United States Patent Application Publication US 2015/0232836 A1 - sequence listing, part 30

SEQ ID NO: 1133509 - DNA, 15 bp, Homo sapiens
tgtccccttagtggc

SEQ ID NO: 1133510 - DNA, 15 bp, Homo sapiens
atgtccccttagtgg

SEQ ID NO: 1133511 - DNA, 15 bp, Homo sapiens
catgtccccttagtg

SEQ ID NO: 1133512 - DNA, 15 bp, Homo sapiens
ccatgtccccttagt

SEQ ID NO: 1133513 - DNA, 15 bp, Homo sapiens
tccatgtccccttag

SEQ ID NO: 1133514 - DNA, 15 bp, Homo sapiens
ctccatgtcccctta

SEQ ID NO: 1133515 - DNA, 15 bp, Homo sapiens
gctccatgtcccctt

SEQ ID NO: 1133516 - DNA, 15 bp, Homo sapiens
ggctccatgtcccct

SEQ ID NO: 1133517 - DNA, 15 bp, Homo sapiens
gggctccatgtcccc

SEQ ID NO: 1133518 - DNA, 15 bp, Homo sapiens
agggctccatgtccc

SEQ ID NO: 1133519 - DNA, 15 bp, Homo sapiens
aagggctccatgtcc

SEQ ID NO: 1133520 - DNA, 15 bp, Homo sapiens
taagggctccatgtc

SEQ ID NO: 1133521 - DNA, 15 bp, Homo sapiens
ctaagggctccatgt

SEQ ID NO: 1133522 - DNA, 15 bp, Homo sapiens
actaagggctccatg

SEQ ID NO: 1133523 - DNA, 15 bp, Homo sapiens
tactaagggctccat

SEQ ID NO: 1133524 - DNA, 15 bp, Homo sapiens
ttactaagggctcca

SEQ ID NO: 1133525 - DNA, 15 bp, Homo sapiens
attactaagggctcc

SEQ ID NO: 1133526 - DNA, 15 bp, Homo sapiens
aattactaagggctc

SEQ ID NO: 1133527 - DNA, 15 bp, Homo sapiens
gaattactaagggct

SEQ ID NO: 1133528 - DNA, 15 bp, Homo sapiens
ggaattactaagggc

SEQ ID NO: 1133529 - DNA, 15 bp, Homo sapiens
aggaattactaaggg

SEQ ID NO: 1133530 - DNA, 15 bp, Homo sapiens
taggaattactaagg

SEQ ID NO: 1133531 - DNA, 15 bp, Homo sapiens
gtaggaattactaag

SEQ ID NO: 1133532 - DNA, 15 bp, Homo sapiens
ggtaggaattactaa

SEQ ID NO: 1133533 - DNA, 15 bp, Homo sapiens
aggtaggaattacta

SEQ ID NO: 1133534 - DNA, 15 bp, Homo sapiens
aaggtaggaattact

SEQ ID NO: 1133535 - DNA, 15 bp, Homo sapiens
taaggtaggaattac

SEQ ID NO: 1133536 - DNA, 15 bp, Homo sapiens
ctaaggtaggaatta

SEQ ID NO: 1133537 - DNA, 15 bp, Homo sapiens
actaaggtaggaatt

SEQ ID NO: 1133538 - DNA, 15 bp, Homo sapiens
tactaaggtaggaat

SEQ ID NO: 1133539 - DNA, 15 bp, Homo sapiens
ttactaaggtaggaa

SEQ ID NO: 1133540 - DNA, 15 bp, Homo sapiens
attactaaggtagga

SEQ ID NO: 1133541 - DNA, 15 bp, Homo sapiens
tattactaaggtagg

SEQ ID NO: 1133542 - DNA, 15 bp, Homo sapiens
ctattactaaggtag

SEQ ID NO: 1133543 - DNA, 15 bp, Homo sapiens
actattactaaggta

SEQ ID NO: 1133544 - DNA, 15 bp, Homo sapiens
gactattactaaggt

SEQ ID NO: 1133545 - DNA, 15 bp, Homo sapiens
agactattactaagg

SEQ ID NO: 1133546 - DNA, 15 bp, Homo sapiens
gagactattactaag

SEQ ID NO: 1133547 - DNA, 15 bp, Homo sapiens
tgagactattactaa

SEQ ID NO: 1133548 - DNA, 15 bp, Homo sapiens
atgagactattacta

SEQ ID NO: 1133549 - DNA, 15 bp, Homo sapiens
gatgagactattact

SEQ ID NO: 1133550 - DNA, 15 bp, Homo sapiens
tgatgagactattac

SEQ ID NO: 1133551 - DNA, 15 bp, Homo sapiens
atgatgagactatta

SEQ ID NO: 1133552 - DNA, 15 bp, Homo sapiens
catgatgagactatt

SEQ ID NO: 1133553 - DNA, 15 bp, Homo sapiens
gcatgatgagactat

SEQ ID NO: 1133554 - DNA, 15 bp, Homo sapiens
ggcatgatgagacta

SEQ ID NO: 1133555 - DNA, 15 bp, Homo sapiens
gggcatgatgagact

SEQ ID NO: 1133556 - DNA, 15 bp, Homo sapiens
agggcatgatgagac

SEQ ID NO: 1133557 - DNA, 15 bp, Homo sapiens
gagggcatgatgaga

SEQ ID NO: 1133558 - DNA, 15 bp, Homo sapiens
agagggcatgatgag

SEQ ID NO: 1133559 - DNA, 15 bp, Homo sapiens
aagagggcatgatga

SEQ ID NO: 1133560 - DNA, 15 bp, Homo sapiens
caagagggcatgatg

SEQ ID NO: 1133561 - DNA, 15 bp, Homo sapiens
ccaagagggcatgat

SEQ ID NO: 1133562 - DNA, 15 bp, Homo sapiens
cccaagagggcatga

SEQ ID NO: 1133563 - DNA, 15 bp, Homo sapiens
tcccaagagggcatg

SEQ ID NO: 1133564 - DNA, 15 bp, Homo sapiens
ttcccaagagggcat

SEQ ID NO: 1133565 - DNA, 15 bp, Homo sapiens
gttcccaagagggca

SEQ ID NO: 1133566 - DNA, 15 bp, Homo sapiens
ggttcccaagagggc

SEQ ID NO: 1133567 - DNA, 15 bp, Homo sapiens
gggttcccaagaggg

SEQ ID NO: 1133568 - DNA, 15 bp, Homo sapiens
tgggttcccaagagg

SEQ ID NO: 1133569 - DNA, 15 bp, Homo sapiens
ctgggttcccaagag

SEQ ID NO: 1133570 - DNA, 15 bp, Homo sapiens
gctgggttcccaaga

SEQ ID NO: 1133571 - DNA, 15 bp, Homo sapiens
ggctgggttcccaag

SEQ ID NO: 1133572 - DNA, 15 bp, Homo sapiens
aggctgggttcccaa

SEQ ID NO: 1133573 - DNA, 15 bp, Homo sapiens
aaggctgggttccca

SEQ ID NO: 1133574 - DNA, 15 bp, Homo sapiens
caaggctgggttccc

SEQ ID NO: 1133575 - DNA, 15 bp, Homo sapiens
acaaggctgggttcc

SEQ ID NO: 1133576 - DNA, 15 bp, Homo sapiens
aacaaggctgggttc

SEQ ID NO: 1133577 - DNA, 15 bp, Homo sapiens
caacaaggctgggtt

SEQ ID NO: 1133578 - DNA, 15 bp, Homo sapiens
tcaacaaggctgggt

SEQ ID NO: 1133579 - DNA, 15 bp, Homo sapiens
atcaacaaggctggg

SEQ ID NO: 1133580 - DNA, 15 bp, Homo sapiens
aatcaacaaggctgg

SEQ ID NO: 1133581 - DNA, 15 bp, Homo sapiens
taatcaacaaggctg

SEQ ID NO: 1133582 - DNA, 15 bp, Homo sapiens
ctaatcaacaaggct

SEQ ID NO: 1133583 - DNA, 15 bp, Homo sapiens
gctaatcaacaaggc

SEQ ID NO: 1133584 - DNA, 15 bp, Homo sapiens
ggctaatcaacaagg

SEQ ID NO: 1133585 - DNA, 15 bp, Homo sapiens
aggctaatcaacaag

SEQ ID NO: 1133586 - DNA, 15 bp, Homo sapiens
gaggctaatcaacaa

SEQ ID NO: 1133587 - DNA, 15 bp, Homo sapiens
agaggctaatcaaca

SEQ ID NO: 1133588 - DNA, 15 bp, Homo sapiens
gagaggctaatcaac

SEQ ID NO: 1133589 - DNA, 15 bp, Homo sapiens
agagaggctaatcaa

SEQ ID NO: 1133590 - DNA, 15 bp, Homo sapiens
cagagaggctaatca

SEQ ID NO: 1133591 - DNA, 15 bp, Homo sapiens
gcagagaggctaatc

SEQ ID NO: 1133592 - DNA, 15 bp, Homo sapiens
agcagagaggctaat

SEQ ID NO: 1133593 - DNA, 15 bp, Homo sapiens
aagcagagaggctaa

SEQ ID NO: 1133594 - DNA, 15 bp, Homo sapiens
aaagcagagaggcta

SEQ ID NO: 1133595 - DNA, 15 bp, Homo sapiens
gaaagcagagaggct

SEQ ID NO: 1133596 - DNA, 15 bp, Homo sapiens
agaaagcagagaggc

SEQ ID NO: 1133597 - DNA, 15 bp, Homo sapiens
gagaaagcagagagg

SEQ ID NO: 1133598 - DNA, 15 bp, Homo sapiens
agagaaagcagagag

SEQ ID NO: 1133599 - DNA, 15 bp, Homo sapiens
gagagaaagcagaga

SEQ ID NO: 1133600 - DNA, 15 bp, Homo sapiens
ggagagaaagcagag

SEQ ID NO: 1133601 - DNA, 15 bp, Homo sapiens
aggagagaaagcaga

SEQ ID NO: 1133602 - DNA, 15 bp, Homo sapiens
aaggagagaaagcag

SEQ ID NO: 1133603 - DNA, 15 bp, Homo sapiens
taaggagagaaagca

SEQ ID NO: 1133604 - DNA, 15 bp, Homo sapiens
ataaggagagaaagc

SEQ ID NO: 1133605 - DNA, 15 bp, Homo sapiens
tataaggagagaaag

SEQ ID NO: 1133606 - DNA, 15 bp, Homo sapiens
ctataaggagagaaa

SEQ ID NO: 1133607 - DNA, 15 bp, Homo sapiens
actataaggagagaa

SEQ ID NO: 1133608 - DNA, 15 bp, Homo sapiens
aactataaggagaga

SEQ ID NO: 1133609 - DNA, 15 bp, Homo sapiens
gaactataaggagag

SEQ ID NO: 1133610 - DNA, 15 bp, Homo sapiens
tgaactataaggaga

SEQ ID NO: 1133611 - DNA, 15 bp, Homo sapiens
ttgaactataaggag

SEQ ID NO: 1133612 - DNA, 15 bp, Homo sapiens
gttgaactataagga

SEQ ID NO: 1133613 - DNA, 15 bp, Homo sapiens
ggttgaactataagg

SEQ ID NO: 1133614 - DNA, 15 bp, Homo sapiens
aggttgaactataag

SEQ ID NO: 1133615 - DNA, 15 bp, Homo sapiens
gaggttgaactataa

SEQ ID NO: 1133616 - DNA, 15 bp, Homo sapiens
ggaggttgaactata

SEQ ID NO: 1133617 - DNA, 15 bp, Homo sapiens
gggaggttgaactat

SEQ ID NO: 1133618 - DNA, 15 bp, Homo sapiens
agggaggttgaacta

SEQ ID NO: 1133619 - DNA, 15 bp, Homo sapiens
cagggaggttgaact

SEQ ID NO: 1133620 - DNA, 15 bp, Homo sapiens
acagggaggttgaac

SEQ ID NO: 1133621 - DNA, 15 bp, Homo sapiens
aacagggaggttgaa

SEQ ID NO: 1133622 - DNA, 15 bp, Homo sapiens
aaacagggaggttga

SEQ ID NO: 1133623 - DNA, 15 bp, Homo sapiens
caaacagggaggttg

SEQ ID NO: 1133624 - DNA, 15 bp, Homo sapiens
acaaacagggaggtt

SEQ ID NO: 1133625 - DNA, 15 bp, Homo sapiens
gaacaaacagggagg

SEQ ID NO: 1133626 - DNA, 15 bp, Homo sapiens
ggaacaaacagggag

SEQ ID NO: 1133627 - DNA, 15 bp, Homo sapiens
tggaacaaacaggga

SEQ ID NO: 1133628 - DNA, 15 bp, Homo sapiens
ttggaacaaacaggg

SEQ ID NO: 1133629 - DNA, 15 bp, Homo sapiens
cttggaacaaacagg

SEQ ID NO: 1133630 - DNA, 15 bp, Homo sapiens
gcttggaacaaacag

SEQ ID NO: 1133631 - DNA, 15 bp, Homo sapiens
tgcttggaacaaaca

SEQ ID NO: 1133632 - DNA, 15 bp, Homo sapiens
ctgcttggaacaaac

SEQ ID NO: 1133633 - DNA, 15 bp, Homo sapiens
actgcttggaacaaa

SEQ ID NO: 1133634 - DNA, 15 bp, Homo sapiens
aactgcttggaacaa

SEQ ID NO: 1133635 - DNA, 15 bp, Homo sapiens
gaactgcttggaaca

SEQ ID NO: 1133636 - DNA, 15 bp, Homo sapiens
agaactgcttggaac

SEQ ID NO: 1133637 - DNA, 15 bp, Homo sapiens
aagaactgcttggaa

SEQ ID NO: 1133638 - DNA, 15 bp, Homo sapiens
aaagaactgcttgga

SEQ ID NO: 1133639 - DNA, 15 bp, Homo sapiens
aaaagaactgcttgg

SEQ ID NO: 1133640 - DNA, 15 bp, Homo sapiens
gaaaagaactgcttg

SEQ ID NO: 1133641 - DNA, 15 bp, Homo sapiens
ggaaaagaactgctt

SEQ ID NO: 1133642 - DNA, 15 bp, Homo sapiens
aggaaaagaactgct

SEQ ID NO: 1133643 - DNA, 15 bp, Homo sapiens
caggaaaagaactgc

SEQ ID NO: 1133644 - DNA, 15 bp, Homo sapiens
gcaggaaaagaactg

SEQ ID NO: 1133645 - DNA, 15 bp, Homo sapiens
ggcaggaaaagaact

SEQ ID NO: 1133646 - DNA, 15 bp, Homo sapiens
gggcaggaaaagaac

SEQ ID NO: 1133647 - DNA, 15 bp, Homo sapiens
tgggcaggaaaagaa

SEQ ID NO: 1133648 - DNA, 15 bp, Homo sapiens
atgggcaggaaaaga

SEQ ID NO: 1133649 - DNA, 15 bp, Homo sapiens
aatgggcaggaaaag

SEQ ID NO: 1133650 - DNA, 15 bp, Homo sapiens
aaatgggcaggaaaa

SEQ ID NO: 1133651 - DNA, 15 bp, Homo sapiens
taaatgggcaggaaa

SEQ ID NO: 1133652 - DNA, 15 bp, Homo sapiens
ataaatgggcaggaa

SEQ ID NO: 1133653 - DNA, 15 bp, Homo sapiens
aataaatgggcagga

SEQ ID NO: 1133654 - DNA, 15 bp, Homo sapiens
taataaatgggcagg

SEQ ID NO: 1133655 - DNA, 15 bp, Homo sapiens
ataataaatgggcag

SEQ ID NO: 1133656 - DNA, 15 bp, Homo sapiens
cataataaatgggca

SEQ ID NO: 1133657 - DNA, 15 bp, Homo sapiens
gcataataaatgggc

SEQ ID NO: 1133658 - DNA, 15 bp, Homo sapiens
tgcataataaatggg

SEQ ID NO: 1133659 - DNA, 15 bp, Homo sapiens
atgcataataaatgg

SEQ ID NO: 1133660 - DNA, 15 bp, Homo sapiens
aatgcataataaatg

SEQ ID NO: 1133661 - DNA, 15 bp, Homo sapiens
aaatgcataataaat

SEQ ID NO: 1133662 - DNA, 15 bp, Homo sapiens
gaaatgcataataaa

SEQ ID NO: 1133663 - DNA, 15 bp, Homo sapiens
agaaatgcataataa

SEQ ID NO: 1133664 - DNA, 15 bp, Homo sapiens
tagaaatgcataata

SEQ ID NO: 1133665 - DNA, 15 bp, Homo sapiens
atagaaatgcataat

SEQ ID NO: 1133666 - DNA, 15 bp, Homo sapiens
tatagaaatgcataa

SEQ ID NO: 1133667 - DNA, 15 bp, Homo sapiens
gtatagaaatgcata

SEQ ID NO: 1133668 - DNA, 15 bp, Homo sapiens
tgtatagaaatgcat

SEQ ID NO: 1133669 - DNA, 15 bp, Homo sapiens
ctgtatagaaatgca

SEQ ID NO: 1133670 - DNA, 15 bp, Homo sapiens
gctgtatagaaatgc

SEQ ID NO: 1133671 - DNA, 15 bp, Homo sapiens
agctgtatagaaatg

SEQ ID NO: 1133672 - DNA, 15 bp, Homo sapiens
aagctgtatagaaat

SEQ ID NO: 1133673 - DNA, 15 bp, Homo sapiens
aaagctgtatagaaa

SEQ ID NO: 1133674 - DNA, 15 bp, Homo sapiens
gaaagctgtatagaa

SEQ ID NO: 1133675 - DNA, 15 bp, Homo sapiens
ggaaagctgtataga

SEQ ID NO: 1133676 - DNA, 15 bp, Homo sapiens
aggaaagctgtatag

SEQ ID NO: 1133677 - DNA, 15 bp, Homo sapiens
gaggaaagctgtata

SEQ ID NO: 1133678 - DNA, 15 bp, Homo sapiens
ggaggaaagctgtat

SEQ ID NO: 1133679 - DNA, 15 bp, Homo sapiens
aggaggaaagctgta

SEQ ID NO: 1133680 - DNA, 15 bp, Homo sapiens
gaggaggaaagctgt

SEQ ID NO: 1133681 - DNA, 15 bp, Homo sapiens
agaggaggaaagctg

SEQ ID NO: 1133682 - DNA, 15 bp, Homo sapiens
aaagaggaggaaagc

SEQ ID NO: 1133683 - DNA, 15 bp, Homo sapiens
aaaagaggaggaaag

SEQ ID NO: 1133684 - DNA, 15 bp, Homo sapiens
aaaaagaggaggaaa

SEQ ID NO: 1133685 - DNA, 15 bp, Homo sapiens
gaaaaagaggaggaa

SEQ ID NO: 1133686 - DNA, 15 bp, Homo sapiens
agaaaaagaggagga

SEQ ID NO: 1133687 - DNA, 15 bp, Homo sapiens
tagaaaaagaggagg

SEQ ID NO: 1133688 - DNA, 15 bp, Homo sapiens
atagaaaaagaggag

SEQ ID NO: 1133689 - DNA, 15 bp, Homo sapiens
tatagaaaaagagga

SEQ ID NO: 1133690 - DNA, 15 bp, Homo sapiens
gtatagaaaaagagg

SEQ ID NO: 1133691 - DNA, 15 bp, Homo sapiens
ggtatagaaaaagag

SEQ ID NO: 1133692 - DNA, 15 bp, Homo sapiens
tggtatagaaaaaga

SEQ ID NO: 1133693 - DNA, 15 bp, Homo sapiens
atggtatagaaaaag

SEQ ID NO: 1133694 - DNA, 15 bp, Homo sapiens
catggtatagaaaaa

SEQ ID NO: 1133695 - DNA, 15 bp, Homo sapiens
gcatggtatagaaaa

SEQ ID NO: 1133696 - DNA, 15 bp, Homo sapiens
agcatggtatagaaa

SEQ ID NO: 1133697 - DNA, 15 bp, Homo sapiens
cagcatggtatagaa

SEQ ID NO: 1133698 - DNA, 15 bp, Homo sapiens
gcagcatggtataga

SEQ ID NO: 1133699 - DNA, 15 bp, Homo sapiens
tgcagcatggtatag

SEQ ID NO: 1133700 - DNA, 15 bp, Homo sapiens
ctgcagcatggtata

SEQ ID NO: 1133701 - DNA, 15 bp, Homo sapiens
actgcagcatggtat

SEQ ID NO: 1133702 - DNA, 15 bp, Homo sapiens
aactgcagcatggta

SEQ ID NO: 1133703 - DNA, 15 bp, Homo sapiens
gaactgcagcatggt

SEQ ID NO: 1133704 - DNA, 15 bp, Homo sapiens
agaactgcagcatgg

SEQ ID NO: 1133705 - DNA, 15 bp, Homo sapiens
aagaactgcagcatg

SEQ ID NO: 1133706 - DNA, 15 bp, Homo sapiens
taagaactgcagcat

SEQ ID NO: 1133707 - DNA, 15 bp, Homo sapiens
ataagaactgcagca

SEQ ID NO: 1133708 - DNA, 15 bp, Homo sapiens
aataagaactgcagc

SEQ ID NO: 1133709 - DNA, 15 bp, Homo sapiens
caataagaactgcag

SEQ ID NO: 1133710 - DNA, 15 bp, Homo sapiens
gcaataagaactgca

SEQ ID NO: 1133711 - DNA, 15 bp, Homo sapiens
agcaataagaactgc

SEQ ID NO: 1133712 - DNA, 15 bp, Homo sapiens
tagcaataagaactg

SEQ ID NO: 1133713 - DNA, 15 bp, Homo sapiens
gtagcaataagaact

SEQ ID NO: 1133714 - DNA, 15 bp, Homo sapiens
ggtagcaataagaac

SEQ ID NO: 1133715 - DNA, 15 bp, Homo sapiens
aggtagcaataagaa

SEQ ID NO: 1133716 - DNA, 15 bp, Homo sapiens
taggtagcaataaga

SEQ ID NO: 1133717 - DNA, 15 bp, Homo sapiens
ctaggtagcaataag

SEQ ID NO: 1133718 - DNA, 15 bp, Homo sapiens
tctaggtagcaataa

SEQ ID NO: 1133719 - DNA, 15 bp, Homo sapiens
ctctaggtagcaata

SEQ ID NO: 1133720 - DNA, 15 bp, Homo sapiens
cctctaggtagcaat

SEQ ID NO: 1133721 - DNA, 15 bp, Homo sapiens
acctctaggtagcaa

SEQ ID NO: 1133722 - DNA, 15 bp, Homo sapiens
aacctctaggtagca

SEQ ID NO: 1133723 - DNA, 15 bp, Homo sapiens
aaacctctaggtagc

SEQ ID NO: 1133724 - DNA, 15 bp, Homo sapiens
aaaacctctaggtag

SEQ ID NO: 1133725 - DNA, 15 bp, Homo sapiens
gaaaacctctaggta

SEQ ID NO: 1133726 - DNA, 15 bp, Homo sapiens
tgaaaacctctaggt

SEQ ID NO: 1133727 - DNA, 15 bp, Homo sapiens
ttgaaaacctctagg

SEQ ID NO: 1133728 - DNA, 15 bp, Homo sapiens
tttgaaaacctctag

SEQ ID NO: 1133729 - DNA, 15 bp, Homo sapiens
ttttgaaaacctcta

SEQ ID NO: 1133730 - DNA, 15 bp, Homo sapiens
attttgaaaacctct

SEQ ID NO: 1133731 - DNA, 15 bp, Homo sapiens
aattttgaaaacctc

SEQ ID NO: 1133732 - DNA, 15 bp, Homo sapiens
gaattttgaaaacct

SEQ ID NO: 1133733 - DNA, 15 bp, Homo sapiens
ggaattttgaaaacc

SEQ ID NO: 1133734 - DNA, 15 bp, Homo sapiens
aggaattttgaaaac

SEQ ID NO: 1133735 - DNA, 15 bp, Homo sapiens
taggaattttgaaaa

SEQ ID NO: 1133736 - DNA, 15 bp, Homo sapiens
ctaggaattttgaaa

SEQ ID NO: 1133737 - DNA, 15 bp, Homo sapiens
cctaggaattttgaa

SEQ ID NO: 1133738 - DNA, 15 bp, Homo sapiens
ccctaggaattttga

SEQ ID NO: 1133739 - DNA, 15 bp, Homo sapiens
cccctaggaattttg

SEQ ID NO: 1133740 - DNA, 15 bp, Homo sapiens
gcccctaggaatttt

SEQ ID NO: 1133741 - DNA, 15 bp, Homo sapiens
cgcccctaggaattt

SEQ ID NO: 1133742 - DNA, 15 bp, Homo sapiens
ccgcccctaggaatt

SEQ ID NO: 1133743 - DNA, 15 bp, Homo sapiens
tccgcccctaggaat

SEQ ID NO: 1133744 - DNA, 15 bp, Homo sapiens
atccgcccctaggaa

SEQ ID NO: 1133745 - DNA, 15 bp, Homo sapiens
tatccgcccctagga

SEQ ID NO: 1133746 - DNA, 15 bp, Homo sapiens
ttatccgcccctagg

SEQ ID NO: 1133747 - DNA, 15 bp, Homo sapiens
cttatccgcccctag

SEQ ID NO: 1133748 - DNA, 15 bp, Homo sapiens
acttatccgccccta

SEQ ID NO: 1133749 - DNA, 15 bp, Homo sapiens
tacttatccgcccct

SEQ ID NO: 1133750 - DNA, 15 bp, Homo sapiens
ctacttatccgcccc

SEQ ID NO: 1133751 - DNA, 15 bp, Homo sapiens
cctacttatccgccc

SEQ ID NO: 1133752 - DNA, 15 bp, Homo sapiens
gcctacttatccgcc

SEQ ID NO: 1133753 - DNA, 15 bp, Homo sapiens
tgcctacttatccgc

SEQ ID NO: 1133754 - DNA, 15 bp, Homo sapiens
atgcctacttatccg

SEQ ID NO: 1133755 - DNA, 15 bp, Homo sapiens
tatgcctacttatcc

SEQ ID NO: 1133756 - DNA, 15 bp, Homo sapiens
ttatgcctacttatc

SEQ ID NO: 1133757 - DNA, 15 bp, Homo sapiens
tttatgcctacttat

SEQ ID NO: 1133758 - DNA, 15 bp, Homo sapiens
gtttatgcctactta

SEQ ID NO: 1133759 - DNA, 15 bp, Homo sapiens
tgtttatgcctactt

SEQ ID NO: 1133760 - DNA, 15 bp, Homo sapiens
ttgtttatgcctact

SEQ ID NO: 1133761 - DNA, 15 bp, Homo sapiens
tttgtttatgcctac

SEQ ID NO: 1133762 - DNA, 15 bp, Homo sapiens
ctttgtttatgccta

SEQ ID NO: 1133763 - DNA, 15 bp, Homo sapiens
actttgtttatgcct

SEQ ID NO: 1133764 - DNA, 15 bp, Homo sapiens
aactttgtttatgcc

SEQ ID NO: 1133765 - DNA, 15 bp, Homo sapiens
gaactttgtttatgc

SEQ ID NO: 1133766 - DNA, 15 bp, Homo sapiens
agaactttgtttatg

SEQ ID NO: 1133767 - DNA, 15 bp, Homo sapiens
aagaactttgtttat

SEQ ID NO: 1133768 - DNA, 15 bp, Homo sapiens
gaagaactttgttta

SEQ ID NO: 1133769 - DNA, 15 bp, Homo sapiens
ggaagaactttgttt

SEQ ID NO: 1133770 - DNA, 15 bp, Homo sapiens
gggaagaactttgtt

SEQ ID NO: 1133771 - DNA, 15 bp, Homo sapiens
agggaagaactttgt

SEQ ID NO: 1133772 - DNA, 15 bp, Homo sapiens
tagggaagaactttg

SEQ ID NO: 1133773 - DNA, 15 bp, Homo sapiens
atagggaagaacttt

SEQ ID NO: 1133774 - DNA, 15 bp, Homo sapiens
aatagggaagaactt

SEQ ID NO: 1133775 - DNA, 15 bp, Homo sapiens
taatagggaagaact

SEQ ID NO: 1133776 - DNA, 15 bp, Homo sapiens
ataatagggaagaac

SEQ ID NO: 1133777 - DNA, 15 bp, Homo sapiens
gataatagggaagaa

SEQ ID NO: 1133778 - DNA, 15 bp, Homo sapiens
ggataatagggaaga

SEQ ID NO: 1133779 - DNA, 15 bp, Homo sapiens
aggataatagggaag

SEQ ID NO: 1133780 - DNA, 15 bp, Homo sapiens
aaggataatagggaa

SEQ ID NO: 1133781 - DNA, 15 bp, Homo sapiens
gaaggataataggga

SEQ ID NO: 1133782 - DNA, 15 bp, Homo sapiens
ggaaggataataggg

SEQ ID NO: 1133783 - DNA, 15 bp, Homo sapiens
aggaaggataatagg

SEQ ID NO: 1133784 - DNA, 15 bp, Homo sapiens
taggaaggataatag

SEQ ID NO: 1133785 - DNA, 15 bp, Homo sapiens
ataggaaggataata

SEQ ID NO: 1133786 - DNA, 15 bp, Homo sapiens
aataggaaggataat

SEQ ID NO: 1133787 - DNA, 15 bp, Homo sapiens
aaataggaaggataa

SEQ ID NO: 1133788 - DNA, 15 bp, Homo sapiens
aaaataggaaggata

SEQ ID NO: 1133789 - DNA, 15 bp, Homo sapiens
aaaaaataggaagga

SEQ ID NO: 1133790 - DNA, 15 bp, Homo sapiens
gaaaaaataggaagg

SEQ ID NO: 1133791 - DNA, 15 bp, Homo sapiens
tgaaaaaataggaag

SEQ ID NO: 1133792 - DNA, 15 bp, Homo sapiens
gtgaaaaaataggaa

SEQ ID NO: 1133793 - DNA, 15 bp, Homo sapiens
ggtgaaaaaatagga

SEQ ID NO: 1133794 - DNA, 15 bp, Homo sapiens
aggtgaaaaaatagg

SEQ ID NO: 1133795 - DNA, 15 bp, Homo sapiens
taggtgaaaaaatag

SEQ ID NO: 1133796 - DNA, 15 bp, Homo sapiens
ctaggtgaaaaaata

SEQ ID NO: 1133797 - DNA, 15 bp, Homo sapiens
tctaggtgaaaaaat

SEQ ID NO: 1133798 - DNA, 15 bp, Homo sapiens
gtctaggtgaaaaaa

SEQ ID NO: 1133799 - DNA, 15 bp, Homo sapiens
agtctaggtgaaaaa

SEQ ID NO: 1133800 - DNA, 15 bp, Homo sapiens
cagtctaggtgaaaa

SEQ ID NO: 1133801 - DNA, 15 bp, Homo sapiens
tcagtctaggtgaaa

SEQ ID NO: 1133802 - DNA, 15 bp, Homo sapiens
ttcagtctaggtgaa

SEQ ID NO: 1133803 - DNA, 15 bp, Homo sapiens
cttcagtctaggtga

SEQ ID NO: 1133804 - DNA, 15 bp, Homo sapiens
tcttcagtctaggtg

SEQ ID NO: 1133805 - DNA, 15 bp, Homo sapiens
ctcttcagtctaggt

SEQ ID NO: 1133806 - DNA, 15 bp, Homo sapiens
cctcttcagtctagg

SEQ ID NO: 1133807 - DNA, 15 bp, Homo sapiens
acctcttcagtctag

SEQ ID NO: 1133808 - DNA, 15 bp, Homo sapiens
tacctcttcagtcta

SEQ ID NO: 1133809 - DNA, 15 bp, Homo sapiens
ctacctcttcagtct

SEQ ID NO: 1133810 - DNA, 15 bp, Homo sapiens
tctacctcttcagtc

SEQ ID NO: 1133811 - DNA, 15 bp, Homo sapiens
gtctacctcttcagt

SEQ ID NO: 1133812 - DNA, 15 bp, Homo sapiens
tgtctacctcttcag

SEQ ID NO: 1133813 - DNA, 15 bp, Homo sapiens
ttgtctacctcttca

SEQ ID NO: 1133814 - DNA, 15 bp, Homo sapiens
tttgtctacctcttc

SEQ ID NO: 1133815 - DNA, 15 bp, Homo sapiens
ttttgtctacctctt

SEQ ID NO: 1133816 - DNA, 15 bp, Homo sapiens
attttgtctacctct

SEQ ID NO: 1133817 - DNA, 15 bp, Homo sapiens
tattttgtctacctc

SEQ ID NO: 1133818 - DNA, 15 bp, Homo sapiens
ctattttgtctacct

SEQ ID NO: 1133819 - DNA, 15 bp, Homo sapiens
tctattttgtctacc

SEQ ID NO: 1133820 - DNA, 15 bp, Homo sapiens
ttctattttgtctac

SEQ ID NO: 1133821 - DNA, 15 bp, Homo sapiens
tttctattttgtcta

SEQ ID NO: 1133822 - DNA, 15 bp, Homo sapiens
atttctattttgtct

SEQ ID NO: 1133823 - DNA, 15 bp, Homo sapiens
tatttctattttgtc

SEQ ID NO: 1133824 - DNA, 15 bp, Homo sapiens
ttatttctattttgt

SEQ ID NO: 1133825 - DNA, 15 bp, Homo sapiens
tttatttctattttg

SEQ ID NO: 1133826 - DNA, 15 bp, Homo sapiens
ctttatttctatttt

SEQ ID NO: 1133827 - DNA, 15 bp, Homo sapiens
tctttatttctattt

SEQ ID NO: 1133828 - DNA, 15 bp, Homo sapiens
gtctttatttctatt

SEQ ID NO: 1133829 - DNA, 15 bp, Homo sapiens
tgtctttatttctat

SEQ ID NO: 1133830 - DNA, 15 bp, Homo sapiens
atgtctttatttcta

SEQ ID NO: 1133831 - DNA, 15 bp, Homo sapiens
aatgtctttatttct

SEQ ID NO: 1133832 - DNA, 15 bp, Homo sapiens
taatgtctttatttc

SEQ ID NO: 1133833 - DNA, 15 bp, Homo sapiens
ttaatgtctttattt

SEQ ID NO: 1133834 - DNA, 15 bp, Homo sapiens
cttaatgtctttatt

SEQ ID NO: 1133835 - DNA, 15 bp, Homo sapiens
ccttaatgtctttat

SEQ ID NO: 1133836 - DNA, 15 bp, Homo sapiens
cccttaatgtcttta

SEQ ID NO: 1133837 - DNA, 15 bp, Homo sapiens
acccttaatgtcttt

SEQ ID NO: 1133838 - DNA, 15 bp, Homo sapiens
tacccttaatgtctt

SEQ ID NO: 1133839 - DNA, 15 bp, Homo sapiens
atacccttaatgtct

SEQ ID NO: 1133840 - DNA, 15 bp, Homo sapiens
catacccttaatgtc

SEQ ID NO: 1133841 - DNA, 15 bp, Homo sapiens
acatacccttaatgt

SEQ ID NO: 1133842 - DNA, 15 bp, Homo sapiens
cacatacccttaatg

SEQ ID NO: 1133843 - DNA, 15 bp, Homo sapiens
acacatacccttaat

SEQ ID NO: 1133844 - DNA, 15 bp, Homo sapiens
aacacatacccttaa

SEQ ID NO: 1133845 - DNA, 15 bp, Homo sapiens
aaacacataccctta

SEQ ID NO: 1133846 - DNA, 15 bp, Homo sapiens
caaacacataccctt

SEQ ID NO: 1133847 - DNA, 15 bp, Homo sapiens
acaaacacataccct

SEQ ID NO: 1133848 - DNA, 15 bp, Homo sapiens
tacaaacacataccc

SEQ ID NO: 1133849 - DNA, 15 bp, Homo sapiens
ctacaaacacatacc

SEQ ID NO: 1133850 - DNA, 15 bp, Homo sapiens
actacaaacacatac

SEQ ID NO: 1133851 - DNA, 15 bp, Homo sapiens
gactacaaacacata

SEQ ID NO: 1133852 - DNA, 15 bp, Homo sapiens
ggactacaaacacat

SEQ ID NO: 1133853 - DNA, 15 bp, Homo sapiens
gggactacaaacaca

SEQ ID NO: 1133854 - DNA, 15 bp, Homo sapiens
tgggactacaaacac

SEQ ID NO: 1133855 - DNA, 15 bp, Homo sapiens
ttgggactacaaaca

SEQ ID NO: 1133856 - DNA, 15 bp, Homo sapiens
tttgggactacaaac

SEQ ID NO: 1133857 - DNA, 15 bp, Homo sapiens
ctttgggactacaaa

SEQ ID NO: 1133858 - DNA, 15 bp, Homo sapiens
tctttgggactacaa

SEQ ID NO: 1133859 - DNA, 15 bp, Homo sapiens
ctctttgggactaca

SEQ ID NO: 1133860 - DNA, 15 bp, Homo sapiens
gctctttgggactac

SEQ ID NO: 1133861 - DNA, 15 bp, Homo sapiens
agctctttgggacta

SEQ ID NO: 1133862 - DNA, 15 bp, Homo sapiens
aagctctttgggact

SEQ ID NO: 1133863 - DNA, 15 bp, Homo sapiens
gaagctctttgggac

SEQ ID NO: 1133864 - DNA, 15 bp, Homo sapiens
agaagctctttggga

SEQ ID NO: 1133865 - DNA, 15 bp, Homo sapiens
gagaagctctttggg

SEQ ID NO: 1133866 - DNA, 15 bp, Homo sapiens
agagaagctctttgg

SEQ ID NO: 1133867 - DNA, 15 bp, Homo sapiens
cagagaagctctttg

SEQ ID NO: 1133868 - DNA, 15 bp, Homo sapiens
ccagagaagctcttt

SEQ ID NO: 1133869 - DNA, 15 bp, Homo sapiens
gccagagaagctctt

SEQ ID NO: 1133870 - DNA, 15 bp, Homo sapiens
tgccagagaagctct

SEQ ID NO: 1133871 - DNA, 15 bp, Homo sapiens
ttgccagagaagctc

SEQ ID NO: 1133872 - DNA, 15 bp, Homo sapiens
attgccagagaagct

SEQ ID NO: 1133873 - DNA, 15 bp, Homo sapiens
aattgccagagaagc

SEQ ID NO: 1133874 - DNA, 15 bp, Homo sapiens
aaattgccagagaag

SEQ ID NO: 1133875 - DNA, 15 bp, Homo sapiens
aaaattgccagagaa

SEQ ID NO: 1133876 - DNA, 15 bp, Homo sapiens
taaaattgccagaga

SEQ ID NO: 1133877 - DNA, 15 bp, Homo sapiens
ataaaattgccagag

SEQ ID NO: 1133878 - DNA, 15 bp, Homo sapiens
cataaaattgccaga

SEQ ID NO: 1133879 - DNA, 15 bp, Homo sapiens
acataaaattgccag

SEQ ID NO: 1133880 - DNA, 15 bp, Homo sapiens
tacataaaattgcca

SEQ ID NO: 1133881 - DNA, 15 bp, Homo sapiens
ctacataaaattgcc

SEQ ID NO: 1133882 - DNA, 15 bp, Homo sapiens
actacataaaattgc

SEQ ID NO: 1133883 - DNA, 15 bp, Homo sapiens
aactacataaaattg

SEQ ID NO: 1133884 - DNA, 15 bp, Homo sapiens
caactacataaaatt

SEQ ID NO: 1133885 - DNA, 15 bp, Homo sapiens
tcaactacataaaat

SEQ ID NO: 1133886 - DNA, 15 bp, Homo sapiens
gtcaactacataaaa

SEQ ID NO: 1133887 - DNA, 15 bp, Homo sapiens
tgtcaactacataaa

SEQ ID NO: 1133888 - DNA, 15 bp, Homo sapiens
ctgtcaactacataa

SEQ ID NO: 1133889 - DNA, 15 bp, Homo sapiens
actgtcaactacata

SEQ ID NO: 1133890 - DNA, 15 bp, Homo sapiens
cactgtcaactacat

SEQ ID NO: 1133891 - DNA, 15 bp, Homo sapiens
tcactgtcaactaca

SEQ ID NO: 1133892 - DNA, 15 bp, Homo sapiens
gtcactgtcaactac

SEQ ID NO: 1133893 - DNA, 15 bp, Homo sapiens
cgtcactgtcaacta

SEQ ID NO: 1133894 - DNA, 15 bp, Homo sapiens
gcgtcactgtcaact

SEQ ID NO: 1133895 - DNA, 15 bp, Homo sapiens
agcgtcactgtcaac

SEQ ID NO: 1133896 - DNA, 15 bp, Homo sapiens
gagcgtcactgtcaa

SEQ ID NO: 1133897 - DNA, 15 bp, Homo sapiens
agagcgtcactgtca

SEQ ID NO: 1133898 - DNA, 15 bp, Homo sapiens
cagagcgtcactgtc

SEQ ID NO: 1133899 - DNA, 15 bp, Homo sapiens
tcagagcgtcactgt

SEQ ID NO: 1133900 - DNA, 15 bp, Homo sapiens
ctcagagcgtcactg

SEQ ID NO: 1133901 - DNA, 15 bp, Homo sapiens
actcagagcgtcact

SEQ ID NO: 1133902 - DNA, 15 bp, Homo sapiens
aactcagagcgtcac

SEQ ID NO: 1133903 - DNA, 15 bp, Homo sapiens
gaactcagagcgtca

SEQ ID NO: 1133904 - DNA, 15 bp, Homo sapiens
tgaactcagagcgtc

SEQ ID NO: 1133905 - DNA, 15 bp, Homo sapiens
ctgaactcagagcgt

SEQ ID NO: 1133906 - DNA, 15 bp, Homo sapiens
cctgaactcagagcg

SEQ ID NO: 1133907 - DNA, 15 bp, Homo sapiens
tcctgaactcagagc

SEQ ID NO: 1133908 - DNA, 15 bp, Homo sapiens
gtcctgaactcagag

SEQ ID NO: 1133909 - DNA, 15 bp, Homo sapiens
tgtcctgaactcaga

SEQ ID NO: 1133910 - DNA, 15 bp, Homo sapiens
ctgtcctgaactcag

SEQ ID NO: 1133911 - DNA, 15 bp, Homo sapiens
tctgtcctgaactca

SEQ ID NO: 1133912 - DNA, 15 bp, Homo sapiens
atctgtcctgaactc

SEQ ID NO: 1133913 - DNA, 15 bp, Homo sapiens
aatctgtcctgaact

SEQ ID NO: 1133914 - DNA, 15 bp, Homo sapiens
caatctgtcctgaac

SEQ ID NO: 1133915 - DNA, 15 bp, Homo sapiens
ccaatctgtcctgaa

SEQ ID NO: 1133916 - DNA, 15 bp, Homo sapiens
tccaatctgtcctga

SEQ ID NO: 1133917 - DNA, 15 bp, Homo sapiens
gtccaatctgtcctg

SEQ ID NO: 1133918 - DNA, 15 bp, Homo sapiens
agtccaatctgtcct

SEQ ID NO: 1133919 - DNA, 15 bp, Homo sapiens
gagtccaatctgtcc

SEQ ID NO: 1133920 - DNA, 15 bp, Homo sapiens
ggagtccaatctgtc

SEQ ID NO: 1133921 - DNA, 15 bp, Homo sapiens
aggagtccaatctgt

SEQ ID NO: 1133922 - DNA, 15 bp, Homo sapiens
aaggagtccaatctg

SEQ ID NO: 1133923 - DNA, 15 bp, Homo sapiens
caaggagtccaatct

SEQ ID NO: 1133924 - DNA, 15 bp, Homo sapiens
ccaaggagtccaatc

SEQ ID NO: 1133925 - DNA, 15 bp, Homo sapiens
gccaaggagtccaat

SEQ ID NO: 1133926 - DNA, 15 bp, Homo sapiens
agccaaggagtccaa

SEQ ID NO: 1133927 - DNA, 15 bp, Homo sapiens
cagccaaggagtcca

SEQ ID NO: 1133928 - DNA, 15 bp, Homo sapiens
tcagccaaggagtcc

SEQ ID NO: 1133929 - DNA, 15 bp, Homo sapiens
ctcagccaaggagtc

SEQ ID NO: 1133930 - DNA, 15 bp, Homo sapiens
tctcagccaaggagt

SEQ ID NO: 1133931 - DNA, 15 bp, Homo sapiens
ctctcagccaaggag

SEQ ID NO: 1133932 - DNA, 15 bp, Homo sapiens
cctctcagccaagga

SEQ ID NO: 1133933 - DNA, 15 bp, Homo sapiens
tcctctcagccaagg

SEQ ID NO: 1133934 - DNA, 15 bp, Homo sapiens
ctcctctcagccaag

SEQ ID NO: 1133935 - DNA, 15 bp, Homo sapiens
actcctctcagccaa

SEQ ID NO: 1133936 - DNA, 15 bp, Homo sapiens
cactcctctcagcca

SEQ ID NO: 1133937 - DNA, 15 bp, Homo sapiens
tcactcctctcagcc

SEQ ID NO: 1133938 - DNA, 15 bp, Homo sapiens
ctcactcctctcagc

SEQ ID NO: 1133939 - DNA, 15 bp, Homo sapiens
cctcactcctctcag

SEQ ID NO: 1133940 - DNA, 15 bp, Homo sapiens
tcctcactcctctca

SEQ ID NO: 1133941 - DNA, 15 bp, Homo sapiens
ctcctcactcctctc

SEQ ID NO: 1133942 - DNA, 15 bp, Homo sapiens
tctcctcactcctct

SEQ ID NO: 1133943 - DNA, 15 bp, Homo sapiens
atctcctcactcctc

SEQ ID NO: 1133944 - DNA, 15 bp, Homo sapiens
tatctcctcactcct

SEQ ID NO: 1133945 - DNA, 15 bp, Homo sapiens
ctatctcctcactcc

SEQ ID NO: 1133946 - DNA, 15 bp, Homo sapiens
cctatctcctcactc

SEQ ID NO: 1133947 - DNA, 15 bp, Homo sapiens
tcctatctcctcact

SEQ ID NO: 1133948 - DNA, 15 bp, Homo sapiens
gtcctatctcctcac

SEQ ID NO: 1133949 - DNA, 15 bp, Homo sapiens
cgtcctatctcctca

SEQ ID NO: 1133950 - DNA, 15 bp, Homo sapiens
ccgtcctatctcctc

SEQ ID NO: 1133951 - DNA, 15 bp, Homo sapiens
accgtcctatctcct

SEQ ID NO: 1133952 - DNA, 15 bp, Homo sapiens
taccgtcctatctcc

SEQ ID NO: 1133953 - DNA, 15 bp, Homo sapiens
ctaccgtcctatctc

SEQ ID NO: 1133954 - DNA, 15 bp, Homo sapiens
tctaccgtcctatct

SEQ ID NO: 1133955 - DNA, 15 bp, Homo sapiens
ctctaccgtcctatc

SEQ ID NO: 1133956 - DNA, 15 bp, Homo sapiens
cctctaccgtcctat

SEQ ID NO: 1133957 - DNA, 15 bp, Homo sapiens
tcctctaccgtccta

SEQ ID NO: 1133958 - DNA, 15 bp, Homo sapiens
ctcctctaccgtcct

SEQ ID NO: 1133959 - DNA, 15 bp, Homo sapiens
tctcctctaccgtcc

SEQ ID NO: 1133960 - DNA, 15 bp, Homo sapiens
ctctcctctaccgtc

SEQ ID NO: 1133961 - DNA, 15 bp, Homo sapiens
cctctcctctaccgt

SEQ ID NO: 1133962 - DNA, 15 bp, Homo sapiens
ccctctcctctaccg

SEQ ID NO: 1133963 - DNA, 15 bp, Homo sapiens
accctctcctctacc

SEQ ID NO: 1133964 - DNA, 15 bp, Homo sapiens
taccctctcctctac

SEQ ID NO: 1133965 - DNA, 15 bp, Homo sapiens
ctaccctctcctcta

SEQ ID NO: 1133966 - DNA, 15 bp, Homo sapiens
tctaccctctcctct

SEQ ID NO: 1133967 - DNA, 15 bp, Homo sapiens
ctctaccctctcctc

SEQ ID NO: 1133968 - DNA, 15 bp, Homo sapiens
gctctaccctctcct

SEQ ID NO: 1133969 - DNA, 15 bp, Homo sapiens
tgctctaccctctcc

SEQ ID NO: 1133970 - DNA, 15 bp, Homo sapiens
ttgctctaccctctc

SEQ ID NO: 1133971 - DNA, 15 bp, Homo sapiens
gttgctctaccctct

SEQ ID NO: 1133972 - DNA, 15 bp, Homo sapiens
agttgctctaccctc

SEQ ID NO: 1133973 - DNA, 15 bp, Homo sapiens
gagttgctctaccct

SEQ ID NO: 1133974 - DNA, 15 bp, Homo sapiens
agagttgctctaccc

SEQ ID NO: 1133975 - DNA, 15 bp, Homo sapiens
cagagttgctctacc

SEQ ID NO: 1133976 - DNA, 15 bp, Homo sapiens
ccagagttgctctac

SEQ ID NO: 1133977 - DNA, 15 bp, Homo sapiens
tccagagttgctcta

SEQ ID NO: 1133978 - DNA, 15 bp, Homo sapiens
ctccagagttgctct

SEQ ID NO: 1133979 - DNA, 15 bp, Homo sapiens
cctccagagttgctc

SEQ ID NO: 1133980 - DNA, 15 bp, Homo sapiens
tcctccagagttgct

SEQ ID NO: 1133981 - DNA, 15 bp, Homo sapiens
ttcctccagagttgc

SEQ ID NO: 1133982 - DNA, 15 bp, Homo sapiens
cttcctccagagttg

SEQ ID NO: 1133983 - DNA, 15 bp, Homo sapiens
gcttcctccagagtt

SEQ ID NO: 1133984 - DNA, 15 bp, Homo sapiens
agcttcctccagagt

SEQ ID NO: 1133985 - DNA, 15 bp, Homo sapiens
aagcttcctccagag

SEQ ID NO: 1133986 - DNA, 15 bp, Homo sapiens
aaagcttcctccaga

SEQ ID NO: 1133987 - DNA, 15 bp, Homo sapiens
gaaagcttcctccag

SEQ ID NO: 1133988 - DNA, 15 bp, Homo sapiens
ggaaagcttcctcca

SEQ ID NO: 1133989 - DNA, 15 bp, Homo sapiens
gggaaagcttcctcc

SEQ ID NO: 1133990 - DNA, 15 bp, Homo sapiens
ggggaaagcttcctc

SEQ ID NO: 1133991 - DNA, 15 bp, Homo sapiens
aggggaaagcttcct

SEQ ID NO: 1133992 - DNA, 15 bp, Homo sapiens
gaggggaaagcttcc

SEQ ID NO: 1133993 - DNA, 15 bp, Homo sapiens
tgaggggaaagcttc

SEQ ID NO: 1133994 - DNA, 15 bp, Homo sapiens
gtgaggggaaagctt

SEQ ID NO: 1133995 - DNA, 15 bp, Homo sapiens
ggtgaggggaaagct

SEQ ID NO: 1133996 - DNA, 15 bp, Homo sapiens
aggtgaggggaaagc

SEQ ID NO: 1133997 - DNA, 15 bp, Homo sapiens
aaggtgaggggaaag

SEQ ID NO: 1133998 - DNA, 15 bp, Homo sapiens
aaaggtgaggggaaa

SEQ ID NO: 1133999 - DNA, 15 bp, Homo sapiens
caaaggtgaggggaa

SEQ ID NO: 1134000 - DNA, 15 bp, Homo sapiens
gcaaaggtgagggga

SEQ ID NO: 1134001 - DNA, 15 bp, Homo sapiens
ggcaaaggtgagggg

SEQ ID NO: 1134002 - DNA, 15 bp, Homo sapiens
tggcaaaggtgaggg

SEQ ID NO: 1134003 - DNA, 15 bp, Homo sapiens
ctggcaaaggtgagg

SEQ ID NO: 1134004 - DNA, 15 bp, Homo sapiens
actggcaaaggtgag

SEQ ID NO: 1134005 - DNA, 15 bp, Homo sapiens
gactggcaaaggtga

SEQ ID NO: 1134006 - DNA, 15 bp, Homo sapiens
ggactggcaaaggtg

SEQ ID NO: 1134007 - DNA, 15 bp, Homo sapiens
aggactggcaaaggt

SEQ ID NO: 1134008 - DNA, 15 bp, Homo sapiens
caggactggcaaagg

SEQ ID NO: 1134009 - DNA, 15 bp, Homo sapiens
acaggactggcaaag

SEQ ID NO: 1134010 - DNA, 15 bp, Homo sapiens
aacaggactggcaaa

SEQ ID NO: 1134011 - DNA, 15 bp, Homo sapiens
taacaggactggcaa

SEQ ID NO: 1134012 - DNA, 15 bp, Homo sapiens
ataacaggactggca

SEQ ID NO: 1134013 - DNA, 15 bp, Homo sapiens
gataacaggactggc

SEQ ID NO: 1134014 - DNA, 15 bp, Homo sapiens
ggataacaggactgg

SEQ ID NO: 1134015 - DNA, 15 bp, Homo sapiens
aggataacaggactg

SEQ ID NO: 1134016 - DNA, 15 bp, Homo sapiens
taggataacaggact

SEQ ID NO: 1134017 - DNA, 15 bp, Homo sapiens
ctaggataacaggac

SEQ ID NO: 1134018 - DNA, 15 bp, Homo sapiens
tctaggataacagga

SEQ ID NO: 1134019 - DNA, 15 bp, Homo sapiens
gtctaggataacagg

SEQ ID NO: 1134020 - DNA, 15 bp, Homo sapiens
agtctaggataacag

SEQ ID NO: 1134021 - DNA, 15 bp, Homo sapiens
aagtctaggataaca

SEQ ID NO: 1134022 - DNA, 15 bp, Homo sapiens
taagtctaggataac

SEQ ID NO: 1134023 - DNA, 15 bp, Homo sapiens
ttaagtctaggataa

SEQ ID NO: 1134024 - DNA, 15 bp, Homo sapiens
gttaagtctaggata

SEQ ID NO: 1134025 - DNA, 15 bp, Homo sapiens
ggttaagtctaggat

SEQ ID NO: 1134026 - DNA, 15 bp, Homo sapiens
tggttaagtctagga

SEQ ID NO: 1134027 - DNA, 15 bp, Homo sapiens
atggttaagtctagg

SEQ ID NO: 1134028 - DNA, 15 bp, Homo sapiens
tatggttaagtctag

SEQ ID NO: 1134029 - DNA, 15 bp, Homo sapiens
ttatggttaagtcta

SEQ ID NO: 1134030 - DNA, 15 bp, Homo sapiens
attatggttaagtct

SEQ ID NO: 1134031 - DNA, 15 bp, Homo sapiens
aattatggttaagtc

SEQ ID NO: 1134032 - DNA, 15 bp, Homo sapiens
taattatggttaagt

SEQ ID NO: 1134033 - DNA, 15 bp, Homo sapiens
ttaattatggttaag

SEQ ID NO: 1134034 - DNA, 15 bp, Homo sapiens
tttaattatggttaa

SEQ ID NO: 1134035 - DNA, 15 bp, Homo sapiens
ctttaattatggtta

SEQ ID NO: 1134036 - DNA, 15 bp, Homo sapiens
tctttaattatggtt

SEQ ID NO: 1134037 - DNA, 15 bp, Homo sapiens
atctttaattatggt

SEQ ID NO: 1134038 - DNA, 15 bp, Homo sapiens
catctttaattatgg

SEQ ID NO: 1134039 - DNA, 15 bp, Homo sapiens
tcatctttaattatg

SEQ ID NO: 1134040 - DNA, 15 bp, Homo sapiens
ctcatctttaattat

SEQ ID NO: 1134041 - DNA, 15 bp, Homo sapiens
cctcatctttaatta

SEQ ID NO: 1134042 - DNA, 15 bp, Homo sapiens
ccctcatctttaatt

SEQ ID NO: 1134043 - DNA, 15 bp, Homo sapiens
tccctcatctttaat

SEQ ID NO: 1134044 - DNA, 15 bp, Homo sapiens
ctccctcatctttaa

SEQ ID NO: 1134045 - DNA, 15 bp, Homo sapiens
cctccctcatcttta

SEQ ID NO: 1134046 - DNA, 15 bp, Homo sapiens
gcctccctcatcttt

SEQ ID NO: 1134047 - DNA, 15 bp, Homo sapiens
tgcctccctcatctt

SEQ ID NO: 1134048 - DNA, 15 bp, Homo sapiens
gtgcctccctcatct

SEQ ID NO: 1134049 - DNA, 15 bp, Homo sapiens
agtgcctccctcatc

SEQ ID NO: 1134050 - DNA, 15 bp, Homo sapiens
gagtgcctccctcat

SEQ ID NO: 1134051 - DNA, 15 bp, Homo sapiens
tgagtgcctccctca

SEQ ID NO: 1134052 - DNA, 15 bp, Homo sapiens
ctgagtgcctccctc

SEQ ID NO: 1134053 - DNA, 15 bp, Homo sapiens
actgagtgcctccct

SEQ ID NO: 1134054 - DNA, 15 bp, Homo sapiens
tactgagtgcctccc

SEQ ID NO: 1134055 - DNA, 15 bp, Homo sapiens
ttactgagtgcctcc

SEQ ID NO: 1134056 - DNA, 15 bp, Homo sapiens
tttactgagtgcctc

SEQ ID NO: 1134057 - DNA, 15 bp, Homo sapiens
ctttactgagtgcct

SEQ ID NO: 1134058 - DNA, 15 bp, Homo sapiens
cctttactgagtgcc

SEQ ID NO: 1134059 - DNA, 15 bp, Homo sapiens
ccctttactgagtgc

SEQ ID NO: 1134060 - DNA, 15 bp, Homo sapiens
tccctttactgagtg

SEQ ID NO: 1134061 - DNA, 15 bp, Homo sapiens
atccctttactgagt

SEQ ID NO: 1134062 - DNA, 15 bp, Homo sapiens
gatccctttactgag

SEQ ID NO: 1134063 - DNA, 15 bp, Homo sapiens
agatccctttactga

SEQ ID NO: 1134064 - DNA, 15 bp, Homo sapiens
tagatccctttactg

SEQ ID NO: 1134065 - DNA, 15 bp, Homo sapiens
ctagatccctttact

SEQ ID NO: 1134066 - DNA, 15 bp, Homo sapiens
actagatccctttac

SEQ ID NO: 1134067 - DNA, 15 bp, Homo sapiens
cactagatcccttta

SEQ ID NO: 1134068 - DNA, 15 bp, Homo sapiens
ccactagatcccttt

SEQ ID NO: 1134069 - DNA, 15 bp, Homo sapiens
cccactagatccctt

SEQ ID NO: 1134070 - DNA, 15 bp, Homo sapiens
tcccactagatccct

SEQ ID NO: 1134071 - DNA, 15 bp, Homo sapiens
ttcccactagatccc

SEQ ID NO: 1134072 - DNA, 15 bp, Homo sapiens
cttcccactagatcc

SEQ ID NO: 1134073 - DNA, 15 bp, Homo sapiens
gcttcccactagatc

SEQ ID NO: 1134074 - DNA, 15 bp, Homo sapiens
agcttcccactagat

SEQ ID NO: 1134075 - DNA, 15 bp, Homo sapiens
aagcttcccactaga

SEQ ID NO: 1134076 - DNA, 15 bp, Homo sapiens
caagcttcccactag

SEQ ID NO: 1134077 - DNA, 15 bp, Homo sapiens
acaagcttcccacta

SEQ ID NO: 1134078 - DNA, 15 bp, Homo sapiens
aacaagcttcccact

SEQ ID NO: 1134079 - DNA, 15 bp, Homo sapiens
gaacaagcttcccac

SEQ ID NO: 1134080 - DNA, 15 bp, Homo sapiens
ggaacaagcttccca

SEQ ID NO: 1134081 - DNA, 15 bp, Homo sapiens
tggaacaagcttccc

SEQ ID NO: 1134082 - DNA, 15 bp, Homo sapiens
ctggaacaagcttcc

SEQ ID NO: 1134083 - DNA, 15 bp, Homo sapiens
tctggaacaagcttc

SEQ ID NO: 1134084 - DNA, 15 bp, Homo sapiens
gtctggaacaagctt

SEQ ID NO: 1134085 - DNA, 15 bp, Homo sapiens
tgtctggaacaagct

SEQ ID NO: 1134086 - DNA, 15 bp, Homo sapiens
ctgtctggaacaagc

SEQ ID NO: 1134087 - DNA, 15 bp, Homo sapiens
gctgtctggaacaag

SEQ ID NO: 1134088 - DNA, 15 bp, Homo sapiens
ggctgtctggaacaa

SEQ ID NO: 1134089 - DNA, 15 bp, Homo sapiens
tggctgtctggaaca

SEQ ID NO: 1134090 - DNA, 15 bp, Homo sapiens
ttggctgtctggaac

SEQ ID NO: 1134091 - DNA, 15 bp, Homo sapiens
cttggctgtctggaa

SEQ ID NO: 1134092 - DNA, 15 bp, Homo sapiens
ccttggctgtctgga

SEQ ID NO: 1134093 - DNA, 15 bp, Homo sapiens
tccttggctgtctgg

SEQ ID NO: 1134094 - DNA, 15 bp, Homo sapiens
ctccttggctgtctg

SEQ ID NO: 1134095 - DNA, 15 bp, Homo sapiens
cctccttggctgtct

SEQ ID NO: 1134096 - DNA, 15 bp, Homo sapiens
ccctccttggctgtc

SEQ ID NO: 1134097 - DNA, 15 bp, Homo sapiens
tccctccttggctgt

SEQ ID NO: 1134098 - DNA, 15 bp, Homo sapiens
ctccctccttggctg

SEQ ID NO: 1134099 - DNA, 15 bp, Homo sapiens
cctccctccttggct

SEQ ID NO: 1134100 - DNA, 15 bp, Homo sapiens
acctccctccttggc

SEQ ID NO: 1134101 - DNA, 15 bp, Homo sapiens
aacctccctccttgg

SEQ ID NO: 1134102 - DNA, 15 bp, Homo sapiens
gaacctccctccttg

SEQ ID NO: 1134103 - DNA, 15 bp, Homo sapiens
cgaacctccctcctt

SEQ ID NO: 1134104 - DNA, 15 bp, Homo sapiens
gcgaacctccctcct

SEQ ID NO: 1134105 - DNA, 15 bp, Homo sapiens
cgcgaacctccctcc

SEQ ID NO: 1134106 - DNA, 15 bp, Homo sapiens
gcgcgaacctccctc

SEQ ID NO: 1134107 - DNA, 15 bp, Homo sapiens
tgcgcgaacctccct

SEQ ID NO: 1134108 - DNA, 15 bp, Homo sapiens
ctgcgcgaacctccc

SEQ ID NO: 1134109 - DNA, 15 bp, Homo sapiens
actgcgcgaacctcc

SEQ ID NO: 1134110 - DNA, 15 bp, Homo sapiens
aactgcgcgaacctc

SEQ ID NO: 1134111 - DNA, 15 bp, Homo sapiens
gaactgcgcgaacct

SEQ ID NO: 1134112 - DNA, 15 bp, Homo sapiens
ggaactgcgcgaacc

SEQ ID NO: 1134113 - DNA, 15 bp, Homo sapiens
aggaactgcgcgaac

SEQ ID NO: 1134114 - DNA, 15 bp, Homo sapiens
aaggaactgcgcgaa

SEQ ID NO: 1134115 - DNA, 15 bp, Homo sapiens
aaaggaactgcgcga

SEQ ID NO: 1134116 - DNA, 15 bp, Homo sapiens
caaaggaactgcgcg

SEQ ID NO: 1134117 - DNA, 15 bp, Homo sapiens
ccaaaggaactgcgc

SEQ ID NO: 1134118 - DNA, 15 bp, Homo sapiens
gccaaaggaactgcg

SEQ ID NO: 1134119 - DNA, 15 bp, Homo sapiens
ggccaaaggaactgc

SEQ ID NO: 1134120 - DNA, 15 bp, Homo sapiens
tggccaaaggaactg

SEQ ID NO: 1134121 - DNA, 15 bp, Homo sapiens
gtggccaaaggaact

SEQ ID NO: 1134122 - DNA, 15 bp, Homo sapiens
ggtggccaaaggaac

SEQ ID NO: 1134123 - DNA, 15 bp, Homo sapiens
gggtggccaaaggaa

SEQ ID NO: 1134124 - DNA, 15 bp, Homo sapiens
tgggtggccaaagga

SEQ ID NO: 1134125 - DNA, 15 bp, Homo sapiens
ctgggtggccaaagg

SEQ ID NO: 1134126 - DNA, 15 bp, Homo sapiens
cctgggtggccaaag

SEQ ID NO: 1134127 - DNA, 15 bp, Homo sapiens
acctgggtggccaaa

SEQ ID NO: 1134128 - DNA, 15 bp, Homo sapiens
cacctgggtggccaa

SEQ ID NO: 1134129 - DNA, 15 bp, Homo sapiens
ccacctgggtggcca

SEQ ID NO: 1134130 - DNA, 15 bp, Homo sapiens
cccacctgggtggcc

SEQ ID NO: 1134131 - DNA, 15 bp, Homo sapiens
ccccacctgggtggc

SEQ ID NO: 1134132 - DNA, 15 bp, Homo sapiens
accccacctgggtgg

SEQ ID NO: 1134133 - DNA, 15 bp, Homo sapiens
taccccacctgggtg

SEQ ID NO: 1134134 - DNA, 15 bp, Homo sapiens
ttaccccacctgggt

SEQ ID NO: 1134135 - DNA, 15 bp, Homo sapiens
attaccccacctggg

SEQ ID NO: 1134136 - DNA, 15 bp, Homo sapiens
aattaccccacctgg

SEQ ID NO: 1134137 - DNA, 15 bp, Homo sapiens
caattaccccacctg

SEQ ID NO: 1134138 - DNA, 15 bp, Homo sapiens
tcaattaccccacct

SEQ ID NO: 1134139 - DNA, 15 bp, Homo sapiens
atcaattaccccacc

SEQ ID NO: 1134140 - DNA, 15 bp, Homo sapiens
gatcaattaccccac

SEQ ID NO: 1134141 - DNA, 15 bp, Homo sapiens
ggatcaattacccca

SEQ ID NO: 1134142 - DNA, 15 bp, Homo sapiens
tggatcaattacccc

SEQ ID NO: 1134143 - DNA, 15 bp, Homo sapiens
atggatcaattaccc

SEQ ID NO: 1134144 - DNA, 15 bp, Homo sapiens
catggatcaattacc

SEQ ID NO: 1134145 - DNA, 15 bp, Homo sapiens
acatggatcaattac

SEQ ID NO: 1134146 - DNA, 15 bp, Homo sapiens
tacatggatcaatta

SEQ ID NO: 1134147 - DNA, 15 bp, Homo sapiens
atacatggatcaatt

SEQ ID NO: 1134148 - DNA, 15 bp, Homo sapiens
catacatggatcaat

SEQ ID NO: 1134149 - DNA, 15 bp, Homo sapiens
gcatacatggatcaa

SEQ ID NO: 1134150 - DNA, 15 bp, Homo sapiens
ggcatacatggatca

SEQ ID NO: 1134151 - DNA, 15 bp, Homo sapiens
tggcatacatggatc

SEQ ID NO: 1134152 - DNA, 15 bp, Homo sapiens
atggcatacatggat

SEQ ID NO: 1134153 - DNA, 15 bp, Homo sapiens
aatggcatacatgga

SEQ ID NO: 1134154 - DNA, 15 bp, Homo sapiens
gaatggcatacatgg

SEQ ID NO: 1134155 - DNA, 15 bp, Homo sapiens
tgaatggcatacatg

SEQ ID NO: 1134156 - DNA, 15 bp, Homo sapiens
atgaatggcatacat

SEQ ID NO: 1134157 - DNA, 15 bp, Homo sapiens
catgaatggcataca

SEQ ID NO: 1134158 - DNA, 15 bp, Homo sapiens
acatgaatggcatac

SEQ ID NO: 1134159 - DNA, 15 bp, Homo sapiens
tacatgaatggcata

SEQ ID NO: 1134160 - DNA, 15 bp, Homo sapiens
gtacatgaatggcat

SEQ ID NO: 1134161 - DNA, 15 bp, Homo sapiens
tgtacatgaatggca

SEQ ID NO: 1134162 - DNA, 15 bp, Homo sapiens
ttgtacatgaatggc

SEQ ID NO: 1134163 - DNA, 15 bp, Homo sapiens
attgtacatgaatgg

SEQ ID NO: 1134164 - DNA, 15 bp, Homo sapiens
cattgtacatgaatg

SEQ ID NO: 1134165 - DNA, 15 bp, Homo sapiens
acattgtacatgaat

SEQ ID NO: 1134166 - DNA, 15 bp, Homo sapiens
tacattgtacatgaa

SEQ ID NO: 1134167 - DNA, 15 bp, Homo sapiens
ctacattgtacatga

SEQ ID NO: 1134168 - DNA, 15 bp, Homo sapiens
cctacattgtacatg

SEQ ID NO: 1134169 - DNA, 15 bp, Homo sapiens
gcctacattgtacat

SEQ ID NO: 1134170 - DNA, 15 bp, Homo sapiens
tgcctacattgtaca

SEQ ID NO: 1134171 - DNA, 15 bp, Homo sapiens
gtgcctacattgtac

SEQ ID NO: 1134172 - DNA, 15 bp, Homo sapiens
agtgcctacattgta

SEQ ID NO: 1134173 - DNA, 15 bp, Homo sapiens
aagtgcctacattgt

SEQ ID NO: 1134174 - DNA, 15 bp, Homo sapiens
taagtgcctacattg

SEQ ID NO: 1134175 - DNA, 15 bp, Homo sapiens
ataagtgcctacatt

SEQ ID NO: 1134176 - DNA, 15 bp, Homo sapiens
tataagtgcctacat

SEQ ID NO: 1134177 - DNA, 15 bp, Homo sapiens
gtataagtgcctaca

SEQ ID NO: 1134178 - DNA, 15 bp, Homo sapiens
ggtataagtgcctac

SEQ ID NO: 1134179 - DNA, 15 bp, Homo sapiens
aggtataagtgccta

SEQ ID NO: 1134180 - DNA, 15 bp, Homo sapiens
caggtataagtgcct

SEQ ID NO: 1134181 - DNA, 15 bp, Homo sapiens
acaggtataagtgcc

SEQ ID NO: 1134182 - DNA, 15 bp, Homo sapiens
tacaggtataagtgc

SEQ ID NO: 1134183 - DNA, 15 bp, Homo sapiens
atacaggtataagtg

SEQ ID NO: 1134184 - DNA, 15 bp, Homo sapiens
aatacaggtataagt

SEQ ID NO: 1134185 - DNA, 15 bp, Homo sapiens
gaatacaggtataag

SEQ ID NO: 1134186 - DNA, 15 bp, Homo sapiens
ggaatacaggtataa

SEQ ID NO: 1134187 - DNA, 15 bp, Homo sapiens
tggaatacaggtata

SEQ ID NO: 1134188 - DNA, 15 bp, Homo sapiens
ttggaatacaggtat

SEQ ID NO: 1134189 - DNA, 15 bp, Homo sapiens
attggaatacaggta

SEQ ID NO: 1134190 - DNA, 15 bp, Homo sapiens
cattggaatacaggt

SEQ ID NO: 1134191 - DNA, 15 bp, Homo sapiens
acattggaatacagg

SEQ ID NO: 1134192 - DNA, 15 bp, Homo sapiens
tacattggaatacag

SEQ ID NO: 1134193 - DNA, 15 bp, Homo sapiens
ctacattggaataca

SEQ ID NO: 1134194 - DNA, 15 bp, Homo sapiens
actacattggaatac

SEQ ID NO: 1134195 - DNA, 15 bp, Homo sapiens
cactacattggaata

SEQ ID NO: 1134196 - DNA, 15 bp, Homo sapiens
tcactacattggaat

SEQ ID NO: 1134197 - DNA, 15 bp, Homo sapiens
ttcactacattggaa

SEQ ID NO: 1134198 - DNA, 15 bp, Homo sapiens
gttcactacattgga

SEQ ID NO: 1134199 - DNA, 15 bp, Homo sapiens
agttcactacattgg

SEQ ID NO: 1134200 - DNA, 15 bp, Homo sapiens
tagttcactacattg

SEQ ID NO: 1134201 - DNA, 15 bp, Homo sapiens
atagttcactacatt

SEQ ID NO: 1134202 - DNA, 15 bp, Homo sapiens
tatagttcactacat

SEQ ID NO: 1134203 - DNA, 15 bp, Homo sapiens
gtatagttcactaca

SEQ ID NO: 1134204 - DNA, 15 bp, Homo sapiens
ggtatagttcactac

SEQ ID NO: 1134205 - DNA, 15 bp, Homo sapiens
tggtatagttcacta

SEQ ID NO: 1134206 - DNA, 15 bp, Homo sapiens
atggtatagttcact

SEQ ID NO: 1134207 - DNA, 15 bp, Homo sapiens
aatggtatagttcac

SEQ ID NO: 1134208 - DNA, 15 bp, Homo sapiens
taatggtatagttca

SEQ ID NO: 1134209 - DNA, 15 bp, Homo sapiens
gtaatggtatagttc

SEQ ID NO: 1134210 - DNA, 15 bp, Homo sapiens
agtaatggtatagtt

SEQ ID NO: 1134211 - DNA, 15 bp, Homo sapiens
gagtaatggtatagt

SEQ ID NO: 1134212 - DNA, 15 bp, Homo sapiens
agagtaatggtatag

SEQ ID NO: 1134213 - DNA, 15 bp, Homo sapiens
aagagtaatggtata

SEQ ID NO: 1134214 - DNA, 15 bp, Homo sapiens
taagagtaatggtat

SEQ ID NO: 1134215 - DNA, 15 bp, Homo sapiens
ttaagagtaatggta

SEQ ID NO: 1134216 - DNA, 15 bp, Homo sapiens
tttaagagtaatggt

SEQ ID NO: 1134217 - DNA, 15 bp, Homo sapiens
atttaagagtaatgg

SEQ ID NO: 1134218 - DNA, 15 bp, Homo sapiens
aatttaagagtaatg

SEQ ID NO: 1134219 - DNA, 15 bp, Homo sapiens
taatttaagagtaat

SEQ ID NO: 1134220 - DNA, 15 bp, Homo sapiens
ttaatttaagagtaa

SEQ ID NO: 1134221 - DNA, 15 bp, Homo sapiens
attaatttaagagta

SEQ ID NO: 1134222 - DNA, 15 bp, Homo sapiens
tattaatttaagagt

SEQ ID NO: 1134223 - DNA, 15 bp, Homo sapiens
atattaatttaagag

SEQ ID NO: 1134224 - DNA, 15 bp, Homo sapiens
aatattaatttaaga

SEQ ID NO: 1134225 - DNA, 15 bp, Homo sapiens
gaatattaatttaag

SEQ ID NO: 1134226 - DNA, 15 bp, Homo sapiens
agaatattaatttaa

SEQ ID NO: 1134227 - DNA, 15 bp, Homo sapiens
aagaatattaattta

SEQ ID NO: 1134228 - DNA, 15 bp, Homo sapiens
aaagaatattaattt

SEQ ID NO: 1134229 - DNA, 15 bp, Homo sapiens
taaagaatattaatt

SEQ ID NO: 1134230 - DNA, 15 bp, Homo sapiens
ataaagaatattaat

SEQ ID NO: 1134231 - DNA, 15 bp, Homo sapiens
aataaagaatattaa

SEQ ID NO: 1134232 - DNA, 15 bp, Homo sapiens
taataaagaatatta

SEQ ID NO: 1134233 - DNA, 15 bp, Homo sapiens
ctaataaagaatatt

SEQ ID NO: 1134234 - DNA, 15 bp, Homo sapiens
gctaataaagaatat

SEQ ID NO: 1134235 - DNA, 15 bp, Homo sapiens
agctaataaagaata

SEQ ID NO: 1134236 - DNA, 15 bp, Homo sapiens
aagctaataaagaat

SEQ ID NO: 1134237 - DNA, 15 bp, Homo sapiens
gaagctaataaagaa

SEQ ID NO: 1134238 - DNA, 15 bp, Homo sapiens
ggaagctaataaaga

SEQ ID NO: 1134239 - DNA, 15 bp, Homo sapiens
tggaagctaataaag

SEQ ID NO: 1134240 - DNA, 15 bp, Homo sapiens
atggaagctaataaa

SEQ ID NO: 1134241 - DNA, 15 bp, Homo sapiens
catggaagctaataa

SEQ ID NO: 1134242 - DNA, 15 bp, Homo sapiens
ccatggaagctaata

SEQ ID NO: 1134243 - DNA, 15 bp, Homo sapiens
accatggaagctaat

SEQ ID NO: 1134244 - DNA, 15 bp, Homo sapiens
caccatggaagctaa

SEQ ID NO: 1134245 - DNA, 15 bp, Homo sapiens
ccaccatggaagcta

SEQ ID NO: 1134246 - DNA, 15 bp, Homo sapiens
gccaccatggaagct

SEQ ID NO: 1134247 - DNA, 15 bp, Homo sapiens
agccaccatggaagc

SEQ ID NO: 1134248 - DNA, 15 bp, Homo sapiens
tagccaccatggaag

SEQ ID NO: 1134249 - DNA, 15 bp, Homo sapiens
atagccaccatggaa

SEQ ID NO: 1134250 - DNA, 15 bp, Homo sapiens
tatagccaccatgga

SEQ ID NO: 1134251 - DNA, 15 bp, Homo sapiens
ctatagccaccatgg

SEQ ID NO: 1134252 - DNA, 15 bp, Homo sapiens
cctatagccaccatg

SEQ ID NO: 1134253 - DNA, 15 bp, Homo sapiens
gcctatagccaccat

SEQ ID NO: 1134254 - DNA, 15 bp, Homo sapiens
ggcctatagccacca

SEQ ID NO: 1134255 - DNA, 15 bp, Homo sapiens
tggcctatagccacc

SEQ ID NO: 1134256 - DNA, 15 bp, Homo sapiens
ctggcctatagccac

SEQ ID NO: 1134257 - DNA, 15 bp, Homo sapiens
cctggcctatagcca

SEQ ID NO: 1134258 - DNA, 15 bp, Homo sapiens
gcctggcctatagcc

SEQ ID NO: 1134259 - DNA, 15 bp, Homo sapiens
tgcctggcctatagc

SEQ ID NO: 1134260 - DNA, 15 bp, Homo sapiens
ttgcctggcctatag

SEQ ID NO: 1134261 - DNA, 15 bp, Homo sapiens
cttgcctggcctata

SEQ ID NO: 1134262 - DNA, 15 bp, Homo sapiens
tcttgcctggcctat

SEQ ID NO: 1134263 - DNA, 15 bp, Homo sapiens
ctcttgcctggccta

SEQ ID NO: 1134264 - DNA, 15 bp, Homo sapiens
tctcttgcctggcct

SEQ ID NO: 1134265 - DNA, 15 bp, Homo sapiens
ctctcttgcctggcc

SEQ ID NO: 1134266 - DNA, 15 bp, Homo sapiens
actctcttgcctggc

SEQ ID NO: 1134267 - DNA, 15 bp, Homo sapiens
aactctcttgcctgg

SEQ ID NO: 1134268 - DNA, 15 bp, Homo sapiens
taactctcttgcctg

SEQ ID NO: 1134269 - DNA, 15 bp, Homo sapiens
ttaactctcttgcct

SEQ ID NO: 1134270 - DNA, 15 bp, Homo sapiens
cttaactctcttgcc

SEQ ID NO: 1134271 - DNA, 15 bp, Homo sapiens
tcttaactctcttgc

SEQ ID NO: 1134272 - DNA, 15 bp, Homo sapiens
ttcttaactctcttg

SEQ ID NO: 1134273 - DNA, 15 bp, Homo sapiens
tttcttaactctctt

SEQ ID NO: 1134274 - DNA, 15 bp, Homo sapiens
ttttcttaactctct

SEQ ID NO: 1134275 - DNA, 15 bp, Homo sapiens
tttttcttaactctc

SEQ ID NO: 1134276 - DNA, 15 bp, Homo sapiens
ttttttcttaactct

SEQ ID NO: 1134277 - DNA, 15 bp, Homo sapiens
attttttcttaactc

SEQ ID NO: 1134278 - DNA, 15 bp, Homo sapiens
tattttttcttaact

SEQ ID NO: 1134279 - DNA, 15 bp, Homo sapiens
ttattttttcttaac

SEQ ID NO: 1134280 - DNA, 15 bp, Homo sapiens
tttattttttcttaa

SEQ ID NO: 1134281 - DNA, 15 bp, Homo sapiens
atttattttttctta

SEQ ID NO: 1134282 - DNA, 15 bp, Homo sapiens
tatttattttttctt

SEQ ID NO: 1134283 - DNA, 15 bp, Homo sapiens
ctatttattttttct

SEQ ID NO: 1134284 - DNA, 15 bp, Homo sapiens
gctatttattttttc

SEQ ID NO: 1134285 - DNA, 15 bp, Homo sapiens
ggctatttatttttt

SEQ ID NO: 1134286 - DNA, 15 bp, Homo sapiens
tggctatttattttt

SEQ ID NO: 1134287 - DNA, 15 bp, Homo sapiens
ctggctatttatttt

SEQ ID NO: 1134288 - DNA, 15 bp, Homo sapiens
cctggctatttattt

SEQ ID NO: 1134289 - DNA, 15 bp, Homo sapiens
acctggctatttatt

SEQ ID NO: 1134290 - DNA, 15 bp, Homo sapiens
tacctggctatttat

SEQ ID NO: 1134291 - DNA, 15 bp, Homo sapiens
atacctggctattta

SEQ ID NO: 1134292 - DNA, 15 bp, Homo sapiens
catacctggctattt

SEQ ID NO: 1134293 - DNA, 15 bp, Homo sapiens
ccatacctggctatt

SEQ ID NO: 1134294 - DNA, 15 bp, Homo sapiens
accatacctggctat

SEQ ID NO: 1134295 - DNA, 15 bp, Homo sapiens
caccatacctggcta

SEQ ID NO: 1134296 - DNA, 15 bp, Homo sapiens
tcaccatacctggct

SEQ ID NO: 1134297 - DNA, 15 bp, Homo sapiens
gtcaccatacctggc

SEQ ID NO: 1134298 - DNA, 15 bp, Homo sapiens
agtcaccatacctgg

SEQ ID NO: 1134299 - DNA, 15 bp, Homo sapiens
gagtcaccatacctg

SEQ ID NO: 1134300 - DNA, 15 bp, Homo sapiens
tgagtcaccatacct

SEQ ID NO: 1134301 - DNA, 15 bp, Homo sapiens
ttgagtcaccatacc

SEQ ID NO: 1134302 - DNA, 15 bp, Homo sapiens
cttgagtcaccatac

SEQ ID NO: 1134303 - DNA, 15 bp, Homo sapiens
gcttgagtcaccata

SEQ ID NO: 1134304 - DNA, 15 bp, Homo sapiens
ggcttgagtcaccat

SEQ ID NO: 1134305 - DNA, 15 bp, Homo sapiens
aggcttgagtcacca

SEQ ID NO: 1134306 - DNA, 15 bp, Homo sapiens
caggcttgagtcacc

SEQ ID NO: 1134307 - DNA, 15 bp, Homo sapiens
acaggcttgagtcac

SEQ ID NO: 1134308 - DNA, 15 bp, Homo sapiens
tacaggcttgagtca

SEQ ID NO: 1134309 - DNA, 15 bp, Homo sapiens
ttacaggcttgagtc

SEQ ID NO: 1134310 - DNA, 15 bp, Homo sapiens
attacaggcttgagt

SEQ ID NO: 1134311 - DNA, 15 bp, Homo sapiens
agattacaggcttga

SEQ ID NO: 1134312 - DNA, 15 bp, Homo sapiens
gagattacaggcttg

SEQ ID NO: 1134313 - DNA, 15 bp, Homo sapiens
cgagattacaggctt

SEQ ID NO: 1134314 - DNA, 15 bp, Homo sapiens
ccgagattacaggct

SEQ ID NO: 1134315 - DNA, 15 bp, Homo sapiens
gccgagattacaggc

SEQ ID NO: 1134316 - DNA, 15 bp, Homo sapiens
tgccgagattacagg

SEQ ID NO: 1134317 - DNA, 15 bp, Homo sapiens
gtgccgagattacag

SEQ ID NO: 1134318 - DNA, 15 bp, Homo sapiens
agtgccgagattaca

SEQ ID NO: 1134319 - DNA, 15 bp, Homo sapiens
aagtgccgagattac

SEQ ID NO: 1134320 - DNA, 15 bp, Homo sapiens
aaagtgccgagatta

SEQ ID NO: 1134321 - DNA, 15 bp, Homo sapiens
taaagtgccgagatt

SEQ ID NO: 1134322 - DNA, 15 bp, Homo sapiens
ctaaagtgccgagat

SEQ ID NO: 1134323 - DNA, 15 bp, Homo sapiens
cctaaagtgccgaga

SEQ ID NO: 1134324 - DNA, 15 bp, Homo sapiens
tcctaaagtgccgag

SEQ ID NO: 1134325 - DNA, 15 bp, Homo sapiens
ctcctaaagtgccga

SEQ ID NO: 1134326 - DNA, 15 bp, Homo sapiens
gcgatcctcctgcct

SEQ ID NO: 1134327 - DNA, 15 bp, Homo sapiens
ctcctggactcaagc

SEQ ID NO: 1134328 - DNA, 15 bp, Homo sapiens
tcttgaactcctgga

SEQ ID NO: 1134329 - DNA, 15 bp, Homo sapiens
ctcaggctggtcttg

SEQ ID NO: 1134330 - DNA, 15 bp, Homo sapiens
gctcaggctggtctt

SEQ ID NO: 1134331 - DNA, 15 bp, Homo sapiens
tgctcaggctggtct

SEQ ID NO: 1134332 - DNA, 15 bp, Homo sapiens
ttgctcaggctggtc

SEQ ID NO: 1134333 - DNA, 15 bp, Homo sapiens
tttgctcaggctggt

SEQ ID NO: 1134334 - DNA, 15 bp, Homo sapiens
ttttgctcaggctgg

SEQ ID NO: 1134335 - DNA, 15 bp, Homo sapiens
attttgctcaggctg

SEQ ID NO: 1134336 - DNA, 15 bp, Homo sapiens
tattttgctcaggct

SEQ ID NO: 1134337 - DNA, 15 bp, Homo sapiens
ctattttgctcaggc

SEQ ID NO: 1134338 - DNA, 15 bp, Homo sapiens
actattttgctcagg

SEQ ID NO: 1134339 - DNA, 15 bp, Homo sapiens
cactattttgctcag

SEQ ID NO: 1134340 - DNA, 15 bp, Homo sapiens
tcactattttgctca

SEQ ID NO: 1134341 - DNA, 15 bp, Homo sapiens
ctcactattttgctc

SEQ ID NO: 1134342 - DNA, 15 bp, Homo sapiens
tctcactattttgct

SEQ ID NO: 1134343 - DNA, 15 bp, Homo sapiens
atctcactattttgc

SEQ ID NO: 1134344 - DNA, 15 bp, Homo sapiens
gatctcactattttg

SEQ ID NO: 1134345 - DNA, 15 bp, Homo sapiens
ggatctcactatttt

SEQ ID NO: 1134346 - DNA, 15 bp, Homo sapiens
aggatctcactattt

SEQ ID NO: 1134347 - DNA, 15 bp, Homo sapiens
caggatctcactatt

SEQ ID NO: 1134348 - DNA, 15 bp, Homo sapiens
acaggatctcactat

SEQ ID NO: 1134349 - DNA, 15 bp, Homo sapiens
gacaggatctcacta

SEQ ID NO: 1134350 - DNA, 15 bp, Homo sapiens
agacaggatctcact

SEQ ID NO: 1134351 - DNA, 15 bp, Homo sapiens
gagacaggatctcac

SEQ ID NO: 1134352 - DNA, 15 bp, Homo sapiens
agagacaggatctca

SEQ ID NO: 1134353 - DNA, 15 bp, Homo sapiens
tagagacaggatctc

SEQ ID NO: 1134354 - DNA, 15 bp, Homo sapiens
atagagacaggatct

SEQ ID NO: 1134355 - DNA, 15 bp, Homo sapiens
aatagagacaggatc

SEQ ID NO: 1134356 - DNA, 15 bp, Homo sapiens
aaatagagacaggat

SEQ ID NO: 1134357 - DNA, 15 bp, Homo sapiens
aaaatagagacagga

SEQ ID NO: 1134358 - DNA, 15 bp, Homo sapiens
aaaaatagagacagg

SEQ ID NO: 1134359 - DNA, 15 bp, Homo sapiens
aaaaaatagagacag

SEQ ID NO: 1134360 - DNA, 15 bp, Homo sapiens
taaaaaatagagaca

SEQ ID NO: 1134361 - DNA, 15 bp, Homo sapiens
ttaaaaaatagagac

SEQ ID NO: 1134362 - DNA, 15 bp, Homo sapiens
ttttttaaaaaatag

SEQ ID NO: 1134363 - DNA, 15 bp, Homo sapiens
cttttttaaaaaata

SEQ ID NO: 1134364 - DNA, 15 bp, Homo sapiens
gcttttttaaaaaat

SEQ ID NO: 1134365 - DNA, 15 bp, Homo sapiens
ggcttttttaaaaaa

SEQ ID NO: 1134366 - DNA, 15 bp, Homo sapiens
aggcttttttaaaaa

SEQ ID NO: 1134367 - DNA, 15 bp, Homo sapiens
aaggcttttttaaaa

SEQ ID NO: 1134368 - DNA, 15 bp, Homo sapiens
caaggcttttttaaa

SEQ ID NO: 1134369 - DNA, 15 bp, Homo sapiens
ccaaggcttttttaa

SEQ ID NO: 1134370 - DNA, 15 bp, Homo sapiens
cccaaggctttttta

SEQ ID NO: 1134371 - DNA, 15 bp, Homo sapiens
ccccaaggctttttt

SEQ ID NO: 1134372 - DNA, 15 bp, Homo sapiens
gccccaaggcttttt

SEQ ID NO: 1134373 - DNA, 15 bp, Homo sapiens
tgccccaaggctttt

SEQ ID NO: 1134374 - DNA, 15 bp, Homo sapiens
ttgccccaaggcttt

SEQ ID NO: 1134375 - DNA, 15 bp, Homo sapiens
tttgccccaaggctt

SEQ ID NO: 1134376 - DNA, 15 bp, Homo sapiens
gtttgccccaaggct

SEQ ID NO: 1134377 - DNA, 15 bp, Homo sapiens
tgtttgccccaaggc

SEQ ID NO: 1134378 - DNA, 15 bp, Homo sapiens
ctgtttgccccaagg

SEQ ID NO: 1134379 - DNA, 15 bp, Homo sapiens
cctgtttgccccaag

SEQ ID NO: 1134380 - DNA, 15 bp, Homo sapiens
tcctgtttgccccaa

SEQ ID NO: 1134381 - DNA, 15 bp, Homo sapiens
ctcctgtttgcccca

SEQ ID NO: 1134382 - DNA, 15 bp, Homo sapiens
actcctgtttgcccc

SEQ ID NO: 1134383 - DNA, 15 bp, Homo sapiens
tactcctgtttgccc

SEQ ID NO: 1134384 - DNA, 15 bp, Homo sapiens
atactcctgtttgcc

SEQ ID NO: 1134385 - DNA, 15 bp, Homo sapiens
catactcctgtttgc

SEQ ID NO: 1134386 - DNA, 15 bp, Homo sapiens
ccatactcctgtttg

SEQ ID NO: 1134387 - DNA, 15 bp, Homo sapiens
tccatactcctgttt

SEQ ID NO: 1134388 - DNA, 15 bp, Homo sapiens
ctccatactcctgtt

SEQ ID NO: 1134389 - DNA, 15 bp, Homo sapiens
cctccatactcctgt

SEQ ID NO: 1134390 - DNA, 15 bp, Homo sapiens
acctccatactcctg

SEQ ID NO: 1134391 - DNA, 15 bp, Homo sapiens
aacctccatactcct

SEQ ID NO: 1134392 - DNA, 15 bp, Homo sapiens
aaacctccatactcc

SEQ ID NO: 1134393 - DNA, 15 bp, Homo sapiens
caaacctccatactc

SEQ ID NO: 1134394 - DNA, 15 bp, Homo sapiens
ccaaacctccatact

SEQ ID NO: 1134395 - DNA, 15 bp, Homo sapiens
tccaaacctccatac

SEQ ID NO: 1134396 - DNA, 15 bp, Homo sapiens
atccaaacctccata

SEQ ID NO: 1134397 - DNA, 15 bp, Homo sapiens
catccaaacctccat

SEQ ID NO: 1134398 - DNA, 15 bp, Homo sapiens
gcatccaaacctcca

SEQ ID NO: 1134399 - DNA, 15 bp, Homo sapiens
agcatccaaacctcc

SEQ ID NO: 1134400 - DNA, 15 bp, Homo sapiens
tagcatccaaacctc

SEQ ID NO: 1134401 - DNA, 15 bp, Homo sapiens
ttagcatccaaacct

SEQ ID NO: 1134402 - DNA, 15 bp, Homo sapiens
attagcatccaaacc

SEQ ID NO: 1134403 - DNA, 15 bp, Homo sapiens
tattagcatccaaac

SEQ ID NO: 1134404 - DNA, 15 bp, Homo sapiens
ctattagcatccaaa

SEQ ID NO: 1134405 - DNA, 15 bp, Homo sapiens
tctattagcatccaa

SEQ ID NO: 1134406 - DNA, 15 bp, Homo sapiens
ttctattagcatcca

SEQ ID NO: 1134407 - DNA, 15 bp, Homo sapiens
gttctattagcatcc

SEQ ID NO: 1134408 - DNA, 15 bp, Homo sapiens
tgttctattagcatc

SEQ ID NO: 1134409 - DNA, 15 bp, Homo sapiens
ctgttctattagcat

SEQ ID NO: 1134410 - DNA, 15 bp, Homo sapiens
gctgttctattagca

SEQ ID NO: 1134411 - DNA, 15 bp, Homo sapiens
tgctgttctattagc

SEQ ID NO: 1134412 - DNA, 15 bp, Homo sapiens
ctgctgttctattag

SEQ ID NO: 1134413 - DNA, 15 bp, Homo sapiens
actgctgttctatta

SEQ ID NO: 1134414 - DNA, 15 bp, Homo sapiens
cactgctgttctatt

SEQ ID NO: 1134415 - DNA, 15 bp, Homo sapiens
acactgctgttctat

SEQ ID NO: 1134416 - DNA, 15 bp, Homo sapiens
gacactgctgttcta

SEQ ID NO: 1134417 - DNA, 15 bp, Homo sapiens
agacactgctgttct

SEQ ID NO: 1134418 - DNA, 15 bp, Homo sapiens
aagacactgctgttc

SEQ ID NO: 1134419 - DNA, 15 bp, Homo sapiens
taagacactgctgtt

SEQ ID NO: 1134420 - DNA, 15 bp, Homo sapiens
gtaagacactgctgt

SEQ ID NO: 1134421 - DNA, 15 bp, Homo sapiens
agtaagacactgctg

SEQ ID NO: 1134422 - DNA, 15 bp, Homo sapiens
cagtaagacactgct

SEQ ID NO: 1134423 - DNA, 15 bp, Homo sapiens
gcagtaagacactgc

SEQ ID NO: 1134424 - DNA, 15 bp, Homo sapiens
agcagtaagacactg

SEQ ID NO: 1134425 - DNA, 15 bp, Homo sapiens
aagcagtaagacact

SEQ ID NO: 1134426 - DNA, 15 bp, Homo sapiens
caagcagtaagacac

SEQ ID NO: 1134427 - DNA, 15 bp, Homo sapiens
ccaagcagtaagaca

SEQ ID NO: 1134428 - DNA, 15 bp, Homo sapiens
tccaagcagtaagac

SEQ ID NO: 1134429 - DNA, 15 bp, Homo sapiens
ctccaagcagtaaga

SEQ ID NO: 1134430 - DNA, 15 bp, Homo sapiens
actccaagcagtaag

SEQ ID NO: 1134431 - DNA, 15 bp, Homo sapiens
aactccaagcagtaa

SEQ ID NO: 1134432 - DNA, 15 bp, Homo sapiens
gaactccaagcagta

SEQ ID NO: 1134433 - DNA, 15 bp, Homo sapiens
agaactccaagcagt

SEQ ID NO: 1134434 - DNA, 15 bp, Homo sapiens
gagaactccaagcag

SEQ ID NO: 1134435 - DNA, 15 bp, Homo sapiens
agagaactccaagca

SEQ ID NO: 1134436 - DNA, 15 bp, Homo sapiens
aagagaactccaagc

SEQ ID NO: 1134437 - DNA, 15 bp, Homo sapiens
caagagaactccaag

SEQ ID NO: 1134438 - DNA, 15 bp, Homo sapiens
acaagagaactccaa

SEQ ID NO: 1134439 - DNA, 15 bp, Homo sapiens
aacaagagaactcca

SEQ ID NO: 1134440 - DNA, 15 bp, Homo sapiens
aaacaagagaactcc

SEQ ID NO: 1134441 - DNA, 15 bp, Homo sapiens
gaaacaagagaactc

SEQ ID NO: 1134442 - DNA, 15 bp, Homo sapiens
agaaacaagagaact

SEQ ID NO: 1134443 - DNA, 15 bp, Homo sapiens
aagaaacaagagaac

SEQ ID NO: 1134444 - DNA, 15 bp, Homo sapiens
caagaaacaagagaa

SEQ ID NO: 1134445 - DNA, 15 bp, Homo sapiens
acaagaaacaagaga

SEQ ID NO: 1134446 - DNA, 15 bp, Homo sapiens
gacaagaaacaagag

SEQ ID NO: 1134447 - DNA, 15 bp, Homo sapiens
ggacaagaaacaaga

SEQ ID NO: 1134448 - DNA, 15 bp, Homo sapiens
aggacaagaaacaag

SEQ ID NO: 1134449 - DNA, 15 bp, Homo sapiens
taggacaagaaacaa

SEQ ID NO: 1134450 - DNA, 15 bp, Homo sapiens
ataggacaagaaaca

SEQ ID NO: 1134451 - DNA, 15 bp, Homo sapiens
gataggacaagaaac

SEQ ID NO: 1134452 - DNA, 15 bp, Homo sapiens
tgataggacaagaaa

SEQ ID NO: 1134453 - DNA, 15 bp, Homo sapiens
gtgataggacaagaa

SEQ ID NO: 1134454 - DNA, 15 bp, Homo sapiens
ggtgataggacaaga

SEQ ID NO: 1134455 - DNA, 15 bp, Homo sapiens
cggtgataggacaag

SEQ ID NO: 1134456 - DNA, 15 bp, Homo sapiens
acggtgataggacaa

SEQ ID NO: 1134457 - DNA, 15 bp, Homo sapiens
tacggtgataggaca

SEQ ID NO: 1134458 - DNA, 15 bp, Homo sapiens
ctacggtgataggac

SEQ ID NO: 1134459 - DNA, 15 bp, Homo sapiens
gctacggtgatagga

SEQ ID NO: 1134460 - DNA, 15 bp, Homo sapiens
ggctacggtgatagg

SEQ ID NO: 1134461 - DNA, 15 bp, Homo sapiens
aggctacggtgatag

SEQ ID NO: 1134462 - DNA, 15 bp, Homo sapiens
aaggctacggtgata

SEQ ID NO: 1134463 - DNA, 15 bp, Homo sapiens
aaaggctacggtgat

SEQ ID NO: 1134464 - DNA, 15 bp, Homo sapiens
caaaggctacggtga

SEQ ID NO: 1134465 - DNA, 15 bp, Homo sapiens
ccaaaggctacggtg

SEQ ID NO: 1134466 - DNA, 15 bp, Homo sapiens
tccaaaggctacggt

SEQ ID NO: 1134467 - DNA, 15 bp, Homo sapiens
atccaaaggctacgg

SEQ ID NO: 1134468 - DNA, 15 bp, Homo sapiens
gatccaaaggctacg

SEQ ID NO: 1134469 - DNA, 15 bp, Homo sapiens
tgatccaaaggctac

SEQ ID NO: 1134470 - DNA, 15 bp, Homo sapiens
gtgatccaaaggcta

SEQ ID NO: 1134471 - DNA, 15 bp, Homo sapiens
tgtgatccaaaggct

SEQ ID NO: 1134472 - DNA, 15 bp, Homo sapiens
ctgtgatccaaaggc

SEQ ID NO: 1134473 - DNA, 15 bp, Homo sapiens
gctgtgatccaaagg

SEQ ID NO: 1134474 - DNA, 15 bp, Homo sapiens
tgctgtgatccaaag

SEQ ID NO: 1134475 - DNA, 15 bp, Homo sapiens
ttgctgtgatccaaa

SEQ ID NO: 1134476 - DNA, 15 bp, Homo sapiens
attgctgtgatccaa

SEQ ID NO: 1134477 - DNA, 15 bp, Homo sapiens
aattgctgtgatcca

SEQ ID NO: 1134478 - DNA, 15 bp, Homo sapiens
aaattgctgtgatcc

SEQ ID NO: 1134479 - DNA, 15 bp, Homo sapiens
aaaattgctgtgatc

SEQ ID NO: 1134480 - DNA, 15 bp, Homo sapiens
aaaaattgctgtgat

SEQ ID NO: 1134481 - DNA, 15 bp, Homo sapiens
gaaaaattgctgtga

SEQ ID NO: 1134482 - DNA, 15 bp, Homo sapiens
ggaaaaattgctgtg

SEQ ID NO: 1134483 - DNA, 15 bp, Homo sapiens
tggaaaaattgctgt

SEQ ID NO: 1134484 - DNA, 15 bp, Homo sapiens
atggaaaaattgctg

SEQ ID NO: 1134485 - DNA, 15 bp, Homo sapiens
catggaaaaattgct

SEQ ID NO: 1134486 - DNA, 15 bp, Homo sapiens
tcatggaaaaattgc

SEQ ID NO: 1134487 - DNA, 15 bp, Homo sapiens
gtcatggaaaaattg

SEQ ID NO: 1134488 - DNA, 15 bp, Homo sapiens
agtcatggaaaaatt

SEQ ID NO: 1134489 - DNA, 15 bp, Homo sapiens
gagtcatggaaaaat

SEQ ID NO: 1134490 - DNA, 15 bp, Homo sapiens
ggagtcatggaaaaa

SEQ ID NO: 1134491 - DNA, 15 bp, Homo sapiens
tggagtcatggaaaa

SEQ ID NO: 1134492 - DNA, 15 bp, Homo sapiens
atggagtcatggaaa

SEQ ID NO: 1134493 - DNA, 15 bp, Homo sapiens
tatggagtcatggaa

SEQ ID NO: 1134494 - DNA, 15 bp, Homo sapiens
gtatggagtcatgga

SEQ ID NO: 1134495 - DNA, 15 bp, Homo sapiens
agtatggagtcatgg

SEQ ID NO: 1134496 - DNA, 15 bp, Homo sapiens
aagtatggagtcatg

SEQ ID NO: 1134497 - DNA, 15 bp, Homo sapiens
aaagtatggagtcat

SEQ ID NO: 1134498 - DNA, 15 bp, Homo sapiens
aaaagtatggagtca

SEQ ID NO: 1134499 - DNA, 15 bp, Homo sapiens
gaaaagtatggagtc

SEQ ID NO: 1134500 - DNA, 15 bp, Homo sapiens
tgaaaagtatggagt

SEQ ID NO: 1134501 - DNA, 15 bp, Homo sapiens
ctgaaaagtatggag

SEQ ID NO: 1134502 - DNA, 15 bp, Homo sapiens
actgaaaagtatgga

SEQ ID NO: 1134503 - DNA, 15 bp, Homo sapiens
aactgaaaagtatgg

SEQ ID NO: 1134504 - DNA, 15 bp, Homo sapiens
gaactgaaaagtatg

SEQ ID NO: 1134505 - DNA, 15 bp, Homo sapiens
agaactgaaaagtat

SEQ ID NO: 1134506 - DNA, 15 bp, Homo sapiens
aagaactgaaaagta

SEQ ID NO: 1134507 - DNA, 15 bp, Homo sapiens
caagaactgaaaagt

SEQ ID NO: 1134508 - DNA, 15 bp, Homo sapiens
tcaagaactgaaaag

SEQ ID NO: 1134509 - DNA, 15 bp, Homo sapiens
ttcaagaactgaaaa

SEQ ID NO: 1134510 - DNA, 15 bp, Homo sapiens
attcaagaactgaaa

SEQ ID NO: 1134511 - DNA, 15 bp, Homo sapiens
tattcaagaactgaa

SEQ ID NO: 1134512 - DNA, 15 bp, Homo sapiens
atattcaagaactga

SEQ ID NO: 1134513 - DNA, 15 bp, Homo sapiens
aatattcaagaactg

SEQ ID NO: 1134514 - DNA, 15 bp, Homo sapiens
aaatattcaagaact

SEQ ID NO: 1134515 - DNA, 15 bp, Homo sapiens
aaaatattcaagaac

SEQ ID NO: 1134516 - DNA, 15 bp, Homo sapiens
aaaaatattcaagaa

SEQ ID NO: 1134517 - DNA, 15 bp, Homo sapiens
aaaaaatattcaaga

SEQ ID NO: 1134518 - DNA, 15 bp, Homo sapiens
gaaaaaatattcaag

SEQ ID NO: 1134519 - DNA, 15 bp, Homo sapiens
ggaaaaaatattcaa

SEQ ID NO: 1134520 - DNA, 15 bp, Homo sapiens
aggaaaaaatattca

SEQ ID NO: 1134521 - DNA, 15 bp, Homo sapiens
aaggaaaaaatattc

SEQ ID NO: 1134522 - DNA, 15 bp, Homo sapiens
aaaggaaaaaatatt

SEQ ID NO: 1134523 - DNA, 15 bp, Homo sapiens
taaaggaaaaaatat

SEQ ID NO: 1134524 - DNA, 15 bp, Homo sapiens
ataaaggaaaaaata

SEQ ID NO: 1134525 - DNA, 15 bp, Homo sapiens
aataaaggaaaaaat

SEQ ID NO: 1134526 - DNA, 15 bp, Homo sapiens
gaataaaggaaaaaa

SEQ ID NO: 1134527 - DNA, 15 bp, Homo sapiens
ggaataaaggaaaaa

SEQ ID NO: 1134528 - DNA, 15 bp, Homo sapiens
aggaataaaggaaaa

SEQ ID NO: 1134529 - DNA, 15 bp, Homo sapiens
gaggaataaaggaaa

SEQ ID NO: 1134530 - DNA, 15 bp, Homo sapiens
agaggaataaaggaa

SEQ ID NO: 1134531 - DNA, 15 bp, Homo sapiens
aagaggaataaagga

SEQ ID NO: 1134532 - DNA, 15 bp, Homo sapiens
caagaggaataaagg

SEQ ID NO: 1134533 - DNA, 15 bp, Homo sapiens
acaagaggaataaag

SEQ ID NO: 1134534 - DNA, 15 bp, Homo sapiens
gacaagaggaataaa

SEQ ID NO: 1134535 - DNA, 15 bp, Homo sapiens
agacaagaggaataa

SEQ ID NO: 1134536 - DNA, 15 bp, Homo sapiens
gagacaagaggaata

SEQ ID NO: 1134537 - DNA, 15 bp, Homo sapiens
agagacaagaggaat

SEQ ID NO: 1134538 - DNA, 15 bp, Homo sapiens
cagagacaagaggaa

SEQ ID NO: 1134539 - DNA, 15 bp, Homo sapiens
acagagacaagagga

SEQ ID NO: 1134540 - DNA, 15 bp, Homo sapiens
tacagagacaagagg

SEQ ID NO: 1134541 - DNA, 15 bp, Homo sapiens
ttacagagacaagag

SEQ ID NO: 1134542 - DNA, 15 bp, Homo sapiens
tttacagagacaaga

SEQ ID NO: 1134543 - DNA, 15 bp, Homo sapiens
ctttacagagacaag

SEQ ID NO: 1134544 - DNA, 15 bp, Homo sapiens
tctttacagagacaa

SEQ ID NO: 1134545 - DNA, 15 bp, Homo sapiens
gtctttacagagaca

SEQ ID NO: 1134546 - DNA, 15 bp, Homo sapiens
tgtctttacagagac

SEQ ID NO: 1134547 - DNA, 15 bp, Homo sapiens
atgtctttacagaga

SEQ ID NO: 1134548 - DNA, 15 bp, Homo sapiens
gatgtctttacagag

SEQ ID NO: 1134549 - DNA, 15 bp, Homo sapiens
tgatgtctttacaga

SEQ ID NO: 1134550 - DNA, 15 bp, Homo sapiens
ttgatgtctttacag

SEQ ID NO: 1134551 - DNA, 15 bp, Homo sapiens
gttgatgtctttaca

SEQ ID NO: 1134552 - DNA, 15 bp, Homo sapiens
agttgatgtctttac

SEQ ID NO: 1134553 - DNA, 15 bp, Homo sapiens
cagttgatgtcttta

SEQ ID NO: 1134554 - DNA, 15 bp, Homo sapiens
ccagttgatgtcttt

SEQ ID NO: 1134555 - DNA, 15 bp, Homo sapiens
tccagttgatgtctt

SEQ ID NO: 1134556 - DNA, 15 bp, Homo sapiens
ctccagttgatgtct

SEQ ID NO: 1134557 - DNA, 15 bp, Homo sapiens
actccagttgatgtc

SEQ ID NO: 1134558 - DNA, 15 bp, Homo sapiens
aactccagttgatgt

SEQ ID NO: 1134559 - DNA, 15 bp, Homo sapiens
caactccagttgatg

SEQ ID NO: 1134560 - DNA, 15 bp, Homo sapiens
ccaactccagttgat

SEQ ID NO: 1134561 - DNA, 15 bp, Homo sapiens
tccaactccagttga

SEQ ID NO: 1134562 - DNA, 15 bp, Homo sapiens
gtccaactccagttg

SEQ ID NO: 1134563 - DNA, 15 bp, Homo sapiens
agtccaactccagtt

SEQ ID NO: 1134564 - DNA, 15 bp, Homo sapiens
cagtccaactccagt

SEQ ID NO: 1134565 - DNA, 15 bp, Homo sapiens
acagtccaactccag

SEQ ID NO: 1134566 - DNA, 15 bp, Homo sapiens
tacagtccaactcca

SEQ ID NO: 1134567 - DNA, 15 bp, Homo sapiens
ttacagtccaactcc

SEQ ID NO: 1134568 - DNA, 15 bp, Homo sapiens
attacagtccaactc

SEQ ID NO: 1134569 - DNA, 15 bp, Homo sapiens
tattacagtccaact

SEQ ID NO: 1134570 - DNA, 15 bp, Homo sapiens
gtattacagtccaac

SEQ ID NO: 1134571 - DNA, 15 bp, Homo sapiens
ggtattacagtccaa

SEQ ID NO: 1134572 - DNA, 15 bp, Homo sapiens
tggtattacagtcca

SEQ ID NO: 1134573 - DNA, 15 bp, Homo sapiens
ctggtattacagtcc

SEQ ID NO: 1134574 - DNA, 15 bp, Homo sapiens
cctggtattacagtc

SEQ ID NO: 1134575 - DNA, 15 bp, Homo sapiens
acctggtattacagt

SEQ ID NO: 1134576 - DNA, 15 bp, Homo sapiens
tacctggtattacag

SEQ ID NO: 1134577 - DNA, 15 bp, Homo sapiens
atacctggtattaca

SEQ ID NO: 1134578 - DNA, 15 bp, Homo sapiens
gatacctggtattac

SEQ ID NO: 1134579 - DNA, 15 bp, Homo sapiens
agatacctggtatta

SEQ ID NO: 1134580 - DNA, 15 bp, Homo sapiens
gagatacctggtatt

SEQ ID NO: 1134581 - DNA, 15 bp, Homo sapiens
ggagatacctggtat

SEQ ID NO: 1134582 - DNA, 15 bp, Homo sapiens
tggagatacctggta

SEQ ID NO: 1134583 - DNA, 15 bp, Homo sapiens
ctggagatacctggt

SEQ ID NO: 1134584 - DNA, 15 bp, Homo sapiens
tctggagatacctgg

SEQ ID NO: 1134585 - DNA, 15 bp, Homo sapiens
ttctggagatacctg

SEQ ID NO: 1134586 - DNA, 15 bp, Homo sapiens
cttctggagatacct

SEQ ID NO: 1134587 - DNA, 15 bp, Homo sapiens
tcttctggagatacc

SEQ ID NO: 1134588 - DNA, 15 bp, Homo sapiens
atcttctggagatac

SEQ ID NO: 1134589 - DNA, 15 bp, Homo sapiens
catcttctggagata

SEQ ID NO: 1134590 - DNA, 15 bp, Homo sapiens
ccatcttctggagat

SEQ ID NO: 1134591 - DNA, 15 bp, Homo sapiens
gccatcttctggaga

SEQ ID NO: 1134592 - DNA, 15 bp, Homo sapiens
tgccatcttctggag

SEQ ID NO: 1134593 - DNA, 15 bp, Homo sapiens
gtgccatcttctgga

SEQ ID NO: 1134594 - DNA, 15 bp, Homo sapiens
agtgccatcttctgg

SEQ ID NO: 1134595 - DNA, 15 bp, Homo sapiens
tagtgccatcttctg

SEQ ID NO: 1134596 - DNA, 15 bp, Homo sapiens
atagtgccatcttct

SEQ ID NO: 1134597 - DNA, 15 bp, Homo sapiens
aatagtgccatcttc

SEQ ID NO: 1134598 - DNA, 15 bp, Homo sapiens
aaatagtgccatctt

SEQ ID NO: 1134599 - DNA, 15 bp, Homo sapiens
taaatagtgccatct

SEQ ID NO: 1134600 - DNA, 15 bp, Homo sapiens
ttaaatagtgccatc

SEQ ID NO: 1134601 - DNA, 15 bp, Homo sapiens
gttaaatagtgccat

SEQ ID NO: 1134602 - DNA, 15 bp, Homo sapiens
tgttaaatagtgcca

SEQ ID NO: 1134603 - DNA, 15 bp, Homo sapiens
ctgttaaatagtgcc

SEQ ID NO: 1134604 - DNA, 15 bp, Homo sapiens
tctgttaaatagtgc

SEQ ID NO: 1134605 - DNA, 15 bp, Homo sapiens
atctgttaaatagtg

SEQ ID NO: 1134606 - DNA, 15 bp, Homo sapiens
aatctgttaaatagt

SEQ ID NO: 1134607 - DNA, 15 bp, Homo sapiens
aaatctgttaaatag

SEQ ID NO: 1134608 - DNA, 15 bp, Homo sapiens
aaaatctgttaaata

SEQ ID NO: 1134609 - DNA, 15 bp, Homo sapiens
taaaatctgttaaat

SEQ ID NO: 1134610 - DNA, 15 bp, Homo sapiens
ataaaatctgttaaa

SEQ ID NO: 1134611 - DNA, 15 bp, Homo sapiens
tataaaatctgttaa

SEQ ID NO: 1134612 - DNA, 15 bp, Homo sapiens
ttataaaatctgtta

SEQ ID NO: 1134613 - DNA, 15 bp, Homo sapiens
tttataaaatctgtt

SEQ ID NO: 1134614 - DNA, 15 bp, Homo sapiens
atttataaaatctgt

SEQ ID NO: 1134615 - DNA, 15 bp, Homo sapiens
ttatttataaaatct

SEQ ID NO: 1134616 - DNA, 15 bp, Homo sapiens
attatttataaaatc

SEQ ID NO: 1134617 - DNA, 15 bp, Homo sapiens
aattatttataaaat

SEQ ID NO: 1134618 - DNA, 15 bp, Homo sapiens
aaattatttataaaa

SEQ ID NO: 1134619 - DNA, 15 bp, Homo sapiens
caaattatttataaa

SEQ ID NO: 1134620 - DNA, 15 bp, Homo sapiens
tcaaattatttataa

SEQ ID NO: 1134621 - DNA, 15 bp, Homo sapiens
atcaaattatttata

SEQ ID NO: 1134622 - DNA, 15 bp, Homo sapiens
catcaaattatttat

SEQ ID NO: 1134623 - DNA, 15 bp, Homo sapiens
acatcaaattattta

SEQ ID NO: 1134624 - DNA, 15 bp, Homo sapiens
cacatcaaattattt

SEQ ID NO: 1134625 - DNA, 15 bp, Homo sapiens
tcacatcaaattatt

SEQ ID NO: 1134626 - DNA, 15 bp, Homo sapiens
ctcacatcaaattat

SEQ ID NO: 1134627 - DNA, 15 bp, Homo sapiens
actcacatcaaatta

SEQ ID NO: 1134628 - DNA, 15 bp, Homo sapiens
gactcacatcaaatt

SEQ ID NO: 1134629 - DNA, 15 bp, Homo sapiens
tgactcacatcaaat

SEQ ID NO: 1134630 - DNA, 15 bp, Homo sapiens
gtgactcacatcaaa

SEQ ID NO: 1134631 - DNA, 15 bp, Homo sapiens
agtgactcacatcaa

SEQ ID NO: 1134632 - DNA, 15 bp, Homo sapiens
cagtgactcacatca

SEQ ID NO: 1134633 - DNA, 15 bp, Homo sapiens
acagtgactcacatc

SEQ ID NO: 1134634 - DNA, 15 bp, Homo sapiens
gacagtgactcacat

SEQ ID NO: 1134635 - DNA, 15 bp, Homo sapiens
tgacagtgactcaca

SEQ ID NO: 1134636 - DNA, 15 bp, Homo sapiens
atgacagtgactcac

SEQ ID NO: 1134637 - DNA, 15 bp, Homo sapiens
gatgacagtgactca

SEQ ID NO: 1134638 - DNA, 15 bp, Homo sapiens
agatgacagtgactc

SEQ ID NO: 1134639 - DNA, 15 bp, Homo sapiens
cagatgacagtgact

SEQ ID NO: 1134640 - DNA, 15 bp, Homo sapiens
tcagatgacagtgac

SEQ ID NO: 1134641 - DNA, 15 bp, Homo sapiens
ttcagatgacagtga

SEQ ID NO: 1134642 - DNA, 15 bp, Homo sapiens
cttcagatgacagtg

SEQ ID NO: 1134643 - DNA, 15 bp, Homo sapiens
gcttcagatgacagt

SEQ ID NO: 1134644 - DNA, 15 bp, Homo sapiens
agcttcagatgacag

SEQ ID NO: 1134645 - DNA, 15 bp, Homo sapiens
aagcttcagatgaca

SEQ ID NO: 1134646 - DNA, 15 bp, Homo sapiens
caagcttcagatgac

SEQ ID NO: 1134647 - DNA, 15 bp, Homo sapiens
acaagcttcagatga

SEQ ID NO: 1134648 - DNA, 15 bp, Homo sapiens
aacaagcttcagatg

SEQ ID NO: 1134649 - DNA, 15 bp, Homo sapiens
caacaagcttcagat

SEQ ID NO: 1134650 - DNA, 15 bp, Homo sapiens
gcaacaagcttcaga

SEQ ID NO: 1134651 - DNA, 15 bp, Homo sapiens
ggcaacaagcttcag

SEQ ID NO: 1134652 - DNA, 15 bp, Homo sapiens
aggcaacaagcttca

SEQ ID NO: 1134653 - DNA, 15 bp, Homo sapiens
aaggcaacaagcttc

SEQ ID NO: 1134654 - DNA, 15 bp, Homo sapiens
aaaggcaacaagctt

SEQ ID NO: 1134655 - DNA, 15 bp, Homo sapiens
aaaaggcaacaagct

SEQ ID NO: 1134656 - DNA, 15 bp, Homo sapiens
gaaaaggcaacaagc

SEQ ID NO: 1134657 - DNA, 15 bp, Homo sapiens
agaaaaggcaacaag

SEQ ID NO: 1134658 - DNA, 15 bp, Homo sapiens
aagaaaaggcaacaa

SEQ ID NO: 1134659 - DNA, 15 bp, Homo sapiens
aaagaaaaggcaaca

SEQ ID NO: 1134660 - DNA, 15 bp, Homo sapiens
gaaagaaaaggcaac

SEQ ID NO: 1134661 - DNA, 15 bp, Homo sapiens
agaaagaaaaggcaa

SEQ ID NO: 1134662 - DNA, 15 bp, Homo sapiens
aagaaagaaaaggca

SEQ ID NO: 1134663 - DNA, 15 bp, Homo sapiens
aaagaaagaaaaggc

SEQ ID NO: 1134664 - DNA, 15 bp, Homo sapiens
gaaagaaagaaaagg

SEQ ID NO: 1134665 - DNA, 15 bp, Homo sapiens
agaaagaaagaaaag

SEQ ID NO: 1134666 - DNA, 15 bp, Homo sapiens
aaagaagaaagaaag

SEQ ID NO: 1134667 - DNA, 15 bp, Homo sapiens
gaaagaagaaagaaa

SEQ ID NO: 1134668 - DNA, 15 bp, Homo sapiens
agaaagaagaaagaa

SEQ ID NO: 1134669 - DNA, 15 bp, Homo sapiens
aagaaagaagaaaga

SEQ ID NO: 1134670 - DNA, 15 bp, Homo sapiens
aaagaaagaagaaag

SEQ ID NO: 1134671 - DNA, 15 bp, Homo sapiens
aaaagaaagaagaaa

SEQ ID NO: 1134672 - DNA, 15 bp, Homo sapiens
aaaaagaaagaagaa

SEQ ID NO: 1134673 - DNA, 15 bp, Homo sapiens
aaaaaagaaagaaga

SEQ ID NO: 1134674 - DNA, 15 bp, Homo sapiens
aaaaaaagaaagaag

SEQ ID NO: 1134675 - DNA, 15 bp, Homo sapiens
gaaaaaaaagaaaga

SEQ ID NO: 1134676 - DNA, 15 bp, Homo sapiens
ggaaaaaaaagaaag

SEQ ID NO: 1134677 - DNA, 15 bp, Homo sapiens
gggaaaaaaaagaaa

SEQ ID NO: 1134678 - DNA, 15 bp, Homo sapiens
ggggaaaaaaaagaa

SEQ ID NO: 1134679 - DNA, 15 bp, Homo sapiens
tggggaaaaaaaaga

SEQ ID NO: 1134680 - DNA, 15 bp, Homo sapiens
atggggaaaaaaaag

SEQ ID NO: 1134681 - DNA, 15 bp, Homo sapiens
gatggggaaaaaaaa

SEQ ID NO: 1134682 - DNA, 15 bp, Homo sapiens
tgatggggaaaaaaa

SEQ ID NO: 1134683 - DNA, 15 bp, Homo sapiens
ttgatggggaaaaaa

SEQ ID NO: 1134684 - DNA, 15 bp, Homo sapiens
attgatggggaaaaa

SEQ ID NO: 1134685 - DNA, 15 bp, Homo sapiens
aattgatggggaaaa

SEQ ID NO: 1134686 - DNA, 15 bp, Homo sapiens
gaattgatggggaaa

SEQ ID NO: 1134687 - DNA, 15 bp, Homo sapiens
agaattgatggggaa

SEQ ID NO: 1134688 - DNA, 15 bp, Homo sapiens
cagaattgatgggga

SEQ ID NO: 1134689 - DNA, 15 bp, Homo sapiens
acagaattgatgggg

SEQ ID NO: 1134690 - DNA, 15 bp, Homo sapiens
tacagaattgatggg

SEQ ID NO: 1134691 - DNA, 15 bp, Homo sapiens
atacagaattgatgg

SEQ ID NO: 1134692 - DNA, 15 bp, Homo sapiens
catacagaattgatg

SEQ ID NO: 1134693 - DNA, 15 bp, Homo sapiens
acatacagaattgat

SEQ ID NO: 1134694 - DNA, 15 bp, Homo sapiens
aacatacagaattga

SEQ ID NO: 1134695 - DNA, 15 bp, Homo sapiens
aaacatacagaattg

SEQ ID NO: 1134696 - DNA, 15 bp, Homo sapiens
caaacatacagaatt

SEQ ID NO: 1134697 - DNA, 15 bp, Homo sapiens
tcaaacatacagaat

SEQ ID NO: 1134698 - DNA, 15 bp, Homo sapiens
ttcaaacatacagaa

SEQ ID NO: 1134699 - DNA, 15 bp, Homo sapiens
tttcaaacatacaga

SEQ ID NO: 1134700 - DNA, 15 bp, Homo sapiens
atttcaaacatacag

SEQ ID NO: 1134701 - DNA, 15 bp, Homo sapiens
catttcaaacataca

SEQ ID NO: 1134702 - DNA, 15 bp, Homo sapiens
gcatttcaaacatac

SEQ ID NO: 1134703 - DNA, 15 bp, Homo sapiens
agcatttcaaacata

SEQ ID NO: 1134704 - DNA, 15 bp, Homo sapiens
cagcatttcaaacat

SEQ ID NO: 1134705 - DNA, 15 bp, Homo sapiens
ccagcatttcaaaca

SEQ ID NO: 1134706 - DNA, 15 bp, Homo sapiens
cccagcatttcaaac

SEQ ID NO: 1134707 - DNA, 15 bp, Homo sapiens
acccagcatttcaaa

SEQ ID NO: 1134708 - DNA, 15 bp, Homo sapiens
aacccagcatttcaa

SEQ ID NO: 1134709 - DNA, 15 bp, Homo sapiens
aaacccagcatttca

SEQ ID NO: 1134710 - DNA, 15 bp, Homo sapiens
aaaacccagcatttc

SEQ ID NO: 1134711 - DNA, 15 bp, Homo sapiens
taaaacccagcattt

SEQ ID NO: 1134712 - DNA, 15 bp, Homo sapiens
ttaaaacccagcatt

SEQ ID NO: 1134713 - DNA, 15 bp, Homo sapiens
cttaaaacccagcat

SEQ ID NO: 1134714 - DNA, 15 bp, Homo sapiens
acttaaaacccagca

SEQ ID NO: 1134715 - DNA, 15 bp, Homo sapiens
aacttaaaacccagc

SEQ ID NO: 1134716 - DNA, 15 bp, Homo sapiens
taacttaaaacccag

SEQ ID NO: 1134717 - DNA, 15 bp, Homo sapiens
ctaacttaaaaccca

SEQ ID NO: 1134718 - DNA, 15 bp, Homo sapiens
actaacttaaaaccc

SEQ ID NO: 1134719 - DNA, 15 bp, Homo sapiens
aactaacttaaaacc

SEQ ID NO: 1134720 - DNA, 15 bp, Homo sapiens
taactaacttaaaac

SEQ ID NO: 1134721 - DNA, 15 bp, Homo sapiens
ctaactaacttaaaa

SEQ ID NO: 1134722 - DNA, 15 bp, Homo sapiens
tctaactaacttaaa

SEQ ID NO: 1134723 - DNA, 15 bp, Homo sapiens
ttctaactaacttaa

SEQ ID NO: 1134724 - DNA, 15 bp, Homo sapiens
attctaactaactta

SEQ ID NO: 1134725 - DNA, 15 bp, Homo sapiens
tattctaactaactt

SEQ ID NO: 1134726 - DNA, 15 bp, Homo sapiens
ttattctaactaact

SEQ ID NO: 1134727 - DNA, 15 bp, Homo sapiens
cttattctaactaac

SEQ ID NO: 1134728 - DNA, 15 bp, Homo sapiens
ccttattctaactaa

SEQ ID NO: 1134729 - DNA, 15 bp, Homo sapiens
cccttattctaacta

SEQ ID NO: 1134730 - DNA, 15 bp, Homo sapiens
tcccttattctaact

SEQ ID NO: 1134731 - DNA, 15 bp, Homo sapiens
atcccttattctaac

SEQ ID NO: 1134732 - DNA, 15 bp, Homo sapiens
catcccttattctaa

SEQ ID NO: 1134733 - DNA, 15 bp, Homo sapiens
acatcccttattcta

SEQ ID NO: 1134734 - DNA, 15 bp, Homo sapiens
gacatcccttattct

SEQ ID NO: 1134735 - DNA, 15 bp, Homo sapiens
agacatcccttattc

SEQ ID NO: 1134736 - DNA, 15 bp, Homo sapiens
cagacatcccttatt

SEQ ID NO: 1134737 - DNA, 15 bp, Homo sapiens
acagacatcccttat

SEQ ID NO: 1134738 - DNA, 15 bp, Homo sapiens
tacagacatccctta

SEQ ID NO: 1134739 - DNA, 15 bp, Homo sapiens
ttacagacatccctt

SEQ ID NO: 1134740 - DNA, 15 bp, Homo sapiens
attacagacatccct

SEQ ID NO: 1134741 - DNA, 15 bp, Homo sapiens
aattacagacatccc

SEQ ID NO: 1134742 - DNA, 15 bp, Homo sapiens
aaattacagacatcc

SEQ ID NO: 1134743 - DNA, 15 bp, Homo sapiens
gaaattacagacatc

SEQ ID NO: 1134744 - DNA, 15 bp, Homo sapiens
ggaaattacagacat

SEQ ID NO: 1134745 - DNA, 15 bp, Homo sapiens
gggaaattacagaca

SEQ ID NO: 1134746 - DNA, 15 bp, Homo sapiens
agggaaattacagac

SEQ ID NO: 1134747 - DNA, 15 bp, Homo sapiens
tagggaaattacaga

SEQ ID NO: 1134748 - DNA, 15 bp, Homo sapiens
ttagggaaattacag

SEQ ID NO: 1134749 - DNA, 15 bp, Homo sapiens
tttagggaaattaca

SEQ ID NO: 1134750 - DNA, 15 bp, Homo sapiens
atttagggaaattac

SEQ ID NO: 1134751 - DNA, 15 bp, Homo sapiens
aatttagggaaatta

SEQ ID NO: 1134752 - DNA, 15 bp, Homo sapiens
caatttagggaaatt

SEQ ID NO: 1134753 - DNA, 15 bp, Homo sapiens
tcaatttagggaaat

SEQ ID NO: 1134754 - DNA, 15 bp, Homo sapiens
ctcaatttagggaaa

SEQ ID NO: 1134755 - DNA, 15 bp, Homo sapiens
tctcaatttagggaa

SEQ ID NO: 1134756 - DNA, 15 bp, Homo sapiens
ttctcaatttaggga

SEQ ID NO: 1134757 - DNA, 15 bp, Homo sapiens
cttctcaatttaggg

SEQ ID NO: 1134758 - DNA, 15 bp, Homo sapiens
acttctcaatttagg

SEQ ID NO: 1134759 - DNA, 15 bp, Homo sapiens
tacttctcaatttag

SEQ ID NO: 1134760 - DNA, 15 bp, Homo sapiens
ttacttctcaattta

SEQ ID NO: 1134761 - DNA, 15 bp, Homo sapiens
attacttctcaattt

SEQ ID NO: 1134762 - DNA, 15 bp, Homo sapiens
tattacttctcaatt

SEQ ID NO: 1134763 - DNA, 15 bp, Homo sapiens
atattacttctcaat

SEQ ID NO: 1134764 - DNA, 15 bp, Homo sapiens
catattacttctcaa

SEQ ID NO: 1134765 - DNA, 15 bp, Homo sapiens
gcatattacttctca

SEQ ID NO: 1134766 - DNA, 15 bp, Homo sapiens
tgcatattacttctc

SEQ ID NO: 1134767 - DNA, 15 bp, Homo sapiens
ttgcatattacttct

SEQ ID NO: 1134768 - DNA, 15 bp, Homo sapiens
tttgcatattacttc

SEQ ID NO: 1134769 - DNA, 15 bp, Homo sapiens
ctttgcatattactt

SEQ ID NO: 1134770 - DNA, 15 bp, Homo sapiens
cctttgcatattact

SEQ ID NO: 1134771 - DNA, 15 bp, Homo sapiens
acctttgcatattac

SEQ ID NO: 1134772 - DNA, 15 bp, Homo sapiens
aacctttgcatatta

SEQ ID NO: 1134773 - DNA, 15 bp, Homo sapiens
caacctttgcatatt

SEQ ID NO: 1134774 - DNA, 15 bp, Homo sapiens
tcaacctttgcatat

SEQ ID NO: 1134775 - DNA, 15 bp, Homo sapiens
atcaacctttgcata

SEQ ID NO: 1134776 - DNA, 15 bp, Homo sapiens
tatcaacctttgcat

SEQ ID NO: 1134777 - DNA, 15 bp, Homo sapiens
atatcaacctttgca

SEQ ID NO: 1134778 - DNA, 15 bp, Homo sapiens
gatatcaacctttgc

SEQ ID NO: 1134779 - DNA, 15 bp, Homo sapiens
tgatatcaacctttg

SEQ ID NO: 1134780 - DNA, 15 bp, Homo sapiens
ctgatatcaaccttt

SEQ ID NO: 1134781 - DNA, 15 bp, Homo sapiens
tctgatatcaacctt

SEQ ID NO: 1134782 - DNA, 15 bp, Homo sapiens
ttctgatatcaacct

SEQ ID NO: 1134783 - DNA, 15 bp, Homo sapiens
cttctgatatcaacc

SEQ ID NO: 1134784 - DNA, 15 bp, Homo sapiens
acttctgatatcaac

SEQ ID NO: 1134785 - DNA, 15 bp, Homo sapiens
gacttctgatatcaa

SEQ ID NO: 1134786 - DNA, 15 bp, Homo sapiens
tgacttctgatatca

SEQ ID NO: 1134787 - DNA, 15 bp, Homo sapiens
atgacttctgatatc

SEQ ID NO: 1134788 - DNA, 15 bp, Homo sapiens
tatgacttctgatat

SEQ ID NO: 1134789 - DNA, 15 bp, Homo sapiens
atatgacttctgata

SEQ ID NO: 1134790 - DNA, 15 bp, Homo sapiens
catatgacttctgat

SEQ ID NO: 1134791 - DNA, 15 bp, Homo sapiens
gcatatgacttctga

SEQ ID NO: 1134792 - DNA, 15 bp, Homo sapiens
agcatatgacttctg

SEQ ID NO: 1134793 - DNA, 15 bp, Homo sapiens
gagcatatgacttct

SEQ ID NO: 1134794 - DNA, 15 bp, Homo sapiens
tgagcatatgacttc

SEQ ID NO: 1134795 - DNA, 15 bp, Homo sapiens
gtgagcatatgactt

SEQ ID NO: 1134796 - DNA, 15 bp, Homo sapiens
ggtgagcatatgact

SEQ ID NO: 1134797 - DNA, 15 bp, Homo sapiens
aggtgagcatatgac

SEQ ID NO: 1134798 - DNA, 15 bp, Homo sapiens
aaggtgagcatatga

SEQ ID NO: 1134799 - DNA, 15 bp, Homo sapiens
caaggtgagcatatg

SEQ ID NO: 1134800 - DNA, 15 bp, Homo sapiens
gcaaggtgagcatat

SEQ ID NO: 1134801 - DNA, 15 bp, Homo sapiens
tgcaaggtgagcata

SEQ ID NO: 1134802 - DNA, 15 bp, Homo sapiens
ttgcaaggtgagcat

SEQ ID NO: 1134803 - DNA, 15 bp, Homo sapiens
gttgcaaggtgagca

SEQ ID NO: 1134804 - DNA, 15 bp, Homo sapiens
tgttgcaaggtgagc

SEQ ID NO: 1134805 - DNA, 15 bp, Homo sapiens
gtgttgcaaggtgag

SEQ ID NO: 1134806 - DNA, 15 bp, Homo sapiens
ggtgttgcaaggtga

SEQ ID NO: 1134807 - DNA, 15 bp, Homo sapiens
tggtgttgcaaggtg

SEQ ID NO: 1134808 - DNA, 15 bp, Homo sapiens
ttggtgttgcaaggt

SEQ ID NO: 1134809 - DNA, 15 bp, Homo sapiens
tttggtgttgcaagg

SEQ ID NO: 1134810 - DNA, 15 bp, Homo sapiens
atttggtgttgcaag

SEQ ID NO: 1134811 - DNA, 15 bp, Homo sapiens
tatttggtgttgcaa

SEQ ID NO: 1134812 - DNA, 15 bp, Homo sapiens
ttatttggtgttgca

SEQ ID NO: 1134813 - DNA, 15 bp, Homo sapiens
attatttggtgttgc

SEQ ID NO: 1134814 - DNA, 15 bp, Homo sapiens
tattatttggtgttg

SEQ ID NO: 1134815 - DNA, 15 bp, Homo sapiens
gtattatttggtgtt

SEQ ID NO: 1134816 - DNA, 15 bp, Homo sapiens
agtattatttggtgt

SEQ ID NO: 1134817 - DNA, 15 bp, Homo sapiens
cagtattatttggtg

SEQ ID NO: 1134818 - DNA, 15 bp, Homo sapiens
ccagtattatttggt

SEQ ID NO: 1134819 - DNA, 15 bp, Homo sapiens
gccagtattatttgg

SEQ ID NO: 1134820 - DNA, 15 bp, Homo sapiens
ggccagtattatttg

SEQ ID NO: 1134821 - DNA, 15 bp, Homo sapiens
gggccagtattattt

SEQ ID NO: 1134822 - DNA, 15 bp, Homo sapiens
tgggccagtattatt

SEQ ID NO: 1134823 - DNA, 15 bp, Homo sapiens
atgggccagtattat

SEQ ID NO: 1134824 - DNA, 15 bp, Homo sapiens
aatgggccagtatta

SEQ ID NO: 1134825 - DNA, 15 bp, Homo sapiens
aaatgggccagtatt

SEQ ID NO: 1134826 - DNA, 15 bp, Homo sapiens
caaatgggccagtat

SEQ ID NO: 1134827 - DNA, 15 bp, Homo sapiens
acaaatgggccagta

SEQ ID NO: 1134828 - DNA, 15 bp, Homo sapiens
cacaaatgggccagt

SEQ ID NO: 1134829 - DNA, 15 bp, Homo sapiens
tcacaaatgggccag

SEQ ID NO: 1134830 - DNA, 15 bp, Homo sapiens
atcacaaatgggcca

SEQ ID NO: 1134831 - DNA, 15 bp, Homo sapiens
aatcacaaatgggcc

SEQ ID NO: 1134832 - DNA, 15 bp, Homo sapiens
aaatcacaaatgggc

SEQ ID NO: 1134833 - DNA, 15 bp, Homo sapiens
aaaatcacaaatggg

SEQ ID NO: 1134834 - DNA, 15 bp, Homo sapiens
aaaaatcacaaatgg

SEQ ID NO: 1134835 - DNA, 15 bp, Homo sapiens
caaaaatcacaaatg

SEQ ID NO: 1134836 - DNA, 15 bp, Homo sapiens
tcaaaaatcacaaat

SEQ ID NO: 1134837 - DNA, 15 bp, Homo sapiens
ttcaaaaatcacaaa

SEQ ID NO: 1134838 - DNA, 15 bp, Homo sapiens
tttcaaaaatcacaa

SEQ ID NO: 1134839 - DNA, 15 bp, Homo sapiens
ctttcaaaaatcaca

SEQ ID NO: 1134840 - DNA, 15 bp, Homo sapiens
actttcaaaaatcac

SEQ ID NO: 1134841 - DNA, 15 bp, Homo sapiens
tactttcaaaaatca

SEQ ID NO: 1134842 - DNA, 15 bp, Homo sapiens
ttactttcaaaaatc

SEQ ID NO: 1134843 - DNA, 15 bp, Homo sapiens
gttactttcaaaaat

SEQ ID NO: 1134844 - DNA, 15 bp, Homo sapiens
tgttactttcaaaaa

SEQ ID NO: 1134845 - DNA, 15 bp, Homo sapiens
gtgttactttcaaaa

SEQ ID NO: 1134846 - DNA, 15 bp, Homo sapiens
agtgttactttcaaa

SEQ ID NO: 1134847 - DNA, 15 bp, Homo sapiens
gagtgttactttcaa

SEQ ID NO: 1134848 - DNA, 15 bp, Homo sapiens
ggagtgttactttca

SEQ ID NO: 1134849 - DNA, 15 bp, Homo sapiens
tggagtgttactttc

SEQ ID NO: 1134850 - DNA, 15 bp, Homo sapiens
atggagtgttacttt

SEQ ID NO: 1134851 - DNA, 15 bp, Homo sapiens
tatggagtgttactt

SEQ ID NO: 1134852 - DNA, 15 bp, Homo sapiens
ttatggagtgttact

SEQ ID NO: 1134853 - DNA, 15 bp, Homo sapiens
attatggagtgttac

SEQ ID NO: 1134854 - DNA, 15 bp, Homo sapiens
tattatggagtgtta

SEQ ID NO: 1134855 - DNA, 15 bp, Homo sapiens
ttattatggagtgtt

SEQ ID NO: 1134856 - DNA, 15 bp, Homo sapiens
tttattatggagtgt

SEQ ID NO: 1134857 - DNA, 15 bp, Homo sapiens
atttattatggagtg

SEQ ID NO: 1134858 - DNA, 15 bp, Homo sapiens
catttattatggagt

SEQ ID NO: 1134859 - DNA, 15 bp, Homo sapiens
ccatttattatggag

SEQ ID NO: 1134860 - DNA, 15 bp, Homo sapiens
tccatttattatgga

SEQ ID NO: 1134861 - DNA, 15 bp, Homo sapiens
atccatttattatgg

SEQ ID NO: 1134862 - DNA, 15 bp, Homo sapiens
catccatttattatg

SEQ ID NO: 1134863 - DNA, 15 bp, Homo sapiens
acatccatttattat

SEQ ID NO: 1134864 - DNA, 15 bp, Homo sapiens
tacatccatttatta

SEQ ID NO: 1134865 - DNA, 15 bp, Homo sapiens
atacatccatttatt

SEQ ID NO: 1134866 - DNA, 15 bp, Homo sapiens
tatacatccatttat

SEQ ID NO: 1134867 - DNA, 15 bp, Homo sapiens
atatacatccattta

SEQ ID NO: 1134868 - DNA, 15 bp, Homo sapiens
tatatacatccattt

SEQ ID NO: 1134869 - DNA, 15 bp, Homo sapiens
atatatacatccatt

SEQ ID NO: 1134870 - DNA, 15 bp, Homo sapiens
tatatatacatccat

SEQ ID NO: 1134871 - DNA, 15 bp, Homo sapiens
ctatatatacatcca

SEQ ID NO: 1134872 - DNA, 15 bp, Homo sapiens
tctatatatacatcc

SEQ ID NO: 1134873 - DNA, 15 bp, Homo sapiens
ttctatatatacatc

SEQ ID NO: 1134874 - DNA, 15 bp, Homo sapiens
cttctatatatacat

SEQ ID NO: 1134875 - DNA, 15 bp, Homo sapiens
gcttctatatataca

SEQ ID NO: 1134876 - DNA, 15 bp, Homo sapiens
tgcttctatatatac

SEQ ID NO: 1134877 - DNA, 15 bp, Homo sapiens
atgcttctatatata

SEQ ID NO: 1134878 - DNA, 15 bp, Homo sapiens
tatgcttctatatat

SEQ ID NO: 1134879 - DNA, 15 bp, Homo sapiens
ttatgcttctatata

SEQ ID NO: 1134880 - DNA, 15 bp, Homo sapiens
gttatgcttctatat

SEQ ID NO: 1134881 - DNA, 15 bp, Homo sapiens
tgttatgcttctata

SEQ ID NO: 1134882 - DNA, 15 bp, Homo sapiens
ttgttatgcttctat

SEQ ID NO: 1134883 - DNA, 15 bp, Homo sapiens
tttgttatgcttcta

SEQ ID NO: 1134884 - DNA, 15 bp, Homo sapiens
ttttgttatgcttct

SEQ ID NO: 1134885 - DNA, 15 bp, Homo sapiens
tttttgttatgcttc

SEQ ID NO: 1134886 - DNA, 15 bp, Homo sapiens
atttttgttatgctt

SEQ ID NO: 1134887 - DNA, 15 bp, Homo sapiens
tatttttgttatgct

SEQ ID NO: 1134888 - DNA, 15 bp, Homo sapiens
ctatttttgttatgc

SEQ ID NO: 1134889 - DNA, 15 bp, Homo sapiens
tctatttttgttatg

SEQ ID NO: 1134890 - DNA, 15 bp, Homo sapiens
ttctatttttgttat

SEQ ID NO: 1134891 - DNA, 15 bp, Homo sapiens
cttctatttttgtta

SEQ ID NO: 1134892 - DNA, 15 bp, Homo sapiens
gcttctatttttgtt

SEQ ID NO: 1134893 - DNA, 15 bp, Homo sapiens
tgcttctatttttgt

SEQ ID NO: 1134894 - DNA, 15 bp, Homo sapiens
gtgcttctatttttg

SEQ ID NO: 1134895 - DNA, 15 bp, Homo sapiens
tatgtgcttctattt

SEQ ID NO: 1134896 - DNA, 15 bp, Homo sapiens
ttatgtgcttctatt

SEQ ID NO: 1134897 - DNA, 15 bp, Homo sapiens
tttatgtgcttctat

SEQ ID NO: 1134898 - DNA, 15 bp, Homo sapiens
ttttatgtgcttcta

SEQ ID NO: 1134899 - DNA, 15 bp, Homo sapiens
cttttatgtgcttct

SEQ ID NO: 1134900 - DNA, 15 bp, Homo sapiens
acttttatgtgcttc

SEQ ID NO: 1134901 - DNA, 15 bp, Homo sapiens
cacttttatgtgctt

SEQ ID NO: 1134902 - DNA, 15 bp, Homo sapiens
tcacttttatgtgct

SEQ ID NO: 1134903 - DNA, 15 bp, Homo sapiens
ttcacttttatgtgc

SEQ ID NO: 1134904 - DNA, 15 bp, Homo sapiens
tttcacttttatgtg

SEQ ID NO: 1134905 - DNA, 15 bp, Homo sapiens
ttttcacttttatgt

SEQ ID NO: 1134906 - DNA, 15 bp, Homo sapiens
cttttcacttttatg

SEQ ID NO: 1134907 - DNA, 15 bp, Homo sapiens
acttttcacttttat

SEQ ID NO: 1134908 - DNA, 15 bp, Homo sapiens
gacttttcactttta

SEQ ID NO: 1134909 - DNA, 15 bp, Homo sapiens
agacttttcactttt

SEQ ID NO: 1134910 - DNA, 15 bp, Homo sapiens
gagacttttcacttt

SEQ ID NO: 1134911 - DNA, 15 bp, Homo sapiens
tgagacttttcactt

SEQ ID NO: 1134912 - DNA, 15 bp, Homo sapiens
atgagacttttcact

SEQ ID NO: 1134913 - DNA, 15 bp, Homo sapiens
tatgagacttttcac

SEQ ID NO: 1134914 - DNA, 15 bp, Homo sapiens
ttatgagacttttca

SEQ ID NO: 1134915 - DNA, 15 bp, Homo sapiens
tttatgagacttttc

SEQ ID NO: 1134916 - DNA, 15 bp, Homo sapiens
gtttatgagactttt

SEQ ID NO: 1134917 - DNA, 15 bp, Homo sapiens
cgtttatgagacttt

SEQ ID NO: 1134918 - DNA, 15 bp, Homo sapiens
gcgtttatgagactt

SEQ ID NO: 1134919 - DNA, 15 bp, Homo sapiens
ggcgtttatgagact

SEQ ID NO: 1134920 - DNA, 15 bp, Homo sapiens
tggcgtttatgagac

SEQ ID NO: 1134921 - DNA, 15 bp, Homo sapiens
atggcgtttatgaga

SEQ ID NO: 1134922 - DNA, 15 bp, Homo sapiens
aatggcgtttatgag

SEQ ID NO: 1134923 - DNA, 15 bp, Homo sapiens
caatggcgtttatga

SEQ ID NO: 1134924 - DNA, 15 bp, Homo sapiens
acaatggcgtttatg

SEQ ID NO: 1134925 - DNA, 15 bp, Homo sapiens
gacaatggcgtttat

SEQ ID NO: 1134926 - DNA, 15 bp, Homo sapiens
tgacaatggcgttta

SEQ ID NO: 1134927 - DNA, 15 bp, Homo sapiens
gtgacaatggcgttt

SEQ ID NO: 1134928 - DNA, 15 bp, Homo sapiens
agtgacaatggcgtt

SEQ ID NO: 1134929 - DNA, 15 bp, Homo sapiens
tagtgacaatggcgt

SEQ ID NO: 1134930 - DNA, 15 bp, Homo sapiens
gtagtgacaatggcg

SEQ ID NO: 1134931 - DNA, 15 bp, Homo sapiens
agtagtgacaatggc

SEQ ID NO: 1134932 - DNA, 15 bp, Homo sapiens
gagtagtgacaatgg

SEQ ID NO: 1134933 - DNA, 15 bp, Homo sapiens
tgagtagtgacaatg

SEQ ID NO: 1134934 - DNA, 15 bp, Homo sapiens
atgagtagtgacaat

SEQ ID NO: 1134935 - DNA, 15 bp, Homo sapiens
catgagtagtgacaa

SEQ ID NO: 1134936 - DNA, 15 bp, Homo sapiens
acatgagtagtgaca

SEQ ID NO: 1134937 - DNA, 15 bp, Homo sapiens
tacatgagtagtgac

SEQ ID NO: 1134938 - DNA, 15 bp, Homo sapiens
ttacatgagtagtga

SEQ ID NO: 1134939 - DNA, 15 bp, Homo sapiens
attacatgagtagtg

SEQ ID NO: 1134940 - DNA, 15 bp, Homo sapiens
aattacatgagtagt

SEQ ID NO: 1134941 - DNA, 15 bp, Homo sapiens
caattacatgagtag

SEQ ID NO: 1134942 - DNA, 15 bp, Homo sapiens
gcaattacatgagta

SEQ ID NO: 1134943 - DNA, 15 bp, Homo sapiens
agcaattacatgagt

SEQ ID NO: 1134944 - DNA, 15 bp, Homo sapiens
cagcaattacatgag

SEQ ID NO: 1134945 - DNA, 15 bp, Homo sapiens
acagcaattacatga

SEQ ID NO: 1134946 - DNA, 15 bp, Homo sapiens
aacagcaattacatg

SEQ ID NO: 1134947 - DNA, 15 bp, Homo sapiens
taacagcaattacat

SEQ ID NO: 1134948 - DNA, 15 bp, Homo sapiens
gtaacagcaattaca

SEQ ID NO: 1134949 - DNA, 15 bp, Homo sapiens
tgtaacagcaattac

SEQ ID NO: 1134950 - DNA, 15 bp, Homo sapiens
ttgtaacagcaatta

SEQ ID NO: 1134951 - DNA, 15 bp, Homo sapiens
tttgtaacagcaatt

SEQ ID NO: 1134952 - DNA, 15 bp, Homo sapiens
atttgtaacagcaat

SEQ ID NO: 1134953 - DNA, 15 bp, Homo sapiens
aatttgtaacagcaa

SEQ ID NO: 1134954 - DNA, 15 bp, Homo sapiens
aaatttgtaacagca

SEQ ID NO: 1134955 - DNA, 15 bp, Homo sapiens
caaatttgtaacagc

SEQ ID NO: 1134956 - DNA, 15 bp, Homo sapiens
acaaatttgtaacag

SEQ ID NO: 1134957 - DNA, 15 bp, Homo sapiens
aacaaatttgtaaca

SEQ ID NO: 1134958 - DNA, 15 bp, Homo sapiens
aaacaaatttgtaac

SEQ ID NO: 1134959 - DNA, 15 bp, Homo sapiens
taaacaaatttgtaa

SEQ ID NO: 1134960 - DNA, 15 bp, Homo sapiens
ttaaacaaatttgta

SEQ ID NO: 1134961 - DNA, 15 bp, Homo sapiens
tttaaacaaatttgt

SEQ ID NO: 1134962 - DNA, 15 bp, Homo sapiens
atttaaacaaatttg

SEQ ID NO: 1134963 - DNA, 15 bp, Homo sapiens
catttaaacaaattt

SEQ ID NO: 1134964 - DNA, 15 bp, Homo sapiens
acatttaaacaaatt

SEQ ID NO: 1134965 - DNA, 15 bp, Homo sapiens
aacatttaaacaaat

SEQ ID NO: 1134966 - DNA, 15 bp, Homo sapiens
caacatttaaacaaa

SEQ ID NO: 1134967 - DNA, 15 bp, Homo sapiens
tcaacatttaaacaa

SEQ ID NO: 1134968 - DNA, 15 bp, Homo sapiens
ttcaacatttaaaca

SEQ ID NO: 1134969 - DNA, 15 bp, Homo sapiens
attcaacatttaaac

SEQ ID NO: 1134970 - DNA, 15 bp, Homo sapiens
tattcaacatttaaa

SEQ ID NO: 1134971 - DNA, 15 bp, Homo sapiens
ttattcaacatttaa

SEQ ID NO: 1134972 - DNA, 15 bp, Homo sapiens
tttattcaacattta

SEQ ID NO: 1134973 - DNA, 15 bp, Homo sapiens
ttttattcaacattt

SEQ ID NO: 1134974 - DNA, 15 bp, Homo sapiens
tttttattcaacatt

SEQ ID NO: 1134975 - DNA, 15 bp, Homo sapiens
atttttattcaacat

SEQ ID NO: 1134976 - DNA, 15 bp, Homo sapiens
catttttattcaaca

SEQ ID NO: 1134977 - DNA, 15 bp, Homo sapiens
ccatttttattcaac

SEQ ID NO: 1134978 - DNA, 15 bp, Homo sapiens
accatttttattcaa

SEQ ID NO: 1134979 - DNA, 15 bp, Homo sapiens
caccatttttattca

SEQ ID NO: 1134980 - DNA, 15 bp, Homo sapiens
acaccatttttattc

SEQ ID NO: 1134981 - DNA, 15 bp, Homo sapiens
gacaccatttttatt

SEQ ID NO: 1134982 - DNA, 15 bp, Homo sapiens
tgacaccatttttat

SEQ ID NO: 1134983 - DNA, 15 bp, Homo sapiens
atgacaccattttta

SEQ ID NO: 1134984 - DNA, 15 bp, Homo sapiens
tatgacaccattttt

SEQ ID NO: 1134985 - DNA, 15 bp, Homo sapiens
ctatgacaccatttt

SEQ ID NO: 1134986 - DNA, 15 bp, Homo sapiens
cctatgacaccattt

SEQ ID NO: 1134987 - DNA, 15 bp, Homo sapiens
gcctatgacaccatt

SEQ ID NO: 1134988 - DNA, 15 bp, Homo sapiens
tgcctatgacaccat

SEQ ID NO: 1134989 - DNA, 15 bp, Homo sapiens
ttgcctatgacacca

SEQ ID NO: 1134990 - DNA, 15 bp, Homo sapiens
gttgcctatgacacc

SEQ ID NO: 1134991 - DNA, 15 bp, Homo sapiens
tgttgcctatgacac

SEQ ID NO: 1134992 - DNA, 15 bp, Homo sapiens
gtgttgcctatgaca

SEQ ID NO: 1134993 - DNA, 15 bp, Homo sapiens
tgtgttgcctatgac

SEQ ID NO: 1134994 - DNA, 15 bp, Homo sapiens
ctgtgttgcctatga

SEQ ID NO: 1134995 - DNA, 15 bp, Homo sapiens
actgtgttgcctatg

SEQ ID NO: 1134996 - DNA, 15 bp, Homo sapiens
cactgtgttgcctat

SEQ ID NO: 1134997 - DNA, 15 bp, Homo sapiens
acactgtgttgccta

SEQ ID NO: 1134998 - DNA, 15 bp, Homo sapiens
aacactgtgttgcct

SEQ ID NO: 1134999 - DNA, 15 bp, Homo sapiens
gaacactgtgttgcc

SEQ ID NO: 1135000 - DNA, 15 bp, Homo sapiens
ggaacactgtgttgc

SEQ ID NO: 1135001 - DNA, 15 bp, Homo sapiens
tggaacactgtgttg

SEQ ID NO: 1135002 - DNA, 15 bp, Homo sapiens
gtggaacactgtgtt

SEQ ID NO: 1135003 - DNA, 15 bp, Homo sapiens
agtggaacactgtgt

SEQ ID NO: 1135004 - DNA, 15 bp, Homo sapiens
tagtggaacactgtg

SEQ ID NO: 1135005 - DNA, 15 bp, Homo sapiens
gtagtggaacactgt

SEQ ID NO: 1135006 - DNA, 15 bp, Homo sapiens
agtagtggaacactg

SEQ ID NO: 1135007 - DNA, 15 bp, Homo sapiens
aagtagtggaacact

SEQ ID NO: 1135008 - DNA, 15 bp, Homo sapiens
caagtagtggaacac

SEQ ID NO: 1135009 - DNA, 15 bp, Homo sapiens
ccaagtagtggaaca

SEQ ID NO: 1135010 - DNA, 15 bp, Homo sapiens
accaagtagtggaac

SEQ ID NO: 1135011 - DNA, 15 bp, Homo sapiens
caccaagtagtggaa

SEQ ID NO: 1135012 - DNA, 15 bp, Homo sapiens
acaccaagtagtgga

SEQ ID NO: 1135013 - DNA, 15 bp, Homo sapiens
aacaccaagtagtgg

SEQ ID NO: 1135014 - DNA, 15 bp, Homo sapiens
aaacaccaagtagtg

SEQ ID NO: 1135015 - DNA, 15 bp, Homo sapiens
aaaacaccaagtagt

SEQ ID NO: 1135016 - DNA, 15 bp, Homo sapiens
aaaaacaccaagtag

SEQ ID NO: 1135017 - DNA, 15 bp, Homo sapiens
taaaaacaccaagta

SEQ ID NO: 1135018 - DNA, 15 bp, Homo sapiens
ttaaaaacaccaagt

SEQ ID NO: 1135019 - DNA, 15 bp, Homo sapiens
attaaaaacaccaag

SEQ ID NO: 1135020 - DNA, 15 bp, Homo sapiens
tattaaaaacaccaa

SEQ ID NO: 1135021 - DNA, 15 bp, Homo sapiens
ctattaaaaacacca

SEQ ID NO: 1135022 - DNA, 15 bp, Homo sapiens
gctattaaaaacacc

SEQ ID NO: 1135023 - DNA, 15 bp, Homo sapiens
tgctattaaaaacac

SEQ ID NO: 1135024 - DNA, 15 bp, Homo sapiens
atgctattaaaaaca

SEQ ID NO: 1135025 - DNA, 15 bp, Homo sapiens
aatgctattaaaaac

SEQ ID NO: 1135026 - DNA, 15 bp, Homo sapiens
taatgctattaaaaa

SEQ ID NO: 1135027 - DNA, 15 bp, Homo sapiens
ataatgctattaaaa

SEQ ID NO: 1135028 - DNA, 15 bp, Homo sapiens
aataatgctattaaa

SEQ ID NO: 1135029 - DNA, 15 bp, Homo sapiens
gaataatgctattaa

SEQ ID NO: 1135030 - DNA, 15 bp, Homo sapiens
agaataatgctatta

SEQ ID NO: 1135031 - DNA, 15 bp, Homo sapiens
cagaataatgctatt

SEQ ID NO: 1135032 - DNA, 15 bp, Homo sapiens
acagaataatgctat

SEQ ID NO: 1135033 - DNA, 15 bp, Homo sapiens
gacagaataatgcta

SEQ ID NO: 1135034 - DNA, 15 bp, Homo sapiens
agacagaataatgct

SEQ ID NO: 1135035 - DNA, 15 bp, Homo sapiens
gagacagaataatgc

SEQ ID NO: 1135036 - DNA, 15 bp, Homo sapiens
tgagacagaataatg

SEQ ID NO: 1135037 - DNA, 15 bp, Homo sapiens
ctgagacagaataat

SEQ ID NO: 1135038 - DNA, 15 bp, Homo sapiens
actgagacagaataa

SEQ ID NO: 1135039 - DNA, 15 bp, Homo sapiens
cactgagacagaata

SEQ ID NO: 1135040 - DNA, 15 bp, Homo sapiens
acactgagacagaat

SEQ ID NO: 1135041 - DNA, 15 bp, Homo sapiens
cacactgagacagaa

SEQ ID NO: 1135042 - DNA, 15 bp, Homo sapiens
gcacactgagacaga

SEQ ID NO: 1135043 - DNA, 15 bp, Homo sapiens
agcacactgagacag

SEQ ID NO: 1135044 - DNA, 15 bp, Homo sapiens
aagcacactgagaca

SEQ ID NO: 1135045 - DNA, 15 bp, Homo sapiens
aaagcacactgagac

SEQ ID NO: 1135046 - DNA, 15 bp, Homo sapiens
caaagcacactgaga

SEQ ID NO: 1135047 - DNA, 15 bp, Homo sapiens
ccaaagcacactgag

SEQ ID NO: 1135048 - DNA, 15 bp, Homo sapiens
tccaaagcacactga

SEQ ID NO: 1135049 - DNA, 15 bp, Homo sapiens
atccaaagcacactg

SEQ ID NO: 1135050 - DNA, 15 bp, Homo sapiens
aatccaaagcacact

SEQ ID NO: 1135051 - DNA, 15 bp, Homo sapiens
taatccaaagcacac

SEQ ID NO: 1135052 - DNA, 15 bp, Homo sapiens
ataatccaaagcaca

SEQ ID NO: 1135053 - DNA, 15 bp, Homo sapiens
gataatccaaagcac

SEQ ID NO: 1135054 - DNA, 15 bp, Homo sapiens
tgataatccaaagca

SEQ ID NO: 1135055 - DNA, 15 bp, Homo sapiens
ctgataatccaaagc

SEQ ID NO: 1135056 - DNA, 15 bp, Homo sapiens
cctgataatccaaag

SEQ ID NO: 1135057 - DNA, 15 bp, Homo sapiens
acctgataatccaaa

SEQ ID NO: 1135058 - DNA, 15 bp, Homo sapiens
cacctgataatccaa

SEQ ID NO: 1135059 - DNA, 15 bp, Homo sapiens
gcacctgataatcca

SEQ ID NO: 1135060 - DNA, 15 bp, Homo sapiens
agcacctgataatcc

SEQ ID NO: 1135061 - DNA, 15 bp, Homo sapiens
aagcacctgataatc

SEQ ID NO: 1135062 - DNA, 15 bp, Homo sapiens
aaagcacctgataat

SEQ ID NO: 1135063 - DNA, 15 bp, Homo sapiens
aaaagcacctgataa

SEQ ID NO: 1135064 - DNA, 15 bp, Homo sapiens
aaaaagcacctgata

SEQ ID NO: 1135065 - DNA, 15 bp, Homo sapiens
taaaaagcacctgat

SEQ ID NO: 1135066 - DNA, 15 bp, Homo sapiens
ttaaaaagcacctga

SEQ ID NO: 1135067 - DNA, 15 bp, Homo sapiens
attaaaaagcacctg

SEQ ID NO: 1135068 - DNA, 15 bp, Homo sapiens
tattaaaaagcacct

SEQ ID NO: 1135069 - DNA, 15 bp, Homo sapiens
ctattaaaaagcacc

SEQ ID NO: 1135070 - DNA, 15 bp, Homo sapiens
actattaaaaagcac

SEQ ID NO: 1135071 - DNA, 15 bp, Homo sapiens
aactattaaaaagca

SEQ ID NO: 1135072 - DNA, 15 bp, Homo sapiens
caactattaaaaagc

SEQ ID NO: 1135073 - DNA, 15 bp, Homo sapiens
gcaactattaaaaag

SEQ ID NO: 1135074 - DNA, 15 bp, Homo sapiens
tgcaactattaaaaa

SEQ ID NO: 1135075 - DNA, 15 bp, Homo sapiens
atgcaactattaaaa

SEQ ID NO: 1135076 - DNA, 15 bp, Homo sapiens
catgcaactattaaa

SEQ ID NO: 1135077 - DNA, 15 bp, Homo sapiens
ccatgcaactattaa

SEQ ID NO: 1135078 - DNA, 15 bp, Homo sapiens
accatgcaactatta

SEQ ID NO: 1135079 - DNA, 15 bp, Homo sapiens
taccatgcaactatt

SEQ ID NO: 1135080 - DNA, 15 bp, Homo sapiens
ataccatgcaactat

SEQ ID NO: 1135081 - DNA, 15 bp, Homo sapiens
aataccatgcaacta

SEQ ID NO: 1135082 - DNA, 15 bp, Homo sapiens
taataccatgcaact

SEQ ID NO: 1135083 - DNA, 15 bp, Homo sapiens
gtaataccatgcaac

SEQ ID NO: 1135084 - DNA, 15 bp, Homo sapiens
tgtaataccatgcaa

SEQ ID NO: 1135085 - DNA, 15 bp, Homo sapiens
atgtaataccatgca

SEQ ID NO: 1135086 - DNA, 15 bp, Homo sapiens
aatgtaataccatgc

SEQ ID NO: 1135087 - DNA, 15 bp, Homo sapiens
caatgtaataccatg

SEQ ID NO: 1135088 - DNA, 15 bp, Homo sapiens
acaatgtaataccat

SEQ ID NO: 1135089 - DNA, 15 bp, Homo sapiens
cacaatgtaatacca

SEQ ID NO: 1135090 - DNA, 15 bp, Homo sapiens
acacaatgtaatacc

SEQ ID NO: 1135091 - DNA, 15 bp, Homo sapiens
tacacaatgtaatac

SEQ ID NO: 1135092 - DNA, 15 bp, Homo sapiens
ctacacaatgtaata

SEQ ID NO: 1135093 - DNA, 15 bp, Homo sapiens
tctacacaatgtaat

SEQ ID NO: 1135094 - DNA, 15 bp, Homo sapiens
atctacacaatgtaa

SEQ ID NO: 1135095 - DNA, 15 bp, Homo sapiens
catctacacaatgta

SEQ ID NO: 1135096 - DNA, 15 bp, Homo sapiens
tcatctacacaatgt

SEQ ID NO: 1135097 - DNA, 15 bp, Homo sapiens
ttcatctacacaatg

SEQ ID NO: 1135098 - DNA, 15 bp, Homo sapiens
gttcatctacacaat

SEQ ID NO: 1135099 - DNA, 15 bp, Homo sapiens
agttcatctacacaa

SEQ ID NO: 1135100 - DNA, 15 bp, Homo sapiens
aagttcatctacaca

SEQ ID NO: 1135101 - DNA, 15 bp, Homo sapiens
caagttcatctacac

SEQ ID NO: 1135102 - DNA, 15 bp, Homo sapiens
tcaagttcatctaca

SEQ ID NO: 1135103 - DNA, 15 bp, Homo sapiens
atcaagttcatctac

SEQ ID NO: 1135104 - DNA, 15 bp, Homo sapiens
aatcaagttcatcta

SEQ ID NO: 1135105 - DNA, 15 bp, Homo sapiens
taatcaagttcatct

SEQ ID NO: 1135106 - DNA, 15 bp, Homo sapiens
ttaatcaagttcatc

SEQ ID NO: 1135107 - DNA, 15 bp, Homo sapiens
attaatcaagttcat

SEQ ID NO: 1135108 - DNA, 15 bp, Homo sapiens
aattaatcaagttca

SEQ ID NO: 1135109 - DNA, 15 bp, Homo sapiens
aaattaatcaagttc

SEQ ID NO: 1135110 - DNA, 15 bp, Homo sapiens
taaattaatcaagtt

SEQ ID NO: 1135111 - DNA, 15 bp, Homo sapiens
ttaaattaatcaagt

SEQ ID NO: 1135112 - DNA, 15 bp, Homo sapiens
tttaaattaatcaag

SEQ ID NO: 1135113 - DNA, 15 bp, Homo sapiens
atttaaattaatcaa

SEQ ID NO: 1135114 - DNA, 15 bp, Homo sapiens
catttaaattaatca

SEQ ID NO: 1135115 - DNA, 15 bp, Homo sapiens
ccatttaaattaatc

SEQ ID NO: 1135116 - DNA, 15 bp, Homo sapiens
accatttaaattaat

SEQ ID NO: 1135117 - DNA, 15 bp, Homo sapiens
aaccatttaaattaa

SEQ ID NO: 1135118 - DNA, 15 bp, Homo sapiens
gaaccatttaaatta

SEQ ID NO: 1135119 - DNA, 15 bp, Homo sapiens
ggaaccatttaaatt

SEQ ID NO: 1135120 - DNA, 15 bp, Homo sapiens
gggaaccatttaaat

SEQ ID NO: 1135121 - DNA, 15 bp, Homo sapiens
agggaaccatttaaa

SEQ ID NO: 1135122 - DNA, 15 bp, Homo sapiens
cagggaaccatttaa

SEQ ID NO: 1135123 - DNA, 15 bp, Homo sapiens
acagggaaccattta

SEQ ID NO: 1135124 - DNA, 15 bp, Homo sapiens
aacagggaaccattt

SEQ ID NO: 1135125 - DNA, 15 bp, Homo sapiens
taacagggaaccatt

SEQ ID NO: 1135126 - DNA, 15 bp, Homo sapiens
ttaacagggaaccat

SEQ ID NO: 1135127 - DNA, 15 bp, Homo sapiens
attaacagggaacca

SEQ ID NO: 1135128 - DNA, 15 bp, Homo sapiens
cattaacagggaacc

SEQ ID NO: 1135129 - DNA, 15 bp, Homo sapiens
ccattaacagggaac

SEQ ID NO: 1135130 - DNA, 15 bp, Homo sapiens
tccattaacagggaa

SEQ ID NO: 1135131 - DNA, 15 bp, Homo sapiens
gtccattaacaggga

SEQ ID NO: 1135132 - DNA, 15 bp, Homo sapiens
tgtccattaacaggg

SEQ ID NO: 1135133 - DNA, 15 bp, Homo sapiens
atgtccattaacagg

SEQ ID NO: 1135134 - DNA, 15 bp, Homo sapiens
catgtccattaacag

SEQ ID NO: 1135135 - DNA, 15 bp, Homo sapiens
acatgtccattaaca

SEQ ID NO: 1135136 - DNA, 15 bp, Homo sapiens
aacatgtccattaac

SEQ ID NO: 1135137 - DNA, 15 bp, Homo sapiens
caacatgtccattaa

SEQ ID NO: 1135138 - DNA, 15 bp, Homo sapiens
ccaacatgtccatta

SEQ ID NO: 1135139 - DNA, 15 bp, Homo sapiens
accaacatgtccatt

SEQ ID NO: 1135140 - DNA, 15 bp, Homo sapiens
aaccaacatgtccat

SEQ ID NO: 1135141 - DNA, 15 bp, Homo sapiens
aaaccaacatgtcca

SEQ ID NO: 1135142 - DNA, 15 bp, Homo sapiens
caaaccaacatgtcc

SEQ ID NO: 1135143 - DNA, 15 bp, Homo sapiens
acaaaccaacatgtc

SEQ ID NO: 1135144 - DNA, 15 bp, Homo sapiens
aacaaaccaacatgt

SEQ ID NO: 1135145 - DNA, 15 bp, Homo sapiens
aaacaaaccaacatg

SEQ ID NO: 1135146 - DNA, 15 bp, Homo sapiens
aaaacaaaccaacat

SEQ ID NO: 1135147 - DNA, 15 bp, Homo sapiens
aaaaacaaaccaaca

SEQ ID NO: 1135148 - DNA, 15 bp, Homo sapiens
caaaaacaaaccaac

SEQ ID NO: 1135149 - DNA, 15 bp, Homo sapiens
acaaaaacaaaccaa

SEQ ID NO: 1135150 - DNA, 15 bp, Homo sapiens
cacaaaaacaaacca

SEQ ID NO: 1135151 - DNA, 15 bp, Homo sapiens
tcacaaaaacaaacc

SEQ ID NO: 1135152 - DNA, 15 bp, Homo sapiens
ttcacaaaaacaaac

SEQ ID NO: 1135153 - DNA, 15 bp, Homo sapiens
gttcacaaaaacaaa

SEQ ID NO: 1135154 - DNA, 15 bp, Homo sapiens
tgttcacaaaaacaa

SEQ ID NO: 1135155 - DNA, 15 bp, Homo sapiens
ttgttcacaaaaaca

SEQ ID NO: 1135156 - DNA, 15 bp, Homo sapiens
gttgttcacaaaaac

SEQ ID NO: 1135157 - DNA, 15 bp, Homo sapiens
agttgttcacaaaaa

SEQ ID NO: 1135158 - DNA, 15 bp, Homo sapiens
cagttgttcacaaaa

SEQ ID NO: 1135159 - DNA, 15 bp, Homo sapiens
tcagttgttcacaaa

SEQ ID NO: 1135160 - DNA, 15 bp, Homo sapiens
atcagttgttcacaa

SEQ ID NO: 1135161 - DNA, 15 bp, Homo sapiens
tatcagttgttcaca

SEQ ID NO: 1135162 - DNA, 15 bp, Homo sapiens
gtatcagttgttcac

SEQ ID NO: 1135163 - DNA, 15 bp, Homo sapiens
tgtatcagttgttca

SEQ ID NO: 1135164 - DNA, 15 bp, Homo sapiens
ctgtatcagttgttc

SEQ ID NO: 1135165 - DNA, 15 bp, Homo sapiens
actgtatcagttgtt

SEQ ID NO: 1135166 - DNA, 15 bp, Homo sapiens
cactgtatcagttgt

SEQ ID NO: 1135167 - DNA, 15 bp, Homo sapiens
tcactgtatcagttg

SEQ ID NO: 1135168 - DNA, 15 bp, Homo sapiens
ttcactgtatcagtt

SEQ ID NO: 1135169 - DNA, 15 bp, Homo sapiens
gttcactgtatcagt

SEQ ID NO: 1135170 - DNA, 15 bp, Homo sapiens
tgttcactgtatcag

SEQ ID NO: 1135171 - DNA, 15 bp, Homo sapiens
atgttcactgtatca

SEQ ID NO: 1135172 - DNA, 15 bp, Homo sapiens
aatgttcactgtatc

SEQ ID NO: 1135173 - DNA, 15 bp, Homo sapiens
aaatgttcactgtat

SEQ ID NO: 1135174 - DNA, 15 bp, Homo sapiens
taaatgttcactgta

SEQ ID NO: 1135175 - DNA, 15 bp, Homo sapiens
ataaatgttcactgt

SEQ ID NO: 1135176 - DNA, 15 bp, Homo sapiens
aataaatgttcactg

SEQ ID NO: 1135177 - DNA, 15 bp, Homo sapiens
aaataaatgttcact

SEQ ID NO: 1135178 - DNA, 15 bp, Homo sapiens
aaaataaatgttcac

SEQ ID NO: 1135179 - DNA, 15 bp, Homo sapiens
aaaaataaatgttca

SEQ ID NO: 1135180 - DNA, 15 bp, Homo sapiens
aaaaaataaatgttc

SEQ ID NO: 1135181 - DNA, 15 bp, Homo sapiens
taaaaaataaatgtt

SEQ ID NO: 1135182 - DNA, 15 bp, Homo sapiens
ttaaaaaataaatgt

SEQ ID NO: 1135183 - DNA, 15 bp, Homo sapiens
tttaaaaaataaatg

SEQ ID NO: 1135184 - DNA, 15 bp, Homo sapiens
tttatttaaaaaata

SEQ ID NO: 1135185 - DNA, 15 bp, Homo sapiens
tttttttatttaaaa

SEQ ID NO: 1135186 - DNA, 15 bp, Homo sapiens
ttttttttatttaaa

SEQ ID NO: 1135187 - DNA, 15 bp, Homo sapiens
cttttttttatttaa

SEQ ID NO: 1135188 - DNA, 15 bp, Homo sapiens
tcttttttttattta

SEQ ID NO: 1135189 - DNA, 15 bp, Homo sapiens
ctcttttttttattt

SEQ ID NO: 1135190 - DNA, 15 bp, Homo sapiens
tctcttttttttatt

SEQ ID NO: 1135191 - DNA, 15 bp, Homo sapiens
ctctcttttttttat

SEQ ID NO: 1135192 - DNA, 15 bp, Homo sapiens
tctctctttttttta

SEQ ID NO: 1135193 - DNA, 15 bp, Homo sapiens
tgtctctcttttttt

SEQ ID NO: 1135194 - DNA, 15 bp, Homo sapiens
ctgtctctctttttt

SEQ ID NO: 1135195 - DNA, 15 bp, Homo sapiens
cctgtctctcttttt

SEQ ID NO: 1135196 - DNA, 15 bp, Homo sapiens
ccctgtctctctttt

SEQ ID NO: 1135197 - DNA, 15 bp, Homo sapiens
accctgtctctcttt

SEQ ID NO: 1135198 - DNA, 15 bp, Homo sapiens
gaccctgtctctctt

SEQ ID NO: 1135199 - DNA, 15 bp, Homo sapiens
agaccctgtctctct

SEQ ID NO: 1135200 - DNA, 15 bp, Homo sapiens
aagaccctgtctctc

SEQ ID NO: 1135201 - DNA, 15 bp, Homo sapiens
aaacacagcaagacc

SEQ ID NO: 1135202 - DNA, 15 bp, Homo sapiens
gaaacacagcaagac

SEQ ID NO: 1135203 - DNA, 15 bp, Homo sapiens
agaaacacagcaaga

SEQ ID NO: 1135204 - DNA, 15 bp, Homo sapiens
gagaaacacagcaag

SEQ ID NO: 1135205 - DNA, 15 bp, Homo sapiens
cgagaaacacagcaa

SEQ ID NO: 1135206 - DNA, 15 bp, Homo sapiens
ccgagaaacacagca

SEQ ID NO: 1135207 - DNA, 15 bp, Homo sapiens
cccgagaaacacagc

SEQ ID NO: 1135208 - DNA, 15 bp, Homo sapiens
gcccgagaaacacag

SEQ ID NO: 1135209 - DNA, 15 bp, Homo sapiens
agcccgagaaacaca

SEQ ID NO: 1135210 - DNA, 15 bp, Homo sapiens
cagcccgagaaacac

SEQ ID NO: 1135211 - DNA, 15 bp, Homo sapiens
ccagcccgagaaaca

SEQ ID NO: 1135212 - DNA, 15 bp, Homo sapiens
gccagcccgagaaac

SEQ ID NO: 1135213 - DNA, 15 bp, Homo sapiens
ggccagcccgagaaa

SEQ ID NO: 1135214 - DNA, 15 bp, Homo sapiens
aggccagcccgagaa

SEQ ID NO: 1135215 - DNA, 15 bp, Homo sapiens
aaggccagcccgaga

SEQ ID NO: 1135216 - DNA, 15 bp, Homo sapiens
caaggccagcccgag

SEQ ID NO: 1135217 - DNA, 15 bp, Homo sapiens
tcaaggccagcccga

SEQ ID NO: 1135218 - DNA, 15 bp, Homo sapiens
ttcaaggccagcccg

SEQ ID NO: 1135219 - DNA, 15 bp, Homo sapiens
gttcaaggccagccc

SEQ ID NO: 1135220 - DNA, 15 bp, Homo sapiens
agttcaaggccagcc

SEQ ID NO: 1135221 - DNA, 15 bp, Homo sapiens
gagttcaaggccagc

SEQ ID NO: 1135222 - DNA, 15 bp, Homo sapiens
ggagttcaaggccag

SEQ ID NO: 1135223 - DNA, 15 bp, Homo sapiens
aggagttcaaggcca

SEQ ID NO: 1135224 - DNA, 15 bp, Homo sapiens
caggagttcaaggcc

SEQ ID NO: 1135225 - DNA, 15 bp, Homo sapiens
ccccaggagttcaag

SEQ ID NO: 1135226 - DNA, 15 bp, Homo sapiens
accccaggagttcaa

SEQ ID NO: 1135227 - DNA, 15 bp, Homo sapiens
gaccccaggagttca

SEQ ID NO: 1135228 - DNA, 15 bp, Homo sapiens
tgaccccaggagttc

SEQ ID NO: 1135229 - DNA, 15 bp, Homo sapiens
ttgaccccaggagtt

SEQ ID NO: 1135230 - DNA, 15 bp, Homo sapiens
cttgaccccaggagt

SEQ ID NO: 1135231 - DNA, 15 bp, Homo sapiens
gcttgaccccaggag

SEQ ID NO: 1135232 - DNA, 15 bp, Homo sapiens
cgcttgaccccagga

SEQ ID NO: 1135233 - DNA, 15 bp, Homo sapiens
tcgcttgaccccagg

SEQ ID NO: 1135234 - DNA, 15 bp, Homo sapiens
atcgcttgaccccag

SEQ ID NO: 1135235 - DNA, 15 bp, Homo sapiens
gatcgcttgacccca

SEQ ID NO: 1135236 - DNA, 15 bp, Homo sapiens
cgatcgcttgacccc

SEQ ID NO: 1135237 - DNA, 15 bp, Homo sapiens
acgatcgcttgaccc

SEQ ID NO: 1135238 - DNA, 15 bp, Homo sapiens
gacgatcgcttgacc

SEQ ID NO: 1135239 - DNA, 15 bp, Homo sapiens
agacgatcgcttgac

SEQ ID NO: 1135240 - DNA, 15 bp, Homo sapiens
aagacgatcgcttga

SEQ ID NO: 1135241 - DNA, 15 bp, Homo sapiens
caagacgatcgcttg

SEQ ID NO: 1135242 - DNA, 15 bp, Homo sapiens
gcaagacgatcgctt

SEQ ID NO: 1135243 - DNA, 15 bp, Homo sapiens
ggcaagacgatcgct

SEQ ID NO: 1135244 - DNA, 15 bp, Homo sapiens
aggcaagacgatcgc

SEQ ID NO: 1135245 - DNA, 15 bp, Homo sapiens
gaggcaagacgatcg

SEQ ID NO: 1135246 - DNA, 15 bp, Homo sapiens
agaggcaagacgatc

SEQ ID NO: 1135247 - DNA, 15 bp, Homo sapiens
cagaggcaagacgat

SEQ ID NO: 1135248 - DNA, 15 bp, Homo sapiens
gcagaggcaagacga

SEQ ID NO: 1135249 - DNA, 15 bp, Homo sapiens
ggcagaggcaagacg

SEQ ID NO: 1135250 - DNA, 15 bp, Homo sapiens
aggcagaggcaagac

SEQ ID NO: 1135251 - DNA, 15 bp, Homo sapiens
ggaggcagaggcaag

SEQ ID NO: 1135252 - DNA, 15 bp, Homo sapiens
gggaggcagaggcaa

SEQ ID NO: 1135253 - DNA, 15 bp, Homo sapiens
agggaggcagaggca

SEQ ID NO: 1135254 - DNA, 15 bp, Homo sapiens
cagggaggcagaggc

SEQ ID NO: 1135255 - DNA, 15 bp, Homo sapiens
cccagggaggcagag

SEQ ID NO: 1135256 - DNA, 15 bp, Homo sapiens
tcccagggaggcaga

SEQ ID NO: 1135257 - DNA, 15 bp, Homo sapiens
atcccagggaggcag

SEQ ID NO: 1135258 - DNA, 15 bp, Homo sapiens
aatcccagggaggca

SEQ ID NO: 1135259 - DNA, 15 bp, Homo sapiens
taatcccagggaggc

SEQ ID NO: 1135260 - DNA, 15 bp, Homo sapiens
gtaatcccagggagg

SEQ ID NO: 1135261 - DNA, 15 bp, Homo sapiens
tgtaatcccagggag

SEQ ID NO: 1135262 - DNA, 15 bp, Homo sapiens
ctgtaatcccaggga

SEQ ID NO: 1135263 - DNA, 15 bp, Homo sapiens
cctgtaatcccaggg

SEQ ID NO: 1135264 - DNA, 15 bp, Homo sapiens
ttcatgcctgtaatc

SEQ ID NO: 1135265 - DNA, 15 bp, Homo sapiens
cttcatgcctgtaat

SEQ ID NO: 1135266 - DNA, 15 bp, Homo sapiens
ggtggcttcatgcct

SEQ ID NO: 1135267 - DNA, 15 bp, Homo sapiens
cggtggcttcatgcc

SEQ ID NO: 1135268 - DNA, 15 bp, Homo sapiens
gcggtggcttcatgc

SEQ ID NO: 1135269 - DNA, 15 bp, Homo sapiens
tgcggtggcttcatg

SEQ ID NO: 1135270 - DNA, 15 bp, Homo sapiens
gtgcggtggcttcat

SEQ ID NO: 1135271 - DNA, 15 bp, Homo sapiens
ggtgcggtggcttca

SEQ ID NO: 1135272 - DNA, 15 bp, Homo sapiens
gggtgcggtggcttc

SEQ ID NO: 1135273 - DNA, 15 bp, Homo sapiens
cgggtgcggtggctt

SEQ ID NO: 1135274 - DNA, 15 bp, Homo sapiens
tgggccgggtgcggt

SEQ ID NO: 1135275 - DNA, 15 bp, Homo sapiens
ctgggccgggtgcgg

SEQ ID NO: 1135276 - DNA, 15 bp, Homo sapiens
actgggccgggtgcg

SEQ ID NO: 1135277 - DNA, 15 bp, Homo sapiens
cactgggccgggtgc

SEQ ID NO: 1135278 - DNA, 15 bp, Homo sapiens
tcactgggccgggtg

SEQ ID NO: 1135279 - DNA, 15 bp, Homo sapiens
ttcactgggccgggt

SEQ ID NO: 1135280 - DNA, 15 bp, Homo sapiens
gttcactgggccggg

SEQ ID NO: 1135281 - DNA, 15 bp, Homo sapiens
tgttcactgggccgg

SEQ ID NO: 1135282 - DNA, 15 bp, Homo sapiens
gtgttcactgggccg

SEQ ID NO: 1135283 - DNA, 15 bp, Homo sapiens
agtgttcactgggcc

SEQ ID NO: 1135284 - DNA, 15 bp, Homo sapiens
gagtgttcactgggc

SEQ ID NO: 1135285 - DNA, 15 bp, Homo sapiens
agagtgttcactggg

SEQ ID NO: 1135286 - DNA, 15 bp, Homo sapiens
aagagtgttcactgg

SEQ ID NO: 1135287 - DNA, 15 bp, Homo sapiens
caagagtgttcactg

SEQ ID NO: 1135288 - DNA, 15 bp, Homo sapiens
tcaagagtgttcact

SEQ ID NO: 1135289 - DNA, 15 bp, Homo sapiens
ttcaagagtgttcac

SEQ ID NO: 1135290 - DNA, 15 bp, Homo sapiens
attcaagagtgttca

SEQ ID NO: 1135291 - DNA, 15 bp, Homo sapiens
cattcaagagtgttc

SEQ ID NO: 1135292 - DNA, 15 bp, Homo sapiens
acattcaagagtgtt

SEQ ID NO: 1135293 - DNA, 15 bp, Homo sapiens
tacattcaagagtgt

SEQ ID NO: 1135294 - DNA, 15 bp, Homo sapiens
atacattcaagagtg

SEQ ID NO: 1135295 - DNA, 15 bp, Homo sapiens
gatacattcaagagt

SEQ ID NO: 1135296 - DNA, 15 bp, Homo sapiens
agatacattcaagag

SEQ ID NO: 1135297 - DNA, 15 bp, Homo sapiens
aagatacattcaaga

SEQ ID NO: 1135298 - DNA, 15 bp, Homo sapiens
aaagatacattcaag

SEQ ID NO: 1135299 - DNA, 15 bp, Homo sapiens
caaagatacattcaa

SEQ ID NO: 1135300 - DNA, 15 bp, Homo sapiens
acaaagatacattca

SEQ ID NO: 1135301 - DNA, 15 bp, Homo sapiens
tacaaagatacattc

SEQ ID NO: 1135302 - DNA, 15 bp, Homo sapiens
atacaaagatacatt

SEQ ID NO: 1135303 - DNA, 15 bp, Homo sapiens
tatacaaagatacat

SEQ ID NO: 1135304 - DNA, 15 bp, Homo sapiens
gtatacaaagataca

SEQ ID NO: 1135305 - DNA, 15 bp, Homo sapiens
agtatacaaagatac

SEQ ID NO: 1135306 - DNA, 15 bp, Homo sapiens
aagtatacaaagata

SEQ ID NO: 1135307 - DNA, 15 bp, Homo sapiens
caagtatacaaagat

SEQ ID NO: 1135308 - DNA, 15 bp, Homo sapiens
acaagtatacaaaga

SEQ ID NO: 1135309 - DNA, 15 bp, Homo sapiens
gacaagtatacaaag

SEQ ID NO: 1135310 - DNA, 15 bp, Homo sapiens
tgacaagtatacaaa

SEQ ID NO: 1135311 - DNA, 15 bp, Homo sapiens
ctgacaagtatacaa

SEQ ID NO: 1135312 - DNA, 15 bp, Homo sapiens
actgacaagtataca

SEQ ID NO: 1135313 - DNA, 15 bp, Homo sapiens
cactgacaagtatac

SEQ ID NO: 1135314 - DNA, 15 bp, Homo sapiens
acactgacaagtata

SEQ ID NO: 1135315 - DNA, 15 bp, Homo sapiens
aacactgacaagtat

SEQ ID NO: 1135316 - DNA, 15 bp, Homo sapiens
aaacactgacaagta

SEQ ID NO: 1135317 - DNA, 15 bp, Homo sapiens
aaaacactgacaagt

SEQ ID NO: 1135318 - DNA, 15 bp, Homo sapiens
aaaaacactgacaag

SEQ ID NO: 1135319 - DNA, 15 bp, Homo sapiens
caaaaacactgacaa

SEQ ID NO: 1135320 - DNA, 15 bp, Homo sapiens
acaaaaacactgaca

SEQ ID NO: 1135321 - DNA, 15 bp, Homo sapiens
tacaaaaacactgac

SEQ ID NO: 1135322 - DNA, 15 bp, Homo sapiens
ctacaaaaacactga

SEQ ID NO: 1135323 - DNA, 15 bp, Homo sapiens
gctacaaaaacactg

SEQ ID NO: 1135324 - DNA, 15 bp, Homo sapiens
tgctacaaaaacact

SEQ ID NO: 1135325 - DNA, 15 bp, Homo sapiens
atgctacaaaaacac

SEQ ID NO: 1135326 - DNA, 15 bp, Homo sapiens
aatgctacaaaaaca

SEQ ID NO: 1135327 - DNA, 15 bp, Homo sapiens
caatgctacaaaaac

SEQ ID NO: 1135328 - DNA, 15 bp, Homo sapiens
tcaatgctacaaaaa

SEQ ID NO: 1135329 - DNA, 15 bp, Homo sapiens
atcaatgctacaaaa

SEQ ID NO: 1135330 - DNA, 15 bp, Homo sapiens
aatcaatgctacaaa

SEQ ID NO: 1135331 - DNA, 15 bp, Homo sapiens
gaatcaatgctacaa

SEQ ID NO: 1135332 - DNA, 15 bp, Homo sapiens
ggaatcaatgctaca

SEQ ID NO: 1135333 - DNA, 15 bp, Homo sapiens
gggaatcaatgctac

SEQ ID NO: 1135334 - DNA, 15 bp, Homo sapiens
tgggaatcaatgcta

SEQ ID NO: 1135335 - DNA, 15 bp, Homo sapiens
ctgggaatcaatgct

SEQ ID NO: 1135336 - DNA, 15 bp, Homo sapiens
tctgggaatcaatgc

SEQ ID NO: 1135337 - DNA, 15 bp, Homo sapiens
ttctgggaatcaatg

SEQ ID NO: 1135338 - DNA, 15 bp, Homo sapiens
cttctgggaatcaat

SEQ ID NO: 1135339 - DNA, 15 bp, Homo sapiens
acttctgggaatcaa

SEQ ID NO: 1135340 - DNA, 15 bp, Homo sapiens
cacttctgggaatca

SEQ ID NO: 1135341 - DNA, 15 bp, Homo sapiens
ccacttctgggaatc

SEQ ID NO: 1135342 - DNA, 15 bp, Homo sapiens
cccacttctgggaat

SEQ ID NO: 1135343 - DNA, 15 bp, Homo sapiens
tcccacttctgggaa

SEQ ID NO: 1135344 - DNA, 15 bp, Homo sapiens
atcccacttctggga

SEQ ID NO: 1135345 - DNA, 15 bp, Homo sapiens
aatcccacttctggg

SEQ ID NO: 1135346 - DNA, 15 bp, Homo sapiens
taatcccacttctgg

SEQ ID NO: 1135347 - DNA, 15 bp, Homo sapiens
gtaatcccacttctg

SEQ ID NO: 1135348 - DNA, 15 bp, Homo sapiens
agtaatcccacttct

SEQ ID NO: 1135349 - DNA, 15 bp, Homo sapiens
cagtaatcccacttc

SEQ ID NO: 1135350 - DNA, 15 bp, Homo sapiens
ccagtaatcccactt

SEQ ID NO: 1135351 - DNA, 15 bp, Homo sapiens
tccagtaatcccact

SEQ ID NO: 1135352 - DNA, 15 bp, Homo sapiens
atccagtaatcccac

SEQ ID NO: 1135353 - DNA, 15 bp, Homo sapiens
aatccagtaatccca

SEQ ID NO: 1135354 - DNA, 15 bp, Homo sapiens
taatccagtaatccc

SEQ ID NO: 1135355 - DNA, 15 bp, Homo sapiens
ttaatccagtaatcc

SEQ ID NO: 1135356 - DNA, 15 bp, Homo sapiens
cttaatccagtaatc

SEQ ID NO: 1135357 - DNA, 15 bp, Homo sapiens
acttaatccagtaat

SEQ ID NO: 1135358 - DNA, 15 bp, Homo sapiens
cacttaatccagtaa

SEQ ID NO: 1135359 - DNA, 15 bp, Homo sapiens
tcacttaatccagta

SEQ ID NO: 1135360 - DNA, 15 bp, Homo sapiens
gtcacttaatccagt

SEQ ID NO: 1135361 - DNA, 15 bp, Homo sapiens
tgtcacttaatccag

SEQ ID NO: 1135362 - DNA, 15 bp, Homo sapiens
atgtcacttaatcca

SEQ ID NO: 1135363 - DNA, 15 bp, Homo sapiens
catgtcacttaatcc

SEQ ID NO: 1135364 - DNA, 15 bp, Homo sapiens
gcatgtcacttaatc

SEQ ID NO: 1135365 - DNA, 15 bp, Homo sapiens
tgcatgtcacttaat

SEQ ID NO: 1135366 - DNA, 15 bp, Homo sapiens
atgcatgtcacttaa

SEQ ID NO: 1135367 - DNA, 15 bp, Homo sapiens
catgcatgtcactta

SEQ ID NO: 1135368 - DNA, 15 bp, Homo sapiens
acatgcatgtcactt

SEQ ID NO: 1135369 - DNA, 15 bp, Homo sapiens
aacatgcatgtcact

SEQ ID NO: 1135370 - DNA, 15 bp, Homo sapiens
aaacatgcatgtcac

SEQ ID NO: 1135371 - DNA, 15 bp, Homo sapiens
caaacatgcatgtca

SEQ ID NO: 1135372 - DNA, 15 bp, Homo sapiens
gcaaacatgcatgtc

SEQ ID NO: 1135373 - DNA, 15 bp, Homo sapiens
tgcaaacatgcatgt

SEQ ID NO: 1135374 - DNA, 15 bp, Homo sapiens
ttgcaaacatgcatg

SEQ ID NO: 1135375 - DNA, 15 bp, Homo sapiens
attgcaaacatgcat

SEQ ID NO: 1135376 - DNA, 15 bp, Homo sapiens
aattgcaaacatgca

SEQ ID NO: 1135377 - DNA, 15 bp, Homo sapiens
aaattgcaaacatgc

SEQ ID NO: 1135378 - DNA, 15 bp, Homo sapiens
aaaattgcaaacatg

SEQ ID NO: 1135379 - DNA, 15 bp, Homo sapiens
taaaattgcaaacat

SEQ ID NO: 1135380 - DNA, 15 bp, Homo sapiens
ttaaaattgcaaaca

SEQ ID NO: 1135381 - DNA, 15 bp, Homo sapiens
gttaaaattgcaaac

SEQ ID NO: 1135382 - DNA, 15 bp, Homo sapiens
tgttaaaattgcaaa

SEQ ID NO: 1135383 - DNA, 15 bp, Homo sapiens
ctgttaaaattgcaa

SEQ ID NO: 1135384 - DNA, 15 bp, Homo sapiens
cctgttaaaattgca

SEQ ID NO: 1135385 - DNA, 15 bp, Homo sapiens
acctgttaaaattgc

SEQ ID NO: 1135386 - DNA, 15 bp, Homo sapiens
tacctgttaaaattg

SEQ ID NO: 1135387 - DNA, 15 bp, Homo sapiens
atacctgttaaaatt

SEQ ID NO: 1135388 - DNA, 15 bp, Homo sapiens
aatacctgttaaaat

SEQ ID NO: 1135389 - DNA, 15 bp, Homo sapiens
caatacctgttaaaa

SEQ ID NO: 1135390 - DNA, 15 bp, Homo sapiens
gcaatacctgttaaa

SEQ ID NO: 1135391 - DNA, 15 bp, Homo sapiens
agcaatacctgttaa

SEQ ID NO: 1135392 - DNA, 15 bp, Homo sapiens
tagcaatacctgtta

SEQ ID NO: 1135393 - DNA, 15 bp, Homo sapiens
atagcaatacctgtt

SEQ ID NO: 1135394 - DNA, 15 bp, Homo sapiens
catagcaatacctgt

SEQ ID NO: 1135395 - DNA, 15 bp, Homo sapiens
acatagcaatacctg

SEQ ID NO: 1135396 - DNA, 15 bp, Homo sapiens
gacatagcaatacct

SEQ ID NO: 1135397 - DNA, 15 bp, Homo sapiens
tgacatagcaatacc

SEQ ID NO: 1135398 - DNA, 15 bp, Homo sapiens
atgacatagcaatac

SEQ ID NO: 1135399 - DNA, 15 bp, Homo sapiens
aatgacatagcaata

SEQ ID NO: 1135400 - DNA, 15 bp, Homo sapiens
aaatgacatagcaat

SEQ ID NO: 1135401 - DNA, 15 bp, Homo sapiens
aaaatgacatagcaa

SEQ ID NO: 1135402 - DNA, 15 bp, Homo sapiens
gaaaatgacatagca

SEQ ID NO: 1135403 - DNA, 15 bp, Homo sapiens
tgaaaatgacatagc

SEQ ID NO: 1135404 - DNA, 15 bp, Homo sapiens
ttgaaaatgacatag

SEQ ID NO: 1135405 - DNA, 15 bp, Homo sapiens
tttgaaaatgacata

SEQ ID NO: 1135406 - DNA, 15 bp, Homo sapiens
ttttgaaaatgacat

SEQ ID NO: 1135407 - DNA, 15 bp, Homo sapiens
cttttgaaaatgaca

SEQ ID NO: 1135408 - DNA, 15 bp, Homo sapiens
tcttttgaaaatgac

SEQ ID NO: 1135409 - DNA, 15 bp, Homo sapiens
ttcttttgaaaatga

SEQ ID NO: 1135410 - DNA, 15 bp, Homo sapiens
cttcttttgaaaatg

SEQ ID NO: 1135411 - DNA, 15 bp, Homo sapiens
gcttcttttgaaaat

SEQ ID NO: 1135412 - DNA, 15 bp, Homo sapiens
agcttcttttgaaaa

SEQ ID NO: 1135413 - DNA, 15 bp, Homo sapiens
tagcttcttttgaaa

SEQ ID NO: 1135414 - DNA, 15 bp, Homo sapiens
atagcttcttttgaa

SEQ ID NO: 1135415 - DNA, 15 bp, Homo sapiens
catagcttcttttga

SEQ ID NO: 1135416 - DNA, 15 bp, Homo sapiens
gcatagcttcttttg

SEQ ID NO: 1135417 - DNA, 15 bp, Homo sapiens
ggcatagcttctttt

SEQ ID NO: 1135418 - DNA, 15 bp, Homo sapiens
tggcatagcttcttt

SEQ ID NO: 1135419 - DNA, 15 bp, Homo sapiens
ttggcatagcttctt

SEQ ID NO: 1135420 - DNA, 15 bp, Homo sapiens
attggcatagcttct

SEQ ID NO: 1135421 - DNA, 15 bp, Homo sapiens
aattggcatagcttc

SEQ ID NO: 1135422 - DNA, 15 bp, Homo sapiens
taattggcatagctt

SEQ ID NO: 1135423 - DNA, 15 bp, Homo sapiens
ttaattggcatagct

SEQ ID NO: 1135424 - DNA, 15 bp, Homo sapiens
attaattggcatagc

SEQ ID NO: 1135425 - DNA, 15 bp, Homo sapiens
tattaattggcatag

SEQ ID NO: 1135426 - DNA, 15 bp, Homo sapiens
gtattaattggcata

SEQ ID NO: 1135427 - DNA, 15 bp, Homo sapiens
agtattaattggcat

SEQ ID NO: 1135428 - DNA, 15 bp, Homo sapiens
gagtattaattggca

SEQ ID NO: 1135429 - DNA, 15 bp, Homo sapiens
agagtattaattggc

SEQ ID NO: 1135430 - DNA, 15 bp, Homo sapiens
gagagtattaattgg

SEQ ID NO: 1135431 - DNA, 15 bp, Homo sapiens
tgagagtattaattg

SEQ ID NO: 1135432 - DNA, 15 bp, Homo sapiens
gtgagagtattaatt

SEQ ID NO: 1135433 - DNA, 15 bp, Homo sapiens
ggtgagagtattaat

SEQ ID NO: 1135434 - DNA, 15 bp, Homo sapiens
tggtgagagtattaa

SEQ ID NO: 1135435 - DNA, 15 bp, Homo sapiens
ttggtgagagtatta

SEQ ID NO: 1135436 - DNA, 15 bp, Homo sapiens
gttggtgagagtatt

SEQ ID NO: 1135437 - DNA, 15 bp, Homo sapiens
tgttggtgagagtat

SEQ ID NO: 1135438 - DNA, 15 bp, Homo sapiens
ttgttggtgagagta

SEQ ID NO: 1135439 - DNA, 15 bp, Homo sapiens
cttgttggtgagagt

SEQ ID NO: 1135440 - DNA, 15 bp, Homo sapiens
tcttgttggtgagag

SEQ ID NO: 1135441 - DNA, 15 bp, Homo sapiens
ctcttgttggtgaga

SEQ ID NO: 1135442 - DNA, 15 bp, Homo sapiens
actcttgttggtgag

SEQ ID NO: 1135443 - DNA, 15 bp, Homo sapiens
cactcttgttggtga

SEQ ID NO: 1135444 - DNA, 15 bp, Homo sapiens
gcactcttgttggtg

SEQ ID NO: 1135445 - DNA, 15 bp, Homo sapiens
agcactcttgttggt

SEQ ID NO: 1135446 - DNA, 15 bp, Homo sapiens
aagcactcttgttgg

SEQ ID NO: 1135447 - DNA, 15 bp, Homo sapiens
taagcactcttgttg

SEQ ID NO: 1135448 - DNA, 15 bp, Homo sapiens
ataagcactcttgtt

SEQ ID NO: 1135449 - DNA, 15 bp, Homo sapiens
aataagcactcttgt

SEQ ID NO: 1135450 - DNA, 15 bp, Homo sapiens
aaataagcactcttg

SEQ ID NO: 1135451 - DNA, 15 bp, Homo sapiens
gaaataagcactctt

SEQ ID NO: 1135452 - DNA, 15 bp, Homo sapiens
ggaaataagcactct

SEQ ID NO: 1135453 - DNA, 15 bp, Homo sapiens
gggaaataagcactc

SEQ ID NO: 1135454 - DNA, 15 bp, Homo sapiens
ggggaaataagcact

SEQ ID NO: 1135455 - DNA, 15 bp, Homo sapiens
aggggaaataagcac

SEQ ID NO: 1135456 - DNA, 15 bp, Homo sapiens
gaggggaaataagca

SEQ ID NO: 1135457 - DNA, 15 bp, Homo sapiens
tgaggggaaataagc

SEQ ID NO: 1135458 - DNA, 15 bp, Homo sapiens
ctgaggggaaataag

SEQ ID NO: 1135459 - DNA, 15 bp, Homo sapiens
gctgaggggaaataa

SEQ ID NO: 1135460 - DNA, 15 bp, Homo sapiens
tgctgaggggaaata

SEQ ID NO: 1135461 - DNA, 15 bp, Homo sapiens
atgctgaggggaaat

SEQ ID NO: 1135462 - DNA, 15 bp, Homo sapiens
tatgctgaggggaaa

SEQ ID NO: 1135463 - DNA, 15 bp, Homo sapiens
atatgctgaggggaa

SEQ ID NO: 1135464 - DNA, 15 bp, Homo sapiens
aatatgctgagggga

SEQ ID NO: 1135465 - DNA, 15 bp, Homo sapiens
taatatgctgagggg

SEQ ID NO: 1135466 - DNA, 15 bp, Homo sapiens
ataatatgctgaggg

SEQ ID NO: 1135467 - DNA, 15 bp, Homo sapiens
gataatatgctgagg

SEQ ID NO: 1135468 - DNA, 15 bp, Homo sapiens
tgataatatgctgag

SEQ ID NO: 1135469 - DNA, 15 bp, Homo sapiens
ctgataatatgctga

SEQ ID NO: 1135470 - DNA, 15 bp, Homo sapiens
cctgataatatgctg

SEQ ID NO: 1135471 - DNA, 15 bp, Homo sapiens
gcctgataatatgct

SEQ ID NO: 1135472 - DNA, 15 bp, Homo sapiens
agcctgataatatgc

SEQ ID NO: 1135473 - DNA, 15 bp, Homo sapiens
aagcctgataatatg

SEQ ID NO: 1135474 - DNA, 15 bp, Homo sapiens
taagcctgataatat

SEQ ID NO: 1135475 - DNA, 15 bp, Homo sapiens
ttaagcctgataata

SEQ ID NO: 1135476 - DNA, 15 bp, Homo sapiens
cttaagcctgataat

SEQ ID NO: 1135477 - DNA, 15 bp, Homo sapiens
acttaagcctgataa

SEQ ID NO: 1135478 - DNA, 15 bp, Homo sapiens
aacttaagcctgata

SEQ ID NO: 1135479 - DNA, 15 bp, Homo sapiens
aaacttaagcctgat

SEQ ID NO: 1135480 - DNA, 15 bp, Homo sapiens
aaaacttaagcctga

SEQ ID NO: 1135481 - DNA, 15 bp, Homo sapiens
caaaacttaagcctg

SEQ ID NO: 1135482 - DNA, 15 bp, Homo sapiens
gcaaaacttaagcct

SEQ ID NO: 1135483 - DNA, 15 bp, Homo sapiens
ggcaaaacttaagcc

SEQ ID NO: 1135484 - DNA, 15 bp, Homo sapiens
tggcaaaacttaagc

SEQ ID NO: 1135485 - DNA, 15 bp, Homo sapiens
ctggcaaaacttaag

SEQ ID NO: 1135486 - DNA, 15 bp, Homo sapiens
actggcaaaacttaa

SEQ ID NO: 1135487 - DNA, 15 bp, Homo sapiens
tactggcaaaactta

SEQ ID NO: 1135488 - DNA, 15 bp, Homo sapiens
atactggcaaaactt

SEQ ID NO: 1135489 - DNA, 15 bp, Homo sapiens
catactggcaaaact

SEQ ID NO: 1135490 - DNA, 15 bp, Homo sapiens
ccatactggcaaaac

SEQ ID NO: 1135491 - DNA, 15 bp, Homo sapiens
cccatactggcaaaa

SEQ ID NO: 1135492 - DNA, 15 bp, Homo sapiens
acccatactggcaaa

SEQ ID NO: 1135493 - DNA, 15 bp, Homo sapiens
cacccatactggcaa

SEQ ID NO: 1135494 - DNA, 15 bp, Homo sapiens
ccacccatactggca

SEQ ID NO: 1135495 - DNA, 15 bp, Homo sapiens
cccacccatactggc

SEQ ID NO: 1135496 - DNA, 15 bp, Homo sapiens
tcccacccatactgg

SEQ ID NO: 1135497 - DNA, 15 bp, Homo sapiens
ctcccacccatactg

SEQ ID NO: 1135498 - DNA, 15 bp, Homo sapiens
tctcccacccatact

SEQ ID NO: 1135499 - DNA, 15 bp, Homo sapiens
ttctcccacccatac

SEQ ID NO: 1135500 - DNA, 15 bp, Homo sapiens
gttctcccacccata

SEQ ID NO: 1135501 - DNA, 15 bp, Homo sapiens
tgttctcccacccat

SEQ ID NO: 1135502 - DNA, 15 bp, Homo sapiens
ctgttctcccaccca

SEQ ID NO: 1135503 - DNA, 15 bp, Homo sapiens
actgttctcccaccc

SEQ ID NO: 1135504 - DNA, 15 bp, Homo sapiens
tactgttctcccacc

SEQ ID NO: 1135505 - DNA, 15 bp, Homo sapiens
ctactgttctcccac

SEQ ID NO: 1135506 - DNA, 15 bp, Homo sapiens
tctactgttctccca

SEQ ID NO: 1135507 - DNA, 15 bp, Homo sapiens
ttctactgttctccc

SEQ ID NO: 1135508 - DNA, 15 bp, Homo sapiens
attctactgttctcc

SEQ ID NO: 1135509 - DNA, 15 bp, Homo sapiens
gattctactgttctc

SEQ ID NO: 1135510 - DNA, 15 bp, Homo sapiens
tgattctactgttct

SEQ ID NO: 1135511 - DNA, 15 bp, Homo sapiens
gtgattctactgttc

SEQ ID NO: 1135512 - DNA, 15 bp, Homo sapiens
tgtgattctactgtt

SEQ ID NO: 1135513 - DNA, 15 bp, Homo sapiens
atgtgattctactgt

SEQ ID NO: 1135514 - DNA, 15 bp, Homo sapiens
aatgtgattctactg

SEQ ID NO: 1135515 - DNA, 15 bp, Homo sapiens
caatgtgattctact

SEQ ID NO: 1135516 - DNA, 15 bp, Homo sapiens
acaatgtgattctac

SEQ ID NO: 1135517 - DNA, 15 bp, Homo sapiens
aacaatgtgattcta

SEQ ID NO: 1135518 - DNA, 15 bp, Homo sapiens
aaacaatgtgattct

SEQ ID NO: 1135519 - DNA, 15 bp, Homo sapiens
aaaacaatgtgattc

SEQ ID NO: 1135520 - DNA, 15 bp, Homo sapiens
taaaacaatgtgatt

SEQ ID NO: 1135521 - DNA, 15 bp, Homo sapiens
ctaaaacaatgtgat

SEQ ID NO: 1135522 - DNA, 15 bp, Homo sapiens
actaaaacaatgtga

SEQ ID NO: 1135523 - DNA, 15 bp, Homo sapiens
cactaaaacaatgtg

SEQ ID NO: 1135524 - DNA, 15 bp, Homo sapiens
acactaaaacaatgt

SEQ ID NO: 1135525 - DNA, 15 bp, Homo sapiens
aacactaaaacaatg

SEQ ID NO: 1135526 - DNA, 15 bp, Homo sapiens
aaacactaaaacaat

SEQ ID NO: 1135527 - DNA, 15 bp, Homo sapiens
caaacactaaaacaa

SEQ ID NO: 1135528 - DNA, 15 bp, Homo sapiens
acaaacactaaaaca

SEQ ID NO: 1135529 - DNA, 15 bp, Homo sapiens
aacaaacactaaaac

SEQ ID NO: 1135530 - DNA, 15 bp, Homo sapiens
aaacaaacactaaaa

SEQ ID NO: 1135531 - DNA, 15 bp, Homo sapiens
gaaacaaacactaaa

SEQ ID NO: 1135532 - DNA, 15 bp, Homo sapiens
agaaacaaacactaa

SEQ ID NO: 1135533 - DNA, 15 bp, Homo sapiens
gagaaacaaacacta

SEQ ID NO: 1135534 - DNA, 15 bp, Homo sapiens
tgagaaacaaacact

SEQ ID NO: 1135535 - DNA, 15 bp, Homo sapiens
ctgagaaacaaacac

SEQ ID NO: 1135536 - DNA, 15 bp, Homo sapiens
tctgagaaacaaaca

SEQ ID NO: 1135537 - DNA, 15 bp, Homo sapiens
atctgagaaacaaac

SEQ ID NO: 1135538 - DNA, 15 bp, Homo sapiens
tatctgagaaacaaa

SEQ ID NO: 1135539 - DNA, 15 bp, Homo sapiens
ctatctgagaaacaa

SEQ ID NO: 1135540 - DNA, 15 bp, Homo sapiens
tctatctgagaaaca

SEQ ID NO: 1135541 - DNA, 15 bp, Homo sapiens
atctatctgagaaac

SEQ ID NO: 1135542 - DNA, 15 bp, Homo sapiens
tatctatctgagaaa

SEQ ID NO: 1135543 - DNA, 15 bp, Homo sapiens
atatctatctgagaa

SEQ ID NO: 1135544 - DNA, 15 bp, Homo sapiens
tatatctatctgaga

SEQ ID NO: 1135545 - DNA, 15 bp, Homo sapiens
ttatatctatctgag

SEQ ID NO: 1135546 - DNA, 15 bp, Homo sapiens
attatatctatctga

SEQ ID NO: 1135547 - DNA, 15 bp, Homo sapiens
aattatatctatctg

SEQ ID NO: 1135548 - DNA, 15 bp, Homo sapiens
aaattatatctatct

SEQ ID NO: 1135549 - DNA, 15 bp, Homo sapiens
aaaattatatctatc

SEQ ID NO: 1135550 - DNA, 15 bp, Homo sapiens
taaaattatatctat

SEQ ID NO: 1135551 - DNA, 15 bp, Homo sapiens
gtaaaattatatcta

SEQ ID NO: 1135552 - DNA, 15 bp, Homo sapiens
tgtaaaattatatct

SEQ ID NO: 1135553 - DNA, 15 bp, Homo sapiens
gtgtaaaattatatc

SEQ ID NO: 1135554 - DNA, 15 bp, Homo sapiens
ggtgtaaaattatat

SEQ ID NO: 1135555 - DNA, 15 bp, Homo sapiens
aggtgtaaaattata

SEQ ID NO: 1135556 - DNA, 15 bp, Homo sapiens
aaggtgtaaaattat

SEQ ID NO: 1135557 - DNA, 15 bp, Homo sapiens
taaggtgtaaaatta

SEQ ID NO: 1135558 - DNA, 15 bp, Homo sapiens
ataaggtgtaaaatt

SEQ ID NO: 1135559 - DNA, 15 bp, Homo sapiens
tataaggtgtaaaat

SEQ ID NO: 1135560 - DNA, 15 bp, Homo sapiens
ttataaggtgtaaaa

SEQ ID NO: 1135561 - DNA, 15 bp, Homo sapiens
gttataaggtgtaaa

SEQ ID NO: 1135562 - DNA, 15 bp, Homo sapiens
ggttataaggtgtaa

SEQ ID NO: 1135563 - DNA, 15 bp, Homo sapiens
aggttataaggtgta

SEQ ID NO: 1135564 - DNA, 15 bp, Homo sapiens
aaggttataaggtgt

SEQ ID NO: 1135565 - DNA, 15 bp, Homo sapiens
gaaggttataaggtg

SEQ ID NO: 1135566 - DNA, 15 bp, Homo sapiens
agaaggttataaggt

SEQ ID NO: 1135567 - DNA, 15 bp, Homo sapiens
gagaaggttataagg

SEQ ID NO: 1135568 - DNA, 15 bp, Homo sapiens
agagaaggttataag

SEQ ID NO: 1135569 - DNA, 15 bp, Homo sapiens
aagagaaggttataa

SEQ ID NO: 1135570 - DNA, 15 bp, Homo sapiens
gaagagaaggttata

SEQ ID NO: 1135571 - DNA, 15 bp, Homo sapiens
agaagagaaggttat

SEQ ID NO: 1135572 - DNA, 15 bp, Homo sapiens
tagaagagaaggtta

SEQ ID NO: 1135573 - DNA, 15 bp, Homo sapiens
atagaagagaaggtt

SEQ ID NO: 1135574 - DNA, 15 bp, Homo sapiens
tatagaagagaaggt

SEQ ID NO: 1135575 - DNA, 15 bp, Homo sapiens
ttatagaagagaagg

SEQ ID NO: 1135576 - DNA, 15 bp, Homo sapiens
tttatagaagagaag

SEQ ID NO: 1135577 - DNA, 15 bp, Homo sapiens
atttatagaagagaa

SEQ ID NO: 1135578 - DNA, 15 bp, Homo sapiens
aatttatagaagaga

SEQ ID NO: 1135579 - DNA, 15 bp, Homo sapiens
caatttatagaagag

SEQ ID NO: 1135580 - DNA, 15 bp, Homo sapiens
acaatttatagaaga

SEQ ID NO: 1135581 - DNA, 15 bp, Homo sapiens
gacaatttatagaag

SEQ ID NO: 1135582 - DNA, 15 bp, Homo sapiens
agacaatttatagaa

SEQ ID NO: 1135583 - DNA, 15 bp, Homo sapiens
tagacaatttataga

SEQ ID NO: 1135584 - DNA, 15 bp, Homo sapiens
atagacaatttatag

SEQ ID NO: 1135585 - DNA, 15 bp, Homo sapiens
aatagacaatttata

SEQ ID NO: 1135586 - DNA, 15 bp, Homo sapiens
aaatagacaatttat

SEQ ID NO: 1135587 - DNA, 15 bp, Homo sapiens
caaatagacaattta

SEQ ID NO: 1135588 - DNA, 15 bp, Homo sapiens
acaaatagacaattt

SEQ ID NO: 1135589 - DNA, 15 bp, Homo sapiens
cacaaatagacaatt

SEQ ID NO: 1135590 - DNA, 15 bp, Homo sapiens
acacaaatagacaat

SEQ ID NO: 1135591 - DNA, 15 bp, Homo sapiens
aacacaaatagacaa

SEQ ID NO: 1135592 - DNA, 15 bp, Homo sapiens
gaacacaaatagaca

SEQ ID NO: 1135593 - DNA, 15 bp, Homo sapiens
tgaacacaaatagac

SEQ ID NO: 1135594 - DNA, 15 bp, Homo sapiens
atgaacacaaataga

SEQ ID NO: 1135595 - DNA, 15 bp, Homo sapiens
aatgaacacaaatag

SEQ ID NO: 1135596 - DNA, 15 bp, Homo sapiens
gaatgaacacaaata

SEQ ID NO: 1135597 - DNA, 15 bp, Homo sapiens
agaatgaacacaaat

SEQ ID NO: 1135598 - DNA, 15 bp, Homo sapiens
gagaatgaacacaaa

SEQ ID NO: 1135599 - DNA, 15 bp, Homo sapiens
ggagaatgaacacaa

SEQ ID NO: 1135600 - DNA, 15 bp, Homo sapiens
tggagaatgaacaca

SEQ ID NO: 1135601 - DNA, 15 bp, Homo sapiens
atggagaatgaacac

SEQ ID NO: 1135602 - DNA, 15 bp, Homo sapiens
aatggagaatgaaca

SEQ ID NO: 1135603 - DNA, 15 bp, Homo sapiens
aaatggagaatgaac

SEQ ID NO: 1135604 - DNA, 15 bp, Homo sapiens
aaaatggagaatgaa

SEQ ID NO: 1135605 - DNA, 15 bp, Homo sapiens
gaaaatggagaatga

SEQ ID NO: 1135606 - DNA, 15 bp, Homo sapiens
ggaaaatggagaatg

SEQ ID NO: 1135607 - DNA, 15 bp, Homo sapiens
aggaaaatggagaat

SEQ ID NO: 1135608 - DNA, 15 bp, Homo sapiens
taggaaaatggagaa

SEQ ID NO: 1135609 - DNA, 15 bp, Homo sapiens
ataggaaaatggaga

SEQ ID NO: 1135610 - DNA, 15 bp, Homo sapiens
cataggaaaatggag

SEQ ID NO: 1135611 - DNA, 15 bp, Homo sapiens
ccataggaaaatgga

SEQ ID NO: 1135612 - DNA, 15 bp, Homo sapiens
cccataggaaaatgg

SEQ ID NO: 1135613 - DNA, 15 bp, Homo sapiens
acccataggaaaatg

SEQ ID NO: 1135614 - DNA, 15 bp, Homo sapiens
aacccataggaaaat

SEQ ID NO: 1135615 - DNA, 15 bp, Homo sapiens
gaacccataggaaaa

SEQ ID NO: 1135616 - DNA, 15 bp, Homo sapiens
agaacccataggaaa

SEQ ID NO: 1135617 - DNA, 15 bp, Homo sapiens
aagaacccataggaa

SEQ ID NO: 1135618 - DNA, 15 bp, Homo sapiens
taagaacccatagga

SEQ ID NO: 1135619 - DNA, 15 bp, Homo sapiens
ataagaacccatagg

SEQ ID NO: 1135620 - DNA, 15 bp, Homo sapiens
aataagaacccatag

SEQ ID NO: 1135621 - DNA, 15 bp, Homo sapiens
caataagaacccata

SEQ ID NO: 1135622 - DNA, 15 bp, Homo sapiens
acaataagaacccat

SEQ ID NO: 1135623 - DNA, 15 bp, Homo sapiens
aacaataagaaccca

SEQ ID NO: 1135624 - DNA, 15 bp, Homo sapiens
caacaataagaaccc

SEQ ID NO: 1135625 - DNA, 15 bp, Homo sapiens
ccaacaataagaacc

SEQ ID NO: 1135626 - DNA, 15 bp, Homo sapiens
tccaacaataagaac

SEQ ID NO: 1135627 - DNA, 15 bp, Homo sapiens
ctccaacaataagaa

SEQ ID NO: 1135628 - DNA, 15 bp, Homo sapiens
gctccaacaataaga

SEQ ID NO: 1135629 - DNA, 15 bp, Homo sapiens
ggctccaacaataag

SEQ ID NO: 1135630 - DNA, 15 bp, Homo sapiens
gggctccaacaataa

SEQ ID NO: 1135631 - DNA, 15 bp, Homo sapiens
tgggctccaacaata

SEQ ID NO: 1135632 - DNA, 15 bp, Homo sapiens
ttgggctccaacaat

SEQ ID NO: 1135633 - DNA, 15 bp, Homo sapiens
attgggctccaacaa

SEQ ID NO: 1135634 - DNA, 15 bp, Homo sapiens
tattgggctccaaca

SEQ ID NO: 1135635 - DNA, 15 bp, Homo sapiens
atattgggctccaac

SEQ ID NO: 1135636 - DNA, 15 bp, Homo sapiens
tatattgggctccaa

SEQ ID NO: 1135637 - DNA, 15 bp, Homo sapiens
atatattgggctcca

SEQ ID NO: 1135638 - DNA, 15 bp, Homo sapiens
tatatattgggctcc

SEQ ID NO: 1135639 - DNA, 15 bp, Homo sapiens
ttatatattgggctc

SEQ ID NO: 1135640 - DNA, 15 bp, Homo sapiens
tttatatattgggct

SEQ ID NO: 1135641 - DNA, 15 bp, Homo sapiens
ttttatatattgggc

SEQ ID NO: 1135642 - DNA, 15 bp, Homo sapiens
cttttatatattggg

SEQ ID NO: 1135643 - DNA, 15 bp, Homo sapiens
ccttttatatattgg

SEQ ID NO: 1135644 - DNA, 15 bp, Homo sapiens
cccttttatatattg

SEQ ID NO: 1135645 - DNA, 15 bp, Homo sapiens
ccccttttatatatt

SEQ ID NO: 1135646 - DNA, 15 bp, Homo sapiens
cccccttttatatat

SEQ ID NO: 1135647 - DNA, 15 bp, Homo sapiens
acccccttttatata

SEQ ID NO: 1135648 - DNA, 15 bp, Homo sapiens
tacccccttttatat

SEQ ID NO: 1135649 - DNA, 15 bp, Homo sapiens
atacccccttttata

SEQ ID NO: 1135650 - DNA, 15 bp, Homo sapiens
aatacccccttttat

SEQ ID NO: 1135651 - DNA, 15 bp, Homo sapiens
aaataccccctttta

SEQ ID NO: 1135652 - DNA, 15 bp, Homo sapiens
caaataccccctttt

SEQ ID NO: 1135653 - DNA, 15 bp, Homo sapiens
acaaatacccccttt

SEQ ID NO: 1135654 - DNA, 15 bp, Homo sapiens
aacaaataccccctt

SEQ ID NO: 1135655 - DNA, 15 bp, Homo sapiens
taacaaataccccct

SEQ ID NO: 1135656 - DNA, 15 bp, Homo sapiens
gtaacaaataccccc

SEQ ID NO: 1135657 - DNA, 15 bp, Homo sapiens
tgtaacaaatacccc

SEQ ID NO: 1135658 - DNA, 15 bp, Homo sapiens
ctgtaacaaataccc

SEQ ID NO: 1135659 - DNA, 15 bp, Homo sapiens
tctgtaacaaatacc

SEQ ID NO: 1135660 - DNA, 15 bp, Homo sapiens
ttctgtaacaaatac

SEQ ID NO: 1135661 - DNA, 15 bp, Homo sapiens
gttctgtaacaaata

SEQ ID NO: 1135662 - DNA, 15 bp, Homo sapiens
ggttctgtaacaaat

SEQ ID NO: 1135663 - DNA, 15 bp, Homo sapiens
aggttctgtaacaaa

SEQ ID NO: 1135664 - DNA, 15 bp, Homo sapiens
gaggttctgtaacaa

SEQ ID NO: 1135665 - DNA, 15 bp, Homo sapiens
agaggttctgtaaca

SEQ ID NO: 1135666 - DNA, 15 bp, Homo sapiens
aagaggttctgtaac

SEQ ID NO: 1135667 - DNA, 15 bp, Homo sapiens
gaagaggttctgtaa

SEQ ID NO: 1135668 - DNA, 15 bp, Homo sapiens
tgaagaggttctgta

SEQ ID NO: 1135669 - DNA, 15 bp, Homo sapiens
ctgaagaggttctgt

SEQ ID NO: 1135670 - DNA, 15 bp, Homo sapiens
actgaagaggttctg

SEQ ID NO: 1135671 - DNA, 15 bp, Homo sapiens
aactgaagaggttct

SEQ ID NO: 1135672 - DNA, 15 bp, Homo sapiens
aaactgaagaggttc

SEQ ID NO: 1135673 - DNA, 15 bp, Homo sapiens
aaaactgaagaggtt

SEQ ID NO: 1135674 - DNA, 15 bp, Homo sapiens
caaaactgaagaggt

SEQ ID NO: 1135675 - DNA, 15 bp, Homo sapiens
ccaaaactgaagagg

SEQ ID NO: 1135676 - DNA, 15 bp, Homo sapiens
accaaaactgaagag

SEQ ID NO: 1135677 - DNA, 15 bp, Homo sapiens
aaccaaaactgaaga

SEQ ID NO: 1135678 - DNA, 15 bp, Homo sapiens
gaaccaaaactgaag

SEQ ID NO: 1135679 - DNA, 15 bp, Homo sapiens
tgaaccaaaactgaa

SEQ ID NO: 1135680 - DNA, 15 bp, Homo sapiens
atgaaccaaaactga

SEQ ID NO: 1135681 - DNA, 15 bp, Homo sapiens
catgaaccaaaactg

SEQ ID NO: 1135682 - DNA, 15 bp, Homo sapiens
acatgaaccaaaact

SEQ ID NO: 1135683 - DNA, 15 bp, Homo sapiens
gacatgaaccaaaac

SEQ ID NO: 1135684 - DNA, 15 bp, Homo sapiens
tgacatgaaccaaaa

SEQ ID NO: 1135685 - DNA, 15 bp, Homo sapiens
atgacatgaaccaaa

SEQ ID NO: 1135686 - DNA, 15 bp, Homo sapiens
catgacatgaaccaa

SEQ ID NO: 1135687 - DNA, 15 bp, Homo sapiens
gcatgacatgaacca

SEQ ID NO: 1135688 - DNA, 15 bp, Homo sapiens
ggcatgacatgaacc

SEQ ID NO: 1135689 - DNA, 15 bp, Homo sapiens
aggcatgacatgaac

SEQ ID NO: 1135690 - DNA, 15 bp, Homo sapiens
caggcatgacatgaa

SEQ ID NO: 1135691 - DNA, 15 bp, Homo sapiens
ccaggcatgacatga

SEQ ID NO: 1135692 - DNA, 15 bp, Homo sapiens
cccaggcatgacatg

SEQ ID NO: 1135693 - DNA, 15 bp, Homo sapiens
acccaggcatgacat

SEQ ID NO: 1135694 - DNA, 15 bp, Homo sapiens
aacccaggcatgaca

SEQ ID NO: 1135695 - DNA, 15 bp, Homo sapiens
aaacccaggcatgac

SEQ ID NO: 1135696 - DNA, 15 bp, Homo sapiens
aaaacccaggcatga

SEQ ID NO: 1135697 - DNA, 15 bp, Homo sapiens
aaaaacccaggcatg

SEQ ID NO: 1135698 - DNA, 15 bp, Homo sapiens
taaaaacccaggcat

SEQ ID NO: 1135699 - DNA, 15 bp, Homo sapiens
gtaaaaacccaggca

SEQ ID NO: 1135700 - DNA, 15 bp, Homo sapiens
ggtaaaaacccaggc

SEQ ID NO: 1135701 - DNA, 15 bp, Homo sapiens
gggtaaaaacccagg

SEQ ID NO: 1135702 - DNA, 15 bp, Homo sapiens
agggtaaaaacccag

SEQ ID NO: 1135703 - DNA, 15 bp, Homo sapiens
aagggtaaaaaccca

SEQ ID NO: 1135704 - DNA, 15 bp, Homo sapiens
aaagggtaaaaaccc

SEQ ID NO: 1135705 - DNA, 15 bp, Homo sapiens
gaaagggtaaaaacc

SEQ ID NO: 1135706 - DNA, 15 bp, Homo sapiens
agaaagggtaaaaac

SEQ ID NO: 1135707 - DNA, 15 bp, Homo sapiens
tagaaagggtaaaaa

SEQ ID NO: 1135708 - DNA, 15 bp, Homo sapiens
gtagaaagggtaaaa

SEQ ID NO: 1135709 - DNA, 15 bp, Homo sapiens
cgtagaaagggtaaa

SEQ ID NO: 1135710 - DNA, 15 bp, Homo sapiens
ccgtagaaagggtaa

SEQ ID NO: 1135711 - DNA, 15 bp, Homo sapiens
tccgtagaaagggta

SEQ ID NO: 1135712 - DNA, 15 bp, Homo sapiens
atccgtagaaagggt

SEQ ID NO: 1135713 - DNA, 15 bp, Homo sapiens
catccgtagaaaggg

SEQ ID NO: 1135714 - DNA, 15 bp, Homo sapiens
acatccgtagaaagg

SEQ ID NO: 1135715 - DNA, 15 bp, Homo sapiens
aacatccgtagaaag

SEQ ID NO: 1135716 - DNA, 15 bp, Homo sapiens
taacatccgtagaaa

SEQ ID NO: 1135717 - DNA, 15 bp, Homo sapiens
ttaacatccgtagaa

SEQ ID NO: 1135718 - DNA, 15 bp, Homo sapiens
tttaacatccgtaga

SEQ ID NO: 1135719 - DNA, 15 bp, Homo sapiens
ttttaacatccgtag

SEQ ID NO: 1135720 - DNA, 15 bp, Homo sapiens
tttttaacatccgta

SEQ ID NO: 1135721 - DNA, 15 bp, Homo sapiens
ttttttaacatccgt

SEQ ID NO: 1135722 - DNA, 15 bp, Homo sapiens
tttttttaacatccg

SEQ ID NO: 1135723 - DNA, 15 bp, Homo sapiens
ttttttttaacatcc

SEQ ID NO: 1135724 - DNA, 15 bp, Homo sapiens
attttttttaacatc

SEQ ID NO: 1135725 - DNA, 15 bp, Homo sapiens
aattttttttaacat

SEQ ID NO: 1135726 - DNA, 15 bp, Homo sapiens
gaattttttttaaca

SEQ ID NO: 1135727 - DNA, 15 bp, Homo sapiens
agaattttttttaac

SEQ ID NO: 1135728 - DNA, 15 bp, Homo sapiens
gagaattttttttaa

SEQ ID NO: 1135729 - DNA, 15 bp, Homo sapiens
agagaatttttttta

SEQ ID NO: 1135730 - DNA, 15 bp, Homo sapiens
tagagaatttttttt

SEQ ID NO: 1135731 - DNA, 15 bp, Homo sapiens
atagagaattttttt

SEQ ID NO: 1135732 - DNA, 15 bp, Homo sapiens
aatagagaatttttt

SEQ ID NO: 1135733 - DNA, 15 bp, Homo sapiens
aaatagagaattttt

SEQ ID NO: 1135734 - DNA, 15 bp, Homo sapiens
aaaatagagaatttt

SEQ ID NO: 1135735 - DNA, 15 bp, Homo sapiens
gaaaatagagaattt

SEQ ID NO: 1135736 - DNA, 15 bp, Homo sapiens
agaaaatagagaatt

SEQ ID NO: 1135737 - DNA, 15 bp, Homo sapiens
aagaaaatagagaat

SEQ ID NO: 1135738 - DNA, 15 bp, Homo sapiens
gaagaaaatagagaa

SEQ ID NO: 1135739 - DNA, 15 bp, Homo sapiens
ggaagaaaatagaga

SEQ ID NO: 1135740 - DNA, 15 bp, Homo sapiens
tggaagaaaatagag

SEQ ID NO: 1135741 - DNA, 15 bp, Homo sapiens
ctggaagaaaataga

SEQ ID NO: 1135742 - DNA, 15 bp, Homo sapiens
actggaagaaaatag

SEQ ID NO: 1135743 - DNA, 15 bp, Homo sapiens
gactggaagaaaata

SEQ ID NO: 1135744 - DNA, 15 bp, Homo sapiens
ggactggaagaaaat

SEQ ID NO: 1135745 - DNA, 15 bp, Homo sapiens
tggactggaagaaaa

SEQ ID NO: 1135746 - DNA, 15 bp, Homo sapiens
gtggactggaagaaa

SEQ ID NO: 1135747 - DNA, 15 bp, Homo sapiens
agtggactggaagaa

SEQ ID NO: 1135748 - DNA, 15 bp, Homo sapiens
aagtggactggaaga

SEQ ID NO: 1135749 - DNA, 15 bp, Homo sapiens
taagtggactggaag

SEQ ID NO: 1135750 - DNA, 15 bp, Homo sapiens
ataagtggactggaa

SEQ ID NO: 1135751 - DNA, 15 bp, Homo sapiens
cataagtggactgga

SEQ ID NO: 1135752 - DNA, 15 bp, Homo sapiens
ccataagtggactgg

SEQ ID NO: 1135753 - DNA, 15 bp, Homo sapiens
gccataagtggactg

SEQ ID NO: 1135754 - DNA, 15 bp, Homo sapiens
agccataagtggact

SEQ ID NO: 1135755 - DNA, 15 bp, Homo sapiens
aagccataagtggac

SEQ ID NO: 1135756 - DNA, 15 bp, Homo sapiens
aaagccataagtgga

SEQ ID NO: 1135757 - DNA, 15 bp, Homo sapiens
taaagccataagtgg

SEQ ID NO: 1135758 - DNA, 15 bp, Homo sapiens
ataaagccataagtg

SEQ ID NO: 1135759 - DNA, 15 bp, Homo sapiens
aataaagccataagt

SEQ ID NO: 1135760 - DNA, 15 bp, Homo sapiens
aaataaagccataag

SEQ ID NO: 1135761 - DNA, 15 bp, Homo sapiens
aaaataaagccataa

SEQ ID NO: 1135762 - DNA, 15 bp, Homo sapiens
aaaaataaagccata

SEQ ID NO: 1135763 - DNA, 15 bp, Homo sapiens
aaaaaataaagccat

SEQ ID NO: 1135764 - DNA, 15 bp, Homo sapiens
taaaaaataaagcca

SEQ ID NO: 1135765 - DNA, 15 bp, Homo sapiens
gtaaaaaataaagcc

SEQ ID NO: 1135766 - DNA, 15 bp, Homo sapiens
tgtaaaaaataaagc

SEQ ID NO: 1135767 - DNA, 15 bp, Homo sapiens
atgtaaaaaataaag

SEQ ID NO: 1135768 - DNA, 15 bp, Homo sapiens
aatgtaaaaaataaa

SEQ ID NO: 1135769 - DNA, 15 bp, Homo sapiens
ctgtattcaaattca

SEQ ID NO: 1135770 - DNA, 15 bp, Homo sapiens
tctgtattcaaattc

SEQ ID NO: 1135771 - DNA, 15 bp, Homo sapiens
gtctgtattcaaatt

SEQ ID NO: 1135772 - DNA, 15 bp, Homo sapiens
ggtctgtattcaaat

SEQ ID NO: 1135773 - DNA, 15 bp, Homo sapiens
aggtctgtattcaaa

SEQ ID NO: 1135774 - DNA, 15 bp, Homo sapiens
caggtctgtattcaa

SEQ ID NO: 1135775 - DNA, 15 bp, Homo sapiens
tcaggtctgtattca

SEQ ID NO: 1135776 - DNA, 15 bp, Homo sapiens
gtcaggtctgtattc

SEQ ID NO: 1135777 - DNA, 15 bp, Homo sapiens
agtcaggtctgtatt

SEQ ID NO: 1135778 - DNA, 15 bp, Homo sapiens
gagtcaggtctgtat

SEQ ID NO: 1135779 - DNA, 15 bp, Homo sapiens
agagtcaggtctgta

SEQ ID NO: 1135780 - DNA, 15 bp, Homo sapiens
tagagtcaggtctgt

SEQ ID NO: 1135781 - DNA, 15 bp, Homo sapiens
ttagagtcaggtctg

SEQ ID NO: 1135782 - DNA, 15 bp, Homo sapiens
tttagagtcaggtct

SEQ ID NO: 1135783 - DNA, 15 bp, Homo sapiens
ctttagagtcaggtc

SEQ ID NO: 1135784 - DNA, 15 bp, Homo sapiens
gctttagagtcaggt

SEQ ID NO: 1135785 - DNA, 15 bp, Homo sapiens
agctttagagtcagg

SEQ ID NO: 1135786 - DNA, 15 bp, Homo sapiens
gagctttagagtcag

SEQ ID NO: 1135787 - DNA, 15 bp, Homo sapiens
agagctttagagtca

SEQ ID NO: 1135788 - DNA, 15 bp, Homo sapiens
aagagctttagagtc

SEQ ID NO: 1135789 - DNA, 15 bp, Homo sapiens
aaagagctttagagt

SEQ ID NO: 1135790 - DNA, 15 bp, Homo sapiens
aaaagagctttagag

SEQ ID NO: 1135791 - DNA, 15 bp, Homo sapiens
gaaaagagctttaga

SEQ ID NO: 1135792 - DNA, 15 bp, Homo sapiens
agaaaagagctttag

SEQ ID NO: 1135793 - DNA, 15 bp, Homo sapiens
aagaaaagagcttta

SEQ ID NO: 1135794 - DNA, 15 bp, Homo sapiens
aaagaaaagagcttt

SEQ ID NO: 1135795 - DNA, 15 bp, Homo sapiens
gaaagaaaagagctt

SEQ ID NO: 1135796 - DNA, 15 bp, Homo sapiens
agaaagaaaagagct

SEQ ID NO: 1135797 - DNA, 15 bp, Homo sapiens
aagaaagaaaagagc

SEQ ID NO: 1135798 - DNA, 15 bp, Homo sapiens
aaagaaagaaaagag

SEQ ID NO: 1135799 - DNA, 15 bp, Homo sapiens
ctaaagaaagaaaag

SEQ ID NO: 1135800 - DNA, 15 bp, Homo sapiens
tctaaagaaagaaaa

SEQ ID NO: 1135801 - DNA, 15 bp, Homo sapiens
atctaaagaaagaaa

SEQ ID NO: 1135802 - DNA, 15 bp, Homo sapiens
aatctaaagaaagaa

SEQ ID NO: 1135803 - DNA, 15 bp, Homo sapiens
aaatctaaagaaaga

SEQ ID NO: 1135804 - DNA, 15 bp, Homo sapiens
aaaatctaaagaaag

SEQ ID NO: 1135805 - DNA, 15 bp, Homo sapiens
taaaatctaaagaaa

SEQ ID NO: 1135806 - DNA, 15 bp, Homo sapiens
ctaaaatctaaagaa

SEQ ID NO: 1135807 - DNA, 15 bp, Homo sapiens
actaaaatctaaaga

SEQ ID NO: 1135808 - DNA, 15 bp, Homo sapiens
cactaaaatctaaag

SEQ ID NO: 1135809 - DNA, 15 bp, Homo sapiens
acactaaaatctaaa

SEQ ID NO: 1135810 - DNA, 15 bp, Homo sapiens
aacactaaaatctaa

SEQ ID NO: 1135811 - DNA, 15 bp, Homo sapiens
gaacactaaaatcta

SEQ ID NO: 1135812 - DNA, 15 bp, Homo sapiens
tgaacactaaaatct

SEQ ID NO: 1135813 - DNA, 15 bp, Homo sapiens
atgaacactaaaatc

SEQ ID NO: 1135814 - DNA, 15 bp, Homo sapiens
aatgaacactaaaat

SEQ ID NO: 1135815 - DNA, 15 bp, Homo sapiens
caatgaacactaaaa

SEQ ID NO: 1135816 - DNA, 15 bp, Homo sapiens
gcaatgaacactaaa

SEQ ID NO: 1135817 - DNA, 15 bp, Homo sapiens
agcaatgaacactaa

SEQ ID NO: 1135818 - DNA, 15 bp, Homo sapiens
aagcaatgaacacta

SEQ ID NO: 1135819 - DNA, 15 bp, Homo sapiens
taagcaatgaacact

SEQ ID NO: 1135820 - DNA, 15 bp, Homo sapiens
gtaagcaatgaacac

SEQ ID NO: 1135821 - DNA, 15 bp, Homo sapiens
agtaagcaatgaaca

SEQ ID NO: 1135822 - DNA, 15 bp, Homo sapiens
aagtaagcaatgaac

SEQ ID NO: 1135823 - DNA, 15 bp, Homo sapiens
caagtaagcaatgaa

SEQ ID NO: 1135824 - DNA, 15 bp, Homo sapiens
tcaagtaagcaatga

SEQ ID NO: 1135825 - DNA, 15 bp, Homo sapiens
ttcaagtaagcaatg

SEQ ID NO: 1135826 - DNA, 15 bp, Homo sapiens
attcaagtaagcaat

SEQ ID NO: 1135827 - DNA, 15 bp, Homo sapiens
cattcaagtaagcaa

SEQ ID NO: 1135828 - DNA, 15 bp, Homo sapiens
tcattcaagtaagca

SEQ ID NO: 1135829 - DNA, 15 bp, Homo sapiens
ctcattcaagtaagc

SEQ ID NO: 1135830 - DNA, 15 bp, Homo sapiens
actcattcaagtaag

SEQ ID NO: 1135831 - DNA, 15 bp, Homo sapiens
tactcattcaagtaa

SEQ ID NO: 1135832 - DNA, 15 bp, Homo sapiens
atactcattcaagta

SEQ ID NO: 1135833 - DNA, 15 bp, Homo sapiens
gatactcattcaagt

SEQ ID NO: 1135834 - DNA, 15 bp, Homo sapiens
agatactcattcaag

SEQ ID NO: 1135835 - DNA, 15 bp, Homo sapiens
tagatactcattcaa

SEQ ID NO: 1135836 - DNA, 15 bp, Homo sapiens
atagatactcattca

SEQ ID NO: 1135837 - DNA, 15 bp, Homo sapiens
tatagatactcattc

SEQ ID NO: 1135838 - DNA, 15 bp, Homo sapiens
ttatagatactcatt

SEQ ID NO: 1135839 - DNA, 15 bp, Homo sapiens
cttatagatactcat

SEQ ID NO: 1135840 - DNA, 15 bp, Homo sapiens
tcttatagatactca

SEQ ID NO: 1135841 - DNA, 15 bp, Homo sapiens
ttcttatagatactc

SEQ ID NO: 1135842 - DNA, 15 bp, Homo sapiens
tttcttatagatact

SEQ ID NO: 1135843 - DNA, 15 bp, Homo sapiens
ttttcttatagatac

SEQ ID NO: 1135844 - DNA, 15 bp, Homo sapiens
gttttcttatagata

SEQ ID NO: 1135845 - DNA, 15 bp, Homo sapiens
agttttcttatagat

SEQ ID NO: 1135846 - DNA, 15 bp, Homo sapiens
aagttttcttataga

SEQ ID NO: 1135847 - DNA, 15 bp, Homo sapiens
aaagttttcttatag

SEQ ID NO: 1135848 - DNA, 15 bp, Homo sapiens
taaagttttcttata

SEQ ID NO: 1135849 - DNA, 15 bp, Homo sapiens
ttaaagttttcttat

SEQ ID NO: 1135850 - DNA, 15 bp, Homo sapiens
gttaaagttttctta

SEQ ID NO: 1135851 - DNA, 15 bp, Homo sapiens
tgttaaagttttctt

SEQ ID NO: 1135852 - DNA, 15 bp, Homo sapiens
atgttaaagttttct

SEQ ID NO: 1135853 - DNA, 15 bp, Homo sapiens
catgttaaagttttc

SEQ ID NO: 1135854 - DNA, 15 bp, Homo sapiens
acatgttaaagtttt

SEQ ID NO: 1135855 - DNA, 15 bp, Homo sapiens
tacatgttaaagttt

SEQ ID NO: 1135856 - DNA, 15 bp, Homo sapiens
ttacatgttaaagtt

SEQ ID NO: 1135857 - DNA, 15 bp, Homo sapiens
tttacatgttaaagt

SEQ ID NO: 1135858 - DNA, 15 bp, Homo sapiens
ttttacatgttaaag

SEQ ID NO: 1135859 - DNA, 15 bp, Homo sapiens
gttttacatgttaaa

SEQ ID NO: 1135860 - DNA, 15 bp, Homo sapiens
agttttacatgttaa

SEQ ID NO: 1135861 - DNA, 15 bp, Homo sapiens
aagttttacatgtta

SEQ ID NO: 1135862 - DNA, 15 bp, Homo sapiens
gaagttttacatgtt

SEQ ID NO: 1135863 - DNA, 15 bp, Homo sapiens
agaagttttacatgt

SEQ ID NO: 1135864 - DNA, 15 bp, Homo sapiens
cagaagttttacatg

SEQ ID NO: 1135865 - DNA, 15 bp, Homo sapiens
acagaagttttacat

SEQ ID NO: 1135866 - DNA, 15 bp, Homo sapiens
cacagaagttttaca

SEQ ID NO: 1135867 - DNA, 15 bp, Homo sapiens
tcacagaagttttac

SEQ ID NO: 1135868 - DNA, 15 bp, Homo sapiens
ttcacagaagtttta

SEQ ID NO: 1135869 - DNA, 15 bp, Homo sapiens
tttcacagaagtttt

SEQ ID NO: 1135870 - DNA, 15 bp, Homo sapiens
atttcacagaagttt

SEQ ID NO: 1135871 - DNA, 15 bp, Homo sapiens
aatttcacagaagtt

SEQ ID NO: 1135872 - DNA, 15 bp, Homo sapiens
taatttcacagaagt

SEQ ID NO: 1135873 - DNA, 15 bp, Homo sapiens
ataatttcacagaag

SEQ ID NO: 1135874 - DNA, 15 bp, Homo sapiens
gataatttcacagaa

SEQ ID NO: 1135875 - DNA, 15 bp, Homo sapiens
agataatttcacaga

SEQ ID NO: 1135876 - DNA, 15 bp, Homo sapiens
aagataatttcacag

SEQ ID NO: 1135877 - DNA, 15 bp, Homo sapiens
caagataatttcaca

SEQ ID NO: 1135878 - DNA, 15 bp, Homo sapiens
acaagataatttcac

SEQ ID NO: 1135879 - DNA, 15 bp, Homo sapiens
gacaagataatttca

SEQ ID NO: 1135880 - DNA, 15 bp, Homo sapiens
ggacaagataatttc

SEQ ID NO: 1135881 - DNA, 15 bp, Homo sapiens
gggacaagataattt

SEQ ID NO: 1135882 - DNA, 15 bp, Homo sapiens
tgggacaagataatt

SEQ ID NO: 1135883 - DNA, 15 bp, Homo sapiens
atgggacaagataat

SEQ ID NO: 1135884 - DNA, 15 bp, Homo sapiens
tatgggacaagataa

SEQ ID NO: 1135885 - DNA, 15 bp, Homo sapiens
atatgggacaagata

SEQ ID NO: 1135886 - DNA, 15 bp, Homo sapiens
gatatgggacaagat

SEQ ID NO: 1135887 - DNA, 15 bp, Homo sapiens
tgatatgggacaaga

SEQ ID NO: 1135888 - DNA, 15 bp, Homo sapiens
ctgatatgggacaag

SEQ ID NO: 1135889 - DNA, 15 bp, Homo sapiens
cctgatatgggacaa

SEQ ID NO: 1135890 - DNA, 15 bp, Homo sapiens
ccctgatatgggaca

SEQ ID NO: 1135891 - DNA, 15 bp, Homo sapiens
accctgatatgggac

SEQ ID NO: 1135892 - DNA, 15 bp, Homo sapiens
gaccctgatatggga

SEQ ID NO: 1135893 - DNA, 15 bp, Homo sapiens
tgaccctgatatggg

SEQ ID NO: 1135894 - DNA, 15 bp, Homo sapiens
atgaccctgatatgg

SEQ ID NO: 1135895 - DNA, 15 bp, Homo sapiens
catgaccctgatatg

SEQ ID NO: 1135896 - DNA, 15 bp, Homo sapiens
acatgaccctgatat

SEQ ID NO: 1135897 - DNA, 15 bp, Homo sapiens
gacatgaccctgata

SEQ ID NO: 1135898 - DNA, 15 bp, Homo sapiens
tgacatgaccctgat

SEQ ID NO: 1135899 - DNA, 15 bp, Homo sapiens
ttgacatgaccctga

SEQ ID NO: 1135900 - DNA, 15 bp, Homo sapiens
tttgacatgaccctg

SEQ ID NO: 1135901 - DNA, 15 bp, Homo sapiens
gtttgacatgaccct

SEQ ID NO: 1135902 - DNA, 15 bp, Homo sapiens
agtttgacatgaccc

SEQ ID NO: 1135903 - DNA, 15 bp, Homo sapiens
tagtttgacatgacc

SEQ ID NO: 1135904 - DNA, 15 bp, Homo sapiens
ttagtttgacatgac

SEQ ID NO: 1135905 - DNA, 15 bp, Homo sapiens
attagtttgacatga

SEQ ID NO: 1135906 - DNA, 15 bp, Homo sapiens
cattagtttgacatg

SEQ ID NO: 1135907 - DNA, 15 bp, Homo sapiens
acattagtttgacat

SEQ ID NO: 1135908 - DNA, 15 bp, Homo sapiens
gacattagtttgaca

SEQ ID NO: 1135909 - DNA, 15 bp, Homo sapiens
ggacattagtttgac

SEQ ID NO: 1135910 - DNA, 15 bp, Homo sapiens
aggacattagtttga

SEQ ID NO: 1135911 - DNA, 15 bp, Homo sapiens
gaggacattagtttg

SEQ ID NO: 1135912 - DNA, 15 bp, Homo sapiens
ggaggacattagttt

SEQ ID NO: 1135913 - DNA, 15 bp, Homo sapiens
aggaggacattagtt

SEQ ID NO: 1135914 - DNA, 15 bp, Homo sapiens
gaggaggacattagt

SEQ ID NO: 1135915 - DNA, 15 bp, Homo sapiens
tgaggaggacattag

SEQ ID NO: 1135916 - DNA, 15 bp, Homo sapiens
tctaacagtggtata

SEQ ID NO: 1135917 - DNA, 15 bp, Homo sapiens
gtctaacagtggtat

SEQ ID NO: 1135918 - DNA, 15 bp, Homo sapiens
ggtctaacagtggta

SEQ ID NO: 1135919 - DNA, 15 bp, Homo sapiens
aggtctaacagtggt

SEQ ID NO: 1135920 - DNA, 15 bp, Homo sapiens
caggtctaacagtgg

SEQ ID NO: 1135921 - DNA, 15 bp, Homo sapiens
acaggtctaacagtg

SEQ ID NO: 1135922 - DNA, 15 bp, Homo sapiens
gacaggtctaacagt

SEQ ID NO: 1135923 - DNA, 15 bp, Homo sapiens
ggacaggtctaacag

SEQ ID NO: 1135924 - DNA, 15 bp, Homo sapiens
aggacaggtctaaca

SEQ ID NO: 1135925 - DNA, 15 bp, Homo sapiens
aaggacaggtctaac

SEQ ID NO: 1135926 - DNA, 15 bp, Homo sapiens
gaaggacaggtctaa

SEQ ID NO: 1135927 - DNA, 15 bp, Homo sapiens
ggaaggacaggtcta

SEQ ID NO: 1135928 - DNA, 15 bp, Homo sapiens
gggaaggacaggtct

SEQ ID NO: 1135929 - DNA, 15 bp, Homo sapiens
agggaaggacaggtc

SEQ ID NO: 1135930 - DNA, 15 bp, Homo sapiens
aagggaaggacaggt

SEQ ID NO: 1135931 - DNA, 15 bp, Homo sapiens
aaagggaaggacagg

SEQ ID NO: 1135932 - DNA, 15 bp, Homo sapiens
gaaagggaaggacag

SEQ ID NO: 1135933 - DNA, 15 bp, Homo sapiens
tgaaagggaaggaca

SEQ ID NO: 1135934 - DNA, 15 bp, Homo sapiens
ctgaaagggaaggac

SEQ ID NO: 1135935 - DNA, 15 bp, Homo sapiens
gctgaaagggaagga

SEQ ID NO: 1135936 - DNA, 15 bp, Homo sapiens
tgctgaaagggaagg

SEQ ID NO: 1135937 - DNA, 15 bp, Homo sapiens
atgctgaaagggaag

SEQ ID NO: 1135938 - DNA, 15 bp, Homo sapiens
catgctgaaagggaa

SEQ ID NO: 1135939 - DNA, 15 bp, Homo sapiens
gcatgctgaaaggga

SEQ ID NO: 1135940 - DNA, 15 bp, Homo sapiens
agcatgctgaaaggg

SEQ ID NO: 1135941 - DNA, 15 bp, Homo sapiens
aagcatgctgaaagg

SEQ ID NO: 1135942 - DNA, 15 bp, Homo sapiens
aaagcatgctgaaag

SEQ ID NO: 1135943 - DNA, 15 bp, Homo sapiens
caaagcatgctgaaa

SEQ ID NO: 1135944 - DNA, 15 bp, Homo sapiens
acaaagcatgctgaa

SEQ ID NO: 1135945 - DNA, 15 bp, Homo sapiens
gacaaagcatgctga

SEQ ID NO: 1135946 - DNA, 15 bp, Homo sapiens
ggacaaagcatgctg

SEQ ID NO: 1135947 - DNA, 15 bp, Homo sapiens
tggacaaagcatgct

SEQ ID NO: 1135948 - DNA, 15 bp, Homo sapiens
atggacaaagcatgc

SEQ ID NO: 1135949 - DNA, 15 bp, Homo sapiens
tatggacaaagcatg

SEQ ID NO: 1135950 - DNA, 15 bp, Homo sapiens
atatggacaaagcat

SEQ ID NO: 1135951 - DNA, 15 bp, Homo sapiens
aatatggacaaagca

SEQ ID NO: 1135952 - DNA, 15 bp, Homo sapiens
aaatatggacaaagc

SEQ ID NO: 1135953 - DNA, 15 bp, Homo sapiens
taaatatggacaaag

SEQ ID NO: 1135954 - DNA, 15 bp, Homo sapiens
ctaaatatggacaaa

SEQ ID NO: 1135955 - DNA, 15 bp, Homo sapiens
tctaaatatggacaa

SEQ ID NO: 1135956 - DNA, 15 bp, Homo sapiens
ttctaaatatggaca

SEQ ID NO: 1135957 - DNA, 15 bp, Homo sapiens
cttctaaatatggac

SEQ ID NO: 1135958 - DNA, 15 bp, Homo sapiens
gcttctaaatatgga

SEQ ID NO: 1135959 - DNA, 15 bp, Homo sapiens
agcttctaaatatgg

SEQ ID NO: 1135960 - DNA, 15 bp, Homo sapiens
cagcttctaaatatg

SEQ ID NO: 1135961 - DNA, 15 bp, Homo sapiens
acagcttctaaatat

SEQ ID NO: 1135962 - DNA, 15 bp, Homo sapiens
aacagcttctaaata

SEQ ID NO: 1135963 - DNA, 15 bp, Homo sapiens
caacagcttctaaat

SEQ ID NO: 1135964 - DNA, 15 bp, Homo sapiens
tcaacagcttctaaa

SEQ ID NO: 1135965 - DNA, 15 bp, Homo sapiens
ttcaacagcttctaa

SEQ ID NO: 1135966 - DNA, 15 bp, Homo sapiens
cttcaacagcttcta

SEQ ID NO: 1135967 - DNA, 15 bp, Homo sapiens
gcttcaacagcttct

SEQ ID NO: 1135968 - DNA, 15 bp, Homo sapiens
ggcttcaacagcttc

SEQ ID NO: 1135969 - DNA, 15 bp, Homo sapiens
tggcttcaacagctt

SEQ ID NO: 1135970 - DNA, 15 bp, Homo sapiens
atggcttcaacagct

SEQ ID NO: 1135971 - DNA, 15 bp, Homo sapiens
aatggcttcaacagc

SEQ ID NO: 1135972 - DNA, 15 bp, Homo sapiens
taatggcttcaacag

SEQ ID NO: 1135973 - DNA, 15 bp, Homo sapiens
gtaatggcttcaaca

SEQ ID NO: 1135974 - DNA, 15 bp, Homo sapiens
agtaatggcttcaac

SEQ ID NO: 1135975 - DNA, 15 bp, Homo sapiens
aagtaatggcttcaa

SEQ ID NO: 1135976 - DNA, 15 bp, Homo sapiens
caagtaatggcttca

SEQ ID NO: 1135977 - DNA, 15 bp, Homo sapiens
acaagtaatggcttc

SEQ ID NO: 1135978 - DNA, 15 bp, Homo sapiens
gacaagtaatggctt

SEQ ID NO: 1135979 - DNA, 15 bp, Homo sapiens
agacaagtaatggct

SEQ ID NO: 1135980 - DNA, 15 bp, Homo sapiens
cagacaagtaatggc

SEQ ID NO: 1135981 - DNA, 15 bp, Homo sapiens
ccagacaagtaatgg

SEQ ID NO: 1135982 - DNA, 15 bp, Homo sapiens
accagacaagtaatg

SEQ ID NO: 1135983 - DNA, 15 bp, Homo sapiens
gaccagacaagtaat

SEQ ID NO: 1135984 - DNA, 15 bp, Homo sapiens
tgaccagacaagtaa

SEQ ID NO: 1135985 - DNA, 15 bp, Homo sapiens
ctgaccagacaagta

SEQ ID NO: 1135986 - DNA, 15 bp, Homo sapiens
actgaccagacaagt

SEQ ID NO: 1135987 - DNA, 15 bp, Homo sapiens
aactgaccagacaag

SEQ ID NO: 1135988 - DNA, 15 bp, Homo sapiens
aaactgaccagacaa

SEQ ID NO: 1135989 - DNA, 15 bp, Homo sapiens
aaaactgaccagaca

SEQ ID NO: 1135990 - DNA, 15 bp, Homo sapiens
aaaaactgaccagac

SEQ ID NO: 1135991 - DNA, 15 bp, Homo sapiens
taaaaactgaccaga

SEQ ID NO: 1135992 - DNA, 15 bp, Homo sapiens
ctaaaaactgaccag

SEQ ID NO: 1135993 - DNA, 15 bp, Homo sapiens
actaaaaactgacca

SEQ ID NO: 1135994 - DNA, 15 bp, Homo sapiens
cactaaaaactgacc

SEQ ID NO: 1135995 - DNA, 15 bp, Homo sapiens
gcactaaaaactgac

SEQ ID NO: 1135996 - DNA, 15 bp, Homo sapiens
agcactaaaaactga

SEQ ID NO: 1135997 - DNA, 15 bp, Homo sapiens
cagcactaaaaactg

SEQ ID NO: 1135998 - DNA, 15 bp, Homo sapiens
ccagcactaaaaact

SEQ ID NO: 1135999 - DNA, 15 bp, Homo sapiens
tccagcactaaaaac

SEQ ID NO: 1136000 - DNA, 15 bp, Homo sapiens
ttccagcactaaaaa

SEQ ID NO: 1136001 - DNA, 15 bp, Homo sapiens
attccagcactaaaa

SEQ ID NO: 1136002 - DNA, 15 bp, Homo sapiens
cattccagcactaaa

SEQ ID NO: 1136003 - DNA, 15 bp, Homo sapiens
ccattccagcactaa

SEQ ID NO: 1136004 - DNA, 15 bp, Homo sapiens
tccattccagcacta

SEQ ID NO: 1136005 - DNA, 15 bp, Homo sapiens
gtccattccagcact

SEQ ID NO: 1136006 - DNA, 15 bp, Homo sapiens
ggtccattccagcac

SEQ ID NO: 1136007 - DNA, 15 bp, Homo sapiens
aggtccattccagca

SEQ ID NO: 1136008 - DNA, 15 bp, Homo sapiens
taggtccattccagc

SEQ ID NO: 1136009 - DNA, 15 bp, Homo sapiens
ctaggtccattccag

SEQ ID NO: 1136010 - DNA, 15 bp, Homo sapiens
gctaggtccattcca

SEQ ID NO: 1136011 - DNA, 15 bp, Homo sapiens
ggctaggtccattcc

SEQ ID NO: 1136012 - DNA, 15 bp, Homo sapiens
aggctaggtccattc

SEQ ID NO: 1136013 - DNA, 15 bp, Homo sapiens
aaggctaggtccatt

SEQ ID NO: 1136014 - DNA, 15 bp, Homo sapiens
aaaggctaggtccat

SEQ ID NO: 1136015 - DNA, 15 bp, Homo sapiens
aaaaggctaggtcca

SEQ ID NO: 1136016 - DNA, 15 bp, Homo sapiens
taaaaggctaggtcc

SEQ ID NO: 1136017 - DNA, 15 bp, Homo sapiens
ctaaaaggctaggtc

SEQ ID NO: 1136018 - DNA, 15 bp, Homo sapiens
cctaaaaggctaggt

SEQ ID NO: 1136019 - DNA, 15 bp, Homo sapiens
gcctaaaaggctagg

SEQ ID NO: 1136020 - DNA, 15 bp, Homo sapiens
ggcctaaaaggctag

SEQ ID NO: 1136021 - DNA, 15 bp, Homo sapiens
aggcctaaaaggcta

SEQ ID NO: 1136022 - DNA, 15 bp, Homo sapiens
aaggcctaaaaggct

SEQ ID NO: 1136023 - DNA, 15 bp, Homo sapiens
gaaggcctaaaaggc

SEQ ID NO: 1136024 - DNA, 15 bp, Homo sapiens
agaaggcctaaaagg

SEQ ID NO: 1136025 - DNA, 15 bp, Homo sapiens
cagaaggcctaaaag

SEQ ID NO: 1136026 - DNA, 15 bp, Homo sapiens
tcagaaggcctaaaa

SEQ ID NO: 1136027 - DNA, 15 bp, Homo sapiens
ctcagaaggcctaaa

SEQ ID NO: 1136028 - DNA, 15 bp, Homo sapiens
tctcagaaggcctaa

SEQ ID NO: 1136029 - DNA, 15 bp, Homo sapiens
atctcagaaggccta

SEQ ID NO: 1136030 - DNA, 15 bp, Homo sapiens
aatctcagaaggcct

SEQ ID NO: 1136031 - DNA, 15 bp, Homo sapiens
aaatctcagaaggcc

SEQ ID NO: 1136032 - DNA, 15 bp, Homo sapiens
taaatctcagaaggc

SEQ ID NO: 1136033 - DNA, 15 bp, Homo sapiens
ctaaatctcagaagg

SEQ ID NO: 1136034 - DNA, 15 bp, Homo sapiens
actaaatctcagaag

SEQ ID NO: 1136035 - DNA, 15 bp, Homo sapiens
aactaaatctcagaa

SEQ ID NO: 1136036 - DNA, 15 bp, Homo sapiens
aaactaaatctcaga

SEQ ID NO: 1136037 - DNA, 15 bp, Homo sapiens
caaactaaatctcag

SEQ ID NO: 1136038 - DNA, 15 bp, Homo sapiens
tcaaactaaatctca

SEQ ID NO: 1136039 - DNA, 15 bp, Homo sapiens
atcaaactaaatctc

SEQ ID NO: 1136040 - DNA, 15 bp, Homo sapiens
gatcaaactaaatct

SEQ ID NO: 1136041 - DNA, 15 bp, Homo sapiens
agatcaaactaaatc

SEQ ID NO: 1136042 - DNA, 15 bp, Homo sapiens
gagatcaaactaaat

SEQ ID NO: 1136043 - DNA, 15 bp, Homo sapiens
cgagatcaaactaaa

SEQ ID NO: 1136044 - DNA, 15 bp, Homo sapiens
acgagatcaaactaa

SEQ ID NO: 1136045 - DNA, 15 bp, Homo sapiens
gacgagatcaaacta

SEQ ID NO: 1136046 - DNA, 15 bp, Homo sapiens
agacgagatcaaact

SEQ ID NO: 1136047 - DNA, 15 bp, Homo sapiens
aagacgagatcaaac

SEQ ID NO: 1136048 - DNA, 15 bp, Homo sapiens
aaagacgagatcaaa

SEQ ID NO: 1136049 - DNA, 15 bp, Homo sapiens
gaaagacgagatcaa

SEQ ID NO: 1136050 - DNA, 15 bp, Homo sapiens
ggaaagacgagatca

SEQ ID NO: 1136051 - DNA, 15 bp, Homo sapiens
gggaaagacgagatc

SEQ ID NO: 1136052 - DNA, 15 bp, Homo sapiens
tgggaaagacgagat

SEQ ID NO: 1136053 - DNA, 15 bp, Homo sapiens
gtgggaaagacgaga

SEQ ID NO: 1136054 - DNA, 15 bp, Homo sapiens
ggtgggaaagacgag

SEQ ID NO: 1136055 - DNA, 15 bp, Homo sapiens
aggtgggaaagacga

SEQ ID NO: 1136056 - DNA, 15 bp, Homo sapiens
taggtgggaaagacg

SEQ ID NO: 1136057 - DNA, 15 bp, Homo sapiens
ttaggtgggaaagac

SEQ ID NO: 1136058 - DNA, 15 bp, Homo sapiens
attaggtgggaaaga

SEQ ID NO: 1136059 - DNA, 15 bp, Homo sapiens
cattaggtgggaaag

SEQ ID NO: 1136060 - DNA, 15 bp, Homo sapiens
ccattaggtgggaaa

SEQ ID NO: 1136061 - DNA, 15 bp, Homo sapiens
gccattaggtgggaa

SEQ ID NO: 1136062 - DNA, 15 bp, Homo sapiens
agccattaggtggga

SEQ ID NO: 1136063 - DNA, 15 bp, Homo sapiens
gagccattaggtggg

SEQ ID NO: 1136064 - DNA, 15 bp, Homo sapiens
agagccattaggtgg

SEQ ID NO: 1136065 - DNA, 15 bp, Homo sapiens
cagagccattaggtg

SEQ ID NO: 1136066 - DNA, 15 bp, Homo sapiens
acagagccattaggt

SEQ ID NO: 1136067 - DNA, 15 bp, Homo sapiens
aacagagccattagg

SEQ ID NO: 1136068 - DNA, 15 bp, Homo sapiens
gaacagagccattag

SEQ ID NO: 1136069 - DNA, 15 bp, Homo sapiens
agaacagagccatta

SEQ ID NO: 1136070 - DNA, 15 bp, Homo sapiens
tagaacagagccatt

SEQ ID NO: 1136071 - DNA, 15 bp, Homo sapiens
gtagaacagagccat

SEQ ID NO: 1136072 - DNA, 15 bp, Homo sapiens
agtagaacagagcca

SEQ ID NO: 1136073 - DNA, 15 bp, Homo sapiens
tagtagaacagagcc

SEQ ID NO: 1136074 - DNA, 15 bp, Homo sapiens
gtagtagaacagagc

SEQ ID NO: 1136075 - DNA, 15 bp, Homo sapiens
tgtagtagaacagag

SEQ ID NO: 1136076 - DNA, 15 bp, Homo sapiens
atgtagtagaacaga

SEQ ID NO: 1136077 - DNA, 15 bp, Homo sapiens
tatgtagtagaacag

SEQ ID NO: 1136078 - DNA, 15 bp, Homo sapiens
ctatgtagtagaaca

SEQ ID NO: 1136079 - DNA, 15 bp, Homo sapiens
tctatgtagtagaac

SEQ ID NO: 1136080 - DNA, 15 bp, Homo sapiens
atctatgtagtagaa

SEQ ID NO: 1136081 - DNA, 15 bp, Homo sapiens
aatctatgtagtaga

SEQ ID NO: 1136082 - DNA, 15 bp, Homo sapiens
aaatctatgtagtag

SEQ ID NO: 1136083 - DNA, 15 bp, Homo sapiens
caaatctatgtagta

SEQ ID NO: 1136084 - DNA, 15 bp, Homo sapiens
tcaaatctatgtagt

SEQ ID NO: 1136085 - DNA, 15 bp, Homo sapiens
atcaaatctatgtag

SEQ ID NO: 1136086 - DNA, 15 bp, Homo sapiens
gatcaaatctatgta

SEQ ID NO: 1136087 - DNA, 15 bp, Homo sapiens
agatcaaatctatgt

SEQ ID NO: 1136088 - DNA, 15 bp, Homo sapiens
cagatcaaatctatg

SEQ ID NO: 1136089 - DNA, 15 bp, Homo sapiens
tcagatcaaatctat

SEQ ID NO: 1136090 - DNA, 15 bp, Homo sapiens
ttcagatcaaatcta

SEQ ID NO: 1136091 - DNA, 15 bp, Homo sapiens
tttcagatcaaatct

SEQ ID NO: 1136092 - DNA, 15 bp, Homo sapiens
gtttcagatcaaatc

SEQ ID NO: 1136093 - DNA, 15 bp, Homo sapiens
tgtttcagatcaaat

SEQ ID NO: 1136094 - DNA, 15 bp, Homo sapiens
ctgtttcagatcaaa

SEQ ID NO: 1136095 - DNA, 15 bp, Homo sapiens
actgtttcagatcaa

SEQ ID NO: 1136096 - DNA, 15 bp, Homo sapiens
aactgtttcagatca

SEQ ID NO: 1136097 - DNA, 15 bp, Homo sapiens
gaactgtttcagatc

SEQ ID NO: 1136098 - DNA, 15 bp, Homo sapiens
agaactgtttcagat

SEQ ID NO: 1136099 - DNA, 15 bp, Homo sapiens
gagaactgtttcaga

SEQ ID NO: 1136100 - DNA, 15 bp, Homo sapiens
agagaactgtttcag

SEQ ID NO: 1136101 - DNA, 15 bp, Homo sapiens
cagagaactgtttca

SEQ ID NO: 1136102 - DNA, 15 bp, Homo sapiens
acagagaactgtttc

SEQ ID NO: 1136103 - DNA, 15 bp, Homo sapiens
aacagagaactgttt

SEQ ID NO: 1136104 - DNA, 15 bp, Homo sapiens
aaacagagaactgtt

SEQ ID NO: 1136105 - DNA, 15 bp, Homo sapiens
gaaacagagaactgt

SEQ ID NO: 1136106 - DNA, 15 bp, Homo sapiens
agaaacagagaactg

SEQ ID NO: 1136107 - DNA, 15 bp, Homo sapiens
tagaaacagagaact

SEQ ID NO: 1136108 - DNA, 15 bp, Homo sapiens
ttagaaacagagaac

SEQ ID NO: 1136109 - DNA, 15 bp, Homo sapiens
tttagaaacagagaa

SEQ ID NO: 1136110 - DNA, 15 bp, Homo sapiens
ttttagaaacagaga

SEQ ID NO: 1136111 - DNA, 15 bp, Homo sapiens
attttagaaacagag

SEQ ID NO: 1136112 - DNA, 15 bp, Homo sapiens
tattttagaaacaga

SEQ ID NO: 1136113 - DNA, 15 bp, Homo sapiens
ttattttagaaacag

SEQ ID NO: 1136114 - DNA, 15 bp, Homo sapiens
gttattttagaaaca

SEQ ID NO: 1136115 - DNA, 15 bp, Homo sapiens
agttattttagaaac

SEQ ID NO: 1136116 - DNA, 15 bp, Homo sapiens
aagttattttagaaa

SEQ ID NO: 1136117 - DNA, 15 bp, Homo sapiens
aaagttattttagaa

SEQ ID NO: 1136118 - DNA, 15 bp, Homo sapiens
gaaagttattttaga

SEQ ID NO: 1136119 - DNA, 15 bp, Homo sapiens
agaaagttattttag

SEQ ID NO: 1136120 - DNA, 15 bp, Homo sapiens
aagaaagttatttta

SEQ ID NO: 1136121 - DNA, 15 bp, Homo sapiens
aaagaaagttatttt

SEQ ID NO: 1136122 - DNA, 15 bp, Homo sapiens
aaaagaaagttattt

SEQ ID NO: 1136123 - DNA, 15 bp, Homo sapiens
gaaaagaaagttatt

SEQ ID NO: 1136124 - DNA, 15 bp, Homo sapiens
tgaaaagaaagttat

SEQ ID NO: 1136125 - DNA, 15 bp, Homo sapiens
atgaaaagaaagtta

SEQ ID NO: 1136126 - DNA, 15 bp, Homo sapiens
catgaaaagaaagtt

SEQ ID NO: 1136127 - DNA, 15 bp, Homo sapiens
tcatgaaaagaaagt

SEQ ID NO: 1136128 - DNA, 15 bp, Homo sapiens
atcatgaaaagaaag

SEQ ID NO: 1136129 - DNA, 15 bp, Homo sapiens
tatcatgaaaagaaa

SEQ ID NO: 1136130 - DNA, 15 bp, Homo sapiens
ctatcatgaaaagaa

SEQ ID NO: 1136131 - DNA, 15 bp, Homo sapiens
actatcatgaaaaga

SEQ ID NO: 1136132 - DNA, 15 bp, Homo sapiens
gactatcatgaaaag

SEQ ID NO: 1136133 - DNA, 15 bp, Homo sapiens
tgactatcatgaaaa

SEQ ID NO: 1136134 - DNA, 15 bp, Homo sapiens
gtgactatcatgaaa

SEQ ID NO: 1136135 - DNA, 15 bp, Homo sapiens
tgtgactatcatgaa

SEQ ID NO: 1136136 - DNA, 15 bp, Homo sapiens
ctgtgactatcatga

SEQ ID NO: 1136137 - DNA, 15 bp, Homo sapiens
actgtgactatcatg

SEQ ID NO: 1136138 - DNA, 15 bp, Homo sapiens
tactgtgactatcat

SEQ ID NO: 1136139 - DNA, 15 bp, Homo sapiens
ttactgtgactatca

SEQ ID NO: 1136140 - DNA, 15 bp, Homo sapiens
tttactgtgactatc

SEQ ID NO: 1136141 - DNA, 15 bp, Homo sapiens
ctttactgtgactat

SEQ ID NO: 1136142 - DNA, 15 bp, Homo sapiens
actttactgtgacta

SEQ ID NO: 1136143 - DNA, 15 bp, Homo sapiens
tactttactgtgact

SEQ ID NO: 1136144 - DNA, 15 bp, Homo sapiens
gtactttactgtgac

SEQ ID NO: 1136145 - DNA, 15 bp, Homo sapiens
tgtactttactgtga

SEQ ID NO: 1136146 - DNA, 15 bp, Homo sapiens
atgtactttactgtg

SEQ ID NO: 1136147 - DNA, 15 bp, Homo sapiens
aatgtactttactgt

SEQ ID NO: 1136148 - DNA, 15 bp, Homo sapiens
aaatgtactttactg

SEQ ID NO: 1136149 - DNA, 15 bp, Homo sapiens
taaatgtactttact

SEQ ID NO: 1136150 - DNA, 15 bp, Homo sapiens
ataaatgtactttac

SEQ ID NO: 1136151 - DNA, 15 bp, Homo sapiens
aataaatgtacttta

SEQ ID NO: 1136152 - DNA, 15 bp, Homo sapiens
taataaatgtacttt

SEQ ID NO: 1136153 - DNA, 15 bp, Homo sapiens
ataataaatgtactt

SEQ ID NO: 1136154 - DNA, 15 bp, Homo sapiens
cataataaatgtact

SEQ ID NO: 1136155 - DNA, 15 bp, Homo sapiens
ccataataaatgtac

SEQ ID NO: 1136156 - DNA, 15 bp, Homo sapiens
tccataataaatgta

SEQ ID NO: 1136157 - DNA, 15 bp, Homo sapiens
ttccataataaatgt

SEQ ID NO: 1136158 - DNA, 15 bp, Homo sapiens
tttccataataaatg

SEQ ID NO: 1136159 - DNA, 15 bp, Homo sapiens
ttttccataataaat

SEQ ID NO: 1136160 - DNA, 15 bp, Homo sapiens
tttttccataataaa

SEQ ID NO: 1136161 - DNA, 15 bp, Homo sapiens
atttttccataataa

SEQ ID NO: 1136162 - DNA, 15 bp, Homo sapiens
gatttttccataata

SEQ ID NO: 1136163 - DNA, 15 bp, Homo sapiens
tgatttttccataat

SEQ ID NO: 1136164 - DNA, 15 bp, Homo sapiens
ttgatttttccataa

SEQ ID NO: 1136165 - DNA, 15 bp, Homo sapiens
attgatttttccata

SEQ ID NO: 1136166 - DNA, 15 bp, Homo sapiens
tattgatttttccat

SEQ ID NO: 1136167 - DNA, 15 bp, Homo sapiens
ttattgatttttcca

SEQ ID NO: 1136168 - DNA, 15 bp, Homo sapiens
cttattgatttttcc

SEQ ID NO: 1136169 - DNA, 15 bp, Homo sapiens
acttattgatttttc

SEQ ID NO: 1136170 - DNA, 15 bp, Homo sapiens
tacttattgattttt

SEQ ID NO: 1136171 - DNA, 15 bp, Homo sapiens
atacttattgatttt

SEQ ID NO: 1136172 - DNA, 15 bp, Homo sapiens
tatacttattgattt

SEQ ID NO: 1136173 - DNA, 15 bp, Homo sapiens
ttatacttattgatt

SEQ ID NO: 1136174 - DNA, 15 bp, Homo sapiens
gttatacttattgat

SEQ ID NO: 1136175 - DNA, 15 bp, Homo sapiens
cgttatacttattga

SEQ ID NO: 1136176 - DNA, 15 bp, Homo sapiens
tcgttatacttattg

SEQ ID NO: 1136177 - DNA, 15 bp, Homo sapiens
ctcgttatacttatt

SEQ ID NO: 1136178 - DNA, 15 bp, Homo sapiens
actcgttatacttat

SEQ ID NO: 1136179 - DNA, 15 bp, Homo sapiens
cactcgttatactta

SEQ ID NO: 1136180 - DNA, 15 bp, Homo sapiens
tcactcgttatactt

SEQ ID NO: 1136181 - DNA, 15 bp, Homo sapiens
ttcactcgttatact

SEQ ID NO: 1136182 - DNA, 15 bp, Homo sapiens
tttcactcgttatac

SEQ ID NO: 1136183 - DNA, 15 bp, Homo sapiens
ctttcactcgttata

SEQ ID NO: 1136184 - DNA, 15 bp, Homo sapiens
actttcactcgttat

SEQ ID NO: 1136185 - DNA, 15 bp, Homo sapiens
aactttcactcgtta

SEQ ID NO: 1136186 - DNA, 15 bp, Homo sapiens
taactttcactcgtt

SEQ ID NO: 1136187 - DNA, 15 bp, Homo sapiens
ataactttcactcgt

SEQ ID NO: 1136188 - DNA, 15 bp, Homo sapiens
aataactttcactcg

SEQ ID NO: 1136189 - DNA, 15 bp, Homo sapiens
aaataactttcactc

SEQ ID NO: 1136190 - DNA, 15 bp, Homo sapiens
gaaataactttcact

SEQ ID NO: 1136191 - DNA, 15 bp, Homo sapiens
agaaataactttcac

SEQ ID NO: 1136192 - DNA, 15 bp, Homo sapiens
aagaaataactttca

SEQ ID NO: 1136193 - DNA, 15 bp, Homo sapiens
caagaaataactttc

SEQ ID NO: 1136194 - DNA, 15 bp, Homo sapiens
ccaagaaataacttt

SEQ ID NO: 1136195 - DNA, 15 bp, Homo sapiens
accaagaaataactt

SEQ ID NO: 1136196 - DNA, 15 bp, Homo sapiens
caccaagaaataact

SEQ ID NO: 1136197 - DNA, 15 bp, Homo sapiens
ccaccaagaaataac

SEQ ID NO: 1136198 - DNA, 15 bp, Homo sapiens
accaccaagaaataa

SEQ ID NO: 1136199 - DNA, 15 bp, Homo sapiens
taccaccaagaaata

SEQ ID NO: 1136200 - DNA, 15 bp, Homo sapiens
ttaccaccaagaaat

SEQ ID NO: 1136201 - DNA, 15 bp, Homo sapiens
cttaccaccaagaaa

SEQ ID NO: 1136202 - DNA, 15 bp, Homo sapiens
tcttaccaccaagaa

SEQ ID NO: 1136203 - DNA, 15 bp, Homo sapiens
atcttaccaccaaga

SEQ ID NO: 1136204 - DNA, 15 bp, Homo sapiens
aatcttaccaccaag

SEQ ID NO: 1136205 - DNA, 15 bp, Homo sapiens
taatcttaccaccaa

SEQ ID NO: 1136206 - DNA, 15 bp, Homo sapiens
ataatcttaccacca

SEQ ID NO: 1136207 - DNA, 15 bp, Homo sapiens
cataatcttaccacc

SEQ ID NO: 1136208 - DNA, 15 bp, Homo sapiens
ccataatcttaccac

SEQ ID NO: 1136209 - DNA, 15 bp, Homo sapiens
cccataatcttacca

SEQ ID NO: 1136210 - DNA, 15 bp, Homo sapiens
tcccataatcttacc

SEQ ID NO: 1136211 - DNA, 15 bp, Homo sapiens
atcccataatcttac

SEQ ID NO: 1136212 - DNA, 15 bp, Homo sapiens
aatcccataatctta

SEQ ID NO: 1136213 - DNA, 15 bp, Homo sapiens
taatcccataatctt

SEQ ID NO: 1136214 - DNA, 15 bp, Homo sapiens
ataatcccataatct

SEQ ID NO: 1136215 - DNA, 15 bp, Homo sapiens
aataatcccataatc

SEQ ID NO: 1136216 - DNA, 15 bp, Homo sapiens
aaataatcccataat

SEQ ID NO: 1136217 - DNA, 15 bp, Homo sapiens
caaataatcccataa

SEQ ID NO: 1136218 - DNA, 15 bp, Homo sapiens
tcaaataatcccata

SEQ ID NO: 1136219 - DNA, 15 bp, Homo sapiens
ttcaaataatcccat

SEQ ID NO: 1136220 - DNA, 15 bp, Homo sapiens
gttcaaataatccca

SEQ ID NO: 1136221 - DNA, 15 bp, Homo sapiens
agttcaaataatccc

SEQ ID NO: 1136222 - DNA, 15 bp, Homo sapiens
aagttcaaataatcc

SEQ ID NO: 1136223 - DNA, 15 bp, Homo sapiens
aaagttcaaataatc

SEQ ID NO: 1136224 - DNA, 15 bp, Homo sapiens
gaaagttcaaataat

SEQ ID NO: 1136225 - DNA, 15 bp, Homo sapiens
agaaagttcaaataa

SEQ ID NO: 1136226 - DNA, 15 bp, Homo sapiens
cagaaagttcaaata

SEQ ID NO: 1136227 - DNA, 15 bp, Homo sapiens
acagaaagttcaaat

SEQ ID NO: 1136228 - DNA, 15 bp, Homo sapiens
aacagaaagttcaaa

SEQ ID NO: 1136229 - DNA, 15 bp, Homo sapiens
aaacagaaagttcaa

SEQ ID NO: 1136230 - DNA, 15 bp, Homo sapiens
gaaacagaaagttca

SEQ ID NO: 1136231 - DNA, 15 bp, Homo sapiens
tgaaacagaaagttc

SEQ ID NO: 1136232 - DNA, 15 bp, Homo sapiens
atgaaacagaaagtt

SEQ ID NO: 1136233 - DNA, 15 bp, Homo sapiens
caatgaaacagaaag

SEQ ID NO: 1136234 - DNA, 15 bp, Homo sapiens
acaatgaaacagaaa

SEQ ID NO: 1136235 - DNA, 15 bp, Homo sapiens
tacaatgaaacagaa

SEQ ID NO: 1136236 - DNA, 15 bp, Homo sapiens
atacaatgaaacaga

SEQ ID NO: 1136237 - DNA, 15 bp, Homo sapiens
aatacaatgaaacag

SEQ ID NO: 1136238 - DNA, 15 bp, Homo sapiens
aaatacaatgaaaca

SEQ ID NO: 1136239 - DNA, 15 bp, Homo sapiens
aaaatacaatgaaac

SEQ ID NO: 1136240 - DNA, 15 bp, Homo sapiens
taaaatacaatgaaa

SEQ ID NO: 1136241 - DNA, 15 bp, Homo sapiens
ataaaatacaatgaa

SEQ ID NO: 1136242 - DNA, 15 bp, Homo sapiens
aataaaatacaatga

SEQ ID NO: 1136243 - DNA, 15 bp, Homo sapiens
aaataaaatacaatg

SEQ ID NO: 1136244 - DNA, 15 bp, Homo sapiens
taaataaaatacaat

SEQ ID NO: 1136245 - DNA, 15 bp, Homo sapiens
ataaataaaatacaa

SEQ ID NO: 1136246 - DNA, 15 bp, Homo sapiens
aataaataaaataca

SEQ ID NO: 1136247 - DNA, 15 bp, Homo sapiens
aaataaataaaatac

SEQ ID NO: 1136248 - DNA, 15 bp, Homo sapiens
acaaaaataaataaa

SEQ ID NO: 1136249 - DNA, 15 bp, Homo sapiens
cacaaaaataaataa

SEQ ID NO: 1136250 - DNA, 15 bp, Homo sapiens
tcacaaaaataaata

SEQ ID NO: 1136251 - DNA, 15 bp, Homo sapiens
atcacaaaaataaat

SEQ ID NO: 1136252 - DNA, 15 bp, Homo sapiens
catcacaaaaataaa

SEQ ID NO: 1136253 - DNA, 15 bp, Homo sapiens
ccatcacaaaaataa

SEQ ID NO: 1136254 - DNA, 15 bp, Homo sapiens
tccatcacaaaaata

SEQ ID NO: 1136255 - DNA, 15 bp, Homo sapiens
ctccatcacaaaaat

SEQ ID NO: 1136256 - DNA, 15 bp, Homo sapiens
actccatcacaaaaa

SEQ ID NO: 1136257 - DNA, 15 bp, Homo sapiens
gactccatcacaaaa

SEQ ID NO: 1136258 - DNA, 15 bp, Homo sapiens
agtgagactccatca

SEQ ID NO: 1136259 - DNA, 15 bp, Homo sapiens
tactactgcactcca

SEQ ID NO: 1136260 - DNA, 15 bp, Homo sapiens
gtactactgcactcc

SEQ ID NO: 1136261 - DNA, 15 bp, Homo sapiens
cgtactactgcactc

SEQ ID NO: 1136262 - DNA, 15 bp, Homo sapiens
tcgtactactgcact

SEQ ID NO: 1136263 - DNA, 15 bp, Homo sapiens
atcgtactactgcac

SEQ ID NO: 1136264 - DNA, 15 bp, Homo sapiens
gatcgtactactgca

SEQ ID NO: 1136265 - DNA, 15 bp, Homo sapiens
agatcgtactactgc

SEQ ID NO: 1136266 - DNA, 15 bp, Homo sapiens
aagatcgtactactg

SEQ ID NO: 1136267 - DNA, 15 bp, Homo sapiens
caagatcgtactact

SEQ ID NO: 1136268 - DNA, 15 bp, Homo sapiens
ccaagatcgtactac

SEQ ID NO: 1136269 - DNA, 15 bp, Homo sapiens
gccaagatcgtacta

SEQ ID NO: 1136270 - DNA, 15 bp, Homo sapiens
agccaagatcgtact

SEQ ID NO: 1136271 - DNA, 15 bp, Homo sapiens
gagccaagatcgtac

SEQ ID NO: 1136272 - DNA, 15 bp, Homo sapiens
tgagccaagatcgta

SEQ ID NO: 1136273 - DNA, 15 bp, Homo sapiens
gggaggttgcagtga

SEQ ID NO: 1136274 - DNA, 15 bp, Homo sapiens
ggggaggttgcagtg

SEQ ID NO: 1136275 - DNA, 15 bp, Homo sapiens
aggggaggttgcagt

SEQ ID NO: 1136276 - DNA, 15 bp, Homo sapiens
aaggggaggttgcag

SEQ ID NO: 1136277 - DNA, 15 bp, Homo sapiens
gaaggggaggttgca

SEQ ID NO: 1136278 - DNA, 15 bp, Homo sapiens
ggaaggggaggttgc

SEQ ID NO: 1136279 - DNA, 15 bp, Homo sapiens
gggaaggggaggttg

SEQ ID NO: 1136280 - DNA, 15 bp, Homo sapiens
tgggaaggggaggtt

SEQ ID NO: 1136281 - DNA, 15 bp, Homo sapiens
ctgggaaggggaggt

SEQ ID NO: 1136282 - DNA, 15 bp, Homo sapiens
actgggaaggggagg

SEQ ID NO: 1136283 - DNA, 15 bp, Homo sapiens
aactgggaaggggag

SEQ ID NO: 1136284 - DNA, 15 bp, Homo sapiens
gaactgggaagggga

SEQ ID NO: 1136285 - DNA, 15 bp, Homo sapiens
tgaactgggaagggg

SEQ ID NO: 1136286 - DNA, 15 bp, Homo sapiens
ttgaactgggaaggg

SEQ ID NO: 1136287 - DNA, 15 bp, Homo sapiens
cttgaactgggaagg

SEQ ID NO: 1136288 - DNA, 15 bp, Homo sapiens
acttgaactgggaag

SEQ ID NO: 1136289 - DNA, 15 bp, Homo sapiens
cacttgaactgggaa

SEQ ID NO: 1136290 - DNA, 15 bp, Homo sapiens
tcacttgaactggga

SEQ ID NO: 1136291 - DNA, 15 bp, Homo sapiens
atcacttgaactggg

SEQ ID NO: 1136292 - DNA, 15 bp, Homo sapiens
aatcacttgaactgg

SEQ ID NO: 1136293 - DNA, 15 bp, Homo sapiens
gaatcacttgaactg

SEQ ID NO: 1136294 - DNA, 15 bp, Homo sapiens
cgtgcgcctgtaatc

SEQ ID NO: 1136295 - DNA, 15 bp, Homo sapiens
gcgtgcgcctgtaat

SEQ ID NO: 1136296 - DNA, 15 bp, Homo sapiens
ggcgtgcgcctgtaa

SEQ ID NO: 1136297 - DNA, 15 bp, Homo sapiens
tggcgtgcgcctgta

SEQ ID NO: 1136298 - DNA, 15 bp, Homo sapiens
gtggcgtgcgcctgt

SEQ ID NO: 1136299 - DNA, 15 bp, Homo sapiens
ggtggcgtgcgcctg

SEQ ID NO: 1136300 - DNA, 15 bp, Homo sapiens
tggtggcgtgcgcct

SEQ ID NO: 1136301 - DNA, 15 bp, Homo sapiens
atggtggcgtgcgcc

SEQ ID NO: 1136302 - DNA, 15 bp, Homo sapiens
catggtggcgtgcgc

SEQ ID NO: 1136303 - DNA, 15 bp, Homo sapiens
gcatggtggcgtgcg

SEQ ID NO: 1136304 - DNA, 15 bp, Homo sapiens
ggcatggtggcgtgc

SEQ ID NO: 1136305 - DNA, 15 bp, Homo sapiens
caggcatggtggcgt

SEQ ID NO: 1136306 - DNA, 15 bp, Homo sapiens
taaaaaaattagcca

SEQ ID NO: 1136307 - DNA, 15 bp, Homo sapiens
gataaaaaaattagc

SEQ ID NO: 1136308 - DNA, 15 bp, Homo sapiens
agataaaaaaattag

SEQ ID NO: 1136309 - DNA, 15 bp, Homo sapiens
aagataaaaaaatta

SEQ ID NO: 1136310 - DNA, 15 bp, Homo sapiens
aaagataaaaaaatt

SEQ ID NO: 1136311 - DNA, 15 bp, Homo sapiens
taaagataaaaaaat

SEQ ID NO: 1136312 - DNA, 15 bp, Homo sapiens
ctaaagataaaaaaa

SEQ ID NO: 1136313 - DNA, 15 bp, Homo sapiens
actaaagataaaaaa

SEQ ID NO: 1136314 - DNA, 15 bp, Homo sapiens
tactaaagataaaaa

SEQ ID NO: 1136315 - DNA, 15 bp, Homo sapiens
ctactaaagataaaa

SEQ ID NO: 1136316 - DNA, 15 bp, Homo sapiens
tctactaaagataaa

SEQ ID NO: 1136317 - DNA, 15 bp, Homo sapiens
ctctactaaagataa

SEQ ID NO: 1136318 - DNA, 15 bp, Homo sapiens
tgtctctactaaaga

SEQ ID NO: 1136319 - DNA, 15 bp, Homo sapiens
ctgtctctactaaag

SEQ ID NO: 1136320 - DNA, 15 bp, Homo sapiens
ggtcaacatggtgaa

SEQ ID NO: 1136321 - DNA, 15 bp, Homo sapiens
tggtcaacatggtga

SEQ ID NO: 1136322 - DNA, 15 bp, Homo sapiens
ctggtcaacatggtg

SEQ ID NO: 1136323 - DNA, 15 bp, Homo sapiens
cctggtcaacatggt

SEQ ID NO: 1136324 - DNA, 15 bp, Homo sapiens
tcagcctggtcaaca

SEQ ID NO: 1136325 - DNA, 15 bp, Homo sapiens
atcagcctggtcaac

SEQ ID NO: 1136326 - DNA, 15 bp, Homo sapiens
gatcagcctggtcaa

SEQ ID NO: 1136327 - DNA, 15 bp, Homo sapiens
agatcagcctggtca

SEQ ID NO: 1136328 - DNA, 15 bp, Homo sapiens
gagatcagcctggtc

SEQ ID NO: 1136329 - DNA, 15 bp, Homo sapiens
ggagatcagcctggt

SEQ ID NO: 1136330 - DNA, 15 bp, Homo sapiens
tggagatcagcctgg

SEQ ID NO: 1136331 - DNA, 15 bp, Homo sapiens
ttggagatcagcctg

SEQ ID NO: 1136332 - DNA, 15 bp, Homo sapiens
gttggagatcagcct

SEQ ID NO: 1136333 - DNA, 15 bp, Homo sapiens
agttggagatcagcc

SEQ ID NO: 1136334 - DNA, 15 bp, Homo sapiens
gagttggagatcagc

SEQ ID NO: 1136335 - DNA, 15 bp, Homo sapiens
ggagttggagatcag

SEQ ID NO: 1136336 - DNA, 15 bp, Homo sapiens
aggagttggagatca

SEQ ID NO: 1136337 - DNA, 15 bp, Homo sapiens
caggagttggagatc

SEQ ID NO: 1136338 - DNA, 15 bp, Homo sapiens
tcaggagttggagat

SEQ ID NO: 1136339 - DNA, 15 bp, Homo sapiens
atcaggagttggaga

SEQ ID NO: 1136340 - DNA, 15 bp, Homo sapiens
gatcaggagttggag

SEQ ID NO: 1136341 - DNA, 15 bp, Homo sapiens
agatcaggagttgga

SEQ ID NO: 1136342 - DNA, 15 bp, Homo sapiens
gagatcaggagttgg

SEQ ID NO: 1136343 - DNA, 15 bp, Homo sapiens
tgagatcaggagttg

SEQ ID NO: 1136344 - DNA, 15 bp, Homo sapiens
tacctgagatcagga

SEQ ID NO: 1136345 - DNA, 15 bp, Homo sapiens
atacctgagatcagg

SEQ ID NO: 1136346 - DNA, 15 bp, Homo sapiens
gatacctgagatcag

SEQ ID NO: 1136347 - DNA, 15 bp, Homo sapiens
ggatacctgagatca

SEQ ID NO: 1136348 - DNA, 15 bp, Homo sapiens
tggatacctgagatc

SEQ ID NO: 1136349 - DNA, 15 bp, Homo sapiens
gtggatacctgagat

SEQ ID NO: 1136350 - DNA, 15 bp, Homo sapiens
ggtggatacctgaga

SEQ ID NO: 1136351 - DNA, 15 bp, Homo sapiens
aggtggatacctgag

SEQ ID NO: 1136352 - DNA, 15 bp, Homo sapiens
caggtggatacctga

SEQ ID NO: 1136353 - DNA, 15 bp, Homo sapiens
gcaggtggatacctg

SEQ ID NO: 1136354 - DNA, 15 bp, Homo sapiens
ggcaggtggatacct

SEQ ID NO: 1136355 - DNA, 15 bp, Homo sapiens
aggcaggtggatacc

SEQ ID NO: 1136356 - DNA, 15 bp, Homo sapiens
gaggcaggtggatac

SEQ ID NO: 1136357 - DNA, 15 bp, Homo sapiens
gtactttgggaggct

SEQ ID NO: 1136358 - DNA, 15 bp, Homo sapiens
ggtactttgggaggc

SEQ ID NO: 1136359 - DNA, 15 bp, Homo sapiens
cggtactttgggagg

SEQ ID NO: 1136360 - DNA, 15 bp, Homo sapiens
ccggtactttgggag

SEQ ID NO: 1136361 - DNA, 15 bp, Homo sapiens
cccggtactttggga

SEQ ID NO: 1136362 - DNA, 15 bp, Homo sapiens
tcccggtactttggg

SEQ ID NO: 1136363 - DNA, 15 bp, Homo sapiens
atcccggtactttgg

SEQ ID NO: 1136364 - DNA, 15 bp, Homo sapiens
aatcccggtactttg

SEQ ID NO: 1136365 - DNA, 15 bp, Homo sapiens
taatcccggtacttt

SEQ ID NO: 1136366 - DNA, 15 bp, Homo sapiens
gtaatcccggtactt

SEQ ID NO: 1136367 - DNA, 15 bp, Homo sapiens
cgtaatcccggtact

SEQ ID NO: 1136368 - DNA, 15 bp, Homo sapiens
ccgtaatcccggtac

SEQ ID NO: 1136369 - DNA, 15 bp, Homo sapiens
cccgtaatcccggta

SEQ ID NO: 1136370 - DNA, 15 bp, Homo sapiens
acccgtaatcccggt

SEQ ID NO: 1136371 - DNA, 15 bp, Homo sapiens
cacccgtaatcccgg

SEQ ID NO: 1136372 - DNA, 15 bp, Homo sapiens
acacccgtaatcccg

SEQ ID NO: 1136373 - DNA, 15 bp, Homo sapiens
cacacccgtaatccc

SEQ ID NO: 1136374 - DNA, 15 bp, Homo sapiens
tcacacccgtaatcc

SEQ ID NO: 1136375 - DNA, 15 bp, Homo sapiens
ctcacacccgtaatc

SEQ ID NO: 1136376 - DNA, 15 bp, Homo sapiens
gctcacacccgtaat

SEQ ID NO: 1136377 - DNA, 15 bp, Homo sapiens
ggctcacacccgtaa

SEQ ID NO: 1136378 - DNA, 15 bp, Homo sapiens
tggctcacacccgta

SEQ ID NO: 1136379 - DNA, 15 bp, Homo sapiens
gtggctcacacccgt

SEQ ID NO: 1136380 - DNA, 15 bp, Homo sapiens
ggtggctcacacccg

SEQ ID NO: 1136381 - DNA, 15 bp, Homo sapiens
gggtggctcacaccc

SEQ ID NO: 1136382 - DNA, 15 bp, Homo sapiens
agggtggctcacacc

SEQ ID NO: 1136383 - DNA, 15 bp, Homo sapiens
cagggtggctcacac

SEQ ID NO: 1136384 - DNA, 15 bp, Homo sapiens
gcagggtggctcaca

SEQ ID NO: 1136385 - DNA, 15 bp, Homo sapiens
ggcagggtggctcac

SEQ ID NO: 1136386 - DNA, 15 bp, Homo sapiens
aggcagggtggctca

SEQ ID NO: 1136387 - DNA, 15 bp, Homo sapiens
caggcagggtggctc

SEQ ID NO: 1136388 - DNA, 15 bp, Homo sapiens
ccaggcagggtggct

SEQ ID NO: 1136389 - DNA, 15 bp, Homo sapiens
gccaggcagggtggc

SEQ ID NO: 1136390 - DNA, 15 bp, Homo sapiens
ggccaggcagggtgg

SEQ ID NO: 1136391 - DNA, 15 bp, Homo sapiens
aggccaggcagggtg

SEQ ID NO: 1136392 - DNA, 15 bp, Homo sapiens
gaggccaggcagggt

SEQ ID NO: 1136393 - DNA, 15 bp, Homo sapiens
tgaggccaggcaggg

SEQ ID NO: 1136394 - DNA, 15 bp, Homo sapiens
atgaggccaggcagg

SEQ ID NO: 1136395 - DNA, 15 bp, Homo sapiens
aatgaggccaggcag

SEQ ID NO: 1136396 - DNA, 15 bp, Homo sapiens
aaatgaggccaggca

SEQ ID NO: 1136397 - DNA, 15 bp, Homo sapiens
aaaatgaggccaggc

SEQ ID NO: 1136398 - DNA, 15 bp, Homo sapiens
caaaatgaggccagg

SEQ ID NO: 1136399 - DNA, 15 bp, Homo sapiens
acaaaatgaggccag

SEQ ID NO: 1136400 - DNA, 15 bp, Homo sapiens
gacaaaatgaggcca

SEQ ID NO: 1136401 - DNA, 15 bp, Homo sapiens
agacaaaatgaggcc

SEQ ID NO: 1136402 - DNA, 15 bp, Homo sapiens
aagacaaaatgaggc

SEQ ID NO: 1136403 - DNA, 15 bp, Homo sapiens
aaagacaaaatgagg

SEQ ID NO: 1136404 - DNA, 15 bp, Homo sapiens
aaaagacaaaatgag

SEQ ID NO: 1136405 - DNA, 15 bp, Homo sapiens
caaaagacaaaatga

SEQ ID NO: 1136406 - DNA, 15 bp, Homo sapiens
ccaaaagacaaaatg

SEQ ID NO: 1136407 - DNA, 15 bp, Homo sapiens
cccaaaagacaaaat

SEQ ID NO: 1136408 - DNA, 15 bp, Homo sapiens
ccccaaaagacaaaa

SEQ ID NO: 1136409 - DNA, 15 bp, Homo sapiens
cccccaaaagacaaa

SEQ ID NO: 1136410 - DNA, 15 bp, Homo sapiens
acccccaaaagacaa

SEQ ID NO: 1136411 - DNA, 15 bp, Homo sapiens
tacccccaaaagaca

SEQ ID NO: 1136412 - DNA, 15 bp, Homo sapiens
atacccccaaaagac

SEQ ID NO: 1136413 - DNA, 15 bp, Homo sapiens
aatacccccaaaaga

SEQ ID NO: 1136414 - DNA, 15 bp, Homo sapiens
aaatacccccaaaag

SEQ ID NO: 1136415 - DNA, 15 bp, Homo sapiens
aaaatacccccaaaa

SEQ ID NO: 1136416 - DNA, 15 bp, Homo sapiens
aaaaatacccccaaa

SEQ ID NO: 1136417 - DNA, 15 bp, Homo sapiens
caaaaatacccccaa

SEQ ID NO: 1136418 - DNA, 15 bp, Homo sapiens
acaaaaataccccca

SEQ ID NO: 1136419 - DNA, 15 bp, Homo sapiens
cacaaaaataccccc

SEQ ID NO: 1136420 - DNA, 15 bp, Homo sapiens
acacaaaaatacccc

SEQ ID NO: 1136421 - DNA, 15 bp, Homo sapiens
cacacaaaaataccc

SEQ ID NO: 1136422 - DNA, 15 bp, Homo sapiens
gcacacaaaaatacc

SEQ ID NO: 1136423 - DNA, 15 bp, Homo sapiens
tgcacacaaaaatac

SEQ ID NO: 1136424 - DNA, 15 bp, Homo sapiens
ctgcacacaaaaata

SEQ ID NO: 1136425 - DNA, 15 bp, Homo sapiens
tctgcacacaaaaat

SEQ ID NO: 1136426 - DNA, 15 bp, Homo sapiens
atctgcacacaaaaa

SEQ ID NO: 1136427 - DNA, 15 bp, Homo sapiens
tatctgcacacaaaa

SEQ ID NO: 1136428 - DNA, 15 bp, Homo sapiens
atatctgcacacaaa

SEQ ID NO: 1136429 - DNA, 15 bp, Homo sapiens
tatatctgcacacaa

SEQ ID NO: 1136430 - DNA, 15 bp, Homo sapiens
atatatctgcacaca

SEQ ID NO: 1136431 - DNA, 15 bp, Homo sapiens
tatatatctgcacac

SEQ ID NO: 1136432 - DNA, 15 bp, Homo sapiens
atatatatctgcaca

SEQ ID NO: 1136433 - DNA, 15 bp, Homo sapiens
catatatatctgcac

SEQ ID NO: 1136434 - DNA, 15 bp, Homo sapiens
acatatatatctgca

SEQ ID NO: 1136435 - DNA, 15 bp, Homo sapiens
tacatatatatctgc

SEQ ID NO: 1136436 - DNA, 15 bp, Homo sapiens
atacatatatatctg

SEQ ID NO: 1136437 - DNA, 15 bp, Homo sapiens
tatacatatatatct

SEQ ID NO: 1136438 - DNA, 15 bp, Homo sapiens
atatacatatatatc

SEQ ID NO: 1136439 - DNA, 15 bp, Homo sapiens
ttatatacatatata

SEQ ID NO: 1136440 - DNA, 15 bp, Homo sapiens
tttatatacatatat

SEQ ID NO: 1136441 - DNA, 15 bp, Homo sapiens
atttatatacatata

SEQ ID NO: 1136442 - DNA, 15 bp, Homo sapiens
tatttatatacatat

SEQ ID NO: 1136443 - DNA, 15 bp, Homo sapiens
atatttatatacata

SEQ ID NO: 1136444 - DNA, 15 bp, Homo sapiens
aatatttatatacat

SEQ ID NO: 1136445 - DNA, 15 bp, Homo sapiens
aaatatttatataca

SEQ ID NO: 1136446 - DNA, 15 bp, Homo sapiens
aaaatatttatatac

SEQ ID NO: 1136447 - DNA, 15 bp, Homo sapiens
aaaaatatttatata

SEQ ID NO: 1136448 - DNA, 15 bp, Homo sapiens
gaaaaatatttatat

SEQ ID NO: 1136449 - DNA, 15 bp, Homo sapiens
ggaaaaatatttata

SEQ ID NO: 1136450 - DNA, 15 bp, Homo sapiens
gggaaaaatatttat

SEQ ID NO: 1136451 - DNA, 15 bp, Homo sapiens
agggaaaaatattta

SEQ ID NO: 1136452 - DNA, 15 bp, Homo sapiens
gagggaaaaatattt

SEQ ID NO: 1136453 - DNA, 15 bp, Homo sapiens
agagggaaaaatatt

SEQ ID NO: 1136454 - DNA, 15 bp, Homo sapiens
aagagggaaaaatat

SEQ ID NO: 1136455 - DNA, 15 bp, Homo sapiens
aaagagggaaaaata

SEQ ID NO: 1136456 - DNA, 15 bp, Homo sapiens
aaaagagggaaaaat

SEQ ID NO: 1136457 - DNA, 15 bp, Homo sapiens
gaaaagagggaaaaa

SEQ ID NO: 1136458 - DNA, 15 bp, Homo sapiens
ggaaaagagggaaaa

SEQ ID NO: 1136459 - DNA, 15 bp, Homo sapiens
gggaaaagagggaaa

SEQ ID NO: 1136460 - DNA, 15 bp, Homo sapiens
ggggaaaagagggaa

SEQ ID NO: 1136461 - DNA, 15 bp, Homo sapiens
tggggaaaagaggga

SEQ ID NO: 1136462 - DNA, 15 bp, Homo sapiens
ctggggaaaagaggg

SEQ ID NO: 1136463 - DNA, 15 bp, Homo sapiens
actggggaaaagagg

SEQ ID NO: 1136464 - DNA, 15 bp, Homo sapiens
aactggggaaaagag

SEQ ID NO: 1136465 - DNA, 15 bp, Homo sapiens
taactggggaaaaga

SEQ ID NO: 1136466 - DNA, 15 bp, Homo sapiens
ctaactggggaaaag

SEQ ID NO: 1136467 - DNA, 15 bp, Homo sapiens
actaactggggaaaa

SEQ ID NO: 1136468 - DNA, 15 bp, Homo sapiens
tactaactggggaaa

SEQ ID NO: 1136469 - DNA, 15 bp, Homo sapiens
atactaactggggaa

SEQ ID NO: 1136470 - DNA, 15 bp, Homo sapiens
aatactaactgggga

SEQ ID NO: 1136471 - DNA, 15 bp, Homo sapiens
aaatactaactgggg

SEQ ID NO: 1136472 - DNA, 15 bp, Homo sapiens
caaatactaactggg

SEQ ID NO: 1136473 - DNA, 15 bp, Homo sapiens
tcaaatactaactgg

SEQ ID NO: 1136474 - DNA, 15 bp, Homo sapiens
ctcaaatactaactg

SEQ ID NO: 1136475 - DNA, 15 bp, Homo sapiens
gctcaaatactaact

SEQ ID NO: 1136476 - DNA, 15 bp, Homo sapiens
tgctcaaatactaac

SEQ ID NO: 1136477 - DNA, 15 bp, Homo sapiens
ctgctcaaatactaa

SEQ ID NO: 1136478 - DNA, 15 bp, Homo sapiens
tctgctcaaatacta

SEQ ID NO: 1136479 - DNA, 15 bp, Homo sapiens
atctgctcaaatact

SEQ ID NO: 1136480 - DNA, 15 bp, Homo sapiens
catctgctcaaatac

SEQ ID NO: 1136481 - DNA, 15 bp, Homo sapiens
tcatctgctcaaata

SEQ ID NO: 1136482 - DNA, 15 bp, Homo sapiens
ttcatctgctcaaat

SEQ ID NO: 1136483 - DNA, 15 bp, Homo sapiens
gttcatctgctcaaa

SEQ ID NO: 1136484 - DNA, 15 bp, Homo sapiens
agttcatctgctcaa

SEQ ID NO: 1136485 - DNA, 15 bp, Homo sapiens
aagttcatctgctca

SEQ ID NO: 1136486 - DNA, 15 bp, Homo sapiens
aaagttcatctgctc

SEQ ID NO: 1136487 - DNA, 15 bp, Homo sapiens
caaagttcatctgct

SEQ ID NO: 1136488 - DNA, 15 bp, Homo sapiens
ccaaagttcatctgc

SEQ ID NO: 1136489 - DNA, 15 bp, Homo sapiens
tccaaagttcatctg

SEQ ID NO: 1136490 - DNA, 15 bp, Homo sapiens
gtccaaagttcatct

SEQ ID NO: 1136491 - DNA, 15 bp, Homo sapiens
ggtccaaagttcatc

SEQ ID NO: 1136492 - DNA, 15 bp, Homo sapiens
gggtccaaagttcat

SEQ ID NO: 1136493 - DNA, 15 bp, Homo sapiens
cgggtccaaagttca

SEQ ID NO: 1136494 - DNA, 15 bp, Homo sapiens
tcgggtccaaagttc

SEQ ID NO: 1136495 - DNA, 15 bp, Homo sapiens
ttcgggtccaaagtt

SEQ ID NO: 1136496 - DNA, 15 bp, Homo sapiens
attcgggtccaaagt

SEQ ID NO: 1136497 - DNA, 15 bp, Homo sapiens
tattcgggtccaaag

SEQ ID NO: 1136498 - DNA, 15 bp, Homo sapiens
gtattcgggtccaaa

SEQ ID NO: 1136499 - DNA, 15 bp, Homo sapiens
ggtattcgggtccaa

SEQ ID NO: 1136500 - DNA, 15 bp, Homo sapiens
aggtattcgggtcca

SEQ ID NO: 1136501 - DNA, 15 bp, Homo sapiens
caggtattcgggtcc

SEQ ID NO: 1136502 - DNA, 15 bp, Homo sapiens
acaggtattcgggtc

SEQ ID NO: 1136503 - DNA, 15 bp, Homo sapiens
tacaggtattcgggt

SEQ ID NO: 1136504 - DNA, 15 bp, Homo sapiens
atacaggtattcggg

SEQ ID NO: 1136505 - DNA, 15 bp, Homo sapiens
aatacaggtattcgg

SEQ ID NO: 1136506 - DNA, 15 bp, Homo sapiens
gaatacaggtattcg

SEQ ID NO: 1136507 - DNA, 15 bp, Homo sapiens
tgaatacaggtattc

SEQ ID NO: 1136508 - DNA, 15 bp, Homo sapiens
ttgaatacaggtatt

SEQ ID NO: 1136509 - DNA, 15 bp, Homo sapiens
cttgaatacaggtat

SEQ ID NO: 1136510 - DNA, 15 bp, Homo sapiens
acttgaatacaggta

SEQ ID NO: 1136511 - DNA, 15 bp, Homo sapiens
gacttgaatacaggt

SEQ ID NO: 1136512 - DNA, 15 bp, Homo sapiens
agacttgaatacagg

SEQ ID NO: 1136513 - DNA, 15 bp, Homo sapiens
gagacttgaatacag

SEQ ID NO: 1136514 - DNA, 15 bp, Homo sapiens
agagacttgaataca

SEQ ID NO: 1136515 - DNA, 15 bp, Homo sapiens
tagagacttgaatac

SEQ ID NO: 1136516 - DNA, 15 bp, Homo sapiens
ttagagacttgaata

SEQ ID NO: 1136517 - DNA, 15 bp, Homo sapiens
attagagacttgaat

SEQ ID NO: 1136518 - DNA, 15 bp, Homo sapiens
tattagagacttgaa

SEQ ID NO: 1136519 - DNA, 15 bp, Homo sapiens
gtattagagacttga

SEQ ID NO: 1136520 - DNA, 15 bp, Homo sapiens
ggtattagagacttg

SEQ ID NO: 1136521 - DNA, 15 bp, Homo sapiens
tggtattagagactt

SEQ ID NO: 1136522 - DNA, 15 bp, Homo sapiens
gtggtattagagact

SEQ ID NO: 1136523 - DNA, 15 bp, Homo sapiens
agtggtattagagac

SEQ ID NO: 1136524 - DNA, 15 bp, Homo sapiens
aagtggtattagaga

SEQ ID NO: 1136525 - DNA, 15 bp, Homo sapiens
gaagtggtattagag

SEQ ID NO: 1136526 - DNA, 15 bp, Homo sapiens
agaagtggtattaga

SEQ ID NO: 1136527 - DNA, 15 bp, Homo sapiens
aagaagtggtattag

SEQ ID NO: 1136528 - DNA, 15 bp, Homo sapiens
caagaagtggtatta

SEQ ID NO: 1136529 - DNA, 15 bp, Homo sapiens
ccaagaagtggtatt

SEQ ID NO: 1136530 - DNA, 15 bp, Homo sapiens
gccaagaagtggtat

SEQ ID NO: 1136531 - DNA, 15 bp, Homo sapiens
agccaagaagtggta

SEQ ID NO: 1136532 - DNA, 15 bp, Homo sapiens
tagccaagaagtggt

SEQ ID NO: 1136533 - DNA, 15 bp, Homo sapiens
atagccaagaagtgg

SEQ ID NO: 1136534 - DNA, 15 bp, Homo sapiens
aatagccaagaagtg

SEQ ID NO: 1136535 - DNA, 15 bp, Homo sapiens
aaatagccaagaagt

SEQ ID NO: 1136536 - DNA, 15 bp, Homo sapiens
aaaatagccaagaag

SEQ ID NO: 1136537 - DNA, 15 bp, Homo sapiens
gaaaatagccaagaa

SEQ ID NO: 1136538 - DNA, 15 bp, Homo sapiens
tgaaaatagccaaga

SEQ ID NO: 1136539 - DNA, 15 bp, Homo sapiens
atgaaaatagccaag

SEQ ID NO: 1136540 - DNA, 15 bp, Homo sapiens
aatgaaaatagccaa

SEQ ID NO: 1136541 - DNA, 15 bp, Homo sapiens
aaatgaaaatagcca

SEQ ID NO: 1136542 - DNA, 15 bp, Homo sapiens
aaaatgaaaatagcc

SEQ ID NO: 1136543 - DNA, 15 bp, Homo sapiens
taaaatgaaaatagc

SEQ ID NO: 1136544 - DNA, 15 bp, Homo sapiens
ataaaatgaaaatag

SEQ ID NO: 1136545 - DNA, 15 bp, Homo sapiens
gataaaatgaaaata

SEQ ID NO: 1136546 - DNA, 15 bp, Homo sapiens
tgataaaatgaaaat

SEQ ID NO: 1136547 - DNA, 15 bp, Homo sapiens
ttgataaaatgaaaa

SEQ ID NO: 1136548 - DNA, 15 bp, Homo sapiens
tttgataaaatgaaa

SEQ ID NO: 1136549 - DNA, 15 bp, Homo sapiens
atttgataaaatgaa

SEQ ID NO: 1136550 - DNA, 15 bp, Homo sapiens
catttgataaaatga

SEQ ID NO: 1136551 - DNA, 15 bp, Homo sapiens
ccatttgataaaatg

SEQ ID NO: 1136552 - DNA, 15 bp, Homo sapiens
gccatttgataaaat

SEQ ID NO: 1136553 - DNA, 15 bp, Homo sapiens
ggccatttgataaaa

SEQ ID NO: 1136554 - DNA, 15 bp, Homo sapiens
aggccatttgataaa

SEQ ID NO: 1136555 - DNA, 15 bp, Homo sapiens
gaggccatttgataa

SEQ ID NO: 1136556 - DNA, 15 bp, Homo sapiens
agaggccatttgata

SEQ ID NO: 1136557 - DNA, 15 bp, Homo sapiens
aagaggccatttgat

SEQ ID NO: 1136558 - DNA, 15 bp, Homo sapiens
taagaggccatttga

SEQ ID NO: 1136559 - DNA, 15 bp, Homo sapiens
ataagaggccatttg

SEQ ID NO: 1136560 - DNA, 15 bp, Homo sapiens
gataagaggccattt

SEQ ID NO: 1136561 - DNA, 15 bp, Homo sapiens
ggataagaggccatt

SEQ ID NO: 1136562 - DNA, 15 bp, Homo sapiens
aggataagaggccat

SEQ ID NO: 1136563 - DNA, 15 bp, Homo sapiens
gaggataagaggcca

SEQ ID NO: 1136564 - DNA, 15 bp, Homo sapiens
cgaggataagaggcc

SEQ ID NO: 1136565 - DNA, 15 bp, Homo sapiens
acgaggataagaggc

SEQ ID NO: 1136566 - DNA, 15 bp, Homo sapiens
aacgaggataagagg

SEQ ID NO: 1136567 - DNA, 15 bp, Homo sapiens
aaacgaggataagag

SEQ ID NO: 1136568 - DNA, 15 bp, Homo sapiens
aaaacgaggataaga

SEQ ID NO: 1136569 - DNA, 15 bp, Homo sapiens
aaaaacgaggataag

SEQ ID NO: 1136570 - DNA, 15 bp, Homo sapiens
gaaaaacgaggataa

SEQ ID NO: 1136571 - DNA, 15 bp, Homo sapiens
agaaaaacgaggata

SEQ ID NO: 1136572 - DNA, 15 bp, Homo sapiens
gagaaaaacgaggat

SEQ ID NO: 1136573 - DNA, 15 bp, Homo sapiens
tgagaaaaacgagga

SEQ ID NO: 1136574 - DNA, 15 bp, Homo sapiens
atgagaaaaacgagg

SEQ ID NO: 1136575 - DNA, 15 bp, Homo sapiens
aatgagaaaaacgag

SEQ ID NO: 1136576 - DNA, 15 bp, Homo sapiens
aaatgagaaaaacga

SEQ ID NO: 1136577 - DNA, 15 bp, Homo sapiens
taaatgagaaaaacg

SEQ ID NO: 1136578 - DNA, 15 bp, Homo sapiens
ataaatgagaaaaac

SEQ ID NO: 1136579 - DNA, 15 bp, Homo sapiens
aataaatgagaaaaa

SEQ ID NO: 1136580 - DNA, 15 bp, Homo sapiens
taataaatgagaaaa

SEQ ID NO: 1136581 - DNA, 15 bp, Homo sapiens
ttaataaatgagaaa

SEQ ID NO: 1136582 - DNA, 15 bp, Homo sapiens
cttaataaatgagaa

SEQ ID NO: 1136583 - DNA, 15 bp, Homo sapiens
acttaataaatgaga

SEQ ID NO: 1136584 - DNA, 15 bp, Homo sapiens
tacttaataaatgag

SEQ ID NO: 1136585 - DNA, 15 bp, Homo sapiens
ctacttaataaatga

SEQ ID NO: 1136586 - DNA, 15 bp, Homo sapiens
tctacttaataaatg

SEQ ID NO: 1136587 - DNA, 15 bp, Homo sapiens
ctctacttaataaat

SEQ ID NO: 1136588 - DNA, 15 bp, Homo sapiens
tctctacttaataaa

SEQ ID NO: 1136589 - DNA, 15 bp, Homo sapiens
atctctacttaataa

SEQ ID NO: 1136590 - DNA, 15 bp, Homo sapiens
catctctacttaata

SEQ ID NO: 1136591 - DNA, 15 bp, Homo sapiens
acatctctacttaat

SEQ ID NO: 1136592 - DNA, 15 bp, Homo sapiens
tacatctctacttaa

SEQ ID NO: 1136593 - DNA, 15 bp, Homo sapiens
ttacatctctactta

SEQ ID NO: 1136594 - DNA, 15 bp, Homo sapiens
gttacatctctactt

SEQ ID NO: 1136595 - DNA, 15 bp, Homo sapiens
agttacatctctact

SEQ ID NO: 1136596 - DNA, 15 bp, Homo sapiens
tagttacatctctac

SEQ ID NO: 1136597 - DNA, 15 bp, Homo sapiens
gtagttacatctcta

SEQ ID NO: 1136598 - DNA, 15 bp, Homo sapiens
agtagttacatctct

SEQ ID NO: 1136599 - DNA, 15 bp, Homo sapiens
aagtagttacatctc

SEQ ID NO: 1136600 - DNA, 15 bp, Homo sapiens
caagtagttacatct

SEQ ID NO: 1136601 - DNA, 15 bp, Homo sapiens
tcaagtagttacatc

SEQ ID NO: 1136602 - DNA, 15 bp, Homo sapiens
atcaagtagttacat

SEQ ID NO: 1136603 - DNA, 15 bp, Homo sapiens
tatcaagtagttaca

SEQ ID NO: 1136604 - DNA, 15 bp, Homo sapiens
atatcaagtagttac

SEQ ID NO: 1136605 - DNA, 15 bp, Homo sapiens
tatatcaagtagtta

SEQ ID NO: 1136606 - DNA, 15 bp, Homo sapiens
ttatatcaagtagtt

SEQ ID NO: 1136607 - DNA, 15 bp, Homo sapiens
attatatcaagtagt

SEQ ID NO: 1136608 - DNA, 15 bp, Homo sapiens
aattatatcaagtag

SEQ ID NO: 1136609 - DNA, 15 bp, Homo sapiens
gaattatatcaagta

SEQ ID NO: 1136610 - DNA, 15 bp, Homo sapiens
tgaattatatcaagt

SEQ ID NO: 1136611 - DNA, 15 bp, Homo sapiens
ttgaattatatcaag

SEQ ID NO: 1136612 - DNA, 15 bp, Homo sapiens
tttgaattatatcaa

SEQ ID NO: 1136613 - DNA, 15 bp, Homo sapiens
ttttgaattatatca

SEQ ID NO: 1136614 - DNA, 15 bp, Homo sapiens
tttttgaattatatc

SEQ ID NO: 1136615 - DNA, 15 bp, Homo sapiens
gtttttgaattatat

SEQ ID NO: 1136616 - DNA, 15 bp, Homo sapiens
agtttttgaattata

SEQ ID NO: 1136617 - DNA, 15 bp, Homo sapiens
gagtttttgaattat

SEQ ID NO: 1136618 - DNA, 15 bp, Homo sapiens
tgagtttttgaatta

SEQ ID NO: 1136619 - DNA, 15 bp, Homo sapiens
ttgagtttttgaatt

SEQ ID NO: 1136620 - DNA, 15 bp, Homo sapiens
attgagtttttgaat

SEQ ID NO: 1136621 - DNA, 15 bp, Homo sapiens
tattgagtttttgaa

SEQ ID NO: 1136622 - DNA, 15 bp, Homo sapiens
ttattgagtttttga

SEQ ID NO: 1136623 - DNA, 15 bp, Homo sapiens
attattgagtttttg

SEQ ID NO: 1136624 - DNA, 15 bp, Homo sapiens
cattattgagttttt

SEQ ID NO: 1136625 - DNA, 15 bp, Homo sapiens
ccattattgagtttt

SEQ ID NO: 1136626 - DNA, 15 bp, Homo sapiens
gccattattgagttt

SEQ ID NO: 1136627 - DNA, 15 bp, Homo sapiens
tgccattattgagtt

SEQ ID NO: 1136628 - DNA, 15 bp, Homo sapiens
atgccattattgagt

SEQ ID NO: 1136629 - DNA, 15 bp, Homo sapiens
aatgccattattgag

SEQ ID NO: 1136630 - DNA, 15 bp, Homo sapiens
gaatgccattattga

SEQ ID NO: 1136631 - DNA, 15 bp, Homo sapiens
agaatgccattattg

SEQ ID NO: 1136632 - DNA, 15 bp, Homo sapiens
aagaatgccattatt

SEQ ID NO: 1136633 - DNA, 15 bp, Homo sapiens
aaagaatgccattat

SEQ ID NO: 1136634 - DNA, 15 bp, Homo sapiens
aaaagaatgccatta

SEQ ID NO: 1136635 - DNA, 15 bp, Homo sapiens
caaaagaatgccatt

SEQ ID NO: 1136636 - DNA, 15 bp, Homo sapiens
acaaaagaatgccat

SEQ ID NO: 1136637 - DNA, 15 bp, Homo sapiens
aacaaaagaatgcca

SEQ ID NO: 1136638 - DNA, 15 bp, Homo sapiens
aaacaaaagaatgcc

SEQ ID NO: 1136639 - DNA, 15 bp, Homo sapiens
aaaacaaaagaatgc

SEQ ID NO: 1136640 - DNA, 15 bp, Homo sapiens
aaaaaacaaaagaat

SEQ ID NO: 1136641 - DNA, 15 bp, Homo sapiens
taaaaaacaaaagaa

SEQ ID NO: 1136642 - DNA, 15 bp, Homo sapiens
ctaaaaaacaaaaga

SEQ ID NO: 1136643 - DNA, 15 bp, Homo sapiens
tctaaaaaacaaaag

SEQ ID NO: 1136644 - DNA, 15 bp, Homo sapiens
gtctaaaaaacaaaa

SEQ ID NO: 1136645 - DNA, 15 bp, Homo sapiens
agtctaaaaaacaaa

SEQ ID NO: 1136646 - DNA, 15 bp, Homo sapiens
gagtctaaaaaacaa

SEQ ID NO: 1136647 - DNA, 15 bp, Homo sapiens
agagtctaaaaaaca

SEQ ID NO: 1136648 - DNA, 15 bp, Homo sapiens
tagagtctaaaaaac

SEQ ID NO: 1136649 - DNA, 15 bp, Homo sapiens
ctagagtctaaaaaa

SEQ ID NO: 1136650 - DNA, 15 bp, Homo sapiens
actagagtctaaaaa

SEQ ID NO: 1136651 - DNA, 15 bp, Homo sapiens
cactagagtctaaaa

SEQ ID NO: 1136652 - DNA, 15 bp, Homo sapiens
acactagagtctaaa

SEQ ID NO: 1136653 - DNA, 15 bp, Homo sapiens
gacactagagtctaa

SEQ ID NO: 1136654 - DNA, 15 bp, Homo sapiens
agacactagagtcta

SEQ ID NO: 1136655 - DNA, 15 bp, Homo sapiens
cagacactagagtct

SEQ ID NO: 1136656 - DNA, 15 bp, Homo sapiens
acagacactagagtc

SEQ ID NO: 1136657 - DNA, 15 bp, Homo sapiens
tacagacactagagt

SEQ ID NO: 1136658 - DNA, 15 bp, Homo sapiens
gtacagacactagag

SEQ ID NO: 1136659 - DNA, 15 bp, Homo sapiens
agtacagacactaga

SEQ ID NO: 1136660 - DNA, 15 bp, Homo sapiens
gagtacagacactag

SEQ ID NO: 1136661 - DNA, 15 bp, Homo sapiens
cgagtacagacacta

SEQ ID NO: 1136662 - DNA, 15 bp, Homo sapiens
acgagtacagacact

SEQ ID NO: 1136663 - DNA, 15 bp, Homo sapiens
aacgagtacagacac

SEQ ID NO: 1136664 - DNA, 15 bp, Homo sapiens
caacgagtacagaca

SEQ ID NO: 1136665 - DNA, 15 bp, Homo sapiens
acaacgagtacagac

SEQ ID NO: 1136666 - DNA, 15 bp, Homo sapiens
tacaacgagtacaga

SEQ ID NO: 1136667 - DNA, 15 bp, Homo sapiens
gtacaacgagtacag

SEQ ID NO: 1136668 - DNA, 15 bp, Homo sapiens
ggtacaacgagtaca

SEQ ID NO: 1136669 - DNA, 15 bp, Homo sapiens
tggtacaacgagtac

SEQ ID NO: 1136670 - DNA, 15 bp, Homo sapiens
atggtacaacgagta

SEQ ID NO: 1136671 - DNA, 15 bp, Homo sapiens
catggtacaacgagt

SEQ ID NO: 1136672 - DNA, 15 bp, Homo sapiens
gcatggtacaacgag

SEQ ID NO: 1136673 - DNA, 15 bp, Homo sapiens
agcatggtacaacga

SEQ ID NO: 1136674 - DNA, 15 bp, Homo sapiens
cagcatggtacaacg

SEQ ID NO: 1136675 - DNA, 15 bp, Homo sapiens
ccagcatggtacaac

SEQ ID NO: 1136676 - DNA, 15 bp, Homo sapiens
cccagcatggtacaa

SEQ ID NO: 1136677 - DNA, 15 bp, Homo sapiens
tcccagcatggtaca

SEQ ID NO: 1136678 - DNA, 15 bp, Homo sapiens
atcccagcatggtac

SEQ ID NO: 1136679 - DNA, 15 bp, Homo sapiens
aatcccagcatggta

SEQ ID NO: 1136680 - DNA, 15 bp, Homo sapiens
gaatcccagcatggt

SEQ ID NO: 1136681 - DNA, 15 bp, Homo sapiens
tgaatcccagcatgg

SEQ ID NO: 1136682 - DNA, 15 bp, Homo sapiens
atgaatcccagcatg

SEQ ID NO: 1136683 - DNA, 15 bp, Homo sapiens
aatgaatcccagcat

SEQ ID NO: 1136684 - DNA, 15 bp, Homo sapiens
aaatgaatcccagca

SEQ ID NO: 1136685 - DNA, 15 bp, Homo sapiens
caaatgaatcccagc

SEQ ID NO: 1136686 - DNA, 15 bp, Homo sapiens
tcaaatgaatcccag

SEQ ID NO: 1136687 - DNA, 15 bp, Homo sapiens
ttcaaatgaatccca

SEQ ID NO: 1136688 - DNA, 15 bp, Homo sapiens
gttcaaatgaatccc

SEQ ID NO: 1136689 - DNA, 15 bp, Homo sapiens
tgttcaaatgaatcc

SEQ ID NO: 1136690 - DNA, 15 bp, Homo sapiens
ttgttcaaatgaatc

SEQ ID NO: 1136691 - DNA, 15 bp, Homo sapiens
attgttcaaatgaat

SEQ ID NO: 1136692 - DNA, 15 bp, Homo sapiens
aattgttcaaatgaa

SEQ ID NO: 1136693 - DNA, 15 bp, Homo sapiens
caattgttcaaatga

SEQ ID NO: 1136694 - DNA, 15 bp, Homo sapiens
gcaattgttcaaatg

SEQ ID NO: 1136695 - DNA, 15 bp, Homo sapiens
tgcaattgttcaaat

SEQ ID NO: 1136696 - DNA, 15 bp, Homo sapiens
atgcaattgttcaaa

SEQ ID NO: 1136697 - DNA, 15 bp, Homo sapiens
catgcaattgttcaa

SEQ ID NO: 1136698 - DNA, 15 bp, Homo sapiens
ccatgcaattgttca

SEQ ID NO: 1136699 - DNA, 15 bp, Homo sapiens
gccatgcaattgttc

SEQ ID NO: 1136700 - DNA, 15 bp, Homo sapiens
agccatgcaattgtt

SEQ ID NO: 1136701 - DNA, 15 bp, Homo sapiens
aagccatgcaattgt

SEQ ID NO: 1136702 - DNA, 15 bp, Homo sapiens
aaagccatgcaattg

SEQ ID NO: 1136703 - DNA, 15 bp, Homo sapiens
aaaagccatgcaatt

SEQ ID NO: 1136704 - DNA, 15 bp, Homo sapiens
aaaaagccatgcaat

SEQ ID NO: 1136705 - DNA, 15 bp, Homo sapiens
aaaaaagccatgcaa

SEQ ID NO: 1136706 - DNA, 15 bp, Homo sapiens
taaaaaagccatgca

SEQ ID NO: 1136707 - DNA, 15 bp, Homo sapiens
ctaaaaaagccatgc

SEQ ID NO: 1136708 - DNA, 15 bp, Homo sapiens
actaaaaaagccatg

SEQ ID NO: 1136709 - DNA, 15 bp, Homo sapiens
cactaaaaaagccat

SEQ ID NO: 1136710 - DNA, 15 bp, Homo sapiens
acactaaaaaagcca

SEQ ID NO: 1136711 - DNA, 15 bp, Homo sapiens
tacactaaaaaagcc

SEQ ID NO: 1136712 - DNA, 15 bp, Homo sapiens
atacactaaaaaagc

SEQ ID NO: 1136713 - DNA, 15 bp, Homo sapiens
aatacactaaaaaag

SEQ ID NO: 1136714 - DNA, 15 bp, Homo sapiens
taatacactaaaaaa

SEQ ID NO: 1136715 - DNA, 15 bp, Homo sapiens
ataatacactaaaaa

SEQ ID NO: 1136716 - DNA, 15 bp, Homo sapiens
aataatacactaaaa

SEQ ID NO: 1136717 - DNA, 15 bp, Homo sapiens
taataatacactaaa

SEQ ID NO: 1136718 - DNA, 15 bp, Homo sapiens
ttaataatacactaa

SEQ ID NO: 1136719 - DNA, 15 bp, Homo sapiens
tttaataatacacta

SEQ ID NO: 1136720 - DNA, 15 bp, Homo sapiens
atttaataatacact

SEQ ID NO: 1136721 - DNA, 15 bp, Homo sapiens
aatttaataatacac

SEQ ID NO: 1136722 - DNA, 15 bp, Homo sapiens
aaatttaataataca

SEQ ID NO: 1136723 - DNA, 15 bp, Homo sapiens
caaatttaataatac

SEQ ID NO: 1136724 - DNA, 15 bp, Homo sapiens
gcaaatttaataata

SEQ ID NO: 1136725 - DNA, 15 bp, Homo sapiens
tgcaaatttaataat

SEQ ID NO: 1136726 - DNA, 15 bp, Homo sapiens
ctgcaaatttaataa

SEQ ID NO: 1136727 - DNA, 15 bp, Homo sapiens
actgcaaatttaata

SEQ ID NO: 1136728 - DNA, 15 bp, Homo sapiens
aactgcaaatttaat

SEQ ID NO: 1136729 - DNA, 15 bp, Homo sapiens
aaactgcaaatttaa

SEQ ID NO: 1136730 - DNA, 15 bp, Homo sapiens
taaactgcaaattta

SEQ ID NO: 1136731 - DNA, 15 bp, Homo sapiens
gtaaactgcaaattt

SEQ ID NO: 1136732 - DNA, 15 bp, Homo sapiens
agtaaactgcaaatt

SEQ ID NO: 1136733 - DNA, 15 bp, Homo sapiens
aagtaaactgcaaat

SEQ ID NO: 1136734 - DNA, 15 bp, Homo sapiens
taagtaaactgcaaa

SEQ ID NO: 1136735 - DNA, 15 bp, Homo sapiens
ctaagtaaactgcaa

SEQ ID NO: 1136736 - DNA, 15 bp, Homo sapiens
tctaagtaaactgca

SEQ ID NO: 1136737 - DNA, 15 bp, Homo sapiens
ttctaagtaaactgc

SEQ ID NO: 1136738 - DNA, 15 bp, Homo sapiens
attctaagtaaactg

SEQ ID NO: 1136739 - DNA, 15 bp, Homo sapiens
aattctaagtaaact

SEQ ID NO: 1136740 - DNA, 15 bp, Homo sapiens
aaattctaagtaaac

SEQ ID NO: 1136741 - DNA, 15 bp, Homo sapiens
taaattctaagtaaa

SEQ ID NO: 1136742 - DNA, 15 bp, Homo sapiens
gtaaattctaagtaa

SEQ ID NO: 1136743 - DNA, 15 bp, Homo sapiens
agtaaattctaagta

SEQ ID NO: 1136744 - DNA, 15 bp, Homo sapiens
cagtaaattctaagt

SEQ ID NO: 1136745 - DNA, 15 bp, Homo sapiens
ccagtaaattctaag

SEQ ID NO: 1136746 - DNA, 15 bp, Homo sapiens
cccagtaaattctaa

SEQ ID NO: 1136747 - DNA, 15 bp, Homo sapiens
tcccagtaaattcta

SEQ ID NO: 1136748 - DNA, 15 bp, Homo sapiens
gtcccagtaaattct

SEQ ID NO: 1136749 - DNA, 15 bp, Homo sapiens
ggtcccagtaaattc

SEQ ID NO: 1136750 - DNA, 15 bp, Homo sapiens
aggtcccagtaaatt

SEQ ID NO: 1136751 - DNA, 15 bp, Homo sapiens
gaggtcccagtaaat

SEQ ID NO: 1136752 - DNA, 15 bp, Homo sapiens
tgaggtcccagtaaa

SEQ ID NO: 1136753 - DNA, 15 bp, Homo sapiens
atgaggtcccagtaa

SEQ ID NO: 1136754 - DNA, 15 bp, Homo sapiens
tatgaggtcccagta

SEQ ID NO: 1136755 - DNA, 15 bp, Homo sapiens
gtatgaggtcccagt

SEQ ID NO: 1136756 - DNA, 15 bp, Homo sapiens
tgtatgaggtcccag

SEQ ID NO: 1136757 - DNA, 15 bp, Homo sapiens
ttgtatgaggtccca

SEQ ID NO: 1136758 - DNA, 15 bp, Homo sapiens
tttgtatgaggtccc

SEQ ID NO: 1136759 - DNA, 15 bp, Homo sapiens
atttgtatgaggtcc

SEQ ID NO: 1136760 - DNA, 15 bp, Homo sapiens
catttgtatgaggtc

SEQ ID NO: 1136761 - DNA, 15 bp, Homo sapiens
ccatttgtatgaggt

SEQ ID NO: 1136762 - DNA, 15 bp, Homo sapiens
cccatttgtatgagg

SEQ ID NO: 1136763 - DNA, 15 bp, Homo sapiens
tcccatttgtatgag

SEQ ID NO: 1136764 - DNA, 15 bp, Homo sapiens
ttcccatttgtatga

SEQ ID NO: 1136765 - DNA, 15 bp, Homo sapiens
tttcccatttgtatg

SEQ ID NO: 1136766 - DNA, 15 bp, Homo sapiens
ttttcccatttgtat

SEQ ID NO: 1136767 - DNA, 15 bp, Homo sapiens
tttttcccatttgta

SEQ ID NO: 1136768 - DNA, 15 bp, Homo sapiens
ttttttcccatttgt

SEQ ID NO: 1136769 - DNA, 15 bp, Homo sapiens
tttttttcccatttg

SEQ ID NO: 1136770 - DNA, 15 bp, Homo sapiens
gtttttttcccattt

SEQ ID NO: 1136771 - DNA, 15 bp, Homo sapiens
tgtttttttcccatt

SEQ ID NO: 1136772 - DNA, 15 bp, Homo sapiens
atgtttttttcccat

SEQ ID NO: 1136773 - DNA, 15 bp, Homo sapiens
tatgtttttttccca

SEQ ID NO: 1136774 - DNA, 15 bp, Homo sapiens
ttatgtttttttccc

SEQ ID NO: 1136775 - DNA, 15 bp, Homo sapiens
gttatgtttttttcc

SEQ ID NO: 1136776 - DNA, 15 bp, Homo sapiens
agttatgtttttttc

SEQ ID NO: 1136777 - DNA, 15 bp, Homo sapiens
cagttatgttttttt

SEQ ID NO: 1136778 - DNA, 15 bp, Homo sapiens
acagttatgtttttt

SEQ ID NO: 1136779 - DNA, 15 bp, Homo sapiens
cacagttatgttttt

SEQ ID NO: 1136780 - DNA, 15 bp, Homo sapiens
acacagttatgtttt

SEQ ID NO: 1136781 - DNA, 15 bp, Homo sapiens
aacacagttatgttt

SEQ ID NO: 1136782 - DNA, 15 bp, Homo sapiens
taacacagttatgtt

SEQ ID NO: 1136783 - DNA, 15 bp, Homo sapiens
gtaacacagttatgt

SEQ ID NO: 1136784 - DNA, 15 bp, Homo sapiens
agtaacacagttatg

SEQ ID NO: 1136785 - DNA, 15 bp, Homo sapiens
gagtaacacagttat

SEQ ID NO: 1136786 - DNA, 15 bp, Homo sapiens
tgagtaacacagtta

SEQ ID NO: 1136787 - DNA, 15 bp, Homo sapiens
atgagtaacacagtt

SEQ ID NO: 1136788 - DNA, 15 bp, Homo sapiens
aatgagtaacacagt

SEQ ID NO: 1136789 - DNA, 15 bp, Homo sapiens
aaatgagtaacacag

SEQ ID NO: 1136790 - DNA, 15 bp, Homo sapiens
caaatgagtaacaca

SEQ ID NO: 1136791 - DNA, 15 bp, Homo sapiens
gcaaatgagtaacac

SEQ ID NO: 1136792 - DNA, 15 bp, Homo sapiens
agcaaatgagtaaca

SEQ ID NO: 1136793 - DNA, 15 bp, Homo sapiens
cagcaaatgagtaac

SEQ ID NO: 1136794 - DNA, 15 bp, Homo sapiens
acagcaaatgagtaa

SEQ ID NO: 1136795 - DNA, 15 bp, Homo sapiens
cacagcaaatgagta

SEQ ID NO: 1136796 - DNA, 15 bp, Homo sapiens
acacagcaaatgagt

SEQ ID NO: 1136797 - DNA, 15 bp, Homo sapiens
cacacagcaaatgag

SEQ ID NO: 1136798 - DNA, 15 bp, Homo sapiens
gcacacagcaaatga

SEQ ID NO: 1136799 - DNA, 15 bp, Homo sapiens
ggcacacagcaaatg

SEQ ID NO: 1136800 - DNA, 15 bp, Homo sapiens
aggcacacagcaaat

SEQ ID NO: 1136801 - DNA, 15 bp, Homo sapiens
aaggcacacagcaaa

SEQ ID NO: 1136802 - DNA, 15 bp, Homo sapiens
aaaggcacacagcaa

SEQ ID NO: 1136803 - DNA, 15 bp, Homo sapiens
caaaggcacacagca

SEQ ID NO: 1136804 - DNA, 15 bp, Homo sapiens
ccaaaggcacacagc

SEQ ID NO: 1136805 - DNA, 15 bp, Homo sapiens
tccaaaggcacacag

SEQ ID NO: 1136806 - DNA, 15 bp, Homo sapiens
atccaaaggcacaca

SEQ ID NO: 1136807 - DNA, 15 bp, Homo sapiens
aatccaaaggcacac

SEQ ID NO: 1136808 - DNA, 15 bp, Homo sapiens
caatccaaaggcaca

SEQ ID NO: 1136809 - DNA, 15 bp, Homo sapiens
tcaatccaaaggcac

SEQ ID NO: 1136810 - DNA, 15 bp, Homo sapiens
gtcaatccaaaggca

SEQ ID NO: 1136811 - DNA, 15 bp, Homo sapiens
ggtcaatccaaaggc

SEQ ID NO: 1136812 - DNA, 15 bp, Homo sapiens
gggtcaatccaaagg

SEQ ID NO: 1136813 - DNA, 15 bp, Homo sapiens
agggtcaatccaaag

SEQ ID NO: 1136814 - DNA, 15 bp, Homo sapiens
tagggtcaatccaaa

SEQ ID NO: 1136815 - DNA, 15 bp, Homo sapiens
atagggtcaatccaa

SEQ ID NO: 1136816 - DNA, 15 bp, Homo sapiens
aatagggtcaatcca

SEQ ID NO: 1136817 - DNA, 15 bp, Homo sapiens
aaatagggtcaatcc

SEQ ID NO: 1136818 - DNA, 15 bp, Homo sapiens
aaaatagggtcaatc

SEQ ID NO: 1136819 - DNA, 15 bp, Homo sapiens
aaaaatagggtcaat

SEQ ID NO: 1136820 - DNA, 15 bp, Homo sapiens
aaaaaatagggtcaa

SEQ ID NO: 1136821 - DNA, 15 bp, Homo sapiens
caaaaaatagggtca

SEQ ID NO: 1136822 - DNA, 15 bp, Homo sapiens
acaaaaaatagggtc

SEQ ID NO: 1136823 - DNA, 15 bp, Homo sapiens
tacaaaaaatagggt

SEQ ID NO: 1136824 - DNA, 15 bp, Homo sapiens
atacaaaaaataggg

SEQ ID NO: 1136825 - DNA, 15 bp, Homo sapiens
aatacaaaaaatagg

SEQ ID NO: 1136826 - DNA, 15 bp, Homo sapiens
gaatacaaaaaatag

SEQ ID NO: 1136827 - DNA, 15 bp, Homo sapiens
tgaatacaaaaaata

SEQ ID NO: 1136828 - DNA, 15 bp, Homo sapiens
atgaatacaaaaaat

SEQ ID NO: 1136829 - DNA, 15 bp, Homo sapiens
aatgaatacaaaaaa

SEQ ID NO: 1136830 - DNA, 15 bp, Homo sapiens
aaatgaatacaaaaa

SEQ ID NO: 1136831 - DNA, 15 bp, Homo sapiens
gaaaatgaatacaaa

SEQ ID NO: 1136832 - DNA, 15 bp, Homo sapiens
agaaaatgaatacaa

SEQ ID NO: 1136833 - DNA, 15 bp, Homo sapiens
gagaaaatgaataca

SEQ ID NO: 1136834 - DNA, 15 bp, Homo sapiens
ggagaaaatgaatac

SEQ ID NO: 1136835 - DNA, 15 bp, Homo sapiens
gggagaaaatgaata

SEQ ID NO: 1136836 - DNA, 15 bp, Homo sapiens
ggggagaaaatgaat

SEQ ID NO: 1136837 - DNA, 15 bp, Homo sapiens
tggggagaaaatgaa

SEQ ID NO: 1136838 - DNA, 15 bp, Homo sapiens
atggggagaaaatga

SEQ ID NO: 1136839 - DNA, 15 bp, Homo sapiens
catggggagaaaatg

SEQ ID NO: 1136840 - DNA, 15 bp, Homo sapiens
acatggggagaaaat

SEQ ID NO: 1136841 - DNA, 15 bp, Homo sapiens
gacatggggagaaaa

SEQ ID NO: 1136842 - DNA, 15 bp, Homo sapiens
ggacatggggagaaa

SEQ ID NO: 1136843 - DNA, 15 bp, Homo sapiens
aggacatggggagaa

SEQ ID NO: 1136844 - DNA, 15 bp, Homo sapiens
caggacatggggaga

SEQ ID NO: 1136845 - DNA, 15 bp, Homo sapiens
tcaggacatggggag

SEQ ID NO: 1136846 - DNA, 15 bp, Homo sapiens
ctcaggacatgggga

SEQ ID NO: 1136847 - DNA, 15 bp, Homo sapiens
actcaggacatgggg

SEQ ID NO: 1136848 - DNA, 15 bp, Homo sapiens
aactcaggacatggg

SEQ ID NO: 1136849 - DNA, 15 bp, Homo sapiens
gaactcaggacatgg

SEQ ID NO: 1136850 - DNA, 15 bp, Homo sapiens
ggaactcaggacatg

SEQ ID NO: 1136851 - DNA, 15 bp, Homo sapiens
tggaactcaggacat

SEQ ID NO: 1136852 - DNA, 15 bp, Homo sapiens
gtggaactcaggaca

SEQ ID NO: 1136853 - DNA, 15 bp, Homo sapiens
agtggaactcaggac

SEQ ID NO: 1136854 - DNA, 15 bp, Homo sapiens
aagtggaactcagga

SEQ ID NO: 1136855 - DNA, 15 bp, Homo sapiens
aaagtggaactcagg

SEQ ID NO: 1136856 - DNA, 15 bp, Homo sapiens
caaagtggaactcag

SEQ ID NO: 1136857 - DNA, 15 bp, Homo sapiens
tcaaagtggaactca

SEQ ID NO: 1136858 - DNA, 15 bp, Homo sapiens
ttcaaagtggaactc

SEQ ID NO: 1136859 - DNA, 15 bp, Homo sapiens
attcaaagtggaact

SEQ ID NO: 1136860 - DNA, 15 bp, Homo sapiens
tattcaaagtggaac

SEQ ID NO: 1136861 - DNA, 15 bp, Homo sapiens
ttattcaaagtggaa

SEQ ID NO: 1136862 - DNA, 15 bp, Homo sapiens
tttattcaaagtgga

SEQ ID NO: 1136863 - DNA, 15 bp, Homo sapiens
ttttattcaaagtgg

SEQ ID NO: 1136864 - DNA, 15 bp, Homo sapiens
tttttattcaaagtg

SEQ ID NO: 1136865 - DNA, 15 bp, Homo sapiens
ctttttattcaaagt

SEQ ID NO: 1136866 - DNA, 15 bp, Homo sapiens
actttttattcaaag

SEQ ID NO: 1136867 - DNA, 15 bp, Homo sapiens
tactttttattcaaa

SEQ ID NO: 1136868 - DNA, 15 bp, Homo sapiens
ttactttttattcaa

SEQ ID NO: 1136869 - DNA, 15 bp, Homo sapiens
attactttttattca

SEQ ID NO: 1136870 - DNA, 15 bp, Homo sapiens
aattactttttattc

SEQ ID NO: 1136871 - DNA, 15 bp, Homo sapiens
aaattactttttatt

SEQ ID NO: 1136872 - DNA, 15 bp, Homo sapiens
aaaattactttttat

SEQ ID NO: 1136873 - DNA, 15 bp, Homo sapiens
aaaaattacttttta

SEQ ID NO: 1136874 - DNA, 15 bp, Homo sapiens
aaaaaattacttttt

SEQ ID NO: 1136875 - DNA, 15 bp, Homo sapiens
aaaaaaattactttt

SEQ ID NO: 1136876 - DNA, 15 bp, Homo sapiens
gaaaaaaattacttt

SEQ ID NO: 1136877 - DNA, 15 bp, Homo sapiens
ggaaaaaaattactt

SEQ ID NO: 1136878 - DNA, 15 bp, Homo sapiens
aggaaaaaaattact

SEQ ID NO: 1136879 - DNA, 15 bp, Homo sapiens
caggaaaaaaattac

SEQ ID NO: 1136880 - DNA, 15 bp, Homo sapiens
gcaggaaaaaaatta

SEQ ID NO: 1136881 - DNA, 15 bp, Homo sapiens
ggcaggaaaaaaatt

SEQ ID NO: 1136882 - DNA, 15 bp, Homo sapiens
aggcaggaaaaaaat

SEQ ID NO: 1136883 - DNA, 15 bp, Homo sapiens
caggcaggaaaaaaa

SEQ ID NO: 1136884 - DNA, 15 bp, Homo sapiens
acaggcaggaaaaaa

SEQ ID NO: 1136885 - DNA, 15 bp, Homo sapiens
tacaggcaggaaaaa

SEQ ID NO: 1136886 - DNA, 15 bp, Homo sapiens
ttacaggcaggaaaa

SEQ ID NO: 1136887 - DNA, 15 bp, Homo sapiens
tttacaggcaggaaa

SEQ ID NO: 1136888 - DNA, 15 bp, Homo sapiens
ttttacaggcaggaa

SEQ ID NO: 1136889 - DNA, 15 bp, Homo sapiens
attttacaggcagga

SEQ ID NO: 1136890 - DNA, 15 bp, Homo sapiens
tattttacaggcagg

SEQ ID NO: 1136891 - DNA, 15 bp, Homo sapiens
ctattttacaggcag

SEQ ID NO: 1136892 - DNA, 15 bp, Homo sapiens
cctattttacaggca

SEQ ID NO: 1136893 - DNA, 15 bp, Homo sapiens
gcctattttacaggc

SEQ ID NO: 1136894 - DNA, 15 bp, Homo sapiens
agcctattttacagg

SEQ ID NO: 1136895 - DNA, 15 bp, Homo sapiens
tagcctattttacag

SEQ ID NO: 1136896 - DNA, 15 bp, Homo sapiens
gtagcctattttaca

SEQ ID NO: 1136897 - DNA, 15 bp, Homo sapiens
ggtagcctattttac

SEQ ID NO: 1136898 - DNA, 15 bp, Homo sapiens
tggtagcctatttta

SEQ ID NO: 1136899 - DNA, 15 bp, Homo sapiens
ttggtagcctatttt

SEQ ID NO: 1136900 - DNA, 15 bp, Homo sapiens
attggtagcctattt

SEQ ID NO: 1136901 - DNA, 15 bp, Homo sapiens
tattggtagcctatt

SEQ ID NO: 1136902 - DNA, 15 bp, Homo sapiens
ctattggtagcctat

SEQ ID NO: 1136903 - DNA, 15 bp, Homo sapiens
cctattggtagccta

SEQ ID NO: 1136904 - DNA, 15 bp, Homo sapiens
gcctattggtagcct

SEQ ID NO: 1136905 - DNA, 15 bp, Homo sapiens
agcctattggtagcc

SEQ ID NO: 1136906 - DNA, 15 bp, Homo sapiens
cagcctattggtagc

SEQ ID NO: 1136907 - DNA, 15 bp, Homo sapiens
gcagcctattggtag

SEQ ID NO: 1136908 - DNA, 15 bp, Homo sapiens
tgcagcctattggta

SEQ ID NO: 1136909 - DNA, 15 bp, Homo sapiens
ctgcagcctattggt

SEQ ID NO: 1136910 - DNA, 15 bp, Homo sapiens
actgcagcctattgg

SEQ ID NO: 1136911 - DNA, 15 bp, Homo sapiens
aactgcagcctattg

SEQ ID NO: 1136912 - DNA, 15 bp, Homo sapiens
caactgcagcctatt

SEQ ID NO: 1136913 - DNA, 15 bp, Homo sapiens
acaactgcagcctat

SEQ ID NO: 1136914 - DNA, 15 bp, Homo sapiens
gacaactgcagccta

SEQ ID NO: 1136915 - DNA, 15 bp, Homo sapiens
agacaactgcagcct

SEQ ID NO: 1136916 - DNA, 15 bp, Homo sapiens
tagacaactgcagcc

SEQ ID NO: 1136917 - DNA, 15 bp, Homo sapiens
atagacaactgcagc

SEQ ID NO: 1136918 - DNA, 15 bp, Homo sapiens
tatagacaactgcag

SEQ ID NO: 1136919 - DNA, 15 bp, Homo sapiens
ctatagacaactgca

SEQ ID NO: 1136920 - DNA, 15 bp, Homo sapiens
actatagacaactgc

SEQ ID NO: 1136921 - DNA, 15 bp, Homo sapiens
tactatagacaactg

SEQ ID NO: 1136922 - DNA, 15 bp, Homo sapiens
ctactatagacaact

SEQ ID NO: 1136923 - DNA, 15 bp, Homo sapiens
gctactatagacaac

SEQ ID NO: 1136924 - DNA, 15 bp, Homo sapiens
agctactatagacaa

SEQ ID NO: 1136925 - DNA, 15 bp, Homo sapiens
cagctactatagaca

SEQ ID NO: 1136926 - DNA, 15 bp, Homo sapiens
gcagctactatagac

SEQ ID NO: 1136927 - DNA, 15 bp, Homo sapiens
agcagctactataga

SEQ ID NO: 1136928 - DNA, 15 bp, Homo sapiens
aagcagctactatag

SEQ ID NO: 1136929 - DNA, 15 bp, Homo sapiens
gaagcagctactata

SEQ ID NO: 1136930 - DNA, 15 bp, Homo sapiens
tgaagcagctactat

SEQ ID NO: 1136931 - DNA, 15 bp, Homo sapiens
gtgaagcagctacta

SEQ ID NO: 1136932 - DNA, 15 bp, Homo sapiens
agtgaagcagctact

SEQ ID NO: 1136933 - DNA, 15 bp, Homo sapiens
cagtgaagcagctac

SEQ ID NO: 1136934 - DNA, 15 bp, Homo sapiens
tcagtgaagcagcta

SEQ ID NO: 1136935 - DNA, 15 bp, Homo sapiens
ctcagtgaagcagct

SEQ ID NO: 1136936 - DNA, 15 bp, Homo sapiens
cctcagtgaagcagc

SEQ ID NO: 1136937 - DNA, 15 bp, Homo sapiens
tcctcagtgaagcag

SEQ ID NO: 1136938 - DNA, 15 bp, Homo sapiens
ctcctcagtgaagca

SEQ ID NO: 1136939 - DNA, 15 bp, Homo sapiens
tctcctcagtgaagc

SEQ ID NO: 1136940 - DNA, 15 bp, Homo sapiens
ctctcctcagtgaag

SEQ ID NO: 1136941 - DNA, 15 bp, Homo sapiens
gctctcctcagtgaa

SEQ ID NO: 1136942 - DNA, 15 bp, Homo sapiens
agctctcctcagtga

SEQ ID NO: 1136943 - DNA, 15 bp, Homo sapiens
gagctctcctcagtg

SEQ ID NO: 1136944 - DNA, 15 bp, Homo sapiens
tgagctctcctcagt

SEQ ID NO: 1136945 - DNA, 15 bp, Homo sapiens
ctgagctctcctcag

SEQ ID NO: 1136946 - DNA, 15 bp, Homo sapiens
gctgagctctcctca

SEQ ID NO: 1136947 - DNA, 15 bp, Homo sapiens
tgctgagctctcctc

SEQ ID NO: 1136948 - DNA, 15 bp, Homo sapiens
atgctgagctctcct

SEQ ID NO: 1136949 - DNA, 15 bp, Homo sapiens
catgctgagctctcc

SEQ ID NO: 1136950 - DNA, 15 bp, Homo sapiens
tcatgctgagctctc

SEQ ID NO: 1136951 - DNA, 15 bp, Homo sapiens
ctcatgctgagctct

SEQ ID NO: 1136952 - DNA, 15 bp, Homo sapiens
tctcatgctgagctc

SEQ ID NO: 1136953 - DNA, 15 bp, Homo sapiens
ctctcatgctgagct

SEQ ID NO: 1136954 - DNA, 15 bp, Homo sapiens
tctctcatgctgagc

SEQ ID NO: 1136955 - DNA, 15 bp, Homo sapiens
ttctctcatgctgag

SEQ ID NO: 1136956 - DNA, 15 bp, Homo sapiens
tttctctcatgctga

SEQ ID NO: 1136957 - DNA, 15 bp, Homo sapiens
atttctctcatgctg

SEQ ID NO: 1136958 - DNA, 15 bp, Homo sapiens
tatttctctcatgct

SEQ ID NO: 1136959 - DNA, 15 bp, Homo sapiens
ctatttctctcatgc

SEQ ID NO: 1136960 - DNA, 15 bp, Homo sapiens
actatttctctcatg

SEQ ID NO: 1136961 - DNA, 15 bp, Homo sapiens
tactatttctctcat

SEQ ID NO: 1136962 - DNA, 15 bp, Homo sapiens
atactatttctctca

SEQ ID NO: 1136963 - DNA, 15 bp, Homo sapiens
catactatttctctc

SEQ ID NO: 1136964 - DNA, 15 bp, Homo sapiens
tcatactatttctct

SEQ ID NO: 1136965 - DNA, 15 bp, Homo sapiens
ttcatactatttctc

SEQ ID NO: 1136966 - DNA, 15 bp, Homo sapiens
attcatactatttct

SEQ ID NO: 1136967 - DNA, 15 bp, Homo sapiens
aattcatactatttc

SEQ ID NO: 1136968 - DNA, 15 bp, Homo sapiens
caattcatactattt

SEQ ID NO: 1136969 - DNA, 15 bp, Homo sapiens
gcaattcatactatt

SEQ ID NO: 1136970 - DNA, 15 bp, Homo sapiens
agcaattcatactat

SEQ ID NO: 1136971 - DNA, 15 bp, Homo sapiens
aagcaattcatacta

SEQ ID NO: 1136972 - DNA, 15 bp, Homo sapiens
caagcaattcatact

SEQ ID NO: 1136973 - DNA, 15 bp, Homo sapiens
gcaagcaattcatac

SEQ ID NO: 1136974 - DNA, 15 bp, Homo sapiens
ggcaagcaattcata

SEQ ID NO: 1136975 - DNA, 15 bp, Homo sapiens
tggcaagcaattcat

SEQ ID NO: 1136976 - DNA, 15 bp, Homo sapiens
gtggcaagcaattca

SEQ ID NO: 1136977 - DNA, 15 bp, Homo sapiens
tgtggcaagcaattc

SEQ ID NO: 1136978 - DNA, 15 bp, Homo sapiens
ttgtggcaagcaatt

SEQ ID NO: 1136979 - DNA, 15 bp, Homo sapiens
cttgtggcaagcaat

SEQ ID NO: 1136980 - DNA, 15 bp, Homo sapiens
acttgtggcaagcaa

SEQ ID NO: 1136981 - DNA, 15 bp, Homo sapiens
aacttgtggcaagca

SEQ ID NO: 1136982 - DNA, 15 bp, Homo sapiens
taacttgtggcaagc

SEQ ID NO: 1136983 - DNA, 15 bp, Homo sapiens
ataacttgtggcaag

SEQ ID NO: 1136984 - DNA, 15 bp, Homo sapiens
cataacttgtggcaa

SEQ ID NO: 1136985 - DNA, 15 bp, Homo sapiens
ccataacttgtggca

SEQ ID NO: 1136986 - DNA, 15 bp, Homo sapiens
cccataacttgtggc

SEQ ID NO: 1136987 - DNA, 15 bp, Homo sapiens
gcccataacttgtgg

SEQ ID NO: 1136988 - DNA, 15 bp, Homo sapiens
agcccataacttgtg

SEQ ID NO: 1136989 - DNA, 15 bp, Homo sapiens
tagcccataacttgt

SEQ ID NO: 1136990 - DNA, 15 bp, Homo sapiens
ctagcccataacttg

SEQ ID NO: 1136991 - DNA, 15 bp, Homo sapiens
gctagcccataactt

SEQ ID NO: 1136992 - DNA, 15 bp, Homo sapiens
ggctagcccataact

SEQ ID NO: 1136993 - DNA, 15 bp, Homo sapiens
aggctagcccataac

SEQ ID NO: 1136994 - DNA, 15 bp, Homo sapiens
aaggctagcccataa

SEQ ID NO: 1136995 - DNA, 15 bp, Homo sapiens
ggtaaccgttcttaa

SEQ ID NO: 1136996 - DNA, 15 bp, Homo sapiens
gggtaaccgttctta

SEQ ID NO: 1136997 - DNA, 15 bp, Homo sapiens
tgggtaaccgttctt

SEQ ID NO: 1136998 - DNA, 15 bp, Homo sapiens
atgggtaaccgttct

SEQ ID NO: 1136999 - DNA, 15 bp, Homo sapiens
aatgggtaaccgttc

SEQ ID NO: 1137000 - DNA, 15 bp, Homo sapiens
aaatgggtaaccgtt

SEQ ID NO: 1137001 - DNA, 15 bp, Homo sapiens
taaatgggtaaccgt

SEQ ID NO: 1137002 - DNA, 15 bp, Homo sapiens
gtaaatgggtaaccg

SEQ ID NO: 1137003 - DNA, 15 bp, Homo sapiens
tgtaaatgggtaacc

SEQ ID NO: 1137004 - DNA, 15 bp, Homo sapiens
ctgtaaatgggtaac

SEQ ID NO: 1137005 - DNA, 15 bp, Homo sapiens
actgtaaatgggtaa

SEQ ID NO: 1137006 - DNA, 15 bp, Homo sapiens
tactgtaaatgggta

SEQ ID NO: 1137007 - DNA, 15 bp, Homo sapiens
atactgtaaatgggt

SEQ ID NO: 1137008 - DNA, 15 bp, Homo sapiens
catactgtaaatggg

SEQ ID NO: 1137009 - DNA, 15 bp, Homo sapiens
ccatactgtaaatgg

SEQ ID NO: 1137010 - DNA, 15 bp, Homo sapiens
tccatactgtaaatg

SEQ ID NO: 1137011 - DNA, 15 bp, Homo sapiens
ttccatactgtaaat

SEQ ID NO: 1137012 - DNA, 15 bp, Homo sapiens
tttccatactgtaaa

SEQ ID NO: 1137013 - DNA, 15 bp, Homo sapiens
ttttccatactgtaa

SEQ ID NO: 1137014 - DNA, 15 bp, Homo sapiens
attttccatactgta

SEQ ID NO: 1137015 - DNA, 15 bp, Homo sapiens
cattttccatactgt

SEQ ID NO: 1137016 - DNA, 15 bp, Homo sapiens
gcattttccatactg

SEQ ID NO: 1137017 - DNA, 15 bp, Homo sapiens
agcattttccatact

SEQ ID NO: 1137018 - DNA, 15 bp, Homo sapiens
aagcattttccatac

SEQ ID NO: 1137019 - DNA, 15 bp, Homo sapiens
gaagcattttccata

SEQ ID NO: 1137020 - DNA, 15 bp, Homo sapiens
tgaagcattttccat

SEQ ID NO: 1137021 - DNA, 15 bp, Homo sapiens
ctgaagcattttcca

SEQ ID NO: 1137022 - DNA, 15 bp, Homo sapiens
tctgaagcattttcc

SEQ ID NO: 1137023 - DNA, 15 bp, Homo sapiens
atctgaagcattttc

SEQ ID NO: 1137024 - DNA, 15 bp, Homo sapiens
catctgaagcatttt

SEQ ID NO: 1137025 - DNA, 15 bp, Homo sapiens
gcatctgaagcattt

SEQ ID NO: 1137026 - DNA, 15 bp, Homo sapiens
tgcatctgaagcatt

SEQ ID NO: 1137027 - DNA, 15 bp, Homo sapiens
ttgcatctgaagcat

SEQ ID NO: 1137028 - DNA, 15 bp, Homo sapiens
gttgcatctgaagca

SEQ ID NO: 1137029 - DNA, 15 bp, Homo sapiens
agttgcatctgaagc

SEQ ID NO: 1137030 - DNA, 15 bp, Homo sapiens
gagttgcatctgaag

SEQ ID NO: 1137031 - DNA, 15 bp, Homo sapiens
agagttgcatctgaa

SEQ ID NO: 1137032 - DNA, 15 bp, Homo sapiens
tagagttgcatctga

SEQ ID NO: 1137033 - DNA, 15 bp, Homo sapiens
ctagagttgcatctg

SEQ ID NO: 1137034 - DNA, 15 bp, Homo sapiens
actagagttgcatct

SEQ ID NO: 1137035 - DNA, 15 bp, Homo sapiens
gactagagttgcatc

SEQ ID NO: 1137036 - DNA, 15 bp, Homo sapiens
tgactagagttgcat

SEQ ID NO: 1137037 - DNA, 15 bp, Homo sapiens
atgactagagttgca

SEQ ID NO: 1137038 - DNA, 15 bp, Homo sapiens
catgactagagttgc

SEQ ID NO: 1137039 - DNA, 15 bp, Homo sapiens
gcatgactagagttg

SEQ ID NO: 1137040 - DNA, 15 bp, Homo sapiens
ggcatgactagagtt

SEQ ID NO: 1137041 - DNA, 15 bp, Homo sapiens
aggcatgactagagt

SEQ ID NO: 1137042 - DNA, 15 bp, Homo sapiens
aaggcatgactagag

SEQ ID NO: 1137043 - DNA, 15 bp, Homo sapiens
taaggcatgactaga

SEQ ID NO: 1137044 - DNA, 15 bp, Homo sapiens
ctaaggcatgactag

SEQ ID NO: 1137045 - DNA, 15 bp, Homo sapiens
tctaaggcatgacta

SEQ ID NO: 1137046 - DNA, 15 bp, Homo sapiens
ctctaaggcatgact

SEQ ID NO: 1137047 - DNA, 15 bp, Homo sapiens
tctctaaggcatgac

SEQ ID NO: 1137048 - DNA, 15 bp, Homo sapiens
atctctaaggcatga

SEQ ID NO: 1137049 - DNA, 15 bp, Homo sapiens
catctctaaggcatg

SEQ ID NO: 1137050 - DNA, 15 bp, Homo sapiens
ccatctctaaggcat

SEQ ID NO: 1137051 - DNA, 15 bp, Homo sapiens
tccatctctaaggca

SEQ ID NO: 1137052 - DNA, 15 bp, Homo sapiens
ctccatctctaaggc

SEQ ID NO: 1137053 - DNA, 15 bp, Homo sapiens
gctccatctctaagg

SEQ ID NO: 1137054 - DNA, 15 bp, Homo sapiens
agctccatctctaag

SEQ ID NO: 1137055 - DNA, 15 bp, Homo sapiens
aagctccatctctaa

SEQ ID NO: 1137056 - DNA, 15 bp, Homo sapiens
taaagctccatctct

SEQ ID NO: 1137057 - DNA, 15 bp, Homo sapiens
ataaagctccatctc

SEQ ID NO: 1137058 - DNA, 15 bp, Homo sapiens
aataaagctccatct

SEQ ID NO: 1137059 - DNA, 15 bp, Homo sapiens
taataaagctccatc

SEQ ID NO: 1137060 - DNA, 15 bp, Homo sapiens
ttaataaagctccat

SEQ ID NO: 1137061 - DNA, 15 bp, Homo sapiens
tttaataaagctcca

SEQ ID NO: 1137062 - DNA, 15 bp, Homo sapiens
gtttaataaagctcc

SEQ ID NO: 1137063 - DNA, 15 bp, Homo sapiens
tgtttaataaagctc

SEQ ID NO: 1137064 - DNA, 15 bp, Homo sapiens
atgtttaataaagct

SEQ ID NO: 1137065 - DNA, 15 bp, Homo sapiens
aatgtttaataaagc

SEQ ID NO: 1137066 - DNA, 15 bp, Homo sapiens
gaatgtttaataaag

SEQ ID NO: 1137067 - DNA, 15 bp, Homo sapiens
tgaatgtttaataaa

SEQ ID NO: 1137068 - DNA, 15 bp, Homo sapiens
ctgaatgtttaataa

SEQ ID NO: 1137069 - DNA, 15 bp, Homo sapiens
tctgaatgtttaata

SEQ ID NO: 1137070 - DNA, 15 bp, Homo sapiens
atctgaatgtttaat

SEQ ID NO: 1137071 - DNA, 15 bp, Homo sapiens
gatctgaatgtttaa

SEQ ID NO: 1137072 - DNA, 15 bp, Homo sapiens
agatctgaatgttta

SEQ ID NO: 1137073 - DNA, 15 bp, Homo sapiens
gagatctgaatgttt

SEQ ID NO: 1137074 - DNA, 15 bp, Homo sapiens
agagatctgaatgtt

SEQ ID NO: 1137075 - DNA, 15 bp, Homo sapiens
tagagatctgaatgt

SEQ ID NO: 1137076 - DNA, 15 bp, Homo sapiens
ctagagatctgaatg

SEQ ID NO: 1137077 - DNA, 15 bp, Homo sapiens
cctagagatctgaat

SEQ ID NO: 1137078 - DNA, 15 bp, Homo sapiens
gcctagagatctgaa

SEQ ID NO: 1137079 - DNA, 15 bp, Homo sapiens
tgcctagagatctga

SEQ ID NO: 1137080 - DNA, 15 bp, Homo sapiens
atgcctagagatctg

SEQ ID NO: 1137081 - DNA, 15 bp, Homo sapiens
tatgcctagagatct

SEQ ID NO: 1137082 - DNA, 15 bp, Homo sapiens
atatgcctagagatc

SEQ ID NO: 1137083 - DNA, 15 bp, Homo sapiens
catatgcctagagat

SEQ ID NO: 1137084 - DNA, 15 bp, Homo sapiens
tcatatgcctagaga

SEQ ID NO: 1137085 - DNA, 15 bp, Homo sapiens
ttcatatgcctagag

SEQ ID NO: 1137086 - DNA, 15 bp, Homo sapiens
cttcatatgcctaga

SEQ ID NO: 1137087 - DNA, 15 bp, Homo sapiens
acttcatatgcctag

SEQ ID NO: 1137088 - DNA, 15 bp, Homo sapiens
cacttcatatgccta

SEQ ID NO: 1137089 - DNA, 15 bp, Homo sapiens
gcacttcatatgcct

SEQ ID NO: 1137090 - DNA, 15 bp, Homo sapiens
agcacttcatatgcc

SEQ ID NO: 1137091 - DNA, 15 bp, Homo sapiens
cagcacttcatatgc

SEQ ID NO: 1137092 - DNA, 15 bp, Homo sapiens
tcagcacttcatatg

SEQ ID NO: 1137093 - DNA, 15 bp, Homo sapiens
actcagcacttcata

SEQ ID NO: 1137094 - DNA, 15 bp, Homo sapiens
aactcagcacttcat

SEQ ID NO: 1137095 - DNA, 15 bp, Homo sapiens
gaactcagcacttca

SEQ ID NO: 1137096 - DNA, 15 bp, Homo sapiens
agaactcagcacttc

SEQ ID NO: 1137097 - DNA, 15 bp, Homo sapiens
gagaactcagcactt

SEQ ID NO: 1137098 - DNA, 15 bp, Homo sapiens
agagaactcagcact

SEQ ID NO: 1137099 - DNA, 15 bp, Homo sapiens
aagagaactcagcac

SEQ ID NO: 1137100 - DNA, 15 bp, Homo sapiens
caagagaactcagca

SEQ ID NO: 1137101 - DNA, 15 bp, Homo sapiens
tcaagagaactcagc

SEQ ID NO: 1137102 - DNA, 15 bp, Homo sapiens
ttcaagagaactcag

SEQ ID NO: 1137103 - DNA, 15 bp, Homo sapiens
gttcaagagaactca

SEQ ID NO: 1137104 - DNA, 15 bp, Homo sapiens
agttcaagagaactc

SEQ ID NO: 1137105 - DNA, 15 bp, Homo sapiens
gagttcaagagaact

SEQ ID NO: 1137106 - DNA, 15 bp, Homo sapiens
ggagttcaagagaac

SEQ ID NO: 1137107 - DNA, 15 bp, Homo sapiens
aggagttcaagagaa

SEQ ID NO: 1137108 - DNA, 15 bp, Homo sapiens
taggagttcaagaga

SEQ ID NO: 1137109 - DNA, 15 bp, Homo sapiens
ttaggagttcaagag

SEQ ID NO: 1137110 - DNA, 15 bp, Homo sapiens
attaggagttcaaga

SEQ ID NO: 1137111 - DNA, 15 bp, Homo sapiens
tattaggagttcaag

SEQ ID NO: 1137112 - DNA, 15 bp, Homo sapiens
gtattaggagttcaa

SEQ ID NO: 1137113 - DNA, 15 bp, Homo sapiens
tgtattaggagttca

SEQ ID NO: 1137114 - DNA, 15 bp, Homo sapiens
ctgtattaggagttc

SEQ ID NO: 1137115 - DNA, 15 bp, Homo sapiens
tctgtattaggagtt

SEQ ID NO: 1137116 - DNA, 15 bp, Homo sapiens
atctgtattaggagt

SEQ ID NO: 1137117 - DNA, 15 bp, Homo sapiens
aatctgtattaggag

SEQ ID NO: 1137118 - DNA, 15 bp, Homo sapiens
caatctgtattagga

SEQ ID NO: 1137119 - DNA, 15 bp, Homo sapiens
gcaatctgtattagg

SEQ ID NO: 1137120 - DNA, 15 bp, Homo sapiens
tgcaatctgtattag

SEQ ID NO: 1137121 - DNA, 15 bp, Homo sapiens
gtgcaatctgtatta

SEQ ID NO: 1137122 - DNA, 15 bp, Homo sapiens
agtgcaatctgtatt

SEQ ID NO: 1137123 - DNA, 15 bp, Homo sapiens
cagtgcaatctgtat

SEQ ID NO: 1137124 - DNA, 15 bp, Homo sapiens
tcagtgcaatctgta

SEQ ID NO: 1137125 - DNA, 15 bp, Homo sapiens
ctcagtgcaatctgt

SEQ ID NO: 1137126 - DNA, 15 bp, Homo sapiens
actcagtgcaatctg

SEQ ID NO: 1137127 - DNA, 15 bp, Homo sapiens
aactcagtgcaatct

SEQ ID NO: 1137128 - DNA, 15 bp, Homo sapiens
aaactcagtgcaatc

SEQ ID NO: 1137129 - DNA, 15 bp, Homo sapiens
taaactcagtgcaat

SEQ ID NO: 1137130 - DNA, 15 bp, Homo sapiens
ctaaactcagtgcaa

SEQ ID NO: 1137131 - DNA, 15 bp, Homo sapiens
actaaactcagtgca

SEQ ID NO: 1137132 - DNA, 15 bp, Homo sapiens
cactaaactcagtgc

SEQ ID NO: 1137133 - DNA, 15 bp, Homo sapiens
tcactaaactcagtg

SEQ ID NO: 1137134 - DNA, 15 bp, Homo sapiens
atcactaaactcagt

SEQ ID NO: 1137135 - DNA, 15 bp, Homo sapiens
tatcactaaactcag

SEQ ID NO: 1137136 - DNA, 15 bp, Homo sapiens
gtatcactaaactca

SEQ ID NO: 1137137 - DNA, 15 bp, Homo sapiens
ggtatcactaaactc

SEQ ID NO: 1137138 - DNA, 15 bp, Homo sapiens
aggtatcactaaact

SEQ ID NO: 1137139 - DNA, 15 bp, Homo sapiens
aaggtatcactaaac

SEQ ID NO: 1137140 - DNA, 15 bp, Homo sapiens
aaaggtatcactaaa

SEQ ID NO: 1137141 - DNA, 15 bp, Homo sapiens
aaaaggtatcactaa

SEQ ID NO: 1137142 - DNA, 15 bp, Homo sapiens
gaaaaggtatcacta

SEQ ID NO: 1137143 - DNA, 15 bp, Homo sapiens
agaaaaggtatcact

SEQ ID NO: 1137144 - DNA, 15 bp, Homo sapiens
cagaaaaggtatcac

SEQ ID NO: 1137145 - DNA, 15 bp, Homo sapiens
ccagaaaaggtatca

SEQ ID NO: 1137146 - DNA, 15 bp, Homo sapiens
tccagaaaaggtatc

SEQ ID NO: 1137147 - DNA, 15 bp, Homo sapiens
ctccagaaaaggtat

SEQ ID NO: 1137148 - DNA, 15 bp, Homo sapiens
gctccagaaaaggta

SEQ ID NO: 1137149 - DNA, 15 bp, Homo sapiens
tgctccagaaaaggt

SEQ ID NO: 1137150 - DNA, 15 bp, Homo sapiens
atgctccagaaaagg

SEQ ID NO: 1137151 - DNA, 15 bp, Homo sapiens
aatgctccagaaaag

SEQ ID NO: 1137152 - DNA, 15 bp, Homo sapiens
gaatgctccagaaaa

SEQ ID NO: 1137153 - DNA, 15 bp, Homo sapiens
ggaatgctccagaaa

SEQ ID NO: 1137154 - DNA, 15 bp, Homo sapiens
aggaatgctccagaa

SEQ ID NO: 1137155 - DNA, 15 bp, Homo sapiens
caggaatgctccaga

SEQ ID NO: 1137156 - DNA, 15 bp, Homo sapiens
tcaggaatgctccag

SEQ ID NO: 1137157 - DNA, 15 bp, Homo sapiens
ctcaggaatgctcca

SEQ ID NO: 1137158 - DNA, 15 bp, Homo sapiens
actcaggaatgctcc

SEQ ID NO: 1137159 - DNA, 15 bp, Homo sapiens
aactcaggaatgctc

SEQ ID NO: 1137160 - DNA, 15 bp, Homo sapiens
gaactcaggaatgct

SEQ ID NO: 1137161 - DNA, 15 bp, Homo sapiens
tgaactcaggaatgc

SEQ ID NO: 1137162 - DNA, 15 bp, Homo sapiens
ctgaactcaggaatg

SEQ ID NO: 1137163 - DNA, 15 bp, Homo sapiens
cctgaactcaggaat

SEQ ID NO: 1137164 - DNA, 15 bp, Homo sapiens
acctgaactcaggaa

SEQ ID NO: 1137165 - DNA, 15 bp, Homo sapiens
tacctgaactcagga

SEQ ID NO: 1137166 - DNA, 15 bp, Homo sapiens
ctacctgaactcagg

SEQ ID NO: 1137167 - DNA, 15 bp, Homo sapiens
cctacctgaactcag

SEQ ID NO: 1137168 - DNA, 15 bp, Homo sapiens
ccctacctgaactca

SEQ ID NO: 1137169 - DNA, 15 bp, Homo sapiens
tccctacctgaactc

SEQ ID NO: 1137170 - DNA, 15 bp, Homo sapiens
ctccctacctgaact

SEQ ID NO: 1137171 - DNA, 15 bp, Homo sapiens
tctccctacctgaac

SEQ ID NO: 1137172 - DNA, 15 bp, Homo sapiens
ttctccctacctgaa

SEQ ID NO: 1137173 - DNA, 15 bp, Homo sapiens
cttctccctacctga

SEQ ID NO: 1137174 - DNA, 15 bp, Homo sapiens
ccttctccctacctg

SEQ ID NO: 1137175 - DNA, 15 bp, Homo sapiens
cccttctccctacct

SEQ ID NO: 1137176 - DNA, 15 bp, Homo sapiens
acccttctccctacc

SEQ ID NO: 1137177 - DNA, 15 bp, Homo sapiens
aacccttctccctac

SEQ ID NO: 1137178 - DNA, 15 bp, Homo sapiens
aaacccttctcccta

SEQ ID NO: 1137179 - DNA, 15 bp, Homo sapiens
aaaacccttctccct

SEQ ID NO: 1137180 - DNA, 15 bp, Homo sapiens
aaaaacccttctccc

SEQ ID NO: 1137181 - DNA, 15 bp, Homo sapiens
caaaaacccttctcc

SEQ ID NO: 1137182 - DNA, 15 bp, Homo sapiens
gcaaaaacccttctc

SEQ ID NO: 1137183 - DNA, 15 bp, Homo sapiens
agcaaaaacccttct

SEQ ID NO: 1137184 - DNA, 15 bp, Homo sapiens
cagcaaaaacccttc

SEQ ID NO: 1137185 - DNA, 15 bp, Homo sapiens
acagcaaaaaccctt

SEQ ID NO: 1137186 - DNA, 15 bp, Homo sapiens
cacagcaaaaaccct

SEQ ID NO: 1137187 - DNA, 15 bp, Homo sapiens
tcacagcaaaaaccc

SEQ ID NO: 1137188 - DNA, 15 bp, Homo sapiens
atcacagcaaaaacc

SEQ ID NO: 1137189 - DNA, 15 bp, Homo sapiens
aatcacagcaaaaac

SEQ ID NO: 1137190 - DNA, 15 bp, Homo sapiens
caatcacagcaaaaa

SEQ ID NO: 1137191 - DNA, 15 bp, Homo sapiens
ccaatcacagcaaaa

SEQ ID NO: 1137192 - DNA, 15 bp, Homo sapiens
gccaatcacagcaaa

SEQ ID NO: 1137193 - DNA, 15 bp, Homo sapiens
agccaatcacagcaa

SEQ ID NO: 1137194 - DNA, 15 bp, Homo sapiens
aagccaatcacagca

SEQ ID NO: 1137195 - DNA, 15 bp, Homo sapiens
caagccaatcacagc

SEQ ID NO: 1137196 - DNA, 15 bp, Homo sapiens
acaagccaatcacag

SEQ ID NO: 1137197 - DNA, 15 bp, Homo sapiens
aacaagccaatcaca

SEQ ID NO: 1137198 - DNA, 15 bp, Homo sapiens
taacaagccaatcac

SEQ ID NO: 1137199 - DNA, 15 bp, Homo sapiens
ataacaagccaatca

SEQ ID NO: 1137200 - DNA, 15 bp, Homo sapiens
cataacaagccaatc

SEQ ID NO: 1137201 - DNA, 15 bp, Homo sapiens
acataacaagccaat

SEQ ID NO: 1137202 - DNA, 15 bp, Homo sapiens
aacataacaagccaa

SEQ ID NO: 1137203 - DNA, 15 bp, Homo sapiens
gaacataacaagcca

SEQ ID NO: 1137204 - DNA, 15 bp, Homo sapiens
agaacataacaagcc

SEQ ID NO: 1137205 - DNA, 15 bp, Homo sapiens
aagaacataacaagc

SEQ ID NO: 1137206 - DNA, 15 bp, Homo sapiens
aaagaacataacaag

SEQ ID NO: 1137207 - DNA, 15 bp, Homo sapiens
gaaagaacataacaa

SEQ ID NO: 1137208 - DNA, 15 bp, Homo sapiens
agaaagaacataaca

SEQ ID NO: 1137209 - DNA, 15 bp, Homo sapiens
tagaaagaacataac

SEQ ID NO: 1137210 - DNA, 15 bp, Homo sapiens
ttagaaagaacataa

SEQ ID NO: 1137211 - DNA, 15 bp, Homo sapiens
tttagaaagaacata

SEQ ID NO: 1137212 - DNA, 15 bp, Homo sapiens
atttagaaagaacat

SEQ ID NO: 1137213 - DNA, 15 bp, Homo sapiens
catttagaaagaaca

SEQ ID NO: 1137214 - DNA, 15 bp, Homo sapiens
ccatttagaaagaac

SEQ ID NO: 1137215 - DNA, 15 bp, Homo sapiens
tccatttagaaagaa

SEQ ID NO: 1137216 - DNA, 15 bp, Homo sapiens
ttccatttagaaaga

SEQ ID NO: 1137217 - DNA, 15 bp, Homo sapiens
tttccatttagaaag

SEQ ID NO: 1137218 - DNA, 15 bp, Homo sapiens
atttccatttagaaa

SEQ ID NO: 1137219 - DNA, 15 bp, Homo sapiens
tatttccatttagaa

SEQ ID NO: 1137220 - DNA, 15 bp, Homo sapiens
ctatttccatttaga

SEQ ID NO: 1137221 - DNA, 15 bp, Homo sapiens
tctatttccatttag

SEQ ID NO: 1137222 - DNA, 15 bp, Homo sapiens
ttctatttccattta

SEQ ID NO: 1137223 - DNA, 15 bp, Homo sapiens
attctatttccattt

SEQ ID NO: 1137224 - DNA, 15 bp, Homo sapiens
aattctatttccatt

SEQ ID NO: 1137225 - DNA, 15 bp, Homo sapiens
caattctatttccat

SEQ ID NO: 1137226 - DNA, 15 bp, Homo sapiens
tcaattctatttcca

SEQ ID NO: 1137227 - DNA, 15 bp, Homo sapiens
ttcaattctatttcc

SEQ ID NO: 1137228 - DNA, 15 bp, Homo sapiens
cttcaattctatttc

SEQ ID NO: 1137229 - DNA, 15 bp, Homo sapiens
acttcaattctattt

SEQ ID NO: 1137230 - DNA, 15 bp, Homo sapiens
cacttcaattctatt

SEQ ID NO: 1137231 - DNA, 15 bp, Homo sapiens
acacttcaattctat

SEQ ID NO: 1137232 - DNA, 15 bp, Homo sapiens
gacacttcaattcta

SEQ ID NO: 1137233 - DNA, 15 bp, Homo sapiens
agacacttcaattct

SEQ ID NO: 1137234 - DNA, 15 bp, Homo sapiens
gagacacttcaattc

SEQ ID NO: 1137235 - DNA, 15 bp, Homo sapiens
ggagacacttcaatt

SEQ ID NO: 1137236 - DNA, 15 bp, Homo sapiens
aggagacacttcaat

SEQ ID NO: 1137237 - DNA, 15 bp, Homo sapiens
gaggagacacttcaa

SEQ ID NO: 1137238 - DNA, 15 bp, Homo sapiens
agaggagacacttca

SEQ ID NO: 1137239 - DNA, 15 bp, Homo sapiens
gagaggagacacttc

SEQ ID NO: 1137240 - DNA, 15 bp, Homo sapiens
agagaggagacactt

SEQ ID NO: 1137241 - DNA, 15 bp, Homo sapiens
gagagaggagacact

SEQ ID NO: 1137242 - DNA, 15 bp, Homo sapiens
ggagagaggagacac

SEQ ID NO: 1137243 - DNA, 15 bp, Homo sapiens
tggagagaggagaca

SEQ ID NO: 1137244 - DNA, 15 bp, Homo sapiens
atggagagaggagac

SEQ ID NO: 1137245 - DNA, 15 bp, Homo sapiens
aatggagagaggaga

SEQ ID NO: 1137246 - DNA, 15 bp, Homo sapiens
aaatggagagaggag

SEQ ID NO: 1137247 - DNA, 15 bp, Homo sapiens
taaatggagagagga

SEQ ID NO: 1137248 - DNA, 15 bp, Homo sapiens
ataaatggagagagg

SEQ ID NO: 1137249 - DNA, 15 bp, Homo sapiens
aataaatggagagag

SEQ ID NO: 1137250 - DNA, 15 bp, Homo sapiens
caataaatggagaga

SEQ ID NO: 1137251 - DNA, 15 bp, Homo sapiens
ccaataaatggagag

SEQ ID NO: 1137252 - DNA, 15 bp, Homo sapiens
tccaataaatggaga

SEQ ID NO: 1137253 - DNA, 15 bp, Homo sapiens
ttccaataaatggag

SEQ ID NO: 1137254 - DNA, 15 bp, Homo sapiens
cttccaataaatgga

SEQ ID NO: 1137255 - DNA, 15 bp, Homo sapiens
tcttccaataaatgg

SEQ ID NO: 1137256 - DNA, 15 bp, Homo sapiens
ctcttccaataaatg

SEQ ID NO: 1137257 - DNA, 15 bp, Homo sapiens
actcttccaataaat

SEQ ID NO: 1137258 - DNA, 15 bp, Homo sapiens
gactcttccaataaa

SEQ ID NO: 1137259 - DNA, 15 bp, Homo sapiens
tgactcttccaataa

SEQ ID NO: 1137260 - DNA, 15 bp, Homo sapiens
atgactcttccaata

SEQ ID NO: 1137261 - DNA, 15 bp, Homo sapiens
catgactcttccaat

SEQ ID NO: 1137262 - DNA, 15 bp, Homo sapiens
tcatgactcttccaa

SEQ ID NO: 1137263 - DNA, 15 bp, Homo sapiens
ctcatgactcttcca

SEQ ID NO: 1137264 - DNA, 15 bp, Homo sapiens
cctcatgactcttcc

SEQ ID NO: 1137265 - DNA, 15 bp, Homo sapiens
ccctcatgactcttc

SEQ ID NO: 1137266 - DNA, 15 bp, Homo sapiens
tccctcatgactctt

SEQ ID NO: 1137267 - DNA, 15 bp, Homo sapiens
gtccctcatgactct

SEQ ID NO: 1137268 - DNA, 15 bp, Homo sapiens
tgtccctcatgactc

SEQ ID NO: 1137269 - DNA, 15 bp, Homo sapiens
atgtccctcatgact

SEQ ID NO: 1137270 - DNA, 15 bp, Homo sapiens
tatgtccctcatgac

SEQ ID NO: 1137271 - DNA, 15 bp, Homo sapiens
ttatgtccctcatga

SEQ ID NO: 1137272 - DNA, 15 bp, Homo sapiens
attatgtccctcatg

SEQ ID NO: 1137273 - DNA, 15 bp, Homo sapiens
aattatgtccctcat

SEQ ID NO: 1137274 - DNA, 15 bp, Homo sapiens
taattatgtccctca

SEQ ID NO: 1137275 - DNA, 15 bp, Homo sapiens
ctaattatgtccctc

SEQ ID NO: 1137276 - DNA, 15 bp, Homo sapiens
tctaattatgtccct

SEQ ID NO: 1137277 - DNA, 15 bp, Homo sapiens
atctaattatgtccc

SEQ ID NO: 1137278 - DNA, 15 bp, Homo sapiens
catctaattatgtcc

SEQ ID NO: 1137279 - DNA, 15 bp, Homo sapiens
tcatctaattatgtc

SEQ ID NO: 1137280 - DNA, 15 bp, Homo sapiens
atcatctaattatgt

SEQ ID NO: 1137281 - DNA, 15 bp, Homo sapiens
gatcatctaattatg

SEQ ID NO: 1137282 - DNA, 15 bp, Homo sapiens
ggatcatctaattat

SEQ ID NO: 1137283 - DNA, 15 bp, Homo sapiens
gggatcatctaatta

SEQ ID NO: 1137284 - DNA, 15 bp, Homo sapiens
agggatcatctaatt

SEQ ID NO: 1137285 - DNA, 15 bp, Homo sapiens
aagggatcatctaat

SEQ ID NO: 1137286 - DNA, 15 bp, Homo sapiens
caagggatcatctaa

SEQ ID NO: 1137287 - DNA, 15 bp, Homo sapiens
ccaagggatcatcta

SEQ ID NO: 1137288 - DNA, 15 bp, Homo sapiens
tccaagggatcatct

SEQ ID NO: 1137289 - DNA, 15 bp, Homo sapiens
ctccaagggatcatc

SEQ ID NO: 1137290 - DNA, 15 bp, Homo sapiens
actccaagggatcat

SEQ ID NO: 1137291 - DNA, 15 bp, Homo sapiens
gactccaagggatca

SEQ ID NO: 1137292 - DNA, 15 bp, Homo sapiens
agactccaagggatc

SEQ ID NO: 1137293 - DNA, 15 bp, Homo sapiens
gagactccaagggat

SEQ ID NO: 1137294 - DNA, 15 bp, Homo sapiens
ggagactccaaggga

SEQ ID NO: 1137295 - DNA, 15 bp, Homo sapiens
cggagactccaaggg

SEQ ID NO: 1137296 - DNA, 15 bp, Homo sapiens
ccggagactccaagg

SEQ ID NO: 1137297 - DNA, 15 bp, Homo sapiens
gccggagactccaag

SEQ ID NO: 1137298 - DNA, 15 bp, Homo sapiens
agccggagactccaa

SEQ ID NO: 1137299 - DNA, 15 bp, Homo sapiens
aagccggagactcca

SEQ ID NO: 1137300 - DNA, 15 bp, Homo sapiens
taagccggagactcc

SEQ ID NO: 1137301 - DNA, 15 bp, Homo sapiens
ctaagccggagactc

SEQ ID NO: 1137302 - DNA, 15 bp, Homo sapiens
cctaagccggagact

SEQ ID NO: 1137303 - DNA, 15 bp, Homo sapiens
acctaagccggagac

SEQ ID NO: 1137304 - DNA, 15 bp, Homo sapiens
gacctaagccggaga

SEQ ID NO: 1137305 - DNA, 15 bp, Homo sapiens
tgacctaagccggag

SEQ ID NO: 1137306 - DNA, 15 bp, Homo sapiens
ctgacctaagccgga

SEQ ID NO: 1137307 - DNA, 15 bp, Homo sapiens
actgacctaagccgg

SEQ ID NO: 1137308 - DNA, 15 bp, Homo sapiens
cactgacctaagccg

SEQ ID NO: 1137309 - DNA, 15 bp, Homo sapiens
ccactgacctaagcc

SEQ ID NO: 1137310 - DNA, 15 bp, Homo sapiens
accactgacctaagc

SEQ ID NO: 1137311 - DNA, 15 bp, Homo sapiens
aaccactgacctaag

SEQ ID NO: 1137312 - DNA, 15 bp, Homo sapiens
taaccactgacctaa

SEQ ID NO: 1137313 - DNA, 15 bp, Homo sapiens
ataaccactgaccta

SEQ ID NO: 1137314 - DNA, 15 bp, Homo sapiens
gataaccactgacct

SEQ ID NO: 1137315 - DNA, 15 bp, Homo sapiens
agataaccactgacc

SEQ ID NO: 1137316 - DNA, 15 bp, Homo sapiens
tagataaccactgac

SEQ ID NO: 1137317 - DNA, 15 bp, Homo sapiens
gtagataaccactga

SEQ ID NO: 1137318 - DNA, 15 bp, Homo sapiens
agtagataaccactg

SEQ ID NO: 1137319 - DNA, 15 bp, Homo sapiens
aagtagataaccact

SEQ ID NO: 1137320 - DNA, 15 bp, Homo sapiens
taagtagataaccac

SEQ ID NO: 1137321 - DNA, 15 bp, Homo sapiens
ctaagtagataacca

SEQ ID NO: 1137322 - DNA, 15 bp, Homo sapiens
cctaagtagataacc

SEQ ID NO: 1137323 - DNA, 15 bp, Homo sapiens
gcctaagtagataac

SEQ ID NO: 1137324 - DNA, 15 bp, Homo sapiens
agcctaagtagataa

SEQ ID NO: 1137325 - DNA, 15 bp, Homo sapiens
cagcctaagtagata

SEQ ID NO: 1137326 - DNA, 15 bp, Homo sapiens
gcagcctaagtagat

SEQ ID NO: 1137327 - DNA, 15 bp, Homo sapiens
tgcagcctaagtaga

SEQ ID NO: 1137328 - DNA, 15 bp, Homo sapiens
gtgcagcctaagtag

SEQ ID NO: 1137329 - DNA, 15 bp, Homo sapiens
tgtgcagcctaagta

SEQ ID NO: 1137330 - DNA, 15 bp, Homo sapiens
atgtgcagcctaagt

SEQ ID NO: 1137331 - DNA, 15 bp, Homo sapiens
aatgtgcagcctaag

SEQ ID NO: 1137332 - DNA, 15 bp, Homo sapiens
caatgtgcagcctaa

SEQ ID NO: 1137333 - DNA, 15 bp, Homo sapiens
ccaatgtgcagccta

SEQ ID NO: 1137334 - DNA, 15 bp, Homo sapiens
tccaatgtgcagcct

SEQ ID NO: 1137335 - DNA, 15 bp, Homo sapiens
ttccaatgtgcagcc

SEQ ID NO: 1137336 - DNA, 15 bp, Homo sapiens
attccaatgtgcagc

SEQ ID NO: 1137337 - DNA, 15 bp, Homo sapiens
gattccaatgtgcag

SEQ ID NO: 1137338 - DNA, 15 bp, Homo sapiens
tgattccaatgtgca

SEQ ID NO: 1137339 - DNA, 15 bp, Homo sapiens
gtgattccaatgtgc

SEQ ID NO: 1137340 - DNA, 15 bp, Homo sapiens
ggtgattccaatgtg

SEQ ID NO: 1137341 - DNA, 15 bp, Homo sapiens
aggtgattccaatgt

SEQ ID NO: 1137342 - DNA, 15 bp, Homo sapiens
caggtgattccaatg

SEQ ID NO: 1137343 - DNA, 15 bp, Homo sapiens
tcaggtgattccaat

SEQ ID NO: 1137344 - DNA, 15 bp, Homo sapiens
ctcaggtgattccaa

SEQ ID NO: 1137345 - DNA, 15 bp, Homo sapiens
tctcaggtgattcca

SEQ ID NO: 1137346 - DNA, 15 bp, Homo sapiens
ctctcaggtgattcc

SEQ ID NO: 1137347 - DNA, 15 bp, Homo sapiens
actctcaggtgattc

SEQ ID NO: 1137348 - DNA, 15 bp, Homo sapiens
aactctcaggtgatt

SEQ ID NO: 1137349 - DNA, 15 bp, Homo sapiens
taactctcaggtgat

SEQ ID NO: 1137350 - DNA, 15 bp, Homo sapiens
ttaactctcaggtga

SEQ ID NO: 1137351 - DNA, 15 bp, Homo sapiens
tttaactctcaggtg

SEQ ID NO: 1137352 - DNA, 15 bp, Homo sapiens
ttttaactctcaggt

SEQ ID NO: 1137353 - DNA, 15 bp, Homo sapiens
tttttaactctcagg

SEQ ID NO: 1137354 - DNA, 15 bp, Homo sapiens
ttttttaactctcag

SEQ ID NO: 1137355 - DNA, 15 bp, Homo sapiens
gttttttaactctca

SEQ ID NO: 1137356 - DNA, 15 bp, Homo sapiens
ggttttttaactctc

SEQ ID NO: 1137357 - DNA, 15 bp, Homo sapiens
tggttttttaactct

SEQ ID NO: 1137358 - DNA, 15 bp, Homo sapiens
ctggttttttaactc

SEQ ID NO: 1137359 - DNA, 15 bp, Homo sapiens
cctggttttttaact

SEQ ID NO: 1137360 - DNA, 15 bp, Homo sapiens
tcctggttttttaac

SEQ ID NO: 1137361 - DNA, 15 bp, Homo sapiens
atcctggttttttaa

SEQ ID NO: 1137362 - DNA, 15 bp, Homo sapiens
tatcctggtttttta

SEQ ID NO: 1137363 - DNA, 15 bp, Homo sapiens
ttatcctggtttttt

SEQ ID NO: 1137364 - DNA, 15 bp, Homo sapiens
gttatcctggttttt

SEQ ID NO: 1137365 - DNA, 15 bp, Homo sapiens
ggttatcctggtttt

SEQ ID NO: 1137366 - DNA, 15 bp, Homo sapiens
aggttatcctggttt

SEQ ID NO: 1137367 - DNA, 15 bp, Homo sapiens
gaggttatcctggtt

SEQ ID NO: 1137368 - DNA, 15 bp, Homo sapiens
agaggttatcctggt

SEQ ID NO: 1137369 - DNA, 15 bp, Homo sapiens
cagaggttatcctgg

SEQ ID NO: 1137370 - DNA, 15 bp, Homo sapiens
gcagaggttatcctg

SEQ ID NO: 1137371 - DNA, 15 bp, Homo sapiens
ggcagaggttatcct

SEQ ID NO: 1137372 - DNA, 15 bp, Homo sapiens
aggcagaggttatcc

SEQ ID NO: 1137373 - DNA, 15 bp, Homo sapiens
caggcagaggttatc

SEQ ID NO: 1137374 - DNA, 15 bp, Homo sapiens
acaggcagaggttat

SEQ ID NO: 1137375 - DNA, 15 bp, Homo sapiens
cacaggcagaggtta

SEQ ID NO: 1137376 - DNA, 15 bp, Homo sapiens
acacaggcagaggtt

SEQ ID NO: 1137377 - DNA, 15 bp, Homo sapiens
gacacaggcagaggt

SEQ ID NO: 1137378 - DNA, 15 bp, Homo sapiens
agacacaggcagagg

SEQ ID NO: 1137379 - DNA, 15 bp, Homo sapiens
gagacacaggcagag

SEQ ID NO: 1137380 - DNA, 15 bp, Homo sapiens
tgagacacaggcaga

SEQ ID NO: 1137381 - DNA, 15 bp, Homo sapiens
atgagacacaggcag

SEQ ID NO: 1137382 - DNA, 15 bp, Homo sapiens
gatgagacacaggca

SEQ ID NO: 1137383 - DNA, 15 bp, Homo sapiens
agatgagacacaggc

SEQ ID NO: 1137384 - DNA, 15 bp, Homo sapiens
gagatgagacacagg

SEQ ID NO: 1137385 - DNA, 15 bp, Homo sapiens
ggagatgagacacag

SEQ ID NO: 1137386 - DNA, 15 bp, Homo sapiens
tggagatgagacaca

SEQ ID NO: 1137387 - DNA, 15 bp, Homo sapiens
ctggagatgagacac

SEQ ID NO: 1137388 - DNA, 15 bp, Homo sapiens
gctggagatgagaca

SEQ ID NO: 1137389 - DNA, 15 bp, Homo sapiens
tgctggagatgagac

SEQ ID NO: 1137390 - DNA, 15 bp, Homo sapiens
ttgctggagatgaga

SEQ ID NO: 1137391 - DNA, 15 bp, Homo sapiens
attgctggagatgag

SEQ ID NO: 1137392 - DNA, 15 bp, Homo sapiens
aattgctggagatga

SEQ ID NO: 1137393 - DNA, 15 bp, Homo sapiens
gaattgctggagatg

SEQ ID NO: 1137394 - DNA, 15 bp, Homo sapiens
agaattgctggagat

SEQ ID NO: 1137395 - DNA, 15 bp, Homo sapiens
cagaattgctggaga

SEQ ID NO: 1137396 - DNA, 15 bp, Homo sapiens
tcagaattgctggag

SEQ ID NO: 1137397 - DNA, 15 bp, Homo sapiens
atcagaattgctgga

SEQ ID NO: 1137398 - DNA, 15 bp, Homo sapiens
catcagaattgctgg

SEQ ID NO: 1137399 - DNA, 15 bp, Homo sapiens
acatcagaattgctg

SEQ ID NO: 1137400 - DNA, 15 bp, Homo sapiens
tacatcagaattgct

SEQ ID NO: 1137401 - DNA, 15 bp, Homo sapiens
ttacatcagaattgc

SEQ ID NO: 1137402 - DNA, 15 bp, Homo sapiens
attacatcagaattg

SEQ ID NO: 1137403 - DNA, 15 bp, Homo sapiens
aattacatcagaatt

SEQ ID NO: 1137404 - DNA, 15 bp, Homo sapiens
caattacatcagaat

SEQ ID NO: 1137405 - DNA, 15 bp, Homo sapiens
ccaattacatcagaa

SEQ ID NO: 1137406 - DNA, 15 bp, Homo sapiens
accaattacatcaga

SEQ ID NO: 1137407 - DNA, 15 bp, Homo sapiens
gaccaattacatcag

SEQ ID NO: 1137408 - DNA, 15 bp, Homo sapiens
tgaccaattacatca

SEQ ID NO: 1137409 - DNA, 15 bp, Homo sapiens
ctgaccaattacatc

SEQ ID NO: 1137410 - DNA, 15 bp, Homo sapiens
cctgaccaattacat

SEQ ID NO: 1137411 - DNA, 15 bp, Homo sapiens
ccctgaccaattaca

SEQ ID NO: 1137412 - DNA, 15 bp, Homo sapiens
gccctgaccaattac

SEQ ID NO: 1137413 - DNA, 15 bp, Homo sapiens
agccctgaccaatta

SEQ ID NO: 1137414 - DNA, 15 bp, Homo sapiens
cagccctgaccaatt

SEQ ID NO: 1137415 - DNA, 15 bp, Homo sapiens
acagccctgaccaat

SEQ ID NO: 1137416 - DNA, 15 bp, Homo sapiens
cacagccctgaccaa

SEQ ID NO: 1137417 - DNA, 15 bp, Homo sapiens
ccacagccctgacca

SEQ ID NO: 1137418 - DNA, 15 bp, Homo sapiens
gccacagccctgacc

SEQ ID NO: 1137419 - DNA, 15 bp, Homo sapiens
ggccacagccctgac

SEQ ID NO: 1137420 - DNA, 15 bp, Homo sapiens
gggccacagccctga

SEQ ID NO: 1137421 - DNA, 15 bp, Homo sapiens
cgggccacagccctg

SEQ ID NO: 1137422 - DNA, 15 bp, Homo sapiens
tcgggccacagccct

SEQ ID NO: 1137423 - DNA, 15 bp, Homo sapiens
ctcgggccacagccc

SEQ ID NO: 1137424 - DNA, 15 bp, Homo sapiens
actcgggccacagcc

SEQ ID NO: 1137425 - DNA, 15 bp, Homo sapiens
tactcgggccacagc

SEQ ID NO: 1137426 - DNA, 15 bp, Homo sapiens
ctactcgggccacag

SEQ ID NO: 1137427 - DNA, 15 bp, Homo sapiens
cctactcgggccaca

SEQ ID NO: 1137428 - DNA, 15 bp, Homo sapiens
acctactcgggccac

SEQ ID NO: 1137429 - DNA, 15 bp, Homo sapiens
cacctactcgggcca

SEQ ID NO: 1137430 - DNA, 15 bp, Homo sapiens
tcacctactcgggcc

SEQ ID NO: 1137431 - DNA, 15 bp, Homo sapiens
ctcacctactcgggc

SEQ ID NO: 1137432 - DNA, 15 bp, Homo sapiens
actcacctactcggg

SEQ ID NO: 1137433 - DNA, 15 bp, Homo sapiens
aactcacctactcgg

SEQ ID NO: 1137434 - DNA, 15 bp, Homo sapiens
gaactcacctactcg

SEQ ID NO: 1137435 - DNA, 15 bp, Homo sapiens
agaactcacctactc

SEQ ID NO: 1137436 - DNA, 15 bp, Homo sapiens
cagaactcacctact

SEQ ID NO: 1137437 - DNA, 15 bp, Homo sapiens
ccagaactcacctac

SEQ ID NO: 1137438 - DNA, 15 bp, Homo sapiens
accagaactcaccta

SEQ ID NO: 1137439 - DNA, 15 bp, Homo sapiens
aaccagaactcacct

SEQ ID NO: 1137440 - DNA, 15 bp, Homo sapiens
aaaccagaactcacc

SEQ ID NO: 1137441 - DNA, 15 bp, Homo sapiens
aaaaccagaactcac

SEQ ID NO: 1137442 - DNA, 15 bp, Homo sapiens
aaaaaccagaactca

SEQ ID NO: 1137443 - DNA, 15 bp, Homo sapiens
aaaaaaccagaactc

SEQ ID NO: 1137444 - DNA, 15 bp, Homo sapiens
taaaaaaccagaact

SEQ ID NO: 1137445 - DNA, 15 bp, Homo sapiens
ttaaaaaaccagaac

SEQ ID NO: 1137446 - DNA, 15 bp, Homo sapiens
tttaaaaaaccagaa

SEQ ID NO: 1137447 - DNA, 15 bp, Homo sapiens
ctttaaaaaaccaga

SEQ ID NO: 1137448 - DNA, 15 bp, Homo sapiens
gctttaaaaaaccag

SEQ ID NO: 1137449 - DNA, 15 bp, Homo sapiens
agctttaaaaaacca

SEQ ID NO: 1137450 - DNA, 15 bp, Homo sapiens
gagctttaaaaaacc

SEQ ID NO: 1137451 - DNA, 15 bp, Homo sapiens
ggagctttaaaaaac

SEQ ID NO: 1137452 - DNA, 15 bp, Homo sapiens
gggagctttaaaaaa

SEQ ID NO: 1137453 - DNA, 15 bp, Homo sapiens
tgggagctttaaaaa

SEQ ID NO: 1137454 - DNA, 15 bp, Homo sapiens
ctgggagctttaaaa

SEQ ID NO: 1137455 - DNA, 15 bp, Homo sapiens
cctgggagctttaaa

SEQ ID NO: 1137456 - DNA, 15 bp, Homo sapiens
acctgggagctttaa

SEQ ID NO: 1137457 - DNA, 15 bp, Homo sapiens
cacctgggagcttta

SEQ ID NO: 1137458 - DNA, 15 bp, Homo sapiens
tcacctgggagcttt

SEQ ID NO: 1137459 - DNA, 15 bp, Homo sapiens
atcacctgggagctt

SEQ ID NO: 1137460 - DNA, 15 bp, Homo sapiens
aatcacctgggagct

SEQ ID NO: 1137461 - DNA, 15 bp, Homo sapiens
gaatcacctgggagc

SEQ ID NO: 1137462 - DNA, 15 bp, Homo sapiens
agaatcacctgggag

SEQ ID NO: 1137463 - DNA, 15 bp, Homo sapiens
cagaatcacctggga

SEQ ID NO: 1137464 - DNA, 15 bp, Homo sapiens
tcagaatcacctggg

SEQ ID NO: 1137465 - DNA, 15 bp, Homo sapiens
atcagaatcacctgg

SEQ ID NO: 1137466 - DNA, 15 bp, Homo sapiens
catcagaatcacctg

SEQ ID NO: 1137467 - DNA, 15 bp, Homo sapiens
acatcagaatcacct

SEQ ID NO: 1137468 - DNA, 15 bp, Homo sapiens
cacatcagaatcacc

SEQ ID NO: 1137469 - DNA, 15 bp, Homo sapiens
gcacatcagaatcac

SEQ ID NO: 1137470 - DNA, 15 bp, Homo sapiens
tgcacatcagaatca

SEQ ID NO: 1137471 - DNA, 15 bp, Homo sapiens
ttgcacatcagaatc

SEQ ID NO: 1137472 - DNA, 15 bp, Homo sapiens
attgcacatcagaat

SEQ ID NO: 1137473 - DNA, 15 bp, Homo sapiens
gattgcacatcagaa

SEQ ID NO: 1137474 - DNA, 15 bp, Homo sapiens
ggattgcacatcaga

SEQ ID NO: 1137475 - DNA, 15 bp, Homo sapiens
tggattgcacatcag

SEQ ID NO: 1137476 - DNA, 15 bp, Homo sapiens
ctggattgcacatca

SEQ ID NO: 1137477 - DNA, 15 bp, Homo sapiens
cctggattgcacatc

SEQ ID NO: 1137478 - DNA, 15 bp, Homo sapiens
acctggattgcacat

SEQ ID NO: 1137479 - DNA, 15 bp, Homo sapiens
aacctggattgcaca

SEQ ID NO: 1137480 - DNA, 15 bp, Homo sapiens
caacctggattgcac

SEQ ID NO: 1137481 - DNA, 15 bp, Homo sapiens
tcaacctggattgca

SEQ ID NO: 1137482 - DNA, 15 bp, Homo sapiens
ctcaacctggattgc

SEQ ID NO: 1137483 - DNA, 15 bp, Homo sapiens
tctcaacctggattg

SEQ ID NO: 1137484 - DNA, 15 bp, Homo sapiens
atctcaacctggatt

SEQ ID NO: 1137485 - DNA, 15 bp, Homo sapiens
gatctcaacctggat

SEQ ID NO: 1137486 - DNA, 15 bp, Homo sapiens
tgatctcaacctgga

SEQ ID NO: 1137487 - DNA, 15 bp, Homo sapiens
gtgatctcaacctgg

SEQ ID NO: 1137488 - DNA, 15 bp, Homo sapiens
agtgatctcaacctg

SEQ ID NO: 1137489 - DNA, 15 bp, Homo sapiens
aagtgatctcaacct

SEQ ID NO: 1137490 - DNA, 15 bp, Homo sapiens
aaagtgatctcaacc

SEQ ID NO: 1137491 - DNA, 15 bp, Homo sapiens
caaagtgatctcaac

SEQ ID NO: 1137492 - DNA, 15 bp, Homo sapiens
ccaaagtgatctcaa

SEQ ID NO: 1137493 - DNA, 15 bp, Homo sapiens
cccaaagtgatctca

SEQ ID NO: 1137494 - DNA, 15 bp, Homo sapiens
gcccaaagtgatctc

SEQ ID NO: 1137495 - DNA, 15 bp, Homo sapiens
ggcccaaagtgatct

SEQ ID NO: 1137496 - DNA, 15 bp, Homo sapiens
gggcccaaagtgatc

SEQ ID NO: 1137497 - DNA, 15 bp, Homo sapiens
agggcccaaagtgat

SEQ ID NO: 1137498 - DNA, 15 bp, Homo sapiens
aagggcccaaagtga

SEQ ID NO: 1137499 - DNA, 15 bp, Homo sapiens
aaagggcccaaagtg

SEQ ID NO: 1137500 - DNA, 15 bp, Homo sapiens
gaaagggcccaaagt

SEQ ID NO: 1137501 - DNA, 15 bp, Homo sapiens
ggaaagggcccaaag

SEQ ID NO: 1137502 - DNA, 15 bp, Homo sapiens
tggaaagggcccaaa

SEQ ID NO: 1137503 - DNA, 15 bp, Homo sapiens
ctggaaagggcccaa

SEQ ID NO: 1137504 - DNA, 15 bp, Homo sapiens
gctggaaagggccca

SEQ ID NO: 1137505 - DNA, 15 bp, Homo sapiens
agctggaaagggccc

SEQ ID NO: 1137506 - DNA, 15 bp, Homo sapiens
gagctggaaagggcc

SEQ ID NO: 1137507 - DNA, 15 bp, Homo sapiens
agagctggaaagggc

SEQ ID NO: 1137508 - DNA, 15 bp, Homo sapiens
aagagctggaaaggg

SEQ ID NO: 1137509 - DNA, 15 bp, Homo sapiens
aaagagctggaaagg

SEQ ID NO: 1137510 - DNA, 15 bp, Homo sapiens
taaagagctggaaag

SEQ ID NO: 1137511 - DNA, 15 bp, Homo sapiens
ttaaagagctggaaa

SEQ ID NO: 1137512 - DNA, 15 bp, Homo sapiens
tttaaagagctggaa

SEQ ID NO: 1137513 - DNA, 15 bp, Homo sapiens
gtttaaagagctgga

SEQ ID NO: 1137514 - DNA, 15 bp, Homo sapiens
tgtttaaagagctgg

SEQ ID NO: 1137515 - DNA, 15 bp, Homo sapiens
atgtttaaagagctg

SEQ ID NO: 1137516 - DNA, 15 bp, Homo sapiens
tatgtttaaagagct

SEQ ID NO: 1137517 - DNA, 15 bp, Homo sapiens
atatgtttaaagagc

SEQ ID NO: 1137518 - DNA, 15 bp, Homo sapiens
tatatgtttaaagag

SEQ ID NO: 1137519 - DNA, 15 bp, Homo sapiens
atatatgtttaaaga

SEQ ID NO: 1137520 - DNA, 15 bp, Homo sapiens
tatatatgtttaaag

SEQ ID NO: 1137521 - DNA, 15 bp, Homo sapiens
atatatatgtttaaa

SEQ ID NO: 1137522 - DNA, 15 bp, Homo sapiens
aatatatatgtttaa

SEQ ID NO: 1137523 - DNA, 15 bp, Homo sapiens
aaatatatatgttta

SEQ ID NO: 1137524 - DNA, 15 bp, Homo sapiens
taaatatatatgttt

SEQ ID NO: 1137525 - DNA, 15 bp, Homo sapiens
ataaatatatatgtt

SEQ ID NO: 1137526 - DNA, 15 bp, Homo sapiens
gataaatatatatgt

SEQ ID NO: 1137527 - DNA, 15 bp, Homo sapiens
agataaatatatatg

SEQ ID NO: 1137528 - DNA, 15 bp, Homo sapiens
tagataaatatatat

SEQ ID NO: 1137529 - DNA, 15 bp, Homo sapiens
ctagataaatatata

SEQ ID NO: 1137530 - DNA, 15 bp, Homo sapiens
cctagataaatatat

SEQ ID NO: 1137531 - DNA, 15 bp, Homo sapiens
tcctagataaatata

SEQ ID NO: 1137532 - DNA, 15 bp, Homo sapiens
ttcctagataaatat

SEQ ID NO: 1137533 - DNA, 15 bp, Homo sapiens
cttcctagataaata

SEQ ID NO: 1137534 - DNA, 15 bp, Homo sapiens
ccttcctagataaat

SEQ ID NO: 1137535 - DNA, 15 bp, Homo sapiens
accttcctagataaa

SEQ ID NO: 1137536 - DNA, 15 bp, Homo sapiens
taccttcctagataa

SEQ ID NO: 1137537 - DNA, 15 bp, Homo sapiens
ataccttcctagata

SEQ ID NO: 1137538 - DNA, 15 bp, Homo sapiens
cataccttcctagat

SEQ ID NO: 1137539 - DNA, 15 bp, Homo sapiens
tcataccttcctaga

SEQ ID NO: 1137540 - DNA, 15 bp, Homo sapiens
ttcataccttcctag

SEQ ID NO: 1137541 - DNA, 15 bp, Homo sapiens
tttcataccttccta

SEQ ID NO: 1137542 - DNA, 15 bp, Homo sapiens
ctttcataccttcct

SEQ ID NO: 1137543 - DNA, 15 bp, Homo sapiens
gctttcataccttcc

SEQ ID NO: 1137544 - DNA, 15 bp, Homo sapiens
tgctttcataccttc

SEQ ID NO: 1137545 - DNA, 15 bp, Homo sapiens
atgctttcatacctt

SEQ ID NO: 1137546 - DNA, 15 bp, Homo sapiens
tatgctttcatacct

SEQ ID NO: 1137547 - DNA, 15 bp, Homo sapiens
ttatgctttcatacc

SEQ ID NO: 1137548 - DNA, 15 bp, Homo sapiens
cttatgctttcatac

SEQ ID NO: 1137549 - DNA, 15 bp, Homo sapiens
acttatgctttcata

SEQ ID NO: 1137550 - DNA, 15 bp, Homo sapiens
aacttatgctttcat

SEQ ID NO: 1137551 - DNA, 15 bp, Homo sapiens
aaacttatgctttca

SEQ ID NO: 1137552 - DNA, 15 bp, Homo sapiens
aaaacttatgctttc

SEQ ID NO: 1137553 - DNA, 15 bp, Homo sapiens
gaaaacttatgcttt

SEQ ID NO: 1137554 - DNA, 15 bp, Homo sapiens
agaaaacttatgctt

SEQ ID NO: 1137555 - DNA, 15 bp, Homo sapiens
aagaaaacttatgct

SEQ ID NO: 1137556 - DNA, 15 bp, Homo sapiens
caagaaaacttatgc

SEQ ID NO: 1137557 - DNA, 15 bp, Homo sapiens
tcaagaaaacttatg

SEQ ID NO: 1137558 - DNA, 15 bp, Homo sapiens
ctcaagaaaacttat

SEQ ID NO: 1137559 - DNA, 15 bp, Homo sapiens
tctcaagaaaactta

SEQ ID NO: 1137560 - DNA, 15 bp, Homo sapiens
gtctcaagaaaactt

SEQ ID NO: 1137561 - DNA, 15 bp, Homo sapiens
agtctcaagaaaact

SEQ ID NO: 1137562 - DNA, 15 bp, Homo sapiens
cagtctcaagaaaac

SEQ ID NO: 1137563 - DNA, 15 bp, Homo sapiens
gcagtctcaagaaaa

SEQ ID NO: 1137564 - DNA, 15 bp, Homo sapiens
ggcagtctcaagaaa

SEQ ID NO: 1137565 - DNA, 15 bp, Homo sapiens
aggcagtctcaagaa

SEQ ID NO: 1137566 - DNA, 15 bp, Homo sapiens
aaggcagtctcaaga

SEQ ID NO: 1137567 - DNA, 15 bp, Homo sapiens
aaaggcagtctcaag

SEQ ID NO: 1137568 - DNA, 15 bp, Homo sapiens
taaaggcagtctcaa

SEQ ID NO: 1137569 - DNA, 15 bp, Homo sapiens
ttaaaggcagtctca

SEQ ID NO: 1137570 - DNA, 15 bp, Homo sapiens
gttaaaggcagtctc

SEQ ID NO: 1137571 - DNA, 15 bp, Homo sapiens
tgttaaaggcagtct

SEQ ID NO: 1137572 - DNA, 15 bp, Homo sapiens
atgttaaaggcagtc

SEQ ID NO: 1137573 - DNA, 15 bp, Homo sapiens
gatgttaaaggcagt

SEQ ID NO: 1137574 - DNA, 15 bp, Homo sapiens
agatgttaaaggcag

SEQ ID NO: 1137575 - DNA, 15 bp, Homo sapiens
cagatgttaaaggca

SEQ ID NO: 1137576 - DNA, 15 bp, Homo sapiens
acagatgttaaaggc

SEQ ID NO: 1137577 - DNA, 15 bp, Homo sapiens
tacagatgttaaagg

SEQ ID NO: 1137578 - DNA, 15 bp, Homo sapiens
ttacagatgttaaag

SEQ ID NO: 1137579 - DNA, 15 bp, Homo sapiens
tttacagatgttaaa

SEQ ID NO: 1137580 - DNA, 15 bp, Homo sapiens
ctttacagatgttaa

SEQ ID NO: 1137581 - DNA, 15 bp, Homo sapiens
cctttacagatgtta

SEQ ID NO: 1137582 - DNA, 15 bp, Homo sapiens
gcctttacagatgtt

SEQ ID NO: 1137583 - DNA, 15 bp, Homo sapiens
agcctttacagatgt

SEQ ID NO: 1137584 - DNA, 15 bp, Homo sapiens
aagcctttacagatg

SEQ ID NO: 1137585 - DNA, 15 bp, Homo sapiens
aaagcctttacagat

SEQ ID NO: 1137586 - DNA, 15 bp, Homo sapiens
gaaagcctttacaga

SEQ ID NO: 1137587 - DNA, 15 bp, Homo sapiens
tgaaagcctttacag

SEQ ID NO: 1137588 - DNA, 15 bp, Homo sapiens
ttgaaagcctttaca

SEQ ID NO: 1137589 - DNA, 15 bp, Homo sapiens
tttgaaagcctttac

SEQ ID NO: 1137590 - DNA, 15 bp, Homo sapiens
ctttgaaagccttta

SEQ ID NO: 1137591 - DNA, 15 bp, Homo sapiens
gctttgaaagccttt

SEQ ID NO: 1137592 - DNA, 15 bp, Homo sapiens
tgctttgaaagcctt

SEQ ID NO: 1137593 - DNA, 15 bp, Homo sapiens
ctgctttgaaagcct

SEQ ID NO: 1137594 - DNA, 15 bp, Homo sapiens
gctgctttgaaagcc

SEQ ID NO: 1137595 - DNA, 15 bp, Homo sapiens
agctgctttgaaagc

SEQ ID NO: 1137596 - DNA, 15 bp, Homo sapiens
aagctgctttgaaag

SEQ ID NO: 1137597 - DNA, 15 bp, Homo sapiens
gaagctgctttgaaa

SEQ ID NO: 1137598 - DNA, 15 bp, Homo sapiens
agaagctgctttgaa

SEQ ID NO: 1137599 - DNA, 15 bp, Homo sapiens
cagaagctgctttga

SEQ ID NO: 1137600 - DNA, 15 bp, Homo sapiens
acagaagctgctttg

SEQ ID NO: 1137601 - DNA, 15 bp, Homo sapiens
tacagaagctgcttt

SEQ ID NO: 1137602 - DNA, 15 bp, Homo sapiens
ctacagaagctgctt

SEQ ID NO: 1137603 - DNA, 15 bp, Homo sapiens
actacagaagctgct

SEQ ID NO: 1137604 - DNA, 15 bp, Homo sapiens
aactacagaagctgc

SEQ ID NO: 1137605 - DNA, 15 bp, Homo sapiens
aaactacagaagctg

SEQ ID NO: 1137606 - DNA, 15 bp, Homo sapiens
aaaactacagaagct

SEQ ID NO: 1137607 - DNA, 15 bp, Homo sapiens
aaaaactacagaagc

SEQ ID NO: 1137608 - DNA, 15 bp, Homo sapiens
aaaaaactacagaag

SEQ ID NO: 1137609 - DNA, 15 bp, Homo sapiens
aaaaaaactacagaa

SEQ ID NO: 1137610 - DNA, 15 bp, Homo sapiens
aaaaaaaactacaga

SEQ ID NO: 1137611 - DNA, 15 bp, Homo sapiens
taaaaaaaactacag

SEQ ID NO: 1137612 - DNA, 15 bp, Homo sapiens
ttaaaaaaaactaca

SEQ ID NO: 1137613 - DNA, 15 bp, Homo sapiens
tttaaaaaaaactac

SEQ ID NO: 1137614 - DNA, 15 bp, Homo sapiens
atttaaaaaaaacta

SEQ ID NO: 1137615 - DNA, 15 bp, Homo sapiens
catttaaaaaaaact

SEQ ID NO: 1137616 - DNA, 15 bp, Homo sapiens
ccatttaaaaaaaac

SEQ ID NO: 1137617 - DNA, 15 bp, Homo sapiens
gccatttaaaaaaaa

SEQ ID NO: 1137618 - DNA, 15 bp, Homo sapiens
agccatttaaaaaaa

SEQ ID NO: 1137619 - DNA, 15 bp, Homo sapiens
cagccatttaaaaaa

SEQ ID NO: 1137620 - DNA, 15 bp, Homo sapiens
tcagccatttaaaaa

SEQ ID NO: 1137621 - DNA, 15 bp, Homo sapiens
ttcagccatttaaaa

SEQ ID NO: 1137622 - DNA, 15 bp, Homo sapiens
attcagccatttaaa

SEQ ID NO: 1137623 - DNA, 15 bp, Homo sapiens
tattcagccatttaa

SEQ ID NO: 1137624 - DNA, 15 bp, Homo sapiens
atattcagccattta

SEQ ID NO: 1137625 - DNA, 15 bp, Homo sapiens
aatattcagccattt

SEQ ID NO: 1137626 - DNA, 15 bp, Homo sapiens
aaatattcagccatt

SEQ ID NO: 1137627 - DNA, 15 bp, Homo sapiens
aaaatattcagccat

SEQ ID NO: 1137628 - DNA, 15 bp, Homo sapiens
aaaaatattcagcca

SEQ ID NO: 1137629 - DNA, 15 bp, Homo sapiens
gaaaaatattcagcc

SEQ ID NO: 1137630 - DNA, 15 bp, Homo sapiens
tgaaaaatattcagc

SEQ ID NO: 1137631 - DNA, 15 bp, Homo sapiens
ttgaaaaatattcag

SEQ ID NO: 1137632 - DNA, 15 bp, Homo sapiens
gttgaaaaatattca

SEQ ID NO: 1137633 - DNA, 15 bp, Homo sapiens
tgttgaaaaatattc

SEQ ID NO: 1137634 - DNA, 15 bp, Homo sapiens
ctgttgaaaaatatt

SEQ ID NO: 1137635 - DNA, 15 bp, Homo sapiens
cctgttgaaaaatat

SEQ ID NO: 1137636 - DNA, 15 bp, Homo sapiens
gcctgttgaaaaata

SEQ ID NO: 1137637 - DNA, 15 bp, Homo sapiens
tgcctgttgaaaaat

SEQ ID NO: 1137638 - DNA, 15 bp, Homo sapiens
ctgcctgttgaaaaa

SEQ ID NO: 1137639 - DNA, 15 bp, Homo sapiens
gctgcctgttgaaaa

SEQ ID NO: 1137640 - DNA, 15 bp, Homo sapiens
tgctgcctgttgaaa

SEQ ID NO: 1137641 - DNA, 15 bp, Homo sapiens
atgctgcctgttgaa

SEQ ID NO: 1137642 - DNA, 15 bp, Homo sapiens
aatgctgcctgttga

SEQ ID NO: 1137643 - DNA, 15 bp, Homo sapiens
aaatgctgcctgttg

SEQ ID NO: 1137644 - DNA, 15 bp, Homo sapiens
caaatgctgcctgtt

SEQ ID NO: 1137645 - DNA, 15 bp, Homo sapiens
ccaaatgctgcctgt

SEQ ID NO: 1137646 - DNA, 15 bp, Homo sapiens
cccaaatgctgcctg

SEQ ID NO: 1137647 - DNA, 15 bp, Homo sapiens
acccaaatgctgcct

SEQ ID NO: 1137648 - DNA, 15 bp, Homo sapiens
aacccaaatgctgcc

SEQ ID NO: 1137649 - DNA, 15 bp, Homo sapiens
taacccaaatgctgc

SEQ ID NO: 1137650 - DNA, 15 bp, Homo sapiens
ataacccaaatgctg

SEQ ID NO: 1137651 - DNA, 15 bp, Homo sapiens
tataacccaaatgct

SEQ ID NO: 1137652 - DNA, 15 bp, Homo sapiens
ttataacccaaatgc

SEQ ID NO: 1137653 - DNA, 15 bp, Homo sapiens
tttataacccaaatg

SEQ ID NO: 1137654 - DNA, 15 bp, Homo sapiens
ttttataacccaaat

SEQ ID NO: 1137655 - DNA, 15 bp, Homo sapiens
attttataacccaaa

SEQ ID NO: 1137656 - DNA, 15 bp, Homo sapiens
aattttataacccaa

SEQ ID NO: 1137657 - DNA, 15 bp, Homo sapiens
taattttataaccca

SEQ ID NO: 1137658 - DNA, 15 bp, Homo sapiens
ctaattttataaccc

SEQ ID NO: 1137659 - DNA, 15 bp, Homo sapiens
gctaattttataacc

SEQ ID NO: 1137660 - DNA, 15 bp, Homo sapiens
agctaattttataac

SEQ ID NO: 1137661 - DNA, 15 bp, Homo sapiens
aagctaattttataa

SEQ ID NO: 1137662 - DNA, 15 bp, Homo sapiens
aaagctaattttata

SEQ ID NO: 1137663 - DNA, 15 bp, Homo sapiens
aaaagctaattttat

SEQ ID NO: 1137664 - DNA, 15 bp, Homo sapiens
caaaagctaatttta

SEQ ID NO: 1137665 - DNA, 15 bp, Homo sapiens
ccaaaagctaatttt

SEQ ID NO: 1137666 - DNA, 15 bp, Homo sapiens
accaaaagctaattt

SEQ ID NO: 1137667 - DNA, 15 bp, Homo sapiens
taccaaaagctaatt

SEQ ID NO: 1137668 - DNA, 15 bp, Homo sapiens
ctaccaaaagctaat

SEQ ID NO: 1137669 - DNA, 15 bp, Homo sapiens
tctaccaaaagctaa

SEQ ID NO: 1137670 - DNA, 15 bp, Homo sapiens
ctctaccaaaagcta

SEQ ID NO: 1137671 - DNA, 15 bp, Homo sapiens
actctaccaaaagct

SEQ ID NO: 1137672 - DNA, 15 bp, Homo sapiens
aactctaccaaaagc

SEQ ID NO: 1137673 - DNA, 15 bp, Homo sapiens
caactctaccaaaag

SEQ ID NO: 1137674 - DNA, 15 bp, Homo sapiens
tcaactctaccaaaa

SEQ ID NO: 1137675 - DNA, 15 bp, Homo sapiens
gtcaactctaccaaa

SEQ ID NO: 1137676 - DNA, 15 bp, Homo sapiens
agtcaactctaccaa

SEQ ID NO: 1137677 - DNA, 15 bp, Homo sapiens
aagtcaactctacca

SEQ ID NO: 1137678 - DNA, 15 bp, Homo sapiens
taagtcaactctacc

SEQ ID NO: 1137679 - DNA, 15 bp, Homo sapiens
ataagtcaactctac

SEQ ID NO: 1137680 - DNA, 15 bp, Homo sapiens
tataagtcaactcta

SEQ ID NO: 1137681 - DNA, 15 bp, Homo sapiens
gtataagtcaactct

SEQ ID NO: 1137682 - DNA, 15 bp, Homo sapiens
ggtataagtcaactc

SEQ ID NO: 1137683 - DNA, 15 bp, Homo sapiens
tggtataagtcaact

SEQ ID NO: 1137684 - DNA, 15 bp, Homo sapiens
gtggtataagtcaac

SEQ ID NO: 1137685 - DNA, 15 bp, Homo sapiens
ggtggtataagtcaa

SEQ ID NO: 1137686 - DNA, 15 bp, Homo sapiens
aggtggtataagtca

SEQ ID NO: 1137687 - DNA, 15 bp, Homo sapiens
gaggtggtataagtc

SEQ ID NO: 1137688 - DNA, 15 bp, Homo sapiens
ggaggtggtataagt

SEQ ID NO: 1137689 - DNA, 15 bp, Homo sapiens
tggaggtggtataag

SEQ ID NO: 1137690 - DNA, 15 bp, Homo sapiens
ctggaggtggtataa

SEQ ID NO: 1137691 - DNA, 15 bp, Homo sapiens
gctggaggtggtata

SEQ ID NO: 1137692 - DNA, 15 bp, Homo sapiens
agctggaggtggtat

SEQ ID NO: 1137693 - DNA, 15 bp, Homo sapiens
aagctggaggtggta

SEQ ID NO: 1137694 - DNA, 15 bp, Homo sapiens
aaagctggaggtggt

SEQ ID NO: 1137695 - DNA, 15 bp, Homo sapiens
aaaagctggaggtgg

SEQ ID NO: 1137696 - DNA, 15 bp, Homo sapiens
caaaagctggaggtg

SEQ ID NO: 1137697 - DNA, 15 bp, Homo sapiens
acaaaagctggaggt

SEQ ID NO: 1137698 - DNA, 15 bp, Homo sapiens
aacaaaagctggagg

SEQ ID NO: 1137699 - DNA, 15 bp, Homo sapiens
gaacaaaagctggag

SEQ ID NO: 1137700 - DNA, 15 bp, Homo sapiens
ggaacaaaagctgga

SEQ ID NO: 1137701 - DNA, 15 bp, Homo sapiens
tggaacaaaagctgg

SEQ ID NO: 1137702 - DNA, 15 bp, Homo sapiens
ttggaacaaaagctg

SEQ ID NO: 1137703 - DNA, 15 bp, Homo sapiens
tttggaacaaaagct

SEQ ID NO: 1137704 - DNA, 15 bp, Homo sapiens
ttttggaacaaaagc

SEQ ID NO: 1137705 - DNA, 15 bp, Homo sapiens
tttttggaacaaaag

SEQ ID NO: 1137706 - DNA, 15 bp, Homo sapiens
atttttggaacaaaa

SEQ ID NO: 1137707 - DNA, 15 bp, Homo sapiens
tatttttggaacaaa

SEQ ID NO: 1137708 - DNA, 15 bp, Homo sapiens
ttatttttggaacaa

SEQ ID NO: 1137709 - DNA, 15 bp, Homo sapiens
tttatttttggaaca

SEQ ID NO: 1137710 - DNA, 15 bp, Homo sapiens
atttatttttggaac

SEQ ID NO: 1137711 - DNA, 15 bp, Homo sapiens
tatttatttttggaa

SEQ ID NO: 1137712 - DNA, 15 bp, Homo sapiens
gtatttatttttgga

SEQ ID NO: 1137713 - DNA, 15 bp, Homo sapiens
agtatttatttttgg

SEQ ID NO: 1137714 - DNA, 15 bp, Homo sapiens
cagtatttatttttg

SEQ ID NO: 1137715 - DNA, 15 bp, Homo sapiens
ccagtatttattttt

SEQ ID NO: 1137716 - DNA, 15 bp, Homo sapiens
accagtatttatttt

SEQ ID NO: 1137717 - DNA, 15 bp, Homo sapiens
aaccagtatttattt

SEQ ID NO: 1137718 - DNA, 15 bp, Homo sapiens
gaaccagtatttatt

SEQ ID NO: 1137719 - DNA, 15 bp, Homo sapiens
agaaccagtatttat

SEQ ID NO: 1137720 - DNA, 15 bp, Homo sapiens
aagaaccagtattta

SEQ ID NO: 1137721 - DNA, 15 bp, Homo sapiens
aaagaaccagtattt

SEQ ID NO: 1137722 - DNA, 15 bp, Homo sapiens
aaaagaaccagtatt

SEQ ID NO: 1137723 - DNA, 15 bp, Homo sapiens
caaaagaaccagtat

SEQ ID NO: 1137724 - DNA, 15 bp, Homo sapiens
ccaaaagaaccagta

SEQ ID NO: 1137725 - DNA, 15 bp, Homo sapiens
gccaaaagaaccagt

SEQ ID NO: 1137726 - DNA, 15 bp, Homo sapiens
tgccaaaagaaccag

SEQ ID NO: 1137727 - DNA, 15 bp, Homo sapiens
gtgccaaaagaacca

SEQ ID NO: 1137728 - DNA, 15 bp, Homo sapiens
tgtgccaaaagaacc

SEQ ID NO: 1137729 - DNA, 15 bp, Homo sapiens
gtgtgccaaaagaac

SEQ ID NO: 1137730 - DNA, 15 bp, Homo sapiens
agtgtgccaaaagaa

SEQ ID NO: 1137731 - DNA, 15 bp, Homo sapiens
tagtgtgccaaaaga

SEQ ID NO: 1137732 - DNA, 15 bp, Homo sapiens
ctagtgtgccaaaag

SEQ ID NO: 1137733 - DNA, 15 bp, Homo sapiens
actagtgtgccaaaa

SEQ ID NO: 1137734 - DNA, 15 bp, Homo sapiens
aactagtgtgccaaa

SEQ ID NO: 1137735 - DNA, 15 bp, Homo sapiens
caactagtgtgccaa

SEQ ID NO: 1137736 - DNA, 15 bp, Homo sapiens
acaactagtgtgcca

SEQ ID NO: 1137737 - DNA, 15 bp, Homo sapiens
aacaactagtgtgcc

SEQ ID NO: 1137738 - DNA, 15 bp, Homo sapiens
aaacaactagtgtgc

SEQ ID NO: 1137739 - DNA, 15 bp, Homo sapiens
aaaacaactagtgtg

SEQ ID NO: 1137740 - DNA, 15 bp, Homo sapiens
taaaacaactagtgt

SEQ ID NO: 1137741 - DNA, 15 bp, Homo sapiens
gtaaaacaactagtg

SEQ ID NO: 1137742 - DNA, 15 bp, Homo sapiens
ggtaaaacaactagt

SEQ ID NO: 1137743 - DNA, 15 bp, Homo sapiens
gggtaaaacaactag

SEQ ID NO: 1137744 - DNA, 15 bp, Homo sapiens
agggtaaaacaacta

SEQ ID NO: 1137745 - DNA, 15 bp, Homo sapiens
tagggtaaaacaact

SEQ ID NO: 1137746 - DNA, 15 bp, Homo sapiens
ttagggtaaaacaac

SEQ ID NO: 1137747 - DNA, 15 bp, Homo sapiens
tttagggtaaaacaa

SEQ ID NO: 1137748 - DNA, 15 bp, Homo sapiens
ctttagggtaaaaca

SEQ ID NO: 1137749 - DNA, 15 bp, Homo sapiens
actttagggtaaaac

SEQ ID NO: 1137750 - DNA, 15 bp, Homo sapiens
aactttagggtaaaa

SEQ ID NO: 1137751 - DNA, 15 bp, Homo sapiens
gaactttagggtaaa

SEQ ID NO: 1137752 - DNA, 15 bp, Homo sapiens
ggaactttagggtaa

SEQ ID NO: 1137753 - DNA, 15 bp, Homo sapiens
aggaactttagggta

SEQ ID NO: 1137754 - DNA, 15 bp, Homo sapiens
gaggaactttagggt

SEQ ID NO: 1137755 - DNA, 15 bp, Homo sapiens
agaggaactttaggg

SEQ ID NO: 1137756 - DNA, 15 bp, Homo sapiens
aagaggaactttagg

SEQ ID NO: 1137757 - DNA, 15 bp, Homo sapiens
aaagaggaactttag

SEQ ID NO: 1137758 - DNA, 15 bp, Homo sapiens
caaagaggaacttta

SEQ ID NO: 1137759 - DNA, 15 bp, Homo sapiens
acaaagaggaacttt

SEQ ID NO: 1137760 - DNA, 15 bp, Homo sapiens
tacaaagaggaactt

SEQ ID NO: 1137761 - DNA, 15 bp, Homo sapiens
ttacaaagaggaact

SEQ ID NO: 1137762 - DNA, 15 bp, Homo sapiens
cttacaaagaggaac

SEQ ID NO: 1137763 - DNA, 15 bp, Homo sapiens
gcttacaaagaggaa

SEQ ID NO: 1137764 - DNA, 15 bp, Homo sapiens
ggcttacaaagagga

SEQ ID NO: 1137765 - DNA, 15 bp, Homo sapiens
tggcttacaaagagg

SEQ ID NO: 1137766 - DNA, 15 bp, Homo sapiens
ctggcttacaaagag

SEQ ID NO: 1137767 - DNA, 15 bp, Homo sapiens
actggcttacaaaga

SEQ ID NO: 1137768 - DNA, 15 bp, Homo sapiens
aactggcttacaaag

SEQ ID NO: 1137769 - DNA, 15 bp, Homo sapiens
taactggcttacaaa

SEQ ID NO: 1137770 - DNA, 15 bp, Homo sapiens
ataactggcttacaa

SEQ ID NO: 1137771 - DNA, 15 bp, Homo sapiens
aataactggcttaca

SEQ ID NO: 1137772 - DNA, 15 bp, Homo sapiens
taataactggcttac

SEQ ID NO: 1137773 - DNA, 15 bp, Homo sapiens
ttaataactggctta

SEQ ID NO: 1137774 - DNA, 15 bp, Homo sapiens
tttaataactggctt

SEQ ID NO: 1137775 - DNA, 15 bp, Homo sapiens
ttttaataactggct

SEQ ID NO: 1137776 - DNA, 15 bp, Homo sapiens
cttttaataactggc

SEQ ID NO: 1137777 - DNA, 15 bp, Homo sapiens
acttttaataactgg

SEQ ID NO: 1137778 - DNA, 15 bp, Homo sapiens
aacttttaataactg

SEQ ID NO: 1137779 - DNA, 15 bp, Homo sapiens
caacttttaataact

SEQ ID NO: 1137780 - DNA, 15 bp, Homo sapiens
acaacttttaataac

SEQ ID NO: 1137781 - DNA, 15 bp, Homo sapiens
cacaacttttaataa

SEQ ID NO: 1137782 - DNA, 15 bp, Homo sapiens
tcacaacttttaata

SEQ ID NO: 1137783 - DNA, 15 bp, Homo sapiens
atcacaacttttaat

SEQ ID NO: 1137784 - DNA, 15 bp, Homo sapiens
catcacaacttttaa

SEQ ID NO: 1137785 - DNA, 15 bp, Homo sapiens
gcatcacaactttta

SEQ ID NO: 1137786 - DNA, 15 bp, Homo sapiens
tgcatcacaactttt

SEQ ID NO: 1137787 - DNA, 15 bp, Homo sapiens
ctgcatcacaacttt

SEQ ID NO: 1137788 - DNA, 15 bp, Homo sapiens
gctgcatcacaactt

SEQ ID NO: 1137789 - DNA, 15 bp, Homo sapiens
ggctgcatcacaact

SEQ ID NO: 1137790 - DNA, 15 bp, Homo sapiens
tggctgcatcacaac

SEQ ID NO: 1137791 - DNA, 15 bp, Homo sapiens
ctggctgcatcacaa

SEQ ID NO: 1137792 - DNA, 15 bp, Homo sapiens
cctggctgcatcaca

SEQ ID NO: 1137793 - DNA, 15 bp, Homo sapiens
ccctggctgcatcac

SEQ ID NO: 1137794 - DNA, 15 bp, Homo sapiens
gccctggctgcatca

SEQ ID NO: 1137795 - DNA, 15 bp, Homo sapiens
cgccctggctgcatc

SEQ ID NO: 1137796 - DNA, 15 bp, Homo sapiens
tcgccctggctgcat

SEQ ID NO: 1137797 - DNA, 15 bp, Homo sapiens
ttcgccctggctgca

SEQ ID NO: 1137798 - DNA, 15 bp, Homo sapiens
cttcgccctggctgc

SEQ ID NO: 1137799 - DNA, 15 bp, Homo sapiens
acttcgccctggctg

SEQ ID NO: 1137800 - DNA, 15 bp, Homo sapiens
cacttcgccctggct

SEQ ID NO: 1137801 - DNA, 15 bp, Homo sapiens
ccacttcgccctggc

SEQ ID NO: 1137802 - DNA, 15 bp, Homo sapiens
accacttcgccctgg

SEQ ID NO: 1137803 - DNA, 15 bp, Homo sapiens
taccacttcgccctg

SEQ ID NO: 1137804 - DNA, 15 bp, Homo sapiens
gtaccacttcgccct

SEQ ID NO: 1137805 - DNA, 15 bp, Homo sapiens
tgtaccacttcgccc

SEQ ID NO: 1137806 - DNA, 15 bp, Homo sapiens
gtgtaccacttcgcc

SEQ ID NO: 1137807 - DNA, 15 bp, Homo sapiens
tgtgtaccacttcgc

SEQ ID NO: 1137808 - DNA, 15 bp, Homo sapiens
atgtgtaccacttcg

SEQ ID NO: 1137809 - DNA, 15 bp, Homo sapiens
gatgtgtaccacttc

SEQ ID NO: 1137810 - DNA, 15 bp, Homo sapiens
agatgtgtaccactt

SEQ ID NO: 1137811 - DNA, 15 bp, Homo sapiens
cagatgtgtaccact

SEQ ID NO: 1137812 - DNA, 15 bp, Homo sapiens
acagatgtgtaccac

SEQ ID NO: 1137813 - DNA, 15 bp, Homo sapiens
tacagatgtgtacca

SEQ ID NO: 1137814 - DNA, 15 bp, Homo sapiens
ctacagatgtgtacc

SEQ ID NO: 1137815 - DNA, 15 bp, Homo sapiens
actacagatgtgtac

SEQ ID NO: 1137816 - DNA, 15 bp, Homo sapiens
gactacagatgtgta

SEQ ID NO: 1137817 - DNA, 15 bp, Homo sapiens
ttccgagtagctggg

SEQ ID NO: 1137818 - DNA, 15 bp, Homo sapiens
cttccgagtagctgg

SEQ ID NO: 1137819 - DNA, 15 bp, Homo sapiens
ccttccgagtagctg

SEQ ID NO: 1137820 - DNA, 15 bp, Homo sapiens
gccttccgagtagct

SEQ ID NO: 1137821 - DNA, 15 bp, Homo sapiens
agccttccgagtagc

SEQ ID NO: 1137822 - DNA, 15 bp, Homo sapiens
cagccttccgagtag

SEQ ID NO: 1137823 - DNA, 15 bp, Homo sapiens
tcagccttccgagta

SEQ ID NO: 1137824 - DNA, 15 bp, Homo sapiens
ctcagccttccgagt

SEQ ID NO: 1137825 - DNA, 15 bp, Homo sapiens
cctcagccttccgag

SEQ ID NO: 1137826 - DNA, 15 bp, Homo sapiens
ccctcagccttccga

SEQ ID NO: 1137827 - DNA, 15 bp, Homo sapiens
cccctcagccttccg

SEQ ID NO: 1137828 - DNA, 15 bp, Homo sapiens
ccccctcagccttcc

SEQ ID NO: 1137829 - DNA, 15 bp, Homo sapiens
cccccctcagccttc

SEQ ID NO: 1137830 - DNA, 15 bp, Homo sapiens
tcccccctcagcctt

SEQ ID NO: 1137831 - DNA, 15 bp, Homo sapiens
ctcccccctcagcct

SEQ ID NO: 1137832 - DNA, 15 bp, Homo sapiens
cctcccccctcagcc

SEQ ID NO: 1137833 - DNA, 15 bp, Homo sapiens
tcctcccccctcagc

SEQ ID NO: 1137834 - DNA, 15 bp, Homo sapiens
atcctcccccctcag

SEQ ID NO: 1137835 - DNA, 15 bp, Homo sapiens
gatcctcccccctca

SEQ ID NO: 1137836 - DNA, 15 bp, Homo sapiens
cgatcctcccccctc

SEQ ID NO: 1137837 - DNA, 15 bp, Homo sapiens
gcgatcctcccccct

SEQ ID NO: 1137838 - DNA, 15 bp, Homo sapiens
agcgatcctcccccc

SEQ ID NO: 1137839 - DNA, 15 bp, Homo sapiens
tagcgatcctccccc

SEQ ID NO: 1137840 - DNA, 15 bp, Homo sapiens
ctagcgatcctcccc

SEQ ID NO: 1137841 - DNA, 15 bp, Homo sapiens
tctagcgatcctccc

SEQ ID NO: 1137842 - DNA, 15 bp, Homo sapiens
ctctagcgatcctcc

SEQ ID NO: 1137843 - DNA, 15 bp, Homo sapiens
gctctagcgatcctc

SEQ ID NO: 1137844 - DNA, 15 bp, Homo sapiens
ggctctagcgatcct

SEQ ID NO: 1137845 - DNA, 15 bp, Homo sapiens
gggctctagcgatcc

SEQ ID NO: 1137846 - DNA, 15 bp, Homo sapiens
tgggctctagcgatc

SEQ ID NO: 1137847 - DNA, 15 bp, Homo sapiens
ttgggctctagcgat

SEQ ID NO: 1137848 - DNA, 15 bp, Homo sapiens
cttgggctctagcga

SEQ ID NO: 1137849 - DNA, 15 bp, Homo sapiens
tcttgggctctagcg

SEQ ID NO: 1137850 - DNA, 15 bp, Homo sapiens
ttcttgggctctagc

SEQ ID NO: 1137851 - DNA, 15 bp, Homo sapiens
cttcttgggctctag

SEQ ID NO: 1137852 - DNA, 15 bp, Homo sapiens
acttcttgggctcta

SEQ ID NO: 1137853 - DNA, 15 bp, Homo sapiens
gacttcttgggctct

SEQ ID NO: 1137854 - DNA, 15 bp, Homo sapiens
tgacttcttgggctc

SEQ ID NO: 1137855 - DNA, 15 bp, Homo sapiens
ttgacttcttgggct

SEQ ID NO: 1137856 - DNA, 15 bp, Homo sapiens
cttgacttcttgggc

SEQ ID NO: 1137857 - DNA, 15 bp, Homo sapiens
ccttgacttcttggg

SEQ ID NO: 1137858 - DNA, 15 bp, Homo sapiens
gccttgacttcttgg

SEQ ID NO: 1137859 - DNA, 15 bp, Homo sapiens
agccttgacttcttg

SEQ ID NO: 1137860 - DNA, 15 bp, Homo sapiens
cagccttgacttctt

SEQ ID NO: 1137861 - DNA, 15 bp, Homo sapiens
gcagccttgacttct

SEQ ID NO: 1137862 - DNA, 15 bp, Homo sapiens
tgcagccttgacttc

SEQ ID NO: 1137863 - DNA, 15 bp, Homo sapiens
ctgcagccttgactt

SEQ ID NO: 1137864 - DNA, 15 bp, Homo sapiens
actgcagccttgact

SEQ ID NO: 1137865 - DNA, 15 bp, Homo sapiens
gttcactgcagcctt

SEQ ID NO: 1137866 - DNA, 15 bp, Homo sapiens
cagttcactgcagcc

SEQ ID NO: 1137867 - DNA, 15 bp, Homo sapiens
acagttcactgcagc

SEQ ID NO: 1137868 - DNA, 15 bp, Homo sapiens
cacagttcactgcag

SEQ ID NO: 1137869 - DNA, 15 bp, Homo sapiens
tcacagttcactgca

SEQ ID NO: 1137870 - DNA, 15 bp, Homo sapiens
atcacagttcactgc

SEQ ID NO: 1137871 - DNA, 15 bp, Homo sapiens
aatcacagttcactg

SEQ ID NO: 1137872 - DNA, 15 bp, Homo sapiens
taatcacagttcact

SEQ ID NO: 1137873 - DNA, 15 bp, Homo sapiens
gtaatcacagttcac

SEQ ID NO: 1137874 - DNA, 15 bp, Homo sapiens
tgtaatcacagttca

SEQ ID NO: 1137875 - DNA, 15 bp, Homo sapiens
gtgtaatcacagttc

SEQ ID NO: 1137876 - DNA, 15 bp, Homo sapiens
ggtgtaatcacagtt

SEQ ID NO: 1137877 - DNA, 15 bp, Homo sapiens
tggtgtaatcacagt

SEQ ID NO: 1137878 - DNA, 15 bp, Homo sapiens
gtggtgtaatcacag

SEQ ID NO: 1137879 - DNA, 15 bp, Homo sapiens
agtggtgtaatcaca

SEQ ID NO: 1137880 - DNA, 15 bp, Homo sapiens
cagtggtgtaatcac

SEQ ID NO: 1137881 - DNA, 15 bp, Homo sapiens
gcagtggtgtaatca

SEQ ID NO: 1137882 - DNA, 15 bp, Homo sapiens
tgcagtggtgtaatc

SEQ ID NO: 1137883 - DNA, 15 bp, Homo sapiens
gtgcagtggtgtaat

SEQ ID NO: 1137884 - DNA, 15 bp, Homo sapiens
agtgcagtggtgtaa

SEQ ID NO: 1137885 - DNA, 15 bp, Homo sapiens
cagtgcagtggtgta

SEQ ID NO: 1137886 - DNA, 15 bp, Homo sapiens
gcagtgcagtggtgt

SEQ ID NO: 1137887 - DNA, 15 bp, Homo sapiens
ggcccaggctgcagt

SEQ ID NO: 1137888 - DNA, 15 bp, Homo sapiens
tggcccaggctgcag

SEQ ID NO: 1137889 - DNA, 15 bp, Homo sapiens
gtggcccaggctgca

SEQ ID NO: 1137890 - DNA, 15 bp, Homo sapiens
tgtggcccaggctgc

SEQ ID NO: 1137891 - DNA, 15 bp, Homo sapiens
ctgtggcccaggctg

SEQ ID NO: 1137892 - DNA, 15 bp, Homo sapiens
tctgtggcccaggct

SEQ ID NO: 1137893 - DNA, 15 bp, Homo sapiens
ctctgtggcccaggc

SEQ ID NO: 1137894 - DNA, 15 bp, Homo sapiens
gctctgtggcccagg

SEQ ID NO: 1137895 - DNA, 15 bp, Homo sapiens
cgctctgtggcccag

SEQ ID NO: 1137896 - DNA, 15 bp, Homo sapiens
tcgctctgtggccca

SEQ ID NO: 1137897 - DNA, 15 bp, Homo sapiens
ctcgctctgtggccc

SEQ ID NO: 1137898 - DNA, 15 bp, Homo sapiens
tctcgctctgtggcc

SEQ ID NO: 1137899 - DNA, 15 bp, Homo sapiens
gtctcgctctgtggc

SEQ ID NO: 1137900 - DNA, 15 bp, Homo sapiens
agtctcgctctgtgg

SEQ ID NO: 1137901 - DNA, 15 bp, Homo sapiens
gagtctcgctctgtg

SEQ ID NO: 1137902 - DNA, 15 bp, Homo sapiens
tgagtctcgctctgt

SEQ ID NO: 1137903 - DNA, 15 bp, Homo sapiens
atgagtctcgctctg

SEQ ID NO: 1137904 - DNA, 15 bp, Homo sapiens
gatgagtctcgctct

SEQ ID NO: 1137905 - DNA, 15 bp, Homo sapiens
agatgagtctcgctc

SEQ ID NO: 1137906 - DNA, 15 bp, Homo sapiens
gagatgagtctcgct

SEQ ID NO: 1137907 - DNA, 15 bp, Homo sapiens
agagatgagtctcgc

SEQ ID NO: 1137908 - DNA, 15 bp, Homo sapiens
aagagatgagtctcg

SEQ ID NO: 1137909 - DNA, 15 bp, Homo sapiens
aaagagatgagtctc

SEQ ID NO: 1137910 - DNA, 15 bp, Homo sapiens
taaagagatgagtct

SEQ ID NO: 1137911 - DNA, 15 bp, Homo sapiens
ttaaagagatgagtc

SEQ ID NO: 1137912 - DNA, 15 bp, Homo sapiens
tttaaagagatgagt

SEQ ID NO: 1137913 - DNA, 15 bp, Homo sapiens
ttttaaagagatgag

SEQ ID NO: 1137914 - DNA, 15 bp, Homo sapiens
tttttaaagagatga

SEQ ID NO: 1137915 - DNA, 15 bp, Homo sapiens
ttttttaaagagatg

SEQ ID NO: 1137916 - DNA, 15 bp, Homo sapiens
tttttttaaagagat

SEQ ID NO: 1137917 - DNA, 15 bp, Homo sapiens
ttttttttaaagaga

SEQ ID NO: 1137918 - DNA, 15 bp, Homo sapiens
cttttttttaaagag

SEQ ID NO: 1137919 - DNA, 15 bp, Homo sapiens
attcttttttttaaa

SEQ ID NO: 1137920 - DNA, 15 bp, Homo sapiens
cattcttttttttaa

SEQ ID NO: 1137921 - DNA, 15 bp, Homo sapiens
acattctttttttta

SEQ ID NO: 1137922 - DNA, 15 bp, Homo sapiens
aacattctttttttt

SEQ ID NO: 1137923 - DNA, 15 bp, Homo sapiens
caacattcttttttt

SEQ ID NO: 1137924 - DNA, 15 bp, Homo sapiens
acaacattctttttt

SEQ ID NO: 1137925 - DNA, 15 bp, Homo sapiens
cacaacattcttttt

SEQ ID NO: 1137926 - DNA, 15 bp, Homo sapiens
tcacaacattctttt

SEQ ID NO: 1137927 - DNA, 15 bp, Homo sapiens
ctcacaacattcttt

SEQ ID NO: 1137928 - DNA, 15 bp, Homo sapiens
cctcacaacattctt

SEQ ID NO: 1137929 - DNA, 15 bp, Homo sapiens
gcctcacaacattct

SEQ ID NO: 1137930 - DNA, 15 bp, Homo sapiens
ggcctcacaacattc

SEQ ID NO: 1137931 - DNA, 15 bp, Homo sapiens
cggcctcacaacatt

SEQ ID NO: 1137932 - DNA, 15 bp, Homo sapiens
ccggcctcacaacat

SEQ ID NO: 1137933 - DNA, 15 bp, Homo sapiens
cccggcctcacaaca

SEQ ID NO: 1137934 - DNA, 15 bp, Homo sapiens
gcccggcctcacaac

SEQ ID NO: 1137935 - DNA, 15 bp, Homo sapiens
cgcccggcctcacaa

SEQ ID NO: 1137936 - DNA, 15 bp, Homo sapiens
gcgcccggcctcaca

SEQ ID NO: 1137937 - DNA, 15 bp, Homo sapiens
tgcgcccggcctcac

SEQ ID NO: 1137938 - DNA, 15 bp, Homo sapiens
ctgcgcccggcctca

SEQ ID NO: 1137939 - DNA, 15 bp, Homo sapiens
actgcgcccggcctc

SEQ ID NO: 1137940 - DNA, 15 bp, Homo sapiens
cacaggcgtgagcca

SEQ ID NO: 1137941 - DNA, 15 bp, Homo sapiens
tcacaggcgtgagcc

SEQ ID NO: 1137942 - DNA, 15 bp, Homo sapiens
atcacaggcgtgagc

SEQ ID NO: 1137943 - DNA, 15 bp, Homo sapiens
gatcacaggcgtgag

SEQ ID NO: 1137944 - DNA, 15 bp, Homo sapiens
ggatcacaggcgtga

SEQ ID NO: 1137945 - DNA, 15 bp, Homo sapiens
gggatcacaggcgtg

SEQ ID NO: 1137946 - DNA, 15 bp, Homo sapiens
tgggatcacaggcgt

SEQ ID NO: 1137947 - DNA, 15 bp, Homo sapiens
ctgggatcacaggcg

SEQ ID NO: 1137948 - DNA, 15 bp, Homo sapiens
tgctgggatcacagg

SEQ ID NO: 1137949 - DNA, 15 bp, Homo sapiens
gtgctgggatcacag

SEQ ID NO: 1137950 - DNA, 15 bp, Homo sapiens
agtgctgggatcaca

SEQ ID NO: 1137951 - DNA, 15 bp, Homo sapiens
aagtgctgggatcac

SEQ ID NO: 1137952 - DNA, 15 bp, Homo sapiens
aaagtgctgggatca

SEQ ID NO: 1137953 - DNA, 15 bp, Homo sapiens
caaagtgctgggatc

SEQ ID NO: 1137954 - DNA, 15 bp, Homo sapiens
tccacctcggcctcc

SEQ ID NO: 1137955 - DNA, 15 bp, Homo sapiens
gtccacctcggcctc

SEQ ID NO: 1137956 - DNA, 15 bp, Homo sapiens
cgtccacctcggcct

SEQ ID NO: 1137957 - DNA, 15 bp, Homo sapiens
ccgtccacctcggcc

SEQ ID NO: 1137958 - DNA, 15 bp, Homo sapiens
tccgtccacctcggc

SEQ ID NO: 1137959 - DNA, 15 bp, Homo sapiens
atccgtccacctcgg

SEQ ID NO: 1137960 - DNA, 15 bp, Homo sapiens
gatccgtccacctcg

SEQ ID NO: 1137961 - DNA, 15 bp, Homo sapiens
tgatccgtccacctc

SEQ ID NO: 1137962 - DNA, 15 bp, Homo sapiens
gtgatccgtccacct

SEQ ID NO: 1137963 - DNA, 15 bp, Homo sapiens
ggtgatccgtccacc

SEQ ID NO: 1137964 - DNA, 15 bp, Homo sapiens
aggtgatccgtccac

SEQ ID NO: 1137965 - DNA, 15 bp, Homo sapiens
caggtgatccgtcca

SEQ ID NO: 1137966 - DNA, 15 bp, Homo sapiens
aacctcaggtgatcc

SEQ ID NO: 1137967 - DNA, 15 bp, Homo sapiens
caacctcaggtgatc

SEQ ID NO: 1137968 - DNA, 15 bp, Homo sapiens
ccaacctcaggtgat

SEQ ID NO: 1137969 - DNA, 15 bp, Homo sapiens
cccaacctcaggtga

SEQ ID NO: 1137970 - DNA, 15 bp, Homo sapiens
tcccaacctcaggtg

SEQ ID NO: 1137971 - DNA, 15 bp, Homo sapiens
ctcccaacctcaggt

SEQ ID NO: 1137972 - DNA, 15 bp, Homo sapiens
actcccaacctcagg

SEQ ID NO: 1137973 - DNA, 15 bp, Homo sapiens
aactcccaacctcag

SEQ ID NO: 1137974 - DNA, 15 bp, Homo sapiens
gaactcccaacctca

SEQ ID NO: 1137975 - DNA, 15 bp, Homo sapiens
cgaactcccaacctc

SEQ ID NO: 1137976 - DNA, 15 bp, Homo sapiens
tcgaactcccaacct

SEQ ID NO: 1137977 - DNA, 15 bp, Homo sapiens
ctcgaactcccaacc

SEQ ID NO: 1137978 - DNA, 15 bp, Homo sapiens
attttttttagtaga

SEQ ID NO: 1137979 - DNA, 15 bp, Homo sapiens
tattttttttagtag

SEQ ID NO: 1137980 - DNA, 15 bp, Homo sapiens
gtattttttttagta

SEQ ID NO: 1137981 - DNA, 15 bp, Homo sapiens
tgtattttttttagt

SEQ ID NO: 1137982 - DNA, 15 bp, Homo sapiens
ttgtattttttttag

SEQ ID NO: 1137983 - DNA, 15 bp, Homo sapiens
tttgtatttttttta

SEQ ID NO: 1137984 - DNA, 15 bp, Homo sapiens
attttgtattttttt

SEQ ID NO: 1137985 - DNA, 15 bp, Homo sapiens
aattttgtatttttt

SEQ ID NO: 1137986 - DNA, 15 bp, Homo sapiens
gtgccaccacgcccg

SEQ ID NO: 1137987 - DNA, 15 bp, Homo sapiens
gccgagtagctggga

SEQ ID NO: 1137988 - DNA, 15 bp, Homo sapiens
tgccgagtagctggg

SEQ ID NO: 1137989 - DNA, 15 bp, Homo sapiens
ctgccgagtagctgg

SEQ ID NO: 1137990 - DNA, 15 bp, Homo sapiens
cctgccgagtagctg

SEQ ID NO: 1137991 - DNA, 15 bp, Homo sapiens
gcctgccgagtagct

SEQ ID NO: 1137992 - DNA, 15 bp, Homo sapiens
agcctgccgagtagc

SEQ ID NO: 1137993 - DNA, 15 bp, Homo sapiens
cagcctgccgagtag

SEQ ID NO: 1137994 - DNA, 15 bp, Homo sapiens
tcagcctgccgagta

SEQ ID NO: 1137995 - DNA, 15 bp, Homo sapiens
ctcagcctgccgagt

SEQ ID NO: 1137996 - DNA, 15 bp, Homo sapiens
cctcagcctgccgag

SEQ ID NO: 1137997 - DNA, 15 bp, Homo sapiens
gcctcagcctgccga

SEQ ID NO: 1137998 - DNA, 15 bp, Homo sapiens
tgcctcagcctgccg

SEQ ID NO: 1137999 - DNA, 15 bp, Homo sapiens
ctgcctcagcctgcc

SEQ ID NO: 1138000 - DNA, 15 bp, Homo sapiens
cctgcctcagcctgc

SEQ ID NO: 1138001 - DNA, 15 bp, Homo sapiens
tcctgcctcagcctg

SEQ ID NO: 1138002 - DNA, 15 bp, Homo sapiens
actcaccacaacctc

SEQ ID NO: 1138003 - DNA, 15 bp, Homo sapiens
aactcaccacaacct

SEQ ID NO: 1138004 - DNA, 15 bp, Homo sapiens
caactcaccacaacc

SEQ ID NO: 1138005 - DNA, 15 bp, Homo sapiens
ccaactcaccacaac

SEQ ID NO: 1138006 - DNA, 15 bp, Homo sapiens
cccaactcaccacaa

SEQ ID NO: 1138007 - DNA, 15 bp, Homo sapiens
gcccaactcaccaca

SEQ ID NO: 1138008 - DNA, 15 bp, Homo sapiens
cgcccaactcaccac

SEQ ID NO: 1138009 - DNA, 15 bp, Homo sapiens
tcgcccaactcacca

SEQ ID NO: 1138010 - DNA, 15 bp, Homo sapiens
ctcgcccaactcacc

SEQ ID NO: 1138011 - DNA, 15 bp, Homo sapiens
gctcgcccaactcac

SEQ ID NO: 1138012 - DNA, 15 bp, Homo sapiens
ggctcgcccaactca

SEQ ID NO: 1138013 - DNA, 15 bp, Homo sapiens
tggctcgcccaactc

SEQ ID NO: 1138014 - DNA, 15 bp, Homo sapiens
atggctcgcccaact

SEQ ID NO: 1138015 - DNA, 15 bp, Homo sapiens
aatggctcgcccaac

SEQ ID NO: 1138016 - DNA, 15 bp, Homo sapiens
caatggctcgcccaa

SEQ ID NO: 1138017 - DNA, 15 bp, Homo sapiens
gcaatggctcgccca

SEQ ID NO: 1138018 - DNA, 15 bp, Homo sapiens
tgcaatggctcgccc

SEQ ID NO: 1138019 - DNA, 15 bp, Homo sapiens
gtgcaatggctcgcc

SEQ ID NO: 1138020 - DNA, 15 bp, Homo sapiens
agtgcaatggctcgc

SEQ ID NO: 1138021 - DNA, 15 bp, Homo sapiens
gagtgcaatggctcg

SEQ ID NO: 1138022 - DNA, 15 bp, Homo sapiens
ggagtgcaatggctc

SEQ ID NO: 1138023 - DNA, 15 bp, Homo sapiens
tggagtgcaatggct

SEQ ID NO: 1138024 - DNA, 15 bp, Homo sapiens
tgagatggagttttg

SEQ ID NO: 1138025 - DNA, 15 bp, Homo sapiens
cttttcttttttttg

SEQ ID NO: 1138026 - DNA, 15 bp, Homo sapiens
attcttttcttttct

SEQ ID NO: 1138027 - DNA, 15 bp, Homo sapiens
cattcttttcttttc

SEQ ID NO: 1138028 - DNA, 15 bp, Homo sapiens
acattcttttctttt

SEQ ID NO: 1138029 - DNA, 15 bp, Homo sapiens
aacattcttttcttt

SEQ ID NO: 1138030 - DNA, 15 bp, Homo sapiens
caacattcttttctt

SEQ ID NO: 1138031 - DNA, 15 bp, Homo sapiens
acaacattcttttct

SEQ ID NO: 1138032 - DNA, 15 bp, Homo sapiens
cacaacattcttttc

SEQ ID NO: 1138033 - DNA, 15 bp, Homo sapiens
ccacaacattctttt

SEQ ID NO: 1138034 - DNA, 15 bp, Homo sapiens
gccacaacattcttt

SEQ ID NO: 1138035 - DNA, 15 bp, Homo sapiens
ggccacaacattctt

SEQ ID NO: 1138036 - DNA, 15 bp, Homo sapiens
tggccacaacattct

SEQ ID NO: 1138037 - DNA, 15 bp, Homo sapiens
ctggccacaacattc

SEQ ID NO: 1138038 - DNA, 15 bp, Homo sapiens
cctggccacaacatt

SEQ ID NO: 1138039 - DNA, 15 bp, Homo sapiens
gcctggccacaacat

SEQ ID NO: 1138040 - DNA, 15 bp, Homo sapiens
cgcctggccacaaca

SEQ ID NO: 1138041 - DNA, 15 bp, Homo sapiens
gcgcctggccacaac

SEQ ID NO: 1138042 - DNA, 15 bp, Homo sapiens
cgcgcctggccacaa

SEQ ID NO: 1138043 - DNA, 15 bp, Homo sapiens
ccgcgcctggccaca

SEQ ID NO: 1138044 - DNA, 15 bp, Homo sapiens
cgtaagccaccgcgc

SEQ ID NO: 1138045 - DNA, 15 bp, Homo sapiens
gcgtaagccaccgcg

SEQ ID NO: 1138046 - DNA, 15 bp, Homo sapiens
ggcgtaagccaccgc

SEQ ID NO: 1138047 - DNA, 15 bp, Homo sapiens
aggcgtaagccaccg

SEQ ID NO: 1138048 - DNA, 15 bp, Homo sapiens
aattacaggcgtaag

SEQ ID NO: 1138049 - DNA, 15 bp, Homo sapiens
aaattacaggcgtaa

SEQ ID NO: 1138050 - DNA, 15 bp, Homo sapiens
gaaattacaggcgta

SEQ ID NO: 1138051 - DNA, 15 bp, Homo sapiens
tgaaattacaggcgt

SEQ ID NO: 1138052 - DNA, 15 bp, Homo sapiens
ctgaaattacaggcg

SEQ ID NO: 1138053 - DNA, 15 bp, Homo sapiens
gctgaaattacaggc

SEQ ID NO: 1138054 - DNA, 15 bp, Homo sapiens
tgctgaaattacagg

SEQ ID NO: 1138055 - DNA, 15 bp, Homo sapiens
gtgctgaaattacag

SEQ ID NO: 1138056 - DNA, 15 bp, Homo sapiens
agtgctgaaattaca

SEQ ID NO: 1138057 - DNA, 15 bp, Homo sapiens
aagtgctgaaattac

SEQ ID NO: 1138058 - DNA, 15 bp, Homo sapiens
aaagtgctgaaatta

SEQ ID NO: 1138059 - DNA, 15 bp, Homo sapiens
caaagtgctgaaatt

SEQ ID NO: 1138060 - DNA, 15 bp, Homo sapiens
ccaaagtgctgaaat

SEQ ID NO: 1138061 - DNA, 15 bp, Homo sapiens
cccaaagtgctgaaa

SEQ ID NO: 1138062 - DNA, 15 bp, Homo sapiens
tcccaaagtgctgaa

SEQ ID NO: 1138063 - DNA, 15 bp, Homo sapiens
cacctcggtctccca

SEQ ID NO: 1138064 - DNA, 15 bp, Homo sapiens
ccacctcggtctccc

SEQ ID NO: 1138065 - DNA, 15 bp, Homo sapiens
cccacctcggtctcc

SEQ ID NO: 1138066 - DNA, 15 bp, Homo sapiens
gcccacctcggtctc

SEQ ID NO: 1138067 - DNA, 15 bp, Homo sapiens
cgcccacctcggtct

SEQ ID NO: 1138068 - DNA, 15 bp, Homo sapiens
ccgcccacctcggtc

SEQ ID NO: 1138069 - DNA, 15 bp, Homo sapiens
tccgcccacctcggt

SEQ ID NO: 1138070 - DNA, 15 bp, Homo sapiens
tgatccgcccacctc

SEQ ID NO: 1138071 - DNA, 15 bp, Homo sapiens
cgtgatccgcccacc

SEQ ID NO: 1138072 - DNA, 15 bp, Homo sapiens
tgatctcctgacctc

SEQ ID NO: 1138073 - DNA, 15 bp, Homo sapiens
atggtcttgatctcc

SEQ ID NO: 1138074 - DNA, 15 bp, Homo sapiens
gatggtcttgatctc

SEQ ID NO: 1138075 - DNA, 15 bp, Homo sapiens
ggatggtcttgatct

SEQ ID NO: 1138076 - DNA, 15 bp, Homo sapiens
aggatggtcttgatc

SEQ ID NO: 1138077 - DNA, 15 bp, Homo sapiens
caggatggtcttgat

SEQ ID NO: 1138078 - DNA, 15 bp, Homo sapiens
ccaggatggtcttga

SEQ ID NO: 1138079 - DNA, 15 bp, Homo sapiens
gccaggatggtcttg

SEQ ID NO: 1138080 - DNA, 15 bp, Homo sapiens
agccaggatggtctt

SEQ ID NO: 1138081 - DNA, 15 bp, Homo sapiens
tgtgttagccaggat

SEQ ID NO: 1138082 - DNA, 15 bp, Homo sapiens
ctgtgttagccagga

SEQ ID NO: 1138083 - DNA, 15 bp, Homo sapiens
tactgtgttagccag

SEQ ID NO: 1138084 - DNA, 15 bp, Homo sapiens
ttactgtgttagcca

SEQ ID NO: 1138085 - DNA, 15 bp, Homo sapiens
tttactgtgttagcc

SEQ ID NO: 1138086 - DNA, 15 bp, Homo sapiens
ttttactgtgttagc

SEQ ID NO: 1138087 - DNA, 15 bp, Homo sapiens
gttttactgtgttag

SEQ ID NO: 1138088 - DNA, 15 bp, Homo sapiens
ggttttactgtgtta

SEQ ID NO: 1138089 - DNA, 15 bp, Homo sapiens
gggttttactgtgtt

SEQ ID NO: 1138090 - DNA, 15 bp, Homo sapiens
ggggttttactgtgt

SEQ ID NO: 1138091 - DNA, 15 bp, Homo sapiens
tggggttttactgtg

SEQ ID NO: 1138092 - DNA, 15 bp, Homo sapiens
atggggttttactgt

SEQ ID NO: 1138093 - DNA, 15 bp, Homo sapiens
gatggggttttactg

SEQ ID NO: 1138094 - DNA, 15 bp, Homo sapiens
agatggggttttact

SEQ ID NO: 1138095 - DNA, 15 bp, Homo sapiens
atttagtagagatgg

SEQ ID NO: 1138096 - DNA, 15 bp, Homo sapiens
tatttagtagagatg

SEQ ID NO: 1138097 - DNA, 15 bp, Homo sapiens
gtatttagtagagat

SEQ ID NO: 1138098 - DNA, 15 bp, Homo sapiens
tgtatttagtagaga

SEQ ID NO: 1138099 - DNA, 15 bp, Homo sapiens
ttgtatttagtagag

SEQ ID NO: 1138100 - DNA, 15 bp, Homo sapiens
tttgtatttagtaga

SEQ ID NO: 1138101 - DNA, 15 bp, Homo sapiens
ttttgtatttagtag

SEQ ID NO: 1138102 - DNA, 15 bp, Homo sapiens
tttttgtatttagta

SEQ ID NO: 1138103 - DNA, 15 bp, Homo sapiens
ttttttgtatttagt

SEQ ID NO: 1138104 - DNA, 15 bp, Homo sapiens
tttttttgtatttag

SEQ ID NO: 1138105 - DNA, 15 bp, Homo sapiens
ttttttttgtattta

SEQ ID NO: 1138106 - DNA, 15 bp, Homo sapiens
tttttttttgtattt

SEQ ID NO: 1138107 - DNA, 15 bp, Homo sapiens
atttttttttgtatt

SEQ ID NO: 1138108 - DNA, 15 bp, Homo sapiens
aatttttttttgtat

SEQ ID NO: 1138109 - DNA, 15 bp, Homo sapiens
taatttttttttgta

SEQ ID NO: 1138110 - DNA, 15 bp, Homo sapiens
cggctaatttttttt

SEQ ID NO: 1138111 - DNA, 15 bp, Homo sapiens
tcccggctaattttt

SEQ ID NO: 1138112 - DNA, 15 bp, Homo sapiens
ctcccggctaatttt

SEQ ID NO: 1138113 - DNA, 15 bp, Homo sapiens
actcccggctaattt

SEQ ID NO: 1138114 - DNA, 15 bp, Homo sapiens
cactcccggctaatt

SEQ ID NO: 1138115 - DNA, 15 bp, Homo sapiens
gcactcccggctaat

SEQ ID NO: 1138116 - DNA, 15 bp, Homo sapiens
agcactcccggctaa

SEQ ID NO: 1138117 - DNA, 15 bp, Homo sapiens
cagcactcccggcta

SEQ ID NO: 1138118 - DNA, 15 bp, Homo sapiens
ccagcactcccggct

SEQ ID NO: 1138119 - DNA, 15 bp, Homo sapiens
gccagcactcccggc

SEQ ID NO: 1138120 - DNA, 15 bp, Homo sapiens
cgccagcactcccgg

SEQ ID NO: 1138121 - DNA, 15 bp, Homo sapiens
ccgccagcactcccg

SEQ ID NO: 1138122 - DNA, 15 bp, Homo sapiens
cccgccagcactccc

SEQ ID NO: 1138123 - DNA, 15 bp, Homo sapiens
acccgccagcactcc

SEQ ID NO: 1138124 - DNA, 15 bp, Homo sapiens
cacccgccagcactc

SEQ ID NO: 1138125 - DNA, 15 bp, Homo sapiens
gcacccgccagcact

SEQ ID NO: 1138126 - DNA, 15 bp, Homo sapiens
ggcacccgccagcac

SEQ ID NO: 1138127 - DNA, 15 bp, Homo sapiens
aggcacccgccagca

SEQ ID NO: 1138128 - DNA, 15 bp, Homo sapiens
caggcacccgccagc

SEQ ID NO: 1138129 - DNA, 15 bp, Homo sapiens
acaggcacccgccag

SEQ ID NO: 1138130 - DNA, 15 bp, Homo sapiens
cgcctcagcctcctg

SEQ ID NO: 1138131 - DNA, 15 bp, Homo sapiens
ccgcctcagcctcct

SEQ ID NO: 1138132 - DNA, 15 bp, Homo sapiens
cctcctgggttcacg

SEQ ID NO: 1138133 - DNA, 15 bp, Homo sapiens
cgctcactgcaagct

SEQ ID NO: 1138134 - DNA, 15 bp, Homo sapiens
ccgctcactgcaagc

SEQ ID NO: 1138135 - DNA, 15 bp, Homo sapiens
tccgctcactgcaag

SEQ ID NO: 1138136 - DNA, 15 bp, Homo sapiens
gcgatctccgctcac

SEQ ID NO: 1138137 - DNA, 15 bp, Homo sapiens
cgcgatctccgctca

SEQ ID NO: 1138138 - DNA, 15 bp, Homo sapiens
gcgcgatctccgctc

SEQ ID NO: 1138139 - DNA, 15 bp, Homo sapiens
ggcgcgatctccgct

SEQ ID NO: 1138140 - DNA, 15 bp, Homo sapiens
tggcgcgatctccgc

SEQ ID NO: 1138141 - DNA, 15 bp, Homo sapiens
gtggcgcgatctccg

SEQ ID NO: 1138142 - DNA, 15 bp, Homo sapiens
agtggcgcgatctcc

SEQ ID NO: 1138143 - DNA, 15 bp, Homo sapiens
atctcgctctgttgc

SEQ ID NO: 1138144 - DNA, 15 bp, Homo sapiens
aatctcgctctgttg

SEQ ID NO: 1138145 - DNA, 15 bp, Homo sapiens
gaatctcgctctgtt

SEQ ID NO: 1138146 - DNA, 15 bp, Homo sapiens
cggaatctcgctctg

SEQ ID NO: 1138147 - DNA, 15 bp, Homo sapiens
acggaatctcgctct

SEQ ID NO: 1138148 - DNA, 15 bp, Homo sapiens
gacggaatctcgctc

SEQ ID NO: 1138149 - DNA, 15 bp, Homo sapiens
agacggaatctcgct

SEQ ID NO: 1138150 - DNA, 15 bp, Homo sapiens
tagacggaatctcgc

SEQ ID NO: 1138151 - DNA, 15 bp, Homo sapiens
ttagacggaatctcg

SEQ ID NO: 1138152 - DNA, 15 bp, Homo sapiens
tttagacggaatctc

SEQ ID NO: 1138153 - DNA, 15 bp, Homo sapiens
ttttagacggaatct

SEQ ID NO: 1138154 - DNA, 15 bp, Homo sapiens
tttttagacggaatc

SEQ ID NO: 1138155 - DNA, 15 bp, Homo sapiens
ttttttagacggaat

SEQ ID NO: 1138156 - DNA, 15 bp, Homo sapiens
tttttttagacggaa

SEQ ID NO: 1138157 - DNA, 15 bp, Homo sapiens
acattcttttttttt

SEQ ID NO: 1138158 - DNA, 15 bp, Homo sapiens
atcacaacattcttt

SEQ ID NO: 1138159 - DNA, 15 bp, Homo sapiens
tatcacaacattctt

SEQ ID NO: 1138160 - DNA, 15 bp, Homo sapiens
ttatcacaacattct

SEQ ID NO: 1138161 - DNA, 15 bp, Homo sapiens
tttatcacaacattc

SEQ ID NO: 1138162 - DNA, 15 bp, Homo sapiens
ttttatcacaacatt

SEQ ID NO: 1138163 - DNA, 15 bp, Homo sapiens
cttttatcacaacat

SEQ ID NO: 1138164 - DNA, 15 bp, Homo sapiens
ccttttatcacaaca

SEQ ID NO: 1138165 - DNA, 15 bp, Homo sapiens
accttttatcacaac

SEQ ID NO: 1138166 - DNA, 15 bp, Homo sapiens
caccttttatcacaa

SEQ ID NO: 1138167 - DNA, 15 bp, Homo sapiens
tcaccttttatcaca

SEQ ID NO: 1138168 - DNA, 15 bp, Homo sapiens
atcaccttttatcac

SEQ ID NO: 1138169 - DNA, 15 bp, Homo sapiens
catcaccttttatca

SEQ ID NO: 1138170 - DNA, 15 bp, Homo sapiens
gcatcaccttttatc

SEQ ID NO: 1138171 - DNA, 15 bp, Homo sapiens
agcatcaccttttat

SEQ ID NO: 1138172 - DNA, 15 bp, Homo sapiens
gagcatcacctttta

SEQ ID NO: 1138173 - DNA, 15 bp, Homo sapiens
tgagcatcacctttt

SEQ ID NO: 1138174 - DNA, 15 bp, Homo sapiens
gtgagcatcaccttt

SEQ ID NO: 1138175 - DNA, 15 bp, Homo sapiens
ggtgagcatcacctt

SEQ ID NO: 1138176 - DNA, 15 bp, Homo sapiens
aggtgagcatcacct

SEQ ID NO: 1138177 - DNA, 15 bp, Homo sapiens
gaggtgagcatcacc

SEQ ID NO: 1138178 - DNA, 15 bp, Homo sapiens
agaggtgagcatcac

SEQ ID NO: 1138179 - DNA, 15 bp, Homo sapiens
gagaggtgagcatca

SEQ ID NO: 1138180 - DNA, 15 bp, Homo sapiens
ggagaggtgagcatc

SEQ ID NO: 1138181 - DNA, 15 bp, Homo sapiens
gggagaggtgagcat

SEQ ID NO: 1138182 - DNA, 15 bp, Homo sapiens
tgggagaggtgagca

SEQ ID NO: 1138183 - DNA, 15 bp, Homo sapiens
gtgggagaggtgagc

SEQ ID NO: 1138184 - DNA, 15 bp, Homo sapiens
tgtgggagaggtgag

SEQ ID NO: 1138185 - DNA, 15 bp, Homo sapiens
gtgtgggagaggtga

SEQ ID NO: 1138186 - DNA, 15 bp, Homo sapiens
ggtgtgggagaggtg

SEQ ID NO: 1138187 - DNA, 15 bp, Homo sapiens
gggtgtgggagaggt

SEQ ID NO: 1138188 - DNA, 15 bp, Homo sapiens
agggtgtgggagagg

SEQ ID NO: 1138189 - DNA, 15 bp, Homo sapiens
aagggtgtgggagag

SEQ ID NO: 1138190 - DNA, 15 bp, Homo sapiens
aaagggtgtgggaga

SEQ ID NO: 1138191 - DNA, 15 bp, Homo sapiens
aaaagggtgtgggag

SEQ ID NO: 1138192 - DNA, 15 bp, Homo sapiens
taaaagggtgtggga

SEQ ID NO: 1138193 - DNA, 15 bp, Homo sapiens
ataaaagggtgtggg

SEQ ID NO: 1138194 - DNA, 15 bp, Homo sapiens
tataaaagggtgtgg

SEQ ID NO: 1138195 - DNA, 15 bp, Homo sapiens
ctataaaagggtgtg

SEQ ID NO: 1138196 - DNA, 15 bp, Homo sapiens
actataaaagggtgt

SEQ ID NO: 1138197 - DNA, 15 bp, Homo sapiens
aactataaaagggtg

SEQ ID NO: 1138198 - DNA, 15 bp, Homo sapiens
aaactataaaagggt

SEQ ID NO: 1138199 - DNA, 15 bp, Homo sapiens
taaactataaaaggg

SEQ ID NO: 1138200 - DNA, 15 bp, Homo sapiens
ctaaactataaaagg

SEQ ID NO: 1138201 - DNA, 15 bp, Homo sapiens
cctaaactataaaag

SEQ ID NO: 1138202 - DNA, 15 bp, Homo sapiens
ccctaaactataaaa

SEQ ID NO: 1138203 - DNA, 15 bp, Homo sapiens
tccctaaactataaa

SEQ ID NO: 1138204 - DNA, 15 bp, Homo sapiens
atccctaaactataa

SEQ ID NO: 1138205 - DNA, 15 bp, Homo sapiens
aatccctaaactata

SEQ ID NO: 1138206 - DNA, 15 bp, Homo sapiens
caatccctaaactat

SEQ ID NO: 1138207 - DNA, 15 bp, Homo sapiens
acaatccctaaacta

SEQ ID NO: 1138208 - DNA, 15 bp, Homo sapiens
tacaatccctaaact

SEQ ID NO: 1138209 - DNA, 15 bp, Homo sapiens
atacaatccctaaac

SEQ ID NO: 1138210 - DNA, 15 bp, Homo sapiens
aatacaatccctaaa

SEQ ID NO: 1138211 - DNA, 15 bp, Homo sapiens
aaatacaatccctaa

SEQ ID NO: 1138212 - DNA, 15 bp, Homo sapiens
gaaatacaatcccta

SEQ ID NO: 1138213 - DNA, 15 bp, Homo sapiens
ggaaatacaatccct

SEQ ID NO: 1138214 - DNA, 15 bp, Homo sapiens
tggaaatacaatccc

SEQ ID NO: 1138215 - DNA, 15 bp, Homo sapiens
ttggaaatacaatcc

SEQ ID NO: 1138216 - DNA, 15 bp, Homo sapiens
cttggaaatacaatc

SEQ ID NO: 1138217 - DNA, 15 bp, Homo sapiens
ccttggaaatacaat

SEQ ID NO: 1138218 - DNA, 15 bp, Homo sapiens
accttggaaatacaa

SEQ ID NO: 1138219 - DNA, 15 bp, Homo sapiens
ggcgatgtcaatagg

SEQ ID NO: 1138220 - DNA, 15 bp, Homo sapiens
tggcgatgtcaatag

SEQ ID NO: 1138221 - DNA, 15 bp, Homo sapiens
ctggcgatgtcaata

SEQ ID NO: 1138222 - DNA, 15 bp, Homo sapiens
actggcgatgtcaat

SEQ ID NO: 1138223 - DNA, 15 bp, Homo sapiens
tactggcgatgtcaa

SEQ ID NO: 1138224 - DNA, 15 bp, Homo sapiens
ttactggcgatgtca

SEQ ID NO: 1138225 - DNA, 15 bp, Homo sapiens
tttactggcgatgtc

SEQ ID NO: 1138226 - DNA, 15 bp, Homo sapiens
ttttactggcgatgt

SEQ ID NO: 1138227 - DNA, 15 bp, Homo sapiens
attttactggcgatg

SEQ ID NO: 1138228 - DNA, 15 bp, Homo sapiens
aattttactggcgat

SEQ ID NO: 1138229 - DNA, 15 bp, Homo sapiens
taattttactggcga

SEQ ID NO: 1138230 - DNA, 15 bp, Homo sapiens
ataattttactggcg

SEQ ID NO: 1138231 - DNA, 15 bp, Homo sapiens
gataattttactggc

SEQ ID NO: 1138232 - DNA, 15 bp, Homo sapiens
tgataattttactgg

SEQ ID NO: 1138233 - DNA, 15 bp, Homo sapiens
ttgataattttactg

SEQ ID NO: 1138234 - DNA, 15 bp, Homo sapiens
attgataattttact

SEQ ID NO: 1138235 - DNA, 15 bp, Homo sapiens
cattgataattttac

SEQ ID NO: 1138236 - DNA, 15 bp, Homo sapiens
acattgataatttta

SEQ ID NO: 1138237 - DNA, 15 bp, Homo sapiens
aacattgataatttt

SEQ ID NO: 1138238 - DNA, 15 bp, Homo sapiens
gaacattgataattt

SEQ ID NO: 1138239 - DNA, 15 bp, Homo sapiens
agaacattgataatt

SEQ ID NO: 1138240 - DNA, 15 bp, Homo sapiens
tagaacattgataat

SEQ ID NO: 1138241 - DNA, 15 bp, Homo sapiens
ctagaacattgataa

SEQ ID NO: 1138242 - DNA, 15 bp, Homo sapiens
actagaacattgata

SEQ ID NO: 1138243 - DNA, 15 bp, Homo sapiens
aactagaacattgat

SEQ ID NO: 1138244 - DNA, 15 bp, Homo sapiens
gaactagaacattga

SEQ ID NO: 1138245 - DNA, 15 bp, Homo sapiens
agaactagaacattg

SEQ ID NO: 1138246 - DNA, 15 bp, Homo sapiens
cagaactagaacatt

SEQ ID NO: 1138247 - DNA, 15 bp, Homo sapiens
acagaactagaacat

SEQ ID NO: 1138248 - DNA, 15 bp, Homo sapiens
cacagaactagaaca

SEQ ID NO: 1138249 - DNA, 15 bp, Homo sapiens
ccacagaactagaac

SEQ ID NO: 1138250 - DNA, 15 bp, Homo sapiens
gccacagaactagaa

SEQ ID NO: 1138251 - DNA, 15 bp, Homo sapiens
ggccacagaactaga

SEQ ID NO: 1138252 - DNA, 15 bp, Homo sapiens
tggccacagaactag

SEQ ID NO: 1138253 - DNA, 15 bp, Homo sapiens
atggccacagaacta

SEQ ID NO: 1138254 - DNA, 15 bp, Homo sapiens
gatggccacagaact

SEQ ID NO: 1138255 - DNA, 15 bp, Homo sapiens
agatggccacagaac

SEQ ID NO: 1138256 - DNA, 15 bp, Homo sapiens
cagatggccacagaa

SEQ ID NO: 1138257 - DNA, 15 bp, Homo sapiens
gcagatggccacaga

SEQ ID NO: 1138258 - DNA, 15 bp, Homo sapiens
agcagatggccacag

SEQ ID NO: 1138259 - DNA, 15 bp, Homo sapiens
aagcagatggccaca

SEQ ID NO: 1138260 - DNA, 15 bp, Homo sapiens
taagcagatggccac

SEQ ID NO: 1138261 - DNA, 15 bp, Homo sapiens
ctaagcagatggcca

SEQ ID NO: 1138262 - DNA, 15 bp, Homo sapiens
actaagcagatggcc

SEQ ID NO: 1138263 - DNA, 15 bp, Homo sapiens
tactaagcagatggc

SEQ ID NO: 1138264 - DNA, 15 bp, Homo sapiens
ctactaagcagatgg

SEQ ID NO: 1138265 - DNA, 15 bp, Homo sapiens
tctactaagcagatg

SEQ ID NO: 1138266 - DNA, 15 bp, Homo sapiens
ctctactaagcagat

SEQ ID NO: 1138267 - DNA, 15 bp, Homo sapiens
gctctactaagcaga

SEQ ID NO: 1138268 - DNA, 15 bp, Homo sapiens
agctctactaagcag

SEQ ID NO: 1138269 - DNA, 15 bp, Homo sapiens
aagctctactaagca

SEQ ID NO: 1138270 - DNA, 15 bp, Homo sapiens
aaagctctactaagc

SEQ ID NO: 1138271 - DNA, 15 bp, Homo sapiens
aaaagctctactaag

SEQ ID NO: 1138272 - DNA, 15 bp, Homo sapiens
aaaaagctctactaa

SEQ ID NO: 1138273 - DNA, 15 bp, Homo sapiens
caaaaagctctacta

SEQ ID NO: 1138274 - DNA, 15 bp, Homo sapiens
gcaaaaagctctact

SEQ ID NO: 1138275 - DNA, 15 bp, Homo sapiens
tgcaaaaagctctac

SEQ ID NO: 1138276 - DNA, 15 bp, Homo sapiens
atgcaaaaagctcta

SEQ ID NO: 1138277 - DNA, 15 bp, Homo sapiens
catgcaaaaagctct

SEQ ID NO: 1138278 - DNA, 15 bp, Homo sapiens
acatgcaaaaagctc

SEQ ID NO: 1138279 - DNA, 15 bp, Homo sapiens
tacatgcaaaaagct

SEQ ID NO: 1138280 - DNA, 15 bp, Homo sapiens
atacatgcaaaaagc

SEQ ID NO: 1138281 - DNA, 15 bp, Homo sapiens
gatacatgcaaaaag

SEQ ID NO: 1138282 - DNA, 15 bp, Homo sapiens
agatacatgcaaaaa

SEQ ID NO: 1138283 - DNA, 15 bp, Homo sapiens
aagatacatgcaaaa

SEQ ID NO: 1138284 - DNA, 15 bp, Homo sapiens
gaagatacatgcaaa

SEQ ID NO: 1138285 - DNA, 15 bp, Homo sapiens
agaagatacatgcaa

SEQ ID NO: 1138286 - DNA, 15 bp, Homo sapiens
tagaagatacatgca

SEQ ID NO: 1138287 - DNA, 15 bp, Homo sapiens
ttagaagatacatgc

SEQ ID NO: 1138288 - DNA, 15 bp, Homo sapiens
cttagaagatacatg

SEQ ID NO: 1138289 - DNA, 15 bp, Homo sapiens
tcttagaagatacat

SEQ ID NO: 1138290 - DNA, 15 bp, Homo sapiens
ttcttagaagataca

SEQ ID NO: 1138291 - DNA, 15 bp, Homo sapiens
attcttagaagatac

SEQ ID NO: 1138292 - DNA, 15 bp, Homo sapiens
aattcttagaagata

SEQ ID NO: 1138293 - DNA, 15 bp, Homo sapiens
aaattcttagaagat

SEQ ID NO: 1138294 - DNA, 15 bp, Homo sapiens
acatgtaccccggac

SEQ ID NO: 1138295 - DNA, 15 bp, Homo sapiens
cacatgtaccccgga

SEQ ID NO: 1138296 - DNA, 15 bp, Homo sapiens
tcacatgtaccccgg

SEQ ID NO: 1138297 - DNA, 15 bp, Homo sapiens
ttcacatgtaccccg

SEQ ID NO: 1138298 - DNA, 15 bp, Homo sapiens
cttcacatgtacccc

SEQ ID NO: 1138299 - DNA, 15 bp, Homo sapiens
ccttcacatgtaccc

SEQ ID NO: 1138300 - DNA, 15 bp, Homo sapiens
tccttcacatgtacc

SEQ ID NO: 1138301 - DNA, 15 bp, Homo sapiens
atccttcacatgtac

SEQ ID NO: 1138302 - DNA, 15 bp, Homo sapiens
catccttcacatgta

SEQ ID NO: 1138303 - DNA, 15 bp, Homo sapiens
acatccttcacatgt

SEQ ID NO: 1138304 - DNA, 15 bp, Homo sapiens
cacatccttcacatg

SEQ ID NO: 1138305 - DNA, 15 bp, Homo sapiens
gcacatccttcacat

SEQ ID NO: 1138306 - DNA, 15 bp, Homo sapiens
tgcacatccttcaca

SEQ ID NO: 1138307 - DNA, 15 bp, Homo sapiens
ctgcacatccttcac

SEQ ID NO: 1138308 - DNA, 15 bp, Homo sapiens
cctgcacatccttca

SEQ ID NO: 1138309 - DNA, 15 bp, Homo sapiens
acctgcacatccttc

SEQ ID NO: 1138310 - DNA, 15 bp, Homo sapiens
aacctgcacatcctt

SEQ ID NO: 1138311 - DNA, 15 bp, Homo sapiens
aaacctgcacatcct

SEQ ID NO: 1138312 - DNA, 15 bp, Homo sapiens
caaacctgcacatcc

SEQ ID NO: 1138313 - DNA, 15 bp, Homo sapiens
acaaacctgcacatc

SEQ ID NO: 1138314 - DNA, 15 bp, Homo sapiens
aacaaacctgcacat

SEQ ID NO: 1138315 - DNA, 15 bp, Homo sapiens
taacaaacctgcaca

SEQ ID NO: 1138316 - DNA, 15 bp, Homo sapiens
ttacctatgtaacaa

SEQ ID NO: 1138317 - DNA, 15 bp, Homo sapiens
tttacctatgtaaca

SEQ ID NO: 1138318 - DNA, 15 bp, Homo sapiens
gtttacctatgtaac

SEQ ID NO: 1138319 - DNA, 15 bp, Homo sapiens
cgtttacctatgtaa

SEQ ID NO: 1138320 - DNA, 15 bp, Homo sapiens
acgtttacctatgta

SEQ ID NO: 1138321 - DNA, 15 bp, Homo sapiens
cacgtttacctatgt

SEQ ID NO: 1138322 - DNA, 15 bp, Homo sapiens
acacgtttacctatg

SEQ ID NO: 1138323 - DNA, 15 bp, Homo sapiens
cacacgtttacctat

SEQ ID NO: 1138324 - DNA, 15 bp, Homo sapiens
gcacacgtttaccta

SEQ ID NO: 1138325 - DNA, 15 bp, Homo sapiens
ggcacacgtttacct

SEQ ID NO: 1138326 - DNA, 15 bp, Homo sapiens
aggcacacgtttacc

SEQ ID NO: 1138327 - DNA, 15 bp, Homo sapiens
aaggcacacgtttac

SEQ ID NO: 1138328 - DNA, 15 bp, Homo sapiens
caaggcacacgttta

SEQ ID NO: 1138329 - DNA, 15 bp, Homo sapiens
ccaaggcacacgttt

SEQ ID NO: 1138330 - DNA, 15 bp, Homo sapiens
accaaggcacacgtt

SEQ ID NO: 1138331 - DNA, 15 bp, Homo sapiens
caccaaggcacacgt

SEQ ID NO: 1138332 - DNA, 15 bp, Homo sapiens
ccaccaaggcacacg

SEQ ID NO: 1138333 - DNA, 15 bp, Homo sapiens
accaccaaggcacac

SEQ ID NO: 1138334 - DNA, 15 bp, Homo sapiens
aaccaccaaggcaca

SEQ ID NO: 1138335 - DNA, 15 bp, Homo sapiens
aaaccaccaaggcac

SEQ ID NO: 1138336 - DNA, 15 bp, Homo sapiens
caaaccaccaaggca

SEQ ID NO: 1138337 - DNA, 15 bp, Homo sapiens
gcaaaccaccaaggc

SEQ ID NO: 1138338 - DNA, 15 bp, Homo sapiens
agcaaaccaccaagg

SEQ ID NO: 1138339 - DNA, 15 bp, Homo sapiens
cagcaaaccaccaag

SEQ ID NO: 1138340 - DNA, 15 bp, Homo sapiens
gcagcaaaccaccaa

SEQ ID NO: 1138341 - DNA, 15 bp, Homo sapiens
aggtgcagcaaacca

SEQ ID NO: 1138342 - DNA, 15 bp, Homo sapiens
caggtgcagcaaacc

SEQ ID NO: 1138343 - DNA, 15 bp, Homo sapiens
acaggtgcagcaaac

SEQ ID NO: 1138344 - DNA, 15 bp, Homo sapiens
gacaggtgcagcaaa

SEQ ID NO: 1138345 - DNA, 15 bp, Homo sapiens
tgacaggtgcagcaa

SEQ ID NO: 1138346 - DNA, 15 bp, Homo sapiens
ttgacaggtgcagca

SEQ ID NO: 1138347 - DNA, 15 bp, Homo sapiens
gttgacaggtgcagc

SEQ ID NO: 1138348 - DNA, 15 bp, Homo sapiens
ggttgacaggtgcag

SEQ ID NO: 1138349 - DNA, 15 bp, Homo sapiens
gggttgacaggtgca

SEQ ID NO: 1138350 - DNA, 15 bp, Homo sapiens
tgggttgacaggtgc

SEQ ID NO: 1138351 - DNA, 15 bp, Homo sapiens
atgggttgacaggtg

SEQ ID NO: 1138352 - DNA, 15 bp, Homo sapiens
gatgggttgacaggt

SEQ ID NO: 1138353 - DNA, 15 bp, Homo sapiens
tgatgggttgacagg

SEQ ID NO: 1138354 - DNA, 15 bp, Homo sapiens
gtgatgggttgacag

SEQ ID NO: 1138355 - DNA, 15 bp, Homo sapiens
ggtgatgggttgaca

SEQ ID NO: 1138356 - DNA, 15 bp, Homo sapiens
aggtgatgggttgac

SEQ ID NO: 1138357 - DNA, 15 bp, Homo sapiens
taggtgatgggttga

SEQ ID NO: 1138358 - DNA, 15 bp, Homo sapiens
gtaggtgatgggttg

SEQ ID NO: 1138359 - DNA, 15 bp, Homo sapiens
cgtaggtgatgggtt

SEQ ID NO: 1138360 - DNA, 15 bp, Homo sapiens
acgtaggtgatgggt

SEQ ID NO: 1138361 - DNA, 15 bp, Homo sapiens
tacgtaggtgatggg

SEQ ID NO: 1138362 - DNA, 15 bp, Homo sapiens
atacgtaggtgatgg

SEQ ID NO: 1138363 - DNA, 15 bp, Homo sapiens
aatacgtaggtgatg

SEQ ID NO: 1138364 - DNA, 15 bp, Homo sapiens
taatacgtaggtgat

SEQ ID NO: 1138365 - DNA, 15 bp, Homo sapiens
ttaatacgtaggtga

SEQ ID NO: 1138366 - DNA, 15 bp, Homo sapiens
cttaatacgtaggtg

SEQ ID NO: 1138367 - DNA, 15 bp, Homo sapiens
gcttaatacgtaggt

SEQ ID NO: 1138368 - DNA, 15 bp, Homo sapiens
ggcttaatacgtagg

SEQ ID NO: 1138369 - DNA, 15 bp, Homo sapiens
gggcttaatacgtag

SEQ ID NO: 1138370 - DNA, 15 bp, Homo sapiens
ggggcttaatacgta

SEQ ID NO: 1138371 - DNA, 15 bp, Homo sapiens
tggggcttaatacgt

SEQ ID NO: 1138372 - DNA, 15 bp, Homo sapiens
gtggggcttaatacg

SEQ ID NO: 1138373 - DNA, 15 bp, Homo sapiens
tgtggggcttaatac

SEQ ID NO: 1138374 - DNA, 15 bp, Homo sapiens
atgtggggcttaata

SEQ ID NO: 1138375 - DNA, 15 bp, Homo sapiens
catgtggggcttaat

SEQ ID NO: 1138376 - DNA, 15 bp, Homo sapiens
gcatgtggggcttaa

SEQ ID NO: 1138377 - DNA, 15 bp, Homo sapiens
tgcatgtggggctta

SEQ ID NO: 1138378 - DNA, 15 bp, Homo sapiens
atgcatgtggggctt

SEQ ID NO: 1138379 - DNA, 15 bp, Homo sapiens
aatgcatgtggggct

SEQ ID NO: 1138380 - DNA, 15 bp, Homo sapiens
taatgcatgtggggc

SEQ ID NO: 1138381 - DNA, 15 bp, Homo sapiens
ctaatgcatgtgggg

SEQ ID NO: 1138382 - DNA, 15 bp, Homo sapiens
gctaatgcatgtggg

SEQ ID NO: 1138383 - DNA, 15 bp, Homo sapiens
agctaatgcatgtgg

SEQ ID NO: 1138384 - DNA, 15 bp, Homo sapiens
tagctaatgcatgtg

SEQ ID NO: 1138385 - DNA, 15 bp, Homo sapiens
atagctaatgcatgt

SEQ ID NO: 1138386 - DNA, 15 bp, Homo sapiens
caatagctaatgcat

SEQ ID NO: 1138387 - DNA, 15 bp, Homo sapiens
tcaatagctaatgca

SEQ ID NO: 1138388 - DNA, 15 bp, Homo sapiens
atcaatagctaatgc

SEQ ID NO: 1138389 - DNA, 15 bp, Homo sapiens
gatcaatagctaatg

SEQ ID NO: 1138390 - DNA, 15 bp, Homo sapiens
ggatcaatagctaat

SEQ ID NO: 1138391 - DNA, 15 bp, Homo sapiens
aggatcaatagctaa

SEQ ID NO: 1138392 - DNA, 15 bp, Homo sapiens
caggatcaatagcta

SEQ ID NO: 1138393 - DNA, 15 bp, Homo sapiens
tcaggatcaatagct

SEQ ID NO: 1138394 - DNA, 15 bp, Homo sapiens
atcaggatcaatagc

SEQ ID NO: 1138395 - DNA, 15 bp, Homo sapiens
catcaggatcaatag

SEQ ID NO: 1138396 - DNA, 15 bp, Homo sapiens
gcatcaggatcaata

SEQ ID NO: 1138397 - DNA, 15 bp, Homo sapiens
agcatcaggatcaat

SEQ ID NO: 1138398 - DNA, 15 bp, Homo sapiens
gagcatcaggatcaa

SEQ ID NO: 1138399 - DNA, 15 bp, Homo sapiens
agagcatcaggatca

SEQ ID NO: 1138400 - DNA, 15 bp, Homo sapiens
gagagcatcaggatc

SEQ ID NO: 1138401 - DNA, 15 bp, Homo sapiens
agagagcatcaggat

SEQ ID NO: 1138402 - DNA, 15 bp, Homo sapiens
gagagagcatcagga

SEQ ID NO: 1138403 - DNA, 15 bp, Homo sapiens
agagagagcatcagg

SEQ ID NO: 1138404 - DNA, 15 bp, Homo sapiens
gagagagagcatcag

SEQ ID NO: 1138405 - DNA, 15 bp, Homo sapiens
ggagagagagcatca

SEQ ID NO: 1138406 - DNA, 15 bp, Homo sapiens
gggagagagagcatc

SEQ ID NO: 1138407 - DNA, 15 bp, Homo sapiens
agggagagagagcat

SEQ ID NO: 1138408 - DNA, 15 bp, Homo sapiens
cagggagagagagca

SEQ ID NO: 1138409 - DNA, 15 bp, Homo sapiens
gcagggagagagagc

SEQ ID NO: 1138410 - DNA, 15 bp, Homo sapiens
agcagggagagagag

SEQ ID NO: 1138411 - DNA, 15 bp, Homo sapiens
cagcagggagagaga

SEQ ID NO: 1138412 - DNA, 15 bp, Homo sapiens
ccagcagggagagag

SEQ ID NO: 1138413 - DNA, 15 bp, Homo sapiens
gccagcagggagaga

SEQ ID NO: 1138414 - DNA, 15 bp, Homo sapiens
agccagcagggagag

SEQ ID NO: 1138415 - DNA, 15 bp, Homo sapiens
gagccagcagggaga

SEQ ID NO: 1138416 - DNA, 15 bp, Homo sapiens
ggagccagcagggag

SEQ ID NO: 1138417 - DNA, 15 bp, Homo sapiens
gggagccagcaggga

SEQ ID NO: 1138418 - DNA, 15 bp, Homo sapiens
ggggagccagcaggg

SEQ ID NO: 1138419 - DNA, 15 bp, Homo sapiens
tggggagccagcagg

SEQ ID NO: 1138420 - DNA, 15 bp, Homo sapiens
ctggggagccagcag

SEQ ID NO: 1138421 - DNA, 15 bp, Homo sapiens
gctggggagccagca

SEQ ID NO: 1138422 - DNA, 15 bp, Homo sapiens
tgctggggagccagc

SEQ ID NO: 1138423 - DNA, 15 bp, Homo sapiens
ctgctggggagccag

SEQ ID NO: 1138424 - DNA, 15 bp, Homo sapiens
cctgctggggagcca

SEQ ID NO: 1138425 - DNA, 15 bp, Homo sapiens
gcctgctggggagcc

SEQ ID NO: 1138426 - DNA, 15 bp, Homo sapiens
ggcctgctggggagc

SEQ ID NO: 1138427 - DNA, 15 bp, Homo sapiens
gggcctgctggggag

SEQ ID NO: 1138428 - DNA, 15 bp, Homo sapiens
ggggcctgctgggga

SEQ ID NO: 1138429 - DNA, 15 bp, Homo sapiens
cggggcctgctgggg

SEQ ID NO: 1138430 - DNA, 15 bp, Homo sapiens
ccggggcctgctggg

SEQ ID NO: 1138431 - DNA, 15 bp, Homo sapiens
accggggcctgctgg

SEQ ID NO: 1138432 - DNA, 15 bp, Homo sapiens
caccggggcctgctg

SEQ ID NO: 1138433 - DNA, 15 bp, Homo sapiens
acaccggggcctgct

SEQ ID NO: 1138434 - DNA, 15 bp, Homo sapiens
cacaccggggcctgc

SEQ ID NO: 1138435 - DNA, 15 bp, Homo sapiens
acacaccggggcctg

SEQ ID NO: 1138436 - DNA, 15 bp, Homo sapiens
cacacaccggggcct

SEQ ID NO: 1138437 - DNA, 15 bp, Homo sapiens
acacacaccggggcc

SEQ ID NO: 1138438 - DNA, 15 bp, Homo sapiens
aacacacaccggggc

SEQ ID NO: 1138439 - DNA, 15 bp, Homo sapiens
caacacacaccgggg

SEQ ID NO: 1138440 - DNA, 15 bp, Homo sapiens
acaacacacaccggg

SEQ ID NO: 1138441 - DNA, 15 bp, Homo sapiens
aacaacacacaccgg

SEQ ID NO: 1138442 - DNA, 15 bp, Homo sapiens
gaacaacacacaccg

SEQ ID NO: 1138443 - DNA, 15 bp, Homo sapiens
ggaacaacacacacc

SEQ ID NO: 1138444 - DNA, 15 bp, Homo sapiens
gggaacaacacacac

SEQ ID NO: 1138445 - DNA, 15 bp, Homo sapiens
ggggaacaacacaca

SEQ ID NO: 1138446 - DNA, 15 bp, Homo sapiens
aggggaacaacacac

SEQ ID NO: 1138447 - DNA, 15 bp, Homo sapiens
gaggggaacaacaca

SEQ ID NO: 1138448 - DNA, 15 bp, Homo sapiens
ggaggggaacaacac

SEQ ID NO: 1138449 - DNA, 15 bp, Homo sapiens
gggaggggaacaaca

SEQ ID NO: 1138450 - DNA, 15 bp, Homo sapiens
agggaggggaacaac

SEQ ID NO: 1138451 - DNA, 15 bp, Homo sapiens
cagggaggggaacaa

SEQ ID NO: 1138452 - DNA, 15 bp, Homo sapiens
aacagggaggggaac

SEQ ID NO: 1138453 - DNA, 15 bp, Homo sapiens
aaacagggaggggaa

SEQ ID NO: 1138454 - DNA, 15 bp, Homo sapiens
taaacagggagggga

SEQ ID NO: 1138455 - DNA, 15 bp, Homo sapiens
ataaacagggagggg

SEQ ID NO: 1138456 - DNA, 15 bp, Homo sapiens
cataaacagggaggg

SEQ ID NO: 1138457 - DNA, 15 bp, Homo sapiens
tcataaacagggagg

SEQ ID NO: 1138458 - DNA, 15 bp, Homo sapiens
ctcataaacagggag

SEQ ID NO: 1138459 - DNA, 15 bp, Homo sapiens
tctcataaacaggga

SEQ ID NO: 1138460 - DNA, 15 bp, Homo sapiens
ttctcataaacaggg

SEQ ID NO: 1138461 - DNA, 15 bp, Homo sapiens
gttctcataaacagg

SEQ ID NO: 1138462 - DNA, 15 bp, Homo sapiens
tgttctcataaacag

SEQ ID NO: 1138463 - DNA, 15 bp, Homo sapiens
gtgttctcataaaca

SEQ ID NO: 1138464 - DNA, 15 bp, Homo sapiens
agtgttctcataaac

SEQ ID NO: 1138465 - DNA, 15 bp, Homo sapiens
aagtgttctcataaa

SEQ ID NO: 1138466 - DNA, 15 bp, Homo sapiens
aaagtgttctcataa

SEQ ID NO: 1138467 - DNA, 15 bp, Homo sapiens
gaaagtgttctcata

SEQ ID NO: 1138468 - DNA, 15 bp, Homo sapiens
agaaagtgttctcat

SEQ ID NO: 1138469 - DNA, 15 bp, Homo sapiens
aagaaagtgttctca

SEQ ID NO: 1138470 - DNA, 15 bp, Homo sapiens
caagaaagtgttctc

SEQ ID NO: 1138471 - DNA, 15 bp, Homo sapiens
tcaagaaagtgttct

SEQ ID NO: 1138472 - DNA, 15 bp, Homo sapiens
gtcaagaaagtgttc

SEQ ID NO: 1138473 - DNA, 15 bp, Homo sapiens
tgtcaagaaagtgtt

SEQ ID NO: 1138474 - DNA, 15 bp, Homo sapiens
atgtcaagaaagtgt

SEQ ID NO: 1138475 - DNA, 15 bp, Homo sapiens
tatgtcaagaaagtg

SEQ ID NO: 1138476 - DNA, 15 bp, Homo sapiens
ttatgtcaagaaagt

SEQ ID NO: 1138477 - DNA, 15 bp, Homo sapiens
tttatgtcaagaaag

SEQ ID NO: 1138478 - DNA, 15 bp, Homo sapiens
ctttatgtcaagaaa

SEQ ID NO: 1138479 - DNA, 15 bp, Homo sapiens
tctttatgtcaagaa

SEQ ID NO: 1138480 - DNA, 15 bp, Homo sapiens
atctttatgtcaaga

SEQ ID NO: 1138481 - DNA, 15 bp, Homo sapiens
aatctttatgtcaag

SEQ ID NO: 1138482 - DNA, 15 bp, Homo sapiens
aaatctttatgtcaa

SEQ ID NO: 1138483 - DNA, 15 bp, Homo sapiens
gaaatctttatgtca

SEQ ID NO: 1138484 - DNA, 15 bp, Homo sapiens
tgaaatctttatgtc

SEQ ID NO: 1138485 - DNA, 15 bp, Homo sapiens
atgaaatctttatgt

SEQ ID NO: 1138486 - DNA, 15 bp, Homo sapiens
aatgaaatctttatg

SEQ ID NO: 1138487 - DNA, 15 bp, Homo sapiens
aaatgaaatctttat

SEQ ID NO: 1138488 - DNA, 15 bp, Homo sapiens
taaatgaaatcttta

SEQ ID NO: 1138489 - DNA, 15 bp, Homo sapiens
ataaatgaaatcttt

SEQ ID NO: 1138490 - DNA, 15 bp, Homo sapiens
aataaatgaaatctt

SEQ ID NO: 1138491 - DNA, 15 bp, Homo sapiens
gaataaatgaaatct

SEQ ID NO: 1138492 - DNA, 15 bp, Homo sapiens
ggaataaatgaaatc

SEQ ID NO: 1138493 - DNA, 15 bp, Homo sapiens
gggaataaatgaaat

SEQ ID NO: 1138494 - DNA, 15 bp, Homo sapiens
tgggaataaatgaaa

SEQ ID NO: 1138495 - DNA, 15 bp, Homo sapiens
atgggaataaatgaa

SEQ ID NO: 1138496 - DNA, 15 bp, Homo sapiens
catgggaataaatga

SEQ ID NO: 1138497 - DNA, 15 bp, Homo sapiens
ccatgggaataaatg

SEQ ID NO: 1138498 - DNA, 15 bp, Homo sapiens
tccatgggaataaat

SEQ ID NO: 1138499 - DNA, 15 bp, Homo sapiens
ttccatgggaataaa

SEQ ID NO: 1138500 - DNA, 15 bp, Homo sapiens
attccatgggaataa

SEQ ID NO: 1138501 - DNA, 15 bp, Homo sapiens
aattccatgggaata

SEQ ID NO: 1138502 - DNA, 15 bp, Homo sapiens
gaattccatgggaat

SEQ ID NO: 1138503 - DNA, 15 bp, Homo sapiens
agaattccatgggaa

SEQ ID NO: 1138504 - DNA, 15 bp, Homo sapiens
tagaattccatggga

SEQ ID NO: 1138505 - DNA, 15 bp, Homo sapiens
ttagaattccatggg

SEQ ID NO: 1138506 - DNA, 15 bp, Homo sapiens
tttagaattccatgg

SEQ ID NO: 1138507 - DNA, 15 bp, Homo sapiens
ctttagaattccatg

SEQ ID NO: 1138508 - DNA, 15 bp, Homo sapiens
cctttagaattccat

SEQ ID NO: 1138509 - DNA, 15 bp, Homo sapiens
gcctttagaattcca

SEQ ID NO: 1138510 - DNA, 15 bp, Homo sapiens
agcctttagaattcc

SEQ ID NO: 1138511 - DNA, 15 bp, Homo sapiens
aagcctttagaattc

SEQ ID NO: 1138512 - DNA, 15 bp, Homo sapiens
aaagcctttagaatt

SEQ ID NO: 1138513 - DNA, 15 bp, Homo sapiens
aaaagcctttagaat

SEQ ID NO: 1138514 - DNA, 15 bp, Homo sapiens
gaaaagcctttagaa

SEQ ID NO: 1138515 - DNA, 15 bp, Homo sapiens
tgaaaagcctttaga

SEQ ID NO: 1138516 - DNA, 15 bp, Homo sapiens
atgaaaagcctttag

SEQ ID NO: 1138517 - DNA, 15 bp, Homo sapiens
tatgaaaagccttta

SEQ ID NO: 1138518 - DNA, 15 bp, Homo sapiens
gtatgaaaagccttt

SEQ ID NO: 1138519 - DNA, 15 bp, Homo sapiens
agtatgaaaagcctt

SEQ ID NO: 1138520 - DNA, 15 bp, Homo sapiens
aagtatgaaaagcct

SEQ ID NO: 1138521 - DNA, 15 bp, Homo sapiens
caagtatgaaaagcc

SEQ ID NO: 1138522 - DNA, 15 bp, Homo sapiens
acaagtatgaaaagc

SEQ ID NO: 1138523 - DNA, 15 bp, Homo sapiens
cacaagtatgaaaag

SEQ ID NO: 1138524 - DNA, 15 bp, Homo sapiens
tcacaagtatgaaaa

SEQ ID NO: 1138525 - DNA, 15 bp, Homo sapiens
ttcacaagtatgaaa

SEQ ID NO: 1138526 - DNA, 15 bp, Homo sapiens
cttcacaagtatgaa

SEQ ID NO: 1138527 - DNA, 15 bp, Homo sapiens
ccttcacaagtatga

SEQ ID NO: 1138528 - DNA, 15 bp, Homo sapiens
tccttcacaagtatg

SEQ ID NO: 1138529 - DNA, 15 bp, Homo sapiens
ttccttcacaagtat

SEQ ID NO: 1138530 - DNA, 15 bp, Homo sapiens
attccttcacaagta

SEQ ID NO: 1138531 - DNA, 15 bp, Homo sapiens
tattccttcacaagt

SEQ ID NO: 1138532 - DNA, 15 bp, Homo sapiens
ttattccttcacaag

SEQ ID NO: 1138533 - DNA, 15 bp, Homo sapiens
attattccttcacaa

SEQ ID NO: 1138534 - DNA, 15 bp, Homo sapiens
tattattccttcaca

SEQ ID NO: 1138535 - DNA, 15 bp, Homo sapiens
ctattattccttcac

SEQ ID NO: 1138536 - DNA, 15 bp, Homo sapiens
actattattccttca

SEQ ID NO: 1138537 - DNA, 15 bp, Homo sapiens
aactattattccttc

SEQ ID NO: 1138538 - DNA, 15 bp, Homo sapiens
aaactattattcctt

SEQ ID NO: 1138539 - DNA, 15 bp, Homo sapiens
taaactattattcct

SEQ ID NO: 1138540 - DNA, 15 bp, Homo sapiens
ctaaactattattcc

SEQ ID NO: 1138541 - DNA, 15 bp, Homo sapiens
tctaaactattattc

SEQ ID NO: 1138542 - DNA, 15 bp, Homo sapiens
ttctaaactattatt

SEQ ID NO: 1138543 - DNA, 15 bp, Homo sapiens
tttctaaactattat

SEQ ID NO: 1138544 - DNA, 15 bp, Homo sapiens
atttctaaactatta

SEQ ID NO: 1138545 - DNA, 15 bp, Homo sapiens
tatttctaaactatt

SEQ ID NO: 1138546 - DNA, 15 bp, Homo sapiens
ttatttctaaactat

SEQ ID NO: 1138547 - DNA, 15 bp, Homo sapiens
tttatttctaaacta

SEQ ID NO: 1138548 - DNA, 15 bp, Homo sapiens
gtttatttctaaact

SEQ ID NO: 1138549 - DNA, 15 bp, Homo sapiens
agtttatttctaaac

SEQ ID NO: 1138550 - DNA, 15 bp, Homo sapiens
cagtttatttctaaa

SEQ ID NO: 1138551 - DNA, 15 bp, Homo sapiens
tcagtttatttctaa

SEQ ID NO: 1138552 - DNA, 15 bp, Homo sapiens
ttcagtttatttcta

SEQ ID NO: 1138553 - DNA, 15 bp, Homo sapiens
gttcagtttatttct

SEQ ID NO: 1138554 - DNA, 15 bp, Homo sapiens
agttcagtttatttc

SEQ ID NO: 1138555 - DNA, 15 bp, Homo sapiens
aagttcagtttattt

SEQ ID NO: 1138556 - DNA, 15 bp, Homo sapiens
aaagttcagtttatt

SEQ ID NO: 1138557 - DNA, 15 bp, Homo sapiens
taaagttcagtttat

SEQ ID NO: 1138558 - DNA, 15 bp, Homo sapiens
ttaaagttcagttta

SEQ ID NO: 1138559 - DNA, 15 bp, Homo sapiens
tttaaagttcagttt

SEQ ID NO: 1138560 - DNA, 15 bp, Homo sapiens
ttttaaagttcagtt

SEQ ID NO: 1138561 - DNA, 15 bp, Homo sapiens
cttttaaagttcagt

SEQ ID NO: 1138562 - DNA, 15 bp, Homo sapiens
tcttttaaagttcag

SEQ ID NO: 1138563 - DNA, 15 bp, Homo sapiens
atcttttaaagttca

SEQ ID NO: 1138564 - DNA, 15 bp, Homo sapiens
tatcttttaaagttc

SEQ ID NO: 1138565 - DNA, 15 bp, Homo sapiens
gtatcttttaaagtt

SEQ ID NO: 1138566 - DNA, 15 bp, Homo sapiens
ggtatcttttaaagt

SEQ ID NO: 1138567 - DNA, 15 bp, Homo sapiens
tggtatcttttaaag

SEQ ID NO: 1138568 - DNA, 15 bp, Homo sapiens
atggtatcttttaaa

SEQ ID NO: 1138569 - DNA, 15 bp, Homo sapiens
aatggtatcttttaa

SEQ ID NO: 1138570 - DNA, 15 bp, Homo sapiens
aaatggtatctttta

SEQ ID NO: 1138571 - DNA, 15 bp, Homo sapiens
aaaatggtatctttt

SEQ ID NO: 1138572 - DNA, 15 bp, Homo sapiens
caaaatggtatcttt

SEQ ID NO: 1138573 - DNA, 15 bp, Homo sapiens
tcaaaatggtatctt

SEQ ID NO: 1138574 - DNA, 15 bp, Homo sapiens
ttcaaaatggtatct

SEQ ID NO: 1138575 - DNA, 15 bp, Homo sapiens
tttcaaaatggtatc

SEQ ID NO: 1138576 - DNA, 15 bp, Homo sapiens
ttttcaaaatggtat

SEQ ID NO: 1138577 - DNA, 15 bp, Homo sapiens
tttttcaaaatggta

SEQ ID NO: 1138578 - DNA, 15 bp, Homo sapiens
atttttcaaaatggt

SEQ ID NO: 1138579 - DNA, 15 bp, Homo sapiens
tatttttcaaaatgg

SEQ ID NO: 1138580 - DNA, 15 bp, Homo sapiens
ttatttttcaaaatg

SEQ ID NO: 1138581 - DNA, 15 bp, Homo sapiens
attatttttcaaaat

SEQ ID NO: 1138582 - DNA, 15 bp, Homo sapiens
tattatttttcaaaa

SEQ ID NO: 1138583 - DNA, 15 bp, Homo sapiens
atattatttttcaaa

SEQ ID NO: 1138584 - DNA, 15 bp, Homo sapiens
tatattatttttcaa

SEQ ID NO: 1138585 - DNA, 15 bp, Homo sapiens
gtatattatttttca

SEQ ID NO: 1138586 - DNA, 15 bp, Homo sapiens
tgtatattatttttc

SEQ ID NO: 1138587 - DNA, 15 bp, Homo sapiens
ctgtatattattttt

SEQ ID NO: 1138588 - DNA, 15 bp, Homo sapiens
gctgtatattatttt

SEQ ID NO: 1138589 - DNA, 15 bp, Homo sapiens
ggctgtatattattt

SEQ ID NO: 1138590 - DNA, 15 bp, Homo sapiens
tggctgtatattatt

SEQ ID NO: 1138591 - DNA, 15 bp, Homo sapiens
atggctgtatattat

SEQ ID NO: 1138592 - DNA, 15 bp, Homo sapiens
gatggctgtatatta

SEQ ID NO: 1138593 - DNA, 15 bp, Homo sapiens
tgatggctgtatatt

SEQ ID NO: 1138594 - DNA, 15 bp, Homo sapiens
ttgatggctgtatat

SEQ ID NO: 1138595 - DNA, 15 bp, Homo sapiens
tttgatggctgtata

SEQ ID NO: 1138596 - DNA, 15 bp, Homo sapiens
ttttgatggctgtat

SEQ ID NO: 1138597 - DNA, 15 bp, Homo sapiens
tttttgatggctgta

SEQ ID NO: 1138598 - DNA, 15 bp, Homo sapiens
atttttgatggctgt

SEQ ID NO: 1138599 - DNA, 15 bp, Homo sapiens
aatttttgatggctg

SEQ ID NO: 1138600 - DNA, 15 bp, Homo sapiens
taatttttgatggct

SEQ ID NO: 1138601 - DNA, 15 bp, Homo sapiens
ataatttttgatggc

SEQ ID NO: 1138602 - DNA, 15 bp, Homo sapiens
tataatttttgatgg

SEQ ID NO: 1138603 - DNA, 15 bp, Homo sapiens
atataatttttgatg

SEQ ID NO: 1138604 - DNA, 15 bp, Homo sapiens
aatataatttttgat

SEQ ID NO: 1138605 - DNA, 15 bp, Homo sapiens
aaatataatttttga

SEQ ID NO: 1138606 - DNA, 15 bp, Homo sapiens
taaatataatttttg

SEQ ID NO: 1138607 - DNA, 15 bp, Homo sapiens
ataaatataattttt

SEQ ID NO: 1138608 - DNA, 15 bp, Homo sapiens
cataaatataatttt

SEQ ID NO: 1138609 - DNA, 15 bp, Homo sapiens
ccataaatataattt

SEQ ID NO: 1138610 - DNA, 15 bp, Homo sapiens
cccataaatataatt

SEQ ID NO: 1138611 - DNA, 15 bp, Homo sapiens
tcccataaatataat

SEQ ID NO: 1138612 - DNA, 15 bp, Homo sapiens
ttcccataaatataa

SEQ ID NO: 1138613 - DNA, 15 bp, Homo sapiens
gttcccataaatata

SEQ ID NO: 1138614 - DNA, 15 bp, Homo sapiens
agttcccataaatat

SEQ ID NO: 1138615 - DNA, 15 bp, Homo sapiens
tagttcccataaata

SEQ ID NO: 1138616 - DNA, 15 bp, Homo sapiens
atagttcccataaat

SEQ ID NO: 1138617 - DNA, 15 bp, Homo sapiens
catagttcccataaa

SEQ ID NO: 1138618 - DNA, 15 bp, Homo sapiens
gcatagttcccataa

SEQ ID NO: 1138619 - DNA, 15 bp, Homo sapiens
tgcatagttcccata

SEQ ID NO: 1138620 - DNA, 15 bp, Homo sapiens
ttgcatagttcccat

SEQ ID NO: 1138621 - DNA, 15 bp, Homo sapiens
attgcatagttccca

SEQ ID NO: 1138622 - DNA, 15 bp, Homo sapiens
tattgcatagttccc

SEQ ID NO: 1138623 - DNA, 15 bp, Homo sapiens
ttattgcatagttcc

SEQ ID NO: 1138624 - DNA, 15 bp, Homo sapiens
attattgcatagttc

SEQ ID NO: 1138625 - DNA, 15 bp, Homo sapiens
tattattgcatagtt

SEQ ID NO: 1138626 - DNA, 15 bp, Homo sapiens
atattattgcatagt

SEQ ID NO: 1138627 - DNA, 15 bp, Homo sapiens
aatattattgcatag

SEQ ID NO: 1138628 - DNA, 15 bp, Homo sapiens
taatattattgcata

SEQ ID NO: 1138629 - DNA, 15 bp, Homo sapiens
ttaatattattgcat

SEQ ID NO: 1138630 - DNA, 15 bp, Homo sapiens
tttaatattattgca

SEQ ID NO: 1138631 - DNA, 15 bp, Homo sapiens
gtttaatattattgc

SEQ ID NO: 1138632 - DNA, 15 bp, Homo sapiens
agtttaatattattg

SEQ ID NO: 1138633 - DNA, 15 bp, Homo sapiens
gagtttaatattatt

SEQ ID NO: 1138634 - DNA, 15 bp, Homo sapiens
agagtttaatattat

SEQ ID NO: 1138635 - DNA, 15 bp, Homo sapiens
tagagtttaatatta

SEQ ID NO: 1138636 - DNA, 15 bp, Homo sapiens
atagagtttaatatt

SEQ ID NO: 1138637 - DNA, 15 bp, Homo sapiens
gatagagtttaatat

SEQ ID NO: 1138638 - DNA, 15 bp, Homo sapiens
tgatagagtttaata

SEQ ID NO: 1138639 - DNA, 15 bp, Homo sapiens
atgatagagtttaat

SEQ ID NO: 1138640 - DNA, 15 bp, Homo sapiens
gatgatagagtttaa

SEQ ID NO: 1138641 - DNA, 15 bp, Homo sapiens
agatgatagagttta

SEQ ID NO: 1138642 - DNA, 15 bp, Homo sapiens
cagatgatagagttt

SEQ ID NO: 1138643 - DNA, 15 bp, Homo sapiens
acagatgatagagtt

SEQ ID NO: 1138644 - DNA, 15 bp, Homo sapiens
aacagatgatagagt

SEQ ID NO: 1138645 - DNA, 15 bp, Homo sapiens
caacagatgatagag

SEQ ID NO: 1138646 - DNA, 15 bp, Homo sapiens
tcaacagatgataga

SEQ ID NO: 1138647 - DNA, 15 bp, Homo sapiens
gtcaacagatgatag

SEQ ID NO: 1138648 - DNA, 15 bp, Homo sapiens
agtcaacagatgata

SEQ ID NO: 1138649 - DNA, 15 bp, Homo sapiens
cagtcaacagatgat

SEQ ID NO: 1138650 - DNA, 15 bp, Homo sapiens
gcagtcaacagatga

SEQ ID NO: 1138651 - DNA, 15 bp, Homo sapiens
ggcagtcaacagatg

SEQ ID NO: 1138652 - DNA, 15 bp, Homo sapiens
aggcagtcaacagat

SEQ ID NO: 1138653 - DNA, 15 bp, Homo sapiens
gaggcagtcaacaga

SEQ ID NO: 1138654 - DNA, 15 bp, Homo sapiens
ggaggcagtcaacag

SEQ ID NO: 1138655 - DNA, 15 bp, Homo sapiens
aggaggcagtcaaca

SEQ ID NO: 1138656 - DNA, 15 bp, Homo sapiens
taggaggcagtcaac

SEQ ID NO: 1138657 - DNA, 15 bp, Homo sapiens
ataggaggcagtcaa

SEQ ID NO: 1138658 - DNA, 15 bp, Homo sapiens
tataggaggcagtca

SEQ ID NO: 1138659 - DNA, 15 bp, Homo sapiens
atataggaggcagtc

SEQ ID NO: 1138660 - DNA, 15 bp, Homo sapiens
aatataggaggcagt

SEQ ID NO: 1138661 - DNA, 15 bp, Homo sapiens
gaatataggaggcag

SEQ ID NO: 1138662 - DNA, 15 bp, Homo sapiens
ggaatataggaggca

SEQ ID NO: 1138663 - DNA, 15 bp, Homo sapiens
tggaatataggaggc

SEQ ID NO: 1138664 - DNA, 15 bp, Homo sapiens
ctggaatataggagg

SEQ ID NO: 1138665 - DNA, 15 bp, Homo sapiens
tctggaatataggag

SEQ ID NO: 1138666 - DNA, 15 bp, Homo sapiens
ttctggaatatagga

SEQ ID NO: 1138667 - DNA, 15 bp, Homo sapiens
tttctggaatatagg

SEQ ID NO: 1138668 - DNA, 15 bp, Homo sapiens
gtttctggaatatag

SEQ ID NO: 1138669 - DNA, 15 bp, Homo sapiens
agtttctggaatata

SEQ ID NO: 1138670 - DNA, 15 bp, Homo sapiens
aagtttctggaatat

SEQ ID NO: 1138671 - DNA, 15 bp, Homo sapiens
aaagtttctggaata

SEQ ID NO: 1138672 - DNA, 15 bp, Homo sapiens
taaagtttctggaat

SEQ ID NO: 1138673 - DNA, 15 bp, Homo sapiens
gtaaagtttctggaa

SEQ ID NO: 1138674 - DNA, 15 bp, Homo sapiens
tgtaaagtttctgga

SEQ ID NO: 1138675 - DNA, 15 bp, Homo sapiens
atgtaaagtttctgg

SEQ ID NO: 1138676 - DNA, 15 bp, Homo sapiens
tatgtaaagtttctg

SEQ ID NO: 1138677 - DNA, 15 bp, Homo sapiens
gtatgtaaagtttct

SEQ ID NO: 1138678 - DNA, 15 bp, Homo sapiens
tgtatgtaaagtttc

SEQ ID NO: 1138679 - DNA, 15 bp, Homo sapiens
gtgtatgtaaagttt

SEQ ID NO: 1138680 - DNA, 15 bp, Homo sapiens
ggtgtatgtaaagtt

SEQ ID NO: 1138681 - DNA, 15 bp, Homo sapiens
tggtgtatgtaaagt

SEQ ID NO: 1138682 - DNA, 15 bp, Homo sapiens
ttggtgtatgtaaag

SEQ ID NO: 1138683 - DNA, 15 bp, Homo sapiens
attggtgtatgtaaa

SEQ ID NO: 1138684 - DNA, 15 bp, Homo sapiens
aattggtgtatgtaa

SEQ ID NO: 1138685 - DNA, 15 bp, Homo sapiens
gaattggtgtatgta

SEQ ID NO: 1138686 - DNA, 15 bp, Homo sapiens
agaattggtgtatgt

SEQ ID NO: 1138687 - DNA, 15 bp, Homo sapiens
tagaattggtgtatg

SEQ ID NO: 1138688 - DNA, 15 bp, Homo sapiens
ttagaattggtgtat

SEQ ID NO: 1138689 - DNA, 15 bp, Homo sapiens
attagaattggtgta

SEQ ID NO: 1138690 - DNA, 15 bp, Homo sapiens
gattagaattggtgt

SEQ ID NO: 1138691 - DNA, 15 bp, Homo sapiens
ggattagaattggtg

SEQ ID NO: 1138692 - DNA, 15 bp, Homo sapiens
aggattagaattggt

SEQ ID NO: 1138693 - DNA, 15 bp, Homo sapiens
aaggattagaattgg

SEQ ID NO: 1138694 - DNA, 15 bp, Homo sapiens
taaggattagaattg

SEQ ID NO: 1138695 - DNA, 15 bp, Homo sapiens
gtaaggattagaatt

SEQ ID NO: 1138696 - DNA, 15 bp, Homo sapiens
tgtaaggattagaat

SEQ ID NO: 1138697 - DNA, 15 bp, Homo sapiens
ttgtaaggattagaa

SEQ ID NO: 1138698 - DNA, 15 bp, Homo sapiens
cttgtaaggattaga

SEQ ID NO: 1138699 - DNA, 15 bp, Homo sapiens
tcttgtaaggattag

SEQ ID NO: 1138700 - DNA, 15 bp, Homo sapiens
ttcttgtaaggatta

SEQ ID NO: 1138701 - DNA, 15 bp, Homo sapiens
gttcttgtaaggatt

SEQ ID NO: 1138702 - DNA, 15 bp, Homo sapiens
cgttcttgtaaggat

SEQ ID NO: 1138703 - DNA, 15 bp, Homo sapiens
gcgttcttgtaagga

SEQ ID NO: 1138704 - DNA, 15 bp, Homo sapiens
agcgttcttgtaagg

SEQ ID NO: 1138705 - DNA, 15 bp, Homo sapiens
cagcgttcttgtaag

SEQ ID NO: 1138706 - DNA, 15 bp, Homo sapiens
acagcgttcttgtaa

SEQ ID NO: 1138707 - DNA, 15 bp, Homo sapiens
cacagcgttcttgta

SEQ ID NO: 1138708 - DNA, 15 bp, Homo sapiens
acacagcgttcttgt

SEQ ID NO: 1138709 - DNA, 15 bp, Homo sapiens
tacacagcgttcttg

SEQ ID NO: 1138710 - DNA, 15 bp, Homo sapiens
ctacacagcgttctt

SEQ ID NO: 1138711 - DNA, 15 bp, Homo sapiens
cctacacagcgttct

SEQ ID NO: 1138712 - DNA, 15 bp, Homo sapiens
gcctacacagcgttc

SEQ ID NO: 1138713 - DNA, 15 bp, Homo sapiens
agcctacacagcgtt

SEQ ID NO: 1138714 - DNA, 15 bp, Homo sapiens
aagcctacacagcgt

SEQ ID NO: 1138715 - DNA, 15 bp, Homo sapiens
aaagcctacacagcg

SEQ ID NO: 1138716 - DNA, 15 bp, Homo sapiens
taaagcctacacagc

SEQ ID NO: 1138717 - DNA, 15 bp, Homo sapiens
ctaaagcctacacag

SEQ ID NO: 1138718 - DNA, 15 bp, Homo sapiens
gctaaagcctacaca

SEQ ID NO: 1138719 - DNA, 15 bp, Homo sapiens
tgctaaagcctacac

SEQ ID NO: 1138720 - DNA, 15 bp, Homo sapiens
atgctaaagcctaca

SEQ ID NO: 1138721 - DNA, 15 bp, Homo sapiens
aatgctaaagcctac

SEQ ID NO: 1138722 - DNA, 15 bp, Homo sapiens
taatgctaaagccta

SEQ ID NO: 1138723 - DNA, 15 bp, Homo sapiens
ctaatgctaaagcct

SEQ ID NO: 1138724 - DNA, 15 bp, Homo sapiens
tctaatgctaaagcc

SEQ ID NO: 1138725 - DNA, 15 bp, Homo sapiens
atctaatgctaaagc

SEQ ID NO: 1138726 - DNA, 15 bp, Homo sapiens
catctaatgctaaag

SEQ ID NO: 1138727 - DNA, 15 bp, Homo sapiens
ccatctaatgctaaa

SEQ ID NO: 1138728 - DNA, 15 bp, Homo sapiens
tccatctaatgctaa

SEQ ID NO: 1138729 - DNA, 15 bp, Homo sapiens
gtccatctaatgcta

SEQ ID NO: 1138730 - DNA, 15 bp, Homo sapiens
ggtccatctaatgct

SEQ ID NO: 1138731 - DNA, 15 bp, Homo sapiens
tggtccatctaatgc

SEQ ID NO: 1138732 - DNA, 15 bp, Homo sapiens
ctggtccatctaatg

SEQ ID NO: 1138733 - DNA, 15 bp, Homo sapiens
cctggtccatctaat

SEQ ID NO: 1138734 - DNA, 15 bp, Homo sapiens
acctggtccatctaa

SEQ ID NO: 1138735 - DNA, 15 bp, Homo sapiens
aacctggtccatcta

SEQ ID NO: 1138736 - DNA, 15 bp, Homo sapiens
aaacctggtccatct

SEQ ID NO: 1138737 - DNA, 15 bp, Homo sapiens
gaaacctggtccatc

SEQ ID NO: 1138738 - DNA, 15 bp, Homo sapiens
tgaaacctggtccat

SEQ ID NO: 1138739 - DNA, 15 bp, Homo sapiens
gtgaaacctggtcca

SEQ ID NO: 1138740 - DNA, 15 bp, Homo sapiens
ggtgaaacctggtcc

SEQ ID NO: 1138741 - DNA, 15 bp, Homo sapiens
tggtgaaacctggtc

SEQ ID NO: 1138742 - DNA, 15 bp, Homo sapiens
ttggtgaaacctggt

SEQ ID NO: 1138743 - DNA, 15 bp, Homo sapiens
gttggtgaaacctgg

SEQ ID NO: 1138744 - DNA, 15 bp, Homo sapiens
agttggtgaaacctg

SEQ ID NO: 1138745 - DNA, 15 bp, Homo sapiens
cagttggtgaaacct

SEQ ID NO: 1138746 - DNA, 15 bp, Homo sapiens
acagttggtgaaacc

SEQ ID NO: 1138747 - DNA, 15 bp, Homo sapiens
tacagttggtgaaac

SEQ ID NO: 1138748 - DNA, 15 bp, Homo sapiens
atacagttggtgaaa

SEQ ID NO: 1138749 - DNA, 15 bp, Homo sapiens
catacagttggtgaa

SEQ ID NO: 1138750 - DNA, 15 bp, Homo sapiens
ccatacagttggtga

SEQ ID NO: 1138751 - DNA, 15 bp, Homo sapiens
accatacagttggtg

SEQ ID NO: 1138752 - DNA, 15 bp, Homo sapiens
gaccatacagttggt

SEQ ID NO: 1138753 - DNA, 15 bp, Homo sapiens
agaccatacagttgg

SEQ ID NO: 1138754 - DNA, 15 bp, Homo sapiens
aagaccatacagttg

SEQ ID NO: 1138755 - DNA, 15 bp, Homo sapiens
caagaccatacagtt

SEQ ID NO: 1138756 - DNA, 15 bp, Homo sapiens
ccaagaccatacagt

SEQ ID NO: 1138757 - DNA, 15 bp, Homo sapiens
tccaagaccatacag

SEQ ID NO: 1138758 - DNA, 15 bp, Homo sapiens
atccaagaccataca

SEQ ID NO: 1138759 - DNA, 15 bp, Homo sapiens
tatccaagaccatac

SEQ ID NO: 1138760 - DNA, 15 bp, Homo sapiens
ttatccaagaccata

SEQ ID NO: 1138761 - DNA, 15 bp, Homo sapiens
cttatccaagaccat

SEQ ID NO: 1138762 - DNA, 15 bp, Homo sapiens
acttatccaagacca

SEQ ID NO: 1138763 - DNA, 15 bp, Homo sapiens
tacttatccaagacc

SEQ ID NO: 1138764 - DNA, 15 bp, Homo sapiens
gtacttatccaagac

SEQ ID NO: 1138765 - DNA, 15 bp, Homo sapiens
ggtacttatccaaga

SEQ ID NO: 1138766 - DNA, 15 bp, Homo sapiens
gggtacttatccaag

SEQ ID NO: 1138767 - DNA, 15 bp, Homo sapiens
tgggtacttatccaa

SEQ ID NO: 1138768 - DNA, 15 bp, Homo sapiens
ttgggtacttatcca

SEQ ID NO: 1138769 - DNA, 15 bp, Homo sapiens
gttgggtacttatcc

SEQ ID NO: 1138770 - DNA, 15 bp, Homo sapiens
ggttgggtacttatc

SEQ ID NO: 1138771 - DNA, 15 bp, Homo sapiens
aggttgggtacttat

SEQ ID NO: 1138772 - DNA, 15 bp, Homo sapiens
gaggttgggtactta

SEQ ID NO: 1138773 - DNA, 15 bp, Homo sapiens
ggaggttgggtactt

SEQ ID NO: 1138774 - DNA, 15 bp, Homo sapiens
aggaggttgggtact

SEQ ID NO: 1138775 - DNA, 15 bp, Homo sapiens
caggaggttgggtac

SEQ ID NO: 1138776 - DNA, 15 bp, Homo sapiens
acaggaggttgggta

SEQ ID NO: 1138777 - DNA, 15 bp, Homo sapiens
gacaggaggttgggt

SEQ ID NO: 1138778 - DNA, 15 bp, Homo sapiens
ggacaggaggttggg

SEQ ID NO: 1138779 - DNA, 15 bp, Homo sapiens
gggacaggaggttgg

SEQ ID NO: 1138780 - DNA, 15 bp, Homo sapiens
agggacaggaggttg

SEQ ID NO: 1138781 - DNA, 15 bp, Homo sapiens
tagggacaggaggtt

SEQ ID NO: 1138782 - DNA, 15 bp, Homo sapiens
ttagggacaggaggt

SEQ ID NO: 1138783 - DNA, 15 bp, Homo sapiens
cttagggacaggagg

SEQ ID NO: 1138784 - DNA, 15 bp, Homo sapiens
acttagggacaggag

SEQ ID NO: 1138785 - DNA, 15 bp, Homo sapiens
aacttagggacagga

SEQ ID NO: 1138786 - DNA, 15 bp, Homo sapiens
aaacttagggacagg

SEQ ID NO: 1138787 - DNA, 15 bp, Homo sapiens
gaaacttagggacag

SEQ ID NO: 1138788 - DNA, 15 bp, Homo sapiens
ggaaacttagggaca

SEQ ID NO: 1138789 - DNA, 15 bp, Homo sapiens
aggaaacttagggac

SEQ ID NO: 1138790 - DNA, 15 bp, Homo sapiens
gaggaaacttaggga

SEQ ID NO: 1138791 - DNA, 15 bp, Homo sapiens
tgaggaaacttaggg

SEQ ID NO: 1138792 - DNA, 15 bp, Homo sapiens
gtgaggaaacttagg

SEQ ID NO: 1138793 - DNA, 15 bp, Homo sapiens
ggtgaggaaacttag

SEQ ID NO: 1138794 - DNA, 15 bp, Homo sapiens
aggtgaggaaactta

SEQ ID NO: 1138795 - DNA, 15 bp, Homo sapiens
caggtgaggaaactt

SEQ ID NO: 1138796 - DNA, 15 bp, Homo sapiens
acaggtgaggaaact

SEQ ID NO: 1138797 - DNA, 15 bp, Homo sapiens
cacaggtgaggaaac

SEQ ID NO: 1138798 - DNA, 15 bp, Homo sapiens
tcacaggtgaggaaa

SEQ ID NO: 1138799 - DNA, 15 bp, Homo sapiens
ttcacaggtgaggaa

SEQ ID NO: 1138800 - DNA, 15 bp, Homo sapiens
tttcacaggtgagga

SEQ ID NO: 1138801 - DNA, 15 bp, Homo sapiens
ttttcacaggtgagg

SEQ ID NO: 1138802 - DNA, 15 bp, Homo sapiens
gttttcacaggtgag

SEQ ID NO: 1138803 - DNA, 15 bp, Homo sapiens
tgttttcacaggtga

SEQ ID NO: 1138804 - DNA, 15 bp, Homo sapiens
gtgttttcacaggtg

SEQ ID NO: 1138805 - DNA, 15 bp, Homo sapiens
cgtgttttcacaggt

SEQ ID NO: 1138806 - DNA, 15 bp, Homo sapiens
ccgtgttttcacagg

SEQ ID NO: 1138807 - DNA, 15 bp, Homo sapiens
accgtgttttcacag

SEQ ID NO: 1138808 - DNA, 15 bp, Homo sapiens
aaccgtgttttcaca

SEQ ID NO: 1138809 - DNA, 15 bp, Homo sapiens
aaaccgtgttttcac

SEQ ID NO: 1138810 - DNA, 15 bp, Homo sapiens
gaaaccgtgttttca

SEQ ID NO: 1138811 - DNA, 15 bp, Homo sapiens
agaaaccgtgttttc

SEQ ID NO: 1138812 - DNA, 15 bp, Homo sapiens
tagaaaccgtgtttt

SEQ ID NO: 1138813 - DNA, 15 bp, Homo sapiens
gtagaaaccgtgttt

SEQ ID NO: 1138814 - DNA, 15 bp, Homo sapiens
ggtagaaaccgtgtt

SEQ ID NO: 1138815 - DNA, 15 bp, Homo sapiens
tggtagaaaccgtgt

SEQ ID NO: 1138816 - DNA, 15 bp, Homo sapiens
ctggtagaaaccgtg

SEQ ID NO: 1138817 - DNA, 15 bp, Homo sapiens
gctggtagaaaccgt

SEQ ID NO: 1138818 - DNA, 15 bp, Homo sapiens
agctggtagaaaccg

SEQ ID NO: 1138819 - DNA, 15 bp, Homo sapiens
aagctggtagaaacc

SEQ ID NO: 1138820 - DNA, 15 bp, Homo sapiens
aaagctggtagaaac

SEQ ID NO: 1138821 - DNA, 15 bp, Homo sapiens
gaaagctggtagaaa

SEQ ID NO: 1138822 - DNA, 15 bp, Homo sapiens
tgaaagctggtagaa

SEQ ID NO: 1138823 - DNA, 15 bp, Homo sapiens
ttgaaagctggtaga

SEQ ID NO: 1138824 - DNA, 15 bp, Homo sapiens
tttgaaagctggtag

SEQ ID NO: 1138825 - DNA, 15 bp, Homo sapiens
atttgaaagctggta

SEQ ID NO: 1138826 - DNA, 15 bp, Homo sapiens
tatttgaaagctggt

SEQ ID NO: 1138827 - DNA, 15 bp, Homo sapiens
ttatttgaaagctgg

SEQ ID NO: 1138828 - DNA, 15 bp, Homo sapiens
cttatttgaaagctg

SEQ ID NO: 1138829 - DNA, 15 bp, Homo sapiens
tcttatttgaaagct

SEQ ID NO: 1138830 - DNA, 15 bp, Homo sapiens
atcttatttgaaagc

SEQ ID NO: 1138831 - DNA, 15 bp, Homo sapiens
catcttatttgaaag

SEQ ID NO: 1138832 - DNA, 15 bp, Homo sapiens
tcatcttatttgaaa

SEQ ID NO: 1138833 - DNA, 15 bp, Homo sapiens
atcatcttatttgaa

SEQ ID NO: 1138834 - DNA, 15 bp, Homo sapiens
gatcatcttatttga

SEQ ID NO: 1138835 - DNA, 15 bp, Homo sapiens
tgatcatcttatttg

SEQ ID NO: 1138836 - DNA, 15 bp, Homo sapiens
ttgatcatcttattt

SEQ ID NO: 1138837 - DNA, 15 bp, Homo sapiens
attgatcatcttatt

SEQ ID NO: 1138838 - DNA, 15 bp, Homo sapiens
tattgatcatcttat

SEQ ID NO: 1138839 - DNA, 15 bp, Homo sapiens
atattgatcatctta

SEQ ID NO: 1138840 - DNA, 15 bp, Homo sapiens
tatattgatcatctt

SEQ ID NO: 1138841 - DNA, 15 bp, Homo sapiens
ttatattgatcatct

SEQ ID NO: 1138842 - DNA, 15 bp, Homo sapiens
cttatattgatcatc

SEQ ID NO: 1138843 - DNA, 15 bp, Homo sapiens
ccttatattgatcat

SEQ ID NO: 1138844 - DNA, 15 bp, Homo sapiens
gccttatattgatca

SEQ ID NO: 1138845 - DNA, 15 bp, Homo sapiens
tgccttatattgatc

SEQ ID NO: 1138846 - DNA, 15 bp, Homo sapiens
gtgccttatattgat

SEQ ID NO: 1138847 - DNA, 15 bp, Homo sapiens
agtgccttatattga

SEQ ID NO: 1138848 - DNA, 15 bp, Homo sapiens
aagtgccttatattg

SEQ ID NO: 1138849 - DNA, 15 bp, Homo sapiens
caagtgccttatatt

SEQ ID NO: 1138850 - DNA, 15 bp, Homo sapiens
ccaagtgccttatat

SEQ ID NO: 1138851 - DNA, 15 bp, Homo sapiens
tccaagtgccttata

SEQ ID NO: 1138852 - DNA, 15 bp, Homo sapiens
ttccaagtgccttat

SEQ ID NO: 1138853 - DNA, 15 bp, Homo sapiens
gttccaagtgcctta

SEQ ID NO: 1138854 - DNA, 15 bp, Homo sapiens
tgttccaagtgcctt

SEQ ID NO: 1138855 - DNA, 15 bp, Homo sapiens
ctgttccaagtgcct

SEQ ID NO: 1138856 - DNA, 15 bp, Homo sapiens
tctgttccaagtgcc

SEQ ID NO: 1138857 - DNA, 15 bp, Homo sapiens
ttctgttccaagtgc

SEQ ID NO: 1138858 - DNA, 15 bp, Homo sapiens
gttctgttccaagtg

SEQ ID NO: 1138859 - DNA, 15 bp, Homo sapiens
ggttctgttccaagt

SEQ ID NO: 1138860 - DNA, 15 bp, Homo sapiens
aggttctgttccaag

SEQ ID NO: 1138861 - DNA, 15 bp, Homo sapiens
caggttctgttccaa

SEQ ID NO: 1138862 - DNA, 15 bp, Homo sapiens
tcaggttctgttcca

SEQ ID NO: 1138863 - DNA, 15 bp, Homo sapiens
gtcaggttctgttcc

SEQ ID NO: 1138864 - DNA, 15 bp, Homo sapiens
tgtcaggttctgttc

SEQ ID NO: 1138865 - DNA, 15 bp, Homo sapiens
gtgtcaggttctgtt

SEQ ID NO: 1138866 - DNA, 15 bp, Homo sapiens
tgtgtcaggttctgt

SEQ ID NO: 1138867 - DNA, 15 bp, Homo sapiens
atgtgtcaggttctg

SEQ ID NO: 1138868 - DNA, 15 bp, Homo sapiens
gatgtgtcaggttct

SEQ ID NO: 1138869 - DNA, 15 bp, Homo sapiens
tgatgtgtcaggttc

SEQ ID NO: 1138870 - DNA, 15 bp, Homo sapiens
atgatgtgtcaggtt

SEQ ID NO: 1138871 - DNA, 15 bp, Homo sapiens
tatgatgtgtcaggt

SEQ ID NO: 1138872 - DNA, 15 bp, Homo sapiens
ttatgatgtgtcagg

SEQ ID NO: 1138873 - DNA, 15 bp, Homo sapiens
cttatgatgtgtcag

SEQ ID NO: 1138874 - DNA, 15 bp, Homo sapiens
gcttatgatgtgtca

SEQ ID NO: 1138875 - DNA, 15 bp, Homo sapiens
tgcttatgatgtgtc

SEQ ID NO: 1138876 - DNA, 15 bp, Homo sapiens
gtgcttatgatgtgt

SEQ ID NO: 1138877 - DNA, 15 bp, Homo sapiens
agtgcttatgatgtg

SEQ ID NO: 1138878 - DNA, 15 bp, Homo sapiens
gagtgcttatgatgt

SEQ ID NO: 1138879 - DNA, 15 bp, Homo sapiens
agagtgcttatgatg

SEQ ID NO: 1138880 - DNA, 15 bp, Homo sapiens
tagagtgcttatgat

SEQ ID NO: 1138881 - DNA, 15 bp, Homo sapiens
atagagtgcttatga

SEQ ID NO: 1138882 - DNA, 15 bp, Homo sapiens
tatagagtgcttatg

SEQ ID NO: 1138883 - DNA, 15 bp, Homo sapiens
ttatagagtgcttat

SEQ ID NO: 1138884 - DNA, 15 bp, Homo sapiens
tttatagagtgctta

SEQ ID NO: 1138885 - DNA, 15 bp, Homo sapiens
atttatagagtgctt

SEQ ID NO: 1138886 - DNA, 15 bp, Homo sapiens
catttatagagtgct

SEQ ID NO: 1138887 - DNA, 15 bp, Homo sapiens
acatttatagagtgc

SEQ ID NO: 1138888 - DNA, 15 bp, Homo sapiens
gacatttatagagtg

SEQ ID NO: 1138889 - DNA, 15 bp, Homo sapiens
agacatttatagagt

SEQ ID NO: 1138890 - DNA, 15 bp, Homo sapiens
tagacatttatagag

SEQ ID NO: 1138891 - DNA, 15 bp, Homo sapiens
atagacatttataga

SEQ ID NO: 1138892 - DNA, 15 bp, Homo sapiens
aatagacatttatag

SEQ ID NO: 1138893 - DNA, 15 bp, Homo sapiens
taatagacatttata

SEQ ID NO: 1138894 - DNA, 15 bp, Homo sapiens
ataatagacatttat

SEQ ID NO: 1138895 - DNA, 15 bp, Homo sapiens
gataatagacattta

SEQ ID NO: 1138896 - DNA, 15 bp, Homo sapiens
tgataatagacattt

SEQ ID NO: 1138897 - DNA, 15 bp, Homo sapiens
gtgataatagacatt

SEQ ID NO: 1138898 - DNA, 15 bp, Homo sapiens
ggtgataatagacat

SEQ ID NO: 1138899 - DNA, 15 bp, Homo sapiens
tggtgataatagaca

SEQ ID NO: 1138900 - DNA, 15 bp, Homo sapiens
ttggtgataatagac

SEQ ID NO: 1138901 - DNA, 15 bp, Homo sapiens
tttggtgataataga

SEQ ID NO: 1138902 - DNA, 15 bp, Homo sapiens
atttggtgataatag

SEQ ID NO: 1138903 - DNA, 15 bp, Homo sapiens
tatttggtgataata

SEQ ID NO: 1138904 - DNA, 15 bp, Homo sapiens
ttatttggtgataat

SEQ ID NO: 1138905 - DNA, 15 bp, Homo sapiens
attatttggtgataa

SEQ ID NO: 1138906 - DNA, 15 bp, Homo sapiens
aattatttggtgata

SEQ ID NO: 1138907 - DNA, 15 bp, Homo sapiens
gaattatttggtgat

SEQ ID NO: 1138908 - DNA, 15 bp, Homo sapiens
ggaattatttggtga

SEQ ID NO: 1138909 - DNA, 15 bp, Homo sapiens
tggaattatttggtg

SEQ ID NO: 1138910 - DNA, 15 bp, Homo sapiens
ctggaattatttggt

SEQ ID NO: 1138911 - DNA, 15 bp, Homo sapiens
cctggaattatttgg

SEQ ID NO: 1138912 - DNA, 15 bp, Homo sapiens
acctggaattatttg

SEQ ID NO: 1138913 - DNA, 15 bp, Homo sapiens
cacctggaattattt

SEQ ID NO: 1138914 - DNA, 15 bp, Homo sapiens
gcacctggaattatt

SEQ ID NO: 1138915 - DNA, 15 bp, Homo sapiens
ggcacctggaattat

SEQ ID NO: 1138916 - DNA, 15 bp, Homo sapiens
aggcacctggaatta

SEQ ID NO: 1138917 - DNA, 15 bp, Homo sapiens
aaggcacctggaatt

SEQ ID NO: 1138918 - DNA, 15 bp, Homo sapiens
caaggcacctggaat

SEQ ID NO: 1138919 - DNA, 15 bp, Homo sapiens
tcaaggcacctggaa

SEQ ID NO: 1138920 - DNA, 15 bp, Homo sapiens
ttcaaggcacctgga

SEQ ID NO: 1138921 - DNA, 15 bp, Homo sapiens
tttcaaggcacctgg

SEQ ID NO: 1138922 - DNA, 15 bp, Homo sapiens
ttttcaaggcacctg

SEQ ID NO: 1138923 - DNA, 15 bp, Homo sapiens
attttcaaggcacct

SEQ ID NO: 1138924 - DNA, 15 bp, Homo sapiens
aattttcaaggcacc

SEQ ID NO: 1138925 - DNA, 15 bp, Homo sapiens
aaattttcaaggcac

SEQ ID NO: 1138926 - DNA, 15 bp, Homo sapiens
taaattttcaaggca

SEQ ID NO: 1138927 - DNA, 15 bp, Homo sapiens
ttaaattttcaaggc

SEQ ID NO: 1138928 - DNA, 15 bp, Homo sapiens
tttaaattttcaagg

SEQ ID NO: 1138929 - DNA, 15 bp, Homo sapiens
atttaaattttcaag

SEQ ID NO: 1138930 - DNA, 15 bp, Homo sapiens
catttaaattttcaa

SEQ ID NO: 1138931 - DNA, 15 bp, Homo sapiens
tcatttaaattttca

SEQ ID NO: 1138932 - DNA, 15 bp, Homo sapiens
ttcatttaaattttc

SEQ ID NO: 1138933 - DNA, 15 bp, Homo sapiens
tttcatttaaatttt

SEQ ID NO: 1138934 - DNA, 15 bp, Homo sapiens
ttttcatttaaattt

SEQ ID NO: 1138935 - DNA, 15 bp, Homo sapiens
tttttcatttaaatt

SEQ ID NO: 1138936 - DNA, 15 bp, Homo sapiens
gtttttcatttaaat

SEQ ID NO: 1138937 - DNA, 15 bp, Homo sapiens
tgtttttcatttaaa

SEQ ID NO: 1138938 - DNA, 15 bp, Homo sapiens
ttgtttttcatttaa

SEQ ID NO: 1138939 - DNA, 15 bp, Homo sapiens
tttgtttttcattta

SEQ ID NO: 1138940 - DNA, 15 bp, Homo sapiens
ttttgtttttcattt

SEQ ID NO: 1138941 - DNA, 15 bp, Homo sapiens
attttgtttttcatt

SEQ ID NO: 1138942 - DNA, 15 bp, Homo sapiens
gattttgtttttcat

SEQ ID NO: 1138943 - DNA, 15 bp, Homo sapiens
tgattttgtttttca

SEQ ID NO: 1138944 - DNA, 15 bp, Homo sapiens
ttgattttgtttttc

SEQ ID NO: 1138945 - DNA, 15 bp, Homo sapiens
tttgattttgttttt

SEQ ID NO: 1138946 - DNA, 15 bp, Homo sapiens
gtttgattttgtttt

SEQ ID NO: 1138947 - DNA, 15 bp, Homo sapiens
ggtttgattttgttt

SEQ ID NO: 1138948 - DNA, 15 bp, Homo sapiens
tggtttgattttgtt

SEQ ID NO: 1138949 - DNA, 15 bp, Homo sapiens
atggtttgattttgt

SEQ ID NO: 1138950 - DNA, 15 bp, Homo sapiens
catggtttgattttg

SEQ ID NO: 1138951 - DNA, 15 bp, Homo sapiens
tcatggtttgatttt

SEQ ID NO: 1138952 - DNA, 15 bp, Homo sapiens
gtcatggtttgattt

SEQ ID NO: 1138953 - DNA, 15 bp, Homo sapiens
tgtcatggtttgatt

SEQ ID NO: 1138954 - DNA, 15 bp, Homo sapiens
ttgtcatggtttgat

SEQ ID NO: 1138955 - DNA, 15 bp, Homo sapiens
attgtcatggtttga

SEQ ID NO: 1138956 - DNA, 15 bp, Homo sapiens
tattgtcatggtttg

SEQ ID NO: 1138957 - DNA, 15 bp, Homo sapiens
gtattgtcatggttt

SEQ ID NO: 1138958 - DNA, 15 bp, Homo sapiens
agtattgtcatggtt

SEQ ID NO: 1138959 - DNA, 15 bp, Homo sapiens
tagtattgtcatggt

SEQ ID NO: 1138960 - DNA, 15 bp, Homo sapiens
ctagtattgtcatgg

SEQ ID NO: 1138961 - DNA, 15 bp, Homo sapiens
tctagtattgtcatg

SEQ ID NO: 1138962 - DNA, 15 bp, Homo sapiens
ttctagtattgtcat

SEQ ID NO: 1138963 - DNA, 15 bp, Homo sapiens
cttctagtattgtca

SEQ ID NO: 1138964 - DNA, 15 bp, Homo sapiens
gcttctagtattgtc

SEQ ID NO: 1138965 - DNA, 15 bp, Homo sapiens
tgcttctagtattgt

SEQ ID NO: 1138966 - DNA, 15 bp, Homo sapiens
ttgcttctagtattg

SEQ ID NO: 1138967 - DNA, 15 bp, Homo sapiens
tttgcttctagtatt

SEQ ID NO: 1138968 - DNA, 15 bp, Homo sapiens
atttgcttctagtat

SEQ ID NO: 1138969 - DNA, 15 bp, Homo sapiens
aatttgcttctagta

SEQ ID NO: 1138970 - DNA, 15 bp, Homo sapiens
aaatttgcttctagt

SEQ ID NO: 1138971 - DNA, 15 bp, Homo sapiens
taaatttgcttctag

SEQ ID NO: 1138972 - DNA, 15 bp, Homo sapiens
ctaaatttgcttcta

SEQ ID NO: 1138973 - DNA, 15 bp, Homo sapiens
cctaaatttgcttct

SEQ ID NO: 1138974 - DNA, 15 bp, Homo sapiens
acctaaatttgcttc

SEQ ID NO: 1138975 - DNA, 15 bp, Homo sapiens
cacctaaatttgctt

SEQ ID NO: 1138976 - DNA, 15 bp, Homo sapiens
tcacctaaatttgct

SEQ ID NO: 1138977 - DNA, 15 bp, Homo sapiens
ttcacctaaatttgc

SEQ ID NO: 1138978 - DNA, 15 bp, Homo sapiens
gttcacctaaatttg

SEQ ID NO: 1138979 - DNA, 15 bp, Homo sapiens
tgttcacctaaattt

SEQ ID NO: 1138980 - DNA, 15 bp, Homo sapiens
gtgttcacctaaatt

SEQ ID NO: 1138981 - DNA, 15 bp, Homo sapiens
agtgttcacctaaat

SEQ ID NO: 1138982 - DNA, 15 bp, Homo sapiens
aagtgttcacctaaa

SEQ ID NO: 1138983 - DNA, 15 bp, Homo sapiens
aaagtgttcacctaa

SEQ ID NO: 1138984 - DNA, 15 bp, Homo sapiens
aaaagtgttcaccta

SEQ ID NO: 1138985 - DNA, 15 bp, Homo sapiens
gaaaagtgttcacct

SEQ ID NO: 1138986 - DNA, 15 bp, Homo sapiens
agaaaagtgttcacc

SEQ ID NO: 1138987 - DNA, 15 bp, Homo sapiens
tagaaaagtgttcac

SEQ ID NO: 1138988 - DNA, 15 bp, Homo sapiens
ttagaaaagtgttca

SEQ ID NO: 1138989 - DNA, 15 bp, Homo sapiens
attagaaaagtgttc

SEQ ID NO: 1138990 - DNA, 15 bp, Homo sapiens
gattagaaaagtgtt

SEQ ID NO: 1138991 - DNA, 15 bp, Homo sapiens
ggattagaaaagtgt

SEQ ID NO: 1138992 - DNA, 15 bp, Homo sapiens
cggattagaaaagtg

SEQ ID NO: 1138993 - DNA, 15 bp, Homo sapiens
ccggattagaaaagt

SEQ ID NO: 1138994 - DNA, 15 bp, Homo sapiens
cccggattagaaaag

SEQ ID NO: 1138995 - DNA, 15 bp, Homo sapiens
ccccggattagaaaa

SEQ ID NO: 1138996 - DNA, 15 bp, Homo sapiens
cccccggattagaaa

SEQ ID NO: 1138997 - DNA, 15 bp, Homo sapiens
acccccggattagaa

SEQ ID NO: 1138998 - DNA, 15 bp, Homo sapiens
cacccccggattaga

SEQ ID NO: 1138999 - DNA, 15 bp, Homo sapiens
ccacccccggattag

SEQ ID NO: 1139000 - DNA, 15 bp, Homo sapiens
cccacccccggatta

SEQ ID NO: 1139001 - DNA, 15 bp, Homo sapiens
gcccacccccggatt

SEQ ID NO: 1139002 - DNA, 15 bp, Homo sapiens
cgcccacccccggat

SEQ ID NO: 1139003 - DNA, 15 bp, Homo sapiens
ccgcccacccccgga

SEQ ID NO: 1139004 - DNA, 15 bp, Homo sapiens
cccgcccacccccgg

SEQ ID NO: 1139005 - DNA, 15 bp, Homo sapiens
ccccgcccacccccg

SEQ ID NO: 1139006 - DNA, 15 bp, Homo sapiens
cccccgcccaccccc

SEQ ID NO: 1139007 - DNA, 15 bp, Homo sapiens
gcccccgcccacccc

SEQ ID NO: 1139008 - DNA, 15 bp, Homo sapiens
agcccccgcccaccc

SEQ ID NO: 1139009 - DNA, 15 bp, Homo sapiens
cagcccccgcccacc

SEQ ID NO: 1139010 - DNA, 15 bp, Homo sapiens
ccagcccccgcccac

SEQ ID NO: 1139011 - DNA, 15 bp, Homo sapiens
cccagcccccgccca

SEQ ID NO: 1139012 - DNA, 15 bp, Homo sapiens
ccccagcccccgccc

SEQ ID NO: 1139013 - DNA, 15 bp, Homo sapiens
cccccagcccccgcc

SEQ ID NO: 1139014 - DNA, 15 bp, Homo sapiens
ccccccagcccccgc

SEQ ID NO: 1139015 - DNA, 15 bp, Homo sapiens
tccccccagcccccg

SEQ ID NO: 1139016 - DNA, 15 bp, Homo sapiens
ctccccccagccccc

SEQ ID NO: 1139017 - DNA, 15 bp, Homo sapiens
cctccccccagcccc

SEQ ID NO: 1139018 - DNA, 15 bp, Homo sapiens
gcctccccccagccc

SEQ ID NO: 1139019 - DNA, 15 bp, Homo sapiens
tgcctccccccagcc

SEQ ID NO: 1139020 - DNA, 15 bp, Homo sapiens
ctgcctccccccagc

SEQ ID NO: 1139021 - DNA, 15 bp, Homo sapiens
cctgcctccccccag

SEQ ID NO: 1139022 - DNA, 15 bp, Homo sapiens
ccctgcctcccccca

SEQ ID NO: 1139023 - DNA, 15 bp, Homo sapiens
tccctgcctcccccc

SEQ ID NO: 1139024 - DNA, 15 bp, Homo sapiens
ctccctgcctccccc

SEQ ID NO: 1139025 - DNA, 15 bp, Homo sapiens
tctccctgcctcccc

SEQ ID NO: 1139026 - DNA, 15 bp, Homo sapiens
ttctccctgcctccc

SEQ ID NO: 1139027 - DNA, 15 bp, Homo sapiens
cttctccctgcctcc

SEQ ID NO: 1139028 - DNA, 15 bp, Homo sapiens
tcttctccctgcctc

SEQ ID NO: 1139029 - DNA, 15 bp, Homo sapiens
gtcttctccctgcct

SEQ ID NO: 1139030 - DNA, 15 bp, Homo sapiens
ggtcttctccctgcc

SEQ ID NO: 1139031 - DNA, 15 bp, Homo sapiens
aggtcttctccctgc

SEQ ID NO: 1139032 - DNA, 15 bp, Homo sapiens
aaggtcttctccctg

SEQ ID NO: 1139033 - DNA, 15 bp, Homo sapiens
aaaggtcttctccct

SEQ ID NO: 1139034 - DNA, 15 bp, Homo sapiens
aaaaggtcttctccc

SEQ ID NO: 1139035 - DNA, 15 bp, Homo sapiens
aaaaaggtcttctcc

SEQ ID NO: 1139036 - DNA, 15 bp, Homo sapiens
aaaaaaggtcttctc

SEQ ID NO: 1139037 - DNA, 15 bp, Homo sapiens
aaaaaaaggtcttct

SEQ ID NO: 1139038 - DNA, 15 bp, Homo sapiens
aaaaaaaaggtcttc

SEQ ID NO: 1139039 - DNA, 15 bp, Homo sapiens
aaaaaaaaaggtctt

SEQ ID NO: 1139040 - DNA, 15 bp, Homo sapiens
aaaaaaaaaaggtct

SEQ ID NO: 1139041 - DNA, 15 bp, Homo sapiens
gaaaaaaaaaaggtc

SEQ ID NO: 1139042 - DNA, 15 bp, Homo sapiens
agaaaaaaaaaaggt

SEQ ID NO: 1139043 - DNA, 15 bp, Homo sapiens
aagaaaaaaaaaagg

SEQ ID NO: 1139044 - DNA, 15 bp, Homo sapiens
tctcaaaaagaaaaa

SEQ ID NO: 1139045 - DNA, 15 bp, Homo sapiens
atctcaaaaagaaaa

SEQ ID NO: 1139046 - DNA, 15 bp, Homo sapiens
ggacagagcaagact

SEQ ID NO: 1139047 - DNA, 15 bp, Homo sapiens
gggacagagcaagac

SEQ ID NO: 1139048 - DNA, 15 bp, Homo sapiens
ggggacagagcaaga

SEQ ID NO: 1139049 - DNA, 15 bp, Homo sapiens
tggggacagagcaag

SEQ ID NO: 1139050 - DNA, 15 bp, Homo sapiens
ttggggacagagcaa

SEQ ID NO: 1139051 - DNA, 15 bp, Homo sapiens
cttggggacagagca

SEQ ID NO: 1139052 - DNA, 15 bp, Homo sapiens
gcttggggacagagc

SEQ ID NO: 1139053 - DNA, 15 bp, Homo sapiens
agcttggggacagag

SEQ ID NO: 1139054 - DNA, 15 bp, Homo sapiens
cagcttggggacaga

SEQ ID NO: 1139055 - DNA, 15 bp, Homo sapiens
ccagcttggggacag

SEQ ID NO: 1139056 - DNA, 15 bp, Homo sapiens
tccagcttggggaca

SEQ ID NO: 1139057 - DNA, 15 bp, Homo sapiens
ctccagcttggggac

SEQ ID NO: 1139058 - DNA, 15 bp, Homo sapiens
actccagcttgggga

SEQ ID NO: 1139059 - DNA, 15 bp, Homo sapiens
cactccagcttgggg

SEQ ID NO: 1139060 - DNA, 15 bp, Homo sapiens
tctgcactccagctt

SEQ ID NO: 1139061 - DNA, 15 bp, Homo sapiens
ctctgcactccagct

SEQ ID NO: 1139062 - DNA, 15 bp, Homo sapiens
cgcctctgcactcca

SEQ ID NO: 1139063 - DNA, 15 bp, Homo sapiens
acgcctctgcactcc

SEQ ID NO: 1139064 - DNA, 15 bp, Homo sapiens
cacgcctctgcactc

SEQ ID NO: 1139065 - DNA, 15 bp, Homo sapiens
tcacgcctctgcact

SEQ ID NO: 1139066 - DNA, 15 bp, Homo sapiens
atcacgcctctgcac

SEQ ID NO: 1139067 - DNA, 15 bp, Homo sapiens
gatcacgcctctgca

SEQ ID NO: 1139068 - DNA, 15 bp, Homo sapiens
agatcacgcctctgc

SEQ ID NO: 1139069 - DNA, 15 bp, Homo sapiens
gagatcacgcctctg

SEQ ID NO: 1139070 - DNA, 15 bp, Homo sapiens
tgagatcacgcctct

SEQ ID NO: 1139071 - DNA, 15 bp, Homo sapiens
ctgagatcacgcctc

SEQ ID NO: 1139072 - DNA, 15 bp, Homo sapiens
gctgagatcacgcct

SEQ ID NO: 1139073 - DNA, 15 bp, Homo sapiens
acttgaatccaggag

SEQ ID NO: 1139074 - DNA, 15 bp, Homo sapiens
tgtatagtcccagct

SEQ ID NO: 1139075 - DNA, 15 bp, Homo sapiens
ctgtatagtcccagc

SEQ ID NO: 1139076 - DNA, 15 bp, Homo sapiens
cctgtatagtcccag

SEQ ID NO: 1139077 - DNA, 15 bp, Homo sapiens
acctgtatagtccca

SEQ ID NO: 1139078 - DNA, 15 bp, Homo sapiens
cacctgtatagtccc

SEQ ID NO: 1139079 - DNA, 15 bp, Homo sapiens
gcacctgtatagtcc

SEQ ID NO: 1139080 - DNA, 15 bp, Homo sapiens
tgcacctgtatagtc

SEQ ID NO: 1139081 - DNA, 15 bp, Homo sapiens
gtgcacctgtatagt

SEQ ID NO: 1139082 - DNA, 15 bp, Homo sapiens
tgtgcacctgtatag

SEQ ID NO: 1139083 - DNA, 15 bp, Homo sapiens
gtgtgcacctgtata

SEQ ID NO: 1139084 - DNA, 15 bp, Homo sapiens
ggtgtgcacctgtat

SEQ ID NO: 1139085 - DNA, 15 bp, Homo sapiens
gtggtggtgtgcacc

SEQ ID NO: 1139086 - DNA, 15 bp, Homo sapiens
cgtggtggtgtgcac

SEQ ID NO: 1139087 - DNA, 15 bp, Homo sapiens
ccgtggtggtgtgca

SEQ ID NO: 1139088 - DNA, 15 bp, Homo sapiens
gccgtggtggtgtgc

SEQ ID NO: 1139089 - DNA, 15 bp, Homo sapiens
ggccgtggtggtgtg

SEQ ID NO: 1139090 - DNA, 15 bp, Homo sapiens
tggccgtggtggtgt

SEQ ID NO: 1139091 - DNA, 15 bp, Homo sapiens
ctggccgtggtggtg

SEQ ID NO: 1139092 - DNA, 15 bp, Homo sapiens
gctggccgtggtggt

SEQ ID NO: 1139093 - DNA, 15 bp, Homo sapiens
agctggccgtggtgg

SEQ ID NO: 1139094 - DNA, 15 bp, Homo sapiens
tagctggccgtggtg

SEQ ID NO: 1139095 - DNA, 15 bp, Homo sapiens
ttagctggccgtggt

SEQ ID NO: 1139096 - DNA, 15 bp, Homo sapiens
attagctggccgtgg

SEQ ID NO: 1139097 - DNA, 15 bp, Homo sapiens
aattagctggccgtg

SEQ ID NO: 1139098 - DNA, 15 bp, Homo sapiens
aaattagctggccgt

SEQ ID NO: 1139099 - DNA, 15 bp, Homo sapiens
aaaattagctggccg

SEQ ID NO: 1139100 - DNA, 15 bp, Homo sapiens
aaaaattagctggcc

SEQ ID NO: 1139101 - DNA, 15 bp, Homo sapiens
caaaaattagctggc

SEQ ID NO: 1139102 - DNA, 15 bp, Homo sapiens
taaaccccatctcta

SEQ ID NO: 1139103 - DNA, 15 bp, Homo sapiens
gtaaaccccatctct

SEQ ID NO: 1139104 - DNA, 15 bp, Homo sapiens
tgtaaaccccatctc

SEQ ID NO: 1139105 - DNA, 15 bp, Homo sapiens
gtgtaaaccccatct

SEQ ID NO: 1139106 - DNA, 15 bp, Homo sapiens
ggtgtaaaccccatc

SEQ ID NO: 1139107 - DNA, 15 bp, Homo sapiens
gggtgtaaaccccat

SEQ ID NO: 1139108 - DNA, 15 bp, Homo sapiens
agggtgtaaacccca

SEQ ID NO: 1139109 - DNA, 15 bp, Homo sapiens
cagggtgtaaacccc

SEQ ID NO: 1139110 - DNA, 15 bp, Homo sapiens
acagggtgtaaaccc

SEQ ID NO: 1139111 - DNA, 15 bp, Homo sapiens
aacagggtgtaaacc

SEQ ID NO: 1139112 - DNA, 15 bp, Homo sapiens
taacagggtgtaaac

SEQ ID NO: 1139113 - DNA, 15 bp, Homo sapiens
ctaacagggtgtaaa

SEQ ID NO: 1139114 - DNA, 15 bp, Homo sapiens
gctaacagggtgtaa

SEQ ID NO: 1139115 - DNA, 15 bp, Homo sapiens
ggctaacagggtgta

SEQ ID NO: 1139116 - DNA, 15 bp, Homo sapiens
tggctaacagggtgt

SEQ ID NO: 1139117 - DNA, 15 bp, Homo sapiens
ctggctaacagggtg

SEQ ID NO: 1139118 - DNA, 15 bp, Homo sapiens
cctggctaacagggt

SEQ ID NO: 1139119 - DNA, 15 bp, Homo sapiens
tcctggctaacaggg

SEQ ID NO: 1139120 - DNA, 15 bp, Homo sapiens
atcctggctaacagg

SEQ ID NO: 1139121 - DNA, 15 bp, Homo sapiens
catcctggctaacag

SEQ ID NO: 1139122 - DNA, 15 bp, Homo sapiens
aattgagaccatcct

SEQ ID NO: 1139123 - DNA, 15 bp, Homo sapiens
aaattgagaccatcc

SEQ ID NO: 1139124 - DNA, 15 bp, Homo sapiens
gaaattgagaccatc

SEQ ID NO: 1139125 - DNA, 15 bp, Homo sapiens
agaaattgagaccat

SEQ ID NO: 1139126 - DNA, 15 bp, Homo sapiens
aagaaattgagacca

SEQ ID NO: 1139127 - DNA, 15 bp, Homo sapiens
caagaaattgagacc

SEQ ID NO: 1139128 - DNA, 15 bp, Homo sapiens
tcaagaaattgagac

SEQ ID NO: 1139129 - DNA, 15 bp, Homo sapiens
gtcaagaaattgaga

SEQ ID NO: 1139130 - DNA, 15 bp, Homo sapiens
ggtcaagaaattgag

SEQ ID NO: 1139131 - DNA, 15 bp, Homo sapiens
aggtcaagaaattga

SEQ ID NO: 1139132 - DNA, 15 bp, Homo sapiens
gaggtcaagaaattg

SEQ ID NO: 1139133 - DNA, 15 bp, Homo sapiens
cgaggtcaagaaatt

SEQ ID NO: 1139134 - DNA, 15 bp, Homo sapiens
gggatcacgaggtca

SEQ ID NO: 1139135 - DNA, 15 bp, Homo sapiens
tgggatcacgaggtc

SEQ ID NO: 1139136 - DNA, 15 bp, Homo sapiens
atgggatcacgaggt

SEQ ID NO: 1139137 - DNA, 15 bp, Homo sapiens
gatgggatcacgagg

SEQ ID NO: 1139138 - DNA, 15 bp, Homo sapiens
ggatgggatcacgag

SEQ ID NO: 1139139 - DNA, 15 bp, Homo sapiens
cggatgggatcacga

SEQ ID NO: 1139140 - DNA, 15 bp, Homo sapiens
gcggatgggatcacg

SEQ ID NO: 1139141 - DNA, 15 bp, Homo sapiens
cgcggatgggatcac

SEQ ID NO: 1139142 - DNA, 15 bp, Homo sapiens
acgcggatgggatca

SEQ ID NO: 1139143 - DNA, 15 bp, Homo sapiens
aacgcggatgggatc

SEQ ID NO: 1139144 - DNA, 15 bp, Homo sapiens
caacgcggatgggat

SEQ ID NO: 1139145 - DNA, 15 bp, Homo sapiens
ccaacgcggatggga

SEQ ID NO: 1139146 - DNA, 15 bp, Homo sapiens
gccaacgcggatggg

SEQ ID NO: 1139147 - DNA, 15 bp, Homo sapiens
ggccaacgcggatgg

SEQ ID NO: 1139148 - DNA, 15 bp, Homo sapiens
aggccaacgcggatg

SEQ ID NO: 1139149 - DNA, 15 bp, Homo sapiens
aaggccaacgcggat

SEQ ID NO: 1139150 - DNA, 15 bp, Homo sapiens
gaaggccaacgcgga

SEQ ID NO: 1139151 - DNA, 15 bp, Homo sapiens
ggaaggccaacgcgg

SEQ ID NO: 1139152 - DNA, 15 bp, Homo sapiens
tggaaggccaacgcg

SEQ ID NO: 1139153 - DNA, 15 bp, Homo sapiens
ttggaaggccaacgc

SEQ ID NO: 1139154 - DNA, 15 bp, Homo sapiens
tttggaaggccaacg

SEQ ID NO: 1139155 - DNA, 15 bp, Homo sapiens
ctttggaaggccaac

SEQ ID NO: 1139156 - DNA, 15 bp, Homo sapiens
ggtaatcccagcact

SEQ ID NO: 1139157 - DNA, 15 bp, Homo sapiens
tggtaatcccagcac

SEQ ID NO: 1139158 - DNA, 15 bp, Homo sapiens
ctggtaatcccagca

SEQ ID NO: 1139159 - DNA, 15 bp, Homo sapiens
gctggtaatcccagc

SEQ ID NO: 1139160 - DNA, 15 bp, Homo sapiens
tgctggtaatcccag

SEQ ID NO: 1139161 - DNA, 15 bp, Homo sapiens
atgctggtaatccca

SEQ ID NO: 1139162 - DNA, 15 bp, Homo sapiens
catgctggtaatccc

SEQ ID NO: 1139163 - DNA, 15 bp, Homo sapiens
tcatgctggtaatcc

SEQ ID NO: 1139164 - DNA, 15 bp, Homo sapiens
ctcatgctggtaatc

SEQ ID NO: 1139165 - DNA, 15 bp, Homo sapiens
gctcatgctggtaat

SEQ ID NO: 1139166 - DNA, 15 bp, Homo sapiens
ggctcatgctggtaa

SEQ ID NO: 1139167 - DNA, 15 bp, Homo sapiens
tggctcatgctggta

SEQ ID NO: 1139168 - DNA, 15 bp, Homo sapiens
gtggctcatgctggt

SEQ ID NO: 1139169 - DNA, 15 bp, Homo sapiens
ggtggctcatgctgg

SEQ ID NO: 1139170 - DNA, 15 bp, Homo sapiens
cggtggctcatgctg

SEQ ID NO: 1139171 - DNA, 15 bp, Homo sapiens
acggtggctcatgct

SEQ ID NO: 1139172 - DNA, 15 bp, Homo sapiens
agccgggcacggtgg

SEQ ID NO: 1139173 - DNA, 15 bp, Homo sapiens
cagccgggcacggtg

SEQ ID NO: 1139174 - DNA, 15 bp, Homo sapiens
ccagccgggcacggt

SEQ ID NO: 1139175 - DNA, 15 bp, Homo sapiens
cccagccgggcacgg

SEQ ID NO: 1139176 - DNA, 15 bp, Homo sapiens
tcccagccgggcacg

SEQ ID NO: 1139177 - DNA, 15 bp, Homo sapiens
ctcccagccgggcac

SEQ ID NO: 1139178 - DNA, 15 bp, Homo sapiens
tctcccagccgggca

SEQ ID NO: 1139179 - DNA, 15 bp, Homo sapiens
ttctcccagccgggc

SEQ ID NO: 1139180 - DNA, 15 bp, Homo sapiens
cttctcccagccggg

SEQ ID NO: 1139181 - DNA, 15 bp, Homo sapiens
tcttctcccagccgg

SEQ ID NO: 1139182 - DNA, 15 bp, Homo sapiens
gtcttctcccagccg

SEQ ID NO: 1139183 - DNA, 15 bp, Homo sapiens
ggtcttctcccagcc

SEQ ID NO: 1139184 - DNA, 15 bp, Homo sapiens
aggtcttctcccagc

SEQ ID NO: 1139185 - DNA, 15 bp, Homo sapiens
aaggtcttctcccag

SEQ ID NO: 1139186 - DNA, 15 bp, Homo sapiens
aaaggtcttctccca

SEQ ID NO: 1139187 - DNA, 15 bp, Homo sapiens
gaaaggtcttctccc

SEQ ID NO: 1139188 - DNA, 15 bp, Homo sapiens
agaaaggtcttctcc

SEQ ID NO: 1139189 - DNA, 15 bp, Homo sapiens
tagaaaggtcttctc

SEQ ID NO: 1139190 - DNA, 15 bp, Homo sapiens
ttagaaaggtcttct

SEQ ID NO: 1139191 - DNA, 15 bp, Homo sapiens
cttagaaaggtcttc

SEQ ID NO: 1139192 - DNA, 15 bp, Homo sapiens
gcttagaaaggtctt

SEQ ID NO: 1139193 - DNA, 15 bp, Homo sapiens
tgcttagaaaggtct

SEQ ID NO: 1139194 - DNA, 15 bp, Homo sapiens
atgcttagaaaggtc

SEQ ID NO: 1139195 - DNA, 15 bp, Homo sapiens
catgcttagaaaggt

SEQ ID NO: 1139196 - DNA, 15 bp, Homo sapiens
tcatgcttagaaagg

SEQ ID NO: 1139197 - DNA, 15 bp, Homo sapiens
atcatgcttagaaag

SEQ ID NO: 1139198 - DNA, 15 bp, Homo sapiens
tatcatgcttagaaa

SEQ ID NO: 1139199 - DNA, 15 bp, Homo sapiens
gtatcatgcttagaa

SEQ ID NO: 1139200 - DNA, 15 bp, Homo sapiens
ggtatcatgcttaga

SEQ ID NO: 1139201 - DNA, 15 bp, Homo sapiens
tggtatcatgcttag

SEQ ID NO: 1139202 - DNA, 15 bp, Homo sapiens
ttggtatcatgctta

SEQ ID NO: 1139203 - DNA, 15 bp, Homo sapiens
tttggtatcatgctt

SEQ ID NO: 1139204 - DNA, 15 bp, Homo sapiens
ctttggtatcatgct

SEQ ID NO: 1139205 - DNA, 15 bp, Homo sapiens
cctttggtatcatgc

SEQ ID NO: 1139206 - DNA, 15 bp, Homo sapiens
gcctttggtatcatg

SEQ ID NO: 1139207 - DNA, 15 bp, Homo sapiens
tgcctttggtatcat

SEQ ID NO: 1139208 - DNA, 15 bp, Homo sapiens
ctgcctttggtatca

SEQ ID NO: 1139209 - DNA, 15 bp, Homo sapiens
tctgcctttggtatc

SEQ ID NO: 1139210 - DNA, 15 bp, Homo sapiens
ctctgcctttggtat

SEQ ID NO: 1139211 - DNA, 15 bp, Homo sapiens
tctctgcctttggta

SEQ ID NO: 1139212 - DNA, 15 bp, Homo sapiens
gtctctgcctttggt

SEQ ID NO: 1139213 - DNA, 15 bp, Homo sapiens
tgtctctgcctttgg

SEQ ID NO: 1139214 - DNA, 15 bp, Homo sapiens
ttgtctctgcctttg

SEQ ID NO: 1139215 - DNA, 15 bp, Homo sapiens
attgtctctgccttt

SEQ ID NO: 1139216 - DNA, 15 bp, Homo sapiens
tattgtctctgcctt

SEQ ID NO: 1139217 - DNA, 15 bp, Homo sapiens
ttattgtctctgcct

SEQ ID NO: 1139218 - DNA, 15 bp, Homo sapiens
tttattgtctctgcc

SEQ ID NO: 1139219 - DNA, 15 bp, Homo sapiens
ctttattgtctctgc

SEQ ID NO: 1139220 - DNA, 15 bp, Homo sapiens
cctttattgtctctg

SEQ ID NO: 1139221 - DNA, 15 bp, Homo sapiens
gcctttattgtctct

SEQ ID NO: 1139222 - DNA, 15 bp, Homo sapiens
tgcctttattgtctc

SEQ ID NO: 1139223 - DNA, 15 bp, Homo sapiens
ttgcctttattgtct

SEQ ID NO: 1139224 - DNA, 15 bp, Homo sapiens
tttgcctttattgtc

SEQ ID NO: 1139225 - DNA, 15 bp, Homo sapiens
ctttgcctttattgt

SEQ ID NO: 1139226 - DNA, 15 bp, Homo sapiens
tctttgcctttattg

SEQ ID NO: 1139227 - DNA, 15 bp, Homo sapiens
ttctttgcctttatt

SEQ ID NO: 1139228 - DNA, 15 bp, Homo sapiens
attctttgcctttat

SEQ ID NO: 1139229 - DNA, 15 bp, Homo sapiens
aattctttgccttta

SEQ ID NO: 1139230 - DNA, 15 bp, Homo sapiens
tcaattctttgcctt

SEQ ID NO: 1139231 - DNA, 15 bp, Homo sapiens
gtcaattctttgcct

SEQ ID NO: 1139232 - DNA, 15 bp, Homo sapiens
tgtcaattctttgcc

SEQ ID NO: 1139233 - DNA, 15 bp, Homo sapiens
ctgtcaattctttgc

SEQ ID NO: 1139234 - DNA, 15 bp, Homo sapiens
tctgtcaattctttg

SEQ ID NO: 1139235 - DNA, 15 bp, Homo sapiens
ttctgtcaattcttt

SEQ ID NO: 1139236 - DNA, 15 bp, Homo sapiens
attctgtcaattctt

SEQ ID NO: 1139237 - DNA, 15 bp, Homo sapiens
aattctgtcaattct

SEQ ID NO: 1139238 - DNA, 15 bp, Homo sapiens
gaattctgtcaattc

SEQ ID NO: 1139239 - DNA, 15 bp, Homo sapiens
tgaattctgtcaatt

SEQ ID NO: 1139240 - DNA, 15 bp, Homo sapiens
gtgaattctgtcaat

SEQ ID NO: 1139241 - DNA, 15 bp, Homo sapiens
agtgaattctgtcaa

SEQ ID NO: 1139242 - DNA, 15 bp, Homo sapiens
tagtgaattctgtca

SEQ ID NO: 1139243 - DNA, 15 bp, Homo sapiens
atagtgaattctgtc

SEQ ID NO: 1139244 - DNA, 15 bp, Homo sapiens
gatagtgaattctgt

SEQ ID NO: 1139245 - DNA, 15 bp, Homo sapiens
ggatagtgaattctg

SEQ ID NO: 1139246 - DNA, 15 bp, Homo sapiens
cggatagtgaattct

SEQ ID NO: 1139247 - DNA, 15 bp, Homo sapiens
tcggatagtgaattc

SEQ ID NO: 1139248 - DNA, 15 bp, Homo sapiens
atcggatagtgaatt

SEQ ID NO: 1139249 - DNA, 15 bp, Homo sapiens
tatcggatagtgaat

SEQ ID NO: 1139250 - DNA, 15 bp, Homo sapiens
ttatcggatagtgaa

SEQ ID NO: 1139251 - DNA, 15 bp, Homo sapiens
tttatcggatagtga

SEQ ID NO: 1139252 - DNA, 15 bp, Homo sapiens
ttttatcggatagtg

SEQ ID NO: 1139253 - DNA, 15 bp, Homo sapiens
tttttatcggatagt

SEQ ID NO: 1139254 - DNA, 15 bp, Homo sapiens
atttttatcggatag

SEQ ID NO: 1139255 - DNA, 15 bp, Homo sapiens
gatttttatcggata

SEQ ID NO: 1139256 - DNA, 15 bp, Homo sapiens
tgatttttatcggat

SEQ ID NO: 1139257 - DNA, 15 bp, Homo sapiens
gtgatttttatcgga

SEQ ID NO: 1139258 - DNA, 15 bp, Homo sapiens
agtgatttttatcgg

SEQ ID NO: 1139259 - DNA, 15 bp, Homo sapiens
aagtgatttttatcg

SEQ ID NO: 1139260 - DNA, 15 bp, Homo sapiens
gaagtgatttttatc

SEQ ID NO: 1139261 - DNA, 15 bp, Homo sapiens
agaagtgatttttat

SEQ ID NO: 1139262 - DNA, 15 bp, Homo sapiens
cagaagtgattttta

SEQ ID NO: 1139263 - DNA, 15 bp, Homo sapiens
acagaagtgattttt

SEQ ID NO: 1139264 - DNA, 15 bp, Homo sapiens
cacagaagtgatttt

SEQ ID NO: 1139265 - DNA, 15 bp, Homo sapiens
ccacagaagtgattt

SEQ ID NO: 1139266 - DNA, 15 bp, Homo sapiens
gccacagaagtgatt

SEQ ID NO: 1139267 - DNA, 15 bp, Homo sapiens
ggccacagaagtgat

SEQ ID NO: 1139268 - DNA, 15 bp, Homo sapiens
cggccacagaagtga

SEQ ID NO: 1139269 - DNA, 15 bp, Homo sapiens
ccggccacagaagtg

SEQ ID NO: 1139270 - DNA, 15 bp, Homo sapiens
cccggccacagaagt

SEQ ID NO: 1139271 - DNA, 15 bp, Homo sapiens
gcccggccacagaag

SEQ ID NO: 1139272 - DNA, 15 bp, Homo sapiens
cgcccggccacagaa

SEQ ID NO: 1139273 - DNA, 15 bp, Homo sapiens
gcgcccggccacaga

SEQ ID NO: 1139274 - DNA, 15 bp, Homo sapiens
cgcgcccggccacag

SEQ ID NO: 1139275 - DNA, 15 bp, Homo sapiens
ccgcgcccggccaca

SEQ ID NO: 1139276 - DNA, 15 bp, Homo sapiens
accgcgcccggccac

SEQ ID NO: 1139277 - DNA, 15 bp, Homo sapiens
ccagtgctgggatta

SEQ ID NO: 1139278 - DNA, 15 bp, Homo sapiens
cccagtgctgggatt

SEQ ID NO: 1139279 - DNA, 15 bp, Homo sapiens
tcccagtgctgggat

SEQ ID NO: 1139280 - DNA, 15 bp, Homo sapiens
ttcccagtgctggga

SEQ ID NO: 1139281 - DNA, 15 bp, Homo sapiens
cttcccagtgctggg

SEQ ID NO: 1139282 - DNA, 15 bp, Homo sapiens
gcttcccagtgctgg

SEQ ID NO: 1139283 - DNA, 15 bp, Homo sapiens
ggcttcccagtgctg

SEQ ID NO: 1139284 - DNA, 15 bp, Homo sapiens
cggcttcccagtgct

SEQ ID NO: 1139285 - DNA, 15 bp, Homo sapiens
tcggcttcccagtgc

SEQ ID NO: 1139286 - DNA, 15 bp, Homo sapiens
ctcggcttcccagtg

SEQ ID NO: 1139287 - DNA, 15 bp, Homo sapiens
cctcggcttcccagt

SEQ ID NO: 1139288 - DNA, 15 bp, Homo sapiens
acctcggcttcccag

SEQ ID NO: 1139289 - DNA, 15 bp, Homo sapiens
gcccacctcggcttc

SEQ ID NO: 1139290 - DNA, 15 bp, Homo sapiens
cgcccacctcggctt

SEQ ID NO: 1139291 - DNA, 15 bp, Homo sapiens
ccgcccacctcggct

SEQ ID NO: 1139292 - DNA, 15 bp, Homo sapiens
aatccgcccacctcg

SEQ ID NO: 1139293 - DNA, 15 bp, Homo sapiens
caatccgcccacctc

SEQ ID NO: 1139294 - DNA, 15 bp, Homo sapiens
gcaatccgcccacct

SEQ ID NO: 1139295 - DNA, 15 bp, Homo sapiens
agcaatccgcccacc

SEQ ID NO: 1139296 - DNA, 15 bp, Homo sapiens
aagcaatccgcccac

SEQ ID NO: 1139297 - DNA, 15 bp, Homo sapiens
caagcaatccgccca

SEQ ID NO: 1139298 - DNA, 15 bp, Homo sapiens
tcaagcaatccgccc

SEQ ID NO: 1139299 - DNA, 15 bp, Homo sapiens
ctcaagcaatccgcc

SEQ ID NO: 1139300 - DNA, 15 bp, Homo sapiens
cctcaagcaatccgc

SEQ ID NO: 1139301 - DNA, 15 bp, Homo sapiens
gcctcaagcaatccg

SEQ ID NO: 1139302 - DNA, 15 bp, Homo sapiens
gtttgccatgttggc

SEQ ID NO: 1139303 - DNA, 15 bp, Homo sapiens
ggtttgccatgttgg

SEQ ID NO: 1139304 - DNA, 15 bp, Homo sapiens
aggtttgccatgttg

SEQ ID NO: 1139305 - DNA, 15 bp, Homo sapiens
gaggtttgccatgtt

SEQ ID NO: 1139306 - DNA, 15 bp, Homo sapiens
ggaggtttgccatgt

SEQ ID NO: 1139307 - DNA, 15 bp, Homo sapiens
aggaggtttgccatg

SEQ ID NO: 1139308 - DNA, 15 bp, Homo sapiens
caggaggtttgccat

SEQ ID NO: 1139309 - DNA, 15 bp, Homo sapiens
acaggaggtttgcca

SEQ ID NO: 1139310 - DNA, 15 bp, Homo sapiens
gacaggaggtttgcc

SEQ ID NO: 1139311 - DNA, 15 bp, Homo sapiens
agacaggaggtttgc

SEQ ID NO: 1139312 - DNA, 15 bp, Homo sapiens
gagacaggaggtttg

SEQ ID NO: 1139313 - DNA, 15 bp, Homo sapiens
agagacaggaggttt

SEQ ID NO: 1139314 - DNA, 15 bp, Homo sapiens
tagagacaggaggtt

SEQ ID NO: 1139315 - DNA, 15 bp, Homo sapiens
gtagagacaggaggt

SEQ ID NO: 1139316 - DNA, 15 bp, Homo sapiens
agtagagacaggagg

SEQ ID NO: 1139317 - DNA, 15 bp, Homo sapiens
tagtagagacaggag

SEQ ID NO: 1139318 - DNA, 15 bp, Homo sapiens
ttagtagagacagga

SEQ ID NO: 1139319 - DNA, 15 bp, Homo sapiens
tagctaattttttgt

SEQ ID NO: 1139320 - DNA, 15 bp, Homo sapiens
ctagctaattttttg

SEQ ID NO: 1139321 - DNA, 15 bp, Homo sapiens
atgccaccatgccta

SEQ ID NO: 1139322 - DNA, 15 bp, Homo sapiens
catgccaccatgcct

SEQ ID NO: 1139323 - DNA, 15 bp, Homo sapiens
ggcatgccaccatgc

SEQ ID NO: 1139324 - DNA, 15 bp, Homo sapiens
aggcatgccaccatg

SEQ ID NO: 1139325 - DNA, 15 bp, Homo sapiens
caggcatgccaccat

SEQ ID NO: 1139326 - DNA, 15 bp, Homo sapiens
acaggcatgccacca

SEQ ID NO: 1139327 - DNA, 15 bp, Homo sapiens
tacaggcatgccacc

SEQ ID NO: 1139328 - DNA, 15 bp, Homo sapiens
ctacaggcatgccac

SEQ ID NO: 1139329 - DNA, 15 bp, Homo sapiens
actacaggcatgcca

SEQ ID NO: 1139330 - DNA, 15 bp, Homo sapiens
atgcctcagcttcct

SEQ ID NO: 1139331 - DNA, 15 bp, Homo sapiens
catgcctcagcttcc

SEQ ID NO: 1139332 - DNA, 15 bp, Homo sapiens
tcatgcctcagcttc

SEQ ID NO: 1139333 - DNA, 15 bp, Homo sapiens
ctcatgcctcagctt

SEQ ID NO: 1139334 - DNA, 15 bp, Homo sapiens
tctcatgcctcagct

SEQ ID NO: 1139335 - DNA, 15 bp, Homo sapiens
tacctcccaggttca

SEQ ID NO: 1139336 - DNA, 15 bp, Homo sapiens
ctacctcccaggttc

SEQ ID NO: 1139337 - DNA, 15 bp, Homo sapiens
tctacctcccaggtt

SEQ ID NO: 1139338 - DNA, 15 bp, Homo sapiens
ctctacctcccaggt

SEQ ID NO: 1139339 - DNA, 15 bp, Homo sapiens
cctctacctcccagg

SEQ ID NO: 1139340 - DNA, 15 bp, Homo sapiens
acctctacctcccag

SEQ ID NO: 1139341 - DNA, 15 bp, Homo sapiens
aacctctacctccca

SEQ ID NO: 1139342 - DNA, 15 bp, Homo sapiens
caacctctacctccc

SEQ ID NO: 1139343 - DNA, 15 bp, Homo sapiens
gcaacctctacctcc

SEQ ID NO: 1139344 - DNA, 15 bp, Homo sapiens
ttggagtgcagtggc

SEQ ID NO: 1139345 - DNA, 15 bp, Homo sapiens
cacccaggttggagt

SEQ ID NO: 1139346 - DNA, 15 bp, Homo sapiens
tcacccaggttggag

SEQ ID NO: 1139347 - DNA, 15 bp, Homo sapiens
gtcacccaggttgga

SEQ ID NO: 1139348 - DNA, 15 bp, Homo sapiens
tgtcacccaggttgg

SEQ ID NO: 1139349 - DNA, 15 bp, Homo sapiens
ttgtcacccaggttg

SEQ ID NO: 1139350 - DNA, 15 bp, Homo sapiens
tttgtcacccaggtt

SEQ ID NO: 1139351 - DNA, 15 bp, Homo sapiens
ctttgtcacccaggt

SEQ ID NO: 1139352 - DNA, 15 bp, Homo sapiens
agagtctcactttgt

SEQ ID NO: 1139353 - DNA, 15 bp, Homo sapiens
cagagtctcactttg

SEQ ID NO: 1139354 - DNA, 15 bp, Homo sapiens
acagagtctcacttt

SEQ ID NO: 1139355 - DNA, 15 bp, Homo sapiens
gacagagtctcactt

SEQ ID NO: 1139356 - DNA, 15 bp, Homo sapiens
gttattttttttgag

SEQ ID NO: 1139357 - DNA, 15 bp, Homo sapiens
tgttattttttttga

SEQ ID NO: 1139358 - DNA, 15 bp, Homo sapiens
ttgttattttttttg

SEQ ID NO: 1139359 - DNA, 15 bp, Homo sapiens
attgttatttttttt

SEQ ID NO: 1139360 - DNA, 15 bp, Homo sapiens
aattgttattttttt

SEQ ID NO: 1139361 - DNA, 15 bp, Homo sapiens
taattgttatttttt

SEQ ID NO: 1139362 - DNA, 15 bp, Homo sapiens
ttaattgttattttt

SEQ ID NO: 1139363 - DNA, 15 bp, Homo sapiens
tttaattgttatttt

SEQ ID NO: 1139364 - DNA, 15 bp, Homo sapiens
ttttaattgttattt

SEQ ID NO: 1139365 - DNA, 15 bp, Homo sapiens
attttaattgttatt

SEQ ID NO: 1139366 - DNA, 15 bp, Homo sapiens
tattttaattgttat

SEQ ID NO: 1139367 - DNA, 15 bp, Homo sapiens
ttattttaattgtta

SEQ ID NO: 1139368 - DNA, 15 bp, Homo sapiens
tttattttaattgtt

SEQ ID NO: 1139369 - DNA, 15 bp, Homo sapiens
ttttattttaattgt

SEQ ID NO: 1139370 - DNA, 15 bp, Homo sapiens
attttattttaattg

SEQ ID NO: 1139371 - DNA, 15 bp, Homo sapiens
gattttattttaatt

SEQ ID NO: 1139372 - DNA, 15 bp, Homo sapiens
tgattttattttaat

SEQ ID NO: 1139373 - DNA, 15 bp, Homo sapiens
gtgattttattttaa

SEQ ID NO: 1139374 - DNA, 15 bp, Homo sapiens
agtgattttatttta

SEQ ID NO: 1139375 - DNA, 15 bp, Homo sapiens
aagtgattttatttt

SEQ ID NO: 1139376 - DNA, 15 bp, Homo sapiens
gaagtgattttattt

SEQ ID NO: 1139377 - DNA, 15 bp, Homo sapiens
agaagtgattttatt

SEQ ID NO: 1139378 - DNA, 15 bp, Homo sapiens
cagaagtgattttat

SEQ ID NO: 1139379 - DNA, 15 bp, Homo sapiens
tcagaagtgatttta

SEQ ID NO: 1139380 - DNA, 15 bp, Homo sapiens
ttcagaagtgatttt

SEQ ID NO: 1139381 - DNA, 15 bp, Homo sapiens
attcagaagtgattt

SEQ ID NO: 1139382 - DNA, 15 bp, Homo sapiens
cattcagaagtgatt

SEQ ID NO: 1139383 - DNA, 15 bp, Homo sapiens
ccattcagaagtgat

SEQ ID NO: 1139384 - DNA, 15 bp, Homo sapiens
accattcagaagtga

SEQ ID NO: 1139385 - DNA, 15 bp, Homo sapiens
caccattcagaagtg

SEQ ID NO: 1139386 - DNA, 15 bp, Homo sapiens
ccaccattcagaagt

SEQ ID NO: 1139387 - DNA, 15 bp, Homo sapiens
tccaccattcagaag

SEQ ID NO: 1139388 - DNA, 15 bp, Homo sapiens
ttccaccattcagaa

SEQ ID NO: 1139389 - DNA, 15 bp, Homo sapiens
tttccaccattcaga

SEQ ID NO: 1139390 - DNA, 15 bp, Homo sapiens
ctttccaccattcag

SEQ ID NO: 1139391 - DNA, 15 bp, Homo sapiens
gctttccaccattca

SEQ ID NO: 1139392 - DNA, 15 bp, Homo sapiens
tgctttccaccattc

SEQ ID NO: 1139393 - DNA, 15 bp, Homo sapiens
gtgctttccaccatt

SEQ ID NO: 1139394 - DNA, 15 bp, Homo sapiens
ggtgctttccaccat

SEQ ID NO: 1139395 - DNA, 15 bp, Homo sapiens
tggtgctttccacca

SEQ ID NO: 1139396 - DNA, 15 bp, Homo sapiens
gtggtgctttccacc

SEQ ID NO: 1139397 - DNA, 15 bp, Homo sapiens
tgtggtgctttccac

SEQ ID NO: 1139398 - DNA, 15 bp, Homo sapiens
ttgtggtgctttcca

SEQ ID NO: 1139399 - DNA, 15 bp, Homo sapiens
tttgtggtgctttcc

SEQ ID NO: 1139400 - DNA, 15 bp, Homo sapiens
ctttgtggtgctttc

SEQ ID NO: 1139401 - DNA, 15 bp, Homo sapiens
actttgtggtgcttt

SEQ ID NO: 1139402 - DNA, 15 bp, Homo sapiens
aactttgtggtgctt

SEQ ID NO: 1139403 - DNA, 15 bp, Homo sapiens
taactttgtggtgct

SEQ ID NO: 1139404 - DNA, 15 bp, Homo sapiens
ctaactttgtggtgc

SEQ ID NO: 1139405 - DNA, 15 bp, Homo sapiens
tctaactttgtggtg

SEQ ID NO: 1139406 - DNA, 15 bp, Homo sapiens
ctctaactttgtggt

SEQ ID NO: 1139407 - DNA, 15 bp, Homo sapiens
cctctaactttgtgg

SEQ ID NO: 1139408 - DNA, 15 bp, Homo sapiens
acctctaactttgtg

SEQ ID NO: 1139409 - DNA, 15 bp, Homo sapiens
gacctctaactttgt

SEQ ID NO: 1139410 - DNA, 15 bp, Homo sapiens
tgacctctaactttg

SEQ ID NO: 1139411 - DNA, 15 bp, Homo sapiens
ttgacctctaacttt

SEQ ID NO: 1139412 - DNA, 15 bp, Homo sapiens
cttgacctctaactt

SEQ ID NO: 1139413 - DNA, 15 bp, Homo sapiens
gcttgacctctaact

SEQ ID NO: 1139414 - DNA, 15 bp, Homo sapiens
tgcttgacctctaac

SEQ ID NO: 1139415 - DNA, 15 bp, Homo sapiens
ttgcttgacctctaa

SEQ ID NO: 1139416 - DNA, 15 bp, Homo sapiens
attgcttgacctcta

SEQ ID NO: 1139417 - DNA, 15 bp, Homo sapiens
tattgcttgacctct

SEQ ID NO: 1139418 - DNA, 15 bp, Homo sapiens
ttattgcttgacctc

SEQ ID NO: 1139419 - DNA, 15 bp, Homo sapiens
attattgcttgacct

SEQ ID NO: 1139420 - DNA, 15 bp, Homo sapiens
aattattgcttgacc

SEQ ID NO: 1139421 - DNA, 15 bp, Homo sapiens
aaattattgcttgac

SEQ ID NO: 1139422 - DNA, 15 bp, Homo sapiens
caaattattgcttga

SEQ ID NO: 1139423 - DNA, 15 bp, Homo sapiens
ccaaattattgcttg

SEQ ID NO: 1139424 - DNA, 15 bp, Homo sapiens
tccaaattattgctt

SEQ ID NO: 1139425 - DNA, 15 bp, Homo sapiens
ctccaaattattgct

SEQ ID NO: 1139426 - DNA, 15 bp, Homo sapiens
tctccaaattattgc

SEQ ID NO: 1139427 - DNA, 15 bp, Homo sapiens
ttctccaaattattg

SEQ ID NO: 1139428 - DNA, 15 bp, Homo sapiens
tttctccaaattatt

SEQ ID NO: 1139429 - DNA, 15 bp, Homo sapiens
ttttctccaaattat

SEQ ID NO: 1139430 - DNA, 15 bp, Homo sapiens
cttttctccaaatta

SEQ ID NO: 1139431 - DNA, 15 bp, Homo sapiens
tcttttctccaaatt

SEQ ID NO: 1139432 - DNA, 15 bp, Homo sapiens
ttcttttctccaaat

SEQ ID NO: 1139433 - DNA, 15 bp, Homo sapiens
attcttttctccaaa

SEQ ID NO: 1139434 - DNA, 15 bp, Homo sapiens
aattcttttctccaa

SEQ ID NO: 1139435 - DNA, 15 bp, Homo sapiens
taattcttttctcca

SEQ ID NO: 1139436 - DNA, 15 bp, Homo sapiens
ctaattcttttctcc

SEQ ID NO: 1139437 - DNA, 15 bp, Homo sapiens
actaattcttttctc

SEQ ID NO: 1139438 - DNA, 15 bp, Homo sapiens
tactaattcttttct

SEQ ID NO: 1139439 - DNA, 15 bp, Homo sapiens
ttactaattcttttc

SEQ ID NO: 1139440 - DNA, 15 bp, Homo sapiens
attactaattctttt

SEQ ID NO: 1139441 - DNA, 15 bp, Homo sapiens
aattactaattcttt

SEQ ID NO: 1139442 - DNA, 15 bp, Homo sapiens
aaattactaattctt

SEQ ID NO: 1139443 - DNA, 15 bp, Homo sapiens
caaattactaattct

SEQ ID NO: 1139444 - DNA, 15 bp, Homo sapiens
acaaattactaattc

SEQ ID NO: 1139445 - DNA, 15 bp, Homo sapiens
aacaaattactaatt

SEQ ID NO: 1139446 - DNA, 15 bp, Homo sapiens
caacaaattactaat

SEQ ID NO: 1139447 - DNA, 15 bp, Homo sapiens
ccaacaaattactaa

SEQ ID NO: 1139448 - DNA, 15 bp, Homo sapiens
tccaacaaattacta

SEQ ID NO: 1139449 - DNA, 15 bp, Homo sapiens
gtccaacaaattact

SEQ ID NO: 1139450 - DNA, 15 bp, Homo sapiens
tgtccaacaaattac

SEQ ID NO: 1139451 - DNA, 15 bp, Homo sapiens
ctgtccaacaaatta

SEQ ID NO: 1139452 - DNA, 15 bp, Homo sapiens
tctgtccaacaaatt

SEQ ID NO: 1139453 - DNA, 15 bp, Homo sapiens
gtctgtccaacaaat

SEQ ID NO: 1139454 - DNA, 15 bp, Homo sapiens
tgtctgtccaacaaa

SEQ ID NO: 1139455 - DNA, 15 bp, Homo sapiens
ttgtctgtccaacaa

SEQ ID NO: 1139456 - DNA, 15 bp, Homo sapiens
tttgtctgtccaaca

SEQ ID NO: 1139457 - DNA, 15 bp, Homo sapiens
ttttgtctgtccaac

SEQ ID NO: 1139458 - DNA, 15 bp, Homo sapiens
cttttgtctgtccaa

SEQ ID NO: 1139459 - DNA, 15 bp, Homo sapiens
tcttttgtctgtcca

SEQ ID NO: 1139460 - DNA, 15 bp, Homo sapiens
gtcttttgtctgtcc

SEQ ID NO: 1139461 - DNA, 15 bp, Homo sapiens
agtcttttgtctgtc

SEQ ID NO: 1139462 - DNA, 15 bp, Homo sapiens
aagtcttttgtctgt

SEQ ID NO: 1139463 - DNA, 15 bp, Homo sapiens
aaagtcttttgtctg

SEQ ID NO: 1139464 - DNA, 15 bp, Homo sapiens
aaaagtcttttgtct

SEQ ID NO: 1139465 - DNA, 15 bp, Homo sapiens
aaaaagtcttttgtc

SEQ ID NO: 1139466 - DNA, 15 bp, Homo sapiens
aaaaaagtcttttgt

SEQ ID NO: 1139467 - DNA, 15 bp, Homo sapiens
taaaaaagtcttttg

SEQ ID NO: 1139468 - DNA, 15 bp, Homo sapiens
ttaaaaaagtctttt

SEQ ID NO: 1139469 - DNA, 15 bp, Homo sapiens
attaaaaaagtcttt

SEQ ID NO: 1139470 - DNA, 15 bp, Homo sapiens
tattaaaaaagtctt

SEQ ID NO: 1139471 - DNA, 15 bp, Homo sapiens
atattaaaaaagtct

SEQ ID NO: 1139472 - DNA, 15 bp, Homo sapiens
tatattaaaaaagtc

SEQ ID NO: 1139473 - DNA, 15 bp, Homo sapiens
ttatattaaaaaagt

SEQ ID NO: 1139474 - DNA, 15 bp, Homo sapiens
gttatattaaaaaag

SEQ ID NO: 1139475 - DNA, 15 bp, Homo sapiens
tgttatattaaaaaa

SEQ ID NO: 1139476 - DNA, 15 bp, Homo sapiens
ttgttatattaaaaa

SEQ ID NO: 1139477 - DNA, 15 bp, Homo sapiens
tttgttatattaaaa

SEQ ID NO: 1139478 - DNA, 15 bp, Homo sapiens
ttttgttatattaaa

SEQ ID NO: 1139479 - DNA, 15 bp, Homo sapiens
tttttgttatattaa

SEQ ID NO: 1139480 - DNA, 15 bp, Homo sapiens
gtttttgttatatta

SEQ ID NO: 1139481 - DNA, 15 bp, Homo sapiens
agtttttgttatatt

SEQ ID NO: 1139482 - DNA, 15 bp, Homo sapiens
aagtttttgttatat

SEQ ID NO: 1139483 - DNA, 15 bp, Homo sapiens
aaagtttttgttata

SEQ ID NO: 1139484 - DNA, 15 bp, Homo sapiens
taaagtttttgttat

SEQ ID NO: 1139485 - DNA, 15 bp, Homo sapiens
ttaaagtttttgtta

SEQ ID NO: 1139486 - DNA, 15 bp, Homo sapiens
tttaaagtttttgtt

SEQ ID NO: 1139487 - DNA, 15 bp, Homo sapiens
ttttaaagtttttgt

SEQ ID NO: 1139488 - DNA, 15 bp, Homo sapiens
tttttaaagtttttg

SEQ ID NO: 1139489 - DNA, 15 bp, Homo sapiens
atttttaaagttttt

SEQ ID NO: 1139490 - DNA, 15 bp, Homo sapiens
aatttttaaagtttt

SEQ ID NO: 1139491 - DNA, 15 bp, Homo sapiens
taatttttaaagttt

SEQ ID NO: 1139492 - DNA, 15 bp, Homo sapiens
ttaatttttaaagtt

SEQ ID NO: 1139493 - DNA, 15 bp, Homo sapiens
tttaatttttaaagt

SEQ ID NO: 1139494 - DNA, 15 bp, Homo sapiens
ttttaatttttaaag

SEQ ID NO: 1139495 - DNA, 15 bp, Homo sapiens
atttttttaattttt

SEQ ID NO: 1139496 - DNA, 15 bp, Homo sapiens
tatttttttaatttt

SEQ ID NO: 1139497 - DNA, 15 bp, Homo sapiens
gtatttttttaattt

SEQ ID NO: 1139498 - DNA, 15 bp, Homo sapiens
tgtatttttttaatt

SEQ ID NO: 1139499 - DNA, 15 bp, Homo sapiens
tgtgtatttttttaa

SEQ ID NO: 1139500 - DNA, 15 bp, Homo sapiens
atgtgtattttttta

SEQ ID NO: 1139501 - DNA, 15 bp, Homo sapiens
aatgtgtattttttt

SEQ ID NO: 1139502 - DNA, 15 bp, Homo sapiens
gaatgtgtatttttt

SEQ ID NO: 1139503 - DNA, 15 bp, Homo sapiens
cgaatgtgtattttt

SEQ ID NO: 1139504 - DNA, 15 bp, Homo sapiens
tcgaatgtgtatttt

SEQ ID NO: 1139505 - DNA, 15 bp, Homo sapiens
ctcgaatgtgtattt

SEQ ID NO: 1139506 - DNA, 15 bp, Homo sapiens
cctcgaatgtgtatt

SEQ ID NO: 1139507 - DNA, 15 bp, Homo sapiens
tcctcgaatgtgtat

SEQ ID NO: 1139508 - DNA, 15 bp, Homo sapiens
gtcctcgaatgtgta

SEQ ID NO: 1139509 - DNA, 15 bp, Homo sapiens
tgtcctcgaatgtgt

SEQ ID NO: 1139510 - DNA, 15 bp, Homo sapiens
atgtcctcgaatgtg

SEQ ID NO: 1139511 - DNA, 15 bp, Homo sapiens
aatgtcctcgaatgt

SEQ ID NO: 1139512 - DNA, 15 bp, Homo sapiens
aaatgtcctcgaatg

SEQ ID NO: 1139513 - DNA, 15 bp, Homo sapiens
aaaatgtcctcgaat

SEQ ID NO: 1139514 - DNA, 15 bp, Homo sapiens
gaaaatgtcctcgaa

SEQ ID NO: 1139515 - DNA, 15 bp, Homo sapiens
ggaaaatgtcctcga

SEQ ID NO: 1139516 - DNA, 15 bp, Homo sapiens
aggaaaatgtcctcg

SEQ ID NO: 1139517 - DNA, 15 bp, Homo sapiens
taggaaaatgtcctc

SEQ ID NO: 1139518 - DNA, 15 bp, Homo sapiens
ttaggaaaatgtcct

SEQ ID NO: 1139519 - DNA, 15 bp, Homo sapiens
tttaggaaaatgtcc

SEQ ID NO: 1139520 - DNA, 15 bp, Homo sapiens
ttttaggaaaatgtc

SEQ ID NO: 1139521 - DNA, 15 bp, Homo sapiens
tttttaggaaaatgt

SEQ ID NO: 1139522 - DNA, 15 bp, Homo sapiens
gtttttaggaaaatg

SEQ ID NO: 1139523 - DNA, 15 bp, Homo sapiens
tgtttttaggaaaat

SEQ ID NO: 1139524 - DNA, 15 bp, Homo sapiens
gtgtttttaggaaaa

SEQ ID NO: 1139525 - DNA, 15 bp, Homo sapiens
tgtgtttttaggaaa

SEQ ID NO: 1139526 - DNA, 15 bp, Homo sapiens
ctgtgtttttaggaa

SEQ ID NO: 1139527 - DNA, 15 bp, Homo sapiens
cctgtgtttttagga

SEQ ID NO: 1139528 - DNA, 15 bp, Homo sapiens
gcctgtgtttttagg

SEQ ID NO: 1139529 - DNA, 15 bp, Homo sapiens
tgcctgtgtttttag

SEQ ID NO: 1139530 - DNA, 15 bp, Homo sapiens
ttgcctgtgttttta

SEQ ID NO: 1139531 - DNA, 15 bp, Homo sapiens
tttgcctgtgttttt

SEQ ID NO: 1139532 - DNA, 15 bp, Homo sapiens
ctttgcctgtgtttt

SEQ ID NO: 1139533 - DNA, 15 bp, Homo sapiens
cctttgcctgtgttt

SEQ ID NO: 1139534 - DNA, 15 bp, Homo sapiens
tcctttgcctgtgtt

SEQ ID NO: 1139535 - DNA, 15 bp, Homo sapiens
gtcctttgcctgtgt

SEQ ID NO: 1139536 - DNA, 15 bp, Homo sapiens
tgtcctttgcctgtg

SEQ ID NO: 1139537 - DNA, 15 bp, Homo sapiens
atgtcctttgcctgt

SEQ ID NO: 1139538 - DNA, 15 bp, Homo sapiens
tatgtcctttgcctg

SEQ ID NO: 1139539 - DNA, 15 bp, Homo sapiens
ttatgtcctttgcct

SEQ ID NO: 1139540 - DNA, 15 bp, Homo sapiens
tttatgtcctttgcc

SEQ ID NO: 1139541 - DNA, 15 bp, Homo sapiens
gtttatgtcctttgc

SEQ ID NO: 1139542 - DNA, 15 bp, Homo sapiens
tgtttatgtcctttg

SEQ ID NO: 1139543 - DNA, 15 bp, Homo sapiens
ctgtttatgtccttt

SEQ ID NO: 1139544 - DNA, 15 bp, Homo sapiens
gctgtttatgtcctt

SEQ ID NO: 1139545 - DNA, 15 bp, Homo sapiens
tgctgtttatgtcct

SEQ ID NO: 1139546 - DNA, 15 bp, Homo sapiens
ttgctgtttatgtcc

SEQ ID NO: 1139547 - DNA, 15 bp, Homo sapiens
tttgctgtttatgtc

SEQ ID NO: 1139548 - DNA, 15 bp, Homo sapiens
ctttgctgtttatgt

SEQ ID NO: 1139549 - DNA, 15 bp, Homo sapiens
gctttgctgtttatg

SEQ ID NO: 1139550 - DNA, 15 bp, Homo sapiens
tgctttgctgtttat

SEQ ID NO: 1139551 - DNA, 15 bp, Homo sapiens
ttgctttgctgttta

SEQ ID NO: 1139552 - DNA, 15 bp, Homo sapiens
cttgctttgctgttt

SEQ ID NO: 1139553 - DNA, 15 bp, Homo sapiens
tcttgctttgctgtt

SEQ ID NO: 1139554 - DNA, 15 bp, Homo sapiens
ttcttgctttgctgt

SEQ ID NO: 1139555 - DNA, 15 bp, Homo sapiens
cttcttgctttgctg

SEQ ID NO: 1139556 - DNA, 15 bp, Homo sapiens
tcttcttgctttgct

SEQ ID NO: 1139557 - DNA, 15 bp, Homo sapiens
gtcttcttgctttgc

SEQ ID NO: 1139558 - DNA, 15 bp, Homo sapiens
tgtcttcttgctttg

SEQ ID NO: 1139559 - DNA, 15 bp, Homo sapiens
ctgtcttcttgcttt

SEQ ID NO: 1139560 - DNA, 15 bp, Homo sapiens
gctgtcttcttgctt

SEQ ID NO: 1139561 - DNA, 15 bp, Homo sapiens
agctgtcttcttgct

SEQ ID NO: 1139562 - DNA, 15 bp, Homo sapiens
aagctgtcttcttgc

SEQ ID NO: 1139563 - DNA, 15 bp, Homo sapiens
caagctgtcttcttg

SEQ ID NO: 1139564 - DNA, 15 bp, Homo sapiens
tcaagctgtcttctt

SEQ ID NO: 1139565 - DNA, 15 bp, Homo sapiens
atcaagctgtcttct

SEQ ID NO: 1139566 - DNA, 15 bp, Homo sapiens
catcaagctgtcttc

SEQ ID NO: 1139567 - DNA, 15 bp, Homo sapiens
acatcaagctgtctt

SEQ ID NO: 1139568 - DNA, 15 bp, Homo sapiens
cacatcaagctgtct

SEQ ID NO: 1139569 - DNA, 15 bp, Homo sapiens
ccacatcaagctgtc

SEQ ID NO: 1139570 - DNA, 15 bp, Homo sapiens
gccacatcaagctgt

SEQ ID NO: 1139571 - DNA, 15 bp, Homo sapiens
ggccacatcaagctg

SEQ ID NO: 1139572 - DNA, 15 bp, Homo sapiens
tggccacatcaagct

SEQ ID NO: 1139573 - DNA, 15 bp, Homo sapiens
atggccacatcaagc

SEQ ID NO: 1139574 - DNA, 15 bp, Homo sapiens
aatggccacatcaag

SEQ ID NO: 1139575 - DNA, 15 bp, Homo sapiens
aaatggccacatcaa

SEQ ID NO: 1139576 - DNA, 15 bp, Homo sapiens
aaaatggccacatca

SEQ ID NO: 1139577 - DNA, 15 bp, Homo sapiens
taaaatggccacatc

SEQ ID NO: 1139578 - DNA, 15 bp, Homo sapiens
ataaaatggccacat

SEQ ID NO: 1139579 - DNA, 15 bp, Homo sapiens
gataaaatggccaca

SEQ ID NO: 1139580 - DNA, 15 bp, Homo sapiens
ggataaaatggccac

SEQ ID NO: 1139581 - DNA, 15 bp, Homo sapiens
tggataaaatggcca

SEQ ID NO: 1139582 - DNA, 15 bp, Homo sapiens
ctggataaaatggcc

SEQ ID NO: 1139583 - DNA, 15 bp, Homo sapiens
cctggataaaatggc

SEQ ID NO: 1139584 - DNA, 15 bp, Homo sapiens
ccctggataaaatgg

SEQ ID NO: 1139585 - DNA, 15 bp, Homo sapiens
cccctggataaaatg

SEQ ID NO: 1139586 - DNA, 15 bp, Homo sapiens
ccccctggataaaat

SEQ ID NO: 1139587 - DNA, 15 bp, Homo sapiens
tccccctggataaaa

SEQ ID NO: 1139588 - DNA, 15 bp, Homo sapiens
gtccccctggataaa

SEQ ID NO: 1139589 - DNA, 15 bp, Homo sapiens
tgtccccctggataa

SEQ ID NO: 1139590 - DNA, 15 bp, Homo sapiens
atgtccccctggata

SEQ ID NO: 1139591 - DNA, 15 bp, Homo sapiens
aatgtccccctggat

SEQ ID NO: 1139592 - DNA, 15 bp, Homo sapiens
aaatgtccccctgga

SEQ ID NO: 1139593 - DNA, 15 bp, Homo sapiens
aaaatgtccccctgg

SEQ ID NO: 1139594 - DNA, 15 bp, Homo sapiens
caaaatgtccccctg

SEQ ID NO: 1139595 - DNA, 15 bp, Homo sapiens
ccaaaatgtccccct

SEQ ID NO: 1139596 - DNA, 15 bp, Homo sapiens
accaaaatgtccccc

SEQ ID NO: 1139597 - DNA, 15 bp, Homo sapiens
caccaaaatgtcccc

SEQ ID NO: 1139598 - DNA, 15 bp, Homo sapiens
tcaccaaaatgtccc

SEQ ID NO: 1139599 - DNA, 15 bp, Homo sapiens
ctcaccaaaatgtcc

SEQ ID NO: 1139600 - DNA, 15 bp, Homo sapiens
gctcaccaaaatgtc

SEQ ID NO: 1139601 - DNA, 15 bp, Homo sapiens
ggctcaccaaaatgt

SEQ ID NO: 1139602 - DNA, 15 bp, Homo sapiens
gggctcaccaaaatg

SEQ ID NO: 1139603 - DNA, 15 bp, Homo sapiens
agggctcaccaaaat

SEQ ID NO: 1139604 - DNA, 15 bp, Homo sapiens
tagggctcaccaaaa

SEQ ID NO: 1139605 - DNA, 15 bp, Homo sapiens
atagggctcaccaaa

SEQ ID NO: 1139606 - DNA, 15 bp, Homo sapiens
catagggctcaccaa

SEQ ID NO: 1139607 - DNA, 15 bp, Homo sapiens
ccatagggctcacca

SEQ ID NO: 1139608 - DNA, 15 bp, Homo sapiens
tccatagggctcacc

SEQ ID NO: 1139609 - DNA, 15 bp, Homo sapiens
gtccatagggctcac

SEQ ID NO: 1139610 - DNA, 15 bp, Homo sapiens
tgtccatagggctca

SEQ ID NO: 1139611 - DNA, 15 bp, Homo sapiens
gtgtccatagggctc

SEQ ID NO: 1139612 - DNA, 15 bp, Homo sapiens
tgtgtccatagggct

SEQ ID NO: 1139613 - DNA, 15 bp, Homo sapiens
ctgtgtccatagggc

SEQ ID NO: 1139614 - DNA, 15 bp, Homo sapiens
gctgtgtccataggg

SEQ ID NO: 1139615 - DNA, 15 bp, Homo sapiens
agctgtgtccatagg

SEQ ID NO: 1139616 - DNA, 15 bp, Homo sapiens
cagctgtgtccatag

SEQ ID NO: 1139617 - DNA, 15 bp, Homo sapiens
gcagctgtgtccata

SEQ ID NO: 1139618 - DNA, 15 bp, Homo sapiens
ggcagctgtgtccat

SEQ ID NO: 1139619 - DNA, 15 bp, Homo sapiens
tggcagctgtgtcca

SEQ ID NO: 1139620 - DNA, 15 bp, Homo sapiens
atggcagctgtgtcc

SEQ ID NO: 1139621 - DNA, 15 bp, Homo sapiens
catggcagctgtgtc

SEQ ID NO: 1139622 - DNA, 15 bp, Homo sapiens
tcatggcagctgtgt

SEQ ID NO: 1139623 - DNA, 15 bp, Homo sapiens
atcatggcagctgtg

SEQ ID NO: 1139624 - DNA, 15 bp, Homo sapiens
catcatggcagctgt

SEQ ID NO: 1139625 - DNA, 15 bp, Homo sapiens
gcatcatggcagctg

SEQ ID NO: 1139626 - DNA, 15 bp, Homo sapiens
ggcatcatggcagct

SEQ ID NO: 1139627 - DNA, 15 bp, Homo sapiens
tggcatcatggcagc

SEQ ID NO: 1139628 - DNA, 15 bp, Homo sapiens
ttggcatcatggcag

SEQ ID NO: 1139629 - DNA, 15 bp, Homo sapiens
gttggcatcatggca

SEQ ID NO: 1139630 - DNA, 15 bp, Homo sapiens
tgttggcatcatggc

SEQ ID NO: 1139631 - DNA, 15 bp, Homo sapiens
ttgttggcatcatgg

SEQ ID NO: 1139632 - DNA, 15 bp, Homo sapiens
attgttggcatcatg

SEQ ID NO: 1139633 - DNA, 15 bp, Homo sapiens
cattgttggcatcat

SEQ ID NO: 1139634 - DNA, 15 bp, Homo sapiens
acattgttggcatca

SEQ ID NO: 1139635 - DNA, 15 bp, Homo sapiens
cacattgttggcatc

SEQ ID NO: 1139636 - DNA, 15 bp, Homo sapiens
tcacattgttggcat

SEQ ID NO: 1139637 - DNA, 15 bp, Homo sapiens
gtcacattgttggca

SEQ ID NO: 1139638 - DNA, 15 bp, Homo sapiens
tgtcacattgttggc

SEQ ID NO: 1139639 - DNA, 15 bp, Homo sapiens
ctgtcacattgttgg

SEQ ID NO: 1139640 - DNA, 15 bp, Homo sapiens
gctgtcacattgttg

SEQ ID NO: 1139641 - DNA, 15 bp, Homo sapiens
agctgtcacattgtt

SEQ ID NO: 1139642 - DNA, 15 bp, Homo sapiens
cagctgtcacattgt

SEQ ID NO: 1139643 - DNA, 15 bp, Homo sapiens
acagctgtcacattg

SEQ ID NO: 1139644 - DNA, 15 bp, Homo sapiens
gacagctgtcacatt

SEQ ID NO: 1139645 - DNA, 15 bp, Homo sapiens
ggacagctgtcacat

SEQ ID NO: 1139646 - DNA, 15 bp, Homo sapiens
gggacagctgtcaca

SEQ ID NO: 1139647 - DNA, 15 bp, Homo sapiens
ggggacagctgtcac

SEQ ID NO: 1139648 - DNA, 15 bp, Homo sapiens
aggggacagctgtca

SEQ ID NO: 1139649 - DNA, 15 bp, Homo sapiens
aaggggacagctgtc

SEQ ID NO: 1139650 - DNA, 15 bp, Homo sapiens
gaaggggacagctgt

SEQ ID NO: 1139651 - DNA, 15 bp, Homo sapiens
ttgaaggggacagct

SEQ ID NO: 1139652 - DNA, 15 bp, Homo sapiens
tttgaaggggacagc

SEQ ID NO: 1139653 - DNA, 15 bp, Homo sapiens
ttttgaaggggacag

SEQ ID NO: 1139654 - DNA, 15 bp, Homo sapiens
attttgaaggggaca

SEQ ID NO: 1139655 - DNA, 15 bp, Homo sapiens
cattttgaaggggac

SEQ ID NO: 1139656 - DNA, 15 bp, Homo sapiens
gcattttgaagggga

SEQ ID NO: 1139657 - DNA, 15 bp, Homo sapiens
cgcattttgaagggg

SEQ ID NO: 1139658 - DNA, 15 bp, Homo sapiens
acgcattttgaaggg

SEQ ID NO: 1139659 - DNA, 15 bp, Homo sapiens
aacgcattttgaagg

SEQ ID NO: 1139660 - DNA, 15 bp, Homo sapiens
taacgcattttgaag

SEQ ID NO: 1139661 - DNA, 15 bp, Homo sapiens
ctaacgcattttgaa

SEQ ID NO: 1139662 - DNA, 15 bp, Homo sapiens
gctaacgcattttga

SEQ ID NO: 1139663 - DNA, 15 bp, Homo sapiens
ggctaacgcattttg

SEQ ID NO: 1139664 - DNA, 15 bp, Homo sapiens
gggctaacgcatttt

SEQ ID NO: 1139665 - DNA, 15 bp, Homo sapiens
ggggctaacgcattt

SEQ ID NO: 1139666 - DNA, 15 bp, Homo sapiens
tggggctaacgcatt

SEQ ID NO: 1139667 - DNA, 15 bp, Homo sapiens
ctggggctaacgcat

SEQ ID NO: 1139668 - DNA, 15 bp, Homo sapiens
gctggggctaacgca

SEQ ID NO: 1139669 - DNA, 15 bp, Homo sapiens
agctggggctaacgc

SEQ ID NO: 1139670 - DNA, 15 bp, Homo sapiens
gagctggggctaacg

SEQ ID NO: 1139671 - DNA, 15 bp, Homo sapiens
agagctggggctaac

SEQ ID NO: 1139672 - DNA, 15 bp, Homo sapiens
aagagctggggctaa

SEQ ID NO: 1139673 - DNA, 15 bp, Homo sapiens
gaagagctggggcta

SEQ ID NO: 1139674 - DNA, 15 bp, Homo sapiens
ggaagagctggggct

SEQ ID NO: 1139675 - DNA, 15 bp, Homo sapiens
aggaagagctggggc

SEQ ID NO: 1139676 - DNA, 15 bp, Homo sapiens
gaggaagagctgggg

SEQ ID NO: 1139677 - DNA, 15 bp, Homo sapiens
agaggaagagctggg

SEQ ID NO: 1139678 - DNA, 15 bp, Homo sapiens
gagaggaagagctgg

SEQ ID NO: 1139679 - DNA, 15 bp, Homo sapiens
ggagaggaagagctg

SEQ ID NO: 1139680 - DNA, 15 bp, Homo sapiens
gggagaggaagagct

SEQ ID NO: 1139681 - DNA, 15 bp, Homo sapiens
ggggagaggaagagc

SEQ ID NO: 1139682 - DNA, 15 bp, Homo sapiens
gggggagaggaagag

SEQ ID NO: 1139683 - DNA, 15 bp, Homo sapiens
tgggggagaggaaga

SEQ ID NO: 1139684 - DNA, 15 bp, Homo sapiens
ttgggggagaggaag

SEQ ID NO: 1139685 - DNA, 15 bp, Homo sapiens
gttgggggagaggaa

SEQ ID NO: 1139686 - DNA, 15 bp, Homo sapiens
ggttgggggagagga

SEQ ID NO: 1139687 - DNA, 15 bp, Homo sapiens
aggttgggggagagg

SEQ ID NO: 1139688 - DNA, 15 bp, Homo sapiens
gaggttgggggagag

SEQ ID NO: 1139689 - DNA, 15 bp, Homo sapiens
ggaggttgggggaga

SEQ ID NO: 1139690 - DNA, 15 bp, Homo sapiens
tggaggttgggggag

SEQ ID NO: 1139691 - DNA, 15 bp, Homo sapiens
ctggaggttggggga

SEQ ID NO: 1139692 - DNA, 15 bp, Homo sapiens
actggaggttggggg

SEQ ID NO: 1139693 - DNA, 15 bp, Homo sapiens
gactggaggttgggg

SEQ ID NO: 1139694 - DNA, 15 bp, Homo sapiens
ggactggaggttggg

SEQ ID NO: 1139695 - DNA, 15 bp, Homo sapiens
tggactggaggttgg

SEQ ID NO: 1139696 - DNA, 15 bp, Homo sapiens
ttggactggaggttg

SEQ ID NO: 1139697 - DNA, 15 bp, Homo sapiens
tttggactggaggtt

SEQ ID NO: 1139698 - DNA, 15 bp, Homo sapiens
ctttggactggaggt

SEQ ID NO: 1139699 - DNA, 15 bp, Homo sapiens
cctttggactggagg

SEQ ID NO: 1139700 - DNA, 15 bp, Homo sapiens
tcctttggactggag

SEQ ID NO: 1139701 - DNA, 15 bp, Homo sapiens
gtcctttggactgga

SEQ ID NO: 1139702 - DNA, 15 bp, Homo sapiens
agtcctttggactgg

SEQ ID NO: 1139703 - DNA, 15 bp, Homo sapiens
aagtcctttggactg

SEQ ID NO: 1139704 - DNA, 15 bp, Homo sapiens
caagtcctttggact

SEQ ID NO: 1139705 - DNA, 15 bp, Homo sapiens
gcaagtcctttggac

SEQ ID NO: 1139706 - DNA, 15 bp, Homo sapiens
tgcaagtcctttgga

SEQ ID NO: 1139707 - DNA, 15 bp, Homo sapiens
gtgcaagtcctttgg

SEQ ID NO: 1139708 - DNA, 15 bp, Homo sapiens
agtgcaagtcctttg

SEQ ID NO: 1139709 - DNA, 15 bp, Homo sapiens
aagtgcaagtccttt

SEQ ID NO: 1139710 - DNA, 15 bp, Homo sapiens
aaagtgcaagtcctt

SEQ ID NO: 1139711 - DNA, 15 bp, Homo sapiens
gaaagtgcaagtcct

SEQ ID NO: 1139712 - DNA, 15 bp, Homo sapiens
agaaagtgcaagtcc

SEQ ID NO: 1139713 - DNA, 15 bp, Homo sapiens
tagaaagtgcaagtc

SEQ ID NO: 1139714 - DNA, 15 bp, Homo sapiens
gtagaaagtgcaagt

SEQ ID NO: 1139715 - DNA, 15 bp, Homo sapiens
agtagaaagtgcaag

SEQ ID NO: 1139716 - DNA, 15 bp, Homo sapiens
aagtagaaagtgcaa

SEQ ID NO: 1139717 - DNA, 15 bp, Homo sapiens
aaagtagaaagtgca

SEQ ID NO: 1139718 - DNA, 15 bp, Homo sapiens
taaagtagaaagtgc

SEQ ID NO: 1139719 - DNA, 15 bp, Homo sapiens
gtaaagtagaaagtg

SEQ ID NO: 1139720 - DNA, 15 bp, Homo sapiens
agtaaagtagaaagt

SEQ ID NO: 1139721 - DNA, 15 bp, Homo sapiens
gagtaaagtagaaag

SEQ ID NO: 1139722 - DNA, 15 bp, Homo sapiens
ggagtaaagtagaaa

SEQ ID NO: 1139723 - DNA, 15 bp, Homo sapiens
aggagtaaagtagaa

SEQ ID NO: 1139724 - DNA, 15 bp, Homo sapiens
aaggagtaaagtaga

SEQ ID NO: 1139725 - DNA, 15 bp, Homo sapiens
aaaggagtaaagtag

SEQ ID NO: 1139726 - DNA, 15 bp, Homo sapiens
gaaaggagtaaagta

SEQ ID NO: 1139727 - DNA, 15 bp, Homo sapiens
agaaaggagtaaagt

SEQ ID NO: 1139728 - DNA, 15 bp, Homo sapiens
cagaaaggagtaaag

SEQ ID NO: 1139729 - DNA, 15 bp, Homo sapiens
gcagaaaggagtaaa

SEQ ID NO: 1139730 - DNA, 15 bp, Homo sapiens
tgcagaaaggagtaa

SEQ ID NO: 1139731 - DNA, 15 bp, Homo sapiens
atgcagaaaggagta

SEQ ID NO: 1139732 - DNA, 15 bp, Homo sapiens
aatgcagaaaggagt

SEQ ID NO: 1139733 - DNA, 15 bp, Homo sapiens
caatgcagaaaggag

SEQ ID NO: 1139734 - DNA, 15 bp, Homo sapiens
acaatgcagaaagga

SEQ ID NO: 1139735 - DNA, 15 bp, Homo sapiens
aacaatgcagaaagg

SEQ ID NO: 1139736 - DNA, 15 bp, Homo sapiens
aaacaatgcagaaag

SEQ ID NO: 1139737 - DNA, 15 bp, Homo sapiens
taaacaatgcagaaa

SEQ ID NO: 1139738 - DNA, 15 bp, Homo sapiens
ttaaacaatgcagaa

SEQ ID NO: 1139739 - DNA, 15 bp, Homo sapiens
attaaacaatgcaga

SEQ ID NO: 1139740 - DNA, 15 bp, Homo sapiens
aattaaacaatgcag

SEQ ID NO: 1139741 - DNA, 15 bp, Homo sapiens
aaattaaacaatgca

SEQ ID NO: 1139742 - DNA, 15 bp, Homo sapiens
aaaattaaacaatgc

SEQ ID NO: 1139743 - DNA, 15 bp, Homo sapiens
gaaaattaaacaatg

SEQ ID NO: 1139744 - DNA, 15 bp, Homo sapiens
agaaaattaaacaat

SEQ ID NO: 1139745 - DNA, 15 bp, Homo sapiens
aagaaaattaaacaa

SEQ ID NO: 1139746 - DNA, 15 bp, Homo sapiens
aaagaaaattaaaca

SEQ ID NO: 1139747 - DNA, 15 bp, Homo sapiens
aaaagaaaattaaac

SEQ ID NO: 1139748 - DNA, 15 bp, Homo sapiens
taaaagaaaattaaa

SEQ ID NO: 1139749 - DNA, 15 bp, Homo sapiens
gtaaaagaaaattaa

SEQ ID NO: 1139750 - DNA, 15 bp, Homo sapiens
tgtaaaagaaaatta

SEQ ID NO: 1139751 - DNA, 15 bp, Homo sapiens
ttgtaaaagaaaatt

SEQ ID NO: 1139752 - DNA, 15 bp, Homo sapiens
tttgtaaaagaaaat

SEQ ID NO: 1139753 - DNA, 15 bp, Homo sapiens
atttgtaaaagaaaa

SEQ ID NO: 1139754 - DNA, 15 bp, Homo sapiens
tatttgtaaaagaaa

SEQ ID NO: 1139755 - DNA, 15 bp, Homo sapiens
atatttgtaaaagaa

SEQ ID NO: 1139756 - DNA, 15 bp, Homo sapiens
catatttgtaaaaga

SEQ ID NO: 1139757 - DNA, 15 bp, Homo sapiens
acatatttgtaaaag

SEQ ID NO: 1139758 - DNA, 15 bp, Homo sapiens
aacatatttgtaaaa

SEQ ID NO: 1139759 - DNA, 15 bp, Homo sapiens
taacatatttgtaaa

SEQ ID NO: 1139760 - DNA, 15 bp, Homo sapiens
gtaacatatttgtaa

SEQ ID NO: 1139761 - DNA, 15 bp, Homo sapiens
agtaacatatttgta

SEQ ID NO: 1139762 - DNA, 15 bp, Homo sapiens
aagtaacatatttgt

SEQ ID NO: 1139763 - DNA, 15 bp, Homo sapiens
caagtaacatatttg

SEQ ID NO: 1139764 - DNA, 15 bp, Homo sapiens
acaagtaacatattt

SEQ ID NO: 1139765 - DNA, 15 bp, Homo sapiens
gacaagtaacatatt

SEQ ID NO: 1139766 - DNA, 15 bp, Homo sapiens
tgacaagtaacatat

SEQ ID NO: 1139767 - DNA, 15 bp, Homo sapiens
atgacaagtaacata

SEQ ID NO: 1139768 - DNA, 15 bp, Homo sapiens
gatgacaagtaacat

SEQ ID NO: 1139769 - DNA, 15 bp, Homo sapiens
tgatgacaagtaaca

SEQ ID NO: 1139770 - DNA, 15 bp, Homo sapiens
ctgatgacaagtaac

SEQ ID NO: 1139771 - DNA, 15 bp, Homo sapiens
tctgatgacaagtaa

SEQ ID NO: 1139772 - DNA, 15 bp, Homo sapiens
ttctgatgacaagta

SEQ ID NO: 1139773 - DNA, 15 bp, Homo sapiens
tttctgatgacaagt

SEQ ID NO: 1139774 - DNA, 15 bp, Homo sapiens
ttttctgatgacaag

SEQ ID NO: 1139775 - DNA, 15 bp, Homo sapiens
tttttctgatgacaa

SEQ ID NO: 1139776 - DNA, 15 bp, Homo sapiens
ttttttctgatgaca

SEQ ID NO: 1139777 - DNA, 15 bp, Homo sapiens
attttttctgatgac

SEQ ID NO: 1139778 - DNA, 15 bp, Homo sapiens
tattttttctgatga

SEQ ID NO: 1139779 - DNA, 15 bp, Homo sapiens
ttattttttctgatg

SEQ ID NO: 1139780 - DNA, 15 bp, Homo sapiens
tttattttttctgat

SEQ ID NO: 1139781 - DNA, 15 bp, Homo sapiens
ctttattttttctga

SEQ ID NO: 1139782 - DNA, 15 bp, Homo sapiens
tctttattttttctg

SEQ ID NO: 1139783 - DNA, 15 bp, Homo sapiens
ttctttattttttct

SEQ ID NO: 1139784 - DNA, 15 bp, Homo sapiens
tttctttattttttc

SEQ ID NO: 1139785 - DNA, 15 bp, Homo sapiens
atttctttatttttt

SEQ ID NO: 1139786 - DNA, 15 bp, Homo sapiens
tatttctttattttt

SEQ ID NO: 1139787 - DNA, 15 bp, Homo sapiens
ttatttctttatttt

SEQ ID NO: 1139788 - DNA, 15 bp, Homo sapiens
tttatttctttattt

SEQ ID NO: 1139789 - DNA, 15 bp, Homo sapiens
atttatttctttatt

SEQ ID NO: 1139790 - DNA, 15 bp, Homo sapiens
tatttatttctttat

SEQ ID NO: 1139791 - DNA, 15 bp, Homo sapiens
ttatttatttcttta

SEQ ID NO: 1139792 - DNA, 15 bp, Homo sapiens
tttatttatttcttt

SEQ ID NO: 1139793 - DNA, 15 bp, Homo sapiens
gtttatttatttctt

SEQ ID NO: 1139794 - DNA, 15 bp, Homo sapiens
agtttatttatttct

SEQ ID NO: 1139795 - DNA, 15 bp, Homo sapiens
cagtttatttatttc

SEQ ID NO: 1139796 - DNA, 15 bp, Homo sapiens
acagtttatttattt

SEQ ID NO: 1139797 - DNA, 15 bp, Homo sapiens
aacagtttatttatt

SEQ ID NO: 1139798 - DNA, 15 bp, Homo sapiens
taacagtttatttat

SEQ ID NO: 1139799 - DNA, 15 bp, Homo sapiens
ctaacagtttattta

SEQ ID NO: 1139800 - DNA, 15 bp, Homo sapiens
tctaacagtttattt

SEQ ID NO: 1139801 - DNA, 15 bp, Homo sapiens
ctctaacagtttatt

SEQ ID NO: 1139802 - DNA, 15 bp, Homo sapiens
actctaacagtttat

SEQ ID NO: 1139803 - DNA, 15 bp, Homo sapiens
cactctaacagttta

SEQ ID NO: 1139804 - DNA, 15 bp, Homo sapiens
acactctaacagttt

SEQ ID NO: 1139805 - DNA, 15 bp, Homo sapiens
aacactctaacagtt

SEQ ID NO: 1139806 - DNA, 15 bp, Homo sapiens
taacactctaacagt

SEQ ID NO: 1139807 - DNA, 15 bp, Homo sapiens
ctaacactctaacag

SEQ ID NO: 1139808 - DNA, 15 bp, Homo sapiens
gctaacactctaaca

SEQ ID NO: 1139809 - DNA, 15 bp, Homo sapiens
ggctaacactctaac

SEQ ID NO: 1139810 - DNA, 15 bp, Homo sapiens
gggctaacactctaa

SEQ ID NO: 1139811 - DNA, 15 bp, Homo sapiens
ggggctaacactcta

SEQ ID NO: 1139812 - DNA, 15 bp, Homo sapiens
aggggctaacactct

SEQ ID NO: 1139813 - DNA, 15 bp, Homo sapiens
aaggggctaacactc

SEQ ID NO: 1139814 - DNA, 15 bp, Homo sapiens
taaggggctaacact

SEQ ID NO: 1139815 - DNA, 15 bp, Homo sapiens
ttaaggggctaacac

SEQ ID NO: 1139816 - DNA, 15 bp, Homo sapiens
tttaaggggctaaca

SEQ ID NO: 1139817 - DNA, 15 bp, Homo sapiens
ctttaaggggctaac

SEQ ID NO: 1139818 - DNA, 15 bp, Homo sapiens
cctttaaggggctaa

SEQ ID NO: 1139819 - DNA, 15 bp, Homo sapiens
ccctttaaggggcta

SEQ ID NO: 1139820 - DNA, 15 bp, Homo sapiens
cccctttaaggggct

SEQ ID NO: 1139821 - DNA, 15 bp, Homo sapiens
tcccctttaaggggc

SEQ ID NO: 1139822 - DNA, 15 bp, Homo sapiens
ctcccctttaagggg

SEQ ID NO: 1139823 - DNA, 15 bp, Homo sapiens
gctcccctttaaggg

SEQ ID NO: 1139824 - DNA, 15 bp, Homo sapiens
tgctcccctttaagg

SEQ ID NO: 1139825 - DNA, 15 bp, Homo sapiens
ttgctcccctttaag

SEQ ID NO: 1139826 - DNA, 15 bp, Homo sapiens
cttgctcccctttaa

SEQ ID NO: 1139827 - DNA, 15 bp, Homo sapiens
tcttgctccccttta

SEQ ID NO: 1139828 - DNA, 15 bp, Homo sapiens
ttcttgctccccttt

SEQ ID NO: 1139829 - DNA, 15 bp, Homo sapiens
attcttgctcccctt

SEQ ID NO: 1139830 - DNA, 15 bp, Homo sapiens
gattcttgctcccct

SEQ ID NO: 1139831 - DNA, 15 bp, Homo sapiens
tgattcttgctcccc

SEQ ID NO: 1139832 - DNA, 15 bp, Homo sapiens
gtgattcttgctccc

SEQ ID NO: 1139833 - DNA, 15 bp, Homo sapiens
ggtgattcttgctcc

SEQ ID NO: 1139834 - DNA, 15 bp, Homo sapiens
aggtgattcttgctc

SEQ ID NO: 1139835 - DNA, 15 bp, Homo sapiens
aaggtgattcttgct

SEQ ID NO: 1139836 - DNA, 15 bp, Homo sapiens
aaaggtgattcttgc

SEQ ID NO: 1139837 - DNA, 15 bp, Homo sapiens
gaaaggtgattcttg

SEQ ID NO: 1139838 - DNA, 15 bp, Homo sapiens
agaaaggtgattctt

SEQ ID NO: 1139839 - DNA, 15 bp, Homo sapiens
tagaaaggtgattct

SEQ ID NO: 1139840 - DNA, 15 bp, Homo sapiens
ttagaaaggtgattc

SEQ ID NO: 1139841 - DNA, 15 bp, Homo sapiens
tttagaaaggtgatt

SEQ ID NO: 1139842 - DNA, 15 bp, Homo sapiens
ttttagaaaggtgat

SEQ ID NO: 1139843 - DNA, 15 bp, Homo sapiens
cttttagaaaggtga

SEQ ID NO: 1139844 - DNA, 15 bp, Homo sapiens
tcttttagaaaggtg

SEQ ID NO: 1139845 - DNA, 15 bp, Homo sapiens
ttcttttagaaaggt

SEQ ID NO: 1139846 - DNA, 15 bp, Homo sapiens
tttcttttagaaagg

SEQ ID NO: 1139847 - DNA, 15 bp, Homo sapiens
ctttcttttagaaag

SEQ ID NO: 1139848 - DNA, 15 bp, Homo sapiens
actttcttttagaaa

SEQ ID NO: 1139849 - DNA, 15 bp, Homo sapiens
aactttcttttagaa

SEQ ID NO: 1139850 - DNA, 15 bp, Homo sapiens
aaactttcttttaga

SEQ ID NO: 1139851 - DNA, 15 bp, Homo sapiens
taaactttcttttag

SEQ ID NO: 1139852 - DNA, 15 bp, Homo sapiens
ataaactttctttta

SEQ ID NO: 1139853 - DNA, 15 bp, Homo sapiens
cataaactttctttt

SEQ ID NO: 1139854 - DNA, 15 bp, Homo sapiens
acataaactttcttt

SEQ ID NO: 1139855 - DNA, 15 bp, Homo sapiens
aacataaactttctt

SEQ ID NO: 1139856 - DNA, 15 bp, Homo sapiens
taacataaactttct

SEQ ID NO: 1139857 - DNA, 15 bp, Homo sapiens
ttaacataaactttc

SEQ ID NO: 1139858 - DNA, 15 bp, Homo sapiens
tttaacataaacttt

SEQ ID NO: 1139859 - DNA, 15 bp, Homo sapiens
atttaacataaactt

SEQ ID NO: 1139860 - DNA, 15 bp, Homo sapiens
tatttaacataaact

SEQ ID NO: 1139861 - DNA, 15 bp, Homo sapiens
atatttaacataaac

SEQ ID NO: 1139862 - DNA, 15 bp, Homo sapiens
tatatttaacataaa

SEQ ID NO: 1139863 - DNA, 15 bp, Homo sapiens
ttatatttaacataa

SEQ ID NO: 1139864 - DNA, 15 bp, Homo sapiens
attatatttaacata

SEQ ID NO: 1139865 - DNA, 15 bp, Homo sapiens
tattatatttaacat

SEQ ID NO: 1139866 - DNA, 15 bp, Homo sapiens
atattatatttaaca

SEQ ID NO: 1139867 - DNA, 15 bp, Homo sapiens
aatattatatttaac

SEQ ID NO: 1139868 - DNA, 15 bp, Homo sapiens
taatattatatttaa

SEQ ID NO: 1139869 - DNA, 15 bp, Homo sapiens
ctaatattatattta

SEQ ID NO: 1139870 - DNA, 15 bp, Homo sapiens
gctaatattatattt

SEQ ID NO: 1139871 - DNA, 15 bp, Homo sapiens
tgctaatattatatt

SEQ ID NO: 1139872 - DNA, 15 bp, Homo sapiens
atgctaatattatat

SEQ ID NO: 1139873 - DNA, 15 bp, Homo sapiens
tatgctaatattata

SEQ ID NO: 1139874 - DNA, 15 bp, Homo sapiens
atatgctaatattat

SEQ ID NO: 1139875 - DNA, 15 bp, Homo sapiens
catatgctaatatta

SEQ ID NO: 1139876 - DNA, 15 bp, Homo sapiens
acatatgctaatatt

SEQ ID NO: 1139877 - DNA, 15 bp, Homo sapiens
cacatatgctaatat

SEQ ID NO: 1139878 - DNA, 15 bp, Homo sapiens
tcacatatgctaata

SEQ ID NO: 1139879 - DNA, 15 bp, Homo sapiens
ttcacatatgctaat

SEQ ID NO: 1139880 - DNA, 15 bp, Homo sapiens
attcacatatgctaa

SEQ ID NO: 1139881 - DNA, 15 bp, Homo sapiens
gattcacatatgcta

SEQ ID NO: 1139882 - DNA, 15 bp, Homo sapiens
ggattcacatatgct

SEQ ID NO: 1139883 - DNA, 15 bp, Homo sapiens
aggattcacatatgc

SEQ ID NO: 1139884 - DNA, 15 bp, Homo sapiens
caggattcacatatg

SEQ ID NO: 1139885 - DNA, 15 bp, Homo sapiens
tcaggattcacatat

SEQ ID NO: 1139886 - DNA, 15 bp, Homo sapiens
ctcaggattcacata

SEQ ID NO: 1139887 - DNA, 15 bp, Homo sapiens
tctcaggattcacat

SEQ ID NO: 1139888 - DNA, 15 bp, Homo sapiens
ctctcaggattcaca

SEQ ID NO: 1139889 - DNA, 15 bp, Homo sapiens
tctctcaggattcac

SEQ ID NO: 1139890 - DNA, 15 bp, Homo sapiens
ttctctcaggattca

SEQ ID NO: 1139891 - DNA, 15 bp, Homo sapiens
tttctctcaggattc

SEQ ID NO: 1139892 - DNA, 15 bp, Homo sapiens
ttttctctcaggatt

SEQ ID NO: 1139893 - DNA, 15 bp, Homo sapiens
cttttctctcaggat

SEQ ID NO: 1139894 - DNA, 15 bp, Homo sapiens
acttttctctcagga

SEQ ID NO: 1139895 - DNA, 15 bp, Homo sapiens
aacttttctctcagg

SEQ ID NO: 1139896 - DNA, 15 bp, Homo sapiens
taacttttctctcag

SEQ ID NO: 1139897 - DNA, 15 bp, Homo sapiens
ttaacttttctctca

SEQ ID NO: 1139898 - DNA, 15 bp, Homo sapiens
gttaacttttctctc

SEQ ID NO: 1139899 - DNA, 15 bp, Homo sapiens
tgttaacttttctct

SEQ ID NO: 1139900 - DNA, 15 bp, Homo sapiens
ctgttaacttttctc

SEQ ID NO: 1139901 - DNA, 15 bp, Homo sapiens
actgttaacttttct

SEQ ID NO: 1139902 - DNA, 15 bp, Homo sapiens
aactgttaacttttc

SEQ ID NO: 1139903 - DNA, 15 bp, Homo sapiens
aaactgttaactttt

SEQ ID NO: 1139904 - DNA, 15 bp, Homo sapiens
taaactgttaacttt

SEQ ID NO: 1139905 - DNA, 15 bp, Homo sapiens
ctaaactgttaactt

SEQ ID NO: 1139906 - DNA, 15 bp, Homo sapiens
actaaactgttaact

SEQ ID NO: 1139907 - DNA, 15 bp, Homo sapiens
aactaaactgttaac

SEQ ID NO: 1139908 - DNA, 15 bp, Homo sapiens
caactaaactgttaa

SEQ ID NO: 1139909 - DNA, 15 bp, Homo sapiens
tcaactaaactgtta

SEQ ID NO: 1139910 - DNA, 15 bp, Homo sapiens
ctcaactaaactgtt

SEQ ID NO: 1139911 - DNA, 15 bp, Homo sapiens
actcaactaaactgt

SEQ ID NO: 1139912 - DNA, 15 bp, Homo sapiens
aactcaactaaactg

SEQ ID NO: 1139913 - DNA, 15 bp, Homo sapiens
taactcaactaaact

SEQ ID NO: 1139914 - DNA, 15 bp, Homo sapiens
ataactcaactaaac

SEQ ID NO: 1139915 - DNA, 15 bp, Homo sapiens
aataactcaactaaa

SEQ ID NO: 1139916 - DNA, 15 bp, Homo sapiens
aaataactcaactaa

SEQ ID NO: 1139917 - DNA, 15 bp, Homo sapiens
gaaataactcaacta

SEQ ID NO: 1139918 - DNA, 15 bp, Homo sapiens
ggaaataactcaact

SEQ ID NO: 1139919 - DNA, 15 bp, Homo sapiens
aggaaataactcaac

SEQ ID NO: 1139920 - DNA, 15 bp, Homo sapiens
gaggaaataactcaa

SEQ ID NO: 1139921 - DNA, 15 bp, Homo sapiens
agaggaaataactca

SEQ ID NO: 1139922 - DNA, 15 bp, Homo sapiens
cagaggaaataactc

SEQ ID NO: 1139923 - DNA, 15 bp, Homo sapiens
acagaggaaataact

SEQ ID NO: 1139924 - DNA, 15 bp, Homo sapiens
tacagaggaaataac

SEQ ID NO: 1139925 - DNA, 15 bp, Homo sapiens
ctacagaggaaataa

SEQ ID NO: 1139926 - DNA, 15 bp, Homo sapiens
actacagaggaaata

SEQ ID NO: 1139927 - DNA, 15 bp, Homo sapiens
gactacagaggaaat

SEQ ID NO: 1139928 - DNA, 15 bp, Homo sapiens
agactacagaggaaa

SEQ ID NO: 1139929 - DNA, 15 bp, Homo sapiens
cagactacagaggaa

SEQ ID NO: 1139930 - DNA, 15 bp, Homo sapiens
ccagactacagagga

SEQ ID NO: 1139931 - DNA, 15 bp, Homo sapiens
tccagactacagagg

SEQ ID NO: 1139932 - DNA, 15 bp, Homo sapiens
ctccagactacagag

SEQ ID NO: 1139933 - DNA, 15 bp, Homo sapiens
gctccagactacaga

SEQ ID NO: 1139934 - DNA, 15 bp, Homo sapiens
agctccagactacag

SEQ ID NO: 1139935 - DNA, 15 bp, Homo sapiens
tagctccagactaca

SEQ ID NO: 1139936 - DNA, 15 bp, Homo sapiens
ttagctccagactac

SEQ ID NO: 1139937 - DNA, 15 bp, Homo sapiens
tttagctccagacta

SEQ ID NO: 1139938 - DNA, 15 bp, Homo sapiens
ttttagctccagact

SEQ ID NO: 1139939 - DNA, 15 bp, Homo sapiens
tttttagctccagac

SEQ ID NO: 1139940 - DNA, 15 bp, Homo sapiens
atttttagctccaga

SEQ ID NO: 1139941 - DNA, 15 bp, Homo sapiens
tatttttagctccag

SEQ ID NO: 1139942 - DNA, 15 bp, Homo sapiens
ctatttttagctcca

SEQ ID NO: 1139943 - DNA, 15 bp, Homo sapiens
cctatttttagctcc

SEQ ID NO: 1139944 - DNA, 15 bp, Homo sapiens
ccctatttttagctc

SEQ ID NO: 1139945 - DNA, 15 bp, Homo sapiens
tccctatttttagct

SEQ ID NO: 1139946 - DNA, 15 bp, Homo sapiens
ttccctatttttagc

SEQ ID NO: 1139947 - DNA, 15 bp, Homo sapiens
attccctatttttag

SEQ ID NO: 1139948 - DNA, 15 bp, Homo sapiens
gattccctattttta

SEQ ID NO: 1139949 - DNA, 15 bp, Homo sapiens
agattccctattttt

SEQ ID NO: 1139950 - DNA, 15 bp, Homo sapiens
aagattccctatttt

SEQ ID NO: 1139951 - DNA, 15 bp, Homo sapiens
taagattccctattt

SEQ ID NO: 1139952 - DNA, 15 bp, Homo sapiens
ataagattccctatt

SEQ ID NO: 1139953 - DNA, 15 bp, Homo sapiens
aataagattccctat

SEQ ID NO: 1139954 - DNA, 15 bp, Homo sapiens
gaataagattcccta

SEQ ID NO: 1139955 - DNA, 15 bp, Homo sapiens
agaataagattccct

SEQ ID NO: 1139956 - DNA, 15 bp, Homo sapiens
cagaataagattccc

SEQ ID NO: 1139957 - DNA, 15 bp, Homo sapiens
acagaataagattcc

SEQ ID NO: 1139958 - DNA, 15 bp, Homo sapiens
gacagaataagattc

SEQ ID NO: 1139959 - DNA, 15 bp, Homo sapiens
ggacagaataagatt

SEQ ID NO: 1139960 - DNA, 15 bp, Homo sapiens
aggacagaataagat

SEQ ID NO: 1139961 - DNA, 15 bp, Homo sapiens
taggacagaataaga

SEQ ID NO: 1139962 - DNA, 15 bp, Homo sapiens
ttaggacagaataag

SEQ ID NO: 1139963 - DNA, 15 bp, Homo sapiens
tttaggacagaataa

SEQ ID NO: 1139964 - DNA, 15 bp, Homo sapiens
atttaggacagaata

SEQ ID NO: 1139965 - DNA, 15 bp, Homo sapiens
gatttaggacagaat

SEQ ID NO: 1139966 - DNA, 15 bp, Homo sapiens
agatttaggacagaa

SEQ ID NO: 1139967 - DNA, 15 bp, Homo sapiens
aagatttaggacaga

SEQ ID NO: 1139968 - DNA, 15 bp, Homo sapiens
aaagatttaggacag

SEQ ID NO: 1139969 - DNA, 15 bp, Homo sapiens
aaaagatttaggaca

SEQ ID NO: 1139970 - DNA, 15 bp, Homo sapiens
gaaaagatttaggac

SEQ ID NO: 1139971 - DNA, 15 bp, Homo sapiens
ggaaaagatttagga

SEQ ID NO: 1139972 - DNA, 15 bp, Homo sapiens
aggaaaagatttagg

SEQ ID NO: 1139973 - DNA, 15 bp, Homo sapiens
aaggaaaagatttag

SEQ ID NO: 1139974 - DNA, 15 bp, Homo sapiens
gaaggaaaagattta

SEQ ID NO: 1139975 - DNA, 15 bp, Homo sapiens
ggaaggaaaagattt

SEQ ID NO: 1139976 - DNA, 15 bp, Homo sapiens
aggaaggaaaagatt

SEQ ID NO: 1139977 - DNA, 15 bp, Homo sapiens
gaggaaggaaaagat

SEQ ID NO: 1139978 - DNA, 15 bp, Homo sapiens
ggaggaaggaaaaga

SEQ ID NO: 1139979 - DNA, 15 bp, Homo sapiens
tggaggaaggaaaag

SEQ ID NO: 1139980 - DNA, 15 bp, Homo sapiens
gtggaggaaggaaaa

SEQ ID NO: 1139981 - DNA, 15 bp, Homo sapiens
ggtggaggaaggaaa

SEQ ID NO: 1139982 - DNA, 15 bp, Homo sapiens
gggtggaggaaggaa

SEQ ID NO: 1139983 - DNA, 15 bp, Homo sapiens
tgggtggaggaagga

SEQ ID NO: 1139984 - DNA, 15 bp, Homo sapiens
ctgggtggaggaagg

SEQ ID NO: 1139985 - DNA, 15 bp, Homo sapiens
actgggtggaggaag

SEQ ID NO: 1139986 - DNA, 15 bp, Homo sapiens
cactgggtggaggaa

SEQ ID NO: 1139987 - DNA, 15 bp, Homo sapiens
acactgggtggagga

SEQ ID NO: 1139988 - DNA, 15 bp, Homo sapiens
gacactgggtggagg

SEQ ID NO: 1139989 - DNA, 15 bp, Homo sapiens
agacactgggtggag

SEQ ID NO: 1139990 - DNA, 15 bp, Homo sapiens
cagacactgggtgga

SEQ ID NO: 1139991 - DNA, 15 bp, Homo sapiens
acagacactgggtgg

SEQ ID NO: 1139992 - DNA, 15 bp, Homo sapiens
gacagacactgggtg

SEQ ID NO: 1139993 - DNA, 15 bp, Homo sapiens
agacagacactgggt

SEQ ID NO: 1139994 - DNA, 15 bp, Homo sapiens
cagacagacactggg

SEQ ID NO: 1139995 - DNA, 15 bp, Homo sapiens
ccagacagacactgg

SEQ ID NO: 1139996 - DNA, 15 bp, Homo sapiens
tccagacagacactg

SEQ ID NO: 1139997 - DNA, 15 bp, Homo sapiens
atccagacagacact

SEQ ID NO: 1139998 - DNA, 15 bp, Homo sapiens
gatccagacagacac

SEQ ID NO: 1139999 - DNA, 15 bp, Homo sapiens
cgatccagacagaca

SEQ ID NO: 1140000 - DNA, 15 bp, Homo sapiens
tcgatccagacagac

SEQ ID NO: 1140001 - DNA, 15 bp, Homo sapiens
ttcgatccagacaga

SEQ ID NO: 1140002 - DNA, 15 bp, Homo sapiens
attcgatccagacag

SEQ ID NO: 1140003 - DNA, 15 bp, Homo sapiens
aattcgatccagaca

SEQ ID NO: 1140004 - DNA, 15 bp, Homo sapiens
gaattcgatccagac

SEQ ID NO: 1140005 - DNA, 15 bp, Homo sapiens
tgaattcgatccaga

SEQ ID NO: 1140006 - DNA, 15 bp, Homo sapiens
atgaattcgatccag

SEQ ID NO: 1140007 - DNA, 15 bp, Homo sapiens
aatgaattcgatcca

SEQ ID NO: 1140008 - DNA, 15 bp, Homo sapiens
gaatgaattcgatcc

SEQ ID NO: 1140009 - DNA, 15 bp, Homo sapiens
tgaatgaattcgatc

SEQ ID NO: 1140010 - DNA, 15 bp, Homo sapiens
atgaatgaattcgat

SEQ ID NO: 1140011 - DNA, 15 bp, Homo sapiens
aatgaatgaattcga

SEQ ID NO: 1140012 - DNA, 15 bp, Homo sapiens
gaatgaatgaattcg

SEQ ID NO: 1140013 - DNA, 15 bp, Homo sapiens
tgaatgaatgaattc

SEQ ID NO: 1140014 - DNA, 15 bp, Homo sapiens
gtgaatgaatgaatt

SEQ ID NO: 1140015 - DNA, 15 bp, Homo sapiens
agtgaatgaatgaat

SEQ ID NO: 1140016 - DNA, 15 bp, Homo sapiens
gagtgaatgaatgaa

SEQ ID NO: 1140017 - DNA, 15 bp, Homo sapiens
tgagtgaatgaatga

SEQ ID NO: 1140018 - DNA, 15 bp, Homo sapiens
ctgagtgaatgaatg

SEQ ID NO: 1140019 - DNA, 15 bp, Homo sapiens
actgagtgaatgaat

SEQ ID NO: 1140020 - DNA, 15 bp, Homo sapiens
tactgagtgaatgaa

SEQ ID NO: 1140021 - DNA, 15 bp, Homo sapiens
ctactgagtgaatga

SEQ ID NO: 1140022 - DNA, 15 bp, Homo sapiens
cctactgagtgaatg

SEQ ID NO: 1140023 - DNA, 15 bp, Homo sapiens
gcctactgagtgaat

SEQ ID NO: 1140024 - DNA, 15 bp, Homo sapiens
tgcctactgagtgaa

SEQ ID NO: 1140025 - DNA, 15 bp, Homo sapiens
gtgcctactgagtga

SEQ ID NO: 1140026 - DNA, 15 bp, Homo sapiens
agtgcctactgagtg

SEQ ID NO: 1140027 - DNA, 15 bp, Homo sapiens
gagtgcctactgagt

SEQ ID NO: 1140028 - DNA, 15 bp, Homo sapiens
tgagtgcctactgag

SEQ ID NO: 1140029 - DNA, 15 bp, Homo sapiens
gtgagtgcctactga

SEQ ID NO: 1140030 - DNA, 15 bp, Homo sapiens
agtgagtgcctactg

SEQ ID NO: 1140031 - DNA, 15 bp, Homo sapiens
gagtgagtgcctact

SEQ ID NO: 1140032 - DNA, 15 bp, Homo sapiens
tgagtgagtgcctac

SEQ ID NO: 1140033 - DNA, 15 bp, Homo sapiens
ctgagtgagtgccta

SEQ ID NO: 1140034 - DNA, 15 bp, Homo sapiens
gctgagtgagtgcct

SEQ ID NO: 1140035 - DNA, 15 bp, Homo sapiens
ggctgagtgagtgcc

SEQ ID NO: 1140036 - DNA, 15 bp, Homo sapiens
tggctgagtgagtgc

SEQ ID NO: 1140037 - DNA, 15 bp, Homo sapiens
ctggctgagtgagtg

SEQ ID NO: 1140038 - DNA, 15 bp, Homo sapiens
cctggctgagtgagt

SEQ ID NO: 1140039 - DNA, 15 bp, Homo sapiens
gcctggctgagtgag

SEQ ID NO: 1140040 - DNA, 15 bp, Homo sapiens
tgcctggctgagtga

SEQ ID NO: 1140041 - DNA, 15 bp, Homo sapiens
atgcctggctgagtg

SEQ ID NO: 1140042 - DNA, 15 bp, Homo sapiens
catgcctggctgagt

SEQ ID NO: 1140043 - DNA, 15 bp, Homo sapiens
ccatgcctggctgag

SEQ ID NO: 1140044 - DNA, 15 bp, Homo sapiens
accatgcctggctga

SEQ ID NO: 1140045 - DNA, 15 bp, Homo sapiens
caccatgcctggctg

SEQ ID NO: 1140046 - DNA, 15 bp, Homo sapiens
gcaccatgcctggct

SEQ ID NO: 1140047 - DNA, 15 bp, Homo sapiens
agcaccatgcctggc

SEQ ID NO: 1140048 - DNA, 15 bp, Homo sapiens
tagcaccatgcctgg

SEQ ID NO: 1140049 - DNA, 15 bp, Homo sapiens
ctagcaccatgcctg

SEQ ID NO: 1140050 - DNA, 15 bp, Homo sapiens
cctagcaccatgcct

SEQ ID NO: 1140051 - DNA, 15 bp, Homo sapiens
gcctagcaccatgcc

SEQ ID NO: 1140052 - DNA, 15 bp, Homo sapiens
ggcctagcaccatgc

SEQ ID NO: 1140053 - DNA, 15 bp, Homo sapiens
aggcctagcaccatg

SEQ ID NO: 1140054 - DNA, 15 bp, Homo sapiens
gaggcctagcaccat

SEQ ID NO: 1140055 - DNA, 15 bp, Homo sapiens
tgaggcctagcacca

SEQ ID NO: 1140056 - DNA, 15 bp, Homo sapiens
ctgaggcctagcacc

SEQ ID NO: 1140057 - DNA, 15 bp, Homo sapiens
cctgaggcctagcac

SEQ ID NO: 1140058 - DNA, 15 bp, Homo sapiens
tcctgaggcctagca

SEQ ID NO: 1140059 - DNA, 15 bp, Homo sapiens
gtcctgaggcctagc

SEQ ID NO: 1140060 - DNA, 15 bp, Homo sapiens
ggtcctgaggcctag

SEQ ID NO: 1140061 - DNA, 15 bp, Homo sapiens
aggtcctgaggccta

SEQ ID NO: 1140062 - DNA, 15 bp, Homo sapiens
gaggtcctgaggcct

SEQ ID NO: 1140063 - DNA, 15 bp, Homo sapiens
cgaggtcctgaggcc

SEQ ID NO: 1140064 - DNA, 15 bp, Homo sapiens
gcgaggtcctgaggc

SEQ ID NO: 1140065 - DNA, 15 bp, Homo sapiens
agcgaggtcctgagg

SEQ ID NO: 1140066 - DNA, 15 bp, Homo sapiens
cagcgaggtcctgag

SEQ ID NO: 1140067 - DNA, 15 bp, Homo sapiens
acagcgaggtcctga

SEQ ID NO: 1140068 - DNA, 15 bp, Homo sapiens
cacagcgaggtcctg

SEQ ID NO: 1140069 - DNA, 15 bp, Homo sapiens
tcacagcgaggtcct

SEQ ID NO: 1140070 - DNA, 15 bp, Homo sapiens
ttcacagcgaggtcc

SEQ ID NO: 1140071 - DNA, 15 bp, Homo sapiens
gttcacagcgaggtc

SEQ ID NO: 1140072 - DNA, 15 bp, Homo sapiens
ggttcacagcgaggt

SEQ ID NO: 1140073 - DNA, 15 bp, Homo sapiens
tggttcacagcgagg

SEQ ID NO: 1140074 - DNA, 15 bp, Homo sapiens
ctggttcacagcgag

SEQ ID NO: 1140075 - DNA, 15 bp, Homo sapiens
tctggttcacagcga

SEQ ID NO: 1140076 - DNA, 15 bp, Homo sapiens
ttctggttcacagcg

SEQ ID NO: 1140077 - DNA, 15 bp, Homo sapiens
tttctggttcacagc

SEQ ID NO: 1140078 - DNA, 15 bp, Homo sapiens
gtttctggttcacag

SEQ ID NO: 1140079 - DNA, 15 bp, Homo sapiens
agtttctggttcaca

SEQ ID NO: 1140080 - DNA, 15 bp, Homo sapiens
cagtttctggttcac

SEQ ID NO: 1140081 - DNA, 15 bp, Homo sapiens
acagtttctggttca

SEQ ID NO: 1140082 - DNA, 15 bp, Homo sapiens
gacagtttctggttc

SEQ ID NO: 1140083 - DNA, 15 bp, Homo sapiens
ggacagtttctggtt

SEQ ID NO: 1140084 - DNA, 15 bp, Homo sapiens
gggacagtttctggt

SEQ ID NO: 1140085 - DNA, 15 bp, Homo sapiens
agggacagtttctgg

SEQ ID NO: 1140086 - DNA, 15 bp, Homo sapiens
tagggacagtttctg

SEQ ID NO: 1140087 - DNA, 15 bp, Homo sapiens
gtagggacagtttct

SEQ ID NO: 1140088 - DNA, 15 bp, Homo sapiens
ggtagggacagtttc

SEQ ID NO: 1140089 - DNA, 15 bp, Homo sapiens
gggtagggacagttt

SEQ ID NO: 1140090 - DNA, 15 bp, Homo sapiens
ggggtagggacagtt

SEQ ID NO: 1140091 - DNA, 15 bp, Homo sapiens
gggggtagggacagt

SEQ ID NO: 1140092 - DNA, 15 bp, Homo sapiens
tgggggtagggacag

SEQ ID NO: 1140093 - DNA, 15 bp, Homo sapiens
atgggggtagggaca

SEQ ID NO: 1140094 - DNA, 15 bp, Homo sapiens
catgggggtagggac

SEQ ID NO: 1140095 - DNA, 15 bp, Homo sapiens
ccatgggggtaggga

SEQ ID NO: 1140096 - DNA, 15 bp, Homo sapiens
accatgggggtaggg

SEQ ID NO: 1140097 - DNA, 15 bp, Homo sapiens
caccatgggggtagg

SEQ ID NO: 1140098 - DNA, 15 bp, Homo sapiens
gcaccatgggggtag

SEQ ID NO: 1140099 - DNA, 15 bp, Homo sapiens
tgcaccatgggggta

SEQ ID NO: 1140100 - DNA, 15 bp, Homo sapiens
ctgcaccatgggggt

SEQ ID NO: 1140101 - DNA, 15 bp, Homo sapiens
cctgcaccatggggg

SEQ ID NO: 1140102 - DNA, 15 bp, Homo sapiens
gcctgcaccatgggg

SEQ ID NO: 1140103 - DNA, 15 bp, Homo sapiens
tgcctgcaccatggg

SEQ ID NO: 1140104 - DNA, 15 bp, Homo sapiens
atgcctgcaccatgg

SEQ ID NO: 1140105 - DNA, 15 bp, Homo sapiens
aatgcctgcaccatg

SEQ ID NO: 1140106 - DNA, 15 bp, Homo sapiens
gaatgcctgcaccat

SEQ ID NO: 1140107 - DNA, 15 bp, Homo sapiens
agaatgcctgcacca

SEQ ID NO: 1140108 - DNA, 15 bp, Homo sapiens
cagaatgcctgcacc

SEQ ID NO: 1140109 - DNA, 15 bp, Homo sapiens
gcagaatgcctgcac

SEQ ID NO: 1140110 - DNA, 15 bp, Homo sapiens
agcagaatgcctgca

SEQ ID NO: 1140111 - DNA, 15 bp, Homo sapiens
aagcagaatgcctgc

SEQ ID NO: 1140112 - DNA, 15 bp, Homo sapiens
caagcagaatgcctg

SEQ ID NO: 1140113 - DNA, 15 bp, Homo sapiens
ccaagcagaatgcct

SEQ ID NO: 1140114 - DNA, 15 bp, Homo sapiens
cccaagcagaatgcc

SEQ ID NO: 1140115 - DNA, 15 bp, Homo sapiens
tcccaagcagaatgc

SEQ ID NO: 1140116 - DNA, 15 bp, Homo sapiens
ctcccaagcagaatg

SEQ ID NO: 1140117 - DNA, 15 bp, Homo sapiens
actcccaagcagaat

SEQ ID NO: 1140118 - DNA, 15 bp, Homo sapiens
aactcccaagcagaa

SEQ ID NO: 1140119 - DNA, 15 bp, Homo sapiens
caactcccaagcaga

SEQ ID NO: 1140120 - DNA, 15 bp, Homo sapiens
ccaactcccaagcag

SEQ ID NO: 1140121 - DNA, 15 bp, Homo sapiens
tccaactcccaagca

SEQ ID NO: 1140122 - DNA, 15 bp, Homo sapiens
tcctccaactcccaa

SEQ ID NO: 1140123 - DNA, 15 bp, Homo sapiens
ctcctccaactccca

SEQ ID NO: 1140124 - DNA, 15 bp, Homo sapiens
cctcctccaactccc

SEQ ID NO: 1140125 - DNA, 15 bp, Homo sapiens
tcctcctccaactcc

SEQ ID NO: 1140126 - DNA, 15 bp, Homo sapiens
ttcctcctccaactc

SEQ ID NO: 1140127 - DNA, 15 bp, Homo sapiens
gttcctcctccaact

SEQ ID NO: 1140128 - DNA, 15 bp, Homo sapiens
tgttcctcctccaac

SEQ ID NO: 1140129 - DNA, 15 bp, Homo sapiens
ctgttcctcctccaa

SEQ ID NO: 1140130 - DNA, 15 bp, Homo sapiens
cctgttcctcctcca

SEQ ID NO: 1140131 - DNA, 15 bp, Homo sapiens
acctgttcctcctcc

SEQ ID NO: 1140132 - DNA, 15 bp, Homo sapiens
tacctgttcctcctc

SEQ ID NO: 1140133 - DNA, 15 bp, Homo sapiens
ttacctgttcctcct

SEQ ID NO: 1140134 - DNA, 15 bp, Homo sapiens
tttacctgttcctcc

SEQ ID NO: 1140135 - DNA, 15 bp, Homo sapiens
ttttacctgttcctc

SEQ ID NO: 1140136 - DNA, 15 bp, Homo sapiens
tttttacctgttcct

SEQ ID NO: 1140137 - DNA, 15 bp, Homo sapiens
ttttttacctgttcc

SEQ ID NO: 1140138 - DNA, 15 bp, Homo sapiens
attttttacctgttc

SEQ ID NO: 1140139 - DNA, 15 bp, Homo sapiens
tattttttacctgtt

SEQ ID NO: 1140140 - DNA, 15 bp, Homo sapiens
ttattttttacctgt

SEQ ID NO: 1140141 - DNA, 15 bp, Homo sapiens
attattttttacctg

SEQ ID NO: 1140142 - DNA, 15 bp, Homo sapiens
aattattttttacct

SEQ ID NO: 1140143 - DNA, 15 bp, Homo sapiens
taattattttttacc

SEQ ID NO: 1140144 - DNA, 15 bp, Homo sapiens
ttaattattttttac

SEQ ID NO: 1140145 - DNA, 15 bp, Homo sapiens
tttaattatttttta

SEQ ID NO: 1140146 - DNA, 15 bp, Homo sapiens
tatttaattattttt

SEQ ID NO: 1140147 - DNA, 15 bp, Homo sapiens
atatttaattatttt

SEQ ID NO: 1140148 - DNA, 15 bp, Homo sapiens
aatatttaattattt

SEQ ID NO: 1140149 - DNA, 15 bp, Homo sapiens
gaatatttaattatt

SEQ ID NO: 1140150 - DNA, 15 bp, Homo sapiens
tgaatatttaattat

SEQ ID NO: 1140151 - DNA, 15 bp, Homo sapiens
ctgaatatttaatta

SEQ ID NO: 1140152 - DNA, 15 bp, Homo sapiens
cctgaatatttaatt

SEQ ID NO: 1140153 - DNA, 15 bp, Homo sapiens
acctgaatatttaat

SEQ ID NO: 1140154 - DNA, 15 bp, Homo sapiens
aacctgaatatttaa

SEQ ID NO: 1140155 - DNA, 15 bp, Homo sapiens
taacctgaatattta

SEQ ID NO: 1140156 - DNA, 15 bp, Homo sapiens
ttaacctgaatattt

SEQ ID NO: 1140157 - DNA, 15 bp, Homo sapiens
gttaacctgaatatt

SEQ ID NO: 1140158 - DNA, 15 bp, Homo sapiens
cgttaacctgaatat

SEQ ID NO: 1140159 - DNA, 15 bp, Homo sapiens
tcgttaacctgaata

SEQ ID NO: 1140160 - DNA, 15 bp, Homo sapiens
atcgttaacctgaat

SEQ ID NO: 1140161 - DNA, 15 bp, Homo sapiens
tatcgttaacctgaa

SEQ ID NO: 1140162 - DNA, 15 bp, Homo sapiens
atatcgttaacctga

SEQ ID NO: 1140163 - DNA, 15 bp, Homo sapiens
tatatcgttaacctg

SEQ ID NO: 1140164 - DNA, 15 bp, Homo sapiens
atatatcgttaacct

SEQ ID NO: 1140165 - DNA, 15 bp, Homo sapiens
aatatatcgttaacc

SEQ ID NO: 1140166 - DNA, 15 bp, Homo sapiens
caatatatcgttaac

SEQ ID NO: 1140167 - DNA, 15 bp, Homo sapiens
acaatatatcgttaa

SEQ ID NO: 1140168 - DNA, 15 bp, Homo sapiens
gacaatatatcgtta

SEQ ID NO: 1140169 - DNA, 15 bp, Homo sapiens
tgacaatatatcgtt

SEQ ID NO: 1140170 - DNA, 15 bp, Homo sapiens
ctgacaatatatcgt

SEQ ID NO: 1140171 - DNA, 15 bp, Homo sapiens
cctgacaatatatcg

SEQ ID NO: 1140172 - DNA, 15 bp, Homo sapiens
acctgacaatatatc

SEQ ID NO: 1140173 - DNA, 15 bp, Homo sapiens
aacctgacaatatat

SEQ ID NO: 1140174 - DNA, 15 bp, Homo sapiens
aaacctgacaatata

SEQ ID NO: 1140175 - DNA, 15 bp, Homo sapiens
caaacctgacaatat

SEQ ID NO: 1140176 - DNA, 15 bp, Homo sapiens
tcaaacctgacaata

SEQ ID NO: 1140177 - DNA, 15 bp, Homo sapiens
ctcaaacctgacaat

SEQ ID NO: 1140178 - DNA, 15 bp, Homo sapiens
cctcaaacctgacaa

SEQ ID NO: 1140179 - DNA, 15 bp, Homo sapiens
tcctcaaacctgaca

SEQ ID NO: 1140180 - DNA, 15 bp, Homo sapiens
atcctcaaacctgac

SEQ ID NO: 1140181 - DNA, 15 bp, Homo sapiens
aatcctcaaacctga

SEQ ID NO: 1140182 - DNA, 15 bp, Homo sapiens
caatcctcaaacctg

SEQ ID NO: 1140183 - DNA, 15 bp, Homo sapiens
tcaatcctcaaacct

SEQ ID NO: 1140184 - DNA, 15 bp, Homo sapiens
ctcaatcctcaaacc

SEQ ID NO: 1140185 - DNA, 15 bp, Homo sapiens
cctcaatcctcaaac

SEQ ID NO: 1140186 - DNA, 15 bp, Homo sapiens
tcctcaatcctcaaa

SEQ ID NO: 1140187 - DNA, 15 bp, Homo sapiens
ttcctcaatcctcaa

SEQ ID NO: 1140188 - DNA, 15 bp, Homo sapiens
tttcctcaatcctca

SEQ ID NO: 1140189 - DNA, 15 bp, Homo sapiens
ctttcctcaatcctc

SEQ ID NO: 1140190 - DNA, 15 bp, Homo sapiens
cctttcctcaatcct

SEQ ID NO: 1140191 - DNA, 15 bp, Homo sapiens
ccctttcctcaatcc

SEQ ID NO: 1140192 - DNA, 15 bp, Homo sapiens
gccctttcctcaatc

SEQ ID NO: 1140193 - DNA, 15 bp, Homo sapiens
cgccctttcctcaat

SEQ ID NO: 1140194 - DNA, 15 bp, Homo sapiens
gcgccctttcctcaa

SEQ ID NO: 1140195 - DNA, 15 bp, Homo sapiens
tgcgccctttcctca

SEQ ID NO: 1140196 - DNA, 15 bp, Homo sapiens
ctgcgccctttcctc

SEQ ID NO: 1140197 - DNA, 15 bp, Homo sapiens
tctgcgccctttcct

SEQ ID NO: 1140198 - DNA, 15 bp, Homo sapiens
ctctgcgccctttcc

SEQ ID NO: 1140199 - DNA, 15 bp, Homo sapiens
tctctgcgccctttc

SEQ ID NO: 1140200 - DNA, 15 bp, Homo sapiens
ctctctgcgcccttt

SEQ ID NO: 1140201 - DNA, 15 bp, Homo sapiens
actctctgcgccctt

SEQ ID NO: 1140202 - DNA, 15 bp, Homo sapiens
cactctctgcgccct

SEQ ID NO: 1140203 - DNA, 15 bp, Homo sapiens
ccactctctgcgccc

SEQ ID NO: 1140204 - DNA, 15 bp, Homo sapiens
gccactctctgcgcc

SEQ ID NO: 1140205 - DNA, 15 bp, Homo sapiens
tgccactctctgcgc

SEQ ID NO: 1140206 - DNA, 15 bp, Homo sapiens
ttgccactctctgcg

SEQ ID NO: 1140207 - DNA, 15 bp, Homo sapiens
cttgccactctctgc

SEQ ID NO: 1140208 - DNA, 15 bp, Homo sapiens
ccttgccactctctg

SEQ ID NO: 1140209 - DNA, 15 bp, Homo sapiens
cccttgccactctct

SEQ ID NO: 1140210 - DNA, 15 bp, Homo sapiens
gcccttgccactctc

SEQ ID NO: 1140211 - DNA, 15 bp, Homo sapiens
agcccttgccactct

SEQ ID NO: 1140212 - DNA, 15 bp, Homo sapiens
cagcccttgccactc

SEQ ID NO: 1140213 - DNA, 15 bp, Homo sapiens
gcagcccttgccact

SEQ ID NO: 1140214 - DNA, 15 bp, Homo sapiens
agcagcccttgccac

SEQ ID NO: 1140215 - DNA, 15 bp, Homo sapiens
cagcagcccttgcca

SEQ ID NO: 1140216 - DNA, 15 bp, Homo sapiens
acagcagcccttgcc

SEQ ID NO: 1140217 - DNA, 15 bp, Homo sapiens
aacagcagcccttgc

SEQ ID NO: 1140218 - DNA, 15 bp, Homo sapiens
aaacagcagcccttg

SEQ ID NO: 1140219 - DNA, 15 bp, Homo sapiens
aaaacagcagccctt

SEQ ID NO: 1140220 - DNA, 15 bp, Homo sapiens
taaaacagcagccct

SEQ ID NO: 1140221 - DNA, 15 bp, Homo sapiens
ctaaaacagcagccc

SEQ ID NO: 1140222 - DNA, 15 bp, Homo sapiens
tctaaaacagcagcc

SEQ ID NO: 1140223 - DNA, 15 bp, Homo sapiens
atctaaaacagcagc

SEQ ID NO: 1140224 - DNA, 15 bp, Homo sapiens
tatctaaaacagcag

SEQ ID NO: 1140225 - DNA, 15 bp, Homo sapiens
gtatctaaaacagca

SEQ ID NO: 1140226 - DNA, 15 bp, Homo sapiens
tgtatctaaaacagc

SEQ ID NO: 1140227 - DNA, 15 bp, Homo sapiens
ctgtatctaaaacag

SEQ ID NO: 1140228 - DNA, 15 bp, Homo sapiens
actgtatctaaaaca

SEQ ID NO: 1140229 - DNA, 15 bp, Homo sapiens
cactgtatctaaaac

SEQ ID NO: 1140230 - DNA, 15 bp, Homo sapiens
ccactgtatctaaaa

SEQ ID NO: 1140231 - DNA, 15 bp, Homo sapiens
gccactgtatctaaa

SEQ ID NO: 1140232 - DNA, 15 bp, Homo sapiens
ggccactgtatctaa

SEQ ID NO: 1140233 - DNA, 15 bp, Homo sapiens
tggccactgtatcta

SEQ ID NO: 1140234 - DNA, 15 bp, Homo sapiens
ctggccactgtatct

SEQ ID NO: 1140235 - DNA, 15 bp, Homo sapiens
cctggccactgtatc

SEQ ID NO: 1140236 - DNA, 15 bp, Homo sapiens
tcctggccactgtat

SEQ ID NO: 1140237 - DNA, 15 bp, Homo sapiens
ctcctggccactgta

SEQ ID NO: 1140238 - DNA, 15 bp, Homo sapiens
cctcctggccactgt

SEQ ID NO: 1140239 - DNA, 15 bp, Homo sapiens
gcctcctggccactg

SEQ ID NO: 1140240 - DNA, 15 bp, Homo sapiens
ggcctcctggccact

SEQ ID NO: 1140241 - DNA, 15 bp, Homo sapiens
aggcctcctggccac

SEQ ID NO: 1140242 - DNA, 15 bp, Homo sapiens
gaggcctcctggcca

SEQ ID NO: 1140243 - DNA, 15 bp, Homo sapiens
ggaggcctcctggcc

SEQ ID NO: 1140244 - DNA, 15 bp, Homo sapiens
cggaggcctcctggc

SEQ ID NO: 1140245 - DNA, 15 bp, Homo sapiens
tcggaggcctcctgg

SEQ ID NO: 1140246 - DNA, 15 bp, Homo sapiens
atcggaggcctcctg

SEQ ID NO: 1140247 - DNA, 15 bp, Homo sapiens
catcggaggcctcct

SEQ ID NO: 1140248 - DNA, 15 bp, Homo sapiens
tcatcggaggcctcc

SEQ ID NO: 1140249 - DNA, 15 bp, Homo sapiens
ctcatcggaggcctc

SEQ ID NO: 1140250 - DNA, 15 bp, Homo sapiens
cctcatcggaggcct

SEQ ID NO: 1140251 - DNA, 15 bp, Homo sapiens
acctcatcggaggcc

SEQ ID NO: 1140252 - DNA, 15 bp, Homo sapiens
cacctcatcggaggc

SEQ ID NO: 1140253 - DNA, 15 bp, Homo sapiens
tcacctcatcggagg

SEQ ID NO: 1140254 - DNA, 15 bp, Homo sapiens
gtcacctcatcggag

SEQ ID NO: 1140255 - DNA, 15 bp, Homo sapiens
ggtcacctcatcgga

SEQ ID NO: 1140256 - DNA, 15 bp, Homo sapiens
aggtcacctcatcgg

SEQ ID NO: 1140257 - DNA, 15 bp, Homo sapiens
aaggtcacctcatcg

SEQ ID NO: 1140258 - DNA, 15 bp, Homo sapiens
aaaggtcacctcatc

SEQ ID NO: 1140259 - DNA, 15 bp, Homo sapiens
caaaggtcacctcat

SEQ ID NO: 1140260 - DNA, 15 bp, Homo sapiens
tcaaaggtcacctca

SEQ ID NO: 1140261 - DNA, 15 bp, Homo sapiens
ctcaaaggtcacctc

SEQ ID NO: 1140262 - DNA, 15 bp, Homo sapiens
cctcaaaggtcacct

SEQ ID NO: 1140263 - DNA, 15 bp, Homo sapiens
tcctcaaaggtcacc

SEQ ID NO: 1140264 - DNA, 15 bp, Homo sapiens
ctcctcaaaggtcac

SEQ ID NO: 1140265 - DNA, 15 bp, Homo sapiens
tctcctcaaaggtca

SEQ ID NO: 1140266 - DNA, 15 bp, Homo sapiens
ctctcctcaaaggtc

SEQ ID NO: 1140267 - DNA, 15 bp, Homo sapiens
tctctcctcaaaggt

SEQ ID NO: 1140268 - DNA, 15 bp, Homo sapiens
gtctctcctcaaagg

SEQ ID NO: 1140269 - DNA, 15 bp, Homo sapiens
tgtctctcctcaaag

SEQ ID NO: 1140270 - DNA, 15 bp, Homo sapiens
atgtctctcctcaaa

SEQ ID NO: 1140271 - DNA, 15 bp, Homo sapiens
catgtctctcctcaa

SEQ ID NO: 1140272 - DNA, 15 bp, Homo sapiens
gcatgtctctcctca

SEQ ID NO: 1140273 - DNA, 15 bp, Homo sapiens
tgcatgtctctcctc

SEQ ID NO: 1140274 - DNA, 15 bp, Homo sapiens
ctgcatgtctctcct

SEQ ID NO: 1140275 - DNA, 15 bp, Homo sapiens
cctgcatgtctctcc

SEQ ID NO: 1140276 - DNA, 15 bp, Homo sapiens
tcctgcatgtctctc

SEQ ID NO: 1140277 - DNA, 15 bp, Homo sapiens
ctcctgcatgtctct

SEQ ID NO: 1140278 - DNA, 15 bp, Homo sapiens
tctcctgcatgtctc

SEQ ID NO: 1140279 - DNA, 15 bp, Homo sapiens
atctcctgcatgtct

SEQ ID NO: 1140280 - DNA, 15 bp, Homo sapiens
catctcctgcatgtc

SEQ ID NO: 1140281 - DNA, 15 bp, Homo sapiens
tcatctcctgcatgt

SEQ ID NO: 1140282 - DNA, 15 bp, Homo sapiens
ctcatctcctgcatg

SEQ ID NO: 1140283 - DNA, 15 bp, Homo sapiens
cctcatctcctgcat

SEQ ID NO: 1140284 - DNA, 15 bp, Homo sapiens
ccctcatctcctgca

SEQ ID NO: 1140285 - DNA, 15 bp, Homo sapiens
cccctcatctcctgc

SEQ ID NO: 1140286 - DNA, 15 bp, Homo sapiens
tcccctcatctcctg

SEQ ID NO: 1140287 - DNA, 15 bp, Homo sapiens
gtcccctcatctcct

SEQ ID NO: 1140288 - DNA, 15 bp, Homo sapiens
tgtcccctcatctcc

SEQ ID NO: 1140289 - DNA, 15 bp, Homo sapiens
ctgtcccctcatctc

SEQ ID NO: 1140290 - DNA, 15 bp, Homo sapiens
actgtcccctcatct

SEQ ID NO: 1140291 - DNA, 15 bp, Homo sapiens
cactgtcccctcatc

SEQ ID NO: 1140292 - DNA, 15 bp, Homo sapiens
tcactgtcccctcat

SEQ ID NO: 1140293 - DNA, 15 bp, Homo sapiens
ttcactgtcccctca

SEQ ID NO: 1140294 - DNA, 15 bp, Homo sapiens
cttcactgtcccctc

SEQ ID NO: 1140295 - DNA, 15 bp, Homo sapiens
tcttcactgtcccct

SEQ ID NO: 1140296 - DNA, 15 bp, Homo sapiens
ctcttcactgtcccc

SEQ ID NO: 1140297 - DNA, 15 bp, Homo sapiens
cctcttcactgtccc

SEQ ID NO: 1140298 - DNA, 15 bp, Homo sapiens
tcctcttcactgtcc

SEQ ID NO: 1140299 - DNA, 15 bp, Homo sapiens
atcctcttcactgtc

SEQ ID NO: 1140300 - DNA, 15 bp, Homo sapiens
aatcctcttcactgt

SEQ ID NO: 1140301 - DNA, 15 bp, Homo sapiens
aaatcctcttcactg

SEQ ID NO: 1140302 - DNA, 15 bp, Homo sapiens
gaaatcctcttcact

SEQ ID NO: 1140303 - DNA, 15 bp, Homo sapiens
agaaatcctcttcac

SEQ ID NO: 1140304 - DNA, 15 bp, Homo sapiens
tagaaatcctcttca

SEQ ID NO: 1140305 - DNA, 15 bp, Homo sapiens
ttagaaatcctcttc

SEQ ID NO: 1140306 - DNA, 15 bp, Homo sapiens
cttagaaatcctctt

SEQ ID NO: 1140307 - DNA, 15 bp, Homo sapiens
tcttagaaatcctct

SEQ ID NO: 1140308 - DNA, 15 bp, Homo sapiens
ttcttagaaatcctc

SEQ ID NO: 1140309 - DNA, 15 bp, Homo sapiens
gttcttagaaatcct

SEQ ID NO: 1140310 - DNA, 15 bp, Homo sapiens
tgttcttagaaatcc

SEQ ID NO: 1140311 - DNA, 15 bp, Homo sapiens
gtgttcttagaaatc

SEQ ID NO: 1140312 - DNA, 15 bp, Homo sapiens
agtgttcttagaaat

SEQ ID NO: 1140313 - DNA, 15 bp, Homo sapiens
gagtgttcttagaaa

SEQ ID NO: 1140314 - DNA, 15 bp, Homo sapiens
ggagtgttcttagaa

SEQ ID NO: 1140315 - DNA, 15 bp, Homo sapiens
tggagtgttcttaga

SEQ ID NO: 1140316 - DNA, 15 bp, Homo sapiens
ctggagtgttcttag

SEQ ID NO: 1140317 - DNA, 15 bp, Homo sapiens
cctggagtgttctta

SEQ ID NO: 1140318 - DNA, 15 bp, Homo sapiens
gcctggagtgttctt

SEQ ID NO: 1140319 - DNA, 15 bp, Homo sapiens
tgcctggagtgttct

SEQ ID NO: 1140320 - DNA, 15 bp, Homo sapiens
ctgcctggagtgttc

SEQ ID NO: 1140321 - DNA, 15 bp, Homo sapiens
tctgcctggagtgtt

SEQ ID NO: 1140322 - DNA, 15 bp, Homo sapiens
gtctgcctggagtgt

SEQ ID NO: 1140323 - DNA, 15 bp, Homo sapiens
tgtctgcctggagtg

SEQ ID NO: 1140324 - DNA, 15 bp, Homo sapiens
ctgtctgcctggagt

SEQ ID NO: 1140325 - DNA, 15 bp, Homo sapiens
tctgtctgcctggag

SEQ ID NO: 1140326 - DNA, 15 bp, Homo sapiens
ttctgtctgcctgga

SEQ ID NO: 1140327 - DNA, 15 bp, Homo sapiens
gttctgtctgcctgg

SEQ ID NO: 1140328 - DNA, 15 bp, Homo sapiens
tgttctgtctgcctg

SEQ ID NO: 1140329 - DNA, 15 bp, Homo sapiens
ctgttctgtctgcct

SEQ ID NO: 1140330 - DNA, 15 bp, Homo sapiens
gctgttctgtctgcc

SEQ ID NO: 1140331 - DNA, 15 bp, Homo sapiens
cgctgttctgtctgc

SEQ ID NO: 1140332 - DNA, 15 bp, Homo sapiens
tcgctgttctgtctg

SEQ ID NO: 1140333 - DNA, 15 bp, Homo sapiens
gtcgctgttctgtct

SEQ ID NO: 1140334 - DNA, 15 bp, Homo sapiens
tgtcgctgttctgtc

SEQ ID NO: 1140335 - DNA, 15 bp, Homo sapiens
ctgtcgctgttctgt

SEQ ID NO: 1140336 - DNA, 15 bp, Homo sapiens
gctgtcgctgttctg

SEQ ID NO: 1140337 - DNA, 15 bp, Homo sapiens
ggctgtcgctgttct

SEQ ID NO: 1140338 - DNA, 15 bp, Homo sapiens
tggctgtcgctgttc

SEQ ID NO: 1140339 - DNA, 15 bp, Homo sapiens
ttggctgtcgctgtt

SEQ ID NO: 1140340 - DNA, 15 bp, Homo sapiens
cttggctgtcgctgt

SEQ ID NO: 1140341 - DNA, 15 bp, Homo sapiens
ccttggctgtcgctg

SEQ ID NO: 1140342 - DNA, 15 bp, Homo sapiens
gccttggctgtcgct

SEQ ID NO: 1140343 - DNA, 15 bp, Homo sapiens
ggccttggctgtcgc

SEQ ID NO: 1140344 - DNA, 15 bp, Homo sapiens
gggccttggctgtcg

SEQ ID NO: 1140345 - DNA, 15 bp, Homo sapiens
agggccttggctgtc

SEQ ID NO: 1140346 - DNA, 15 bp, Homo sapiens
cagggccttggctgt

SEQ ID NO: 1140347 - DNA, 15 bp, Homo sapiens
tcagggccttggctg

SEQ ID NO: 1140348 - DNA, 15 bp, Homo sapiens
ttcagggccttggct

SEQ ID NO: 1140349 - DNA, 15 bp, Homo sapiens
cttcagggccttggc

SEQ ID NO: 1140350 - DNA, 15 bp, Homo sapiens
acttcagggccttgg

SEQ ID NO: 1140351 - DNA, 15 bp, Homo sapiens
cacttcagggccttg

SEQ ID NO: 1140352 - DNA, 15 bp, Homo sapiens
ccacttcagggcctt

SEQ ID NO: 1140353 - DNA, 15 bp, Homo sapiens
cccacttcagggcct

SEQ ID NO: 1140354 - DNA, 15 bp, Homo sapiens
acccacttcagggcc

SEQ ID NO: 1140355 - DNA, 15 bp, Homo sapiens
tacccacttcagggc

SEQ ID NO: 1140356 - DNA, 15 bp, Homo sapiens
ctacccacttcaggg

SEQ ID NO: 1140357 - DNA, 15 bp, Homo sapiens
cctacccacttcagg

SEQ ID NO: 1140358 - DNA, 15 bp, Homo sapiens
ccctacccacttcag

SEQ ID NO: 1140359 - DNA, 15 bp, Homo sapiens
cccctacccacttca

SEQ ID NO: 1140360 - DNA, 15 bp, Homo sapiens
gcccctacccacttc

SEQ ID NO: 1140361 - DNA, 15 bp, Homo sapiens
ggcccctacccactt

SEQ ID NO: 1140362 - DNA, 15 bp, Homo sapiens
aggcccctacccact

SEQ ID NO: 1140363 - DNA, 15 bp, Homo sapiens
caggcccctacccac

SEQ ID NO: 1140364 - DNA, 15 bp, Homo sapiens
ccaggcccctaccca

SEQ ID NO: 1140365 - DNA, 15 bp, Homo sapiens
accaggcccctaccc

SEQ ID NO: 1140366 - DNA, 15 bp, Homo sapiens
caccaggcccctacc

SEQ ID NO: 1140367 - DNA, 15 bp, Homo sapiens
acaccaggcccctac

SEQ ID NO: 1140368 - DNA, 15 bp, Homo sapiens
cacaccaggccccta

SEQ ID NO: 1140369 - DNA, 15 bp, Homo sapiens
acacaccaggcccct

SEQ ID NO: 1140370 - DNA, 15 bp, Homo sapiens
cacacaccaggcccc

SEQ ID NO: 1140371 - DNA, 15 bp, Homo sapiens
acacacaccaggccc

SEQ ID NO: 1140372 - DNA, 15 bp, Homo sapiens
cacacacaccaggcc

SEQ ID NO: 1140373 - DNA, 15 bp, Homo sapiens
tcacacacaccaggc

SEQ ID NO: 1140374 - DNA, 15 bp, Homo sapiens
ctcacacacaccagg

SEQ ID NO: 1140375 - DNA, 15 bp, Homo sapiens
cctcacacacaccag

SEQ ID NO: 1140376 - DNA, 15 bp, Homo sapiens
tcctcacacacacca

SEQ ID NO: 1140377 - DNA, 15 bp, Homo sapiens
ttcctcacacacacc

SEQ ID NO: 1140378 - DNA, 15 bp, Homo sapiens
gttcctcacacacac

SEQ ID NO: 1140379 - DNA, 15 bp, Homo sapiens
ggttcctcacacaca

SEQ ID NO: 1140380 - DNA, 15 bp, Homo sapiens
aggttcctcacacac

SEQ ID NO: 1140381 - DNA, 15 bp, Homo sapiens
gaggttcctcacaca

SEQ ID NO: 1140382 - DNA, 15 bp, Homo sapiens
tgaggttcctcacac

SEQ ID NO: 1140383 - DNA, 15 bp, Homo sapiens
ctgaggttcctcaca

SEQ ID NO: 1140384 - DNA, 15 bp, Homo sapiens
cctgaggttcctcac

SEQ ID NO: 1140385 - DNA, 15 bp, Homo sapiens
tcctgaggttcctca

SEQ ID NO: 1140386 - DNA, 15 bp, Homo sapiens
atcctgaggttcctc

SEQ ID NO: 1140387 - DNA, 15 bp, Homo sapiens
aatcctgaggttcct

SEQ ID NO: 1140388 - DNA, 15 bp, Homo sapiens
caatcctgaggttcc

SEQ ID NO: 1140389 - DNA, 15 bp, Homo sapiens
gcaatcctgaggttc

SEQ ID NO: 1140390 - DNA, 15 bp, Homo sapiens
ggcaatcctgaggtt

SEQ ID NO: 1140391 - DNA, 15 bp, Homo sapiens
tggcaatcctgaggt

SEQ ID NO: 1140392 - DNA, 15 bp, Homo sapiens
atggcaatcctgagg

SEQ ID NO: 1140393 - DNA, 15 bp, Homo sapiens
gatggcaatcctgag

SEQ ID NO: 1140394 - DNA, 15 bp, Homo sapiens
tgatggcaatcctga

SEQ ID NO: 1140395 - DNA, 15 bp, Homo sapiens
atgatggcaatcctg

SEQ ID NO: 1140396 - DNA, 15 bp, Homo sapiens
catgatggcaatcct

SEQ ID NO: 1140397 - DNA, 15 bp, Homo sapiens
ccatgatggcaatcc

SEQ ID NO: 1140398 - DNA, 15 bp, Homo sapiens
gccatgatggcaatc

SEQ ID NO: 1140399 - DNA, 15 bp, Homo sapiens
agccatgatggcaat

SEQ ID NO: 1140400 - DNA, 15 bp, Homo sapiens
cagccatgatggcaa

SEQ ID NO: 1140401 - DNA, 15 bp, Homo sapiens
ccagccatgatggca

SEQ ID NO: 1140402 - DNA, 15 bp, Homo sapiens
tccagccatgatggc

SEQ ID NO: 1140403 - DNA, 15 bp, Homo sapiens
ctccagccatgatgg

SEQ ID NO: 1140404 - DNA, 15 bp, Homo sapiens
gctccagccatgatg

SEQ ID NO: 1140405 - DNA, 15 bp, Homo sapiens
tgctccagccatgat

SEQ ID NO: 1140406 - DNA, 15 bp, Homo sapiens
ctgctccagccatga

SEQ ID NO: 1140407 - DNA, 15 bp, Homo sapiens
tctgctccagccatg

SEQ ID NO: 1140408 - DNA, 15 bp, Homo sapiens
ctctgctccagccat

SEQ ID NO: 1140409 - DNA, 15 bp, Homo sapiens
tctctgctccagcca

SEQ ID NO: 1140410 - DNA, 15 bp, Homo sapiens
gtctctgctccagcc

SEQ ID NO: 1140411 - DNA, 15 bp, Homo sapiens
tgtctctgctccagc

SEQ ID NO: 1140412 - DNA, 15 bp, Homo sapiens
atgtctctgctccag

SEQ ID NO: 1140413 - DNA, 15 bp, Homo sapiens
catgtctctgctcca

SEQ ID NO: 1140414 - DNA, 15 bp, Homo sapiens
tcatgtctctgctcc

SEQ ID NO: 1140415 - DNA, 15 bp, Homo sapiens
ttcatgtctctgctc

SEQ ID NO: 1140416 - DNA, 15 bp, Homo sapiens
cttcatgtctctgct

SEQ ID NO: 1140417 - DNA, 15 bp, Homo sapiens
gcttcatgtctctgc

SEQ ID NO: 1140418 - DNA, 15 bp, Homo sapiens
tgcttcatgtctctg

SEQ ID NO: 1140419 - DNA, 15 bp, Homo sapiens
ttgcttcatgtctct

SEQ ID NO: 1140420 - DNA, 15 bp, Homo sapiens
cttgcttcatgtctc

SEQ ID NO: 1140421 - DNA, 15 bp, Homo sapiens
tcttgcttcatgtct

SEQ ID NO: 1140422 - DNA, 15 bp, Homo sapiens
ttcttgcttcatgtc

SEQ ID NO: 1140423 - DNA, 15 bp, Homo sapiens
cttcttgcttcatgt

SEQ ID NO: 1140424 - DNA, 15 bp, Homo sapiens
ccttcttgcttcatg

SEQ ID NO: 1140425 - DNA, 15 bp, Homo sapiens
gccttcttgcttcat

SEQ ID NO: 1140426 - DNA, 15 bp, Homo sapiens
ggccttcttgcttca

SEQ ID NO: 1140427 - DNA, 15 bp, Homo sapiens
tggccttcttgcttc

SEQ ID NO: 1140428 - DNA, 15 bp, Homo sapiens
atggccttcttgctt

SEQ ID NO: 1140429 - DNA, 15 bp, Homo sapiens
catggccttcttgct

SEQ ID NO: 1140430 - DNA, 15 bp, Homo sapiens
ccatggccttcttgc

SEQ ID NO: 1140431 - DNA, 15 bp, Homo sapiens
tccatggccttcttg

SEQ ID NO: 1140432 - DNA, 15 bp, Homo sapiens
ctccatggccttctt

SEQ ID NO: 1140433 - DNA, 15 bp, Homo sapiens
tctccatggccttct

SEQ ID NO: 1140434 - DNA, 15 bp, Homo sapiens
atctccatggccttc

SEQ ID NO: 1140435 - DNA, 15 bp, Homo sapiens
catctccatggcctt

SEQ ID NO: 1140436 - DNA, 15 bp, Homo sapiens
tcatctccatggcct

SEQ ID NO: 1140437 - DNA, 15 bp, Homo sapiens
ctcatctccatggcc

SEQ ID NO: 1140438 - DNA, 15 bp, Homo sapiens
cctcatctccatggc

SEQ ID NO: 1140439 - DNA, 15 bp, Homo sapiens
ccctcatctccatgg

SEQ ID NO: 1140440 - DNA, 15 bp, Homo sapiens
gccctcatctccatg

SEQ ID NO: 1140441 - DNA, 15 bp, Homo sapiens
tgccctcatctccat

SEQ ID NO: 1140442 - DNA, 15 bp, Homo sapiens
ctgccctcatctcca

SEQ ID NO: 1140443 - DNA, 15 bp, Homo sapiens
cctgccctcatctcc

SEQ ID NO: 1140444 - DNA, 15 bp, Homo sapiens
ccctgccctcatctc

SEQ ID NO: 1140445 - DNA, 15 bp, Homo sapiens
tccctgccctcatct

SEQ ID NO: 1140446 - DNA, 15 bp, Homo sapiens
ctccctgccctcatc

SEQ ID NO: 1140447 - DNA, 15 bp, Homo sapiens
tctccctgccctcat

SEQ ID NO: 1140448 - DNA, 15 bp, Homo sapiens
atctccctgccctca

SEQ ID NO: 1140449 - DNA, 15 bp, Homo sapiens
gatctccctgccctc

SEQ ID NO: 1140450 - DNA, 15 bp, Homo sapiens
ggatctccctgccct

SEQ ID NO: 1140451 - DNA, 15 bp, Homo sapiens
gggatctccctgccc

SEQ ID NO: 1140452 - DNA, 15 bp, Homo sapiens
cgggatctccctgcc

SEQ ID NO: 1140453 - DNA, 15 bp, Homo sapiens
ccgggatctccctgc

SEQ ID NO: 1140454 - DNA, 15 bp, Homo sapiens
tccgggatctccctg

SEQ ID NO: 1140455 - DNA, 15 bp, Homo sapiens
ctccgggatctccct

SEQ ID NO: 1140456 - DNA, 15 bp, Homo sapiens
actccgggatctccc

SEQ ID NO: 1140457 - DNA, 15 bp, Homo sapiens
cactccgggatctcc

SEQ ID NO: 1140458 - DNA, 15 bp, Homo sapiens
ccactccgggatctc

SEQ ID NO: 1140459 - DNA, 15 bp, Homo sapiens
cccactccgggatct

SEQ ID NO: 1140460 - DNA, 15 bp, Homo sapiens
ccccactccgggatc

SEQ ID NO: 1140461 - DNA, 15 bp, Homo sapiens
tccccactccgggat

SEQ ID NO: 1140462 - DNA, 15 bp, Homo sapiens
ctccccactccggga

SEQ ID NO: 1140463 - DNA, 15 bp, Homo sapiens
tctccccactccggg

SEQ ID NO: 1140464 - DNA, 15 bp, Homo sapiens
atctccccactccgg

SEQ ID NO: 1140465 - DNA, 15 bp, Homo sapiens
gatctccccactccg

SEQ ID NO: 1140466 - DNA, 15 bp, Homo sapiens
tgatctccccactcc

SEQ ID NO: 1140467 - DNA, 15 bp, Homo sapiens
ctgatctccccactc

SEQ ID NO: 1140468 - DNA, 15 bp, Homo sapiens
tctgatctccccact

SEQ ID NO: 1140469 - DNA, 15 bp, Homo sapiens
atctgatctccccac

SEQ ID NO: 1140470 - DNA, 15 bp, Homo sapiens
catctgatctcccca

SEQ ID NO: 1140471 - DNA, 15 bp, Homo sapiens
ccatctgatctcccc

SEQ ID NO: 1140472 - DNA, 15 bp, Homo sapiens
cccatctgatctccc

SEQ ID NO: 1140473 - DNA, 15 bp, Homo sapiens
ccccatctgatctcc

SEQ ID NO: 1140474 - DNA, 15 bp, Homo sapiens
gccccatctgatctc

SEQ ID NO: 1140475 - DNA, 15 bp, Homo sapiens
agccccatctgatct

SEQ ID NO: 1140476 - DNA, 15 bp, Homo sapiens
gagccccatctgatc

SEQ ID NO: 1140477 - DNA, 15 bp, Homo sapiens
agagccccatctgat

SEQ ID NO: 1140478 - DNA, 15 bp, Homo sapiens
cagagccccatctga

SEQ ID NO: 1140479 - DNA, 15 bp, Homo sapiens
acagagccccatctg

SEQ ID NO: 1140480 - DNA, 15 bp, Homo sapiens
cacagagccccatct

SEQ ID NO: 1140481 - DNA, 15 bp, Homo sapiens
acacagagccccatc

SEQ ID NO: 1140482 - DNA, 15 bp, Homo sapiens
tacacagagccccat

SEQ ID NO: 1140483 - DNA, 15 bp, Homo sapiens
atacacagagcccca

SEQ ID NO: 1140484 - DNA, 15 bp, Homo sapiens
gatacacagagcccc

SEQ ID NO: 1140485 - DNA, 15 bp, Homo sapiens
tgatacacagagccc

SEQ ID NO: 1140486 - DNA, 15 bp, Homo sapiens
atgatacacagagcc

SEQ ID NO: 1140487 - DNA, 15 bp, Homo sapiens
catgatacacagagc

SEQ ID NO: 1140488 - DNA, 15 bp, Homo sapiens
gcatgatacacagag

SEQ ID NO: 1140489 - DNA, 15 bp, Homo sapiens
tgcatgatacacaga

SEQ ID NO: 1140490 - DNA, 15 bp, Homo sapiens
ttgcatgatacacag

SEQ ID NO: 1140491 - DNA, 15 bp, Homo sapiens
tttgcatgatacaca

SEQ ID NO: 1140492 - DNA, 15 bp, Homo sapiens
ctttgcatgatacac

SEQ ID NO: 1140493 - DNA, 15 bp, Homo sapiens
cctttgcatgataca

SEQ ID NO: 1140494 - DNA, 15 bp, Homo sapiens
tcctttgcatgatac

SEQ ID NO: 1140495 - DNA, 15 bp, Homo sapiens
gtcctttgcatgata

SEQ ID NO: 1140496 - DNA, 15 bp, Homo sapiens
agtcctttgcatgat

SEQ ID NO: 1140497 - DNA, 15 bp, Homo sapiens
aagtcctttgcatga

SEQ ID NO: 1140498 - DNA, 15 bp, Homo sapiens
aaagtcctttgcatg

SEQ ID NO: 1140499 - DNA, 15 bp, Homo sapiens
caaagtcctttgcat

SEQ ID NO: 1140500 - DNA, 15 bp, Homo sapiens
gcaaagtcctttgca

SEQ ID NO: 1140501 - DNA, 15 bp, Homo sapiens
tgcaaagtcctttgc

SEQ ID NO: 1140502 - DNA, 15 bp, Homo sapiens
atgcaaagtcctttg

SEQ ID NO: 1140503 - DNA, 15 bp, Homo sapiens
aatgcaaagtccttt

SEQ ID NO: 1140504 - DNA, 15 bp, Homo sapiens
gaatgcaaagtcctt

SEQ ID NO: 1140505 - DNA, 15 bp, Homo sapiens
agaatgcaaagtcct

SEQ ID NO: 1140506 - DNA, 15 bp, Homo sapiens
cagaatgcaaagtcc

SEQ ID NO: 1140507 - DNA, 15 bp, Homo sapiens
acagaatgcaaagtc

SEQ ID NO: 1140508 - DNA, 15 bp, Homo sapiens
aacagaatgcaaagt

SEQ ID NO: 1140509 - DNA, 15 bp, Homo sapiens
gaacagaatgcaaag

SEQ ID NO: 1140510 - DNA, 15 bp, Homo sapiens
ggaacagaatgcaaa

SEQ ID NO: 1140511 - DNA, 15 bp, Homo sapiens
tggaacagaatgcaa

SEQ ID NO: 1140512 - DNA, 15 bp, Homo sapiens
ttggaacagaatgca

SEQ ID NO: 1140513 - DNA, 15 bp, Homo sapiens
cttggaacagaatgc

SEQ ID NO: 1140514 - DNA, 15 bp, Homo sapiens
tcttggaacagaatg

SEQ ID NO: 1140515 - DNA, 15 bp, Homo sapiens
ctcttggaacagaat

SEQ ID NO: 1140516 - DNA, 15 bp, Homo sapiens
gctcttggaacagaa

SEQ ID NO: 1140517 - DNA, 15 bp, Homo sapiens
agctcttggaacaga

SEQ ID NO: 1140518 - DNA, 15 bp, Homo sapiens
cagctcttggaacag

SEQ ID NO: 1140519 - DNA, 15 bp, Homo sapiens
ccagctcttggaaca

SEQ ID NO: 1140520 - DNA, 15 bp, Homo sapiens
cccagctcttggaac

SEQ ID NO: 1140521 - DNA, 15 bp, Homo sapiens
tcccagctcttggaa

SEQ ID NO: 1140522 - DNA, 15 bp, Homo sapiens
ttcccagctcttgga

SEQ ID NO: 1140523 - DNA, 15 bp, Homo sapiens
cttcccagctcttgg

SEQ ID NO: 1140524 - DNA, 15 bp, Homo sapiens
ccttcccagctcttg

SEQ ID NO: 1140525 - DNA, 15 bp, Homo sapiens
accttcccagctctt

SEQ ID NO: 1140526 - DNA, 15 bp, Homo sapiens
aaccttcccagctct

SEQ ID NO: 1140527 - DNA, 15 bp, Homo sapiens
caaccttcccagctc

SEQ ID NO: 1140528 - DNA, 15 bp, Homo sapiens
tcaaccttcccagct

SEQ ID NO: 1140529 - DNA, 15 bp, Homo sapiens
gtcaaccttcccagc

SEQ ID NO: 1140530 - DNA, 15 bp, Homo sapiens
tgtcaaccttcccag

SEQ ID NO: 1140531 - DNA, 15 bp, Homo sapiens
atgtcaaccttccca

SEQ ID NO: 1140532 - DNA, 15 bp, Homo sapiens
tatgtcaaccttccc

SEQ ID NO: 1140533 - DNA, 15 bp, Homo sapiens
ttatgtcaaccttcc

SEQ ID NO: 1140534 - DNA, 15 bp, Homo sapiens
attatgtcaaccttc

SEQ ID NO: 1140535 - DNA, 15 bp, Homo sapiens
aattatgtcaacctt

SEQ ID NO: 1140536 - DNA, 15 bp, Homo sapiens
taattatgtcaacct

SEQ ID NO: 1140537 - DNA, 15 bp, Homo sapiens
ctaattatgtcaacc

SEQ ID NO: 1140538 - DNA, 15 bp, Homo sapiens
cctaattatgtcaac

SEQ ID NO: 1140539 - DNA, 15 bp, Homo sapiens
tcctaattatgtcaa

SEQ ID NO: 1140540 - DNA, 15 bp, Homo sapiens
ttcctaattatgtca

SEQ ID NO: 1140541 - DNA, 15 bp, Homo sapiens
tttcctaattatgtc

SEQ ID NO: 1140542 - DNA, 15 bp, Homo sapiens
ttttcctaattatgt

SEQ ID NO: 1140543 - DNA, 15 bp, Homo sapiens
tttttcctaattatg

SEQ ID NO: 1140544 - DNA, 15 bp, Homo sapiens
ttttttcctaattat

SEQ ID NO: 1140545 - DNA, 15 bp, Homo sapiens
cttttttcctaatta

SEQ ID NO: 1140546 - DNA, 15 bp, Homo sapiens
gcttttttcctaatt

SEQ ID NO: 1140547 - DNA, 15 bp, Homo sapiens
ggcttttttcctaat

SEQ ID NO: 1140548 - DNA, 15 bp, Homo sapiens
gggcttttttcctaa

SEQ ID NO: 1140549 - DNA, 15 bp, Homo sapiens
tgggcttttttccta

SEQ ID NO: 1140550 - DNA, 15 bp, Homo sapiens
ctgggcttttttcct

SEQ ID NO: 1140551 - DNA, 15 bp, Homo sapiens
tctgggcttttttcc

SEQ ID NO: 1140552 - DNA, 15 bp, Homo sapiens
ttctgggcttttttc

SEQ ID NO: 1140553 - DNA, 15 bp, Homo sapiens
tttctgggctttttt

SEQ ID NO: 1140554 - DNA, 15 bp, Homo sapiens
ttttctgggcttttt

SEQ ID NO: 1140555 - DNA, 15 bp, Homo sapiens
cttttctgggctttt

SEQ ID NO: 1140556 - DNA, 15 bp, Homo sapiens
gcttttctgggcttt

SEQ ID NO: 1140557 - DNA, 15 bp, Homo sapiens
tgcttttctgggctt

SEQ ID NO: 1140558 - DNA, 15 bp, Homo sapiens
ctgcttttctgggct

SEQ ID NO: 1140559 - DNA, 15 bp, Homo sapiens
tctgcttttctgggc

SEQ ID NO: 1140560 - DNA, 15 bp, Homo sapiens
ctctgcttttctggg

SEQ ID NO: 1140561 - DNA, 15 bp, Homo sapiens
cctctgcttttctgg

SEQ ID NO: 1140562 - DNA, 15 bp, Homo sapiens
acctctgcttttctg

SEQ ID NO: 1140563 - DNA, 15 bp, Homo sapiens
tacctctgcttttct

SEQ ID NO: 1140564 - DNA, 15 bp, Homo sapiens
atacctctgcttttc

SEQ ID NO: 1140565 - DNA, 15 bp, Homo sapiens
gatacctctgctttt

SEQ ID NO: 1140566 - DNA, 15 bp, Homo sapiens
ggatacctctgcttt

SEQ ID NO: 1140567 - DNA, 15 bp, Homo sapiens
tggatacctctgctt

SEQ ID NO: 1140568 - DNA, 15 bp, Homo sapiens
atggatacctctgct

SEQ ID NO: 1140569 - DNA, 15 bp, Homo sapiens
aatggatacctctgc

SEQ ID NO: 1140570 - DNA, 15 bp, Homo sapiens
aaatggatacctctg

SEQ ID NO: 1140571 - DNA, 15 bp, Homo sapiens
aaaatggatacctct

SEQ ID NO: 1140572 - DNA, 15 bp, Homo sapiens
aaaaatggatacctc

SEQ ID NO: 1140573 - DNA, 15 bp, Homo sapiens
gaaaaatggatacct

SEQ ID NO: 1140574 - DNA, 15 bp, Homo sapiens
tgaaaaatggatacc

SEQ ID NO: 1140575 - DNA, 15 bp, Homo sapiens
atgaaaaatggatac

SEQ ID NO: 1140576 - DNA, 15 bp, Homo sapiens
catgaaaaatggata

SEQ ID NO: 1140577 - DNA, 15 bp, Homo sapiens
ccatgaaaaatggat

SEQ ID NO: 1140578 - DNA, 15 bp, Homo sapiens
accatgaaaaatgga

SEQ ID NO: 1140579 - DNA, 15 bp, Homo sapiens
taccatgaaaaatgg

SEQ ID NO: 1140580 - DNA, 15 bp, Homo sapiens
ttaccatgaaaaatg

SEQ ID NO: 1140581 - DNA, 15 bp, Homo sapiens
tttaccatgaaaaat

SEQ ID NO: 1140582 - DNA, 15 bp, Homo sapiens
ctttaccatgaaaaa

SEQ ID NO: 1140583 - DNA, 15 bp, Homo sapiens
tctttaccatgaaaa

SEQ ID NO: 1140584 - DNA, 15 bp, Homo sapiens
atctttaccatgaaa

SEQ ID NO: 1140585 - DNA, 15 bp, Homo sapiens
catctttaccatgaa

SEQ ID NO: 1140586 - DNA, 15 bp, Homo sapiens
tcatctttaccatga

SEQ ID NO: 1140587 - DNA, 15 bp, Homo sapiens
atcatctttaccatg

SEQ ID NO: 1140588 - DNA, 15 bp, Homo sapiens
tatcatctttaccat

SEQ ID NO: 1140589 - DNA, 15 bp, Homo sapiens
ttatcatctttacca

SEQ ID NO: 1140590 - DNA, 15 bp, Homo sapiens
attatcatctttacc

SEQ ID NO: 1140591 - DNA, 15 bp, Homo sapiens
aattatcatctttac

SEQ ID NO: 1140592 - DNA, 15 bp, Homo sapiens
aaattatcatcttta

SEQ ID NO: 1140593 - DNA, 15 bp, Homo sapiens
gaaattatcatcttt

SEQ ID NO: 1140594 - DNA, 15 bp, Homo sapiens
tgaaattatcatctt

SEQ ID NO: 1140595 - DNA, 15 bp, Homo sapiens
ttgaaattatcatct

SEQ ID NO: 1140596 - DNA, 15 bp, Homo sapiens
attgaaattatcatc

SEQ ID NO: 1140597 - DNA, 15 bp, Homo sapiens
aattgaaattatcat

SEQ ID NO: 1140598 - DNA, 15 bp, Homo sapiens
taattgaaattatca

SEQ ID NO: 1140599 - DNA, 15 bp, Homo sapiens
ttaattgaaattatc

SEQ ID NO: 1140600 - DNA, 15 bp, Homo sapiens
tttaattgaaattat

SEQ ID NO: 1140601 - DNA, 15 bp, Homo sapiens
ttttaattgaaatta

SEQ ID NO: 1140602 - DNA, 15 bp, Homo sapiens
gttttaattgaaatt

SEQ ID NO: 1140603 - DNA, 15 bp, Homo sapiens
tgttttaattgaaat

SEQ ID NO: 1140604 - DNA, 15 bp, Homo sapiens
gtgttttaattgaaa

SEQ ID NO: 1140605 - DNA, 15 bp, Homo sapiens
cgtgttttaattgaa

SEQ ID NO: 1140606 - DNA, 15 bp, Homo sapiens
tcgtgttttaattga

SEQ ID NO: 1140607 - DNA, 15 bp, Homo sapiens
atcgtgttttaattg

SEQ ID NO: 1140608 - DNA, 15 bp, Homo sapiens
aatcgtgttttaatt

SEQ ID NO: 1140609 - DNA, 15 bp, Homo sapiens
gaatcgtgttttaat

SEQ ID NO: 1140610 - DNA, 15 bp, Homo sapiens
ggaatcgtgttttaa

SEQ ID NO: 1140611 - DNA, 15 bp, Homo sapiens
aggaatcgtgtttta

SEQ ID NO: 1140612 - DNA, 15 bp, Homo sapiens
caggaatcgtgtttt

SEQ ID NO: 1140613 - DNA, 15 bp, Homo sapiens
ccaggaatcgtgttt

SEQ ID NO: 1140614 - DNA, 15 bp, Homo sapiens
tccaggaatcgtgtt

SEQ ID NO: 1140615 - DNA, 15 bp, Homo sapiens
atccaggaatcgtgt

SEQ ID NO: 1140616 - DNA, 15 bp, Homo sapiens
tatccaggaatcgtg

SEQ ID NO: 1140617 - DNA, 15 bp, Homo sapiens
atatccaggaatcgt

SEQ ID NO: 1140618 - DNA, 15 bp, Homo sapiens
tatatccaggaatcg

SEQ ID NO: 1140619 - DNA, 15 bp, Homo sapiens
atatatccaggaatc

SEQ ID NO: 1140620 - DNA, 15 bp, Homo sapiens
catatatccaggaat

SEQ ID NO: 1140621 - DNA, 15 bp, Homo sapiens
acatatatccaggaa

SEQ ID NO: 1140622 - DNA, 15 bp, Homo sapiens
tacatatatccagga

SEQ ID NO: 1140623 - DNA, 15 bp, Homo sapiens
ttacatatatccagg

SEQ ID NO: 1140624 - DNA, 15 bp, Homo sapiens
attacatatatccag

SEQ ID NO: 1140625 - DNA, 15 bp, Homo sapiens
aattacatatatcca

SEQ ID NO: 1140626 - DNA, 15 bp, Homo sapiens
aaattacatatatcc

SEQ ID NO: 1140627 - DNA, 15 bp, Homo sapiens
caaattacatatatc

SEQ ID NO: 1140628 - DNA, 15 bp, Homo sapiens
acaaattacatatat

SEQ ID NO: 1140629 - DNA, 15 bp, Homo sapiens
tacaaattacatata

SEQ ID NO: 1140630 - DNA, 15 bp, Homo sapiens
ctacaaattacatat

SEQ ID NO: 1140631 - DNA, 15 bp, Homo sapiens
cctacaaattacata

SEQ ID NO: 1140632 - DNA, 15 bp, Homo sapiens
gcctacaaattacat

SEQ ID NO: 1140633 - DNA, 15 bp, Homo sapiens
ggcctacaaattaca

SEQ ID NO: 1140634 - DNA, 15 bp, Homo sapiens
tggcctacaaattac

SEQ ID NO: 1140635 - DNA, 15 bp, Homo sapiens
ttggcctacaaatta

SEQ ID NO: 1140636 - DNA, 15 bp, Homo sapiens
tttggcctacaaatt

SEQ ID NO: 1140637 - DNA, 15 bp, Homo sapiens
atttggcctacaaat

SEQ ID NO: 1140638 - DNA, 15 bp, Homo sapiens
catttggcctacaaa

SEQ ID NO: 1140639 - DNA, 15 bp, Homo sapiens
ccatttggcctacaa

SEQ ID NO: 1140640 - DNA, 15 bp, Homo sapiens
accatttggcctaca

SEQ ID NO: 1140641 - DNA, 15 bp, Homo sapiens
caccatttggcctac

SEQ ID NO: 1140642 - DNA, 15 bp, Homo sapiens
gcaccatttggccta

SEQ ID NO: 1140643 - DNA, 15 bp, Homo sapiens
ggcaccatttggcct

SEQ ID NO: 1140644 - DNA, 15 bp, Homo sapiens
gggcaccatttggcc

SEQ ID NO: 1140645 - DNA, 15 bp, Homo sapiens
tgggcaccatttggc

SEQ ID NO: 1140646 - DNA, 15 bp, Homo sapiens
ttgggcaccatttgg

SEQ ID NO: 1140647 - DNA, 15 bp, Homo sapiens
attgggcaccatttg

SEQ ID NO: 1140648 - DNA, 15 bp, Homo sapiens
gattgggcaccattt

SEQ ID NO: 1140649 - DNA, 15 bp, Homo sapiens
ggattgggcaccatt

SEQ ID NO: 1140650 - DNA, 15 bp, Homo sapiens
gggattgggcaccat

SEQ ID NO: 1140651 - DNA, 15 bp, Homo sapiens
agggattgggcacca

SEQ ID NO: 1140652 - DNA, 15 bp, Homo sapiens
tagggattgggcacc

SEQ ID NO: 1140653 - DNA, 15 bp, Homo sapiens
gtagggattgggcac

SEQ ID NO: 1140654 - DNA, 15 bp, Homo sapiens
ggtagggattgggca

SEQ ID NO: 1140655 - DNA, 15 bp, Homo sapiens
aggtagggattgggc

SEQ ID NO: 1140656 - DNA, 15 bp, Homo sapiens
gaggtagggattggg

SEQ ID NO: 1140657 - DNA, 15 bp, Homo sapiens
ggaggtagggattgg

SEQ ID NO: 1140658 - DNA, 15 bp, Homo sapiens
gggaggtagggattg

SEQ ID NO: 1140659 - DNA, 15 bp, Homo sapiens
agggaggtagggatt

SEQ ID NO: 1140660 - DNA, 15 bp, Homo sapiens
gagggaggtagggat

SEQ ID NO: 1140661 - DNA, 15 bp, Homo sapiens
tgagggaggtaggga

SEQ ID NO: 1140662 - DNA, 15 bp, Homo sapiens
gtgagggaggtaggg

SEQ ID NO: 1140663 - DNA, 15 bp, Homo sapiens
ggtgagggaggtagg

SEQ ID NO: 1140664 - DNA, 15 bp, Homo sapiens
gggtgagggaggtag

SEQ ID NO: 1140665 - DNA, 15 bp, Homo sapiens
ggggtgagggaggta

SEQ ID NO: 1140666 - DNA, 15 bp, Homo sapiens
gggggtgagggaggt

SEQ ID NO: 1140667 - DNA, 15 bp, Homo sapiens
agggggtgagggagg

SEQ ID NO: 1140668 - DNA, 15 bp, Homo sapiens
gagggggtgagggag

SEQ ID NO: 1140669 - DNA, 15 bp, Homo sapiens
tgagggggtgaggga

SEQ ID NO: 1140670 - DNA, 15 bp, Homo sapiens
gtgagggggtgaggg

SEQ ID NO: 1140671 - DNA, 15 bp, Homo sapiens
agtgagggggtgagg

SEQ ID NO: 1140672 - DNA, 15 bp, Homo sapiens
aagtgagggggtgag

SEQ ID NO: 1140673 - DNA, 15 bp, Homo sapiens
gaagtgagggggtga

SEQ ID NO: 1140674 - DNA, 15 bp, Homo sapiens
ggaagtgagggggtg

SEQ ID NO: 1140675 - DNA, 15 bp, Homo sapiens
gggaagtgagggggt

SEQ ID NO: 1140676 - DNA, 15 bp, Homo sapiens
agggaagtgaggggg

SEQ ID NO: 1140677 - DNA, 15 bp, Homo sapiens
tagggaagtgagggg

SEQ ID NO: 1140678 - DNA, 15 bp, Homo sapiens
atagggaagtgaggg

SEQ ID NO: 1140679 - DNA, 15 bp, Homo sapiens
gatagggaagtgagg

SEQ ID NO: 1140680 - DNA, 15 bp, Homo sapiens
ggatagggaagtgag

SEQ ID NO: 1140681 - DNA, 15 bp, Homo sapiens
gggatagggaagtga

SEQ ID NO: 1140682 - DNA, 15 bp, Homo sapiens
agggatagggaagtg

SEQ ID NO: 1140683 - DNA, 15 bp, Homo sapiens
tagggatagggaagt

SEQ ID NO: 1140684 - DNA, 15 bp, Homo sapiens
ttagggatagggaag

SEQ ID NO: 1140685 - DNA, 15 bp, Homo sapiens
tttagggatagggaa

SEQ ID NO: 1140686 - DNA, 15 bp, Homo sapiens
ttttagggataggga

SEQ ID NO: 1140687 - DNA, 15 bp, Homo sapiens
gttttagggataggg

SEQ ID NO: 1140688 - DNA, 15 bp, Homo sapiens
ggttttagggatagg

SEQ ID NO: 1140689 - DNA, 15 bp, Homo sapiens
aggttttagggatag

SEQ ID NO: 1140690 - DNA, 15 bp, Homo sapiens
caggttttagggata

SEQ ID NO: 1140691 - DNA, 15 bp, Homo sapiens
acaggttttagggat

SEQ ID NO: 1140692 - DNA, 15 bp, Homo sapiens
tacaggttttaggga

SEQ ID NO: 1140693 - DNA, 15 bp, Homo sapiens
gtacaggttttaggg

SEQ ID NO: 1140694 - DNA, 15 bp, Homo sapiens
ggtacaggttttagg

SEQ ID NO: 1140695 - DNA, 15 bp, Homo sapiens
aggtacaggttttag

SEQ ID NO: 1140696 - DNA, 15 bp, Homo sapiens
gaggtacaggtttta

SEQ ID NO: 1140697 - DNA, 15 bp, Homo sapiens
tgaggtacaggtttt

SEQ ID NO: 1140698 - DNA, 15 bp, Homo sapiens
ttgaggtacaggttt

SEQ ID NO: 1140699 - DNA, 15 bp, Homo sapiens
gttgaggtacaggtt

SEQ ID NO: 1140700 - DNA, 15 bp, Homo sapiens
agttgaggtacaggt

SEQ ID NO: 1140701 - DNA, 15 bp, Homo sapiens
gagttgaggtacagg

SEQ ID NO: 1140702 - DNA, 15 bp, Homo sapiens
ggagttgaggtacag

SEQ ID NO: 1140703 - DNA, 15 bp, Homo sapiens
gggagttgaggtaca

SEQ ID NO: 1140704 - DNA, 15 bp, Homo sapiens
cgggagttgaggtac

SEQ ID NO: 1140705 - DNA, 15 bp, Homo sapiens
acgggagttgaggta

SEQ ID NO: 1140706 - DNA, 15 bp, Homo sapiens
aacgggagttgaggt

SEQ ID NO: 1140707 - DNA, 15 bp, Homo sapiens
gaacgggagttgagg

SEQ ID NO: 1140708 - DNA, 15 bp, Homo sapiens
cgaacgggagttgag

SEQ ID NO: 1140709 - DNA, 15 bp, Homo sapiens
acgaacgggagttga

SEQ ID NO: 1140710 - DNA, 15 bp, Homo sapiens
tacgaacgggagttg

SEQ ID NO: 1140711 - DNA, 15 bp, Homo sapiens
ttacgaacgggagtt

SEQ ID NO: 1140712 - DNA, 15 bp, Homo sapiens
cttacgaacgggagt

SEQ ID NO: 1140713 - DNA, 15 bp, Homo sapiens
acttacgaacgggag

SEQ ID NO: 1140714 - DNA, 15 bp, Homo sapiens
cacttacgaacggga

SEQ ID NO: 1140715 - DNA, 15 bp, Homo sapiens
tcacttacgaacggg

SEQ ID NO: 1140716 - DNA, 15 bp, Homo sapiens
atcacttacgaacgg

SEQ ID NO: 1140717 - DNA, 15 bp, Homo sapiens
catcacttacgaacg

SEQ ID NO: 1140718 - DNA, 15 bp, Homo sapiens
ccatcacttacgaac

SEQ ID NO: 1140719 - DNA, 15 bp, Homo sapiens
cccatcacttacgaa

SEQ ID NO: 1140720 - DNA, 15 bp, Homo sapiens
tcccatcacttacga

SEQ ID NO: 1140721 - DNA, 15 bp, Homo sapiens
ctcccatcacttacg

SEQ ID NO: 1140722 - DNA, 15 bp, Homo sapiens
actcccatcacttac

SEQ ID NO: 1140723 - DNA, 15 bp, Homo sapiens
aactcccatcactta

SEQ ID NO: 1140724 - DNA, 15 bp, Homo sapiens
taactcccatcactt

SEQ ID NO: 1140725 - DNA, 15 bp, Homo sapiens
ctaactcccatcact

SEQ ID NO: 1140726 - DNA, 15 bp, Homo sapiens
cctaactcccatcac

SEQ ID NO: 1140727 - DNA, 15 bp, Homo sapiens
tcctaactcccatca

SEQ ID NO: 1140728 - DNA, 15 bp, Homo sapiens
ttcctaactcccatc

SEQ ID NO: 1140729 - DNA, 15 bp, Homo sapiens
attcctaactcccat

SEQ ID NO: 1140730 - DNA, 15 bp, Homo sapiens
tattcctaactccca

SEQ ID NO: 1140731 - DNA, 15 bp, Homo sapiens
ctattcctaactccc

SEQ ID NO: 1140732 - DNA, 15 bp, Homo sapiens
tctattcctaactcc

SEQ ID NO: 1140733 - DNA, 15 bp, Homo sapiens
ctctattcctaactc

SEQ ID NO: 1140734 - DNA, 15 bp, Homo sapiens
tctctattcctaact

SEQ ID NO: 1140735 - DNA, 15 bp, Homo sapiens
ttctctattcctaac

SEQ ID NO: 1140736 - DNA, 15 bp, Homo sapiens
tttctctattcctaa

SEQ ID NO: 1140737 - DNA, 15 bp, Homo sapiens
atttctctattccta

SEQ ID NO: 1140738 - DNA, 15 bp, Homo sapiens
gatttctctattcct

SEQ ID NO: 1140739 - DNA, 15 bp, Homo sapiens
agatttctctattcc

SEQ ID NO: 1140740 - DNA, 15 bp, Homo sapiens
gagatttctctattc

SEQ ID NO: 1140741 - DNA, 15 bp, Homo sapiens
ggagatttctctatt

SEQ ID NO: 1140742 - DNA, 15 bp, Homo sapiens
gggagatttctctat

SEQ ID NO: 1140743 - DNA, 15 bp, Homo sapiens
cgggagatttctcta

SEQ ID NO: 1140744 - DNA, 15 bp, Homo sapiens
ccgggagatttctct

SEQ ID NO: 1140745 - DNA, 15 bp, Homo sapiens
accgggagatttctc

SEQ ID NO: 1140746 - DNA, 15 bp, Homo sapiens
aaccgggagatttct

SEQ ID NO: 1140747 - DNA, 15 bp, Homo sapiens
caaccgggagatttc

SEQ ID NO: 1140748 - DNA, 15 bp, Homo sapiens
ccaaccgggagattt

SEQ ID NO: 1140749 - DNA, 15 bp, Homo sapiens
cccaaccgggagatt

SEQ ID NO: 1140750 - DNA, 15 bp, Homo sapiens
acccaaccgggagat

SEQ ID NO: 1140751 - DNA, 15 bp, Homo sapiens
aacccaaccgggaga

SEQ ID NO: 1140752 - DNA, 15 bp, Homo sapiens
aaacccaaccgggag

SEQ ID NO: 1140753 - DNA, 15 bp, Homo sapiens
aaaacccaaccggga

SEQ ID NO: 1140754 - DNA, 15 bp, Homo sapiens
gaaaacccaaccggg

SEQ ID NO: 1140755 - DNA, 15 bp, Homo sapiens
agaaaacccaaccgg

SEQ ID NO: 1140756 - DNA, 15 bp, Homo sapiens
cagaaaacccaaccg

SEQ ID NO: 1140757 - DNA, 15 bp, Homo sapiens
tcagaaaacccaacc

SEQ ID NO: 1140758 - DNA, 15 bp, Homo sapiens
ctcagaaaacccaac

SEQ ID NO: 1140759 - DNA, 15 bp, Homo sapiens
gctcagaaaacccaa

SEQ ID NO: 1140760 - DNA, 15 bp, Homo sapiens
tgctcagaaaaccca

SEQ ID NO: 1140761 - DNA, 15 bp, Homo sapiens
ttgctcagaaaaccc

SEQ ID NO: 1140762 - DNA, 15 bp, Homo sapiens
tttgctcagaaaacc

SEQ ID NO: 1140763 - DNA, 15 bp, Homo sapiens
ctttgctcagaaaac

SEQ ID NO: 1140764 - DNA, 15 bp, Homo sapiens
tctttgctcagaaaa

SEQ ID NO: 1140765 - DNA, 15 bp, Homo sapiens
ctctttgctcagaaa

SEQ ID NO: 1140766 - DNA, 15 bp, Homo sapiens
cctctttgctcagaa

SEQ ID NO: 1140767 - DNA, 15 bp, Homo sapiens
acctctttgctcaga

SEQ ID NO: 1140768 - DNA, 15 bp, Homo sapiens
tacctctttgctcag

SEQ ID NO: 1140769 - DNA, 15 bp, Homo sapiens
ttacctctttgctca

SEQ ID NO: 1140770 - DNA, 15 bp, Homo sapiens
gttacctctttgctc

SEQ ID NO: 1140771 - DNA, 15 bp, Homo sapiens
tgttacctctttgct

SEQ ID NO: 1140772 - DNA, 15 bp, Homo sapiens
atgttacctctttgc

SEQ ID NO: 1140773 - DNA, 15 bp, Homo sapiens
tatgttacctctttg

SEQ ID NO: 1140774 - DNA, 15 bp, Homo sapiens
ctatgttacctcttt

SEQ ID NO: 1140775 - DNA, 15 bp, Homo sapiens
gctatgttacctctt

SEQ ID NO: 1140776 - DNA, 15 bp, Homo sapiens
tgctatgttacctct

SEQ ID NO: 1140777 - DNA, 15 bp, Homo sapiens
ctgctatgttacctc

SEQ ID NO: 1140778 - DNA, 15 bp, Homo sapiens
gctgctatgttacct

SEQ ID NO: 1140779 - DNA, 15 bp, Homo sapiens
agctgctatgttacc

SEQ ID NO: 1140780 - DNA, 15 bp, Homo sapiens
ccaagggcttttaaa

SEQ ID NO: 1140781 - DNA, 15 bp, Homo sapiens
accaagggcttttaa

SEQ ID NO: 1140782 - DNA, 15 bp, Homo sapiens
caccaagggctttta

SEQ ID NO: 1140783 - DNA, 15 bp, Homo sapiens
tcaccaagggctttt

SEQ ID NO: 1140784 - DNA, 15 bp, Homo sapiens
gtcaccaagggcttt

SEQ ID NO: 1140785 - DNA, 15 bp, Homo sapiens
ggtcaccaagggctt

SEQ ID NO: 1140786 - DNA, 15 bp, Homo sapiens
tggtcaccaagggct

SEQ ID NO: 1140787 - DNA, 15 bp, Homo sapiens
ttggtcaccaagggc

SEQ ID NO: 1140788 - DNA, 15 bp, Homo sapiens
gttggtcaccaaggg

SEQ ID NO: 1140789 - DNA, 15 bp, Homo sapiens
tgttggtcaccaagg

SEQ ID NO: 1140790 - DNA, 15 bp, Homo sapiens
atgttggtcaccaag

SEQ ID NO: 1140791 - DNA, 15 bp, Homo sapiens
catgttggtcaccaa

SEQ ID NO: 1140792 - DNA, 15 bp, Homo sapiens
gcatgttggtcacca

SEQ ID NO: 1140793 - DNA, 15 bp, Homo sapiens
tgcatgttggtcacc

SEQ ID NO: 1140794 - DNA, 15 bp, Homo sapiens
gtgcatgttggtcac

SEQ ID NO: 1140795 - DNA, 15 bp, Homo sapiens
agtgcatgttggtca

SEQ ID NO: 1140796 - DNA, 15 bp, Homo sapiens
cagtgcatgttggtc

SEQ ID NO: 1140797 - DNA, 15 bp, Homo sapiens
ccagtgcatgttggt

SEQ ID NO: 1140798 - DNA, 15 bp, Homo sapiens
tccagtgcatgttgg

SEQ ID NO: 1140799 - DNA, 15 bp, Homo sapiens
ctccagtgcatgttg

SEQ ID NO: 1140800 - DNA, 15 bp, Homo sapiens
cctccagtgcatgtt

SEQ ID NO: 1140801 - DNA, 15 bp, Homo sapiens
acctccagtgcatgt

SEQ ID NO: 1140802 - DNA, 15 bp, Homo sapiens
tacctccagtgcatg

SEQ ID NO: 1140803 - DNA, 15 bp, Homo sapiens
ttacctccagtgcat

SEQ ID NO: 1140804 - DNA, 15 bp, Homo sapiens
gttacctccagtgca

SEQ ID NO: 1140805 - DNA, 15 bp, Homo sapiens
agttacctccagtgc

SEQ ID NO: 1140806 - DNA, 15 bp, Homo sapiens
cagttacctccagtg

SEQ ID NO: 1140807 - DNA, 15 bp, Homo sapiens
acagttacctccagt

SEQ ID NO: 1140808 - DNA, 15 bp, Homo sapiens
aacagttacctccag

SEQ ID NO: 1140809 - DNA, 15 bp, Homo sapiens
gaacagttacctcca

SEQ ID NO: 1140810 - DNA, 15 bp, Homo sapiens
agaacagttacctcc

SEQ ID NO: 1140811 - DNA, 15 bp, Homo sapiens
gagaacagttacctc

SEQ ID NO: 1140812 - DNA, 15 bp, Homo sapiens
agagaacagttacct

SEQ ID NO: 1140813 - DNA, 15 bp, Homo sapiens
cagagaacagttacc

SEQ ID NO: 1140814 - DNA, 15 bp, Homo sapiens
ccagagaacagttac

SEQ ID NO: 1140815 - DNA, 15 bp, Homo sapiens
tccagagaacagtta

SEQ ID NO: 1140816 - DNA, 15 bp, Homo sapiens
ctccagagaacagtt

SEQ ID NO: 1140817 - DNA, 15 bp, Homo sapiens
actccagagaacagt

SEQ ID NO: 1140818 - DNA, 15 bp, Homo sapiens
aactccagagaacag

SEQ ID NO: 1140819 - DNA, 15 bp, Homo sapiens
taactccagagaaca

SEQ ID NO: 1140820 - DNA, 15 bp, Homo sapiens
gtaactccagagaac

SEQ ID NO: 1140821 - DNA, 15 bp, Homo sapiens
agtaactccagagaa

SEQ ID NO: 1140822 - DNA, 15 bp, Homo sapiens
aagtaactccagaga

SEQ ID NO: 1140823 - DNA, 15 bp, Homo sapiens
aaagtaactccagag

SEQ ID NO: 1140824 - DNA, 15 bp, Homo sapiens
taaagtaactccaga

SEQ ID NO: 1140825 - DNA, 15 bp, Homo sapiens
ataaagtaactccag

SEQ ID NO: 1140826 - DNA, 15 bp, Homo sapiens
gataaagtaactcca

SEQ ID NO: 1140827 - DNA, 15 bp, Homo sapiens
agataaagtaactcc

SEQ ID NO: 1140828 - DNA, 15 bp, Homo sapiens
cagataaagtaactc

SEQ ID NO: 1140829 - DNA, 15 bp, Homo sapiens
gcagataaagtaact

SEQ ID NO: 1140830 - DNA, 15 bp, Homo sapiens
ggcagataaagtaac

SEQ ID NO: 1140831 - DNA, 15 bp, Homo sapiens
aggcagataaagtaa

SEQ ID NO: 1140832 - DNA, 15 bp, Homo sapiens
taggcagataaagta

SEQ ID NO: 1140833 - DNA, 15 bp, Homo sapiens
ttaggcagataaagt

SEQ ID NO: 1140834 - DNA, 15 bp, Homo sapiens
tttaggcagataaag

SEQ ID NO: 1140835 - DNA, 15 bp, Homo sapiens
ctttaggcagataaa

SEQ ID NO: 1140836 - DNA, 15 bp, Homo sapiens
actttaggcagataa

SEQ ID NO: 1140837 - DNA, 15 bp, Homo sapiens
gactttaggcagata

SEQ ID NO: 1140838 - DNA, 15 bp, Homo sapiens
agactttaggcagat

SEQ ID NO: 1140839 - DNA, 15 bp, Homo sapiens
cagactttaggcaga

SEQ ID NO: 1140840 - DNA, 15 bp, Homo sapiens
ccagactttaggcag

SEQ ID NO: 1140841 - DNA, 15 bp, Homo sapiens
tccagactttaggca

SEQ ID NO: 1140842 - DNA, 15 bp, Homo sapiens
ttccagactttaggc

SEQ ID NO: 1140843 - DNA, 15 bp, Homo sapiens
gttccagactttagg

SEQ ID NO: 1140844 - DNA, 15 bp, Homo sapiens
agttccagactttag

SEQ ID NO: 1140845 - DNA, 15 bp, Homo sapiens
tagttccagacttta

SEQ ID NO: 1140846 - DNA, 15 bp, Homo sapiens
gtagttccagacttt

SEQ ID NO: 1140847 - DNA, 15 bp, Homo sapiens
ggtagttccagactt

SEQ ID NO: 1140848 - DNA, 15 bp, Homo sapiens
tggtagttccagact

SEQ ID NO: 1140849 - DNA, 15 bp, Homo sapiens
ttggtagttccagac

SEQ ID NO: 1140850 - DNA, 15 bp, Homo sapiens
tttggtagttccaga

SEQ ID NO: 1140851 - DNA, 15 bp, Homo sapiens
ctttggtagttccag

SEQ ID NO: 1140852 - DNA, 15 bp, Homo sapiens
tctttggtagttcca

SEQ ID NO: 1140853 - DNA, 15 bp, Homo sapiens
ttctttggtagttcc

SEQ ID NO: 1140854 - DNA, 15 bp, Homo sapiens
attctttggtagttc

SEQ ID NO: 1140855 - DNA, 15 bp, Homo sapiens
tattctttggtagtt

SEQ ID NO: 1140856 - DNA, 15 bp, Homo sapiens
ttattctttggtagt

SEQ ID NO: 1140857 - DNA, 15 bp, Homo sapiens
tttattctttggtag

SEQ ID NO: 1140858 - DNA, 15 bp, Homo sapiens
ttttattctttggta

SEQ ID NO: 1140859 - DNA, 15 bp, Homo sapiens
gttttattctttggt

SEQ ID NO: 1140860 - DNA, 15 bp, Homo sapiens
tgttttattctttgg

SEQ ID NO: 1140861 - DNA, 15 bp, Homo sapiens
ttgttttattctttg

SEQ ID NO: 1140862 - DNA, 15 bp, Homo sapiens
attgttttattcttt

SEQ ID NO: 1140863 - DNA, 15 bp, Homo sapiens
cattgttttattctt

SEQ ID NO: 1140864 - DNA, 15 bp, Homo sapiens
tcattgttttattct

SEQ ID NO: 1140865 - DNA, 15 bp, Homo sapiens
gtcattgttttattc

SEQ ID NO: 1140866 - DNA, 15 bp, Homo sapiens
ggtcattgttttatt

SEQ ID NO: 1140867 - DNA, 15 bp, Homo sapiens
tggtcattgttttat

SEQ ID NO: 1140868 - DNA, 15 bp, Homo sapiens
gtggtcattgtttta

SEQ ID NO: 1140869 - DNA, 15 bp, Homo sapiens
agtggtcattgtttt

SEQ ID NO: 1140870 - DNA, 15 bp, Homo sapiens
cagtggtcattgttt

SEQ ID NO: 1140871 - DNA, 15 bp, Homo sapiens
ccagtggtcattgtt

SEQ ID NO: 1140872 - DNA, 15 bp, Homo sapiens
accagtggtcattgt

SEQ ID NO: 1140873 - DNA, 15 bp, Homo sapiens
gaccagtggtcattg

SEQ ID NO: 1140874 - DNA, 15 bp, Homo sapiens
ggaccagtggtcatt

SEQ ID NO: 1140875 - DNA, 15 bp, Homo sapiens
aggaccagtggtcat

SEQ ID NO: 1140876 - DNA, 15 bp, Homo sapiens
aaggaccagtggtca

SEQ ID NO: 1140877 - DNA, 15 bp, Homo sapiens
aaaggaccagtggtc

SEQ ID NO: 1140878 - DNA, 15 bp, Homo sapiens
aaaaggaccagtggt

SEQ ID NO: 1140879 - DNA, 15 bp, Homo sapiens
aaaaaggaccagtgg

SEQ ID NO: 1140880 - DNA, 15 bp, Homo sapiens
taaaaaggaccagtg

SEQ ID NO: 1140881 - DNA, 15 bp, Homo sapiens
ataaaaaggaccagt

SEQ ID NO: 1140882 - DNA, 15 bp, Homo sapiens
cataaaaaggaccag

SEQ ID NO: 1140883 - DNA, 15 bp, Homo sapiens
acataaaaaggacca

SEQ ID NO: 1140884 - DNA, 15 bp, Homo sapiens
cacataaaaaggacc

SEQ ID NO: 1140885 - DNA, 15 bp, Homo sapiens
acacataaaaaggac

SEQ ID NO: 1140886 - DNA, 15 bp, Homo sapiens
aacacataaaaagga

SEQ ID NO: 1140887 - DNA, 15 bp, Homo sapiens
aaacacataaaaagg

SEQ ID NO: 1140888 - DNA, 15 bp, Homo sapiens
caaacacataaaaag

SEQ ID NO: 1140889 - DNA, 15 bp, Homo sapiens
gcaaacacataaaaa

SEQ ID NO: 1140890 - DNA, 15 bp, Homo sapiens
tgcaaacacataaaa

SEQ ID NO: 1140891 - DNA, 15 bp, Homo sapiens
atgcaaacacataaa

SEQ ID NO: 1140892 - DNA, 15 bp, Homo sapiens
aatgcaaacacataa

SEQ ID NO: 1140893 - DNA, 15 bp, Homo sapiens
taatgcaaacacata

SEQ ID NO: 1140894 - DNA, 15 bp, Homo sapiens
ttaatgcaaacacat

SEQ ID NO: 1140895 - DNA, 15 bp, Homo sapiens
gttaatgcaaacaca

SEQ ID NO: 1140896 - DNA, 15 bp, Homo sapiens
agttaatgcaaacac

SEQ ID NO: 1140897 - DNA, 15 bp, Homo sapiens
aagttaatgcaaaca

SEQ ID NO: 1140898 - DNA, 15 bp, Homo sapiens
taagttaatgcaaac

SEQ ID NO: 1140899 - DNA, 15 bp, Homo sapiens
ttaagttaatgcaaa

SEQ ID NO: 1140900 - DNA, 15 bp, Homo sapiens
attaagttaatgcaa

SEQ ID NO: 1140901 - DNA, 15 bp, Homo sapiens
aattaagttaatgca

SEQ ID NO: 1140902 - DNA, 15 bp, Homo sapiens
gaattaagttaatgc

SEQ ID NO: 1140903 - DNA, 15 bp, Homo sapiens
tgaattaagttaatg

SEQ ID NO: 1140904 - DNA, 15 bp, Homo sapiens
atgaattaagttaat

SEQ ID NO: 1140905 - DNA, 15 bp, Homo sapiens
tatgaattaagttaa

SEQ ID NO: 1140906 - DNA, 15 bp, Homo sapiens
atatgaattaagtta

SEQ ID NO: 1140907 - DNA, 15 bp, Homo sapiens
gatatgaattaagtt

SEQ ID NO: 1140908 - DNA, 15 bp, Homo sapiens
tgatatgaattaagt

SEQ ID NO: 1140909 - DNA, 15 bp, Homo sapiens
ttgatatgaattaag

SEQ ID NO: 1140910 - DNA, 15 bp, Homo sapiens
tttgatatgaattaa

SEQ ID NO: 1140911 - DNA, 15 bp, Homo sapiens
ctttgatatgaatta

SEQ ID NO: 1140912 - DNA, 15 bp, Homo sapiens
cctttgatatgaatt

SEQ ID NO: 1140913 - DNA, 15 bp, Homo sapiens
tcctttgatatgaat

SEQ ID NO: 1140914 - DNA, 15 bp, Homo sapiens
ttcctttgatatgaa

SEQ ID NO: 1140915 - DNA, 15 bp, Homo sapiens
cttcctttgatatga

SEQ ID NO: 1140916 - DNA, 15 bp, Homo sapiens
tcttcctttgatatg

SEQ ID NO: 1140917 - DNA, 15 bp, Homo sapiens
ttcttcctttgatat

SEQ ID NO: 1140918 - DNA, 15 bp, Homo sapiens
tttcttcctttgata

SEQ ID NO: 1140919 - DNA, 15 bp, Homo sapiens
tctttcttcctttga

SEQ ID NO: 1140920 - DNA, 15 bp, Homo sapiens
gtctttcttcctttg

SEQ ID NO: 1140921 - DNA, 15 bp, Homo sapiens
tgtctttcttccttt

SEQ ID NO: 1140922 - DNA, 15 bp, Homo sapiens
gtgtctttcttcctt

SEQ ID NO: 1140923 - DNA, 15 bp, Homo sapiens
tgtgtctttcttcct

SEQ ID NO: 1140924 - DNA, 15 bp, Homo sapiens
gtgtgtctttcttcc

SEQ ID NO: 1140925 - DNA, 15 bp, Homo sapiens
ggtgtgtctttcttc

SEQ ID NO: 1140926 - DNA, 15 bp, Homo sapiens
aggtgtgtctttctt

SEQ ID NO: 1140927 - DNA, 15 bp, Homo sapiens
caggtgtgtctttct

SEQ ID NO: 1140928 - DNA, 15 bp, Homo sapiens
ccaggtgtgtctttc

SEQ ID NO: 1140929 - DNA, 15 bp, Homo sapiens
tccaggtgtgtcttt

SEQ ID NO: 1140930 - DNA, 15 bp, Homo sapiens
gtccaggtgtgtctt

SEQ ID NO: 1140931 - DNA, 15 bp, Homo sapiens
tgtccaggtgtgtct

SEQ ID NO: 1140932 - DNA, 15 bp, Homo sapiens
ctgtccaggtgtgtc

SEQ ID NO: 1140933 - DNA, 15 bp, Homo sapiens
tctgtccaggtgtgt

SEQ ID NO: 1140934 - DNA, 15 bp, Homo sapiens
ctctgtccaggtgtg

SEQ ID NO: 1140935 - DNA, 15 bp, Homo sapiens
actctgtccaggtgt

SEQ ID NO: 1140936 - DNA, 15 bp, Homo sapiens
aactctgtccaggtg

SEQ ID NO: 1140937 - DNA, 15 bp, Homo sapiens
aaactctgtccaggt

SEQ ID NO: 1140938 - DNA, 15 bp, Homo sapiens
aaaactctgtccagg

SEQ ID NO: 1140939 - DNA, 15 bp, Homo sapiens
caaaactctgtccag

SEQ ID NO: 1140940 - DNA, 15 bp, Homo sapiens
acaaaactctgtcca

SEQ ID NO: 1140941 - DNA, 15 bp, Homo sapiens
gacaaaactctgtcc

SEQ ID NO: 1140942 - DNA, 15 bp, Homo sapiens
tgacaaaactctgtc

SEQ ID NO: 1140943 - DNA, 15 bp, Homo sapiens
gtgacaaaactctgt

SEQ ID NO: 1140944 - DNA, 15 bp, Homo sapiens
tgtgacaaaactctg

SEQ ID NO: 1140945 - DNA, 15 bp, Homo sapiens
ttgtgacaaaactct

SEQ ID NO: 1140946 - DNA, 15 bp, Homo sapiens
tttgtgacaaaactc

SEQ ID NO: 1140947 - DNA, 15 bp, Homo sapiens
gtttgtgacaaaact

SEQ ID NO: 1140948 - DNA, 15 bp, Homo sapiens
ggtttgtgacaaaac

SEQ ID NO: 1140949 - DNA, 15 bp, Homo sapiens
tggtttgtgacaaaa

SEQ ID NO: 1140950 - DNA, 15 bp, Homo sapiens
atggtttgtgacaaa

SEQ ID NO: 1140951 - DNA, 15 bp, Homo sapiens
gatggtttgtgacaa

SEQ ID NO: 1140952 - DNA, 15 bp, Homo sapiens
cgatggtttgtgaca

SEQ ID NO: 1140953 - DNA, 15 bp, Homo sapiens
gcgatggtttgtgac

SEQ ID NO: 1140954 - DNA, 15 bp, Homo sapiens
ggcgatggtttgtga

SEQ ID NO: 1140955 - DNA, 15 bp, Homo sapiens
aggcgatggtttgtg

SEQ ID NO: 1140956 - DNA, 15 bp, Homo sapiens
aaggcgatggtttgt

SEQ ID NO: 1140957 - DNA, 15 bp, Homo sapiens
gaaggcgatggtttg

SEQ ID NO: 1140958 - DNA, 15 bp, Homo sapiens
agaaggcgatggttt

SEQ ID NO: 1140959 - DNA, 15 bp, Homo sapiens
tagaaggcgatggtt

SEQ ID NO: 1140960 - DNA, 15 bp, Homo sapiens
atagaaggcgatggt

SEQ ID NO: 1140961 - DNA, 15 bp, Homo sapiens
aatagaaggcgatgg

SEQ ID NO: 1140962 - DNA, 15 bp, Homo sapiens
aaatagaaggcgatg

SEQ ID NO: 1140963 - DNA, 15 bp, Homo sapiens
gaaatagaaggcgat

SEQ ID NO: 1140964 - DNA, 15 bp, Homo sapiens
tgaaatagaaggcga

SEQ ID NO: 1140965 - DNA, 15 bp, Homo sapiens
ctgaaatagaaggcg

SEQ ID NO: 1140966 - DNA, 15 bp, Homo sapiens
actgaaatagaaggc

SEQ ID NO: 1140967 - DNA, 15 bp, Homo sapiens
gactgaaatagaagg

SEQ ID NO: 1140968 - DNA, 15 bp, Homo sapiens
agactgaaatagaag

SEQ ID NO: 1140969 - DNA, 15 bp, Homo sapiens
tagactgaaatagaa

SEQ ID NO: 1140970 - DNA, 15 bp, Homo sapiens
ttagactgaaataga

SEQ ID NO: 1140971 - DNA, 15 bp, Homo sapiens
attagactgaaatag

SEQ ID NO: 1140972 - DNA, 15 bp, Homo sapiens
aattagactgaaata

SEQ ID NO: 1140973 - DNA, 15 bp, Homo sapiens
gaattagactgaaat

SEQ ID NO: 1140974 - DNA, 15 bp, Homo sapiens
tgaattagactgaaa

SEQ ID NO: 1140975 - DNA, 15 bp, Homo sapiens
ctgaattagactgaa

SEQ ID NO: 1140976 - DNA, 15 bp, Homo sapiens
actgaattagactga

SEQ ID NO: 1140977 - DNA, 15 bp, Homo sapiens
tactgaattagactg

SEQ ID NO: 1140978 - DNA, 15 bp, Homo sapiens
atactgaattagact

SEQ ID NO: 1140979 - DNA, 15 bp, Homo sapiens
aatactgaattagac

SEQ ID NO: 1140980 - DNA, 15 bp, Homo sapiens
aaatactgaattaga

SEQ ID NO: 1140981 - DNA, 15 bp, Homo sapiens
gaaatactgaattag

SEQ ID NO: 1140982 - DNA, 15 bp, Homo sapiens
tgaaatactgaatta

SEQ ID NO: 1140983 - DNA, 15 bp, Homo sapiens
ttgaaatactgaatt

SEQ ID NO: 1140984 - DNA, 15 bp, Homo sapiens
tttgaaatactgaat

SEQ ID NO: 1140985 - DNA, 15 bp, Homo sapiens
ctttgaaatactgaa

SEQ ID NO: 1140986 - DNA, 15 bp, Homo sapiens
tctttgaaatactga

SEQ ID NO: 1140987 - DNA, 15 bp, Homo sapiens
ttctttgaaatactg

SEQ ID NO: 1140988 - DNA, 15 bp, Homo sapiens
tttctttgaaatact

SEQ ID NO: 1140989 - DNA, 15 bp, Homo sapiens
ttttctttgaaatac

SEQ ID NO: 1140990 - DNA, 15 bp, Homo sapiens
attttctttgaaata

SEQ ID NO: 1140991 - DNA, 15 bp, Homo sapiens
gattttctttgaaat

SEQ ID NO: 1140992 - DNA, 15 bp, Homo sapiens
tgattttctttgaaa

SEQ ID NO: 1140993 - DNA, 15 bp, Homo sapiens
atgattttctttgaa

SEQ ID NO: 1140994 - DNA, 15 bp, Homo sapiens
aatgattttctttga

SEQ ID NO: 1140995 - DNA, 15 bp, Homo sapiens
aaatgattttctttg

SEQ ID NO: 1140996 - DNA, 15 bp, Homo sapiens
gaaatgattttcttt

SEQ ID NO: 1140997 - DNA, 15 bp, Homo sapiens
tgaaatgattttctt

SEQ ID NO: 1140998 - DNA, 15 bp, Homo sapiens
atgaaatgattttct

SEQ ID NO: 1140999 - DNA, 15 bp, Homo sapiens
tatgaaatgattttc

SEQ ID NO: 1141000 - DNA, 15 bp, Homo sapiens
ctatgaaatgatttt

SEQ ID NO: 1141001 - DNA, 15 bp, Homo sapiens
gctatgaaatgattt

SEQ ID NO: 1141002 - DNA, 15 bp, Homo sapiens
ggctatgaaatgatt

SEQ ID NO: 1141003 - DNA, 15 bp, Homo sapiens
tggctatgaaatgat

SEQ ID NO: 1141004 - DNA, 15 bp, Homo sapiens
atggctatgaaatga

SEQ ID NO: 1141005 - DNA, 15 bp, Homo sapiens
aatggctatgaaatg

SEQ ID NO: 1141006 - DNA, 15 bp, Homo sapiens
caatggctatgaaat

SEQ ID NO: 1141007 - DNA, 15 bp, Homo sapiens
acaatggctatgaaa

SEQ ID NO: 1141008 - DNA, 15 bp, Homo sapiens
gacaatggctatgaa

SEQ ID NO: 1141009 - DNA, 15 bp, Homo sapiens
agacaatggctatga

SEQ ID NO: 1141010 - DNA, 15 bp, Homo sapiens
cagacaatggctatg

SEQ ID NO: 1141011 - DNA, 15 bp, Homo sapiens
gcagacaatggctat

SEQ ID NO: 1141012 - DNA, 15 bp, Homo sapiens
agcagacaatggcta

SEQ ID NO: 1141013 - DNA, 15 bp, Homo sapiens
gagcagacaatggct

SEQ ID NO: 1141014 - DNA, 15 bp, Homo sapiens
agagcagacaatggc

SEQ ID NO: 1141015 - DNA, 15 bp, Homo sapiens
cagagcagacaatgg

SEQ ID NO: 1141016 - DNA, 15 bp, Homo sapiens
gcagagcagacaatg

SEQ ID NO: 1141017 - DNA, 15 bp, Homo sapiens
tgcagagcagacaat

SEQ ID NO: 1141018 - DNA, 15 bp, Homo sapiens
ctgcagagcagacaa

SEQ ID NO: 1141019 - DNA, 15 bp, Homo sapiens
cctgcagagcagaca

SEQ ID NO: 1141020 - DNA, 15 bp, Homo sapiens
gcctgcagagcagac

SEQ ID NO: 1141021 - DNA, 15 bp, Homo sapiens
agcctgcagagcaga

SEQ ID NO: 1141022 - DNA, 15 bp, Homo sapiens
gagcctgcagagcag

SEQ ID NO: 1141023 - DNA, 15 bp, Homo sapiens
tgagcctgcagagca

SEQ ID NO: 1141024 - DNA, 15 bp, Homo sapiens
ttgagcctgcagagc

SEQ ID NO: 1141025 - DNA, 15 bp, Homo sapiens
gttgagcctgcagag

SEQ ID NO: 1141026 - DNA, 15 bp, Homo sapiens
tgttgagcctgcaga

SEQ ID NO: 1141027 - DNA, 15 bp, Homo sapiens
ctgttgagcctgcag

SEQ ID NO: 1141028 - DNA, 15 bp, Homo sapiens
tctgttgagcctgca

SEQ ID NO: 1141029 - DNA, 15 bp, Homo sapiens
gtctgttgagcctgc

SEQ ID NO: 1141030 - DNA, 15 bp, Homo sapiens
ggtctgttgagcctg

SEQ ID NO: 1141031 - DNA, 15 bp, Homo sapiens
aggtctgttgagcct

SEQ ID NO: 1141032 - DNA, 15 bp, Homo sapiens
aaggtctgttgagcc

SEQ ID NO: 1141033 - DNA, 15 bp, Homo sapiens
caaggtctgttgagc

SEQ ID NO: 1141034 - DNA, 15 bp, Homo sapiens
acaaggtctgttgag

SEQ ID NO: 1141035 - DNA, 15 bp, Homo sapiens
aacaaggtctgttga

SEQ ID NO: 1141036 - DNA, 15 bp, Homo sapiens
taacaaggtctgttg

SEQ ID NO: 1141037 - DNA, 15 bp, Homo sapiens
gtaacaaggtctgtt

SEQ ID NO: 1141038 - DNA, 15 bp, Homo sapiens
tgtaacaaggtctgt

SEQ ID NO: 1141039 - DNA, 15 bp, Homo sapiens
ctgtaacaaggtctg

SEQ ID NO: 1141040 - DNA, 15 bp, Homo sapiens
cctgtaacaaggtct

SEQ ID NO: 1141041 - DNA, 15 bp, Homo sapiens
gcctgtaacaaggtc

SEQ ID NO: 1141042 - DNA, 15 bp, Homo sapiens
ggcctgtaacaaggt

SEQ ID NO: 1141043 - DNA, 15 bp, Homo sapiens
aggcctgtaacaagg

SEQ ID NO: 1141044 - DNA, 15 bp, Homo sapiens
aaggcctgtaacaag

SEQ ID NO: 1141045 - DNA, 15 bp, Homo sapiens
aaaggcctgtaacaa

SEQ ID NO: 1141046 - DNA, 15 bp, Homo sapiens
aaaaggcctgtaaca

SEQ ID NO: 1141047 - DNA, 15 bp, Homo sapiens
aaaaaggcctgtaac

SEQ ID NO: 1141048 - DNA, 15 bp, Homo sapiens
caaaaaggcctgtaa

SEQ ID NO: 1141049 - DNA, 15 bp, Homo sapiens
tcaaaaaggcctgta

SEQ ID NO: 1141050 - DNA, 15 bp, Homo sapiens
ctcaaaaaggcctgt

SEQ ID NO: 1141051 - DNA, 15 bp, Homo sapiens
actcaaaaaggcctg

SEQ ID NO: 1141052 - DNA, 15 bp, Homo sapiens
aactcaaaaaggcct

SEQ ID NO: 1141053 - DNA, 15 bp, Homo sapiens
gaactcaaaaaggcc

SEQ ID NO: 1141054 - DNA, 15 bp, Homo sapiens
agaactcaaaaaggc

SEQ ID NO: 1141055 - DNA, 15 bp, Homo sapiens
gagaactcaaaaagg

SEQ ID NO: 1141056 - DNA, 15 bp, Homo sapiens
ggagaactcaaaaag

SEQ ID NO: 1141057 - DNA, 15 bp, Homo sapiens
tggagaactcaaaaa

SEQ ID NO: 1141058 - DNA, 15 bp, Homo sapiens
ttggagaactcaaaa

SEQ ID NO: 1141059 - DNA, 15 bp, Homo sapiens
cttggagaactcaaa

SEQ ID NO: 1141060 - DNA, 15 bp, Homo sapiens
acttggagaactcaa

SEQ ID NO: 1141061 - DNA, 15 bp, Homo sapiens
gacttggagaactca

SEQ ID NO: 1141062 - DNA, 15 bp, Homo sapiens
ggacttggagaactc

SEQ ID NO: 1141063 - DNA, 15 bp, Homo sapiens
tggacttggagaact

SEQ ID NO: 1141064 - DNA, 15 bp, Homo sapiens
atggacttggagaac

SEQ ID NO: 1141065 - DNA, 15 bp, Homo sapiens
aatggacttggagaa

SEQ ID NO: 1141066 - DNA, 15 bp, Homo sapiens
gaatggacttggaga

SEQ ID NO: 1141067 - DNA, 15 bp, Homo sapiens
tgaatggacttggag

SEQ ID NO: 1141068 - DNA, 15 bp, Homo sapiens
atgaatggacttgga

SEQ ID NO: 1141069 - DNA, 15 bp, Homo sapiens
aatgaatggacttgg

SEQ ID NO: 1141070 - DNA, 15 bp, Homo sapiens
aaatgaatggacttg

SEQ ID NO: 1141071 - DNA, 15 bp, Homo sapiens
gaaatgaatggactt

SEQ ID NO: 1141072 - DNA, 15 bp, Homo sapiens
ggaaatgaatggact

SEQ ID NO: 1141073 - DNA, 15 bp, Homo sapiens
gggaaatgaatggac

SEQ ID NO: 1141074 - DNA, 15 bp, Homo sapiens
ggggaaatgaatgga

SEQ ID NO: 1141075 - DNA, 15 bp, Homo sapiens
aggggaaatgaatgg

SEQ ID NO: 1141076 - DNA, 15 bp, Homo sapiens
taggggaaatgaatg

SEQ ID NO: 1141077 - DNA, 15 bp, Homo sapiens
ttaggggaaatgaat

SEQ ID NO: 1141078 - DNA, 15 bp, Homo sapiens
tttaggggaaatgaa

SEQ ID NO: 1141079 - DNA, 15 bp, Homo sapiens
ttttaggggaaatga

SEQ ID NO: 1141080 - DNA, 15 bp, Homo sapiens
tttttaggggaaatg

SEQ ID NO: 1141081 - DNA, 15 bp, Homo sapiens
ttttttaggggaaat

SEQ ID NO: 1141082 - DNA, 15 bp, Homo sapiens
attttttaggggaaa

SEQ ID NO: 1141083 - DNA, 15 bp, Homo sapiens
gattttttaggggaa

SEQ ID NO: 1141084 - DNA, 15 bp, Homo sapiens
tgattttttagggga

SEQ ID NO: 1141085 - DNA, 15 bp, Homo sapiens
atgattttttagggg

SEQ ID NO: 1141086 - DNA, 15 bp, Homo sapiens
aatgattttttaggg

SEQ ID NO: 1141087 - DNA, 15 bp, Homo sapiens
aaatgattttttagg

SEQ ID NO: 1141088 - DNA, 15 bp, Homo sapiens
aaaatgattttttag

SEQ ID NO: 1141089 - DNA, 15 bp, Homo sapiens
taaaatgatttttta

SEQ ID NO: 1141090 - DNA, 15 bp, Homo sapiens
ataaaatgatttttt

SEQ ID NO: 1141091 - DNA, 15 bp, Homo sapiens
tataaaatgattttt

SEQ ID NO: 1141092 - DNA, 15 bp, Homo sapiens
atataaaatgatttt

SEQ ID NO: 1141093 - DNA, 15 bp, Homo sapiens
tatataaaatgattt

SEQ ID NO: 1141094 - DNA, 15 bp, Homo sapiens
gtatataaaatgatt

SEQ ID NO: 1141095 - DNA, 15 bp, Homo sapiens
ggtatataaaatgat

SEQ ID NO: 1141096 - DNA, 15 bp, Homo sapiens
gggtatataaaatga

SEQ ID NO: 1141097 - DNA, 15 bp, Homo sapiens
ggggtatataaaatg

SEQ ID NO: 1141098 - DNA, 15 bp, Homo sapiens
tggggtatataaaat

SEQ ID NO: 1141099 - DNA, 15 bp, Homo sapiens
ttggggtatataaaa

SEQ ID NO: 1141100 - DNA, 15 bp, Homo sapiens
tttggggtatataaa

SEQ ID NO: 1141101 - DNA, 15 bp, Homo sapiens
atttggggtatataa

SEQ ID NO: 1141102 - DNA, 15 bp, Homo sapiens
aatttggggtatata

SEQ ID NO: 1141103 - DNA, 15 bp, Homo sapiens
caatttggggtatat

SEQ ID NO: 1141104 - DNA, 15 bp, Homo sapiens
acaatttggggtata

SEQ ID NO: 1141105 - DNA, 15 bp, Homo sapiens
gacaatttggggtat

SEQ ID NO: 1141106 - DNA, 15 bp, Homo sapiens
tgacaatttggggta

SEQ ID NO: 1141107 - DNA, 15 bp, Homo sapiens
gtgacaatttggggt

SEQ ID NO: 1141108 - DNA, 15 bp, Homo sapiens
tgtgacaatttgggg

SEQ ID NO: 1141109 - DNA, 15 bp, Homo sapiens
atgtgacaatttggg

SEQ ID NO: 1141110 - DNA, 15 bp, Homo sapiens
aatgtgacaatttgg

SEQ ID NO: 1141111 - DNA, 15 bp, Homo sapiens
aaatgtgacaatttg

SEQ ID NO: 1141112 - DNA, 15 bp, Homo sapiens
taaatgtgacaattt

SEQ ID NO: 1141113 - DNA, 15 bp, Homo sapiens
gtaaatgtgacaatt

SEQ ID NO: 1141114 - DNA, 15 bp, Homo sapiens
ggtaaatgtgacaat

SEQ ID NO: 1141115 - DNA, 15 bp, Homo sapiens
gggtaaatgtgacaa

SEQ ID NO: 1141116 - DNA, 15 bp, Homo sapiens
ggggtaaatgtgaca

SEQ ID NO: 1141117 - DNA, 15 bp, Homo sapiens
tggggtaaatgtgac

SEQ ID NO: 1141118 - DNA, 15 bp, Homo sapiens
gtggggtaaatgtga

SEQ ID NO: 1141119 - DNA, 15 bp, Homo sapiens
agtggggtaaatgtg

SEQ ID NO: 1141120 - DNA, 15 bp, Homo sapiens
aagtggggtaaatgt

SEQ ID NO: 1141121 - DNA, 15 bp, Homo sapiens
gaagtggggtaaatg

SEQ ID NO: 1141122 - DNA, 15 bp, Homo sapiens
agaagtggggtaaat

SEQ ID NO: 1141123 - DNA, 15 bp, Homo sapiens
aagaagtggggtaaa

SEQ ID NO: 1141124 - DNA, 15 bp, Homo sapiens
gaagaagtggggtaa

SEQ ID NO: 1141125 - DNA, 15 bp, Homo sapiens
ggaagaagtggggta

SEQ ID NO: 1141126 - DNA, 15 bp, Homo sapiens
gggaagaagtggggt

SEQ ID NO: 1141127 - DNA, 15 bp, Homo sapiens
agggaagaagtgggg

SEQ ID NO: 1141128 - DNA, 15 bp, Homo sapiens
tagggaagaagtggg

SEQ ID NO: 1141129 - DNA, 15 bp, Homo sapiens
atagggaagaagtgg

SEQ ID NO: 1141130 - DNA, 15 bp, Homo sapiens
catagggaagaagtg

SEQ ID NO: 1141131 - DNA, 15 bp, Homo sapiens
tcatagggaagaagt

SEQ ID NO: 1141132 - DNA, 15 bp, Homo sapiens
ttcatagggaagaag

SEQ ID NO: 1141133 - DNA, 15 bp, Homo sapiens
tttcatagggaagaa

SEQ ID NO: 1141134 - DNA, 15 bp, Homo sapiens
ttttcatagggaaga

SEQ ID NO: 1141135 - DNA, 15 bp, Homo sapiens
cttttcatagggaag

SEQ ID NO: 1141136 - DNA, 15 bp, Homo sapiens
acttttcatagggaa

SEQ ID NO: 1141137 - DNA, 15 bp, Homo sapiens
cacttttcataggga

SEQ ID NO: 1141138 - DNA, 15 bp, Homo sapiens
ccacttttcataggg

SEQ ID NO: 1141139 - DNA, 15 bp, Homo sapiens
accacttttcatagg

SEQ ID NO: 1141140 - DNA, 15 bp, Homo sapiens
taccacttttcatag

SEQ ID NO: 1141141 - DNA, 15 bp, Homo sapiens
ataccacttttcata

SEQ ID NO: 1141142 - DNA, 15 bp, Homo sapiens
tataccacttttcat

SEQ ID NO: 1141143 - DNA, 15 bp, Homo sapiens
atataccacttttca

SEQ ID NO: 1141144 - DNA, 15 bp, Homo sapiens
tatataccacttttc

SEQ ID NO: 1141145 - DNA, 15 bp, Homo sapiens
ctatataccactttt

SEQ ID NO: 1141146 - DNA, 15 bp, Homo sapiens
cctatataccacttt

SEQ ID NO: 1141147 - DNA, 15 bp, Homo sapiens
gcctatataccactt

SEQ ID NO: 1141148 - DNA, 15 bp, Homo sapiens
tgcctatataccact

SEQ ID NO: 1141149 - DNA, 15 bp, Homo sapiens
atgcctatataccac

SEQ ID NO: 1141150 - DNA, 15 bp, Homo sapiens
gatgcctatatacca

SEQ ID NO: 1141151 - DNA, 15 bp, Homo sapiens
agatgcctatatacc

SEQ ID NO: 1141152 - DNA, 15 bp, Homo sapiens
gagatgcctatatac

SEQ ID NO: 1141153 - DNA, 15 bp, Homo sapiens
agagatgcctatata

SEQ ID NO: 1141154 - DNA, 15 bp, Homo sapiens
tagagatgcctatat

SEQ ID NO: 1141155 - DNA, 15 bp, Homo sapiens
gtagagatgcctata

SEQ ID NO: 1141156 - DNA, 15 bp, Homo sapiens
ggtagagatgcctat

SEQ ID NO: 1141157 - DNA, 15 bp, Homo sapiens
gggtagagatgccta

SEQ ID NO: 1141158 - DNA, 15 bp, Homo sapiens
ggggtagagatgcct

SEQ ID NO: 1141159 - DNA, 15 bp, Homo sapiens
gggggtagagatgcc

SEQ ID NO: 1141160 - DNA, 15 bp, Homo sapiens
tgggggtagagatgc

SEQ ID NO: 1141161 - DNA, 15 bp, Homo sapiens
atgggggtagagatg

SEQ ID NO: 1141162 - DNA, 15 bp, Homo sapiens
gatgggggtagagat

SEQ ID NO: 1141163 - DNA, 15 bp, Homo sapiens
cgatgggggtagaga

SEQ ID NO: 1141164 - DNA, 15 bp, Homo sapiens
ccgatgggggtagag

SEQ ID NO: 1141165 - DNA, 15 bp, Homo sapiens
cccgatgggggtaga

SEQ ID NO: 1141166 - DNA, 15 bp, Homo sapiens
acccgatgggggtag

SEQ ID NO: 1141167 - DNA, 15 bp, Homo sapiens
aacccgatgggggta

SEQ ID NO: 1141168 - DNA, 15 bp, Homo sapiens
taacccgatgggggt

SEQ ID NO: 1141169 - DNA, 15 bp, Homo sapiens
ataacccgatggggg

SEQ ID NO: 1141170 - DNA, 15 bp, Homo sapiens
aataacccgatgggg

SEQ ID NO: 1141171 - DNA, 15 bp, Homo sapiens
caataacccgatggg

SEQ ID NO: 1141172 - DNA, 15 bp, Homo sapiens
ccaataacccgatgg

SEQ ID NO: 1141173 - DNA, 15 bp, Homo sapiens
cccaataacccgatg

SEQ ID NO: 1141174 - DNA, 15 bp, Homo sapiens
acccaataacccgat

SEQ ID NO: 1141175 - DNA, 15 bp, Homo sapiens
tacccaataacccga

SEQ ID NO: 1141176 - DNA, 15 bp, Homo sapiens
ttacccaataacccg

SEQ ID NO: 1141177 - DNA, 15 bp, Homo sapiens
attacccaataaccc

SEQ ID NO: 1141178 - DNA, 15 bp, Homo sapiens
gattacccaataacc

SEQ ID NO: 1141179 - DNA, 15 bp, Homo sapiens
ggattacccaataac

SEQ ID NO: 1141180 - DNA, 15 bp, Homo sapiens
aggattacccaataa

SEQ ID NO: 1141181 - DNA, 15 bp, Homo sapiens
aaggattacccaata

SEQ ID NO: 1141182 - DNA, 15 bp, Homo sapiens
gaaggattacccaat

SEQ ID NO: 1141183 - DNA, 15 bp, Homo sapiens
agaaggattacccaa

SEQ ID NO: 1141184 - DNA, 15 bp, Homo sapiens
gagaaggattaccca

SEQ ID NO: 1141185 - DNA, 15 bp, Homo sapiens
ggagaaggattaccc

SEQ ID NO: 1141186 - DNA, 15 bp, Homo sapiens
aggagaaggattacc

SEQ ID NO: 1141187 - DNA, 15 bp, Homo sapiens
taggagaaggattac

SEQ ID NO: 1141188 - DNA, 15 bp, Homo sapiens
gtaggagaaggatta

SEQ ID NO: 1141189 - DNA, 15 bp, Homo sapiens
tgtaggagaaggatt

SEQ ID NO: 1141190 - DNA, 15 bp, Homo sapiens
ttgtaggagaaggat

SEQ ID NO: 1141191 - DNA, 15 bp, Homo sapiens
attgtaggagaagga

SEQ ID NO: 1141192 - DNA, 15 bp, Homo sapiens
gattgtaggagaagg

SEQ ID NO: 1141193 - DNA, 15 bp, Homo sapiens
ggattgtaggagaag

SEQ ID NO: 1141194 - DNA, 15 bp, Homo sapiens
gggattgtaggagaa

SEQ ID NO: 1141195 - DNA, 15 bp, Homo sapiens
ggggattgtaggaga

SEQ ID NO: 1141196 - DNA, 15 bp, Homo sapiens
gggggattgtaggag

SEQ ID NO: 1141197 - DNA, 15 bp, Homo sapiens
agggggattgtagga

SEQ ID NO: 1141198 - DNA, 15 bp, Homo sapiens
tagggggattgtagg

SEQ ID NO: 1141199 - DNA, 15 bp, Homo sapiens
atagggggattgtag

SEQ ID NO: 1141200 - DNA, 15 bp, Homo sapiens
catagggggattgta

SEQ ID NO: 1141201 - DNA, 15 bp, Homo sapiens
gcatagggggattgt

SEQ ID NO: 1141202 - DNA, 15 bp, Homo sapiens
agcatagggggattg

SEQ ID NO: 1141203 - DNA, 15 bp, Homo sapiens
tagcatagggggatt

SEQ ID NO: 1141204 - DNA, 15 bp, Homo sapiens
atagcatagggggat

SEQ ID NO: 1141205 - DNA, 15 bp, Homo sapiens
catagcataggggga

SEQ ID NO: 1141206 - DNA, 15 bp, Homo sapiens
gcatagcataggggg

SEQ ID NO: 1141207 - DNA, 15 bp, Homo sapiens
tgcatagcatagggg

SEQ ID NO: 1141208 - DNA, 15 bp, Homo sapiens
gtgcatagcataggg

SEQ ID NO: 1141209 - DNA, 15 bp, Homo sapiens
tgtgcatagcatagg

SEQ ID NO: 1141210 - DNA, 15 bp, Homo sapiens
atgtgcatagcatag

SEQ ID NO: 1141211 - DNA, 15 bp, Homo sapiens
aatgtgcatagcata

SEQ ID NO: 1141212 - DNA, 15 bp, Homo sapiens
taatgtgcatagcat

SEQ ID NO: 1141213 - DNA, 15 bp, Homo sapiens
ttaatgtgcatagca

SEQ ID NO: 1141214 - DNA, 15 bp, Homo sapiens
gttaatgtgcatagc

SEQ ID NO: 1141215 - DNA, 15 bp, Homo sapiens
tgttaatgtgcatag

SEQ ID NO: 1141216 - DNA, 15 bp, Homo sapiens
atgttaatgtgcata

SEQ ID NO: 1141217 - DNA, 15 bp, Homo sapiens
tatgttaatgtgcat

SEQ ID NO: 1141218 - DNA, 15 bp, Homo sapiens
ttatgttaatgtgca

SEQ ID NO: 1141219 - DNA, 15 bp, Homo sapiens
tttatgttaatgtgc

SEQ ID NO: 1141220 - DNA, 15 bp, Homo sapiens
ttttatgttaatgtg

SEQ ID NO: 1141221 - DNA, 15 bp, Homo sapiens
attttatgttaatgt

SEQ ID NO: 1141222 - DNA, 15 bp, Homo sapiens
aattttatgttaatg

SEQ ID NO: 1141223 - DNA, 15 bp, Homo sapiens
aaattttatgttaat

SEQ ID NO: 1141224 - DNA, 15 bp, Homo sapiens
caaattttatgttaa

SEQ ID NO: 1141225 - DNA, 15 bp, Homo sapiens
gcaaattttatgtta

SEQ ID NO: 1141226 - DNA, 15 bp, Homo sapiens
tgcaaattttatgtt

SEQ ID NO: 1141227 - DNA, 15 bp, Homo sapiens
atgcaaattttatgt

SEQ ID NO: 1141228 - DNA, 15 bp, Homo sapiens
catgcaaattttatg

SEQ ID NO: 1141229 - DNA, 15 bp, Homo sapiens
gcatgcaaattttat

SEQ ID NO: 1141230 - DNA, 15 bp, Homo sapiens
ggcatgcaaatttta

SEQ ID NO: 1141231 - DNA, 15 bp, Homo sapiens
aggcatgcaaatttt

SEQ ID NO: 1141232 - DNA, 15 bp, Homo sapiens
aaggcatgcaaattt

SEQ ID NO: 1141233 - DNA, 15 bp, Homo sapiens
aaaggcatgcaaatt

SEQ ID NO: 1141234 - DNA, 15 bp, Homo sapiens
aaaaggcatgcaaat

SEQ ID NO: 1141235 - DNA, 15 bp, Homo sapiens
gaaaaggcatgcaaa

SEQ ID NO: 1141236 - DNA, 15 bp, Homo sapiens
agaaaaggcatgcaa

SEQ ID NO: 1141237 - DNA, 15 bp, Homo sapiens
gagaaaaggcatgca

SEQ ID NO: 1141238 - DNA, 15 bp, Homo sapiens
ggagaaaaggcatgc

SEQ ID NO: 1141239 - DNA, 15 bp, Homo sapiens
aggagaaaaggcatg

SEQ ID NO: 1141240 - DNA, 15 bp, Homo sapiens
taggagaaaaggcat

SEQ ID NO: 1141241 - DNA, 15 bp, Homo sapiens
ataggagaaaaggca

SEQ ID NO: 1141242 - DNA, 15 bp, Homo sapiens
aataggagaaaaggc

SEQ ID NO: 1141243 - DNA, 15 bp, Homo sapiens
taataggagaaaagg

SEQ ID NO: 1141244 - DNA, 15 bp, Homo sapiens
ttaataggagaaaag

SEQ ID NO: 1141245 - DNA, 15 bp, Homo sapiens
attaataggagaaaa

SEQ ID NO: 1141246 - DNA, 15 bp, Homo sapiens
gattaataggagaaa

SEQ ID NO: 1141247 - DNA, 15 bp, Homo sapiens
agattaataggagaa

SEQ ID NO: 1141248 - DNA, 15 bp, Homo sapiens
cagattaataggaga

SEQ ID NO: 1141249 - DNA, 15 bp, Homo sapiens
gcagattaataggag

SEQ ID NO: 1141250 - DNA, 15 bp, Homo sapiens
agcagattaatagga

SEQ ID NO: 1141251 - DNA, 15 bp, Homo sapiens
aagcagattaatagg

SEQ ID NO: 1141252 - DNA, 15 bp, Homo sapiens
aaagcagattaatag

SEQ ID NO: 1141253 - DNA, 15 bp, Homo sapiens
caaagcagattaata

SEQ ID NO: 1141254 - DNA, 15 bp, Homo sapiens
acaaagcagattaat

SEQ ID NO: 1141255 - DNA, 15 bp, Homo sapiens
gacaaagcagattaa

SEQ ID NO: 1141256 - DNA, 15 bp, Homo sapiens
tgacaaagcagatta

SEQ ID NO: 1141257 - DNA, 15 bp, Homo sapiens
atgacaaagcagatt

SEQ ID NO: 1141258 - DNA, 15 bp, Homo sapiens
aatgacaaagcagat

SEQ ID NO: 1141259 - DNA, 15 bp, Homo sapiens
aaatgacaaagcaga

SEQ ID NO: 1141260 - DNA, 15 bp, Homo sapiens
caaatgacaaagcag

SEQ ID NO: 1141261 - DNA, 15 bp, Homo sapiens
tcaaatgacaaagca

SEQ ID NO: 1141262 - DNA, 15 bp, Homo sapiens
atcaaatgacaaagc

SEQ ID NO: 1141263 - DNA, 15 bp, Homo sapiens
aatcaaatgacaaag

SEQ ID NO: 1141264 - DNA, 15 bp, Homo sapiens
aaatcaaatgacaaa

SEQ ID NO: 1141265 - DNA, 15 bp, Homo sapiens
aaaatcaaatgacaa

SEQ ID NO: 1141266 - DNA, 15 bp, Homo sapiens
gaaaatcaaatgaca

SEQ ID NO: 1141267 - DNA, 15 bp, Homo sapiens
tgaaaatcaaatgac

SEQ ID NO: 1141268 - DNA, 15 bp, Homo sapiens
ttgaaaatcaaatga

SEQ ID NO: 1141269 - DNA, 15 bp, Homo sapiens
attgaaaatcaaatg

SEQ ID NO: 1141270 - DNA, 15 bp, Homo sapiens
cattgaaaatcaaat

SEQ ID NO: 1141271 - DNA, 15 bp, Homo sapiens
tcattgaaaatcaaa

SEQ ID NO: 1141272 - DNA, 15 bp, Homo sapiens
ttcattgaaaatcaa

SEQ ID NO: 1141273 - DNA, 15 bp, Homo sapiens
gttcattgaaaatca

SEQ ID NO: 1141274 - DNA, 15 bp, Homo sapiens
ggttcattgaaaatc

SEQ ID NO: 1141275 - DNA, 15 bp, Homo sapiens
aggttcattgaaaat

SEQ ID NO: 1141276 - DNA, 15 bp, Homo sapiens
aaggttcattgaaaa

SEQ ID NO: 1141277 - DNA, 15 bp, Homo sapiens
gaaggttcattgaaa

SEQ ID NO: 1141278 - DNA, 15 bp, Homo sapiens
tgaaggttcattgaa

SEQ ID NO: 1141279 - DNA, 15 bp, Homo sapiens
ctgaaggttcattga

SEQ ID NO: 1141280 - DNA, 15 bp, Homo sapiens
tctgaaggttcattg

SEQ ID NO: 1141281 - DNA, 15 bp, Homo sapiens
ctctgaaggttcatt

SEQ ID NO: 1141282 - DNA, 15 bp, Homo sapiens
cctctgaaggttcat

SEQ ID NO: 1141283 - DNA, 15 bp, Homo sapiens
ccctctgaaggttca

SEQ ID NO: 1141284 - DNA, 15 bp, Homo sapiens
gccctctgaaggttc

SEQ ID NO: 1141285 - DNA, 15 bp, Homo sapiens
tgccctctgaaggtt

SEQ ID NO: 1141286 - DNA, 15 bp, Homo sapiens
ttgccctctgaaggt

SEQ ID NO: 1141287 - DNA, 15 bp, Homo sapiens
tttgccctctgaagg

SEQ ID NO: 1141288 - DNA, 15 bp, Homo sapiens
ttttgccctctgaag

SEQ ID NO: 1141289 - DNA, 15 bp, Homo sapiens
cttttgccctctgaa

SEQ ID NO: 1141290 - DNA, 15 bp, Homo sapiens
ccttttgccctctga

SEQ ID NO: 1141291 - DNA, 15 bp, Homo sapiens
tccttttgccctctg

SEQ ID NO: 1141292 - DNA, 15 bp, Homo sapiens
ttccttttgccctct

SEQ ID NO: 1141293 - DNA, 15 bp, Homo sapiens
tttccttttgccctc

SEQ ID NO: 1141294 - DNA, 15 bp, Homo sapiens
ctttccttttgccct

SEQ ID NO: 1141295 - DNA, 15 bp, Homo sapiens
actttccttttgccc

SEQ ID NO: 1141296 - DNA, 15 bp, Homo sapiens
aactttccttttgcc

SEQ ID NO: 1141297 - DNA, 15 bp, Homo sapiens
aaactttccttttgc

SEQ ID NO: 1141298 - DNA, 15 bp, Homo sapiens
aaaactttccttttg

SEQ ID NO: 1141299 - DNA, 15 bp, Homo sapiens
gaaaactttcctttt

SEQ ID NO: 1141300 - DNA, 15 bp, Homo sapiens
ggaaaactttccttt

SEQ ID NO: 1141301 - DNA, 15 bp, Homo sapiens
gggaaaactttcctt

SEQ ID NO: 1141302 - DNA, 15 bp, Homo sapiens
agggaaaactttcct

SEQ ID NO: 1141303 - DNA, 15 bp, Homo sapiens
gagggaaaactttcc

SEQ ID NO: 1141304 - DNA, 15 bp, Homo sapiens
tgagggaaaactttc

SEQ ID NO: 1141305 - DNA, 15 bp, Homo sapiens
ctgagggaaaacttt

SEQ ID NO: 1141306 - DNA, 15 bp, Homo sapiens
gctgagggaaaactt

SEQ ID NO: 1141307 - DNA, 15 bp, Homo sapiens
agctgagggaaaact

SEQ ID NO: 1141308 - DNA, 15 bp, Homo sapiens
gagctgagggaaaac

SEQ ID NO: 1141309 - DNA, 15 bp, Homo sapiens
ggagctgagggaaaa

SEQ ID NO: 1141310 - DNA, 15 bp, Homo sapiens
tggagctgagggaaa

SEQ ID NO: 1141311 - DNA, 15 bp, Homo sapiens
ttggagctgagggaa

SEQ ID NO: 1141312 - DNA, 15 bp, Homo sapiens
gttggagctgaggga

SEQ ID NO: 1141313 - DNA, 15 bp, Homo sapiens
tgttggagctgaggg

SEQ ID NO: 1141314 - DNA, 15 bp, Homo sapiens
ctgttggagctgagg

SEQ ID NO: 1141315 - DNA, 15 bp, Homo sapiens
actgttggagctgag

SEQ ID NO: 1141316 - DNA, 15 bp, Homo sapiens
aactgttggagctga

SEQ ID NO: 1141317 - DNA, 15 bp, Homo sapiens
aaactgttggagctg

SEQ ID NO: 1141318 - DNA, 15 bp, Homo sapiens
aaaactgttggagct

SEQ ID NO: 1141319 - DNA, 15 bp, Homo sapiens
caaaactgttggagc

SEQ ID NO: 1141320 - DNA, 15 bp, Homo sapiens
ccaaaactgttggag

SEQ ID NO: 1141321 - DNA, 15 bp, Homo sapiens
gccaaaactgttgga

SEQ ID NO: 1141322 - DNA, 15 bp, Homo sapiens
ggccaaaactgttgg

SEQ ID NO: 1141323 - DNA, 15 bp, Homo sapiens
gggccaaaactgttg

SEQ ID NO: 1141324 - DNA, 15 bp, Homo sapiens
tgggccaaaactgtt

SEQ ID NO: 1141325 - DNA, 15 bp, Homo sapiens
ctgggccaaaactgt

SEQ ID NO: 1141326 - DNA, 15 bp, Homo sapiens
actgggccaaaactg

SEQ ID NO: 1141327 - DNA, 15 bp, Homo sapiens
cactgggccaaaact

SEQ ID NO: 1141328 - DNA, 15 bp, Homo sapiens
tcactgggccaaaac

SEQ ID NO: 1141329 - DNA, 15 bp, Homo sapiens
ttcactgggccaaaa

SEQ ID NO: 1141330 - DNA, 15 bp, Homo sapiens
gttcactgggccaaa

SEQ ID NO: 1141331 - DNA, 15 bp, Homo sapiens
tgttcactgggccaa

SEQ ID NO: 1141332 - DNA, 15 bp, Homo sapiens
ctgttcactgggcca

SEQ ID NO: 1141333 - DNA, 15 bp, Homo sapiens
cctgttcactgggcc

SEQ ID NO: 1141334 - DNA, 15 bp, Homo sapiens
tcctgttcactgggc

SEQ ID NO: 1141335 - DNA, 15 bp, Homo sapiens
gtcctgttcactggg

SEQ ID NO: 1141336 - DNA, 15 bp, Homo sapiens
tgtcctgttcactgg

SEQ ID NO: 1141337 - DNA, 15 bp, Homo sapiens
ttgtcctgttcactg

SEQ ID NO: 1141338 - DNA, 15 bp, Homo sapiens
gttgtcctgttcact

SEQ ID NO: 1141339 - DNA, 15 bp, Homo sapiens
ggttgtcctgttcac

SEQ ID NO: 1141340 - DNA, 15 bp, Homo sapiens
tggttgtcctgttca

SEQ ID NO: 1141341 - DNA, 15 bp, Homo sapiens
ttggttgtcctgttc

SEQ ID NO: 1141342 - DNA, 15 bp, Homo sapiens
tttggttgtcctgtt

SEQ ID NO: 1141343 - DNA, 15 bp, Homo sapiens
ttttggttgtcctgt

SEQ ID NO: 1141344 - DNA, 15 bp, Homo sapiens
gttttggttgtcctg

SEQ ID NO: 1141345 - DNA, 15 bp, Homo sapiens
agttttggttgtcct

SEQ ID NO: 1141346 - DNA, 15 bp, Homo sapiens
cagttttggttgtcc

SEQ ID NO: 1141347 - DNA, 15 bp, Homo sapiens
gcagttttggttgtc

SEQ ID NO: 1141348 - DNA, 15 bp, Homo sapiens
agcagttttggttgt

SEQ ID NO: 1141349 - DNA, 15 bp, Homo sapiens
gagcagttttggttg

SEQ ID NO: 1141350 - DNA, 15 bp, Homo sapiens
agagcagttttggtt

SEQ ID NO: 1141351 - DNA, 15 bp, Homo sapiens
cagagcagttttggt

SEQ ID NO: 1141352 - DNA, 15 bp, Homo sapiens
gcagagcagttttgg

SEQ ID NO: 1141353 - DNA, 15 bp, Homo sapiens
agcagagcagttttg

SEQ ID NO: 1141354 - DNA, 15 bp, Homo sapiens
gagcagagcagtttt

SEQ ID NO: 1141355 - DNA, 15 bp, Homo sapiens
agagcagagcagttt

SEQ ID NO: 1141356 - DNA, 15 bp, Homo sapiens
aagagcagagcagtt

SEQ ID NO: 1141357 - DNA, 15 bp, Homo sapiens
gaagagcagagcagt

SEQ ID NO: 1141358 - DNA, 15 bp, Homo sapiens
ggaagagcagagcag

SEQ ID NO: 1141359 - DNA, 15 bp, Homo sapiens
cggaagagcagagca

SEQ ID NO: 1141360 - DNA, 15 bp, Homo sapiens
tcggaagagcagagc

SEQ ID NO: 1141361 - DNA, 15 bp, Homo sapiens
ttcggaagagcagag

SEQ ID NO: 1141362 - DNA, 15 bp, Homo sapiens
tttcggaagagcaga

SEQ ID NO: 1141363 - DNA, 15 bp, Homo sapiens
ttttcggaagagcag

SEQ ID NO: 1141364 - DNA, 15 bp, Homo sapiens
attttcggaagagca

SEQ ID NO: 1141365 - DNA, 15 bp, Homo sapiens
aattttcggaagagc

SEQ ID NO: 1141366 - DNA, 15 bp, Homo sapiens
caattttcggaagag

SEQ ID NO: 1141367 - DNA, 15 bp, Homo sapiens
gcaattttcggaaga

SEQ ID NO: 1141368 - DNA, 15 bp, Homo sapiens
tgcaattttcggaag

SEQ ID NO: 1141369 - DNA, 15 bp, Homo sapiens
ctgcaattttcggaa

SEQ ID NO: 1141370 - DNA, 15 bp, Homo sapiens
actgcaattttcgga

SEQ ID NO: 1141371 - DNA, 15 bp, Homo sapiens
gactgcaattttcgg

SEQ ID NO: 1141372 - DNA, 15 bp, Homo sapiens
tgactgcaattttcg

SEQ ID NO: 1141373 - DNA, 15 bp, Homo sapiens
ctgactgcaattttc

SEQ ID NO: 1141374 - DNA, 15 bp, Homo sapiens
cctgactgcaatttt

SEQ ID NO: 1141375 - DNA, 15 bp, Homo sapiens
ccctgactgcaattt

SEQ ID NO: 1141376 - DNA, 15 bp, Homo sapiens
tccctgactgcaatt

SEQ ID NO: 1141377 - DNA, 15 bp, Homo sapiens
ttccctgactgcaat

SEQ ID NO: 1141378 - DNA, 15 bp, Homo sapiens
gttccctgactgcaa

SEQ ID NO: 1141379 - DNA, 15 bp, Homo sapiens
ggttccctgactgca

SEQ ID NO: 1141380 - DNA, 15 bp, Homo sapiens
aggttccctgactgc

SEQ ID NO: 1141381 - DNA, 15 bp, Homo sapiens
caggttccctgactg

SEQ ID NO: 1141382 - DNA, 15 bp, Homo sapiens
ccaggttccctgact

SEQ ID NO: 1141383 - DNA, 15 bp, Homo sapiens
cccaggttccctgac

SEQ ID NO: 1141384 - DNA, 15 bp, Homo sapiens
tcccaggttccctga

SEQ ID NO: 1141385 - DNA, 15 bp, Homo sapiens
gtcccaggttccctg

SEQ ID NO: 1141386 - DNA, 15 bp, Homo sapiens
ggtcccaggttccct

SEQ ID NO: 1141387 - DNA, 15 bp, Homo sapiens
gggtcccaggttccc

SEQ ID NO: 1141388 - DNA, 15 bp, Homo sapiens
cgggtcccaggttcc

SEQ ID NO: 1141389 - DNA, 15 bp, Homo sapiens
ccgggtcccaggttc

SEQ ID NO: 1141390 - DNA, 15 bp, Homo sapiens
gccgggtcccaggtt

SEQ ID NO: 1141391 - DNA, 15 bp, Homo sapiens
tgccgggtcccaggt

SEQ ID NO: 1141392 - DNA, 15 bp, Homo sapiens
ttgccgggtcccagg

SEQ ID NO: 1141393 - DNA, 15 bp, Homo sapiens
cttgccgggtcccag

SEQ ID NO: 1141394 - DNA, 15 bp, Homo sapiens
gcttgccgggtccca

SEQ ID NO: 1141395 - DNA, 15 bp, Homo sapiens
ggcttgccgggtccc

SEQ ID NO: 1141396 - DNA, 15 bp, Homo sapiens
tggcttgccgggtcc

SEQ ID NO: 1141397 - DNA, 15 bp, Homo sapiens
ctggcttgccgggtc

SEQ ID NO: 1141398 - DNA, 15 bp, Homo sapiens
gctggcttgccgggt

SEQ ID NO: 1141399 - DNA, 15 bp, Homo sapiens
tgctggcttgccggg

SEQ ID NO: 1141400 - DNA, 15 bp, Homo sapiens
ctgctggcttgccgg

SEQ ID NO: 1141401 - DNA, 15 bp, Homo sapiens
tctgctggcttgccg

SEQ ID NO: 1141402 - DNA, 15 bp, Homo sapiens
ttctgctggcttgcc

SEQ ID NO: 1141403 - DNA, 15 bp, Homo sapiens
cttctgctggcttgc

SEQ ID NO: 1141404 - DNA, 15 bp, Homo sapiens
ccttctgctggcttg

SEQ ID NO: 1141405 - DNA, 15 bp, Homo sapiens
cccttctgctggctt

SEQ ID NO: 1141406 - DNA, 15 bp, Homo sapiens
acccttctgctggct

SEQ ID NO: 1141407 - DNA, 15 bp, Homo sapiens
tacccttctgctggc

SEQ ID NO: 1141408 - DNA, 15 bp, Homo sapiens
ttacccttctgctgg

SEQ ID NO: 1141409 - DNA, 15 bp, Homo sapiens
cttacccttctgctg

SEQ ID NO: 1141410 - DNA, 15 bp, Homo sapiens
tcttacccttctgct

SEQ ID NO: 1141411 - DNA, 15 bp, Homo sapiens
ttcttacccttctgc

SEQ ID NO: 1141412 - DNA, 15 bp, Homo sapiens
tttcttacccttctg

SEQ ID NO: 1141413 - DNA, 15 bp, Homo sapiens
atttcttacccttct

SEQ ID NO: 1141414 - DNA, 15 bp, Homo sapiens
aatttcttacccttc

SEQ ID NO: 1141415 - DNA, 15 bp, Homo sapiens
gaatttcttaccctt

SEQ ID NO: 1141416 - DNA, 15 bp, Homo sapiens
agaatttcttaccct

SEQ ID NO: 1141417 - DNA, 15 bp, Homo sapiens
aagaatttcttaccc

SEQ ID NO: 1141418 - DNA, 15 bp, Homo sapiens
aaagaatttcttacc

SEQ ID NO: 1141419 - DNA, 15 bp, Homo sapiens
gaaagaatttcttac

SEQ ID NO: 1141420 - DNA, 15 bp, Homo sapiens
ggaaagaatttctta

SEQ ID NO: 1141421 - DNA, 15 bp, Homo sapiens
tggaaagaatttctt

SEQ ID NO: 1141422 - DNA, 15 bp, Homo sapiens
ctggaaagaatttct

SEQ ID NO: 1141423 - DNA, 15 bp, Homo sapiens
actggaaagaatttc

SEQ ID NO: 1141424 - DNA, 15 bp, Homo sapiens
gactggaaagaattt

SEQ ID NO: 1141425 - DNA, 15 bp, Homo sapiens
tgactggaaagaatt

SEQ ID NO: 1141426 - DNA, 15 bp, Homo sapiens
ctgactggaaagaat

SEQ ID NO: 1141427 - DNA, 15 bp, Homo sapiens
tctgactggaaagaa

SEQ ID NO: 1141428 - DNA, 15 bp, Homo sapiens
ttctgactggaaaga

SEQ ID NO: 1141429 - DNA, 15 bp, Homo sapiens
attctgactggaaag

SEQ ID NO: 1141430 - DNA, 15 bp, Homo sapiens
gattctgactggaaa

SEQ ID NO: 1141431 - DNA, 15 bp, Homo sapiens
agattctgactggaa

SEQ ID NO: 1141432 - DNA, 15 bp, Homo sapiens
aagattctgactgga

SEQ ID NO: 1141433 - DNA, 15 bp, Homo sapiens
caagattctgactgg

SEQ ID NO: 1141434 - DNA, 15 bp, Homo sapiens
ccaagattctgactg

SEQ ID NO: 1141435 - DNA, 15 bp, Homo sapiens
accaagattctgact

SEQ ID NO: 1141436 - DNA, 15 bp, Homo sapiens
gaccaagattctgac

SEQ ID NO: 1141437 - DNA, 15 bp, Homo sapiens
agaccaagattctga

SEQ ID NO: 1141438 - DNA, 15 bp, Homo sapiens
cagaccaagattctg

SEQ ID NO: 1141439 - DNA, 15 bp, Homo sapiens
acagaccaagattct

SEQ ID NO: 1141440 - DNA, 15 bp, Homo sapiens
cacagaccaagattc

SEQ ID NO: 1141441 - DNA, 15 bp, Homo sapiens
acacagaccaagatt

SEQ ID NO: 1141442 - DNA, 15 bp, Homo sapiens
aacacagaccaagat

SEQ ID NO: 1141443 - DNA, 15 bp, Homo sapiens
aaacacagaccaaga

SEQ ID NO: 1141444 - DNA, 15 bp, Homo sapiens
caaacacagaccaag

SEQ ID NO: 1141445 - DNA, 15 bp, Homo sapiens
acaaacacagaccaa

SEQ ID NO: 1141446 - DNA, 15 bp, Homo sapiens
gacaaacacagacca

SEQ ID NO: 1141447 - DNA, 15 bp, Homo sapiens
agacaaacacagacc

SEQ ID NO: 1141448 - DNA, 15 bp, Homo sapiens
aagacaaacacagac

SEQ ID NO: 1141449 - DNA, 15 bp, Homo sapiens
aaagacaaacacaga

SEQ ID NO: 1141450 - DNA, 15 bp, Homo sapiens
caaagacaaacacag

SEQ ID NO: 1141451 - DNA, 15 bp, Homo sapiens
ccaaagacaaacaca

SEQ ID NO: 1141452 - DNA, 15 bp, Homo sapiens
tccaaagacaaacac

SEQ ID NO: 1141453 - DNA, 15 bp, Homo sapiens
ttccaaagacaaaca

SEQ ID NO: 1141454 - DNA, 15 bp, Homo sapiens
attccaaagacaaac

SEQ ID NO: 1141455 - DNA, 15 bp, Homo sapiens
gattccaaagacaaa

SEQ ID NO: 1141456 - DNA, 15 bp, Homo sapiens
agattccaaagacaa

SEQ ID NO: 1141457 - DNA, 15 bp, Homo sapiens
cagattccaaagaca

SEQ ID NO: 1141458 - DNA, 15 bp, Homo sapiens
ccagattccaaagac

SEQ ID NO: 1141459 - DNA, 15 bp, Homo sapiens
tccagattccaaaga

SEQ ID NO: 1141460 - DNA, 15 bp, Homo sapiens
atccagattccaaag

SEQ ID NO: 1141461 - DNA, 15 bp, Homo sapiens
catccagattccaaa

SEQ ID NO: 1141462 - DNA, 15 bp, Homo sapiens
tcatccagattccaa

SEQ ID NO: 1141463 - DNA, 15 bp, Homo sapiens
ctcatccagattcca

SEQ ID NO: 1141464 - DNA, 15 bp, Homo sapiens
gctcatccagattcc

SEQ ID NO: 1141465 - DNA, 15 bp, Homo sapiens
cgctcatccagattc

SEQ ID NO: 1141466 - DNA, 15 bp, Homo sapiens
ccgctcatccagatt

SEQ ID NO: 1141467 - DNA, 15 bp, Homo sapiens
tccgctcatccagat

SEQ ID NO: 1141468 - DNA, 15 bp, Homo sapiens
atccgctcatccaga

SEQ ID NO: 1141469 - DNA, 15 bp, Homo sapiens
tatccgctcatccag

SEQ ID NO: 1141470 - DNA, 15 bp, Homo sapiens
ctatccgctcatcca

SEQ ID NO: 1141471 - DNA, 15 bp, Homo sapiens
actatccgctcatcc

SEQ ID NO: 1141472 - DNA, 15 bp, Homo sapiens
tactatccgctcatc

SEQ ID NO: 1141473 - DNA, 15 bp, Homo sapiens
ttactatccgctcat

SEQ ID NO: 1141474 - DNA, 15 bp, Homo sapiens
tttactatccgctca

SEQ ID NO: 1141475 - DNA, 15 bp, Homo sapiens
ttttactatccgctc

SEQ ID NO: 1141476 - DNA, 15 bp, Homo sapiens
tttttactatccgct

SEQ ID NO: 1141477 - DNA, 15 bp, Homo sapiens
ttttttactatccgc

SEQ ID NO: 1141478 - DNA, 15 bp, Homo sapiens
tttttttactatccg

SEQ ID NO: 1141479 - DNA, 15 bp, Homo sapiens
gtttttttactatcc

SEQ ID NO: 1141480 - DNA, 15 bp, Homo sapiens
ggtttttttactatc

SEQ ID NO: 1141481 - DNA, 15 bp, Homo sapiens
tggtttttttactat

SEQ ID NO: 1141482 - DNA, 15 bp, Homo sapiens
atggtttttttacta

SEQ ID NO: 1141483 - DNA, 15 bp, Homo sapiens
catggtttttttact

SEQ ID NO: 1141484 - DNA, 15 bp, Homo sapiens
acatggtttttttac

SEQ ID NO: 1141485 - DNA, 15 bp, Homo sapiens
aacatggttttttta

SEQ ID NO: 1141486 - DNA, 15 bp, Homo sapiens
aaacatggttttttt

SEQ ID NO: 1141487 - DNA, 15 bp, Homo sapiens
caaacatggtttttt

SEQ ID NO: 1141488 - DNA, 15 bp, Homo sapiens
acaaacatggttttt

SEQ ID NO: 1141489 - DNA, 15 bp, Homo sapiens
gacaaacatggtttt

SEQ ID NO: 1141490 - DNA, 15 bp, Homo sapiens
agacaaacatggttt

SEQ ID NO: 1141491 - DNA, 15 bp, Homo sapiens
gagacaaacatggtt

SEQ ID NO: 1141492 - DNA, 15 bp, Homo sapiens
agagacaaacatggt

SEQ ID NO: 1141493 - DNA, 15 bp, Homo sapiens
gagagacaaacatgg

SEQ ID NO: 1141494 - DNA, 15 bp, Homo sapiens
agagagacaaacatg

SEQ ID NO: 1141495 - DNA, 15 bp, Homo sapiens
aagagagacaaacat

SEQ ID NO: 1141496 - DNA, 15 bp, Homo sapiens
aaagagagacaaaca

SEQ ID NO: 1141497 - DNA, 15 bp, Homo sapiens
gaaagagagacaaac

SEQ ID NO: 1141498 - DNA, 15 bp, Homo sapiens
ggaaagagagacaaa

SEQ ID NO: 1141499 - DNA, 15 bp, Homo sapiens
tggaaagagagacaa

SEQ ID NO: 1141500 - DNA, 15 bp, Homo sapiens
atggaaagagagaca

SEQ ID NO: 1141501 - DNA, 15 bp, Homo sapiens
tatggaaagagagac

SEQ ID NO: 1141502 - DNA, 15 bp, Homo sapiens
atatggaaagagaga

SEQ ID NO: 1141503 - DNA, 15 bp, Homo sapiens
catatggaaagagag

SEQ ID NO: 1141504 - DNA, 15 bp, Homo sapiens
acatatggaaagaga

SEQ ID NO: 1141505 - DNA, 15 bp, Homo sapiens
tacatatggaaagag

SEQ ID NO: 1141506 - DNA, 15 bp, Homo sapiens
ttacatatggaaaga

SEQ ID NO: 1141507 - DNA, 15 bp, Homo sapiens
gttacatatggaaag

SEQ ID NO: 1141508 - DNA, 15 bp, Homo sapiens
tgttacatatggaaa

SEQ ID NO: 1141509 - DNA, 15 bp, Homo sapiens
atgttacatatggaa

SEQ ID NO: 1141510 - DNA, 15 bp, Homo sapiens
aatgttacatatgga

SEQ ID NO: 1141511 - DNA, 15 bp, Homo sapiens
taatgttacatatgg

SEQ ID NO: 1141512 - DNA, 15 bp, Homo sapiens
ttaatgttacatatg

SEQ ID NO: 1141513 - DNA, 15 bp, Homo sapiens
gttaatgttacatat

SEQ ID NO: 1141514 - DNA, 15 bp, Homo sapiens
tgttaatgttacata

SEQ ID NO: 1141515 - DNA, 15 bp, Homo sapiens
ctgttaatgttacat

SEQ ID NO: 1141516 - DNA, 15 bp, Homo sapiens
cctgttaatgttaca

SEQ ID NO: 1141517 - DNA, 15 bp, Homo sapiens
tcctgttaatgttac

SEQ ID NO: 1141518 - DNA, 15 bp, Homo sapiens
ctcctgttaatgtta

SEQ ID NO: 1141519 - DNA, 15 bp, Homo sapiens
tctcctgttaatgtt

SEQ ID NO: 1141520 - DNA, 15 bp, Homo sapiens
ttctcctgttaatgt

SEQ ID NO: 1141521 - DNA, 15 bp, Homo sapiens
tttctcctgttaatg

SEQ ID NO: 1141522 - DNA, 15 bp, Homo sapiens
ttttctcctgttaat

SEQ ID NO: 1141523 - DNA, 15 bp, Homo sapiens
attttctcctgttaa

SEQ ID NO: 1141524 - DNA, 15 bp, Homo sapiens
gattttctcctgtta

SEQ ID NO: 1141525 - DNA, 15 bp, Homo sapiens
tgattttctcctgtt

SEQ ID NO: 1141526 - DNA, 15 bp, Homo sapiens
atgattttctcctgt

SEQ ID NO: 1141527 - DNA, 15 bp, Homo sapiens
aatgattttctcctg

SEQ ID NO: 1141528 - DNA, 15 bp, Homo sapiens
aaatgattttctcct

SEQ ID NO: 1141529 - DNA, 15 bp, Homo sapiens
aaaatgattttctcc

SEQ ID NO: 1141530 - DNA, 15 bp, Homo sapiens
aaaaatgattttctc

SEQ ID NO: 1141531 - DNA, 15 bp, Homo sapiens
caaaaatgattttct

SEQ ID NO: 1141532 - DNA, 15 bp, Homo sapiens
tcaaaaatgattttc

SEQ ID NO: 1141533 - DNA, 15 bp, Homo sapiens
gtcaaaaatgatttt

SEQ ID NO: 1141534 - DNA, 15 bp, Homo sapiens
agtcaaaaatgattt

SEQ ID NO: 1141535 - DNA, 15 bp, Homo sapiens
cagtcaaaaatgatt

SEQ ID NO: 1141536 - DNA, 15 bp, Homo sapiens
ccagtcaaaaatgat

SEQ ID NO: 1141537 - DNA, 15 bp, Homo sapiens
accagtcaaaaatga

SEQ ID NO: 1141538 - DNA, 15 bp, Homo sapiens
gaccagtcaaaaatg

SEQ ID NO: 1141539 - DNA, 15 bp, Homo sapiens
agaccagtcaaaaat

SEQ ID NO: 1141540 - DNA, 15 bp, Homo sapiens
aagaccagtcaaaaa

SEQ ID NO: 1141541 - DNA, 15 bp, Homo sapiens
caagaccagtcaaaa

SEQ ID NO: 1141542 - DNA, 15 bp, Homo sapiens
ccaagaccagtcaaa

SEQ ID NO: 1141543 - DNA, 15 bp, Homo sapiens
cccaagaccagtcaa

SEQ ID NO: 1141544 - DNA, 15 bp, Homo sapiens
acccaagaccagtca

SEQ ID NO: 1141545 - DNA, 15 bp, Homo sapiens
cacccaagaccagtc

SEQ ID NO: 1141546 - DNA, 15 bp, Homo sapiens
acacccaagaccagt

SEQ ID NO: 1141547 - DNA, 15 bp, Homo sapiens
tacacccaagaccag

SEQ ID NO: 1141548 - DNA, 15 bp, Homo sapiens
ctacacccaagacca

SEQ ID NO: 1141549 - DNA, 15 bp, Homo sapiens
gctacacccaagacc

SEQ ID NO: 1141550 - DNA, 15 bp, Homo sapiens
tgctacacccaagac

SEQ ID NO: 1141551 - DNA, 15 bp, Homo sapiens
ttgctacacccaaga

SEQ ID NO: 1141552 - DNA, 15 bp, Homo sapiens
gttgctacacccaag

SEQ ID NO: 1141553 - DNA, 15 bp, Homo sapiens
agttgctacacccaa

SEQ ID NO: 1141554 - DNA, 15 bp, Homo sapiens
gagttgctacaccca

SEQ ID NO: 1141555 - DNA, 15 bp, Homo sapiens
agagttgctacaccc

SEQ ID NO: 1141556 - DNA, 15 bp, Homo sapiens
cagagttgctacacc

SEQ ID NO: 1141557 - DNA, 15 bp, Homo sapiens
ccagagttgctacac

SEQ ID NO: 1141558 - DNA, 15 bp, Homo sapiens
accagagttgctaca

SEQ ID NO: 1141559 - DNA, 15 bp, Homo sapiens
caccagagttgctac

SEQ ID NO: 1141560 - DNA, 15 bp, Homo sapiens
acaccagagttgcta

SEQ ID NO: 1141561 - DNA, 15 bp, Homo sapiens
tacaccagagttgct

SEQ ID NO: 1141562 - DNA, 15 bp, Homo sapiens
atacaccagagttgc

SEQ ID NO: 1141563 - DNA, 15 bp, Homo sapiens
aatacaccagagttg

SEQ ID NO: 1141564 - DNA, 15 bp, Homo sapiens
aaatacaccagagtt

SEQ ID NO: 1141565 - DNA, 15 bp, Homo sapiens
aaaatacaccagagt

SEQ ID NO: 1141566 - DNA, 15 bp, Homo sapiens
taaaatacaccagag

SEQ ID NO: 1141567 - DNA, 15 bp, Homo sapiens
ataaaatacaccaga

SEQ ID NO: 1141568 - DNA, 15 bp, Homo sapiens
aataaaatacaccag

SEQ ID NO: 1141569 - DNA, 15 bp, Homo sapiens
caataaaatacacca

SEQ ID NO: 1141570 - DNA, 15 bp, Homo sapiens
acaataaaatacacc

SEQ ID NO: 1141571 - DNA, 15 bp, Homo sapiens
tacaataaaatacac

SEQ ID NO: 1141572 - DNA, 15 bp, Homo sapiens
atacaataaaataca

SEQ ID NO: 1141573 - DNA, 15 bp, Homo sapiens
tatacaataaaatac

SEQ ID NO: 1141574 - DNA, 15 bp, Homo sapiens
ctatacaataaaata

SEQ ID NO: 1141575 - DNA, 15 bp, Homo sapiens
tctatacaataaaat

SEQ ID NO: 1141576 - DNA, 15 bp, Homo sapiens
atctatacaataaaa

SEQ ID NO: 1141577 - DNA, 15 bp, Homo sapiens
tatctatacaataaa

SEQ ID NO: 1141578 - DNA, 15 bp, Homo sapiens
atatctatacaataa

SEQ ID NO: 1141579 - DNA, 15 bp, Homo sapiens
aatatctatacaata

SEQ ID NO: 1141580 - DNA, 15 bp, Homo sapiens
gaatatctatacaat

SEQ ID NO: 1141581 - DNA, 15 bp, Homo sapiens
tgaatatctatacaa

SEQ ID NO: 1141582 - DNA, 15 bp, Homo sapiens
atgaatatctataca

SEQ ID NO: 1141583 - DNA, 15 bp, Homo sapiens
tatgaatatctatac

SEQ ID NO: 1141584 - DNA, 15 bp, Homo sapiens
atatgaatatctata

SEQ ID NO: 1141585 - DNA, 15 bp, Homo sapiens
caatatgaatatcta

SEQ ID NO: 1141586 - DNA, 15 bp, Homo sapiens
acaatatgaatatct

SEQ ID NO: 1141587 - DNA, 15 bp, Homo sapiens
gacaatatgaatatc

SEQ ID NO: 1141588 - DNA, 15 bp, Homo sapiens
agacaatatgaatat

SEQ ID NO: 1141589 - DNA, 15 bp, Homo sapiens
aagacaatatgaata

SEQ ID NO: 1141590 - DNA, 15 bp, Homo sapiens
taagacaatatgaat

SEQ ID NO: 1141591 - DNA, 15 bp, Homo sapiens
ataagacaatatgaa

SEQ ID NO: 1141592 - DNA, 15 bp, Homo sapiens
gataagacaatatga

SEQ ID NO: 1141593 - DNA, 15 bp, Homo sapiens
agataagacaatatg

SEQ ID NO: 1141594 - DNA, 15 bp, Homo sapiens
aagataagacaatat

SEQ ID NO: 1141595 - DNA, 15 bp, Homo sapiens
aaagataagacaata

SEQ ID NO: 1141596 - DNA, 15 bp, Homo sapiens
aaaagataagacaat

SEQ ID NO: 1141597 - DNA, 15 bp, Homo sapiens
aaaaagataagacaa

SEQ ID NO: 1141598 - DNA, 15 bp, Homo sapiens
aaaaaagataagaca

SEQ ID NO: 1141599 - DNA, 15 bp, Homo sapiens
gaaaaaagataagac

SEQ ID NO: 1141600 - DNA, 15 bp, Homo sapiens
agaaaaaagataaga

SEQ ID NO: 1141601 - DNA, 15 bp, Homo sapiens
gagaaaaaagataag

SEQ ID NO: 1141602 - DNA, 15 bp, Homo sapiens
ggagaaaaaagataa

SEQ ID NO: 1141603 - DNA, 15 bp, Homo sapiens
gggagaaaaaagata

SEQ ID NO: 1141604 - DNA, 15 bp, Homo sapiens
tgggagaaaaaagat

SEQ ID NO: 1141605 - DNA, 15 bp, Homo sapiens
ctgggagaaaaaaga

SEQ ID NO: 1141606 - DNA, 15 bp, Homo sapiens
tctgggagaaaaaag

SEQ ID NO: 1141607 - DNA, 15 bp, Homo sapiens
ttctgggagaaaaaa

SEQ ID NO: 1141608 - DNA, 15 bp, Homo sapiens
tttctgggagaaaaa

SEQ ID NO: 1141609 - DNA, 15 bp, Homo sapiens
atttctgggagaaaa

SEQ ID NO: 1141610 - DNA, 15 bp, Homo sapiens
tatttctgggagaaa

SEQ ID NO: 1141611 - DNA, 15 bp, Homo sapiens
ctatttctgggagaa

SEQ ID NO: 1141612 - DNA, 15 bp, Homo sapiens
tctatttctgggaga

SEQ ID NO: 1141613 - DNA, 15 bp, Homo sapiens
atctatttctgggag

SEQ ID NO: 1141614 - DNA, 15 bp, Homo sapiens
aatctatttctggga

SEQ ID NO: 1141615 - DNA, 15 bp, Homo sapiens
aaatctatttctggg

SEQ ID NO: 1141616 - DNA, 15 bp, Homo sapiens
aaaatctatttctgg

SEQ ID NO: 1141617 - DNA, 15 bp, Homo sapiens
caaaatctatttctg

SEQ ID NO: 1141618 - DNA, 15 bp, Homo sapiens
acaaaatctatttct

SEQ ID NO: 1141619 - DNA, 15 bp, Homo sapiens
aacaaaatctatttc

SEQ ID NO: 1141620 - DNA, 15 bp, Homo sapiens
aaacaaaatctattt

SEQ ID NO: 1141621 - DNA, 15 bp, Homo sapiens
gaaacaaaatctatt

SEQ ID NO: 1141622 - DNA, 15 bp, Homo sapiens
agaaacaaaatctat

SEQ ID NO: 1141623 - DNA, 15 bp, Homo sapiens
gagaaacaaaatcta

SEQ ID NO: 1141624 - DNA, 15 bp, Homo sapiens
ggagaaacaaaatct

SEQ ID NO: 1141625 - DNA, 15 bp, Homo sapiens
tggagaaacaaaatc

SEQ ID NO: 1141626 - DNA, 15 bp, Homo sapiens
atggagaaacaaaat

SEQ ID NO: 1141627 - DNA, 15 bp, Homo sapiens
aatggagaaacaaaa

SEQ ID NO: 1141628 - DNA, 15 bp, Homo sapiens
caatggagaaacaaa

SEQ ID NO: 1141629 - DNA, 15 bp, Homo sapiens
acaatggagaaacaa

SEQ ID NO: 1141630 - DNA, 15 bp, Homo sapiens
gacaatggagaaaca

SEQ ID NO: 1141631 - DNA, 15 bp, Homo sapiens
agacaatggagaaac

SEQ ID NO: 1141632 - DNA, 15 bp, Homo sapiens
aagacaatggagaaa

SEQ ID NO: 1141633 - DNA, 15 bp, Homo sapiens
aaagacaatggagaa

SEQ ID NO: 1141634 - DNA, 15 bp, Homo sapiens
caaagacaatggaga

SEQ ID NO: 1141635 - DNA, 15 bp, Homo sapiens
acaaagacaatggag

SEQ ID NO: 1141636 - DNA, 15 bp, Homo sapiens
gacaaagacaatgga

SEQ ID NO: 1141637 - DNA, 15 bp, Homo sapiens
agacaaagacaatgg

SEQ ID NO: 1141638 - DNA, 15 bp, Homo sapiens
aagacaaagacaatg

SEQ ID NO: 1141639 - DNA, 15 bp, Homo sapiens
aaagacaaagacaat

SEQ ID NO: 1141640 - DNA, 15 bp, Homo sapiens
taaagacaaagacaa

SEQ ID NO: 1141641 - DNA, 15 bp, Homo sapiens
ataaagacaaagaca

SEQ ID NO: 1141642 - DNA, 15 bp, Homo sapiens
cataaagacaaagac

SEQ ID NO: 1141643 - DNA, 15 bp, Homo sapiens
acataaagacaaaga

SEQ ID NO: 1141644 - DNA, 15 bp, Homo sapiens
cacataaagacaaag

SEQ ID NO: 1141645 - DNA, 15 bp, Homo sapiens
acacataaagacaaa

SEQ ID NO: 1141646 - DNA, 15 bp, Homo sapiens
aacacataaagacaa

SEQ ID NO: 1141647 - DNA, 15 bp, Homo sapiens
caacacataaagaca

SEQ ID NO: 1141648 - DNA, 15 bp, Homo sapiens
acaacacataaagac

SEQ ID NO: 1141649 - DNA, 15 bp, Homo sapiens
aacaacacataaaga

SEQ ID NO: 1141650 - DNA, 15 bp, Homo sapiens
aaacaacacataaag

SEQ ID NO: 1141651 - DNA, 15 bp, Homo sapiens
aaaacaacacataaa

SEQ ID NO: 1141652 - DNA, 15 bp, Homo sapiens
caaaacaacacataa

SEQ ID NO: 1141653 - DNA, 15 bp, Homo sapiens
acaaaacaacacata

SEQ ID NO: 1141654 - DNA, 15 bp, Homo sapiens
gacaaaacaacacat

SEQ ID NO: 1141655 - DNA, 15 bp, Homo sapiens
tgacaaaacaacaca

SEQ ID NO: 1141656 - DNA, 15 bp, Homo sapiens
atgacaaaacaacac

SEQ ID NO: 1141657 - DNA, 15 bp, Homo sapiens
tatgacaaaacaaca

SEQ ID NO: 1141658 - DNA, 15 bp, Homo sapiens
ttatgacaaaacaac

SEQ ID NO: 1141659 - DNA, 15 bp, Homo sapiens
tttatgacaaaacaa

SEQ ID NO: 1141660 - DNA, 15 bp, Homo sapiens
ctttatgacaaaaca

SEQ ID NO: 1141661 - DNA, 15 bp, Homo sapiens
tctttatgacaaaac

SEQ ID NO: 1141662 - DNA, 15 bp, Homo sapiens
atctttatgacaaaa

SEQ ID NO: 1141663 - DNA, 15 bp, Homo sapiens
catctttatgacaaa

SEQ ID NO: 1141664 - DNA, 15 bp, Homo sapiens
ccatctttatgacaa

SEQ ID NO: 1141665 - DNA, 15 bp, Homo sapiens
cccatctttatgaca

SEQ ID NO: 1141666 - DNA, 15 bp, Homo sapiens
acccatctttatgac

SEQ ID NO: 1141667 - DNA, 15 bp, Homo sapiens
cacccatctttatga

SEQ ID NO: 1141668 - DNA, 15 bp, Homo sapiens
acacccatctttatg

SEQ ID NO: 1141669 - DNA, 15 bp, Homo sapiens
gacacccatctttat

SEQ ID NO: 1141670 - DNA, 15 bp, Homo sapiens
tgacacccatcttta

SEQ ID NO: 1141671 - DNA, 15 bp, Homo sapiens
atgacacccatcttt

SEQ ID NO: 1141672 - DNA, 15 bp, Homo sapiens
tatgacacccatctt

SEQ ID NO: 1141673 - DNA, 15 bp, Homo sapiens
ctatgacacccatct

SEQ ID NO: 1141674 - DNA, 15 bp, Homo sapiens
cctatgacacccatc

SEQ ID NO: 1141675 - DNA, 15 bp, Homo sapiens
tcctatgacacccat

SEQ ID NO: 1141676 - DNA, 15 bp, Homo sapiens
atcctatgacaccca

SEQ ID NO: 1141677 - DNA, 15 bp, Homo sapiens
tatcctatgacaccc

SEQ ID NO: 1141678 - DNA, 15 bp, Homo sapiens
ctatcctatgacacc

SEQ ID NO: 1141679 - DNA, 15 bp, Homo sapiens
tctatcctatgacac

SEQ ID NO: 1141680 - DNA, 15 bp, Homo sapiens
ttctatcctatgaca

SEQ ID NO: 1141681 - DNA, 15 bp, Homo sapiens
gttctatcctatgac

SEQ ID NO: 1141682 - DNA, 15 bp, Homo sapiens
tgttctatcctatga

SEQ ID NO: 1141683 - DNA, 15 bp, Homo sapiens
atgttctatcctatg

SEQ ID NO: 1141684 - DNA, 15 bp, Homo sapiens
catgttctatcctat

SEQ ID NO: 1141685 - DNA, 15 bp, Homo sapiens
ccatgttctatccta

SEQ ID NO: 1141686 - DNA, 15 bp, Homo sapiens
cccatgttctatcct

SEQ ID NO: 1141687 - DNA, 15 bp, Homo sapiens
acccatgttctatcc

SEQ ID NO: 1141688 - DNA, 15 bp, Homo sapiens
gacccatgttctatc

SEQ ID NO: 1141689 - DNA, 15 bp, Homo sapiens
agacccatgttctat

SEQ ID NO: 1141690 - DNA, 15 bp, Homo sapiens
tagacccatgttcta

SEQ ID NO: 1141691 - DNA, 15 bp, Homo sapiens
ttagacccatgttct

SEQ ID NO: 1141692 - DNA, 15 bp, Homo sapiens
tttagacccatgttc

SEQ ID NO: 1141693 - DNA, 15 bp, Homo sapiens
ctttagacccatgtt

SEQ ID NO: 1141694 - DNA, 15 bp, Homo sapiens
actttagacccatgt

SEQ ID NO: 1141695 - DNA, 15 bp, Homo sapiens
gactttagacccatg

SEQ ID NO: 1141696 - DNA, 15 bp, Homo sapiens
agactttagacccat

SEQ ID NO: 1141697 - DNA, 15 bp, Homo sapiens
gagactttagaccca

SEQ ID NO: 1141698 - DNA, 15 bp, Homo sapiens
agagactttagaccc

SEQ ID NO: 1141699 - DNA, 15 bp, Homo sapiens
tagagactttagacc

SEQ ID NO: 1141700 - DNA, 15 bp, Homo sapiens
atagagactttagac

SEQ ID NO: 1141701 - DNA, 15 bp, Homo sapiens
tatagagactttaga

SEQ ID NO: 1141702 - DNA, 15 bp, Homo sapiens
ttatagagactttag

SEQ ID NO: 1141703 - DNA, 15 bp, Homo sapiens
cttatagagacttta

SEQ ID NO: 1141704 - DNA, 15 bp, Homo sapiens
gcttatagagacttt

SEQ ID NO: 1141705 - DNA, 15 bp, Homo sapiens
ggcttatagagactt

SEQ ID NO: 1141706 - DNA, 15 bp, Homo sapiens
gggcttatagagact

SEQ ID NO: 1141707 - DNA, 15 bp, Homo sapiens
ggggcttatagagac

SEQ ID NO: 1141708 - DNA, 15 bp, Homo sapiens
aggggcttatagaga

SEQ ID NO: 1141709 - DNA, 15 bp, Homo sapiens
aaggggcttatagag

SEQ ID NO: 1141710 - DNA, 15 bp, Homo sapiens
caaggggcttataga

SEQ ID NO: 1141711 - DNA, 15 bp, Homo sapiens
acaaggggcttatag

SEQ ID NO: 1141712 - DNA, 15 bp, Homo sapiens
gacaaggggcttata

SEQ ID NO: 1141713 - DNA, 15 bp, Homo sapiens
agacaaggggcttat

SEQ ID NO: 1141714 - DNA, 15 bp, Homo sapiens
cagacaaggggctta

SEQ ID NO: 1141715 - DNA, 15 bp, Homo sapiens
tcagacaaggggctt

SEQ ID NO: 1141716 - DNA, 15 bp, Homo sapiens
ctcagacaaggggct

SEQ ID NO: 1141717 - DNA, 15 bp, Homo sapiens
gctcagacaaggggc

SEQ ID NO: 1141718 - DNA, 15 bp, Homo sapiens
agctcagacaagggg

SEQ ID NO: 1141719 - DNA, 15 bp, Homo sapiens
cagctcagacaaggg

SEQ ID NO: 1141720 - DNA, 15 bp, Homo sapiens
ccagctcagacaagg

SEQ ID NO: 1141721 - DNA, 15 bp, Homo sapiens
gccagctcagacaag

SEQ ID NO: 1141722 - DNA, 15 bp, Homo sapiens
ggccagctcagacaa

SEQ ID NO: 1141723 - DNA, 15 bp, Homo sapiens
gggccagctcagaca

SEQ ID NO: 1141724 - DNA, 15 bp, Homo sapiens
ggggccagctcagac

SEQ ID NO: 1141725 - DNA, 15 bp, Homo sapiens
gggggccagctcaga

SEQ ID NO: 1141726 - DNA, 15 bp, Homo sapiens
cgggggccagctcag

SEQ ID NO: 1141727 - DNA, 15 bp, Homo sapiens
tcgggggccagctca

SEQ ID NO: 1141728 - DNA, 15 bp, Homo sapiens
ctcgggggccagctc

SEQ ID NO: 1141729 - DNA, 15 bp, Homo sapiens
tctcgggggccagct

SEQ ID NO: 1141730 - DNA, 15 bp, Homo sapiens
ctctcgggggccagc

SEQ ID NO: 1141731 - DNA, 15 bp, Homo sapiens
tctctcgggggccag

SEQ ID NO: 1141732 - DNA, 15 bp, Homo sapiens
gtctctcgggggcca

SEQ ID NO: 1141733 - DNA, 15 bp, Homo sapiens
agtctctcgggggcc

SEQ ID NO: 1141734 - DNA, 15 bp, Homo sapiens
cagtctctcgggggc

SEQ ID NO: 1141735 - DNA, 15 bp, Homo sapiens
ccagtctctcggggg

SEQ ID NO: 1141736 - DNA, 15 bp, Homo sapiens
accagtctctcgggg

SEQ ID NO: 1141737 - DNA, 15 bp, Homo sapiens
caccagtctctcggg

SEQ ID NO: 1141738 - DNA, 15 bp, Homo sapiens
tcaccagtctctcgg

SEQ ID NO: 1141739 - DNA, 15 bp, Homo sapiens
atcaccagtctctcg

SEQ ID NO: 1141740 - DNA, 15 bp, Homo sapiens
catcaccagtctctc

SEQ ID NO: 1141741 - DNA, 15 bp, Homo sapiens
acatcaccagtctct

SEQ ID NO: 1141742 - DNA, 15 bp, Homo sapiens
aacatcaccagtctc

SEQ ID NO: 1141743 - DNA, 15 bp, Homo sapiens
aaacatcaccagtct

SEQ ID NO: 1141744 - DNA, 15 bp, Homo sapiens
taaacatcaccagtc

SEQ ID NO: 1141745 - DNA, 15 bp, Homo sapiens
gtaaacatcaccagt

SEQ ID NO: 1141746 - DNA, 15 bp, Homo sapiens
tgtaaacatcaccag

SEQ ID NO: 1141747 - DNA, 15 bp, Homo sapiens
ctgtaaacatcacca

SEQ ID NO: 1141748 - DNA, 15 bp, Homo sapiens
actgtaaacatcacc

SEQ ID NO: 1141749 - DNA, 15 bp, Homo sapiens
aactgtaaacatcac

SEQ ID NO: 1141750 - DNA, 15 bp, Homo sapiens
aaactgtaaacatca

SEQ ID NO: 1141751 - DNA, 15 bp, Homo sapiens
gaaactgtaaacatc

SEQ ID NO: 1141752 - DNA, 15 bp, Homo sapiens
tgaaactgtaaacat

SEQ ID NO: 1141753 - DNA, 15 bp, Homo sapiens
atgaaactgtaaaca

SEQ ID NO: 1141754 - DNA, 15 bp, Homo sapiens
gatgaaactgtaaac

SEQ ID NO: 1141755 - DNA, 15 bp, Homo sapiens
tgatgaaactgtaaa

SEQ ID NO: 1141756 - DNA, 15 bp, Homo sapiens
ctgatgaaactgtaa

SEQ ID NO: 1141757 - DNA, 15 bp, Homo sapiens
tctgatgaaactgta

SEQ ID NO: 1141758 - DNA, 15 bp, Homo sapiens
gtctgatgaaactgt

SEQ ID NO: 1141759 - DNA, 15 bp, Homo sapiens
ggtctgatgaaactg

SEQ ID NO: 1141760 - DNA, 15 bp, Homo sapiens
aggtctgatgaaact

SEQ ID NO: 1141761 - DNA, 15 bp, Homo sapiens
taggtctgatgaaac

SEQ ID NO: 1141762 - DNA, 15 bp, Homo sapiens
ataggtctgatgaaa

SEQ ID NO: 1141763 - DNA, 15 bp, Homo sapiens
cataggtctgatgaa

SEQ ID NO: 1141764 - DNA, 15 bp, Homo sapiens
acataggtctgatga

SEQ ID NO: 1141765 - DNA, 15 bp, Homo sapiens
tacataggtctgatg

SEQ ID NO: 1141766 - DNA, 15 bp, Homo sapiens
gtacataggtctgat

SEQ ID NO: 1141767 - DNA, 15 bp, Homo sapiens
tgtacataggtctga

SEQ ID NO: 1141768 - DNA, 15 bp, Homo sapiens
ttgtacataggtctg

SEQ ID NO: 1141769 - DNA, 15 bp, Homo sapiens
attgtacataggtct

SEQ ID NO: 1141770 - DNA, 15 bp, Homo sapiens
aattgtacataggtc

SEQ ID NO: 1141771 - DNA, 15 bp, Homo sapiens
caattgtacataggt

SEQ ID NO: 1141772 - DNA, 15 bp, Homo sapiens
acaattgtacatagg

SEQ ID NO: 1141773 - DNA, 15 bp, Homo sapiens
tacaattgtacatag

SEQ ID NO: 1141774 - DNA, 15 bp, Homo sapiens
gtacaattgtacata

SEQ ID NO: 1141775 - DNA, 15 bp, Homo sapiens
cgtacaattgtacat

SEQ ID NO: 1141776 - DNA, 15 bp, Homo sapiens
acgtacaattgtaca

SEQ ID NO: 1141777 - DNA, 15 bp, Homo sapiens
cacgtacaattgtac

SEQ ID NO: 1141778 - DNA, 15 bp, Homo sapiens
gcacgtacaattgta

SEQ ID NO: 1141779 - DNA, 15 bp, Homo sapiens
agcacgtacaattgt

SEQ ID NO: 1141780 - DNA, 15 bp, Homo sapiens
cagcacgtacaattg

SEQ ID NO: 1141781 - DNA, 15 bp, Homo sapiens
acagcacgtacaatt

SEQ ID NO: 1141782 - DNA, 15 bp, Homo sapiens
cacagcacgtacaat

SEQ ID NO: 1141783 - DNA, 15 bp, Homo sapiens
tcacagcacgtacaa

SEQ ID NO: 1141784 - DNA, 15 bp, Homo sapiens
ctcacagcacgtaca

SEQ ID NO: 1141785 - DNA, 15 bp, Homo sapiens
actcacagcacgtac

SEQ ID NO: 1141786 - DNA, 15 bp, Homo sapiens
gactcacagcacgta

SEQ ID NO: 1141787 - DNA, 15 bp, Homo sapiens
cggggactcacagca

SEQ ID NO: 1141788 - DNA, 15 bp, Homo sapiens
tcggggactcacagc

SEQ ID NO: 1141789 - DNA, 15 bp, Homo sapiens
ttcggggactcacag

SEQ ID NO: 1141790 - DNA, 15 bp, Homo sapiens
tttcggggactcaca

SEQ ID NO: 1141791 - DNA, 15 bp, Homo sapiens
atttcggggactcac

SEQ ID NO: 1141792 - DNA, 15 bp, Homo sapiens
tatttcggggactca

SEQ ID NO: 1141793 - DNA, 15 bp, Homo sapiens
ttatttcggggactc

SEQ ID NO: 1141794 - DNA, 15 bp, Homo sapiens
tttatttcggggact

SEQ ID NO: 1141795 - DNA, 15 bp, Homo sapiens
ttttatttcggggac

SEQ ID NO: 1141796 - DNA, 15 bp, Homo sapiens
tttttatttcgggga

SEQ ID NO: 1141797 - DNA, 15 bp, Homo sapiens
gtttttatttcgggg

SEQ ID NO: 1141798 - DNA, 15 bp, Homo sapiens
agtttttatttcggg

SEQ ID NO: 1141799 - DNA, 15 bp, Homo sapiens
cagtttttatttcgg

SEQ ID NO: 1141800 - DNA, 15 bp, Homo sapiens
ccagtttttatttcg

SEQ ID NO: 1141801 - DNA, 15 bp, Homo sapiens
tccagtttttatttc

SEQ ID NO: 1141802 - DNA, 15 bp, Homo sapiens
atccagtttttattt

SEQ ID NO: 1141803 - DNA, 15 bp, Homo sapiens
catccagtttttatt

SEQ ID NO: 1141804 - DNA, 15 bp, Homo sapiens
tcatccagtttttat

SEQ ID NO: 1141805 - DNA, 15 bp, Homo sapiens
ctcatccagttttta

SEQ ID NO: 1141806 - DNA, 15 bp, Homo sapiens
cctcatccagttttt

SEQ ID NO: 1141807 - DNA, 15 bp, Homo sapiens
ccctcatccagtttt

SEQ ID NO: 1141808 - DNA, 15 bp, Homo sapiens
accctcatccagttt

SEQ ID NO: 1141809 - DNA, 15 bp, Homo sapiens
gaccctcatccagtt

SEQ ID NO: 1141810 - DNA, 15 bp, Homo sapiens
ggaccctcatccagt

SEQ ID NO: 1141811 - DNA, 15 bp, Homo sapiens
gggaccctcatccag

SEQ ID NO: 1141812 - DNA, 15 bp, Homo sapiens
ggggaccctcatcca

SEQ ID NO: 1141813 - DNA, 15 bp, Homo sapiens
aggggaccctcatcc

SEQ ID NO: 1141814 - DNA, 15 bp, Homo sapiens
aaggggaccctcatc

SEQ ID NO: 1141815 - DNA, 15 bp, Homo sapiens
taaggggaccctcat

SEQ ID NO: 1141816 - DNA, 15 bp, Homo sapiens
ataaggggaccctca

SEQ ID NO: 1141817 - DNA, 15 bp, Homo sapiens
tataaggggaccctc

SEQ ID NO: 1141818 - DNA, 15 bp, Homo sapiens
atataaggggaccct

SEQ ID NO: 1141819 - DNA, 15 bp, Homo sapiens
gatataaggggaccc

SEQ ID NO: 1141820 - DNA, 15 bp, Homo sapiens
agatataaggggacc

SEQ ID NO: 1141821 - DNA, 15 bp, Homo sapiens
aagatataaggggac

SEQ ID NO: 1141822 - DNA, 15 bp, Homo sapiens
caagatataagggga

SEQ ID NO: 1141823 - DNA, 15 bp, Homo sapiens
acaagatataagggg

SEQ ID NO: 1141824 - DNA, 15 bp, Homo sapiens
aacaagatataaggg

SEQ ID NO: 1141825 - DNA, 15 bp, Homo sapiens
aaacaagatataagg

SEQ ID NO: 1141826 - DNA, 15 bp, Homo sapiens
aaaacaagatataag

SEQ ID NO: 1141827 - DNA, 15 bp, Homo sapiens
caaaacaagatataa

SEQ ID NO: 1141828 - DNA, 15 bp, Homo sapiens
acaaaacaagatata

SEQ ID NO: 1141829 - DNA, 15 bp, Homo sapiens
cacaaaacaagatat

SEQ ID NO: 1141830 - DNA, 15 bp, Homo sapiens
acacaaaacaagata

SEQ ID NO: 1141831 - DNA, 15 bp, Homo sapiens
aacacaaaacaagat

SEQ ID NO: 1141832 - DNA, 15 bp, Homo sapiens
aaacacaaaacaaga

SEQ ID NO: 1141833 - DNA, 15 bp, Homo sapiens
caaacacaaaacaag

SEQ ID NO: 1141834 - DNA, 15 bp, Homo sapiens
acaaacacaaaacaa

SEQ ID NO: 1141835 - DNA, 15 bp, Homo sapiens
cacaaacacaaaaca

SEQ ID NO: 1141836 - DNA, 15 bp, Homo sapiens
tcacaaacacaaaac

SEQ ID NO: 1141837 - DNA, 15 bp, Homo sapiens
tctcacaaacacaaa

SEQ ID NO: 1141838 - DNA, 15 bp, Homo sapiens
ttctcacaaacacaa

SEQ ID NO: 1141839 - DNA, 15 bp, Homo sapiens
gttctcacaaacaca

SEQ ID NO: 1141840 - DNA, 15 bp, Homo sapiens
agttctcacaaacac

SEQ ID NO: 1141841 - DNA, 15 bp, Homo sapiens
aagttctcacaaaca

SEQ ID NO: 1141842 - DNA, 15 bp, Homo sapiens
caagttctcacaaac

SEQ ID NO: 1141843 - DNA, 15 bp, Homo sapiens
tcaagttctcacaaa

SEQ ID NO: 1141844 - DNA, 15 bp, Homo sapiens
gtcaagttctcacaa

SEQ ID NO: 1141845 - DNA, 15 bp, Homo sapiens
agtcaagttctcaca

SEQ ID NO: 1141846 - DNA, 15 bp, Homo sapiens
aagtcaagttctcac

SEQ ID NO: 1141847 - DNA, 15 bp, Homo sapiens
caagtcaagttctca

SEQ ID NO: 1141848 - DNA, 15 bp, Homo sapiens
acaagtcaagttctc

SEQ ID NO: 1141849 - DNA, 15 bp, Homo sapiens
aacaagtcaagttct

SEQ ID NO: 1141850 - DNA, 15 bp, Homo sapiens
aaacaagtcaagttc

SEQ ID NO: 1141851 - DNA, 15 bp, Homo sapiens
caaacaagtcaagtt

SEQ ID NO: 1141852 - DNA, 15 bp, Homo sapiens
acaaacaagtcaagt

SEQ ID NO: 1141853 - DNA, 15 bp, Homo sapiens
aacaaacaagtcaag

SEQ ID NO: 1141854 - DNA, 15 bp, Homo sapiens
taacaaacaagtcaa

SEQ ID NO: 1141855 - DNA, 15 bp, Homo sapiens
gtaacaaacaagtca

SEQ ID NO: 1141856 - DNA, 15 bp, Homo sapiens
agtaacaaacaagtc

SEQ ID NO: 1141857 - DNA, 15 bp, Homo sapiens
cagtaacaaacaagt

SEQ ID NO: 1141858 - DNA, 15 bp, Homo sapiens
ccagtaacaaacaag

SEQ ID NO: 1141859 - DNA, 15 bp, Homo sapiens
accagtaacaaacaa

SEQ ID NO: 1141860 - DNA, 15 bp, Homo sapiens
caccagtaacaaaca

SEQ ID NO: 1141861 - DNA, 15 bp, Homo sapiens
ccaccagtaacaaac

SEQ ID NO: 1141862 - DNA, 15 bp, Homo sapiens
cccaccagtaacaaa

SEQ ID NO: 1141863 - DNA, 15 bp, Homo sapiens
tcccaccagtaacaa

SEQ ID NO: 1141864 - DNA, 15 bp, Homo sapiens
ctcccaccagtaaca

SEQ ID NO: 1141865 - DNA, 15 bp, Homo sapiens
gctcccaccagtaac

SEQ ID NO: 1141866 - DNA, 15 bp, Homo sapiens
tgctcccaccagtaa

SEQ ID NO: 1141867 - DNA, 15 bp, Homo sapiens
gtgctcccaccagta

SEQ ID NO: 1141868 - DNA, 15 bp, Homo sapiens
agtgctcccaccagt

SEQ ID NO: 1141869 - DNA, 15 bp, Homo sapiens
gagtgctcccaccag

SEQ ID NO: 1141870 - DNA, 15 bp, Homo sapiens
cgagtgctcccacca

SEQ ID NO: 1141871 - DNA, 15 bp, Homo sapiens
gcgagtgctcccacc

SEQ ID NO: 1141872 - DNA, 15 bp, Homo sapiens
agcgagtgctcccac

SEQ ID NO: 1141873 - DNA, 15 bp, Homo sapiens
gagcgagtgctccca

SEQ ID NO: 1141874 - DNA, 15 bp, Homo sapiens
agagcgagtgctccc

SEQ ID NO: 1141875 - DNA, 15 bp, Homo sapiens
aagagcgagtgctcc

SEQ ID NO: 1141876 - DNA, 15 bp, Homo sapiens
caagagcgagtgctc

SEQ ID NO: 1141877 - DNA, 15 bp, Homo sapiens
acaagagcgagtgct

SEQ ID NO: 1141878 - DNA, 15 bp, Homo sapiens
aacaagagcgagtgc

SEQ ID NO: 1141879 - DNA, 15 bp, Homo sapiens
aaacaagagcgagtg

SEQ ID NO: 1141880 - DNA, 15 bp, Homo sapiens
aaaacaagagcgagt

SEQ ID NO: 1141881 - DNA, 15 bp, Homo sapiens
aaaaacaagagcgag

SEQ ID NO: 1141882 - DNA, 15 bp, Homo sapiens
gaaaaacaagagcga

SEQ ID NO: 1141883 - DNA, 15 bp, Homo sapiens
tgaaaaacaagagcg

SEQ ID NO: 1141884 - DNA, 15 bp, Homo sapiens
gtgaaaaacaagagc

SEQ ID NO: 1141885 - DNA, 15 bp, Homo sapiens
ggtgaaaaacaagag

SEQ ID NO: 1141886 - DNA, 15 bp, Homo sapiens
tggtgaaaaacaaga

SEQ ID NO: 1141887 - DNA, 15 bp, Homo sapiens
atggtgaaaaacaag

SEQ ID NO: 1141888 - DNA, 15 bp, Homo sapiens
gatggtgaaaaacaa

SEQ ID NO: 1141889 - DNA, 15 bp, Homo sapiens
agatggtgaaaaaca

SEQ ID NO: 1141890 - DNA, 15 bp, Homo sapiens
cagatggtgaaaaac

SEQ ID NO: 1141891 - DNA, 15 bp, Homo sapiens
ccagatggtgaaaaa

SEQ ID NO: 1141892 - DNA, 15 bp, Homo sapiens
cccagatggtgaaaa

SEQ ID NO: 1141893 - DNA, 15 bp, Homo sapiens
ccccagatggtgaaa

SEQ ID NO: 1141894 - DNA, 15 bp, Homo sapiens
tccccagatggtgaa

SEQ ID NO: 1141895 - DNA, 15 bp, Homo sapiens
ctccccagatggtga

SEQ ID NO: 1141896 - DNA, 15 bp, Homo sapiens
actccccagatggtg

SEQ ID NO: 1141897 - DNA, 15 bp, Homo sapiens
tactccccagatggt

SEQ ID NO: 1141898 - DNA, 15 bp, Homo sapiens
atactccccagatgg

SEQ ID NO: 1141899 - DNA, 15 bp, Homo sapiens
catactccccagatg

SEQ ID NO: 1141900 - DNA, 15 bp, Homo sapiens
tcatactccccagat

SEQ ID NO: 1141901 - DNA, 15 bp, Homo sapiens
atcatactccccaga

SEQ ID NO: 1141902 - DNA, 15 bp, Homo sapiens
aatcatactccccag

SEQ ID NO: 1141903 - DNA, 15 bp, Homo sapiens
aaatcatactcccca

SEQ ID NO: 1141904 - DNA, 15 bp, Homo sapiens
aaaatcatactcccc

SEQ ID NO: 1141905 - DNA, 15 bp, Homo sapiens
gaaaatcatactccc

SEQ ID NO: 1141906 - DNA, 15 bp, Homo sapiens
cgaaaatcatactcc

SEQ ID NO: 1141907 - DNA, 15 bp, Homo sapiens
ccgaaaatcatactc

SEQ ID NO: 1141908 - DNA, 15 bp, Homo sapiens
cccgaaaatcatact

SEQ ID NO: 1141909 - DNA, 15 bp, Homo sapiens
tcccgaaaatcatac

SEQ ID NO: 1141910 - DNA, 15 bp, Homo sapiens
gtcccgaaaatcata

SEQ ID NO: 1141911 - DNA, 15 bp, Homo sapiens
tgtcccgaaaatcat

SEQ ID NO: 1141912 - DNA, 15 bp, Homo sapiens
atgtcccgaaaatca

SEQ ID NO: 1141913 - DNA, 15 bp, Homo sapiens
tatgtcccgaaaatc

SEQ ID NO: 1141914 - DNA, 15 bp, Homo sapiens
ttatgtcccgaaaat

SEQ ID NO: 1141915 - DNA, 15 bp, Homo sapiens
gttatgtcccgaaaa

SEQ ID NO: 1141916 - DNA, 15 bp, Homo sapiens
agttatgtcccgaaa

SEQ ID NO: 1141917 - DNA, 15 bp, Homo sapiens
cagttatgtcccgaa

SEQ ID NO: 1141918 - DNA, 15 bp, Homo sapiens
ccagttatgtcccga

SEQ ID NO: 1141919 - DNA, 15 bp, Homo sapiens
accagttatgtcccg

SEQ ID NO: 1141920 - DNA, 15 bp, Homo sapiens
caccagttatgtccc

SEQ ID NO: 1141921 - DNA, 15 bp, Homo sapiens
ccaccagttatgtcc

SEQ ID NO: 1141922 - DNA, 15 bp, Homo sapiens
gccaccagttatgtc

SEQ ID NO: 1141923 - DNA, 15 bp, Homo sapiens
ggccaccagttatgt

SEQ ID NO: 1141924 - DNA, 15 bp, Homo sapiens
tggccaccagttatg

SEQ ID NO: 1141925 - DNA, 15 bp, Homo sapiens
ctggccaccagttat

SEQ ID NO: 1141926 - DNA, 15 bp, Homo sapiens
actggccaccagtta

SEQ ID NO: 1141927 - DNA, 15 bp, Homo sapiens
gactggccaccagtt

SEQ ID NO: 1141928 - DNA, 15 bp, Homo sapiens
agactggccaccagt

SEQ ID NO: 1141929 - DNA, 15 bp, Homo sapiens
cagactggccaccag

SEQ ID NO: 1141930 - DNA, 15 bp, Homo sapiens
tcagactggccacca

SEQ ID NO: 1141931 - DNA, 15 bp, Homo sapiens
ttcagactggccacc

SEQ ID NO: 1141932 - DNA, 15 bp, Homo sapiens
tttcagactggccac

SEQ ID NO: 1141933 - DNA, 15 bp, Homo sapiens
ctttcagactggcca

SEQ ID NO: 1141934 - DNA, 15 bp, Homo sapiens
cctttcagactggcc

SEQ ID NO: 1141935 - DNA, 15 bp, Homo sapiens
ccctttcagactggc

SEQ ID NO: 1141936 - DNA, 15 bp, Homo sapiens
gccctttcagactgg

SEQ ID NO: 1141937 - DNA, 15 bp, Homo sapiens
ggccctttcagactg

SEQ ID NO: 1141938 - DNA, 15 bp, Homo sapiens
tggccctttcagact

SEQ ID NO: 1141939 - DNA, 15 bp, Homo sapiens
ctggccctttcagac

SEQ ID NO: 1141940 - DNA, 15 bp, Homo sapiens
tctggccctttcaga

SEQ ID NO: 1141941 - DNA, 15 bp, Homo sapiens
ttctggccctttcag

SEQ ID NO: 1141942 - DNA, 15 bp, Homo sapiens
gttctggccctttca

SEQ ID NO: 1141943 - DNA, 15 bp, Homo sapiens
ggttctggccctttc

SEQ ID NO: 1141944 - DNA, 15 bp, Homo sapiens
gggttctggcccttt

SEQ ID NO: 1141945 - DNA, 15 bp, Homo sapiens
agggttctggccctt

SEQ ID NO: 1141946 - DNA, 15 bp, Homo sapiens
tagggttctggccct

SEQ ID NO: 1141947 - DNA, 15 bp, Homo sapiens
ctagggttctggccc

SEQ ID NO: 1141948 - DNA, 15 bp, Homo sapiens
tctagggttctggcc

SEQ ID NO: 1141949 - DNA, 15 bp, Homo sapiens
gtctagggttctggc

SEQ ID NO: 1141950 - DNA, 15 bp, Homo sapiens
tgtctagggttctgg

SEQ ID NO: 1141951 - DNA, 15 bp, Homo sapiens
gtgtctagggttctg

SEQ ID NO: 1141952 - DNA, 15 bp, Homo sapiens
ggtgtctagggttct

SEQ ID NO: 1141953 - DNA, 15 bp, Homo sapiens
aggtgtctagggttc

SEQ ID NO: 1141954 - DNA, 15 bp, Homo sapiens
taggtgtctagggtt

SEQ ID NO: 1141955 - DNA, 15 bp, Homo sapiens
ttaggtgtctagggt

SEQ ID NO: 1141956 - DNA, 15 bp, Homo sapiens
cttaggtgtctaggg

SEQ ID NO: 1141957 - DNA, 15 bp, Homo sapiens
tcttaggtgtctagg

SEQ ID NO: 1141958 - DNA, 15 bp, Homo sapiens
atcttaggtgtctag

SEQ ID NO: 1141959 - DNA, 15 bp, Homo sapiens
tatcttaggtgtcta

SEQ ID NO: 1141960 - DNA, 15 bp, Homo sapiens
atatcttaggtgtct

SEQ ID NO: 1141961 - DNA, 15 bp, Homo sapiens
aatatcttaggtgtc

SEQ ID NO: 1141962 - DNA, 15 bp, Homo sapiens
taatatcttaggtgt

SEQ ID NO: 1141963 - DNA, 15 bp, Homo sapiens
ttaatatcttaggtg

SEQ ID NO: 1141964 - DNA, 15 bp, Homo sapiens
cttaatatcttaggt

SEQ ID NO: 1141965 - DNA, 15 bp, Homo sapiens
gcttaatatcttagg

SEQ ID NO: 1141966 - DNA, 15 bp, Homo sapiens
tgcttaatatcttag

SEQ ID NO: 1141967 - DNA, 15 bp, Homo sapiens
ctgcttaatatctta

SEQ ID NO: 1141968 - DNA, 15 bp, Homo sapiens
gctgcttaatatctt

SEQ ID NO: 1141969 - DNA, 15 bp, Homo sapiens
tgctgcttaatatct

SEQ ID NO: 1141970 - DNA, 15 bp, Homo sapiens
gtgctgcttaatatc

SEQ ID NO: 1141971 - DNA, 15 bp, Homo sapiens
tgtgctgcttaatat

SEQ ID NO: 1141972 - DNA, 15 bp, Homo sapiens
gtgtgctgcttaata

SEQ ID NO: 1141973 - DNA, 15 bp, Homo sapiens
agtgtgctgcttaat

SEQ ID NO: 1141974 - DNA, 15 bp, Homo sapiens
gagtgtgctgcttaa

SEQ ID NO: 1141975 - DNA, 15 bp, Homo sapiens
agagtgtgctgctta

SEQ ID NO: 1141976 - DNA, 15 bp, Homo sapiens
aagagtgtgctgctt

SEQ ID NO: 1141977 - DNA, 15 bp, Homo sapiens
taagagtgtgctgct

SEQ ID NO: 1141978 - DNA, 15 bp, Homo sapiens
ctaagagtgtgctgc

SEQ ID NO: 1141979 - DNA, 15 bp, Homo sapiens
cctaagagtgtgctg

SEQ ID NO: 1141980 - DNA, 15 bp, Homo sapiens
acctaagagtgtgct

SEQ ID NO: 1141981 - DNA, 15 bp, Homo sapiens
gacctaagagtgtgc

SEQ ID NO: 1141982 - DNA, 15 bp, Homo sapiens
agacctaagagtgtg

SEQ ID NO: 1141983 - DNA, 15 bp, Homo sapiens
cagacctaagagtgt

SEQ ID NO: 1141984 - DNA, 15 bp, Homo sapiens
tcagacctaagagtg

SEQ ID NO: 1141985 - DNA, 15 bp, Homo sapiens
ttcagacctaagagt

SEQ ID NO: 1141986 - DNA, 15 bp, Homo sapiens
attcagacctaagag

SEQ ID NO: 1141987 - DNA, 15 bp, Homo sapiens
tattcagacctaaga

SEQ ID NO: 1141988 - DNA, 15 bp, Homo sapiens
atattcagacctaag

SEQ ID NO: 1141989 - DNA, 15 bp, Homo sapiens
catattcagacctaa

SEQ ID NO: 1141990 - DNA, 15 bp, Homo sapiens
gcatattcagaccta

SEQ ID NO: 1141991 - DNA, 15 bp, Homo sapiens
ggcatattcagacct

SEQ ID NO: 1141992 - DNA, 15 bp, Homo sapiens
tggcatattcagacc

SEQ ID NO: 1141993 - DNA, 15 bp, Homo sapiens
ctggcatattcagac

SEQ ID NO: 1141994 - DNA, 15 bp, Homo sapiens
tctggcatattcaga

SEQ ID NO: 1141995 - DNA, 15 bp, Homo sapiens
gtctggcatattcag

SEQ ID NO: 1141996 - DNA, 15 bp, Homo sapiens
agtctggcatattca

SEQ ID NO: 1141997 - DNA, 15 bp, Homo sapiens
gagtctggcatattc

SEQ ID NO: 1141998 - DNA, 15 bp, Homo sapiens
agagtctggcatatt

SEQ ID NO: 1141999 - DNA, 15 bp, Homo sapiens
gagagtctggcatat

SEQ ID NO: 1142000 - DNA, 15 bp, Homo sapiens
tgagagtctggcata

SEQ ID NO: 1142001 - DNA, 15 bp, Homo sapiens
ctgagagtctggcat

SEQ ID NO: 1142002 - DNA, 15 bp, Homo sapiens
cctgagagtctggca

SEQ ID NO: 1142003 - DNA, 15 bp, Homo sapiens
ccctgagagtctggc

SEQ ID NO: 1142004 - DNA, 15 bp, Homo sapiens
cccctgagagtctgg

SEQ ID NO: 1142005 - DNA, 15 bp, Homo sapiens
tcccctgagagtctg

SEQ ID NO: 1142006 - DNA, 15 bp, Homo sapiens
gtcccctgagagtct

SEQ ID NO: 1142007 - DNA, 15 bp, Homo sapiens
agtcccctgagagtc

SEQ ID NO: 1142008 - DNA, 15 bp, Homo sapiens
aagtcccctgagagt

SEQ ID NO: 1142009 - DNA, 15 bp, Homo sapiens
aaagtcccctgagag

SEQ ID NO: 1142010 - DNA, 15 bp, Homo sapiens
caaagtcccctgaga

SEQ ID NO: 1142011 - DNA, 15 bp, Homo sapiens
acaaagtcccctgag

SEQ ID NO: 1142012 - DNA, 15 bp, Homo sapiens
gacaaagtcccctga

SEQ ID NO: 1142013 - DNA, 15 bp, Homo sapiens
ggacaaagtcccctg

SEQ ID NO: 1142014 - DNA, 15 bp, Homo sapiens
aggacaaagtcccct

SEQ ID NO: 1142015 - DNA, 15 bp, Homo sapiens
taggacaaagtcccc

SEQ ID NO: 1142016 - DNA, 15 bp, Homo sapiens
ataggacaaagtccc

SEQ ID NO: 1142017 - DNA, 15 bp, Homo sapiens
gataggacaaagtcc

SEQ ID NO: 1142018 - DNA, 15 bp, Homo sapiens
agataggacaaagtc

SEQ ID NO: 1142019 - DNA, 15 bp, Homo sapiens
tagataggacaaagt

SEQ ID NO: 1142020 - DNA, 15 bp, Homo sapiens
atagataggacaaag

SEQ ID NO: 1142021 - DNA, 15 bp, Homo sapiens
tatagataggacaaa

SEQ ID NO: 1142022 - DNA, 15 bp, Homo sapiens
ttatagataggacaa

SEQ ID NO: 1142023 - DNA, 15 bp, Homo sapiens
tttatagataggaca

SEQ ID NO: 1142024 - DNA, 15 bp, Homo sapiens
ctttatagataggac

SEQ ID NO: 1142025 - DNA, 15 bp, Homo sapiens
cctttatagatagga

SEQ ID NO: 1142026 - DNA, 15 bp, Homo sapiens
tcctttatagatagg

SEQ ID NO: 1142027 - DNA, 15 bp, Homo sapiens
gtcctttatagatag

SEQ ID NO: 1142028 - DNA, 15 bp, Homo sapiens
ggtcctttatagata

SEQ ID NO: 1142029 - DNA, 15 bp, Homo sapiens
aggtcctttatagat

SEQ ID NO: 1142030 - DNA, 15 bp, Homo sapiens
aaggtcctttataga

SEQ ID NO: 1142031 - DNA, 15 bp, Homo sapiens
aaaggtcctttatag

SEQ ID NO: 1142032 - DNA, 15 bp, Homo sapiens
caaaggtcctttata

SEQ ID NO: 1142033 - DNA, 15 bp, Homo sapiens
acaaaggtcctttat

SEQ ID NO: 1142034 - DNA, 15 bp, Homo sapiens
aacaaaggtccttta

SEQ ID NO: 1142035 - DNA, 15 bp, Homo sapiens
caacaaaggtccttt

SEQ ID NO: 1142036 - DNA, 15 bp, Homo sapiens
acaacaaaggtcctt

SEQ ID NO: 1142037 - DNA, 15 bp, Homo sapiens
gacaacaaaggtcct

SEQ ID NO: 1142038 - DNA, 15 bp, Homo sapiens
agacaacaaaggtcc

SEQ ID NO: 1142039 - DNA, 15 bp, Homo sapiens
gagacaacaaaggtc

SEQ ID NO: 1142040 - DNA, 15 bp, Homo sapiens
tgagacaacaaaggt

SEQ ID NO: 1142041 - DNA, 15 bp, Homo sapiens
ttgagacaacaaagg

SEQ ID NO: 1142042 - DNA, 15 bp, Homo sapiens
gttgagacaacaaag

SEQ ID NO: 1142043 - DNA, 15 bp, Homo sapiens
tgttgagacaacaaa

SEQ ID NO: 1142044 - DNA, 15 bp, Homo sapiens
gtgttgagacaacaa

SEQ ID NO: 1142045 - DNA, 15 bp, Homo sapiens
tgtgttgagacaaca

SEQ ID NO: 1142046 - DNA, 15 bp, Homo sapiens
atgtgttgagacaac

SEQ ID NO: 1142047 - DNA, 15 bp, Homo sapiens
catgtgttgagacaa

SEQ ID NO: 1142048 - DNA, 15 bp, Homo sapiens
gcatgtgttgagaca

SEQ ID NO: 1142049 - DNA, 15 bp, Homo sapiens
agcatgtgttgagac

SEQ ID NO: 1142050 - DNA, 15 bp, Homo sapiens
tagcatgtgttgaga

SEQ ID NO: 1142051 - DNA, 15 bp, Homo sapiens
gtagcatgtgttgag

SEQ ID NO: 1142052 - DNA, 15 bp, Homo sapiens
ggtagcatgtgttga

SEQ ID NO: 1142053 - DNA, 15 bp, Homo sapiens
aggtagcatgtgttg

SEQ ID NO: 1142054 - DNA, 15 bp, Homo sapiens
caggtagcatgtgtt

SEQ ID NO: 1142055 - DNA, 15 bp, Homo sapiens
ccaggtagcatgtgt

SEQ ID NO: 1142056 - DNA, 15 bp, Homo sapiens
accaggtagcatgtg

SEQ ID NO: 1142057 - DNA, 15 bp, Homo sapiens
aaccaggtagcatgt

SEQ ID NO: 1142058 - DNA, 15 bp, Homo sapiens
taaccaggtagcatg

SEQ ID NO: 1142059 - DNA, 15 bp, Homo sapiens
ctaaccaggtagcat

SEQ ID NO: 1142060 - DNA, 15 bp, Homo sapiens
actaaccaggtagca

SEQ ID NO: 1142061 - DNA, 15 bp, Homo sapiens
aactaaccaggtagc

SEQ ID NO: 1142062 - DNA, 15 bp, Homo sapiens
gaactaaccaggtag

SEQ ID NO: 1142063 - DNA, 15 bp, Homo sapiens
agaactaaccaggta

SEQ ID NO: 1142064 - DNA, 15 bp, Homo sapiens
cagaactaaccaggt

SEQ ID NO: 1142065 - DNA, 15 bp, Homo sapiens
ccagaactaaccagg

SEQ ID NO: 1142066 - DNA, 15 bp, Homo sapiens
tccagaactaaccag

SEQ ID NO: 1142067 - DNA, 15 bp, Homo sapiens
ttccagaactaacca

SEQ ID NO: 1142068 - DNA, 15 bp, Homo sapiens
tttccagaactaacc

SEQ ID NO: 1142069 - DNA, 15 bp, Homo sapiens
ttttccagaactaac

SEQ ID NO: 1142070 - DNA, 15 bp, Homo sapiens
cttttccagaactaa

SEQ ID NO: 1142071 - DNA, 15 bp, Homo sapiens
acttttccagaacta

SEQ ID NO: 1142072 - DNA, 15 bp, Homo sapiens
gacttttccagaact

SEQ ID NO: 1142073 - DNA, 15 bp, Homo sapiens
ggacttttccagaac

SEQ ID NO: 1142074 - DNA, 15 bp, Homo sapiens
tggacttttccagaa

SEQ ID NO: 1142075 - DNA, 15 bp, Homo sapiens
ttggacttttccaga

SEQ ID NO: 1142076 - DNA, 15 bp, Homo sapiens
tttggacttttccag

SEQ ID NO: 1142077 - DNA, 15 bp, Homo sapiens
gtttggacttttcca

SEQ ID NO: 1142078 - DNA, 15 bp, Homo sapiens
ggtttggacttttcc

SEQ ID NO: 1142079 - DNA, 15 bp, Homo sapiens
gggtttggacttttc

SEQ ID NO: 1142080 - DNA, 15 bp, Homo sapiens
tgggtttggactttt

SEQ ID NO: 1142081 - DNA, 15 bp, Homo sapiens
ctgggtttggacttt

SEQ ID NO: 1142082 - DNA, 15 bp, Homo sapiens
cctgggtttggactt

SEQ ID NO: 1142083 - DNA, 15 bp, Homo sapiens
tcctgggtttggact

SEQ ID NO: 1142084 - DNA, 15 bp, Homo sapiens
ctcctgggtttggac

SEQ ID NO: 1142085 - DNA, 15 bp, Homo sapiens
cctcctgggtttgga

SEQ ID NO: 1142086 - DNA, 15 bp, Homo sapiens
ccctcctgggtttgg

SEQ ID NO: 1142087 - DNA, 15 bp, Homo sapiens
accctcctgggtttg

SEQ ID NO: 1142088 - DNA, 15 bp, Homo sapiens
gaccctcctgggttt

SEQ ID NO: 1142089 - DNA, 15 bp, Homo sapiens
agaccctcctgggtt

SEQ ID NO: 1142090 - DNA, 15 bp, Homo sapiens
cagaccctcctgggt

SEQ ID NO: 1142091 - DNA, 15 bp, Homo sapiens
gcagaccctcctggg

SEQ ID NO: 1142092 - DNA, 15 bp, Homo sapiens
agcagaccctcctgg

SEQ ID NO: 1142093 - DNA, 15 bp, Homo sapiens
cagcagaccctcctg

SEQ ID NO: 1142094 - DNA, 15 bp, Homo sapiens
ccagcagaccctcct

SEQ ID NO: 1142095 - DNA, 15 bp, Homo sapiens
accagcagaccctcc

SEQ ID NO: 1142096 - DNA, 15 bp, Homo sapiens
caccagcagaccctc

SEQ ID NO: 1142097 - DNA, 15 bp, Homo sapiens
gcaccagcagaccct

SEQ ID NO: 1142098 - DNA, 15 bp, Homo sapiens
tgcaccagcagaccc

SEQ ID NO: 1142099 - DNA, 15 bp, Homo sapiens
ttgcaccagcagacc

SEQ ID NO: 1142100 - DNA, 15 bp, Homo sapiens
gttgcaccagcagac

SEQ ID NO: 1142101 - DNA, 15 bp, Homo sapiens
tgttgcaccagcaga

SEQ ID NO: 1142102 - DNA, 15 bp, Homo sapiens
ctgttgcaccagcag

SEQ ID NO: 1142103 - DNA, 15 bp, Homo sapiens
tctgttgcaccagca

SEQ ID NO: 1142104 - DNA, 15 bp, Homo sapiens
atctgttgcaccagc

SEQ ID NO: 1142105 - DNA, 15 bp, Homo sapiens
aatctgttgcaccag

SEQ ID NO: 1142106 - DNA, 15 bp, Homo sapiens
taatctgttgcacca

SEQ ID NO: 1142107 - DNA, 15 bp, Homo sapiens
ttaatctgttgcacc

SEQ ID NO: 1142108 - DNA, 15 bp, Homo sapiens
cttaatctgttgcac

SEQ ID NO: 1142109 - DNA, 15 bp, Homo sapiens
ccttaatctgttgca

SEQ ID NO: 1142110 - DNA, 15 bp, Homo sapiens
cccttaatctgttgc

SEQ ID NO: 1142111 - DNA, 15 bp, Homo sapiens
ccccttaatctgttg

SEQ ID NO: 1142112 - DNA, 15 bp, Homo sapiens
accccttaatctgtt

SEQ ID NO: 1142113 - DNA, 15 bp, Homo sapiens
gaccccttaatctgt

SEQ ID NO: 1142114 - DNA, 15 bp, Homo sapiens
agaccccttaatctg

SEQ ID NO: 1142115 - DNA, 15 bp, Homo sapiens
cagaccccttaatct

SEQ ID NO: 1142116 - DNA, 15 bp, Homo sapiens
acagaccccttaatc

SEQ ID NO: 1142117 - DNA, 15 bp, Homo sapiens
cacagaccccttaat

SEQ ID NO: 1142118 - DNA, 15 bp, Homo sapiens
tcacagaccccttaa

SEQ ID NO: 1142119 - DNA, 15 bp, Homo sapiens
gtcacagacccctta

SEQ ID NO: 1142120 - DNA, 15 bp, Homo sapiens
agtcacagacccctt

SEQ ID NO: 1142121 - DNA, 15 bp, Homo sapiens
cagtcacagacccct

SEQ ID NO: 1142122 - DNA, 15 bp, Homo sapiens
ccagtcacagacccc

SEQ ID NO: 1142123 - DNA, 15 bp, Homo sapiens
gccagtcacagaccc

SEQ ID NO: 1142124 - DNA, 15 bp, Homo sapiens
tgccagtcacagacc

SEQ ID NO: 1142125 - DNA, 15 bp, Homo sapiens
gtgccagtcacagac

SEQ ID NO: 1142126 - DNA, 15 bp, Homo sapiens
tgtgccagtcacaga

SEQ ID NO: 1142127 - DNA, 15 bp, Homo sapiens
gtgtgccagtcacag

SEQ ID NO: 1142128 - DNA, 15 bp, Homo sapiens
ggtgtgccagtcaca

SEQ ID NO: 1142129 - DNA, 15 bp, Homo sapiens
gggtgtgccagtcac

SEQ ID NO: 1142130 - DNA, 15 bp, Homo sapiens
ggggtgtgccagtca

SEQ ID NO: 1142131 - DNA, 15 bp, Homo sapiens
tggggtgtgccagtc

SEQ ID NO: 1142132 - DNA, 15 bp, Homo sapiens
gtggggtgtgccagt

SEQ ID NO: 1142133 - DNA, 15 bp, Homo sapiens
tgtggggtgtgccag

SEQ ID NO: 1142134 - DNA, 15 bp, Homo sapiens
ttgtggggtgtgcca

SEQ ID NO: 1142135 - DNA, 15 bp, Homo sapiens
gttgtggggtgtgcc

SEQ ID NO: 1142136 - DNA, 15 bp, Homo sapiens
agttgtggggtgtgc

SEQ ID NO: 1142137 - DNA, 15 bp, Homo sapiens
aagttgtggggtgtg

SEQ ID NO: 1142138 - DNA, 15 bp, Homo sapiens
aaagttgtggggtgt

SEQ ID NO: 1142139 - DNA, 15 bp, Homo sapiens
caaagttgtggggtg

SEQ ID NO: 1142140 - DNA, 15 bp, Homo sapiens
acaaagttgtggggt

SEQ ID NO: 1142141 - DNA, 15 bp, Homo sapiens
cacaaagttgtgggg

SEQ ID NO: 1142142 - DNA, 15 bp, Homo sapiens
ccacaaagttgtggg

SEQ ID NO: 1142143 - DNA, 15 bp, Homo sapiens
cccacaaagttgtgg

SEQ ID NO: 1142144 - DNA, 15 bp, Homo sapiens
tcccacaaagttgtg

SEQ ID NO: 1142145 - DNA, 15 bp, Homo sapiens
atcccacaaagttgt

SEQ ID NO: 1142146 - DNA, 15 bp, Homo sapiens
tatcccacaaagttg

SEQ ID NO: 1142147 - DNA, 15 bp, Homo sapiens
ctatcccacaaagtt

SEQ ID NO: 1142148 - DNA, 15 bp, Homo sapiens
actatcccacaaagt

SEQ ID NO: 1142149 - DNA, 15 bp, Homo sapiens
cactatcccacaaag

SEQ ID NO: 1142150 - DNA, 15 bp, Homo sapiens
acactatcccacaaa

SEQ ID NO: 1142151 - DNA, 15 bp, Homo sapiens
cacactatcccacaa

SEQ ID NO: 1142152 - DNA, 15 bp, Homo sapiens
ccacactatcccaca

SEQ ID NO: 1142153 - DNA, 15 bp, Homo sapiens
gccacactatcccac

SEQ ID NO: 1142154 - DNA, 15 bp, Homo sapiens
tgccacactatccca

SEQ ID NO: 1142155 - DNA, 15 bp, Homo sapiens
gtgccacactatccc

SEQ ID NO: 1142156 - DNA, 15 bp, Homo sapiens
agtgccacactatcc

SEQ ID NO: 1142157 - DNA, 15 bp, Homo sapiens
cagtgccacactatc

SEQ ID NO: 1142158 - DNA, 15 bp, Homo sapiens
gcagtgccacactat

SEQ ID NO: 1142159 - DNA, 15 bp, Homo sapiens
agcagtgccacacta

SEQ ID NO: 1142160 - DNA, 15 bp, Homo sapiens
cagcagtgccacact

SEQ ID NO: 1142161 - DNA, 15 bp, Homo sapiens
gcagcagtgccacac

SEQ ID NO: 1142162 - DNA, 15 bp, Homo sapiens
tgcagcagtgccaca

SEQ ID NO: 1142163 - DNA, 15 bp, Homo sapiens
gtgcagcagtgccac

SEQ ID NO: 1142164 - DNA, 15 bp, Homo sapiens
tgtgcagcagtgcca

SEQ ID NO: 1142165 - DNA, 15 bp, Homo sapiens
gtgtgcagcagtgcc

SEQ ID NO: 1142166 - DNA, 15 bp, Homo sapiens
tgtgtgcagcagtgc

SEQ ID NO: 1142167 - DNA, 15 bp, Homo sapiens
gtgtgtgcagcagtg

SEQ ID NO: 1142168 - DNA, 15 bp, Homo sapiens
tgtgtgtgcagcagt

SEQ ID NO: 1142169 - DNA, 15 bp, Homo sapiens
ctgtgtgtgcagcag

SEQ ID NO: 1142170 - DNA, 15 bp, Homo sapiens
tctgtgtgtgcagca

SEQ ID NO: 1142171 - DNA, 15 bp, Homo sapiens
gtctgtgtgtgcagc

SEQ ID NO: 1142172 - DNA, 15 bp, Homo sapiens
tgtctgtgtgtgcag

SEQ ID NO: 1142173 - DNA, 15 bp, Homo sapiens
ctgtctgtgtgtgca

SEQ ID NO: 1142174 - DNA, 15 bp, Homo sapiens
gctgtctgtgtgtgc

SEQ ID NO: 1142175 - DNA, 15 bp, Homo sapiens
tgctgtctgtgtgtg

SEQ ID NO: 1142176 - DNA, 15 bp, Homo sapiens
gtgctgtctgtgtgt

SEQ ID NO: 1142177 - DNA, 15 bp, Homo sapiens
ggtgctgtctgtgtg

SEQ ID NO: 1142178 - DNA, 15 bp, Homo sapiens
gggtgctgtctgtgt

SEQ ID NO: 1142179 - DNA, 15 bp, Homo sapiens
agggtgctgtctgtg

SEQ ID NO: 1142180 - DNA, 15 bp, Homo sapiens
cagggtgctgtctgt

SEQ ID NO: 1142181 - DNA, 15 bp, Homo sapiens
gcagggtgctgtctg

SEQ ID NO: 1142182 - DNA, 15 bp, Homo sapiens
cgcagggtgctgtct

SEQ ID NO: 1142183 - DNA, 15 bp, Homo sapiens
gcgcagggtgctgtc

SEQ ID NO: 1142184 - DNA, 15 bp, Homo sapiens
ggcgcagggtgctgt

SEQ ID NO: 1142185 - DNA, 15 bp, Homo sapiens
tggcgcagggtgctg

SEQ ID NO: 1142186 - DNA, 15 bp, Homo sapiens
atggcgcagggtgct

SEQ ID NO: 1142187 - DNA, 15 bp, Homo sapiens
gatggcgcagggtgc

SEQ ID NO: 1142188 - DNA, 15 bp, Homo sapiens
agatggcgcagggtg

SEQ ID NO: 1142189 - DNA, 15 bp, Homo sapiens
cagatggcgcagggt

SEQ ID NO: 1142190 - DNA, 15 bp, Homo sapiens
acagatggcgcaggg

SEQ ID NO: 1142191 - DNA, 15 bp, Homo sapiens
cacagatggcgcagg

SEQ ID NO: 1142192 - DNA, 15 bp, Homo sapiens
ccacagatggcgcag

SEQ ID NO: 1142193 - DNA, 15 bp, Homo sapiens
accacagatggcgca

SEQ ID NO: 1142194 - DNA, 15 bp, Homo sapiens
taccacagatggcgc

SEQ ID NO: 1142195 - DNA, 15 bp, Homo sapiens
ttaccacagatggcg

SEQ ID NO: 1142196 - DNA, 15 bp, Homo sapiens
attaccacagatggc

SEQ ID NO: 1142197 - DNA, 15 bp, Homo sapiens
cattaccacagatgg

SEQ ID NO: 1142198 - DNA, 15 bp, Homo sapiens
tcattaccacagatg

SEQ ID NO: 1142199 - DNA, 15 bp, Homo sapiens
ctcattaccacagat

SEQ ID NO: 1142200 - DNA, 15 bp, Homo sapiens
actcattaccacaga

SEQ ID NO: 1142201 - DNA, 15 bp, Homo sapiens
gactcattaccacag

SEQ ID NO: 1142202 - DNA, 15 bp, Homo sapiens
agactcattaccaca

SEQ ID NO: 1142203 - DNA, 15 bp, Homo sapiens
aagactcattaccac

SEQ ID NO: 1142204 - DNA, 15 bp, Homo sapiens
aaagactcattacca

SEQ ID NO: 1142205 - DNA, 15 bp, Homo sapiens
aaaagactcattacc

SEQ ID NO: 1142206 - DNA, 15 bp, Homo sapiens
caaaagactcattac

SEQ ID NO: 1142207 - DNA, 15 bp, Homo sapiens
gcaaaagactcatta

SEQ ID NO: 1142208 - DNA, 15 bp, Homo sapiens
agcaaaagactcatt

SEQ ID NO: 1142209 - DNA, 15 bp, Homo sapiens
tagcaaaagactcat

SEQ ID NO: 1142210 - DNA, 15 bp, Homo sapiens
gtagcaaaagactca

SEQ ID NO: 1142211 - DNA, 15 bp, Homo sapiens
ggtagcaaaagactc

SEQ ID NO: 1142212 - DNA, 15 bp, Homo sapiens
aggtagcaaaagact

SEQ ID NO: 1142213 - DNA, 15 bp, Homo sapiens
aaggtagcaaaagac

SEQ ID NO: 1142214 - DNA, 15 bp, Homo sapiens
taaggtagcaaaaga

SEQ ID NO: 1142215 - DNA, 15 bp, Homo sapiens
ctaaggtagcaaaag

SEQ ID NO: 1142216 - DNA, 15 bp, Homo sapiens
gctaaggtagcaaaa

SEQ ID NO: 1142217 - DNA, 15 bp, Homo sapiens
ggctaaggtagcaaa

SEQ ID NO: 1142218 - DNA, 15 bp, Homo sapiens
aggctaaggtagcaa

SEQ ID NO: 1142219 - DNA, 15 bp, Homo sapiens
taggctaaggtagca

SEQ ID NO: 1142220 - DNA, 15 bp, Homo sapiens
ataggctaaggtagc

SEQ ID NO: 1142221 - DNA, 15 bp, Homo sapiens
aataggctaaggtag

SEQ ID NO: 1142222 - DNA, 15 bp, Homo sapiens
aaataggctaaggta

SEQ ID NO: 1142223 - DNA, 15 bp, Homo sapiens
gaaataggctaaggt

SEQ ID NO: 1142224 - DNA, 15 bp, Homo sapiens
agaaataggctaagg

SEQ ID NO: 1142225 - DNA, 15 bp, Homo sapiens
cagaaataggctaag

SEQ ID NO: 1142226 - DNA, 15 bp, Homo sapiens
tcagaaataggctaa

SEQ ID NO: 1142227 - DNA, 15 bp, Homo sapiens
ctcagaaataggcta

SEQ ID NO: 1142228 - DNA, 15 bp, Homo sapiens
tctcagaaataggct

SEQ ID NO: 1142229 - DNA, 15 bp, Homo sapiens
ctctcagaaataggc

SEQ ID NO: 1142230 - DNA, 15 bp, Homo sapiens
actctcagaaatagg

SEQ ID NO: 1142231 - DNA, 15 bp, Homo sapiens
cactctcagaaatag

SEQ ID NO: 1142232 - DNA, 15 bp, Homo sapiens
tcactctcagaaata

SEQ ID NO: 1142233 - DNA, 15 bp, Homo sapiens
ttcactctcagaaat

SEQ ID NO: 1142234 - DNA, 15 bp, Homo sapiens
attcactctcagaaa

SEQ ID NO: 1142235 - DNA, 15 bp, Homo sapiens
aattcactctcagaa

SEQ ID NO: 1142236 - DNA, 15 bp, Homo sapiens
aaattcactctcaga

SEQ ID NO: 1142237 - DNA, 15 bp, Homo sapiens
aaaattcactctcag

SEQ ID NO: 1142238 - DNA, 15 bp, Homo sapiens
aaaaattcactctca

SEQ ID NO: 1142239 - DNA, 15 bp, Homo sapiens
caaaaattcactctc

SEQ ID NO: 1142240 - DNA, 15 bp, Homo sapiens
tcaaaaattcactct

SEQ ID NO: 1142241 - DNA, 15 bp, Homo sapiens
ctcaaaaattcactc

SEQ ID NO: 1142242 - DNA, 15 bp, Homo sapiens
cctcaaaaattcact

SEQ ID NO: 1142243 - DNA, 15 bp, Homo sapiens
tcctcaaaaattcac

SEQ ID NO: 1142244 - DNA, 15 bp, Homo sapiens
ttcctcaaaaattca

SEQ ID NO: 1142245 - DNA, 15 bp, Homo sapiens
attcctcaaaaattc

SEQ ID NO: 1142246 - DNA, 15 bp, Homo sapiens
gattcctcaaaaatt

SEQ ID NO: 1142247 - DNA, 15 bp, Homo sapiens
tgattcctcaaaaat

SEQ ID NO: 1142248 - DNA, 15 bp, Homo sapiens
atgattcctcaaaaa

SEQ ID NO: 1142249 - DNA, 15 bp, Homo sapiens
catgattcctcaaaa

SEQ ID NO: 1142250 - DNA, 15 bp, Homo sapiens
tcatgattcctcaaa

SEQ ID NO: 1142251 - DNA, 15 bp, Homo sapiens
ctcatgattcctcaa

SEQ ID NO: 1142252 - DNA, 15 bp, Homo sapiens
cctcatgattcctca

SEQ ID NO: 1142253 - DNA, 15 bp, Homo sapiens
ccctcatgattcctc

SEQ ID NO: 1142254 - DNA, 15 bp, Homo sapiens
gccctcatgattcct

SEQ ID NO: 1142255 - DNA, 15 bp, Homo sapiens
agccctcatgattcc

SEQ ID NO: 1142256 - DNA, 15 bp, Homo sapiens
tagccctcatgattc

SEQ ID NO: 1142257 - DNA, 15 bp, Homo sapiens
gtagccctcatgatt

SEQ ID NO: 1142258 - DNA, 15 bp, Homo sapiens
tgtagccctcatgat

SEQ ID NO: 1142259 - DNA, 15 bp, Homo sapiens
atgtagccctcatga

SEQ ID NO: 1142260 - DNA, 15 bp, Homo sapiens
gatgtagccctcatg

SEQ ID NO: 1142261 - DNA, 15 bp, Homo sapiens
tgatgtagccctcat

SEQ ID NO: 1142262 - DNA, 15 bp, Homo sapiens
ttgatgtagccctca

SEQ ID NO: 1142263 - DNA, 15 bp, Homo sapiens
gttgatgtagccctc

SEQ ID NO: 1142264 - DNA, 15 bp, Homo sapiens
agttgatgtagccct

SEQ ID NO: 1142265 - DNA, 15 bp, Homo sapiens
cagttgatgtagccc

SEQ ID NO: 1142266 - DNA, 15 bp, Homo sapiens
tcagttgatgtagcc

SEQ ID NO: 1142267 - DNA, 15 bp, Homo sapiens
ttcagttgatgtagc

SEQ ID NO: 1142268 - DNA, 15 bp, Homo sapiens
gttcagttgatgtag

SEQ ID NO: 1142269 - DNA, 15 bp, Homo sapiens
ggttcagttgatgta

SEQ ID NO: 1142270 - DNA, 15 bp, Homo sapiens
cggttcagttgatgt

SEQ ID NO: 1142271 - DNA, 15 bp, Homo sapiens
tcggttcagttgatg

SEQ ID NO: 1142272 - DNA, 15 bp, Homo sapiens
atcggttcagttgat

SEQ ID NO: 1142273 - DNA, 15 bp, Homo sapiens
aatcggttcagttga

SEQ ID NO: 1142274 - DNA, 15 bp, Homo sapiens
aaatcggttcagttg

SEQ ID NO: 1142275 - DNA, 15 bp, Homo sapiens
aaaatcggttcagtt

SEQ ID NO: 1142276 - DNA, 15 bp, Homo sapiens
aaaaatcggttcagt

SEQ ID NO: 1142277 - DNA, 15 bp, Homo sapiens
taaaaatcggttcag

SEQ ID NO: 1142278 - DNA, 15 bp, Homo sapiens
ttaaaaatcggttca

SEQ ID NO: 1142279 - DNA, 15 bp, Homo sapiens
tttaaaaatcggttc

SEQ ID NO: 1142280 - DNA, 15 bp, Homo sapiens
ttttaaaaatcggtt

SEQ ID NO: 1142281 - DNA, 15 bp, Homo sapiens
attttaaaaatcggt

SEQ ID NO: 1142282 - DNA, 15 bp, Homo sapiens
cattttaaaaatcgg

SEQ ID NO: 1142283 - DNA, 15 bp, Homo sapiens
gcattttaaaaatcg

SEQ ID NO: 1142284 - DNA, 15 bp, Homo sapiens
ggcattttaaaaatc

SEQ ID NO: 1142285 - DNA, 15 bp, Homo sapiens
tggcattttaaaaat

SEQ ID NO: 1142286 - DNA, 15 bp, Homo sapiens
gtggcattttaaaaa

SEQ ID NO: 1142287 - DNA, 15 bp, Homo sapiens
agtggcattttaaaa

SEQ ID NO: 1142288 - DNA, 15 bp, Homo sapiens
aagtggcattttaaa

SEQ ID NO: 1142289 - DNA, 15 bp, Homo sapiens
taagtggcattttaa

SEQ ID NO: 1142290 - DNA, 15 bp, Homo sapiens
ttaagtggcatttta

SEQ ID NO: 1142291 - DNA, 15 bp, Homo sapiens
gttaagtggcatttt

SEQ ID NO: 1142292 - DNA, 15 bp, Homo sapiens
tgttaagtggcattt

SEQ ID NO: 1142293 - DNA, 15 bp, Homo sapiens
atgttaagtggcatt

SEQ ID NO: 1142294 - DNA, 15 bp, Homo sapiens
aatgttaagtggcat

SEQ ID NO: 1142295 - DNA, 15 bp, Homo sapiens
gaatgttaagtggca

SEQ ID NO: 1142296 - DNA, 15 bp, Homo sapiens
tgaatgttaagtggc

SEQ ID NO: 1142297 - DNA, 15 bp, Homo sapiens
atgaatgttaagtgg

SEQ ID NO: 1142298 - DNA, 15 bp, Homo sapiens
tatgaatgttaagtg

SEQ ID NO: 1142299 - DNA, 15 bp, Homo sapiens
ctatgaatgttaagt

SEQ ID NO: 1142300 - DNA, 15 bp, Homo sapiens
actatgaatgttaag

SEQ ID NO: 1142301 - DNA, 15 bp, Homo sapiens
tactatgaatgttaa

SEQ ID NO: 1142302 - DNA, 15 bp, Homo sapiens
atactatgaatgtta

SEQ ID NO: 1142303 - DNA, 15 bp, Homo sapiens
aatactatgaatgtt

SEQ ID NO: 1142304 - DNA, 15 bp, Homo sapiens
caatactatgaatgt

SEQ ID NO: 1142305 - DNA, 15 bp, Homo sapiens
acaatactatgaatg

SEQ ID NO: 1142306 - DNA, 15 bp, Homo sapiens
tacaatactatgaat

SEQ ID NO: 1142307 - DNA, 15 bp, Homo sapiens
ttacaatactatgaa

SEQ ID NO: 1142308 - DNA, 15 bp, Homo sapiens
tttacaatactatga

SEQ ID NO: 1142309 - DNA, 15 bp, Homo sapiens
gtttacaatactatg

SEQ ID NO: 1142310 - DNA, 15 bp, Homo sapiens
agtttacaatactat

SEQ ID NO: 1142311 - DNA, 15 bp, Homo sapiens
aagtttacaatacta

SEQ ID NO: 1142312 - DNA, 15 bp, Homo sapiens
caagtttacaatact

SEQ ID NO: 1142313 - DNA, 15 bp, Homo sapiens
ccaagtttacaatac

SEQ ID NO: 1142314 - DNA, 15 bp, Homo sapiens
tccaagtttacaata

SEQ ID NO: 1142315 - DNA, 15 bp, Homo sapiens
ttccaagtttacaat

SEQ ID NO: 1142316 - DNA, 15 bp, Homo sapiens
tttccaagtttacaa

SEQ ID NO: 1142317 - DNA, 15 bp, Homo sapiens
ctttccaagtttaca

SEQ ID NO: 1142318 - DNA, 15 bp, Homo sapiens
actttccaagtttac

SEQ ID NO: 1142319 - DNA, 15 bp, Homo sapiens
aactttccaagttta

SEQ ID NO: 1142320 - DNA, 15 bp, Homo sapiens
taactttccaagttt

SEQ ID NO: 1142321 - DNA, 15 bp, Homo sapiens
gtaactttccaagtt

SEQ ID NO: 1142322 - DNA, 15 bp, Homo sapiens
ggtaactttccaagt

SEQ ID NO: 1142323 - DNA, 15 bp, Homo sapiens
aggtaactttccaag

SEQ ID NO: 1142324 - DNA, 15 bp, Homo sapiens
gaggtaactttccaa

SEQ ID NO: 1142325 - DNA, 15 bp, Homo sapiens
agaggtaactttcca

SEQ ID NO: 1142326 - DNA, 15 bp, Homo sapiens
cagaggtaactttcc

SEQ ID NO: 1142327 - DNA, 15 bp, Homo sapiens
ccagaggtaactttc

SEQ ID NO: 1142328 - DNA, 15 bp, Homo sapiens
cccagaggtaacttt

SEQ ID NO: 1142329 - DNA, 15 bp, Homo sapiens
tcccagaggtaactt

SEQ ID NO: 1142330 - DNA, 15 bp, Homo sapiens
gtcccagaggtaact

SEQ ID NO: 1142331 - DNA, 15 bp, Homo sapiens
agtcccagaggtaac

SEQ ID NO: 1142332 - DNA, 15 bp, Homo sapiens
aagtcccagaggtaa

SEQ ID NO: 1142333 - DNA, 15 bp, Homo sapiens
aaagtcccagaggta

SEQ ID NO: 1142334 - DNA, 15 bp, Homo sapiens
caaagtcccagaggt

SEQ ID NO: 1142335 - DNA, 15 bp, Homo sapiens
gcaaagtcccagagg

SEQ ID NO: 1142336 - DNA, 15 bp, Homo sapiens
tgcaaagtcccagag

SEQ ID NO: 1142337 - DNA, 15 bp, Homo sapiens
atgcaaagtcccaga

SEQ ID NO: 1142338 - DNA, 15 bp, Homo sapiens
catgcaaagtcccag

SEQ ID NO: 1142339 - DNA, 15 bp, Homo sapiens
tcatgcaaagtccca

SEQ ID NO: 1142340 - DNA, 15 bp, Homo sapiens
ttcatgcaaagtccc

SEQ ID NO: 1142341 - DNA, 15 bp, Homo sapiens
tttcatgcaaagtcc

SEQ ID NO: 1142342 - DNA, 15 bp, Homo sapiens
ttttcatgcaaagtc

SEQ ID NO: 1142343 - DNA, 15 bp, Homo sapiens
tttttcatgcaaagt

SEQ ID NO: 1142344 - DNA, 15 bp, Homo sapiens
ttttttcatgcaaag

SEQ ID NO: 1142345 - DNA, 15 bp, Homo sapiens
cttttttcatgcaaa

SEQ ID NO: 1142346 - DNA, 15 bp, Homo sapiens
gcttttttcatgcaa

SEQ ID NO: 1142347 - DNA, 15 bp, Homo sapiens
agcttttttcatgca

SEQ ID NO: 1142348 - DNA, 15 bp, Homo sapiens
cagcttttttcatgc

SEQ ID NO: 1142349 - DNA, 15 bp, Homo sapiens
tcagcttttttcatg

SEQ ID NO: 1142350 - DNA, 15 bp, Homo sapiens
atcagcttttttcat

SEQ ID NO: 1142351 - DNA, 15 bp, Homo sapiens
aatcagcttttttca

SEQ ID NO: 1142352 - DNA, 15 bp, Homo sapiens
caatcagcttttttc

SEQ ID NO: 1142353 - DNA, 15 bp, Homo sapiens
ccaatcagctttttt

SEQ ID NO: 1142354 - DNA, 15 bp, Homo sapiens
gccaatcagcttttt

SEQ ID NO: 1142355 - DNA, 15 bp, Homo sapiens
agccaatcagctttt

SEQ ID NO: 1142356 - DNA, 15 bp, Homo sapiens
aagccaatcagcttt

SEQ ID NO: 1142357 - DNA, 15 bp, Homo sapiens
gaagccaatcagctt

SEQ ID NO: 1142358 - DNA, 15 bp, Homo sapiens
tgaagccaatcagct

SEQ ID NO: 1142359 - DNA, 15 bp, Homo sapiens
ctgaagccaatcagc

SEQ ID NO: 1142360 - DNA, 15 bp, Homo sapiens
actgaagccaatcag

SEQ ID NO: 1142361 - DNA, 15 bp, Homo sapiens
aactgaagccaatca

SEQ ID NO: 1142362 - DNA, 15 bp, Homo sapiens
caactgaagccaatc

SEQ ID NO: 1142363 - DNA, 15 bp, Homo sapiens
gcaactgaagccaat

SEQ ID NO: 1142364 - DNA, 15 bp, Homo sapiens
agcaactgaagccaa

SEQ ID NO: 1142365 - DNA, 15 bp, Homo sapiens
aagcaactgaagcca

SEQ ID NO: 1142366 - DNA, 15 bp, Homo sapiens
aaagcaactgaagcc

SEQ ID NO: 1142367 - DNA, 15 bp, Homo sapiens
caaagcaactgaagc

SEQ ID NO: 1142368 - DNA, 15 bp, Homo sapiens
gcaaagcaactgaag

SEQ ID NO: 1142369 - DNA, 15 bp, Homo sapiens
tgcaaagcaactgaa

SEQ ID NO: 1142370 - DNA, 15 bp, Homo sapiens
ttgcaaagcaactga

SEQ ID NO: 1142371 - DNA, 15 bp, Homo sapiens
attgcaaagcaactg

SEQ ID NO: 1142372 - DNA, 15 bp, Homo sapiens
tattgcaaagcaact

SEQ ID NO: 1142373 - DNA, 15 bp, Homo sapiens
ttattgcaaagcaac

SEQ ID NO: 1142374 - DNA, 15 bp, Homo sapiens
tttattgcaaagcaa

SEQ ID NO: 1142375 - DNA, 15 bp, Homo sapiens
ctttattgcaaagca

SEQ ID NO: 1142376 - DNA, 15 bp, Homo sapiens
tctttattgcaaagc

SEQ ID NO: 1142377 - DNA, 15 bp, Homo sapiens
ttctttattgcaaag

SEQ ID NO: 1142378 - DNA, 15 bp, Homo sapiens
tttctttattgcaaa

SEQ ID NO: 1142379 - DNA, 15 bp, Homo sapiens
gtttctttattgcaa

SEQ ID NO: 1142380 - DNA, 15 bp, Homo sapiens
agtttctttattgca

SEQ ID NO: 1142381 - DNA, 15 bp, Homo sapiens
cagtttctttattgc

SEQ ID NO: 1142382 - DNA, 15 bp, Homo sapiens
ccagtttctttattg

SEQ ID NO: 1142383 - DNA, 15 bp, Homo sapiens
gccagtttctttatt

SEQ ID NO: 1142384 - DNA, 15 bp, Homo sapiens
agccagtttctttat

SEQ ID NO: 1142385 - DNA, 15 bp, Homo sapiens
tagccagtttcttta

SEQ ID NO: 1142386 - DNA, 15 bp, Homo sapiens
atagccagtttcttt

SEQ ID NO: 1142387 - DNA, 15 bp, Homo sapiens
tatagccagtttctt

SEQ ID NO: 1142388 - DNA, 15 bp, Homo sapiens
atatagccagtttct

SEQ ID NO: 1142389 - DNA, 15 bp, Homo sapiens
aatatagccagtttc

SEQ ID NO: 1142390 - DNA, 15 bp, Homo sapiens
aaatatagccagttt

SEQ ID NO: 1142391 - DNA, 15 bp, Homo sapiens
taaatatagccagtt

SEQ ID NO: 1142392 - DNA, 15 bp, Homo sapiens
ttaaatatagccagt

SEQ ID NO: 1142393 - DNA, 15 bp, Homo sapiens
cttaaatatagccag

SEQ ID NO: 1142394 - DNA, 15 bp, Homo sapiens
acttaaatatagcca

SEQ ID NO: 1142395 - DNA, 15 bp, Homo sapiens
cacttaaatatagcc

SEQ ID NO: 1142396 - DNA, 15 bp, Homo sapiens
tcacttaaatatagc

SEQ ID NO: 1142397 - DNA, 15 bp, Homo sapiens
ttcacttaaatatag

SEQ ID NO: 1142398 - DNA, 15 bp, Homo sapiens
tttcacttaaatata

SEQ ID NO: 1142399 - DNA, 15 bp, Homo sapiens
ttttcacttaaatat

SEQ ID NO: 1142400 - DNA, 15 bp, Homo sapiens
gttttcacttaaata

SEQ ID NO: 1142401 - DNA, 15 bp, Homo sapiens
agttttcacttaaat

SEQ ID NO: 1142402 - DNA, 15 bp, Homo sapiens
aagttttcacttaaa

SEQ ID NO: 1142403 - DNA, 15 bp, Homo sapiens
aaagttttcacttaa

SEQ ID NO: 1142404 - DNA, 15 bp, Homo sapiens
aaaagttttcactta

SEQ ID NO: 1142405 - DNA, 15 bp, Homo sapiens
aaaaagttttcactt

SEQ ID NO: 1142406 - DNA, 15 bp, Homo sapiens
taaaaagttttcact

SEQ ID NO: 1142407 - DNA, 15 bp, Homo sapiens
ctaaaaagttttcac

SEQ ID NO: 1142408 - DNA, 15 bp, Homo sapiens
tctaaaaagttttca

SEQ ID NO: 1142409 - DNA, 15 bp, Homo sapiens
ctctaaaaagttttc

SEQ ID NO: 1142410 - DNA, 15 bp, Homo sapiens
cctctaaaaagtttt

SEQ ID NO: 1142411 - DNA, 15 bp, Homo sapiens
ccctctaaaaagttt

SEQ ID NO: 1142412 - DNA, 15 bp, Homo sapiens
gccctctaaaaagtt

SEQ ID NO: 1142413 - DNA, 15 bp, Homo sapiens
agccctctaaaaagt

SEQ ID NO: 1142414 - DNA, 15 bp, Homo sapiens
gagccctctaaaaag

SEQ ID NO: 1142415 - DNA, 15 bp, Homo sapiens
agagccctctaaaaa

SEQ ID NO: 1142416 - DNA, 15 bp, Homo sapiens
aagagccctctaaaa

SEQ ID NO: 1142417 - DNA, 15 bp, Homo sapiens
caagagccctctaaa

SEQ ID NO: 1142418 - DNA, 15 bp, Homo sapiens
gcaagagccctctaa

SEQ ID NO: 1142419 - DNA, 15 bp, Homo sapiens
ggcaagagccctcta

SEQ ID NO: 1142420 - DNA, 15 bp, Homo sapiens
aggcaagagccctct

SEQ ID NO: 1142421 - DNA, 15 bp, Homo sapiens
aaggcaagagccctc

SEQ ID NO: 1142422 - DNA, 15 bp, Homo sapiens
taaggcaagagccct

SEQ ID NO: 1142423 - DNA, 15 bp, Homo sapiens
ttaaggcaagagccc

SEQ ID NO: 1142424 - DNA, 15 bp, Homo sapiens
attaaggcaagagcc

SEQ ID NO: 1142425 - DNA, 15 bp, Homo sapiens
gattaaggcaagagc

SEQ ID NO: 1142426 - DNA, 15 bp, Homo sapiens
tgattaaggcaagag

SEQ ID NO: 1142427 - DNA, 15 bp, Homo sapiens
ctgattaaggcaaga

SEQ ID NO: 1142428 - DNA, 15 bp, Homo sapiens
gctgattaaggcaag

SEQ ID NO: 1142429 - DNA, 15 bp, Homo sapiens
agctgattaaggcaa

SEQ ID NO: 1142430 - DNA, 15 bp, Homo sapiens
cagctgattaaggca

SEQ ID NO: 1142431 - DNA, 15 bp, Homo sapiens
acagctgattaaggc

SEQ ID NO: 1142432 - DNA, 15 bp, Homo sapiens
aacagctgattaagg

SEQ ID NO: 1142433 - DNA, 15 bp, Homo sapiens
taacagctgattaag

SEQ ID NO: 1142434 - DNA, 15 bp, Homo sapiens
ataacagctgattaa

SEQ ID NO: 1142435 - DNA, 15 bp, Homo sapiens
aataacagctgatta

SEQ ID NO: 1142436 - DNA, 15 bp, Homo sapiens
caataacagctgatt

SEQ ID NO: 1142437 - DNA, 15 bp, Homo sapiens
ccaataacagctgat

SEQ ID NO: 1142438 - DNA, 15 bp, Homo sapiens
accaataacagctga

SEQ ID NO: 1142439 - DNA, 15 bp, Homo sapiens
taccaataacagctg

SEQ ID NO: 1142440 - DNA, 15 bp, Homo sapiens
gtaccaataacagct

SEQ ID NO: 1142441 - DNA, 15 bp, Homo sapiens
agtaccaataacagc

SEQ ID NO: 1142442 - DNA, 15 bp, Homo sapiens
aagtaccaataacag

SEQ ID NO: 1142443 - DNA, 15 bp, Homo sapiens
taagtaccaataaca

SEQ ID NO: 1142444 - DNA, 15 bp, Homo sapiens
ataagtaccaataac

SEQ ID NO: 1142445 - DNA, 15 bp, Homo sapiens
tataagtaccaataa

SEQ ID NO: 1142446 - DNA, 15 bp, Homo sapiens
atataagtaccaata

SEQ ID NO: 1142447 - DNA, 15 bp, Homo sapiens
tatataagtaccaat

SEQ ID NO: 1142448 - DNA, 15 bp, Homo sapiens
ttatataagtaccaa

SEQ ID NO: 1142449 - DNA, 15 bp, Homo sapiens
cttatataagtacca

SEQ ID NO: 1142450 - DNA, 15 bp, Homo sapiens
tcttatataagtacc

SEQ ID NO: 1142451 - DNA, 15 bp, Homo sapiens
ttcttatataagtac

SEQ ID NO: 1142452 - DNA, 15 bp, Homo sapiens
tttcttatataagta

SEQ ID NO: 1142453 - DNA, 15 bp, Homo sapiens
gtttcttatataagt

SEQ ID NO: 1142454 - DNA, 15 bp, Homo sapiens
tgtttcttatataag

SEQ ID NO: 1142455 - DNA, 15 bp, Homo sapiens
ttgtttcttatataa

SEQ ID NO: 1142456 - DNA, 15 bp, Homo sapiens
tttgtttcttatata

SEQ ID NO: 1142457 - DNA, 15 bp, Homo sapiens
ttttgtttcttatat

SEQ ID NO: 1142458 - DNA, 15 bp, Homo sapiens
cttttgtttcttata

SEQ ID NO: 1142459 - DNA, 15 bp, Homo sapiens
tcttttgtttcttat

SEQ ID NO: 1142460 - DNA, 15 bp, Homo sapiens
ttcttttgtttctta

SEQ ID NO: 1142461 - DNA, 15 bp, Homo sapiens
tttcttttgtttctt

SEQ ID NO: 1142462 - DNA, 15 bp, Homo sapiens
atttcttttgtttct

SEQ ID NO: 1142463 - DNA, 15 bp, Homo sapiens
catttcttttgtttc

SEQ ID NO: 1142464 - DNA, 15 bp, Homo sapiens
acatttcttttgttt

SEQ ID NO: 1142465 - DNA, 15 bp, Homo sapiens
tacatttcttttgtt

SEQ ID NO: 1142466 - DNA, 15 bp, Homo sapiens
ctacatttcttttgt

SEQ ID NO: 1142467 - DNA, 15 bp, Homo sapiens
gctacatttcttttg

SEQ ID NO: 1142468 - DNA, 15 bp, Homo sapiens
ggctacatttctttt

SEQ ID NO: 1142469 - DNA, 15 bp, Homo sapiens
aggctacatttcttt

SEQ ID NO: 1142470 - DNA, 15 bp, Homo sapiens
aaggctacatttctt

SEQ ID NO: 1142471 - DNA, 15 bp, Homo sapiens
taaggctacatttct

SEQ ID NO: 1142472 - DNA, 15 bp, Homo sapiens
ctaaggctacatttc

SEQ ID NO: 1142473 - DNA, 15 bp, Homo sapiens
tctaaggctacattt

SEQ ID NO: 1142474 - DNA, 15 bp, Homo sapiens
ttctaaggctacatt

SEQ ID NO: 1142475 - DNA, 15 bp, Homo sapiens
tttctaaggctacat

SEQ ID NO: 1142476 - DNA, 15 bp, Homo sapiens
gtttctaaggctaca

SEQ ID NO: 1142477 - DNA, 15 bp, Homo sapiens
agtttctaaggctac

SEQ ID NO: 1142478 - DNA, 15 bp, Homo sapiens
gagtttctaaggcta

SEQ ID NO: 1142479 - DNA, 15 bp, Homo sapiens
ggagtttctaaggct

SEQ ID NO: 1142480 - DNA, 15 bp, Homo sapiens
aggagtttctaaggc

SEQ ID NO: 1142481 - DNA, 15 bp, Homo sapiens
aaggagtttctaagg

SEQ ID NO: 1142482 - DNA, 15 bp, Homo sapiens
aaaggagtttctaag

SEQ ID NO: 1142483 - DNA, 15 bp, Homo sapiens
caaaggagtttctaa

SEQ ID NO: 1142484 - DNA, 15 bp, Homo sapiens
ccaaaggagtttcta

SEQ ID NO: 1142485 - DNA, 15 bp, Homo sapiens
gccaaaggagtttct

SEQ ID NO: 1142486 - DNA, 15 bp, Homo sapiens
tgccaaaggagtttc

SEQ ID NO: 1142487 - DNA, 15 bp, Homo sapiens
ttgccaaaggagttt

SEQ ID NO: 1142488 - DNA, 15 bp, Homo sapiens
cttgccaaaggagtt

SEQ ID NO: 1142489 - DNA, 15 bp, Homo sapiens
tcttgccaaaggagt

SEQ ID NO: 1142490 - DNA, 15 bp, Homo sapiens
atcttgccaaaggag

SEQ ID NO: 1142491 - DNA, 15 bp, Homo sapiens
aatcttgccaaagga

SEQ ID NO: 1142492 - DNA, 15 bp, Homo sapiens
aaatcttgccaaagg

SEQ ID NO: 1142493 - DNA, 15 bp, Homo sapiens
gaaatcttgccaaag

SEQ ID NO: 1142494 - DNA, 15 bp, Homo sapiens
tgaaatcttgccaaa

SEQ ID NO: 1142495 - DNA, 15 bp, Homo sapiens
ttgaaatcttgccaa

SEQ ID NO: 1142496 - DNA, 15 bp, Homo sapiens
tttgaaatcttgcca

SEQ ID NO: 1142497 - DNA, 15 bp, Homo sapiens
ttttgaaatcttgcc

SEQ ID NO: 1142498 - DNA, 15 bp, Homo sapiens
tttttgaaatcttgc

SEQ ID NO: 1142499 - DNA, 15 bp, Homo sapiens
ctttttgaaatcttg

SEQ ID NO: 1142500 - DNA, 15 bp, Homo sapiens
cctttttgaaatctt

SEQ ID NO: 1142501 - DNA, 15 bp, Homo sapiens
gcctttttgaaatct

SEQ ID NO: 1142502 - DNA, 15 bp, Homo sapiens
tgcctttttgaaatc

SEQ ID NO: 1142503 - DNA, 15 bp, Homo sapiens
ctgcctttttgaaat

SEQ ID NO: 1142504 - DNA, 15 bp, Homo sapiens
tctgcctttttgaaa

SEQ ID NO: 1142505 - DNA, 15 bp, Homo sapiens
ttctgcctttttgaa

SEQ ID NO: 1142506 - DNA, 15 bp, Homo sapiens
tttctgcctttttga

SEQ ID NO: 1142507 - DNA, 15 bp, Homo sapiens
ctttctgcctttttg

SEQ ID NO: 1142508 - DNA, 15 bp, Homo sapiens
gctttctgccttttt

SEQ ID NO: 1142509 - DNA, 15 bp, Homo sapiens
tgctttctgcctttt

SEQ ID NO: 1142510 - DNA, 15 bp, Homo sapiens
ctgctttctgccttt

SEQ ID NO: 1142511 - DNA, 15 bp, Homo sapiens
tctgctttctgcctt

SEQ ID NO: 1142512 - DNA, 15 bp, Homo sapiens
atctgctttctgcct

SEQ ID NO: 1142513 - DNA, 15 bp, Homo sapiens
aatctgctttctgcc

SEQ ID NO: 1142514 - DNA, 15 bp, Homo sapiens
caatctgctttctgc

SEQ ID NO: 1142515 - DNA, 15 bp, Homo sapiens
acaatctgctttctg

SEQ ID NO: 1142516 - DNA, 15 bp, Homo sapiens
tacaatctgctttct

SEQ ID NO: 1142517 - DNA, 15 bp, Homo sapiens
ttacaatctgctttc

SEQ ID NO: 1142518 - DNA, 15 bp, Homo sapiens
tttacaatctgcttt

SEQ ID NO: 1142519 - DNA, 15 bp, Homo sapiens
atttacaatctgctt

SEQ ID NO: 1142520 - DNA, 15 bp, Homo sapiens
catttacaatctgct

SEQ ID NO: 1142521 - DNA, 15 bp, Homo sapiens
acatttacaatctgc

SEQ ID NO: 1142522 - DNA, 15 bp, Homo sapiens
tacatttacaatctg

SEQ ID NO: 1142523 - DNA, 15 bp, Homo sapiens
gtacatttacaatct

SEQ ID NO: 1142524 - DNA, 15 bp, Homo sapiens
agtacatttacaatc

SEQ ID NO: 1142525 - DNA, 15 bp, Homo sapiens
aagtacatttacaat

SEQ ID NO: 1142526 - DNA, 15 bp, Homo sapiens
taagtacatttacaa

SEQ ID NO: 1142527 - DNA, 15 bp, Homo sapiens
ttaagtacatttaca

SEQ ID NO: 1142528 - DNA, 15 bp, Homo sapiens
tttaagtacatttac

SEQ ID NO: 1142529 - DNA, 15 bp, Homo sapiens
ttttaagtacattta

SEQ ID NO: 1142530 - DNA, 15 bp, Homo sapiens
attttaagtacattt

SEQ ID NO: 1142531 - DNA, 15 bp, Homo sapiens
gattttaagtacatt

SEQ ID NO: 1142532 - DNA, 15 bp, Homo sapiens
agattttaagtacat

SEQ ID NO: 1142533 - DNA, 15 bp, Homo sapiens
aagattttaagtaca

SEQ ID NO: 1142534 - DNA, 15 bp, Homo sapiens
aaagattttaagtac

SEQ ID NO: 1142535 - DNA, 15 bp, Homo sapiens
aaaagattttaagta

SEQ ID NO: 1142536 - DNA, 15 bp, Homo sapiens
aaaaagattttaagt

SEQ ID NO: 1142537 - DNA, 15 bp, Homo sapiens
caaaaagattttaag

SEQ ID NO: 1142538 - DNA, 15 bp, Homo sapiens
gcaaaaagattttaa

SEQ ID NO: 1142539 - DNA, 15 bp, Homo sapiens
agcaaaaagatttta

SEQ ID NO: 1142540 - DNA, 15 bp, Homo sapiens
aagcaaaaagatttt

SEQ ID NO: 1142541 - DNA, 15 bp, Homo sapiens
gaagcaaaaagattt

SEQ ID NO: 1142542 - DNA, 15 bp, Homo sapiens
tgaagcaaaaagatt

SEQ ID NO: 1142543 - DNA, 15 bp, Homo sapiens
ttgaagcaaaaagat

SEQ ID NO: 1142544 - DNA, 15 bp, Homo sapiens
tttgaagcaaaaaga

SEQ ID NO: 1142545 - DNA, 15 bp, Homo sapiens
gtttgaagcaaaaag

SEQ ID NO: 1142546 - DNA, 15 bp, Homo sapiens
agtttgaagcaaaaa

SEQ ID NO: 1142547 - DNA, 15 bp, Homo sapiens
cagtttgaagcaaaa

SEQ ID NO: 1142548 - DNA, 15 bp, Homo sapiens
gcagtttgaagcaaa

SEQ ID NO: 1142549 - DNA, 15 bp, Homo sapiens
ggcagtttgaagcaa

SEQ ID NO: 1142550 - DNA, 15 bp, Homo sapiens
caggcagtttgaagc

SEQ ID NO: 1142551 - DNA, 15 bp, Homo sapiens
gcaggcagtttgaag

SEQ ID NO: 1142552 - DNA, 15 bp, Homo sapiens
agcaggcagtttgaa

SEQ ID NO: 1142553 - DNA, 15 bp, Homo sapiens
aagcaggcagtttga

SEQ ID NO: 1142554 - DNA, 15 bp, Homo sapiens
aaagcaggcagtttg

SEQ ID NO: 1142555 - DNA, 15 bp, Homo sapiens
caaagcaggcagttt

SEQ ID NO: 1142556 - DNA, 15 bp, Homo sapiens
ccaaagcaggcagtt

SEQ ID NO: 1142557 - DNA, 15 bp, Homo sapiens
cccaaagcaggcagt

SEQ ID NO: 1142558 - DNA, 15 bp, Homo sapiens
ccccaaagcaggcag

SEQ ID NO: 1142559 - DNA, 15 bp, Homo sapiens
accccaaagcaggca

SEQ ID NO: 1142560 - DNA, 15 bp, Homo sapiens
aaccccaaagcaggc

SEQ ID NO: 1142561 - DNA, 15 bp, Homo sapiens
gaaccccaaagcagg

SEQ ID NO: 1142562 - DNA, 15 bp, Homo sapiens
ggaaccccaaagcag

SEQ ID NO: 1142563 - DNA, 15 bp, Homo sapiens
gggaaccccaaagca

SEQ ID NO: 1142564 - DNA, 15 bp, Homo sapiens
cgggaaccccaaagc

SEQ ID NO: 1142565 - DNA, 15 bp, Homo sapiens
gcgggaaccccaaag

SEQ ID NO: 1142566 - DNA, 15 bp, Homo sapiens
agcgggaaccccaaa

SEQ ID NO: 1142567 - DNA, 15 bp, Homo sapiens
cagcgggaaccccaa

SEQ ID NO: 1142568 - DNA, 15 bp, Homo sapiens
tcagcgggaacccca

SEQ ID NO: 1142569 - DNA, 15 bp, Homo sapiens
ttcagcgggaacccc

SEQ ID NO: 1142570 - DNA, 15 bp, Homo sapiens
gttcagcgggaaccc

SEQ ID NO: 1142571 - DNA, 15 bp, Homo sapiens
ggttcagcgggaacc

SEQ ID NO: 1142572 - DNA, 15 bp, Homo sapiens
aggttcagcgggaac

SEQ ID NO: 1142573 - DNA, 15 bp, Homo sapiens
taggttcagcgggaa

SEQ ID NO: 1142574 - DNA, 15 bp, Homo sapiens
gtaggttcagcggga

SEQ ID NO: 1142575 - DNA, 15 bp, Homo sapiens
tgtaggttcagcggg

SEQ ID NO: 1142576 - DNA, 15 bp, Homo sapiens
ttgtaggttcagcgg

SEQ ID NO: 1142577 - DNA, 15 bp, Homo sapiens
tttgtaggttcagcg

SEQ ID NO: 1142578 - DNA, 15 bp, Homo sapiens
ttttgtaggttcagc

SEQ ID NO: 1142579 - DNA, 15 bp, Homo sapiens
tttttgtaggttcag

SEQ ID NO: 1142580 - DNA, 15 bp, Homo sapiens
ctttttgtaggttca

SEQ ID NO: 1142581 - DNA, 15 bp, Homo sapiens
tctttttgtaggttc

SEQ ID NO: 1142582 - DNA, 15 bp, Homo sapiens
atctttttgtaggtt

SEQ ID NO: 1142583 - DNA, 15 bp, Homo sapiens
tatctttttgtaggt

SEQ ID NO: 1142584 - DNA, 15 bp, Homo sapiens
gtatctttttgtagg

SEQ ID NO: 1142585 - DNA, 15 bp, Homo sapiens
ggtatctttttgtag

SEQ ID NO: 1142586 - DNA, 15 bp, Homo sapiens
gggtatctttttgta

SEQ ID NO: 1142587 - DNA, 15 bp, Homo sapiens
ggggtatctttttgt

SEQ ID NO: 1142588 - DNA, 15 bp, Homo sapiens
tggggtatctttttg

SEQ ID NO: 1142589 - DNA, 15 bp, Homo sapiens
ctggggtatcttttt

SEQ ID NO: 1142590 - DNA, 15 bp, Homo sapiens
gctggggtatctttt

SEQ ID NO: 1142591 - DNA, 15 bp, Homo sapiens
agctggggtatcttt

SEQ ID NO: 1142592 - DNA, 15 bp, Homo sapiens
aagctggggtatctt

SEQ ID NO: 1142593 - DNA, 15 bp, Homo sapiens
caagctggggtatct

SEQ ID NO: 1142594 - DNA, 15 bp, Homo sapiens
acaagctggggtatc

SEQ ID NO: 1142595 - DNA, 15 bp, Homo sapiens
tacaagctggggtat

SEQ ID NO: 1142596 - DNA, 15 bp, Homo sapiens
ctacaagctggggta

SEQ ID NO: 1142597 - DNA, 15 bp, Homo sapiens
actacaagctggggt

SEQ ID NO: 1142598 - DNA, 15 bp, Homo sapiens
cactacaagctgggg

SEQ ID NO: 1142599 - DNA, 15 bp, Homo sapiens
acactacaagctggg

SEQ ID NO: 1142600 - DNA, 15 bp, Homo sapiens
tacactacaagctgg

SEQ ID NO: 1142601 - DNA, 15 bp, Homo sapiens
ctacactacaagctg

SEQ ID NO: 1142602 - DNA, 15 bp, Homo sapiens
cctacactacaagct

SEQ ID NO: 1142603 - DNA, 15 bp, Homo sapiens
ccctacactacaagc

SEQ ID NO: 1142604 - DNA, 15 bp, Homo sapiens
cccctacactacaag

SEQ ID NO: 1142605 - DNA, 15 bp, Homo sapiens
gcccctacactacaa

SEQ ID NO: 1142606 - DNA, 15 bp, Homo sapiens
agcccctacactaca

SEQ ID NO: 1142607 - DNA, 15 bp, Homo sapiens
tagcccctacactac

SEQ ID NO: 1142608 - DNA, 15 bp, Homo sapiens
ctagcccctacacta

SEQ ID NO: 1142609 - DNA, 15 bp, Homo sapiens
cctagcccctacact

SEQ ID NO: 1142610 - DNA, 15 bp, Homo sapiens
tcctagcccctacac

SEQ ID NO: 1142611 - DNA, 15 bp, Homo sapiens
atcctagcccctaca

SEQ ID NO: 1142612 - DNA, 15 bp, Homo sapiens
aatcctagcccctac

SEQ ID NO: 1142613 - DNA, 15 bp, Homo sapiens
gaatcctagccccta

SEQ ID NO: 1142614 - DNA, 15 bp, Homo sapiens
agaatcctagcccct

SEQ ID NO: 1142615 - DNA, 15 bp, Homo sapiens
tagaatcctagcccc

SEQ ID NO: 1142616 - DNA, 15 bp, Homo sapiens
gtagaatcctagccc

SEQ ID NO: 1142617 - DNA, 15 bp, Homo sapiens
agtagaatcctagcc

SEQ ID NO: 1142618 - DNA, 15 bp, Homo sapiens
gagtagaatcctagc

SEQ ID NO: 1142619 - DNA, 15 bp, Homo sapiens
agagtagaatcctag

SEQ ID NO: 1142620 - DNA, 15 bp, Homo sapiens
aagagtagaatccta

SEQ ID NO: 1142621 - DNA, 15 bp, Homo sapiens
gaagagtagaatcct

SEQ ID NO: 1142622 - DNA, 15 bp, Homo sapiens
tgaagagtagaatcc

SEQ ID NO: 1142623 - DNA, 15 bp, Homo sapiens
gtgaagagtagaatc

SEQ ID NO: 1142624 - DNA, 15 bp, Homo sapiens
agtgaagagtagaat

SEQ ID NO: 1142625 - DNA, 15 bp, Homo sapiens
cagtgaagagtagaa

SEQ ID NO: 1142626 - DNA, 15 bp, Homo sapiens
gcagtgaagagtaga

SEQ ID NO: 1142627 - DNA, 15 bp, Homo sapiens
agcagtgaagagtag

SEQ ID NO: 1142628 - DNA, 15 bp, Homo sapiens
cagcagtgaagagta

SEQ ID NO: 1142629 - DNA, 15 bp, Homo sapiens
acagcagtgaagagt

SEQ ID NO: 1142630 - DNA, 15 bp, Homo sapiens
cacagcagtgaagag

SEQ ID NO: 1142631 - DNA, 15 bp, Homo sapiens
tcacagcagtgaaga

SEQ ID NO: 1142632 - DNA, 15 bp, Homo sapiens
atcacagcagtgaag

SEQ ID NO: 1142633 - DNA, 15 bp, Homo sapiens
gatcacagcagtgaa

SEQ ID NO: 1142634 - DNA, 15 bp, Homo sapiens
agatcacagcagtga

SEQ ID NO: 1142635 - DNA, 15 bp, Homo sapiens
cagatcacagcagtg

SEQ ID NO: 1142636 - DNA, 15 bp, Homo sapiens
ccagatcacagcagt

SEQ ID NO: 1142637 - DNA, 15 bp, Homo sapiens
cccagatcacagcag

SEQ ID NO: 1142638 - DNA, 15 bp, Homo sapiens
tcccagatcacagca

SEQ ID NO: 1142639 - DNA, 15 bp, Homo sapiens
atcccagatcacagc

SEQ ID NO: 1142640 - DNA, 15 bp, Homo sapiens
aatcccagatcacag

SEQ ID NO: 1142641 - DNA, 15 bp, Homo sapiens
caatcccagatcaca

SEQ ID NO: 1142642 - DNA, 15 bp, Homo sapiens
ccaatcccagatcac

SEQ ID NO: 1142643 - DNA, 15 bp, Homo sapiens
tccaatcccagatca

SEQ ID NO: 1142644 - DNA, 15 bp, Homo sapiens
atccaatcccagatc

SEQ ID NO: 1142645 - DNA, 15 bp, Homo sapiens
aatccaatcccagat

SEQ ID NO: 1142646 - DNA, 15 bp, Homo sapiens
gaatccaatcccaga

SEQ ID NO: 1142647 - DNA, 15 bp, Homo sapiens
agaatccaatcccag

SEQ ID NO: 1142648 - DNA, 15 bp, Homo sapiens
gagaatccaatccca

SEQ ID NO: 1142649 - DNA, 15 bp, Homo sapiens
tgagaatccaatccc

SEQ ID NO: 1142650 - DNA, 15 bp, Homo sapiens
atgagaatccaatcc

SEQ ID NO: 1142651 - DNA, 15 bp, Homo sapiens
aatgagaatccaatc

SEQ ID NO: 1142652 - DNA, 15 bp, Homo sapiens
gaatgagaatccaat

SEQ ID NO: 1142653 - DNA, 15 bp, Homo sapiens
tgaatgagaatccaa

SEQ ID NO: 1142654 - DNA, 15 bp, Homo sapiens
ctgaatgagaatcca

SEQ ID NO: 1142655 - DNA, 15 bp, Homo sapiens
cctgaatgagaatcc

SEQ ID NO: 1142656 - DNA, 15 bp, Homo sapiens
tcctgaatgagaatc

SEQ ID NO: 1142657 - DNA, 15 bp, Homo sapiens
ttcctgaatgagaat

SEQ ID NO: 1142658 - DNA, 15 bp, Homo sapiens
tttcctgaatgagaa

SEQ ID NO: 1142659 - DNA, 15 bp, Homo sapiens
atttcctgaatgaga

SEQ ID NO: 1142660 - DNA, 15 bp, Homo sapiens
gatttcctgaatgag

SEQ ID NO: 1142661 - DNA, 15 bp, Homo sapiens
tgatttcctgaatga

SEQ ID NO: 1142662 - DNA, 15 bp, Homo sapiens
ctgatttcctgaatg

SEQ ID NO: 1142663 - DNA, 15 bp, Homo sapiens
tctgatttcctgaat

SEQ ID NO: 1142664 - DNA, 15 bp, Homo sapiens
gtctgatttcctgaa

SEQ ID NO: 1142665 - DNA, 15 bp, Homo sapiens
ggtctgatttcctga

SEQ ID NO: 1142666 - DNA, 15 bp, Homo sapiens
gggtctgatttcctg

SEQ ID NO: 1142667 - DNA, 15 bp, Homo sapiens
agggtctgatttcct

SEQ ID NO: 1142668 - DNA, 15 bp, Homo sapiens
aagggtctgatttcc

SEQ ID NO: 1142669 - DNA, 15 bp, Homo sapiens
taagggtctgatttc

SEQ ID NO: 1142670 - DNA, 15 bp, Homo sapiens
ctaagggtctgattt

SEQ ID NO: 1142671 - DNA, 15 bp, Homo sapiens
tctaagggtctgatt

SEQ ID NO: 1142672 - DNA, 15 bp, Homo sapiens
ctctaagggtctgat

SEQ ID NO: 1142673 - DNA, 15 bp, Homo sapiens
tctctaagggtctga

SEQ ID NO: 1142674 - DNA, 15 bp, Homo sapiens
atctctaagggtctg

SEQ ID NO: 1142675 - DNA, 15 bp, Homo sapiens
gatctctaagggtct

SEQ ID NO: 1142676 - DNA, 15 bp, Homo sapiens
agatctctaagggtc

SEQ ID NO: 1142677 - DNA, 15 bp, Homo sapiens
tagatctctaagggt

SEQ ID NO: 1142678 - DNA, 15 bp, Homo sapiens
ctagatctctaaggg

SEQ ID NO: 1142679 - DNA, 15 bp, Homo sapiens
tctagatctctaagg

SEQ ID NO: 1142680 - DNA, 15 bp, Homo sapiens
atctagatctctaag

SEQ ID NO: 1142681 - DNA, 15 bp, Homo sapiens
gatctagatctctaa

SEQ ID NO: 1142682 - DNA, 15 bp, Homo sapiens
agatctagatctcta

SEQ ID NO: 1142683 - DNA, 15 bp, Homo sapiens
aagatctagatctct

SEQ ID NO: 1142684 - DNA, 15 bp, Homo sapiens
aaagatctagatctc

SEQ ID NO: 1142685 - DNA, 15 bp, Homo sapiens
caaagatctagatct

SEQ ID NO: 1142686 - DNA, 15 bp, Homo sapiens
gcaaagatctagatc

SEQ ID NO: 1142687 - DNA, 15 bp, Homo sapiens
tgcaaagatctagat

SEQ ID NO: 1142688 - DNA, 15 bp, Homo sapiens
ttgcaaagatctaga

SEQ ID NO: 1142689 - DNA, 15 bp, Homo sapiens
gttgcaaagatctag

SEQ ID NO: 1142690 - DNA, 15 bp, Homo sapiens
agttgcaaagatcta

SEQ ID NO: 1142691 - DNA, 15 bp, Homo sapiens
gagttgcaaagatct

SEQ ID NO: 1142692 - DNA, 15 bp, Homo sapiens
tgagttgcaaagatc

SEQ ID NO: 1142693 - DNA, 15 bp, Homo sapiens
ctgagttgcaaagat

SEQ ID NO: 1142694 - DNA, 15 bp, Homo sapiens
cctgagttgcaaaga

SEQ ID NO: 1142695 - DNA, 15 bp, Homo sapiens
tcctgagttgcaaag

SEQ ID NO: 1142696 - DNA, 15 bp, Homo sapiens
ctcctgagttgcaaa

SEQ ID NO: 1142697 - DNA, 15 bp, Homo sapiens
tctcctgagttgcaa

SEQ ID NO: 1142698 - DNA, 15 bp, Homo sapiens
ttctcctgagttgca

SEQ ID NO: 1142699 - DNA, 15 bp, Homo sapiens
tttctcctgagttgc

SEQ ID NO: 1142700 - DNA, 15 bp, Homo sapiens
ttttctcctgagttg

SEQ ID NO: 1142701 - DNA, 15 bp, Homo sapiens
tttttctcctgagtt

SEQ ID NO: 1142702 - DNA, 15 bp, Homo sapiens
ctttttctcctgagt

SEQ ID NO: 1142703 - DNA, 15 bp, Homo sapiens
tctttttctcctgag

SEQ ID NO: 1142704 - DNA, 15 bp, Homo sapiens
ttctttttctcctga

SEQ ID NO: 1142705 - DNA, 15 bp, Homo sapiens
tttctttttctcctg

SEQ ID NO: 1142706 - DNA, 15 bp, Homo sapiens
ttttctttttctcct

SEQ ID NO: 1142707 - DNA, 15 bp, Homo sapiens
tttttctttttctcc

SEQ ID NO: 1142708 - DNA, 15 bp, Homo sapiens
catttttctttttct

SEQ ID NO: 1142709 - DNA, 15 bp, Homo sapiens
acatttttctttttc

SEQ ID NO: 1142710 - DNA, 15 bp, Homo sapiens
tacatttttcttttt

SEQ ID NO: 1142711 - DNA, 15 bp, Homo sapiens
gtacatttttctttt

SEQ ID NO: 1142712 - DNA, 15 bp, Homo sapiens
tgtacatttttcttt

SEQ ID NO: 1142713 - DNA, 15 bp, Homo sapiens
ttgtacatttttctt

SEQ ID NO: 1142714 - DNA, 15 bp, Homo sapiens
gttgtacatttttct

SEQ ID NO: 1142715 - DNA, 15 bp, Homo sapiens
tgttgtacatttttc

SEQ ID NO: 1142716 - DNA, 15 bp, Homo sapiens
ttgttgtacattttt

SEQ ID NO: 1142717 - DNA, 15 bp, Homo sapiens
attgttgtacatttt

SEQ ID NO: 1142718 - DNA, 15 bp, Homo sapiens
aattgttgtacattt

SEQ ID NO: 1142719 - DNA, 15 bp, Homo sapiens
taattgttgtacatt

SEQ ID NO: 1142720 - DNA, 15 bp, Homo sapiens
ctaattgttgtacat

SEQ ID NO: 1142721 - DNA, 15 bp, Homo sapiens
gctaattgttgtaca

SEQ ID NO: 1142722 - DNA, 15 bp, Homo sapiens
agctaattgttgtac

SEQ ID NO: 1142723 - DNA, 15 bp, Homo sapiens
aagctaattgttgta

SEQ ID NO: 1142724 - DNA, 15 bp, Homo sapiens
caagctaattgttgt

SEQ ID NO: 1142725 - DNA, 15 bp, Homo sapiens
tcaagctaattgttg

SEQ ID NO: 1142726 - DNA, 15 bp, Homo sapiens
ttcaagctaattgtt

SEQ ID NO: 1142727 - DNA, 15 bp, Homo sapiens
attcaagctaattgt

SEQ ID NO: 1142728 - DNA, 15 bp, Homo sapiens
aattcaagctaattg

SEQ ID NO: 1142729 - DNA, 15 bp, Homo sapiens
taattcaagctaatt

SEQ ID NO: 1142730 - DNA, 15 bp, Homo sapiens
ataattcaagctaat

SEQ ID NO: 1142731 - DNA, 15 bp, Homo sapiens
aataattcaagctaa

SEQ ID NO: 1142732 - DNA, 15 bp, Homo sapiens
aaataattcaagcta

SEQ ID NO: 1142733 - DNA, 15 bp, Homo sapiens
caaataattcaagct

SEQ ID NO: 1142734 - DNA, 15 bp, Homo sapiens
acaaataattcaagc

SEQ ID NO: 1142735 - DNA, 15 bp, Homo sapiens
aacaaataattcaag

SEQ ID NO: 1142736 - DNA, 15 bp, Homo sapiens
aaacaaataattcaa

SEQ ID NO: 1142737 - DNA, 15 bp, Homo sapiens
aaaacaaataattca

SEQ ID NO: 1142738 - DNA, 15 bp, Homo sapiens
caaaacaaataattc

SEQ ID NO: 1142739 - DNA, 15 bp, Homo sapiens
tcaaaacaaataatt

SEQ ID NO: 1142740 - DNA, 15 bp, Homo sapiens
ttcaaaacaaataat

SEQ ID NO: 1142741 - DNA, 15 bp, Homo sapiens
attcaaaacaaataa

SEQ ID NO: 1142742 - DNA, 15 bp, Homo sapiens
aattcaaaacaaata

SEQ ID NO: 1142743 - DNA, 15 bp, Homo sapiens
taaattcaaaacaaa

SEQ ID NO: 1142744 - DNA, 15 bp, Homo sapiens
ataaattcaaaacaa

SEQ ID NO: 1142745 - DNA, 15 bp, Homo sapiens
cataaattcaaaaca

SEQ ID NO: 1142746 - DNA, 15 bp, Homo sapiens
acataaattcaaaac

SEQ ID NO: 1142747 - DNA, 15 bp, Homo sapiens
aacataaattcaaaa

SEQ ID NO: 1142748 - DNA, 15 bp, Homo sapiens
aaacataaattcaaa

SEQ ID NO: 1142749 - DNA, 15 bp, Homo sapiens
caaacataaattcaa

SEQ ID NO: 1142750 - DNA, 15 bp, Homo sapiens
acaaacataaattca

SEQ ID NO: 1142751 - DNA, 15 bp, Homo sapiens
cacaaacataaattc

SEQ ID NO: 1142752 - DNA, 15 bp, Homo sapiens
acacaaacataaatt

SEQ ID NO: 1142753 - DNA, 15 bp, Homo sapiens
cacacaaacataaat

SEQ ID NO: 1142754 - DNA, 15 bp, Homo sapiens
tcacacaaacataaa

SEQ ID NO: 1142755 - DNA, 15 bp, Homo sapiens
gtcacacaaacataa

SEQ ID NO: 1142756 - DNA, 15 bp, Homo sapiens
agtcacacaaacata

SEQ ID NO: 1142757 - DNA, 15 bp, Homo sapiens
gagtcacacaaacat

SEQ ID NO: 1142758 - DNA, 15 bp, Homo sapiens
agagtcacacaaaca

SEQ ID NO: 1142759 - DNA, 15 bp, Homo sapiens
gagagtcacacaaac

SEQ ID NO: 1142760 - DNA, 15 bp, Homo sapiens
cgagagtcacacaaa

SEQ ID NO: 1142761 - DNA, 15 bp, Homo sapiens
tcgagagtcacacaa

SEQ ID NO: 1142762 - DNA, 15 bp, Homo sapiens
gtcgagagtcacaca

SEQ ID NO: 1142763 - DNA, 15 bp, Homo sapiens
agtcgagagtcacac

SEQ ID NO: 1142764 - DNA, 15 bp, Homo sapiens
cagtcgagagtcaca

SEQ ID NO: 1142765 - DNA, 15 bp, Homo sapiens
acagtcgagagtcac

SEQ ID NO: 1142766 - DNA, 15 bp, Homo sapiens
aacagtcgagagtca

SEQ ID NO: 1142767 - DNA, 15 bp, Homo sapiens
aaacagtcgagagtc

SEQ ID NO: 1142768 - DNA, 15 bp, Homo sapiens
caaacagtcgagagt

SEQ ID NO: 1142769 - DNA, 15 bp, Homo sapiens
ccaaacagtcgagag

SEQ ID NO: 1142770 - DNA, 15 bp, Homo sapiens
tccaaacagtcgaga

SEQ ID NO: 1142771 - DNA, 15 bp, Homo sapiens
ctccaaacagtcgag

SEQ ID NO: 1142772 - DNA, 15 bp, Homo sapiens
tctccaaacagtcga

SEQ ID NO: 1142773 - DNA, 15 bp, Homo sapiens
ctctccaaacagtcg

SEQ ID NO: 1142774 - DNA, 15 bp, Homo sapiens
actctccaaacagtc

SEQ ID NO: 1142775 - DNA, 15 bp, Homo sapiens
aactctccaaacagt

SEQ ID NO: 1142776 - DNA, 15 bp, Homo sapiens
taactctccaaacag

SEQ ID NO: 1142777 - DNA, 15 bp, Homo sapiens
gtaactctccaaaca

SEQ ID NO: 1142778 - DNA, 15 bp, Homo sapiens
tgtaactctccaaac

SEQ ID NO: 1142779 - DNA, 15 bp, Homo sapiens
atgtaactctccaaa

SEQ ID NO: 1142780 - DNA, 15 bp, Homo sapiens
aatgtaactctccaa

SEQ ID NO: 1142781 - DNA, 15 bp, Homo sapiens
taatgtaactctcca

SEQ ID NO: 1142782 - DNA, 15 bp, Homo sapiens
gtaatgtaactctcc

SEQ ID NO: 1142783 - DNA, 15 bp, Homo sapiens
ggtaatgtaactctc

SEQ ID NO: 1142784 - DNA, 15 bp, Homo sapiens
tggtaatgtaactct

SEQ ID NO: 1142785 - DNA, 15 bp, Homo sapiens
atggtaatgtaactc

SEQ ID NO: 1142786 - DNA, 15 bp, Homo sapiens
aatggtaatgtaact

SEQ ID NO: 1142787 - DNA, 15 bp, Homo sapiens
aaatggtaatgtaac

SEQ ID NO: 1142788 - DNA, 15 bp, Homo sapiens
caaatggtaatgtaa

SEQ ID NO: 1142789 - DNA, 15 bp, Homo sapiens
tcaaatggtaatgta

SEQ ID NO: 1142790 - DNA, 15 bp, Homo sapiens
atcaaatggtaatgt

SEQ ID NO: 1142791 - DNA, 15 bp, Homo sapiens
tatcaaatggtaatg

SEQ ID NO: 1142792 - DNA, 15 bp, Homo sapiens
atatcaaatggtaat

SEQ ID NO: 1142793 - DNA, 15 bp, Homo sapiens
aatatcaaatggtaa

SEQ ID NO: 1142794 - DNA, 15 bp, Homo sapiens
caatatcaaatggta

SEQ ID NO: 1142795 - DNA, 15 bp, Homo sapiens
tcaatatcaaatggt

SEQ ID NO: 1142796 - DNA, 15 bp, Homo sapiens
atcaatatcaaatgg

SEQ ID NO: 1142797 - DNA, 15 bp, Homo sapiens
gatcaatatcaaatg

SEQ ID NO: 1142798 - DNA, 15 bp, Homo sapiens
agatcaatatcaaat

SEQ ID NO: 1142799 - DNA, 15 bp, Homo sapiens
aagatcaatatcaaa

SEQ ID NO: 1142800 - DNA, 15 bp, Homo sapiens
aaagatcaatatcaa

SEQ ID NO: 1142801 - DNA, 15 bp, Homo sapiens
aaaagatcaatatca

SEQ ID NO: 1142802 - DNA, 15 bp, Homo sapiens
aaaaagatcaatatc

SEQ ID NO: 1142803 - DNA, 15 bp, Homo sapiens
gaaaaagatcaatat

SEQ ID NO: 1142804 - DNA, 15 bp, Homo sapiens
ggaaaaagatcaata

SEQ ID NO: 1142805 - DNA, 15 bp, Homo sapiens
gggaaaaagatcaat

SEQ ID NO: 1142806 - DNA, 15 bp, Homo sapiens
agggaaaaagatcaa

SEQ ID NO: 1142807 - DNA, 15 bp, Homo sapiens
aagggaaaaagatca

SEQ ID NO: 1142808 - DNA, 15 bp, Homo sapiens
aaagggaaaaagatc

SEQ ID NO: 1142809 - DNA, 15 bp, Homo sapiens
aaaagggaaaaagat

SEQ ID NO: 1142810 - DNA, 15 bp, Homo sapiens
taaaagggaaaaaga

SEQ ID NO: 1142811 - DNA, 15 bp, Homo sapiens
ataaaagggaaaaag

SEQ ID NO: 1142812 - DNA, 15 bp, Homo sapiens
cataaaagggaaaaa

SEQ ID NO: 1142813 - DNA, 15 bp, Homo sapiens
ccataaaagggaaaa

SEQ ID NO: 1142814 - DNA, 15 bp, Homo sapiens
tccataaaagggaaa

SEQ ID NO: 1142815 - DNA, 15 bp, Homo sapiens
gtccataaaagggaa

SEQ ID NO: 1142816 - DNA, 15 bp, Homo sapiens
ggtccataaaaggga

SEQ ID NO: 1142817 - DNA, 15 bp, Homo sapiens
tggtccataaaaggg

SEQ ID NO: 1142818 - DNA, 15 bp, Homo sapiens
atggtccataaaagg

SEQ ID NO: 1142819 - DNA, 15 bp, Homo sapiens
aatggtccataaaag

SEQ ID NO: 1142820 - DNA, 15 bp, Homo sapiens
aaatggtccataaaa

SEQ ID NO: 1142821 - DNA, 15 bp, Homo sapiens
aaaatggtccataaa

SEQ ID NO: 1142822 - DNA, 15 bp, Homo sapiens
aaaaatggtccataa

SEQ ID NO: 1142823 - DNA, 15 bp, Homo sapiens
taaaaatggtccata

SEQ ID NO: 1142824 - DNA, 15 bp, Homo sapiens
gtaaaaatggtccat

SEQ ID NO: 1142825 - DNA, 15 bp, Homo sapiens
agtaaaaatggtcca

SEQ ID NO: 1142826 - DNA, 15 bp, Homo sapiens
aagtaaaaatggtcc

SEQ ID NO: 1142827 - DNA, 15 bp, Homo sapiens
aaagtaaaaatggtc

SEQ ID NO: 1142828 - DNA, 15 bp, Homo sapiens
aaaagtaaaaatggt

SEQ ID NO: 1142829 - DNA, 15 bp, Homo sapiens
gaaaagtaaaaatgg

SEQ ID NO: 1142830 - DNA, 15 bp, Homo sapiens
agaaaagtaaaaatg

SEQ ID NO: 1142831 - DNA, 15 bp, Homo sapiens
cagaaaagtaaaaat

SEQ ID NO: 1142832 - DNA, 15 bp, Homo sapiens
acagaaaagtaaaaa

SEQ ID NO: 1142833 - DNA, 15 bp, Homo sapiens
aacagaaaagtaaaa

SEQ ID NO: 1142834 - DNA, 15 bp, Homo sapiens
taacagaaaagtaaa

SEQ ID NO: 1142835 - DNA, 15 bp, Homo sapiens
ataacagaaaagtaa

SEQ ID NO: 1142836 - DNA, 15 bp, Homo sapiens
aataacagaaaagta

SEQ ID NO: 1142837 - DNA, 15 bp, Homo sapiens
caataacagaaaagt

SEQ ID NO: 1142838 - DNA, 15 bp, Homo sapiens
tcaataacagaaaag

SEQ ID NO: 1142839 - DNA, 15 bp, Homo sapiens
ttcaataacagaaaa

SEQ ID NO: 1142840 - DNA, 15 bp, Homo sapiens
cttcaataacagaaa

SEQ ID NO: 1142841 - DNA, 15 bp, Homo sapiens
acttcaataacagaa

SEQ ID NO: 1142842 - DNA, 15 bp, Homo sapiens
gacttcaataacaga

SEQ ID NO: 1142843 - DNA, 15 bp, Homo sapiens
agacttcaataacag

SEQ ID NO: 1142844 - DNA, 15 bp, Homo sapiens
gagacttcaataaca

SEQ ID NO: 1142845 - DNA, 15 bp, Homo sapiens
agagacttcaataac

SEQ ID NO: 1142846 - DNA, 15 bp, Homo sapiens
aagagacttcaataa

SEQ ID NO: 1142847 - DNA, 15 bp, Homo sapiens
aaagagacttcaata

SEQ ID NO: 1142848 - DNA, 15 bp, Homo sapiens
taaagagacttcaat

SEQ ID NO: 1142849 - DNA, 15 bp, Homo sapiens
ctaaagagacttcaa

SEQ ID NO: 1142850 - DNA, 15 bp, Homo sapiens
cctaaagagacttca

SEQ ID NO: 1142851 - DNA, 15 bp, Homo sapiens
ccctaaagagacttc

SEQ ID NO: 1142852 - DNA, 15 bp, Homo sapiens
cccctaaagagactt

SEQ ID NO: 1142853 - DNA, 15 bp, Homo sapiens
gcccctaaagagact

SEQ ID NO: 1142854 - DNA, 15 bp, Homo sapiens
agcccctaaagagac

SEQ ID NO: 1142855 - DNA, 15 bp, Homo sapiens
cagcccctaaagaga

SEQ ID NO: 1142856 - DNA, 15 bp, Homo sapiens
ccagcccctaaagag

SEQ ID NO: 1142857 - DNA, 15 bp, Homo sapiens
gccagcccctaaaga

SEQ ID NO: 1142858 - DNA, 15 bp, Homo sapiens
agccagcccctaaag

SEQ ID NO: 1142859 - DNA, 15 bp, Homo sapiens
gagccagcccctaaa

SEQ ID NO: 1142860 - DNA, 15 bp, Homo sapiens
ggagccagcccctaa

SEQ ID NO: 1142861 - DNA, 15 bp, Homo sapiens
tggagccagccccta

SEQ ID NO: 1142862 - DNA, 15 bp, Homo sapiens
ctggagccagcccct

SEQ ID NO: 1142863 - DNA, 15 bp, Homo sapiens
tctggagccagcccc

SEQ ID NO: 1142864 - DNA, 15 bp, Homo sapiens
atctggagccagccc

SEQ ID NO: 1142865 - DNA, 15 bp, Homo sapiens
gatctggagccagcc

SEQ ID NO: 1142866 - DNA, 15 bp, Homo sapiens
agatctggagccagc

SEQ ID NO: 1142867 - DNA, 15 bp, Homo sapiens
aagatctggagccag

SEQ ID NO: 1142868 - DNA, 15 bp, Homo sapiens
caagatctggagcca

SEQ ID NO: 1142869 - DNA, 15 bp, Homo sapiens
acaagatctggagcc

SEQ ID NO: 1142870 - DNA, 15 bp, Homo sapiens
cacaagatctggagc

SEQ ID NO: 1142871 - DNA, 15 bp, Homo sapiens
tcacaagatctggag

SEQ ID NO: 1142872 - DNA, 15 bp, Homo sapiens
ctcacaagatctgga

SEQ ID NO: 1142873 - DNA, 15 bp, Homo sapiens
cctcacaagatctgg

SEQ ID NO: 1142874 - DNA, 15 bp, Homo sapiens
tcctcacaagatctg

SEQ ID NO: 1142875 - DNA, 15 bp, Homo sapiens
gtcctcacaagatct

SEQ ID NO: 1142876 - DNA, 15 bp, Homo sapiens
agtcctcacaagatc

SEQ ID NO: 1142877 - DNA, 15 bp, Homo sapiens
aagtcctcacaagat

SEQ ID NO: 1142878 - DNA, 15 bp, Homo sapiens
gaagtcctcacaaga

SEQ ID NO: 1142879 - DNA, 15 bp, Homo sapiens
ggaagtcctcacaag

SEQ ID NO: 1142880 - DNA, 15 bp, Homo sapiens
aggaagtcctcacaa

SEQ ID NO: 1142881 - DNA, 15 bp, Homo sapiens
gaggaagtcctcaca

SEQ ID NO: 1142882 - DNA, 15 bp, Homo sapiens
agaggaagtcctcac

SEQ ID NO: 1142883 - DNA, 15 bp, Homo sapiens
aagaggaagtcctca

SEQ ID NO: 1142884 - DNA, 15 bp, Homo sapiens
gaagaggaagtcctc

SEQ ID NO: 1142885 - DNA, 15 bp, Homo sapiens
tgaagaggaagtcct

SEQ ID NO: 1142886 - DNA, 15 bp, Homo sapiens
atgaagaggaagtcc

SEQ ID NO: 1142887 - DNA, 15 bp, Homo sapiens
catgaagaggaagtc

SEQ ID NO: 1142888 - DNA, 15 bp, Homo sapiens
gcatgaagaggaagt

SEQ ID NO: 1142889 - DNA, 15 bp, Homo sapiens
ggcatgaagaggaag

SEQ ID NO: 1142890 - DNA, 15 bp, Homo sapiens
tggcatgaagaggaa

SEQ ID NO: 1142891 - DNA, 15 bp, Homo sapiens
gtggcatgaagagga

SEQ ID NO: 1142892 - DNA, 15 bp, Homo sapiens
agtggcatgaagagg

SEQ ID NO: 1142893 - DNA, 15 bp, Homo sapiens
aagtggcatgaagag

SEQ ID NO: 1142894 - DNA, 15 bp, Homo sapiens
aaagtggcatgaaga

SEQ ID NO: 1142895 - DNA, 15 bp, Homo sapiens
caaagtggcatgaag

SEQ ID NO: 1142896 - DNA, 15 bp, Homo sapiens
tcaaagtggcatgaa

SEQ ID NO: 1142897 - DNA, 15 bp, Homo sapiens
ctcaaagtggcatga

SEQ ID NO: 1142898 - DNA, 15 bp, Homo sapiens
cctcaaagtggcatg

SEQ ID NO: 1142899 - DNA, 15 bp, Homo sapiens
acctcaaagtggcat

SEQ ID NO: 1142900 - DNA, 15 bp, Homo sapiens
cacctcaaagtggca

SEQ ID NO: 1142901 - DNA, 15 bp, Homo sapiens
gcacctcaaagtggc

SEQ ID NO: 1142902 - DNA, 15 bp, Homo sapiens
ggcacctcaaagtgg

SEQ ID NO: 1142903 - DNA, 15 bp, Homo sapiens
aggcacctcaaagtg

SEQ ID NO: 1142904 - DNA, 15 bp, Homo sapiens
gaggcacctcaaagt

SEQ ID NO: 1142905 - DNA, 15 bp, Homo sapiens
tgaggcacctcaaag

SEQ ID NO: 1142906 - DNA, 15 bp, Homo sapiens
atgaggcacctcaaa

SEQ ID NO: 1142907 - DNA, 15 bp, Homo sapiens
tatgaggcacctcaa

SEQ ID NO: 1142908 - DNA, 15 bp, Homo sapiens
atatgaggcacctca

SEQ ID NO: 1142909 - DNA, 15 bp, Homo sapiens
gatatgaggcacctc

SEQ ID NO: 1142910 - DNA, 15 bp, Homo sapiens
agatatgaggcacct

SEQ ID NO: 1142911 - DNA, 15 bp, Homo sapiens
cagatatgaggcacc

SEQ ID NO: 1142912 - DNA, 15 bp, Homo sapiens
acagatatgaggcac

SEQ ID NO: 1142913 - DNA, 15 bp, Homo sapiens
gacagatatgaggca

SEQ ID NO: 1142914 - DNA, 15 bp, Homo sapiens
ggacagatatgaggc

SEQ ID NO: 1142915 - DNA, 15 bp, Homo sapiens
aggacagatatgagg

SEQ ID NO: 1142916 - DNA, 15 bp, Homo sapiens
aaggacagatatgag

SEQ ID NO: 1142917 - DNA, 15 bp, Homo sapiens
aaaggacagatatga

SEQ ID NO: 1142918 - DNA, 15 bp, Homo sapiens
caaaggacagatatg

SEQ ID NO: 1142919 - DNA, 15 bp, Homo sapiens
acaaaggacagatat

SEQ ID NO: 1142920 - DNA, 15 bp, Homo sapiens
aacaaaggacagata

SEQ ID NO: 1142921 - DNA, 15 bp, Homo sapiens
taacaaaggacagat

SEQ ID NO: 1142922 - DNA, 15 bp, Homo sapiens
gtaacaaaggacaga

SEQ ID NO: 1142923 - DNA, 15 bp, Homo sapiens
ggtaacaaaggacag

SEQ ID NO: 1142924 - DNA, 15 bp, Homo sapiens
aggtaacaaaggaca

SEQ ID NO: 1142925 - DNA, 15 bp, Homo sapiens
gaggtaacaaaggac

SEQ ID NO: 1142926 - DNA, 15 bp, Homo sapiens
tgaggtaacaaagga

SEQ ID NO: 1142927 - DNA, 15 bp, Homo sapiens
atgaggtaacaaagg

SEQ ID NO: 1142928 - DNA, 15 bp, Homo sapiens
tatgaggtaacaaag

SEQ ID NO: 1142929 - DNA, 15 bp, Homo sapiens
ttatgaggtaacaaa

SEQ ID NO: 1142930 - DNA, 15 bp, Homo sapiens
tttatgaggtaacaa

SEQ ID NO: 1142931 - DNA, 15 bp, Homo sapiens
ctttatgaggtaaca

SEQ ID NO: 1142932 - DNA, 15 bp, Homo sapiens
cctttatgaggtaac

SEQ ID NO: 1142933 - DNA, 15 bp, Homo sapiens
tcctttatgaggtaa

SEQ ID NO: 1142934 - DNA, 15 bp, Homo sapiens
atcctttatgaggta

SEQ ID NO: 1142935 - DNA, 15 bp, Homo sapiens
aatcctttatgaggt

SEQ ID NO: 1142936 - DNA, 15 bp, Homo sapiens
aaatcctttatgagg

SEQ ID NO: 1142937 - DNA, 15 bp, Homo sapiens
taaatcctttatgag

SEQ ID NO: 1142938 - DNA, 15 bp, Homo sapiens
gtaaatcctttatga

SEQ ID NO: 1142939 - DNA, 15 bp, Homo sapiens
agtaaatcctttatg

SEQ ID NO: 1142940 - DNA, 15 bp, Homo sapiens
cagtaaatcctttat

SEQ ID NO: 1142941 - DNA, 15 bp, Homo sapiens
ccagtaaatccttta

SEQ ID NO: 1142942 - DNA, 15 bp, Homo sapiens
gccagtaaatccttt

SEQ ID NO: 1142943 - DNA, 15 bp, Homo sapiens
agccagtaaatcctt

SEQ ID NO: 1142944 - DNA, 15 bp, Homo sapiens
aagccagtaaatcct

SEQ ID NO: 1142945 - DNA, 15 bp, Homo sapiens
aaagccagtaaatcc

SEQ ID NO: 1142946 - DNA, 15 bp, Homo sapiens
caaagccagtaaatc

SEQ ID NO: 1142947 - DNA, 15 bp, Homo sapiens
ccaaagccagtaaat

SEQ ID NO: 1142948 - DNA, 15 bp, Homo sapiens
accaaagccagtaaa

SEQ ID NO: 1142949 - DNA, 15 bp, Homo sapiens
aaccaaagccagtaa

SEQ ID NO: 1142950 - DNA, 15 bp, Homo sapiens
gaaccaaagccagta

SEQ ID NO: 1142951 - DNA, 15 bp, Homo sapiens
agaaccaaagccagt

SEQ ID NO: 1142952 - DNA, 15 bp, Homo sapiens
cagaaccaaagccag

SEQ ID NO: 1142953 - DNA, 15 bp, Homo sapiens
tcagaaccaaagcca

SEQ ID NO: 1142954 - DNA, 15 bp, Homo sapiens
ctcagaaccaaagcc

SEQ ID NO: 1142955 - DNA, 15 bp, Homo sapiens
actcagaaccaaagc

SEQ ID NO: 1142956 - DNA, 15 bp, Homo sapiens
gactcagaaccaaag

SEQ ID NO: 1142957 - DNA, 15 bp, Homo sapiens
tgactcagaaccaaa

SEQ ID NO: 1142958 - DNA, 15 bp, Homo sapiens
gtgactcagaaccaa

SEQ ID NO: 1142959 - DNA, 15 bp, Homo sapiens
agtgactcagaacca

SEQ ID NO: 1142960 - DNA, 15 bp, Homo sapiens
gagtgactcagaacc

SEQ ID NO: 1142961 - DNA, 15 bp, Homo sapiens
tgagtgactcagaac

SEQ ID NO: 1142962 - DNA, 15 bp, Homo sapiens
ctgagtgactcagaa

SEQ ID NO: 1142963 - DNA, 15 bp, Homo sapiens
actgagtgactcaga

SEQ ID NO: 1142964 - DNA, 15 bp, Homo sapiens
tactgagtgactcag

SEQ ID NO: 1142965 - DNA, 15 bp, Homo sapiens
ctactgagtgactca

SEQ ID NO: 1142966 - DNA, 15 bp, Homo sapiens
tctactgagtgactc

SEQ ID NO: 1142967 - DNA, 15 bp, Homo sapiens
atctactgagtgact

SEQ ID NO: 1142968 - DNA, 15 bp, Homo sapiens
tatctactgagtgac

SEQ ID NO: 1142969 - DNA, 15 bp, Homo sapiens
gtatctactgagtga

SEQ ID NO: 1142970 - DNA, 15 bp, Homo sapiens
ggtatctactgagtg

SEQ ID NO: 1142971 - DNA, 15 bp, Homo sapiens
aggtatctactgagt

SEQ ID NO: 1142972 - DNA, 15 bp, Homo sapiens
aaggtatctactgag

SEQ ID NO: 1142973 - DNA, 15 bp, Homo sapiens
aaaggtatctactga

SEQ ID NO: 1142974 - DNA, 15 bp, Homo sapiens
caaaggtatctactg

SEQ ID NO: 1142975 - DNA, 15 bp, Homo sapiens
ccaaaggtatctact

SEQ ID NO: 1142976 - DNA, 15 bp, Homo sapiens
accaaaggtatctac

SEQ ID NO: 1142977 - DNA, 15 bp, Homo sapiens
aaccaaaggtatcta

SEQ ID NO: 1142978 - DNA, 15 bp, Homo sapiens
taaccaaaggtatct

SEQ ID NO: 1142979 - DNA, 15 bp, Homo sapiens
ctaaccaaaggtatc

SEQ ID NO: 1142980 - DNA, 15 bp, Homo sapiens
tctaaccaaaggtat

SEQ ID NO: 1142981 - DNA, 15 bp, Homo sapiens
ttctaaccaaaggta

SEQ ID NO: 1142982 - DNA, 15 bp, Homo sapiens
tttctaaccaaaggt

SEQ ID NO: 1142983 - DNA, 15 bp, Homo sapiens
ctttctaaccaaagg

SEQ ID NO: 1142984 - DNA, 15 bp, Homo sapiens
cctttctaaccaaag

SEQ ID NO: 1142985 - DNA, 15 bp, Homo sapiens
tcctttctaaccaaa

SEQ ID NO: 1142986 - DNA, 15 bp, Homo sapiens
ctcctttctaaccaa

SEQ ID NO: 1142987 - DNA, 15 bp, Homo sapiens
tctcctttctaacca

SEQ ID NO: 1142988 - DNA, 15 bp, Homo sapiens
ttctcctttctaacc

SEQ ID NO: 1142989 - DNA, 15 bp, Homo sapiens
tttctcctttctaac

SEQ ID NO: 1142990 - DNA, 15 bp, Homo sapiens
atttctcctttctaa

SEQ ID NO: 1142991 - DNA, 15 bp, Homo sapiens
tatttctcctttcta

SEQ ID NO: 1142992 - DNA, 15 bp, Homo sapiens
ttatttctcctttct

SEQ ID NO: 1142993 - DNA, 15 bp, Homo sapiens
tttatttctcctttc

SEQ ID NO: 1142994 - DNA, 15 bp, Homo sapiens
ttttatttctccttt

SEQ ID NO: 1142995 - DNA, 15 bp, Homo sapiens
cttttatttctcctt

SEQ ID NO: 1142996 - DNA, 15 bp, Homo sapiens
acttttatttctcct

SEQ ID NO: 1142997 - DNA, 15 bp, Homo sapiens
aacttttatttctcc

SEQ ID NO: 1142998 - DNA, 15 bp, Homo sapiens
gaacttttatttctc

SEQ ID NO: 1142999 - DNA, 15 bp, Homo sapiens
tgaacttttatttct

SEQ ID NO: 1143000 - DNA, 15 bp, Homo sapiens
ttgaacttttatttc

SEQ ID NO: 1143001 - DNA, 15 bp, Homo sapiens
tttgaacttttattt

SEQ ID NO: 1143002 - DNA, 15 bp, Homo sapiens
ttttgaacttttatt

SEQ ID NO: 1143003 - DNA, 15 bp, Homo sapiens
tttttgaacttttat

SEQ ID NO: 1143004 - DNA, 15 bp, Homo sapiens
gtttttgaactttta

SEQ ID NO: 1143005 - DNA, 15 bp, Homo sapiens
tgtttttgaactttt

SEQ ID NO: 1143006 - DNA, 15 bp, Homo sapiens
ttgtttttgaacttt

SEQ ID NO: 1143007 - DNA, 15 bp, Homo sapiens
cttgtttttgaactt

SEQ ID NO: 1143008 - DNA, 15 bp, Homo sapiens
ccttgtttttgaact

SEQ ID NO: 1143009 - DNA, 15 bp, Homo sapiens
tccttgtttttgaac

SEQ ID NO: 1143010 - DNA, 15 bp, Homo sapiens
ttccttgtttttgaa

SEQ ID NO: 1143011 - DNA, 15 bp, Homo sapiens
attccttgtttttga

SEQ ID NO: 1143012 - DNA, 15 bp, Homo sapiens
tattccttgtttttg

SEQ ID NO: 1143013 - DNA, 15 bp, Homo sapiens
gtattccttgttttt

SEQ ID NO: 1143014 - DNA, 15 bp, Homo sapiens
agtattccttgtttt

SEQ ID NO: 1143015 - DNA, 15 bp, Homo sapiens
cagtattccttgttt

SEQ ID NO: 1143016 - DNA, 15 bp, Homo sapiens
ccagtattccttgtt

SEQ ID NO: 1143017 - DNA, 15 bp, Homo sapiens
accagtattccttgt

SEQ ID NO: 1143018 - DNA, 15 bp, Homo sapiens
aaccagtattccttg

SEQ ID NO: 1143019 - DNA, 15 bp, Homo sapiens
aaaccagtattcctt

SEQ ID NO: 1143020 - DNA, 15 bp, Homo sapiens
aaaaccagtattcct

SEQ ID NO: 1143021 - DNA, 15 bp, Homo sapiens
aaaaaccagtattcc

SEQ ID NO: 1143022 - DNA, 15 bp, Homo sapiens
aaaaaaccagtattc

SEQ ID NO: 1143023 - DNA, 15 bp, Homo sapiens
caaaaaaccagtatt

SEQ ID NO: 1143024 - DNA, 15 bp, Homo sapiens
acaaaaaaccagtat

SEQ ID NO: 1143025 - DNA, 15 bp, Homo sapiens
gacaaaaaaccagta

SEQ ID NO: 1143026 - DNA, 15 bp, Homo sapiens
ggacaaaaaaccagt

SEQ ID NO: 1143027 - DNA, 15 bp, Homo sapiens
gggacaaaaaaccag

SEQ ID NO: 1143028 - DNA, 15 bp, Homo sapiens
tgggacaaaaaacca

SEQ ID NO: 1143029 - DNA, 15 bp, Homo sapiens
ctgggacaaaaaacc

SEQ ID NO: 1143030 - DNA, 15 bp, Homo sapiens
gctgggacaaaaaac

SEQ ID NO: 1143031 - DNA, 15 bp, Homo sapiens
agctgggacaaaaaa

SEQ ID NO: 1143032 - DNA, 15 bp, Homo sapiens
cagctgggacaaaaa

SEQ ID NO: 1143033 - DNA, 15 bp, Homo sapiens
tcagctgggacaaaa

SEQ ID NO: 1143034 - DNA, 15 bp, Homo sapiens
ttcagctgggacaaa

SEQ ID NO: 1143035 - DNA, 15 bp, Homo sapiens
tttcagctgggacaa

SEQ ID NO: 1143036 - DNA, 15 bp, Homo sapiens
atttcagctgggaca

SEQ ID NO: 1143037 - DNA, 15 bp, Homo sapiens
gatttcagctgggac

SEQ ID NO: 1143038 - DNA, 15 bp, Homo sapiens
agatttcagctggga

SEQ ID NO: 1143039 - DNA, 15 bp, Homo sapiens
cagatttcagctggg

SEQ ID NO: 1143040 - DNA, 15 bp, Homo sapiens
tcagatttcagctgg

SEQ ID NO: 1143041 - DNA, 15 bp, Homo sapiens
atcagatttcagctg

SEQ ID NO: 1143042 - DNA, 15 bp, Homo sapiens
tatcagatttcagct

SEQ ID NO: 1143043 - DNA, 15 bp, Homo sapiens
ttatcagatttcagc

SEQ ID NO: 1143044 - DNA, 15 bp, Homo sapiens
attatcagatttcag

SEQ ID NO: 1143045 - DNA, 15 bp, Homo sapiens
tattatcagatttca

SEQ ID NO: 1143046 - DNA, 15 bp, Homo sapiens
ttattatcagatttc

SEQ ID NO: 1143047 - DNA, 15 bp, Homo sapiens
attattatcagattt

SEQ ID NO: 1143048 - DNA, 15 bp, Homo sapiens
tattattatcagatt

SEQ ID NO: 1143049 - DNA, 15 bp, Homo sapiens
ttattattatcagat

SEQ ID NO: 1143050 - DNA, 15 bp, Homo sapiens
tttattattatcaga

SEQ ID NO: 1143051 - DNA, 15 bp, Homo sapiens
atttattattatcag

SEQ ID NO: 1143052 - DNA, 15 bp, Homo sapiens
aatttattattatca

SEQ ID NO: 1143053 - DNA, 15 bp, Homo sapiens
gaatttattattatc

SEQ ID NO: 1143054 - DNA, 15 bp, Homo sapiens
ggaatttattattat

SEQ ID NO: 1143055 - DNA, 15 bp, Homo sapiens
tggaatttattatta

SEQ ID NO: 1143056 - DNA, 15 bp, Homo sapiens
ttggaatttattatt

SEQ ID NO: 1143057 - DNA, 15 bp, Homo sapiens
attggaatttattat

SEQ ID NO: 1143058 - DNA, 15 bp, Homo sapiens
aattggaatttatta

SEQ ID NO: 1143059 - DNA, 15 bp, Homo sapiens
aaattggaatttatt

SEQ ID NO: 1143060 - DNA, 15 bp, Homo sapiens
aaaattggaatttat

SEQ ID NO: 1143061 - DNA, 15 bp, Homo sapiens
aaaaattggaattta

SEQ ID NO: 1143062 - DNA, 15 bp, Homo sapiens
taaaaattggaattt

SEQ ID NO: 1143063 - DNA, 15 bp, Homo sapiens
ttaaaaattggaatt

SEQ ID NO: 1143064 - DNA, 15 bp, Homo sapiens
tttaaaaattggaat

SEQ ID NO: 1143065 - DNA, 15 bp, Homo sapiens
ttttaaaaattggaa

SEQ ID NO: 1143066 - DNA, 15 bp, Homo sapiens
tttttaaaaattgga

SEQ ID NO: 1143067 - DNA, 15 bp, Homo sapiens
ttttttaaaaattgg

SEQ ID NO: 1143068 - DNA, 15 bp, Homo sapiens
tttttttaaaaattg

SEQ ID NO: 1143069 - DNA, 15 bp, Homo sapiens
ctttttttaaaaatt

SEQ ID NO: 1143070 - DNA, 15 bp, Homo sapiens
tctttttttaaaaat

SEQ ID NO: 1143071 - DNA, 15 bp, Homo sapiens
ttctttttttaaaaa

SEQ ID NO: 1143072 - DNA, 15 bp, Homo sapiens
gttctttttttaaaa

SEQ ID NO: 1143073 - DNA, 15 bp, Homo sapiens
agttctttttttaaa

SEQ ID NO: 1143074 - DNA, 15 bp, Homo sapiens
gagttctttttttaa

SEQ ID NO: 1143075 - DNA, 15 bp, Homo sapiens
agagttcttttttta

SEQ ID NO: 1143076 - DNA, 15 bp, Homo sapiens
tagagttcttttttt

SEQ ID NO: 1143077 - DNA, 15 bp, Homo sapiens
ttagagttctttttt

SEQ ID NO: 1143078 - DNA, 15 bp, Homo sapiens
cttagagttcttttt

SEQ ID NO: 1143079 - DNA, 15 bp, Homo sapiens
ccttagagttctttt

SEQ ID NO: 1143080 - DNA, 15 bp, Homo sapiens
accttagagttcttt

SEQ ID NO: 1143081 - DNA, 15 bp, Homo sapiens
gaccttagagttctt

SEQ ID NO: 1143082 - DNA, 15 bp, Homo sapiens
tgaccttagagttct

SEQ ID NO: 1143083 - DNA, 15 bp, Homo sapiens
ctgaccttagagttc

SEQ ID NO: 1143084 - DNA, 15 bp, Homo sapiens
tctgaccttagagtt

SEQ ID NO: 1143085 - DNA, 15 bp, Homo sapiens
ttctgaccttagagt

SEQ ID NO: 1143086 - DNA, 15 bp, Homo sapiens
tttctgaccttagag

SEQ ID NO: 1143087 - DNA, 15 bp, Homo sapiens
ttttctgaccttaga

SEQ ID NO: 1143088 - DNA, 15 bp, Homo sapiens
gttttctgaccttag

SEQ ID NO: 1143089 - DNA, 15 bp, Homo sapiens
tgttttctgacctta

SEQ ID NO: 1143090 - DNA, 15 bp, Homo sapiens
ctgttttctgacctt

SEQ ID NO: 1143091 - DNA, 15 bp, Homo sapiens
gctgttttctgacct

SEQ ID NO: 1143092 - DNA, 15 bp, Homo sapiens
agctgttttctgacc

SEQ ID NO: 1143093 - DNA, 15 bp, Homo sapiens
aagctgttttctgac

SEQ ID NO: 1143094 - DNA, 15 bp, Homo sapiens
taagctgttttctga

SEQ ID NO: 1143095 - DNA, 15 bp, Homo sapiens
ttaagctgttttctg

SEQ ID NO: 1143096 - DNA, 15 bp, Homo sapiens
gttaagctgttttct

SEQ ID NO: 1143097 - DNA, 15 bp, Homo sapiens
agttaagctgttttc

SEQ ID NO: 1143098 - DNA, 15 bp, Homo sapiens
tagttaagctgtttt

SEQ ID NO: 1143099 - DNA, 15 bp, Homo sapiens
ttagttaagctgttt

SEQ ID NO: 1143100 - DNA, 15 bp, Homo sapiens
tttagttaagctgtt

SEQ ID NO: 1143101 - DNA, 15 bp, Homo sapiens
ttttagttaagctgt

SEQ ID NO: 1143102 - DNA, 15 bp, Homo sapiens
cttttagttaagctg

SEQ ID NO: 1143103 - DNA, 15 bp, Homo sapiens
gcttttagttaagct

SEQ ID NO: 1143104 - DNA, 15 bp, Homo sapiens
agcttttagttaagc

SEQ ID NO: 1143105 - DNA, 15 bp, Homo sapiens
cagcttttagttaag

SEQ ID NO: 1143106 - DNA, 15 bp, Homo sapiens
tcagcttttagttaa

SEQ ID NO: 1143107 - DNA, 15 bp, Homo sapiens
atcagcttttagtta

SEQ ID NO: 1143108 - DNA, 15 bp, Homo sapiens
tatcagcttttagtt

SEQ ID NO: 1143109 - DNA, 15 bp, Homo sapiens
atatcagcttttagt

SEQ ID NO: 1143110 - DNA, 15 bp, Homo sapiens
aatatcagcttttag

SEQ ID NO: 1143111 - DNA, 15 bp, Homo sapiens
gaatatcagctttta

SEQ ID NO: 1143112 - DNA, 15 bp, Homo sapiens
tgaatatcagctttt

SEQ ID NO: 1143113 - DNA, 15 bp, Homo sapiens
ctgaatatcagcttt

SEQ ID NO: 1143114 - DNA, 15 bp, Homo sapiens
cctgaatatcagctt

SEQ ID NO: 1143115 - DNA, 15 bp, Homo sapiens
gcctgaatatcagct

SEQ ID NO: 1143116 - DNA, 15 bp, Homo sapiens
agcctgaatatcagc

SEQ ID NO: 1143117 - DNA, 15 bp, Homo sapiens
tagcctgaatatcag

SEQ ID NO: 1143118 - DNA, 15 bp, Homo sapiens
atagcctgaatatca

SEQ ID NO: 1143119 - DNA, 15 bp, Homo sapiens
tatagcctgaatatc

SEQ ID NO: 1143120 - DNA, 15 bp, Homo sapiens
ttatagcctgaatat

SEQ ID NO: 1143121 - DNA, 15 bp, Homo sapiens
attatagcctgaata

SEQ ID NO: 1143122 - DNA, 15 bp, Homo sapiens
aattatagcctgaat

SEQ ID NO: 1143123 - DNA, 15 bp, Homo sapiens
aaattatagcctgaa

SEQ ID NO: 1143124 - DNA, 15 bp, Homo sapiens
aaaattatagcctga

SEQ ID NO: 1143125 - DNA, 15 bp, Homo sapiens
aaaaattatagcctg

SEQ ID NO: 1143126 - DNA, 15 bp, Homo sapiens
taaaaattatagcct

SEQ ID NO: 1143127 - DNA, 15 bp, Homo sapiens
gtaaaaattatagcc

SEQ ID NO: 1143128 - DNA, 15 bp, Homo sapiens
agtaaaaattatagc

SEQ ID NO: 1143129 - DNA, 15 bp, Homo sapiens
aagtaaaaattatag

SEQ ID NO: 1143130 - DNA, 15 bp, Homo sapiens
aaagtaaaaattata

SEQ ID NO: 1143131 - DNA, 15 bp, Homo sapiens
taaagtaaaaattat

SEQ ID NO: 1143132 - DNA, 15 bp, Homo sapiens
ataaagtaaaaatta

SEQ ID NO: 1143133 - DNA, 15 bp, Homo sapiens
aataaagtaaaaatt

SEQ ID NO: 1143134 - DNA, 15 bp, Homo sapiens
aaataaagtaaaaat

SEQ ID NO: 1143135 - DNA, 15 bp, Homo sapiens
aaaataaagtaaaaa

SEQ ID NO: 1143136 - DNA, 15 bp, Homo sapiens
aaaaataaagtaaaa

SEQ ID NO: 1143137 - DNA, 15 bp, Homo sapiens
aaaaaataaagtaaa

SEQ ID NO: 1143138 - DNA, 15 bp, Homo sapiens
aaaaaaataaagtaa

SEQ ID NO: 1143139 - DNA, 15 bp, Homo sapiens
taaaaaaataaagta

SEQ ID NO: 1143140 - DNA, 15 bp, Homo sapiens
ttaaaaaaataaagt

SEQ ID NO: 1143141 - DNA, 15 bp, Homo sapiens
attaaaaaaataaag

SEQ ID NO: 1143142 - DNA, 15 bp, Homo sapiens
aattaaaaaaataaa

SEQ ID NO: 1143143 - DNA, 15 bp, Homo sapiens
aaattaaaaaaataa

SEQ ID NO: 1143144 - DNA, 15 bp, Homo sapiens
ataaattaaaaaaat

SEQ ID NO: 1143145 - DNA, 15 bp, Homo sapiens
aataaattaaaaaaa

SEQ ID NO: 1143146 - DNA, 15 bp, Homo sapiens
taataaattaaaaaa

SEQ ID NO: 1143147 - DNA, 15 bp, Homo sapiens
ataataaattaaaaa

SEQ ID NO: 1143148 - DNA, 15 bp, Homo sapiens
aataataaattaaaa

SEQ ID NO: 1143149 - DNA, 15 bp, Homo sapiens
taataataaattaaa

SEQ ID NO: 1143150 - DNA, 15 bp, Homo sapiens
ataataataaattaa

SEQ ID NO: 1143151 - DNA, 15 bp, Homo sapiens
aataataataaatta

SEQ ID NO: 1143152 - DNA, 15 bp, Homo sapiens
taataataataaatt

SEQ ID NO: 1143153 - DNA, 15 bp, Homo sapiens
ataataataataaat

SEQ ID NO: 1143154 - DNA, 15 bp, Homo sapiens
tctcaaaataataat

SEQ ID NO: 1143155 - DNA, 15 bp, Homo sapiens
gtctcaaaataataa

SEQ ID NO: 1143156 - DNA, 15 bp, Homo sapiens
tgtctcaaaataata

SEQ ID NO: 1143157 - DNA, 15 bp, Homo sapiens
ttgtctcaaaataat

SEQ ID NO: 1143158 - DNA, 15 bp, Homo sapiens
tttgtctcaaaataa

SEQ ID NO: 1143159 - DNA, 15 bp, Homo sapiens
ctttgtctcaaaata

SEQ ID NO: 1143160 - DNA, 15 bp, Homo sapiens
actttgtctcaaaat

SEQ ID NO: 1143161 - DNA, 15 bp, Homo sapiens
gactttgtctcaaaa

SEQ ID NO: 1143162 - DNA, 15 bp, Homo sapiens
agactttgtctcaaa

SEQ ID NO: 1143163 - DNA, 15 bp, Homo sapiens
gagactttgtctcaa

SEQ ID NO: 1143164 - DNA, 15 bp, Homo sapiens
tgagactttgtctca

SEQ ID NO: 1143165 - DNA, 15 bp, Homo sapiens
gtgagactttgtctc

SEQ ID NO: 1143166 - DNA, 15 bp, Homo sapiens
agtgagactttgtct

SEQ ID NO: 1143167 - DNA, 15 bp, Homo sapiens
gagtgagactttgtc

SEQ ID NO: 1143168 - DNA, 15 bp, Homo sapiens
agagtgagactttgt

SEQ ID NO: 1143169 - DNA, 15 bp, Homo sapiens
cagagtgagactttg

SEQ ID NO: 1143170 - DNA, 15 bp, Homo sapiens
acagagtgagacttt

SEQ ID NO: 1143171 - DNA, 15 bp, Homo sapiens
tacagagtgagactt

SEQ ID NO: 1143172 - DNA, 15 bp, Homo sapiens
atacagagtgagact

SEQ ID NO: 1143173 - DNA, 15 bp, Homo sapiens
gatacagagtgagac

SEQ ID NO: 1143174 - DNA, 15 bp, Homo sapiens
ggatacagagtgaga

SEQ ID NO: 1143175 - DNA, 15 bp, Homo sapiens
gggatacagagtgag

SEQ ID NO: 1143176 - DNA, 15 bp, Homo sapiens
tgggatacagagtga

SEQ ID NO: 1143177 - DNA, 15 bp, Homo sapiens
ctgggatacagagtg

SEQ ID NO: 1143178 - DNA, 15 bp, Homo sapiens
cctgggatacagagt

SEQ ID NO: 1143179 - DNA, 15 bp, Homo sapiens
gcctgggatacagag

SEQ ID NO: 1143180 - DNA, 15 bp, Homo sapiens
agcctgggatacaga

SEQ ID NO: 1143181 - DNA, 15 bp, Homo sapiens
cagcctgggatacag

SEQ ID NO: 1143182 - DNA, 15 bp, Homo sapiens
ccagcctgggataca

SEQ ID NO: 1143183 - DNA, 15 bp, Homo sapiens
tccagcctgggatac

SEQ ID NO: 1143184 - DNA, 15 bp, Homo sapiens
ctccagcctgggata

SEQ ID NO: 1143185 - DNA, 15 bp, Homo sapiens
actccagcctgggat

SEQ ID NO: 1143186 - DNA, 15 bp, Homo sapiens
gctactgcactccag

SEQ ID NO: 1143187 - DNA, 15 bp, Homo sapiens
tgctactgcactcca

SEQ ID NO: 1143188 - DNA, 15 bp, Homo sapiens
atgctactgcactcc

SEQ ID NO: 1143189 - DNA, 15 bp, Homo sapiens
catgctactgcactc

SEQ ID NO: 1143190 - DNA, 15 bp, Homo sapiens
tcatgctactgcact

SEQ ID NO: 1143191 - DNA, 15 bp, Homo sapiens
atcatgctactgcac

SEQ ID NO: 1143192 - DNA, 15 bp, Homo sapiens
gatcatgctactgca

SEQ ID NO: 1143193 - DNA, 15 bp, Homo sapiens
agatcatgctactgc

SEQ ID NO: 1143194 - DNA, 15 bp, Homo sapiens
gagatcatgctactg

SEQ ID NO: 1143195 - DNA, 15 bp, Homo sapiens
cgagatcatgctact

SEQ ID NO: 1143196 - DNA, 15 bp, Homo sapiens
ccgagatcatgctac

SEQ ID NO: 1143197 - DNA, 15 bp, Homo sapiens
gccgagatcatgcta

SEQ ID NO: 1143198 - DNA, 15 bp, Homo sapiens
agccgagatcatgct

SEQ ID NO: 1143199 - DNA, 15 bp, Homo sapiens
tcagctactcgggaa

SEQ ID NO: 1143200 - DNA, 15 bp, Homo sapiens
ggtgcctgtaatctc

SEQ ID NO: 1143201 - DNA, 15 bp, Homo sapiens
gggtgcctgtaatct

SEQ ID NO: 1143202 - DNA, 15 bp, Homo sapiens
tgggtgcctgtaatc

SEQ ID NO: 1143203 - DNA, 15 bp, Homo sapiens
gtgggtgcctgtaat

SEQ ID NO: 1143204 - DNA, 15 bp, Homo sapiens
ggtgggtgcctgtaa

SEQ ID NO: 1143205 - DNA, 15 bp, Homo sapiens
tggtgggtgcctgta

SEQ ID NO: 1143206 - DNA, 15 bp, Homo sapiens
gtggtgggtgcctgt

SEQ ID NO: 1143207 - DNA, 15 bp, Homo sapiens
ggtggtgggtgcctg

SEQ ID NO: 1143208 - DNA, 15 bp, Homo sapiens
tggtggtgggtgcct

SEQ ID NO: 1143209 - DNA, 15 bp, Homo sapiens
atggtggtgggtgcc

SEQ ID NO: 1143210 - DNA, 15 bp, Homo sapiens
catggtggtgggtgc

SEQ ID NO: 1143211 - DNA, 15 bp, Homo sapiens
acatggtggtgggtg

SEQ ID NO: 1143212 - DNA, 15 bp, Homo sapiens
gacatggtggtgggt

SEQ ID NO: 1143213 - DNA, 15 bp, Homo sapiens
tgacatggtggtggg

SEQ ID NO: 1143214 - DNA, 15 bp, Homo sapiens
ttgacatggtggtgg

SEQ ID NO: 1143215 - DNA, 15 bp, Homo sapiens
cttgacatggtggtg

SEQ ID NO: 1143216 - DNA, 15 bp, Homo sapiens
gcttgacatggtggt

SEQ ID NO: 1143217 - DNA, 15 bp, Homo sapiens
agcttgacatggtgg

SEQ ID NO: 1143218 - DNA, 15 bp, Homo sapiens
tagcttgacatggtg

SEQ ID NO: 1143219 - DNA, 15 bp, Homo sapiens
ttagcttgacatggt

SEQ ID NO: 1143220 - DNA, 15 bp, Homo sapiens
attagcttgacatgg

SEQ ID NO: 1143221 - DNA, 15 bp, Homo sapiens
aattagcttgacatg

SEQ ID NO: 1143222 - DNA, 15 bp, Homo sapiens
aaattagcttgacat

SEQ ID NO: 1143223 - DNA, 15 bp, Homo sapiens
aaaattagcttgaca

SEQ ID NO: 1143224 - DNA, 15 bp, Homo sapiens
aaaaattagcttgac

SEQ ID NO: 1143225 - DNA, 15 bp, Homo sapiens
caaaaattagcttga

SEQ ID NO: 1143226 - DNA, 15 bp, Homo sapiens
acaaaaattagcttg

SEQ ID NO: 1143227 - DNA, 15 bp, Homo sapiens
tacaaaaattagctt

SEQ ID NO: 1143228 - DNA, 15 bp, Homo sapiens
ctctactaaaactac

SEQ ID NO: 1143229 - DNA, 15 bp, Homo sapiens
tctctactaaaacta

SEQ ID NO: 1143230 - DNA, 15 bp, Homo sapiens
atctctactaaaact

SEQ ID NO: 1143231 - DNA, 15 bp, Homo sapiens
tatctctactaaaac

SEQ ID NO: 1143232 - DNA, 15 bp, Homo sapiens
aaaaccttatctcta

SEQ ID NO: 1143233 - DNA, 15 bp, Homo sapiens
caaaaccttatctct

SEQ ID NO: 1143234 - DNA, 15 bp, Homo sapiens
gcaaaaccttatctc

SEQ ID NO: 1143235 - DNA, 15 bp, Homo sapiens
ggcaaaaccttatct

SEQ ID NO: 1143236 - DNA, 15 bp, Homo sapiens
tggcaaaaccttatc

SEQ ID NO: 1143237 - DNA, 15 bp, Homo sapiens
atggcaaaaccttat

SEQ ID NO: 1143238 - DNA, 15 bp, Homo sapiens
catggcaaaacctta

SEQ ID NO: 1143239 - DNA, 15 bp, Homo sapiens
acatggcaaaacctt

SEQ ID NO: 1143240 - DNA, 15 bp, Homo sapiens
ggcctggccaacatg

SEQ ID NO: 1143241 - DNA, 15 bp, Homo sapiens
cggcctggccaacat

SEQ ID NO: 1143242 - DNA, 15 bp, Homo sapiens
ccggcctggccaaca

SEQ ID NO: 1143243 - DNA, 15 bp, Homo sapiens
accggcctggccaac

SEQ ID NO: 1143244 - DNA, 15 bp, Homo sapiens
gaccggcctggccaa

SEQ ID NO: 1143245 - DNA, 15 bp, Homo sapiens
agaccggcctggcca

SEQ ID NO: 1143246 - DNA, 15 bp, Homo sapiens
gagaccggcctggcc

SEQ ID NO: 1143247 - DNA, 15 bp, Homo sapiens
tgagaccggcctggc

SEQ ID NO: 1143248 - DNA, 15 bp, Homo sapiens
ttgagaccggcctgg

SEQ ID NO: 1143249 - DNA, 15 bp, Homo sapiens
tttgagaccggcctg

SEQ ID NO: 1143250 - DNA, 15 bp, Homo sapiens
gtttgagaccggcct

SEQ ID NO: 1143251 - DNA, 15 bp, Homo sapiens
aggagtttgagaccg

SEQ ID NO: 1143252 - DNA, 15 bp, Homo sapiens
tgggtcaggagtttg

SEQ ID NO: 1143253 - DNA, 15 bp, Homo sapiens
ctgggtcaggagttt

SEQ ID NO: 1143254 - DNA, 15 bp, Homo sapiens
cctgggtcaggagtt

SEQ ID NO: 1143255 - DNA, 15 bp, Homo sapiens
acctgggtcaggagt

SEQ ID NO: 1143256 - DNA, 15 bp, Homo sapiens
cacctgggtcaggag

SEQ ID NO: 1143257 - DNA, 15 bp, Homo sapiens
tcacctgggtcagga

SEQ ID NO: 1143258 - DNA, 15 bp, Homo sapiens
atcacctgggtcagg

SEQ ID NO: 1143259 - DNA, 15 bp, Homo sapiens
gatcacctgggtcag

SEQ ID NO: 1143260 - DNA, 15 bp, Homo sapiens
ggatcacctgggtca

SEQ ID NO: 1143261 - DNA, 15 bp, Homo sapiens
tggatcacctgggtc

SEQ ID NO: 1143262 - DNA, 15 bp, Homo sapiens
gtggatcacctgggt

SEQ ID NO: 1143263 - DNA, 15 bp, Homo sapiens
ggtggatcacctggg

SEQ ID NO: 1143264 - DNA, 15 bp, Homo sapiens
gggtggatcacctgg

SEQ ID NO: 1143265 - DNA, 15 bp, Homo sapiens
aaggctgaggtgggt

SEQ ID NO: 1143266 - DNA, 15 bp, Homo sapiens
ggaaggctgaggtgg

SEQ ID NO: 1143267 - DNA, 15 bp, Homo sapiens
tggaaggctgaggtg

SEQ ID NO: 1143268 - DNA, 15 bp, Homo sapiens
ttggaaggctgaggt

SEQ ID NO: 1143269 - DNA, 15 bp, Homo sapiens
gggcaaggtggctca

SEQ ID NO: 1143270 - DNA, 15 bp, Homo sapiens
cgggcaaggtggctc

SEQ ID NO: 1143271 - DNA, 15 bp, Homo sapiens
ccgggcaaggtggct

SEQ ID NO: 1143272 - DNA, 15 bp, Homo sapiens
gccgggcaaggtggc

SEQ ID NO: 1143273 - DNA, 15 bp, Homo sapiens
ggccgggcaaggtgg

SEQ ID NO: 1143274 - DNA, 15 bp, Homo sapiens
cggccgggcaaggtg

SEQ ID NO: 1143275 - DNA, 15 bp, Homo sapiens
acggccgggcaaggt

SEQ ID NO: 1143276 - DNA, 15 bp, Homo sapiens
tacggccgggcaagg

SEQ ID NO: 1143277 - DNA, 15 bp, Homo sapiens
gtacggccgggcaag

SEQ ID NO: 1143278 - DNA, 15 bp, Homo sapiens
agtacggccgggcaa

SEQ ID NO: 1143279 - DNA, 15 bp, Homo sapiens
aagtacggccgggca

SEQ ID NO: 1143280 - DNA, 15 bp, Homo sapiens
aaagtacggccgggc

SEQ ID NO: 1143281 - DNA, 15 bp, Homo sapiens
caaagtacggccggg

SEQ ID NO: 1143282 - DNA, 15 bp, Homo sapiens
acaaagtacggccgg

SEQ ID NO: 1143283 - DNA, 15 bp, Homo sapiens
aacaaagtacggccg

SEQ ID NO: 1143284 - DNA, 15 bp, Homo sapiens
aaacaaagtacggcc

SEQ ID NO: 1143285 - DNA, 15 bp, Homo sapiens
aaaacaaagtacggc

SEQ ID NO: 1143286 - DNA, 15 bp, Homo sapiens
taaaacaaagtacgg

SEQ ID NO: 1143287 - DNA, 15 bp, Homo sapiens
ataaaacaaagtacg

SEQ ID NO: 1143288 - DNA, 15 bp, Homo sapiens
aataaaacaaagtac

SEQ ID NO: 1143289 - DNA, 15 bp, Homo sapiens
aaataaaacaaagta

SEQ ID NO: 1143290 - DNA, 15 bp, Homo sapiens
aaaataaaacaaagt

SEQ ID NO: 1143291 - DNA, 15 bp, Homo sapiens
aaaaataaaacaaag

SEQ ID NO: 1143292 - DNA, 15 bp, Homo sapiens
gaaaaataaaacaaa

SEQ ID NO: 1143293 - DNA, 15 bp, Homo sapiens
tgaaaaataaaacaa

SEQ ID NO: 1143294 - DNA, 15 bp, Homo sapiens
gtgaaaaataaaaca

SEQ ID NO: 1143295 - DNA, 15 bp, Homo sapiens
tgtgaaaaataaaac

SEQ ID NO: 1143296 - DNA, 15 bp, Homo sapiens
ttgtgaaaaataaaa

SEQ ID NO: 1143297 - DNA, 15 bp, Homo sapiens
tttgtgaaaaataaa

SEQ ID NO: 1143298 - DNA, 15 bp, Homo sapiens
ctttgtgaaaaataa

SEQ ID NO: 1143299 - DNA, 15 bp, Homo sapiens
tctttgtgaaaaata

SEQ ID NO: 1143300 - DNA, 15 bp, Homo sapiens
gtctttgtgaaaaat

SEQ ID NO: 1143301 - DNA, 15 bp, Homo sapiens
agtctttgtgaaaaa

SEQ ID NO: 1143302 - DNA, 15 bp, Homo sapiens
aagtctttgtgaaaa

SEQ ID NO: 1143303 - DNA, 15 bp, Homo sapiens
aaagtctttgtgaaa

SEQ ID NO: 1143304 - DNA, 15 bp, Homo sapiens
aaaagtctttgtgaa

SEQ ID NO: 1143305 - DNA, 15 bp, Homo sapiens
gaaaagtctttgtga

SEQ ID NO: 1143306 - DNA, 15 bp, Homo sapiens
ggaaaagtctttgtg

SEQ ID NO: 1143307 - DNA, 15 bp, Homo sapiens
gggaaaagtctttgt

SEQ ID NO: 1143308 - DNA, 15 bp, Homo sapiens
agggaaaagtctttg

SEQ ID NO: 1143309 - DNA, 15 bp, Homo sapiens
aagggaaaagtcttt

SEQ ID NO: 1143310 - DNA, 15 bp, Homo sapiens
aaagggaaaagtctt

SEQ ID NO: 1143311 - DNA, 15 bp, Homo sapiens
aaaagggaaaagtct

SEQ ID NO: 1143312 - DNA, 15 bp, Homo sapiens
caaaagggaaaagtc

SEQ ID NO: 1143313 - DNA, 15 bp, Homo sapiens
ccaaaagggaaaagt

SEQ ID NO: 1143314 - DNA, 15 bp, Homo sapiens
tccaaaagggaaaag

SEQ ID NO: 1143315 - DNA, 15 bp, Homo sapiens
atccaaaagggaaaa

SEQ ID NO: 1143316 - DNA, 15 bp, Homo sapiens
gatccaaaagggaaa

SEQ ID NO: 1143317 - DNA, 15 bp, Homo sapiens
agatccaaaagggaa

SEQ ID NO: 1143318 - DNA, 15 bp, Homo sapiens
aagatccaaaaggga

SEQ ID NO: 1143319 - DNA, 15 bp, Homo sapiens
gaagatccaaaaggg

SEQ ID NO: 1143320 - DNA, 15 bp, Homo sapiens
agaagatccaaaagg

SEQ ID NO: 1143321 - DNA, 15 bp, Homo sapiens
aagaagatccaaaag

SEQ ID NO: 1143322 - DNA, 15 bp, Homo sapiens
aaagaagatccaaaa

SEQ ID NO: 1143323 - DNA, 15 bp, Homo sapiens
gaaagaagatccaaa

SEQ ID NO: 1143324 - DNA, 15 bp, Homo sapiens
agaaagaagatccaa

SEQ ID NO: 1143325 - DNA, 15 bp, Homo sapiens
tagaaagaagatcca

SEQ ID NO: 1143326 - DNA, 15 bp, Homo sapiens
gtagaaagaagatcc

SEQ ID NO: 1143327 - DNA, 15 bp, Homo sapiens
ggtagaaagaagatc

SEQ ID NO: 1143328 - DNA, 15 bp, Homo sapiens
gggtagaaagaagat

SEQ ID NO: 1143329 - DNA, 15 bp, Homo sapiens
agggtagaaagaaga

SEQ ID NO: 1143330 - DNA, 15 bp, Homo sapiens
cagggtagaaagaag

SEQ ID NO: 1143331 - DNA, 15 bp, Homo sapiens
acagggtagaaagaa

SEQ ID NO: 1143332 - DNA, 15 bp, Homo sapiens
cacagggtagaaaga

SEQ ID NO: 1143333 - DNA, 15 bp, Homo sapiens
acacagggtagaaag

SEQ ID NO: 1143334 - DNA, 15 bp, Homo sapiens
aacacagggtagaaa

SEQ ID NO: 1143335 - DNA, 15 bp, Homo sapiens
caacacagggtagaa

SEQ ID NO: 1143336 - DNA, 15 bp, Homo sapiens
ccaacacagggtaga

SEQ ID NO: 1143337 - DNA, 15 bp, Homo sapiens
accaacacagggtag

SEQ ID NO: 1143338 - DNA, 15 bp, Homo sapiens
aaccaacacagggta

SEQ ID NO: 1143339 - DNA, 15 bp, Homo sapiens
aaaccaacacagggt

SEQ ID NO: 1143340 - DNA, 15 bp, Homo sapiens
aaaaccaacacaggg

SEQ ID NO: 1143341 - DNA, 15 bp, Homo sapiens
aaaaaccaacacagg

SEQ ID NO: 1143342 - DNA, 15 bp, Homo sapiens
caaaaaccaacacag

SEQ ID NO: 1143343 - DNA, 15 bp, Homo sapiens
acaaaaaccaacaca

SEQ ID NO: 1143344 - DNA, 15 bp, Homo sapiens
aacaaaaaccaacac

SEQ ID NO: 1143345 - DNA, 15 bp, Homo sapiens
aaacaaaaaccaaca

SEQ ID NO: 1143346 - DNA, 15 bp, Homo sapiens
aaaacaaaaaccaac

SEQ ID NO: 1143347 - DNA, 15 bp, Homo sapiens
caaaacaaaaaccaa

SEQ ID NO: 1143348 - DNA, 15 bp, Homo sapiens
acaaaacaaaaacca

SEQ ID NO: 1143349 - DNA, 15 bp, Homo sapiens
aacaaaacaaaaacc

SEQ ID NO: 1143350 - DNA, 15 bp, Homo sapiens
ccaaaacaaaacaaa

SEQ ID NO: 1143351 - DNA, 15 bp, Homo sapiens
cccaaaacaaaacaa

SEQ ID NO: 1143352 - DNA, 15 bp, Homo sapiens
gcccaaaacaaaaca

SEQ ID NO: 1143353 - DNA, 15 bp, Homo sapiens
agcccaaaacaaaac

SEQ ID NO: 1143354 - DNA, 15 bp, Homo sapiens
aagcccaaaacaaaa

SEQ ID NO: 1143355 - DNA, 15 bp, Homo sapiens
aaagcccaaaacaaa

SEQ ID NO: 1143356 - DNA, 15 bp, Homo sapiens
aaaagcccaaaacaa

SEQ ID NO: 1143357 - DNA, 15 bp, Homo sapiens
aaaaagcccaaaaca

SEQ ID NO: 1143358 - DNA, 15 bp, Homo sapiens
aaaaaagcccaaaac

SEQ ID NO: 1143359 - DNA, 15 bp, Homo sapiens
caaaaaagcccaaaa

SEQ ID NO: 1143360 - DNA, 15 bp, Homo sapiens
acaaaaaagcccaaa

SEQ ID NO: 1143361 - DNA, 15 bp, Homo sapiens
aacaaaaaagcccaa

SEQ ID NO: 1143362 - DNA, 15 bp, Homo sapiens
aaacaaaaaagccca

SEQ ID NO: 1143363 - DNA, 15 bp, Homo sapiens
aaaacaaaaaagccc

SEQ ID NO: 1143364 - DNA, 15 bp, Homo sapiens
aaaaacaaaaaagcc

SEQ ID NO: 1143365 - DNA, 15 bp, Homo sapiens
gaaaaacaaaaaagc

SEQ ID NO: 1143366 - DNA, 15 bp, Homo sapiens
ggaaaaacaaaaaag

SEQ ID NO: 1143367 - DNA, 15 bp, Homo sapiens
tggaaaaacaaaaaa

SEQ ID NO: 1143368 - DNA, 15 bp, Homo sapiens
ctggaaaaacaaaaa

SEQ ID NO: 1143369 - DNA, 15 bp, Homo sapiens
actggaaaaacaaaa

SEQ ID NO: 1143370 - DNA, 15 bp, Homo sapiens
gactggaaaaacaaa

SEQ ID NO: 1143371 - DNA, 15 bp, Homo sapiens
tgactggaaaaacaa

SEQ ID NO: 1143372 - DNA, 15 bp, Homo sapiens
ttgactggaaaaaca

SEQ ID NO: 1143373 - DNA, 15 bp, Homo sapiens
gttgactggaaaaac

SEQ ID NO: 1143374 - DNA, 15 bp, Homo sapiens
agttgactggaaaaa

SEQ ID NO: 1143375 - DNA, 15 bp, Homo sapiens
cagttgactggaaaa

SEQ ID NO: 1143376 - DNA, 15 bp, Homo sapiens
tcagttgactggaaa

SEQ ID NO: 1143377 - DNA, 15 bp, Homo sapiens
ttcagttgactggaa

SEQ ID NO: 1143378 - DNA, 15 bp, Homo sapiens
cttcagttgactgga

SEQ ID NO: 1143379 - DNA, 15 bp, Homo sapiens
gcttcagttgactgg

SEQ ID NO: 1143380 - DNA, 15 bp, Homo sapiens
agcttcagttgactg

SEQ ID NO: 1143381 - DNA, 15 bp, Homo sapiens
gagcttcagttgact

SEQ ID NO: 1143382 - DNA, 15 bp, Homo sapiens
agagcttcagttgac

SEQ ID NO: 1143383 - DNA, 15 bp, Homo sapiens
aagagcttcagttga

SEQ ID NO: 1143384 - DNA, 15 bp, Homo sapiens
aaagagcttcagttg

SEQ ID NO: 1143385 - DNA, 15 bp, Homo sapiens
aaaagagcttcagtt

SEQ ID NO: 1143386 - DNA, 15 bp, Homo sapiens
aaaaagagcttcagt

SEQ ID NO: 1143387 - DNA, 15 bp, Homo sapiens
taaaaagagcttcag

SEQ ID NO: 1143388 - DNA, 15 bp, Homo sapiens
ttaaaaagagcttca

SEQ ID NO: 1143389 - DNA, 15 bp, Homo sapiens
tttaaaaagagcttc

SEQ ID NO: 1143390 - DNA, 15 bp, Homo sapiens
ttttaaaaagagctt

SEQ ID NO: 1143391 - DNA, 15 bp, Homo sapiens
tttttaaaaagagct

SEQ ID NO: 1143392 - DNA, 15 bp, Homo sapiens
atttttaaaaagagc

SEQ ID NO: 1143393 - DNA, 15 bp, Homo sapiens
aatttttaaaaagag

SEQ ID NO: 1143394 - DNA, 15 bp, Homo sapiens
taatttttaaaaaga

SEQ ID NO: 1143395 - DNA, 15 bp, Homo sapiens
ataatttttaaaaag

SEQ ID NO: 1143396 - DNA, 15 bp, Homo sapiens
tataatttttaaaaa

SEQ ID NO: 1143397 - DNA, 15 bp, Homo sapiens
gtataatttttaaaa

SEQ ID NO: 1143398 - DNA, 15 bp, Homo sapiens
tgtataatttttaaa

SEQ ID NO: 1143399 - DNA, 15 bp, Homo sapiens
atgtataatttttaa

SEQ ID NO: 1143400 - DNA, 15 bp, Homo sapiens
aatgtataattttta

SEQ ID NO: 1143401 - DNA, 15 bp, Homo sapiens
aaatgtataattttt

SEQ ID NO: 1143402 - DNA, 15 bp, Homo sapiens
caaatgtataatttt

SEQ ID NO: 1143403 - DNA, 15 bp, Homo sapiens
ccaaatgtataattt

SEQ ID NO: 1143404 - DNA, 15 bp, Homo sapiens
accaaatgtataatt

SEQ ID NO: 1143405 - DNA, 15 bp, Homo sapiens
gaccaaatgtataat

SEQ ID NO: 1143406 - DNA, 15 bp, Homo sapiens
ggaccaaatgtataa

SEQ ID NO: 1143407 - DNA, 15 bp, Homo sapiens
aggaccaaatgtata

SEQ ID NO: 1143408 - DNA, 15 bp, Homo sapiens
aaggaccaaatgtat

SEQ ID NO: 1143409 - DNA, 15 bp, Homo sapiens
aaaggaccaaatgta

SEQ ID NO: 1143410 - DNA, 15 bp, Homo sapiens
aaaaggaccaaatgt

SEQ ID NO: 1143411 - DNA, 15 bp, Homo sapiens
aaaaaggaccaaatg

SEQ ID NO: 1143412 - DNA, 15 bp, Homo sapiens
aaaaaaggaccaaat

SEQ ID NO: 1143413 - DNA, 15 bp, Homo sapiens
aaaaaaaggaccaaa

SEQ ID NO: 1143414 - DNA, 15 bp, Homo sapiens
aaaaaaaaggaccaa

SEQ ID NO: 1143415 - DNA, 15 bp, Homo sapiens
caaaaaaaaggacca

SEQ ID NO: 1143416 - DNA, 15 bp, Homo sapiens
gcaaaaaaaaggacc

SEQ ID NO: 1143417 - DNA, 15 bp, Homo sapiens
agcaaaaaaaaggac

SEQ ID NO: 1143418 - DNA, 15 bp, Homo sapiens
aagcaaaaaaaagga

SEQ ID NO: 1143419 - DNA, 15 bp, Homo sapiens
gaagcaaaaaaaagg

SEQ ID NO: 1143420 - DNA, 15 bp, Homo sapiens
ggaagcaaaaaaaag

SEQ ID NO: 1143421 - DNA, 15 bp, Homo sapiens
aggaagcaaaaaaaa

SEQ ID NO: 1143422 - DNA, 15 bp, Homo sapiens
aaggaagcaaaaaaa

SEQ ID NO: 1143423 - DNA, 15 bp, Homo sapiens
aaaggaagcaaaaaa

SEQ ID NO: 1143424 - DNA, 15 bp, Homo sapiens
gaaaggaagcaaaaa

SEQ ID NO: 1143425 - DNA, 15 bp, Homo sapiens
agaaaggaagcaaaa

SEQ ID NO: 1143426 - DNA, 15 bp, Homo sapiens
aagaaaggaagcaaa

SEQ ID NO: 1143427 - DNA, 15 bp, Homo sapiens
taagaaaggaagcaa

SEQ ID NO: 1143428 - DNA, 15 bp, Homo sapiens
ataagaaaggaagca

SEQ ID NO: 1143429 - DNA, 15 bp, Homo sapiens
aataagaaaggaagc

SEQ ID NO: 1143430 - DNA, 15 bp, Homo sapiens
taataagaaaggaag

SEQ ID NO: 1143431 - DNA, 15 bp, Homo sapiens
ctaataagaaaggaa

SEQ ID NO: 1143432 - DNA, 15 bp, Homo sapiens
tctaataagaaagga

SEQ ID NO: 1143433 - DNA, 15 bp, Homo sapiens
ttctaataagaaagg

SEQ ID NO: 1143434 - DNA, 15 bp, Homo sapiens
attctaataagaaag

SEQ ID NO: 1143435 - DNA, 15 bp, Homo sapiens
aattctaataagaaa

SEQ ID NO: 1143436 - DNA, 15 bp, Homo sapiens
taattctaataagaa

SEQ ID NO: 1143437 - DNA, 15 bp, Homo sapiens
ataattctaataaga

SEQ ID NO: 1143438 - DNA, 15 bp, Homo sapiens
aataattctaataag

SEQ ID NO: 1143439 - DNA, 15 bp, Homo sapiens
aaataattctaataa

SEQ ID NO: 1143440 - DNA, 15 bp, Homo sapiens
aaaataattctaata

SEQ ID NO: 1143441 - DNA, 15 bp, Homo sapiens
aaaaataattctaat

SEQ ID NO: 1143442 - DNA, 15 bp, Homo sapiens
taaaaataattctaa

SEQ ID NO: 1143443 - DNA, 15 bp, Homo sapiens
gtaaaaataattcta

SEQ ID NO: 1143444 - DNA, 15 bp, Homo sapiens
agtaaaaataattct

SEQ ID NO: 1143445 - DNA, 15 bp, Homo sapiens
cagtaaaaataattc

SEQ ID NO: 1143446 - DNA, 15 bp, Homo sapiens
tcagtaaaaataatt

SEQ ID NO: 1143447 - DNA, 15 bp, Homo sapiens
ctcagtaaaaataat

SEQ ID NO: 1143448 - DNA, 15 bp, Homo sapiens
tctcagtaaaaataa

SEQ ID NO: 1143449 - DNA, 15 bp, Homo sapiens
ttctcagtaaaaata

SEQ ID NO: 1143450 - DNA, 15 bp, Homo sapiens
tttctcagtaaaaat

SEQ ID NO: 1143451 - DNA, 15 bp, Homo sapiens
ttttctcagtaaaaa

SEQ ID NO: 1143452 - DNA, 15 bp, Homo sapiens
tttttctcagtaaaa

SEQ ID NO: 1143453 - DNA, 15 bp, Homo sapiens
ttttttctcagtaaa

SEQ ID NO: 1143454 - DNA, 15 bp, Homo sapiens
tttttttctcagtaa

SEQ ID NO: 1143455 - DNA, 15 bp, Homo sapiens
ttttttttctcagta

SEQ ID NO: 1143456 - DNA, 15 bp, Homo sapiens
cttttttttctcagt

SEQ ID NO: 1143457 - DNA, 15 bp, Homo sapiens
acttttttttctcag

SEQ ID NO: 1143458 - DNA, 15 bp, Homo sapiens
tacttttttttctca

SEQ ID NO: 1143459 - DNA, 15 bp, Homo sapiens
ttacttttttttctc

SEQ ID NO: 1143460 - DNA, 15 bp, Homo sapiens
tttacttttttttct

SEQ ID NO: 1143461 - DNA, 15 bp, Homo sapiens
ttttacttttttttc

SEQ ID NO: 1143462 - DNA, 15 bp, Homo sapiens
attttactttttttt

SEQ ID NO: 1143463 - DNA, 15 bp, Homo sapiens
aattttacttttttt

SEQ ID NO: 1143464 - DNA, 15 bp, Homo sapiens
aaattttactttttt

SEQ ID NO: 1143465 - DNA, 15 bp, Homo sapiens
gaaattttacttttt

SEQ ID NO: 1143466 - DNA, 15 bp, Homo sapiens
tgaaattttactttt

SEQ ID NO: 1143467 - DNA, 15 bp, Homo sapiens
atgaaattttacttt

SEQ ID NO: 1143468 - DNA, 15 bp, Homo sapiens
aatgaaattttactt

SEQ ID NO: 1143469 - DNA, 15 bp, Homo sapiens
caatgaaattttact

SEQ ID NO: 1143470 - DNA, 15 bp, Homo sapiens
ccaatgaaattttac

SEQ ID NO: 1143471 - DNA, 15 bp, Homo sapiens
accaatgaaatttta

SEQ ID NO: 1143472 - DNA, 15 bp, Homo sapiens
gaccaatgaaatttt

SEQ ID NO: 1143473 - DNA, 15 bp, Homo sapiens
agaccaatgaaattt

SEQ ID NO: 1143474 - DNA, 15 bp, Homo sapiens
aagaccaatgaaatt

SEQ ID NO: 1143475 - DNA, 15 bp, Homo sapiens
aaagaccaatgaaat

SEQ ID NO: 1143476 - DNA, 15 bp, Homo sapiens
aaaagaccaatgaaa

SEQ ID NO: 1143477 - DNA, 15 bp, Homo sapiens
aaaaagaccaatgaa

SEQ ID NO: 1143478 - DNA, 15 bp, Homo sapiens
caaaaagaccaatga

SEQ ID NO: 1143479 - DNA, 15 bp, Homo sapiens
ccaaaaagaccaatg

SEQ ID NO: 1143480 - DNA, 15 bp, Homo sapiens
tccaaaaagaccaat

SEQ ID NO: 1143481 - DNA, 15 bp, Homo sapiens
ttccaaaaagaccaa

SEQ ID NO: 1143482 - DNA, 15 bp, Homo sapiens
tttccaaaaagacca

SEQ ID NO: 1143483 - DNA, 15 bp, Homo sapiens
ttttccaaaaagacc

SEQ ID NO: 1143484 - DNA, 15 bp, Homo sapiens
cttttccaaaaagac

SEQ ID NO: 1143485 - DNA, 15 bp, Homo sapiens
gcttttccaaaaaga

SEQ ID NO: 1143486 - DNA, 15 bp, Homo sapiens
agcttttccaaaaag

SEQ ID NO: 1143487 - DNA, 15 bp, Homo sapiens
aagcttttccaaaaa

SEQ ID NO: 1143488 - DNA, 15 bp, Homo sapiens
taagcttttccaaaa

SEQ ID NO: 1143489 - DNA, 15 bp, Homo sapiens
ttaagcttttccaaa

SEQ ID NO: 1143490 - DNA, 15 bp, Homo sapiens
tttaagcttttccaa

SEQ ID NO: 1143491 - DNA, 15 bp, Homo sapiens
ttttaagcttttcca

SEQ ID NO: 1143492 - DNA, 15 bp, Homo sapiens
attttaagcttttcc

SEQ ID NO: 1143493 - DNA, 15 bp, Homo sapiens
tattttaagcttttc

SEQ ID NO: 1143494 - DNA, 15 bp, Homo sapiens
atattttaagctttt

SEQ ID NO: 1143495 - DNA, 15 bp, Homo sapiens
aatattttaagcttt

SEQ ID NO: 1143496 - DNA, 15 bp, Homo sapiens
gaatattttaagctt

SEQ ID NO: 1143497 - DNA, 15 bp, Homo sapiens
ggaatattttaagct

SEQ ID NO: 1143498 - DNA, 15 bp, Homo sapiens
gggaatattttaagc

SEQ ID NO: 1143499 - DNA, 15 bp, Homo sapiens
cgggaatattttaag

SEQ ID NO: 1143500 - DNA, 15 bp, Homo sapiens
tcgggaatattttaa

SEQ ID NO: 1143501 - DNA, 15 bp, Homo sapiens
atcgggaatatttta

SEQ ID NO: 1143502 - DNA, 15 bp, Homo sapiens
catcgggaatatttt

SEQ ID NO: 1143503 - DNA, 15 bp, Homo sapiens
ccatcgggaatattt

SEQ ID NO: 1143504 - DNA, 15 bp, Homo sapiens
cccatcgggaatatt

SEQ ID NO: 1143505 - DNA, 15 bp, Homo sapiens
gcccatcgggaatat

SEQ ID NO: 1143506 - DNA, 15 bp, Homo sapiens
agcccatcgggaata

SEQ ID NO: 1143507 - DNA, 15 bp, Homo sapiens
aagcccatcgggaat

SEQ ID NO: 1143508 - DNA, 15 bp, Homo sapiens
gaagcccatcgggaa

SEQ ID NO: 1143509 - DNA, 15 bp, Homo sapiens
agaagcccatcggga

SEQ ID NO: 1143510 - DNA, 15 bp, Homo sapiens
gagaagcccatcggg

SEQ ID NO: 1143511 - DNA, 15 bp, Homo sapiens
agagaagcccatcgg

SEQ ID NO: 1143512 - DNA, 15 bp, Homo sapiens
tagagaagcccatcg

SEQ ID NO: 1143513 - DNA, 15 bp, Homo sapiens
ttagagaagcccatc

SEQ ID NO: 1143514 - DNA, 15 bp, Homo sapiens
cttagagaagcccat

SEQ ID NO: 1143515 - DNA, 15 bp, Homo sapiens
tcttagagaagccca

SEQ ID NO: 1143516 - DNA, 15 bp, Homo sapiens
ctcttagagaagccc

SEQ ID NO: 1143517 - DNA, 15 bp, Homo sapiens
actcttagagaagcc

SEQ ID NO: 1143518 - DNA, 15 bp, Homo sapiens
aactcttagagaagc

SEQ ID NO: 1143519 - DNA, 15 bp, Homo sapiens
caactcttagagaag

SEQ ID NO: 1143520 - DNA, 15 bp, Homo sapiens
acaactcttagagaa

SEQ ID NO: 1143521 - DNA, 15 bp, Homo sapiens
aacaactcttagaga

SEQ ID NO: 1143522 - DNA, 15 bp, Homo sapiens
aaacaactcttagag

SEQ ID NO: 1143523 - DNA, 15 bp, Homo sapiens
aaaacaactcttaga

SEQ ID NO: 1143524 - DNA, 15 bp, Homo sapiens
gaaaacaactcttag

SEQ ID NO: 1143525 - DNA, 15 bp, Homo sapiens
ggaaaacaactctta

SEQ ID NO: 1143526 - DNA, 15 bp, Homo sapiens
gggaaaacaactctt

SEQ ID NO: 1143527 - DNA, 15 bp, Homo sapiens
tgggaaaacaactct

SEQ ID NO: 1143528 - DNA, 15 bp, Homo sapiens
atgggaaaacaactc

SEQ ID NO: 1143529 - DNA, 15 bp, Homo sapiens
aatgggaaaacaact

SEQ ID NO: 1143530 - DNA, 15 bp, Homo sapiens
aaatgggaaaacaac

SEQ ID NO: 1143531 - DNA, 15 bp, Homo sapiens
taaatgggaaaacaa

SEQ ID NO: 1143532 - DNA, 15 bp, Homo sapiens
gtaaatgggaaaaca

SEQ ID NO: 1143533 - DNA, 15 bp, Homo sapiens
agtaaatgggaaaac

SEQ ID NO: 1143534 - DNA, 15 bp, Homo sapiens
aagtaaatgggaaaa

SEQ ID NO: 1143535 - DNA, 15 bp, Homo sapiens
gaagtaaatgggaaa

SEQ ID NO: 1143536 - DNA, 15 bp, Homo sapiens
agaagtaaatgggaa

SEQ ID NO: 1143537 - DNA, 15 bp, Homo sapiens
tagaagtaaatggga

SEQ ID NO: 1143538 - DNA, 15 bp, Homo sapiens
gtagaagtaaatggg

SEQ ID NO: 1143539 - DNA, 15 bp, Homo sapiens
agtagaagtaaatgg

SEQ ID NO: 1143540 - DNA, 15 bp, Homo sapiens
aagtagaagtaaatg

SEQ ID NO: 1143541 - DNA, 15 bp, Homo sapiens
gaagtagaagtaaat

SEQ ID NO: 1143542 - DNA, 15 bp, Homo sapiens
tgaagtagaagtaaa

SEQ ID NO: 1143543 - DNA, 15 bp, Homo sapiens
gtgaagtagaagtaa

SEQ ID NO: 1143544 - DNA, 15 bp, Homo sapiens
ggtgaagtagaagta

SEQ ID NO: 1143545 - DNA, 15 bp, Homo sapiens
aggtgaagtagaagt

SEQ ID NO: 1143546 - DNA, 15 bp, Homo sapiens
aaggtgaagtagaag

SEQ ID NO: 1143547 - DNA, 15 bp, Homo sapiens
aaaggtgaagtagaa

SEQ ID NO: 1143548 - DNA, 15 bp, Homo sapiens
gaaaggtgaagtaga

SEQ ID NO: 1143549 - DNA, 15 bp, Homo sapiens
agaaaggtgaagtag

SEQ ID NO: 1143550 - DNA, 15 bp, Homo sapiens
aagaaaggtgaagta

SEQ ID NO: 1143551 - DNA, 15 bp, Homo sapiens
aaagaaaggtgaagt

SEQ ID NO: 1143552 - DNA, 15 bp, Homo sapiens
aaaagaaaggtgaag

SEQ ID NO: 1143553 - DNA, 15 bp, Homo sapiens
caaaagaaaggtgaa

SEQ ID NO: 1143554 - DNA, 15 bp, Homo sapiens
gcaaaagaaaggtga

SEQ ID NO: 1143555 - DNA, 15 bp, Homo sapiens
ggcaaaagaaaggtg

SEQ ID NO: 1143556 - DNA, 15 bp, Homo sapiens
tggcaaaagaaaggt

SEQ ID NO: 1143557 - DNA, 15 bp, Homo sapiens
gtggcaaaagaaagg

SEQ ID NO: 1143558 - DNA, 15 bp, Homo sapiens
ggtggcaaaagaaag

SEQ ID NO: 1143559 - DNA, 15 bp, Homo sapiens
aggtggcaaaagaaa

SEQ ID NO: 1143560 - DNA, 15 bp, Homo sapiens
aaggtggcaaaagaa

SEQ ID NO: 1143561 - DNA, 15 bp, Homo sapiens
aaaggtggcaaaaga

SEQ ID NO: 1143562 - DNA, 15 bp, Homo sapiens
taaaggtggcaaaag

SEQ ID NO: 1143563 - DNA, 15 bp, Homo sapiens
ttaaaggtggcaaaa

SEQ ID NO: 1143564 - DNA, 15 bp, Homo sapiens
attaaaggtggcaaa

SEQ ID NO: 1143565 - DNA, 15 bp, Homo sapiens
tattaaaggtggcaa

SEQ ID NO: 1143566 - DNA, 15 bp, Homo sapiens
atattaaaggtggca

SEQ ID NO: 1143567 - DNA, 15 bp, Homo sapiens
aatattaaaggtggc

SEQ ID NO: 1143568 - DNA, 15 bp, Homo sapiens
taatattaaaggtgg

SEQ ID NO: 1143569 - DNA, 15 bp, Homo sapiens
gtaatattaaaggtg

SEQ ID NO: 1143570 - DNA, 15 bp, Homo sapiens
tgtaatattaaaggt

SEQ ID NO: 1143571 - DNA, 15 bp, Homo sapiens
atgtaatattaaagg

SEQ ID NO: 1143572 - DNA, 15 bp, Homo sapiens
aatgtaatattaaag

SEQ ID NO: 1143573 - DNA, 15 bp, Homo sapiens
taatgtaatattaaa

SEQ ID NO: 1143574 - DNA, 15 bp, Homo sapiens
ttaatgtaatattaa

SEQ ID NO: 1143575 - DNA, 15 bp, Homo sapiens
cttaatgtaatatta

SEQ ID NO: 1143576 - DNA, 15 bp, Homo sapiens
ccttaatgtaatatt

SEQ ID NO: 1143577 - DNA, 15 bp, Homo sapiens
cccttaatgtaatat

SEQ ID NO: 1143578 - DNA, 15 bp, Homo sapiens
ccccttaatgtaata

SEQ ID NO: 1143579 - DNA, 15 bp, Homo sapiens
accccttaatgtaat

SEQ ID NO: 1143580 - DNA, 15 bp, Homo sapiens
gaccccttaatgtaa

SEQ ID NO: 1143581 - DNA, 15 bp, Homo sapiens
agaccccttaatgta

SEQ ID NO: 1143582 - DNA, 15 bp, Homo sapiens
tagaccccttaatgt

SEQ ID NO: 1143583 - DNA, 15 bp, Homo sapiens
ttagaccccttaatg

SEQ ID NO: 1143584 - DNA, 15 bp, Homo sapiens
gttagaccccttaat

SEQ ID NO: 1143585 - DNA, 15 bp, Homo sapiens
ggttagaccccttaa

SEQ ID NO: 1143586 - DNA, 15 bp, Homo sapiens
tggttagacccctta

SEQ ID NO: 1143587 - DNA, 15 bp, Homo sapiens
ctggttagacccctt

SEQ ID NO: 1143588 - DNA, 15 bp, Homo sapiens
cctggttagacccct

SEQ ID NO: 1143589 - DNA, 15 bp, Homo sapiens
tcctggttagacccc

SEQ ID NO: 1143590 - DNA, 15 bp, Homo sapiens
gtcctggttagaccc

SEQ ID NO: 1143591 - DNA, 15 bp, Homo sapiens
agtcctggttagacc

SEQ ID NO: 1143592 - DNA, 15 bp, Homo sapiens
aagtcctggttagac

SEQ ID NO: 1143593 - DNA, 15 bp, Homo sapiens
aaagtcctggttaga

SEQ ID NO: 1143594 - DNA, 15 bp, Homo sapiens
caaagtcctggttag

SEQ ID NO: 1143595 - DNA, 15 bp, Homo sapiens
tcaaagtcctggtta

SEQ ID NO: 1143596 - DNA, 15 bp, Homo sapiens
gtcaaagtcctggtt

SEQ ID NO: 1143597 - DNA, 15 bp, Homo sapiens
agtcaaagtcctggt

SEQ ID NO: 1143598 - DNA, 15 bp, Homo sapiens
gagtcaaagtcctgg

SEQ ID NO: 1143599 - DNA, 15 bp, Homo sapiens
agagtcaaagtcctg

SEQ ID NO: 1143600 - DNA, 15 bp, Homo sapiens
gagagtcaaagtcct

SEQ ID NO: 1143601 - DNA, 15 bp, Homo sapiens
tgagagtcaaagtcc

SEQ ID NO: 1143602 - DNA, 15 bp, Homo sapiens
atgagagtcaaagtc

SEQ ID NO: 1143603 - DNA, 15 bp, Homo sapiens
catgagagtcaaagt

SEQ ID NO: 1143604 - DNA, 15 bp, Homo sapiens
tcatgagagtcaaag

SEQ ID NO: 1143605 - DNA, 15 bp, Homo sapiens
ctcatgagagtcaaa

SEQ ID NO: 1143606 - DNA, 15 bp, Homo sapiens
cctcatgagagtcaa

SEQ ID NO: 1143607 - DNA, 15 bp, Homo sapiens
ccctcatgagagtca

SEQ ID NO: 1143608 - DNA, 15 bp, Homo sapiens
cccctcatgagagtc

SEQ ID NO: 1143609 - DNA, 15 bp, Homo sapiens
tcccctcatgagagt

SEQ ID NO: 1143610 - DNA, 15 bp, Homo sapiens
gtcccctcatgagag

SEQ ID NO: 1143611 - DNA, 15 bp, Homo sapiens
ggtcccctcatgaga

SEQ ID NO: 1143612 - DNA, 15 bp, Homo sapiens
gggtcccctcatgag

SEQ ID NO: 1143613 - DNA, 15 bp, Homo sapiens
agggtcccctcatga

SEQ ID NO: 1143614 - DNA, 15 bp, Homo sapiens
cagggtcccctcatg

SEQ ID NO: 1143615 - DNA, 15 bp, Homo sapiens
acagggtcccctcat

SEQ ID NO: 1143616 - DNA, 15 bp, Homo sapiens
cacagggtcccctca

SEQ ID NO: 1143617 - DNA, 15 bp, Homo sapiens
tcacagggtcccctc

SEQ ID NO: 1143618 - DNA, 15 bp, Homo sapiens
gtcacagggtcccct

SEQ ID NO: 1143619 - DNA, 15 bp, Homo sapiens
ggtcacagggtcccc

SEQ ID NO: 1143620 - DNA, 15 bp, Homo sapiens
gggtcacagggtccc

SEQ ID NO: 1143621 - DNA, 15 bp, Homo sapiens
agggtcacagggtcc

SEQ ID NO: 1143622 - DNA, 15 bp, Homo sapiens
aagggtcacagggtc

SEQ ID NO: 1143623 - DNA, 15 bp, Homo sapiens
aaagggtcacagggt

SEQ ID NO: 1143624 - DNA, 15 bp, Homo sapiens
caaagggtcacaggg

SEQ ID NO: 1143625 - DNA, 15 bp, Homo sapiens
tcaaagggtcacagg

SEQ ID NO: 1143626 - DNA, 15 bp, Homo sapiens
ttcaaagggtcacag

SEQ ID NO: 1143627 - DNA, 15 bp, Homo sapiens
cttcaaagggtcaca

SEQ ID NO: 1143628 - DNA, 15 bp, Homo sapiens
tcttcaaagggtcac

SEQ ID NO: 1143629 - DNA, 15 bp, Homo sapiens
ttcttcaaagggtca

SEQ ID NO: 1143630 - DNA, 15 bp, Homo sapiens
gttcttcaaagggtc

SEQ ID NO: 1143631 - DNA, 15 bp, Homo sapiens
tgttcttcaaagggt

SEQ ID NO: 1143632 - DNA, 15 bp, Homo sapiens
gtgttcttcaaaggg

SEQ ID NO: 1143633 - DNA, 15 bp, Homo sapiens
tgtgttcttcaaagg

SEQ ID NO: 1143634 - DNA, 15 bp, Homo sapiens
gtgtgttcttcaaag

SEQ ID NO: 1143635 - DNA, 15 bp, Homo sapiens
tgtgtgttcttcaaa

SEQ ID NO: 1143636 - DNA, 15 bp, Homo sapiens
ttgtgtgttcttcaa

SEQ ID NO: 1143637 - DNA, 15 bp, Homo sapiens
tttgtgtgttcttca

SEQ ID NO: 1143638 - DNA, 15 bp, Homo sapiens
ttttgtgtgttcttc

SEQ ID NO: 1143639 - DNA, 15 bp, Homo sapiens
tttttgtgtgttctt

SEQ ID NO: 1143640 - DNA, 15 bp, Homo sapiens
ttttttgtgtgttct

SEQ ID NO: 1143641 - DNA, 15 bp, Homo sapiens
tttttttgtgtgttc

SEQ ID NO: 1143642 - DNA, 15 bp, Homo sapiens
ctttttttgtgtgtt

SEQ ID NO: 1143643 - DNA, 15 bp, Homo sapiens
actttttttgtgtgt

SEQ ID NO: 1143644 - DNA, 15 bp, Homo sapiens
cactttttttgtgtg

SEQ ID NO: 1143645 - DNA, 15 bp, Homo sapiens
gcactttttttgtgt

SEQ ID NO: 1143646 - DNA, 15 bp, Homo sapiens
ggcactttttttgtg

SEQ ID NO: 1143647 - DNA, 15 bp, Homo sapiens
tggcactttttttgt

SEQ ID NO: 1143648 - DNA, 15 bp, Homo sapiens
gtggcactttttttg

SEQ ID NO: 1143649 - DNA, 15 bp, Homo sapiens
agtggcacttttttt

SEQ ID NO: 1143650 - DNA, 15 bp, Homo sapiens
cagtggcactttttt

SEQ ID NO: 1143651 - DNA, 15 bp, Homo sapiens
ccagtggcacttttt

SEQ ID NO: 1143652 - DNA, 15 bp, Homo sapiens
gccagtggcactttt

SEQ ID NO: 1143653 - DNA, 15 bp, Homo sapiens
ggccagtggcacttt

SEQ ID NO: 1143654 - DNA, 15 bp, Homo sapiens
aggccagtggcactt

SEQ ID NO: 1143655 - DNA, 15 bp, Homo sapiens
gaggccagtggcact

SEQ ID NO: 1143656 - DNA, 15 bp, Homo sapiens
agaggccagtggcac

SEQ ID NO: 1143657 - DNA, 15 bp, Homo sapiens
aagaggccagtggca

SEQ ID NO: 1143658 - DNA, 15 bp, Homo sapiens
caagaggccagtggc

SEQ ID NO: 1143659 - DNA, 15 bp, Homo sapiens
ccaagaggccagtgg

SEQ ID NO: 1143660 - DNA, 15 bp, Homo sapiens
cccaagaggccagtg

SEQ ID NO: 1143661 - DNA, 15 bp, Homo sapiens
ccccaagaggccagt

SEQ ID NO: 1143662 - DNA, 15 bp, Homo sapiens
gccccaagaggccag

SEQ ID NO: 1143663 - DNA, 15 bp, Homo sapiens
cgccccaagaggcca

SEQ ID NO: 1143664 - DNA, 15 bp, Homo sapiens
ccgccccaagaggcc

SEQ ID NO: 1143665 - DNA, 15 bp, Homo sapiens
cccgccccaagaggc

SEQ ID NO: 1143666 - DNA, 15 bp, Homo sapiens
ccccgccccaagagg

SEQ ID NO: 1143667 - DNA, 15 bp, Homo sapiens
cccccgccccaagag

SEQ ID NO: 1143668 - DNA, 15 bp, Homo sapiens
ccccccgccccaaga

SEQ ID NO: 1143669 - DNA, 15 bp, Homo sapiens
tccccccgccccaag

SEQ ID NO: 1143670 - DNA, 15 bp, Homo sapiens
atccccccgccccaa

SEQ ID NO: 1143671 - DNA, 15 bp, Homo sapiens
catccccccgcccca

SEQ ID NO: 1143672 - DNA, 15 bp, Homo sapiens
acatccccccgcccc

SEQ ID NO: 1143673 - DNA, 15 bp, Homo sapiens
aacatccccccgccc

SEQ ID NO: 1143674 - DNA, 15 bp, Homo sapiens
gaacatccccccgcc

SEQ ID NO: 1143675 - DNA, 15 bp, Homo sapiens
ggaacatccccccgc

SEQ ID NO: 1143676 - DNA, 15 bp, Homo sapiens
gggaacatccccccg

SEQ ID NO: 1143677 - DNA, 15 bp, Homo sapiens
agggaacatcccccc

SEQ ID NO: 1143678 - DNA, 15 bp, Homo sapiens
cagggaacatccccc

SEQ ID NO: 1143679 - DNA, 15 bp, Homo sapiens
acagggaacatcccc

SEQ ID NO: 1143680 - DNA, 15 bp, Homo sapiens
gacagggaacatccc

SEQ ID NO: 1143681 - DNA, 15 bp, Homo sapiens
agacagggaacatcc

SEQ ID NO: 1143682 - DNA, 15 bp, Homo sapiens
gagacagggaacatc

SEQ ID NO: 1143683 - DNA, 15 bp, Homo sapiens
ggagacagggaacat

SEQ ID NO: 1143684 - DNA, 15 bp, Homo sapiens
tggagacagggaaca

SEQ ID NO: 1143685 - DNA, 15 bp, Homo sapiens
atggagacagggaac

SEQ ID NO: 1143686 - DNA, 15 bp, Homo sapiens
aatggagacagggaa

SEQ ID NO: 1143687 - DNA, 15 bp, Homo sapiens
taatggagacaggga

SEQ ID NO: 1143688 - DNA, 15 bp, Homo sapiens
gtaatggagacaggg

SEQ ID NO: 1143689 - DNA, 15 bp, Homo sapiens
tgtaatggagacagg

SEQ ID NO: 1143690 - DNA, 15 bp, Homo sapiens
ctgtaatggagacag

SEQ ID NO: 1143691 - DNA, 15 bp, Homo sapiens
tctgtaatggagaca

SEQ ID NO: 1143692 - DNA, 15 bp, Homo sapiens
ctctgtaatggagac

SEQ ID NO: 1143693 - DNA, 15 bp, Homo sapiens
gctctgtaatggaga

SEQ ID NO: 1143694 - DNA, 15 bp, Homo sapiens
agctctgtaatggag

SEQ ID NO: 1143695 - DNA, 15 bp, Homo sapiens
gagctctgtaatgga

SEQ ID NO: 1143696 - DNA, 15 bp, Homo sapiens
ggagctctgtaatgg

SEQ ID NO: 1143697 - DNA, 15 bp, Homo sapiens
tggagctctgtaatg

SEQ ID NO: 1143698 - DNA, 15 bp, Homo sapiens
ttggagctctgtaat

SEQ ID NO: 1143699 - DNA, 15 bp, Homo sapiens
cttggagctctgtaa

SEQ ID NO: 1143700 - DNA, 15 bp, Homo sapiens
tcttggagctctgta

SEQ ID NO: 1143701 - DNA, 15 bp, Homo sapiens
ctcttggagctctgt

SEQ ID NO: 1143702 - DNA, 15 bp, Homo sapiens
cctcttggagctctg

SEQ ID NO: 1143703 - DNA, 15 bp, Homo sapiens
acctcttggagctct

SEQ ID NO: 1143704 - DNA, 15 bp, Homo sapiens
tacctcttggagctc

SEQ ID NO: 1143705 - DNA, 15 bp, Homo sapiens
atacctcttggagct

SEQ ID NO: 1143706 - DNA, 15 bp, Homo sapiens
catacctcttggagc

SEQ ID NO: 1143707 - DNA, 15 bp, Homo sapiens
ccatacctcttggag

SEQ ID NO: 1143708 - DNA, 15 bp, Homo sapiens
cccatacctcttgga

SEQ ID NO: 1143709 - DNA, 15 bp, Homo sapiens
gcccatacctcttgg

SEQ ID NO: 1143710 - DNA, 15 bp, Homo sapiens
tgcccatacctcttg

SEQ ID NO: 1143711 - DNA, 15 bp, Homo sapiens
ctgcccatacctctt

SEQ ID NO: 1143712 - DNA, 15 bp, Homo sapiens
cctgcccatacctct

SEQ ID NO: 1143713 - DNA, 15 bp, Homo sapiens
acctgcccatacctc

SEQ ID NO: 1143714 - DNA, 15 bp, Homo sapiens
aacctgcccatacct

SEQ ID NO: 1143715 - DNA, 15 bp, Homo sapiens
gaacctgcccatacc

SEQ ID NO: 1143716 - DNA, 15 bp, Homo sapiens
ggaacctgcccatac

SEQ ID NO: 1143717 - DNA, 15 bp, Homo sapiens
aggaacctgcccata

SEQ ID NO: 1143718 - DNA, 15 bp, Homo sapiens
gaggaacctgcccat

SEQ ID NO: 1143719 - DNA, 15 bp, Homo sapiens
agaggaacctgccca

SEQ ID NO: 1143720 - DNA, 15 bp, Homo sapiens
gagaggaacctgccc

SEQ ID NO: 1143721 - DNA, 15 bp, Homo sapiens
tgagaggaacctgcc

SEQ ID NO: 1143722 - DNA, 15 bp, Homo sapiens
ctgagaggaacctgc

SEQ ID NO: 1143723 - DNA, 15 bp, Homo sapiens
cctgagaggaacctg

SEQ ID NO: 1143724 - DNA, 15 bp, Homo sapiens
acctgagaggaacct

SEQ ID NO: 1143725 - DNA, 15 bp, Homo sapiens
gacctgagaggaacc

SEQ ID NO: 1143726 - DNA, 15 bp, Homo sapiens
agacctgagaggaac

SEQ ID NO: 1143727 - DNA, 15 bp, Homo sapiens
tagacctgagaggaa

SEQ ID NO: 1143728 - DNA, 15 bp, Homo sapiens
ttagacctgagagga

SEQ ID NO: 1143729 - DNA, 15 bp, Homo sapiens
tttagacctgagagg

SEQ ID NO: 1143730 - DNA, 15 bp, Homo sapiens
ctttagacctgagag

SEQ ID NO: 1143731 - DNA, 15 bp, Homo sapiens
tctttagacctgaga

SEQ ID NO: 1143732 - DNA, 15 bp, Homo sapiens
atctttagacctgag

SEQ ID NO: 1143733 - DNA, 15 bp, Homo sapiens
aatctttagacctga

SEQ ID NO: 1143734 - DNA, 15 bp, Homo sapiens
aaatctttagacctg

SEQ ID NO: 1143735 - DNA, 15 bp, Homo sapiens
caaatctttagacct

SEQ ID NO: 1143736 - DNA, 15 bp, Homo sapiens
gcaaatctttagacc

SEQ ID NO: 1143737 - DNA, 15 bp, Homo sapiens
ggcaaatctttagac

SEQ ID NO: 1143738 - DNA, 15 bp, Homo sapiens
gggcaaatctttaga

SEQ ID NO: 1143739 - DNA, 15 bp, Homo sapiens
agggcaaatctttag

SEQ ID NO: 1143740 - DNA, 15 bp, Homo sapiens
gagggcaaatcttta

SEQ ID NO: 1143741 - DNA, 15 bp, Homo sapiens
agagggcaaatcttt

SEQ ID NO: 1143742 - DNA, 15 bp, Homo sapiens
cagagggcaaatctt

SEQ ID NO: 1143743 - DNA, 15 bp, Homo sapiens
acagagggcaaatct

SEQ ID NO: 1143744 - DNA, 15 bp, Homo sapiens
aacagagggcaaatc

SEQ ID NO: 1143745 - DNA, 15 bp, Homo sapiens
caacagagggcaaat

SEQ ID NO: 1143746 - DNA, 15 bp, Homo sapiens
acaacagagggcaaa

SEQ ID NO: 1143747 - DNA, 15 bp, Homo sapiens
cacaacagagggcaa

SEQ ID NO: 1143748 - DNA, 15 bp, Homo sapiens
acacaacagagggca

SEQ ID NO: 1143749 - DNA, 15 bp, Homo sapiens
aacacaacagagggc

SEQ ID NO: 1143750 - DNA, 15 bp, Homo sapiens
taacacaacagaggg

SEQ ID NO: 1143751 - DNA, 15 bp, Homo sapiens
ttaacacaacagagg

SEQ ID NO: 1143752 - DNA, 15 bp, Homo sapiens
cttaacacaacagag

SEQ ID NO: 1143753 - DNA, 15 bp, Homo sapiens
gcttaacacaacaga

SEQ ID NO: 1143754 - DNA, 15 bp, Homo sapiens
ggcttaacacaacag

SEQ ID NO: 1143755 - DNA, 15 bp, Homo sapiens
gggcttaacacaaca

SEQ ID NO: 1143756 - DNA, 15 bp, Homo sapiens
ggggcttaacacaac

SEQ ID NO: 1143757 - DNA, 15 bp, Homo sapiens
gggggcttaacacaa

SEQ ID NO: 1143758 - DNA, 15 bp, Homo sapiens
agggggcttaacaca

SEQ ID NO: 1143759 - DNA, 15 bp, Homo sapiens
cagggggcttaacac

SEQ ID NO: 1143760 - DNA, 15 bp, Homo sapiens
tcagggggcttaaca

SEQ ID NO: 1143761 - DNA, 15 bp, Homo sapiens
atcagggggcttaac

SEQ ID NO: 1143762 - DNA, 15 bp, Homo sapiens
catcagggggcttaa

SEQ ID NO: 1143763 - DNA, 15 bp, Homo sapiens
acatcagggggctta

SEQ ID NO: 1143764 - DNA, 15 bp, Homo sapiens
gacatcagggggctt

SEQ ID NO: 1143765 - DNA, 15 bp, Homo sapiens
agacatcagggggct

SEQ ID NO: 1143766 - DNA, 15 bp, Homo sapiens
cagacatcagggggc

SEQ ID NO: 1143767 - DNA, 15 bp, Homo sapiens
ccagacatcaggggg

SEQ ID NO: 1143768 - DNA, 15 bp, Homo sapiens
gccagacatcagggg

SEQ ID NO: 1143769 - DNA, 15 bp, Homo sapiens
agccagacatcaggg

SEQ ID NO: 1143770 - DNA, 15 bp, Homo sapiens
aagccagacatcagg

SEQ ID NO: 1143771 - DNA, 15 bp, Homo sapiens
aaagccagacatcag

SEQ ID NO: 1143772 - DNA, 15 bp, Homo sapiens
aaaagccagacatca

SEQ ID NO: 1143773 - DNA, 15 bp, Homo sapiens
caaaagccagacatc

SEQ ID NO: 1143774 - DNA, 15 bp, Homo sapiens
ccaaaagccagacat

SEQ ID NO: 1143775 - DNA, 15 bp, Homo sapiens
tccaaaagccagaca

SEQ ID NO: 1143776 - DNA, 15 bp, Homo sapiens
atccaaaagccagac

SEQ ID NO: 1143777 - DNA, 15 bp, Homo sapiens
tatccaaaagccaga

SEQ ID NO: 1143778 - DNA, 15 bp, Homo sapiens
gtatccaaaagccag

SEQ ID NO: 1143779 - DNA, 15 bp, Homo sapiens
tgtatccaaaagcca

SEQ ID NO: 1143780 - DNA, 15 bp, Homo sapiens
atgtatccaaaagcc

SEQ ID NO: 1143781 - DNA, 15 bp, Homo sapiens
tatgtatccaaaagc

SEQ ID NO: 1143782 - DNA, 15 bp, Homo sapiens
atatgtatccaaaag

SEQ ID NO: 1143783 - DNA, 15 bp, Homo sapiens
gatatgtatccaaaa

SEQ ID NO: 1143784 - DNA, 15 bp, Homo sapiens
agatatgtatccaaa

SEQ ID NO: 1143785 - DNA, 15 bp, Homo sapiens
cagatatgtatccaa

SEQ ID NO: 1143786 - DNA, 15 bp, Homo sapiens
acagatatgtatcca

SEQ ID NO: 1143787 - DNA, 15 bp, Homo sapiens
cacagatatgtatcc

SEQ ID NO: 1143788 - DNA, 15 bp, Homo sapiens
acacagatatgtatc

SEQ ID NO: 1143789 - DNA, 15 bp, Homo sapiens
cacacagatatgtat

SEQ ID NO: 1143790 - DNA, 15 bp, Homo sapiens
acacacagatatgta

SEQ ID NO: 1143791 - DNA, 15 bp, Homo sapiens
aacacacagatatgt

SEQ ID NO: 1143792 - DNA, 15 bp, Homo sapiens
gaacacacagatatg

SEQ ID NO: 1143793 - DNA, 15 bp, Homo sapiens
agaacacacagatat

SEQ ID NO: 1143794 - DNA, 15 bp, Homo sapiens
cagaacacacagata

SEQ ID NO: 1143795 - DNA, 15 bp, Homo sapiens
acagaacacacagat

SEQ ID NO: 1143796 - DNA, 15 bp, Homo sapiens
tacagaacacacaga

SEQ ID NO: 1143797 - DNA, 15 bp, Homo sapiens
atacagaacacacag

SEQ ID NO: 1143798 - DNA, 15 bp, Homo sapiens
aatacagaacacaca

SEQ ID NO: 1143799 - DNA, 15 bp, Homo sapiens
aaatacagaacacac

SEQ ID NO: 1143800 - DNA, 15 bp, Homo sapiens
aaaatacagaacaca

SEQ ID NO: 1143801 - DNA, 15 bp, Homo sapiens
taaaatacagaacac

SEQ ID NO: 1143802 - DNA, 15 bp, Homo sapiens
ataaaatacagaaca

SEQ ID NO: 1143803 - DNA, 15 bp, Homo sapiens
cataaaatacagaac

SEQ ID NO: 1143804 - DNA, 15 bp, Homo sapiens
acataaaatacagaa

SEQ ID NO: 1143805 - DNA, 15 bp, Homo sapiens
gacataaaatacaga

SEQ ID NO: 1143806 - DNA, 15 bp, Homo sapiens
agacataaaatacag

SEQ ID NO: 1143807 - DNA, 15 bp, Homo sapiens
tagacataaaataca

SEQ ID NO: 1143808 - DNA, 15 bp, Homo sapiens
gtagacataaaatac

SEQ ID NO: 1143809 - DNA, 15 bp, Homo sapiens
tgtagacataaaata

SEQ ID NO: 1143810 - DNA, 15 bp, Homo sapiens
gtgtagacataaaat

SEQ ID NO: 1143811 - DNA, 15 bp, Homo sapiens
tgtgtagacataaaa

SEQ ID NO: 1143812 - DNA, 15 bp, Homo sapiens
atgtgtagacataaa

SEQ ID NO: 1143813 - DNA, 15 bp, Homo sapiens
tatgtgtagacataa

SEQ ID NO: 1143814 - DNA, 15 bp, Homo sapiens
atatgtgtagacata

SEQ ID NO: 1143815 - DNA, 15 bp, Homo sapiens
aatatgtgtagacat

SEQ ID NO: 1143816 - DNA, 15 bp, Homo sapiens
aaatatgtgtagaca

SEQ ID NO: 1143817 - DNA, 15 bp, Homo sapiens
taaatatgtgtagac

SEQ ID NO: 1143818 - DNA, 15 bp, Homo sapiens
ataaatatgtgtaga

SEQ ID NO: 1143819 - DNA, 15 bp, Homo sapiens
tataaatatgtgtag

SEQ ID NO: 1143820 - DNA, 15 bp, Homo sapiens
atataaatatgtgta

SEQ ID NO: 1143821 - DNA, 15 bp, Homo sapiens
aatataaatatgtgt

SEQ ID NO: 1143822 - DNA, 15 bp, Homo sapiens
aaatataaatatgtg

SEQ ID NO: 1143823 - DNA, 15 bp, Homo sapiens
gaaatataaatatgt

SEQ ID NO: 1143824 - DNA, 15 bp, Homo sapiens
agaaatataaatatg

SEQ ID NO: 1143825 - DNA, 15 bp, Homo sapiens
tagaaatataaatat

SEQ ID NO: 1143826 - DNA, 15 bp, Homo sapiens
atagaaatataaata

SEQ ID NO: 1143827 - DNA, 15 bp, Homo sapiens
tatagaaatataaat

SEQ ID NO: 1143828 - DNA, 15 bp, Homo sapiens
gtatagaaatataaa

SEQ ID NO: 1143829 - DNA, 15 bp, Homo sapiens
tgtatagaaatataa

SEQ ID NO: 1143830 - DNA, 15 bp, Homo sapiens
atgtatagaaatata

SEQ ID NO: 1143831 - DNA, 15 bp, Homo sapiens
tatgtatagaaatat

SEQ ID NO: 1143832 - DNA, 15 bp, Homo sapiens
atatgtatagaaata

SEQ ID NO: 1143833 - DNA, 15 bp, Homo sapiens
catatgtatagaaat

SEQ ID NO: 1143834 - DNA, 15 bp, Homo sapiens
gcatatgtatagaaa

SEQ ID NO: 1143835 - DNA, 15 bp, Homo sapiens
agcatatgtatagaa

SEQ ID NO: 1143836 - DNA, 15 bp, Homo sapiens
aagcatatgtataga

SEQ ID NO: 1143837 - DNA, 15 bp, Homo sapiens
caagcatatgtatag

SEQ ID NO: 1143838 - DNA, 15 bp, Homo sapiens
acaagcatatgtata

SEQ ID NO: 1143839 - DNA, 15 bp, Homo sapiens
tacaagcatatgtat

SEQ ID NO: 1143840 - DNA, 15 bp, Homo sapiens
atacaagcatatgta

SEQ ID NO: 1143841 - DNA, 15 bp, Homo sapiens
tatacaagcatatgt

SEQ ID NO: 1143842 - DNA, 15 bp, Homo sapiens
atatacaagcatatg

SEQ ID NO: 1143843 - DNA, 15 bp, Homo sapiens
aatatacaagcatat

SEQ ID NO: 1143844 - DNA, 15 bp, Homo sapiens
caatatacaagcata

SEQ ID NO: 1143845 - DNA, 15 bp, Homo sapiens
acaatatacaagcat

SEQ ID NO: 1143846 - DNA, 15 bp, Homo sapiens
gacaatatacaagca

SEQ ID NO: 1143847 - DNA, 15 bp, Homo sapiens
agacaatatacaagc

SEQ ID NO: 1143848 - DNA, 15 bp, Homo sapiens
tagacaatatacaag

SEQ ID NO: 1143849 - DNA, 15 bp, Homo sapiens
ttagacaatatacaa

SEQ ID NO: 1143850 - DNA, 15 bp, Homo sapiens
attagacaatataca

SEQ ID NO: 1143851 - DNA, 15 bp, Homo sapiens
cattagacaatatac

SEQ ID NO: 1143852 - DNA, 15 bp, Homo sapiens
ccattagacaatata

SEQ ID NO: 1143853 - DNA, 15 bp, Homo sapiens
accattagacaatat

SEQ ID NO: 1143854 - DNA, 15 bp, Homo sapiens
taccattagacaata

SEQ ID NO: 1143855 - DNA, 15 bp, Homo sapiens
ttaccattagacaat

SEQ ID NO: 1143856 - DNA, 15 bp, Homo sapiens
attaccattagacaa

SEQ ID NO: 1143857 - DNA, 15 bp, Homo sapiens
tattaccattagaca

SEQ ID NO: 1143858 - DNA, 15 bp, Homo sapiens
ttattaccattagac

SEQ ID NO: 1143859 - DNA, 15 bp, Homo sapiens
tttattaccattaga

SEQ ID NO: 1143860 - DNA, 15 bp, Homo sapiens
atttattaccattag

SEQ ID NO: 1143861 - DNA, 15 bp, Homo sapiens
aatttattaccatta

SEQ ID NO: 1143862 - DNA, 15 bp, Homo sapiens
caatttattaccatt

SEQ ID NO: 1143863 - DNA, 15 bp, Homo sapiens
tcaatttattaccat

SEQ ID NO: 1143864 - DNA, 15 bp, Homo sapiens
gtcaatttattacca

SEQ ID NO: 1143865 - DNA, 15 bp, Homo sapiens
agtcaatttattacc

SEQ ID NO: 1143866 - DNA, 15 bp, Homo sapiens
aagtcaatttattac

SEQ ID NO: 1143867 - DNA, 15 bp, Homo sapiens
caagtcaatttatta

SEQ ID NO: 1143868 - DNA, 15 bp, Homo sapiens
tcaagtcaatttatt

SEQ ID NO: 1143869 - DNA, 15 bp, Homo sapiens
ttcaagtcaatttat

SEQ ID NO: 1143870 - DNA, 15 bp, Homo sapiens
tttcaagtcaattta

SEQ ID NO: 1143871 - DNA, 15 bp, Homo sapiens
ttttcaagtcaattt

SEQ ID NO: 1143872 - DNA, 15 bp, Homo sapiens
attttcaagtcaatt

SEQ ID NO: 1143873 - DNA, 15 bp, Homo sapiens
tattttcaagtcaat

SEQ ID NO: 1143874 - DNA, 15 bp, Homo sapiens
ttattttcaagtcaa

SEQ ID NO: 1143875 - DNA, 15 bp, Homo sapiens
tttattttcaagtca

SEQ ID NO: 1143876 - DNA, 15 bp, Homo sapiens
ttttattttcaagtc

SEQ ID NO: 1143877 - DNA, 15 bp, Homo sapiens
tttttattttcaagt

SEQ ID NO: 1143878 - DNA, 15 bp, Homo sapiens
gtttttattttcaag

SEQ ID NO: 1143879 - DNA, 15 bp, Homo sapiens
tgtttttattttcaa

SEQ ID NO: 1143880 - DNA, 15 bp, Homo sapiens
gtgtttttattttca

SEQ ID NO: 1143881 - DNA, 15 bp, Homo sapiens
tgtgtttttattttc

SEQ ID NO: 1143882 - DNA, 15 bp, Homo sapiens
atgtgtttttatttt

SEQ ID NO: 1143883 - DNA, 15 bp, Homo sapiens
tatgtgtttttattt

SEQ ID NO: 1143884 - DNA, 15 bp, Homo sapiens
atatgtgtttttatt

SEQ ID NO: 1143885 - DNA, 15 bp, Homo sapiens
tatatgtgtttttat

SEQ ID NO: 1143886 - DNA, 15 bp, Homo sapiens
ttatatgtgttttta

SEQ ID NO: 1143887 - DNA, 15 bp, Homo sapiens
tttatatgtgttttt

SEQ ID NO: 1143888 - DNA, 15 bp, Homo sapiens
atttatatgtgtttt

SEQ ID NO: 1143889 - DNA, 15 bp, Homo sapiens
aatttatatgtgttt

SEQ ID NO: 1143890 - DNA, 15 bp, Homo sapiens
taatttatatgtgtt

SEQ ID NO: 1143891 - DNA, 15 bp, Homo sapiens
ttaatttatatgtgt

SEQ ID NO: 1143892 - DNA, 15 bp, Homo sapiens
cttaatttatatgtg

SEQ ID NO: 1143893 - DNA, 15 bp, Homo sapiens
acttaatttatatgt

SEQ ID NO: 1143894 - DNA, 15 bp, Homo sapiens
tacttaatttatatg

SEQ ID NO: 1143895 - DNA, 15 bp, Homo sapiens
ttacttaatttatat

SEQ ID NO: 1143896 - DNA, 15 bp, Homo sapiens
tttacttaatttata

SEQ ID NO: 1143897 - DNA, 15 bp, Homo sapiens
atttacttaatttat

SEQ ID NO: 1143898 - DNA, 15 bp, Homo sapiens
tatttacttaattta

SEQ ID NO: 1143899 - DNA, 15 bp, Homo sapiens
ctatttacttaattt

SEQ ID NO: 1143900 - DNA, 15 bp, Homo sapiens
cctatttacttaatt

SEQ ID NO: 1143901 - DNA, 15 bp, Homo sapiens
acctatttacttaat

SEQ ID NO: 1143902 - DNA, 15 bp, Homo sapiens
aacctatttacttaa

SEQ ID NO: 1143903 - DNA, 15 bp, Homo sapiens
gaacctatttactta

SEQ ID NO: 1143904 - DNA, 15 bp, Homo sapiens
tgaacctatttactt

SEQ ID NO: 1143905 - DNA, 15 bp, Homo sapiens
ttgaacctatttact

SEQ ID NO: 1143906 - DNA, 15 bp, Homo sapiens
attgaacctatttac

SEQ ID NO: 1143907 - DNA, 15 bp, Homo sapiens
cattgaacctattta

SEQ ID NO: 1143908 - DNA, 15 bp, Homo sapiens
gcattgaacctattt

SEQ ID NO: 1143909 - DNA, 15 bp, Homo sapiens
agcattgaacctatt

SEQ ID NO: 1143910 - DNA, 15 bp, Homo sapiens
aagcattgaacctat

SEQ ID NO: 1143911 - DNA, 15 bp, Homo sapiens
aaagcattgaaccta

SEQ ID NO: 1143912 - DNA, 15 bp, Homo sapiens
aaaagcattgaacct

SEQ ID NO: 1143913 - DNA, 15 bp, Homo sapiens
gaaaagcattgaacc

SEQ ID NO: 1143914 - DNA, 15 bp, Homo sapiens
tgaaaagcattgaac

SEQ ID NO: 1143915 - DNA, 15 bp, Homo sapiens
ttgaaaagcattgaa

SEQ ID NO: 1143916 - DNA, 15 bp, Homo sapiens
tttgaaaagcattga

SEQ ID NO: 1143917 - DNA, 15 bp, Homo sapiens
atttgaaaagcattg

SEQ ID NO: 1143918 - DNA, 15 bp, Homo sapiens
aatttgaaaagcatt

SEQ ID NO: 1143919 - DNA, 15 bp, Homo sapiens
gaatttgaaaagcat

SEQ ID NO: 1143920 - DNA, 15 bp, Homo sapiens
tgaatttgaaaagca

SEQ ID NO: 1143921 - DNA, 15 bp, Homo sapiens
atgaatttgaaaagc

SEQ ID NO: 1143922 - DNA, 15 bp, Homo sapiens
tatgaatttgaaaag

SEQ ID NO: 1143923 - DNA, 15 bp, Homo sapiens
atatgaatttgaaaa

SEQ ID NO: 1143924 - DNA, 15 bp, Homo sapiens
catatgaatttgaaa

SEQ ID NO: 1143925 - DNA, 15 bp, Homo sapiens
tcatatgaatttgaa

SEQ ID NO: 1143926 - DNA, 15 bp, Homo sapiens
gtcatatgaatttga

SEQ ID NO: 1143927 - DNA, 15 bp, Homo sapiens
ggtcatatgaatttg

SEQ ID NO: 1143928 - DNA, 15 bp, Homo sapiens
aggtcatatgaattt

SEQ ID NO: 1143929 - DNA, 15 bp, Homo sapiens
aaggtcatatgaatt

SEQ ID NO: 1143930 - DNA, 15 bp, Homo sapiens
taaggtcatatgaat

SEQ ID NO: 1143931 - DNA, 15 bp, Homo sapiens
ttaaggtcatatgaa

SEQ ID NO: 1143932 - DNA, 15 bp, Homo sapiens
cttaaggtcatatga

SEQ ID NO: 1143933 - DNA, 15 bp, Homo sapiens
tcttaaggtcatatg

SEQ ID NO: 1143934 - DNA, 15 bp, Homo sapiens
ttcttaaggtcatat

SEQ ID NO: 1143935 - DNA, 15 bp, Homo sapiens
attcttaaggtcata

SEQ ID NO: 1143936 - DNA, 15 bp, Homo sapiens
gattcttaaggtcat

SEQ ID NO: 1143937 - DNA, 15 bp, Homo sapiens
agattcttaaggtca

SEQ ID NO: 1143938 - DNA, 15 bp, Homo sapiens
aagattcttaaggtc

SEQ ID NO: 1143939 - DNA, 15 bp, Homo sapiens
aaagattcttaaggt

SEQ ID NO: 1143940 - DNA, 15 bp, Homo sapiens
caaagattcttaagg

SEQ ID NO: 1143941 - DNA, 15 bp, Homo sapiens
gcaaagattcttaag

SEQ ID NO: 1143942 - DNA, 15 bp, Homo sapiens
agcaaagattcttaa

SEQ ID NO: 1143943 - DNA, 15 bp, Homo sapiens
tagcaaagattctta

SEQ ID NO: 1143944 - DNA, 15 bp, Homo sapiens
ttagcaaagattctt

SEQ ID NO: 1143945 - DNA, 15 bp, Homo sapiens
tttagcaaagattct

SEQ ID NO: 1143946 - DNA, 15 bp, Homo sapiens
atttagcaaagattc

SEQ ID NO: 1143947 - DNA, 15 bp, Homo sapiens
tatttagcaaagatt

SEQ ID NO: 1143948 - DNA, 15 bp, Homo sapiens
ttatttagcaaagat

SEQ ID NO: 1143949 - DNA, 15 bp, Homo sapiens
tttatttagcaaaga

SEQ ID NO: 1143950 - DNA, 15 bp, Homo sapiens
ttttatttagcaaag

SEQ ID NO: 1143951 - DNA, 15 bp, Homo sapiens
gttttatttagcaaa

SEQ ID NO: 1143952 - DNA, 15 bp, Homo sapiens
agttttatttagcaa

SEQ ID NO: 1143953 - DNA, 15 bp, Homo sapiens
aagttttatttagca

SEQ ID NO: 1143954 - DNA, 15 bp, Homo sapiens
aaagttttatttagc

SEQ ID NO: 1143955 - DNA, 15 bp, Homo sapiens
aaaagttttatttag

SEQ ID NO: 1143956 - DNA, 15 bp, Homo sapiens
taaaagttttattta

SEQ ID NO: 1143957 - DNA, 15 bp, Homo sapiens
ttaaaagttttattt

SEQ ID NO: 1143958 - DNA, 15 bp, Homo sapiens
tttaaaagttttatt

SEQ ID NO: 1143959 - DNA, 15 bp, Homo sapiens
ttttaaaagttttat

SEQ ID NO: 1143960 - DNA, 15 bp, Homo sapiens
attttaaaagtttta

SEQ ID NO: 1143961 - DNA, 15 bp, Homo sapiens
aattttaaaagtttt

SEQ ID NO: 1143962 - DNA, 15 bp, Homo sapiens
taattttaaaagttt

SEQ ID NO: 1143963 - DNA, 15 bp, Homo sapiens
ataattttaaaagtt

SEQ ID NO: 1143964 - DNA, 15 bp, Homo sapiens
aataattttaaaagt

SEQ ID NO: 1143965 - DNA, 15 bp, Homo sapiens
caataattttaaaag

SEQ ID NO: 1143966 - DNA, 15 bp, Homo sapiens
ccaataattttaaaa

SEQ ID NO: 1143967 - DNA, 15 bp, Homo sapiens
accaataattttaaa

SEQ ID NO: 1143968 - DNA, 15 bp, Homo sapiens
taccaataattttaa

SEQ ID NO: 1143969 - DNA, 15 bp, Homo sapiens
ttaccaataatttta

SEQ ID NO: 1143970 - DNA, 15 bp, Homo sapiens
tttaccaataatttt

SEQ ID NO: 1143971 - DNA, 15 bp, Homo sapiens
ttttaccaataattt

SEQ ID NO: 1143972 - DNA, 15 bp, Homo sapiens
attttaccaataatt

SEQ ID NO: 1143973 - DNA, 15 bp, Homo sapiens
tattttaccaataat

SEQ ID NO: 1143974 - DNA, 15 bp, Homo sapiens
ttattttaccaataa

SEQ ID NO: 1143975 - DNA, 15 bp, Homo sapiens
tttattttaccaata

SEQ ID NO: 1143976 - DNA, 15 bp, Homo sapiens
ttttattttaccaat

SEQ ID NO: 1143977 - DNA, 15 bp, Homo sapiens
attttattttaccaa

SEQ ID NO: 1143978 - DNA, 15 bp, Homo sapiens
tattttattttacca

SEQ ID NO: 1143979 - DNA, 15 bp, Homo sapiens
ttattttattttacc

SEQ ID NO: 1143980 - DNA, 15 bp, Homo sapiens
atttttattttattt

SEQ ID NO: 1143981 - DNA, 15 bp, Homo sapiens
aatttttattttatt

SEQ ID NO: 1143982 - DNA, 15 bp, Homo sapiens
aaatttttattttat

SEQ ID NO: 1143983 - DNA, 15 bp, Homo sapiens
gaaatttttatttta

SEQ ID NO: 1143984 - DNA, 15 bp, Homo sapiens
agaaatttttatttt

SEQ ID NO: 1143985 - DNA, 15 bp, Homo sapiens
aagaaatttttattt

SEQ ID NO: 1143986 - DNA, 15 bp, Homo sapiens
gaagaaatttttatt

SEQ ID NO: 1143987 - DNA, 15 bp, Homo sapiens
tgaagaaatttttat

SEQ ID NO: 1143988 - DNA, 15 bp, Homo sapiens
ctgaagaaattttta

SEQ ID NO: 1143989 - DNA, 15 bp, Homo sapiens
tctgaagaaattttt

SEQ ID NO: 1143990 - DNA, 15 bp, Homo sapiens
ttctgaagaaatttt

SEQ ID NO: 1143991 - DNA, 15 bp, Homo sapiens
attctgaagaaattt

SEQ ID NO: 1143992 - DNA, 15 bp, Homo sapiens
aattctgaagaaatt

SEQ ID NO: 1143993 - DNA, 15 bp, Homo sapiens
aaattctgaagaaat

SEQ ID NO: 1143994 - DNA, 15 bp, Homo sapiens
taaattctgaagaaa

SEQ ID NO: 1143995 - DNA, 15 bp, Homo sapiens
ttaaattctgaagaa

SEQ ID NO: 1143996 - DNA, 15 bp, Homo sapiens
attaaattctgaaga

SEQ ID NO: 1143997 - DNA, 15 bp, Homo sapiens
aattaaattctgaag

SEQ ID NO: 1143998 - DNA, 15 bp, Homo sapiens
aaattaaattctgaa

SEQ ID NO: 1143999 - DNA, 15 bp, Homo sapiens
taaattaaattctga

SEQ ID NO: 1144000 - DNA, 15 bp, Homo sapiens
ataaattaaattctg

SEQ ID NO: 1144001 - DNA, 15 bp, Homo sapiens
tataaattaaattct

SEQ ID NO: 1144002 - DNA, 15 bp, Homo sapiens
gtataaattaaattc

SEQ ID NO: 1144003 - DNA, 15 bp, Homo sapiens
tgtataaattaaatt

SEQ ID NO: 1144004 - DNA, 15 bp, Homo sapiens
atgtataaattaaat

SEQ ID NO: 1144005 - DNA, 15 bp, Homo sapiens
aatgtataaattaaa

SEQ ID NO: 1144006 - DNA, 15 bp, Homo sapiens
aaatgtataaattaa

SEQ ID NO: 1144007 - DNA, 15 bp, Homo sapiens
aaaatgtataaatta

SEQ ID NO: 1144008 - DNA, 15 bp, Homo sapiens
aaaaatgtataaatt

SEQ ID NO: 1144009 - DNA, 15 bp, Homo sapiens
caaaaatgtataaat

SEQ ID NO: 1144010 - DNA, 15 bp, Homo sapiens
gcaaaaatgtataaa

SEQ ID NO: 1144011 - DNA, 15 bp, Homo sapiens
ggcaaaaatgtataa

SEQ ID NO: 1144012 - DNA, 15 bp, Homo sapiens
aggcaaaaatgtata

SEQ ID NO: 1144013 - DNA, 15 bp, Homo sapiens
caggcaaaaatgtat

SEQ ID NO: 1144014 - DNA, 15 bp, Homo sapiens
ccaggcaaaaatgta

SEQ ID NO: 1144015 - DNA, 15 bp, Homo sapiens
cccaggcaaaaatgt

SEQ ID NO: 1144016 - DNA, 15 bp, Homo sapiens
ccccaggcaaaaatg

SEQ ID NO: 1144017 - DNA, 15 bp, Homo sapiens
gccccaggcaaaaat

SEQ ID NO: 1144018 - DNA, 15 bp, Homo sapiens
agccccaggcaaaaa

SEQ ID NO: 1144019 - DNA, 15 bp, Homo sapiens
tagccccaggcaaaa

SEQ ID NO: 1144020 - DNA, 15 bp, Homo sapiens
gtagccccaggcaaa

SEQ ID NO: 1144021 - DNA, 15 bp, Homo sapiens
agtagccccaggcaa

SEQ ID NO: 1144022 - DNA, 15 bp, Homo sapiens
cagtagccccaggca

SEQ ID NO: 1144023 - DNA, 15 bp, Homo sapiens
gcagtagccccaggc

SEQ ID NO: 1144024 - DNA, 15 bp, Homo sapiens
agcagtagccccagg

SEQ ID NO: 1144025 - DNA, 15 bp, Homo sapiens
gagcagtagccccag

SEQ ID NO: 1144026 - DNA, 15 bp, Homo sapiens
tgagcagtagcccca

SEQ ID NO: 1144027 - DNA, 15 bp, Homo sapiens
ctgagcagtagcccc

SEQ ID NO: 1144028 - DNA, 15 bp, Homo sapiens
cctgagcagtagccc

SEQ ID NO: 1144029 - DNA, 15 bp, Homo sapiens
gcctgagcagtagcc

SEQ ID NO: 1144030 - DNA, 15 bp, Homo sapiens
tgcctgagcagtagc

SEQ ID NO: 1144031 - DNA, 15 bp, Homo sapiens
ctgcctgagcagtag

SEQ ID NO: 1144032 - DNA, 15 bp, Homo sapiens
cctgcctgagcagta

SEQ ID NO: 1144033 - DNA, 15 bp, Homo sapiens
acctgcctgagcagt

SEQ ID NO: 1144034 - DNA, 15 bp, Homo sapiens
aacctgcctgagcag

SEQ ID NO: 1144035 - DNA, 15 bp, Homo sapiens
aaacctgcctgagca

SEQ ID NO: 1144036 - DNA, 15 bp, Homo sapiens
caaacctgcctgagc

SEQ ID NO: 1144037 - DNA, 15 bp, Homo sapiens
ccaaacctgcctgag

SEQ ID NO: 1144038 - DNA, 15 bp, Homo sapiens
tccaaacctgcctga

SEQ ID NO: 1144039 - DNA, 15 bp, Homo sapiens
gtccaaacctgcctg

SEQ ID NO: 1144040 - DNA, 15 bp, Homo sapiens
agtccaaacctgcct

SEQ ID NO: 1144041 - DNA, 15 bp, Homo sapiens
cagtccaaacctgcc

SEQ ID NO: 1144042 - DNA, 15 bp, Homo sapiens
acagtccaaacctgc

SEQ ID NO: 1144043 - DNA, 15 bp, Homo sapiens
gacagtccaaacctg

SEQ ID NO: 1144044 - DNA, 15 bp, Homo sapiens
agacagtccaaacct

SEQ ID NO: 1144045 - DNA, 15 bp, Homo sapiens
gagacagtccaaacc

SEQ ID NO: 1144046 - DNA, 15 bp, Homo sapiens
agagacagtccaaac

SEQ ID NO: 1144047 - DNA, 15 bp, Homo sapiens
cagagacagtccaaa

SEQ ID NO: 1144048 - DNA, 15 bp, Homo sapiens
gcagagacagtccaa

SEQ ID NO: 1144049 - DNA, 15 bp, Homo sapiens
agcagagacagtcca

SEQ ID NO: 1144050 - DNA, 15 bp, Homo sapiens
tagcagagacagtcc

SEQ ID NO: 1144051 - DNA, 15 bp, Homo sapiens
ttagcagagacagtc

SEQ ID NO: 1144052 - DNA, 15 bp, Homo sapiens
tttagcagagacagt

SEQ ID NO: 1144053 - DNA, 15 bp, Homo sapiens
atttagcagagacag

SEQ ID NO: 1144054 - DNA, 15 bp, Homo sapiens
catttagcagagaca

SEQ ID NO: 1144055 - DNA, 15 bp, Homo sapiens
acatttagcagagac

SEQ ID NO: 1144056 - DNA, 15 bp, Homo sapiens
tacatttagcagaga

SEQ ID NO: 1144057 - DNA, 15 bp, Homo sapiens
ctacatttagcagag

SEQ ID NO: 1144058 - DNA, 15 bp, Homo sapiens
actacatttagcaga

SEQ ID NO: 1144059 - DNA, 15 bp, Homo sapiens
tactacatttagcag

SEQ ID NO: 1144060 - DNA, 15 bp, Homo sapiens
ttactacatttagca

SEQ ID NO: 1144061 - DNA, 15 bp, Homo sapiens
cttactacatttagc

SEQ ID NO: 1144062 - DNA, 15 bp, Homo sapiens
ccttactacatttag

SEQ ID NO: 1144063 - DNA, 15 bp, Homo sapiens
accttactacattta

SEQ ID NO: 1144064 - DNA, 15 bp, Homo sapiens
gaccttactacattt

SEQ ID NO: 1144065 - DNA, 15 bp, Homo sapiens
tgaccttactacatt

SEQ ID NO: 1144066 - DNA, 15 bp, Homo sapiens
atgaccttactacat

SEQ ID NO: 1144067 - DNA, 15 bp, Homo sapiens
tatgaccttactaca

SEQ ID NO: 1144068 - DNA, 15 bp, Homo sapiens
ttatgaccttactac

SEQ ID NO: 1144069 - DNA, 15 bp, Homo sapiens
tttatgaccttacta

SEQ ID NO: 1144070 - DNA, 15 bp, Homo sapiens
ttttatgaccttact

SEQ ID NO: 1144071 - DNA, 15 bp, Homo sapiens
gttttatgaccttac

SEQ ID NO: 1144072 - DNA, 15 bp, Homo sapiens
agttttatgacctta

SEQ ID NO: 1144073 - DNA, 15 bp, Homo sapiens
tagttttatgacctt

SEQ ID NO: 1144074 - DNA, 15 bp, Homo sapiens
atagttttatgacct

SEQ ID NO: 1144075 - DNA, 15 bp, Homo sapiens
gatagttttatgacc

SEQ ID NO: 1144076 - DNA, 15 bp, Homo sapiens
agatagttttatgac

SEQ ID NO: 1144077 - DNA, 15 bp, Homo sapiens
gagatagttttatga

SEQ ID NO: 1144078 - DNA, 15 bp, Homo sapiens
agagatagttttatg

SEQ ID NO: 1144079 - DNA, 15 bp, Homo sapiens
aagagatagttttat

SEQ ID NO: 1144080 - DNA, 15 bp, Homo sapiens
gaagagatagtttta

SEQ ID NO: 1144081 - DNA, 15 bp, Homo sapiens
agaagagatagtttt

SEQ ID NO: 1144082 - DNA, 15 bp, Homo sapiens
tagaagagatagttt

SEQ ID NO: 1144083 - DNA, 15 bp, Homo sapiens
atagaagagatagtt

SEQ ID NO: 1144084 - DNA, 15 bp, Homo sapiens
catagaagagatagt

SEQ ID NO: 1144085 - DNA, 15 bp, Homo sapiens
tcatagaagagatag

SEQ ID NO: 1144086 - DNA, 15 bp, Homo sapiens
atcatagaagagata

SEQ ID NO: 1144087 - DNA, 15 bp, Homo sapiens
tatcatagaagagat

SEQ ID NO: 1144088 - DNA, 15 bp, Homo sapiens
atatcatagaagaga

SEQ ID NO: 1144089 - DNA, 15 bp, Homo sapiens
aatatcatagaagag

SEQ ID NO: 1144090 - DNA, 15 bp, Homo sapiens
aaatatcatagaaga

SEQ ID NO: 1144091 - DNA, 15 bp, Homo sapiens
aaaatatcatagaag

SEQ ID NO: 1144092 - DNA, 15 bp, Homo sapiens
aaaaatatcatagaa

SEQ ID NO: 1144093 - DNA, 15 bp, Homo sapiens
caaaaatatcataga

SEQ ID NO: 1144094 - DNA, 15 bp, Homo sapiens
ccaaaaatatcatag

SEQ ID NO: 1144095 - DNA, 15 bp, Homo sapiens
accaaaaatatcata

SEQ ID NO: 1144096 - DNA, 15 bp, Homo sapiens
taccaaaaatatcat

SEQ ID NO: 1144097 - DNA, 15 bp, Homo sapiens
gtaccaaaaatatca

SEQ ID NO: 1144098 - DNA, 15 bp, Homo sapiens
agtaccaaaaatatc

SEQ ID NO: 1144099 - DNA, 15 bp, Homo sapiens
aagtaccaaaaatat

SEQ ID NO: 1144100 - DNA, 15 bp, Homo sapiens
gaagtaccaaaaata

SEQ ID NO: 1144101 - DNA, 15 bp, Homo sapiens
agaagtaccaaaaat

SEQ ID NO: 1144102 - DNA, 15 bp, Homo sapiens
aagaagtaccaaaaa

SEQ ID NO: 1144103 - DNA, 15 bp, Homo sapiens
aaagaagtaccaaaa

SEQ ID NO: 1144104 - DNA, 15 bp, Homo sapiens
caaagaagtaccaaa

SEQ ID NO: 1144105 - DNA, 15 bp, Homo sapiens
tcaaagaagtaccaa

SEQ ID NO: 1144106 - DNA, 15 bp, Homo sapiens
atcaaagaagtacca

SEQ ID NO: 1144107 - DNA, 15 bp, Homo sapiens
aatcaaagaagtacc

SEQ ID NO: 1144108 - DNA, 15 bp, Homo sapiens
aaatcaaagaagtac

SEQ ID NO: 1144109 - DNA, 15 bp, Homo sapiens
caaatcaaagaagta

SEQ ID NO: 1144110 - DNA, 15 bp, Homo sapiens
acaaatcaaagaagt

SEQ ID NO: 1144111 - DNA, 15 bp, Homo sapiens
gacaaatcaaagaag

SEQ ID NO: 1144112 - DNA, 15 bp, Homo sapiens
agacaaatcaaagaa

SEQ ID NO: 1144113 - DNA, 15 bp, Homo sapiens
cagacaaatcaaaga

SEQ ID NO: 1144114 - DNA, 15 bp, Homo sapiens
acagacaaatcaaag

SEQ ID NO: 1144115 - DNA, 15 bp, Homo sapiens
cacagacaaatcaaa

SEQ ID NO: 1144116 - DNA, 15 bp, Homo sapiens
tcacagacaaatcaa

SEQ ID NO: 1144117 - DNA, 15 bp, Homo sapiens
ctcacagacaaatca

SEQ ID NO: 1144118 - DNA, 15 bp, Homo sapiens
gctcacagacaaatc

SEQ ID NO: 1144119 - DNA, 15 bp, Homo sapiens
agctcacagacaaat

SEQ ID NO: 1144120 - DNA, 15 bp, Homo sapiens
tagctcacagacaaa

SEQ ID NO: 1144121 - DNA, 15 bp, Homo sapiens
ttagctcacagacaa

SEQ ID NO: 1144122 - DNA, 15 bp, Homo sapiens
tttagctcacagaca

SEQ ID NO: 1144123 - DNA, 15 bp, Homo sapiens
ctttagctcacagac

SEQ ID NO: 1144124 - DNA, 15 bp, Homo sapiens
gctttagctcacaga

SEQ ID NO: 1144125 - DNA, 15 bp, Homo sapiens
agctttagctcacag

SEQ ID NO: 1144126 - DNA, 15 bp, Homo sapiens
tagctttagctcaca

SEQ ID NO: 1144127 - DNA, 15 bp, Homo sapiens
gtagctttagctcac

SEQ ID NO: 1144128 - DNA, 15 bp, Homo sapiens
agtagctttagctca

SEQ ID NO: 1144129 - DNA, 15 bp, Homo sapiens
tagtagctttagctc

SEQ ID NO: 1144130 - DNA, 15 bp, Homo sapiens
gtagtagctttagct

SEQ ID NO: 1144131 - DNA, 15 bp, Homo sapiens
tgtagtagctttagc

SEQ ID NO: 1144132 - DNA, 15 bp, Homo sapiens
ctgtagtagctttag

SEQ ID NO: 1144133 - DNA, 15 bp, Homo sapiens
gctgtagtagcttta

SEQ ID NO: 1144134 - DNA, 15 bp, Homo sapiens
agctgtagtagcttt

SEQ ID NO: 1144135 - DNA, 15 bp, Homo sapiens
cagctgtagtagctt

SEQ ID NO: 1144136 - DNA, 15 bp, Homo sapiens
ccagctgtagtagct

SEQ ID NO: 1144137 - DNA, 15 bp, Homo sapiens
accagctgtagtagc

SEQ ID NO: 1144138 - DNA, 15 bp, Homo sapiens
caccagctgtagtag

SEQ ID NO: 1144139 - DNA, 15 bp, Homo sapiens
ccaccagctgtagta

SEQ ID NO: 1144140 - DNA, 15 bp, Homo sapiens
gccaccagctgtagt

SEQ ID NO: 1144141 - DNA, 15 bp, Homo sapiens
agccaccagctgtag

SEQ ID NO: 1144142 - DNA, 15 bp, Homo sapiens
cagccaccagctgta

SEQ ID NO: 1144143 - DNA, 15 bp, Homo sapiens
ccagccaccagctgt

SEQ ID NO: 1144144 - DNA, 15 bp, Homo sapiens
cccagccaccagctg

SEQ ID NO: 1144145 - DNA, 15 bp, Homo sapiens
gcccagccaccagct

SEQ ID NO: 1144146 - DNA, 15 bp, Homo sapiens
agcccagccaccagc

SEQ ID NO: 1144147 - DNA, 15 bp, Homo sapiens
gagcccagccaccag

SEQ ID NO: 1144148 - DNA, 15 bp, Homo sapiens
ggagcccagccacca

SEQ ID NO: 1144149 - DNA, 15 bp, Homo sapiens
gggagcccagccacc

SEQ ID NO: 1144150 - DNA, 15 bp, Homo sapiens
ggggagcccagccac

SEQ ID NO: 1144151 - DNA, 15 bp, Homo sapiens
gggggagcccagcca

SEQ ID NO: 1144152 - DNA, 15 bp, Homo sapiens
tgggggagcccagcc

SEQ ID NO: 1144153 - DNA, 15 bp, Homo sapiens
ttgggggagcccagc

SEQ ID NO: 1144154 - DNA, 15 bp, Homo sapiens
attgggggagcccag

SEQ ID NO: 1144155 - DNA, 15 bp, Homo sapiens
cattgggggagccca

SEQ ID NO: 1144156 - DNA, 15 bp, Homo sapiens
gcattgggggagccc

SEQ ID NO: 1144157 - DNA, 15 bp, Homo sapiens
ggcattgggggagcc

SEQ ID NO: 1144158 - DNA, 15 bp, Homo sapiens
aggcattgggggagc

SEQ ID NO: 1144159 - DNA, 15 bp, Homo sapiens
aaggcattgggggag

SEQ ID NO: 1144160 - DNA, 15 bp, Homo sapiens
caaggcattggggga

SEQ ID NO: 1144161 - DNA, 15 bp, Homo sapiens
gcaaggcattggggg

SEQ ID NO: 1144162 - DNA, 15 bp, Homo sapiens
tgcaaggcattgggg

SEQ ID NO: 1144163 - DNA, 15 bp, Homo sapiens
gtgcaaggcattggg

SEQ ID NO: 1144164 - DNA, 15 bp, Homo sapiens
tgtgcaaggcattgg

SEQ ID NO: 1144165 - DNA, 15 bp, Homo sapiens
gtgtgcaaggcattg

SEQ ID NO: 1144166 - DNA, 15 bp, Homo sapiens
tgtgtgcaaggcatt

SEQ ID NO: 1144167 - DNA, 15 bp, Homo sapiens
atgtgtgcaaggcat

SEQ ID NO: 1144168 - DNA, 15 bp, Homo sapiens
gatgtgtgcaaggca

SEQ ID NO: 1144169 - DNA, 15 bp, Homo sapiens
agatgtgtgcaaggc

SEQ ID NO: 1144170 - DNA, 15 bp, Homo sapiens
aagatgtgtgcaagg

SEQ ID NO: 1144171 - DNA, 15 bp, Homo sapiens
taagatgtgtgcaag

SEQ ID NO: 1144172 - DNA, 15 bp, Homo sapiens
gtaagatgtgtgcaa

SEQ ID NO: 1144173 - DNA, 15 bp, Homo sapiens
agtaagatgtgtgca

SEQ ID NO: 1144174 - DNA, 15 bp, Homo sapiens
cagtaagatgtgtgc

SEQ ID NO: 1144175 - DNA, 15 bp, Homo sapiens
acagtaagatgtgtg

SEQ ID NO: 1144176 - DNA, 15 bp, Homo sapiens
cacagtaagatgtgt

SEQ ID NO: 1144177 - DNA, 15 bp, Homo sapiens
tcacagtaagatgtg

SEQ ID NO: 1144178 - DNA, 15 bp, Homo sapiens
ctcacagtaagatgt

SEQ ID NO: 1144179 - DNA, 15 bp, Homo sapiens
gctcacagtaagatg

SEQ ID NO: 1144180 - DNA, 15 bp, Homo sapiens
ggctcacagtaagat

SEQ ID NO: 1144181 - DNA, 15 bp, Homo sapiens
aggctcacagtaaga

SEQ ID NO: 1144182 - DNA, 15 bp, Homo sapiens
taggctcacagtaag

SEQ ID NO: 1144183 - DNA, 15 bp, Homo sapiens
ataggctcacagtaa

SEQ ID NO: 1144184 - DNA, 15 bp, Homo sapiens
cataggctcacagta

SEQ ID NO: 1144185 - DNA, 15 bp, Homo sapiens
acataggctcacagt

SEQ ID NO: 1144186 - DNA, 15 bp, Homo sapiens
aacataggctcacag

SEQ ID NO: 1144187 - DNA, 15 bp, Homo sapiens
aaacataggctcaca

SEQ ID NO: 1144188 - DNA, 15 bp, Homo sapiens
aaaacataggctcac

SEQ ID NO: 1144189 - DNA, 15 bp, Homo sapiens
aaaaacataggctca

SEQ ID NO: 1144190 - DNA, 15 bp, Homo sapiens
caaaaacataggctc

SEQ ID NO: 1144191 - DNA, 15 bp, Homo sapiens
gcaaaaacataggct

SEQ ID NO: 1144192 - DNA, 15 bp, Homo sapiens
agcaaaaacataggc

SEQ ID NO: 1144193 - DNA, 15 bp, Homo sapiens
aagcaaaaacatagg

SEQ ID NO: 1144194 - DNA, 15 bp, Homo sapiens
aaagcaaaaacatag

SEQ ID NO: 1144195 - DNA, 15 bp, Homo sapiens
aaaagcaaaaacata

SEQ ID NO: 1144196 - DNA, 15 bp, Homo sapiens
caaaagcaaaaacat

SEQ ID NO: 1144197 - DNA, 15 bp, Homo sapiens
tcaaaagcaaaaaca

SEQ ID NO: 1144198 - DNA, 15 bp, Homo sapiens
ctcaaaagcaaaaac

SEQ ID NO: 1144199 - DNA, 15 bp, Homo sapiens
actcaaaagcaaaaa

SEQ ID NO: 1144200 - DNA, 15 bp, Homo sapiens
aactcaaaagcaaaa

SEQ ID NO: 1144201 - DNA, 15 bp, Homo sapiens
aaactcaaaagcaaa

SEQ ID NO: 1144202 - DNA, 15 bp, Homo sapiens
gaaactcaaaagcaa

SEQ ID NO: 1144203 - DNA, 15 bp, Homo sapiens
agaaactcaaaagca

SEQ ID NO: 1144204 - DNA, 15 bp, Homo sapiens
tagaaactcaaaagc

SEQ ID NO: 1144205 - DNA, 15 bp, Homo sapiens
ctagaaactcaaaag

SEQ ID NO: 1144206 - DNA, 15 bp, Homo sapiens
cctagaaactcaaaa

SEQ ID NO: 1144207 - DNA, 15 bp, Homo sapiens
acctagaaactcaaa

SEQ ID NO: 1144208 - DNA, 15 bp, Homo sapiens
gacctagaaactcaa

SEQ ID NO: 1144209 - DNA, 15 bp, Homo sapiens
agacctagaaactca

SEQ ID NO: 1144210 - DNA, 15 bp, Homo sapiens
aagacctagaaactc

SEQ ID NO: 1144211 - DNA, 15 bp, Homo sapiens
caagacctagaaact

SEQ ID NO: 1144212 - DNA, 15 bp, Homo sapiens
ccaagacctagaaac

SEQ ID NO: 1144213 - DNA, 15 bp, Homo sapiens
tccaagacctagaaa

SEQ ID NO: 1144214 - DNA, 15 bp, Homo sapiens
ctccaagacctagaa

SEQ ID NO: 1144215 - DNA, 15 bp, Homo sapiens
gctccaagacctaga

SEQ ID NO: 1144216 - DNA, 15 bp, Homo sapiens
ggctccaagacctag

SEQ ID NO: 1144217 - DNA, 15 bp, Homo sapiens
aggctccaagaccta

SEQ ID NO: 1144218 - DNA, 15 bp, Homo sapiens
taggctccaagacct

SEQ ID NO: 1144219 - DNA, 15 bp, Homo sapiens
ctaggctccaagacc

SEQ ID NO: 1144220 - DNA, 15 bp, Homo sapiens
tctaggctccaagac

SEQ ID NO: 1144221 - DNA, 15 bp, Homo sapiens
ttctaggctccaaga

SEQ ID NO: 1144222 - DNA, 15 bp, Homo sapiens
tttctaggctccaag

SEQ ID NO: 1144223 - DNA, 15 bp, Homo sapiens
ctttctaggctccaa

SEQ ID NO: 1144224 - DNA, 15 bp, Homo sapiens
tctttctaggctcca

SEQ ID NO: 1144225 - DNA, 15 bp, Homo sapiens
atctttctaggctcc

SEQ ID NO: 1144226 - DNA, 15 bp, Homo sapiens
aatctttctaggctc

SEQ ID NO: 1144227 - DNA, 15 bp, Homo sapiens
caatctttctaggct

SEQ ID NO: 1144228 - DNA, 15 bp, Homo sapiens
gcaatctttctaggc

SEQ ID NO: 1144229 - DNA, 15 bp, Homo sapiens
ggcaatctttctagg

SEQ ID NO: 1144230 - DNA, 15 bp, Homo sapiens
tggcaatctttctag

SEQ ID NO: 1144231 - DNA, 15 bp, Homo sapiens
atggcaatctttcta

SEQ ID NO: 1144232 - DNA, 15 bp, Homo sapiens
catggcaatctttct

SEQ ID NO: 1144233 - DNA, 15 bp, Homo sapiens
tcatggcaatctttc

SEQ ID NO: 1144234 - DNA, 15 bp, Homo sapiens
atcatggcaatcttt

SEQ ID NO: 1144235 - DNA, 15 bp, Homo sapiens
catcatggcaatctt

SEQ ID NO: 1144236 - DNA, 15 bp, Homo sapiens
tcatcatggcaatct

SEQ ID NO: 1144237 - DNA, 15 bp, Homo sapiens
ttcatcatggcaatc

SEQ ID NO: 1144238 - DNA, 15 bp, Homo sapiens
cttcatcatggcaat

SEQ ID NO: 1144239 - DNA, 15 bp, Homo sapiens
gcttcatcatggcaa

SEQ ID NO: 1144240 - DNA, 15 bp, Homo sapiens
ggcttcatcatggca

SEQ ID NO: 1144241 - DNA, 15 bp, Homo sapiens
aggcttcatcatggc

SEQ ID NO: 1144242 - DNA, 15 bp, Homo sapiens
caggcttcatcatgg

SEQ ID NO: 1144243 - DNA, 15 bp, Homo sapiens
tcaggcttcatcatg

SEQ ID NO: 1144244 - DNA, 15 bp, Homo sapiens
ttcaggcttcatcat

SEQ ID NO: 1144245 - DNA, 15 bp, Homo sapiens
cttcaggcttcatca

SEQ ID NO: 1144246 - DNA, 15 bp, Homo sapiens
tcttcaggcttcatc

SEQ ID NO: 1144247 - DNA, 15 bp, Homo sapiens
atcttcaggcttcat

SEQ ID NO: 1144248 - DNA, 15 bp, Homo sapiens
tatcttcaggcttca

SEQ ID NO: 1144249 - DNA, 15 bp, Homo sapiens
atatcttcaggcttc

SEQ ID NO: 1144250 - DNA, 15 bp, Homo sapiens
tatatcttcaggctt

SEQ ID NO: 1144251 - DNA, 15 bp, Homo sapiens
atatatcttcaggct

SEQ ID NO: 1144252 - DNA, 15 bp, Homo sapiens
catatatcttcaggc

SEQ ID NO: 1144253 - DNA, 15 bp, Homo sapiens
acatatatcttcagg

SEQ ID NO: 1144254 - DNA, 15 bp, Homo sapiens
cacatatatcttcag

SEQ ID NO: 1144255 - DNA, 15 bp, Homo sapiens
acacatatatcttca

SEQ ID NO: 1144256 - DNA, 15 bp, Homo sapiens
cacacatatatcttc

SEQ ID NO: 1144257 - DNA, 15 bp, Homo sapiens
acacacatatatctt

SEQ ID NO: 1144258 - DNA, 15 bp, Homo sapiens
gacacacatatatct

SEQ ID NO: 1144259 - DNA, 15 bp, Homo sapiens
ggacacacatatatc

SEQ ID NO: 1144260 - DNA, 15 bp, Homo sapiens
tggacacacatatat

SEQ ID NO: 1144261 - DNA, 15 bp, Homo sapiens
gtggacacacatata

SEQ ID NO: 1144262 - DNA, 15 bp, Homo sapiens
tgtggacacacatat

SEQ ID NO: 1144263 - DNA, 15 bp, Homo sapiens
ctgtggacacacata

SEQ ID NO: 1144264 - DNA, 15 bp, Homo sapiens
gctgtggacacacat

SEQ ID NO: 1144265 - DNA, 15 bp, Homo sapiens
tgctgtggacacaca

SEQ ID NO: 1144266 - DNA, 15 bp, Homo sapiens
gtgctgtggacacac

SEQ ID NO: 1144267 - DNA, 15 bp, Homo sapiens
ggtgctgtggacaca

SEQ ID NO: 1144268 - DNA, 15 bp, Homo sapiens
aggtgctgtggacac

SEQ ID NO: 1144269 - DNA, 15 bp, Homo sapiens
caggtgctgtggaca

SEQ ID NO: 1144270 - DNA, 15 bp, Homo sapiens
ccaggtgctgtggac

SEQ ID NO: 1144271 - DNA, 15 bp, Homo sapiens
cccaggtgctgtgga

SEQ ID NO: 1144272 - DNA, 15 bp, Homo sapiens
gcccaggtgctgtgg

SEQ ID NO: 1144273 - DNA, 15 bp, Homo sapiens
agcccaggtgctgtg

SEQ ID NO: 1144274 - DNA, 15 bp, Homo sapiens
tagcccaggtgctgt

SEQ ID NO: 1144275 - DNA, 15 bp, Homo sapiens
gtagcccaggtgctg

SEQ ID NO: 1144276 - DNA, 15 bp, Homo sapiens
ggtagcccaggtgct

SEQ ID NO: 1144277 - DNA, 15 bp, Homo sapiens
tggtagcccaggtgc

SEQ ID NO: 1144278 - DNA, 15 bp, Homo sapiens
ctggtagcccaggtg

SEQ ID NO: 1144279 - DNA, 15 bp, Homo sapiens
gctggtagcccaggt

SEQ ID NO: 1144280 - DNA, 15 bp, Homo sapiens
agctggtagcccagg

SEQ ID NO: 1144281 - DNA, 15 bp, Homo sapiens
cagctggtagcccag

SEQ ID NO: 1144282 - DNA, 15 bp, Homo sapiens
gcagctggtagccca

SEQ ID NO: 1144283 - DNA, 15 bp, Homo sapiens
tgcagctggtagccc

SEQ ID NO: 1144284 - DNA, 15 bp, Homo sapiens
ctgcagctggtagcc

SEQ ID NO: 1144285 - DNA, 15 bp, Homo sapiens
cctgcagctggtagc

SEQ ID NO: 1144286 - DNA, 15 bp, Homo sapiens
ccctgcagctggtag

SEQ ID NO: 1144287 - DNA, 15 bp, Homo sapiens
gccctgcagctggta

SEQ ID NO: 1144288 - DNA, 15 bp, Homo sapiens
tgccctgcagctggt

SEQ ID NO: 1144289 - DNA, 15 bp, Homo sapiens
ctgccctgcagctgg

SEQ ID NO: 1144290 - DNA, 15 bp, Homo sapiens
tctgccctgcagctg

SEQ ID NO: 1144291 - DNA, 15 bp, Homo sapiens
ctctgccctgcagct

SEQ ID NO: 1144292 - DNA, 15 bp, Homo sapiens
actctgccctgcagc

SEQ ID NO: 1144293 - DNA, 15 bp, Homo sapiens
gactctgccctgcag

SEQ ID NO: 1144294 - DNA, 15 bp, Homo sapiens
tgactctgccctgca

SEQ ID NO: 1144295 - DNA, 15 bp, Homo sapiens
ttgactctgccctgc

SEQ ID NO: 1144296 - DNA, 15 bp, Homo sapiens
cttgactctgccctg

SEQ ID NO: 1144297 - DNA, 15 bp, Homo sapiens
gcttgactctgccct

SEQ ID NO: 1144298 - DNA, 15 bp, Homo sapiens
agcttgactctgccc

SEQ ID NO: 1144299 - DNA, 15 bp, Homo sapiens
gagcttgactctgcc

SEQ ID NO: 1144300 - DNA, 15 bp, Homo sapiens
tgagcttgactctgc

SEQ ID NO: 1144301 - DNA, 15 bp, Homo sapiens
ctgagcttgactctg

SEQ ID NO: 1144302 - DNA, 15 bp, Homo sapiens
actgagcttgactct

SEQ ID NO: 1144303 - DNA, 15 bp, Homo sapiens
tactgagcttgactc

SEQ ID NO: 1144304 - DNA, 15 bp, Homo sapiens
ctactgagcttgact

SEQ ID NO: 1144305 - DNA, 15 bp, Homo sapiens
cctactgagcttgac

SEQ ID NO: 1144306 - DNA, 15 bp, Homo sapiens
ccctactgagcttga

SEQ ID NO: 1144307 - DNA, 15 bp, Homo sapiens
gccctactgagcttg

SEQ ID NO: 1144308 - DNA, 15 bp, Homo sapiens
ggccctactgagctt

SEQ ID NO: 1144309 - DNA, 15 bp, Homo sapiens
gggccctactgagct

SEQ ID NO: 1144310 - DNA, 15 bp, Homo sapiens
agggccctactgagc

SEQ ID NO: 1144311 - DNA, 15 bp, Homo sapiens
tagggccctactgag

SEQ ID NO: 1144312 - DNA, 15 bp, Homo sapiens
atagggccctactga

SEQ ID NO: 1144313 - DNA, 15 bp, Homo sapiens
gatagggccctactg

SEQ ID NO: 1144314 - DNA, 15 bp, Homo sapiens
ggatagggccctact

SEQ ID NO: 1144315 - DNA, 15 bp, Homo sapiens
aggatagggccctac

SEQ ID NO: 1144316 - DNA, 15 bp, Homo sapiens
gaggatagggcccta

SEQ ID NO: 1144317 - DNA, 15 bp, Homo sapiens
ggaggatagggccct

SEQ ID NO: 1144318 - DNA, 15 bp, Homo sapiens
gggaggatagggccc

SEQ ID NO: 1144319 - DNA, 15 bp, Homo sapiens
tgggaggatagggcc

SEQ ID NO: 1144320 - DNA, 15 bp, Homo sapiens
gtgggaggatagggc

SEQ ID NO: 1144321 - DNA, 15 bp, Homo sapiens
tgtgggaggataggg

SEQ ID NO: 1144322 - DNA, 15 bp, Homo sapiens
atgtgggaggatagg

SEQ ID NO: 1144323 - DNA, 15 bp, Homo sapiens
gatgtgggaggatag

SEQ ID NO: 1144324 - DNA, 15 bp, Homo sapiens
ggatgtgggaggata

SEQ ID NO: 1144325 - DNA, 15 bp, Homo sapiens
tggatgtgggaggat

SEQ ID NO: 1144326 - DNA, 15 bp, Homo sapiens
ctggatgtgggagga

SEQ ID NO: 1144327 - DNA, 15 bp, Homo sapiens
gctggatgtgggagg

SEQ ID NO: 1144328 - DNA, 15 bp, Homo sapiens
agctggatgtgggag

SEQ ID NO: 1144329 - DNA, 15 bp, Homo sapiens
gagctggatgtggga

SEQ ID NO: 1144330 - DNA, 15 bp, Homo sapiens
agagctggatgtggg

SEQ ID NO: 1144331 - DNA, 15 bp, Homo sapiens
aagagctggatgtgg

SEQ ID NO: 1144332 - DNA, 15 bp, Homo sapiens
gaagagctggatgtg

SEQ ID NO: 1144333 - DNA, 15 bp, Homo sapiens
ggaagagctggatgt

SEQ ID NO: 1144334 - DNA, 15 bp, Homo sapiens
aggaagagctggatg

SEQ ID NO: 1144335 - DNA, 15 bp, Homo sapiens
gaggaagagctggat

SEQ ID NO: 1144336 - DNA, 15 bp, Homo sapiens
agaggaagagctgga

SEQ ID NO: 1144337 - DNA, 15 bp, Homo sapiens
aagaggaagagctgg

SEQ ID NO: 1144338 - DNA, 15 bp, Homo sapiens
caagaggaagagctg

SEQ ID NO: 1144339 - DNA, 15 bp, Homo sapiens
ccaagaggaagagct

SEQ ID NO: 1144340 - DNA, 15 bp, Homo sapiens
accaagaggaagagc

SEQ ID NO: 1144341 - DNA, 15 bp, Homo sapiens
gaccaagaggaagag

SEQ ID NO: 1144342 - DNA, 15 bp, Homo sapiens
tgaccaagaggaaga

SEQ ID NO: 1144343 - DNA, 15 bp, Homo sapiens
atgaccaagaggaag

SEQ ID NO: 1144344 - DNA, 15 bp, Homo sapiens
catgaccaagaggaa

SEQ ID NO: 1144345 - DNA, 15 bp, Homo sapiens
gcatgaccaagagga

SEQ ID NO: 1144346 - DNA, 15 bp, Homo sapiens
agcatgaccaagagg

SEQ ID NO: 1144347 - DNA, 15 bp, Homo sapiens
cagcatgaccaagag

SEQ ID NO: 1144348 - DNA, 15 bp, Homo sapiens
ccagcatgaccaaga

SEQ ID NO: 1144349 - DNA, 15 bp, Homo sapiens
cccagcatgaccaag

SEQ ID NO: 1144350 - DNA, 15 bp, Homo sapiens
tcccagcatgaccaa

SEQ ID NO: 1144351 - DNA, 15 bp, Homo sapiens
ctcccagcatgacca

SEQ ID NO: 1144352 - DNA, 15 bp, Homo sapiens
cctcccagcatgacc

SEQ ID NO: 1144353 - DNA, 15 bp, Homo sapiens
ccctcccagcatgac

SEQ ID NO: 1144354 - DNA, 15 bp, Homo sapiens
cccctcccagcatga

SEQ ID NO: 1144355 - DNA, 15 bp, Homo sapiens
acccctcccagcatg

SEQ ID NO: 1144356 - DNA, 15 bp, Homo sapiens
gacccctcccagcat

SEQ ID NO: 1144357 - DNA, 15 bp, Homo sapiens
tgacccctcccagca

SEQ ID NO: 1144358 - DNA, 15 bp, Homo sapiens
ctgacccctcccagc

SEQ ID NO: 1144359 - DNA, 15 bp, Homo sapiens
tctgacccctcccag

SEQ ID NO: 1144360 - DNA, 15 bp, Homo sapiens
atctgacccctccca

SEQ ID NO: 1144361 - DNA, 15 bp, Homo sapiens
gatctgacccctccc

SEQ ID NO: 1144362 - DNA, 15 bp, Homo sapiens
ggatctgacccctcc

SEQ ID NO: 1144363 - DNA, 15 bp, Homo sapiens
aggatctgacccctc

SEQ ID NO: 1144364 - DNA, 15 bp, Homo sapiens
gaggatctgacccct

SEQ ID NO: 1144365 - DNA, 15 bp, Homo sapiens
ggaggatctgacccc

SEQ ID NO: 1144366 - DNA, 15 bp, Homo sapiens
tggaggatctgaccc

SEQ ID NO: 1144367 - DNA, 15 bp, Homo sapiens
ctggaggatctgacc

SEQ ID NO: 1144368 - DNA, 15 bp, Homo sapiens
tctggaggatctgac

SEQ ID NO: 1144369 - DNA, 15 bp, Homo sapiens
gtctggaggatctga

SEQ ID NO: 1144370 - DNA, 15 bp, Homo sapiens
tgtctggaggatctg

SEQ ID NO: 1144371 - DNA, 15 bp, Homo sapiens
atgtctggaggatct

SEQ ID NO: 1144372 - DNA, 15 bp, Homo sapiens
gatgtctggaggatc

SEQ ID NO: 1144373 - DNA, 15 bp, Homo sapiens
tgatgtctggaggat

SEQ ID NO: 1144374 - DNA, 15 bp, Homo sapiens
atgatgtctggagga

SEQ ID NO: 1144375 - DNA, 15 bp, Homo sapiens
gatgatgtctggagg

SEQ ID NO: 1144376 - DNA, 15 bp, Homo sapiens
agatgatgtctggag

SEQ ID NO: 1144377 - DNA, 15 bp, Homo sapiens
aagatgatgtctgga

SEQ ID NO: 1144378 - DNA, 15 bp, Homo sapiens
gaagatgatgtctgg

SEQ ID NO: 1144379 - DNA, 15 bp, Homo sapiens
tgaagatgatgtctg

SEQ ID NO: 1144380 - DNA, 15 bp, Homo sapiens
atgaagatgatgtct

SEQ ID NO: 1144381 - DNA, 15 bp, Homo sapiens
tatgaagatgatgtc

SEQ ID NO: 1144382 - DNA, 15 bp, Homo sapiens
ctatgaagatgatgt

SEQ ID NO: 1144383 - DNA, 15 bp, Homo sapiens
actatgaagatgatg

SEQ ID NO: 1144384 - DNA, 15 bp, Homo sapiens
aactatgaagatgat

SEQ ID NO: 1144385 - DNA, 15 bp, Homo sapiens
gaactatgaagatga

SEQ ID NO: 1144386 - DNA, 15 bp, Homo sapiens
agaactatgaagatg

SEQ ID NO: 1144387 - DNA, 15 bp, Homo sapiens
cagaactatgaagat

SEQ ID NO: 1144388 - DNA, 15 bp, Homo sapiens
acagaactatgaaga

SEQ ID NO: 1144389 - DNA, 15 bp, Homo sapiens
gacagaactatgaag

SEQ ID NO: 1144390 - DNA, 15 bp, Homo sapiens
ggacagaactatgaa

SEQ ID NO: 1144391 - DNA, 15 bp, Homo sapiens
aggacagaactatga

SEQ ID NO: 1144392 - DNA, 15 bp, Homo sapiens
gaggacagaactatg

SEQ ID NO: 1144393 - DNA, 15 bp, Homo sapiens
agaggacagaactat

SEQ ID NO: 1144394 - DNA, 15 bp, Homo sapiens
cagaggacagaacta

SEQ ID NO: 1144395 - DNA, 15 bp, Homo sapiens
acagaggacagaact

SEQ ID NO: 1144396 - DNA, 15 bp, Homo sapiens
gacagaggacagaac

SEQ ID NO: 1144397 - DNA, 15 bp, Homo sapiens
ggacagaggacagaa

SEQ ID NO: 1144398 - DNA, 15 bp, Homo sapiens
gggacagaggacaga

SEQ ID NO: 1144399 - DNA, 15 bp, Homo sapiens
cgggacagaggacag

SEQ ID NO: 1144400 - DNA, 15 bp, Homo sapiens
ccgggacagaggaca

SEQ ID NO: 1144401 - DNA, 15 bp, Homo sapiens
cccgggacagaggac

SEQ ID NO: 1144402 - DNA, 15 bp, Homo sapiens
gcccgggacagagga

SEQ ID NO: 1144403 - DNA, 15 bp, Homo sapiens
agcccgggacagagg

SEQ ID NO: 1144404 - DNA, 15 bp, Homo sapiens
aagcccgggacagag

SEQ ID NO: 1144405 - DNA, 15 bp, Homo sapiens
aaagcccgggacaga

SEQ ID NO: 1144406 - DNA, 15 bp, Homo sapiens
taaagcccgggacag

SEQ ID NO: 1144407 - DNA, 15 bp, Homo sapiens
gtaaagcccgggaca

SEQ ID NO: 1144408 - DNA, 15 bp, Homo sapiens
tgtaaagcccgggac

SEQ ID NO: 1144409 - DNA, 15 bp, Homo sapiens
gtgtaaagcccggga

SEQ ID NO: 1144410 - DNA, 15 bp, Homo sapiens
agtgtaaagcccggg

SEQ ID NO: 1144411 - DNA, 15 bp, Homo sapiens
aagtgtaaagcccgg

SEQ ID NO: 1144412 - DNA, 15 bp, Homo sapiens
caagtgtaaagcccg

SEQ ID NO: 1144413 - DNA, 15 bp, Homo sapiens
ccaagtgtaaagccc

SEQ ID NO: 1144414 - DNA, 15 bp, Homo sapiens
accaagtgtaaagcc

SEQ ID NO: 1144415 - DNA, 15 bp, Homo sapiens
caccaagtgtaaagc

SEQ ID NO: 1144416 - DNA, 15 bp, Homo sapiens
acaccaagtgtaaag

SEQ ID NO: 1144417 - DNA, 15 bp, Homo sapiens
cacaccaagtgtaaa

SEQ ID NO: 1144418 - DNA, 15 bp, Homo sapiens
acacaccaagtgtaa

SEQ ID NO: 1144419 - DNA, 15 bp, Homo sapiens
tacacaccaagtgta

SEQ ID NO: 1144420 - DNA, 15 bp, Homo sapiens
ttacacaccaagtgt

SEQ ID NO: 1144421 - DNA, 15 bp, Homo sapiens
tttacacaccaagtg

SEQ ID NO: 1144422 - DNA, 15 bp, Homo sapiens
atttacacaccaagt

SEQ ID NO: 1144423 - DNA, 15 bp, Homo sapiens
gatttacacaccaag

SEQ ID NO: 1144424 - DNA, 15 bp, Homo sapiens
ggatttacacaccaa

SEQ ID NO: 1144425 - DNA, 15 bp, Homo sapiens
tggatttacacacca

SEQ ID NO: 1144426 - DNA, 15 bp, Homo sapiens
ctggatttacacacc

SEQ ID NO: 1144427 - DNA, 15 bp, Homo sapiens
cctggatttacacac

SEQ ID NO: 1144428 - DNA, 15 bp, Homo sapiens
tcctggatttacaca

SEQ ID NO: 1144429 - DNA, 15 bp, Homo sapiens
gtcctggatttacac

SEQ ID NO: 1144430 - DNA, 15 bp, Homo sapiens
ggtcctggatttaca

SEQ ID NO: 1144431 - DNA, 15 bp, Homo sapiens
gggtcctggatttac

SEQ ID NO: 1144432 - DNA, 15 bp, Homo sapiens
tgggtcctggattta

SEQ ID NO: 1144433 - DNA, 15 bp, Homo sapiens
ctgggtcctggattt

SEQ ID NO: 1144434 - DNA, 15 bp, Homo sapiens
cctgggtcctggatt

SEQ ID NO: 1144435 - DNA, 15 bp, Homo sapiens
acctgggtcctggat

SEQ ID NO: 1144436 - DNA, 15 bp, Homo sapiens
cacctgggtcctgga

SEQ ID NO: 1144437 - DNA, 15 bp, Homo sapiens
ccacctgggtcctgg

SEQ ID NO: 1144438 - DNA, 15 bp, Homo sapiens
tccacctgggtcctg

SEQ ID NO: 1144439 - DNA, 15 bp, Homo sapiens
gtccacctgggtcct

SEQ ID NO: 1144440 - DNA, 15 bp, Homo sapiens
ggtccacctgggtcc

SEQ ID NO: 1144441 - DNA, 15 bp, Homo sapiens
gggtccacctgggtc

SEQ ID NO: 1144442 - DNA, 15 bp, Homo sapiens
agggtccacctgggt

SEQ ID NO: 1144443 - DNA, 15 bp, Homo sapiens
gagggtccacctggg

SEQ ID NO: 1144444 - DNA, 15 bp, Homo sapiens
ggagggtccacctgg

SEQ ID NO: 1144445 - DNA, 15 bp, Homo sapiens
aggagggtccacctg

SEQ ID NO: 1144446 - DNA, 15 bp, Homo sapiens
aaggagggtccacct

SEQ ID NO: 1144447 - DNA, 15 bp, Homo sapiens
aaaggagggtccacc

SEQ ID NO: 1144448 - DNA, 15 bp, Homo sapiens
aaaaggagggtccac

SEQ ID NO: 1144449 - DNA, 15 bp, Homo sapiens
gaaaaggagggtcca

SEQ ID NO: 1144450 - DNA, 15 bp, Homo sapiens
tgaaaaggagggtcc

SEQ ID NO: 1144451 - DNA, 15 bp, Homo sapiens
atgaaaaggagggtc

SEQ ID NO: 1144452 - DNA, 15 bp, Homo sapiens
tatgaaaaggagggt

SEQ ID NO: 1144453 - DNA, 15 bp, Homo sapiens
ttatgaaaaggaggg

SEQ ID NO: 1144454 - DNA, 15 bp, Homo sapiens
gttatgaaaaggagg

SEQ ID NO: 1144455 - DNA, 15 bp, Homo sapiens
ggttatgaaaaggag

SEQ ID NO: 1144456 - DNA, 15 bp, Homo sapiens
tggttatgaaaagga

SEQ ID NO: 1144457 - DNA, 15 bp, Homo sapiens
atggttatgaaaagg

SEQ ID NO: 1144458 - DNA, 15 bp, Homo sapiens
gatggttatgaaaag

SEQ ID NO: 1144459 - DNA, 15 bp, Homo sapiens
cgatggttatgaaaa

SEQ ID NO: 1144460 - DNA, 15 bp, Homo sapiens
acgatggttatgaaa

SEQ ID NO: 1144461 - DNA, 15 bp, Homo sapiens
cacgatggttatgaa

SEQ ID NO: 1144462 - DNA, 15 bp, Homo sapiens
ccacgatggttatga

SEQ ID NO: 1144463 - DNA, 15 bp, Homo sapiens
cccacgatggttatg

SEQ ID NO: 1144464 - DNA, 15 bp, Homo sapiens
acccacgatggttat

SEQ ID NO: 1144465 - DNA, 15 bp, Homo sapiens
cacccacgatggtta

SEQ ID NO: 1144466 - DNA, 15 bp, Homo sapiens
gcacccacgatggtt

SEQ ID NO: 1144467 - DNA, 15 bp, Homo sapiens
ggcacccacgatggt

SEQ ID NO: 1144468 - DNA, 15 bp, Homo sapiens
gggcacccacgatgg

SEQ ID NO: 1144469 - DNA, 15 bp, Homo sapiens
tgggcacccacgatg

SEQ ID NO: 1144470 - DNA, 15 bp, Homo sapiens
atgggcacccacgat

SEQ ID NO: 1144471 - DNA, 15 bp, Homo sapiens
catgggcacccacga

SEQ ID NO: 1144472 - DNA, 15 bp, Homo sapiens
ccatgggcacccacg

SEQ ID NO: 1144473 - DNA, 15 bp, Homo sapiens
cccatgggcacccac

SEQ ID NO: 1144474 - DNA, 15 bp, Homo sapiens
gcccatgggcaccca

SEQ ID NO: 1144475 - DNA, 15 bp, Homo sapiens
tgcccatgggcaccc

SEQ ID NO: 1144476 - DNA, 15 bp, Homo sapiens
atgcccatgggcacc

SEQ ID NO: 1144477 - DNA, 15 bp, Homo sapiens
aatgcccatgggcac

SEQ ID NO: 1144478 - DNA, 15 bp, Homo sapiens
aaatgcccatgggca

SEQ ID NO: 1144479 - DNA, 15 bp, Homo sapiens
caaatgcccatgggc

SEQ ID NO: 1144480 - DNA, 15 bp, Homo sapiens
ccaaatgcccatggg

SEQ ID NO: 1144481 - DNA, 15 bp, Homo sapiens
tccaaatgcccatgg

SEQ ID NO: 1144482 - DNA, 15 bp, Homo sapiens
atccaaatgcccatg

SEQ ID NO: 1144483 - DNA, 15 bp, Homo sapiens
gatccaaatgcccat

SEQ ID NO: 1144484 - DNA, 15 bp, Homo sapiens
ggatccaaatgccca

SEQ ID NO: 1144485 - DNA, 15 bp, Homo sapiens
tggatccaaatgccc

SEQ ID NO: 1144486 - DNA, 15 bp, Homo sapiens
ctggatccaaatgcc

SEQ ID NO: 1144487 - DNA, 15 bp, Homo sapiens
cctggatccaaatgc

SEQ ID NO: 1144488 - DNA, 15 bp, Homo sapiens
tcctggatccaaatg

SEQ ID NO: 1144489 - DNA, 15 bp, Homo sapiens
gtcctggatccaaat

SEQ ID NO: 1144490 - DNA, 15 bp, Homo sapiens
tgtcctggatccaaa

SEQ ID NO: 1144491 - DNA, 15 bp, Homo sapiens
ttgtcctggatccaa

SEQ ID NO: 1144492 - DNA, 15 bp, Homo sapiens
gttgtcctggatcca

SEQ ID NO: 1144493 - DNA, 15 bp, Homo sapiens
ggttgtcctggatcc

SEQ ID NO: 1144494 - DNA, 15 bp, Homo sapiens
aggttgtcctggatc

SEQ ID NO: 1144495 - DNA, 15 bp, Homo sapiens
caggttgtcctggat

SEQ ID NO: 1144496 - DNA, 15 bp, Homo sapiens
ccaggttgtcctgga

SEQ ID NO: 1144497 - DNA, 15 bp, Homo sapiens
tccaggttgtcctgg

SEQ ID NO: 1144498 - DNA, 15 bp, Homo sapiens
ctccaggttgtcctg

SEQ ID NO: 1144499 - DNA, 15 bp, Homo sapiens
cctccaggttgtcct

SEQ ID NO: 1144500 - DNA, 15 bp, Homo sapiens
tcctccaggttgtcc

SEQ ID NO: 1144501 - DNA, 15 bp, Homo sapiens
atcctccaggttgtc

SEQ ID NO: 1144502 - DNA, 15 bp, Homo sapiens
tatcctccaggttgt

SEQ ID NO: 1144503 - DNA, 15 bp, Homo sapiens
ctatcctccaggttg

SEQ ID NO: 1144504 - DNA, 15 bp, Homo sapiens
tctatcctccaggtt

SEQ ID NO: 1144505 - DNA, 15 bp, Homo sapiens
ctctatcctccaggt

SEQ ID NO: 1144506 - DNA, 15 bp, Homo sapiens
actctatcctccagg

SEQ ID NO: 1144507 - DNA, 15 bp, Homo sapiens
tactctatcctccag

SEQ ID NO: 1144508 - DNA, 15 bp, Homo sapiens
atactctatcctcca

SEQ ID NO: 1144509 - DNA, 15 bp, Homo sapiens
aatactctatcctcc

SEQ ID NO: 1144510 - DNA, 15 bp, Homo sapiens
caatactctatcctc

SEQ ID NO: 1144511 - DNA, 15 bp, Homo sapiens
ccaatactctatcct

SEQ ID NO: 1144512 - DNA, 15 bp, Homo sapiens
cccaatactctatcc

SEQ ID NO: 1144513 - DNA, 15 bp, Homo sapiens
ccccaatactctatc

SEQ ID NO: 1144514 - DNA, 15 bp, Homo sapiens
tccccaatactctat

SEQ ID NO: 1144515 - DNA, 15 bp, Homo sapiens
ctccccaatactcta

SEQ ID NO: 1144516 - DNA, 15 bp, Homo sapiens
cctccccaatactct

SEQ ID NO: 1144517 - DNA, 15 bp, Homo sapiens
tcctccccaatactc

SEQ ID NO: 1144518 - DNA, 15 bp, Homo sapiens
atcctccccaatact

SEQ ID NO: 1144519 - DNA, 15 bp, Homo sapiens
tatcctccccaatac

SEQ ID NO: 1144520 - DNA, 15 bp, Homo sapiens
gtatcctccccaata

SEQ ID NO: 1144521 - DNA, 15 bp, Homo sapiens
ggtatcctccccaat

SEQ ID NO: 1144522 - DNA, 15 bp, Homo sapiens
aggtatcctccccaa

SEQ ID NO: 1144523 - DNA, 15 bp, Homo sapiens
caggtatcctcccca

SEQ ID NO: 1144524 - DNA, 15 bp, Homo sapiens
acaggtatcctcccc

SEQ ID NO: 1144525 - DNA, 15 bp, Homo sapiens
cacaggtatcctccc

SEQ ID NO: 1144526 - DNA, 15 bp, Homo sapiens
gcacaggtatcctcc

SEQ ID NO: 1144527 - DNA, 15 bp, Homo sapiens
ggcacaggtatcctc

SEQ ID NO: 1144528 - DNA, 15 bp, Homo sapiens
gggcacaggtatcct

SEQ ID NO: 1144529 - DNA, 15 bp, Homo sapiens
tgggcacaggtatcc

SEQ ID NO: 1144530 - DNA, 15 bp, Homo sapiens
ctgggcacaggtatc

SEQ ID NO: 1144531 - DNA, 15 bp, Homo sapiens
actgggcacaggtat

SEQ ID NO: 1144532 - DNA, 15 bp, Homo sapiens
tactgggcacaggta

SEQ ID NO: 1144533 - DNA, 15 bp, Homo sapiens
atactgggcacaggt

SEQ ID NO: 1144534 - DNA, 15 bp, Homo sapiens
gatactgggcacagg

SEQ ID NO: 1144535 - DNA, 15 bp, Homo sapiens
agatactgggcacag

SEQ ID NO: 1144536 - DNA, 15 bp, Homo sapiens
aagatactgggcaca

SEQ ID NO: 1144537 - DNA, 15 bp, Homo sapiens
taagatactgggcac

SEQ ID NO: 1144538 - DNA, 15 bp, Homo sapiens
ttaagatactgggca

SEQ ID NO: 1144539 - DNA, 15 bp, Homo sapiens
tttaagatactgggc

SEQ ID NO: 1144540 - DNA, 15 bp, Homo sapiens
ctttaagatactggg

SEQ ID NO: 1144541 - DNA, 15 bp, Homo sapiens
cctttaagatactgg

SEQ ID NO: 1144542 - DNA, 15 bp, Homo sapiens
gcctttaagatactg

SEQ ID NO: 1144543 - DNA, 15 bp, Homo sapiens
ggcctttaagatact

SEQ ID NO: 1144544 - DNA, 15 bp, Homo sapiens
aggcctttaagatac

SEQ ID NO: 1144545 - DNA, 15 bp, Homo sapiens
aaggcctttaagata

SEQ ID NO: 1144546 - DNA, 15 bp, Homo sapiens
caaggcctttaagat

SEQ ID NO: 1144547 - DNA, 15 bp, Homo sapiens
gcaaggcctttaaga

SEQ ID NO: 1144548 - DNA, 15 bp, Homo sapiens
agcaaggcctttaag

SEQ ID NO: 1144549 - DNA, 15 bp, Homo sapiens
gagcaaggcctttaa

SEQ ID NO: 1144550 - DNA, 15 bp, Homo sapiens
tgagcaaggccttta

SEQ ID NO: 1144551 - DNA, 15 bp, Homo sapiens
ttgagcaaggccttt

SEQ ID NO: 1144552 - DNA, 15 bp, Homo sapiens
cttgagcaaggcctt

SEQ ID NO: 1144553 - DNA, 15 bp, Homo sapiens
tcttgagcaaggcct

SEQ ID NO: 1144554 - DNA, 15 bp, Homo sapiens
atcttgagcaaggcc

SEQ ID NO: 1144555 - DNA, 15 bp, Homo sapiens
catcttgagcaaggc

SEQ ID NO: 1144556 - DNA, 15 bp, Homo sapiens
tcatcttgagcaagg

SEQ ID NO: 1144557 - DNA, 15 bp, Homo sapiens
ttcatcttgagcaag

SEQ ID NO: 1144558 - DNA, 15 bp, Homo sapiens
tttcatcttgagcaa

SEQ ID NO: 1144559 - DNA, 15 bp, Homo sapiens
atttcatcttgagca

SEQ ID NO: 1144560 - DNA, 15 bp, Homo sapiens
aatttcatcttgagc

SEQ ID NO: 1144561 - DNA, 15 bp, Homo sapiens
caatttcatcttgag

SEQ ID NO: 1144562 - DNA, 15 bp, Homo sapiens
ccaatttcatcttga

SEQ ID NO: 1144563 - DNA, 15 bp, Homo sapiens
gccaatttcatcttg

SEQ ID NO: 1144564 - DNA, 15 bp, Homo sapiens
agccaatttcatctt

SEQ ID NO: 1144565 - DNA, 15 bp, Homo sapiens
cagccaatttcatct

SEQ ID NO: 1144566 - DNA, 15 bp, Homo sapiens
tcagccaatttcatc

SEQ ID NO: 1144567 - DNA, 15 bp, Homo sapiens
atcagccaatttcat

SEQ ID NO: 1144568 - DNA, 15 bp, Homo sapiens
aatcagccaatttca

SEQ ID NO: 1144569 - DNA, 15 bp, Homo sapiens
aaatcagccaatttc

SEQ ID NO: 1144570 - DNA, 15 bp, Homo sapiens
taaatcagccaattt

SEQ ID NO: 1144571 - DNA, 15 bp, Homo sapiens
ctaaatcagccaatt

SEQ ID NO: 1144572 - DNA, 15 bp, Homo sapiens
cctaaatcagccaat

SEQ ID NO: 1144573 - DNA, 15 bp, Homo sapiens
ccctaaatcagccaa

SEQ ID NO: 1144574 - DNA, 15 bp, Homo sapiens
accctaaatcagcca

SEQ ID NO: 1144575 - DNA, 15 bp, Homo sapiens
aaccctaaatcagcc

SEQ ID NO: 1144576 - DNA, 15 bp, Homo sapiens
caaccctaaatcagc

SEQ ID NO: 1144577 - DNA, 15 bp, Homo sapiens
tcaaccctaaatcag

SEQ ID NO: 1144578 - DNA, 15 bp, Homo sapiens
gtcaaccctaaatca

SEQ ID NO: 1144579 - DNA, 15 bp, Homo sapiens
tgtcaaccctaaatc

SEQ ID NO: 1144580 - DNA, 15 bp, Homo sapiens
atgtcaaccctaaat

SEQ ID NO: 1144581 - DNA, 15 bp, Homo sapiens
catgtcaaccctaaa

SEQ ID NO: 1144582 - DNA, 15 bp, Homo sapiens
ccatgtcaaccctaa

SEQ ID NO: 1144583 - DNA, 15 bp, Homo sapiens
accatgtcaacccta

SEQ ID NO: 1144584 - DNA, 15 bp, Homo sapiens
aaccatgtcaaccct

SEQ ID NO: 1144585 - DNA, 15 bp, Homo sapiens
aaaccatgtcaaccc

SEQ ID NO: 1144586 - DNA, 15 bp, Homo sapiens
taaaccatgtcaacc

SEQ ID NO: 1144587 - DNA, 15 bp, Homo sapiens
ctaaaccatgtcaac

SEQ ID NO: 1144588 - DNA, 15 bp, Homo sapiens
gctaaaccatgtcaa

SEQ ID NO: 1144589 - DNA, 15 bp, Homo sapiens
agctaaaccatgtca

SEQ ID NO: 1144590 - DNA, 15 bp, Homo sapiens
cagctaaaccatgtc

SEQ ID NO: 1144591 - DNA, 15 bp, Homo sapiens
ccagctaaaccatgt

SEQ ID NO: 1144592 - DNA, 15 bp, Homo sapiens
cccagctaaaccatg

SEQ ID NO: 1144593 - DNA, 15 bp, Homo sapiens
tcccagctaaaccat

SEQ ID NO: 1144594 - DNA, 15 bp, Homo sapiens
ttcccagctaaacca

SEQ ID NO: 1144595 - DNA, 15 bp, Homo sapiens
tttcccagctaaacc

SEQ ID NO: 1144596 - DNA, 15 bp, Homo sapiens
ttttcccagctaaac

SEQ ID NO: 1144597 - DNA, 15 bp, Homo sapiens
tttttcccagctaaa

SEQ ID NO: 1144598 - DNA, 15 bp, Homo sapiens
ttttttcccagctaa

SEQ ID NO: 1144599 - DNA, 15 bp, Homo sapiens
tttttttcccagcta

SEQ ID NO: 1144600 - DNA, 15 bp, Homo sapiens
gtttttttcccagct

SEQ ID NO: 1144601 - DNA, 15 bp, Homo sapiens
tgtttttttcccagc

SEQ ID NO: 1144602 - DNA, 15 bp, Homo sapiens
ttgtttttttcccag

SEQ ID NO: 1144603 - DNA, 15 bp, Homo sapiens
tttgtttttttccca

SEQ ID NO: 1144604 - DNA, 15 bp, Homo sapiens
ttttgtttttttccc

SEQ ID NO: 1144605 - DNA, 15 bp, Homo sapiens
tttttttgttttttg

SEQ ID NO: 1144606 - DNA, 15 bp, Homo sapiens
ctgtttttttgtttt

SEQ ID NO: 1144607 - DNA, 15 bp, Homo sapiens
ggcctgtttttttgt

SEQ ID NO: 1144608 - DNA, 15 bp, Homo sapiens
tggcctgtttttttg

SEQ ID NO: 1144609 - DNA, 15 bp, Homo sapiens
ctggcctgttttttt

SEQ ID NO: 1144610 - DNA, 15 bp, Homo sapiens
cctggcctgtttttt

SEQ ID NO: 1144611 - DNA, 15 bp, Homo sapiens
gcctggcctgttttt

SEQ ID NO: 1144612 - DNA, 15 bp, Homo sapiens
tgcctggcctgtttt

SEQ ID NO: 1144613 - DNA, 15 bp, Homo sapiens
gtgcctggcctgttt

SEQ ID NO: 1144614 - DNA, 15 bp, Homo sapiens
tgtgcctggcctgtt

SEQ ID NO: 1144615 - DNA, 15 bp, Homo sapiens
ttgtgcctggcctgt

SEQ ID NO: 1144616 - DNA, 15 bp, Homo sapiens
attgtgcctggcctg

SEQ ID NO: 1144617 - DNA, 15 bp, Homo sapiens
cattgtgcctggcct

SEQ ID NO: 1144618 - DNA, 15 bp, Homo sapiens
ccattgtgcctggcc

SEQ ID NO: 1144619 - DNA, 15 bp, Homo sapiens
gccattgtgcctggc

SEQ ID NO: 1144620 - DNA, 15 bp, Homo sapiens
agccattgtgcctgg

SEQ ID NO: 1144621 - DNA, 15 bp, Homo sapiens
gagccattgtgcctg

SEQ ID NO: 1144622 - DNA, 15 bp, Homo sapiens
tgagccattgtgcct

SEQ ID NO: 1144623 - DNA, 15 bp, Homo sapiens
gtgagccattgtgcc

SEQ ID NO: 1144624 - DNA, 15 bp, Homo sapiens
cgtgagccattgtgc

SEQ ID NO: 1144625 - DNA, 15 bp, Homo sapiens
gcgtgagccattgtg

SEQ ID NO: 1144626 - DNA, 15 bp, Homo sapiens
ggcgtgagccattgt

SEQ ID NO: 1144627 - DNA, 15 bp, Homo sapiens
aggcgtgagccattg

SEQ ID NO: 1144628 - DNA, 15 bp, Homo sapiens
caggcgtgagccatt

SEQ ID NO: 1144629 - DNA, 15 bp, Homo sapiens
tcaaggtgctgggat

SEQ ID NO: 1144630 - DNA, 15 bp, Homo sapiens
ctcaaggtgctggga

SEQ ID NO: 1144631 - DNA, 15 bp, Homo sapiens
tctcaaggtgctggg

SEQ ID NO: 1144632 - DNA, 15 bp, Homo sapiens
ctctcaaggtgctgg

SEQ ID NO: 1144633 - DNA, 15 bp, Homo sapiens
cctctcaaggtgctg

SEQ ID NO: 1144634 - DNA, 15 bp, Homo sapiens
gcctctcaaggtgct

SEQ ID NO: 1144635 - DNA, 15 bp, Homo sapiens
ggcctctcaaggtgc

SEQ ID NO: 1144636 - DNA, 15 bp, Homo sapiens
tggcctctcaaggtg

SEQ ID NO: 1144637 - DNA, 15 bp, Homo sapiens
ttggcctctcaaggt

SEQ ID NO: 1144638 - DNA, 15 bp, Homo sapiens
cttggcctctcaagg

SEQ ID NO: 1144639 - DNA, 15 bp, Homo sapiens
ccttggcctctcaag

SEQ ID NO: 1144640 - DNA, 15 bp, Homo sapiens
cgccttggcctctca

SEQ ID NO: 1144641 - DNA, 15 bp, Homo sapiens
ccgccttggcctctc

SEQ ID NO: 1144642 - DNA, 15 bp, Homo sapiens
cccgccttggcctct

SEQ ID NO: 1144643 - DNA, 15 bp, Homo sapiens
caccgtgcccagcta

SEQ ID NO: 1144644 - DNA, 15 bp, Homo sapiens
ccaccgtgcccagct

SEQ ID NO: 1144645 - DNA, 15 bp, Homo sapiens
gccaccgtgcccagc

SEQ ID NO: 1144646 - DNA, 15 bp, Homo sapiens
cgccaccgtgcccag

SEQ ID NO: 1144647 - DNA, 15 bp, Homo sapiens
ccgccaccgtgccca

SEQ ID NO: 1144648 - DNA, 15 bp, Homo sapiens
cccgccaccgtgccc

SEQ ID NO: 1144649 - DNA, 15 bp, Homo sapiens
acccgccaccgtgcc

SEQ ID NO: 1144650 - DNA, 15 bp, Homo sapiens
cacccgccaccgtgc

SEQ ID NO: 1144651 - DNA, 15 bp, Homo sapiens
gcacccgccaccgtg

SEQ ID NO: 1144652 - DNA, 15 bp, Homo sapiens
ggcacccgccaccgt

SEQ ID NO: 1144653 - DNA, 15 bp, Homo sapiens
aggcacccgccaccg

SEQ ID NO: 1144654 - DNA, 15 bp, Homo sapiens
agactacaggcaccc

SEQ ID NO: 1144655 - DNA, 15 bp, Homo sapiens
gagactacaggcacc

SEQ ID NO: 1144656 - DNA, 15 bp, Homo sapiens
gctctgcctcccggg

SEQ ID NO: 1144657 - DNA, 15 bp, Homo sapiens
agctctgcctcccgg

SEQ ID NO: 1144658 - DNA, 15 bp, Homo sapiens
aagctctgcctcccg

SEQ ID NO: 1144659 - DNA, 15 bp, Homo sapiens
caagctctgcctccc

SEQ ID NO: 1144660 - DNA, 15 bp, Homo sapiens
gcagtcttggctcac

SEQ ID NO: 1144661 - DNA, 15 bp, Homo sapiens
cgcagtcttggctca

SEQ ID NO: 1144662 - DNA, 15 bp, Homo sapiens
gcgcagtcttggctc

SEQ ID NO: 1144663 - DNA, 15 bp, Homo sapiens
ggcgcagtcttggct

SEQ ID NO: 1144664 - DNA, 15 bp, Homo sapiens
tggcgcagtcttggc

SEQ ID NO: 1144665 - DNA, 15 bp, Homo sapiens
gtggcgcagtcttgg

SEQ ID NO: 1144666 - DNA, 15 bp, Homo sapiens
agtggcgcagtcttg

SEQ ID NO: 1144667 - DNA, 15 bp, Homo sapiens
cagtggcgcagtctt

SEQ ID NO: 1144668 - DNA, 15 bp, Homo sapiens
gctgtcgcccaggct

SEQ ID NO: 1144669 - DNA, 15 bp, Homo sapiens
cgctgtcgcccaggc

SEQ ID NO: 1144670 - DNA, 15 bp, Homo sapiens
gcgctgtcgcccagg

SEQ ID NO: 1144671 - DNA, 15 bp, Homo sapiens
tgcgctgtcgcccag

SEQ ID NO: 1144672 - DNA, 15 bp, Homo sapiens
ttgcgctgtcgccca

SEQ ID NO: 1144673 - DNA, 15 bp, Homo sapiens
cttgcgctgtcgccc

SEQ ID NO: 1144674 - DNA, 15 bp, Homo sapiens
tcttgcgctgtcgcc

SEQ ID NO: 1144675 - DNA, 15 bp, Homo sapiens
gtcttgcgctgtcgc

SEQ ID NO: 1144676 - DNA, 15 bp, Homo sapiens
agtcttgcgctgtcg

SEQ ID NO: 1144677 - DNA, 15 bp, Homo sapiens
cagtcttgcgctgtc

SEQ ID NO: 1144678 - DNA, 15 bp, Homo sapiens
gcagtcttgcgctgt

SEQ ID NO: 1144679 - DNA, 15 bp, Homo sapiens
tgcagtcttgcgctg

SEQ ID NO: 1144680 - DNA, 15 bp, Homo sapiens
atgcagtcttgcgct

SEQ ID NO: 1144681 - DNA, 15 bp, Homo sapiens
tatgcagtcttgcgc

SEQ ID NO: 1144682 - DNA, 15 bp, Homo sapiens
ttatgcagtcttgcg

SEQ ID NO: 1144683 - DNA, 15 bp, Homo sapiens
tttatgcagtcttgc

SEQ ID NO: 1144684 - DNA, 15 bp, Homo sapiens
ttttatgcagtcttg

SEQ ID NO: 1144685 - DNA, 15 bp, Homo sapiens
tttttatgcagtctt

SEQ ID NO: 1144686 - DNA, 15 bp, Homo sapiens
gtttttatgcagtct

SEQ ID NO: 1144687 - DNA, 15 bp, Homo sapiens
tgtttttatgcagtc

SEQ ID NO: 1144688 - DNA, 15 bp, Homo sapiens
ttgtttttatgcagt

SEQ ID NO: 1144689 - DNA, 15 bp, Homo sapiens
gttgtttttatgcag

SEQ ID NO: 1144690 - DNA, 15 bp, Homo sapiens
tgttgtttttatgca

SEQ ID NO: 1144691 - DNA, 15 bp, Homo sapiens
ttgttgtttttatgc

SEQ ID NO: 1144692 - DNA, 15 bp, Homo sapiens
gttgttgtttttatg

SEQ ID NO: 1144693 - DNA, 15 bp, Homo sapiens
tgttgttgtttttat

SEQ ID NO: 1144694 - DNA, 15 bp, Homo sapiens
ctgttgttgttttta

SEQ ID NO: 1144695 - DNA, 15 bp, Homo sapiens
gctgttgttgttttt

SEQ ID NO: 1144696 - DNA, 15 bp, Homo sapiens
tgctgttgttgtttt

SEQ ID NO: 1144697 - DNA, 15 bp, Homo sapiens
ttgctgttgttgttt

SEQ ID NO: 1144698 - DNA, 15 bp, Homo sapiens
gttgctgttgttgtt

SEQ ID NO: 1144699 - DNA, 15 bp, Homo sapiens
tgttgctgttgttgt

SEQ ID NO: 1144700 - DNA, 15 bp, Homo sapiens
ttgttgctgttgttg

SEQ ID NO: 1144701 - DNA, 15 bp, Homo sapiens
tttttgttgctgttg

SEQ ID NO: 1144702 - DNA, 15 bp, Homo sapiens
ttttttgttgctgtt

SEQ ID NO: 1144703 - DNA, 15 bp, Homo sapiens
tttttttgttgctgt

SEQ ID NO: 1144704 - DNA, 15 bp, Homo sapiens
ttttttttgttgctg

SEQ ID NO: 1144705 - DNA, 15 bp, Homo sapiens
gttttttttgttgct

SEQ ID NO: 1144706 - DNA, 15 bp, Homo sapiens
ggttttttttgttgc

SEQ ID NO: 1144707 - DNA, 15 bp, Homo sapiens
gggttttttttgttg

SEQ ID NO: 1144708 - DNA, 15 bp, Homo sapiens
tgggttttttttgtt

SEQ ID NO: 1144709 - DNA, 15 bp, Homo sapiens
ttgggttttttttgt

SEQ ID NO: 1144710 - DNA, 15 bp, Homo sapiens
tttgggttttttttg

SEQ ID NO: 1144711 - DNA, 15 bp, Homo sapiens
gtttgggtttttttt

SEQ ID NO: 1144712 - DNA, 15 bp, Homo sapiens
tgtttgggttttttt

SEQ ID NO: 1144713 - DNA, 15 bp, Homo sapiens
ttgtttgggtttttt

SEQ ID NO: 1144714 - DNA, 15 bp, Homo sapiens
tttgtttgggttttt

SEQ ID NO: 1144715 - DNA, 15 bp, Homo sapiens
gtttgtttgggtttt

SEQ ID NO: 1144716 - DNA, 15 bp, Homo sapiens
tgtttgtttgggttt

SEQ ID NO: 1144717 - DNA, 15 bp, Homo sapiens
ttgtttgtttgggtt

SEQ ID NO: 1144718 - DNA, 15 bp, Homo sapiens
ttttgtttgtttggg

SEQ ID NO: 1144719 - DNA, 15 bp, Homo sapiens
tttttgtttgtttgg

SEQ ID NO: 1144720 - DNA, 15 bp, Homo sapiens
agctttttgtttgtt

SEQ ID NO: 1144721 - DNA, 15 bp, Homo sapiens
aagctttttgtttgt

SEQ ID NO: 1144722 - DNA, 15 bp, Homo sapiens
taagctttttgtttg

SEQ ID NO: 1144723 - DNA, 15 bp, Homo sapiens
ttaagctttttgttt

SEQ ID NO: 1144724 - DNA, 15 bp, Homo sapiens
cttaagctttttgtt

SEQ ID NO: 1144725 - DNA, 15 bp, Homo sapiens
gcttaagctttttgt

SEQ ID NO: 1144726 - DNA, 15 bp, Homo sapiens
agcttaagctttttg

SEQ ID NO: 1144727 - DNA, 15 bp, Homo sapiens
aagcttaagcttttt

SEQ ID NO: 1144728 - DNA, 15 bp, Homo sapiens
taagcttaagctttt

SEQ ID NO: 1144729 - DNA, 15 bp, Homo sapiens
ttaagcttaagcttt

SEQ ID NO: 1144730 - DNA, 15 bp, Homo sapiens
tttaagcttaagctt

SEQ ID NO: 1144731 - DNA, 15 bp, Homo sapiens
atttaagcttaagct

SEQ ID NO: 1144732 - DNA, 15 bp, Homo sapiens
catttaagcttaagc

SEQ ID NO: 1144733 - DNA, 15 bp, Homo sapiens
ccatttaagcttaag

SEQ ID NO: 1144734 - DNA, 15 bp, Homo sapiens
gccatttaagcttaa

SEQ ID NO: 1144735 - DNA, 15 bp, Homo sapiens
agccatttaagctta

SEQ ID NO: 1144736 - DNA, 15 bp, Homo sapiens
tagccatttaagctt

SEQ ID NO: 1144737 - DNA, 15 bp, Homo sapiens
gtagccatttaagct

SEQ ID NO: 1144738 - DNA, 15 bp, Homo sapiens
agtagccatttaagc

SEQ ID NO: 1144739 - DNA, 15 bp, Homo sapiens
tagtagccatttaag

SEQ ID NO: 1144740 - DNA, 15 bp, Homo sapiens
atagtagccatttaa

SEQ ID NO: 1144741 - DNA, 15 bp, Homo sapiens
aatagtagccattta

SEQ ID NO: 1144742 - DNA, 15 bp, Homo sapiens
caatagtagccattt

SEQ ID NO: 1144743 - DNA, 15 bp, Homo sapiens
acaatagtagccatt

SEQ ID NO: 1144744 - DNA, 15 bp, Homo sapiens
aacaatagtagccat

SEQ ID NO: 1144745 - DNA, 15 bp, Homo sapiens
aaacaatagtagcca

SEQ ID NO: 1144746 - DNA, 15 bp, Homo sapiens
aaaacaatagtagcc

SEQ ID NO: 1144747 - DNA, 15 bp, Homo sapiens
aaaaacaatagtagc

SEQ ID NO: 1144748 - DNA, 15 bp, Homo sapiens
gaaaaacaatagtag

SEQ ID NO: 1144749 - DNA, 15 bp, Homo sapiens
tgaaaaacaatagta

SEQ ID NO: 1144750 - DNA, 15 bp, Homo sapiens
atgaaaaacaatagt

SEQ ID NO: 1144751 - DNA, 15 bp, Homo sapiens
catgaaaaacaatag

SEQ ID NO: 1144752 - DNA, 15 bp, Homo sapiens
tcatgaaaaacaata

SEQ ID NO: 1144753 - DNA, 15 bp, Homo sapiens
ctcatgaaaaacaat

SEQ ID NO: 1144754 - DNA, 15 bp, Homo sapiens
cctcatgaaaaacaa

SEQ ID NO: 1144755 - DNA, 15 bp, Homo sapiens
tcctcatgaaaaaca

SEQ ID NO: 1144756 - DNA, 15 bp, Homo sapiens
ttcctcatgaaaaac

SEQ ID NO: 1144757 - DNA, 15 bp, Homo sapiens
attcctcatgaaaaa

SEQ ID NO: 1144758 - DNA, 15 bp, Homo sapiens
aattcctcatgaaaa

SEQ ID NO: 1144759 - DNA, 15 bp, Homo sapiens
gaattcctcatgaaa

SEQ ID NO: 1144760 - DNA, 15 bp, Homo sapiens
tgaattcctcatgaa

SEQ ID NO: 1144761 - DNA, 15 bp, Homo sapiens
ctgaattcctcatga

SEQ ID NO: 1144762 - DNA, 15 bp, Homo sapiens
tctgaattcctcatg

SEQ ID NO: 1144763 - DNA, 15 bp, Homo sapiens
gtctgaattcctcat

SEQ ID NO: 1144764 - DNA, 15 bp, Homo sapiens
tgtctgaattcctca

SEQ ID NO: 1144765 - DNA, 15 bp, Homo sapiens
atgtctgaattcctc

SEQ ID NO: 1144766 - DNA, 15 bp, Homo sapiens
tatgtctgaattcct

SEQ ID NO: 1144767 - DNA, 15 bp, Homo sapiens
ttatgtctgaattcc

SEQ ID NO: 1144768 - DNA, 15 bp, Homo sapiens
attatgtctgaattc

SEQ ID NO: 1144769 - DNA, 15 bp, Homo sapiens
aattatgtctgaatt

SEQ ID NO: 1144770 - DNA, 15 bp, Homo sapiens
caattatgtctgaat

SEQ ID NO: 1144771 - DNA, 15 bp, Homo sapiens
acaattatgtctgaa

SEQ ID NO: 1144772 - DNA, 15 bp, Homo sapiens
aacaattatgtctga

SEQ ID NO: 1144773 - DNA, 15 bp, Homo sapiens
caacaattatgtctg

SEQ ID NO: 1144774 - DNA, 15 bp, Homo sapiens
tcaacaattatgtct

SEQ ID NO: 1144775 - DNA, 15 bp, Homo sapiens
atcaacaattatgtc

SEQ ID NO: 1144776 - DNA, 15 bp, Homo sapiens
catcaacaattatgt

SEQ ID NO: 1144777 - DNA, 15 bp, Homo sapiens
tcatcaacaattatg

SEQ ID NO: 1144778 - DNA, 15 bp, Homo sapiens
ctcatcaacaattat

SEQ ID NO: 1144779 - DNA, 15 bp, Homo sapiens
actcatcaacaatta

SEQ ID NO: 1144780 - DNA, 15 bp, Homo sapiens
gactcatcaacaatt

SEQ ID NO: 1144781 - DNA, 15 bp, Homo sapiens
tgactcatcaacaat

SEQ ID NO: 1144782 - DNA, 15 bp, Homo sapiens
ttgactcatcaacaa

SEQ ID NO: 1144783 - DNA, 15 bp, Homo sapiens
attgactcatcaaca

SEQ ID NO: 1144784 - DNA, 15 bp, Homo sapiens
aattgactcatcaac

SEQ ID NO: 1144785 - DNA, 15 bp, Homo sapiens
taattgactcatcaa

SEQ ID NO: 1144786 - DNA, 15 bp, Homo sapiens
ctaattgactcatca

SEQ ID NO: 1144787 - DNA, 15 bp, Homo sapiens
cctaattgactcatc

SEQ ID NO: 1144788 - DNA, 15 bp, Homo sapiens
acctaattgactcat

SEQ ID NO: 1144789 - DNA, 15 bp, Homo sapiens
tacctaattgactca

SEQ ID NO: 1144790 - DNA, 15 bp, Homo sapiens
ttacctaattgactc

SEQ ID NO: 1144791 - DNA, 15 bp, Homo sapiens
tttacctaattgact

SEQ ID NO: 1144792 - DNA, 15 bp, Homo sapiens
atttacctaattgac

SEQ ID NO: 1144793 - DNA, 15 bp, Homo sapiens
tatttacctaattga

SEQ ID NO: 1144794 - DNA, 15 bp, Homo sapiens
gtatttacctaattg

SEQ ID NO: 1144795 - DNA, 15 bp, Homo sapiens
tgtatttacctaatt

SEQ ID NO: 1144796 - DNA, 15 bp, Homo sapiens
ttgtatttacctaat

SEQ ID NO: 1144797 - DNA, 15 bp, Homo sapiens
tatttgtatttacct

SEQ ID NO: 1144798 - DNA, 15 bp, Homo sapiens
ctatttgtatttacc

SEQ ID NO: 1144799 - DNA, 15 bp, Homo sapiens
tctatttgtatttac

SEQ ID NO: 1144800 - DNA, 15 bp, Homo sapiens
ctctatttgtattta

SEQ ID NO: 1144801 - DNA, 15 bp, Homo sapiens
actctatttgtattt

SEQ ID NO: 1144802 - DNA, 15 bp, Homo sapiens
tactctatttgtatt

SEQ ID NO: 1144803 - DNA, 15 bp, Homo sapiens
ttactctatttgtat

SEQ ID NO: 1144804 - DNA, 15 bp, Homo sapiens
tttactctatttgta

SEQ ID NO: 1144805 - DNA, 15 bp, Homo sapiens
atttactctatttgt

SEQ ID NO: 1144806 - DNA, 15 bp, Homo sapiens
catttactctatttg

SEQ ID NO: 1144807 - DNA, 15 bp, Homo sapiens
acatttactctattt

SEQ ID NO: 1144808 - DNA, 15 bp, Homo sapiens
aacatttactctatt

SEQ ID NO: 1144809 - DNA, 15 bp, Homo sapiens
aaacatttactctat

SEQ ID NO: 1144810 - DNA, 15 bp, Homo sapiens
taaacatttactcta

SEQ ID NO: 1144811 - DNA, 15 bp, Homo sapiens
tgtaaacatttactc

SEQ ID NO: 1144812 - DNA, 15 bp, Homo sapiens
ttgtaaacatttact

SEQ ID NO: 1144813 - DNA, 15 bp, Homo sapiens
tttgtaaacatttac

SEQ ID NO: 1144814 - DNA, 15 bp, Homo sapiens
atttgtaaacattta

SEQ ID NO: 1144815 - DNA, 15 bp, Homo sapiens
tatttgtaaacattt

SEQ ID NO: 1144816 - DNA, 15 bp, Homo sapiens
ttatttgtaaacatt

SEQ ID NO: 1144817 - DNA, 15 bp, Homo sapiens
tttatttgtaaacat

SEQ ID NO: 1144818 - DNA, 15 bp, Homo sapiens
atttatttgtaaaca

SEQ ID NO: 1144819 - DNA, 15 bp, Homo sapiens
aatttatttgtaaac

SEQ ID NO: 1144820 - DNA, 15 bp, Homo sapiens
aaatttatttgtaaa

SEQ ID NO: 1144821 - DNA, 15 bp, Homo sapiens
taaatttatttgtaa

SEQ ID NO: 1144822 - DNA, 15 bp, Homo sapiens
ataaatttatttgta

SEQ ID NO: 1144823 - DNA, 15 bp, Homo sapiens
gataaatttatttgt

SEQ ID NO: 1144824 - DNA, 15 bp, Homo sapiens
tgataaatttatttg

SEQ ID NO: 1144825 - DNA, 15 bp, Homo sapiens
atgataaatttattt

SEQ ID NO: 1144826 - DNA, 15 bp, Homo sapiens
tatgataaatttatt

SEQ ID NO: 1144827 - DNA, 15 bp, Homo sapiens
ctatgataaatttat

SEQ ID NO: 1144828 - DNA, 15 bp, Homo sapiens
actatgataaattta

SEQ ID NO: 1144829 - DNA, 15 bp, Homo sapiens
aactatgataaattt

SEQ ID NO: 1144830 - DNA, 15 bp, Homo sapiens
aaactatgataaatt

SEQ ID NO: 1144831 - DNA, 15 bp, Homo sapiens
gaaactatgataaat

SEQ ID NO: 1144832 - DNA, 15 bp, Homo sapiens
tgaaactatgataaa

SEQ ID NO: 1144833 - DNA, 15 bp, Homo sapiens
ttgaaactatgataa

SEQ ID NO: 1144834 - DNA, 15 bp, Homo sapiens
tttgaaactatgata

SEQ ID NO: 1144835 - DNA, 15 bp, Homo sapiens
ttttgaaactatgat

SEQ ID NO: 1144836 - DNA, 15 bp, Homo sapiens
tttttgaaactatga

SEQ ID NO: 1144837 - DNA, 15 bp, Homo sapiens
atttttgaaactatg

SEQ ID NO: 1144838 - DNA, 15 bp, Homo sapiens
gatttttgaaactat

SEQ ID NO: 1144839 - DNA, 15 bp, Homo sapiens
agatttttgaaacta

SEQ ID NO: 1144840 - DNA, 15 bp, Homo sapiens
aagatttttgaaact

SEQ ID NO: 1144841 - DNA, 15 bp, Homo sapiens
aaagatttttgaaac

SEQ ID NO: 1144842 - DNA, 15 bp, Homo sapiens
aaaagatttttgaaa

SEQ ID NO: 1144843 - DNA, 15 bp, Homo sapiens
aaaaagatttttgaa

SEQ ID NO: 1144844 - DNA, 15 bp, Homo sapiens
caaaaagatttttga

SEQ ID NO: 1144845 - DNA, 15 bp, Homo sapiens
ccaaaaagatttttg

SEQ ID NO: 1144846 - DNA, 15 bp, Homo sapiens
accaaaaagattttt

SEQ ID NO: 1144847 - DNA, 15 bp, Homo sapiens
taccaaaaagatttt

SEQ ID NO: 1144848 - DNA, 15 bp, Homo sapiens
ttaccaaaaagattt

SEQ ID NO: 1144849 - DNA, 15 bp, Homo sapiens
attaccaaaaagatt

SEQ ID NO: 1144850 - DNA, 15 bp, Homo sapiens
aattaccaaaaagat

SEQ ID NO: 1144851 - DNA, 15 bp, Homo sapiens
caattaccaaaaaga

SEQ ID NO: 1144852 - DNA, 15 bp, Homo sapiens
tcaattaccaaaaag

SEQ ID NO: 1144853 - DNA, 15 bp, Homo sapiens
gtcaattaccaaaaa

SEQ ID NO: 1144854 - DNA, 15 bp, Homo sapiens
tgtcaattaccaaaa

SEQ ID NO: 1144855 - DNA, 15 bp, Homo sapiens
gtgtcaattaccaaa

SEQ ID NO: 1144856 - DNA, 15 bp, Homo sapiens
agtgtcaattaccaa

SEQ ID NO: 1144857 - DNA, 15 bp, Homo sapiens
gagtgtcaattacca

SEQ ID NO: 1144858 - DNA, 15 bp, Homo sapiens
agagtgtcaattacc

SEQ ID NO: 1144859 - DNA, 15 bp, Homo sapiens
aagagtgtcaattac

SEQ ID NO: 1144860 - DNA, 15 bp, Homo sapiens
taagagtgtcaatta

SEQ ID NO: 1144861 - DNA, 15 bp, Homo sapiens
ttaagagtgtcaatt

SEQ ID NO: 1144862 - DNA, 15 bp, Homo sapiens
tttaagagtgtcaat

SEQ ID NO: 1144863 - DNA, 15 bp, Homo sapiens
ctttaagagtgtcaa

SEQ ID NO: 1144864 - DNA, 15 bp, Homo sapiens
actttaagagtgtca

SEQ ID NO: 1144865 - DNA, 15 bp, Homo sapiens
gactttaagagtgtc

SEQ ID NO: 1144866 - DNA, 15 bp, Homo sapiens
agactttaagagtgt

SEQ ID NO: 1144867 - DNA, 15 bp, Homo sapiens
aagactttaagagtg

SEQ ID NO: 1144868 - DNA, 15 bp, Homo sapiens
taagactttaagagt

SEQ ID NO: 1144869 - DNA, 15 bp, Homo sapiens
ttaagactttaagag

SEQ ID NO: 1144870 - DNA, 15 bp, Homo sapiens
tttaagactttaaga

SEQ ID NO: 1144871 - DNA, 15 bp, Homo sapiens
ctttaagactttaag

SEQ ID NO: 1144872 - DNA, 15 bp, Homo sapiens
actttaagactttaa

SEQ ID NO: 1144873 - DNA, 15 bp, Homo sapiens
gactttaagacttta

SEQ ID NO: 1144874 - DNA, 15 bp, Homo sapiens
tgactttaagacttt

SEQ ID NO: 1144875 - DNA, 15 bp, Homo sapiens
atgactttaagactt

SEQ ID NO: 1144876 - DNA, 15 bp, Homo sapiens
catgactttaagact

SEQ ID NO: 1144877 - DNA, 15 bp, Homo sapiens
acatgactttaagac

SEQ ID NO: 1144878 - DNA, 15 bp, Homo sapiens
aacatgactttaaga

SEQ ID NO: 1144879 - DNA, 15 bp, Homo sapiens
taacatgactttaag

SEQ ID NO: 1144880 - DNA, 15 bp, Homo sapiens
ataacatgactttaa

SEQ ID NO: 1144881 - DNA, 15 bp, Homo sapiens
tataacatgacttta

SEQ ID NO: 1144882 - DNA, 15 bp, Homo sapiens
atataacatgacttt

SEQ ID NO: 1144883 - DNA, 15 bp, Homo sapiens
aatataacatgactt

SEQ ID NO: 1144884 - DNA, 15 bp, Homo sapiens
taatataacatgact

SEQ ID NO: 1144885 - DNA, 15 bp, Homo sapiens
ttaatataacatgac

SEQ ID NO: 1144886 - DNA, 15 bp, Homo sapiens
tttaatataacatga

SEQ ID NO: 1144887 - DNA, 15 bp, Homo sapiens
atttaatataacatg

SEQ ID NO: 1144888 - DNA, 15 bp, Homo sapiens
aatttaatataacat

SEQ ID NO: 1144889 - DNA, 15 bp, Homo sapiens
taatttaatataaca

SEQ ID NO: 1144890 - DNA, 15 bp, Homo sapiens
ttaatttaatataac

SEQ ID NO: 1144891 - DNA, 15 bp, Homo sapiens
cttaatttaatataa

SEQ ID NO: 1144892 - DNA, 15 bp, Homo sapiens
acttaatttaatata

SEQ ID NO: 1144893 - DNA, 15 bp, Homo sapiens
tacttaatttaatat

SEQ ID NO: 1144894 - DNA, 15 bp, Homo sapiens
ttacttaatttaata

SEQ ID NO: 1144895 - DNA, 15 bp, Homo sapiens
attacttaatttaat

SEQ ID NO: 1144896 - DNA, 15 bp, Homo sapiens
tattacttaatttaa

SEQ ID NO: 1144897 - DNA, 15 bp, Homo sapiens
ctattacttaattta

SEQ ID NO: 1144898 - DNA, 15 bp, Homo sapiens
actattacttaattt

SEQ ID NO: 1144899 - DNA, 15 bp, Homo sapiens
aactattacttaatt

SEQ ID NO: 1144900 - DNA, 15 bp, Homo sapiens
taactattacttaat

SEQ ID NO: 1144901 - DNA, 15 bp, Homo sapiens
ttaactattacttaa

SEQ ID NO: 1144902 - DNA, 15 bp, Homo sapiens
attaactattactta

SEQ ID NO: 1144903 - DNA, 15 bp, Homo sapiens
tattaactattactt

SEQ ID NO: 1144904 - DNA, 15 bp, Homo sapiens
ctattaactattact

SEQ ID NO: 1144905 - DNA, 15 bp, Homo sapiens
actattaactattac

SEQ ID NO: 1144906 - DNA, 15 bp, Homo sapiens
cactattaactatta

SEQ ID NO: 1144907 - DNA, 15 bp, Homo sapiens
tcactattaactatt

SEQ ID NO: 1144908 - DNA, 15 bp, Homo sapiens
ttcactattaactat

SEQ ID NO: 1144909 - DNA, 15 bp, Homo sapiens
tttcactattaacta

SEQ ID NO: 1144910 - DNA, 15 bp, Homo sapiens
atttcactattaact

SEQ ID NO: 1144911 - DNA, 15 bp, Homo sapiens
tatttcactattaac

SEQ ID NO: 1144912 - DNA, 15 bp, Homo sapiens
atatttcactattaa

SEQ ID NO: 1144913 - DNA, 15 bp, Homo sapiens
gatatttcactatta

SEQ ID NO: 1144914 - DNA, 15 bp, Homo sapiens
agatatttcactatt

SEQ ID NO: 1144915 - DNA, 15 bp, Homo sapiens
cagatatttcactat

SEQ ID NO: 1144916 - DNA, 15 bp, Homo sapiens
tcagatatttcacta

SEQ ID NO: 1144917 - DNA, 15 bp, Homo sapiens
ctcagatatttcact

SEQ ID NO: 1144918 - DNA, 15 bp, Homo sapiens
actcagatatttcac

SEQ ID NO: 1144919 - DNA, 15 bp, Homo sapiens
aactcagatatttca

SEQ ID NO: 1144920 - DNA, 15 bp, Homo sapiens
taactcagatatttc

SEQ ID NO: 1144921 - DNA, 15 bp, Homo sapiens
ataactcagatattt

SEQ ID NO: 1144922 - DNA, 15 bp, Homo sapiens
aataactcagatatt

SEQ ID NO: 1144923 - DNA, 15 bp, Homo sapiens
aaataactcagatat

SEQ ID NO: 1144924 - DNA, 15 bp, Homo sapiens
gaaataactcagata

SEQ ID NO: 1144925 - DNA, 15 bp, Homo sapiens
agaaataactcagat

SEQ ID NO: 1144926 - DNA, 15 bp, Homo sapiens
tagaaataactcaga

SEQ ID NO: 1144927 - DNA, 15 bp, Homo sapiens
ttagaaataactcag

SEQ ID NO: 1144928 - DNA, 15 bp, Homo sapiens
cttagaaataactca

SEQ ID NO: 1144929 - DNA, 15 bp, Homo sapiens
acttagaaataactc

SEQ ID NO: 1144930 - DNA, 15 bp, Homo sapiens
aacttagaaataact

SEQ ID NO: 1144931 - DNA, 15 bp, Homo sapiens
taacttagaaataac

SEQ ID NO: 1144932 - DNA, 15 bp, Homo sapiens
ttaacttagaaataa

SEQ ID NO: 1144933 - DNA, 15 bp, Homo sapiens
tttaacttagaaata

SEQ ID NO: 1144934 - DNA, 15 bp, Homo sapiens
ttttaacttagaaat

SEQ ID NO: 1144935 - DNA, 15 bp, Homo sapiens
attttaacttagaaa

SEQ ID NO: 1144936 - DNA, 15 bp, Homo sapiens
tattttaacttagaa

SEQ ID NO: 1144937 - DNA, 15 bp, Homo sapiens
gtattttaacttaga

SEQ ID NO: 1144938 - DNA, 15 bp, Homo sapiens
agtattttaacttag

SEQ ID NO: 1144939 - DNA, 15 bp, Homo sapiens
cagtattttaactta

SEQ ID NO: 1144940 - DNA, 15 bp, Homo sapiens
tcagtattttaactt

SEQ ID NO: 1144941 - DNA, 15 bp, Homo sapiens
gtcagtattttaact

SEQ ID NO: 1144942 - DNA, 15 bp, Homo sapiens
tgtcagtattttaac

SEQ ID NO: 1144943 - DNA, 15 bp, Homo sapiens
gtgtcagtattttaa

SEQ ID NO: 1144944 - DNA, 15 bp, Homo sapiens
tgtgtcagtatttta

SEQ ID NO: 1144945 - DNA, 15 bp, Homo sapiens
atgtgtcagtatttt

SEQ ID NO: 1144946 - DNA, 15 bp, Homo sapiens
gatgtgtcagtattt

SEQ ID NO: 1144947 - DNA, 15 bp, Homo sapiens
tgatgtgtcagtatt

SEQ ID NO: 1144948 - DNA, 15 bp, Homo sapiens
ttgatgtgtcagtat

SEQ ID NO: 1144949 - DNA, 15 bp, Homo sapiens
attgatgtgtcagta

SEQ ID NO: 1144950 - DNA, 15 bp, Homo sapiens
aattgatgtgtcagt

SEQ ID NO: 1144951 - DNA, 15 bp, Homo sapiens
taattgatgtgtcag

SEQ ID NO: 1144952 - DNA, 15 bp, Homo sapiens
ataattgatgtgtca

SEQ ID NO: 1144953 - DNA, 15 bp, Homo sapiens
aataattgatgtgtc

SEQ ID NO: 1144954 - DNA, 15 bp, Homo sapiens
taataattgatgtgt

SEQ ID NO: 1144955 - DNA, 15 bp, Homo sapiens
ttaataattgatgtg

SEQ ID NO: 1144956 - DNA, 15 bp, Homo sapiens
cttaataattgatgt

SEQ ID NO: 1144957 - DNA, 15 bp, Homo sapiens
gcttaataattgatg

SEQ ID NO: 1144958 - DNA, 15 bp, Homo sapiens
tgcttaataattgat

SEQ ID NO: 1144959 - DNA, 15 bp, Homo sapiens
atgcttaataattga

SEQ ID NO: 1144960 - DNA, 15 bp, Homo sapiens
tatgcttaataattg

SEQ ID NO: 1144961 - DNA, 15 bp, Homo sapiens
ttatgcttaataatt

SEQ ID NO: 1144962 - DNA, 15 bp, Homo sapiens
cttatgcttaataat

SEQ ID NO: 1144963 - DNA, 15 bp, Homo sapiens
acttatgcttaataa

SEQ ID NO: 1144964 - DNA, 15 bp, Homo sapiens
aacttatgcttaata

SEQ ID NO: 1144965 - DNA, 15 bp, Homo sapiens
aaacttatgcttaat

SEQ ID NO: 1144966 - DNA, 15 bp, Homo sapiens
taaacttatgcttaa

SEQ ID NO: 1144967 - DNA, 15 bp, Homo sapiens
ttaaacttatgctta

SEQ ID NO: 1144968 - DNA, 15 bp, Homo sapiens
cttaaacttatgctt

SEQ ID NO: 1144969 - DNA, 15 bp, Homo sapiens
acttaaacttatgct

SEQ ID NO: 1144970 - DNA, 15 bp, Homo sapiens
aacttaaacttatgc

SEQ ID NO: 1144971 - DNA, 15 bp, Homo sapiens
aaacttaaacttatg

SEQ ID NO: 1144972 - DNA, 15 bp, Homo sapiens
caaacttaaacttat

SEQ ID NO: 1144973 - DNA, 15 bp, Homo sapiens
tcaaacttaaactta

SEQ ID NO: 1144974 - DNA, 15 bp, Homo sapiens
ttcaaacttaaactt

SEQ ID NO: 1144975 - DNA, 15 bp, Homo sapiens
attcaaacttaaact

SEQ ID NO: 1144976 - DNA, 15 bp, Homo sapiens
tattcaaacttaaac

SEQ ID NO: 1144977 - DNA, 15 bp, Homo sapiens
gtattcaaacttaaa

SEQ ID NO: 1144978 - DNA, 15 bp, Homo sapiens
agtattcaaacttaa

SEQ ID NO: 1144979 - DNA, 15 bp, Homo sapiens
gagtattcaaactta

SEQ ID NO: 1144980 - DNA, 15 bp, Homo sapiens
agagtattcaaactt

SEQ ID NO: 1144981 - DNA, 15 bp, Homo sapiens
cagagtattcaaact

SEQ ID NO: 1144982 - DNA, 15 bp, Homo sapiens
tcagagtattcaaac

SEQ ID NO: 1144983 - DNA, 15 bp, Homo sapiens
atcagagtattcaaa

SEQ ID NO: 1144984 - DNA, 15 bp, Homo sapiens
tatcagagtattcaa

SEQ ID NO: 1144985 - DNA, 15 bp, Homo sapiens
gtatcagagtattca

SEQ ID NO: 1144986 - DNA, 15 bp, Homo sapiens
ggtatcagagtattc

SEQ ID NO: 1144987 - DNA, 15 bp, Homo sapiens
aggtatcagagtatt

SEQ ID NO: 1144988 - DNA, 15 bp, Homo sapiens
aaggtatcagagtat

SEQ ID NO: 1144989 - DNA, 15 bp, Homo sapiens
taaggtatcagagta

SEQ ID NO: 1144990 - DNA, 15 bp, Homo sapiens
ataaggtatcagagt

SEQ ID NO: 1144991 - DNA, 15 bp, Homo sapiens
aataaggtatcagag

SEQ ID NO: 1144992 - DNA, 15 bp, Homo sapiens
aaataaggtatcaga

SEQ ID NO: 1144993 - DNA, 15 bp, Homo sapiens
aaaataaggtatcag

SEQ ID NO: 1144994 - DNA, 15 bp, Homo sapiens
caaaataaggtatca

SEQ ID NO: 1144995 - DNA, 15 bp, Homo sapiens
tcaaaataaggtatc

SEQ ID NO: 1144996 - DNA, 15 bp, Homo sapiens
atcaaaataaggtat

SEQ ID NO: 1144997 - DNA, 15 bp, Homo sapiens
catcaaaataaggta

SEQ ID NO: 1144998 - DNA, 15 bp, Homo sapiens
acatcaaaataaggt

SEQ ID NO: 1144999 - DNA, 15 bp, Homo sapiens
cacatcaaaataagg

SEQ ID NO: 1145000 - DNA, 15 bp, Homo sapiens
tcacatcaaaataag

SEQ ID NO: 1145001 - DNA, 15 bp, Homo sapiens
atcacatcaaaataa

SEQ ID NO: 1145002 - DNA, 15 bp, Homo sapiens
tatcacatcaaaata

SEQ ID NO: 1145003 - DNA, 15 bp, Homo sapiens
atatcacatcaaaat

SEQ ID NO: 1145004 - DNA, 15 bp, Homo sapiens
tatatcacatcaaaa

SEQ ID NO: 1145005 - DNA, 15 bp, Homo sapiens
ctatatcacatcaaa

SEQ ID NO: 1145006 - DNA, 15 bp, Homo sapiens
tctatatcacatcaa

SEQ ID NO: 1145007 - DNA, 15 bp, Homo sapiens
ttctatatcacatca

SEQ ID NO: 1145008 - DNA, 15 bp, Homo sapiens
tttctatatcacatc

SEQ ID NO: 1145009 - DNA, 15 bp, Homo sapiens
ttttctatatcacat

SEQ ID NO: 1145010 - DNA, 15 bp, Homo sapiens
cttttctatatcaca

SEQ ID NO: 1145011 - DNA, 15 bp, Homo sapiens
tcttttctatatcac

SEQ ID NO: 1145012 - DNA, 15 bp, Homo sapiens
atcttttctatatca

SEQ ID NO: 1145013 - DNA, 15 bp, Homo sapiens
tatcttttctatatc

SEQ ID NO: 1145014 - DNA, 15 bp, Homo sapiens
ttatcttttctatat

SEQ ID NO: 1145015 - DNA, 15 bp, Homo sapiens
tttatcttttctata

SEQ ID NO: 1145016 - DNA, 15 bp, Homo sapiens
atttatcttttctat

SEQ ID NO: 1145017 - DNA, 15 bp, Homo sapiens
tatttatcttttcta

SEQ ID NO: 1145018 - DNA, 15 bp, Homo sapiens
atatttatcttttct

SEQ ID NO: 1145019 - DNA, 15 bp, Homo sapiens
tatatttatcttttc

SEQ ID NO: 1145020 - DNA, 15 bp, Homo sapiens
atatatttatctttt

SEQ ID NO: 1145021 - DNA, 15 bp, Homo sapiens
aatatatttatcttt

SEQ ID NO: 1145022 - DNA, 15 bp, Homo sapiens
aaatatatttatctt

SEQ ID NO: 1145023 - DNA, 15 bp, Homo sapiens
caaatatatttatct

SEQ ID NO: 1145024 - DNA, 15 bp, Homo sapiens
tcaaatatatttatc

SEQ ID NO: 1145025 - DNA, 15 bp, Homo sapiens
ttcaaatatatttat

SEQ ID NO: 1145026 - DNA, 15 bp, Homo sapiens
attcaaatatattta

SEQ ID NO: 1145027 - DNA, 15 bp, Homo sapiens
gattcaaatatattt

SEQ ID NO: 1145028 - DNA, 15 bp, Homo sapiens
agattcaaatatatt

SEQ ID NO: 1145029 - DNA, 15 bp, Homo sapiens
gagattcaaatatat

SEQ ID NO: 1145030 - DNA, 15 bp, Homo sapiens
agagattcaaatata

SEQ ID NO: 1145031 - DNA, 15 bp, Homo sapiens
aagagattcaaatat

SEQ ID NO: 1145032 - DNA, 15 bp, Homo sapiens
caagagattcaaata

SEQ ID NO: 1145033 - DNA, 15 bp, Homo sapiens
tcaagagattcaaat

SEQ ID NO: 1145034 - DNA, 15 bp, Homo sapiens
atcaagagattcaaa

SEQ ID NO: 1145035 - DNA, 15 bp, Homo sapiens
tatcaagagattcaa

SEQ ID NO: 1145036 - DNA, 15 bp, Homo sapiens
ttatcaagagattca

SEQ ID NO: 1145037 - DNA, 15 bp, Homo sapiens
tttatcaagagattc

SEQ ID NO: 1145038 - DNA, 15 bp, Homo sapiens
gtttatcaagagatt

SEQ ID NO: 1145039 - DNA, 15 bp, Homo sapiens
tgtttatcaagagat

SEQ ID NO: 1145040 - DNA, 15 bp, Homo sapiens
atgtttatcaagaga

SEQ ID NO: 1145041 - DNA, 15 bp, Homo sapiens
catgtttatcaagag

SEQ ID NO: 1145042 - DNA, 15 bp, Homo sapiens
tcatgtttatcaaga

SEQ ID NO: 1145043 - DNA, 15 bp, Homo sapiens
ttcatgtttatcaag

SEQ ID NO: 1145044 - DNA, 15 bp, Homo sapiens
tttcatgtttatcaa

SEQ ID NO: 1145045 - DNA, 15 bp, Homo sapiens
ttttcatgtttatca

SEQ ID NO: 1145046 - DNA, 15 bp, Homo sapiens
tttttcatgtttatc

SEQ ID NO: 1145047 - DNA, 15 bp, Homo sapiens
atttttcatgtttat

SEQ ID NO: 1145048 - DNA, 15 bp, Homo sapiens
aatttttcatgttta

SEQ ID NO: 1145049 - DNA, 15 bp, Homo sapiens
caatttttcatgttt

SEQ ID NO: 1145050 - DNA, 15 bp, Homo sapiens
tcaatttttcatgtt

SEQ ID NO: 1145051 - DNA, 15 bp, Homo sapiens
ctcaatttttcatgt

SEQ ID NO: 1145052 - DNA, 15 bp, Homo sapiens
cctcaatttttcatg

SEQ ID NO: 1145053 - DNA, 15 bp, Homo sapiens
tcctcaatttttcat

SEQ ID NO: 1145054 - DNA, 15 bp, Homo sapiens
ttcctcaatttttca

SEQ ID NO: 1145055 - DNA, 15 bp, Homo sapiens
tttcctcaatttttc

SEQ ID NO: 1145056 - DNA, 15 bp, Homo sapiens
atttcctcaattttt

SEQ ID NO: 1145057 - DNA, 15 bp, Homo sapiens
tatttcctcaatttt

SEQ ID NO: 1145058 - DNA, 15 bp, Homo sapiens
atatttcctcaattt

SEQ ID NO: 1145059 - DNA, 15 bp, Homo sapiens
aatatttcctcaatt

SEQ ID NO: 1145060 - DNA, 15 bp, Homo sapiens
aaatatttcctcaat

SEQ ID NO: 1145061 - DNA, 15 bp, Homo sapiens
aaaatatttcctcaa

SEQ ID NO: 1145062 - DNA, 15 bp, Homo sapiens
aaaaatatttcctca

SEQ ID NO: 1145063 - DNA, 15 bp, Homo sapiens
taaaaatatttcctc

SEQ ID NO: 1145064 - DNA, 15 bp, Homo sapiens
ttaaaaatatttcct

SEQ ID NO: 1145065 - DNA, 15 bp, Homo sapiens
cttaaaaatatttcc

SEQ ID NO: 1145066 - DNA, 15 bp, Homo sapiens
tcttaaaaatatttc

SEQ ID NO: 1145067 - DNA, 15 bp, Homo sapiens
ttcttaaaaatattt

SEQ ID NO: 1145068 - DNA, 15 bp, Homo sapiens
attcttaaaaatatt

SEQ ID NO: 1145069 - DNA, 15 bp, Homo sapiens
aattcttaaaaatat

SEQ ID NO: 1145070 - DNA, 15 bp, Homo sapiens
taattcttaaaaata

SEQ ID NO: 1145071 - DNA, 15 bp, Homo sapiens
ataattcttaaaaat

SEQ ID NO: 1145072 - DNA, 15 bp, Homo sapiens
tataattcttaaaaa

SEQ ID NO: 1145073 - DNA, 15 bp, Homo sapiens
ttataattcttaaaa

SEQ ID NO: 1145074 - DNA, 15 bp, Homo sapiens
tttataattcttaaa

SEQ ID NO: 1145075 - DNA, 15 bp, Homo sapiens
ttttataattcttaa

SEQ ID NO: 1145076 - DNA, 15 bp, Homo sapiens
attttataattctta

SEQ ID NO: 1145077 - DNA, 15 bp, Homo sapiens
cattttataattctt

SEQ ID NO: 1145078 - DNA, 15 bp, Homo sapiens
ccattttataattct

SEQ ID NO: 1145079 - DNA, 15 bp, Homo sapiens
accattttataattc

SEQ ID NO: 1145080 - DNA, 15 bp, Homo sapiens
aaccattttataatt

SEQ ID NO: 1145081 - DNA, 15 bp, Homo sapiens
aaaccattttataat

SEQ ID NO: 1145082 - DNA, 15 bp, Homo sapiens
aaaaccattttataa

SEQ ID NO: 1145083 - DNA, 15 bp, Homo sapiens
gaaaaccattttata

SEQ ID NO: 1145084 - DNA, 15 bp, Homo sapiens
tgaaaaccattttat

SEQ ID NO: 1145085 - DNA, 15 bp, Homo sapiens
atgaaaaccatttta

SEQ ID NO: 1145086 - DNA, 15 bp, Homo sapiens
aatgaaaaccatttt

SEQ ID NO: 1145087 - DNA, 15 bp, Homo sapiens
aaatgaaaaccattt

SEQ ID NO: 1145088 - DNA, 15 bp, Homo sapiens
taaatgaaaaccatt

SEQ ID NO: 1145089 - DNA, 15 bp, Homo sapiens
gtaaatgaaaaccat

SEQ ID NO: 1145090 - DNA, 15 bp, Homo sapiens
tgtaaatgaaaacca

SEQ ID NO: 1145091 - DNA, 15 bp, Homo sapiens
ttgtaaatgaaaacc

SEQ ID NO: 1145092 - DNA, 15 bp, Homo sapiens
tttgtaaatgaaaac

SEQ ID NO: 1145093 - DNA, 15 bp, Homo sapiens
atttgtaaatgaaaa

SEQ ID NO: 1145094 - DNA, 15 bp, Homo sapiens
tatttgtaaatgaaa

SEQ ID NO: 1145095 - DNA, 15 bp, Homo sapiens
gtatttgtaaatgaa

SEQ ID NO: 1145096 - DNA, 15 bp, Homo sapiens
agtatttgtaaatga

SEQ ID NO: 1145097 - DNA, 15 bp, Homo sapiens
cagtatttgtaaatg

SEQ ID NO: 1145098 - DNA, 15 bp, Homo sapiens
tcagtatttgtaaat

SEQ ID NO: 1145099 - DNA, 15 bp, Homo sapiens
atcagtatttgtaaa

SEQ ID NO: 1145100 - DNA, 15 bp, Homo sapiens
tatcagtatttgtaa

SEQ ID NO: 1145101 - DNA, 15 bp, Homo sapiens
atatcagtatttgta

SEQ ID NO: 1145102 - DNA, 15 bp, Homo sapiens
catatcagtatttgt

SEQ ID NO: 1145103 - DNA, 15 bp, Homo sapiens
tcatatcagtatttg

SEQ ID NO: 1145104 - DNA, 15 bp, Homo sapiens
ttcatatcagtattt

SEQ ID NO: 1145105 - DNA, 15 bp, Homo sapiens
tttcatatcagtatt

SEQ ID NO: 1145106 - DNA, 15 bp, Homo sapiens
ctttcatatcagtat

SEQ ID NO: 1145107 - DNA, 15 bp, Homo sapiens
tctttcatatcagta

SEQ ID NO: 1145108 - DNA, 15 bp, Homo sapiens
ctctttcatatcagt

SEQ ID NO: 1145109 - DNA, 15 bp, Homo sapiens
actctttcatatcag

SEQ ID NO: 1145110 - DNA, 15 bp, Homo sapiens
aactctttcatatca

SEQ ID NO: 1145111 - DNA, 15 bp, Homo sapiens
gaactctttcatatc

SEQ ID NO: 1145112 - DNA, 15 bp, Homo sapiens
ggaactctttcatat

SEQ ID NO: 1145113 - DNA, 15 bp, Homo sapiens
gggaactctttcata

SEQ ID NO: 1145114 - DNA, 15 bp, Homo sapiens
agggaactctttcat

SEQ ID NO: 1145115 - DNA, 15 bp, Homo sapiens
aagggaactctttca

SEQ ID NO: 1145116 - DNA, 15 bp, Homo sapiens
taagggaactctttc

SEQ ID NO: 1145117 - DNA, 15 bp, Homo sapiens
ctaagggaactcttt

SEQ ID NO: 1145118 - DNA, 15 bp, Homo sapiens
tctaagggaactctt

SEQ ID NO: 1145119 - DNA, 15 bp, Homo sapiens
atctaagggaactct

SEQ ID NO: 1145120 - DNA, 15 bp, Homo sapiens
aatctaagggaactc

SEQ ID NO: 1145121 - DNA, 15 bp, Homo sapiens
aaatctaagggaact

SEQ ID NO: 1145122 - DNA, 15 bp, Homo sapiens
aaaatctaagggaac

SEQ ID NO: 1145123 - DNA, 15 bp, Homo sapiens
gaaaatctaagggaa

SEQ ID NO: 1145124 - DNA, 15 bp, Homo sapiens
tgaaaatctaaggga

SEQ ID NO: 1145125 - DNA, 15 bp, Homo sapiens
gtgaaaatctaaggg

SEQ ID NO: 1145126 - DNA, 15 bp, Homo sapiens
agtgaaaatctaagg

SEQ ID NO: 1145127 - DNA, 15 bp, Homo sapiens
tagtgaaaatctaag

SEQ ID NO: 1145128 - DNA, 15 bp, Homo sapiens
ttagtgaaaatctaa

SEQ ID NO: 1145129 - DNA, 15 bp, Homo sapiens
tttagtgaaaatcta

SEQ ID NO: 1145130 - DNA, 15 bp, Homo sapiens
ttttagtgaaaatct

SEQ ID NO: 1145131 - DNA, 15 bp, Homo sapiens
tttttagtgaaaatc

SEQ ID NO: 1145132 - DNA, 15 bp, Homo sapiens
atttttagtgaaaat

SEQ ID NO: 1145133 - DNA, 15 bp, Homo sapiens
aatttttagtgaaaa

SEQ ID NO: 1145134 - DNA, 15 bp, Homo sapiens
taatttttagtgaaa

SEQ ID NO: 1145135 - DNA, 15 bp, Homo sapiens
ttaatttttagtgaa

SEQ ID NO: 1145136 - DNA, 15 bp, Homo sapiens
cttaatttttagtga

SEQ ID NO: 1145137 - DNA, 15 bp, Homo sapiens
tcttaatttttagtg

SEQ ID NO: 1145138 - DNA, 15 bp, Homo sapiens
atcttaatttttagt

SEQ ID NO: 1145139 - DNA, 15 bp, Homo sapiens
tatcttaatttttag

SEQ ID NO: 1145140 - DNA, 15 bp, Homo sapiens
gtatcttaattttta

SEQ ID NO: 1145141 - DNA, 15 bp, Homo sapiens
agtatcttaattttt

SEQ ID NO: 1145142 - DNA, 15 bp, Homo sapiens
tagtatcttaatttt

SEQ ID NO: 1145143 - DNA, 15 bp, Homo sapiens
ttagtatcttaattt

SEQ ID NO: 1145144 - DNA, 15 bp, Homo sapiens
cttagtatcttaatt

SEQ ID NO: 1145145 - DNA, 15 bp, Homo sapiens
ctcttagtatcttaa

SEQ ID NO: 1145146 - DNA, 15 bp, Homo sapiens
actcttagtatctta

SEQ ID NO: 1145147 - DNA, 15 bp, Homo sapiens
aactcttagtatctt

SEQ ID NO: 1145148 - DNA, 15 bp, Homo sapiens
taactcttagtatct

SEQ ID NO: 1145149 - DNA, 15 bp, Homo sapiens
ttaactcttagtatc

SEQ ID NO: 1145150 - DNA, 15 bp, Homo sapiens
tttaactcttagtat

SEQ ID NO: 1145151 - DNA, 15 bp, Homo sapiens
atttaactcttagta

SEQ ID NO: 1145152 - DNA, 15 bp, Homo sapiens
aatttaactcttagt

SEQ ID NO: 1145153 - DNA, 15 bp, Homo sapiens
taatttaactcttag

SEQ ID NO: 1145154 - DNA, 15 bp, Homo sapiens
ataatttaactctta

SEQ ID NO: 1145155 - DNA, 15 bp, Homo sapiens
tataatttaactctt

SEQ ID NO: 1145156 - DNA, 15 bp, Homo sapiens
ttataatttaactct

SEQ ID NO: 1145157 - DNA, 15 bp, Homo sapiens
attataatttaactc

SEQ ID NO: 1145158 - DNA, 15 bp, Homo sapiens
aattataatttaact

SEQ ID NO: 1145159 - DNA, 15 bp, Homo sapiens
taattataatttaac

SEQ ID NO: 1145160 - DNA, 15 bp, Homo sapiens
ttaattataatttaa

SEQ ID NO: 1145161 - DNA, 15 bp, Homo sapiens
attaattataattta

SEQ ID NO: 1145162 - DNA, 15 bp, Homo sapiens
tattaattataattt

SEQ ID NO: 1145163 - DNA, 15 bp, Homo sapiens
atattaattataatt

SEQ ID NO: 1145164 - DNA, 15 bp, Homo sapiens
tatattaattataat

SEQ ID NO: 1145165 - DNA, 15 bp, Homo sapiens
atatattaattataa

SEQ ID NO: 1145166 - DNA, 15 bp, Homo sapiens
catatattaattata

SEQ ID NO: 1145167 - DNA, 15 bp, Homo sapiens
acatatattaattat

SEQ ID NO: 1145168 - DNA, 15 bp, Homo sapiens
tacatatattaatta

SEQ ID NO: 1145169 - DNA, 15 bp, Homo sapiens
ttacatatattaatt

SEQ ID NO: 1145170 - DNA, 15 bp, Homo sapiens
attacatatattaat

SEQ ID NO: 1145171 - DNA, 15 bp, Homo sapiens
aattacatatattaa

SEQ ID NO: 1145172 - DNA, 15 bp, Homo sapiens
taattacatatatta

SEQ ID NO: 1145173 - DNA, 15 bp, Homo sapiens
ttaattacatatatt

SEQ ID NO: 1145174 - DNA, 15 bp, Homo sapiens
tttaattacatatat

SEQ ID NO: 1145175 - DNA, 15 bp, Homo sapiens
ttttaattacatata

SEQ ID NO: 1145176 - DNA, 15 bp, Homo sapiens
gttttaattacatat

SEQ ID NO: 1145177 - DNA, 15 bp, Homo sapiens
ggttttaattacata

SEQ ID NO: 1145178 - DNA, 15 bp, Homo sapiens
tggttttaattacat

SEQ ID NO: 1145179 - DNA, 15 bp, Homo sapiens
gtggttttaattaca

SEQ ID NO: 1145180 - DNA, 15 bp, Homo sapiens
agtggttttaattac

SEQ ID NO: 1145181 - DNA, 15 bp, Homo sapiens
tagtggttttaatta

SEQ ID NO: 1145182 - DNA, 15 bp, Homo sapiens
ttagtggttttaatt

SEQ ID NO: 1145183 - DNA, 15 bp, Homo sapiens
tttagtggttttaat

SEQ ID NO: 1145184 - DNA, 15 bp, Homo sapiens
ttttagtggttttaa

SEQ ID NO: 1145185 - DNA, 15 bp, Homo sapiens
tttttagtggtttta

SEQ ID NO: 1145186 - DNA, 15 bp, Homo sapiens
atttttagtggtttt

SEQ ID NO: 1145187 - DNA, 15 bp, Homo sapiens
tatttttagtggttt

SEQ ID NO: 1145188 - DNA, 15 bp, Homo sapiens
ttatttttagtggtt

SEQ ID NO: 1145189 - DNA, 15 bp, Homo sapiens
cttatttttagtggt

SEQ ID NO: 1145190 - DNA, 15 bp, Homo sapiens
ccttatttttagtgg

SEQ ID NO: 1145191 - DNA, 15 bp, Homo sapiens
accttatttttagtg

SEQ ID NO: 1145192 - DNA, 15 bp, Homo sapiens
taccttatttttagt

SEQ ID NO: 1145193 - DNA, 15 bp, Homo sapiens
ttaccttatttttag

SEQ ID NO: 1145194 - DNA, 15 bp, Homo sapiens
tttaccttattttta

SEQ ID NO: 1145195 - DNA, 15 bp, Homo sapiens
gtttaccttattttt

SEQ ID NO: 1145196 - DNA, 15 bp, Homo sapiens
tgtttaccttatttt

SEQ ID NO: 1145197 - DNA, 15 bp, Homo sapiens
ttgtttaccttattt

SEQ ID NO: 1145198 - DNA, 15 bp, Homo sapiens
attgtttaccttatt

SEQ ID NO: 1145199 - DNA, 15 bp, Homo sapiens
aattgtttaccttat

SEQ ID NO: 1145200 - DNA, 15 bp, Homo sapiens
aaattgtttacctta

SEQ ID NO: 1145201 - DNA, 15 bp, Homo sapiens
aaaattgtttacctt

SEQ ID NO: 1145202 - DNA, 15 bp, Homo sapiens
caaaattgtttacct

SEQ ID NO: 1145203 - DNA, 15 bp, Homo sapiens
acaaaattgtttacc

SEQ ID NO: 1145204 - DNA, 15 bp, Homo sapiens
tacaaaattgtttac

SEQ ID NO: 1145205 - DNA, 15 bp, Homo sapiens
atacaaaattgttta

SEQ ID NO: 1145206 - DNA, 15 bp, Homo sapiens
catacaaaattgttt

SEQ ID NO: 1145207 - DNA, 15 bp, Homo sapiens
gcatacaaaattgtt

SEQ ID NO: 1145208 - DNA, 15 bp, Homo sapiens
tgcatacaaaattgt

SEQ ID NO: 1145209 - DNA, 15 bp, Homo sapiens
ttgcatacaaaattg

SEQ ID NO: 1145210 - DNA, 15 bp, Homo sapiens
tttgcatacaaaatt

SEQ ID NO: 1145211 - DNA, 15 bp, Homo sapiens
ctttgcatacaaaat

SEQ ID NO: 1145212 - DNA, 15 bp, Homo sapiens
actttgcatacaaaa

SEQ ID NO: 1145213 - DNA, 15 bp, Homo sapiens
cactttgcatacaaa

SEQ ID NO: 1145214 - DNA, 15 bp, Homo sapiens
acactttgcatacaa

SEQ ID NO: 1145215 - DNA, 15 bp, Homo sapiens
tacactttgcataca

SEQ ID NO: 1145216 - DNA, 15 bp, Homo sapiens
atacactttgcatac

SEQ ID NO: 1145217 - DNA, 15 bp, Homo sapiens
tatacactttgcata

SEQ ID NO: 1145218 - DNA, 15 bp, Homo sapiens
gtatacactttgcat

SEQ ID NO: 1145219 - DNA, 15 bp, Homo sapiens
tgtatacactttgca

SEQ ID NO: 1145220 - DNA, 15 bp, Homo sapiens
ttgtatacactttgc

SEQ ID NO: 1145221 - DNA, 15 bp, Homo sapiens
tttgtatacactttg

SEQ ID NO: 1145222 - DNA, 15 bp, Homo sapiens
ttttgtatacacttt

SEQ ID NO: 1145223 - DNA, 15 bp, Homo sapiens
tttttgtatacactt

SEQ ID NO: 1145224 - DNA, 15 bp, Homo sapiens
ttttttgtatacact

SEQ ID NO: 1145225 - DNA, 15 bp, Homo sapiens
tttttttgtatacac

SEQ ID NO: 1145226 - DNA, 15 bp, Homo sapiens
ctttttttgtataca

SEQ ID NO: 1145227 - DNA, 15 bp, Homo sapiens
cctttttttgtatac

SEQ ID NO: 1145228 - DNA, 15 bp, Homo sapiens
gcctttttttgtata

SEQ ID NO: 1145229 - DNA, 15 bp, Homo sapiens
tgcctttttttgtat

SEQ ID NO: 1145230 - DNA, 15 bp, Homo sapiens
ttgcctttttttgta

SEQ ID NO: 1145231 - DNA, 15 bp, Homo sapiens
cttgcctttttttgt

SEQ ID NO: 1145232 - DNA, 15 bp, Homo sapiens
tcttgcctttttttg

SEQ ID NO: 1145233 - DNA, 15 bp, Homo sapiens
atcttgccttttttt

SEQ ID NO: 1145234 - DNA, 15 bp, Homo sapiens
tatcttgcctttttt

SEQ ID NO: 1145235 - DNA, 15 bp, Homo sapiens
gtatcttgccttttt

SEQ ID NO: 1145236 - DNA, 15 bp, Homo sapiens
cgtatcttgcctttt

SEQ ID NO: 1145237 - DNA, 15 bp, Homo sapiens
acgtatcttgccttt

SEQ ID NO: 1145238 - DNA, 15 bp, Homo sapiens
aacgtatcttgcctt

SEQ ID NO: 1145239 - DNA, 15 bp, Homo sapiens
aaacgtatcttgcct

SEQ ID NO: 1145240 - DNA, 15 bp, Homo sapiens
aaaacgtatcttgcc

SEQ ID NO: 1145241 - DNA, 15 bp, Homo sapiens
aaaaacgtatcttgc

SEQ ID NO: 1145242 - DNA, 15 bp, Homo sapiens
caaaaacgtatcttg

SEQ ID NO: 1145243 - DNA, 15 bp, Homo sapiens
ccaaaaacgtatctt

SEQ ID NO: 1145244 - DNA, 15 bp, Homo sapiens
accaaaaacgtatct

SEQ ID NO: 1145245 - DNA, 15 bp, Homo sapiens
caccaaaaacgtatc

SEQ ID NO: 1145246 - DNA, 15 bp, Homo sapiens
tcaccaaaaacgtat

SEQ ID NO: 1145247 - DNA, 15 bp, Homo sapiens
ctcaccaaaaacgta

SEQ ID NO: 1145248 - DNA, 15 bp, Homo sapiens
tctcaccaaaaacgt

SEQ ID NO: 1145249 - DNA, 15 bp, Homo sapiens
ttctcaccaaaaacg

SEQ ID NO: 1145250 - DNA, 15 bp, Homo sapiens
gttctcaccaaaaac

SEQ ID NO: 1145251 - DNA, 15 bp, Homo sapiens
cgttctcaccaaaaa

SEQ ID NO: 1145252 - DNA, 15 bp, Homo sapiens
gcgttctcaccaaaa

SEQ ID NO: 1145253 - DNA, 15 bp, Homo sapiens
agcgttctcaccaaa

SEQ ID NO: 1145254 - DNA, 15 bp, Homo sapiens
aagcgttctcaccaa

SEQ ID NO: 1145255 - DNA, 15 bp, Homo sapiens
taagcgttctcacca

SEQ ID NO: 1145256 - DNA, 15 bp, Homo sapiens
ataagcgttctcacc

SEQ ID NO: 1145257 - DNA, 15 bp, Homo sapiens
tataagcgttctcac

SEQ ID NO: 1145258 - DNA, 15 bp, Homo sapiens
ttataagcgttctca

SEQ ID NO: 1145259 - DNA, 15 bp, Homo sapiens
cttataagcgttctc

SEQ ID NO: 1145260 - DNA, 15 bp, Homo sapiens
ccttataagcgttct

SEQ ID NO: 1145261 - DNA, 15 bp, Homo sapiens
tccttataagcgttc

SEQ ID NO: 1145262 - DNA, 15 bp, Homo sapiens
ttccttataagcgtt

SEQ ID NO: 1145263 - DNA, 15 bp, Homo sapiens
cttccttataagcgt

SEQ ID NO: 1145264 - DNA, 15 bp, Homo sapiens
acttccttataagcg

SEQ ID NO: 1145265 - DNA, 15 bp, Homo sapiens
gacttccttataagc

SEQ ID NO: 1145266 - DNA, 15 bp, Homo sapiens
tgacttccttataag

SEQ ID NO: 1145267 - DNA, 15 bp, Homo sapiens
atgacttccttataa

SEQ ID NO: 1145268 - DNA, 15 bp, Homo sapiens
catgacttccttata

SEQ ID NO: 1145269 - DNA, 15 bp, Homo sapiens
tcatgacttccttat

SEQ ID NO: 1145270 - DNA, 15 bp, Homo sapiens
ctcatgacttcctta

SEQ ID NO: 1145271 - DNA, 15 bp, Homo sapiens
actcatgacttcctt

SEQ ID NO: 1145272 - DNA, 15 bp, Homo sapiens
tactcatgacttcct

SEQ ID NO: 1145273 - DNA, 15 bp, Homo sapiens
atactcatgacttcc

SEQ ID NO: 1145274 - DNA, 15 bp, Homo sapiens
catactcatgacttc

SEQ ID NO: 1145275 - DNA, 15 bp, Homo sapiens
acatactcatgactt

SEQ ID NO: 1145276 - DNA, 15 bp, Homo sapiens
cacatactcatgact

SEQ ID NO: 1145277 - DNA, 15 bp, Homo sapiens
ccacatactcatgac

SEQ ID NO: 1145278 - DNA, 15 bp, Homo sapiens
accacatactcatga

SEQ ID NO: 1145279 - DNA, 15 bp, Homo sapiens
aaccacatactcatg

SEQ ID NO: 1145280 - DNA, 15 bp, Homo sapiens
aaaccacatactcat

SEQ ID NO: 1145281 - DNA, 15 bp, Homo sapiens
caaaccacatactca

SEQ ID NO: 1145282 - DNA, 15 bp, Homo sapiens
ccaaaccacatactc

SEQ ID NO: 1145283 - DNA, 15 bp, Homo sapiens
accaaaccacatact

SEQ ID NO: 1145284 - DNA, 15 bp, Homo sapiens
aaccaaaccacatac

SEQ ID NO: 1145285 - DNA, 15 bp, Homo sapiens
taaccaaaccacata

SEQ ID NO: 1145286 - DNA, 15 bp, Homo sapiens
ttaaccaaaccacat

SEQ ID NO: 1145287 - DNA, 15 bp, Homo sapiens
tttaaccaaaccaca

SEQ ID NO: 1145288 - DNA, 15 bp, Homo sapiens
ctttaaccaaaccac

SEQ ID NO: 1145289 - DNA, 15 bp, Homo sapiens
cctttaaccaaacca

SEQ ID NO: 1145290 - DNA, 15 bp, Homo sapiens
tcctttaaccaaacc

SEQ ID NO: 1145291 - DNA, 15 bp, Homo sapiens
ttcctttaaccaaac

SEQ ID NO: 1145292 - DNA, 15 bp, Homo sapiens
tttcctttaaccaaa

SEQ ID NO: 1145293 - DNA, 15 bp, Homo sapiens
ttttcctttaaccaa

SEQ ID NO: 1145294 - DNA, 15 bp, Homo sapiens
cttttcctttaacca

SEQ ID NO: 1145295 - DNA, 15 bp, Homo sapiens
acttttcctttaacc

SEQ ID NO: 1145296 - DNA, 15 bp, Homo sapiens
tacttttcctttaac

SEQ ID NO: 1145297 - DNA, 15 bp, Homo sapiens
ttacttttcctttaa

SEQ ID NO: 1145298 - DNA, 15 bp, Homo sapiens
attacttttccttta

SEQ ID NO: 1145299 - DNA, 15 bp, Homo sapiens
aattacttttccttt

SEQ ID NO: 1145300 - DNA, 15 bp, Homo sapiens
aaattacttttcctt

SEQ ID NO: 1145301 - DNA, 15 bp, Homo sapiens
aaaattacttttcct

SEQ ID NO: 1145302 - DNA, 15 bp, Homo sapiens
caaaattacttttcc

SEQ ID NO: 1145303 - DNA, 15 bp, Homo sapiens
acaaaattacttttc

SEQ ID NO: 1145304 - DNA, 15 bp, Homo sapiens
gacaaaattactttt

SEQ ID NO: 1145305 - DNA, 15 bp, Homo sapiens
agacaaaattacttt

SEQ ID NO: 1145306 - DNA, 15 bp, Homo sapiens
tagacaaaattactt

SEQ ID NO: 1145307 - DNA, 15 bp, Homo sapiens
ctagacaaaattact

SEQ ID NO: 1145308 - DNA, 15 bp, Homo sapiens
actagacaaaattac

SEQ ID NO: 1145309 - DNA, 15 bp, Homo sapiens
aactagacaaaatta

SEQ ID NO: 1145310 - DNA, 15 bp, Homo sapiens
aaactagacaaaatt

SEQ ID NO: 1145311 - DNA, 15 bp, Homo sapiens
taaactagacaaaat

SEQ ID NO: 1145312 - DNA, 15 bp, Homo sapiens
ctaaactagacaaaa

SEQ ID NO: 1145313 - DNA, 15 bp, Homo sapiens
tctaaactagacaaa

SEQ ID NO: 1145314 - DNA, 15 bp, Homo sapiens
ctctaaactagacaa

SEQ ID NO: 1145315 - DNA, 15 bp, Homo sapiens
cctctaaactagaca

SEQ ID NO: 1145316 - DNA, 15 bp, Homo sapiens
acctctaaactagac

SEQ ID NO: 1145317 - DNA, 15 bp, Homo sapiens
aacctctaaactaga

SEQ ID NO: 1145318 - DNA, 15 bp, Homo sapiens
taacctctaaactag

SEQ ID NO: 1145319 - DNA, 15 bp, Homo sapiens
gtaacctctaaacta

SEQ ID NO: 1145320 - DNA, 15 bp, Homo sapiens
agtaacctctaaact

SEQ ID NO: 1145321 - DNA, 15 bp, Homo sapiens
aagtaacctctaaac

SEQ ID NO: 1145322 - DNA, 15 bp, Homo sapiens
taagtaacctctaaa

SEQ ID NO: 1145323 - DNA, 15 bp, Homo sapiens
ttaagtaacctctaa

SEQ ID NO: 1145324 - DNA, 15 bp, Homo sapiens
tttaagtaacctcta

SEQ ID NO: 1145325 - DNA, 15 bp, Homo sapiens
ttttaagtaacctct

SEQ ID NO: 1145326 - DNA, 15 bp, Homo sapiens
cttttaagtaacctc

SEQ ID NO: 1145327 - DNA, 15 bp, Homo sapiens
acttttaagtaacct

SEQ ID NO: 1145328 - DNA, 15 bp, Homo sapiens
aacttttaagtaacc

SEQ ID NO: 1145329 - DNA, 15 bp, Homo sapiens
caacttttaagtaac

SEQ ID NO: 1145330 - DNA, 15 bp, Homo sapiens
acaacttttaagtaa

SEQ ID NO: 1145331 - DNA, 15 bp, Homo sapiens
aacaacttttaagta

SEQ ID NO: 1145332 - DNA, 15 bp, Homo sapiens
aaacaacttttaagt

SEQ ID NO: 1145333 - DNA, 15 bp, Homo sapiens
gaaacaacttttaag

SEQ ID NO: 1145334 - DNA, 15 bp, Homo sapiens
tgaaacaacttttaa

SEQ ID NO: 1145335 - DNA, 15 bp, Homo sapiens
ctgaaacaactttta

SEQ ID NO: 1145336 - DNA, 15 bp, Homo sapiens
tctgaaacaactttt

SEQ ID NO: 1145337 - DNA, 15 bp, Homo sapiens
gtctgaaacaacttt

SEQ ID NO: 1145338 - DNA, 15 bp, Homo sapiens
ggtctgaaacaactt

SEQ ID NO: 1145339 - DNA, 15 bp, Homo sapiens
tggtctgaaacaact

SEQ ID NO: 1145340 - DNA, 15 bp, Homo sapiens
ctggtctgaaacaac

SEQ ID NO: 1145341 - DNA, 15 bp, Homo sapiens
cctggtctgaaacaa

SEQ ID NO: 1145342 - DNA, 15 bp, Homo sapiens
gcctggtctgaaaca

SEQ ID NO: 1145343 - DNA, 15 bp, Homo sapiens
tgcctggtctgaaac

SEQ ID NO: 1145344 - DNA, 15 bp, Homo sapiens
gtgcctggtctgaaa

SEQ ID NO: 1145345 - DNA, 15 bp, Homo sapiens
tgtgcctggtctgaa

SEQ ID NO: 1145346 - DNA, 15 bp, Homo sapiens
ctgtgcctggtctga

SEQ ID NO: 1145347 - DNA, 15 bp, Homo sapiens
actgtgcctggtctg

SEQ ID NO: 1145348 - DNA, 15 bp, Homo sapiens
cactgtgcctggtct

SEQ ID NO: 1145349 - DNA, 15 bp, Homo sapiens
ccactgtgcctggtc

SEQ ID NO: 1145350 - DNA, 15 bp, Homo sapiens
gccactgtgcctggt

SEQ ID NO: 1145351 - DNA, 15 bp, Homo sapiens
tatgagccactgtgc

SEQ ID NO: 1145352 - DNA, 15 bp, Homo sapiens
atatgagccactgtg

SEQ ID NO: 1145353 - DNA, 15 bp, Homo sapiens
gatatgagccactgt

SEQ ID NO: 1145354 - DNA, 15 bp, Homo sapiens
agatatgagccactg

SEQ ID NO: 1145355 - DNA, 15 bp, Homo sapiens
cagatatgagccact

SEQ ID NO: 1145356 - DNA, 15 bp, Homo sapiens
acagatatgagccac

SEQ ID NO: 1145357 - DNA, 15 bp, Homo sapiens
tacagatatgagcca

SEQ ID NO: 1145358 - DNA, 15 bp, Homo sapiens
ttacagatatgagcc

SEQ ID NO: 1145359 - DNA, 15 bp, Homo sapiens
attacagatatgagc

SEQ ID NO: 1145360 - DNA, 15 bp, Homo sapiens
gattacagatatgag

SEQ ID NO: 1145361 - DNA, 15 bp, Homo sapiens
ggattacagatatga

SEQ ID NO: 1145362 - DNA, 15 bp, Homo sapiens
gggattacagatatg

SEQ ID NO: 1145363 - DNA, 15 bp, Homo sapiens
tgggattacagatat

SEQ ID NO: 1145364 - DNA, 15 bp, Homo sapiens
ttgggattacagata

SEQ ID NO: 1145365 - DNA, 15 bp, Homo sapiens
gttgggattacagat

SEQ ID NO: 1145366 - DNA, 15 bp, Homo sapiens
tgttgggattacaga

SEQ ID NO: 1145367 - DNA, 15 bp, Homo sapiens
gaagtgttgggatta

SEQ ID NO: 1145368 - DNA, 15 bp, Homo sapiens
cgaagtgttgggatt

SEQ ID NO: 1145369 - DNA, 15 bp, Homo sapiens
ccgaagtgttgggat

SEQ ID NO: 1145370 - DNA, 15 bp, Homo sapiens
cccgaagtgttggga

SEQ ID NO: 1145371 - DNA, 15 bp, Homo sapiens
tcccgaagtgttggg

SEQ ID NO: 1145372 - DNA, 15 bp, Homo sapiens
ctcccgaagtgttgg

SEQ ID NO: 1145373 - DNA, 15 bp, Homo sapiens
cctcccgaagtgttg

SEQ ID NO: 1145374 - DNA, 15 bp, Homo sapiens
gcctcccgaagtgtt

SEQ ID NO: 1145375 - DNA, 15 bp, Homo sapiens
ggcctcccgaagtgt

SEQ ID NO: 1145376 - DNA, 15 bp, Homo sapiens
tggcctcccgaagtg

SEQ ID NO: 1145377 - DNA, 15 bp, Homo sapiens
ttggcctcccgaagt

SEQ ID NO: 1145378 - DNA, 15 bp, Homo sapiens
tttggcctcccgaag

SEQ ID NO: 1145379 - DNA, 15 bp, Homo sapiens
ctttggcctcccgaa

SEQ ID NO: 1145380 - DNA, 15 bp, Homo sapiens
actttggcctcccga

SEQ ID NO: 1145381 - DNA, 15 bp, Homo sapiens
cactttggcctcccg

SEQ ID NO: 1145382 - DNA, 15 bp, Homo sapiens
tcccactttggcctc

SEQ ID NO: 1145383 - DNA, 15 bp, Homo sapiens
ctcccactttggcct

SEQ ID NO: 1145384 - DNA, 15 bp, Homo sapiens
cctcccactttggcc

SEQ ID NO: 1145385 - DNA, 15 bp, Homo sapiens
tcctcccactttggc

SEQ ID NO: 1145386 - DNA, 15 bp, Homo sapiens
atcctcccactttgg

SEQ ID NO: 1145387 - DNA, 15 bp, Homo sapiens
aatcctcccactttg

SEQ ID NO: 1145388 - DNA, 15 bp, Homo sapiens
aaatcctcccacttt

SEQ ID NO: 1145389 - DNA, 15 bp, Homo sapiens
gaaatcctcccactt

SEQ ID NO: 1145390 - DNA, 15 bp, Homo sapiens
agaaatcctcccact

SEQ ID NO: 1145391 - DNA, 15 bp, Homo sapiens
aagaaatcctcccac

SEQ ID NO: 1145392 - DNA, 15 bp, Homo sapiens
caagaaatcctccca

SEQ ID NO: 1145393 - DNA, 15 bp, Homo sapiens
tcaagaaatcctccc

SEQ ID NO: 1145394 - DNA, 15 bp, Homo sapiens
ctcaagaaatcctcc

SEQ ID NO: 1145395 - DNA, 15 bp, Homo sapiens
cctcaagaaatcctc

SEQ ID NO: 1145396 - DNA, 15 bp, Homo sapiens
gcctcaagaaatcct

SEQ ID NO: 1145397 - DNA, 15 bp, Homo sapiens
ggcctcaagaaatcc

SEQ ID NO: 1145398 - DNA, 15 bp, Homo sapiens
tggcctcaagaaatc

SEQ ID NO: 1145399 - DNA, 15 bp, Homo sapiens
ctggcctcaagaaat

SEQ ID NO: 1145400 - DNA, 15 bp, Homo sapiens
gctggcctcaagaaa

SEQ ID NO: 1145401 - DNA, 15 bp, Homo sapiens
agctggcctcaagaa

SEQ ID NO: 1145402 - DNA, 15 bp, Homo sapiens
aagctggcctcaaga

SEQ ID NO: 1145403 - DNA, 15 bp, Homo sapiens
caagctggcctcaag

SEQ ID NO: 1145404 - DNA, 15 bp, Homo sapiens
ccaagctggcctcaa

SEQ ID NO: 1145405 - DNA, 15 bp, Homo sapiens
cccaagctggcctca

SEQ ID NO: 1145406 - DNA, 15 bp, Homo sapiens
gcccaagctggcctc

SEQ ID NO: 1145407 - DNA, 15 bp, Homo sapiens
tgcccaagctggcct

SEQ ID NO: 1145408 - DNA, 15 bp, Homo sapiens
ttgcccaagctggcc

SEQ ID NO: 1145409 - DNA, 15 bp, Homo sapiens
gttgcccaagctggc

SEQ ID NO: 1145410 - DNA, 15 bp, Homo sapiens
cctctgttgcccaag

SEQ ID NO: 1145411 - DNA, 15 bp, Homo sapiens
ccctctgttgcccaa

SEQ ID NO: 1145412 - DNA, 15 bp, Homo sapiens
tccctctgttgccca

SEQ ID NO: 1145413 - DNA, 15 bp, Homo sapiens
ctccctctgttgccc

SEQ ID NO: 1145414 - DNA, 15 bp, Homo sapiens
tctccctctgttgcc

SEQ ID NO: 1145415 - DNA, 15 bp, Homo sapiens
gtctccctctgttgc

SEQ ID NO: 1145416 - DNA, 15 bp, Homo sapiens
ggtctccctctgttg

SEQ ID NO: 1145417 - DNA, 15 bp, Homo sapiens
gggtctccctctgtt

SEQ ID NO: 1145418 - DNA, 15 bp, Homo sapiens
agggtctccctctgt

SEQ ID NO: 1145419 - DNA, 15 bp, Homo sapiens
acagggtctccctct

SEQ ID NO: 1145420 - DNA, 15 bp, Homo sapiens
gacagggtctccctc

SEQ ID NO: 1145421 - DNA, 15 bp, Homo sapiens
agacagggtctccct

SEQ ID NO: 1145422 - DNA, 15 bp, Homo sapiens
gagacagggtctccc

SEQ ID NO: 1145423 - DNA, 15 bp, Homo sapiens
agagacagggtctcc

SEQ ID NO: 1145424 - DNA, 15 bp, Homo sapiens
tttttttgtagagac

SEQ ID NO: 1145425 - DNA, 15 bp, Homo sapiens
tttttttttgtagag

SEQ ID NO: 1145426 - DNA, 15 bp, Homo sapiens
taaaatttttttttt

SEQ ID NO: 1145427 - DNA, 15 bp, Homo sapiens
attaaaatttttttt

SEQ ID NO: 1145428 - DNA, 15 bp, Homo sapiens
aattaaaattttttt

SEQ ID NO: 1145429 - DNA, 15 bp, Homo sapiens
taattaaaatttttt

SEQ ID NO: 1145430 - DNA, 15 bp, Homo sapiens
ctaattaaaattttt

SEQ ID NO: 1145431 - DNA, 15 bp, Homo sapiens
gctaattaaaatttt

SEQ ID NO: 1145432 - DNA, 15 bp, Homo sapiens
agctaattaaaattt

SEQ ID NO: 1145433 - DNA, 15 bp, Homo sapiens
tagctaattaaaatt

SEQ ID NO: 1145434 - DNA, 15 bp, Homo sapiens
ctagctaattaaaat

SEQ ID NO: 1145435 - DNA, 15 bp, Homo sapiens
cctagctaattaaaa

SEQ ID NO: 1145436 - DNA, 15 bp, Homo sapiens
acctagctaattaaa

SEQ ID NO: 1145437 - DNA, 15 bp, Homo sapiens
cacctagctaattaa

SEQ ID NO: 1145438 - DNA, 15 bp, Homo sapiens
acacctagctaatta

SEQ ID NO: 1145439 - DNA, 15 bp, Homo sapiens
cacacctagctaatt

SEQ ID NO: 1145440 - DNA, 15 bp, Homo sapiens
ccacacctagctaat

SEQ ID NO: 1145441 - DNA, 15 bp, Homo sapiens
accacacctagctaa

SEQ ID NO: 1145442 - DNA, 15 bp, Homo sapiens
caccacacctagcta

SEQ ID NO: 1145443 - DNA, 15 bp, Homo sapiens
ccaccacacctagct

SEQ ID NO: 1145444 - DNA, 15 bp, Homo sapiens
accaccacacctagc

SEQ ID NO: 1145445 - DNA, 15 bp, Homo sapiens
caccaccacacctag

SEQ ID NO: 1145446 - DNA, 15 bp, Homo sapiens
gcaccaccacaccta

SEQ ID NO: 1145447 - DNA, 15 bp, Homo sapiens
tgcaccaccacacct

SEQ ID NO: 1145448 - DNA, 15 bp, Homo sapiens
cacaggtgtgcacca

SEQ ID NO: 1145449 - DNA, 15 bp, Homo sapiens
ccacaggtgtgcacc

SEQ ID NO: 1145450 - DNA, 15 bp, Homo sapiens
accacaggtgtgcac

SEQ ID NO: 1145451 - DNA, 15 bp, Homo sapiens
gaccacaggtgtgca

SEQ ID NO: 1145452 - DNA, 15 bp, Homo sapiens
agaccacaggtgtgc

SEQ ID NO: 1145453 - DNA, 15 bp, Homo sapiens
gagaccacaggtgtg

SEQ ID NO: 1145454 - DNA, 15 bp, Homo sapiens
tgagaccacaggtgt

SEQ ID NO: 1145455 - DNA, 15 bp, Homo sapiens
ctgagaccacaggtg

SEQ ID NO: 1145456 - DNA, 15 bp, Homo sapiens
gctgagaccacaggt

SEQ ID NO: 1145457 - DNA, 15 bp, Homo sapiens
cagtagctgagacca

SEQ ID NO: 1145458 - DNA, 15 bp, Homo sapiens
acagtagctgagacc

SEQ ID NO: 1145459 - DNA, 15 bp, Homo sapiens
cacagtagctgagac

SEQ ID NO: 1145460 - DNA, 15 bp, Homo sapiens
ccacagtagctgaga

SEQ ID NO: 1145461 - DNA, 15 bp, Homo sapiens
tccacagtagctgag

SEQ ID NO: 1145462 - DNA, 15 bp, Homo sapiens
ctccacagtagctga

SEQ ID NO: 1145463 - DNA, 15 bp, Homo sapiens
cctccacagtagctg

SEQ ID NO: 1145464 - DNA, 15 bp, Homo sapiens
gcctccacagtagct

SEQ ID NO: 1145465 - DNA, 15 bp, Homo sapiens
agcctccacagtagc

SEQ ID NO: 1145466 - DNA, 15 bp, Homo sapiens
cagcctccacagtag

SEQ ID NO: 1145467 - DNA, 15 bp, Homo sapiens
tcagcctccacagta

SEQ ID NO: 1145468 - DNA, 15 bp, Homo sapiens
ctcagcctccacagt

SEQ ID NO: 1145469 - DNA, 15 bp, Homo sapiens
cctcagcctccacag

SEQ ID NO: 1145470 - DNA, 15 bp, Homo sapiens
ccctcagcctccaca

SEQ ID NO: 1145471 - DNA, 15 bp, Homo sapiens
gccctcagcctccac

SEQ ID NO: 1145472 - DNA, 15 bp, Homo sapiens
agccctcagcctcca

SEQ ID NO: 1145473 - DNA, 15 bp, Homo sapiens
cagccctcagcctcc

SEQ ID NO: 1145474 - DNA, 15 bp, Homo sapiens
tcagccctcagcctc

SEQ ID NO: 1145475 - DNA, 15 bp, Homo sapiens
ctcagccctcagcct

SEQ ID NO: 1145476 - DNA, 15 bp, Homo sapiens
tctcagccctcagcc

SEQ ID NO: 1145477 - DNA, 15 bp, Homo sapiens
atctcagccctcagc

SEQ ID NO: 1145478 - DNA, 15 bp, Homo sapiens
catctcagccctcag

SEQ ID NO: 1145479 - DNA, 15 bp, Homo sapiens
ccatctcagccctca

SEQ ID NO: 1145480 - DNA, 15 bp, Homo sapiens
cccatctcagccctc

SEQ ID NO: 1145481 - DNA, 15 bp, Homo sapiens
tcccatctcagccct

SEQ ID NO: 1145482 - DNA, 15 bp, Homo sapiens
ctcccatctcagccc

SEQ ID NO: 1145483 - DNA, 15 bp, Homo sapiens
cctcccatctcagcc

SEQ ID NO: 1145484 - DNA, 15 bp, Homo sapiens
tcctcccatctcagc

SEQ ID NO: 1145485 - DNA, 15 bp, Homo sapiens
atcctcccatctcag

SEQ ID NO: 1145486 - DNA, 15 bp, Homo sapiens
gatcctcccatctca

SEQ ID NO: 1145487 - DNA, 15 bp, Homo sapiens
tgatcctcccatctc

SEQ ID NO: 1145488 - DNA, 15 bp, Homo sapiens
gtgatcctcccatct

SEQ ID NO: 1145489 - DNA, 15 bp, Homo sapiens
agtgatcctcccatc

SEQ ID NO: 1145490 - DNA, 15 bp, Homo sapiens
cggctcaagtgatcc

SEQ ID NO: 1145491 - DNA, 15 bp, Homo sapiens
ccggctcaagtgatc

SEQ ID NO: 1145492 - DNA, 15 bp, Homo sapiens
cccggctcaagtgat

SEQ ID NO: 1145493 - DNA, 15 bp, Homo sapiens
ccccggctcaagtga

SEQ ID NO: 1145494 - DNA, 15 bp, Homo sapiens
tccccggctcaagtg

SEQ ID NO: 1145495 - DNA, 15 bp, Homo sapiens
ctccccggctcaagt

SEQ ID NO: 1145496 - DNA, 15 bp, Homo sapiens
cctccccggctcaag

SEQ ID NO: 1145497 - DNA, 15 bp, Homo sapiens
acctccccggctcaa

SEQ ID NO: 1145498 - DNA, 15 bp, Homo sapiens
gacctccccggctca

SEQ ID NO: 1145499 - DNA, 15 bp, Homo sapiens
tgacctccccggctc

SEQ ID NO: 1145500 - DNA, 15 bp, Homo sapiens
ttgacctccccggct

SEQ ID NO: 1145501 - DNA, 15 bp, Homo sapiens
cttgacctccccggc

SEQ ID NO: 1145502 - DNA, 15 bp, Homo sapiens
ccttgacctccccgg

SEQ ID NO: 1145503 - DNA, 15 bp, Homo sapiens
gccttgacctccccg

SEQ ID NO: 1145504 - DNA, 15 bp, Homo sapiens
agccttgacctcccc

SEQ ID NO: 1145505 - DNA, 15 bp, Homo sapiens
cagccttgacctccc

SEQ ID NO: 1145506 - DNA, 15 bp, Homo sapiens
agcagccttgacctc

SEQ ID NO: 1145507 - DNA, 15 bp, Homo sapiens
cagcagccttgacct

SEQ ID NO: 1145508 - DNA, 15 bp, Homo sapiens
acagcagccttgacc

SEQ ID NO: 1145509 - DNA, 15 bp, Homo sapiens
cacagcagccttgac

SEQ ID NO: 1145510 - DNA, 15 bp, Homo sapiens
tcacagcagccttga

SEQ ID NO: 1145511 - DNA, 15 bp, Homo sapiens
ctcacagcagccttg

SEQ ID NO: 1145512 - DNA, 15 bp, Homo sapiens
gctcacagcagcctt

SEQ ID NO: 1145513 - DNA, 15 bp, Homo sapiens
ggctcacagcagcct

SEQ ID NO: 1145514 - DNA, 15 bp, Homo sapiens
tggctcacagcagcc

SEQ ID NO: 1145515 - DNA, 15 bp, Homo sapiens
atggctcacagcagc

SEQ ID NO: 1145516 - DNA, 15 bp, Homo sapiens
catggctcacagcag

SEQ ID NO: 1145517 - DNA, 15 bp, Homo sapiens
tcatggctcacagca

SEQ ID NO: 1145518 - DNA, 15 bp, Homo sapiens
atcatggctcacagc

SEQ ID NO: 1145519 - DNA, 15 bp, Homo sapiens
gatcatggctcacag

SEQ ID NO: 1145520 - DNA, 15 bp, Homo sapiens
tgatcatggctcaca

SEQ ID NO: 1145521 - DNA, 15 bp, Homo sapiens
ctgatcatggctcac

SEQ ID NO: 1145522 - DNA, 15 bp, Homo sapiens
cctgatcatggctca

SEQ ID NO: 1145523 - DNA, 15 bp, Homo sapiens
gcctgatcatggctc

SEQ ID NO: 1145524 - DNA, 15 bp, Homo sapiens
ggcctgatcatggct

SEQ ID NO: 1145525 - DNA, 15 bp, Homo sapiens
tggcctgatcatggc

SEQ ID NO: 1145526 - DNA, 15 bp, Homo sapiens
atggcctgatcatgg

SEQ ID NO: 1145527 - DNA, 15 bp, Homo sapiens
aatggcctgatcatg

SEQ ID NO: 1145528 - DNA, 15 bp, Homo sapiens
caatggcctgatcat

SEQ ID NO: 1145529 - DNA, 15 bp, Homo sapiens
gcaatggcctgatca

SEQ ID NO: 1145530 - DNA, 15 bp, Homo sapiens
tgcaatggcctgatc

SEQ ID NO: 1145531 - DNA, 15 bp, Homo sapiens
gtgcaatggcctgat

SEQ ID NO: 1145532 - DNA, 15 bp, Homo sapiens
agtgcaatggcctga

SEQ ID NO: 1145533 - DNA, 15 bp, Homo sapiens
gagtgcaatggcctg

SEQ ID NO: 1145534 - DNA, 15 bp, Homo sapiens
ggagtgcaatggcct

SEQ ID NO: 1145535 - DNA, 15 bp, Homo sapiens
tggagtgcaatggcc

SEQ ID NO: 1145536 - DNA, 15 bp, Homo sapiens
actcaggctggagtg

SEQ ID NO: 1145537 - DNA, 15 bp, Homo sapiens
cactcaggctggagt

SEQ ID NO: 1145538 - DNA, 15 bp, Homo sapiens
tcactcaggctggag

SEQ ID NO: 1145539 - DNA, 15 bp, Homo sapiens
ttgtcactcaggctg

SEQ ID NO: 1145540 - DNA, 15 bp, Homo sapiens
cttgtcactcaggct

SEQ ID NO: 1145541 - DNA, 15 bp, Homo sapiens
tcttgtcactcaggc

SEQ ID NO: 1145542 - DNA, 15 bp, Homo sapiens
gtcttgtcactcagg

SEQ ID NO: 1145543 - DNA, 15 bp, Homo sapiens
ggtcttgtcactcag

SEQ ID NO: 1145544 - DNA, 15 bp, Homo sapiens
gggtcttgtcactca

SEQ ID NO: 1145545 - DNA, 15 bp, Homo sapiens
agggtcttgtcactc

SEQ ID NO: 1145546 - DNA, 15 bp, Homo sapiens
cagggtcttgtcact

SEQ ID NO: 1145547 - DNA, 15 bp, Homo sapiens
acagggtcttgtcac

SEQ ID NO: 1145548 - DNA, 15 bp, Homo sapiens
gacagggtcttgtca

SEQ ID NO: 1145549 - DNA, 15 bp, Homo sapiens
agacagggtcttgtc

SEQ ID NO: 1145550 - DNA, 15 bp, Homo sapiens
tttttagagacaggg

SEQ ID NO: 1145551 - DNA, 15 bp, Homo sapiens
ttattttttagagac

SEQ ID NO: 1145552 - DNA, 15 bp, Homo sapiens
tttattttttagaga

SEQ ID NO: 1145553 - DNA, 15 bp, Homo sapiens
ttttattttttagag

SEQ ID NO: 1145554 - DNA, 15 bp, Homo sapiens
tttttattttttaga

SEQ ID NO: 1145555 - DNA, 15 bp, Homo sapiens
atttttattttttag

SEQ ID NO: 1145556 - DNA, 15 bp, Homo sapiens
tatttttatttttta

SEQ ID NO: 1145557 - DNA, 15 bp, Homo sapiens
ttttttatttatttt

SEQ ID NO: 1145558 - DNA, 15 bp, Homo sapiens
attttttatttattt

SEQ ID NO: 1145559 - DNA, 15 bp, Homo sapiens
tattttttatttatt

SEQ ID NO: 1145560 - DNA, 15 bp, Homo sapiens
ttattttttatttat

SEQ ID NO: 1145561 - DNA, 15 bp, Homo sapiens
tttattttttattta

SEQ ID NO: 1145562 - DNA, 15 bp, Homo sapiens
atttattttttattt

SEQ ID NO: 1145563 - DNA, 15 bp, Homo sapiens
tatttattttttatt

SEQ ID NO: 1145564 - DNA, 15 bp, Homo sapiens
ttatttattttttat

SEQ ID NO: 1145565 - DNA, 15 bp, Homo sapiens
tttatttatttttta

SEQ ID NO: 1145566 - DNA, 15 bp, Homo sapiens
ctttatttatttttt

SEQ ID NO: 1145567 - DNA, 15 bp, Homo sapiens
tctttatttattttt

SEQ ID NO: 1145568 - DNA, 15 bp, Homo sapiens
atctttatttatttt

SEQ ID NO: 1145569 - DNA, 15 bp, Homo sapiens
aatctttatttattt

SEQ ID NO: 1145570 - DNA, 15 bp, Homo sapiens
caatctttatttatt

SEQ ID NO: 1145571 - DNA, 15 bp, Homo sapiens
gcaatctttatttat

SEQ ID NO: 1145572 - DNA, 15 bp, Homo sapiens
agcaatctttattta

SEQ ID NO: 1145573 - DNA, 15 bp, Homo sapiens
aagcaatctttattt

SEQ ID NO: 1145574 - DNA, 15 bp, Homo sapiens
gaagcaatctttatt

SEQ ID NO: 1145575 - DNA, 15 bp, Homo sapiens
tgaagcaatctttat

SEQ ID NO: 1145576 - DNA, 15 bp, Homo sapiens
ctgaagcaatcttta

SEQ ID NO: 1145577 - DNA, 15 bp, Homo sapiens
tctgaagcaatcttt

SEQ ID NO: 1145578 - DNA, 15 bp, Homo sapiens
gtctgaagcaatctt

SEQ ID NO: 1145579 - DNA, 15 bp, Homo sapiens
agtctgaagcaatct

SEQ ID NO: 1145580 - DNA, 15 bp, Homo sapiens
tagtctgaagcaatc

SEQ ID NO: 1145581 - DNA, 15 bp, Homo sapiens
ttagtctgaagcaat

SEQ ID NO: 1145582 - DNA, 15 bp, Homo sapiens
cttagtctgaagcaa

SEQ ID NO: 1145583 - DNA, 15 bp, Homo sapiens
acttagtctgaagca

SEQ ID NO: 1145584 - DNA, 15 bp, Homo sapiens
cacttagtctgaagc

SEQ ID NO: 1145585 - DNA, 15 bp, Homo sapiens
tcacttagtctgaag

SEQ ID NO: 1145586 - DNA, 15 bp, Homo sapiens
ttcacttagtctgaa

SEQ ID NO: 1145587 - DNA, 15 bp, Homo sapiens
attcacttagtctga

SEQ ID NO: 1145588 - DNA, 15 bp, Homo sapiens
cattcacttagtctg

SEQ ID NO: 1145589 - DNA, 15 bp, Homo sapiens
ccattcacttagtct

SEQ ID NO: 1145590 - DNA, 15 bp, Homo sapiens
tccattcacttagtc

SEQ ID NO: 1145591 - DNA, 15 bp, Homo sapiens
ctccattcacttagt

SEQ ID NO: 1145592 - DNA, 15 bp, Homo sapiens
tctccattcacttag

SEQ ID NO: 1145593 - DNA, 15 bp, Homo sapiens
ttctccattcactta

SEQ ID NO: 1145594 - DNA, 15 bp, Homo sapiens
tttctccattcactt

SEQ ID NO: 1145595 - DNA, 15 bp, Homo sapiens
ttttctccattcact

SEQ ID NO: 1145596 - DNA, 15 bp, Homo sapiens
tttttctccattcac

SEQ ID NO: 1145597 - DNA, 15 bp, Homo sapiens
ttttttctccattca

SEQ ID NO: 1145598 - DNA, 15 bp, Homo sapiens
tttttttctccattc

SEQ ID NO: 1145599 - DNA, 15 bp, Homo sapiens
ttttttttctccatt

SEQ ID NO: 1145600 - DNA, 15 bp, Homo sapiens
attttttttctccat

SEQ ID NO: 1145601 - DNA, 15 bp, Homo sapiens
cattttttttctcca

SEQ ID NO: 1145602 - DNA, 15 bp, Homo sapiens
tcattttttttctcc

SEQ ID NO: 1145603 - DNA, 15 bp, Homo sapiens
atcattttttttctc

SEQ ID NO: 1145604 - DNA, 15 bp, Homo sapiens
tatcattttttttct

SEQ ID NO: 1145605 - DNA, 15 bp, Homo sapiens
atatcattttttttc

SEQ ID NO: 1145606 - DNA, 15 bp, Homo sapiens
tatatcatttttttt

SEQ ID NO: 1145607 - DNA, 15 bp, Homo sapiens
ctatatcattttttt

SEQ ID NO: 1145608 - DNA, 15 bp, Homo sapiens
cctatatcatttttt

SEQ ID NO: 1145609 - DNA, 15 bp, Homo sapiens
acctatatcattttt

SEQ ID NO: 1145610 - DNA, 15 bp, Homo sapiens
tacctatatcatttt

SEQ ID NO: 1145611 - DNA, 15 bp, Homo sapiens
ttacctatatcattt

SEQ ID NO: 1145612 - DNA, 15 bp, Homo sapiens
tttacctatatcatt

SEQ ID NO: 1145613 - DNA, 15 bp, Homo sapiens
ttttacctatatcat

SEQ ID NO: 1145614 - DNA, 15 bp, Homo sapiens
gttttacctatatca

SEQ ID NO: 1145615 - DNA, 15 bp, Homo sapiens
agttttacctatatc

SEQ ID NO: 1145616 - DNA, 15 bp, Homo sapiens
tagttttacctatat

SEQ ID NO: 1145617 - DNA, 15 bp, Homo sapiens
ttagttttacctata

SEQ ID NO: 1145618 - DNA, 15 bp, Homo sapiens
tttagttttacctat

SEQ ID NO: 1145619 - DNA, 15 bp, Homo sapiens
atttagttttaccta

SEQ ID NO: 1145620 - DNA, 15 bp, Homo sapiens
catttagttttacct

SEQ ID NO: 1145621 - DNA, 15 bp, Homo sapiens
ccatttagttttacc

SEQ ID NO: 1145622 - DNA, 15 bp, Homo sapiens
tccatttagttttac

SEQ ID NO: 1145623 - DNA, 15 bp, Homo sapiens
atccatttagtttta

SEQ ID NO: 1145624 - DNA, 15 bp, Homo sapiens
tatccatttagtttt

SEQ ID NO: 1145625 - DNA, 15 bp, Homo sapiens
atatccatttagttt

SEQ ID NO: 1145626 - DNA, 15 bp, Homo sapiens
tatatccatttagtt

SEQ ID NO: 1145627 - DNA, 15 bp, Homo sapiens
ttatatccatttagt

SEQ ID NO: 1145628 - DNA, 15 bp, Homo sapiens
tttatatccatttag

SEQ ID NO: 1145629 - DNA, 15 bp, Homo sapiens
ctttatatccattta

SEQ ID NO: 1145630 - DNA, 15 bp, Homo sapiens
tctttatatccattt

SEQ ID NO: 1145631 - DNA, 15 bp, Homo sapiens
gtctttatatccatt

SEQ ID NO: 1145632 - DNA, 15 bp, Homo sapiens
agtctttatatccat

SEQ ID NO: 1145633 - DNA, 15 bp, Homo sapiens
aagtctttatatcca

SEQ ID NO: 1145634 - DNA, 15 bp, Homo sapiens
aaagtctttatatcc

SEQ ID NO: 1145635 - DNA, 15 bp, Homo sapiens
aaaagtctttatatc

SEQ ID NO: 1145636 - DNA, 15 bp, Homo sapiens
taaaagtctttatat

SEQ ID NO: 1145637 - DNA, 15 bp, Homo sapiens
ttaaaagtctttata

SEQ ID NO: 1145638 - DNA, 15 bp, Homo sapiens
tttaaaagtctttat

SEQ ID NO: 1145639 - DNA, 15 bp, Homo sapiens
ttttaaaagtcttta

SEQ ID NO: 1145640 - DNA, 15 bp, Homo sapiens
tttttaaaagtcttt

SEQ ID NO: 1145641 - DNA, 15 bp, Homo sapiens
ctttttaaaagtctt

SEQ ID NO: 1145642 - DNA, 15 bp, Homo sapiens
actttttaaaagtct

SEQ ID NO: 1145643 - DNA, 15 bp, Homo sapiens
tactttttaaaagtc

SEQ ID NO: 1145644 - DNA, 15 bp, Homo sapiens
ctactttttaaaagt

SEQ ID NO: 1145645 - DNA, 15 bp, Homo sapiens
tctactttttaaaag

SEQ ID NO: 1145646 - DNA, 15 bp, Homo sapiens
ttctactttttaaaa

SEQ ID NO: 1145647 - DNA, 15 bp, Homo sapiens
cttctactttttaaa

SEQ ID NO: 1145648 - DNA, 15 bp, Homo sapiens
tcttctactttttaa

SEQ ID NO: 1145649 - DNA, 15 bp, Homo sapiens
ctcttctacttttta

SEQ ID NO: 1145650 - DNA, 15 bp, Homo sapiens
actcttctacttttt

SEQ ID NO: 1145651 - DNA, 15 bp, Homo sapiens
tactcttctactttt

SEQ ID NO: 1145652 - DNA, 15 bp, Homo sapiens
ctactcttctacttt

SEQ ID NO: 1145653 - DNA, 15 bp, Homo sapiens
cctactcttctactt

SEQ ID NO: 1145654 - DNA, 15 bp, Homo sapiens
tcctactcttctact

SEQ ID NO: 1145655 - DNA, 15 bp, Homo sapiens
ttcctactcttctac

SEQ ID NO: 1145656 - DNA, 15 bp, Homo sapiens
tttcctactcttcta

SEQ ID NO: 1145657 - DNA, 15 bp, Homo sapiens
ttttcctactcttct

SEQ ID NO: 1145658 - DNA, 15 bp, Homo sapiens
tttttcctactcttc

SEQ ID NO: 1145659 - DNA, 15 bp, Homo sapiens
ttttttcctactctt

SEQ ID NO: 1145660 - DNA, 15 bp, Homo sapiens
attttttcctactct

SEQ ID NO: 1145661 - DNA, 15 bp, Homo sapiens
aattttttcctactc

SEQ ID NO: 1145662 - DNA, 15 bp, Homo sapiens
taattttttcctact

SEQ ID NO: 1145663 - DNA, 15 bp, Homo sapiens
ataattttttcctac

SEQ ID NO: 1145664 - DNA, 15 bp, Homo sapiens
tataattttttccta

SEQ ID NO: 1145665 - DNA, 15 bp, Homo sapiens
ttataattttttcct

SEQ ID NO: 1145666 - DNA, 15 bp, Homo sapiens
attataattttttcc

SEQ ID NO: 1145667 - DNA, 15 bp, Homo sapiens
tattataattttttc

SEQ ID NO: 1145668 - DNA, 15 bp, Homo sapiens
cctattataattttt

SEQ ID NO: 1145669 - DNA, 15 bp, Homo sapiens
acctattataatttt

SEQ ID NO: 1145670 - DNA, 15 bp, Homo sapiens
aacctattataattt

SEQ ID NO: 1145671 - DNA, 15 bp, Homo sapiens
taacctattataatt

SEQ ID NO: 1145672 - DNA, 15 bp, Homo sapiens
ataacctattataat

SEQ ID NO: 1145673 - DNA, 15 bp, Homo sapiens
tataacctattataa

SEQ ID NO: 1145674 - DNA, 15 bp, Homo sapiens
ctataacctattata

SEQ ID NO: 1145675 - DNA, 15 bp, Homo sapiens
tctataacctattat

SEQ ID NO: 1145676 - DNA, 15 bp, Homo sapiens
ttctataacctatta

SEQ ID NO: 1145677 - DNA, 15 bp, Homo sapiens
cttctataacctatt

SEQ ID NO: 1145678 - DNA, 15 bp, Homo sapiens
ccttctataacctat

SEQ ID NO: 1145679 - DNA, 15 bp, Homo sapiens
accttctataaccta

SEQ ID NO: 1145680 - DNA, 15 bp, Homo sapiens
aaccttctataacct

SEQ ID NO: 1145681 - DNA, 15 bp, Homo sapiens
aaaccttctataacc

SEQ ID NO: 1145682 - DNA, 15 bp, Homo sapiens
taaaccttctataac

SEQ ID NO: 1145683 - DNA, 15 bp, Homo sapiens
ataaaccttctataa

SEQ ID NO: 1145684 - DNA, 15 bp, Homo sapiens
cataaaccttctata

SEQ ID NO: 1145685 - DNA, 15 bp, Homo sapiens
tcataaaccttctat

SEQ ID NO: 1145686 - DNA, 15 bp, Homo sapiens
ttcataaaccttcta

SEQ ID NO: 1145687 - DNA, 15 bp, Homo sapiens
tttcataaaccttct

SEQ ID NO: 1145688 - DNA, 15 bp, Homo sapiens
ttttcataaaccttc

SEQ ID NO: 1145689 - DNA, 15 bp, Homo sapiens
cttttcataaacctt

SEQ ID NO: 1145690 - DNA, 15 bp, Homo sapiens
acttttcataaacct

SEQ ID NO: 1145691 - DNA, 15 bp, Homo sapiens
aacttttcataaacc

SEQ ID NO: 1145692 - DNA, 15 bp, Homo sapiens
aaacttttcataaac

SEQ ID NO: 1145693 - DNA, 15 bp, Homo sapiens
taaacttttcataaa

SEQ ID NO: 1145694 - DNA, 15 bp, Homo sapiens
ataaacttttcataa

SEQ ID NO: 1145695 - DNA, 15 bp, Homo sapiens
gataaacttttcata

SEQ ID NO: 1145696 - DNA, 15 bp, Homo sapiens
agataaacttttcat

SEQ ID NO: 1145697 - DNA, 15 bp, Homo sapiens
aagataaacttttca

SEQ ID NO: 1145698 - DNA, 15 bp, Homo sapiens
caagataaacttttc

SEQ ID NO: 1145699 - DNA, 15 bp, Homo sapiens
acaagataaactttt

SEQ ID NO: 1145700 - DNA, 15 bp, Homo sapiens
cacaagataaacttt

SEQ ID NO: 1145701 - DNA, 15 bp, Homo sapiens
acacaagataaactt

SEQ ID NO: 1145702 - DNA, 15 bp, Homo sapiens
cacacaagataaact

SEQ ID NO: 1145703 - DNA, 15 bp, Homo sapiens
gcacacaagataaac

SEQ ID NO: 1145704 - DNA, 15 bp, Homo sapiens
tgcacacaagataaa

SEQ ID NO: 1145705 - DNA, 15 bp, Homo sapiens
ttgcacacaagataa

SEQ ID NO: 1145706 - DNA, 15 bp, Homo sapiens
tttgcacacaagata

SEQ ID NO: 1145707 - DNA, 15 bp, Homo sapiens
ctttgcacacaagat

SEQ ID NO: 1145708 - DNA, 15 bp, Homo sapiens
gctttgcacacaaga

SEQ ID NO: 1145709 - DNA, 15 bp, Homo sapiens
agctttgcacacaag

SEQ ID NO: 1145710 - DNA, 15 bp, Homo sapiens
cagctttgcacacaa

SEQ ID NO: 1145711 - DNA, 15 bp, Homo sapiens
tcagctttgcacaca

SEQ ID NO: 1145712 - DNA, 15 bp, Homo sapiens
gtcagctttgcacac

SEQ ID NO: 1145713 - DNA, 15 bp, Homo sapiens
agtcagctttgcaca

SEQ ID NO: 1145714 - DNA, 15 bp, Homo sapiens
cagtcagctttgcac

SEQ ID NO: 1145715 - DNA, 15 bp, Homo sapiens
tcagtcagctttgca

SEQ ID NO: 1145716 - DNA, 15 bp, Homo sapiens
atcagtcagctttgc

SEQ ID NO: 1145717 - DNA, 15 bp, Homo sapiens
tatcagtcagctttg

SEQ ID NO: 1145718 - DNA, 15 bp, Homo sapiens
atatcagtcagcttt

SEQ ID NO: 1145719 - DNA, 15 bp, Homo sapiens
gatatcagtcagctt

SEQ ID NO: 1145720 - DNA, 15 bp, Homo sapiens
tgatatcagtcagct

SEQ ID NO: 1145721 - DNA, 15 bp, Homo sapiens
ctgatatcagtcagc

SEQ ID NO: 1145722 - DNA, 15 bp, Homo sapiens
tctgatatcagtcag

SEQ ID NO: 1145723 - DNA, 15 bp, Homo sapiens
ctctgatatcagtca

SEQ ID NO: 1145724 - DNA, 15 bp, Homo sapiens
tctctgatatcagtc

SEQ ID NO: 1145725 - DNA, 15 bp, Homo sapiens
ttctctgatatcagt

SEQ ID NO: 1145726 - DNA, 15 bp, Homo sapiens
tttctctgatatcag

SEQ ID NO: 1145727 - DNA, 15 bp, Homo sapiens
atttctctgatatca

SEQ ID NO: 1145728 - DNA, 15 bp, Homo sapiens
aatttctctgatatc

SEQ ID NO: 1145729 - DNA, 15 bp, Homo sapiens
aaatttctctgatat

SEQ ID NO: 1145730 - DNA, 15 bp, Homo sapiens
caaatttctctgata

SEQ ID NO: 1145731 - DNA, 15 bp, Homo sapiens
acaaatttctctgat

SEQ ID NO: 1145732 - DNA, 15 bp, Homo sapiens
aacaaatttctctga

SEQ ID NO: 1145733 - DNA, 15 bp, Homo sapiens
aaacaaatttctctg

SEQ ID NO: 1145734 - DNA, 15 bp, Homo sapiens
taaacaaatttctct

SEQ ID NO: 1145735 - DNA, 15 bp, Homo sapiens
gtaaacaaatttctc

SEQ ID NO: 1145736 - DNA, 15 bp, Homo sapiens
tgtaaacaaatttct

SEQ ID NO: 1145737 - DNA, 15 bp, Homo sapiens
gtgtaaacaaatttc

SEQ ID NO: 1145738 - DNA, 15 bp, Homo sapiens
cgtgtaaacaaattt

SEQ ID NO: 1145739 - DNA, 15 bp, Homo sapiens
acgtgtaaacaaatt

SEQ ID NO: 1145740 - DNA, 15 bp, Homo sapiens
gacgtgtaaacaaat

SEQ ID NO: 1145741 - DNA, 15 bp, Homo sapiens
tgacgtgtaaacaaa

SEQ ID NO: 1145742 - DNA, 15 bp, Homo sapiens
atgacgtgtaaacaa

SEQ ID NO: 1145743 - DNA, 15 bp, Homo sapiens
aatgacgtgtaaaca

SEQ ID NO: 1145744 - DNA, 15 bp, Homo sapiens
taatgacgtgtaaac

SEQ ID NO: 1145745 - DNA, 15 bp, Homo sapiens
ttaatgacgtgtaaa

SEQ ID NO: 1145746 - DNA, 15 bp, Homo sapiens
tttaatgacgtgtaa

SEQ ID NO: 1145747 - DNA, 15 bp, Homo sapiens
ttttaatgacgtgta

SEQ ID NO: 1145748 - DNA, 15 bp, Homo sapiens
attttaatgacgtgt

SEQ ID NO: 1145749 - DNA, 15 bp, Homo sapiens
aattttaatgacgtg

SEQ ID NO: 1145750 - DNA, 15 bp, Homo sapiens
taattttaatgacgt

SEQ ID NO: 1145751 - DNA, 15 bp, Homo sapiens
ctaattttaatgacg

SEQ ID NO: 1145752 - DNA, 15 bp, Homo sapiens
gctaattttaatgac

SEQ ID NO: 1145753 - DNA, 15 bp, Homo sapiens
agctaattttaatga

SEQ ID NO: 1145754 - DNA, 15 bp, Homo sapiens
aagctaattttaatg

SEQ ID NO: 1145755 - DNA, 15 bp, Homo sapiens
aaagctaattttaat

SEQ ID NO: 1145756 - DNA, 15 bp, Homo sapiens
taaagctaattttaa

SEQ ID NO: 1145757 - DNA, 15 bp, Homo sapiens
ctaaagctaatttta

SEQ ID NO: 1145758 - DNA, 15 bp, Homo sapiens
actaaagctaatttt

SEQ ID NO: 1145759 - DNA, 15 bp, Homo sapiens
tactaaagctaattt

SEQ ID NO: 1145760 - DNA, 15 bp, Homo sapiens
atactaaagctaatt

SEQ ID NO: 1145761 - DNA, 15 bp, Homo sapiens
aatactaaagctaat

SEQ ID NO: 1145762 - DNA, 15 bp, Homo sapiens
aaatactaaagctaa

SEQ ID NO: 1145763 - DNA, 15 bp, Homo sapiens
taaatactaaagcta

SEQ ID NO: 1145764 - DNA, 15 bp, Homo sapiens
ttaaatactaaagct

SEQ ID NO: 1145765 - DNA, 15 bp, Homo sapiens
tttaaatactaaagc

SEQ ID NO: 1145766 - DNA, 15 bp, Homo sapiens
ctttaaatactaaag

SEQ ID NO: 1145767 - DNA, 15 bp, Homo sapiens
actttaaatactaaa

SEQ ID NO: 1145768 - DNA, 15 bp, Homo sapiens
tactttaaatactaa

SEQ ID NO: 1145769 - DNA, 15 bp, Homo sapiens
gtactttaaatacta

SEQ ID NO: 1145770 - DNA, 15 bp, Homo sapiens
tgtactttaaatact

SEQ ID NO: 1145771 - DNA, 15 bp, Homo sapiens
gtgtactttaaatac

SEQ ID NO: 1145772 - DNA, 15 bp, Homo sapiens
tgtgtactttaaata

SEQ ID NO: 1145773 - DNA, 15 bp, Homo sapiens
ttgtgtactttaaat

SEQ ID NO: 1145774 - DNA, 15 bp, Homo sapiens
tttgtgtactttaaa

SEQ ID NO: 1145775 - DNA, 15 bp, Homo sapiens
ctttgtgtactttaa

SEQ ID NO: 1145776 - DNA, 15 bp, Homo sapiens
tctttgtgtacttta

SEQ ID NO: 1145777 - DNA, 15 bp, Homo sapiens
gtctttgtgtacttt

SEQ ID NO: 1145778 - DNA, 15 bp, Homo sapiens
tgtctttgtgtactt

SEQ ID NO: 1145779 - DNA, 15 bp, Homo sapiens
ttgtctttgtgtact

SEQ ID NO: 1145780 - DNA, 15 bp, Homo sapiens
tttgtctttgtgtac

SEQ ID NO: 1145781 - DNA, 15 bp, Homo sapiens
ctttgtctttgtgta

SEQ ID NO: 1145782 - DNA, 15 bp, Homo sapiens
gctttgtctttgtgt

SEQ ID NO: 1145783 - DNA, 15 bp, Homo sapiens
agctttgtctttgtg

SEQ ID NO: 1145784 - DNA, 15 bp, Homo sapiens
tagctttgtctttgt

SEQ ID NO: 1145785 - DNA, 15 bp, Homo sapiens
ctagctttgtctttg

SEQ ID NO: 1145786 - DNA, 15 bp, Homo sapiens
actagctttgtcttt

SEQ ID NO: 1145787 - DNA, 15 bp, Homo sapiens
cactagctttgtctt

SEQ ID NO: 1145788 - DNA, 15 bp, Homo sapiens
ccactagctttgtct

SEQ ID NO: 1145789 - DNA, 15 bp, Homo sapiens
accactagctttgtc

SEQ ID NO: 1145790 - DNA, 15 bp, Homo sapiens
aaccactagctttgt

SEQ ID NO: 1145791 - DNA, 15 bp, Homo sapiens
caaccactagctttg

SEQ ID NO: 1145792 - DNA, 15 bp, Homo sapiens
tcaaccactagcttt

SEQ ID NO: 1145793 - DNA, 15 bp, Homo sapiens
atcaaccactagctt

SEQ ID NO: 1145794 - DNA, 15 bp, Homo sapiens
aatcaaccactagct

SEQ ID NO: 1145795 - DNA, 15 bp, Homo sapiens
aaatcaaccactagc

SEQ ID NO: 1145796 - DNA, 15 bp, Homo sapiens
aaaatcaaccactag

SEQ ID NO: 1145797 - DNA, 15 bp, Homo sapiens
gaaaatcaaccacta

SEQ ID NO: 1145798 - DNA, 15 bp, Homo sapiens
agaaaatcaaccact

SEQ ID NO: 1145799 - DNA, 15 bp, Homo sapiens
gagaaaatcaaccac

SEQ ID NO: 1145800 - DNA, 15 bp, Homo sapiens
agagaaaatcaacca

SEQ ID NO: 1145801 - DNA, 15 bp, Homo sapiens
aagagaaaatcaacc

SEQ ID NO: 1145802 - DNA, 15 bp, Homo sapiens
aaagagaaaatcaac

SEQ ID NO: 1145803 - DNA, 15 bp, Homo sapiens
aaaagagaaaatcaa

SEQ ID NO: 1145804 - DNA, 15 bp, Homo sapiens
taaaagagaaaatca

SEQ ID NO: 1145805 - DNA, 15 bp, Homo sapiens
ttaaaagagaaaatc

SEQ ID NO: 1145806 - DNA, 15 bp, Homo sapiens
tttaaaagagaaaat

SEQ ID NO: 1145807 - DNA, 15 bp, Homo sapiens
atttaaaagagaaaa

SEQ ID NO: 1145808 - DNA, 15 bp, Homo sapiens
tatttaaaagagaaa

SEQ ID NO: 1145809 - DNA, 15 bp, Homo sapiens
ttatttaaaagagaa

SEQ ID NO: 1145810 - DNA, 15 bp, Homo sapiens
attatttaaaagaga

SEQ ID NO: 1145811 - DNA, 15 bp, Homo sapiens
tattatttaaaagag

SEQ ID NO: 1145812 - DNA, 15 bp, Homo sapiens
atattatttaaaaga

SEQ ID NO: 1145813 - DNA, 15 bp, Homo sapiens
aatattatttaaaag

SEQ ID NO: 1145814 - DNA, 15 bp, Homo sapiens
aaatattatttaaaa

SEQ ID NO: 1145815 - DNA, 15 bp, Homo sapiens
aaaatattatttaaa

SEQ ID NO: 1145816 - DNA, 15 bp, Homo sapiens
aaaaatattatttaa

SEQ ID NO: 1145817 - DNA, 15 bp, Homo sapiens
caaaaatattattta

SEQ ID NO: 1145818 - DNA, 15 bp, Homo sapiens
gcaaaaatattattt

SEQ ID NO: 1145819 - DNA, 15 bp, Homo sapiens
tgcaaaaatattatt

SEQ ID NO: 1145820 - DNA, 15 bp, Homo sapiens
atgcaaaaatattat

SEQ ID NO: 1145821 - DNA, 15 bp, Homo sapiens
tatgcaaaaatatta

SEQ ID NO: 1145822 - DNA, 15 bp, Homo sapiens
ctatgcaaaaatatt

SEQ ID NO: 1145823 - DNA, 15 bp, Homo sapiens
cctatgcaaaaatat

SEQ ID NO: 1145824 - DNA, 15 bp, Homo sapiens
tcctatgcaaaaata

SEQ ID NO: 1145825 - DNA, 15 bp, Homo sapiens
atcctatgcaaaaat

SEQ ID NO: 1145826 - DNA, 15 bp, Homo sapiens
aatcctatgcaaaaa

SEQ ID NO: 1145827 - DNA, 15 bp, Homo sapiens
taatcctatgcaaaa

SEQ ID NO: 1145828 - DNA, 15 bp, Homo sapiens
ttaatcctatgcaaa

SEQ ID NO: 1145829 - DNA, 15 bp, Homo sapiens
attaatcctatgcaa

SEQ ID NO: 1145830 - DNA, 15 bp, Homo sapiens
tattaatcctatgca

SEQ ID NO: 1145831 - DNA, 15 bp, Homo sapiens
ttattaatcctatgc

SEQ ID NO: 1145832 - DNA, 15 bp, Homo sapiens
tttattaatcctatg

SEQ ID NO: 1145833 - DNA, 15 bp, Homo sapiens
ttttattaatcctat

SEQ ID NO: 1145834 - DNA, 15 bp, Homo sapiens
tttttattaatccta

SEQ ID NO: 1145835 - DNA, 15 bp, Homo sapiens
ctttttattaatcct

SEQ ID NO: 1145836 - DNA, 15 bp, Homo sapiens
tctttttattaatcc

SEQ ID NO: 1145837 - DNA, 15 bp, Homo sapiens
ttctttttattaatc

SEQ ID NO: 1145838 - DNA, 15 bp, Homo sapiens
tttctttttattaat

SEQ ID NO: 1145839 - DNA, 15 bp, Homo sapiens
ttttctttttattaa

SEQ ID NO: 1145840 - DNA, 15 bp, Homo sapiens
cttttctttttatta

SEQ ID NO: 1145841 - DNA, 15 bp, Homo sapiens
tcttttctttttatt

SEQ ID NO: 1145842 - DNA, 15 bp, Homo sapiens
atcttttctttttat

SEQ ID NO: 1145843 - DNA, 15 bp, Homo sapiens
aatcttttcttttta

SEQ ID NO: 1145844 - DNA, 15 bp, Homo sapiens
aaatcttttcttttt

SEQ ID NO: 1145845 - DNA, 15 bp, Homo sapiens
aaaatcttttctttt

SEQ ID NO: 1145846 - DNA, 15 bp, Homo sapiens
aaaaatcttttcttt

SEQ ID NO: 1145847 - DNA, 15 bp, Homo sapiens
caaaaatcttttctt

SEQ ID NO: 1145848 - DNA, 15 bp, Homo sapiens
acaaaaatcttttct

SEQ ID NO: 1145849 - DNA, 15 bp, Homo sapiens
tacaaaaatcttttc

SEQ ID NO: 1145850 - DNA, 15 bp, Homo sapiens
gtacaaaaatctttt

SEQ ID NO: 1145851 - DNA, 15 bp, Homo sapiens
tgtacaaaaatcttt

SEQ ID NO: 1145852 - DNA, 15 bp, Homo sapiens
atgtacaaaaatctt

SEQ ID NO: 1145853 - DNA, 15 bp, Homo sapiens
catgtacaaaaatct

SEQ ID NO: 1145854 - DNA, 15 bp, Homo sapiens
acatgtacaaaaatc

SEQ ID NO: 1145855 - DNA, 15 bp, Homo sapiens
aacatgtacaaaaat

SEQ ID NO: 1145856 - DNA, 15 bp, Homo sapiens
gaacatgtacaaaaa

SEQ ID NO: 1145857 - DNA, 15 bp, Homo sapiens
agaacatgtacaaaa

SEQ ID NO: 1145858 - DNA, 15 bp, Homo sapiens
cagaacatgtacaaa

SEQ ID NO: 1145859 - DNA, 15 bp, Homo sapiens
tcagaacatgtacaa

SEQ ID NO: 1145860 - DNA, 15 bp, Homo sapiens
ctcagaacatgtaca

SEQ ID NO: 1145861 - DNA, 15 bp, Homo sapiens
actcagaacatgtac

SEQ ID NO: 1145862 - DNA, 15 bp, Homo sapiens
tactcagaacatgta

SEQ ID NO: 1145863 - DNA, 15 bp, Homo sapiens
ttactcagaacatgt

SEQ ID NO: 1145864 - DNA, 15 bp, Homo sapiens
tttactcagaacatg

SEQ ID NO: 1145865 - DNA, 15 bp, Homo sapiens
ttttactcagaacat

SEQ ID NO: 1145866 - DNA, 15 bp, Homo sapiens
attttactcagaaca

SEQ ID NO: 1145867 - DNA, 15 bp, Homo sapiens
cattttactcagaac

SEQ ID NO: 1145868 - DNA, 15 bp, Homo sapiens
gcattttactcagaa

SEQ ID NO: 1145869 - DNA, 15 bp, Homo sapiens
tgcattttactcaga

SEQ ID NO: 1145870 - DNA, 15 bp, Homo sapiens
ttgcattttactcag

SEQ ID NO: 1145871 - DNA, 15 bp, Homo sapiens
tttgcattttactca

SEQ ID NO: 1145872 - DNA, 15 bp, Homo sapiens
ttttgcattttactc

SEQ ID NO: 1145873 - DNA, 15 bp, Homo sapiens
tttttgcattttact

SEQ ID NO: 1145874 - DNA, 15 bp, Homo sapiens
ttttttgcattttac

SEQ ID NO: 1145875 - DNA, 15 bp, Homo sapiens
tttttttgcatttta

SEQ ID NO: 1145876 - DNA, 15 bp, Homo sapiens
gtttttttgcatttt

SEQ ID NO: 1145877 - DNA, 15 bp, Homo sapiens
tgtttttttgcattt

SEQ ID NO: 1145878 - DNA, 15 bp, Homo sapiens
ttgtttttttgcatt

SEQ ID NO: 1145879 - DNA, 15 bp, Homo sapiens
tttgtttttttgcat

SEQ ID NO: 1145880 - DNA, 15 bp, Homo sapiens
ttttgtttttttgca

SEQ ID NO: 1145881 - DNA, 15 bp, Homo sapiens
tttttgtttttttgc

SEQ ID NO: 1145882 - DNA, 15 bp, Homo sapiens
ttgctttttttttgt

SEQ ID NO: 1145883 - DNA, 15 bp, Homo sapiens
cttgctttttttttg

SEQ ID NO: 1145884 - DNA, 15 bp, Homo sapiens
tctcttgcttttttt

SEQ ID NO: 1145885 - DNA, 15 bp, Homo sapiens
ctctcttgctttttt

SEQ ID NO: 1145886 - DNA, 15 bp, Homo sapiens
tctctcttgcttttt

SEQ ID NO: 1145887 - DNA, 15 bp, Homo sapiens
ctctctcttgctttt

SEQ ID NO: 1145888 - DNA, 15 bp, Homo sapiens
tctctctcttgcttt

SEQ ID NO: 1145889 - DNA, 15 bp, Homo sapiens
ttctctctcttgctt

SEQ ID NO: 1145890 - DNA, 15 bp, Homo sapiens
tttctctctcttgct

SEQ ID NO: 1145891 - DNA, 15 bp, Homo sapiens
gtttctctctcttgc

SEQ ID NO: 1145892 - DNA, 15 bp, Homo sapiens
tgtttctctctcttg

SEQ ID NO: 1145893 - DNA, 15 bp, Homo sapiens
ctgtttctctctctt

SEQ ID NO: 1145894 - DNA, 15 bp, Homo sapiens
atctgtttctctctc

SEQ ID NO: 1145895 - DNA, 15 bp, Homo sapiens
aatctgtttctctct

SEQ ID NO: 1145896 - DNA, 15 bp, Homo sapiens
aaatctgtttctctc

SEQ ID NO: 1145897 - DNA, 15 bp, Homo sapiens
aaaatctgtttctct

SEQ ID NO: 1145898 - DNA, 15 bp, Homo sapiens
caaaatctgtttctc

SEQ ID NO: 1145899 - DNA, 15 bp, Homo sapiens
acaaaatctgtttct

SEQ ID NO: 1145900 - DNA, 15 bp, Homo sapiens
cacaaaatctgtttc

SEQ ID NO: 1145901 - DNA, 15 bp, Homo sapiens
acacaaaatctgttt

SEQ ID NO: 1145902 - DNA, 15 bp, Homo sapiens
cacacaaaatctgtt

SEQ ID NO: 1145903 - DNA, 15 bp, Homo sapiens
gcacacaaaatctgt

SEQ ID NO: 1145904 - DNA, 15 bp, Homo sapiens
ggcacacaaaatctg

SEQ ID NO: 1145905 - DNA, 15 bp, Homo sapiens
aggcacacaaaatct

SEQ ID NO: 1145906 - DNA, 15 bp, Homo sapiens
gaggcacacaaaatc

SEQ ID NO: 1145907 - DNA, 15 bp, Homo sapiens
tgaggcacacaaaat

SEQ ID NO: 1145908 - DNA, 15 bp, Homo sapiens
atgaggcacacaaaa

SEQ ID NO: 1145909 - DNA, 15 bp, Homo sapiens
catgaggcacacaaa

SEQ ID NO: 1145910 - DNA, 15 bp, Homo sapiens
acatgaggcacacaa

SEQ ID NO: 1145911 - DNA, 15 bp, Homo sapiens
gacatgaggcacaca

SEQ ID NO: 1145912 - DNA, 15 bp, Homo sapiens
agacatgaggcacac

SEQ ID NO: 1145913 - DNA, 15 bp, Homo sapiens
aagacatgaggcaca

SEQ ID NO: 1145914 - DNA, 15 bp, Homo sapiens
caagacatgaggcac

SEQ ID NO: 1145915 - DNA, 15 bp, Homo sapiens
acaagacatgaggca

SEQ ID NO: 1145916 - DNA, 15 bp, Homo sapiens
gacaagacatgaggc

SEQ ID NO: 1145917 - DNA, 15 bp, Homo sapiens
tgacaagacatgagg

SEQ ID NO: 1145918 - DNA, 15 bp, Homo sapiens
atgacaagacatgag

SEQ ID NO: 1145919 - DNA, 15 bp, Homo sapiens
catgacaagacatga

SEQ ID NO: 1145920 - DNA, 15 bp, Homo sapiens
gcatgacaagacatg

SEQ ID NO: 1145921 - DNA, 15 bp, Homo sapiens
agcatgacaagacat

SEQ ID NO: 1145922 - DNA, 15 bp, Homo sapiens
aagcatgacaagaca

SEQ ID NO: 1145923 - DNA, 15 bp, Homo sapiens
gaagcatgacaagac

SEQ ID NO: 1145924 - DNA, 15 bp, Homo sapiens
agaagcatgacaaga

SEQ ID NO: 1145925 - DNA, 15 bp, Homo sapiens
aagaagcatgacaag

SEQ ID NO: 1145926 - DNA, 15 bp, Homo sapiens
gaagaagcatgacaa

SEQ ID NO: 1145927 - DNA, 15 bp, Homo sapiens
tgaagaagcatgaca

SEQ ID NO: 1145928 - DNA, 15 bp, Homo sapiens
ctgaagaagcatgac

SEQ ID NO: 1145929 - DNA, 15 bp, Homo sapiens
tctgaagaagcatga

SEQ ID NO: 1145930 - DNA, 15 bp, Homo sapiens
ttctgaagaagcatg

SEQ ID NO: 1145931 - DNA, 15 bp, Homo sapiens
cttctgaagaagcat

SEQ ID NO: 1145932 - DNA, 15 bp, Homo sapiens
ccttctgaagaagca

SEQ ID NO: 1145933 - DNA, 15 bp, Homo sapiens
accttctgaagaagc

SEQ ID NO: 1145934 - DNA, 15 bp, Homo sapiens
caccttctgaagaag

SEQ ID NO: 1145935 - DNA, 15 bp, Homo sapiens
acaccttctgaagaa

SEQ ID NO: 1145936 - DNA, 15 bp, Homo sapiens
aacaccttctgaaga

SEQ ID NO: 1145937 - DNA, 15 bp, Homo sapiens
aaacaccttctgaag

SEQ ID NO: 1145938 - DNA, 15 bp, Homo sapiens
aaaacaccttctgaa

SEQ ID NO: 1145939 - DNA, 15 bp, Homo sapiens
caaaacaccttctga

SEQ ID NO: 1145940 - DNA, 15 bp, Homo sapiens
tcaaaacaccttctg

SEQ ID NO: 1145941 - DNA, 15 bp, Homo sapiens
atcaaaacaccttct

SEQ ID NO: 1145942 - DNA, 15 bp, Homo sapiens
aatcaaaacaccttc

SEQ ID NO: 1145943 - DNA, 15 bp, Homo sapiens
taatcaaaacacctt

SEQ ID NO: 1145944 - DNA, 15 bp, Homo sapiens
ataatcaaaacacct

SEQ ID NO: 1145945 - DNA, 15 bp, Homo sapiens
aataatcaaaacacc

SEQ ID NO: 1145946 - DNA, 15 bp, Homo sapiens
aaataatcaaaacac

SEQ ID NO: 1145947 - DNA, 15 bp, Homo sapiens
caaataatcaaaaca

SEQ ID NO: 1145948 - DNA, 15 bp, Homo sapiens
gcaaataatcaaaac

SEQ ID NO: 1145949 - DNA, 15 bp, Homo sapiens
tgcaaataatcaaaa

SEQ ID NO: 1145950 - DNA, 15 bp, Homo sapiens
ttgcaaataatcaaa

SEQ ID NO: 1145951 - DNA, 15 bp, Homo sapiens
tttgcaaataatcaa

SEQ ID NO: 1145952 - DNA, 15 bp, Homo sapiens
ttttgcaaataatca

SEQ ID NO: 1145953 - DNA, 15 bp, Homo sapiens
gttttgcaaataatc

SEQ ID NO: 1145954 - DNA, 15 bp, Homo sapiens
ggttttgcaaataat

SEQ ID NO: 1145955 - DNA, 15 bp, Homo sapiens
cggttttgcaaataa

SEQ ID NO: 1145956 - DNA, 15 bp, Homo sapiens
tcggttttgcaaata

SEQ ID NO: 1145957 - DNA, 15 bp, Homo sapiens
ctcggttttgcaaat

SEQ ID NO: 1145958 - DNA, 15 bp, Homo sapiens
actcggttttgcaaa

SEQ ID NO: 1145959 - DNA, 15 bp, Homo sapiens
gactcggttttgcaa

SEQ ID NO: 1145960 - DNA, 15 bp, Homo sapiens
agactcggttttgca

SEQ ID NO: 1145961 - DNA, 15 bp, Homo sapiens
gagactcggttttgc

SEQ ID NO: 1145962 - DNA, 15 bp, Homo sapiens
agagactcggttttg

SEQ ID NO: 1145963 - DNA, 15 bp, Homo sapiens
aagagactcggtttt

SEQ ID NO: 1145964 - DNA, 15 bp, Homo sapiens
taagagactcggttt

SEQ ID NO: 1145965 - DNA, 15 bp, Homo sapiens
ataagagactcggtt

SEQ ID NO: 1145966 - DNA, 15 bp, Homo sapiens
gataagagactcggt

SEQ ID NO: 1145967 - DNA, 15 bp, Homo sapiens
tgataagagactcgg

SEQ ID NO: 1145968 - DNA, 15 bp, Homo sapiens
ttgataagagactcg

SEQ ID NO: 1145969 - DNA, 15 bp, Homo sapiens
attgataagagactc

SEQ ID NO: 1145970 - DNA, 15 bp, Homo sapiens
gattgataagagact

SEQ ID NO: 1145971 - DNA, 15 bp, Homo sapiens
tgattgataagagac

SEQ ID NO: 1145972 - DNA, 15 bp, Homo sapiens
ttgattgataagaga

SEQ ID NO: 1145973 - DNA, 15 bp, Homo sapiens
tttgattgataagag

SEQ ID NO: 1145974 - DNA, 15 bp, Homo sapiens
gtttgattgataaga

SEQ ID NO: 1145975 - DNA, 15 bp, Homo sapiens
tgtttgattgataag

SEQ ID NO: 1145976 - DNA, 15 bp, Homo sapiens
ctgtttgattgataa

SEQ ID NO: 1145977 - DNA, 15 bp, Homo sapiens
gctgtttgattgata

SEQ ID NO: 1145978 - DNA, 15 bp, Homo sapiens
tgctgtttgattgat

SEQ ID NO: 1145979 - DNA, 15 bp, Homo sapiens
ttgctgtttgattga

SEQ ID NO: 1145980 - DNA, 15 bp, Homo sapiens
tttgctgtttgattg

SEQ ID NO: 1145981 - DNA, 15 bp, Homo sapiens
ctttgctgtttgatt

SEQ ID NO: 1145982 - DNA, 15 bp, Homo sapiens
cctttgctgtttgat

SEQ ID NO: 1145983 - DNA, 15 bp, Homo sapiens
acctttgctgtttga

SEQ ID NO: 1145984 - DNA, 15 bp, Homo sapiens
aacctttgctgtttg

SEQ ID NO: 1145985 - DNA, 15 bp, Homo sapiens
aaacctttgctgttt

SEQ ID NO: 1145986 - DNA, 15 bp, Homo sapiens
aaaacctttgctgtt

SEQ ID NO: 1145987 - DNA, 15 bp, Homo sapiens
aaaaacctttgctgt

SEQ ID NO: 1145988 - DNA, 15 bp, Homo sapiens
caaaaacctttgctg

SEQ ID NO: 1145989 - DNA, 15 bp, Homo sapiens
gcaaaaacctttgct

SEQ ID NO: 1145990 - DNA, 15 bp, Homo sapiens
agcaaaaacctttgc

SEQ ID NO: 1145991 - DNA, 15 bp, Homo sapiens
aagcaaaaacctttg

SEQ ID NO: 1145992 - DNA, 15 bp, Homo sapiens
aaagcaaaaaccttt

SEQ ID NO: 1145993 - DNA, 15 bp, Homo sapiens
aaaagcaaaaacctt

SEQ ID NO: 1145994 - DNA, 15 bp, Homo sapiens
aaaaagcaaaaacct

SEQ ID NO: 1145995 - DNA, 15 bp, Homo sapiens
caaaaagcaaaaacc

SEQ ID NO: 1145996 - DNA, 15 bp, Homo sapiens
tcaaaaagcaaaaac

SEQ ID NO: 1145997 - DNA, 15 bp, Homo sapiens
ttcaaaaagcaaaaa

SEQ ID NO: 1145998 - DNA, 15 bp, Homo sapiens
agatttcaaaaagca

SEQ ID NO: 1145999 - DNA, 15 bp, Homo sapiens
aagatttcaaaaagc

SEQ ID NO: 1146000 - DNA, 15 bp, Homo sapiens
gaagatttcaaaaag

SEQ ID NO: 1146001 - DNA, 15 bp, Homo sapiens
agaagatttcaaaaa

SEQ ID NO: 1146002 - DNA, 15 bp, Homo sapiens
tagaagatttcaaaa

SEQ ID NO: 1146003 - DNA, 15 bp, Homo sapiens
ttagaagatttcaaa

SEQ ID NO: 1146004 - DNA, 15 bp, Homo sapiens
attagaagatttcaa

SEQ ID NO: 1146005 - DNA, 15 bp, Homo sapiens
aattagaagatttca

SEQ ID NO: 1146006 - DNA, 15 bp, Homo sapiens
taattagaagatttc

SEQ ID NO: 1146007 - DNA, 15 bp, Homo sapiens
ataattagaagattt

SEQ ID NO: 1146008 - DNA, 15 bp, Homo sapiens
gataattagaagatt

SEQ ID NO: 1146009 - DNA, 15 bp, Homo sapiens
tgataattagaagat

SEQ ID NO: 1146010 - DNA, 15 bp, Homo sapiens
gtgataattagaaga

SEQ ID NO: 1146011 - DNA, 15 bp, Homo sapiens
agtgataattagaag

SEQ ID NO: 1146012 - DNA, 15 bp, Homo sapiens
aagtgataattagaa

SEQ ID NO: 1146013 - DNA, 15 bp, Homo sapiens
aaagtgataattaga

SEQ ID NO: 1146014 - DNA, 15 bp, Homo sapiens
caaagtgataattag

SEQ ID NO: 1146015 - DNA, 15 bp, Homo sapiens
ccaaagtgataatta

SEQ ID NO: 1146016 - DNA, 15 bp, Homo sapiens
gccaaagtgataatt

SEQ ID NO: 1146017 - DNA, 15 bp, Homo sapiens
agccaaagtgataat

SEQ ID NO: 1146018 - DNA, 15 bp, Homo sapiens
tagccaaagtgataa

SEQ ID NO: 1146019 - DNA, 15 bp, Homo sapiens
ttagccaaagtgata

SEQ ID NO: 1146020 - DNA, 15 bp, Homo sapiens
tttagccaaagtgat

SEQ ID NO: 1146021 - DNA, 15 bp, Homo sapiens
atttagccaaagtga

SEQ ID NO: 1146022 - DNA, 15 bp, Homo sapiens
catttagccaaagtg

SEQ ID NO: 1146023 - DNA, 15 bp, Homo sapiens
tcatttagccaaagt

SEQ ID NO: 1146024 - DNA, 15 bp, Homo sapiens
ttcatttagccaaag

SEQ ID NO: 1146025 - DNA, 15 bp, Homo sapiens
attcatttagccaaa

SEQ ID NO: 1146026 - DNA, 15 bp, Homo sapiens
cattcatttagccaa

SEQ ID NO: 1146027 - DNA, 15 bp, Homo sapiens
tcattcatttagcca

SEQ ID NO: 1146028 - DNA, 15 bp, Homo sapiens
gtcattcatttagcc

SEQ ID NO: 1146029 - DNA, 15 bp, Homo sapiens
agtcattcatttagc

SEQ ID NO: 1146030 - DNA, 15 bp, Homo sapiens
tagtcattcatttag

SEQ ID NO: 1146031 - DNA, 15 bp, Homo sapiens
atagtcattcattta

SEQ ID NO: 1146032 - DNA, 15 bp, Homo sapiens
aatagtcattcattt

SEQ ID NO: 1146033 - DNA, 15 bp, Homo sapiens
taatagtcattcatt

SEQ ID NO: 1146034 - DNA, 15 bp, Homo sapiens
ataatagtcattcat

SEQ ID NO: 1146035 - DNA, 15 bp, Homo sapiens
aataatagtcattca

SEQ ID NO: 1146036 - DNA, 15 bp, Homo sapiens
aaataatagtcattc

SEQ ID NO: 1146037 - DNA, 15 bp, Homo sapiens
aaaataatagtcatt

SEQ ID NO: 1146038 - DNA, 15 bp, Homo sapiens
aaaaataatagtcat

SEQ ID NO: 1146039 - DNA, 15 bp, Homo sapiens
aaaaaataatagtca

SEQ ID NO: 1146040 - DNA, 15 bp, Homo sapiens
gaaaaaataatagtc

SEQ ID NO: 1146041 - DNA, 15 bp, Homo sapiens
tgaaaaaataatagt

SEQ ID NO: 1146042 - DNA, 15 bp, Homo sapiens
atgaaaaaataatag

SEQ ID NO: 1146043 - DNA, 15 bp, Homo sapiens
aatgaaaaaataata

SEQ ID NO: 1146044 - DNA, 15 bp, Homo sapiens
caatgaaaaaataat

SEQ ID NO: 1146045 - DNA, 15 bp, Homo sapiens
ccaatgaaaaaataa

SEQ ID NO: 1146046 - DNA, 15 bp, Homo sapiens
tccaatgaaaaaata

SEQ ID NO: 1146047 - DNA, 15 bp, Homo sapiens
gtccaatgaaaaaat

SEQ ID NO: 1146048 - DNA, 15 bp, Homo sapiens
ggtccaatgaaaaaa

SEQ ID NO: 1146049 - DNA, 15 bp, Homo sapiens
aggtccaatgaaaaa

SEQ ID NO: 1146050 - DNA, 15 bp, Homo sapiens
taggtccaatgaaaa

SEQ ID NO: 1146051 - DNA, 15 bp, Homo sapiens
ataggtccaatgaaa

SEQ ID NO: 1146052 - DNA, 15 bp, Homo sapiens
cataggtccaatgaa

SEQ ID NO: 1146053 - DNA, 15 bp, Homo sapiens
tcataggtccaatga

SEQ ID NO: 1146054 - DNA, 15 bp, Homo sapiens
atcataggtccaatg

SEQ ID NO: 1146055 - DNA, 15 bp, Homo sapiens
gatcataggtccaat

SEQ ID NO: 1146056 - DNA, 15 bp, Homo sapiens
ggatcataggtccaa

SEQ ID NO: 1146057 - DNA, 15 bp, Homo sapiens
aggatcataggtcca

SEQ ID NO: 1146058 - DNA, 15 bp, Homo sapiens
taggatcataggtcc

SEQ ID NO: 1146059 - DNA, 15 bp, Homo sapiens
ataggatcataggtc

SEQ ID NO: 1146060 - DNA, 15 bp, Homo sapiens
aataggatcataggt

SEQ ID NO: 1146061 - DNA, 15 bp, Homo sapiens
aaataggatcatagg

SEQ ID NO: 1146062 - DNA, 15 bp, Homo sapiens
aaaataggatcatag

SEQ ID NO: 1146063 - DNA, 15 bp, Homo sapiens
caaaataggatcata

SEQ ID NO: 1146064 - DNA, 15 bp, Homo sapiens
tcaaaataggatcat

SEQ ID NO: 1146065 - DNA, 15 bp, Homo sapiens
atcaaaataggatca

SEQ ID NO: 1146066 - DNA, 15 bp, Homo sapiens
gatcaaaataggatc

SEQ ID NO: 1146067 - DNA, 15 bp, Homo sapiens
tgatcaaaataggat

SEQ ID NO: 1146068 - DNA, 15 bp, Homo sapiens
ttgatcaaaatagga

SEQ ID NO: 1146069 - DNA, 15 bp, Homo sapiens
cttgatcaaaatagg

SEQ ID NO: 1146070 - DNA, 15 bp, Homo sapiens
acttgatcaaaatag

SEQ ID NO: 1146071 - DNA, 15 bp, Homo sapiens
tacttgatcaaaata

SEQ ID NO: 1146072 - DNA, 15 bp, Homo sapiens
atacttgatcaaaat

SEQ ID NO: 1146073 - DNA, 15 bp, Homo sapiens
aatacttgatcaaaa

SEQ ID NO: 1146074 - DNA, 15 bp, Homo sapiens
aaatacttgatcaaa

SEQ ID NO: 1146075 - DNA, 15 bp, Homo sapiens
caaatacttgatcaa

SEQ ID NO: 1146076 - DNA, 15 bp, Homo sapiens
tcaaatacttgatca

SEQ ID NO: 1146077 - DNA, 15 bp, Homo sapiens
ttcaaatacttgatc

SEQ ID NO: 1146078 - DNA, 15 bp, Homo sapiens
tttcaaatacttgat

SEQ ID NO: 1146079 - DNA, 15 bp, Homo sapiens
gtttcaaatacttga

SEQ ID NO: 1146080 - DNA, 15 bp, Homo sapiens
ggtttcaaatacttg

SEQ ID NO: 1146081 - DNA, 15 bp, Homo sapiens
aggtttcaaatactt

SEQ ID NO: 1146082 - DNA, 15 bp, Homo sapiens
aaggtttcaaatact

SEQ ID NO: 1146083 - DNA, 15 bp, Homo sapiens
aaaggtttcaaatac

SEQ ID NO: 1146084 - DNA, 15 bp, Homo sapiens
taaaggtttcaaata

SEQ ID NO: 1146085 - DNA, 15 bp, Homo sapiens
ttaaaggtttcaaat

SEQ ID NO: 1146086 - DNA, 15 bp, Homo sapiens
attaaaggtttcaaa

SEQ ID NO: 1146087 - DNA, 15 bp, Homo sapiens
cattaaaggtttcaa

SEQ ID NO: 1146088 - DNA, 15 bp, Homo sapiens
acattaaaggtttca

SEQ ID NO: 1146089 - DNA, 15 bp, Homo sapiens
tacattaaaggtttc

SEQ ID NO: 1146090 - DNA, 15 bp, Homo sapiens
atacattaaaggttt

SEQ ID NO: 1146091 - DNA, 15 bp, Homo sapiens
aatacattaaaggtt

SEQ ID NO: 1146092 - DNA, 15 bp, Homo sapiens
aaatacattaaaggt

SEQ ID NO: 1146093 - DNA, 15 bp, Homo sapiens
caaatacattaaagg

SEQ ID NO: 1146094 - DNA, 15 bp, Homo sapiens
tcaaatacattaaag

SEQ ID NO: 1146095 - DNA, 15 bp, Homo sapiens
ctcaaatacattaaa

SEQ ID NO: 1146096 - DNA, 15 bp, Homo sapiens
tctcaaatacattaa

SEQ ID NO: 1146097 - DNA, 15 bp, Homo sapiens
ctctcaaatacatta

SEQ ID NO: 1146098 - DNA, 15 bp, Homo sapiens
cctctcaaatacatt

SEQ ID NO: 1146099 - DNA, 15 bp, Homo sapiens
gcctctcaaatacat

SEQ ID NO: 1146100 - DNA, 15 bp, Homo sapiens
agcctctcaaataca

SEQ ID NO: 1146101 - DNA, 15 bp, Homo sapiens
aagcctctcaaatac

SEQ ID NO: 1146102 - DNA, 15 bp, Homo sapiens
gaagcctctcaaata

SEQ ID NO: 1146103 - DNA, 15 bp, Homo sapiens
agaagcctctcaaat

SEQ ID NO: 1146104 - DNA, 15 bp, Homo sapiens
gagaagcctctcaaa

SEQ ID NO: 1146105 - DNA, 15 bp, Homo sapiens
tgagaagcctctcaa

SEQ ID NO: 1146106 - DNA, 15 bp, Homo sapiens
gtgagaagcctctca

SEQ ID NO: 1146107 - DNA, 15 bp, Homo sapiens
tgtgagaagcctctc

SEQ ID NO: 1146108 - DNA, 15 bp, Homo sapiens
ttgtgagaagcctct

SEQ ID NO: 1146109 - DNA, 15 bp, Homo sapiens
attgtgagaagcctc

SEQ ID NO: 1146110 - DNA, 15 bp, Homo sapiens
aattgtgagaagcct

SEQ ID NO: 1146111 - DNA, 15 bp, Homo sapiens
taattgtgagaagcc

SEQ ID NO: 1146112 - DNA, 15 bp, Homo sapiens
ataattgtgagaagc

SEQ ID NO: 1146113 - DNA, 15 bp, Homo sapiens
tataattgtgagaag

SEQ ID NO: 1146114 - DNA, 15 bp, Homo sapiens
atataattgtgagaa

SEQ ID NO: 1146115 - DNA, 15 bp, Homo sapiens
aatataattgtgaga

SEQ ID NO: 1146116 - DNA, 15 bp, Homo sapiens
aaatataattgtgag

SEQ ID NO: 1146117 - DNA, 15 bp, Homo sapiens
gaaatataattgtga

SEQ ID NO: 1146118 - DNA, 15 bp, Homo sapiens
tgaaatataattgtg

SEQ ID NO: 1146119 - DNA, 15 bp, Homo sapiens
ttgaaatataattgt

SEQ ID NO: 1146120 - DNA, 15 bp, Homo sapiens
tttgaaatataattg

SEQ ID NO: 1146121 - DNA, 15 bp, Homo sapiens
ttttgaaatataatt

SEQ ID NO: 1146122 - DNA, 15 bp, Homo sapiens
attttgaaatataat

SEQ ID NO: 1146123 - DNA, 15 bp, Homo sapiens
gattttgaaatataa

SEQ ID NO: 1146124 - DNA, 15 bp, Homo sapiens
agattttgaaatata

SEQ ID NO: 1146125 - DNA, 15 bp, Homo sapiens
tagattttgaaatat

SEQ ID NO: 1146126 - DNA, 15 bp, Homo sapiens
ttagattttgaaata

SEQ ID NO: 1146127 - DNA, 15 bp, Homo sapiens
tttagattttgaaat

SEQ ID NO: 1146128 - DNA, 15 bp, Homo sapiens
ttttagattttgaaa

SEQ ID NO: 1146129 - DNA, 15 bp, Homo sapiens
attttagattttgaa

SEQ ID NO: 1146130 - DNA, 15 bp, Homo sapiens
aattttagattttga

SEQ ID NO: 1146131 - DNA, 15 bp, Homo sapiens
taattttagattttg

SEQ ID NO: 1146132 - DNA, 15 bp, Homo sapiens
ttaattttagatttt

SEQ ID NO: 1146133 - DNA, 15 bp, Homo sapiens
cttaattttagattt

SEQ ID NO: 1146134 - DNA, 15 bp, Homo sapiens
acttaattttagatt

SEQ ID NO: 1146135 - DNA, 15 bp, Homo sapiens
tacttaattttagat

SEQ ID NO: 1146136 - DNA, 15 bp, Homo sapiens
atacttaattttaga

SEQ ID NO: 1146137 - DNA, 15 bp, Homo sapiens
aatacttaattttag

SEQ ID NO: 1146138 - DNA, 15 bp, Homo sapiens
aaatacttaatttta

SEQ ID NO: 1146139 - DNA, 15 bp, Homo sapiens
aaaatacttaatttt

SEQ ID NO: 1146140 - DNA, 15 bp, Homo sapiens
aaaaatacttaattt

SEQ ID NO: 1146141 - DNA, 15 bp, Homo sapiens
caaaaatacttaatt

SEQ ID NO: 1146142 - DNA, 15 bp, Homo sapiens
tcaaaaatacttaat

SEQ ID NO: 1146143 - DNA, 15 bp, Homo sapiens
gtcaaaaatacttaa

SEQ ID NO: 1146144 - DNA, 15 bp, Homo sapiens
ggtcaaaaatactta

SEQ ID NO: 1146145 - DNA, 15 bp, Homo sapiens
aggtcaaaaatactt

SEQ ID NO: 1146146 - DNA, 15 bp, Homo sapiens
gaggtcaaaaatact

SEQ ID NO: 1146147 - DNA, 15 bp, Homo sapiens
tgaggtcaaaaatac

SEQ ID NO: 1146148 - DNA, 15 bp, Homo sapiens
ttgaggtcaaaaata

SEQ ID NO: 1146149 - DNA, 15 bp, Homo sapiens
tttgaggtcaaaaat

SEQ ID NO: 1146150 - DNA, 15 bp, Homo sapiens
gtttgaggtcaaaaa

SEQ ID NO: 1146151 - DNA, 15 bp, Homo sapiens
agtttgaggtcaaaa

SEQ ID NO: 1146152 - DNA, 15 bp, Homo sapiens
tagtttgaggtcaaa

SEQ ID NO: 1146153 - DNA, 15 bp, Homo sapiens
ttagtttgaggtcaa

SEQ ID NO: 1146154 - DNA, 15 bp, Homo sapiens
gttagtttgaggtca

SEQ ID NO: 1146155 - DNA, 15 bp, Homo sapiens
agttagtttgaggtc

SEQ ID NO: 1146156 - DNA, 15 bp, Homo sapiens
aagttagtttgaggt

SEQ ID NO: 1146157 - DNA, 15 bp, Homo sapiens
aaagttagtttgagg

SEQ ID NO: 1146158 - DNA, 15 bp, Homo sapiens
caaagttagtttgag

SEQ ID NO: 1146159 - DNA, 15 bp, Homo sapiens
tcaaagttagtttga

SEQ ID NO: 1146160 - DNA, 15 bp, Homo sapiens
ctcaaagttagtttg

SEQ ID NO: 1146161 - DNA, 15 bp, Homo sapiens
tctcaaagttagttt

SEQ ID NO: 1146162 - DNA, 15 bp, Homo sapiens
atctcaaagttagtt

SEQ ID NO: 1146163 - DNA, 15 bp, Homo sapiens
tatctcaaagttagt

SEQ ID NO: 1146164 - DNA, 15 bp, Homo sapiens
atatctcaaagttag

SEQ ID NO: 1146165 - DNA, 15 bp, Homo sapiens
aatatctcaaagtta

SEQ ID NO: 1146166 - DNA, 15 bp, Homo sapiens
gaatatctcaaagtt

SEQ ID NO: 1146167 - DNA, 15 bp, Homo sapiens
ggaatatctcaaagt

SEQ ID NO: 1146168 - DNA, 15 bp, Homo sapiens
tggaatatctcaaag

SEQ ID NO: 1146169 - DNA, 15 bp, Homo sapiens
ttggaatatctcaaa

SEQ ID NO: 1146170 - DNA, 15 bp, Homo sapiens
tttggaatatctcaa

SEQ ID NO: 1146171 - DNA, 15 bp, Homo sapiens
ttttggaatatctca

SEQ ID NO: 1146172 - DNA, 15 bp, Homo sapiens
tttttggaatatctc

SEQ ID NO: 1146173 - DNA, 15 bp, Homo sapiens
ctttttggaatatct

SEQ ID NO: 1146174 - DNA, 15 bp, Homo sapiens
gctttttggaatatc

SEQ ID NO: 1146175 - DNA, 15 bp, Homo sapiens
agctttttggaatat

SEQ ID NO: 1146176 - DNA, 15 bp, Homo sapiens
cagctttttggaata

SEQ ID NO: 1146177 - DNA, 15 bp, Homo sapiens
gcagctttttggaat

SEQ ID NO: 1146178 - DNA, 15 bp, Homo sapiens
agcagctttttggaa

SEQ ID NO: 1146179 - DNA, 15 bp, Homo sapiens
cagcagctttttgga

SEQ ID NO: 1146180 - DNA, 15 bp, Homo sapiens
tcagcagctttttgg

SEQ ID NO: 1146181 - DNA, 15 bp, Homo sapiens
ttcagcagctttttg

SEQ ID NO: 1146182 - DNA, 15 bp, Homo sapiens
cttcagcagcttttt

SEQ ID NO: 1146183 - DNA, 15 bp, Homo sapiens
gcttcagcagctttt

SEQ ID NO: 1146184 - DNA, 15 bp, Homo sapiens
agcttcagcagcttt

SEQ ID NO: 1146185 - DNA, 15 bp, Homo sapiens
aagcttcagcagctt

SEQ ID NO: 1146186 - DNA, 15 bp, Homo sapiens
gaagcttcagcagct

SEQ ID NO: 1146187 - DNA, 15 bp, Homo sapiens
ggaagcttcagcagc

SEQ ID NO: 1146188 - DNA, 15 bp, Homo sapiens
tggaagcttcagcag

SEQ ID NO: 1146189 - DNA, 15 bp, Homo sapiens
ttggaagcttcagca

SEQ ID NO: 1146190 - DNA, 15 bp, Homo sapiens
tttggaagcttcagc

SEQ ID NO: 1146191 - DNA, 15 bp, Homo sapiens
ttttggaagcttcag

SEQ ID NO: 1146192 - DNA, 15 bp, Homo sapiens
cttttggaagcttca

SEQ ID NO: 1146193 - DNA, 15 bp, Homo sapiens
tcttttggaagcttc

SEQ ID NO: 1146194 - DNA, 15 bp, Homo sapiens
ttcttttggaagctt

SEQ ID NO: 1146195 - DNA, 15 bp, Homo sapiens
tttcttttggaagct

SEQ ID NO: 1146196 - DNA, 15 bp, Homo sapiens
atttcttttggaagc

SEQ ID NO: 1146197 - DNA, 15 bp, Homo sapiens
tatttcttttggaag

SEQ ID NO: 1146198 - DNA, 15 bp, Homo sapiens
ttatttcttttggaa

SEQ ID NO: 1146199 - DNA, 15 bp, Homo sapiens
attatttcttttgga

SEQ ID NO: 1146200 - DNA, 15 bp, Homo sapiens
tattatttcttttgg

SEQ ID NO: 1146201 - DNA, 15 bp, Homo sapiens
ttattatttcttttg

SEQ ID NO: 1146202 - DNA, 15 bp, Homo sapiens
tttattatttctttt

SEQ ID NO: 1146203 - DNA, 15 bp, Homo sapiens
gtttattatttcttt

SEQ ID NO: 1146204 - DNA, 15 bp, Homo sapiens
tgtttattatttctt

SEQ ID NO: 1146205 - DNA, 15 bp, Homo sapiens
ctgtttattatttct

SEQ ID NO: 1146206 - DNA, 15 bp, Homo sapiens
cctgtttattatttc

SEQ ID NO: 1146207 - DNA, 15 bp, Homo sapiens
gcctgtttattattt

SEQ ID NO: 1146208 - DNA, 15 bp, Homo sapiens
agcctgtttattatt

SEQ ID NO: 1146209 - DNA, 15 bp, Homo sapiens
aagcctgtttattat

SEQ ID NO: 1146210 - DNA, 15 bp, Homo sapiens
taagcctgtttatta

SEQ ID NO: 1146211 - DNA, 15 bp, Homo sapiens
ataagcctgtttatt

SEQ ID NO: 1146212 - DNA, 15 bp, Homo sapiens
aataagcctgtttat

SEQ ID NO: 1146213 - DNA, 15 bp, Homo sapiens
aaataagcctgttta

SEQ ID NO: 1146214 - DNA, 15 bp, Homo sapiens
caaataagcctgttt

SEQ ID NO: 1146215 - DNA, 15 bp, Homo sapiens
tcaaataagcctgtt

SEQ ID NO: 1146216 - DNA, 15 bp, Homo sapiens
atcaaataagcctgt

SEQ ID NO: 1146217 - DNA, 15 bp, Homo sapiens
tatcaaataagcctg

SEQ ID NO: 1146218 - DNA, 15 bp, Homo sapiens
atatcaaataagcct

SEQ ID NO: 1146219 - DNA, 15 bp, Homo sapiens
catatcaaataagcc

SEQ ID NO: 1146220 - DNA, 15 bp, Homo sapiens
acatatcaaataagc

SEQ ID NO: 1146221 - DNA, 15 bp, Homo sapiens
aacatatcaaataag

SEQ ID NO: 1146222 - DNA, 15 bp, Homo sapiens
gaacatatcaaataa

SEQ ID NO: 1146223 - DNA, 15 bp, Homo sapiens
tgaacatatcaaata

SEQ ID NO: 1146224 - DNA, 15 bp, Homo sapiens
atgaacatatcaaat

SEQ ID NO: 1146225 - DNA, 15 bp, Homo sapiens
aatgaacatatcaaa

SEQ ID NO: 1146226 - DNA, 15 bp, Homo sapiens
taatgaacatatcaa

SEQ ID NO: 1146227 - DNA, 15 bp, Homo sapiens
ataatgaacatatca

SEQ ID NO: 1146228 - DNA, 15 bp, Homo sapiens
cataatgaacatatc

SEQ ID NO: 1146229 - DNA, 15 bp, Homo sapiens
acataatgaacatat

SEQ ID NO: 1146230 - DNA, 15 bp, Homo sapiens
tacataatgaacata

SEQ ID NO: 1146231 - DNA, 15 bp, Homo sapiens
ttacataatgaacat

SEQ ID NO: 1146232 - DNA, 15 bp, Homo sapiens
tttacataatgaaca

SEQ ID NO: 1146233 - DNA, 15 bp, Homo sapiens
ttttacataatgaac

SEQ ID NO: 1146234 - DNA, 15 bp, Homo sapiens
tttttacataatgaa

SEQ ID NO: 1146235 - DNA, 15 bp, Homo sapiens
ctttttacataatga

SEQ ID NO: 1146236 - DNA, 15 bp, Homo sapiens
tctttttacataatg

SEQ ID NO: 1146237 - DNA, 15 bp, Homo sapiens
atctttttacataat

SEQ ID NO: 1146238 - DNA, 15 bp, Homo sapiens
aatctttttacataa

SEQ ID NO: 1146239 - DNA, 15 bp, Homo sapiens
aaatctttttacata

SEQ ID NO: 1146240 - DNA, 15 bp, Homo sapiens
aaaatctttttacat

SEQ ID NO: 1146241 - DNA, 15 bp, Homo sapiens
gaaaatctttttaca

SEQ ID NO: 1146242 - DNA, 15 bp, Homo sapiens
tgaaaatctttttac

SEQ ID NO: 1146243 - DNA, 15 bp, Homo sapiens
ttgaaaatcttttta

SEQ ID NO: 1146244 - DNA, 15 bp, Homo sapiens
tttgaaaatcttttt

SEQ ID NO: 1146245 - DNA, 15 bp, Homo sapiens
atttgaaaatctttt

SEQ ID NO: 1146246 - DNA, 15 bp, Homo sapiens
tatttgaaaatcttt

SEQ ID NO: 1146247 - DNA, 15 bp, Homo sapiens
ttatttgaaaatctt

SEQ ID NO: 1146248 - DNA, 15 bp, Homo sapiens
cttatttgaaaatct

SEQ ID NO: 1146249 - DNA, 15 bp, Homo sapiens
tcttatttgaaaatc

SEQ ID NO: 1146250 - DNA, 15 bp, Homo sapiens
ttcttatttgaaaat

SEQ ID NO: 1146251 - DNA, 15 bp, Homo sapiens
tttcttatttgaaaa

SEQ ID NO: 1146252 - DNA, 15 bp, Homo sapiens
atttcttatttgaaa

SEQ ID NO: 1146253 - DNA, 15 bp, Homo sapiens
tatttcttatttgaa

SEQ ID NO: 1146254 - DNA, 15 bp, Homo sapiens
ttatttcttatttga

SEQ ID NO: 1146255 - DNA, 15 bp, Homo sapiens
attatttcttatttg

SEQ ID NO: 1146256 - DNA, 15 bp, Homo sapiens
tattatttcttattt

SEQ ID NO: 1146257 - DNA, 15 bp, Homo sapiens
atattatttcttatt

SEQ ID NO: 1146258 - DNA, 15 bp, Homo sapiens
aatattatttcttat

SEQ ID NO: 1146259 - DNA, 15 bp, Homo sapiens
aaatattatttctta

SEQ ID NO: 1146260 - DNA, 15 bp, Homo sapiens
taaatattatttctt

SEQ ID NO: 1146261 - DNA, 15 bp, Homo sapiens
ttaaatattatttct

SEQ ID NO: 1146262 - DNA, 15 bp, Homo sapiens
cttaaatattatttc

SEQ ID NO: 1146263 - DNA, 15 bp, Homo sapiens
ccttaaatattattt

SEQ ID NO: 1146264 - DNA, 15 bp, Homo sapiens
gccttaaatattatt

SEQ ID NO: 1146265 - DNA, 15 bp, Homo sapiens
ggccttaaatattat

SEQ ID NO: 1146266 - DNA, 15 bp, Homo sapiens
cggccttaaatatta

SEQ ID NO: 1146267 - DNA, 15 bp, Homo sapiens
ccggccttaaatatt

SEQ ID NO: 1146268 - DNA, 15 bp, Homo sapiens
cccggccttaaatat

SEQ ID NO: 1146269 - DNA, 15 bp, Homo sapiens
gcccggccttaaata

SEQ ID NO: 1146270 - DNA, 15 bp, Homo sapiens
cgcccggccttaaat

SEQ ID NO: 1146271 - DNA, 15 bp, Homo sapiens
gcgcccggccttaaa

SEQ ID NO: 1146272 - DNA, 15 bp, Homo sapiens
cgcgcccggccttaa

SEQ ID NO: 1146273 - DNA, 15 bp, Homo sapiens
ccgcgcccggcctta

SEQ ID NO: 1146274 - DNA, 15 bp, Homo sapiens
accgcgcccggcctt

SEQ ID NO: 1146275 - DNA, 15 bp, Homo sapiens
agccgggatggtctc

SEQ ID NO: 1146276 - DNA, 15 bp, Homo sapiens
tagccgggatggtct

SEQ ID NO: 1146277 - DNA, 15 bp, Homo sapiens
ttagccgggatggtc

SEQ ID NO: 1146278 - DNA, 15 bp, Homo sapiens
tttagccgggatggt

SEQ ID NO: 1146279 - DNA, 15 bp, Homo sapiens
ttttagccgggatgg

SEQ ID NO: 1146280 - DNA, 15 bp, Homo sapiens
gttttagccgggatg

SEQ ID NO: 1146281 - DNA, 15 bp, Homo sapiens
cgttttagccgggat

SEQ ID NO: 1146282 - DNA, 15 bp, Homo sapiens
ccgttttagccggga

SEQ ID NO: 1146283 - DNA, 15 bp, Homo sapiens
accgttttagccggg

SEQ ID NO: 1146284 - DNA, 15 bp, Homo sapiens
caccgttttagccgg

SEQ ID NO: 1146285 - DNA, 15 bp, Homo sapiens
tcaccgttttagccg

SEQ ID NO: 1146286 - DNA, 15 bp, Homo sapiens
ttcaccgttttagcc

SEQ ID NO: 1146287 - DNA, 15 bp, Homo sapiens
tttcaccgttttagc

SEQ ID NO: 1146288 - DNA, 15 bp, Homo sapiens
gtttcaccgttttag

SEQ ID NO: 1146289 - DNA, 15 bp, Homo sapiens
ggtttcaccgtttta

SEQ ID NO: 1146290 - DNA, 15 bp, Homo sapiens
gggtttcaccgtttt

SEQ ID NO: 1146291 - DNA, 15 bp, Homo sapiens
ggggtttcaccgttt

SEQ ID NO: 1146292 - DNA, 15 bp, Homo sapiens
cggggtttcaccgtt

SEQ ID NO: 1146293 - DNA, 15 bp, Homo sapiens
acccggctaattttt

SEQ ID NO: 1146294 - DNA, 15 bp, Homo sapiens
cacccggctaatttt

SEQ ID NO: 1146295 - DNA, 15 bp, Homo sapiens
acacccggctaattt

SEQ ID NO: 1146296 - DNA, 15 bp, Homo sapiens
tacacccggctaatt

SEQ ID NO: 1146297 - DNA, 15 bp, Homo sapiens
ctacacccggctaat

SEQ ID NO: 1146298 - DNA, 15 bp, Homo sapiens
actacacccggctaa

SEQ ID NO: 1146299 - DNA, 15 bp, Homo sapiens
cactacacccggcta

SEQ ID NO: 1146300 - DNA, 15 bp, Homo sapiens
ccactacacccggct

SEQ ID NO: 1146301 - DNA, 15 bp, Homo sapiens
gccactacacccggc

SEQ ID NO: 1146302 - DNA, 15 bp, Homo sapiens
cgccactacacccgg

SEQ ID NO: 1146303 - DNA, 15 bp, Homo sapiens
gcgccactacacccg

SEQ ID NO: 1146304 - DNA, 15 bp, Homo sapiens
cgcgccactacaccc

SEQ ID NO: 1146305 - DNA, 15 bp, Homo sapiens
gcgcgccactacacc

SEQ ID NO: 1146306 - DNA, 15 bp, Homo sapiens
cgcgcgccactacac

SEQ ID NO: 1146307 - DNA, 15 bp, Homo sapiens
gcgcgcgccactaca

SEQ ID NO: 1146308 - DNA, 15 bp, Homo sapiens
ggcgcgcgccactac

SEQ ID NO: 1146309 - DNA, 15 bp, Homo sapiens
aggcgcgcgccacta

SEQ ID NO: 1146310 - DNA, 15 bp, Homo sapiens
caggcgcgcgccact

SEQ ID NO: 1146311 - DNA, 15 bp, Homo sapiens
ctacaggcgcgcgcc

SEQ ID NO: 1146312 - DNA, 15 bp, Homo sapiens
actacaggcgcgcgc

SEQ ID NO: 1146313 - DNA, 15 bp, Homo sapiens
gactacaggcgcgcg

SEQ ID NO: 1146314 - DNA, 15 bp, Homo sapiens
ggactacaggcgcgc

SEQ ID NO: 1146315 - DNA, 15 bp, Homo sapiens
tggctggagtgcagt

SEQ ID NO: 1146316 - DNA, 15 bp, Homo sapiens
ctggctggagtgcag

SEQ ID NO: 1146317 - DNA, 15 bp, Homo sapiens
cctggctggagtgca

SEQ ID NO: 1146318 - DNA, 15 bp, Homo sapiens
ccctggctggagtgc

SEQ ID NO: 1146319 - DNA, 15 bp, Homo sapiens
gccctggctggagtg

SEQ ID NO: 1146320 - DNA, 15 bp, Homo sapiens
cgccctggctggagt

SEQ ID NO: 1146321 - DNA, 15 bp, Homo sapiens
tcgccctggctggag

SEQ ID NO: 1146322 - DNA, 15 bp, Homo sapiens
gtcgccctggctgga

SEQ ID NO: 1146323 - DNA, 15 bp, Homo sapiens
tgtcgccctggctgg

SEQ ID NO: 1146324 - DNA, 15 bp, Homo sapiens
ctgtcgccctggctg

SEQ ID NO: 1146325 - DNA, 15 bp, Homo sapiens
tctgtcgccctggct

SEQ ID NO: 1146326 - DNA, 15 bp, Homo sapiens
ctctgtcgccctggc

SEQ ID NO: 1146327 - DNA, 15 bp, Homo sapiens
gctctgtcgccctgg

SEQ ID NO: 1146328 - DNA, 15 bp, Homo sapiens
cgctctgtcgccctg

SEQ ID NO: 1146329 - DNA, 15 bp, Homo sapiens
tcgctctgtcgccct

SEQ ID NO: 1146330 - DNA, 15 bp, Homo sapiens
attatttcttttttt

SEQ ID NO: 1146331 - DNA, 15 bp, Homo sapiens
tattatttctttttt

SEQ ID NO: 1146332 - DNA, 15 bp, Homo sapiens
atattatttcttttt

SEQ ID NO: 1146333 - DNA, 15 bp, Homo sapiens
aatattatttctttt

SEQ ID NO: 1146334 - DNA, 15 bp, Homo sapiens
aaatattatttcttt

SEQ ID NO: 1146335 - DNA, 15 bp, Homo sapiens
gttaaatattatttc

SEQ ID NO: 1146336 - DNA, 15 bp, Homo sapiens
ggttaaatattattt

SEQ ID NO: 1146337 - DNA, 15 bp, Homo sapiens
aggttaaatattatt

SEQ ID NO: 1146338 - DNA, 15 bp, Homo sapiens
aaggttaaatattat

SEQ ID NO: 1146339 - DNA, 15 bp, Homo sapiens
aaaggttaaatatta

SEQ ID NO: 1146340 - DNA, 15 bp, Homo sapiens
aaaaggttaaatatt

SEQ ID NO: 1146341 - DNA, 15 bp, Homo sapiens
gaaaaggttaaatat

SEQ ID NO: 1146342 - DNA, 15 bp, Homo sapiens
tgaaaaggttaaata

SEQ ID NO: 1146343 - DNA, 15 bp, Homo sapiens
ttgaaaaggttaaat

SEQ ID NO: 1146344 - DNA, 15 bp, Homo sapiens
tttgaaaaggttaaa

SEQ ID NO: 1146345 - DNA, 15 bp, Homo sapiens
ttttgaaaaggttaa

SEQ ID NO: 1146346 - DNA, 15 bp, Homo sapiens
attttgaaaaggtta

SEQ ID NO: 1146347 - DNA, 15 bp, Homo sapiens
aattttgaaaaggtt

SEQ ID NO: 1146348 - DNA, 15 bp, Homo sapiens
taattttgaaaaggt

SEQ ID NO: 1146349 - DNA, 15 bp, Homo sapiens
ataattttgaaaagg

SEQ ID NO: 1146350 - DNA, 15 bp, Homo sapiens
tataattttgaaaag

SEQ ID NO: 1146351 - DNA, 15 bp, Homo sapiens
atataattttgaaaa

SEQ ID NO: 1146352 - DNA, 15 bp, Homo sapiens
aatataattttgaaa

SEQ ID NO: 1146353 - DNA, 15 bp, Homo sapiens
aaatataattttgaa

SEQ ID NO: 1146354 - DNA, 15 bp, Homo sapiens
caaatataattttga

SEQ ID NO: 1146355 - DNA, 15 bp, Homo sapiens
acaaatataattttg

SEQ ID NO: 1146356 - DNA, 15 bp, Homo sapiens
tacaaatataatttt

SEQ ID NO: 1146357 - DNA, 15 bp, Homo sapiens
atacaaatataattt

SEQ ID NO: 1146358 - DNA, 15 bp, Homo sapiens
aatacaaatataatt

SEQ ID NO: 1146359 - DNA, 15 bp, Homo sapiens
caatacaaatataat

SEQ ID NO: 1146360 - DNA, 15 bp, Homo sapiens
acaatacaaatataa

SEQ ID NO: 1146361 - DNA, 15 bp, Homo sapiens
gacaatacaaatata

SEQ ID NO: 1146362 - DNA, 15 bp, Homo sapiens
tgacaatacaaatat

SEQ ID NO: 1146363 - DNA, 15 bp, Homo sapiens
atgacaatacaaata

SEQ ID NO: 1146364 - DNA, 15 bp, Homo sapiens
catgacaatacaaat

SEQ ID NO: 1146365 - DNA, 15 bp, Homo sapiens
acatgacaatacaaa

SEQ ID NO: 1146366 - DNA, 15 bp, Homo sapiens
aacatgacaatacaa

SEQ ID NO: 1146367 - DNA, 15 bp, Homo sapiens
taacatgacaataca

SEQ ID NO: 1146368 - DNA, 15 bp, Homo sapiens
ataacatgacaatac

SEQ ID NO: 1146369 - DNA, 15 bp, Homo sapiens
aataacatgacaata

SEQ ID NO: 1146370 - DNA, 15 bp, Homo sapiens
taataacatgacaat

SEQ ID NO: 1146371 - DNA, 15 bp, Homo sapiens
ctaataacatgacaa

SEQ ID NO: 1146372 - DNA, 15 bp, Homo sapiens
actaataacatgaca

SEQ ID NO: 1146373 - DNA, 15 bp, Homo sapiens
tactaataacatgac

SEQ ID NO: 1146374 - DNA, 15 bp, Homo sapiens
atactaataacatga

SEQ ID NO: 1146375 - DNA, 15 bp, Homo sapiens
aatactaataacatg

SEQ ID NO: 1146376 - DNA, 15 bp, Homo sapiens
aaatactaataacat

SEQ ID NO: 1146377 - DNA, 15 bp, Homo sapiens
caaatactaataaca

SEQ ID NO: 1146378 - DNA, 15 bp, Homo sapiens
gcaaatactaataac

SEQ ID NO: 1146379 - DNA, 15 bp, Homo sapiens
agcaaatactaataa

SEQ ID NO: 1146380 - DNA, 15 bp, Homo sapiens
gagcaaatactaata

SEQ ID NO: 1146381 - DNA, 15 bp, Homo sapiens
ggagcaaatactaat

SEQ ID NO: 1146382 - DNA, 15 bp, Homo sapiens
tggagcaaatactaa

SEQ ID NO: 1146383 - DNA, 15 bp, Homo sapiens
ttggagcaaatacta

SEQ ID NO: 1146384 - DNA, 15 bp, Homo sapiens
tttggagcaaatact

SEQ ID NO: 1146385 - DNA, 15 bp, Homo sapiens
ttttggagcaaatac

SEQ ID NO: 1146386 - DNA, 15 bp, Homo sapiens
attttggagcaaata

SEQ ID NO: 1146387 - DNA, 15 bp, Homo sapiens
aattttggagcaaat

SEQ ID NO: 1146388 - DNA, 15 bp, Homo sapiens
taattttggagcaaa

SEQ ID NO: 1146389 - DNA, 15 bp, Homo sapiens
ataattttggagcaa

SEQ ID NO: 1146390 - DNA, 15 bp, Homo sapiens
tataattttggagca

SEQ ID NO: 1146391 - DNA, 15 bp, Homo sapiens
atataattttggagc

SEQ ID NO: 1146392 - DNA, 15 bp, Homo sapiens
catataattttggag

SEQ ID NO: 1146393 - DNA, 15 bp, Homo sapiens
tcatataattttgga

SEQ ID NO: 1146394 - DNA, 15 bp, Homo sapiens
ctcatataattttgg

SEQ ID NO: 1146395 - DNA, 15 bp, Homo sapiens
tctcatataattttg

SEQ ID NO: 1146396 - DNA, 15 bp, Homo sapiens
atctcatataatttt

SEQ ID NO: 1146397 - DNA, 15 bp, Homo sapiens
aatctcatataattt

SEQ ID NO: 1146398 - DNA, 15 bp, Homo sapiens
gaatctcatataatt

SEQ ID NO: 1146399 - DNA, 15 bp, Homo sapiens
ggaatctcatataat

SEQ ID NO: 1146400 - DNA, 15 bp, Homo sapiens
aggaatctcatataa

SEQ ID NO: 1146401 - DNA, 15 bp, Homo sapiens
taggaatctcatata

SEQ ID NO: 1146402 - DNA, 15 bp, Homo sapiens
ttaggaatctcatat

SEQ ID NO: 1146403 - DNA, 15 bp, Homo sapiens
tttaggaatctcata

SEQ ID NO: 1146404 - DNA, 15 bp, Homo sapiens
ttttaggaatctcat

SEQ ID NO: 1146405 - DNA, 15 bp, Homo sapiens
tttttaggaatctca

SEQ ID NO: 1146406 - DNA, 15 bp, Homo sapiens
atttttaggaatctc

SEQ ID NO: 1146407 - DNA, 15 bp, Homo sapiens
aatttttaggaatct

SEQ ID NO: 1146408 - DNA, 15 bp, Homo sapiens
caatttttaggaatc

SEQ ID NO: 1146409 - DNA, 15 bp, Homo sapiens
ccaatttttaggaat

SEQ ID NO: 1146410 - DNA, 15 bp, Homo sapiens
tccaatttttaggaa

SEQ ID NO: 1146411 - DNA, 15 bp, Homo sapiens
atccaatttttagga

SEQ ID NO: 1146412 - DNA, 15 bp, Homo sapiens
aatccaatttttagg

SEQ ID NO: 1146413 - DNA, 15 bp, Homo sapiens
aaatccaatttttag

SEQ ID NO: 1146414 - DNA, 15 bp, Homo sapiens
caaatccaattttta

SEQ ID NO: 1146415 - DNA, 15 bp, Homo sapiens
acaaatccaattttt

SEQ ID NO: 1146416 - DNA, 15 bp, Homo sapiens
aacaaatccaatttt

SEQ ID NO: 1146417 - DNA, 15 bp, Homo sapiens
aaacaaatccaattt

SEQ ID NO: 1146418 - DNA, 15 bp, Homo sapiens
aaaacaaatccaatt

SEQ ID NO: 1146419 - DNA, 15 bp, Homo sapiens
caaaacaaatccaat

SEQ ID NO: 1146420 - DNA, 15 bp, Homo sapiens
acaaaacaaatccaa

SEQ ID NO: 1146421 - DNA, 15 bp, Homo sapiens
aacaaaacaaatcca

SEQ ID NO: 1146422 - DNA, 15 bp, Homo sapiens
taacaaaacaaatcc

SEQ ID NO: 1146423 - DNA, 15 bp, Homo sapiens
ataacaaaacaaatc

SEQ ID NO: 1146424 - DNA, 15 bp, Homo sapiens
tataacaaaacaaat

SEQ ID NO: 1146425 - DNA, 15 bp, Homo sapiens
atataacaaaacaaa

SEQ ID NO: 1146426 - DNA, 15 bp, Homo sapiens
catataacaaaacaa

SEQ ID NO: 1146427 - DNA, 15 bp, Homo sapiens
acatataacaaaaca

SEQ ID NO: 1146428 - DNA, 15 bp, Homo sapiens
aacatataacaaaac

SEQ ID NO: 1146429 - DNA, 15 bp, Homo sapiens
taacatataacaaaa

SEQ ID NO: 1146430 - DNA, 15 bp, Homo sapiens
ataacatataacaaa

SEQ ID NO: 1146431 - DNA, 15 bp, Homo sapiens
aataacatataacaa

SEQ ID NO: 1146432 - DNA, 15 bp, Homo sapiens
taataacatataaca

SEQ ID NO: 1146433 - DNA, 15 bp, Homo sapiens
ctaataacatataac

SEQ ID NO: 1146434 - DNA, 15 bp, Homo sapiens
actaataacatataa

SEQ ID NO: 1146435 - DNA, 15 bp, Homo sapiens
gactaataacatata

SEQ ID NO: 1146436 - DNA, 15 bp, Homo sapiens
tgactaataacatat

SEQ ID NO: 1146437 - DNA, 15 bp, Homo sapiens
atgactaataacata

SEQ ID NO: 1146438 - DNA, 15 bp, Homo sapiens
tatgactaataacat

SEQ ID NO: 1146439 - DNA, 15 bp, Homo sapiens
ttatgactaataaca

SEQ ID NO: 1146440 - DNA, 15 bp, Homo sapiens
attatgactaataac

SEQ ID NO: 1146441 - DNA, 15 bp, Homo sapiens
aattatgactaataa

SEQ ID NO: 1146442 - DNA, 15 bp, Homo sapiens
taattatgactaata

SEQ ID NO: 1146443 - DNA, 15 bp, Homo sapiens
ataattatgactaat

SEQ ID NO: 1146444 - DNA, 15 bp, Homo sapiens
cataattatgactaa

SEQ ID NO: 1146445 - DNA, 15 bp, Homo sapiens
tcataattatgacta

SEQ ID NO: 1146446 - DNA, 15 bp, Homo sapiens
ctcataattatgact

SEQ ID NO: 1146447 - DNA, 15 bp, Homo sapiens
actcataattatgac

SEQ ID NO: 1146448 - DNA, 15 bp, Homo sapiens
tactcataattatga

SEQ ID NO: 1146449 - DNA, 15 bp, Homo sapiens
atactcataattatg

SEQ ID NO: 1146450 - DNA, 15 bp, Homo sapiens
aatactcataattat

SEQ ID NO: 1146451 - DNA, 15 bp, Homo sapiens
taatactcataatta

SEQ ID NO: 1146452 - DNA, 15 bp, Homo sapiens
ataatactcataatt

SEQ ID NO: 1146453 - DNA, 15 bp, Homo sapiens
cataatactcataat

SEQ ID NO: 1146454 - DNA, 15 bp, Homo sapiens
acataatactcataa

SEQ ID NO: 1146455 - DNA, 15 bp, Homo sapiens
aacataatactcata

SEQ ID NO: 1146456 - DNA, 15 bp, Homo sapiens
taacataatactcat

SEQ ID NO: 1146457 - DNA, 15 bp, Homo sapiens
ttaacataatactca

SEQ ID NO: 1146458 - DNA, 15 bp, Homo sapiens
tttaacataatactc

SEQ ID NO: 1146459 - DNA, 15 bp, Homo sapiens
atttaacataatact

SEQ ID NO: 1146460 - DNA, 15 bp, Homo sapiens
aatttaacataatac

SEQ ID NO: 1146461 - DNA, 15 bp, Homo sapiens
caatttaacataata

SEQ ID NO: 1146462 - DNA, 15 bp, Homo sapiens
acaatttaacataat

SEQ ID NO: 1146463 - DNA, 15 bp, Homo sapiens
aacaatttaacataa

SEQ ID NO: 1146464 - DNA, 15 bp, Homo sapiens
caacaatttaacata

SEQ ID NO: 1146465 - DNA, 15 bp, Homo sapiens
acaacaatttaacat

SEQ ID NO: 1146466 - DNA, 15 bp, Homo sapiens
tacaacaatttaaca

SEQ ID NO: 1146467 - DNA, 15 bp, Homo sapiens
ctacaacaatttaac

SEQ ID NO: 1146468 - DNA, 15 bp, Homo sapiens
cctacaacaatttaa

SEQ ID NO: 1146469 - DNA, 15 bp, Homo sapiens
acctacaacaattta

SEQ ID NO: 1146470 - DNA, 15 bp, Homo sapiens
gacctacaacaattt

SEQ ID NO: 1146471 - DNA, 15 bp, Homo sapiens
tgacctacaacaatt

SEQ ID NO: 1146472 - DNA, 15 bp, Homo sapiens
atgacctacaacaat

SEQ ID NO: 1146473 - DNA, 15 bp, Homo sapiens
tatgacctacaacaa

SEQ ID NO: 1146474 - DNA, 15 bp, Homo sapiens
ttatgacctacaaca

SEQ ID NO: 1146475 - DNA, 15 bp, Homo sapiens
tttatgacctacaac

SEQ ID NO: 1146476 - DNA, 15 bp, Homo sapiens
ttttatgacctacaa

SEQ ID NO: 1146477 - DNA, 15 bp, Homo sapiens
cttttatgacctaca

SEQ ID NO: 1146478 - DNA, 15 bp, Homo sapiens
ccttttatgacctac

SEQ ID NO: 1146479 - DNA, 15 bp, Homo sapiens
tccttttatgaccta

SEQ ID NO: 1146480 - DNA, 15 bp, Homo sapiens
ctccttttatgacct

SEQ ID NO: 1146481 - DNA, 15 bp, Homo sapiens
tctccttttatgacc

SEQ ID NO: 1146482 - DNA, 15 bp, Homo sapiens
ttctccttttatgac

SEQ ID NO: 1146483 - DNA, 15 bp, Homo sapiens
tttctccttttatga

SEQ ID NO: 1146484 - DNA, 15 bp, Homo sapiens
ttttctccttttatg

SEQ ID NO: 1146485 - DNA, 15 bp, Homo sapiens
attttctccttttat

SEQ ID NO: 1146486 - DNA, 15 bp, Homo sapiens
cattttctcctttta

SEQ ID NO: 1146487 - DNA, 15 bp, Homo sapiens
tcattttctcctttt

SEQ ID NO: 1146488 - DNA, 15 bp, Homo sapiens
gtcattttctccttt

SEQ ID NO: 1146489 - DNA, 15 bp, Homo sapiens
ggtcattttctcctt

SEQ ID NO: 1146490 - DNA, 15 bp, Homo sapiens
aggtcattttctcct

SEQ ID NO: 1146491 - DNA, 15 bp, Homo sapiens
taggtcattttctcc

SEQ ID NO: 1146492 - DNA, 15 bp, Homo sapiens
ctaggtcattttctc

SEQ ID NO: 1146493 - DNA, 15 bp, Homo sapiens
actaggtcattttct

SEQ ID NO: 1146494 - DNA, 15 bp, Homo sapiens
aactaggtcattttc

SEQ ID NO: 1146495 - DNA, 15 bp, Homo sapiens
aaactaggtcatttt

SEQ ID NO: 1146496 - DNA, 15 bp, Homo sapiens
aaaactaggtcattt

SEQ ID NO: 1146497 - DNA, 15 bp, Homo sapiens
gaaaactaggtcatt

SEQ ID NO: 1146498 - DNA, 15 bp, Homo sapiens
agaaaactaggtcat

SEQ ID NO: 1146499 - DNA, 15 bp, Homo sapiens
aagaaaactaggtca

SEQ ID NO: 1146500 - DNA, 15 bp, Homo sapiens
caagaaaactaggtc

SEQ ID NO: 1146501 - DNA, 15 bp, Homo sapiens
acaagaaaactaggt

SEQ ID NO: 1146502 - DNA, 15 bp, Homo sapiens
aacaagaaaactagg

SEQ ID NO: 1146503 - DNA, 15 bp, Homo sapiens
taacaagaaaactag

SEQ ID NO: 1146504 - DNA, 15 bp, Homo sapiens
ttaacaagaaaacta

SEQ ID NO: 1146505 - DNA, 15 bp, Homo sapiens
attaacaagaaaact

SEQ ID NO: 1146506 - DNA, 15 bp, Homo sapiens
aattaacaagaaaac

SEQ ID NO: 1146507 - DNA, 15 bp, Homo sapiens
gaattaacaagaaaa

SEQ ID NO: 1146508 - DNA, 15 bp, Homo sapiens
ggaattaacaagaaa

SEQ ID NO: 1146509 - DNA, 15 bp, Homo sapiens
tggaattaacaagaa

SEQ ID NO: 1146510 - DNA, 15 bp, Homo sapiens
atggaattaacaaga

SEQ ID NO: 1146511 - DNA, 15 bp, Homo sapiens
gatggaattaacaag

SEQ ID NO: 1146512 - DNA, 15 bp, Homo sapiens
agatggaattaacaa

SEQ ID NO: 1146513 - DNA, 15 bp, Homo sapiens
aagatggaattaaca

SEQ ID NO: 1146514 - DNA, 15 bp, Homo sapiens
aaagatggaattaac

SEQ ID NO: 1146515 - DNA, 15 bp, Homo sapiens
taaagatggaattaa

SEQ ID NO: 1146516 - DNA, 15 bp, Homo sapiens
ttaaagatggaatta

SEQ ID NO: 1146517 - DNA, 15 bp, Homo sapiens
gttaaagatggaatt

SEQ ID NO: 1146518 - DNA, 15 bp, Homo sapiens
ggttaaagatggaat

SEQ ID NO: 1146519 - DNA, 15 bp, Homo sapiens
tggttaaagatggaa

SEQ ID NO: 1146520 - DNA, 15 bp, Homo sapiens
gtggttaaagatgga

SEQ ID NO: 1146521 - DNA, 15 bp, Homo sapiens
cgtggttaaagatgg

SEQ ID NO: 1146522 - DNA, 15 bp, Homo sapiens
ccgtggttaaagatg

SEQ ID NO: 1146523 - DNA, 15 bp, Homo sapiens
gccgtggttaaagat

SEQ ID NO: 1146524 - DNA, 15 bp, Homo sapiens
ggccgtggttaaaga

SEQ ID NO: 1146525 - DNA, 15 bp, Homo sapiens
tggccgtggttaaag

SEQ ID NO: 1146526 - DNA, 15 bp, Homo sapiens
atggccgtggttaaa

SEQ ID NO: 1146527 - DNA, 15 bp, Homo sapiens
aatggccgtggttaa

SEQ ID NO: 1146528 - DNA, 15 bp, Homo sapiens
aaatggccgtggtta

SEQ ID NO: 1146529 - DNA, 15 bp, Homo sapiens
aaaatggccgtggtt

SEQ ID NO: 1146530 - DNA, 15 bp, Homo sapiens
aaaaatggccgtggt

SEQ ID NO: 1146531 - DNA, 15 bp, Homo sapiens
taaaaatggccgtgg

SEQ ID NO: 1146532 - DNA, 15 bp, Homo sapiens
ctaaaaatggccgtg

SEQ ID NO: 1146533 - DNA, 15 bp, Homo sapiens
actaaaaatggccgt

SEQ ID NO: 1146534 - DNA, 15 bp, Homo sapiens
gactaaaaatggccg

SEQ ID NO: 1146535 - DNA, 15 bp, Homo sapiens
agactaaaaatggcc

SEQ ID NO: 1146536 - DNA, 15 bp, Homo sapiens
aagactaaaaatggc

SEQ ID NO: 1146537 - DNA, 15 bp, Homo sapiens
caagactaaaaatgg

SEQ ID NO: 1146538 - DNA, 15 bp, Homo sapiens
gcaagactaaaaatg

SEQ ID NO: 1146539 - DNA, 15 bp, Homo sapiens
agcaagactaaaaat

SEQ ID NO: 1146540 - DNA, 15 bp, Homo sapiens
gagcaagactaaaaa

SEQ ID NO: 1146541 - DNA, 15 bp, Homo sapiens
tgagcaagactaaaa

SEQ ID NO: 1146542 - DNA, 15 bp, Homo sapiens
gtgagcaagactaaa

SEQ ID NO: 1146543 - DNA, 15 bp, Homo sapiens
tgtgagcaagactaa

SEQ ID NO: 1146544 - DNA, 15 bp, Homo sapiens
ttgtgagcaagacta

SEQ ID NO: 1146545 - DNA, 15 bp, Homo sapiens
attgtgagcaagact

SEQ ID NO: 1146546 - DNA, 15 bp, Homo sapiens
aattgtgagcaagac

SEQ ID NO: 1146547 - DNA, 15 bp, Homo sapiens
taattgtgagcaaga

SEQ ID NO: 1146548 - DNA, 15 bp, Homo sapiens
ttaattgtgagcaag

SEQ ID NO: 1146549 - DNA, 15 bp, Homo sapiens
attaattgtgagcaa

SEQ ID NO: 1146550 - DNA, 15 bp, Homo sapiens
aattaattgtgagca

SEQ ID NO: 1146551 - DNA, 15 bp, Homo sapiens
aaattaattgtgagc

SEQ ID NO: 1146552 - DNA, 15 bp, Homo sapiens
aaaattaattgtgag

SEQ ID NO: 1146553 - DNA, 15 bp, Homo sapiens
aaaaattaattgtga

SEQ ID NO: 1146554 - DNA, 15 bp, Homo sapiens
aaaaaattaattgtg

SEQ ID NO: 1146555 - DNA, 15 bp, Homo sapiens
aaaaaaattaattgt

SEQ ID NO: 1146556 - DNA, 15 bp, Homo sapiens
taaaaaaattaattg

SEQ ID NO: 1146557 - DNA, 15 bp, Homo sapiens
ataaaaaaattaatt

SEQ ID NO: 1146558 - DNA, 15 bp, Homo sapiens
cataaaaaaattaat

SEQ ID NO: 1146559 - DNA, 15 bp, Homo sapiens
gcataaaaaaattaa

SEQ ID NO: 1146560 - DNA, 15 bp, Homo sapiens
agcataaaaaaatta

SEQ ID NO: 1146561 - DNA, 15 bp, Homo sapiens
cagcataaaaaaatt

SEQ ID NO: 1146562 - DNA, 15 bp, Homo sapiens
tcagcataaaaaaat

SEQ ID NO: 1146563 - DNA, 15 bp, Homo sapiens
atcagcataaaaaaa

SEQ ID NO: 1146564 - DNA, 15 bp, Homo sapiens
gatcagcataaaaaa

SEQ ID NO: 1146565 - DNA, 15 bp, Homo sapiens
ggatcagcataaaaa

SEQ ID NO: 1146566 - DNA, 15 bp, Homo sapiens
aggatcagcataaaa

SEQ ID NO: 1146567 - DNA, 15 bp, Homo sapiens
aaggatcagcataaa

SEQ ID NO: 1146568 - DNA, 15 bp, Homo sapiens
aaaggatcagcataa

SEQ ID NO: 1146569 - DNA, 15 bp, Homo sapiens
aaaaggatcagcata

SEQ ID NO: 1146570 - DNA, 15 bp, Homo sapiens
aaaaaggatcagcat

SEQ ID NO: 1146571 - DNA, 15 bp, Homo sapiens
aaaaaaggatcagca

SEQ ID NO: 1146572 - DNA, 15 bp, Homo sapiens
aaaaaaaggatcagc

SEQ ID NO: 1146573 - DNA, 15 bp, Homo sapiens
gaaaaaaaggatcag

SEQ ID NO: 1146574 - DNA, 15 bp, Homo sapiens
agaaaaaaaggatca

SEQ ID NO: 1146575 - DNA, 15 bp, Homo sapiens
cagaaaaaaaggatc

SEQ ID NO: 1146576 - DNA, 15 bp, Homo sapiens
tcagaaaaaaaggat

SEQ ID NO: 1146577 - DNA, 15 bp, Homo sapiens
ttcagaaaaaaagga

SEQ ID NO: 1146578 - DNA, 15 bp, Homo sapiens
tttcagaaaaaaagg

SEQ ID NO: 1146579 - DNA, 15 bp, Homo sapiens
ctttcagaaaaaaag

SEQ ID NO: 1146580 - DNA, 15 bp, Homo sapiens
gctttcagaaaaaaa

SEQ ID NO: 1146581 - DNA, 15 bp, Homo sapiens
agctttcagaaaaaa

SEQ ID NO: 1146582 - DNA, 15 bp, Homo sapiens
gagctttcagaaaaa

SEQ ID NO: 1146583 - DNA, 15 bp, Homo sapiens
agagctttcagaaaa

SEQ ID NO: 1146584 - DNA, 15 bp, Homo sapiens
aagagctttcagaaa

SEQ ID NO: 1146585 - DNA, 15 bp, Homo sapiens
aaagagctttcagaa

SEQ ID NO: 1146586 - DNA, 15 bp, Homo sapiens
caaagagctttcaga

SEQ ID NO: 1146587 - DNA, 15 bp, Homo sapiens
gcaaagagctttcag

SEQ ID NO: 1146588 - DNA, 15 bp, Homo sapiens
tgcaaagagctttca

SEQ ID NO: 1146589 - DNA, 15 bp, Homo sapiens
ttgcaaagagctttc

SEQ ID NO: 1146590 - DNA, 15 bp, Homo sapiens
tttgcaaagagcttt

SEQ ID NO: 1146591 - DNA, 15 bp, Homo sapiens
atttgcaaagagctt

SEQ ID NO: 1146592 - DNA, 15 bp, Homo sapiens
gatttgcaaagagct

SEQ ID NO: 1146593 - DNA, 15 bp, Homo sapiens
ggatttgcaaagagc

SEQ ID NO: 1146594 - DNA, 15 bp, Homo sapiens
aggatttgcaaagag

SEQ ID NO: 1146595 - DNA, 15 bp, Homo sapiens
taggatttgcaaaga

SEQ ID NO: 1146596 - DNA, 15 bp, Homo sapiens
ttaggatttgcaaag

SEQ ID NO: 1146597 - DNA, 15 bp, Homo sapiens
tttaggatttgcaaa

SEQ ID NO: 1146598 - DNA, 15 bp, Homo sapiens
ctttaggatttgcaa

SEQ ID NO: 1146599 - DNA, 15 bp, Homo sapiens
actttaggatttgca

SEQ ID NO: 1146600 - DNA, 15 bp, Homo sapiens
cactttaggatttgc

SEQ ID NO: 1146601 - DNA, 15 bp, Homo sapiens
acactttaggatttg

SEQ ID NO: 1146602 - DNA, 15 bp, Homo sapiens
aacactttaggattt

SEQ ID NO: 1146603 - DNA, 15 bp, Homo sapiens
caacactttaggatt

SEQ ID NO: 1146604 - DNA, 15 bp, Homo sapiens
acaacactttaggat

SEQ ID NO: 1146605 - DNA, 15 bp, Homo sapiens
cacaacactttagga

SEQ ID NO: 1146606 - DNA, 15 bp, Homo sapiens
acacaacactttagg

SEQ ID NO: 1146607 - DNA, 15 bp, Homo sapiens
gacacaacactttag

SEQ ID NO: 1146608 - DNA, 15 bp, Homo sapiens
agacacaacacttta

SEQ ID NO: 1146609 - DNA, 15 bp, Homo sapiens
aagacacaacacttt

SEQ ID NO: 1146610 - DNA, 15 bp, Homo sapiens
gaagacacaacactt

SEQ ID NO: 1146611 - DNA, 15 bp, Homo sapiens
tgaagacacaacact

SEQ ID NO: 1146612 - DNA, 15 bp, Homo sapiens
ttgaagacacaacac

SEQ ID NO: 1146613 - DNA, 15 bp, Homo sapiens
cttgaagacacaaca

SEQ ID NO: 1146614 - DNA, 15 bp, Homo sapiens
tcttgaagacacaac

SEQ ID NO: 1146615 - DNA, 15 bp, Homo sapiens
ttcttgaagacacaa

SEQ ID NO: 1146616 - DNA, 15 bp, Homo sapiens
tttcttgaagacaca

SEQ ID NO: 1146617 - DNA, 15 bp, Homo sapiens
ctttcttgaagacac

SEQ ID NO: 1146618 - DNA, 15 bp, Homo sapiens
gctttcttgaagaca

SEQ ID NO: 1146619 - DNA, 15 bp, Homo sapiens
agctttcttgaagac

SEQ ID NO: 1146620 - DNA, 15 bp, Homo sapiens
gagctttcttgaaga

SEQ ID NO: 1146621 - DNA, 15 bp, Homo sapiens
tgagctttcttgaag

SEQ ID NO: 1146622 - DNA, 15 bp, Homo sapiens
atgagctttcttgaa

SEQ ID NO: 1146623 - DNA, 15 bp, Homo sapiens
catgagctttcttga

SEQ ID NO: 1146624 - DNA, 15 bp, Homo sapiens
ccatgagctttcttg

SEQ ID NO: 1146625 - DNA, 15 bp, Homo sapiens
tccatgagctttctt

SEQ ID NO: 1146626 - DNA, 15 bp, Homo sapiens
ttccatgagctttct

SEQ ID NO: 1146627 - DNA, 15 bp, Homo sapiens
tttccatgagctttc

SEQ ID NO: 1146628 - DNA, 15 bp, Homo sapiens
ctttccatgagcttt

SEQ ID NO: 1146629 - DNA, 15 bp, Homo sapiens
cctttccatgagctt

SEQ ID NO: 1146630 - DNA, 15 bp, Homo sapiens
tcctttccatgagct

SEQ ID NO: 1146631 - DNA, 15 bp, Homo sapiens
gtcctttccatgagc

SEQ ID NO: 1146632 - DNA, 15 bp, Homo sapiens
agtcctttccatgag

SEQ ID NO: 1146633 - DNA, 15 bp, Homo sapiens
cagtcctttccatga

SEQ ID NO: 1146634 - DNA, 15 bp, Homo sapiens
gcagtcctttccatg

SEQ ID NO: 1146635 - DNA, 15 bp, Homo sapiens
tgcagtcctttccat

SEQ ID NO: 1146636 - DNA, 15 bp, Homo sapiens
ttgcagtcctttcca

SEQ ID NO: 1146637 - DNA, 15 bp, Homo sapiens
gttgcagtcctttcc

SEQ ID NO: 1146638 - DNA, 15 bp, Homo sapiens
tgttgcagtcctttc

SEQ ID NO: 1146639 - DNA, 15 bp, Homo sapiens
ttgttgcagtccttt

SEQ ID NO: 1146640 - DNA, 15 bp, Homo sapiens
cttgttgcagtcctt

SEQ ID NO: 1146641 - DNA, 15 bp, Homo sapiens
acttgttgcagtcct

SEQ ID NO: 1146642 - DNA, 15 bp, Homo sapiens
tacttgttgcagtcc

SEQ ID NO: 1146643 - DNA, 15 bp, Homo sapiens
gtacttgttgcagtc

SEQ ID NO: 1146644 - DNA, 15 bp, Homo sapiens
agtacttgttgcagt

SEQ ID NO: 1146645 - DNA, 15 bp, Homo sapiens
gagtacttgttgcag

SEQ ID NO: 1146646 - DNA, 15 bp, Homo sapiens
agagtacttgttgca

SEQ ID NO: 1146647 - DNA, 15 bp, Homo sapiens
aagagtacttgttgc

SEQ ID NO: 1146648 - DNA, 15 bp, Homo sapiens
caagagtacttgttg

SEQ ID NO: 1146649 - DNA, 15 bp, Homo sapiens
ccaagagtacttgtt

SEQ ID NO: 1146650 - DNA, 15 bp, Homo sapiens
gccaagagtacttgt

SEQ ID NO: 1146651 - DNA, 15 bp, Homo sapiens
agccaagagtacttg

SEQ ID NO: 1146652 - DNA, 15 bp, Homo sapiens
cagccaagagtactt

SEQ ID NO: 1146653 - DNA, 15 bp, Homo sapiens
ccagccaagagtact

SEQ ID NO: 1146654 - DNA, 15 bp, Homo sapiens
cccagccaagagtac

SEQ ID NO: 1146655 - DNA, 15 bp, Homo sapiens
gcccagccaagagta

SEQ ID NO: 1146656 - DNA, 15 bp, Homo sapiens
tgcccagccaagagt

SEQ ID NO: 1146657 - DNA, 15 bp, Homo sapiens
gtgcccagccaagag

SEQ ID NO: 1146658 - DNA, 15 bp, Homo sapiens
tgtgcccagccaaga

SEQ ID NO: 1146659 - DNA, 15 bp, Homo sapiens
ctgtgcccagccaag

SEQ ID NO: 1146660 - DNA, 15 bp, Homo sapiens
actgtgcccagccaa

SEQ ID NO: 1146661 - DNA, 15 bp, Homo sapiens
cactgtgcccagcca

SEQ ID NO: 1146662 - DNA, 15 bp, Homo sapiens
tgcctcccaaagtgt

SEQ ID NO: 1146663 - DNA, 15 bp, Homo sapiens
ctgcctcccaaagtg

SEQ ID NO: 1146664 - DNA, 15 bp, Homo sapiens
tctgcctcccaaagt

SEQ ID NO: 1146665 - DNA, 15 bp, Homo sapiens
cctctgcctcccaaa

SEQ ID NO: 1146666 - DNA, 15 bp, Homo sapiens
acctctgcctcccaa

SEQ ID NO: 1146667 - DNA, 15 bp, Homo sapiens
cacctctgcctccca

SEQ ID NO: 1146668 - DNA, 15 bp, Homo sapiens
cccacctctgcctcc

SEQ ID NO: 1146669 - DNA, 15 bp, Homo sapiens
acccacctctgcctc

SEQ ID NO: 1146670 - DNA, 15 bp, Homo sapiens
tccacccacctctgc

SEQ ID NO: 1146671 - DNA, 15 bp, Homo sapiens
atccacccacctctg

SEQ ID NO: 1146672 - DNA, 15 bp, Homo sapiens
gatccacccacctct

SEQ ID NO: 1146673 - DNA, 15 bp, Homo sapiens
acctgacctcaggtg

SEQ ID NO: 1146674 - DNA, 15 bp, Homo sapiens
cacctgacctcaggt

SEQ ID NO: 1146675 - DNA, 15 bp, Homo sapiens
acacctgacctcagg

SEQ ID NO: 1146676 - DNA, 15 bp, Homo sapiens
aacacctgacctcag

SEQ ID NO: 1146677 - DNA, 15 bp, Homo sapiens
gaacacctgacctca

SEQ ID NO: 1146678 - DNA, 15 bp, Homo sapiens
cgaacacctgacctc

SEQ ID NO: 1146679 - DNA, 15 bp, Homo sapiens
tcgaacacctgacct

SEQ ID NO: 1146680 - DNA, 15 bp, Homo sapiens
ctcgaacacctgacc

SEQ ID NO: 1146681 - DNA, 15 bp, Homo sapiens
tctcgaacacctgac

SEQ ID NO: 1146682 - DNA, 15 bp, Homo sapiens
gtctcgaacacctga

SEQ ID NO: 1146683 - DNA, 15 bp, Homo sapiens
ggtctcgaacacctg

SEQ ID NO: 1146684 - DNA, 15 bp, Homo sapiens
tggtctcgaacacct

SEQ ID NO: 1146685 - DNA, 15 bp, Homo sapiens
ctggtctcgaacacc

SEQ ID NO: 1146686 - DNA, 15 bp, Homo sapiens
gctggtctcgaacac

SEQ ID NO: 1146687 - DNA, 15 bp, Homo sapiens
ggctggtctcgaaca

SEQ ID NO: 1146688 - DNA, 15 bp, Homo sapiens
tatgttggtcaggct

SEQ ID NO: 1146689 - DNA, 15 bp, Homo sapiens
ctatgttggtcaggc

SEQ ID NO: 1146690 - DNA, 15 bp, Homo sapiens
actatgttggtcagg

SEQ ID NO: 1146691 - DNA, 15 bp, Homo sapiens
cactatgttggtcag

SEQ ID NO: 1146692 - DNA, 15 bp, Homo sapiens
tcactatgttggtca

SEQ ID NO: 1146693 - DNA, 15 bp, Homo sapiens
ttcactatgttggtc

SEQ ID NO: 1146694 - DNA, 15 bp, Homo sapiens
tttcactatgttggt

SEQ ID NO: 1146695 - DNA, 15 bp, Homo sapiens
agggtttcactatgt

SEQ ID NO: 1146696 - DNA, 15 bp, Homo sapiens
cagggtttcactatg

SEQ ID NO: 1146697 - DNA, 15 bp, Homo sapiens
acagggtttcactat

SEQ ID NO: 1146698 - DNA, 15 bp, Homo sapiens
gacagggtttcacta

SEQ ID NO: 1146699 - DNA, 15 bp, Homo sapiens
cagagacagggtttc

SEQ ID NO: 1146700 - DNA, 15 bp, Homo sapiens
gcagagacagggttt

SEQ ID NO: 1146701 - DNA, 15 bp, Homo sapiens
agcagagacagggtt

SEQ ID NO: 1146702 - DNA, 15 bp, Homo sapiens
tagcagagacagggt

SEQ ID NO: 1146703 - DNA, 15 bp, Homo sapiens
ttagcagagacaggg

SEQ ID NO: 1146704 - DNA, 15 bp, Homo sapiens
tttagcagagacagg

SEQ ID NO: 1146705 - DNA, 15 bp, Homo sapiens
ttttagcagagacag

SEQ ID NO: 1146706 - DNA, 15 bp, Homo sapiens
attttagcagagaca

SEQ ID NO: 1146707 - DNA, 15 bp, Homo sapiens
tattttagcagagac

SEQ ID NO: 1146708 - DNA, 15 bp, Homo sapiens
ttattttagcagaga

SEQ ID NO: 1146709 - DNA, 15 bp, Homo sapiens
tttattttagcagag

SEQ ID NO: 1146710 - DNA, 15 bp, Homo sapiens
ttttattttagcaga

SEQ ID NO: 1146711 - DNA, 15 bp, Homo sapiens
tttttattttagcag

SEQ ID NO: 1146712 - DNA, 15 bp, Homo sapiens
ttttttattttagca

SEQ ID NO: 1146713 - DNA, 15 bp, Homo sapiens
tttttttattttagc

SEQ ID NO: 1146714 - DNA, 15 bp, Homo sapiens
atttttttattttag

SEQ ID NO: 1146715 - DNA, 15 bp, Homo sapiens
aatttttttatttta

SEQ ID NO: 1146716 - DNA, 15 bp, Homo sapiens
taatttttttatttt

SEQ ID NO: 1146717 - DNA, 15 bp, Homo sapiens
ctaatttttttattt

SEQ ID NO: 1146718 - DNA, 15 bp, Homo sapiens
cctaatttttttatt

SEQ ID NO: 1146719 - DNA, 15 bp, Homo sapiens
gcctaatttttttat

SEQ ID NO: 1146720 - DNA, 15 bp, Homo sapiens
ggcctaattttttta

SEQ ID NO: 1146721 - DNA, 15 bp, Homo sapiens
tggcctaattttttt

SEQ ID NO: 1146722 - DNA, 15 bp, Homo sapiens
ctggcctaatttttt

SEQ ID NO: 1146723 - DNA, 15 bp, Homo sapiens
gctggcctaattttt

SEQ ID NO: 1146724 - DNA, 15 bp, Homo sapiens
tgctggcctaatttt

SEQ ID NO: 1146725 - DNA, 15 bp, Homo sapiens
atgctggcctaattt

SEQ ID NO: 1146726 - DNA, 15 bp, Homo sapiens
catgctggcctaatt

SEQ ID NO: 1146727 - DNA, 15 bp, Homo sapiens
ccatgctggcctaat

SEQ ID NO: 1146728 - DNA, 15 bp, Homo sapiens
accatgctggcctaa

SEQ ID NO: 1146729 - DNA, 15 bp, Homo sapiens
caccatgctggccta

SEQ ID NO: 1146730 - DNA, 15 bp, Homo sapiens
ccaccatgctggcct

SEQ ID NO: 1146731 - DNA, 15 bp, Homo sapiens
gccaccatgctggcc

SEQ ID NO: 1146732 - DNA, 15 bp, Homo sapiens
tgccaccatgctggc

SEQ ID NO: 1146733 - DNA, 15 bp, Homo sapiens
acctgccaccatgct

SEQ ID NO: 1146734 - DNA, 15 bp, Homo sapiens
agattacaggcacct

SEQ ID NO: 1146735 - DNA, 15 bp, Homo sapiens
gagattacaggcacc

SEQ ID NO: 1146736 - DNA, 15 bp, Homo sapiens
tgagattacaggcac

SEQ ID NO: 1146737 - DNA, 15 bp, Homo sapiens
atggcatgatctcgg

SEQ ID NO: 1146738 - DNA, 15 bp, Homo sapiens
aatggcatgatctcg

SEQ ID NO: 1146739 - DNA, 15 bp, Homo sapiens
caatggcatgatctc

SEQ ID NO: 1146740 - DNA, 15 bp, Homo sapiens
ggccaggctggagtg

SEQ ID NO: 1146741 - DNA, 15 bp, Homo sapiens
tggccaggctggagt

SEQ ID NO: 1146742 - DNA, 15 bp, Homo sapiens
ttggccaggctggag

SEQ ID NO: 1146743 - DNA, 15 bp, Homo sapiens
cttggccaggctgga

SEQ ID NO: 1146744 - DNA, 15 bp, Homo sapiens
ctcttggccaggctg

SEQ ID NO: 1146745 - DNA, 15 bp, Homo sapiens
gctcttggccaggct

SEQ ID NO: 1146746 - DNA, 15 bp, Homo sapiens
tgctcttggccaggc

SEQ ID NO: 1146747 - DNA, 15 bp, Homo sapiens
ttgctcttggccagg

SEQ ID NO: 1146748 - DNA, 15 bp, Homo sapiens
tttgctcttggccag

SEQ ID NO: 1146749 - DNA, 15 bp, Homo sapiens
ttttgctcttggcca

SEQ ID NO: 1146750 - DNA, 15 bp, Homo sapiens
attttgctcttggcc

SEQ ID NO: 1146751 - DNA, 15 bp, Homo sapiens
aattttgctcttggc

SEQ ID NO: 1146752 - DNA, 15 bp, Homo sapiens
gaattttgctcttgg

SEQ ID NO: 1146753 - DNA, 15 bp, Homo sapiens
ggaattttgctcttg

SEQ ID NO: 1146754 - DNA, 15 bp, Homo sapiens
tggaattttgctctt

SEQ ID NO: 1146755 - DNA, 15 bp, Homo sapiens
atggaattttgctct

SEQ ID NO: 1146756 - DNA, 15 bp, Homo sapiens
gatggaattttgctc

SEQ ID NO: 1146757 - DNA, 15 bp, Homo sapiens
agatggaattttgct

SEQ ID NO: 1146758 - DNA, 15 bp, Homo sapiens
gagatggaattttgc

SEQ ID NO: 1146759 - DNA, 15 bp, Homo sapiens
tgagatggaattttg

SEQ ID NO: 1146760 - DNA, 15 bp, Homo sapiens
ttgagatggaatttt

SEQ ID NO: 1146761 - DNA, 15 bp, Homo sapiens
tttgagatggaattt

SEQ ID NO: 1146762 - DNA, 15 bp, Homo sapiens
ttttgagatggaatt

SEQ ID NO: 1146763 - DNA, 15 bp, Homo sapiens
tttttgagatggaat

SEQ ID NO: 1146764 - DNA, 15 bp, Homo sapiens
gtttttgagatggaa

SEQ ID NO: 1146765 - DNA, 15 bp, Homo sapiens
ttgtttttgtttgtt

SEQ ID NO: 1146766 - DNA, 15 bp, Homo sapiens
tttgtttttgtttgt

SEQ ID NO: 1146767 - DNA, 15 bp, Homo sapiens
ttttgtttttgtttg

SEQ ID NO: 1146768 - DNA, 15 bp, Homo sapiens
tgtttgttttttgtt

SEQ ID NO: 1146769 - DNA, 15 bp, Homo sapiens
ttgtttgttttttgt

SEQ ID NO: 1146770 - DNA, 15 bp, Homo sapiens
tttttgttttgtttg

SEQ ID NO: 1146771 - DNA, 15 bp, Homo sapiens
cttgttttttgtttt

SEQ ID NO: 1146772 - DNA, 15 bp, Homo sapiens
acttgttttttgttt

SEQ ID NO: 1146773 - DNA, 15 bp, Homo sapiens
tacttgttttttgtt

SEQ ID NO: 1146774 - DNA, 15 bp, Homo sapiens
gtacttgttttttgt

SEQ ID NO: 1146775 - DNA, 15 bp, Homo sapiens
agtacttgttttttg

SEQ ID NO: 1146776 - DNA, 15 bp, Homo sapiens
gagtacttgtttttt

SEQ ID NO: 1146777 - DNA, 15 bp, Homo sapiens
agagtacttgttttt

SEQ ID NO: 1146778 - DNA, 15 bp, Homo sapiens
aagagtacttgtttt

SEQ ID NO: 1146779 - DNA, 15 bp, Homo sapiens
caagagtacttgttt

SEQ ID NO: 1146780 - DNA, 15 bp, Homo sapiens
tcaagagtacttgtt

SEQ ID NO: 1146781 - DNA, 15 bp, Homo sapiens
ttcaagagtacttgt

SEQ ID NO: 1146782 - DNA, 15 bp, Homo sapiens
attcaagagtacttg

SEQ ID NO: 1146783 - DNA, 15 bp, Homo sapiens
tattcaagagtactt

SEQ ID NO: 1146784 - DNA, 15 bp, Homo sapiens
gtattcaagagtact

SEQ ID NO: 1146785 - DNA, 15 bp, Homo sapiens
tgtattcaagagtac

SEQ ID NO: 1146786 - DNA, 15 bp, Homo sapiens
ttgtattcaagagta

SEQ ID NO: 1146787 - DNA, 15 bp, Homo sapiens
cttgtattcaagagt

SEQ ID NO: 1146788 - DNA, 15 bp, Homo sapiens
acttgtattcaagag

SEQ ID NO: 1146789 - DNA, 15 bp, Homo sapiens
aacttgtattcaaga

SEQ ID NO: 1146790 - DNA, 15 bp, Homo sapiens
aaacttgtattcaag

SEQ ID NO: 1146791 - DNA, 15 bp, Homo sapiens
gaaacttgtattcaa

SEQ ID NO: 1146792 - DNA, 15 bp, Homo sapiens
agaaacttgtattca

SEQ ID NO: 1146793 - DNA, 15 bp, Homo sapiens
aagaaacttgtattc

SEQ ID NO: 1146794 - DNA, 15 bp, Homo sapiens
taagaaacttgtatt

SEQ ID NO: 1146795 - DNA, 15 bp, Homo sapiens
ataagaaacttgtat

SEQ ID NO: 1146796 - DNA, 15 bp, Homo sapiens
tataagaaacttgta

SEQ ID NO: 1146797 - DNA, 15 bp, Homo sapiens
ttataagaaacttgt

SEQ ID NO: 1146798 - DNA, 15 bp, Homo sapiens
attataagaaacttg

SEQ ID NO: 1146799 - DNA, 15 bp, Homo sapiens
aattataagaaactt

SEQ ID NO: 1146800 - DNA, 15 bp, Homo sapiens
aaattataagaaact

SEQ ID NO: 1146801 - DNA, 15 bp, Homo sapiens
aaaattataagaaac

SEQ ID NO: 1146802 - DNA, 15 bp, Homo sapiens
taaaattataagaaa

SEQ ID NO: 1146803 - DNA, 15 bp, Homo sapiens
ttaaaattataagaa

SEQ ID NO: 1146804 - DNA, 15 bp, Homo sapiens
cttaaaattataaga

SEQ ID NO: 1146805 - DNA, 15 bp, Homo sapiens
tcttaaaattataag

SEQ ID NO: 1146806 - DNA, 15 bp, Homo sapiens
atcttaaaattataa

SEQ ID NO: 1146807 - DNA, 15 bp, Homo sapiens
aatcttaaaattata

SEQ ID NO: 1146808 - DNA, 15 bp, Homo sapiens
caatcttaaaattat

SEQ ID NO: 1146809 - DNA, 15 bp, Homo sapiens
acaatcttaaaatta

SEQ ID NO: 1146810 - DNA, 15 bp, Homo sapiens
tacaatcttaaaatt

SEQ ID NO: 1146811 - DNA, 15 bp, Homo sapiens
atacaatcttaaaat

SEQ ID NO: 1146812 - DNA, 15 bp, Homo sapiens
aatacaatcttaaaa

SEQ ID NO: 1146813 - DNA, 15 bp, Homo sapiens
taatacaatcttaaa

SEQ ID NO: 1146814 - DNA, 15 bp, Homo sapiens
ataatacaatcttaa

SEQ ID NO: 1146815 - DNA, 15 bp, Homo sapiens
tataatacaatctta

SEQ ID NO: 1146816 - DNA, 15 bp, Homo sapiens
ctataatacaatctt

SEQ ID NO: 1146817 - DNA, 15 bp, Homo sapiens
gctataatacaatct

SEQ ID NO: 1146818 - DNA, 15 bp, Homo sapiens
tgctataatacaatc

SEQ ID NO: 1146819 - DNA, 15 bp, Homo sapiens
gtgctataatacaat

SEQ ID NO: 1146820 - DNA, 15 bp, Homo sapiens
agtgctataatacaa

SEQ ID NO: 1146821 - DNA, 15 bp, Homo sapiens
cagtgctataataca

SEQ ID NO: 1146822 - DNA, 15 bp, Homo sapiens
tcagtgctataatac

SEQ ID NO: 1146823 - DNA, 15 bp, Homo sapiens
ctcagtgctataata

SEQ ID NO: 1146824 - DNA, 15 bp, Homo sapiens
actcagtgctataat

SEQ ID NO: 1146825 - DNA, 15 bp, Homo sapiens
tactcagtgctataa

SEQ ID NO: 1146826 - DNA, 15 bp, Homo sapiens
ttactcagtgctata

SEQ ID NO: 1146827 - DNA, 15 bp, Homo sapiens
tttactcagtgctat

SEQ ID NO: 1146828 - DNA, 15 bp, Homo sapiens
gtttactcagtgcta

SEQ ID NO: 1146829 - DNA, 15 bp, Homo sapiens
tgtttactcagtgct

SEQ ID NO: 1146830 - DNA, 15 bp, Homo sapiens
ttgtttactcagtgc

SEQ ID NO: 1146831 - DNA, 15 bp, Homo sapiens
attgtttactcagtg

SEQ ID NO: 1146832 - DNA, 15 bp, Homo sapiens
aattgtttactcagt

SEQ ID NO: 1146833 - DNA, 15 bp, Homo sapiens
aaattgtttactcag

SEQ ID NO: 1146834 - DNA, 15 bp, Homo sapiens
gaaattgtttactca

SEQ ID NO: 1146835 - DNA, 15 bp, Homo sapiens
tgaaattgtttactc

SEQ ID NO: 1146836 - DNA, 15 bp, Homo sapiens
ctgaaattgtttact

SEQ ID NO: 1146837 - DNA, 15 bp, Homo sapiens
tctgaaattgtttac

SEQ ID NO: 1146838 - DNA, 15 bp, Homo sapiens
ttctgaaattgttta

SEQ ID NO: 1146839 - DNA, 15 bp, Homo sapiens
gttctgaaattgttt

SEQ ID NO: 1146840 - DNA, 15 bp, Homo sapiens
agttctgaaattgtt

SEQ ID NO: 1146841 - DNA, 15 bp, Homo sapiens
gagttctgaaattgt

SEQ ID NO: 1146842 - DNA, 15 bp, Homo sapiens
agagttctgaaattg

SEQ ID NO: 1146843 - DNA, 15 bp, Homo sapiens
tagagttctgaaatt

SEQ ID NO: 1146844 - DNA, 15 bp, Homo sapiens
ttagagttctgaaat

SEQ ID NO: 1146845 - DNA, 15 bp, Homo sapiens
attagagttctgaaa

SEQ ID NO: 1146846 - DNA, 15 bp, Homo sapiens
aattagagttctgaa

SEQ ID NO: 1146847 - DNA, 15 bp, Homo sapiens
aaattagagttctga

SEQ ID NO: 1146848 - DNA, 15 bp, Homo sapiens
aaaattagagttctg

SEQ ID NO: 1146849 - DNA, 15 bp, Homo sapiens
aaaaattagagttct

SEQ ID NO: 1146850 - DNA, 15 bp, Homo sapiens
taaaaattagagttc

SEQ ID NO: 1146851 - DNA, 15 bp, Homo sapiens
ttaaaaattagagtt

SEQ ID NO: 1146852 - DNA, 15 bp, Homo sapiens
tttaaaaattagagt

SEQ ID NO: 1146853 - DNA, 15 bp, Homo sapiens
ttttaaaaattagag

SEQ ID NO: 1146854 - DNA, 15 bp, Homo sapiens
actttttaaaaatta

SEQ ID NO: 1146855 - DNA, 15 bp, Homo sapiens
gactttttaaaaatt

SEQ ID NO: 1146856 - DNA, 15 bp, Homo sapiens
tgactttttaaaaat

SEQ ID NO: 1146857 - DNA, 15 bp, Homo sapiens
atgactttttaaaaa

SEQ ID NO: 1146858 - DNA, 15 bp, Homo sapiens
tatgactttttaaaa

SEQ ID NO: 1146859 - DNA, 15 bp, Homo sapiens
ttatgactttttaaa

SEQ ID NO: 1146860 - DNA, 15 bp, Homo sapiens
tttatgactttttaa

SEQ ID NO: 1146861 - DNA, 15 bp, Homo sapiens
ttttatgacttttta

SEQ ID NO: 1146862 - DNA, 15 bp, Homo sapiens
attttatgacttttt

SEQ ID NO: 1146863 - DNA, 15 bp, Homo sapiens
aattttatgactttt

SEQ ID NO: 1146864 - DNA, 15 bp, Homo sapiens
caattttatgacttt

SEQ ID NO: 1146865 - DNA, 15 bp, Homo sapiens
acaattttatgactt

SEQ ID NO: 1146866 - DNA, 15 bp, Homo sapiens
aacaattttatgact

SEQ ID NO: 1146867 - DNA, 15 bp, Homo sapiens
taacaattttatgac

SEQ ID NO: 1146868 - DNA, 15 bp, Homo sapiens
ttaacaattttatga

SEQ ID NO: 1146869 - DNA, 15 bp, Homo sapiens
gttaacaattttatg

SEQ ID NO: 1146870 - DNA, 15 bp, Homo sapiens
agttaacaattttat

SEQ ID NO: 1146871 - DNA, 15 bp, Homo sapiens
gagttaacaatttta

SEQ ID NO: 1146872 - DNA, 15 bp, Homo sapiens
tgagttaacaatttt

SEQ ID NO: 1146873 - DNA, 15 bp, Homo sapiens
ttgagttaacaattt

SEQ ID NO: 1146874 - DNA, 15 bp, Homo sapiens
gttgagttaacaatt

SEQ ID NO: 1146875 - DNA, 15 bp, Homo sapiens
tgttgagttaacaat

SEQ ID NO: 1146876 - DNA, 15 bp, Homo sapiens
atgttgagttaacaa

SEQ ID NO: 1146877 - DNA, 15 bp, Homo sapiens
gatgttgagttaaca

SEQ ID NO: 1146878 - DNA, 15 bp, Homo sapiens
tgatgttgagttaac

SEQ ID NO: 1146879 - DNA, 15 bp, Homo sapiens
ttgatgttgagttaa

SEQ ID NO: 1146880 - DNA, 15 bp, Homo sapiens
cttgatgttgagtta

SEQ ID NO: 1146881 - DNA, 15 bp, Homo sapiens
gcttgatgttgagtt

SEQ ID NO: 1146882 - DNA, 15 bp, Homo sapiens
tgcttgatgttgagt

SEQ ID NO: 1146883 - DNA, 15 bp, Homo sapiens
ttgcttgatgttgag

SEQ ID NO: 1146884 - DNA, 15 bp, Homo sapiens
tttgcttgatgttga

SEQ ID NO: 1146885 - DNA, 15 bp, Homo sapiens
ttttgcttgatgttg

SEQ ID NO: 1146886 - DNA, 15 bp, Homo sapiens
gttttgcttgatgtt

SEQ ID NO: 1146887 - DNA, 15 bp, Homo sapiens
tgttttgcttgatgt

SEQ ID NO: 1146888 - DNA, 15 bp, Homo sapiens
ttgttttgcttgatg

SEQ ID NO: 1146889 - DNA, 15 bp, Homo sapiens
gttgttttgcttgat

SEQ ID NO: 1146890 - DNA, 15 bp, Homo sapiens
agttgttttgcttga

SEQ ID NO: 1146891 - DNA, 15 bp, Homo sapiens
tagttgttttgcttg

SEQ ID NO: 1146892 - DNA, 15 bp, Homo sapiens
ttagttgttttgctt

SEQ ID NO: 1146893 - DNA, 15 bp, Homo sapiens
attagttgttttgct

SEQ ID NO: 1146894 - DNA, 15 bp, Homo sapiens
aattagttgttttgc

SEQ ID NO: 1146895 - DNA, 15 bp, Homo sapiens
taattagttgttttg

SEQ ID NO: 1146896 - DNA, 15 bp, Homo sapiens
gtaattagttgtttt

SEQ ID NO: 1146897 - DNA, 15 bp, Homo sapiens
tgtaattagttgttt

SEQ ID NO: 1146898 - DNA, 15 bp, Homo sapiens
atgtaattagttgtt

SEQ ID NO: 1146899 - DNA, 15 bp, Homo sapiens
aatgtaattagttgt

SEQ ID NO: 1146900 - DNA, 15 bp, Homo sapiens
caatgtaattagttg

SEQ ID NO: 1146901 - DNA, 15 bp, Homo sapiens
ccaatgtaattagtt

SEQ ID NO: 1146902 - DNA, 15 bp, Homo sapiens
tccaatgtaattagt

SEQ ID NO: 1146903 - DNA, 15 bp, Homo sapiens
gtccaatgtaattag

SEQ ID NO: 1146904 - DNA, 15 bp, Homo sapiens
agtccaatgtaatta

SEQ ID NO: 1146905 - DNA, 15 bp, Homo sapiens
tagtccaatgtaatt

SEQ ID NO: 1146906 - DNA, 15 bp, Homo sapiens
ttagtccaatgtaat

SEQ ID NO: 1146907 - DNA, 15 bp, Homo sapiens
attagtccaatgtaa

SEQ ID NO: 1146908 - DNA, 15 bp, Homo sapiens
cattagtccaatgta

SEQ ID NO: 1146909 - DNA, 15 bp, Homo sapiens
acattagtccaatgt

SEQ ID NO: 1146910 - DNA, 15 bp, Homo sapiens
tacattagtccaatg

SEQ ID NO: 1146911 - DNA, 15 bp, Homo sapiens
ttacattagtccaat

SEQ ID NO: 1146912 - DNA, 15 bp, Homo sapiens
attacattagtccaa

SEQ ID NO: 1146913 - DNA, 15 bp, Homo sapiens
aattacattagtcca

SEQ ID NO: 1146914 - DNA, 15 bp, Homo sapiens
aaattacattagtcc

SEQ ID NO: 1146915 - DNA, 15 bp, Homo sapiens
aaaattacattagtc

SEQ ID NO: 1146916 - DNA, 15 bp, Homo sapiens
taaaattacattagt

SEQ ID NO: 1146917 - DNA, 15 bp, Homo sapiens
ttaaaattacattag

SEQ ID NO: 1146918 - DNA, 15 bp, Homo sapiens
attaaaattacatta

SEQ ID NO: 1146919 - DNA, 15 bp, Homo sapiens
tattaaaattacatt

SEQ ID NO: 1146920 - DNA, 15 bp, Homo sapiens
ttattaaaattacat

SEQ ID NO: 1146921 - DNA, 15 bp, Homo sapiens
gttattaaaattaca

SEQ ID NO: 1146922 - DNA, 15 bp, Homo sapiens
agttattaaaattac

SEQ ID NO: 1146923 - DNA, 15 bp, Homo sapiens
aagttattaaaatta

SEQ ID NO: 1146924 - DNA, 15 bp, Homo sapiens
aaagttattaaaatt

SEQ ID NO: 1146925 - DNA, 15 bp, Homo sapiens
aaaagttattaaaat

SEQ ID NO: 1146926 - DNA, 15 bp, Homo sapiens
aaaaagttattaaaa

SEQ ID NO: 1146927 - DNA, 15 bp, Homo sapiens
aaaaaagttattaaa

SEQ ID NO: 1146928 - DNA, 15 bp, Homo sapiens
caaaaaagttattaa

SEQ ID NO: 1146929 - DNA, 15 bp, Homo sapiens
acaaaaaagttatta

SEQ ID NO: 1146930 - DNA, 15 bp, Homo sapiens
aacaaaaaagttatt

SEQ ID NO: 1146931 - DNA, 15 bp, Homo sapiens
aaacaaaaaagttat

SEQ ID NO: 1146932 - DNA, 15 bp, Homo sapiens
taaacaaaaaagtta

SEQ ID NO: 1146933 - DNA, 15 bp, Homo sapiens
ttaaacaaaaaagtt

SEQ ID NO: 1146934 - DNA, 15 bp, Homo sapiens
tttaaacaaaaaagt

SEQ ID NO: 1146935 - DNA, 15 bp, Homo sapiens
ttttaaacaaaaaag

SEQ ID NO: 1146936 - DNA, 15 bp, Homo sapiens
attttaaacaaaaaa

SEQ ID NO: 1146937 - DNA, 15 bp, Homo sapiens
tattttaaacaaaaa

SEQ ID NO: 1146938 - DNA, 15 bp, Homo sapiens
atattttaaacaaaa

SEQ ID NO: 1146939 - DNA, 15 bp, Homo sapiens
aatattttaaacaaa

SEQ ID NO: 1146940 - DNA, 15 bp, Homo sapiens
caatattttaaacaa

SEQ ID NO: 1146941 - DNA, 15 bp, Homo sapiens
gcaatattttaaaca

SEQ ID NO: 1146942 - DNA, 15 bp, Homo sapiens
agcaatattttaaac

SEQ ID NO: 1146943 - DNA, 15 bp, Homo sapiens
cagcaatattttaaa

SEQ ID NO: 1146944 - DNA, 15 bp, Homo sapiens
tcagcaatattttaa

SEQ ID NO: 1146945 - DNA, 15 bp, Homo sapiens
atcagcaatatttta

SEQ ID NO: 1146946 - DNA, 15 bp, Homo sapiens
aatcagcaatatttt

SEQ ID NO: 1146947 - DNA, 15 bp, Homo sapiens
gaatcagcaatattt

SEQ ID NO: 1146948 - DNA, 15 bp, Homo sapiens
agaatcagcaatatt

SEQ ID NO: 1146949 - DNA, 15 bp, Homo sapiens
aagaatcagcaatat

SEQ ID NO: 1146950 - DNA, 15 bp, Homo sapiens
aaagaatcagcaata

SEQ ID NO: 1146951 - DNA, 15 bp, Homo sapiens
aaaagaatcagcaat

SEQ ID NO: 1146952 - DNA, 15 bp, Homo sapiens
aaaaagaatcagcaa

SEQ ID NO: 1146953 - DNA, 15 bp, Homo sapiens
taaaaagaatcagca

SEQ ID NO: 1146954 - DNA, 15 bp, Homo sapiens
ataaaaagaatcagc

SEQ ID NO: 1146955 - DNA, 15 bp, Homo sapiens
cataaaaagaatcag

SEQ ID NO: 1146956 - DNA, 15 bp, Homo sapiens
acataaaaagaatca

SEQ ID NO: 1146957 - DNA, 15 bp, Homo sapiens
aacataaaaagaatc

SEQ ID NO: 1146958 - DNA, 15 bp, Homo sapiens
aaacataaaaagaat

SEQ ID NO: 1146959 - DNA, 15 bp, Homo sapiens
aaaacataaaaagaa

SEQ ID NO: 1146960 - DNA, 15 bp, Homo sapiens
caaaacataaaaaga

SEQ ID NO: 1146961 - DNA, 15 bp, Homo sapiens
gcaaaacataaaaag

SEQ ID NO: 1146962 - DNA, 15 bp, Homo sapiens
agcaaaacataaaaa

SEQ ID NO: 1146963 - DNA, 15 bp, Homo sapiens
aagcaaaacataaaa

SEQ ID NO: 1146964 - DNA, 15 bp, Homo sapiens
aaagcaaaacataaa

SEQ ID NO: 1146965 - DNA, 15 bp, Homo sapiens
taaagcaaaacataa

SEQ ID NO: 1146966 - DNA, 15 bp, Homo sapiens
gtaaagcaaaacata

SEQ ID NO: 1146967 - DNA, 15 bp, Homo sapiens
tgtaaagcaaaacat

SEQ ID NO: 1146968 - DNA, 15 bp, Homo sapiens
ctgtaaagcaaaaca

SEQ ID NO: 1146969 - DNA, 15 bp, Homo sapiens
tctgtaaagcaaaac

SEQ ID NO: 1146970 - DNA, 15 bp, Homo sapiens
ctctgtaaagcaaaa

SEQ ID NO: 1146971 - DNA, 15 bp, Homo sapiens
actctgtaaagcaaa

SEQ ID NO: 1146972 - DNA, 15 bp, Homo sapiens
aactctgtaaagcaa

SEQ ID NO: 1146973 - DNA, 15 bp, Homo sapiens
taactctgtaaagca

SEQ ID NO: 1146974 - DNA, 15 bp, Homo sapiens
ttaactctgtaaagc

SEQ ID NO: 1146975 - DNA, 15 bp, Homo sapiens
cttaactctgtaaag

SEQ ID NO: 1146976 - DNA, 15 bp, Homo sapiens
ccttaactctgtaaa

SEQ ID NO: 1146977 - DNA, 15 bp, Homo sapiens
tccttaactctgtaa

SEQ ID NO: 1146978 - DNA, 15 bp, Homo sapiens
ttccttaactctgta

SEQ ID NO: 1146979 - DNA, 15 bp, Homo sapiens
tttccttaactctgt

SEQ ID NO: 1146980 - DNA, 15 bp, Homo sapiens
ttttccttaactctg

SEQ ID NO: 1146981 - DNA, 15 bp, Homo sapiens
attttccttaactct

SEQ ID NO: 1146982 - DNA, 15 bp, Homo sapiens
cattttccttaactc

SEQ ID NO: 1146983 - DNA, 15 bp, Homo sapiens
acattttccttaact

SEQ ID NO: 1146984 - DNA, 15 bp, Homo sapiens
aacattttccttaac

SEQ ID NO: 1146985 - DNA, 15 bp, Homo sapiens
aaacattttccttaa

SEQ ID NO: 1146986 - DNA, 15 bp, Homo sapiens
caaacattttcctta

SEQ ID NO: 1146987 - DNA, 15 bp, Homo sapiens
acaaacattttcctt

SEQ ID NO: 1146988 - DNA, 15 bp, Homo sapiens
aacaaacattttcct

SEQ ID NO: 1146989 - DNA, 15 bp, Homo sapiens
gaacaaacattttcc

SEQ ID NO: 1146990 - DNA, 15 bp, Homo sapiens
agaacaaacattttc

SEQ ID NO: 1146991 - DNA, 15 bp, Homo sapiens
cagaacaaacatttt

SEQ ID NO: 1146992 - DNA, 15 bp, Homo sapiens
acagaacaaacattt

SEQ ID NO: 1146993 - DNA, 15 bp, Homo sapiens
aacagaacaaacatt

SEQ ID NO: 1146994 - DNA, 15 bp, Homo sapiens
taacagaacaaacat

SEQ ID NO: 1146995 - DNA, 15 bp, Homo sapiens
ttaacagaacaaaca

SEQ ID NO: 1146996 - DNA, 15 bp, Homo sapiens
cttaacagaacaaac

SEQ ID NO: 1146997 - DNA, 15 bp, Homo sapiens
gcttaacagaacaaa

SEQ ID NO: 1146998 - DNA, 15 bp, Homo sapiens
agcttaacagaacaa

SEQ ID NO: 1146999 - DNA, 15 bp, Homo sapiens
aagcttaacagaaca

SEQ ID NO: 1147000 - DNA, 15 bp, Homo sapiens
aaagcttaacagaac

SEQ ID NO: 1147001 - DNA, 15 bp, Homo sapiens
taaagcttaacagaa

SEQ ID NO: 1147002 - DNA, 15 bp, Homo sapiens
gtaaagcttaacaga

SEQ ID NO: 1147003 - DNA, 15 bp, Homo sapiens
tgtaaagcttaacag

SEQ ID NO: 1147004 - DNA, 15 bp, Homo sapiens
ctgtaaagcttaaca

SEQ ID NO: 1147005 - DNA, 15 bp, Homo sapiens
tctgtaaagcttaac

SEQ ID NO: 1147006 - DNA, 15 bp, Homo sapiens
ttctgtaaagcttaa

SEQ ID NO: 1147007 - DNA, 15 bp, Homo sapiens
tttctgtaaagctta

SEQ ID NO: 1147008 - DNA, 15 bp, Homo sapiens
atttctgtaaagctt

SEQ ID NO: 1147009 - DNA, 15 bp, Homo sapiens
catttctgtaaagct

SEQ ID NO: 1147010 - DNA, 15 bp, Homo sapiens
ccatttctgtaaagc

SEQ ID NO: 1147011 - DNA, 15 bp, Homo sapiens
cccatttctgtaaag

SEQ ID NO: 1147012 - DNA, 15 bp, Homo sapiens
acccatttctgtaaa

SEQ ID NO: 1147013 - DNA, 15 bp, Homo sapiens
ttacccatttctgta

SEQ ID NO: 1147014 - DNA, 15 bp, Homo sapiens
tttacccatttctgt

SEQ ID NO: 1147015 - DNA, 15 bp, Homo sapiens
ctttacccatttctg

SEQ ID NO: 1147016 - DNA, 15 bp, Homo sapiens
actttacccatttct

SEQ ID NO: 1147017 - DNA, 15 bp, Homo sapiens
tactttacccatttc

SEQ ID NO: 1147018 - DNA, 15 bp, Homo sapiens
atactttacccattt

SEQ ID NO: 1147019 - DNA, 15 bp, Homo sapiens
tatactttacccatt

SEQ ID NO: 1147020 - DNA, 15 bp, Homo sapiens
gtatactttacccat

SEQ ID NO: 1147021 - DNA, 15 bp, Homo sapiens
agtatactttaccca

SEQ ID NO: 1147022 - DNA, 15 bp, Homo sapiens
aagtatactttaccc

SEQ ID NO: 1147023 - DNA, 15 bp, Homo sapiens
aaagtatactttacc

SEQ ID NO: 1147024 - DNA, 15 bp, Homo sapiens
aaaagtatactttac

SEQ ID NO: 1147025 - DNA, 15 bp, Homo sapiens
aaaaagtatacttta

SEQ ID NO: 1147026 - DNA, 15 bp, Homo sapiens
aaaaaagtatacttt

SEQ ID NO: 1147027 - DNA, 15 bp, Homo sapiens
caaaaaagtatactt

SEQ ID NO: 1147028 - DNA, 15 bp, Homo sapiens
tcaaaaaagtatact

SEQ ID NO: 1147029 - DNA, 15 bp, Homo sapiens
ttcaaaaaagtatac

SEQ ID NO: 1147030 - DNA, 15 bp, Homo sapiens
gttcaaaaaagtata

SEQ ID NO: 1147031 - DNA, 15 bp, Homo sapiens
tgttcaaaaaagtat

SEQ ID NO: 1147032 - DNA, 15 bp, Homo sapiens
ttgttcaaaaaagta

SEQ ID NO: 1147033 - DNA, 15 bp, Homo sapiens
tttgttcaaaaaagt

SEQ ID NO: 1147034 - DNA, 15 bp, Homo sapiens
ttttgttcaaaaaag

SEQ ID NO: 1147035 - DNA, 15 bp, Homo sapiens
attttgttcaaaaaa

SEQ ID NO: 1147036 - DNA, 15 bp, Homo sapiens
aattttgttcaaaaa

SEQ ID NO: 1147037 - DNA, 15 bp, Homo sapiens
caattttgttcaaaa

SEQ ID NO: 1147038 - DNA, 15 bp, Homo sapiens
tcaattttgttcaaa

SEQ ID NO: 1147039 - DNA, 15 bp, Homo sapiens
ttcaattttgttcaa

SEQ ID NO: 1147040 - DNA, 15 bp, Homo sapiens
tttcaattttgttca

SEQ ID NO: 1147041 - DNA, 15 bp, Homo sapiens
gtttcaattttgttc

SEQ ID NO: 1147042 - DNA, 15 bp, Homo sapiens
tgtttcaattttgtt

SEQ ID NO: 1147043 - DNA, 15 bp, Homo sapiens
atgtttcaattttgt

SEQ ID NO: 1147044 - DNA, 15 bp, Homo sapiens
aatgtttcaattttg

SEQ ID NO: 1147045 - DNA, 15 bp, Homo sapiens
gaatgtttcaatttt

SEQ ID NO: 1147046 - DNA, 15 bp, Homo sapiens
tgaatgtttcaattt

SEQ ID NO: 1147047 - DNA, 15 bp, Homo sapiens
gtgaatgtttcaatt

SEQ ID NO: 1147048 - DNA, 15 bp, Homo sapiens
agtgaatgtttcaat

SEQ ID NO: 1147049 - DNA, 15 bp, Homo sapiens
aagtgaatgtttcaa

SEQ ID NO: 1147050 - DNA, 15 bp, Homo sapiens
aaagtgaatgtttca

SEQ ID NO: 1147051 - DNA, 15 bp, Homo sapiens
aaaagtgaatgtttc

SEQ ID NO: 1147052 - DNA, 15 bp, Homo sapiens
gaaaagtgaatgttt

SEQ ID NO: 1147053 - DNA, 15 bp, Homo sapiens
agaaaagtgaatgtt

SEQ ID NO: 1147054 - DNA, 15 bp, Homo sapiens
gagaaaagtgaatgt

SEQ ID NO: 1147055 - DNA, 15 bp, Homo sapiens
agagaaaagtgaatg

SEQ ID NO: 1147056 - DNA, 15 bp, Homo sapiens
gagagaaaagtgaat

SEQ ID NO: 1147057 - DNA, 15 bp, Homo sapiens
agagagaaaagtgaa

SEQ ID NO: 1147058 - DNA, 15 bp, Homo sapiens
tagagagaaaagtga

SEQ ID NO: 1147059 - DNA, 15 bp, Homo sapiens
gtagagagaaaagtg

SEQ ID NO: 1147060 - DNA, 15 bp, Homo sapiens
ggtagagagaaaagt

SEQ ID NO: 1147061 - DNA, 15 bp, Homo sapiens
aggtagagagaaaag

SEQ ID NO: 1147062 - DNA, 15 bp, Homo sapiens
caggtagagagaaaa

SEQ ID NO: 1147063 - DNA, 15 bp, Homo sapiens
tcaggtagagagaaa

SEQ ID NO: 1147064 - DNA, 15 bp, Homo sapiens
atcaggtagagagaa

SEQ ID NO: 1147065 - DNA, 15 bp, Homo sapiens
aatcaggtagagaga

SEQ ID NO: 1147066 - DNA, 15 bp, Homo sapiens
caatcaggtagagag

SEQ ID NO: 1147067 - DNA, 15 bp, Homo sapiens
tcaatcaggtagaga

SEQ ID NO: 1147068 - DNA, 15 bp, Homo sapiens
atcaatcaggtagag

SEQ ID NO: 1147069 - DNA, 15 bp, Homo sapiens
gatcaatcaggtaga

SEQ ID NO: 1147070 - DNA, 15 bp, Homo sapiens
ggatcaatcaggtag

SEQ ID NO: 1147071 - DNA, 15 bp, Homo sapiens
aggatcaatcaggta

SEQ ID NO: 1147072 - DNA, 15 bp, Homo sapiens
caggatcaatcaggt

SEQ ID NO: 1147073 - DNA, 15 bp, Homo sapiens
tcaggatcaatcagg

SEQ ID NO: 1147074 - DNA, 15 bp, Homo sapiens
ttcaggatcaatcag

SEQ ID NO: 1147075 - DNA, 15 bp, Homo sapiens
attcaggatcaatca

SEQ ID NO: 1147076 - DNA, 15 bp, Homo sapiens
aattcaggatcaatc

SEQ ID NO: 1147077 - DNA, 15 bp, Homo sapiens
aaattcaggatcaat

SEQ ID NO: 1147078 - DNA, 15 bp, Homo sapiens
caaattcaggatcaa

SEQ ID NO: 1147079 - DNA, 15 bp, Homo sapiens
ccaaattcaggatca

SEQ ID NO: 1147080 - DNA, 15 bp, Homo sapiens
tccaaattcaggatc

SEQ ID NO: 1147081 - DNA, 15 bp, Homo sapiens
ttccaaattcaggat

SEQ ID NO: 1147082 - DNA, 15 bp, Homo sapiens
tttccaaattcagga

SEQ ID NO: 1147083 - DNA, 15 bp, Homo sapiens
gtttccaaattcagg

SEQ ID NO: 1147084 - DNA, 15 bp, Homo sapiens
agtttccaaattcag

SEQ ID NO: 1147085 - DNA, 15 bp, Homo sapiens
tagtttccaaattca

SEQ ID NO: 1147086 - DNA, 15 bp, Homo sapiens
atagtttccaaattc

SEQ ID NO: 1147087 - DNA, 15 bp, Homo sapiens
catagtttccaaatt

SEQ ID NO: 1147088 - DNA, 15 bp, Homo sapiens
tcatagtttccaaat

SEQ ID NO: 1147089 - DNA, 15 bp, Homo sapiens
ctcatagtttccaaa

SEQ ID NO: 1147090 - DNA, 15 bp, Homo sapiens
actcatagtttccaa

SEQ ID NO: 1147091 - DNA, 15 bp, Homo sapiens
tactcatagtttcca

SEQ ID NO: 1147092 - DNA, 15 bp, Homo sapiens
atactcatagtttcc

SEQ ID NO: 1147093 - DNA, 15 bp, Homo sapiens
aatactcatagtttc

SEQ ID NO: 1147094 - DNA, 15 bp, Homo sapiens
aaatactcatagttt

SEQ ID NO: 1147095 - DNA, 15 bp, Homo sapiens
gaaatactcatagtt

SEQ ID NO: 1147096 - DNA, 15 bp, Homo sapiens
agaaatactcatagt

SEQ ID NO: 1147097 - DNA, 15 bp, Homo sapiens
tagaaatactcatag

SEQ ID NO: 1147098 - DNA, 15 bp, Homo sapiens
atagaaatactcata

SEQ ID NO: 1147099 - DNA, 15 bp, Homo sapiens
aatagaaatactcat

SEQ ID NO: 1147100 - DNA, 15 bp, Homo sapiens
aaatagaaatactca

SEQ ID NO: 1147101 - DNA, 15 bp, Homo sapiens
aaaatagaaatactc

SEQ ID NO: 1147102 - DNA, 15 bp, Homo sapiens
taaaatagaaatact

SEQ ID NO: 1147103 - DNA, 15 bp, Homo sapiens
ataaaatagaaatac

SEQ ID NO: 1147104 - DNA, 15 bp, Homo sapiens
cataaaatagaaata

SEQ ID NO: 1147105 - DNA, 15 bp, Homo sapiens
ccataaaatagaaat

SEQ ID NO: 1147106 - DNA, 15 bp, Homo sapiens
gccataaaatagaaa

SEQ ID NO: 1147107 - DNA, 15 bp, Homo sapiens
tgccataaaatagaa

SEQ ID NO: 1147108 - DNA, 15 bp, Homo sapiens
ttgccataaaataga

SEQ ID NO: 1147109 - DNA, 15 bp, Homo sapiens
tttgccataaaatag

SEQ ID NO: 1147110 - DNA, 15 bp, Homo sapiens
ttttgccataaaata

SEQ ID NO: 1147111 - DNA, 15 bp, Homo sapiens
attttgccataaaat

SEQ ID NO: 1147112 - DNA, 15 bp, Homo sapiens
tattttgccataaaa

SEQ ID NO: 1147113 - DNA, 15 bp, Homo sapiens
ctattttgccataaa

SEQ ID NO: 1147114 - DNA, 15 bp, Homo sapiens
actattttgccataa

SEQ ID NO: 1147115 - DNA, 15 bp, Homo sapiens
aactattttgccata

SEQ ID NO: 1147116 - DNA, 15 bp, Homo sapiens
taactattttgccat

SEQ ID NO: 1147117 - DNA, 15 bp, Homo sapiens
ataactattttgcca

SEQ ID NO: 1147118 - DNA, 15 bp, Homo sapiens
aataactattttgcc

SEQ ID NO: 1147119 - DNA, 15 bp, Homo sapiens
aaataactattttgc

SEQ ID NO: 1147120 - DNA, 15 bp, Homo sapiens
caaataactattttg

SEQ ID NO: 1147121 - DNA, 15 bp, Homo sapiens
tcaaataactatttt

SEQ ID NO: 1147122 - DNA, 15 bp, Homo sapiens
ttcaaataactattt

SEQ ID NO: 1147123 - DNA, 15 bp, Homo sapiens
attcaaataactatt

SEQ ID NO: 1147124 - DNA, 15 bp, Homo sapiens
gattcaaataactat

SEQ ID NO: 1147125 - DNA, 15 bp, Homo sapiens
tgattcaaataacta

SEQ ID NO: 1147126 - DNA, 15 bp, Homo sapiens
ctgattcaaataact

SEQ ID NO: 1147127 - DNA, 15 bp, Homo sapiens
actgattcaaataac

SEQ ID NO: 1147128 - DNA, 15 bp, Homo sapiens
aactgattcaaataa

SEQ ID NO: 1147129 - DNA, 15 bp, Homo sapiens
gaactgattcaaata

SEQ ID NO: 1147130 - DNA, 15 bp, Homo sapiens
tgaactgattcaaat

SEQ ID NO: 1147131 - DNA, 15 bp, Homo sapiens
atgaactgattcaaa

SEQ ID NO: 1147132 - DNA, 15 bp, Homo sapiens
aatgaactgattcaa

SEQ ID NO: 1147133 - DNA, 15 bp, Homo sapiens
taatgaactgattca

SEQ ID NO: 1147134 - DNA, 15 bp, Homo sapiens
ttaatgaactgattc

SEQ ID NO: 1147135 - DNA, 15 bp, Homo sapiens
cttaatgaactgatt

SEQ ID NO: 1147136 - DNA, 15 bp, Homo sapiens
tcttaatgaactgat

SEQ ID NO: 1147137 - DNA, 15 bp, Homo sapiens
ttcttaatgaactga

SEQ ID NO: 1147138 - DNA, 15 bp, Homo sapiens
attcttaatgaactg

SEQ ID NO: 1147139 - DNA, 15 bp, Homo sapiens
gattcttaatgaact

SEQ ID NO: 1147140 - DNA, 15 bp, Homo sapiens
agattcttaatgaac

SEQ ID NO: 1147141 - DNA, 15 bp, Homo sapiens
cagattcttaatgaa

SEQ ID NO: 1147142 - DNA, 15 bp, Homo sapiens
acagattcttaatga

SEQ ID NO: 1147143 - DNA, 15 bp, Homo sapiens
aacagattcttaatg

SEQ ID NO: 1147144 - DNA, 15 bp, Homo sapiens
gaacagattcttaat

SEQ ID NO: 1147145 - DNA, 15 bp, Homo sapiens
ggaacagattcttaa

SEQ ID NO: 1147146 - DNA, 15 bp, Homo sapiens
gggaacagattctta

SEQ ID NO: 1147147 - DNA, 15 bp, Homo sapiens
agggaacagattctt

SEQ ID NO: 1147148 - DNA, 15 bp, Homo sapiens
aagggaacagattct

SEQ ID NO: 1147149 - DNA, 15 bp, Homo sapiens
aaagggaacagattc

SEQ ID NO: 1147150 - DNA, 15 bp, Homo sapiens
aaaagggaacagatt

SEQ ID NO: 1147151 - DNA, 15 bp, Homo sapiens
caaaagggaacagat

SEQ ID NO: 1147152 - DNA, 15 bp, Homo sapiens
gcaaaagggaacaga

SEQ ID NO: 1147153 - DNA, 15 bp, Homo sapiens
ggcaaaagggaacag

SEQ ID NO: 1147154 - DNA, 15 bp, Homo sapiens
tggcaaaagggaaca

SEQ ID NO: 1147155 - DNA, 15 bp, Homo sapiens
gtggcaaaagggaac

SEQ ID NO: 1147156 - DNA, 15 bp, Homo sapiens
tgtggcaaaagggaa

SEQ ID NO: 1147157 - DNA, 15 bp, Homo sapiens
ctgtggcaaaaggga

SEQ ID NO: 1147158 - DNA, 15 bp, Homo sapiens
tctgtggcaaaaggg

SEQ ID NO: 1147159 - DNA, 15 bp, Homo sapiens
ttctgtggcaaaagg

SEQ ID NO: 1147160 - DNA, 15 bp, Homo sapiens
gttctgtggcaaaag

SEQ ID NO: 1147161 - DNA, 15 bp, Homo sapiens
tgttctgtggcaaaa

SEQ ID NO: 1147162 - DNA, 15 bp, Homo sapiens
gtgttctgtggcaaa

SEQ ID NO: 1147163 - DNA, 15 bp, Homo sapiens
tgtgttctgtggcaa

SEQ ID NO: 1147164 - DNA, 15 bp, Homo sapiens
ctgtgttctgtggca

SEQ ID NO: 1147165 - DNA, 15 bp, Homo sapiens
actgtgttctgtggc

SEQ ID NO: 1147166 - DNA, 15 bp, Homo sapiens
aactgtgttctgtgg

SEQ ID NO: 1147167 - DNA, 15 bp, Homo sapiens
caactgtgttctgtg

SEQ ID NO: 1147168 - DNA, 15 bp, Homo sapiens
ccaactgtgttctgt

SEQ ID NO: 1147169 - DNA, 15 bp, Homo sapiens
tccaactgtgttctg

SEQ ID NO: 1147170 - DNA, 15 bp, Homo sapiens
ctccaactgtgttct

SEQ ID NO: 1147171 - DNA, 15 bp, Homo sapiens
tctccaactgtgttc

SEQ ID NO: 1147172 - DNA, 15 bp, Homo sapiens
gtctccaactgtgtt

SEQ ID NO: 1147173 - DNA, 15 bp, Homo sapiens
agtctccaactgtgt

SEQ ID NO: 1147174 - DNA, 15 bp, Homo sapiens
gagtctccaactgtg

SEQ ID NO: 1147175 - DNA, 15 bp, Homo sapiens
agagtctccaactgt

SEQ ID NO: 1147176 - DNA, 15 bp, Homo sapiens
cagagtctccaactg

SEQ ID NO: 1147177 - DNA, 15 bp, Homo sapiens
ccagagtctccaact

SEQ ID NO: 1147178 - DNA, 15 bp, Homo sapiens
accagagtctccaac

SEQ ID NO: 1147179 - DNA, 15 bp, Homo sapiens
aaccagagtctccaa

SEQ ID NO: 1147180 - DNA, 15 bp, Homo sapiens
taaccagagtctcca

SEQ ID NO: 1147181 - DNA, 15 bp, Homo sapiens
ataaccagagtctcc

SEQ ID NO: 1147182 - DNA, 15 bp, Homo sapiens
aataaccagagtctc

SEQ ID NO: 1147183 - DNA, 15 bp, Homo sapiens
aaataaccagagtct

SEQ ID NO: 1147184 - DNA, 15 bp, Homo sapiens
aaaataaccagagtc

SEQ ID NO: 1147185 - DNA, 15 bp, Homo sapiens
taaaataaccagagt

SEQ ID NO: 1147186 - DNA, 15 bp, Homo sapiens
gtaaaataaccagag

SEQ ID NO: 1147187 - DNA, 15 bp, Homo sapiens
ggtaaaataaccaga

SEQ ID NO: 1147188 - DNA, 15 bp, Homo sapiens
tggtaaaataaccag

SEQ ID NO: 1147189 - DNA, 15 bp, Homo sapiens
ttggtaaaataacca

SEQ ID NO: 1147190 - DNA, 15 bp, Homo sapiens
cttggtaaaataacc

SEQ ID NO: 1147191 - DNA, 15 bp, Homo sapiens
ccttggtaaaataac

SEQ ID NO: 1147192 - DNA, 15 bp, Homo sapiens
gccttggtaaaataa

SEQ ID NO: 1147193 - DNA, 15 bp, Homo sapiens
agccttggtaaaata

SEQ ID NO: 1147194 - DNA, 15 bp, Homo sapiens
aagccttggtaaaat

SEQ ID NO: 1147195 - DNA, 15 bp, Homo sapiens
aaagccttggtaaaa

SEQ ID NO: 1147196 - DNA, 15 bp, Homo sapiens
caaagccttggtaaa

SEQ ID NO: 1147197 - DNA, 15 bp, Homo sapiens
tcaaagccttggtaa

SEQ ID NO: 1147198 - DNA, 15 bp, Homo sapiens
gtcaaagccttggta

SEQ ID NO: 1147199 - DNA, 15 bp, Homo sapiens
agtcaaagccttggt

SEQ ID NO: 1147200 - DNA, 15 bp, Homo sapiens
cagtcaaagccttgg

SEQ ID NO: 1147201 - DNA, 15 bp, Homo sapiens
tcagtcaaagccttg

SEQ ID NO: 1147202 - DNA, 15 bp, Homo sapiens
ttcagtcaaagcctt

SEQ ID NO: 1147203 - DNA, 15 bp, Homo sapiens
tttcagtcaaagcct

SEQ ID NO: 1147204 - DNA, 15 bp, Homo sapiens
atttcagtcaaagcc

SEQ ID NO: 1147205 - DNA, 15 bp, Homo sapiens
catttcagtcaaagc

SEQ ID NO: 1147206 - DNA, 15 bp, Homo sapiens
gcatttcagtcaaag

SEQ ID NO: 1147207 - DNA, 15 bp, Homo sapiens
ggcatttcagtcaaa

SEQ ID NO: 1147208 - DNA, 15 bp, Homo sapiens
tggcatttcagtcaa

SEQ ID NO: 1147209 - DNA, 15 bp, Homo sapiens
atggcatttcagtca

SEQ ID NO: 1147210 - DNA, 15 bp, Homo sapiens
tatggcatttcagtc

SEQ ID NO: 1147211 - DNA, 15 bp, Homo sapiens
atatggcatttcagt

SEQ ID NO: 1147212 - DNA, 15 bp, Homo sapiens
aatatggcatttcag

SEQ ID NO: 1147213 - DNA, 15 bp, Homo sapiens
aaatatggcatttca

SEQ ID NO: 1147214 - DNA, 15 bp, Homo sapiens
aaaatatggcatttc

SEQ ID NO: 1147215 - DNA, 15 bp, Homo sapiens
gaaaatatggcattt

SEQ ID NO: 1147216 - DNA, 15 bp, Homo sapiens
tgaaaatatggcatt

SEQ ID NO: 1147217 - DNA, 15 bp, Homo sapiens
ctgaaaatatggcat

SEQ ID NO: 1147218 - DNA, 15 bp, Homo sapiens
tctgaaaatatggca

SEQ ID NO: 1147219 - DNA, 15 bp, Homo sapiens
atctgaaaatatggc

SEQ ID NO: 1147220 - DNA, 15 bp, Homo sapiens
catctgaaaatatgg

SEQ ID NO: 1147221 - DNA, 15 bp, Homo sapiens
acatctgaaaatatg

SEQ ID NO: 1147222 - DNA, 15 bp, Homo sapiens
cacatctgaaaatat

SEQ ID NO: 1147223 - DNA, 15 bp, Homo sapiens
tcacatctgaaaata

SEQ ID NO: 1147224 - DNA, 15 bp, Homo sapiens
gtcacatctgaaaat

SEQ ID NO: 1147225 - DNA, 15 bp, Homo sapiens
ggtcacatctgaaaa

SEQ ID NO: 1147226 - DNA, 15 bp, Homo sapiens
tggtcacatctgaaa

SEQ ID NO: 1147227 - DNA, 15 bp, Homo sapiens
ctggtcacatctgaa

SEQ ID NO: 1147228 - DNA, 15 bp, Homo sapiens
tctggtcacatctga

SEQ ID NO: 1147229 - DNA, 15 bp, Homo sapiens
gtctggtcacatctg

SEQ ID NO: 1147230 - DNA, 15 bp, Homo sapiens
tgtctggtcacatct

SEQ ID NO: 1147231 - DNA, 15 bp, Homo sapiens
ctgtctggtcacatc

SEQ ID NO: 1147232 - DNA, 15 bp, Homo sapiens
gctgtctggtcacat

SEQ ID NO: 1147233 - DNA, 15 bp, Homo sapiens
agctgtctggtcaca

SEQ ID NO: 1147234 - DNA, 15 bp, Homo sapiens
aagctgtctggtcac

SEQ ID NO: 1147235 - DNA, 15 bp, Homo sapiens
aaagctgtctggtca

SEQ ID NO: 1147236 - DNA, 15 bp, Homo sapiens
taaagctgtctggtc

SEQ ID NO: 1147237 - DNA, 15 bp, Homo sapiens
ttaaagctgtctggt

SEQ ID NO: 1147238 - DNA, 15 bp, Homo sapiens
cttaaagctgtctgg

SEQ ID NO: 1147239 - DNA, 15 bp, Homo sapiens
tcttaaagctgtctg

SEQ ID NO: 1147240 - DNA, 15 bp, Homo sapiens
ttcttaaagctgtct

SEQ ID NO: 1147241 - DNA, 15 bp, Homo sapiens
tttcttaaagctgtc

SEQ ID NO: 1147242 - DNA, 15 bp, Homo sapiens
gtttcttaaagctgt

SEQ ID NO: 1147243 - DNA, 15 bp, Homo sapiens
agtttcttaaagctg

SEQ ID NO: 1147244 - DNA, 15 bp, Homo sapiens
cagtttcttaaagct

SEQ ID NO: 1147245 - DNA, 15 bp, Homo sapiens
tcagtttcttaaagc

SEQ ID NO: 1147246 - DNA, 15 bp, Homo sapiens
ctcagtttcttaaag

SEQ ID NO: 1147247 - DNA, 15 bp, Homo sapiens
cctcagtttcttaaa

SEQ ID NO: 1147248 - DNA, 15 bp, Homo sapiens
acctcagtttcttaa

SEQ ID NO: 1147249 - DNA, 15 bp, Homo sapiens
aacctcagtttctta

SEQ ID NO: 1147250 - DNA, 15 bp, Homo sapiens
caacctcagtttctt

SEQ ID NO: 1147251 - DNA, 15 bp, Homo sapiens
tcaacctcagtttct

SEQ ID NO: 1147252 - DNA, 15 bp, Homo sapiens
atcaacctcagtttc

SEQ ID NO: 1147253 - DNA, 15 bp, Homo sapiens
tatcaacctcagttt

SEQ ID NO: 1147254 - DNA, 15 bp, Homo sapiens
atatcaacctcagtt

SEQ ID NO: 1147255 - DNA, 15 bp, Homo sapiens
aatatcaacctcagt

SEQ ID NO: 1147256 - DNA, 15 bp, Homo sapiens
taatatcaacctcag

SEQ ID NO: 1147257 - DNA, 15 bp, Homo sapiens
ataatatcaacctca

SEQ ID NO: 1147258 - DNA, 15 bp, Homo sapiens
cataatatcaacctc

SEQ ID NO: 1147259 - DNA, 15 bp, Homo sapiens
tcataatatcaacct

SEQ ID NO: 1147260 - DNA, 15 bp, Homo sapiens
ttcataatatcaacc

SEQ ID NO: 1147261 - DNA, 15 bp, Homo sapiens
cttcataatatcaac

SEQ ID NO: 1147262 - DNA, 15 bp, Homo sapiens
gcttcataatatcaa

SEQ ID NO: 1147263 - DNA, 15 bp, Homo sapiens
ggcttcataatatca

SEQ ID NO: 1147264 - DNA, 15 bp, Homo sapiens
gggcttcataatatc

SEQ ID NO: 1147265 - DNA, 15 bp, Homo sapiens
tgggcttcataatat

SEQ ID NO: 1147266 - DNA, 15 bp, Homo sapiens
atgggcttcataata

SEQ ID NO: 1147267 - DNA, 15 bp, Homo sapiens
tatgggcttcataat

SEQ ID NO: 1147268 - DNA, 15 bp, Homo sapiens
ctatgggcttcataa

SEQ ID NO: 1147269 - DNA, 15 bp, Homo sapiens
cctatgggcttcata

SEQ ID NO: 1147270 - DNA, 15 bp, Homo sapiens
tcctatgggcttcat

SEQ ID NO: 1147271 - DNA, 15 bp, Homo sapiens
ctcctatgggcttca

SEQ ID NO: 1147272 - DNA, 15 bp, Homo sapiens
gctcctatgggcttc

SEQ ID NO: 1147273 - DNA, 15 bp, Homo sapiens
agctcctatgggctt

SEQ ID NO: 1147274 - DNA, 15 bp, Homo sapiens
aagctcctatgggct

SEQ ID NO: 1147275 - DNA, 15 bp, Homo sapiens
aaagctcctatgggc

SEQ ID NO: 1147276 - DNA, 15 bp, Homo sapiens
aaaagctcctatggg

SEQ ID NO: 1147277 - DNA, 15 bp, Homo sapiens
caaaagctcctatgg

SEQ ID NO: 1147278 - DNA, 15 bp, Homo sapiens
ccaaaagctcctatg

SEQ ID NO: 1147279 - DNA, 15 bp, Homo sapiens
tccaaaagctcctat

SEQ ID NO: 1147280 - DNA, 15 bp, Homo sapiens
ttccaaaagctccta

SEQ ID NO: 1147281 - DNA, 15 bp, Homo sapiens
tttccaaaagctcct

SEQ ID NO: 1147282 - DNA, 15 bp, Homo sapiens
ttttccaaaagctcc

SEQ ID NO: 1147283 - DNA, 15 bp, Homo sapiens
tttttccaaaagctc

SEQ ID NO: 1147284 - DNA, 15 bp, Homo sapiens
gtttttccaaaagct

SEQ ID NO: 1147285 - DNA, 15 bp, Homo sapiens
agtttttccaaaagc

SEQ ID NO: 1147286 - DNA, 15 bp, Homo sapiens
cagtttttccaaaag

SEQ ID NO: 1147287 - DNA, 15 bp, Homo sapiens
ccagtttttccaaaa

SEQ ID NO: 1147288 - DNA, 15 bp, Homo sapiens
accagtttttccaaa

SEQ ID NO: 1147289 - DNA, 15 bp, Homo sapiens
gaccagtttttccaa

SEQ ID NO: 1147290 - DNA, 15 bp, Homo sapiens
agaccagtttttcca

SEQ ID NO: 1147291 - DNA, 15 bp, Homo sapiens
tagaccagtttttcc

SEQ ID NO: 1147292 - DNA, 15 bp, Homo sapiens
ttagaccagtttttc

SEQ ID NO: 1147293 - DNA, 15 bp, Homo sapiens
attagaccagttttt

SEQ ID NO: 1147294 - DNA, 15 bp, Homo sapiens
tattagaccagtttt

SEQ ID NO: 1147295 - DNA, 15 bp, Homo sapiens
atattagaccagttt

SEQ ID NO: 1147296 - DNA, 15 bp, Homo sapiens
gatattagaccagtt

SEQ ID NO: 1147297 - DNA, 15 bp, Homo sapiens
ggatattagaccagt

SEQ ID NO: 1147298 - DNA, 15 bp, Homo sapiens
aggatattagaccag

SEQ ID NO: 1147299 - DNA, 15 bp, Homo sapiens
taggatattagacca

SEQ ID NO: 1147300 - DNA, 15 bp, Homo sapiens
ttaggatattagacc

SEQ ID NO: 1147301 - DNA, 15 bp, Homo sapiens
tttaggatattagac

SEQ ID NO: 1147302 - DNA, 15 bp, Homo sapiens
atttaggatattaga

SEQ ID NO: 1147303 - DNA, 15 bp, Homo sapiens
tatttaggatattag

SEQ ID NO: 1147304 - DNA, 15 bp, Homo sapiens
gtatttaggatatta

SEQ ID NO: 1147305 - DNA, 15 bp, Homo sapiens
tgtatttaggatatt

SEQ ID NO: 1147306 - DNA, 15 bp, Homo sapiens
gtgtatttaggatat

SEQ ID NO: 1147307 - DNA, 15 bp, Homo sapiens
cgtgtatttaggata

SEQ ID NO: 1147308 - DNA, 15 bp, Homo sapiens
ccgtgtatttaggat

SEQ ID NO: 1147309 - DNA, 15 bp, Homo sapiens
accgtgtatttagga

SEQ ID NO: 1147310 - DNA, 15 bp, Homo sapiens
aaccgtgtatttagg

SEQ ID NO: 1147311 - DNA, 15 bp, Homo sapiens
gaaccgtgtatttag

SEQ ID NO: 1147312 - DNA, 15 bp, Homo sapiens
tgaaccgtgtattta

SEQ ID NO: 1147313 - DNA, 15 bp, Homo sapiens
gtgaaccgtgtattt

SEQ ID NO: 1147314 - DNA, 15 bp, Homo sapiens
tgtgaaccgtgtatt

SEQ ID NO: 1147315 - DNA, 15 bp, Homo sapiens
atgtgaaccgtgtat

SEQ ID NO: 1147316 - DNA, 15 bp, Homo sapiens
tatgtgaaccgtgta

SEQ ID NO: 1147317 - DNA, 15 bp, Homo sapiens
ttatgtgaaccgtgt

SEQ ID NO: 1147318 - DNA, 15 bp, Homo sapiens
attatgtgaaccgtg

SEQ ID NO: 1147319 - DNA, 15 bp, Homo sapiens
cattatgtgaaccgt

SEQ ID NO: 1147320 - DNA, 15 bp, Homo sapiens
ccattatgtgaaccg

SEQ ID NO: 1147321 - DNA, 15 bp, Homo sapiens
cccattatgtgaacc

SEQ ID NO: 1147322 - DNA, 15 bp, Homo sapiens
gcccattatgtgaac

SEQ ID NO: 1147323 - DNA, 15 bp, Homo sapiens
agcccattatgtgaa

SEQ ID NO: 1147324 - DNA, 15 bp, Homo sapiens
aagcccattatgtga

SEQ ID NO: 1147325 - DNA, 15 bp, Homo sapiens
caagcccattatgtg

SEQ ID NO: 1147326 - DNA, 15 bp, Homo sapiens
acaagcccattatgt

SEQ ID NO: 1147327 - DNA, 15 bp, Homo sapiens
cacaagcccattatg

SEQ ID NO: 1147328 - DNA, 15 bp, Homo sapiens
ccacaagcccattat

SEQ ID NO: 1147329 - DNA, 15 bp, Homo sapiens
accacaagcccatta

SEQ ID NO: 1147330 - DNA, 15 bp, Homo sapiens
taccacaagcccatt

SEQ ID NO: 1147331 - DNA, 15 bp, Homo sapiens
ttaccacaagcccat

SEQ ID NO: 1147332 - DNA, 15 bp, Homo sapiens
cttaccacaagccca

SEQ ID NO: 1147333 - DNA, 15 bp, Homo sapiens
acttaccacaagccc

SEQ ID NO: 1147334 - DNA, 15 bp, Homo sapiens
tacttaccacaagcc

SEQ ID NO: 1147335 - DNA, 15 bp, Homo sapiens
ttacttaccacaagc

SEQ ID NO: 1147336 - DNA, 15 bp, Homo sapiens
cttacttaccacaag

SEQ ID NO: 1147337 - DNA, 15 bp, Homo sapiens
tcttacttaccacaa

SEQ ID NO: 1147338 - DNA, 15 bp, Homo sapiens
ttcttacttaccaca

SEQ ID NO: 1147339 - DNA, 15 bp, Homo sapiens
attcttacttaccac

SEQ ID NO: 1147340 - DNA, 15 bp, Homo sapiens
cattcttacttacca

SEQ ID NO: 1147341 - DNA, 15 bp, Homo sapiens
acattcttacttacc

SEQ ID NO: 1147342 - DNA, 15 bp, Homo sapiens
gacattcttacttac

SEQ ID NO: 1147343 - DNA, 15 bp, Homo sapiens
tgacattcttactta

SEQ ID NO: 1147344 - DNA, 15 bp, Homo sapiens
gtgacattcttactt

SEQ ID NO: 1147345 - DNA, 15 bp, Homo sapiens
agtgacattcttact

SEQ ID NO: 1147346 - DNA, 15 bp, Homo sapiens
aagtgacattcttac

SEQ ID NO: 1147347 - DNA, 15 bp, Homo sapiens
aaagtgacattctta

SEQ ID NO: 1147348 - DNA, 15 bp, Homo sapiens
gaaagtgacattctt

SEQ ID NO: 1147349 - DNA, 15 bp, Homo sapiens
agaaagtgacattct

SEQ ID NO: 1147350 - DNA, 15 bp, Homo sapiens
cagaaagtgacattc

SEQ ID NO: 1147351 - DNA, 15 bp, Homo sapiens
tcagaaagtgacatt

SEQ ID NO: 1147352 - DNA, 15 bp, Homo sapiens
gtcagaaagtgacat

SEQ ID NO: 1147353 - DNA, 15 bp, Homo sapiens
tgtcagaaagtgaca

SEQ ID NO: 1147354 - DNA, 15 bp, Homo sapiens
atgtcagaaagtgac

SEQ ID NO: 1147355 - DNA, 15 bp, Homo sapiens
gatgtcagaaagtga

SEQ ID NO: 1147356 - DNA, 15 bp, Homo sapiens
ggatgtcagaaagtg

SEQ ID NO: 1147357 - DNA, 15 bp, Homo sapiens
gggatgtcagaaagt

SEQ ID NO: 1147358 - DNA, 15 bp, Homo sapiens
tgggatgtcagaaag

SEQ ID NO: 1147359 - DNA, 15 bp, Homo sapiens
ctgggatgtcagaaa

SEQ ID NO: 1147360 - DNA, 15 bp, Homo sapiens
cctgggatgtcagaa

SEQ ID NO: 1147361 - DNA, 15 bp, Homo sapiens
tcctgggatgtcaga

SEQ ID NO: 1147362 - DNA, 15 bp, Homo sapiens
ttcctgggatgtcag

SEQ ID NO: 1147363 - DNA, 15 bp, Homo sapiens
gttcctgggatgtca

SEQ ID NO: 1147364 - DNA, 15 bp, Homo sapiens
ggttcctgggatgtc

SEQ ID NO: 1147365 - DNA, 15 bp, Homo sapiens
gaggttcctgggatg

SEQ ID NO: 1147366 - DNA, 15 bp, Homo sapiens
tgaggttcctgggat

SEQ ID NO: 1147367 - DNA, 15 bp, Homo sapiens
ttgaggttcctggga

SEQ ID NO: 1147368 - DNA, 15 bp, Homo sapiens
cttgaggttcctggg

SEQ ID NO: 1147369 - DNA, 15 bp, Homo sapiens
acttgaggttcctgg

SEQ ID NO: 1147370 - DNA, 15 bp, Homo sapiens
aacttgaggttcctg

SEQ ID NO: 1147371 - DNA, 15 bp, Homo sapiens
taacttgaggttcct

SEQ ID NO: 1147372 - DNA, 15 bp, Homo sapiens
ttaacttgaggttcc

SEQ ID NO: 1147373 - DNA, 15 bp, Homo sapiens
attaacttgaggttc

SEQ ID NO: 1147374 - DNA, 15 bp, Homo sapiens
aattaacttgaggtt

SEQ ID NO: 1147375 - DNA, 15 bp, Homo sapiens
caattaacttgaggt

SEQ ID NO: 1147376 - DNA, 15 bp, Homo sapiens
ccaattaacttgagg

SEQ ID NO: 1147377 - DNA, 15 bp, Homo sapiens
cccaattaacttgag

SEQ ID NO: 1147378 - DNA, 15 bp, Homo sapiens
ccccaattaacttga

SEQ ID NO: 1147379 - DNA, 15 bp, Homo sapiens
cccccaattaacttg

SEQ ID NO: 1147380 - DNA, 15 bp, Homo sapiens
tcccccaattaactt

SEQ ID NO: 1147381 - DNA, 15 bp, Homo sapiens
gtcccccaattaact

SEQ ID NO: 1147382 - DNA, 15 bp, Homo sapiens
ggtcccccaattaac

SEQ ID NO: 1147383 - DNA, 15 bp, Homo sapiens
aggtcccccaattaa

SEQ ID NO: 1147384 - DNA, 15 bp, Homo sapiens
aaggtcccccaatta

SEQ ID NO: 1147385 - DNA, 15 bp, Homo sapiens
caaggtcccccaatt

SEQ ID NO: 1147386 - DNA, 15 bp, Homo sapiens
tcaaggtcccccaat

SEQ ID NO: 1147387 - DNA, 15 bp, Homo sapiens
ctcaaggtcccccaa

SEQ ID NO: 1147388 - DNA, 15 bp, Homo sapiens
tctcaaggtccccca

SEQ ID NO: 1147389 - DNA, 15 bp, Homo sapiens
ttctcaaggtccccc

SEQ ID NO: 1147390 - DNA, 15 bp, Homo sapiens
tttctcaaggtcccc

SEQ ID NO: 1147391 - DNA, 15 bp, Homo sapiens
ttttctcaaggtccc

SEQ ID NO: 1147392 - DNA, 15 bp, Homo sapiens
cttttctcaaggtcc

SEQ ID NO: 1147393 - DNA, 15 bp, Homo sapiens
tcttttctcaaggtc

SEQ ID NO: 1147394 - DNA, 15 bp, Homo sapiens
ctcttttctcaaggt

SEQ ID NO: 1147395 - DNA, 15 bp, Homo sapiens
tctcttttctcaagg

SEQ ID NO: 1147396 - DNA, 15 bp, Homo sapiens
ttctcttttctcaag

SEQ ID NO: 1147397 - DNA, 15 bp, Homo sapiens
tttctcttttctcaa

SEQ ID NO: 1147398 - DNA, 15 bp, Homo sapiens
atttctcttttctca

SEQ ID NO: 1147399 - DNA, 15 bp, Homo sapiens
aatttctcttttctc

SEQ ID NO: 1147400 - DNA, 15 bp, Homo sapiens
gaatttctcttttct

SEQ ID NO: 1147401 - DNA, 15 bp, Homo sapiens
tgaatttctcttttc

SEQ ID NO: 1147402 - DNA, 15 bp, Homo sapiens
gtgaatttctctttt

SEQ ID NO: 1147403 - DNA, 15 bp, Homo sapiens
agtgaatttctcttt

SEQ ID NO: 1147404 - DNA, 15 bp, Homo sapiens
tagtgaatttctctt

SEQ ID NO: 1147405 - DNA, 15 bp, Homo sapiens
ttagtgaatttctct

SEQ ID NO: 1147406 - DNA, 15 bp, Homo sapiens
attagtgaatttctc

SEQ ID NO: 1147407 - DNA, 15 bp, Homo sapiens
aattagtgaatttct

SEQ ID NO: 1147408 - DNA, 15 bp, Homo sapiens
aaattagtgaatttc

SEQ ID NO: 1147409 - DNA, 15 bp, Homo sapiens
caaattagtgaattt

SEQ ID NO: 1147410 - DNA, 15 bp, Homo sapiens
acaaattagtgaatt

SEQ ID NO: 1147411 - DNA, 15 bp, Homo sapiens
tacaaattagtgaat

SEQ ID NO: 1147412 - DNA, 15 bp, Homo sapiens
gtacaaattagtgaa

SEQ ID NO: 1147413 - DNA, 15 bp, Homo sapiens
tgtacaaattagtga

SEQ ID NO: 1147414 - DNA, 15 bp, Homo sapiens
ctgtacaaattagtg

SEQ ID NO: 1147415 - DNA, 15 bp, Homo sapiens
cctgtacaaattagt

SEQ ID NO: 1147416 - DNA, 15 bp, Homo sapiens
acctgtacaaattag

SEQ ID NO: 1147417 - DNA, 15 bp, Homo sapiens
tacctgtacaaatta

SEQ ID NO: 1147418 - DNA, 15 bp, Homo sapiens
atacctgtacaaatt

SEQ ID NO: 1147419 - DNA, 15 bp, Homo sapiens
aatacctgtacaaat

SEQ ID NO: 1147420 - DNA, 15 bp, Homo sapiens
taatacctgtacaaa

SEQ ID NO: 1147421 - DNA, 15 bp, Homo sapiens
gtaatacctgtacaa

SEQ ID NO: 1147422 - DNA, 15 bp, Homo sapiens
agtaatacctgtaca

SEQ ID NO: 1147423 - DNA, 15 bp, Homo sapiens
cagtaatacctgtac

SEQ ID NO: 1147424 - DNA, 15 bp, Homo sapiens
tcagtaatacctgta

SEQ ID NO: 1147425 - DNA, 15 bp, Homo sapiens
gtcagtaatacctgt

SEQ ID NO: 1147426 - DNA, 15 bp, Homo sapiens
tgtcagtaatacctg

SEQ ID NO: 1147427 - DNA, 15 bp, Homo sapiens
gtgtcagtaatacct

SEQ ID NO: 1147428 - DNA, 15 bp, Homo sapiens
tgtgtcagtaatacc

SEQ ID NO: 1147429 - DNA, 15 bp, Homo sapiens
ttgtgtcagtaatac

SEQ ID NO: 1147430 - DNA, 15 bp, Homo sapiens
attgtgtcagtaata

SEQ ID NO: 1147431 - DNA, 15 bp, Homo sapiens
gattgtgtcagtaat

SEQ ID NO: 1147432 - DNA, 15 bp, Homo sapiens
agattgtgtcagtaa

SEQ ID NO: 1147433 - DNA, 15 bp, Homo sapiens
tagattgtgtcagta

SEQ ID NO: 1147434 - DNA, 15 bp, Homo sapiens
ttagattgtgtcagt

SEQ ID NO: 1147435 - DNA, 15 bp, Homo sapiens
cttagattgtgtcag

SEQ ID NO: 1147436 - DNA, 15 bp, Homo sapiens
tcttagattgtgtca

SEQ ID NO: 1147437 - DNA, 15 bp, Homo sapiens
ctcttagattgtgtc

SEQ ID NO: 1147438 - DNA, 15 bp, Homo sapiens
gctcttagattgtgt

SEQ ID NO: 1147439 - DNA, 15 bp, Homo sapiens
tgctcttagattgtg

SEQ ID NO: 1147440 - DNA, 15 bp, Homo sapiens
ttgctcttagattgt

SEQ ID NO: 1147441 - DNA, 15 bp, Homo sapiens
tttgctcttagattg

SEQ ID NO: 1147442 - DNA, 15 bp, Homo sapiens
atttgctcttagatt

SEQ ID NO: 1147443 - DNA, 15 bp, Homo sapiens
gatttgctcttagat

SEQ ID NO: 1147444 - DNA, 15 bp, Homo sapiens
ggatttgctcttaga

SEQ ID NO: 1147445 - DNA, 15 bp, Homo sapiens
tggatttgctcttag

SEQ ID NO: 1147446 - DNA, 15 bp, Homo sapiens
ttggatttgctctta

SEQ ID NO: 1147447 - DNA, 15 bp, Homo sapiens
attggatttgctctt

SEQ ID NO: 1147448 - DNA, 15 bp, Homo sapiens
gattggatttgctct

SEQ ID NO: 1147449 - DNA, 15 bp, Homo sapiens
ggattggatttgctc

SEQ ID NO: 1147450 - DNA, 15 bp, Homo sapiens
aggattggatttgct

SEQ ID NO: 1147451 - DNA, 15 bp, Homo sapiens
aaggattggatttgc

SEQ ID NO: 1147452 - DNA, 15 bp, Homo sapiens
caaggattggatttg

SEQ ID NO: 1147453 - DNA, 15 bp, Homo sapiens
tcaaggattggattt

SEQ ID NO: 1147454 - DNA, 15 bp, Homo sapiens
gtcaaggattggatt

SEQ ID NO: 1147455 - DNA, 15 bp, Homo sapiens
agtcaaggattggat

SEQ ID NO: 1147456 - DNA, 15 bp, Homo sapiens
aagtcaaggattgga

SEQ ID NO: 1147457 - DNA, 15 bp, Homo sapiens
caagtcaaggattgg

SEQ ID NO: 1147458 - DNA, 15 bp, Homo sapiens
ccaagtcaaggattg

SEQ ID NO: 1147459 - DNA, 15 bp, Homo sapiens
gccaagtcaaggatt

SEQ ID NO: 1147460 - DNA, 15 bp, Homo sapiens
agccaagtcaaggat

SEQ ID NO: 1147461 - DNA, 15 bp, Homo sapiens
aagccaagtcaagga

SEQ ID NO: 1147462 - DNA, 15 bp, Homo sapiens
aaagccaagtcaagg

SEQ ID NO: 1147463 - DNA, 15 bp, Homo sapiens
gaaagccaagtcaag

SEQ ID NO: 1147464 - DNA, 15 bp, Homo sapiens
agaaagccaagtcaa

SEQ ID NO: 1147465 - DNA, 15 bp, Homo sapiens
tagaaagccaagtca

SEQ ID NO: 1147466 - DNA, 15 bp, Homo sapiens
ctagaaagccaagtc

SEQ ID NO: 1147467 - DNA, 15 bp, Homo sapiens
gctagaaagccaagt

SEQ ID NO: 1147468 - DNA, 15 bp, Homo sapiens
ggctagaaagccaag

SEQ ID NO: 1147469 - DNA, 15 bp, Homo sapiens
aggctagaaagccaa

SEQ ID NO: 1147470 - DNA, 15 bp, Homo sapiens
caggctagaaagcca

SEQ ID NO: 1147471 - DNA, 15 bp, Homo sapiens
tcaggctagaaagcc

SEQ ID NO: 1147472 - DNA, 15 bp, Homo sapiens
ttcaggctagaaagc

SEQ ID NO: 1147473 - DNA, 15 bp, Homo sapiens
cttcaggctagaaag

SEQ ID NO: 1147474 - DNA, 15 bp, Homo sapiens
tcttcaggctagaaa

SEQ ID NO: 1147475 - DNA, 15 bp, Homo sapiens
ctcttcaggctagaa

SEQ ID NO: 1147476 - DNA, 15 bp, Homo sapiens
cctcttcaggctaga

SEQ ID NO: 1147477 - DNA, 15 bp, Homo sapiens
acctcttcaggctag

SEQ ID NO: 1147478 - DNA, 15 bp, Homo sapiens
aacctcttcaggcta

SEQ ID NO: 1147479 - DNA, 15 bp, Homo sapiens
aaacctcttcaggct

SEQ ID NO: 1147480 - DNA, 15 bp, Homo sapiens
gaaacctcttcaggc

SEQ ID NO: 1147481 - DNA, 15 bp, Homo sapiens
agaaacctcttcagg

SEQ ID NO: 1147482 - DNA, 15 bp, Homo sapiens
tagaaacctcttcag

SEQ ID NO: 1147483 - DNA, 15 bp, Homo sapiens
ttagaaacctcttca

SEQ ID NO: 1147484 - DNA, 15 bp, Homo sapiens
tttagaaacctcttc

SEQ ID NO: 1147485 - DNA, 15 bp, Homo sapiens
ttttagaaacctctt

SEQ ID NO: 1147486 - DNA, 15 bp, Homo sapiens
cttttagaaacctct

SEQ ID NO: 1147487 - DNA, 15 bp, Homo sapiens
acttttagaaacctc

SEQ ID NO: 1147488 - DNA, 15 bp, Homo sapiens
aacttttagaaacct

SEQ ID NO: 1147489 - DNA, 15 bp, Homo sapiens
aaacttttagaaacc

SEQ ID NO: 1147490 - DNA, 15 bp, Homo sapiens
taaacttttagaaac

SEQ ID NO: 1147491 - DNA, 15 bp, Homo sapiens
ttaaacttttagaaa

SEQ ID NO: 1147492 - DNA, 15 bp, Homo sapiens
attaaacttttagaa

SEQ ID NO: 1147493 - DNA, 15 bp, Homo sapiens
gattaaacttttaga

SEQ ID NO: 1147494 - DNA, 15 bp, Homo sapiens
agattaaacttttag

SEQ ID NO: 1147495 - DNA, 15 bp, Homo sapiens
cagattaaactttta

SEQ ID NO: 1147496 - DNA, 15 bp, Homo sapiens
tcagattaaactttt

SEQ ID NO: 1147497 - DNA, 15 bp, Homo sapiens
ctcagattaaacttt

SEQ ID NO: 1147498 - DNA, 15 bp, Homo sapiens
tctcagattaaactt

SEQ ID NO: 1147499 - DNA, 15 bp, Homo sapiens
atctcagattaaact

SEQ ID NO: 1147500 - DNA, 15 bp, Homo sapiens
aatctcagattaaac

SEQ ID NO: 1147501 - DNA, 15 bp, Homo sapiens
gaatctcagattaaa

SEQ ID NO: 1147502 - DNA, 15 bp, Homo sapiens
ggaatctcagattaa

SEQ ID NO: 1147503 - DNA, 15 bp, Homo sapiens
aggaatctcagatta

SEQ ID NO: 1147504 - DNA, 15 bp, Homo sapiens
aaggaatctcagatt

SEQ ID NO: 1147505 - DNA, 15 bp, Homo sapiens
taaggaatctcagat

SEQ ID NO: 1147506 - DNA, 15 bp, Homo sapiens
gtaaggaatctcaga

SEQ ID NO: 1147507 - DNA, 15 bp, Homo sapiens
cgtaaggaatctcag

SEQ ID NO: 1147508 - DNA, 15 bp, Homo sapiens
tcgtaaggaatctca

SEQ ID NO: 1147509 - DNA, 15 bp, Homo sapiens
ttcgtaaggaatctc

SEQ ID NO: 1147510 - DNA, 15 bp, Homo sapiens
tttcgtaaggaatct

SEQ ID NO: 1147511 - DNA, 15 bp, Homo sapiens
ttttcgtaaggaatc

SEQ ID NO: 1147512 - DNA, 15 bp, Homo sapiens
cttttcgtaaggaat

SEQ ID NO: 1147513 - DNA, 15 bp, Homo sapiens
acttttcgtaaggaa

SEQ ID NO: 1147514 - DNA, 15 bp, Homo sapiens
aacttttcgtaagga

SEQ ID NO: 1147515 - DNA, 15 bp, Homo sapiens
gaacttttcgtaagg

SEQ ID NO: 1147516 - DNA, 15 bp, Homo sapiens
ggaacttttcgtaag

SEQ ID NO: 1147517 - DNA, 15 bp, Homo sapiens
tggaacttttcgtaa

SEQ ID NO: 1147518 - DNA, 15 bp, Homo sapiens
ctggaacttttcgta

SEQ ID NO: 1147519 - DNA, 15 bp, Homo sapiens
gctggaacttttcgt

SEQ ID NO: 1147520 - DNA, 15 bp, Homo sapiens
tgctggaacttttcg

SEQ ID NO: 1147521 - DNA, 15 bp, Homo sapiens
ttgctggaacttttc

SEQ ID NO: 1147522 - DNA, 15 bp, Homo sapiens
tttgctggaactttt

SEQ ID NO: 1147523 - DNA, 15 bp, Homo sapiens
ctttgctggaacttt

SEQ ID NO: 1147524 - DNA, 15 bp, Homo sapiens
actttgctggaactt

SEQ ID NO: 1147525 - DNA, 15 bp, Homo sapiens
cactttgctggaact

SEQ ID NO: 1147526 - DNA, 15 bp, Homo sapiens
tcactttgctggaac

SEQ ID NO: 1147527 - DNA, 15 bp, Homo sapiens
ttcactttgctggaa

SEQ ID NO: 1147528 - DNA, 15 bp, Homo sapiens
gttcactttgctgga

SEQ ID NO: 1147529 - DNA, 15 bp, Homo sapiens
agttcactttgctgg

SEQ ID NO: 1147530 - DNA, 15 bp, Homo sapiens
aagttcactttgctg

SEQ ID NO: 1147531 - DNA, 15 bp, Homo sapiens
taagttcactttgct

SEQ ID NO: 1147532 - DNA, 15 bp, Homo sapiens
ttaagttcactttgc

SEQ ID NO: 1147533 - DNA, 15 bp, Homo sapiens
tttaagttcactttg

SEQ ID NO: 1147534 - DNA, 15 bp, Homo sapiens
ttttaagttcacttt

SEQ ID NO: 1147535 - DNA, 15 bp, Homo sapiens
cttttaagttcactt

SEQ ID NO: 1147536 - DNA, 15 bp, Homo sapiens
ccttttaagttcact

SEQ ID NO: 1147537 - DNA, 15 bp, Homo sapiens
tccttttaagttcac

SEQ ID NO: 1147538 - DNA, 15 bp, Homo sapiens
ctccttttaagttca

SEQ ID NO: 1147539 - DNA, 15 bp, Homo sapiens
gctccttttaagttc

SEQ ID NO: 1147540 - DNA, 15 bp, Homo sapiens
ggctccttttaagtt

SEQ ID NO: 1147541 - DNA, 15 bp, Homo sapiens
aggctccttttaagt

SEQ ID NO: 1147542 - DNA, 15 bp, Homo sapiens
caggctccttttaag

SEQ ID NO: 1147543 - DNA, 15 bp, Homo sapiens
acaggctccttttaa

SEQ ID NO: 1147544 - DNA, 15 bp, Homo sapiens
cacaggctcctttta

SEQ ID NO: 1147545 - DNA, 15 bp, Homo sapiens
acacaggctcctttt

SEQ ID NO: 1147546 - DNA, 15 bp, Homo sapiens
aacacaggctccttt

SEQ ID NO: 1147547 - DNA, 15 bp, Homo sapiens
taacacaggctcctt

SEQ ID NO: 1147548 - DNA, 15 bp, Homo sapiens
gtaacacaggctcct

SEQ ID NO: 1147549 - DNA, 15 bp, Homo sapiens
tgtaacacaggctcc

SEQ ID NO: 1147550 - DNA, 15 bp, Homo sapiens
ttgtaacacaggctc

SEQ ID NO: 1147551 - DNA, 15 bp, Homo sapiens
tttgtaacacaggct

SEQ ID NO: 1147552 - DNA, 15 bp, Homo sapiens
atttgtaacacaggc

SEQ ID NO: 1147553 - DNA, 15 bp, Homo sapiens
aatttgtaacacagg

SEQ ID NO: 1147554 - DNA, 15 bp, Homo sapiens
caatttgtaacacag

SEQ ID NO: 1147555 - DNA, 15 bp, Homo sapiens
tcaatttgtaacaca

SEQ ID NO: 1147556 - DNA, 15 bp, Homo sapiens
atcaatttgtaacac

SEQ ID NO: 1147557 - DNA, 15 bp, Homo sapiens
tatcaatttgtaaca

SEQ ID NO: 1147558 - DNA, 15 bp, Homo sapiens
atatcaatttgtaac

SEQ ID NO: 1147559 - DNA, 15 bp, Homo sapiens
aatatcaatttgtaa

SEQ ID NO: 1147560 - DNA, 15 bp, Homo sapiens
gaatatcaatttgta

SEQ ID NO: 1147561 - DNA, 15 bp, Homo sapiens
agaatatcaatttgt

SEQ ID NO: 1147562 - DNA, 15 bp, Homo sapiens
aagaatatcaatttg

SEQ ID NO: 1147563 - DNA, 15 bp, Homo sapiens
taagaatatcaattt

SEQ ID NO: 1147564 - DNA, 15 bp, Homo sapiens
gtaagaatatcaatt

SEQ ID NO: 1147565 - DNA, 15 bp, Homo sapiens
agtaagaatatcaat

SEQ ID NO: 1147566 - DNA, 15 bp, Homo sapiens
cagtaagaatatcaa

SEQ ID NO: 1147567 - DNA, 15 bp, Homo sapiens
gcagtaagaatatca

SEQ ID NO: 1147568 - DNA, 15 bp, Homo sapiens
tgcagtaagaatatc

SEQ ID NO: 1147569 - DNA, 15 bp, Homo sapiens
gtgcagtaagaatat

SEQ ID NO: 1147570 - DNA, 15 bp, Homo sapiens
agtgcagtaagaata

SEQ ID NO: 1147571 - DNA, 15 bp, Homo sapiens
aagtgcagtaagaat

SEQ ID NO: 1147572 - DNA, 15 bp, Homo sapiens
aaagtgcagtaagaa

SEQ ID NO: 1147573 - DNA, 15 bp, Homo sapiens
taaagtgcagtaaga

SEQ ID NO: 1147574 - DNA, 15 bp, Homo sapiens
ataaagtgcagtaag

SEQ ID NO: 1147575 - DNA, 15 bp, Homo sapiens
cataaagtgcagtaa

SEQ ID NO: 1147576 - DNA, 15 bp, Homo sapiens
gcataaagtgcagta

SEQ ID NO: 1147577 - DNA, 15 bp, Homo sapiens
tgcataaagtgcagt

SEQ ID NO: 1147578 - DNA, 15 bp, Homo sapiens
ttgcataaagtgcag

SEQ ID NO: 1147579 - DNA, 15 bp, Homo sapiens
tttgcataaagtgca

SEQ ID NO: 1147580 - DNA, 15 bp, Homo sapiens
tatttgcataaagtg

SEQ ID NO: 1147581 - DNA, 15 bp, Homo sapiens
ttatttgcataaagt

SEQ ID NO: 1147582 - DNA, 15 bp, Homo sapiens
attatttgcataaag

SEQ ID NO: 1147583 - DNA, 15 bp, Homo sapiens
gattatttgcataaa

SEQ ID NO: 1147584 - DNA, 15 bp, Homo sapiens
tgattatttgcataa

SEQ ID NO: 1147585 - DNA, 15 bp, Homo sapiens
ctgattatttgcata

SEQ ID NO: 1147586 - DNA, 15 bp, Homo sapiens
cctgattatttgcat

SEQ ID NO: 1147587 - DNA, 15 bp, Homo sapiens
gcctgattatttgca

SEQ ID NO: 1147588 - DNA, 15 bp, Homo sapiens
ggcctgattatttgc

SEQ ID NO: 1147589 - DNA, 15 bp, Homo sapiens
tggcctgattatttg

SEQ ID NO: 1147590 - DNA, 15 bp, Homo sapiens
ttggcctgattattt

SEQ ID NO: 1147591 - DNA, 15 bp, Homo sapiens
cttggcctgattatt

SEQ ID NO: 1147592 - DNA, 15 bp, Homo sapiens
acttggcctgattat

SEQ ID NO: 1147593 - DNA, 15 bp, Homo sapiens
tacttggcctgatta

SEQ ID NO: 1147594 - DNA, 15 bp, Homo sapiens
gtacttggcctgatt

SEQ ID NO: 1147595 - DNA, 15 bp, Homo sapiens
tgtacttggcctgat

SEQ ID NO: 1147596 - DNA, 15 bp, Homo sapiens
ttgtacttggcctga

SEQ ID NO: 1147597 - DNA, 15 bp, Homo sapiens
attgtacttggcctg

SEQ ID NO: 1147598 - DNA, 15 bp, Homo sapiens
tattgtacttggcct

SEQ ID NO: 1147599 - DNA, 15 bp, Homo sapiens
ttattgtacttggcc

SEQ ID NO: 1147600 - DNA, 15 bp, Homo sapiens
cttattgtacttggc

SEQ ID NO: 1147601 - DNA, 15 bp, Homo sapiens
tcttattgtacttgg

SEQ ID NO: 1147602 - DNA, 15 bp, Homo sapiens
gtcttattgtacttg

SEQ ID NO: 1147603 - DNA, 15 bp, Homo sapiens
cgtcttattgtactt

SEQ ID NO: 1147604 - DNA, 15 bp, Homo sapiens
tcgtcttattgtact

SEQ ID NO: 1147605 - DNA, 15 bp, Homo sapiens
ttcgtcttattgtac

SEQ ID NO: 1147606 - DNA, 15 bp, Homo sapiens
tttcgtcttattgta

SEQ ID NO: 1147607 - DNA, 15 bp, Homo sapiens
ttttcgtcttattgt

SEQ ID NO: 1147608 - DNA, 15 bp, Homo sapiens
gttttcgtcttattg

SEQ ID NO: 1147609 - DNA, 15 bp, Homo sapiens
agttttcgtcttatt

SEQ ID NO: 1147610 - DNA, 15 bp, Homo sapiens
aagttttcgtcttat

SEQ ID NO: 1147611 - DNA, 15 bp, Homo sapiens
taagttttcgtctta

SEQ ID NO: 1147612 - DNA, 15 bp, Homo sapiens
ttaagttttcgtctt

SEQ ID NO: 1147613 - DNA, 15 bp, Homo sapiens
attaagttttcgtct

SEQ ID NO: 1147614 - DNA, 15 bp, Homo sapiens
tattaagttttcgtc

SEQ ID NO: 1147615 - DNA, 15 bp, Homo sapiens
atattaagttttcgt

SEQ ID NO: 1147616 - DNA, 15 bp, Homo sapiens
catattaagttttcg

SEQ ID NO: 1147617 - DNA, 15 bp, Homo sapiens
gcatattaagttttc

SEQ ID NO: 1147618 - DNA, 15 bp, Homo sapiens
tgcatattaagtttt

SEQ ID NO: 1147619 - DNA, 15 bp, Homo sapiens
ttgcatattaagttt

SEQ ID NO: 1147620 - DNA, 15 bp, Homo sapiens
tttgcatattaagtt

SEQ ID NO: 1147621 - DNA, 15 bp, Homo sapiens
atttgcatattaagt

SEQ ID NO: 1147622 - DNA, 15 bp, Homo sapiens
tatttgcatattaag

SEQ ID NO: 1147623 - DNA, 15 bp, Homo sapiens
ttatttgcatattaa

SEQ ID NO: 1147624 - DNA, 15 bp, Homo sapiens
tttatttgcatatta

SEQ ID NO: 1147625 - DNA, 15 bp, Homo sapiens
ttttatttgcatatt

SEQ ID NO: 1147626 - DNA, 15 bp, Homo sapiens
attttatttgcatat

SEQ ID NO: 1147627 - DNA, 15 bp, Homo sapiens
cattttatttgcata

SEQ ID NO: 1147628 - DNA, 15 bp, Homo sapiens
ccattttatttgcat

SEQ ID NO: 1147629 - DNA, 15 bp, Homo sapiens
gccattttatttgca

SEQ ID NO: 1147630 - DNA, 15 bp, Homo sapiens
agccattttatttgc

SEQ ID NO: 1147631 - DNA, 15 bp, Homo sapiens
aagccattttatttg

SEQ ID NO: 1147632 - DNA, 15 bp, Homo sapiens
aaagccattttattt

SEQ ID NO: 1147633 - DNA, 15 bp, Homo sapiens
caaagccattttatt

SEQ ID NO: 1147634 - DNA, 15 bp, Homo sapiens
gcaaagccattttat

SEQ ID NO: 1147635 - DNA, 15 bp, Homo sapiens
agcaaagccatttta

SEQ ID NO: 1147636 - DNA, 15 bp, Homo sapiens
aagcaaagccatttt

SEQ ID NO: 1147637 - DNA, 15 bp, Homo sapiens
aaagcaaagccattt

SEQ ID NO: 1147638 - DNA, 15 bp, Homo sapiens
aaaagcaaagccatt

SEQ ID NO: 1147639 - DNA, 15 bp, Homo sapiens
taaaagcaaagccat

SEQ ID NO: 1147640 - DNA, 15 bp, Homo sapiens
ataaaagcaaagcca

SEQ ID NO: 1147641 - DNA, 15 bp, Homo sapiens
aataaaagcaaagcc

SEQ ID NO: 1147642 - DNA, 15 bp, Homo sapiens
aaataaaagcaaagc

SEQ ID NO: 1147643 - DNA, 15 bp, Homo sapiens
taaataaaagcaaag

SEQ ID NO: 1147644 - DNA, 15 bp, Homo sapiens
ataaataaaagcaaa

SEQ ID NO: 1147645 - DNA, 15 bp, Homo sapiens
gataaataaaagcaa

SEQ ID NO: 1147646 - DNA, 15 bp, Homo sapiens
agataaataaaagca

SEQ ID NO: 1147647 - DNA, 15 bp, Homo sapiens
aagataaataaaagc

SEQ ID NO: 1147648 - DNA, 15 bp, Homo sapiens
aaagataaataaaag

SEQ ID NO: 1147649 - DNA, 15 bp, Homo sapiens
caaagataaataaaa

SEQ ID NO: 1147650 - DNA, 15 bp, Homo sapiens
ccaaagataaataaa

SEQ ID NO: 1147651 - DNA, 15 bp, Homo sapiens
accaaagataaataa

SEQ ID NO: 1147652 - DNA, 15 bp, Homo sapiens
taccaaagataaata

SEQ ID NO: 1147653 - DNA, 15 bp, Homo sapiens
ctaccaaagataaat

SEQ ID NO: 1147654 - DNA, 15 bp, Homo sapiens
tctaccaaagataaa

SEQ ID NO: 1147655 - DNA, 15 bp, Homo sapiens
ttctaccaaagataa

SEQ ID NO: 1147656 - DNA, 15 bp, Homo sapiens
tttctaccaaagata

SEQ ID NO: 1147657 - DNA, 15 bp, Homo sapiens
atttctaccaaagat

SEQ ID NO: 1147658 - DNA, 15 bp, Homo sapiens
catttctaccaaaga

SEQ ID NO: 1147659 - DNA, 15 bp, Homo sapiens
ccatttctaccaaag

SEQ ID NO: 1147660 - DNA, 15 bp, Homo sapiens
cccatttctaccaaa

SEQ ID NO: 1147661 - DNA, 15 bp, Homo sapiens
ccccatttctaccaa

SEQ ID NO: 1147662 - DNA, 15 bp, Homo sapiens
cccccatttctacca

SEQ ID NO: 1147663 - DNA, 15 bp, Homo sapiens
tcccccatttctacc

SEQ ID NO: 1147664 - DNA, 15 bp, Homo sapiens
gtcccccatttctac

SEQ ID NO: 1147665 - DNA, 15 bp, Homo sapiens
agtcccccatttcta

SEQ ID NO: 1147666 - DNA, 15 bp, Homo sapiens
cagtcccccatttct

SEQ ID NO: 1147667 - DNA, 15 bp, Homo sapiens
tcagtcccccatttc

SEQ ID NO: 1147668 - DNA, 15 bp, Homo sapiens
ttcagtcccccattt

SEQ ID NO: 1147669 - DNA, 15 bp, Homo sapiens
cttcagtcccccatt

SEQ ID NO: 1147670 - DNA, 15 bp, Homo sapiens
tcttcagtcccccat

SEQ ID NO: 1147671 - DNA, 15 bp, Homo sapiens
ctcttcagtccccca

SEQ ID NO: 1147672 - DNA, 15 bp, Homo sapiens
tctcttcagtccccc

SEQ ID NO: 1147673 - DNA, 15 bp, Homo sapiens
ctctcttcagtcccc

SEQ ID NO: 1147674 - DNA, 15 bp, Homo sapiens
tctctcttcagtccc

SEQ ID NO: 1147675 - DNA, 15 bp, Homo sapiens
ttctctcttcagtcc

SEQ ID NO: 1147676 - DNA, 15 bp, Homo sapiens
tttctctcttcagtc

SEQ ID NO: 1147677 - DNA, 15 bp, Homo sapiens
ttttctctcttcagt

SEQ ID NO: 1147678 - DNA, 15 bp, Homo sapiens
tttttctctcttcag

SEQ ID NO: 1147679 - DNA, 15 bp, Homo sapiens
atttttctctcttca

SEQ ID NO: 1147680 - DNA, 15 bp, Homo sapiens
gatttttctctcttc

SEQ ID NO: 1147681 - DNA, 15 bp, Homo sapiens
tgatttttctctctt

SEQ ID NO: 1147682 - DNA, 15 bp, Homo sapiens
atgatttttctctct

SEQ ID NO: 1147683 - DNA, 15 bp, Homo sapiens
catgatttttctctc

SEQ ID NO: 1147684 - DNA, 15 bp, Homo sapiens
acatgatttttctct

SEQ ID NO: 1147685 - DNA, 15 bp, Homo sapiens
aacatgatttttctc

SEQ ID NO: 1147686 - DNA, 15 bp, Homo sapiens
aaacatgatttttct

SEQ ID NO: 1147687 - DNA, 15 bp, Homo sapiens
gaaacatgatttttc

SEQ ID NO: 1147688 - DNA, 15 bp, Homo sapiens
tgaaacatgattttt

SEQ ID NO: 1147689 - DNA, 15 bp, Homo sapiens
ctgaaacatgatttt

SEQ ID NO: 1147690 - DNA, 15 bp, Homo sapiens
cctgaaacatgattt

SEQ ID NO: 1147691 - DNA, 15 bp, Homo sapiens
tcctgaaacatgatt

SEQ ID NO: 1147692 - DNA, 15 bp, Homo sapiens
ttcctgaaacatgat

SEQ ID NO: 1147693 - DNA, 15 bp, Homo sapiens
tttcctgaaacatga

SEQ ID NO: 1147694 - DNA, 15 bp, Homo sapiens
ctttcctgaaacatg

SEQ ID NO: 1147695 - DNA, 15 bp, Homo sapiens
tctttcctgaaacat

SEQ ID NO: 1147696 - DNA, 15 bp, Homo sapiens
ttctttcctgaaaca

SEQ ID NO: 1147697 - DNA, 15 bp, Homo sapiens
tttctttcctgaaac

SEQ ID NO: 1147698 - DNA, 15 bp, Homo sapiens
ttttctttcctgaaa

SEQ ID NO: 1147699 - DNA, 15 bp, Homo sapiens
tttttctttcctgaa

SEQ ID NO: 1147700 - DNA, 15 bp, Homo sapiens
ttttttctttcctga

SEQ ID NO: 1147701 - DNA, 15 bp, Homo sapiens
tttttttctttcctg

SEQ ID NO: 1147702 - DNA, 15 bp, Homo sapiens
ttttttttctttcct

SEQ ID NO: 1147703 - DNA, 15 bp, Homo sapiens
tttttttttctttcc

SEQ ID NO: 1147704 - DNA, 15 bp, Homo sapiens
gtttttttttctttc

SEQ ID NO: 1147705 - DNA, 15 bp, Homo sapiens
agtttttttttcttt

SEQ ID NO: 1147706 - DNA, 15 bp, Homo sapiens
tagtttttttttctt

SEQ ID NO: 1147707 - DNA, 15 bp, Homo sapiens
atagtttttttttct

SEQ ID NO: 1147708 - DNA, 15 bp, Homo sapiens
tatagtttttttttc

SEQ ID NO: 1147709 - DNA, 15 bp, Homo sapiens
ttatagttttttttt

SEQ ID NO: 1147710 - DNA, 15 bp, Homo sapiens
attatagtttttttt

SEQ ID NO: 1147711 - DNA, 15 bp, Homo sapiens
aattatagttttttt

SEQ ID NO: 1147712 - DNA, 15 bp, Homo sapiens
taattatagtttttt

SEQ ID NO: 1147713 - DNA, 15 bp, Homo sapiens
ctaattatagttttt

SEQ ID NO: 1147714 - DNA, 15 bp, Homo sapiens
tctaattatagtttt

SEQ ID NO: 1147715 - DNA, 15 bp, Homo sapiens
atctaattatagttt

SEQ ID NO: 1147716 - DNA, 15 bp, Homo sapiens
aatctaattatagtt

SEQ ID NO: 1147717 - DNA, 15 bp, Homo sapiens
gaatctaattatagt

SEQ ID NO: 1147718 - DNA, 15 bp, Homo sapiens
ggaatctaattatag

SEQ ID NO: 1147719 - DNA, 15 bp, Homo sapiens
tggaatctaattata

SEQ ID NO: 1147720 - DNA, 15 bp, Homo sapiens
ctggaatctaattat

SEQ ID NO: 1147721 - DNA, 15 bp, Homo sapiens
actggaatctaatta

SEQ ID NO: 1147722 - DNA, 15 bp, Homo sapiens
aactggaatctaatt

SEQ ID NO: 1147723 - DNA, 15 bp, Homo sapiens
gaactggaatctaat

SEQ ID NO: 1147724 - DNA, 15 bp, Homo sapiens
tgaactggaatctaa

SEQ ID NO: 1147725 - DNA, 15 bp, Homo sapiens
atgaactggaatcta

SEQ ID NO: 1147726 - DNA, 15 bp, Homo sapiens
aatgaactggaatct

SEQ ID NO: 1147727 - DNA, 15 bp, Homo sapiens
caatgaactggaatc

SEQ ID NO: 1147728 - DNA, 15 bp, Homo sapiens
acaatgaactggaat

SEQ ID NO: 1147729 - DNA, 15 bp, Homo sapiens
aacaatgaactggaa

SEQ ID NO: 1147730 - DNA, 15 bp, Homo sapiens
aaacaatgaactgga

SEQ ID NO: 1147731 - DNA, 15 bp, Homo sapiens
caaacaatgaactgg

SEQ ID NO: 1147732 - DNA, 15 bp, Homo sapiens
acaaacaatgaactg

SEQ ID NO: 1147733 - DNA, 15 bp, Homo sapiens
aacaaacaatgaact

SEQ ID NO: 1147734 - DNA, 15 bp, Homo sapiens
aaacaaacaatgaac

SEQ ID NO: 1147735 - DNA, 15 bp, Homo sapiens
aaaacaaacaatgaa

SEQ ID NO: 1147736 - DNA, 15 bp, Homo sapiens
aaaaacaaacaatga

SEQ ID NO: 1147737 - DNA, 15 bp, Homo sapiens
aaaaaacaaacaatg

SEQ ID NO: 1147738 - DNA, 15 bp, Homo sapiens
gaaaaaacaaacaat

SEQ ID NO: 1147739 - DNA, 15 bp, Homo sapiens
agaaaaaacaaacaa

SEQ ID NO: 1147740 - DNA, 15 bp, Homo sapiens
aagaaaaaacaaaca

SEQ ID NO: 1147741 - DNA, 15 bp, Homo sapiens
aaagaaaaaacaaac

SEQ ID NO: 1147742 - DNA, 15 bp, Homo sapiens
gaaagaaaaaacaaa

SEQ ID NO: 1147743 - DNA, 15 bp, Homo sapiens
agaaagaaaaaacaa

SEQ ID NO: 1147744 - DNA, 15 bp, Homo sapiens
aagaaagaaaaaaca

SEQ ID NO: 1147745 - DNA, 15 bp, Homo sapiens
aaagaaagaaaaaac

SEQ ID NO: 1147746 - DNA, 15 bp, Homo sapiens
gaaagaaagaaaaaa

SEQ ID NO: 1147747 - DNA, 15 bp, Homo sapiens
gagaaagaaagaaaa

SEQ ID NO: 1147748 - DNA, 15 bp, Homo sapiens
tgagaaagaaagaaa

SEQ ID NO: 1147749 - DNA, 15 bp, Homo sapiens
ctgagaaagaaagaa

SEQ ID NO: 1147750 - DNA, 15 bp, Homo sapiens
tctgagaaagaaaga

SEQ ID NO: 1147751 - DNA, 15 bp, Homo sapiens
atctgagaaagaaag

SEQ ID NO: 1147752 - DNA, 15 bp, Homo sapiens
aatctgagaaagaaa

SEQ ID NO: 1147753 - DNA, 15 bp, Homo sapiens
aaatctgagaaagaa

SEQ ID NO: 1147754 - DNA, 15 bp, Homo sapiens
aaaatctgagaaaga

SEQ ID NO: 1147755 - DNA, 15 bp, Homo sapiens
aaaaatctgagaaag

SEQ ID NO: 1147756 - DNA, 15 bp, Homo sapiens
aaaaaatctgagaaa

SEQ ID NO: 1147757 - DNA, 15 bp, Homo sapiens
aaaaaaatctgagaa

SEQ ID NO: 1147758 - DNA, 15 bp, Homo sapiens
taaaaaaatctgaga

SEQ ID NO: 1147759 - DNA, 15 bp, Homo sapiens
ataaaaaaatctgag

SEQ ID NO: 1147760 - DNA, 15 bp, Homo sapiens
aataaaaaaatctga

SEQ ID NO: 1147761 - DNA, 15 bp, Homo sapiens
aaataaaaaaatctg

SEQ ID NO: 1147762 - DNA, 15 bp, Homo sapiens
caaataaaaaaatct

SEQ ID NO: 1147763 - DNA, 15 bp, Homo sapiens
gcaaataaaaaaatc

SEQ ID NO: 1147764 - DNA, 15 bp, Homo sapiens
ggcaaataaaaaaat

SEQ ID NO: 1147765 - DNA, 15 bp, Homo sapiens
aggcaaataaaaaaa

SEQ ID NO: 1147766 - DNA, 15 bp, Homo sapiens
caggcaaataaaaaa

SEQ ID NO: 1147767 - DNA, 15 bp, Homo sapiens
acaggcaaataaaaa

SEQ ID NO: 1147768 - DNA, 15 bp, Homo sapiens
tacaggcaaataaaa

SEQ ID NO: 1147769 - DNA, 15 bp, Homo sapiens
ttacaggcaaataaa

SEQ ID NO: 1147770 - DNA, 15 bp, Homo sapiens
attacaggcaaataa

SEQ ID NO: 1147771 - DNA, 15 bp, Homo sapiens
gattacaggcaaata

SEQ ID NO: 1147772 - DNA, 15 bp, Homo sapiens
agattacaggcaaat

SEQ ID NO: 1147773 - DNA, 15 bp, Homo sapiens
tagattacaggcaaa

SEQ ID NO: 1147774 - DNA, 15 bp, Homo sapiens
ttagattacaggcaa

SEQ ID NO: 1147775 - DNA, 15 bp, Homo sapiens
tttagattacaggca

SEQ ID NO: 1147776 - DNA, 15 bp, Homo sapiens
gtttagattacaggc

SEQ ID NO: 1147777 - DNA, 15 bp, Homo sapiens
agtttagattacagg

SEQ ID NO: 1147778 - DNA, 15 bp, Homo sapiens
tagtttagattacag

SEQ ID NO: 1147779 - DNA, 15 bp, Homo sapiens
ttagtttagattaca

SEQ ID NO: 1147780 - DNA, 15 bp, Homo sapiens
tttagtttagattac

SEQ ID NO: 1147781 - DNA, 15 bp, Homo sapiens
atttagtttagatta

SEQ ID NO: 1147782 - DNA, 15 bp, Homo sapiens
gatttagtttagatt

SEQ ID NO: 1147783 - DNA, 15 bp, Homo sapiens
agatttagtttagat

SEQ ID NO: 1147784 - DNA, 15 bp, Homo sapiens
aagatttagtttaga

SEQ ID NO: 1147785 - DNA, 15 bp, Homo sapiens
taagatttagtttag

SEQ ID NO: 1147786 - DNA, 15 bp, Homo sapiens
ttaagatttagttta

SEQ ID NO: 1147787 - DNA, 15 bp, Homo sapiens
tttaagatttagttt

SEQ ID NO: 1147788 - DNA, 15 bp, Homo sapiens
atttaagatttagtt

SEQ ID NO: 1147789 - DNA, 15 bp, Homo sapiens
aatttaagatttagt

SEQ ID NO: 1147790 - DNA, 15 bp, Homo sapiens
caatttaagatttag

SEQ ID NO: 1147791 - DNA, 15 bp, Homo sapiens
acaatttaagattta

SEQ ID NO: 1147792 - DNA, 15 bp, Homo sapiens
aacaatttaagattt

SEQ ID NO: 1147793 - DNA, 15 bp, Homo sapiens
taacaatttaagatt

SEQ ID NO: 1147794 - DNA, 15 bp, Homo sapiens
ctaacaatttaagat

SEQ ID NO: 1147795 - DNA, 15 bp, Homo sapiens
actaacaatttaaga

SEQ ID NO: 1147796 - DNA, 15 bp, Homo sapiens
gactaacaatttaag

SEQ ID NO: 1147797 - DNA, 15 bp, Homo sapiens
ggactaacaatttaa

SEQ ID NO: 1147798 - DNA, 15 bp, Homo sapiens
aggactaacaattta

SEQ ID NO: 1147799 - DNA, 15 bp, Homo sapiens
taggactaacaattt

SEQ ID NO: 1147800 - DNA, 15 bp, Homo sapiens
ataggactaacaatt

SEQ ID NO: 1147801 - DNA, 15 bp, Homo sapiens
gataggactaacaat

SEQ ID NO: 1147802 - DNA, 15 bp, Homo sapiens
tgataggactaacaa

SEQ ID NO: 1147803 - DNA, 15 bp, Homo sapiens
ttgataggactaaca

SEQ ID NO: 1147804 - DNA, 15 bp, Homo sapiens
tttgataggactaac

SEQ ID NO: 1147805 - DNA, 15 bp, Homo sapiens
ttttgataggactaa

SEQ ID NO: 1147806 - DNA, 15 bp, Homo sapiens
attttgataggacta

SEQ ID NO: 1147807 - DNA, 15 bp, Homo sapiens
gattttgataggact

SEQ ID NO: 1147808 - DNA, 15 bp, Homo sapiens
agattttgataggac

SEQ ID NO: 1147809 - DNA, 15 bp, Homo sapiens
cagattttgatagga

SEQ ID NO: 1147810 - DNA, 15 bp, Homo sapiens
acagattttgatagg

SEQ ID NO: 1147811 - DNA, 15 bp, Homo sapiens
gacagattttgatag

SEQ ID NO: 1147812 - DNA, 15 bp, Homo sapiens
agacagattttgata

SEQ ID NO: 1147813 - DNA, 15 bp, Homo sapiens
aagacagattttgat

SEQ ID NO: 1147814 - DNA, 15 bp, Homo sapiens
aaagacagattttga

SEQ ID NO: 1147815 - DNA, 15 bp, Homo sapiens
caaagacagattttg

SEQ ID NO: 1147816 - DNA, 15 bp, Homo sapiens
tcaaagacagatttt

SEQ ID NO: 1147817 - DNA, 15 bp, Homo sapiens
ttcaaagacagattt

SEQ ID NO: 1147818 - DNA, 15 bp, Homo sapiens
attcaaagacagatt

SEQ ID NO: 1147819 - DNA, 15 bp, Homo sapiens
gattcaaagacagat

SEQ ID NO: 1147820 - DNA, 15 bp, Homo sapiens
agattcaaagacaga

SEQ ID NO: 1147821 - DNA, 15 bp, Homo sapiens
gagattcaaagacag

SEQ ID NO: 1147822 - DNA, 15 bp, Homo sapiens
ggagattcaaagaca

SEQ ID NO: 1147823 - DNA, 15 bp, Homo sapiens
tggagattcaaagac

SEQ ID NO: 1147824 - DNA, 15 bp, Homo sapiens
ctggagattcaaaga

SEQ ID NO: 1147825 - DNA, 15 bp, Homo sapiens
cctggagattcaaag

SEQ ID NO: 1147826 - DNA, 15 bp, Homo sapiens
gcctggagattcaaa

SEQ ID NO: 1147827 - DNA, 15 bp, Homo sapiens
tgcctggagattcaa

SEQ ID NO: 1147828 - DNA, 15 bp, Homo sapiens
ttgcctggagattca

SEQ ID NO: 1147829 - DNA, 15 bp, Homo sapiens
cttgcctggagattc

SEQ ID NO: 1147830 - DNA, 15 bp, Homo sapiens
gcttgcctggagatt

SEQ ID NO: 1147831 - DNA, 15 bp, Homo sapiens
tgcttgcctggagat

SEQ ID NO: 1147832 - DNA, 15 bp, Homo sapiens
atgcttgcctggaga

SEQ ID NO: 1147833 - DNA, 15 bp, Homo sapiens
aatgcttgcctggag

SEQ ID NO: 1147834 - DNA, 15 bp, Homo sapiens
aaatgcttgcctgga

SEQ ID NO: 1147835 - DNA, 15 bp, Homo sapiens
aaaatgcttgcctgg

SEQ ID NO: 1147836 - DNA, 15 bp, Homo sapiens
gaaaatgcttgcctg

SEQ ID NO: 1147837 - DNA, 15 bp, Homo sapiens
tgaaaatgcttgcct

SEQ ID NO: 1147838 - DNA, 15 bp, Homo sapiens
ttgaaaatgcttgcc

SEQ ID NO: 1147839 - DNA, 15 bp, Homo sapiens
attgaaaatgcttgc

SEQ ID NO: 1147840 - DNA, 15 bp, Homo sapiens
aattgaaaatgcttg

SEQ ID NO: 1147841 - DNA, 15 bp, Homo sapiens
aaattgaaaatgctt

SEQ ID NO: 1147842 - DNA, 15 bp, Homo sapiens
aaaattgaaaatgct

SEQ ID NO: 1147843 - DNA, 15 bp, Homo sapiens
gaaaattgaaaatgc

SEQ ID NO: 1147844 - DNA, 15 bp, Homo sapiens
ggaaaattgaaaatg

SEQ ID NO: 1147845 - DNA, 15 bp, Homo sapiens
aggaaaattgaaaat

SEQ ID NO: 1147846 - DNA, 15 bp, Homo sapiens
gaggaaaattgaaaa

SEQ ID NO: 1147847 - DNA, 15 bp, Homo sapiens
ggaggaaaattgaaa

SEQ ID NO: 1147848 - DNA, 15 bp, Homo sapiens
aggaggaaaattgaa

SEQ ID NO: 1147849 - DNA, 15 bp, Homo sapiens
taggaggaaaattga

SEQ ID NO: 1147850 - DNA, 15 bp, Homo sapiens
gtaggaggaaaattg

SEQ ID NO: 1147851 - DNA, 15 bp, Homo sapiens
tgtaggaggaaaatt

SEQ ID NO: 1147852 - DNA, 15 bp, Homo sapiens
atgtaggaggaaaat

SEQ ID NO: 1147853 - DNA, 15 bp, Homo sapiens
aatgtaggaggaaaa

SEQ ID NO: 1147854 - DNA, 15 bp, Homo sapiens
aaatgtaggaggaaa

SEQ ID NO: 1147855 - DNA, 15 bp, Homo sapiens
gaaatgtaggaggaa

SEQ ID NO: 1147856 - DNA, 15 bp, Homo sapiens
agaaatgtaggagga

SEQ ID NO: 1147857 - DNA, 15 bp, Homo sapiens
cagaaatgtaggagg

SEQ ID NO: 1147858 - DNA, 15 bp, Homo sapiens
tcagaaatgtaggag

SEQ ID NO: 1147859 - DNA, 15 bp, Homo sapiens
gtcagaaatgtagga

SEQ ID NO: 1147860 - DNA, 15 bp, Homo sapiens
agtcagaaatgtagg

SEQ ID NO: 1147861 - DNA, 15 bp, Homo sapiens
aagtcagaaatgtag

SEQ ID NO: 1147862 - DNA, 15 bp, Homo sapiens
caagtcagaaatgta

SEQ ID NO: 1147863 - DNA, 15 bp, Homo sapiens
ccaagtcagaaatgt

SEQ ID NO: 1147864 - DNA, 15 bp, Homo sapiens
tccaagtcagaaatg

SEQ ID NO: 1147865 - DNA, 15 bp, Homo sapiens
ttccaagtcagaaat

SEQ ID NO: 1147866 - DNA, 15 bp, Homo sapiens
attccaagtcagaaa

SEQ ID NO: 1147867 - DNA, 15 bp, Homo sapiens
gattccaagtcagaa

SEQ ID NO: 1147868 - DNA, 15 bp, Homo sapiens
tgattccaagtcaga

SEQ ID NO: 1147869 - DNA, 15 bp, Homo sapiens
gtgattccaagtcag

SEQ ID NO: 1147870 - DNA, 15 bp, Homo sapiens
agtgattccaagtca

SEQ ID NO: 1147871 - DNA, 15 bp, Homo sapiens
tagtgattccaagtc

SEQ ID NO: 1147872 - DNA, 15 bp, Homo sapiens
ttagtgattccaagt

SEQ ID NO: 1147873 - DNA, 15 bp, Homo sapiens
tttagtgattccaag

SEQ ID NO: 1147874 - DNA, 15 bp, Homo sapiens
gtttagtgattccaa

SEQ ID NO: 1147875 - DNA, 15 bp, Homo sapiens
cgtttagtgattcca

SEQ ID NO: 1147876 - DNA, 15 bp, Homo sapiens
acgtttagtgattcc

SEQ ID NO: 1147877 - DNA, 15 bp, Homo sapiens
aacgtttagtgattc

SEQ ID NO: 1147878 - DNA, 15 bp, Homo sapiens
taacgtttagtgatt

SEQ ID NO: 1147879 - DNA, 15 bp, Homo sapiens
ttaacgtttagtgat

SEQ ID NO: 1147880 - DNA, 15 bp, Homo sapiens
tttaacgtttagtga

SEQ ID NO: 1147881 - DNA, 15 bp, Homo sapiens
ttttaacgtttagtg

SEQ ID NO: 1147882 - DNA, 15 bp, Homo sapiens
attttaacgtttagt

SEQ ID NO: 1147883 - DNA, 15 bp, Homo sapiens
aattttaacgtttag

SEQ ID NO: 1147884 - DNA, 15 bp, Homo sapiens
gaattttaacgttta

SEQ ID NO: 1147885 - DNA, 15 bp, Homo sapiens
ggaattttaacgttt

SEQ ID NO: 1147886 - DNA, 15 bp, Homo sapiens
gggaattttaacgtt

SEQ ID NO: 1147887 - DNA, 15 bp, Homo sapiens
agggaattttaacgt

SEQ ID NO: 1147888 - DNA, 15 bp, Homo sapiens
aagggaattttaacg

SEQ ID NO: 1147889 - DNA, 15 bp, Homo sapiens
aaagggaattttaac

SEQ ID NO: 1147890 - DNA, 15 bp, Homo sapiens
aaaagggaattttaa

SEQ ID NO: 1147891 - DNA, 15 bp, Homo sapiens
aaaaagggaatttta

SEQ ID NO: 1147892 - DNA, 15 bp, Homo sapiens
gaaaaagggaatttt

SEQ ID NO: 1147893 - DNA, 15 bp, Homo sapiens
ggaaaaagggaattt

SEQ ID NO: 1147894 - DNA, 15 bp, Homo sapiens
aggaaaaagggaatt

SEQ ID NO: 1147895 - DNA, 15 bp, Homo sapiens
taggaaaaagggaat

SEQ ID NO: 1147896 - DNA, 15 bp, Homo sapiens
ttaggaaaaagggaa

SEQ ID NO: 1147897 - DNA, 15 bp, Homo sapiens
cttaggaaaaaggga

SEQ ID NO: 1147898 - DNA, 15 bp, Homo sapiens
tcttaggaaaaaggg

SEQ ID NO: 1147899 - DNA, 15 bp, Homo sapiens
gtcttaggaaaaagg

SEQ ID NO: 1147900 - DNA, 15 bp, Homo sapiens
agtcttaggaaaaag

SEQ ID NO: 1147901 - DNA, 15 bp, Homo sapiens
gagtcttaggaaaaa

SEQ ID NO: 1147902 - DNA, 15 bp, Homo sapiens
agagtcttaggaaaa

SEQ ID NO: 1147903 - DNA, 15 bp, Homo sapiens
tagagtcttaggaaa

SEQ ID NO: 1147904 - DNA, 15 bp, Homo sapiens
gtagagtcttaggaa

SEQ ID NO: 1147905 - DNA, 15 bp, Homo sapiens
tgtagagtcttagga

SEQ ID NO: 1147906 - DNA, 15 bp, Homo sapiens
ttgtagagtcttagg

SEQ ID NO: 1147907 - DNA, 15 bp, Homo sapiens
cttgtagagtcttag

SEQ ID NO: 1147908 - DNA, 15 bp, Homo sapiens
gcttgtagagtctta

SEQ ID NO: 1147909 - DNA, 15 bp, Homo sapiens
agcttgtagagtctt

SEQ ID NO: 1147910 - DNA, 15 bp, Homo sapiens
cagcttgtagagtct

SEQ ID NO: 1147911 - DNA, 15 bp, Homo sapiens
tcagcttgtagagtc

SEQ ID NO: 1147912 - DNA, 15 bp, Homo sapiens
atcagcttgtagagt

SEQ ID NO: 1147913 - DNA, 15 bp, Homo sapiens
tatcagcttgtagag

SEQ ID NO: 1147914 - DNA, 15 bp, Homo sapiens
gtatcagcttgtaga

SEQ ID NO: 1147915 - DNA, 15 bp, Homo sapiens
agtatcagcttgtag

SEQ ID NO: 1147916 - DNA, 15 bp, Homo sapiens
tagtatcagcttgta

SEQ ID NO: 1147917 - DNA, 15 bp, Homo sapiens
ctagtatcagcttgt

SEQ ID NO: 1147918 - DNA, 15 bp, Homo sapiens
gctagtatcagcttg

SEQ ID NO: 1147919 - DNA, 15 bp, Homo sapiens
agctagtatcagctt

SEQ ID NO: 1147920 - DNA, 15 bp, Homo sapiens
tagctagtatcagct

SEQ ID NO: 1147921 - DNA, 15 bp, Homo sapiens
ttagctagtatcagc

SEQ ID NO: 1147922 - DNA, 15 bp, Homo sapiens
gttagctagtatcag

SEQ ID NO: 1147923 - DNA, 15 bp, Homo sapiens
agttagctagtatca

SEQ ID NO: 1147924 - DNA, 15 bp, Homo sapiens
aagttagctagtatc

SEQ ID NO: 1147925 - DNA, 15 bp, Homo sapiens
caagttagctagtat

SEQ ID NO: 1147926 - DNA, 15 bp, Homo sapiens
ccaagttagctagta

SEQ ID NO: 1147927 - DNA, 15 bp, Homo sapiens
gccaagttagctagt

SEQ ID NO: 1147928 - DNA, 15 bp, Homo sapiens
agccaagttagctag

SEQ ID NO: 1147929 - DNA, 15 bp, Homo sapiens
aagccaagttagcta

SEQ ID NO: 1147930 - DNA, 15 bp, Homo sapiens
aaagccaagttagct

SEQ ID NO: 1147931 - DNA, 15 bp, Homo sapiens
caaagccaagttagc

SEQ ID NO: 1147932 - DNA, 15 bp, Homo sapiens
tcaaagccaagttag

SEQ ID NO: 1147933 - DNA, 15 bp, Homo sapiens
ttcaaagccaagtta

SEQ ID NO: 1147934 - DNA, 15 bp, Homo sapiens
cttcaaagccaagtt

SEQ ID NO: 1147935 - DNA, 15 bp, Homo sapiens
tcttcaaagccaagt

SEQ ID NO: 1147936 - DNA, 15 bp, Homo sapiens
ttcttcaaagccaag

SEQ ID NO: 1147937 - DNA, 15 bp, Homo sapiens
tttcttcaaagccaa

SEQ ID NO: 1147938 - DNA, 15 bp, Homo sapiens
ttttcttcaaagcca

SEQ ID NO: 1147939 - DNA, 15 bp, Homo sapiens
tttttcttcaaagcc

SEQ ID NO: 1147940 - DNA, 15 bp, Homo sapiens
atttttcttcaaagc

SEQ ID NO: 1147941 - DNA, 15 bp, Homo sapiens
gatttttcttcaaag

SEQ ID NO: 1147942 - DNA, 15 bp, Homo sapiens
tgatttttcttcaaa

SEQ ID NO: 1147943 - DNA, 15 bp, Homo sapiens
gtgatttttcttcaa

SEQ ID NO: 1147944 - DNA, 15 bp, Homo sapiens
agtgatttttcttca

SEQ ID NO: 1147945 - DNA, 15 bp, Homo sapiens
cagtgatttttcttc

SEQ ID NO: 1147946 - DNA, 15 bp, Homo sapiens
gcagtgatttttctt

SEQ ID NO: 1147947 - DNA, 15 bp, Homo sapiens
tgcagtgatttttct

SEQ ID NO: 1147948 - DNA, 15 bp, Homo sapiens
ttgcagtgatttttc

SEQ ID NO: 1147949 - DNA, 15 bp, Homo sapiens
gttgcagtgattttt

SEQ ID NO: 1147950 - DNA, 15 bp, Homo sapiens
tgttgcagtgatttt

SEQ ID NO: 1147951 - DNA, 15 bp, Homo sapiens
atgttgcagtgattt

SEQ ID NO: 1147952 - DNA, 15 bp, Homo sapiens
aatgttgcagtgatt

SEQ ID NO: 1147953 - DNA, 15 bp, Homo sapiens
aaatgttgcagtgat

SEQ ID NO: 1147954 - DNA, 15 bp, Homo sapiens
aaaatgttgcagtga

SEQ ID NO: 1147955 - DNA, 15 bp, Homo sapiens
taaaatgttgcagtg

SEQ ID NO: 1147956 - DNA, 15 bp, Homo sapiens
ataaaatgttgcagt

SEQ ID NO: 1147957 - DNA, 15 bp, Homo sapiens
tataaaatgttgcag

SEQ ID NO: 1147958 - DNA, 15 bp, Homo sapiens
ttataaaatgttgca

SEQ ID NO: 1147959 - DNA, 15 bp, Homo sapiens
tttataaaatgttgc

SEQ ID NO: 1147960 - DNA, 15 bp, Homo sapiens
atttataaaatgttg

SEQ ID NO: 1147961 - DNA, 15 bp, Homo sapiens
catttataaaatgtt

SEQ ID NO: 1147962 - DNA, 15 bp, Homo sapiens
ccatttataaaatgt

SEQ ID NO: 1147963 - DNA, 15 bp, Homo sapiens
tccatttataaaatg

SEQ ID NO: 1147964 - DNA, 15 bp, Homo sapiens
gtccatttataaaat

SEQ ID NO: 1147965 - DNA, 15 bp, Homo sapiens
tgtccatttataaaa

SEQ ID NO: 1147966 - DNA, 15 bp, Homo sapiens
ttgtccatttataaa

SEQ ID NO: 1147967 - DNA, 15 bp, Homo sapiens
tttgtccatttataa

SEQ ID NO: 1147968 - DNA, 15 bp, Homo sapiens
gtttgtccatttata

SEQ ID NO: 1147969 - DNA, 15 bp, Homo sapiens
agtttgtccatttat

SEQ ID NO: 1147970 - DNA, 15 bp, Homo sapiens
aagtttgtccattta

SEQ ID NO: 1147971 - DNA, 15 bp, Homo sapiens
aaagtttgtccattt

SEQ ID NO: 1147972 - DNA, 15 bp, Homo sapiens
caaagtttgtccatt

SEQ ID NO: 1147973 - DNA, 15 bp, Homo sapiens
gcaaagtttgtccat

SEQ ID NO: 1147974 - DNA, 15 bp, Homo sapiens
tgcaaagtttgtcca

SEQ ID NO: 1147975 - DNA, 15 bp, Homo sapiens
gtgcaaagtttgtcc

SEQ ID NO: 1147976 - DNA, 15 bp, Homo sapiens
tgtgcaaagtttgtc

SEQ ID NO: 1147977 - DNA, 15 bp, Homo sapiens
gtgtgcaaagtttgt

SEQ ID NO: 1147978 - DNA, 15 bp, Homo sapiens
tgtgtgcaaagtttg

SEQ ID NO: 1147979 - DNA, 15 bp, Homo sapiens
ttgtgtgcaaagttt

SEQ ID NO: 1147980 - DNA, 15 bp, Homo sapiens
cttgtgtgcaaagtt

SEQ ID NO: 1147981 - DNA, 15 bp, Homo sapiens
gcttgtgtgcaaagt

SEQ ID NO: 1147982 - DNA, 15 bp, Homo sapiens
agcttgtgtgcaaag

SEQ ID NO: 1147983 - DNA, 15 bp, Homo sapiens
tagcttgtgtgcaaa

SEQ ID NO: 1147984 - DNA, 15 bp, Homo sapiens
gtagcttgtgtgcaa

SEQ ID NO: 1147985 - DNA, 15 bp, Homo sapiens
tgtagcttgtgtgca

SEQ ID NO: 1147986 - DNA, 15 bp, Homo sapiens
ttgtagcttgtgtgc

SEQ ID NO: 1147987 - DNA, 15 bp, Homo sapiens
attgtagcttgtgtg

SEQ ID NO: 1147988 - DNA, 15 bp, Homo sapiens
gattgtagcttgtgt

SEQ ID NO: 1147989 - DNA, 15 bp, Homo sapiens
ggattgtagcttgtg

SEQ ID NO: 1147990 - DNA, 15 bp, Homo sapiens
tggattgtagcttgt

SEQ ID NO: 1147991 - DNA, 15 bp, Homo sapiens
ctggattgtagcttg

SEQ ID NO: 1147992 - DNA, 15 bp, Homo sapiens
cctggattgtagctt

SEQ ID NO: 1147993 - DNA, 15 bp, Homo sapiens
tcctggattgtagct

SEQ ID NO: 1147994 - DNA, 15 bp, Homo sapiens
ttcctggattgtagc

SEQ ID NO: 1147995 - DNA, 15 bp, Homo sapiens
tttcctggattgtag

SEQ ID NO: 1147996 - DNA, 15 bp, Homo sapiens
ttttcctggattgta

SEQ ID NO: 1147997 - DNA, 15 bp, Homo sapiens
attttcctggattgt

SEQ ID NO: 1147998 - DNA, 15 bp, Homo sapiens
gattttcctggattg

SEQ ID NO: 1147999 - DNA, 15 bp, Homo sapiens
agattttcctggatt

SEQ ID NO: 1148000 - DNA, 15 bp, Homo sapiens
cagattttcctggat

SEQ ID NO: 1148001 - DNA, 15 bp, Homo sapiens
acagattttcctgga

SEQ ID NO: 1148002 - DNA, 15 bp, Homo sapiens
gacagattttcctgg

SEQ ID NO: 1148003 - DNA, 15 bp, Homo sapiens
tgacagattttcctg

SEQ ID NO: 1148004 - DNA, 15 bp, Homo sapiens
ctgacagattttcct

SEQ ID NO: 1148005 - DNA, 15 bp, Homo sapiens
tctgacagattttcc

SEQ ID NO: 1148006 - DNA, 15 bp, Homo sapiens
atctgacagattttc

SEQ ID NO: 1148007 - DNA, 15 bp, Homo sapiens
aatctgacagatttt

SEQ ID NO: 1148008 - DNA, 15 bp, Homo sapiens
caatctgacagattt

SEQ ID NO: 1148009 - DNA, 15 bp, Homo sapiens
gcaatctgacagatt

SEQ ID NO: 1148010 - DNA, 15 bp, Homo sapiens
agcaatctgacagat

SEQ ID NO: 1148011 - DNA, 15 bp, Homo sapiens
tagcaatctgacaga

SEQ ID NO: 1148012 - DNA, 15 bp, Homo sapiens
gtagcaatctgacag

SEQ ID NO: 1148013 - DNA, 15 bp, Homo sapiens
agtagcaatctgaca

SEQ ID NO: 1148014 - DNA, 15 bp, Homo sapiens
cagtagcaatctgac

SEQ ID NO: 1148015 - DNA, 15 bp, Homo sapiens
tcagtagcaatctga

SEQ ID NO: 1148016 - DNA, 15 bp, Homo sapiens
atcagtagcaatctg

SEQ ID NO: 1148017 - DNA, 15 bp, Homo sapiens
tatcagtagcaatct

SEQ ID NO: 1148018 - DNA, 15 bp, Homo sapiens
atatcagtagcaatc

SEQ ID NO: 1148019 - DNA, 15 bp, Homo sapiens
aatatcagtagcaat

SEQ ID NO: 1148020 - DNA, 15 bp, Homo sapiens
gaatatcagtagcaa

SEQ ID NO: 1148021 - DNA, 15 bp, Homo sapiens
agaatatcagtagca

SEQ ID NO: 1148022 - DNA, 15 bp, Homo sapiens
gagaatatcagtagc

SEQ ID NO: 1148023 - DNA, 15 bp, Homo sapiens
tgagaatatcagtag

SEQ ID NO: 1148024 - DNA, 15 bp, Homo sapiens
ctgagaatatcagta

SEQ ID NO: 1148025 - DNA, 15 bp, Homo sapiens
gctgagaatatcagt

SEQ ID NO: 1148026 - DNA, 15 bp, Homo sapiens
agctgagaatatcag

SEQ ID NO: 1148027 - DNA, 15 bp, Homo sapiens
cagctgagaatatca

SEQ ID NO: 1148028 - DNA, 15 bp, Homo sapiens
acagctgagaatatc

SEQ ID NO: 1148029 - DNA, 15 bp, Homo sapiens
gacagctgagaatat

SEQ ID NO: 1148030 - DNA, 15 bp, Homo sapiens
ggacagctgagaata

SEQ ID NO: 1148031 - DNA, 15 bp, Homo sapiens
aggacagctgagaat

SEQ ID NO: 1148032 - DNA, 15 bp, Homo sapiens
caggacagctgagaa

SEQ ID NO: 1148033 - DNA, 15 bp, Homo sapiens
gcaggacagctgaga

SEQ ID NO: 1148034 - DNA, 15 bp, Homo sapiens
tgcaggacagctgag

SEQ ID NO: 1148035 - DNA, 15 bp, Homo sapiens
ctgcaggacagctga

SEQ ID NO: 1148036 - DNA, 15 bp, Homo sapiens
tctgcaggacagctg

SEQ ID NO: 1148037 - DNA, 15 bp, Homo sapiens
gtctgcaggacagct

SEQ ID NO: 1148038 - DNA, 15 bp, Homo sapiens
agtctgcaggacagc

SEQ ID NO: 1148039 - DNA, 15 bp, Homo sapiens
aagtctgcaggacag

SEQ ID NO: 1148040 - DNA, 15 bp, Homo sapiens
aaagtctgcaggaca

SEQ ID NO: 1148041 - DNA, 15 bp, Homo sapiens
taaagtctgcaggac

SEQ ID NO: 1148042 - DNA, 15 bp, Homo sapiens
ctaaagtctgcagga

SEQ ID NO: 1148043 - DNA, 15 bp, Homo sapiens
tctaaagtctgcagg

SEQ ID NO: 1148044 - DNA, 15 bp, Homo sapiens
ttctaaagtctgcag

SEQ ID NO: 1148045 - DNA, 15 bp, Homo sapiens
cttctaaagtctgca

SEQ ID NO: 1148046 - DNA, 15 bp, Homo sapiens
tcttctaaagtctgc

SEQ ID NO: 1148047 - DNA, 15 bp, Homo sapiens
ttcttctaaagtctg

SEQ ID NO: 1148048 - DNA, 15 bp, Homo sapiens
tttcttctaaagtct

SEQ ID NO: 1148049 - DNA, 15 bp, Homo sapiens
gtttcttctaaagtc

SEQ ID NO: 1148050 - DNA, 15 bp, Homo sapiens
agtttcttctaaagt

SEQ ID NO: 1148051 - DNA, 15 bp, Homo sapiens
tagtttcttctaaag

SEQ ID NO: 1148052 - DNA, 15 bp, Homo sapiens
ctagtttcttctaaa

SEQ ID NO: 1148053 - DNA, 15 bp, Homo sapiens
actagtttcttctaa

SEQ ID NO: 1148054 - DNA, 15 bp, Homo sapiens
aactagtttcttcta

SEQ ID NO: 1148055 - DNA, 15 bp, Homo sapiens
aaactagtttcttct

SEQ ID NO: 1148056 - DNA, 15 bp, Homo sapiens
caaactagtttcttc

SEQ ID NO: 1148057 - DNA, 15 bp, Homo sapiens
acaaactagtttctt

SEQ ID NO: 1148058 - DNA, 15 bp, Homo sapiens
tacaaactagtttct

SEQ ID NO: 1148059 - DNA, 15 bp, Homo sapiens
ttacaaactagtttc

SEQ ID NO: 1148060 - DNA, 15 bp, Homo sapiens
tttacaaactagttt

SEQ ID NO: 1148061 - DNA, 15 bp, Homo sapiens
gtttacaaactagtt

SEQ ID NO: 1148062 - DNA, 15 bp, Homo sapiens
agtttacaaactagt

SEQ ID NO: 1148063 - DNA, 15 bp, Homo sapiens
tagtttacaaactag

SEQ ID NO: 1148064 - DNA, 15 bp, Homo sapiens
gtagtttacaaacta

SEQ ID NO: 1148065 - DNA, 15 bp, Homo sapiens
agtagtttacaaact

SEQ ID NO: 1148066 - DNA, 15 bp, Homo sapiens
gagtagtttacaaac

SEQ ID NO: 1148067 - DNA, 15 bp, Homo sapiens
ggagtagtttacaaa

SEQ ID NO: 1148068 - DNA, 15 bp, Homo sapiens
tggagtagtttacaa

SEQ ID NO: 1148069 - DNA, 15 bp, Homo sapiens
ttggagtagtttaca

SEQ ID NO: 1148070 - DNA, 15 bp, Homo sapiens
tttggagtagtttac

SEQ ID NO: 1148071 - DNA, 15 bp, Homo sapiens
ctttggagtagttta

SEQ ID NO: 1148072 - DNA, 15 bp, Homo sapiens
tctttggagtagttt

SEQ ID NO: 1148073 - DNA, 15 bp, Homo sapiens
atctttggagtagtt

SEQ ID NO: 1148074 - DNA, 15 bp, Homo sapiens
aatctttggagtagt

SEQ ID NO: 1148075 - DNA, 15 bp, Homo sapiens
taatctttggagtag

SEQ ID NO: 1148076 - DNA, 15 bp, Homo sapiens
ttaatctttggagta

SEQ ID NO: 1148077 - DNA, 15 bp, Homo sapiens
gttaatctttggagt

SEQ ID NO: 1148078 - DNA, 15 bp, Homo sapiens
ggttaatctttggag

SEQ ID NO: 1148079 - DNA, 15 bp, Homo sapiens
aggttaatctttgga

SEQ ID NO: 1148080 - DNA, 15 bp, Homo sapiens
aaggttaatctttgg

SEQ ID NO: 1148081 - DNA, 15 bp, Homo sapiens
aaaggttaatctttg

SEQ ID NO: 1148082 - DNA, 15 bp, Homo sapiens
caaaggttaatcttt

SEQ ID NO: 1148083 - DNA, 15 bp, Homo sapiens
acaaaggttaatctt

SEQ ID NO: 1148084 - DNA, 15 bp, Homo sapiens
aacaaaggttaatct

SEQ ID NO: 1148085 - DNA, 15 bp, Homo sapiens
aaacaaaggttaatc

SEQ ID NO: 1148086 - DNA, 15 bp, Homo sapiens
aaaacaaaggttaat

SEQ ID NO: 1148087 - DNA, 15 bp, Homo sapiens
aaaaacaaaggttaa

SEQ ID NO: 1148088 - DNA, 15 bp, Homo sapiens
gaaaaacaaaggtta

SEQ ID NO: 1148089 - DNA, 15 bp, Homo sapiens
agaaaaacaaaggtt

SEQ ID NO: 1148090 - DNA, 15 bp, Homo sapiens
aagaaaaacaaaggt

SEQ ID NO: 1148091 - DNA, 15 bp, Homo sapiens
gaagaaaaacaaagg

SEQ ID NO: 1148092 - DNA, 15 bp, Homo sapiens
ggaagaaaaacaaag

SEQ ID NO: 1148093 - DNA, 15 bp, Homo sapiens
tggaagaaaaacaaa

SEQ ID NO: 1148094 - DNA, 15 bp, Homo sapiens
ttggaagaaaaacaa

SEQ ID NO: 1148095 - DNA, 15 bp, Homo sapiens
attggaagaaaaaca

SEQ ID NO: 1148096 - DNA, 15 bp, Homo sapiens
aattggaagaaaaac

SEQ ID NO: 1148097 - DNA, 15 bp, Homo sapiens
gaattggaagaaaaa

SEQ ID NO: 1148098 - DNA, 15 bp, Homo sapiens
agaattggaagaaaa

SEQ ID NO: 1148099 - DNA, 15 bp, Homo sapiens
cagaattggaagaaa

SEQ ID NO: 1148100 - DNA, 15 bp, Homo sapiens
acagaattggaagaa

SEQ ID NO: 1148101 - DNA, 15 bp, Homo sapiens
tacagaattggaaga

SEQ ID NO: 1148102 - DNA, 15 bp, Homo sapiens
ttacagaattggaag

SEQ ID NO: 1148103 - DNA, 15 bp, Homo sapiens
tttacagaattggaa

SEQ ID NO: 1148104 - DNA, 15 bp, Homo sapiens
ttttacagaattgga

SEQ ID NO: 1148105 - DNA, 15 bp, Homo sapiens
tttttacagaattgg

SEQ ID NO: 1148106 - DNA, 15 bp, Homo sapiens
ttttttacagaattg

SEQ ID NO: 1148107 - DNA, 15 bp, Homo sapiens
attttttacagaatt

SEQ ID NO: 1148108 - DNA, 15 bp, Homo sapiens
cattttttacagaat

SEQ ID NO: 1148109 - DNA, 15 bp, Homo sapiens
ccattttttacagaa

SEQ ID NO: 1148110 - DNA, 15 bp, Homo sapiens
gccattttttacaga

SEQ ID NO: 1148111 - DNA, 15 bp, Homo sapiens
agccattttttacag

SEQ ID NO: 1148112 - DNA, 15 bp, Homo sapiens
gagccattttttaca

SEQ ID NO: 1148113 - DNA, 15 bp, Homo sapiens
agagccattttttac

SEQ ID NO: 1148114 - DNA, 15 bp, Homo sapiens
aagagccatttttta

SEQ ID NO: 1148115 - DNA, 15 bp, Homo sapiens
taagagccatttttt

SEQ ID NO: 1148116 - DNA, 15 bp, Homo sapiens
gtaagagccattttt

SEQ ID NO: 1148117 - DNA, 15 bp, Homo sapiens
agtaagagccatttt

SEQ ID NO: 1148118 - DNA, 15 bp, Homo sapiens
cagtaagagccattt

SEQ ID NO: 1148119 - DNA, 15 bp, Homo sapiens
acagtaagagccatt

SEQ ID NO: 1148120 - DNA, 15 bp, Homo sapiens
tacagtaagagccat

SEQ ID NO: 1148121 - DNA, 15 bp, Homo sapiens
ctacagtaagagcca

SEQ ID NO: 1148122 - DNA, 15 bp, Homo sapiens
tctacagtaagagcc

SEQ ID NO: 1148123 - DNA, 15 bp, Homo sapiens
atctacagtaagagc

SEQ ID NO: 1148124 - DNA, 15 bp, Homo sapiens
gatctacagtaagag

SEQ ID NO: 1148125 - DNA, 15 bp, Homo sapiens
agatctacagtaaga

SEQ ID NO: 1148126 - DNA, 15 bp, Homo sapiens
aagatctacagtaag

SEQ ID NO: 1148127 - DNA, 15 bp, Homo sapiens
aaagatctacagtaa

SEQ ID NO: 1148128 - DNA, 15 bp, Homo sapiens
aaaagatctacagta

SEQ ID NO: 1148129 - DNA, 15 bp, Homo sapiens
aaaaagatctacagt

SEQ ID NO: 1148130 - DNA, 15 bp, Homo sapiens
caaaaagatctacag

SEQ ID NO: 1148131 - DNA, 15 bp, Homo sapiens
acaaaaagatctaca

SEQ ID NO: 1148132 - DNA, 15 bp, Homo sapiens
gacaaaaagatctac

SEQ ID NO: 1148133 - DNA, 15 bp, Homo sapiens
agacaaaaagatcta

SEQ ID NO: 1148134 - DNA, 15 bp, Homo sapiens
cagacaaaaagatct

SEQ ID NO: 1148135 - DNA, 15 bp, Homo sapiens
gcagacaaaaagatc

SEQ ID NO: 1148136 - DNA, 15 bp, Homo sapiens
tgcagacaaaaagat

SEQ ID NO: 1148137 - DNA, 15 bp, Homo sapiens
atgcagacaaaaaga

SEQ ID NO: 1148138 - DNA, 15 bp, Homo sapiens
aatgcagacaaaaag

SEQ ID NO: 1148139 - DNA, 15 bp, Homo sapiens
taatgcagacaaaaa

SEQ ID NO: 1148140 - DNA, 15 bp, Homo sapiens
ataatgcagacaaaa

SEQ ID NO: 1148141 - DNA, 15 bp, Homo sapiens
tataatgcagacaaa

SEQ ID NO: 1148142 - DNA, 15 bp, Homo sapiens
atataatgcagacaa

SEQ ID NO: 1148143 - DNA, 15 bp, Homo sapiens
tatataatgcagaca

SEQ ID NO: 1148144 - DNA, 15 bp, Homo sapiens
atatataatgcagac

SEQ ID NO: 1148145 - DNA, 15 bp, Homo sapiens
tatatataatgcaga

SEQ ID NO: 1148146 - DNA, 15 bp, Homo sapiens
ctatatataatgcag

SEQ ID NO: 1148147 - DNA, 15 bp, Homo sapiens
tctatatataatgca

SEQ ID NO: 1148148 - DNA, 15 bp, Homo sapiens
ctctatatataatgc

SEQ ID NO: 1148149 - DNA, 15 bp, Homo sapiens
actctatatataatg

SEQ ID NO: 1148150 - DNA, 15 bp, Homo sapiens
gactctatatataat

SEQ ID NO: 1148151 - DNA, 15 bp, Homo sapiens
tgactctatatataa

SEQ ID NO: 1148152 - DNA, 15 bp, Homo sapiens
atgactctatatata

SEQ ID NO: 1148153 - DNA, 15 bp, Homo sapiens
tatgactctatatat

SEQ ID NO: 1148154 - DNA, 15 bp, Homo sapiens
ctatgactctatata

SEQ ID NO: 1148155 - DNA, 15 bp, Homo sapiens
gctatgactctatat

SEQ ID NO: 1148156 - DNA, 15 bp, Homo sapiens
agctatgactctata

SEQ ID NO: 1148157 - DNA, 15 bp, Homo sapiens
aagctatgactctat

SEQ ID NO: 1148158 - DNA, 15 bp, Homo sapiens
aaagctatgactcta

SEQ ID NO: 1148159 - DNA, 15 bp, Homo sapiens
taaagctatgactct

SEQ ID NO: 1148160 - DNA, 15 bp, Homo sapiens
ttaaagctatgactc

SEQ ID NO: 1148161 - DNA, 15 bp, Homo sapiens
cttaaagctatgact

SEQ ID NO: 1148162 - DNA, 15 bp, Homo sapiens
tcttaaagctatgac

SEQ ID NO: 1148163 - DNA, 15 bp, Homo sapiens
atcttaaagctatga

SEQ ID NO: 1148164 - DNA, 15 bp, Homo sapiens
gatcttaaagctatg

SEQ ID NO: 1148165 - DNA, 15 bp, Homo sapiens
ggatcttaaagctat

SEQ ID NO: 1148166 - DNA, 15 bp, Homo sapiens
gggatcttaaagcta

SEQ ID NO: 1148167 - DNA, 15 bp, Homo sapiens
tgggatcttaaagct

SEQ ID NO: 1148168 - DNA, 15 bp, Homo sapiens
atgggatcttaaagc

SEQ ID NO: 1148169 - DNA, 15 bp, Homo sapiens
gatgggatcttaaag

SEQ ID NO: 1148170 - DNA, 15 bp, Homo sapiens
agatgggatcttaaa

SEQ ID NO: 1148171 - DNA, 15 bp, Homo sapiens
tagatgggatcttaa

SEQ ID NO: 1148172 - DNA, 15 bp, Homo sapiens
gtagatgggatctta

SEQ ID NO: 1148173 - DNA, 15 bp, Homo sapiens
tgtagatgggatctt

SEQ ID NO: 1148174 - DNA, 15 bp, Homo sapiens
ttgtagatgggatct

SEQ ID NO: 1148175 - DNA, 15 bp, Homo sapiens
tttgtagatgggatc

SEQ ID NO: 1148176 - DNA, 15 bp, Homo sapiens
ctttgtagatgggat

SEQ ID NO: 1148177 - DNA, 15 bp, Homo sapiens
gctttgtagatggga

SEQ ID NO: 1148178 - DNA, 15 bp, Homo sapiens
ggctttgtagatggg

SEQ ID NO: 1148179 - DNA, 15 bp, Homo sapiens
tggctttgtagatgg

SEQ ID NO: 1148180 - DNA, 15 bp, Homo sapiens
atggctttgtagatg

SEQ ID NO: 1148181 - DNA, 15 bp, Homo sapiens
gatggctttgtagat

SEQ ID NO: 1148182 - DNA, 15 bp, Homo sapiens
agatggctttgtaga

SEQ ID NO: 1148183 - DNA, 15 bp, Homo sapiens
gagatggctttgtag

SEQ ID NO: 1148184 - DNA, 15 bp, Homo sapiens
ggagatggctttgta

SEQ ID NO: 1148185 - DNA, 15 bp, Homo sapiens
aggagatggctttgt

SEQ ID NO: 1148186 - DNA, 15 bp, Homo sapiens
caggagatggctttg

SEQ ID NO: 1148187 - DNA, 15 bp, Homo sapiens
tcaggagatggcttt

SEQ ID NO: 1148188 - DNA, 15 bp, Homo sapiens
atcaggagatggctt

SEQ ID NO: 1148189 - DNA, 15 bp, Homo sapiens
tatcaggagatggct

SEQ ID NO: 1148190 - DNA, 15 bp, Homo sapiens
atatcaggagatggc

SEQ ID NO: 1148191 - DNA, 15 bp, Homo sapiens
tatatcaggagatgg

SEQ ID NO: 1148192 - DNA, 15 bp, Homo sapiens
ttatatcaggagatg

SEQ ID NO: 1148193 - DNA, 15 bp, Homo sapiens
cttatatcaggagat

SEQ ID NO: 1148194 - DNA, 15 bp, Homo sapiens
tcttatatcaggaga

SEQ ID NO: 1148195 - DNA, 15 bp, Homo sapiens
gtcttatatcaggag

SEQ ID NO: 1148196 - DNA, 15 bp, Homo sapiens
tgtcttatatcagga

SEQ ID NO: 1148197 - DNA, 15 bp, Homo sapiens
ttgtcttatatcagg

SEQ ID NO: 1148198 - DNA, 15 bp, Homo sapiens
tttgtcttatatcag

SEQ ID NO: 1148199 - DNA, 15 bp, Homo sapiens
ttttgtcttatatca

SEQ ID NO: 1148200 - DNA, 15 bp, Homo sapiens
gttttgtcttatatc

SEQ ID NO: 1148201 - DNA, 15 bp, Homo sapiens
agttttgtcttatat

SEQ ID NO: 1148202 - DNA, 15 bp, Homo sapiens
cagttttgtcttata

SEQ ID NO: 1148203 - DNA, 15 bp, Homo sapiens
ccagttttgtcttat

SEQ ID NO: 1148204 - DNA, 15 bp, Homo sapiens
gccagttttgtctta

SEQ ID NO: 1148205 - DNA, 15 bp, Homo sapiens
ggccagttttgtctt

SEQ ID NO: 1148206 - DNA, 15 bp, Homo sapiens
aggccagttttgtct

SEQ ID NO: 1148207 - DNA, 15 bp, Homo sapiens
aaggccagttttgtc

SEQ ID NO: 1148208 - DNA, 15 bp, Homo sapiens
aaaggccagttttgt

SEQ ID NO: 1148209 - DNA, 15 bp, Homo sapiens
aaaaggccagttttg

SEQ ID NO: 1148210 - DNA, 15 bp, Homo sapiens
gaaaaggccagtttt

SEQ ID NO: 1148211 - DNA, 15 bp, Homo sapiens
ggaaaaggccagttt

SEQ ID NO: 1148212 - DNA, 15 bp, Homo sapiens
gggaaaaggccagtt

SEQ ID NO: 1148213 - DNA, 15 bp, Homo sapiens
tgggaaaaggccagt

SEQ ID NO: 1148214 - DNA, 15 bp, Homo sapiens
ctgggaaaaggccag

SEQ ID NO: 1148215 - DNA, 15 bp, Homo sapiens
tctgggaaaaggcca

SEQ ID NO: 1148216 - DNA, 15 bp, Homo sapiens
ttctgggaaaaggcc

SEQ ID NO: 1148217 - DNA, 15 bp, Homo sapiens
cttctgggaaaaggc

SEQ ID NO: 1148218 - DNA, 15 bp, Homo sapiens
acttctgggaaaagg

SEQ ID NO: 1148219 - DNA, 15 bp, Homo sapiens
cacttctgggaaaag

SEQ ID NO: 1148220 - DNA, 15 bp, Homo sapiens
tcacttctgggaaaa

SEQ ID NO: 1148221 - DNA, 15 bp, Homo sapiens
ctcacttctgggaaa

SEQ ID NO: 1148222 - DNA, 15 bp, Homo sapiens
tctcacttctgggaa

SEQ ID NO: 1148223 - DNA, 15 bp, Homo sapiens
ttctcacttctggga

SEQ ID NO: 1148224 - DNA, 15 bp, Homo sapiens
cttctcacttctggg

SEQ ID NO: 1148225 - DNA, 15 bp, Homo sapiens
tcttctcacttctgg

SEQ ID NO: 1148226 - DNA, 15 bp, Homo sapiens
gtcttctcacttctg

SEQ ID NO: 1148227 - DNA, 15 bp, Homo sapiens
agtcttctcacttct

SEQ ID NO: 1148228 - DNA, 15 bp, Homo sapiens
tagtcttctcacttc

SEQ ID NO: 1148229 - DNA, 15 bp, Homo sapiens
ttagtcttctcactt

SEQ ID NO: 1148230 - DNA, 15 bp, Homo sapiens
attagtcttctcact

SEQ ID NO: 1148231 - DNA, 15 bp, Homo sapiens
aattagtcttctcac

SEQ ID NO: 1148232 - DNA, 15 bp, Homo sapiens
taattagtcttctca

SEQ ID NO: 1148233 - DNA, 15 bp, Homo sapiens
ctaattagtcttctc

SEQ ID NO: 1148234 - DNA, 15 bp, Homo sapiens
tctaattagtcttct

SEQ ID NO: 1148235 - DNA, 15 bp, Homo sapiens
gtctaattagtcttc

SEQ ID NO: 1148236 - DNA, 15 bp, Homo sapiens
agtctaattagtctt

SEQ ID NO: 1148237 - DNA, 15 bp, Homo sapiens
cagtctaattagtct

SEQ ID NO: 1148238 - DNA, 15 bp, Homo sapiens
ccagtctaattagtc

SEQ ID NO: 1148239 - DNA, 15 bp, Homo sapiens
gccagtctaattagt

SEQ ID NO: 1148240 - DNA, 15 bp, Homo sapiens
ggccagtctaattag

SEQ ID NO: 1148241 - DNA, 15 bp, Homo sapiens
aggccagtctaatta

SEQ ID NO: 1148242 - DNA, 15 bp, Homo sapiens
aaggccagtctaatt

SEQ ID NO: 1148243 - DNA, 15 bp, Homo sapiens
aaaggccagtctaat

SEQ ID NO: 1148244 - DNA, 15 bp, Homo sapiens
aaaaggccagtctaa

SEQ ID NO: 1148245 - DNA, 15 bp, Homo sapiens
gaaaaggccagtcta

SEQ ID NO: 1148246 - DNA, 15 bp, Homo sapiens
ggaaaaggccagtct

SEQ ID NO: 1148247 - DNA, 15 bp, Homo sapiens
gggaaaaggccagtc

SEQ ID NO: 1148248 - DNA, 15 bp, Homo sapiens
cagtcttctcacttc

SEQ ID NO: 1148249 - DNA, 15 bp, Homo sapiens
ccagtcttctcactt

SEQ ID NO: 1148250 - DNA, 15 bp, Homo sapiens
accagtcttctcact

SEQ ID NO: 1148251 - DNA, 15 bp, Homo sapiens
aaccagtcttctcac

SEQ ID NO: 1148252 - DNA, 15 bp, Homo sapiens
aaaccagtcttctca

SEQ ID NO: 1148253 - DNA, 15 bp, Homo sapiens
taaaccagtcttctc

SEQ ID NO: 1148254 - DNA, 15 bp, Homo sapiens
ttaaaccagtcttct

SEQ ID NO: 1148255 - DNA, 15 bp, Homo sapiens
attaaaccagtcttc

SEQ ID NO: 1148256 - DNA, 15 bp, Homo sapiens
cattaaaccagtctt

SEQ ID NO: 1148257 - DNA, 15 bp, Homo sapiens
tcattaaaccagtct

SEQ ID NO: 1148258 - DNA, 15 bp, Homo sapiens
ctcattaaaccagtc

SEQ ID NO: 1148259 - DNA, 15 bp, Homo sapiens
tctcattaaaccagt

SEQ ID NO: 1148260 - DNA, 15 bp, Homo sapiens
atctcattaaaccag

SEQ ID NO: 1148261 - DNA, 15 bp, Homo sapiens
gatctcattaaacca

SEQ ID NO: 1148262 - DNA, 15 bp, Homo sapiens
ggatctcattaaacc

SEQ ID NO: 1148263 - DNA, 15 bp, Homo sapiens
aggatctcattaaac

SEQ ID NO: 1148264 - DNA, 15 bp, Homo sapiens
aaggatctcattaaa

SEQ ID NO: 1148265 - DNA, 15 bp, Homo sapiens
aaaggatctcattaa

SEQ ID NO: 1148266 - DNA, 15 bp, Homo sapiens
caaaggatctcatta

SEQ ID NO: 1148267 - DNA, 15 bp, Homo sapiens
gcaaaggatctcatt

SEQ ID NO: 1148268 - DNA, 15 bp, Homo sapiens
ggcaaaggatctcat

SEQ ID NO: 1148269 - DNA, 15 bp, Homo sapiens
tggcaaaggatctca

SEQ ID NO: 1148270 - DNA, 15 bp, Homo sapiens
atggcaaaggatctc

SEQ ID NO: 1148271 - DNA, 15 bp, Homo sapiens
aatggcaaaggatct

SEQ ID NO: 1148272 - DNA, 15 bp, Homo sapiens
gaatggcaaaggatc

SEQ ID NO: 1148273 - DNA, 15 bp, Homo sapiens
tgaatggcaaaggat

SEQ ID NO: 1148274 - DNA, 15 bp, Homo sapiens
ctgaatggcaaagga

SEQ ID NO: 1148275 - DNA, 15 bp, Homo sapiens
gctgaatggcaaagg

SEQ ID NO: 1148276 - DNA, 15 bp, Homo sapiens
agctgaatggcaaag

SEQ ID NO: 1148277 - DNA, 15 bp, Homo sapiens
tagctgaatggcaaa

SEQ ID NO: 1148278 - DNA, 15 bp, Homo sapiens
gtagctgaatggcaa

SEQ ID NO: 1148279 - DNA, 15 bp, Homo sapiens
agtagctgaatggca

SEQ ID NO: 1148280 - DNA, 15 bp, Homo sapiens
tagtagctgaatggc

SEQ ID NO: 1148281 - DNA, 15 bp, Homo sapiens
ttagtagctgaatgg

SEQ ID NO: 1148282 - DNA, 15 bp, Homo sapiens
gttagtagctgaatg

SEQ ID NO: 1148283 - DNA, 15 bp, Homo sapiens
agttagtagctgaat

SEQ ID NO: 1148284 - DNA, 15 bp, Homo sapiens
gagttagtagctgaa

SEQ ID NO: 1148285 - DNA, 15 bp, Homo sapiens
tgagttagtagctga

SEQ ID NO: 1148286 - DNA, 15 bp, Homo sapiens
ctgagttagtagctg

SEQ ID NO: 1148287 - DNA, 15 bp, Homo sapiens
actgagttagtagct

SEQ ID NO: 1148288 - DNA, 15 bp, Homo sapiens
aactgagttagtagc

SEQ ID NO: 1148289 - DNA, 15 bp, Homo sapiens
aaactgagttagtag

SEQ ID NO: 1148290 - DNA, 15 bp, Homo sapiens
aaaactgagttagta

SEQ ID NO: 1148291 - DNA, 15 bp, Homo sapiens
aaaaactgagttagt

SEQ ID NO: 1148292 - DNA, 15 bp, Homo sapiens
gaaaaactgagttag

SEQ ID NO: 1148293 - DNA, 15 bp, Homo sapiens
agaaaaactgagtta

SEQ ID NO: 1148294 - DNA, 15 bp, Homo sapiens
gagaaaaactgagtt

SEQ ID NO: 1148295 - DNA, 15 bp, Homo sapiens
agagaaaaactgagt

SEQ ID NO: 1148296 - DNA, 15 bp, Homo sapiens
gagagaaaaactgag

SEQ ID NO: 1148297 - DNA, 15 bp, Homo sapiens
agagagaaaaactga

SEQ ID NO: 1148298 - DNA, 15 bp, Homo sapiens
tagagagaaaaactg

SEQ ID NO: 1148299 - DNA, 15 bp, Homo sapiens
gtagagagaaaaact

SEQ ID NO: 1148300 - DNA, 15 bp, Homo sapiens
ttgtagagagaaaaa

SEQ ID NO: 1148301 - DNA, 15 bp, Homo sapiens
gttgtagagagaaaa

SEQ ID NO: 1148302 - DNA, 15 bp, Homo sapiens
agttgtagagagaaa

SEQ ID NO: 1148303 - DNA, 15 bp, Homo sapiens
tagttgtagagagaa

SEQ ID NO: 1148304 - DNA, 15 bp, Homo sapiens
gtagttgtagagaga

SEQ ID NO: 1148305 - DNA, 15 bp, Homo sapiens
ggtagttgtagagag

SEQ ID NO: 1148306 - DNA, 15 bp, Homo sapiens
tggtagttgtagaga

SEQ ID NO: 1148307 - DNA, 15 bp, Homo sapiens
ttggtagttgtagag

SEQ ID NO: 1148308 - DNA, 15 bp, Homo sapiens
gttggtagttgtaga

SEQ ID NO: 1148309 - DNA, 15 bp, Homo sapiens
agttggtagttgtag

SEQ ID NO: 1148310 - DNA, 15 bp, Homo sapiens
gagttggtagttgta

SEQ ID NO: 1148311 - DNA, 15 bp, Homo sapiens
tgagttggtagttgt

SEQ ID NO: 1148312 - DNA, 15 bp, Homo sapiens
ttgagttggtagttg

SEQ ID NO: 1148313 - DNA, 15 bp, Homo sapiens
gttgagttggtagtt

SEQ ID NO: 1148314 - DNA, 15 bp, Homo sapiens
agttgagttggtagt

SEQ ID NO: 1148315 - DNA, 15 bp, Homo sapiens
aagttgagttggtag

SEQ ID NO: 1148316 - DNA, 15 bp, Homo sapiens
aaagttgagttggta

SEQ ID NO: 1148317 - DNA, 15 bp, Homo sapiens
aaaagttgagttggt

SEQ ID NO: 1148318 - DNA, 15 bp, Homo sapiens
aaaaagttgagttgg

SEQ ID NO: 1148319 - DNA, 15 bp, Homo sapiens
caaaaagttgagttg

SEQ ID NO: 1148320 - DNA, 15 bp, Homo sapiens
acaaaaagttgagtt

SEQ ID NO: 1148321 - DNA, 15 bp, Homo sapiens
cacaaaaagttgagt

SEQ ID NO: 1148322 - DNA, 15 bp, Homo sapiens
acacaaaaagttgag

SEQ ID NO: 1148323 - DNA, 15 bp, Homo sapiens
tacacaaaaagttga

SEQ ID NO: 1148324 - DNA, 15 bp, Homo sapiens
atacacaaaaagttg

SEQ ID NO: 1148325 - DNA, 15 bp, Homo sapiens
catacacaaaaagtt

SEQ ID NO: 1148326 - DNA, 15 bp, Homo sapiens
tcatacacaaaaagt

SEQ ID NO: 1148327 - DNA, 15 bp, Homo sapiens
ttcatacacaaaaag

SEQ ID NO: 1148328 - DNA, 15 bp, Homo sapiens
tttcatacacaaaaa

SEQ ID NO: 1148329 - DNA, 15 bp, Homo sapiens
gtttcatacacaaaa

SEQ ID NO: 1148330 - DNA, 15 bp, Homo sapiens
tgtttcatacacaaa

SEQ ID NO: 1148331 - DNA, 15 bp, Homo sapiens
atgtttcatacacaa

SEQ ID NO: 1148332 - DNA, 15 bp, Homo sapiens
aatgtttcatacaca

SEQ ID NO: 1148333 - DNA, 15 bp, Homo sapiens
taatgtttcatacac

SEQ ID NO: 1148334 - DNA, 15 bp, Homo sapiens
ctaatgtttcataca

SEQ ID NO: 1148335 - DNA, 15 bp, Homo sapiens
tctaatgtttcatac

SEQ ID NO: 1148336 - DNA, 15 bp, Homo sapiens
ttctaatgtttcata

SEQ ID NO: 1148337 - DNA, 15 bp, Homo sapiens
tttctaatgtttcat

SEQ ID NO: 1148338 - DNA, 15 bp, Homo sapiens
ttttctaatgtttca

SEQ ID NO: 1148339 - DNA, 15 bp, Homo sapiens
cttttctaatgtttc

SEQ ID NO: 1148340 - DNA, 15 bp, Homo sapiens
acttttctaatgttt

SEQ ID NO: 1148341 - DNA, 15 bp, Homo sapiens
aacttttctaatgtt

SEQ ID NO: 1148342 - DNA, 15 bp, Homo sapiens
aaacttttctaatgt

SEQ ID NO: 1148343 - DNA, 15 bp, Homo sapiens
gaaacttttctaatg

SEQ ID NO: 1148344 - DNA, 15 bp, Homo sapiens
tgaaacttttctaat

SEQ ID NO: 1148345 - DNA, 15 bp, Homo sapiens
ttgaaacttttctaa

SEQ ID NO: 1148346 - DNA, 15 bp, Homo sapiens
tttgaaacttttcta

SEQ ID NO: 1148347 - DNA, 15 bp, Homo sapiens
gtttgaaacttttct

SEQ ID NO: 1148348 - DNA, 15 bp, Homo sapiens
tgtttgaaacttttc

SEQ ID NO: 1148349 - DNA, 15 bp, Homo sapiens
ctgtttgaaactttt

SEQ ID NO: 1148350 - DNA, 15 bp, Homo sapiens
cctgtttgaaacttt

SEQ ID NO: 1148351 - DNA, 15 bp, Homo sapiens
ccctgtttgaaactt

SEQ ID NO: 1148352 - DNA, 15 bp, Homo sapiens
cccctgtttgaaact

SEQ ID NO: 1148353 - DNA, 15 bp, Homo sapiens
tcccctgtttgaaac

SEQ ID NO: 1148354 - DNA, 15 bp, Homo sapiens
ttcccctgtttgaaa

SEQ ID NO: 1148355 - DNA, 15 bp, Homo sapiens
attcccctgtttgaa

SEQ ID NO: 1148356 - DNA, 15 bp, Homo sapiens
aattcccctgtttga

SEQ ID NO: 1148357 - DNA, 15 bp, Homo sapiens
taattcccctgtttg

SEQ ID NO: 1148358 - DNA, 15 bp, Homo sapiens
gtaattcccctgttt

SEQ ID NO: 1148359 - DNA, 15 bp, Homo sapiens
agtaattcccctgtt

SEQ ID NO: 1148360 - DNA, 15 bp, Homo sapiens
cagtaattcccctgt

SEQ ID NO: 1148361 - DNA, 15 bp, Homo sapiens
ccagtaattcccctg

SEQ ID NO: 1148362 - DNA, 15 bp, Homo sapiens
cccagtaattcccct

SEQ ID NO: 1148363 - DNA, 15 bp, Homo sapiens
ccccagtaattcccc

SEQ ID NO: 1148364 - DNA, 15 bp, Homo sapiens
gccccagtaattccc

SEQ ID NO: 1148365 - DNA, 15 bp, Homo sapiens
agccccagtaattcc

SEQ ID NO: 1148366 - DNA, 15 bp, Homo sapiens
gagccccagtaattc

SEQ ID NO: 1148367 - DNA, 15 bp, Homo sapiens
tgagccccagtaatt

SEQ ID NO: 1148368 - DNA, 15 bp, Homo sapiens
ctgagccccagtaat

SEQ ID NO: 1148369 - DNA, 15 bp, Homo sapiens
tctgagccccagtaa

SEQ ID NO: 1148370 - DNA, 15 bp, Homo sapiens
ttctgagccccagta

SEQ ID NO: 1148371 - DNA, 15 bp, Homo sapiens
tttctgagccccagt

SEQ ID NO: 1148372 - DNA, 15 bp, Homo sapiens
ttttctgagccccag

SEQ ID NO: 1148373 - DNA, 15 bp, Homo sapiens
cttttctgagcccca

SEQ ID NO: 1148374 - DNA, 15 bp, Homo sapiens
ccttttctgagcccc

SEQ ID NO: 1148375 - DNA, 15 bp, Homo sapiens
tccttttctgagccc

SEQ ID NO: 1148376 - DNA, 15 bp, Homo sapiens
gtccttttctgagcc

SEQ ID NO: 1148377 - DNA, 15 bp, Homo sapiens
tgtccttttctgagc

SEQ ID NO: 1148378 - DNA, 15 bp, Homo sapiens
gtgtccttttctgag

SEQ ID NO: 1148379 - DNA, 15 bp, Homo sapiens
ggtgtccttttctga

SEQ ID NO: 1148380 - DNA, 15 bp, Homo sapiens
gggtgtccttttctg

SEQ ID NO: 1148381 - DNA, 15 bp, Homo sapiens
tgggtgtccttttct

SEQ ID NO: 1148382 - DNA, 15 bp, Homo sapiens
ttgggtgtccttttc

SEQ ID NO: 1148383 - DNA, 15 bp, Homo sapiens
tttgggtgtcctttt

SEQ ID NO: 1148384 - DNA, 15 bp, Homo sapiens
ttttgggtgtccttt

SEQ ID NO: 1148385 - DNA, 15 bp, Homo sapiens
tttttgggtgtcctt

SEQ ID NO: 1148386 - DNA, 15 bp, Homo sapiens
atttttgggtgtcct

SEQ ID NO: 1148387 - DNA, 15 bp, Homo sapiens
tatttttgggtgtcc

SEQ ID NO: 1148388 - DNA, 15 bp, Homo sapiens
atatttttgggtgtc

SEQ ID NO: 1148389 - DNA, 15 bp, Homo sapiens
catatttttgggtgt

SEQ ID NO: 1148390 - DNA, 15 bp, Homo sapiens
ccatatttttgggtg

SEQ ID NO: 1148391 - DNA, 15 bp, Homo sapiens
gccatatttttgggt

SEQ ID NO: 1148392 - DNA, 15 bp, Homo sapiens
tgccatatttttggg

SEQ ID NO: 1148393 - DNA, 15 bp, Homo sapiens
gtgccatatttttgg

SEQ ID NO: 1148394 - DNA, 15 bp, Homo sapiens
agtgccatatttttg

SEQ ID NO: 1148395 - DNA, 15 bp, Homo sapiens
gagtgccatattttt

SEQ ID NO: 1148396 - DNA, 15 bp, Homo sapiens
agagtgccatatttt

SEQ ID NO: 1148397 - DNA, 15 bp, Homo sapiens
cagagtgccatattt

SEQ ID NO: 1148398 - DNA, 15 bp, Homo sapiens
tcagagtgccatatt

SEQ ID NO: 1148399 - DNA, 15 bp, Homo sapiens
atcagagtgccatat

SEQ ID NO: 1148400 - DNA, 15 bp, Homo sapiens
tatcagagtgccata

SEQ ID NO: 1148401 - DNA, 15 bp, Homo sapiens
atatcagagtgccat

SEQ ID NO: 1148402 - DNA, 15 bp, Homo sapiens
catatcagagtgcca

SEQ ID NO: 1148403 - DNA, 15 bp, Homo sapiens
gcatatcagagtgcc

SEQ ID NO: 1148404 - DNA, 15 bp, Homo sapiens
agcatatcagagtgc

SEQ ID NO: 1148405 - DNA, 15 bp, Homo sapiens
cagcatatcagagtg

SEQ ID NO: 1148406 - DNA, 15 bp, Homo sapiens
ccagcatatcagagt

SEQ ID NO: 1148407 - DNA, 15 bp, Homo sapiens
accagcatatcagag

SEQ ID NO: 1148408 - DNA, 15 bp, Homo sapiens
aaccagcatatcaga

SEQ ID NO: 1148409 - DNA, 15 bp, Homo sapiens
taaccagcatatcag

SEQ ID NO: 1148410 - DNA, 15 bp, Homo sapiens
gtaaccagcatatca

SEQ ID NO: 1148411 - DNA, 15 bp, Homo sapiens
agtaaccagcatatc

SEQ ID NO: 1148412 - DNA, 15 bp, Homo sapiens
aagtaaccagcatat

SEQ ID NO: 1148413 - DNA, 15 bp, Homo sapiens
gaagtaaccagcata

SEQ ID NO: 1148414 - DNA, 15 bp, Homo sapiens
tgaagtaaccagcat

SEQ ID NO: 1148415 - DNA, 15 bp, Homo sapiens
ttgaagtaaccagca

SEQ ID NO: 1148416 - DNA, 15 bp, Homo sapiens
tttgaagtaaccagc

SEQ ID NO: 1148417 - DNA, 15 bp, Homo sapiens
atttgaagtaaccag

SEQ ID NO: 1148418 - DNA, 15 bp, Homo sapiens
aatttgaagtaacca

SEQ ID NO: 1148419 - DNA, 15 bp, Homo sapiens
taatttgaagtaacc

SEQ ID NO: 1148420 - DNA, 15 bp, Homo sapiens
ttaatttgaagtaac

SEQ ID NO: 1148421 - DNA, 15 bp, Homo sapiens
tttaatttgaagtaa

SEQ ID NO: 1148422 - DNA, 15 bp, Homo sapiens
ctttaatttgaagta

SEQ ID NO: 1148423 - DNA, 15 bp, Homo sapiens
cctttaatttgaagt

SEQ ID NO: 1148424 - DNA, 15 bp, Homo sapiens
gcctttaatttgaag

SEQ ID NO: 1148425 - DNA, 15 bp, Homo sapiens
agcctttaatttgaa

SEQ ID NO: 1148426 - DNA, 15 bp, Homo sapiens
gagcctttaatttga

SEQ ID NO: 1148427 - DNA, 15 bp, Homo sapiens
ggagcctttaatttg

SEQ ID NO: 1148428 - DNA, 15 bp, Homo sapiens
gggagcctttaattt

SEQ ID NO: 1148429 - DNA, 15 bp, Homo sapiens
cgggagcctttaatt

SEQ ID NO: 1148430 - DNA, 15 bp, Homo sapiens
ccgggagcctttaat

SEQ ID NO: 1148431 - DNA, 15 bp, Homo sapiens
tccgggagcctttaa

SEQ ID NO: 1148432 - DNA, 15 bp, Homo sapiens
ttccgggagccttta

SEQ ID NO: 1148433 - DNA, 15 bp, Homo sapiens
cttccgggagccttt

SEQ ID NO: 1148434 - DNA, 15 bp, Homo sapiens
gcttccgggagcctt

SEQ ID NO: 1148435 - DNA, 15 bp, Homo sapiens
ggcttccgggagcct

SEQ ID NO: 1148436 - DNA, 15 bp, Homo sapiens
tggcttccgggagcc

SEQ ID NO: 1148437 - DNA, 15 bp, Homo sapiens
ctggcttccgggagc

SEQ ID NO: 1148438 - DNA, 15 bp, Homo sapiens
actggcttccgggag

SEQ ID NO: 1148439 - DNA, 15 bp, Homo sapiens
tactggcttccggga

SEQ ID NO: 1148440 - DNA, 15 bp, Homo sapiens
ctactggcttccggg

SEQ ID NO: 1148441 - DNA, 15 bp, Homo sapiens
tctactggcttccgg

SEQ ID NO: 1148442 - DNA, 15 bp, Homo sapiens
gtctactggcttccg

SEQ ID NO: 1148443 - DNA, 15 bp, Homo sapiens
tgtctactggcttcc

SEQ ID NO: 1148444 - DNA, 15 bp, Homo sapiens
gtgtctactggcttc

SEQ ID NO: 1148445 - DNA, 15 bp, Homo sapiens
agtgtctactggctt

SEQ ID NO: 1148446 - DNA, 15 bp, Homo sapiens
cagtgtctactggct

SEQ ID NO: 1148447 - DNA, 15 bp, Homo sapiens
ccagtgtctactggc

SEQ ID NO: 1148448 - DNA, 15 bp, Homo sapiens
tccagtgtctactgg

SEQ ID NO: 1148449 - DNA, 15 bp, Homo sapiens
ttccagtgtctactg

SEQ ID NO: 1148450 - DNA, 15 bp, Homo sapiens
cttccagtgtctact

SEQ ID NO: 1148451 - DNA, 15 bp, Homo sapiens
tcttccagtgtctac

SEQ ID NO: 1148452 - DNA, 15 bp, Homo sapiens
ttcttccagtgtcta

SEQ ID NO: 1148453 - DNA, 15 bp, Homo sapiens
cttcttccagtgtct

SEQ ID NO: 1148454 - DNA, 15 bp, Homo sapiens
acttcttccagtgtc

SEQ ID NO: 1148455 - DNA, 15 bp, Homo sapiens
aacttcttccagtgt

SEQ ID NO: 1148456 - DNA, 15 bp, Homo sapiens
caacttcttccagtg

SEQ ID NO: 1148457 - DNA, 15 bp, Homo sapiens
acaacttcttccagt

SEQ ID NO: 1148458 - DNA, 15 bp, Homo sapiens
aacaacttcttccag

SEQ ID NO: 1148459 - DNA, 15 bp, Homo sapiens
gaacaacttcttcca

SEQ ID NO: 1148460 - DNA, 15 bp, Homo sapiens
ggaacaacttcttcc

SEQ ID NO: 1148461 - DNA, 15 bp, Homo sapiens
gggaacaacttcttc

SEQ ID NO: 1148462 - DNA, 15 bp, Homo sapiens
ggggaacaacttctt

SEQ ID NO: 1148463 - DNA, 15 bp, Homo sapiens
cggggaacaacttct

SEQ ID NO: 1148464 - DNA, 15 bp, Homo sapiens
tcggggaacaacttc

SEQ ID NO: 1148465 - DNA, 15 bp, Homo sapiens
ttcggggaacaactt

SEQ ID NO: 1148466 - DNA, 15 bp, Homo sapiens
cttcggggaacaact

SEQ ID NO: 1148467 - DNA, 15 bp, Homo sapiens
acttcggggaacaac

SEQ ID NO: 1148468 - DNA, 15 bp, Homo sapiens
aacttcggggaacaa

SEQ ID NO: 1148469 - DNA, 15 bp, Homo sapiens
gaacttcggggaaca

SEQ ID NO: 1148470 - DNA, 15 bp, Homo sapiens
agaacttcggggaac

SEQ ID NO: 1148471 - DNA, 15 bp, Homo sapiens
gagaacttcggggaa

SEQ ID NO: 1148472 - DNA, 15 bp, Homo sapiens
agagaacttcgggga

SEQ ID NO: 1148473 - DNA, 15 bp, Homo sapiens
aagagaacttcgggg

SEQ ID NO: 1148474 - DNA, 15 bp, Homo sapiens
taagagaacttcggg

SEQ ID NO: 1148475 - DNA, 15 bp, Homo sapiens
gtaagagaacttcgg

SEQ ID NO: 1148476 - DNA, 15 bp, Homo sapiens
ggtaagagaacttcg

SEQ ID NO: 1148477 - DNA, 15 bp, Homo sapiens
aggtaagagaacttc

SEQ ID NO: 1148478 - DNA, 15 bp, Homo sapiens
caggtaagagaactt

SEQ ID NO: 1148479 - DNA, 15 bp, Homo sapiens
gcaggtaagagaact

SEQ ID NO: 1148480 - DNA, 15 bp, Homo sapiens
ggcaggtaagagaac

SEQ ID NO: 1148481 - DNA, 15 bp, Homo sapiens
aggcaggtaagagaa

SEQ ID NO: 1148482 - DNA, 15 bp, Homo sapiens
aaggcaggtaagaga

SEQ ID NO: 1148483 - DNA, 15 bp, Homo sapiens
taaggcaggtaagag

SEQ ID NO: 1148484 - DNA, 15 bp, Homo sapiens
ttaaggcaggtaaga

SEQ ID NO: 1148485 - DNA, 15 bp, Homo sapiens
cttaaggcaggtaag

SEQ ID NO: 1148486 - DNA, 15 bp, Homo sapiens
acttaaggcaggtaa

SEQ ID NO: 1148487 - DNA, 15 bp, Homo sapiens
gacttaaggcaggta

SEQ ID NO: 1148488 - DNA, 15 bp, Homo sapiens
ggacttaaggcaggt

SEQ ID NO: 1148489 - DNA, 15 bp, Homo sapiens
tggacttaaggcagg

SEQ ID NO: 1148490 - DNA, 15 bp, Homo sapiens
ctggacttaaggcag

SEQ ID NO: 1148491 - DNA, 15 bp, Homo sapiens
tctggacttaaggca

SEQ ID NO: 1148492 - DNA, 15 bp, Homo sapiens
atctggacttaaggc

SEQ ID NO: 1148493 - DNA, 15 bp, Homo sapiens
gatctggacttaagg

SEQ ID NO: 1148494 - DNA, 15 bp, Homo sapiens
agatctggacttaag

SEQ ID NO: 1148495 - DNA, 15 bp, Homo sapiens
cagatctggacttaa

SEQ ID NO: 1148496 - DNA, 15 bp, Homo sapiens
gcagatctggactta

SEQ ID NO: 1148497 - DNA, 15 bp, Homo sapiens
ggcagatctggactt

SEQ ID NO: 1148498 - DNA, 15 bp, Homo sapiens
tggcagatctggact

SEQ ID NO: 1148499 - DNA, 15 bp, Homo sapiens
ttggcagatctggac

SEQ ID NO: 1148500 - DNA, 15 bp, Homo sapiens
tttggcagatctgga

SEQ ID NO: 1148501 - DNA, 15 bp, Homo sapiens
ctttggcagatctgg

SEQ ID NO: 1148502 - DNA, 15 bp, Homo sapiens
tctttggcagatctg

SEQ ID NO: 1148503 - DNA, 15 bp, Homo sapiens
ttctttggcagatct

SEQ ID NO: 1148504 - DNA, 15 bp, Homo sapiens
cttctttggcagatc

SEQ ID NO: 1148505 - DNA, 15 bp, Homo sapiens
tcttctttggcagat

SEQ ID NO: 1148506 - DNA, 15 bp, Homo sapiens
ttcttctttggcaga

SEQ ID NO: 1148507 - DNA, 15 bp, Homo sapiens
tttcttctttggcag

SEQ ID NO: 1148508 - DNA, 15 bp, Homo sapiens
ttttcttctttggca

SEQ ID NO: 1148509 - DNA, 15 bp, Homo sapiens
gttttcttctttggc

SEQ ID NO: 1148510 - DNA, 15 bp, Homo sapiens
tgttttcttctttgg

SEQ ID NO: 1148511 - DNA, 15 bp, Homo sapiens
ttgttttcttctttg

SEQ ID NO: 1148512 - DNA, 15 bp, Homo sapiens
attgttttcttcttt

SEQ ID NO: 1148513 - DNA, 15 bp, Homo sapiens
aattgttttcttctt

SEQ ID NO: 1148514 - DNA, 15 bp, Homo sapiens
taattgttttcttct

SEQ ID NO: 1148515 - DNA, 15 bp, Homo sapiens
gtaattgttttcttc

SEQ ID NO: 1148516 - DNA, 15 bp, Homo sapiens
ggtaattgttttctt

SEQ ID NO: 1148517 - DNA, 15 bp, Homo sapiens
aggtaattgttttct

SEQ ID NO: 1148518 - DNA, 15 bp, Homo sapiens
gaggtaattgttttc

SEQ ID NO: 1148519 - DNA, 15 bp, Homo sapiens
agaggtaattgtttt

SEQ ID NO: 1148520 - DNA, 15 bp, Homo sapiens
cagaggtaattgttt

SEQ ID NO: 1148521 - DNA, 15 bp, Homo sapiens
ccagaggtaattgtt

SEQ ID NO: 1148522 - DNA, 15 bp, Homo sapiens
accagaggtaattgt

SEQ ID NO: 1148523 - DNA, 15 bp, Homo sapiens
gaccagaggtaattg

SEQ ID NO: 1148524 - DNA, 15 bp, Homo sapiens
ggaccagaggtaatt

SEQ ID NO: 1148525 - DNA, 15 bp, Homo sapiens
gggaccagaggtaat

SEQ ID NO: 1148526 - DNA, 15 bp, Homo sapiens
agggaccagaggtaa

SEQ ID NO: 1148527 - DNA, 15 bp, Homo sapiens
aagggaccagaggta

SEQ ID NO: 1148528 - DNA, 15 bp, Homo sapiens
aaagggaccagaggt

SEQ ID NO: 1148529 - DNA, 15 bp, Homo sapiens
aaaagggaccagagg

SEQ ID NO: 1148530 - DNA, 15 bp, Homo sapiens
gaaaagggaccagag

SEQ ID NO: 1148531 - DNA, 15 bp, Homo sapiens
agaaaagggaccaga

SEQ ID NO: 1148532 - DNA, 15 bp, Homo sapiens
cagaaaagggaccag

SEQ ID NO: 1148533 - DNA, 15 bp, Homo sapiens
acagaaaagggacca

SEQ ID NO: 1148534 - DNA, 15 bp, Homo sapiens
cacagaaaagggacc

SEQ ID NO: 1148535 - DNA, 15 bp, Homo sapiens
acacagaaaagggac

SEQ ID NO: 1148536 - DNA, 15 bp, Homo sapiens
aacacagaaaaggga

SEQ ID NO: 1148537 - DNA, 15 bp, Homo sapiens
aaacacagaaaaggg

SEQ ID NO: 1148538 - DNA, 15 bp, Homo sapiens
aaaacacagaaaagg

SEQ ID NO: 1148539 - DNA, 15 bp, Homo sapiens
gaaaacacagaaaag

SEQ ID NO: 1148540 - DNA, 15 bp, Homo sapiens
tgaaaacacagaaaa

SEQ ID NO: 1148541 - DNA, 15 bp, Homo sapiens
atgaaaacacagaaa

SEQ ID NO: 1148542 - DNA, 15 bp, Homo sapiens
aatgaaaacacagaa

SEQ ID NO: 1148543 - DNA, 15 bp, Homo sapiens
taatgaaaacacaga

SEQ ID NO: 1148544 - DNA, 15 bp, Homo sapiens
ttaatgaaaacacag

SEQ ID NO: 1148545 - DNA, 15 bp, Homo sapiens
gttaatgaaaacaca

SEQ ID NO: 1148546 - DNA, 15 bp, Homo sapiens
agttaatgaaaacac

SEQ ID NO: 1148547 - DNA, 15 bp, Homo sapiens
aagttaatgaaaaca

SEQ ID NO: 1148548 - DNA, 15 bp, Homo sapiens
taagttaatgaaaac

SEQ ID NO: 1148549 - DNA, 15 bp, Homo sapiens
ttaagttaatgaaaa

SEQ ID NO: 1148550 - DNA, 15 bp, Homo sapiens
gttaagttaatgaaa

SEQ ID NO: 1148551 - DNA, 15 bp, Homo sapiens
agttaagttaatgaa

SEQ ID NO: 1148552 - DNA, 15 bp, Homo sapiens
gagttaagttaatga

SEQ ID NO: 1148553 - DNA, 15 bp, Homo sapiens
tgagttaagttaatg

SEQ ID NO: 1148554 - DNA, 15 bp, Homo sapiens
atgagttaagttaat

SEQ ID NO: 1148555 - DNA, 15 bp, Homo sapiens
catgagttaagttaa

SEQ ID NO: 1148556 - DNA, 15 bp, Homo sapiens
acatgagttaagtta

SEQ ID NO: 1148557 - DNA, 15 bp, Homo sapiens
aacatgagttaagtt

SEQ ID NO: 1148558 - DNA, 15 bp, Homo sapiens
taacatgagttaagt

SEQ ID NO: 1148559 - DNA, 15 bp, Homo sapiens
gtaacatgagttaag

SEQ ID NO: 1148560 - DNA, 15 bp, Homo sapiens
tgtaacatgagttaa

SEQ ID NO: 1148561 - DNA, 15 bp, Homo sapiens
ctgtaacatgagtta

SEQ ID NO: 1148562 - DNA, 15 bp, Homo sapiens
cctgtaacatgagtt

SEQ ID NO: 1148563 - DNA, 15 bp, Homo sapiens
tcctgtaacatgagt

SEQ ID NO: 1148564 - DNA, 15 bp, Homo sapiens
ttcctgtaacatgag

SEQ ID NO: 1148565 - DNA, 15 bp, Homo sapiens
cttcctgtaacatga

SEQ ID NO: 1148566 - DNA, 15 bp, Homo sapiens
tcttcctgtaacatg

SEQ ID NO: 1148567 - DNA, 15 bp, Homo sapiens
ttcttcctgtaacat

SEQ ID NO: 1148568 - DNA, 15 bp, Homo sapiens
attcttcctgtaaca

SEQ ID NO: 1148569 - DNA, 15 bp, Homo sapiens
cattcttcctgtaac

SEQ ID NO: 1148570 - DNA, 15 bp, Homo sapiens
tcattcttcctgtaa

SEQ ID NO: 1148571 - DNA, 15 bp, Homo sapiens
gtcattcttcctgta

SEQ ID NO: 1148572 - DNA, 15 bp, Homo sapiens
agtcattcttcctgt

SEQ ID NO: 1148573 - DNA, 15 bp, Homo sapiens
tagtcattcttcctg

SEQ ID NO: 1148574 - DNA, 15 bp, Homo sapiens
ttagtcattcttcct

SEQ ID NO: 1148575 - DNA, 15 bp, Homo sapiens
tttagtcattcttcc

SEQ ID NO: 1148576 - DNA, 15 bp, Homo sapiens
ctttagtcattcttc

SEQ ID NO: 1148577 - DNA, 15 bp, Homo sapiens
actttagtcattctt

SEQ ID NO: 1148578 - DNA, 15 bp, Homo sapiens
aactttagtcattct

SEQ ID NO: 1148579 - DNA, 15 bp, Homo sapiens
aaactttagtcattc

SEQ ID NO: 1148580 - DNA, 15 bp, Homo sapiens
caaactttagtcatt

SEQ ID NO: 1148581 - DNA, 15 bp, Homo sapiens
acaaactttagtcat

SEQ ID NO: 1148582 - DNA, 15 bp, Homo sapiens
gacaaactttagtca

SEQ ID NO: 1148583 - DNA, 15 bp, Homo sapiens
tgacaaactttagtc

SEQ ID NO: 1148584 - DNA, 15 bp, Homo sapiens
ttgacaaactttagt

SEQ ID NO: 1148585 - DNA, 15 bp, Homo sapiens
gttgacaaactttag

SEQ ID NO: 1148586 - DNA, 15 bp, Homo sapiens
tgttgacaaacttta

SEQ ID NO: 1148587 - DNA, 15 bp, Homo sapiens
gtgttgacaaacttt

SEQ ID NO: 1148588 - DNA, 15 bp, Homo sapiens
tgtgttgacaaactt

SEQ ID NO: 1148589 - DNA, 15 bp, Homo sapiens
gtgtgttgacaaact

SEQ ID NO: 1148590 - DNA, 15 bp, Homo sapiens
ggtgtgttgacaaac

SEQ ID NO: 1148591 - DNA, 15 bp, Homo sapiens
aggtgtgttgacaaa

SEQ ID NO: 1148592 - DNA, 15 bp, Homo sapiens
caggtgtgttgacaa

SEQ ID NO: 1148593 - DNA, 15 bp, Homo sapiens
ccaggtgtgttgaca

SEQ ID NO: 1148594 - DNA, 15 bp, Homo sapiens
tccaggtgtgttgac

SEQ ID NO: 1148595 - DNA, 15 bp, Homo sapiens
gtccaggtgtgttga

SEQ ID NO: 1148596 - DNA, 15 bp, Homo sapiens
tgtccaggtgtgttg

SEQ ID NO: 1148597 - DNA, 15 bp, Homo sapiens
ctgtccaggtgtgtt

SEQ ID NO: 1148598 - DNA, 15 bp, Homo sapiens
gtctgtccaggtgtg

SEQ ID NO: 1148599 - DNA, 15 bp, Homo sapiens
agtctgtccaggtgt

SEQ ID NO: 1148600 - DNA, 15 bp, Homo sapiens
aagtctgtccaggtg

SEQ ID NO: 1148601 - DNA, 15 bp, Homo sapiens
aaagtctgtccaggt

SEQ ID NO: 1148602 - DNA, 15 bp, Homo sapiens
aaaagtctgtccagg

SEQ ID NO: 1148603 - DNA, 15 bp, Homo sapiens
caaaagtctgtccag

SEQ ID NO: 1148604 - DNA, 15 bp, Homo sapiens
acaaaagtctgtcca

SEQ ID NO: 1148605 - DNA, 15 bp, Homo sapiens
gacaaaagtctgtcc

SEQ ID NO: 1148606 - DNA, 15 bp, Homo sapiens
tgacaaaagtctgtc

SEQ ID NO: 1148607 - DNA, 15 bp, Homo sapiens
gtgacaaaagtctgt

SEQ ID NO: 1148608 - DNA, 15 bp, Homo sapiens
tgtgacaaaagtctg

SEQ ID NO: 1148609 - DNA, 15 bp, Homo sapiens
gtgtgacaaaagtct

SEQ ID NO: 1148610 - DNA, 15 bp, Homo sapiens
tgtgtgacaaaagtc

SEQ ID NO: 1148611 - DNA, 15 bp, Homo sapiens
atgtgtgacaaaagt

SEQ ID NO: 1148612 - DNA, 15 bp, Homo sapiens
gatgtgtgacaaaag

SEQ ID NO: 1148613 - DNA, 15 bp, Homo sapiens
tgatgtgtgacaaaa

SEQ ID NO: 1148614 - DNA, 15 bp, Homo sapiens
atgatgtgtgacaaa

SEQ ID NO: 1148615 - DNA, 15 bp, Homo sapiens
aatgatgtgtgacaa

SEQ ID NO: 1148616 - DNA, 15 bp, Homo sapiens
caatgatgtgtgaca

SEQ ID NO: 1148617 - DNA, 15 bp, Homo sapiens
acaatgatgtgtgac

SEQ ID NO: 1148618 - DNA, 15 bp, Homo sapiens
gacaatgatgtgtga

SEQ ID NO: 1148619 - DNA, 15 bp, Homo sapiens
agacaatgatgtgtg

SEQ ID NO: 1148620 - DNA, 15 bp, Homo sapiens
aagacaatgatgtgt

SEQ ID NO: 1148621 - DNA, 15 bp, Homo sapiens
gaagacaatgatgtg

SEQ ID NO: 1148622 - DNA, 15 bp, Homo sapiens
agaagacaatgatgt

SEQ ID NO: 1148623 - DNA, 15 bp, Homo sapiens
tagaagacaatgatg

SEQ ID NO: 1148624 - DNA, 15 bp, Homo sapiens
atagaagacaatgat

SEQ ID NO: 1148625 - DNA, 15 bp, Homo sapiens
aatagaagacaatga

SEQ ID NO: 1148626 - DNA, 15 bp, Homo sapiens
aaatagaagacaatg

SEQ ID NO: 1148627 - DNA, 15 bp, Homo sapiens
gaaatagaagacaat

SEQ ID NO: 1148628 - DNA, 15 bp, Homo sapiens
tgaaatagaagacaa

SEQ ID NO: 1148629 - DNA, 15 bp, Homo sapiens
ctgaaatagaagaca

SEQ ID NO: 1148630 - DNA, 15 bp, Homo sapiens
actgaaatagaagac

SEQ ID NO: 1148631 - DNA, 15 bp, Homo sapiens
gactgaaatagaaga

SEQ ID NO: 1148632 - DNA, 15 bp, Homo sapiens
ggactgaaatagaag

SEQ ID NO: 1148633 - DNA, 15 bp, Homo sapiens
tggactgaaatagaa

SEQ ID NO: 1148634 - DNA, 15 bp, Homo sapiens
ttggactgaaataga

SEQ ID NO: 1148635 - DNA, 15 bp, Homo sapiens
attggactgaaatag

SEQ ID NO: 1148636 - DNA, 15 bp, Homo sapiens
aattggactgaaata

SEQ ID NO: 1148637 - DNA, 15 bp, Homo sapiens
gaattggactgaaat

SEQ ID NO: 1148638 - DNA, 15 bp, Homo sapiens
tgaattggactgaaa

SEQ ID NO: 1148639 - DNA, 15 bp, Homo sapiens
ctgaattggactgaa

SEQ ID NO: 1148640 - DNA, 15 bp, Homo sapiens
actgaattggactga

SEQ ID NO: 1148641 - DNA, 15 bp, Homo sapiens
tactgaattggactg

SEQ ID NO: 1148642 - DNA, 15 bp, Homo sapiens
atactgaattggact

SEQ ID NO: 1148643 - DNA, 15 bp, Homo sapiens
aatactgaattggac

SEQ ID NO: 1148644 - DNA, 15 bp, Homo sapiens
aaatactgaattgga

SEQ ID NO: 1148645 - DNA, 15 bp, Homo sapiens
aaaatactgaattgg

SEQ ID NO: 1148646 - DNA, 15 bp, Homo sapiens
taaaatactgaattg

SEQ ID NO: 1148647 - DNA, 15 bp, Homo sapiens
ataaaatactgaatt

SEQ ID NO: 1148648 - DNA, 15 bp, Homo sapiens
aataaaatactgaat

SEQ ID NO: 1148649 - DNA, 15 bp, Homo sapiens
aaaataaaatactga

SEQ ID NO: 1148650 - DNA, 15 bp, Homo sapiens
taaaataaaatactg

SEQ ID NO: 1148651 - DNA, 15 bp, Homo sapiens
gtaaaataaaatact

SEQ ID NO: 1148652 - DNA, 15 bp, Homo sapiens
agtaaaataaaatac

SEQ ID NO: 1148653 - DNA, 15 bp, Homo sapiens
taagtaaaataaaat

SEQ ID NO: 1148654 - DNA, 15 bp, Homo sapiens
taaaataaataagta

SEQ ID NO: 1148655 - DNA, 15 bp, Homo sapiens
ataaaataaataagt

SEQ ID NO: 1148656 - DNA, 15 bp, Homo sapiens
aataaaataaataag

SEQ ID NO: 1148657 - DNA, 15 bp, Homo sapiens
aaaataaaataaata

SEQ ID NO: 1148658 - DNA, 15 bp, Homo sapiens
caaaaataaataaaa

SEQ ID NO: 1148659 - DNA, 15 bp, Homo sapiens
cgactccgtctcaaa

SEQ ID NO: 1148660 - DNA, 15 bp, Homo sapiens
gcgactccgtctcaa

SEQ ID NO: 1148661 - DNA, 15 bp, Homo sapiens
ggcgactccgtctca

SEQ ID NO: 1148662 - DNA, 15 bp, Homo sapiens
aggcgactccgtctc

SEQ ID NO: 1148663 - DNA, 15 bp, Homo sapiens
aaggcgactccgtct

SEQ ID NO: 1148664 - DNA, 15 bp, Homo sapiens
gaaggcgactccgtc

SEQ ID NO: 1148665 - DNA, 15 bp, Homo sapiens
agaaggcgactccgt

SEQ ID NO: 1148666 - DNA, 15 bp, Homo sapiens
cagaaggcgactccg

SEQ ID NO: 1148667 - DNA, 15 bp, Homo sapiens
acagaaggcgactcc

SEQ ID NO: 1148668 - DNA, 15 bp, Homo sapiens
gacagaaggcgactc

SEQ ID NO: 1148669 - DNA, 15 bp, Homo sapiens
cgacagaaggcgact

SEQ ID NO: 1148670 - DNA, 15 bp, Homo sapiens
gcgacagaaggcgac

SEQ ID NO: 1148671 - DNA, 15 bp, Homo sapiens
tgcgacagaaggcga

SEQ ID NO: 1148672 - DNA, 15 bp, Homo sapiens
gtgcgacagaaggcg

SEQ ID NO: 1148673 - DNA, 15 bp, Homo sapiens
tgtgcgacagaaggc

SEQ ID NO: 1148674 - DNA, 15 bp, Homo sapiens
ctgtgcgacagaagg

SEQ ID NO: 1148675 - DNA, 15 bp, Homo sapiens
cctgtgcgacagaag

SEQ ID NO: 1148676 - DNA, 15 bp, Homo sapiens
gcctgtgcgacagaa

SEQ ID NO: 1148677 - DNA, 15 bp, Homo sapiens
agcctgtgcgacaga

SEQ ID NO: 1148678 - DNA, 15 bp, Homo sapiens
cagcctgtgcgacag

SEQ ID NO: 1148679 - DNA, 15 bp, Homo sapiens
ccagcctgtgcgaca

SEQ ID NO: 1148680 - DNA, 15 bp, Homo sapiens
tccagcctgtgcgac

SEQ ID NO: 1148681 - DNA, 15 bp, Homo sapiens
acagctactcgggag

SEQ ID NO: 1148682 - DNA, 15 bp, Homo sapiens
cacagctactcggga

SEQ ID NO: 1148683 - DNA, 15 bp, Homo sapiens
tcacagctactcggg

SEQ ID NO: 1148684 - DNA, 15 bp, Homo sapiens
atcacagctactcgg

SEQ ID NO: 1148685 - DNA, 15 bp, Homo sapiens
aatcacagctactcg

SEQ ID NO: 1148686 - DNA, 15 bp, Homo sapiens
gtgcctgtaatcaca

SEQ ID NO: 1148687 - DNA, 15 bp, Homo sapiens
tgtgcctgtaatcac

SEQ ID NO: 1148688 - DNA, 15 bp, Homo sapiens
atgtgcctgtaatca

SEQ ID NO: 1148689 - DNA, 15 bp, Homo sapiens
tatgtgcctgtaatc

SEQ ID NO: 1148690 - DNA, 15 bp, Homo sapiens
gtatgtgcctgtaat

SEQ ID NO: 1148691 - DNA, 15 bp, Homo sapiens
ggtatgtgcctgtaa

SEQ ID NO: 1148692 - DNA, 15 bp, Homo sapiens
tggtatgtgcctgta

SEQ ID NO: 1148693 - DNA, 15 bp, Homo sapiens
gtggtatgtgcctgt

SEQ ID NO: 1148694 - DNA, 15 bp, Homo sapiens
ggtggtatgtgcctg

SEQ ID NO: 1148695 - DNA, 15 bp, Homo sapiens
tggtggtatgtgcct

SEQ ID NO: 1148696 - DNA, 15 bp, Homo sapiens
atggtggtatgtgcc

SEQ ID NO: 1148697 - DNA, 15 bp, Homo sapiens
catggtggtatgtgc

SEQ ID NO: 1148698 - DNA, 15 bp, Homo sapiens
gcatggtggtatgtg

SEQ ID NO: 1148699 - DNA, 15 bp, Homo sapiens
ggcatggtggtatgt

SEQ ID NO: 1148700 - DNA, 15 bp, Homo sapiens
gggcatggtggtatg

SEQ ID NO: 1148701 - DNA, 15 bp, Homo sapiens
tgggcatggtggtat

SEQ ID NO: 1148702 - DNA, 15 bp, Homo sapiens
ctgggcatggtggta

SEQ ID NO: 1148703 - DNA, 15 bp, Homo sapiens
caaaaaaattagctg

SEQ ID NO: 1148704 - DNA, 15 bp, Homo sapiens
acaaaaaaattagct

SEQ ID NO: 1148705 - DNA, 15 bp, Homo sapiens
taacaaaaaaattag

SEQ ID NO: 1148706 - DNA, 15 bp, Homo sapiens
ataacaaaaaaatta

SEQ ID NO: 1148707 - DNA, 15 bp, Homo sapiens
aataacaaaaaaatt

SEQ ID NO: 1148708 - DNA, 15 bp, Homo sapiens
aaataacaaaaaaat

SEQ ID NO: 1148709 - DNA, 15 bp, Homo sapiens
aaaataacaaaaaaa

SEQ ID NO: 1148710 - DNA, 15 bp, Homo sapiens
aaaaataacaaaaaa

SEQ ID NO: 1148711 - DNA, 15 bp, Homo sapiens
taaaaataacaaaaa

SEQ ID NO: 1148712 - DNA, 15 bp, Homo sapiens
ctaaaaataacaaaa

SEQ ID NO: 1148713 - DNA, 15 bp, Homo sapiens
actaaaaataacaaa

SEQ ID NO: 1148714 - DNA, 15 bp, Homo sapiens
tactaaaaataacaa

SEQ ID NO: 1148715 - DNA, 15 bp, Homo sapiens
ctactaaaaataaca

SEQ ID NO: 1148716 - DNA, 15 bp, Homo sapiens
tctactaaaaataac

SEQ ID NO: 1148717 - DNA, 15 bp, Homo sapiens
aggtgaaaccccgtc

SEQ ID NO: 1148718 - DNA, 15 bp, Homo sapiens
aaggtgaaaccccgt

SEQ ID NO: 1148719 - DNA, 15 bp, Homo sapiens
caaggtgaaaccccg

SEQ ID NO: 1148720 - DNA, 15 bp, Homo sapiens
ccaaggtgaaacccc

SEQ ID NO: 1148721 - DNA, 15 bp, Homo sapiens
gccaaggtgaaaccc

SEQ ID NO: 1148722 - DNA, 15 bp, Homo sapiens
ggccaaggtgaaacc

SEQ ID NO: 1148723 - DNA, 15 bp, Homo sapiens
tggccaaggtgaaac

SEQ ID NO: 1148724 - DNA, 15 bp, Homo sapiens
gtggccaaggtgaaa

SEQ ID NO: 1148725 - DNA, 15 bp, Homo sapiens
tgtggccaaggtgaa

SEQ ID NO: 1148726 - DNA, 15 bp, Homo sapiens
gtgtggccaaggtga

SEQ ID NO: 1148727 - DNA, 15 bp, Homo sapiens
agtgtggccaaggtg

SEQ ID NO: 1148728 - DNA, 15 bp, Homo sapiens
cagtgtggccaaggt

SEQ ID NO: 1148729 - DNA, 15 bp, Homo sapiens
ccagtgtggccaagg

SEQ ID NO: 1148730 - DNA, 15 bp, Homo sapiens
accagtgtggccaag

SEQ ID NO: 1148731 - DNA, 15 bp, Homo sapiens
gaccagtgtggccaa

SEQ ID NO: 1148732 - DNA, 15 bp, Homo sapiens
agaccagtgtggcca

SEQ ID NO: 1148733 - DNA, 15 bp, Homo sapiens
gagaccagtgtggcc

SEQ ID NO: 1148734 - DNA, 15 bp, Homo sapiens
cgagaccagtgtggc

SEQ ID NO: 1148735 - DNA, 15 bp, Homo sapiens
tcgagaccagtgtgg

SEQ ID NO: 1148736 - DNA, 15 bp, Homo sapiens
ctcgagaccagtgtg

SEQ ID NO: 1148737 - DNA, 15 bp, Homo sapiens
gctcgagaccagtgt

SEQ ID NO: 1148738 - DNA, 15 bp, Homo sapiens
agctcgagaccagtg

SEQ ID NO: 1148739 - DNA, 15 bp, Homo sapiens
gagctcgagaccagt

SEQ ID NO: 1148740 - DNA, 15 bp, Homo sapiens
ggagctcgagaccag

SEQ ID NO: 1148741 - DNA, 15 bp, Homo sapiens
aggagctcgagacca

SEQ ID NO: 1148742 - DNA, 15 bp, Homo sapiens
caggagctcgagacc

SEQ ID NO: 1148743 - DNA, 15 bp, Homo sapiens
tcaggagctcgagac

SEQ ID NO: 1148744 - DNA, 15 bp, Homo sapiens
gtcaggagctcgaga

SEQ ID NO: 1148745 - DNA, 15 bp, Homo sapiens
ggtcaggagctcgag

SEQ ID NO: 1148746 - DNA, 15 bp, Homo sapiens
aggtcaggagctcga

SEQ ID NO: 1148747 - DNA, 15 bp, Homo sapiens
gaggtcaggagctcg

SEQ ID NO: 1148748 - DNA, 15 bp, Homo sapiens
tgaggtcaggagctc

SEQ ID NO: 1148749 - DNA, 15 bp, Homo sapiens
ctgaggtcaggagct

SEQ ID NO: 1148750 - DNA, 15 bp, Homo sapiens
cctgaggtcaggagc

SEQ ID NO: 1148751 - DNA, 15 bp, Homo sapiens
tgcctgaggtcagga

SEQ ID NO: 1148752 - DNA, 15 bp, Homo sapiens
ctgcctgaggtcagg

SEQ ID NO: 1148753 - DNA, 15 bp, Homo sapiens
actgcctgaggtcag

SEQ ID NO: 1148754 - DNA, 15 bp, Homo sapiens
gactgcctgaggtca

SEQ ID NO: 1148755 - DNA, 15 bp, Homo sapiens
ggactgcctgaggtc

SEQ ID NO: 1148756 - DNA, 15 bp, Homo sapiens
tggactgcctgaggt

SEQ ID NO: 1148757 - DNA, 15 bp, Homo sapiens
gtggactgcctgagg

SEQ ID NO: 1148758 - DNA, 15 bp, Homo sapiens
ggtggactgcctgag

SEQ ID NO: 1148759 - DNA, 15 bp, Homo sapiens
gggtggactgcctga

SEQ ID NO: 1148760 - DNA, 15 bp, Homo sapiens
cgggtggactgcctg

SEQ ID NO: 1148761 - DNA, 15 bp, Homo sapiens
gcgggtggactgcct

SEQ ID NO: 1148762 - DNA, 15 bp, Homo sapiens
ggcgggtggactgcc

SEQ ID NO: 1148763 - DNA, 15 bp, Homo sapiens
aggcgggtggactgc

SEQ ID NO: 1148764 - DNA, 15 bp, Homo sapiens
gaggcgggtggactg

SEQ ID NO: 1148765 - DNA, 15 bp, Homo sapiens
tgaggcgggtggact

SEQ ID NO: 1148766 - DNA, 15 bp, Homo sapiens
ctgaggcgggtggac

SEQ ID NO: 1148767 - DNA, 15 bp, Homo sapiens
gccgcggtggctcac

SEQ ID NO: 1148768 - DNA, 15 bp, Homo sapiens
agccgcggtggctca

SEQ ID NO: 1148769 - DNA, 15 bp, Homo sapiens
cagccgcggtggctc

SEQ ID NO: 1148770 - DNA, 15 bp, Homo sapiens
ccagccgcggtggct

SEQ ID NO: 1148771 - DNA, 15 bp, Homo sapiens
gccagccgcggtggc

SEQ ID NO: 1148772 - DNA, 15 bp, Homo sapiens
cgccagccgcggtgg

SEQ ID NO: 1148773 - DNA, 15 bp, Homo sapiens
gcgccagccgcggtg

SEQ ID NO: 1148774 - DNA, 15 bp, Homo sapiens
ggcgccagccgcggt

SEQ ID NO: 1148775 - DNA, 15 bp, Homo sapiens
aggcgccagccgcgg

SEQ ID NO: 1148776 - DNA, 15 bp, Homo sapiens
caggcgccagccgcg

SEQ ID NO: 1148777 - DNA, 15 bp, Homo sapiens
ccaggcgccagccgc

SEQ ID NO: 1148778 - DNA, 15 bp, Homo sapiens
accaggcgccagccg

SEQ ID NO: 1148779 - DNA, 15 bp, Homo sapiens
aaccaggcgccagcc

SEQ ID NO: 1148780 - DNA, 15 bp, Homo sapiens
taaccaggcgccagc

SEQ ID NO: 1148781 - DNA, 15 bp, Homo sapiens
ataaccaggcgccag

SEQ ID NO: 1148782 - DNA, 15 bp, Homo sapiens
aataaccaggcgcca

SEQ ID NO: 1148783 - DNA, 15 bp, Homo sapiens
aaataaccaggcgcc

SEQ ID NO: 1148784 - DNA, 15 bp, Homo sapiens
aaaataaccaggcgc

SEQ ID NO: 1148785 - DNA, 15 bp, Homo sapiens
aaaaataaccaggcg

SEQ ID NO: 1148786 - DNA, 15 bp, Homo sapiens
aaaaaataaccaggc

SEQ ID NO: 1148787 - DNA, 15 bp, Homo sapiens
taaaaaataaccagg

SEQ ID NO: 1148788 - DNA, 15 bp, Homo sapiens
ctaaaaaataaccag

SEQ ID NO: 1148789 - DNA, 15 bp, Homo sapiens
actaaaaaataacca

SEQ ID NO: 1148790 - DNA, 15 bp, Homo sapiens
cactaaaaaataacc

SEQ ID NO: 1148791 - DNA, 15 bp, Homo sapiens
tcactaaaaaataac

SEQ ID NO: 1148792 - DNA, 15 bp, Homo sapiens
atcactaaaaaataa

SEQ ID NO: 1148793 - DNA, 15 bp, Homo sapiens
aatcactaaaaaata

SEQ ID NO: 1148794 - DNA, 15 bp, Homo sapiens
aaatcactaaaaaat

SEQ ID NO: 1148795 - DNA, 15 bp, Homo sapiens
aaaatcactaaaaaa

SEQ ID NO: 1148796 - DNA, 15 bp, Homo sapiens
aaaaatcactaaaaa

SEQ ID NO: 1148797 - DNA, 15 bp, Homo sapiens
taaaaatcactaaaa

SEQ ID NO: 1148798 - DNA, 15 bp, Homo sapiens
ctaaaaatcactaaa

SEQ ID NO: 1148799 - DNA, 15 bp, Homo sapiens
tctaaaaatcactaa

SEQ ID NO: 1148800 - DNA, 15 bp, Homo sapiens
gtctaaaaatcacta

SEQ ID NO: 1148801 - DNA, 15 bp, Homo sapiens
tgtctaaaaatcact

SEQ ID NO: 1148802 - DNA, 15 bp, Homo sapiens
atgtctaaaaatcac

SEQ ID NO: 1148803 - DNA, 15 bp, Homo sapiens
gatgtctaaaaatca

SEQ ID NO: 1148804 - DNA, 15 bp, Homo sapiens
agatgtctaaaaatc

SEQ ID NO: 1148805 - DNA, 15 bp, Homo sapiens
tagatgtctaaaaat

SEQ ID NO: 1148806 - DNA, 15 bp, Homo sapiens
atagatgtctaaaaa

SEQ ID NO: 1148807 - DNA, 15 bp, Homo sapiens
tatagatgtctaaaa

SEQ ID NO: 1148808 - DNA, 15 bp, Homo sapiens
ttatagatgtctaaa

SEQ ID NO: 1148809 - DNA, 15 bp, Homo sapiens
tttatagatgtctaa

SEQ ID NO: 1148810 - DNA, 15 bp, Homo sapiens
ttttatagatgtcta

SEQ ID NO: 1148811 - DNA, 15 bp, Homo sapiens
tttttatagatgtct

SEQ ID NO: 1148812 - DNA, 15 bp, Homo sapiens
gtttttatagatgtc

SEQ ID NO: 1148813 - DNA, 15 bp, Homo sapiens
tgtttttatagatgt

SEQ ID NO: 1148814 - DNA, 15 bp, Homo sapiens
ttgtttttatagatg

SEQ ID NO: 1148815 - DNA, 15 bp, Homo sapiens
attgtttttatagat

SEQ ID NO: 1148816 - DNA, 15 bp, Homo sapiens
tattgtttttataga

SEQ ID NO: 1148817 - DNA, 15 bp, Homo sapiens
atattgtttttatag

SEQ ID NO: 1148818 - DNA, 15 bp, Homo sapiens
gatattgtttttata

SEQ ID NO: 1148819 - DNA, 15 bp, Homo sapiens
tgatattgtttttat

SEQ ID NO: 1148820 - DNA, 15 bp, Homo sapiens
ctgatattgttttta

SEQ ID NO: 1148821 - DNA, 15 bp, Homo sapiens
actgatattgttttt

SEQ ID NO: 1148822 - DNA, 15 bp, Homo sapiens
tactgatattgtttt

SEQ ID NO: 1148823 - DNA, 15 bp, Homo sapiens
gtactgatattgttt

SEQ ID NO: 1148824 - DNA, 15 bp, Homo sapiens
agtactgatattgtt

SEQ ID NO: 1148825 - DNA, 15 bp, Homo sapiens
aagtactgatattgt

SEQ ID NO: 1148826 - DNA, 15 bp, Homo sapiens
aaagtactgatattg

SEQ ID NO: 1148827 - DNA, 15 bp, Homo sapiens
caaagtactgatatt

SEQ ID NO: 1148828 - DNA, 15 bp, Homo sapiens
tcaaagtactgatat

SEQ ID NO: 1148829 - DNA, 15 bp, Homo sapiens
ctcaaagtactgata

SEQ ID NO: 1148830 - DNA, 15 bp, Homo sapiens
cctcaaagtactgat

SEQ ID NO: 1148831 - DNA, 15 bp, Homo sapiens
acctcaaagtactga

SEQ ID NO: 1148832 - DNA, 15 bp, Homo sapiens
gacctcaaagtactg

SEQ ID NO: 1148833 - DNA, 15 bp, Homo sapiens
agacctcaaagtact

SEQ ID NO: 1148834 - DNA, 15 bp, Homo sapiens
tagacctcaaagtac

SEQ ID NO: 1148835 - DNA, 15 bp, Homo sapiens
ttagacctcaaagta

SEQ ID NO: 1148836 - DNA, 15 bp, Homo sapiens
cttagacctcaaagt

SEQ ID NO: 1148837 - DNA, 15 bp, Homo sapiens
tcttagacctcaaag

SEQ ID NO: 1148838 - DNA, 15 bp, Homo sapiens
atcttagacctcaaa

SEQ ID NO: 1148839 - DNA, 15 bp, Homo sapiens
catcttagacctcaa

SEQ ID NO: 1148840 - DNA, 15 bp, Homo sapiens
tcatcttagacctca

SEQ ID NO: 1148841 - DNA, 15 bp, Homo sapiens
atcatcttagacctc

SEQ ID NO: 1148842 - DNA, 15 bp, Homo sapiens
catcatcttagacct

SEQ ID NO: 1148843 - DNA, 15 bp, Homo sapiens
acatcatcttagacc

SEQ ID NO: 1148844 - DNA, 15 bp, Homo sapiens
aacatcatcttagac

SEQ ID NO: 1148845 - DNA, 15 bp, Homo sapiens
aaacatcatcttaga

SEQ ID NO: 1148846 - DNA, 15 bp, Homo sapiens
aaaacatcatcttag

SEQ ID NO: 1148847 - DNA, 15 bp, Homo sapiens
gaaaacatcatctta

SEQ ID NO: 1148848 - DNA, 15 bp, Homo sapiens
agaaaacatcatctt

SEQ ID NO: 1148849 - DNA, 15 bp, Homo sapiens
aagaaaacatcatct

SEQ ID NO: 1148850 - DNA, 15 bp, Homo sapiens
gaagaaaacatcatc

SEQ ID NO: 1148851 - DNA, 15 bp, Homo sapiens
ggaagaaaacatcat

SEQ ID NO: 1148852 - DNA, 15 bp, Homo sapiens
aggaagaaaacatca

SEQ ID NO: 1148853 - DNA, 15 bp, Homo sapiens
aaggaagaaaacatc

SEQ ID NO: 1148854 - DNA, 15 bp, Homo sapiens
taaggaagaaaacat

SEQ ID NO: 1148855 - DNA, 15 bp, Homo sapiens
ttaaggaagaaaaca

SEQ ID NO: 1148856 - DNA, 15 bp, Homo sapiens
cttaaggaagaaaac

SEQ ID NO: 1148857 - DNA, 15 bp, Homo sapiens
ccttaaggaagaaaa

SEQ ID NO: 1148858 - DNA, 15 bp, Homo sapiens
cccttaaggaagaaa

SEQ ID NO: 1148859 - DNA, 15 bp, Homo sapiens
tcccttaaggaagaa

SEQ ID NO: 1148860 - DNA, 15 bp, Homo sapiens
ctcccttaaggaaga

SEQ ID NO: 1148861 - DNA, 15 bp, Homo sapiens
actcccttaaggaag

SEQ ID NO: 1148862 - DNA, 15 bp, Homo sapiens
tactcccttaaggaa

SEQ ID NO: 1148863 - DNA, 15 bp, Homo sapiens
atactcccttaagga

SEQ ID NO: 1148864 - DNA, 15 bp, Homo sapiens
aatactcccttaagg

SEQ ID NO: 1148865 - DNA, 15 bp, Homo sapiens
aaatactcccttaag

SEQ ID NO: 1148866 - DNA, 15 bp, Homo sapiens
taaatactcccttaa

SEQ ID NO: 1148867 - DNA, 15 bp, Homo sapiens
ttaaatactccctta

SEQ ID NO: 1148868 - DNA, 15 bp, Homo sapiens
attaaatactccctt

SEQ ID NO: 1148869 - DNA, 15 bp, Homo sapiens
aattaaatactccct

SEQ ID NO: 1148870 - DNA, 15 bp, Homo sapiens
aaattaaatactccc

SEQ ID NO: 1148871 - DNA, 15 bp, Homo sapiens
aaaattaaatactcc

SEQ ID NO: 1148872 - DNA, 15 bp, Homo sapiens
caaaattaaatactc

SEQ ID NO: 1148873 - DNA, 15 bp, Homo sapiens
acaaaattaaatact

SEQ ID NO: 1148874 - DNA, 15 bp, Homo sapiens
aacaaaattaaatac

SEQ ID NO: 1148875 - DNA, 15 bp, Homo sapiens
aaacaaaattaaata

SEQ ID NO: 1148876 - DNA, 15 bp, Homo sapiens
aaaacaaaattaaat

SEQ ID NO: 1148877 - DNA, 15 bp, Homo sapiens
taaaacaaaattaaa

SEQ ID NO: 1148878 - DNA, 15 bp, Homo sapiens
ataaaacaaaattaa

SEQ ID NO: 1148879 - DNA, 15 bp, Homo sapiens
aataaaacaaaatta

SEQ ID NO: 1148880 - DNA, 15 bp, Homo sapiens
aaataaaacaaaatt

SEQ ID NO: 1148881 - DNA, 15 bp, Homo sapiens
aaaataaaacaaaat

SEQ ID NO: 1148882 - DNA, 15 bp, Homo sapiens
ccaaaataaaacaaa

SEQ ID NO: 1148883 - DNA, 15 bp, Homo sapiens
gccaaaataaaacaa

SEQ ID NO: 1148884 - DNA, 15 bp, Homo sapiens
tgccaaaataaaaca

SEQ ID NO: 1148885 - DNA, 15 bp, Homo sapiens
ttgccaaaataaaac

SEQ ID NO: 1148886 - DNA, 15 bp, Homo sapiens
gttgccaaaataaaa

SEQ ID NO: 1148887 - DNA, 15 bp, Homo sapiens
agttgccaaaataaa

SEQ ID NO: 1148888 - DNA, 15 bp, Homo sapiens
tagttgccaaaataa

SEQ ID NO: 1148889 - DNA, 15 bp, Homo sapiens
ttagttgccaaaata

SEQ ID NO: 1148890 - DNA, 15 bp, Homo sapiens
cttagttgccaaaat

SEQ ID NO: 1148891 - DNA, 15 bp, Homo sapiens
ccttagttgccaaaa

SEQ ID NO: 1148892 - DNA, 15 bp, Homo sapiens
cccttagttgccaaa

SEQ ID NO: 1148893 - DNA, 15 bp, Homo sapiens
gcccttagttgccaa

SEQ ID NO: 1148894 - DNA, 15 bp, Homo sapiens
ggcccttagttgcca

SEQ ID NO: 1148895 - DNA, 15 bp, Homo sapiens
aggcccttagttgcc

SEQ ID NO: 1148896 - DNA, 15 bp, Homo sapiens
aaggcccttagttgc

SEQ ID NO: 1148897 - DNA, 15 bp, Homo sapiens
taaggcccttagttg

SEQ ID NO: 1148898 - DNA, 15 bp, Homo sapiens
ttaaggcccttagtt

SEQ ID NO: 1148899 - DNA, 15 bp, Homo sapiens
attaaggcccttagt

SEQ ID NO: 1148900 - DNA, 15 bp, Homo sapiens
aattaaggcccttag

SEQ ID NO: 1148901 - DNA, 15 bp, Homo sapiens
taattaaggccctta

SEQ ID NO: 1148902 - DNA, 15 bp, Homo sapiens
ctaattaaggccctt

SEQ ID NO: 1148903 - DNA, 15 bp, Homo sapiens
gctaattaaggccct

SEQ ID NO: 1148904 - DNA, 15 bp, Homo sapiens
tgctaattaaggccc

SEQ ID NO: 1148905 - DNA, 15 bp, Homo sapiens
ttgctaattaaggcc

SEQ ID NO: 1148906 - DNA, 15 bp, Homo sapiens
tttgctaattaaggc

SEQ ID NO: 1148907 - DNA, 15 bp, Homo sapiens
ttttgctaattaagg

SEQ ID NO: 1148908 - DNA, 15 bp, Homo sapiens
attttgctaattaag

SEQ ID NO: 1148909 - DNA, 15 bp, Homo sapiens
gattttgctaattaa

SEQ ID NO: 1148910 - DNA, 15 bp, Homo sapiens
agattttgctaatta

SEQ ID NO: 1148911 - DNA, 15 bp, Homo sapiens
cagattttgctaatt

SEQ ID NO: 1148912 - DNA, 15 bp, Homo sapiens
tcagattttgctaat

SEQ ID NO: 1148913 - DNA, 15 bp, Homo sapiens
ttcagattttgctaa

SEQ ID NO: 1148914 - DNA, 15 bp, Homo sapiens
attcagattttgcta

SEQ ID NO: 1148915 - DNA, 15 bp, Homo sapiens
gattcagattttgct

SEQ ID NO: 1148916 - DNA, 15 bp, Homo sapiens
tgattcagattttgc

SEQ ID NO: 1148917 - DNA, 15 bp, Homo sapiens
gtgattcagattttg

SEQ ID NO: 1148918 - DNA, 15 bp, Homo sapiens
cgtgattcagatttt

SEQ ID NO: 1148919 - DNA, 15 bp, Homo sapiens
acgtgattcagattt

SEQ ID NO: 1148920 - DNA, 15 bp, Homo sapiens
aacgtgattcagatt

SEQ ID NO: 1148921 - DNA, 15 bp, Homo sapiens
taacgtgattcagat

SEQ ID NO: 1148922 - DNA, 15 bp, Homo sapiens
ttaacgtgattcaga

SEQ ID NO: 1148923 - DNA, 15 bp, Homo sapiens
attaacgtgattcag

SEQ ID NO: 1148924 - DNA, 15 bp, Homo sapiens
aattaacgtgattca

SEQ ID NO: 1148925 - DNA, 15 bp, Homo sapiens
gaattaacgtgattc

SEQ ID NO: 1148926 - DNA, 15 bp, Homo sapiens
ggaattaacgtgatt

SEQ ID NO: 1148927 - DNA, 15 bp, Homo sapiens
gggaattaacgtgat

SEQ ID NO: 1148928 - DNA, 15 bp, Homo sapiens
agggaattaacgtga

SEQ ID NO: 1148929 - DNA, 15 bp, Homo sapiens
aagggaattaacgtg

SEQ ID NO: 1148930 - DNA, 15 bp, Homo sapiens
aaagggaattaacgt

SEQ ID NO: 1148931 - DNA, 15 bp, Homo sapiens
gaaagggaattaacg

SEQ ID NO: 1148932 - DNA, 15 bp, Homo sapiens
tgaaagggaattaac

SEQ ID NO: 1148933 - DNA, 15 bp, Homo sapiens
ctgaaagggaattaa

SEQ ID NO: 1148934 - DNA, 15 bp, Homo sapiens
tctgaaagggaatta

SEQ ID NO: 1148935 - DNA, 15 bp, Homo sapiens
ctctgaaagggaatt

SEQ ID NO: 1148936 - DNA, 15 bp, Homo sapiens
tctctgaaagggaat

SEQ ID NO: 1148937 - DNA, 15 bp, Homo sapiens
atctctgaaagggaa

SEQ ID NO: 1148938 - DNA, 15 bp, Homo sapiens
tatctctgaaaggga

SEQ ID NO: 1148939 - DNA, 15 bp, Homo sapiens
atatctctgaaaggg

SEQ ID NO: 1148940 - DNA, 15 bp, Homo sapiens
gatatctctgaaagg

SEQ ID NO: 1148941 - DNA, 15 bp, Homo sapiens
tgatatctctgaaag

SEQ ID NO: 1148942 - DNA, 15 bp, Homo sapiens
atgatatctctgaaa

SEQ ID NO: 1148943 - DNA, 15 bp, Homo sapiens
catgatatctctgaa

SEQ ID NO: 1148944 - DNA, 15 bp, Homo sapiens
tcatgatatctctga

SEQ ID NO: 1148945 - DNA, 15 bp, Homo sapiens
ttcatgatatctctg

SEQ ID NO: 1148946 - DNA, 15 bp, Homo sapiens
tttcatgatatctct

SEQ ID NO: 1148947 - DNA, 15 bp, Homo sapiens
ctttcatgatatctc

SEQ ID NO: 1148948 - DNA, 15 bp, Homo sapiens
actttcatgatatct

SEQ ID NO: 1148949 - DNA, 15 bp, Homo sapiens
aactttcatgatatc

SEQ ID NO: 1148950 - DNA, 15 bp, Homo sapiens
aaactttcatgatat

SEQ ID NO: 1148951 - DNA, 15 bp, Homo sapiens
gaaactttcatgata

SEQ ID NO: 1148952 - DNA, 15 bp, Homo sapiens
ggaaactttcatgat

SEQ ID NO: 1148953 - DNA, 15 bp, Homo sapiens
aggaaactttcatga

SEQ ID NO: 1148954 - DNA, 15 bp, Homo sapiens
gaggaaactttcatg

SEQ ID NO: 1148955 - DNA, 15 bp, Homo sapiens
tgaggaaactttcat

SEQ ID NO: 1148956 - DNA, 15 bp, Homo sapiens
atgaggaaactttca

SEQ ID NO: 1148957 - DNA, 15 bp, Homo sapiens
tatgaggaaactttc

SEQ ID NO: 1148958 - DNA, 15 bp, Homo sapiens
ttatgaggaaacttt

SEQ ID NO: 1148959 - DNA, 15 bp, Homo sapiens
cttatgaggaaactt

SEQ ID NO: 1148960 - DNA, 15 bp, Homo sapiens
gcttatgaggaaact

SEQ ID NO: 1148961 - DNA, 15 bp, Homo sapiens
ggcttatgaggaaac

SEQ ID NO: 1148962 - DNA, 15 bp, Homo sapiens
tggcttatgaggaaa

SEQ ID NO: 1148963 - DNA, 15 bp, Homo sapiens
ttggcttatgaggaa

SEQ ID NO: 1148964 - DNA, 15 bp, Homo sapiens
attggcttatgagga

SEQ ID NO: 1148965 - DNA, 15 bp, Homo sapiens
aattggcttatgagg

SEQ ID NO: 1148966 - DNA, 15 bp, Homo sapiens
taattggcttatgag

SEQ ID NO: 1148967 - DNA, 15 bp, Homo sapiens
ataattggcttatga

SEQ ID NO: 1148968 - DNA, 15 bp, Homo sapiens
tataattggcttatg

SEQ ID NO: 1148969 - DNA, 15 bp, Homo sapiens
ttataattggcttat

SEQ ID NO: 1148970 - DNA, 15 bp, Homo sapiens
tttataattggctta

SEQ ID NO: 1148971 - DNA, 15 bp, Homo sapiens
ttttataattggctt

SEQ ID NO: 1148972 - DNA, 15 bp, Homo sapiens
cttttataattggct

SEQ ID NO: 1148973 - DNA, 15 bp, Homo sapiens
acttttataattggc

SEQ ID NO: 1148974 - DNA, 15 bp, Homo sapiens
tacttttataattgg

SEQ ID NO: 1148975 - DNA, 15 bp, Homo sapiens
ttacttttataattg

SEQ ID NO: 1148976 - DNA, 15 bp, Homo sapiens
tttacttttataatt

SEQ ID NO: 1148977 - DNA, 15 bp, Homo sapiens
ttttacttttataat

SEQ ID NO: 1148978 - DNA, 15 bp, Homo sapiens
attttacttttataa

SEQ ID NO: 1148979 - DNA, 15 bp, Homo sapiens
aattttacttttata

SEQ ID NO: 1148980 - DNA, 15 bp, Homo sapiens
taattttacttttat

SEQ ID NO: 1148981 - DNA, 15 bp, Homo sapiens
ctaattttactttta

SEQ ID NO: 1148982 - DNA, 15 bp, Homo sapiens
actaattttactttt

SEQ ID NO: 1148983 - DNA, 15 bp, Homo sapiens
aactaattttacttt

SEQ ID NO: 1148984 - DNA, 15 bp, Homo sapiens
taactaattttactt

SEQ ID NO: 1148985 - DNA, 15 bp, Homo sapiens
gtaactaattttact

SEQ ID NO: 1148986 - DNA, 15 bp, Homo sapiens
agtaactaattttac

SEQ ID NO: 1148987 - DNA, 15 bp, Homo sapiens
tagtaactaatttta

SEQ ID NO: 1148988 - DNA, 15 bp, Homo sapiens
gtagtaactaatttt

SEQ ID NO: 1148989 - DNA, 15 bp, Homo sapiens
tgtagtaactaattt

SEQ ID NO: 1148990 - DNA, 15 bp, Homo sapiens
ttgtagtaactaatt

SEQ ID NO: 1148991 - DNA, 15 bp, Homo sapiens
cttgtagtaactaat

SEQ ID NO: 1148992 - DNA, 15 bp, Homo sapiens
gcttgtagtaactaa

SEQ ID NO: 1148993 - DNA, 15 bp, Homo sapiens
tgcttgtagtaacta

SEQ ID NO: 1148994 - DNA, 15 bp, Homo sapiens
ttgcttgtagtaact

SEQ ID NO: 1148995 - DNA, 15 bp, Homo sapiens
tttgcttgtagtaac

SEQ ID NO: 1148996 - DNA, 15 bp, Homo sapiens
ctttgcttgtagtaa

SEQ ID NO: 1148997 - DNA, 15 bp, Homo sapiens
actttgcttgtagta

SEQ ID NO: 1148998 - DNA, 15 bp, Homo sapiens
aactttgcttgtagt

SEQ ID NO: 1148999 - DNA, 15 bp, Homo sapiens
aaactttgcttgtag

SEQ ID NO: 1149000 - DNA, 15 bp, Homo sapiens
aaaactttgcttgta

SEQ ID NO: 1149001 - DNA, 15 bp, Homo sapiens
aaaaactttgcttgt

SEQ ID NO: 1149002 - DNA, 15 bp, Homo sapiens
taaaaactttgcttg

SEQ ID NO: 1149003 - DNA, 15 bp, Homo sapiens
ctaaaaactttgctt

SEQ ID NO: 1149004 - DNA, 15 bp, Homo sapiens
tctaaaaactttgct

SEQ ID NO: 1149005 - DNA, 15 bp, Homo sapiens
ttctaaaaactttgc

SEQ ID NO: 1149006 - DNA, 15 bp, Homo sapiens
tttctaaaaactttg

SEQ ID NO: 1149007 - DNA, 15 bp, Homo sapiens
ttttctaaaaacttt

SEQ ID NO: 1149008 - DNA, 15 bp, Homo sapiens
attttctaaaaactt

SEQ ID NO: 1149009 - DNA, 15 bp, Homo sapiens
aattttctaaaaact

SEQ ID NO: 1149010 - DNA, 15 bp, Homo sapiens
gaattttctaaaaac

SEQ ID NO: 1149011 - DNA, 15 bp, Homo sapiens
ggaattttctaaaaa

SEQ ID NO: 1149012 - DNA, 15 bp, Homo sapiens
aggaattttctaaaa

SEQ ID NO: 1149013 - DNA, 15 bp, Homo sapiens
caggaattttctaaa

SEQ ID NO: 1149014 - DNA, 15 bp, Homo sapiens
tcaggaattttctaa

SEQ ID NO: 1149015 - DNA, 15 bp, Homo sapiens
gtcaggaattttcta

SEQ ID NO: 1149016 - DNA, 15 bp, Homo sapiens
agtcaggaattttct

SEQ ID NO: 1149017 - DNA, 15 bp, Homo sapiens
gagtcaggaattttc

SEQ ID NO: 1149018 - DNA, 15 bp, Homo sapiens
agagtcaggaatttt

SEQ ID NO: 1149019 - DNA, 15 bp, Homo sapiens
tagagtcaggaattt

SEQ ID NO: 1149020 - DNA, 15 bp, Homo sapiens
ctagagtcaggaatt

SEQ ID NO: 1149021 - DNA, 15 bp, Homo sapiens
actagagtcaggaat

SEQ ID NO: 1149022 - DNA, 15 bp, Homo sapiens
tactagagtcaggaa

SEQ ID NO: 1149023 - DNA, 15 bp, Homo sapiens
ttactagagtcagga

SEQ ID NO: 1149024 - DNA, 15 bp, Homo sapiens
cttactagagtcagg

SEQ ID NO: 1149025 - DNA, 15 bp, Homo sapiens
acttactagagtcag

SEQ ID NO: 1149026 - DNA, 15 bp, Homo sapiens
cacttactagagtca

SEQ ID NO: 1149027 - DNA, 15 bp, Homo sapiens
gcacttactagagtc

SEQ ID NO: 1149028 - DNA, 15 bp, Homo sapiens
ggcacttactagagt

SEQ ID NO: 1149029 - DNA, 15 bp, Homo sapiens
gggcacttactagag

SEQ ID NO: 1149030 - DNA, 15 bp, Homo sapiens
tgggcacttactaga

SEQ ID NO: 1149031 - DNA, 15 bp, Homo sapiens
ctgggcacttactag

SEQ ID NO: 1149032 - DNA, 15 bp, Homo sapiens
tctgggcacttacta

SEQ ID NO: 1149033 - DNA, 15 bp, Homo sapiens
ttctgggcacttact

SEQ ID NO: 1149034 - DNA, 15 bp, Homo sapiens
tttctgggcacttac

SEQ ID NO: 1149035 - DNA, 15 bp, Homo sapiens
ttttctgggcactta

SEQ ID NO: 1149036 - DNA, 15 bp, Homo sapiens
tttttctgggcactt

SEQ ID NO: 1149037 - DNA, 15 bp, Homo sapiens
atttttctgggcact

SEQ ID NO: 1149038 - DNA, 15 bp, Homo sapiens
aatttttctgggcac

SEQ ID NO: 1149039 - DNA, 15 bp, Homo sapiens
aaatttttctgggca

SEQ ID NO: 1149040 - DNA, 15 bp, Homo sapiens
caaatttttctgggc

SEQ ID NO: 1149041 - DNA, 15 bp, Homo sapiens
tcaaatttttctggg

SEQ ID NO: 1149042 - DNA, 15 bp, Homo sapiens
ttcaaatttttctgg

SEQ ID NO: 1149043 - DNA, 15 bp, Homo sapiens
attcaaatttttctg

SEQ ID NO: 1149044 - DNA, 15 bp, Homo sapiens
cattcaaatttttct

SEQ ID NO: 1149045 - DNA, 15 bp, Homo sapiens
acattcaaatttttc

SEQ ID NO: 1149046 - DNA, 15 bp, Homo sapiens
tacattcaaattttt

SEQ ID NO: 1149047 - DNA, 15 bp, Homo sapiens
ttacattcaaatttt

SEQ ID NO: 1149048 - DNA, 15 bp, Homo sapiens
attacattcaaattt

SEQ ID NO: 1149049 - DNA, 15 bp, Homo sapiens
aattacattcaaatt

SEQ ID NO: 1149050 - DNA, 15 bp, Homo sapiens
caattacattcaaat

SEQ ID NO: 1149051 - DNA, 15 bp, Homo sapiens
tcaattacattcaaa

SEQ ID NO: 1149052 - DNA, 15 bp, Homo sapiens
atcaattacattcaa

SEQ ID NO: 1149053 - DNA, 15 bp, Homo sapiens
aatcaattacattca

SEQ ID NO: 1149054 - DNA, 15 bp, Homo sapiens
aaatcaattacattc

SEQ ID NO: 1149055 - DNA, 15 bp, Homo sapiens
caaatcaattacatt

SEQ ID NO: 1149056 - DNA, 15 bp, Homo sapiens
gcaaatcaattacat

SEQ ID NO: 1149057 - DNA, 15 bp, Homo sapiens
tgcaaatcaattaca

SEQ ID NO: 1149058 - DNA, 15 bp, Homo sapiens
atgcaaatcaattac

SEQ ID NO: 1149059 - DNA, 15 bp, Homo sapiens
catgcaaatcaatta

SEQ ID NO: 1149060 - DNA, 15 bp, Homo sapiens
tcatgcaaatcaatt

SEQ ID NO: 1149061 - DNA, 15 bp, Homo sapiens
ttcatgcaaatcaat

SEQ ID NO: 1149062 - DNA, 15 bp, Homo sapiens
tttcatgcaaatcaa

SEQ ID NO: 1149063 - DNA, 15 bp, Homo sapiens
ttttcatgcaaatca

SEQ ID NO: 1149064 - DNA, 15 bp, Homo sapiens
tttttcatgcaaatc

SEQ ID NO: 1149065 - DNA, 15 bp, Homo sapiens
atttttcatgcaaat

SEQ ID NO: 1149066 - DNA, 15 bp, Homo sapiens
catttttcatgcaaa

SEQ ID NO: 1149067 - DNA, 15 bp, Homo sapiens
gcatttttcatgcaa

SEQ ID NO: 1149068 - DNA, 15 bp, Homo sapiens
agcatttttcatgca

SEQ ID NO: 1149069 - DNA, 15 bp, Homo sapiens
cagcatttttcatgc

SEQ ID NO: 1149070 - DNA, 15 bp, Homo sapiens
acagcatttttcatg

SEQ ID NO: 1149071 - DNA, 15 bp, Homo sapiens
tacagcatttttcat

SEQ ID NO: 1149072 - DNA, 15 bp, Homo sapiens
ttacagcatttttca

SEQ ID NO: 1149073 - DNA, 15 bp, Homo sapiens
tttacagcatttttc

SEQ ID NO: 1149074 - DNA, 15 bp, Homo sapiens
ttttacagcattttt

SEQ ID NO: 1149075 - DNA, 15 bp, Homo sapiens
gttttacagcatttt

SEQ ID NO: 1149076 - DNA, 15 bp, Homo sapiens
tgttttacagcattt

SEQ ID NO: 1149077 - DNA, 15 bp, Homo sapiens
atgttttacagcatt

SEQ ID NO: 1149078 - DNA, 15 bp, Homo sapiens
tatgttttacagcat

SEQ ID NO: 1149079 - DNA, 15 bp, Homo sapiens
ttatgttttacagca

SEQ ID NO: 1149080 - DNA, 15 bp, Homo sapiens
attatgttttacagc

SEQ ID NO: 1149081 - DNA, 15 bp, Homo sapiens
tattatgttttacag

SEQ ID NO: 1149082 - DNA, 15 bp, Homo sapiens
ttattatgttttaca

SEQ ID NO: 1149083 - DNA, 15 bp, Homo sapiens
gttattatgttttac

SEQ ID NO: 1149084 - DNA, 15 bp, Homo sapiens
tgttattatgtttta

SEQ ID NO: 1149085 - DNA, 15 bp, Homo sapiens
atgttattatgtttt

SEQ ID NO: 1149086 - DNA, 15 bp, Homo sapiens
tatgttattatgttt

SEQ ID NO: 1149087 - DNA, 15 bp, Homo sapiens
ttatgttattatgtt

SEQ ID NO: 1149088 - DNA, 15 bp, Homo sapiens
tttatgttattatgt

SEQ ID NO: 1149089 - DNA, 15 bp, Homo sapiens
gtttatgttattatg

SEQ ID NO: 1149090 - DNA, 15 bp, Homo sapiens
cgtttatgttattat

SEQ ID NO: 1149091 - DNA, 15 bp, Homo sapiens
acgtttatgttatta

SEQ ID NO: 1149092 - DNA, 15 bp, Homo sapiens
aacgtttatgttatt

SEQ ID NO: 1149093 - DNA, 15 bp, Homo sapiens
taacgtttatgttat

SEQ ID NO: 1149094 - DNA, 15 bp, Homo sapiens
ttaacgtttatgtta

SEQ ID NO: 1149095 - DNA, 15 bp, Homo sapiens
attaacgtttatgtt

SEQ ID NO: 1149096 - DNA, 15 bp, Homo sapiens
cattaacgtttatgt

SEQ ID NO: 1149097 - DNA, 15 bp, Homo sapiens
ccattaacgtttatg

SEQ ID NO: 1149098 - DNA, 15 bp, Homo sapiens
accattaacgtttat

SEQ ID NO: 1149099 - DNA, 15 bp, Homo sapiens
caccattaacgttta

SEQ ID NO: 1149100 - DNA, 15 bp, Homo sapiens
tcaccattaacgttt

SEQ ID NO: 1149101 - DNA, 15 bp, Homo sapiens
ttcaccattaacgtt

SEQ ID NO: 1149102 - DNA, 15 bp, Homo sapiens
attcaccattaacgt

SEQ ID NO: 1149103 - DNA, 15 bp, Homo sapiens
aattcaccattaacg

SEQ ID NO: 1149104 - DNA, 15 bp, Homo sapiens
gaattcaccattaac

SEQ ID NO: 1149105 - DNA, 15 bp, Homo sapiens
tgaattcaccattaa

SEQ ID NO: 1149106 - DNA, 15 bp, Homo sapiens
ctgaattcaccatta

SEQ ID NO: 1149107 - DNA, 15 bp, Homo sapiens
actgaattcaccatt

SEQ ID NO: 1149108 - DNA, 15 bp, Homo sapiens
cactgaattcaccat

SEQ ID NO: 1149109 - DNA, 15 bp, Homo sapiens
tcactgaattcacca

SEQ ID NO: 1149110 - DNA, 15 bp, Homo sapiens
atcactgaattcacc

SEQ ID NO: 1149111 - DNA, 15 bp, Homo sapiens
catcactgaattcac

SEQ ID NO: 1149112 - DNA, 15 bp, Homo sapiens
acatcactgaattca

SEQ ID NO: 1149113 - DNA, 15 bp, Homo sapiens
aacatcactgaattc

SEQ ID NO: 1149114 - DNA, 15 bp, Homo sapiens
caacatcactgaatt

SEQ ID NO: 1149115 - DNA, 15 bp, Homo sapiens
ccaacatcactgaat

SEQ ID NO: 1149116 - DNA, 15 bp, Homo sapiens
accaacatcactgaa

SEQ ID NO: 1149117 - DNA, 15 bp, Homo sapiens
taccaacatcactga

SEQ ID NO: 1149118 - DNA, 15 bp, Homo sapiens
ataccaacatcactg

SEQ ID NO: 1149119 - DNA, 15 bp, Homo sapiens
aataccaacatcact

SEQ ID NO: 1149120 - DNA, 15 bp, Homo sapiens
aaataccaacatcac

SEQ ID NO: 1149121 - DNA, 15 bp, Homo sapiens
gaaataccaacatca

SEQ ID NO: 1149122 - DNA, 15 bp, Homo sapiens
ggaaataccaacatc

SEQ ID NO: 1149123 - DNA, 15 bp, Homo sapiens
tggaaataccaacat

SEQ ID NO: 1149124 - DNA, 15 bp, Homo sapiens
atggaaataccaaca

SEQ ID NO: 1149125 - DNA, 15 bp, Homo sapiens
tcatggaaataccaa

SEQ ID NO: 1149126 - DNA, 15 bp, Homo sapiens
gtcatggaaatacca

SEQ ID NO: 1149127 - DNA, 15 bp, Homo sapiens
agtcatggaaatacc

SEQ ID NO: 1149128 - DNA, 15 bp, Homo sapiens
aagtcatggaaatac

SEQ ID NO: 1149129 - DNA, 15 bp, Homo sapiens
aaagtcatggaaata

SEQ ID NO: 1149130 - DNA, 15 bp, Homo sapiens
aaaagtcatggaaat

SEQ ID NO: 1149131 - DNA, 15 bp, Homo sapiens
aaaaagtcatggaaa

SEQ ID NO: 1149132 - DNA, 15 bp, Homo sapiens
aaaaaagtcatggaa

SEQ ID NO: 1149133 - DNA, 15 bp, Homo sapiens
gaaaaaagtcatgga

SEQ ID NO: 1149134 - DNA, 15 bp, Homo sapiens
tgaaaaaagtcatgg

SEQ ID NO: 1149135 - DNA, 15 bp, Homo sapiens
atgaaaaaagtcatg

SEQ ID NO: 1149136 - DNA, 15 bp, Homo sapiens
aatgaaaaaagtcat

SEQ ID NO: 1149137 - DNA, 15 bp, Homo sapiens
gaatgaaaaaagtca

SEQ ID NO: 1149138 - DNA, 15 bp, Homo sapiens
agaatgaaaaaagtc

SEQ ID NO: 1149139 - DNA, 15 bp, Homo sapiens
gagaatgaaaaaagt

SEQ ID NO: 1149140 - DNA, 15 bp, Homo sapiens
ggagaatgaaaaaag

SEQ ID NO: 1149141 - DNA, 15 bp, Homo sapiens
aggagaatgaaaaaa

SEQ ID NO: 1149142 - DNA, 15 bp, Homo sapiens
aaggagaatgaaaaa

SEQ ID NO: 1149143 - DNA, 15 bp, Homo sapiens
taaggagaatgaaaa

SEQ ID NO: 1149144 - DNA, 15 bp, Homo sapiens
gtaaggagaatgaaa

SEQ ID NO: 1149145 - DNA, 15 bp, Homo sapiens
tgtaaggagaatgaa

SEQ ID NO: 1149146 - DNA, 15 bp, Homo sapiens
atgtaaggagaatga

SEQ ID NO: 1149147 - DNA, 15 bp, Homo sapiens
catgtaaggagaatg

SEQ ID NO: 1149148 - DNA, 15 bp, Homo sapiens
gcatgtaaggagaat

SEQ ID NO: 1149149 - DNA, 15 bp, Homo sapiens
agcatgtaaggagaa

SEQ ID NO: 1149150 - DNA, 15 bp, Homo sapiens
cagcatgtaaggaga

SEQ ID NO: 1149151 - DNA, 15 bp, Homo sapiens
acagcatgtaaggag

SEQ ID NO: 1149152 - DNA, 15 bp, Homo sapiens
tacagcatgtaagga

SEQ ID NO: 1149153 - DNA, 15 bp, Homo sapiens
ttacagcatgtaagg

SEQ ID NO: 1149154 - DNA, 15 bp, Homo sapiens
tttacagcatgtaag

SEQ ID NO: 1149155 - DNA, 15 bp, Homo sapiens
atttacagcatgtaa

SEQ ID NO: 1149156 - DNA, 15 bp, Homo sapiens
aatttacagcatgta

SEQ ID NO: 1149157 - DNA, 15 bp, Homo sapiens
taatttacagcatgt

SEQ ID NO: 1149158 - DNA, 15 bp, Homo sapiens
ataatttacagcatg

SEQ ID NO: 1149159 - DNA, 15 bp, Homo sapiens
aataatttacagcat

SEQ ID NO: 1149160 - DNA, 15 bp, Homo sapiens
aaataatttacagca

SEQ ID NO: 1149161 - DNA, 15 bp, Homo sapiens
aaaataatttacagc

SEQ ID NO: 1149162 - DNA, 15 bp, Homo sapiens
aaaaataatttacag

SEQ ID NO: 1149163 - DNA, 15 bp, Homo sapiens
aaaaaataatttaca

SEQ ID NO: 1149164 - DNA, 15 bp, Homo sapiens
taaaaaataatttac

SEQ ID NO: 1149165 - DNA, 15 bp, Homo sapiens
ttaaaaaataattta

SEQ ID NO: 1149166 - DNA, 15 bp, Homo sapiens
tttaaaaaataattt

SEQ ID NO: 1149167 - DNA, 15 bp, Homo sapiens
atttaaaaaataatt

SEQ ID NO: 1149168 - DNA, 15 bp, Homo sapiens
catttaaaaaataat

SEQ ID NO: 1149169 - DNA, 15 bp, Homo sapiens
tcatttaaaaaataa

SEQ ID NO: 1149170 - DNA, 15 bp, Homo sapiens
ttcatttaaaaaata

SEQ ID NO: 1149171 - DNA, 15 bp, Homo sapiens
tttcatttaaaaaat

SEQ ID NO: 1149172 - DNA, 15 bp, Homo sapiens
ttttcatttaaaaaa

SEQ ID NO: 1149173 - DNA, 15 bp, Homo sapiens
attttcatttaaaaa

SEQ ID NO: 1149174 - DNA, 15 bp, Homo sapiens
aattttcatttaaaa

SEQ ID NO: 1149175 - DNA, 15 bp, Homo sapiens
gaattttcatttaaa

SEQ ID NO: 1149176 - DNA, 15 bp, Homo sapiens
agaattttcatttaa

SEQ ID NO: 1149177 - DNA, 15 bp, Homo sapiens
aagaattttcattta

SEQ ID NO: 1149178 - DNA, 15 bp, Homo sapiens
aaagaattttcattt

SEQ ID NO: 1149179 - DNA, 15 bp, Homo sapiens
aaaagaattttcatt

SEQ ID NO: 1149180 - DNA, 15 bp, Homo sapiens
taaaagaattttcat

SEQ ID NO: 1149181 - DNA, 15 bp, Homo sapiens
ataaaagaattttca

SEQ ID NO: 1149182 - DNA, 15 bp, Homo sapiens
aataaaagaattttc

SEQ ID NO: 1149183 - DNA, 15 bp, Homo sapiens
taataaaagaatttt

SEQ ID NO: 1149184 - DNA, 15 bp, Homo sapiens
tttaataaaagaatt

SEQ ID NO: 1149185 - DNA, 15 bp, Homo sapiens
ttttaataaaagaat

SEQ ID NO: 1149186 - DNA, 15 bp, Homo sapiens
tttttaataaaagaa

SEQ ID NO: 1149187 - DNA, 15 bp, Homo sapiens
ttttttaataaaaga

SEQ ID NO: 1149188 - DNA, 15 bp, Homo sapiens
tttttttaataaaag

SEQ ID NO: 1149189 - DNA, 15 bp, Homo sapiens
ctttttttaataaaa

SEQ ID NO: 1149190 - DNA, 15 bp, Homo sapiens
gctttttttaataaa

SEQ ID NO: 1149191 - DNA, 15 bp, Homo sapiens
agctttttttaataa

SEQ ID NO: 1149192 - DNA, 15 bp, Homo sapiens
tagctttttttaata

SEQ ID NO: 1149193 - DNA, 15 bp, Homo sapiens
gtagctttttttaat

SEQ ID NO: 1149194 - DNA, 15 bp, Homo sapiens
tgtagctttttttaa

SEQ ID NO: 1149195 - DNA, 15 bp, Homo sapiens
atgtagcttttttta

SEQ ID NO: 1149196 - DNA, 15 bp, Homo sapiens
aatgtagcttttttt

SEQ ID NO: 1149197 - DNA, 15 bp, Homo sapiens
aaatgtagctttttt

SEQ ID NO: 1149198 - DNA, 15 bp, Homo sapiens
aaaatgtagcttttt

SEQ ID NO: 1149199 - DNA, 15 bp, Homo sapiens
taaaatgtagctttt

SEQ ID NO: 1149200 - DNA, 15 bp, Homo sapiens
ataaaatgtagcttt

SEQ ID NO: 1149201 - DNA, 15 bp, Homo sapiens
tataaaatgtagctt

SEQ ID NO: 1149202 - DNA, 15 bp, Homo sapiens
ttataaaatgtagct

SEQ ID NO: 1149203 - DNA, 15 bp, Homo sapiens
tttataaaatgtagc

SEQ ID NO: 1149204 - DNA, 15 bp, Homo sapiens
atttataaaatgtag

SEQ ID NO: 1149205 - DNA, 15 bp, Homo sapiens
aatttataaaatgta

SEQ ID NO: 1149206 - DNA, 15 bp, Homo sapiens
taatttataaaatgt

SEQ ID NO: 1149207 - DNA, 15 bp, Homo sapiens
ctaatttataaaatg

SEQ ID NO: 1149208 - DNA, 15 bp, Homo sapiens
actaatttataaaat

SEQ ID NO: 1149209 - DNA, 15 bp, Homo sapiens
tactaatttataaaa

SEQ ID NO: 1149210 - DNA, 15 bp, Homo sapiens
atactaatttataaa

SEQ ID NO: 1149211 - DNA, 15 bp, Homo sapiens
tatactaatttataa

SEQ ID NO: 1149212 - DNA, 15 bp, Homo sapiens
ttatactaatttata

SEQ ID NO: 1149213 - DNA, 15 bp, Homo sapiens
gttatactaatttat

SEQ ID NO: 1149214 - DNA, 15 bp, Homo sapiens
tgttatactaattta

SEQ ID NO: 1149215 - DNA, 15 bp, Homo sapiens
atgttatactaattt

SEQ ID NO: 1149216 - DNA, 15 bp, Homo sapiens
tatgttatactaatt

SEQ ID NO: 1149217 - DNA, 15 bp, Homo sapiens
ttatgttatactaat

SEQ ID NO: 1149218 - DNA, 15 bp, Homo sapiens
attatgttatactaa

SEQ ID NO: 1149219 - DNA, 15 bp, Homo sapiens
cattatgttatacta

SEQ ID NO: 1149220 - DNA, 15 bp, Homo sapiens
ccattatgttatact

SEQ ID NO: 1149221 - DNA, 15 bp, Homo sapiens
accattatgttatac

SEQ ID NO: 1149222 - DNA, 15 bp, Homo sapiens
taccattatgttata

SEQ ID NO: 1149223 - DNA, 15 bp, Homo sapiens
ttaccattatgttat

SEQ ID NO: 1149224 - DNA, 15 bp, Homo sapiens
tttaccattatgtta

SEQ ID NO: 1149225 - DNA, 15 bp, Homo sapiens
ctttaccattatgtt

SEQ ID NO: 1149226 - DNA, 15 bp, Homo sapiens
tctttaccattatgt

SEQ ID NO: 1149227 - DNA, 15 bp, Homo sapiens
ctctttaccattatg

SEQ ID NO: 1149228 - DNA, 15 bp, Homo sapiens
tctctttaccattat

SEQ ID NO: 1149229 - DNA, 15 bp, Homo sapiens
ttctctttaccatta

SEQ ID NO: 1149230 - DNA, 15 bp, Homo sapiens
tttctctttaccatt

SEQ ID NO: 1149231 - DNA, 15 bp, Homo sapiens
atttctctttaccat

SEQ ID NO: 1149232 - DNA, 15 bp, Homo sapiens
catttctctttacca

SEQ ID NO: 1149233 - DNA, 15 bp, Homo sapiens
acatttctctttacc

SEQ ID NO: 1149234 - DNA, 15 bp, Homo sapiens
cacatttctctttac

SEQ ID NO: 1149235 - DNA, 15 bp, Homo sapiens
tcacatttctcttta

SEQ ID NO: 1149236 - DNA, 15 bp, Homo sapiens
ttcacatttctcttt

SEQ ID NO: 1149237 - DNA, 15 bp, Homo sapiens
attcacatttctctt

SEQ ID NO: 1149238 - DNA, 15 bp, Homo sapiens
cattcacatttctct

SEQ ID NO: 1149239 - DNA, 15 bp, Homo sapiens
acattcacatttctc

SEQ ID NO: 1149240 - DNA, 15 bp, Homo sapiens
tacattcacatttct

SEQ ID NO: 1149241 - DNA, 15 bp, Homo sapiens
atacattcacatttc

SEQ ID NO: 1149242 - DNA, 15 bp, Homo sapiens
aatacattcacattt

SEQ ID NO: 1149243 - DNA, 15 bp, Homo sapiens
taatacattcacatt

SEQ ID NO: 1149244 - DNA, 15 bp, Homo sapiens
ctaatacattcacat

SEQ ID NO: 1149245 - DNA, 15 bp, Homo sapiens
tctaatacattcaca

SEQ ID NO: 1149246 - DNA, 15 bp, Homo sapiens
ttctaatacattcac

SEQ ID NO: 1149247 - DNA, 15 bp, Homo sapiens
tttctaatacattca

SEQ ID NO: 1149248 - DNA, 15 bp, Homo sapiens
ttttctaatacattc

SEQ ID NO: 1149249 - DNA, 15 bp, Homo sapiens
cttttctaatacatt

SEQ ID NO: 1149250 - DNA, 15 bp, Homo sapiens
tcttttctaatacat

SEQ ID NO: 1149251 - DNA, 15 bp, Homo sapiens
atcttttctaataca

SEQ ID NO: 1149252 - DNA, 15 bp, Homo sapiens
catcttttctaatac

SEQ ID NO: 1149253 - DNA, 15 bp, Homo sapiens
gcatcttttctaata

SEQ ID NO: 1149254 - DNA, 15 bp, Homo sapiens
agcatcttttctaat

SEQ ID NO: 1149255 - DNA, 15 bp, Homo sapiens
gagcatcttttctaa

SEQ ID NO: 1149256 - DNA, 15 bp, Homo sapiens
ggagcatcttttcta

SEQ ID NO: 1149257 - DNA, 15 bp, Homo sapiens
tggagcatcttttct

SEQ ID NO: 1149258 - DNA, 15 bp, Homo sapiens
atggagcatcttttc

SEQ ID NO: 1149259 - DNA, 15 bp, Homo sapiens
aatggagcatctttt

SEQ ID NO: 1149260 - DNA, 15 bp, Homo sapiens
caatggagcatcttt

SEQ ID NO: 1149261 - DNA, 15 bp, Homo sapiens
tcaatggagcatctt

SEQ ID NO: 1149262 - DNA, 15 bp, Homo sapiens
ctcaatggagcatct

SEQ ID NO: 1149263 - DNA, 15 bp, Homo sapiens
tctcaatggagcatc

SEQ ID NO: 1149264 - DNA, 15 bp, Homo sapiens
ctctcaatggagcat

SEQ ID NO: 1149265 - DNA, 15 bp, Homo sapiens
cctctcaatggagca

SEQ ID NO: 1149266 - DNA, 15 bp, Homo sapiens
tcctctcaatggagc

SEQ ID NO: 1149267 - DNA, 15 bp, Homo sapiens
ctcctctcaatggag

SEQ ID NO: 1149268 - DNA, 15 bp, Homo sapiens
tctcctctcaatgga

SEQ ID NO: 1149269 - DNA, 15 bp, Homo sapiens
gtctcctctcaatgg

SEQ ID NO: 1149270 - DNA, 15 bp, Homo sapiens
tgtctcctctcaatg

SEQ ID NO: 1149271 - DNA, 15 bp, Homo sapiens
gtgtctcctctcaat

SEQ ID NO: 1149272 - DNA, 15 bp, Homo sapiens
tgtgtctcctctcaa

SEQ ID NO: 1149273 - DNA, 15 bp, Homo sapiens
atgtgtctcctctca

SEQ ID NO: 1149274 - DNA, 15 bp, Homo sapiens
aatgtgtctcctctc

SEQ ID NO: 1149275 - DNA, 15 bp, Homo sapiens
aaatgtgtctcctct

SEQ ID NO: 1149276 - DNA, 15 bp, Homo sapiens
caaatgtgtctcctc

SEQ ID NO: 1149277 - DNA, 15 bp, Homo sapiens
acaaatgtgtctcct

SEQ ID NO: 1149278 - DNA, 15 bp, Homo sapiens
tacaaatgtgtctcc

SEQ ID NO: 1149279 - DNA, 15 bp, Homo sapiens
atacaaatgtgtctc

SEQ ID NO: 1149280 - DNA, 15 bp, Homo sapiens
aatacaaatgtgtct

SEQ ID NO: 1149281 - DNA, 15 bp, Homo sapiens
aaatacaaatgtgtc

SEQ ID NO: 1149282 - DNA, 15 bp, Homo sapiens
taaatacaaatgtgt

SEQ ID NO: 1149283 - DNA, 15 bp, Homo sapiens
ataaatacaaatgtg

SEQ ID NO: 1149284 - DNA, 15 bp, Homo sapiens
gataaatacaaatgt

SEQ ID NO: 1149285 - DNA, 15 bp, Homo sapiens
tgataaatacaaatg

SEQ ID NO: 1149286 - DNA, 15 bp, Homo sapiens
atgataaatacaaat

SEQ ID NO: 1149287 - DNA, 15 bp, Homo sapiens
catgataaatacaaa

SEQ ID NO: 1149288 - DNA, 15 bp, Homo sapiens
tcatgataaatacaa

SEQ ID NO: 1149289 - DNA, 15 bp, Homo sapiens
gtcatgataaataca

SEQ ID NO: 1149290 - DNA, 15 bp, Homo sapiens
ggtcatgataaatac

SEQ ID NO: 1149291 - DNA, 15 bp, Homo sapiens
aggtcatgataaata

SEQ ID NO: 1149292 - DNA, 15 bp, Homo sapiens
aaggtcatgataaat

SEQ ID NO: 1149293 - DNA, 15 bp, Homo sapiens
caaggtcatgataaa

SEQ ID NO: 1149294 - DNA, 15 bp, Homo sapiens
tcaaggtcatgataa

SEQ ID NO: 1149295 - DNA, 15 bp, Homo sapiens
ttcaaggtcatgata

SEQ ID NO: 1149296 - DNA, 15 bp, Homo sapiens
attcaaggtcatgat

SEQ ID NO: 1149297 - DNA, 15 bp, Homo sapiens
cattcaaggtcatga

SEQ ID NO: 1149298 - DNA, 15 bp, Homo sapiens
tcattcaaggtcatg

SEQ ID NO: 1149299 - DNA, 15 bp, Homo sapiens
ttcattcaaggtcat

SEQ ID NO: 1149300 - DNA, 15 bp, Homo sapiens
cttcattcaaggtca

SEQ ID NO: 1149301 - DNA, 15 bp, Homo sapiens
ccttcattcaaggtc

SEQ ID NO: 1149302 - DNA, 15 bp, Homo sapiens
accttcattcaaggt

SEQ ID NO: 1149303 - DNA, 15 bp, Homo sapiens
gaccttcattcaagg

SEQ ID NO: 1149304 - DNA, 15 bp, Homo sapiens
ggaccttcattcaag

SEQ ID NO: 1149305 - DNA, 15 bp, Homo sapiens
gggaccttcattcaa

SEQ ID NO: 1149306 - DNA, 15 bp, Homo sapiens
agggaccttcattca

SEQ ID NO: 1149307 - DNA, 15 bp, Homo sapiens
gagggaccttcattc

SEQ ID NO: 1149308 - DNA, 15 bp, Homo sapiens
agagggaccttcatt

SEQ ID NO: 1149309 - DNA, 15 bp, Homo sapiens
cagagggaccttcat

SEQ ID NO: 1149310 - DNA, 15 bp, Homo sapiens
gcagagggaccttca

SEQ ID NO: 1149311 - DNA, 15 bp, Homo sapiens
tgcagagggaccttc

SEQ ID NO: 1149312 - DNA, 15 bp, Homo sapiens
ctgcagagggacctt

SEQ ID NO: 1149313 - DNA, 15 bp, Homo sapiens
tctgcagagggacct

SEQ ID NO: 1149314 - DNA, 15 bp, Homo sapiens
atctgcagagggacc

SEQ ID NO: 1149315 - DNA, 15 bp, Homo sapiens
gatctgcagagggac

SEQ ID NO: 1149316 - DNA, 15 bp, Homo sapiens
ggatctgcagaggga

SEQ ID NO: 1149317 - DNA, 15 bp, Homo sapiens
aggatctgcagaggg

SEQ ID NO: 1149318 - DNA, 15 bp, Homo sapiens
taggatctgcagagg

SEQ ID NO: 1149319 - DNA, 15 bp, Homo sapiens
ataggatctgcagag

SEQ ID NO: 1149320 - DNA, 15 bp, Homo sapiens
gataggatctgcaga

SEQ ID NO: 1149321 - DNA, 15 bp, Homo sapiens
tgataggatctgcag

SEQ ID NO: 1149322 - DNA, 15 bp, Homo sapiens
atgataggatctgca

SEQ ID NO: 1149323 - DNA, 15 bp, Homo sapiens
tatgataggatctgc

SEQ ID NO: 1149324 - DNA, 15 bp, Homo sapiens
ttatgataggatctg

SEQ ID NO: 1149325 - DNA, 15 bp, Homo sapiens
attatgataggatct

SEQ ID NO: 1149326 - DNA, 15 bp, Homo sapiens
tattatgataggatc

SEQ ID NO: 1149327 - DNA, 15 bp, Homo sapiens
ctattatgataggat

SEQ ID NO: 1149328 - DNA, 15 bp, Homo sapiens
actattatgatagga

SEQ ID NO: 1149329 - DNA, 15 bp, Homo sapiens
gactattatgatagg

SEQ ID NO: 1149330 - DNA, 15 bp, Homo sapiens
ggactattatgatag

SEQ ID NO: 1149331 - DNA, 15 bp, Homo sapiens
aggactattatgata

SEQ ID NO: 1149332 - DNA, 15 bp, Homo sapiens
aaggactattatgat

SEQ ID NO: 1149333 - DNA, 15 bp, Homo sapiens
caaggactattatga

SEQ ID NO: 1149334 - DNA, 15 bp, Homo sapiens
acaaggactattatg

SEQ ID NO: 1149335 - DNA, 15 bp, Homo sapiens
cacaaggactattat

SEQ ID NO: 1149336 - DNA, 15 bp, Homo sapiens
acacaaggactatta

SEQ ID NO: 1149337 - DNA, 15 bp, Homo sapiens
gacacaaggactatt

SEQ ID NO: 1149338 - DNA, 15 bp, Homo sapiens
tgacacaaggactat

SEQ ID NO: 1149339 - DNA, 15 bp, Homo sapiens
ctgacacaaggacta

SEQ ID NO: 1149340 - DNA, 15 bp, Homo sapiens
actgacacaaggact

SEQ ID NO: 1149341 - DNA, 15 bp, Homo sapiens
cactgacacaaggac

SEQ ID NO: 1149342 - DNA, 15 bp, Homo sapiens
tcactgacacaagga

SEQ ID NO: 1149343 - DNA, 15 bp, Homo sapiens
ttcactgacacaagg

SEQ ID NO: 1149344 - DNA, 15 bp, Homo sapiens
cttcactgacacaag

SEQ ID NO: 1149345 - DNA, 15 bp, Homo sapiens
acttcactgacacaa

SEQ ID NO: 1149346 - DNA, 15 bp, Homo sapiens
gacttcactgacaca

SEQ ID NO: 1149347 - DNA, 15 bp, Homo sapiens
ggacttcactgacac

SEQ ID NO: 1149348 - DNA, 15 bp, Homo sapiens
gggacttcactgaca

SEQ ID NO: 1149349 - DNA, 15 bp, Homo sapiens
ggggacttcactgac

SEQ ID NO: 1149350 - DNA, 15 bp, Homo sapiens
aggggacttcactga

SEQ ID NO: 1149351 - DNA, 15 bp, Homo sapiens
caggggacttcactg

SEQ ID NO: 1149352 - DNA, 15 bp, Homo sapiens
acaggggacttcact

SEQ ID NO: 1149353 - DNA, 15 bp, Homo sapiens
cacaggggacttcac

SEQ ID NO: 1149354 - DNA, 15 bp, Homo sapiens
tcacaggggacttca

SEQ ID NO: 1149355 - DNA, 15 bp, Homo sapiens
ttcacaggggacttc

SEQ ID NO: 1149356 - DNA, 15 bp, Homo sapiens
tttcacaggggactt

SEQ ID NO: 1149357 - DNA, 15 bp, Homo sapiens
gtttcacaggggact

SEQ ID NO: 1149358 - DNA, 15 bp, Homo sapiens
agtttcacaggggac

SEQ ID NO: 1149359 - DNA, 15 bp, Homo sapiens
cagtttcacagggga

SEQ ID NO: 1149360 - DNA, 15 bp, Homo sapiens
ccagtttcacagggg

SEQ ID NO: 1149361 - DNA, 15 bp, Homo sapiens
tccagtttcacaggg

SEQ ID NO: 1149362 - DNA, 15 bp, Homo sapiens
atccagtttcacagg

SEQ ID NO: 1149363 - DNA, 15 bp, Homo sapiens
tatccagtttcacag

SEQ ID NO: 1149364 - DNA, 15 bp, Homo sapiens
ttatccagtttcaca

SEQ ID NO: 1149365 - DNA, 15 bp, Homo sapiens
gttatccagtttcac

SEQ ID NO: 1149366 - DNA, 15 bp, Homo sapiens
tgttatccagtttca

SEQ ID NO: 1149367 - DNA, 15 bp, Homo sapiens
ctgttatccagtttc

SEQ ID NO: 1149368 - DNA, 15 bp, Homo sapiens
cctgttatccagttt

SEQ ID NO: 1149369 - DNA, 15 bp, Homo sapiens
tcctgttatccagtt

SEQ ID NO: 1149370 - DNA, 15 bp, Homo sapiens
atcctgttatccagt

SEQ ID NO: 1149371 - DNA, 15 bp, Homo sapiens
aatcctgttatccag

SEQ ID NO: 1149372 - DNA, 15 bp, Homo sapiens
aaatcctgttatcca

SEQ ID NO: 1149373 - DNA, 15 bp, Homo sapiens
aaaatcctgttatcc

SEQ ID NO: 1149374 - DNA, 15 bp, Homo sapiens
taaaatcctgttatc

SEQ ID NO: 1149375 - DNA, 15 bp, Homo sapiens
ttaaaatcctgttat

SEQ ID NO: 1149376 - DNA, 15 bp, Homo sapiens
cttaaaatcctgtta

SEQ ID NO: 1149377 - DNA, 15 bp, Homo sapiens
ccttaaaatcctgtt

SEQ ID NO: 1149378 - DNA, 15 bp, Homo sapiens
accttaaaatcctgt

SEQ ID NO: 1149379 - DNA, 15 bp, Homo sapiens
taccttaaaatcctg

SEQ ID NO: 1149380 - DNA, 15 bp, Homo sapiens
ctaccttaaaatcct

SEQ ID NO: 1149381 - DNA, 15 bp, Homo sapiens
tctaccttaaaatcc

SEQ ID NO: 1149382 - DNA, 15 bp, Homo sapiens
ctctaccttaaaatc

SEQ ID NO: 1149383 - DNA, 15 bp, Homo sapiens
tctctaccttaaaat

SEQ ID NO: 1149384 - DNA, 15 bp, Homo sapiens
atctctaccttaaaa

SEQ ID NO: 1149385 - DNA, 15 bp, Homo sapiens
catctctaccttaaa

SEQ ID NO: 1149386 - DNA, 15 bp, Homo sapiens
acatctctaccttaa

SEQ ID NO: 1149387 - DNA, 15 bp, Homo sapiens
aacatctctacctta

SEQ ID NO: 1149388 - DNA, 15 bp, Homo sapiens
gaacatctctacctt

SEQ ID NO: 1149389 - DNA, 15 bp, Homo sapiens
ggaacatctctacct

SEQ ID NO: 1149390 - DNA, 15 bp, Homo sapiens
aggaacatctctacc

SEQ ID NO: 1149391 - DNA, 15 bp, Homo sapiens
gaggaacatctctac

SEQ ID NO: 1149392 - DNA, 15 bp, Homo sapiens
tgaggaacatctcta

SEQ ID NO: 1149393 - DNA, 15 bp, Homo sapiens
ctgaggaacatctct

SEQ ID NO: 1149394 - DNA, 15 bp, Homo sapiens
cctgaggaacatctc

SEQ ID NO: 1149395 - DNA, 15 bp, Homo sapiens
gcctgaggaacatct

SEQ ID NO: 1149396 - DNA, 15 bp, Homo sapiens
tgcctgaggaacatc

SEQ ID NO: 1149397 - DNA, 15 bp, Homo sapiens
ctgcctgaggaacat

SEQ ID NO: 1149398 - DNA, 15 bp, Homo sapiens
tctgcctgaggaaca

SEQ ID NO: 1149399 - DNA, 15 bp, Homo sapiens
atctgcctgaggaac

SEQ ID NO: 1149400 - DNA, 15 bp, Homo sapiens
catctgcctgaggaa

SEQ ID NO: 1149401 - DNA, 15 bp, Homo sapiens
ccatctgcctgagga

SEQ ID NO: 1149402 - DNA, 15 bp, Homo sapiens
tccatctgcctgagg

SEQ ID NO: 1149403 - DNA, 15 bp, Homo sapiens
ttccatctgcctgag

SEQ ID NO: 1149404 - DNA, 15 bp, Homo sapiens
tttccatctgcctga

SEQ ID NO: 1149405 - DNA, 15 bp, Homo sapiens
atttccatctgcctg

SEQ ID NO: 1149406 - DNA, 15 bp, Homo sapiens
catttccatctgcct

SEQ ID NO: 1149407 - DNA, 15 bp, Homo sapiens
acatttccatctgcc

SEQ ID NO: 1149408 - DNA, 15 bp, Homo sapiens
tacatttccatctgc

SEQ ID NO: 1149409 - DNA, 15 bp, Homo sapiens
ctacatttccatctg

SEQ ID NO: 1149410 - DNA, 15 bp, Homo sapiens
actacatttccatct

SEQ ID NO: 1149411 - DNA, 15 bp, Homo sapiens
gactacatttccatc

SEQ ID NO: 1149412 - DNA, 15 bp, Homo sapiens
agactacatttccat

SEQ ID NO: 1149413 - DNA, 15 bp, Homo sapiens
tagactacatttcca

SEQ ID NO: 1149414 - DNA, 15 bp, Homo sapiens
atagactacatttcc

SEQ ID NO: 1149415 - DNA, 15 bp, Homo sapiens
tatagactacatttc

SEQ ID NO: 1149416 - DNA, 15 bp, Homo sapiens
ctatagactacattt

SEQ ID NO: 1149417 - DNA, 15 bp, Homo sapiens
gctatagactacatt

SEQ ID NO: 1149418 - DNA, 15 bp, Homo sapiens
agctatagactacat

SEQ ID NO: 1149419 - DNA, 15 bp, Homo sapiens
cagctatagactaca

SEQ ID NO: 1149420 - DNA, 15 bp, Homo sapiens
acagctatagactac

SEQ ID NO: 1149421 - DNA, 15 bp, Homo sapiens
cacagctatagacta

SEQ ID NO: 1149422 - DNA, 15 bp, Homo sapiens
tcacagctatagact

SEQ ID NO: 1149423 - DNA, 15 bp, Homo sapiens
ttcacagctatagac

SEQ ID NO: 1149424 - DNA, 15 bp, Homo sapiens
cttcacagctataga

SEQ ID NO: 1149425 - DNA, 15 bp, Homo sapiens
tcttcacagctatag

SEQ ID NO: 1149426 - DNA, 15 bp, Homo sapiens
atcttcacagctata

SEQ ID NO: 1149427 - DNA, 15 bp, Homo sapiens
tatcttcacagctat

SEQ ID NO: 1149428 - DNA, 15 bp, Homo sapiens
ttatcttcacagcta

SEQ ID NO: 1149429 - DNA, 15 bp, Homo sapiens
cttatcttcacagct

SEQ ID NO: 1149430 - DNA, 15 bp, Homo sapiens
acttatcttcacagc

SEQ ID NO: 1149431 - DNA, 15 bp, Homo sapiens
gacttatcttcacag

SEQ ID NO: 1149432 - DNA, 15 bp, Homo sapiens
tgacttatcttcaca

SEQ ID NO: 1149433 - DNA, 15 bp, Homo sapiens
ctgacttatcttcac

SEQ ID NO: 1149434 - DNA, 15 bp, Homo sapiens
cctgacttatcttca

SEQ ID NO: 1149435 - DNA, 15 bp, Homo sapiens
gcctgacttatcttc

SEQ ID NO: 1149436 - DNA, 15 bp, Homo sapiens
tgcctgacttatctt

SEQ ID NO: 1149437 - DNA, 15 bp, Homo sapiens
ttgcctgacttatct

SEQ ID NO: 1149438 - DNA, 15 bp, Homo sapiens
attgcctgacttatc

SEQ ID NO: 1149439 - DNA, 15 bp, Homo sapiens
cattgcctgacttat

SEQ ID NO: 1149440 - DNA, 15 bp, Homo sapiens
tcattgcctgactta

SEQ ID NO: 1149441 - DNA, 15 bp, Homo sapiens
ttcattgcctgactt

SEQ ID NO: 1149442 - DNA, 15 bp, Homo sapiens
tttcattgcctgact

SEQ ID NO: 1149443 - DNA, 15 bp, Homo sapiens
atttcattgcctgac

SEQ ID NO: 1149444 - DNA, 15 bp, Homo sapiens
tatttcattgcctga

SEQ ID NO: 1149445 - DNA, 15 bp, Homo sapiens
ttatttcattgcctg

SEQ ID NO: 1149446 - DNA, 15 bp, Homo sapiens
attatttcattgcct

SEQ ID NO: 1149447 - DNA, 15 bp, Homo sapiens
aattatttcattgcc

SEQ ID NO: 1149448 - DNA, 15 bp, Homo sapiens
taattatttcattgc

SEQ ID NO: 1149449 - DNA, 15 bp, Homo sapiens
ataattatttcattg

SEQ ID NO: 1149450 - DNA, 15 bp, Homo sapiens
tataattatttcatt

SEQ ID NO: 1149451 - DNA, 15 bp, Homo sapiens
ctataattatttcat

SEQ ID NO: 1149452 - DNA, 15 bp, Homo sapiens
tctataattatttca

SEQ ID NO: 1149453 - DNA, 15 bp, Homo sapiens
ctctataattatttc

SEQ ID NO: 1149454 - DNA, 15 bp, Homo sapiens
tctctataattattt

SEQ ID NO: 1149455 - DNA, 15 bp, Homo sapiens
ttctctataattatt

SEQ ID NO: 1149456 - DNA, 15 bp, Homo sapiens
tttctctataattat

SEQ ID NO: 1149457 - DNA, 15 bp, Homo sapiens
ttttctctataatta

SEQ ID NO: 1149458 - DNA, 15 bp, Homo sapiens
tttttctctataatt

SEQ ID NO: 1149459 - DNA, 15 bp, Homo sapiens
ttttttctctataat

SEQ ID NO: 1149460 - DNA, 15 bp, Homo sapiens
attttttctctataa

SEQ ID NO: 1149461 - DNA, 15 bp, Homo sapiens
tattttttctctata

SEQ ID NO: 1149462 - DNA, 15 bp, Homo sapiens
ttattttttctctat

SEQ ID NO: 1149463 - DNA, 15 bp, Homo sapiens
attattttttctcta

SEQ ID NO: 1149464 - DNA, 15 bp, Homo sapiens
cattattttttctct

SEQ ID NO: 1149465 - DNA, 15 bp, Homo sapiens
acattattttttctc

SEQ ID NO: 1149466 - DNA, 15 bp, Homo sapiens
tacattattttttct

SEQ ID NO: 1149467 - DNA, 15 bp, Homo sapiens
ttacattattttttc

SEQ ID NO: 1149468 - DNA, 15 bp, Homo sapiens
cttacattatttttt

SEQ ID NO: 1149469 - DNA, 15 bp, Homo sapiens
gcttacattattttt

SEQ ID NO: 1149470 - DNA, 15 bp, Homo sapiens
agcttacattatttt

SEQ ID NO: 1149471 - DNA, 15 bp, Homo sapiens
tagcttacattattt

SEQ ID NO: 1149472 - DNA, 15 bp, Homo sapiens
atagcttacattatt

SEQ ID NO: 1149473 - DNA, 15 bp, Homo sapiens
gatagcttacattat

SEQ ID NO: 1149474 - DNA, 15 bp, Homo sapiens
tgatagcttacatta

SEQ ID NO: 1149475 - DNA, 15 bp, Homo sapiens
ttgatagcttacatt

SEQ ID NO: 1149476 - DNA, 15 bp, Homo sapiens
tttgatagcttacat

SEQ ID NO: 1149477 - DNA, 15 bp, Homo sapiens
ctttgatagcttaca

SEQ ID NO: 1149478 - DNA, 15 bp, Homo sapiens
tctttgatagcttac

SEQ ID NO: 1149479 - DNA, 15 bp, Homo sapiens
gtctttgatagctta

SEQ ID NO: 1149480 - DNA, 15 bp, Homo sapiens
tgtctttgatagctt

SEQ ID NO: 1149481 - DNA, 15 bp, Homo sapiens
ctgtctttgatagct

SEQ ID NO: 1149482 - DNA, 15 bp, Homo sapiens
tctgtctttgatagc

SEQ ID NO: 1149483 - DNA, 15 bp, Homo sapiens
atctgtctttgatag

SEQ ID NO: 1149484 - DNA, 15 bp, Homo sapiens
catctgtctttgata

SEQ ID NO: 1149485 - DNA, 15 bp, Homo sapiens
acatctgtctttgat

SEQ ID NO: 1149486 - DNA, 15 bp, Homo sapiens
tacatctgtctttga

SEQ ID NO: 1149487 - DNA, 15 bp, Homo sapiens
atacatctgtctttg

SEQ ID NO: 1149488 - DNA, 15 bp, Homo sapiens
tatacatctgtcttt

SEQ ID NO: 1149489 - DNA, 15 bp, Homo sapiens
gtatacatctgtctt

SEQ ID NO: 1149490 - DNA, 15 bp, Homo sapiens
tgtatacatctgtct

SEQ ID NO: 1149491 - DNA, 15 bp, Homo sapiens
ttgtatacatctgtc

SEQ ID NO: 1149492 - DNA, 15 bp, Homo sapiens
cttgtatacatctgt

SEQ ID NO: 1149493 - DNA, 15 bp, Homo sapiens
ccttgtatacatctg

SEQ ID NO: 1149494 - DNA, 15 bp, Homo sapiens
cccttgtatacatct

SEQ ID NO: 1149495 - DNA, 15 bp, Homo sapiens
tcccttgtatacatc

SEQ ID NO: 1149496 - DNA, 15 bp, Homo sapiens
ctcccttgtatacat

SEQ ID NO: 1149497 - DNA, 15 bp, Homo sapiens
tctcccttgtataca

SEQ ID NO: 1149498 - DNA, 15 bp, Homo sapiens
gtctcccttgtatac

SEQ ID NO: 1149499 - DNA, 15 bp, Homo sapiens
tgtctcccttgtata

SEQ ID NO: 1149500 - DNA, 15 bp, Homo sapiens
ctgtctcccttgtat

SEQ ID NO: 1149501 - DNA, 15 bp, Homo sapiens
tctgtctcccttgta

SEQ ID NO: 1149502 - DNA, 15 bp, Homo sapiens
ctctgtctcccttgt

SEQ ID NO: 1149503 - DNA, 15 bp, Homo sapiens
actctgtctcccttg

SEQ ID NO: 1149504 - DNA, 15 bp, Homo sapiens
gactctgtctccctt

SEQ ID NO: 1149505 - DNA, 15 bp, Homo sapiens
tgactctgtctccct

SEQ ID NO: 1149506 - DNA, 15 bp, Homo sapiens
gtgactctgtctccc

SEQ ID NO: 1149507 - DNA, 15 bp, Homo sapiens
tgtgactctgtctcc

SEQ ID NO: 1149508 - DNA, 15 bp, Homo sapiens
atgtgactctgtctc

SEQ ID NO: 1149509 - DNA, 15 bp, Homo sapiens
tatgtgactctgtct

SEQ ID NO: 1149510 - DNA, 15 bp, Homo sapiens
ttatgtgactctgtc

SEQ ID NO: 1149511 - DNA, 15 bp, Homo sapiens
tttatgtgactctgt

SEQ ID NO: 1149512 - DNA, 15 bp, Homo sapiens
ctttatgtgactctg

SEQ ID NO: 1149513 - DNA, 15 bp, Homo sapiens
actttatgtgactct

SEQ ID NO: 1149514 - DNA, 15 bp, Homo sapiens
gactttatgtgactc

SEQ ID NO: 1149515 - DNA, 15 bp, Homo sapiens
agactttatgtgact

SEQ ID NO: 1149516 - DNA, 15 bp, Homo sapiens
gagactttatgtgac

SEQ ID NO: 1149517 - DNA, 15 bp, Homo sapiens
tgagactttatgtga

SEQ ID NO: 1149518 - DNA, 15 bp, Homo sapiens
ctgagactttatgtg

SEQ ID NO: 1149519 - DNA, 15 bp, Homo sapiens
tctgagactttatgt

SEQ ID NO: 1149520 - DNA, 15 bp, Homo sapiens
atctgagactttatg

SEQ ID NO: 1149521 - DNA, 15 bp, Homo sapiens
catctgagactttat

SEQ ID NO: 1149522 - DNA, 15 bp, Homo sapiens
acatctgagacttta

SEQ ID NO: 1149523 - DNA, 15 bp, Homo sapiens
tacatctgagacttt

SEQ ID NO: 1149524 - DNA, 15 bp, Homo sapiens
ctacatctgagactt

SEQ ID NO: 1149525 - DNA, 15 bp, Homo sapiens
cctacatctgagact

SEQ ID NO: 1149526 - DNA, 15 bp, Homo sapiens
tcctacatctgagac

SEQ ID NO: 1149527 - DNA, 15 bp, Homo sapiens
ctcctacatctgaga

SEQ ID NO: 1149528 - DNA, 15 bp, Homo sapiens
cctcctacatctgag

SEQ ID NO: 1149529 - DNA, 15 bp, Homo sapiens
gcctcctacatctga

SEQ ID NO: 1149530 - DNA, 15 bp, Homo sapiens
ggcctcctacatctg

SEQ ID NO: 1149531 - DNA, 15 bp, Homo sapiens
tggcctcctacatct

SEQ ID NO: 1149532 - DNA, 15 bp, Homo sapiens
atggcctcctacatc

SEQ ID NO: 1149533 - DNA, 15 bp, Homo sapiens
tatggcctcctacat

SEQ ID NO: 1149534 - DNA, 15 bp, Homo sapiens
ctatggcctcctaca

SEQ ID NO: 1149535 - DNA, 15 bp, Homo sapiens
tctatggcctcctac

SEQ ID NO: 1149536 - DNA, 15 bp, Homo sapiens
ctctatggcctccta

SEQ ID NO: 1149537 - DNA, 15 bp, Homo sapiens
gctctatggcctcct

SEQ ID NO: 1149538 - DNA, 15 bp, Homo sapiens
tgctctatggcctcc

SEQ ID NO: 1149539 - DNA, 15 bp, Homo sapiens
ttgctctatggcctc

SEQ ID NO: 1149540 - DNA, 15 bp, Homo sapiens
tttgctctatggcct

SEQ ID NO: 1149541 - DNA, 15 bp, Homo sapiens
ttttgctctatggcc

SEQ ID NO: 1149542 - DNA, 15 bp, Homo sapiens
gttttgctctatggc

SEQ ID NO: 1149543 - DNA, 15 bp, Homo sapiens
cgttttgctctatgg

SEQ ID NO: 1149544 - DNA, 15 bp, Homo sapiens
gcgttttgctctatg

SEQ ID NO: 1149545 - DNA, 15 bp, Homo sapiens
agcgttttgctctat

SEQ ID NO: 1149546 - DNA, 15 bp, Homo sapiens
cagcgttttgctcta

SEQ ID NO: 1149547 - DNA, 15 bp, Homo sapiens
tcagcgttttgctct

SEQ ID NO: 1149548 - DNA, 15 bp, Homo sapiens
ctcagcgttttgctc

SEQ ID NO: 1149549 - DNA, 15 bp, Homo sapiens
actcagcgttttgct

SEQ ID NO: 1149550 - DNA, 15 bp, Homo sapiens
aactcagcgttttgc

SEQ ID NO: 1149551 - DNA, 15 bp, Homo sapiens
gaactcagcgttttg

SEQ ID NO: 1149552 - DNA, 15 bp, Homo sapiens
agaactcagcgtttt

SEQ ID NO: 1149553 - DNA, 15 bp, Homo sapiens
cagaactcagcgttt

SEQ ID NO: 1149554 - DNA, 15 bp, Homo sapiens
ccagaactcagcgtt

SEQ ID NO: 1149555 - DNA, 15 bp, Homo sapiens
gccagaactcagcgt

SEQ ID NO: 1149556 - DNA, 15 bp, Homo sapiens
agccagaactcagcg

SEQ ID NO: 1149557 - DNA, 15 bp, Homo sapiens
aagccagaactcagc

SEQ ID NO: 1149558 - DNA, 15 bp, Homo sapiens
aaagccagaactcag

SEQ ID NO: 1149559 - DNA, 15 bp, Homo sapiens
gaaagccagaactca

SEQ ID NO: 1149560 - DNA, 15 bp, Homo sapiens
tgaaagccagaactc

SEQ ID NO: 1149561 - DNA, 15 bp, Homo sapiens
ctgaaagccagaact

SEQ ID NO: 1149562 - DNA, 15 bp, Homo sapiens
cctgaaagccagaac

SEQ ID NO: 1149563 - DNA, 15 bp, Homo sapiens
tcctgaaagccagaa

SEQ ID NO: 1149564 - DNA, 15 bp, Homo sapiens
ctcctgaaagccaga

SEQ ID NO: 1149565 - DNA, 15 bp, Homo sapiens
actcctgaaagccag

SEQ ID NO: 1149566 - DNA, 15 bp, Homo sapiens
aactcctgaaagcca

SEQ ID NO: 1149567 - DNA, 15 bp, Homo sapiens
aaactcctgaaagcc

SEQ ID NO: 1149568 - DNA, 15 bp, Homo sapiens
aaaactcctgaaagc

SEQ ID NO: 1149569 - DNA, 15 bp, Homo sapiens
gaaaactcctgaaag

SEQ ID NO: 1149570 - DNA, 15 bp, Homo sapiens
agaaaactcctgaaa

SEQ ID NO: 1149571 - DNA, 15 bp, Homo sapiens
tagaaaactcctgaa

SEQ ID NO: 1149572 - DNA, 15 bp, Homo sapiens
ttagaaaactcctga

SEQ ID NO: 1149573 - DNA, 15 bp, Homo sapiens
gttagaaaactcctg

SEQ ID NO: 1149574 - DNA, 15 bp, Homo sapiens
tgttagaaaactcct

SEQ ID NO: 1149575 - DNA, 15 bp, Homo sapiens
atgttagaaaactcc

SEQ ID NO: 1149576 - DNA, 15 bp, Homo sapiens
tatgttagaaaactc

SEQ ID NO: 1149577 - DNA, 15 bp, Homo sapiens
ttatgttagaaaact

SEQ ID NO: 1149578 - DNA, 15 bp, Homo sapiens
gttatgttagaaaac

SEQ ID NO: 1149579 - DNA, 15 bp, Homo sapiens
tgttatgttagaaaa

SEQ ID NO: 1149580 - DNA, 15 bp, Homo sapiens
ttgttatgttagaaa

SEQ ID NO: 1149581 - DNA, 15 bp, Homo sapiens
gttgttatgttagaa

SEQ ID NO: 1149582 - DNA, 15 bp, Homo sapiens
ggttgttatgttaga

SEQ ID NO: 1149583 - DNA, 15 bp, Homo sapiens
aggttgttatgttag

SEQ ID NO: 1149584 - DNA, 15 bp, Homo sapiens
caggttgttatgtta

SEQ ID NO: 1149585 - DNA, 15 bp, Homo sapiens
tcaggttgttatgtt

SEQ ID NO: 1149586 - DNA, 15 bp, Homo sapiens
atcaggttgttatgt

SEQ ID NO: 1149587 - DNA, 15 bp, Homo sapiens
gatcaggttgttatg

SEQ ID NO: 1149588 - DNA, 15 bp, Homo sapiens
tgatcaggttgttat

SEQ ID NO: 1149589 - DNA, 15 bp, Homo sapiens
gtgatcaggttgtta

SEQ ID NO: 1149590 - DNA, 15 bp, Homo sapiens
ggtgatcaggttgtt

SEQ ID NO: 1149591 - DNA, 15 bp, Homo sapiens
tggtgatcaggttgt

SEQ ID NO: 1149592 - DNA, 15 bp, Homo sapiens
ctggtgatcaggttg

SEQ ID NO: 1149593 - DNA, 15 bp, Homo sapiens
actggtgatcaggtt

SEQ ID NO: 1149594 - DNA, 15 bp, Homo sapiens
aactggtgatcaggt

SEQ ID NO: 1149595 - DNA, 15 bp, Homo sapiens
taactggtgatcagg

SEQ ID NO: 1149596 - DNA, 15 bp, Homo sapiens
ttaactggtgatcag

SEQ ID NO: 1149597 - DNA, 15 bp, Homo sapiens
tttaactggtgatca

SEQ ID NO: 1149598 - DNA, 15 bp, Homo sapiens
ttttaactggtgatc

SEQ ID NO: 1149599 - DNA, 15 bp, Homo sapiens
cttttaactggtgat

SEQ ID NO: 1149600 - DNA, 15 bp, Homo sapiens
gcttttaactggtga

SEQ ID NO: 1149601 - DNA, 15 bp, Homo sapiens
agcttttaactggtg

SEQ ID NO: 1149602 - DNA, 15 bp, Homo sapiens
tagcttttaactggt

SEQ ID NO: 1149603 - DNA, 15 bp, Homo sapiens
ttagcttttaactgg

SEQ ID NO: 1149604 - DNA, 15 bp, Homo sapiens
cttagcttttaactg

SEQ ID NO: 1149605 - DNA, 15 bp, Homo sapiens
ccttagcttttaact

SEQ ID NO: 1149606 - DNA, 15 bp, Homo sapiens
tccttagcttttaac

SEQ ID NO: 1149607 - DNA, 15 bp, Homo sapiens
ctccttagcttttaa

SEQ ID NO: 1149608 - DNA, 15 bp, Homo sapiens
tctccttagctttta

SEQ ID NO: 1149609 - DNA, 15 bp, Homo sapiens
ttctccttagctttt

SEQ ID NO: 1149610 - DNA, 15 bp, Homo sapiens
tttctccttagcttt

SEQ ID NO: 1149611 - DNA, 15 bp, Homo sapiens
ctttctccttagctt

SEQ ID NO: 1149612 - DNA, 15 bp, Homo sapiens
tctttctccttagct

SEQ ID NO: 1149613 - DNA, 15 bp, Homo sapiens
atctttctccttagc

SEQ ID NO: 1149614 - DNA, 15 bp, Homo sapiens
catctttctccttag

SEQ ID NO: 1149615 - DNA, 15 bp, Homo sapiens
tcatctttctcctta

SEQ ID NO: 1149616 - DNA, 15 bp, Homo sapiens
ttcatctttctcctt

SEQ ID NO: 1149617 - DNA, 15 bp, Homo sapiens
cttcatctttctcct

SEQ ID NO: 1149618 - DNA, 15 bp, Homo sapiens
tcttcatctttctcc

SEQ ID NO: 1149619 - DNA, 15 bp, Homo sapiens
ttcttcatctttctc

SEQ ID NO: 1149620 - DNA, 15 bp, Homo sapiens
attcttcatctttct

SEQ ID NO: 1149621 - DNA, 15 bp, Homo sapiens
gattcttcatctttc

SEQ ID NO: 1149622 - DNA, 15 bp, Homo sapiens
tgattcttcatcttt

SEQ ID NO: 1149623 - DNA, 15 bp, Homo sapiens
ctgattcttcatctt

SEQ ID NO: 1149624 - DNA, 15 bp, Homo sapiens
actgattcttcatct

SEQ ID NO: 1149625 - DNA, 15 bp, Homo sapiens
tactgattcttcatc

SEQ ID NO: 1149626 - DNA, 15 bp, Homo sapiens
atactgattcttcat

SEQ ID NO: 1149627 - DNA, 15 bp, Homo sapiens
catactgattcttca

SEQ ID NO: 1149628 - DNA, 15 bp, Homo sapiens
tcatactgattcttc

SEQ ID NO: 1149629 - DNA, 15 bp, Homo sapiens
ctcatactgattctt

SEQ ID NO: 1149630 - DNA, 15 bp, Homo sapiens
tctcatactgattct

SEQ ID NO: 1149631 - DNA, 15 bp, Homo sapiens
atctcatactgattc

SEQ ID NO: 1149632 - DNA, 15 bp, Homo sapiens
gatctcatactgatt

SEQ ID NO: 1149633 - DNA, 15 bp, Homo sapiens
tgatctcatactgat

SEQ ID NO: 1149634 - DNA, 15 bp, Homo sapiens
atgatctcatactga

SEQ ID NO: 1149635 - DNA, 15 bp, Homo sapiens
tatgatctcatactg

SEQ ID NO: 1149636 - DNA, 15 bp, Homo sapiens
ttatgatctcatact

SEQ ID NO: 1149637 - DNA, 15 bp, Homo sapiens
tttatgatctcatac

SEQ ID NO: 1149638 - DNA, 15 bp, Homo sapiens
ttttatgatctcata

SEQ ID NO: 1149639 - DNA, 15 bp, Homo sapiens
attttatgatctcat

SEQ ID NO: 1149640 - DNA, 15 bp, Homo sapiens
aattttatgatctca

SEQ ID NO: 1149641 - DNA, 15 bp, Homo sapiens
taattttatgatctc

SEQ ID NO: 1149642 - DNA, 15 bp, Homo sapiens
ataattttatgatct

SEQ ID NO: 1149643 - DNA, 15 bp, Homo sapiens
cataattttatgatc

SEQ ID NO: 1149644 - DNA, 15 bp, Homo sapiens
tcataattttatgat

SEQ ID NO: 1149645 - DNA, 15 bp, Homo sapiens
atcataattttatga

SEQ ID NO: 1149646 - DNA, 15 bp, Homo sapiens
catcataattttatg

SEQ ID NO: 1149647 - DNA, 15 bp, Homo sapiens
gcatcataattttat

SEQ ID NO: 1149648 - DNA, 15 bp, Homo sapiens
agcatcataatttta

SEQ ID NO: 1149649 - DNA, 15 bp, Homo sapiens
gagcatcataatttt

SEQ ID NO: 1149650 - DNA, 15 bp, Homo sapiens
agagcatcataattt

SEQ ID NO: 1149651 - DNA, 15 bp, Homo sapiens
aagagcatcataatt

SEQ ID NO: 1149652 - DNA, 15 bp, Homo sapiens
gaagagcatcataat

SEQ ID NO: 1149653 - DNA, 15 bp, Homo sapiens
agaagagcatcataa

SEQ ID NO: 1149654 - DNA, 15 bp, Homo sapiens
tagaagagcatcata

SEQ ID NO: 1149655 - DNA, 15 bp, Homo sapiens
ttagaagagcatcat

SEQ ID NO: 1149656 - DNA, 15 bp, Homo sapiens
tttagaagagcatca

SEQ ID NO: 1149657 - DNA, 15 bp, Homo sapiens
ttttagaagagcatc

SEQ ID NO: 1149658 - DNA, 15 bp, Homo sapiens
tttttagaagagcat

SEQ ID NO: 1149659 - DNA, 15 bp, Homo sapiens
atttttagaagagca

SEQ ID NO: 1149660 - DNA, 15 bp, Homo sapiens
tatttttagaagagc

SEQ ID NO: 1149661 - DNA, 15 bp, Homo sapiens
atatttttagaagag

SEQ ID NO: 1149662 - DNA, 15 bp, Homo sapiens
catatttttagaaga

SEQ ID NO: 1149663 - DNA, 15 bp, Homo sapiens
gcatatttttagaag

SEQ ID NO: 1149664 - DNA, 15 bp, Homo sapiens
cgcatatttttagaa

SEQ ID NO: 1149665 - DNA, 15 bp, Homo sapiens
tcgcatatttttaga

SEQ ID NO: 1149666 - DNA, 15 bp, Homo sapiens
ttcgcatatttttag

SEQ ID NO: 1149667 - DNA, 15 bp, Homo sapiens
tttcgcatattttta

SEQ ID NO: 1149668 - DNA, 15 bp, Homo sapiens
atttcgcatattttt

SEQ ID NO: 1149669 - DNA, 15 bp, Homo sapiens
catttcgcatatttt

SEQ ID NO: 1149670 - DNA, 15 bp, Homo sapiens
tcatttcgcatattt

SEQ ID NO: 1149671 - DNA, 15 bp, Homo sapiens
ctcatttcgcatatt

SEQ ID NO: 1149672 - DNA, 15 bp, Homo sapiens
cctcatttcgcatat

SEQ ID NO: 1149673 - DNA, 15 bp, Homo sapiens
acctcatttcgcata

SEQ ID NO: 1149674 - DNA, 15 bp, Homo sapiens
aacctcatttcgcat

SEQ ID NO: 1149675 - DNA, 15 bp, Homo sapiens
aaacctcatttcgca

SEQ ID NO: 1149676 - DNA, 15 bp, Homo sapiens
aaaacctcatttcgc

SEQ ID NO: 1149677 - DNA, 15 bp, Homo sapiens
aaaaacctcatttcg

SEQ ID NO: 1149678 - DNA, 15 bp, Homo sapiens
taaaaacctcatttc

SEQ ID NO: 1149679 - DNA, 15 bp, Homo sapiens
ctaaaaacctcattt

SEQ ID NO: 1149680 - DNA, 15 bp, Homo sapiens
cctaaaaacctcatt

SEQ ID NO: 1149681 - DNA, 15 bp, Homo sapiens
ccctaaaaacctcat

SEQ ID NO: 1149682 - DNA, 15 bp, Homo sapiens
tccctaaaaacctca

SEQ ID NO: 1149683 - DNA, 15 bp, Homo sapiens
ctccctaaaaacctc

SEQ ID NO: 1149684 - DNA, 15 bp, Homo sapiens
cctccctaaaaacct

SEQ ID NO: 1149685 - DNA, 15 bp, Homo sapiens
acctccctaaaaacc

SEQ ID NO: 1149686 - DNA, 15 bp, Homo sapiens
cacctccctaaaaac

SEQ ID NO: 1149687 - DNA, 15 bp, Homo sapiens
acacctccctaaaaa

SEQ ID NO: 1149688 - DNA, 15 bp, Homo sapiens
tacacctccctaaaa

SEQ ID NO: 1149689 - DNA, 15 bp, Homo sapiens
ctacacctccctaaa

SEQ ID NO: 1149690 - DNA, 15 bp, Homo sapiens
cctacacctccctaa

SEQ ID NO: 1149691 - DNA, 15 bp, Homo sapiens
acctacacctcccta

SEQ ID NO: 1149692 - DNA, 15 bp, Homo sapiens
tacctacacctccct

SEQ ID NO: 1149693 - DNA, 15 bp, Homo sapiens
atacctacacctccc

SEQ ID NO: 1149694 - DNA, 15 bp, Homo sapiens
catacctacacctcc

SEQ ID NO: 1149695 - DNA, 15 bp, Homo sapiens
ccatacctacacctc

SEQ ID NO: 1149696 - DNA, 15 bp, Homo sapiens
gccatacctacacct

SEQ ID NO: 1149697 - DNA, 15 bp, Homo sapiens
agccatacctacacc

SEQ ID NO: 1149698 - DNA, 15 bp, Homo sapiens
cagccatacctacac

SEQ ID NO: 1149699 - DNA, 15 bp, Homo sapiens
tcagccatacctaca

SEQ ID NO: 1149700 - DNA, 15 bp, Homo sapiens
ttcagccatacctac

SEQ ID NO: 1149701 - DNA, 15 bp, Homo sapiens
cttcagccataccta

SEQ ID NO: 1149702 - DNA, 15 bp, Homo sapiens
tcttcagccatacct

SEQ ID NO: 1149703 - DNA, 15 bp, Homo sapiens
ttcttcagccatacc

SEQ ID NO: 1149704 - DNA, 15 bp, Homo sapiens
tttcttcagccatac

SEQ ID NO: 1149705 - DNA, 15 bp, Homo sapiens
ttttcttcagccata

SEQ ID NO: 1149706 - DNA, 15 bp, Homo sapiens
attttcttcagccat

SEQ ID NO: 1149707 - DNA, 15 bp, Homo sapiens
gattttcttcagcca

SEQ ID NO: 1149708 - DNA, 15 bp, Homo sapiens
tgattttcttcagcc

SEQ ID NO: 1149709 - DNA, 15 bp, Homo sapiens
ttgattttcttcagc

SEQ ID NO: 1149710 - DNA, 15 bp, Homo sapiens
cttgattttcttcag

SEQ ID NO: 1149711 - DNA, 15 bp, Homo sapiens
ccttgattttcttca

SEQ ID NO: 1149712 - DNA, 15 bp, Homo sapiens
accttgattttcttc

SEQ ID NO: 1149713 - DNA, 15 bp, Homo sapiens
caccttgattttctt

SEQ ID NO: 1149714 - DNA, 15 bp, Homo sapiens
tcaccttgattttct

SEQ ID NO: 1149715 - DNA, 15 bp, Homo sapiens
ttcaccttgattttc

SEQ ID NO: 1149716 - DNA, 15 bp, Homo sapiens
attcaccttgatttt

SEQ ID NO: 1149717 - DNA, 15 bp, Homo sapiens
cattcaccttgattt

SEQ ID NO: 1149718 - DNA, 15 bp, Homo sapiens
tcattcaccttgatt

SEQ ID NO: 1149719 - DNA, 15 bp, Homo sapiens
ttcattcaccttgat

SEQ ID NO: 1149720 - DNA, 15 bp, Homo sapiens
cttcattcaccttga

SEQ ID NO: 1149721 - DNA, 15 bp, Homo sapiens
tcttcattcaccttg

SEQ ID NO: 1149722 - DNA, 15 bp, Homo sapiens
gtcttcattcacctt

SEQ ID NO: 1149723 - DNA, 15 bp, Homo sapiens
tgtcttcattcacct

SEQ ID NO: 1149724 - DNA, 15 bp, Homo sapiens
ttgtcttcattcacc

SEQ ID NO: 1149725 - DNA, 15 bp, Homo sapiens
cttgtcttcattcac

SEQ ID NO: 1149726 - DNA, 15 bp, Homo sapiens
tcttgtcttcattca

SEQ ID NO: 1149727 - DNA, 15 bp, Homo sapiens
atcttgtcttcattc

SEQ ID NO: 1149728 - DNA, 15 bp, Homo sapiens
gatcttgtcttcatt

SEQ ID NO: 1149729 - DNA, 15 bp, Homo sapiens
tgatcttgtcttcat

SEQ ID NO: 1149730 - DNA, 15 bp, Homo sapiens
ttgatcttgtcttca

SEQ ID NO: 1149731 - DNA, 15 bp, Homo sapiens
attgatcttgtcttc

SEQ ID NO: 1149732 - DNA, 15 bp, Homo sapiens
aattgatcttgtctt

SEQ ID NO: 1149733 - DNA, 15 bp, Homo sapiens
caattgatcttgtct

SEQ ID NO: 1149734 - DNA, 15 bp, Homo sapiens
tcaattgatcttgtc

SEQ ID NO: 1149735 - DNA, 15 bp, Homo sapiens
ctcaattgatcttgt

SEQ ID NO: 1149736 - DNA, 15 bp, Homo sapiens
tctcaattgatcttg

SEQ ID NO: 1149737 - DNA, 15 bp, Homo sapiens
ttctcaattgatctt

SEQ ID NO: 1149738 - DNA, 15 bp, Homo sapiens
attctcaattgatct

SEQ ID NO: 1149739 - DNA, 15 bp, Homo sapiens
cattctcaattgatc

SEQ ID NO: 1149740 - DNA, 15 bp, Homo sapiens
acattctcaattgat

SEQ ID NO: 1149741 - DNA, 15 bp, Homo sapiens
tacattctcaattga

SEQ ID NO: 1149742 - DNA, 15 bp, Homo sapiens
ctacattctcaattg

SEQ ID NO: 1149743 - DNA, 15 bp, Homo sapiens
actacattctcaatt

SEQ ID NO: 1149744 - DNA, 15 bp, Homo sapiens
aactacattctcaat

SEQ ID NO: 1149745 - DNA, 15 bp, Homo sapiens
aaactacattctcaa

SEQ ID NO: 1149746 - DNA, 15 bp, Homo sapiens
gaaactacattctca

SEQ ID NO: 1149747 - DNA, 15 bp, Homo sapiens
tgaaactacattctc

SEQ ID NO: 1149748 - DNA, 15 bp, Homo sapiens
ctgaaactacattct

SEQ ID NO: 1149749 - DNA, 15 bp, Homo sapiens
tctgaaactacattc

SEQ ID NO: 1149750 - DNA, 15 bp, Homo sapiens
ttctgaaactacatt

SEQ ID NO: 1149751 - DNA, 15 bp, Homo sapiens
tttctgaaactacat

SEQ ID NO: 1149752 - DNA, 15 bp, Homo sapiens
atttctgaaactaca

SEQ ID NO: 1149753 - DNA, 15 bp, Homo sapiens
tatttctgaaactac

SEQ ID NO: 1149754 - DNA, 15 bp, Homo sapiens
ctatttctgaaacta

SEQ ID NO: 1149755 - DNA, 15 bp, Homo sapiens
gctatttctgaaact

SEQ ID NO: 1149756 - DNA, 15 bp, Homo sapiens
tgctatttctgaaac

SEQ ID NO: 1149757 - DNA, 15 bp, Homo sapiens
ttgctatttctgaaa

SEQ ID NO: 1149758 - DNA, 15 bp, Homo sapiens
tttgctatttctgaa

SEQ ID NO: 1149759 - DNA, 15 bp, Homo sapiens
ctttgctatttctga

SEQ ID NO: 1149760 - DNA, 15 bp, Homo sapiens
tctttgctatttctg

SEQ ID NO: 1149761 - DNA, 15 bp, Homo sapiens
ttctttgctatttct

SEQ ID NO: 1149762 - DNA, 15 bp, Homo sapiens
cttctttgctatttc

SEQ ID NO: 1149763 - DNA, 15 bp, Homo sapiens
gcttctttgctattt

SEQ ID NO: 1149764 - DNA, 15 bp, Homo sapiens
ggcttctttgctatt

SEQ ID NO: 1149765 - DNA, 15 bp, Homo sapiens
tggcttctttgctat

SEQ ID NO: 1149766 - DNA, 15 bp, Homo sapiens
ttggcttctttgcta

SEQ ID NO: 1149767 - DNA, 15 bp, Homo sapiens
actttggcttctttg

SEQ ID NO: 1149768 - DNA, 15 bp, Homo sapiens
aactttggcttcttt

SEQ ID NO: 1149769 - DNA, 15 bp, Homo sapiens
aaactttggcttctt

SEQ ID NO: 1149770 - DNA, 15 bp, Homo sapiens
caaactttggcttct

SEQ ID NO: 1149771 - DNA, 15 bp, Homo sapiens
tcaaactttggcttc

SEQ ID NO: 1149772 - DNA, 15 bp, Homo sapiens
ctcaaactttggctt

SEQ ID NO: 1149773 - DNA, 15 bp, Homo sapiens
cctcaaactttggct

SEQ ID NO: 1149774 - DNA, 15 bp, Homo sapiens
tcctcaaactttggc

SEQ ID NO: 1149775 - DNA, 15 bp, Homo sapiens
ttcctcaaactttgg

SEQ ID NO: 1149776 - DNA, 15 bp, Homo sapiens
cttcctcaaactttg

SEQ ID NO: 1149777 - DNA, 15 bp, Homo sapiens
acttcctcaaacttt

SEQ ID NO: 1149778 - DNA, 15 bp, Homo sapiens
aacttcctcaaactt

SEQ ID NO: 1149779 - DNA, 15 bp, Homo sapiens
taacttcctcaaact

SEQ ID NO: 1149780 - DNA, 15 bp, Homo sapiens
ttaacttcctcaaac

SEQ ID NO: 1149781 - DNA, 15 bp, Homo sapiens
cttaacttcctcaaa

SEQ ID NO: 1149782 - DNA, 15 bp, Homo sapiens
acttaacttcctcaa

SEQ ID NO: 1149783 - DNA, 15 bp, Homo sapiens
cacttaacttcctca

SEQ ID NO: 1149784 - DNA, 15 bp, Homo sapiens
ccacttaacttcctc

SEQ ID NO: 1149785 - DNA, 15 bp, Homo sapiens
gccacttaacttcct

SEQ ID NO: 1149786 - DNA, 15 bp, Homo sapiens
agccacttaacttcc

SEQ ID NO: 1149787 - DNA, 15 bp, Homo sapiens
tagccacttaacttc

SEQ ID NO: 1149788 - DNA, 15 bp, Homo sapiens
ctagccacttaactt

SEQ ID NO: 1149789 - DNA, 15 bp, Homo sapiens
cctagccacttaact

SEQ ID NO: 1149790 - DNA, 15 bp, Homo sapiens
ccctagccacttaac

SEQ ID NO: 1149791 - DNA, 15 bp, Homo sapiens
tccctagccacttaa

SEQ ID NO: 1149792 - DNA, 15 bp, Homo sapiens
atccctagccactta

SEQ ID NO: 1149793 - DNA, 15 bp, Homo sapiens
tatccctagccactt

SEQ ID NO: 1149794 - DNA, 15 bp, Homo sapiens
ttatccctagccact

SEQ ID NO: 1149795 - DNA, 15 bp, Homo sapiens
gttatccctagccac

SEQ ID NO: 1149796 - DNA, 15 bp, Homo sapiens
tgttatccctagcca

SEQ ID NO: 1149797 - DNA, 15 bp, Homo sapiens
atgttatccctagcc

SEQ ID NO: 1149798 - DNA, 15 bp, Homo sapiens
aatgttatccctagc

SEQ ID NO: 1149799 - DNA, 15 bp, Homo sapiens
caatgttatccctag

SEQ ID NO: 1149800 - DNA, 15 bp, Homo sapiens
tcaatgttatcccta

SEQ ID NO: 1149801 - DNA, 15 bp, Homo sapiens
ctcaatgttatccct

SEQ ID NO: 1149802 - DNA, 15 bp, Homo sapiens
cctcaatgttatccc

SEQ ID NO: 1149803 - DNA, 15 bp, Homo sapiens
gcctcaatgttatcc

SEQ ID NO: 1149804 - DNA, 15 bp, Homo sapiens
tgcctcaatgttatc

SEQ ID NO: 1149805 - DNA, 15 bp, Homo sapiens
gtgcctcaatgttat

SEQ ID NO: 1149806 - DNA, 15 bp, Homo sapiens
agtgcctcaatgtta

SEQ ID NO: 1149807 - DNA, 15 bp, Homo sapiens
tagtgcctcaatgtt

SEQ ID NO: 1149808 - DNA, 15 bp, Homo sapiens
ttagtgcctcaatgt

SEQ ID NO: 1149809 - DNA, 15 bp, Homo sapiens
tttagtgcctcaatg

SEQ ID NO: 1149810 - DNA, 15 bp, Homo sapiens
ctttagtgcctcaat

SEQ ID NO: 1149811 - DNA, 15 bp, Homo sapiens
gctttagtgcctcaa

SEQ ID NO: 1149812 - DNA, 15 bp, Homo sapiens
tgctttagtgcctca

SEQ ID NO: 1149813 - DNA, 15 bp, Homo sapiens
atgctttagtgcctc

SEQ ID NO: 1149814 - DNA, 15 bp, Homo sapiens
aatgctttagtgcct

SEQ ID NO: 1149815 - DNA, 15 bp, Homo sapiens
taatgctttagtgcc

SEQ ID NO: 1149816 - DNA, 15 bp, Homo sapiens
ataatgctttagtgc

SEQ ID NO: 1149817 - DNA, 15 bp, Homo sapiens
aataatgctttagtg

SEQ ID NO: 1149818 - DNA, 15 bp, Homo sapiens
caataatgctttagt

SEQ ID NO: 1149819 - DNA, 15 bp, Homo sapiens
ccaataatgctttag

SEQ ID NO: 1149820 - DNA, 15 bp, Homo sapiens
accaataatgcttta

SEQ ID NO: 1149821 - DNA, 15 bp, Homo sapiens
aaccaataatgcttt

SEQ ID NO: 1149822 - DNA, 15 bp, Homo sapiens
gaaccaataatgctt

SEQ ID NO: 1149823 - DNA, 15 bp, Homo sapiens
agaaccaataatgct

SEQ ID NO: 1149824 - DNA, 15 bp, Homo sapiens
cagaaccaataatgc

SEQ ID NO: 1149825 - DNA, 15 bp, Homo sapiens
gcagaaccaataatg

SEQ ID NO: 1149826 - DNA, 15 bp, Homo sapiens
tgcagaaccaataat

SEQ ID NO: 1149827 - DNA, 15 bp, Homo sapiens
ctgcagaaccaataa

SEQ ID NO: 1149828 - DNA, 15 bp, Homo sapiens
actgcagaaccaata

SEQ ID NO: 1149829 - DNA, 15 bp, Homo sapiens
gactgcagaaccaat

SEQ ID NO: 1149830 - DNA, 15 bp, Homo sapiens
tgactgcagaaccaa

SEQ ID NO: 1149831 - DNA, 15 bp, Homo sapiens
ttgactgcagaacca

SEQ ID NO: 1149832 - DNA, 15 bp, Homo sapiens
cttgactgcagaacc

SEQ ID NO: 1149833 - DNA, 15 bp, Homo sapiens
ccttgactgcagaac

SEQ ID NO: 1149834 - DNA, 15 bp, Homo sapiens
cccttgactgcagaa

SEQ ID NO: 1149835 - DNA, 15 bp, Homo sapiens
acccttgactgcaga

SEQ ID NO: 1149836 - DNA, 15 bp, Homo sapiens
tacccttgactgcag

SEQ ID NO: 1149837 - DNA, 15 bp, Homo sapiens
ctacccttgactgca

SEQ ID NO: 1149838 - DNA, 15 bp, Homo sapiens
cctacccttgactgc

SEQ ID NO: 1149839 - DNA, 15 bp, Homo sapiens
tcctacccttgactg

SEQ ID NO: 1149840 - DNA, 15 bp, Homo sapiens
atcctacccttgact

SEQ ID NO: 1149841 - DNA, 15 bp, Homo sapiens
tatcctacccttgac

SEQ ID NO: 1149842 - DNA, 15 bp, Homo sapiens
ctatcctacccttga

SEQ ID NO: 1149843 - DNA, 15 bp, Homo sapiens
tctatcctacccttg

SEQ ID NO: 1149844 - DNA, 15 bp, Homo sapiens
atctatcctaccctt

SEQ ID NO: 1149845 - DNA, 15 bp, Homo sapiens
aatctatcctaccct

SEQ ID NO: 1149846 - DNA, 15 bp, Homo sapiens
caatctatcctaccc

SEQ ID NO: 1149847 - DNA, 15 bp, Homo sapiens
acaatctatcctacc

SEQ ID NO: 1149848 - DNA, 15 bp, Homo sapiens
aacaatctatcctac

SEQ ID NO: 1149849 - DNA, 15 bp, Homo sapiens
aaacaatctatccta

SEQ ID NO: 1149850 - DNA, 15 bp, Homo sapiens
aaaacaatctatcct

SEQ ID NO: 1149851 - DNA, 15 bp, Homo sapiens
aaaaacaatctatcc

SEQ ID NO: 1149852 - DNA, 15 bp, Homo sapiens
aaaaaacaatctatc

SEQ ID NO: 1149853 - DNA, 15 bp, Homo sapiens
aaaaaaacaatctat

SEQ ID NO: 1149854 - DNA, 15 bp, Homo sapiens
aaaaaaaacaatcta

SEQ ID NO: 1149855 - DNA, 15 bp, Homo sapiens
aaaaaaaaacaatct

SEQ ID NO: 1149856 - DNA, 15 bp, Homo sapiens
aaaaaaaaaacaatc

SEQ ID NO: 1149857 - DNA, 15 bp, Homo sapiens
aaaaaaaaaaacaat

SEQ ID NO: 1149858 - DNA, 15 bp, Homo sapiens
gattgcaccattgca

SEQ ID NO: 1149859 - DNA, 15 bp, Homo sapiens
agattgcaccattgc

SEQ ID NO: 1149860 - DNA, 15 bp, Homo sapiens
aagattgcaccattg

SEQ ID NO: 1149861 - DNA, 15 bp, Homo sapiens
caagattgcaccatt

SEQ ID NO: 1149862 - DNA, 15 bp, Homo sapiens
ccaagattgcaccat

SEQ ID NO: 1149863 - DNA, 15 bp, Homo sapiens
gccaagattgcacca

SEQ ID NO: 1149864 - DNA, 15 bp, Homo sapiens
agccaagattgcacc

SEQ ID NO: 1149865 - DNA, 15 bp, Homo sapiens
gagccaagattgcac

SEQ ID NO: 1149866 - DNA, 15 bp, Homo sapiens
agaggcagaggttgc

SEQ ID NO: 1149867 - DNA, 15 bp, Homo sapiens
gagaggcagaggttg

SEQ ID NO: 1149868 - DNA, 15 bp, Homo sapiens
cgagaggcagaggtt

SEQ ID NO: 1149869 - DNA, 15 bp, Homo sapiens
ccgagaggcagaggt

SEQ ID NO: 1149870 - DNA, 15 bp, Homo sapiens
cccgagaggcagagg

SEQ ID NO: 1149871 - DNA, 15 bp, Homo sapiens
gcccgagaggcagag

SEQ ID NO: 1149872 - DNA, 15 bp, Homo sapiens
agcccgagaggcaga

SEQ ID NO: 1149873 - DNA, 15 bp, Homo sapiens
gagcccgagaggcag

SEQ ID NO: 1149874 - DNA, 15 bp, Homo sapiens
tgagcccgagaggca

SEQ ID NO: 1149875 - DNA, 15 bp, Homo sapiens
ttgagcccgagaggc

SEQ ID NO: 1149876 - DNA, 15 bp, Homo sapiens
cttgagcccgagagg

SEQ ID NO: 1149877 - DNA, 15 bp, Homo sapiens
gcttgagcccgagag

SEQ ID NO: 1149878 - DNA, 15 bp, Homo sapiens
tgcttgagcccgaga

SEQ ID NO: 1149879 - DNA, 15 bp, Homo sapiens
ttgcttgagcccgag

SEQ ID NO: 1149880 - DNA, 15 bp, Homo sapiens
attgcttgagcccga

SEQ ID NO: 1149881 - DNA, 15 bp, Homo sapiens
aattgcttgagcccg

SEQ ID NO: 1149882 - DNA, 15 bp, Homo sapiens
gaattgcttgagccc

SEQ ID NO: 1149883 - DNA, 15 bp, Homo sapiens
ggagaattgcttgag

SEQ ID NO: 1149884 - DNA, 15 bp, Homo sapiens
atgtgcctgtaatcc

SEQ ID NO: 1149885 - DNA, 15 bp, Homo sapiens
gcatgtgcctgtaat

SEQ ID NO: 1149886 - DNA, 15 bp, Homo sapiens
ggcatgtgcctgtaa

SEQ ID NO: 1149887 - DNA, 15 bp, Homo sapiens
tggcatgtgcctgta

SEQ ID NO: 1149888 - DNA, 15 bp, Homo sapiens
gtggcatgtgcctgt

SEQ ID NO: 1149889 - DNA, 15 bp, Homo sapiens
ggtggcatgtgcctg

SEQ ID NO: 1149890 - DNA, 15 bp, Homo sapiens
tgggcatggtggcat

SEQ ID NO: 1149891 - DNA, 15 bp, Homo sapiens
ttgaaaatacaaaaa

SEQ ID NO: 1149892 - DNA, 15 bp, Homo sapiens
attgaaaatacaaaa

SEQ ID NO: 1149893 - DNA, 15 bp, Homo sapiens
tattgaaaatacaaa

SEQ ID NO: 1149894 - DNA, 15 bp, Homo sapiens
ctattgaaaatacaa

SEQ ID NO: 1149895 - DNA, 15 bp, Homo sapiens
tctattgaaaataca

SEQ ID NO: 1149896 - DNA, 15 bp, Homo sapiens
ctctattgaaaatac

SEQ ID NO: 1149897 - DNA, 15 bp, Homo sapiens
tctctattgaaaata

SEQ ID NO: 1149898 - DNA, 15 bp, Homo sapiens
gtctctattgaaaat

SEQ ID NO: 1149899 - DNA, 15 bp, Homo sapiens
agtctctattgaaaa

SEQ ID NO: 1149900 - DNA, 15 bp, Homo sapiens
cagtctctattgaaa

SEQ ID NO: 1149901 - DNA, 15 bp, Homo sapiens
ccagtctctattgaa

SEQ ID NO: 1149902 - DNA, 15 bp, Homo sapiens
cccagtctctattga

SEQ ID NO: 1149903 - DNA, 15 bp, Homo sapiens
acccagtctctattg

SEQ ID NO: 1149904 - DNA, 15 bp, Homo sapiens
aacccagtctctatt

SEQ ID NO: 1149905 - DNA, 15 bp, Homo sapiens
aaacccagtctctat

SEQ ID NO: 1149906 - DNA, 15 bp, Homo sapiens
gggcaacatggtgaa

SEQ ID NO: 1149907 - DNA, 15 bp, Homo sapiens
tgggcaacatggtga

SEQ ID NO: 1149908 - DNA, 15 bp, Homo sapiens
ctgggcaacatggtg

SEQ ID NO: 1149909 - DNA, 15 bp, Homo sapiens
cctgggcaacatggt

SEQ ID NO: 1149910 - DNA, 15 bp, Homo sapiens
gaagaccagcctggg

SEQ ID NO: 1149911 - DNA, 15 bp, Homo sapiens
tgaagaccagcctgg

SEQ ID NO: 1149912 - DNA, 15 bp, Homo sapiens
ttgaagaccagcctg

SEQ ID NO: 1149913 - DNA, 15 bp, Homo sapiens
gttgaagaccagcct

SEQ ID NO: 1149914 - DNA, 15 bp, Homo sapiens
agttgaagaccagcc

SEQ ID NO: 1149915 - DNA, 15 bp, Homo sapiens
gagttgaagaccagc

SEQ ID NO: 1149916 - DNA, 15 bp, Homo sapiens
ggagttgaagaccag

SEQ ID NO: 1149917 - DNA, 15 bp, Homo sapiens
caggagttgaagacc

SEQ ID NO: 1149918 - DNA, 15 bp, Homo sapiens
tcaggagttgaagac

SEQ ID NO: 1149919 - DNA, 15 bp, Homo sapiens
gtcaggagttgaaga

SEQ ID NO: 1149920 - DNA, 15 bp, Homo sapiens
ggtcaggagttgaag

SEQ ID NO: 1149921 - DNA, 15 bp, Homo sapiens
aggtcaggagttgaa

SEQ ID NO: 1149922 - DNA, 15 bp, Homo sapiens
gaggtcaggagttga

SEQ ID NO: 1149923 - DNA, 15 bp, Homo sapiens
agggcggatcacttg

SEQ ID NO: 1149924 - DNA, 15 bp, Homo sapiens
gagggcggatcactt

SEQ ID NO: 1149925 - DNA, 15 bp, Homo sapiens
ggagggcggatcact

SEQ ID NO: 1149926 - DNA, 15 bp, Homo sapiens
aggagggcggatcac

SEQ ID NO: 1149927 - DNA, 15 bp, Homo sapiens
gaggagggcggatca

SEQ ID NO: 1149928 - DNA, 15 bp, Homo sapiens
tgaggagggcggatc

SEQ ID NO: 1149929 - DNA, 15 bp, Homo sapiens
ctgaggagggcggat

SEQ ID NO: 1149930 - DNA, 15 bp, Homo sapiens
gctgaggagggcgga

SEQ ID NO: 1149931 - DNA, 15 bp, Homo sapiens
agctgaggagggcgg

SEQ ID NO: 1149932 - DNA, 15 bp, Homo sapiens
aagctgaggagggcg

SEQ ID NO: 1149933 - DNA, 15 bp, Homo sapiens
gaagctgaggagggc

SEQ ID NO: 1149934 - DNA, 15 bp, Homo sapiens
ggaagctgaggaggg

SEQ ID NO: 1149935 - DNA, 15 bp, Homo sapiens
gggaagctgaggagg

SEQ ID NO: 1149936 - DNA, 15 bp, Homo sapiens
tgggaagctgaggag

SEQ ID NO: 1149937 - DNA, 15 bp, Homo sapiens
ttgggaagctgagga

SEQ ID NO: 1149938 - DNA, 15 bp, Homo sapiens
cggtgtggtggctca

SEQ ID NO: 1149939 - DNA, 15 bp, Homo sapiens
ccggtgtggtggctc

SEQ ID NO: 1149940 - DNA, 15 bp, Homo sapiens
cccggtgtggtggct

SEQ ID NO: 1149941 - DNA, 15 bp, Homo sapiens
ccccggtgtggtggc

SEQ ID NO: 1149942 - DNA, 15 bp, Homo sapiens
cccccggtgtggtgg

SEQ ID NO: 1149943 - DNA, 15 bp, Homo sapiens
ccccccggtgtggtg

SEQ ID NO: 1149944 - DNA, 15 bp, Homo sapiens
accccccggtgtggt

SEQ ID NO: 1149945 - DNA, 15 bp, Homo sapiens
taccccccggtgtgg

SEQ ID NO: 1149946 - DNA, 15 bp, Homo sapiens
ctaccccccggtgtg

SEQ ID NO: 1149947 - DNA, 15 bp, Homo sapiens
cctaccccccggtgt

SEQ ID NO: 1149948 - DNA, 15 bp, Homo sapiens
tcctaccccccggtg

SEQ ID NO: 1149949 - DNA, 15 bp, Homo sapiens
atcctaccccccggt

SEQ ID NO: 1149950 - DNA, 15 bp, Homo sapiens
tatcctaccccccgg

SEQ ID NO: 1149951 - DNA, 15 bp, Homo sapiens
ctatcctaccccccg

SEQ ID NO: 1149952 - DNA, 15 bp, Homo sapiens
tctatcctacccccc

SEQ ID NO: 1149953 - DNA, 15 bp, Homo sapiens
atctatcctaccccc

SEQ ID NO: 1149954 - DNA, 15 bp, Homo sapiens
aatctatcctacccc

SEQ ID NO: 1149955 - DNA, 15 bp, Homo sapiens
aaatctatcctaccc

SEQ ID NO: 1149956 - DNA, 15 bp, Homo sapiens
taaatctatcctacc

SEQ ID NO: 1149957 - DNA, 15 bp, Homo sapiens
ctaaatctatcctac

SEQ ID NO: 1149958 - DNA, 15 bp, Homo sapiens
actaaatctatccta

SEQ ID NO: 1149959 - DNA, 15 bp, Homo sapiens
cactaaatctatcct

SEQ ID NO: 1149960 - DNA, 15 bp, Homo sapiens
tcactaaatctatcc

SEQ ID NO: 1149961 - DNA, 15 bp, Homo sapiens
ctcactaaatctatc

SEQ ID NO: 1149962 - DNA, 15 bp, Homo sapiens
tctcactaaatctat

SEQ ID NO: 1149963 - DNA, 15 bp, Homo sapiens
atctcactaaatcta

SEQ ID NO: 1149964 - DNA, 15 bp, Homo sapiens
catctcactaaatct

SEQ ID NO: 1149965 - DNA, 15 bp, Homo sapiens
tcatctcactaaatc

SEQ ID NO: 1149966 - DNA, 15 bp, Homo sapiens
gtcatctcactaaat

SEQ ID NO: 1149967 - DNA, 15 bp, Homo sapiens
agtcatctcactaaa

SEQ ID NO: 1149968 - DNA, 15 bp, Homo sapiens
cagtcatctcactaa

SEQ ID NO: 1149969 - DNA, 15 bp, Homo sapiens
ccagtcatctcacta

SEQ ID NO: 1149970 - DNA, 15 bp, Homo sapiens
tccagtcatctcact

SEQ ID NO: 1149971 - DNA, 15 bp, Homo sapiens
atccagtcatctcac

SEQ ID NO: 1149972 - DNA, 15 bp, Homo sapiens
tatccagtcatctca

SEQ ID NO: 1149973 - DNA, 15 bp, Homo sapiens
ttatccagtcatctc

SEQ ID NO: 1149974 - DNA, 15 bp, Homo sapiens
tttatccagtcatct

SEQ ID NO: 1149975 - DNA, 15 bp, Homo sapiens
gtttatccagtcatc

SEQ ID NO: 1149976 - DNA, 15 bp, Homo sapiens
cgtttatccagtcat

SEQ ID NO: 1149977 - DNA, 15 bp, Homo sapiens
ccgtttatccagtca

SEQ ID NO: 1149978 - DNA, 15 bp, Homo sapiens
tccgtttatccagtc

SEQ ID NO: 1149979 - DNA, 15 bp, Homo sapiens
ttccgtttatccagt

SEQ ID NO: 1149980 - DNA, 15 bp, Homo sapiens
attccgtttatccag

SEQ ID NO: 1149981 - DNA, 15 bp, Homo sapiens
gattccgtttatcca

SEQ ID NO: 1149982 - DNA, 15 bp, Homo sapiens
tgattccgtttatcc

SEQ ID NO: 1149983 - DNA, 15 bp, Homo sapiens
ttgattccgtttatc

SEQ ID NO: 1149984 - DNA, 15 bp, Homo sapiens
cttgattccgtttat

SEQ ID NO: 1149985 - DNA, 15 bp, Homo sapiens
tcttgattccgttta

SEQ ID NO: 1149986 - DNA, 15 bp, Homo sapiens
ttcttgattccgttt

SEQ ID NO: 1149987 - DNA, 15 bp, Homo sapiens
tttcttgattccgtt

SEQ ID NO: 1149988 - DNA, 15 bp, Homo sapiens
ttttcttgattccgt

SEQ ID NO: 1149989 - DNA, 15 bp, Homo sapiens
tttttcttgattccg

SEQ ID NO: 1149990 - DNA, 15 bp, Homo sapiens
ctttttcttgattcc

SEQ ID NO: 1149991 - DNA, 15 bp, Homo sapiens
gctttttcttgattc

SEQ ID NO: 1149992 - DNA, 15 bp, Homo sapiens
agctttttcttgatt

SEQ ID NO: 1149993 - DNA, 15 bp, Homo sapiens
aagctttttcttgat

SEQ ID NO: 1149994 - DNA, 15 bp, Homo sapiens
aaagctttttcttga

SEQ ID NO: 1149995 - DNA, 15 bp, Homo sapiens
caaagctttttcttg

SEQ ID NO: 1149996 - DNA, 15 bp, Homo sapiens
acaaagctttttctt

SEQ ID NO: 1149997 - DNA, 15 bp, Homo sapiens
gacaaagctttttct

SEQ ID NO: 1149998 - DNA, 15 bp, Homo sapiens
tgacaaagctttttc

SEQ ID NO: 1149999 - DNA, 15 bp, Homo sapiens
ttgacaaagcttttt

SEQ ID NO: 1150000 - DNA, 15 bp, Homo sapiens
tttgacaaagctttt

SEQ ID NO: 1150001 - DNA, 15 bp, Homo sapiens
ttttgacaaagcttt

SEQ ID NO: 1150002 - DNA, 15 bp, Homo sapiens
tttttgacaaagctt

SEQ ID NO: 1150003 - DNA, 15 bp, Homo sapiens
gtttttgacaaagct

SEQ ID NO: 1150004 - DNA, 15 bp, Homo sapiens
agtttttgacaaagc

SEQ ID NO: 1150005 - DNA, 15 bp, Homo sapiens
aagtttttgacaaag

SEQ ID NO: 1150006 - DNA, 15 bp, Homo sapiens
taagtttttgacaaa

SEQ ID NO: 1150007 - DNA, 15 bp, Homo sapiens
ataagtttttgacaa

SEQ ID NO: 1150008 - DNA, 15 bp, Homo sapiens
cataagtttttgaca

SEQ ID NO: 1150009 - DNA, 15 bp, Homo sapiens
gcataagtttttgac

SEQ ID NO: 1150010 - DNA, 15 bp, Homo sapiens
agcataagtttttga

SEQ ID NO: 1150011 - DNA, 15 bp, Homo sapiens
aagcataagtttttg

SEQ ID NO: 1150012 - DNA, 15 bp, Homo sapiens
gaagcataagttttt

SEQ ID NO: 1150013 - DNA, 15 bp, Homo sapiens
agaagcataagtttt

SEQ ID NO: 1150014 - DNA, 15 bp, Homo sapiens
aagaagcataagttt

SEQ ID NO: 1150015 - DNA, 15 bp, Homo sapiens
taagaagcataagtt

SEQ ID NO: 1150016 - DNA, 15 bp, Homo sapiens
ttaagaagcataagt

SEQ ID NO: 1150017 - DNA, 15 bp, Homo sapiens
tttaagaagcataag

SEQ ID NO: 1150018 - DNA, 15 bp, Homo sapiens
ttttaagaagcataa

SEQ ID NO: 1150019 - DNA, 15 bp, Homo sapiens
tttttaagaagcata

SEQ ID NO: 1150020 - DNA, 15 bp, Homo sapiens
gtttttaagaagcat

SEQ ID NO: 1150021 - DNA, 15 bp, Homo sapiens
agtttttaagaagca

SEQ ID NO: 1150022 - DNA, 15 bp, Homo sapiens
aagtttttaagaagc

SEQ ID NO: 1150023 - DNA, 15 bp, Homo sapiens
taagtttttaagaag

SEQ ID NO: 1150024 - DNA, 15 bp, Homo sapiens
attaagtttttaaga

SEQ ID NO: 1150025 - DNA, 15 bp, Homo sapiens
gattaagtttttaag

SEQ ID NO: 1150026 - DNA, 15 bp, Homo sapiens
ggattaagtttttaa

SEQ ID NO: 1150027 - DNA, 15 bp, Homo sapiens
aggattaagttttta

SEQ ID NO: 1150028 - DNA, 15 bp, Homo sapiens
caggattaagttttt

SEQ ID NO: 1150029 - DNA, 15 bp, Homo sapiens
ccaggattaagtttt

SEQ ID NO: 1150030 - DNA, 15 bp, Homo sapiens
cccaggattaagttt

SEQ ID NO: 1150031 - DNA, 15 bp, Homo sapiens
tcccaggattaagtt

SEQ ID NO: 1150032 - DNA, 15 bp, Homo sapiens
gtcccaggattaagt

SEQ ID NO: 1150033 - DNA, 15 bp, Homo sapiens
tgtcccaggattaag

SEQ ID NO: 1150034 - DNA, 15 bp, Homo sapiens
ctgtcccaggattaa

SEQ ID NO: 1150035 - DNA, 15 bp, Homo sapiens
tctgtcccaggatta

SEQ ID NO: 1150036 - DNA, 15 bp, Homo sapiens
ttctgtcccaggatt

SEQ ID NO: 1150037 - DNA, 15 bp, Homo sapiens
attctgtcccaggat

SEQ ID NO: 1150038 - DNA, 15 bp, Homo sapiens
gattctgtcccagga

SEQ ID NO: 1150039 - DNA, 15 bp, Homo sapiens
tgattctgtcccagg

SEQ ID NO: 1150040 - DNA, 15 bp, Homo sapiens
atgattctgtcccag

SEQ ID NO: 1150041 - DNA, 15 bp, Homo sapiens
gatgattctgtccca

SEQ ID NO: 1150042 - DNA, 15 bp, Homo sapiens
agatgattctgtccc

SEQ ID NO: 1150043 - DNA, 15 bp, Homo sapiens
tagatgattctgtcc

SEQ ID NO: 1150044 - DNA, 15 bp, Homo sapiens
ttagatgattctgtc

SEQ ID NO: 1150045 - DNA, 15 bp, Homo sapiens
tttagatgattctgt

SEQ ID NO: 1150046 - DNA, 15 bp, Homo sapiens
ttttagatgattctg

SEQ ID NO: 1150047 - DNA, 15 bp, Homo sapiens
gttttagatgattct

SEQ ID NO: 1150048 - DNA, 15 bp, Homo sapiens
cgttttagatgattc

SEQ ID NO: 1150049 - DNA, 15 bp, Homo sapiens
acgttttagatgatt

SEQ ID NO: 1150050 - DNA, 15 bp, Homo sapiens
aacgttttagatgat

SEQ ID NO: 1150051 - DNA, 15 bp, Homo sapiens
caacgttttagatga

SEQ ID NO: 1150052 - DNA, 15 bp, Homo sapiens
acaacgttttagatg

SEQ ID NO: 1150053 - DNA, 15 bp, Homo sapiens
aacaacgttttagat

SEQ ID NO: 1150054 - DNA, 15 bp, Homo sapiens
gaacaacgttttaga

SEQ ID NO: 1150055 - DNA, 15 bp, Homo sapiens
ggaacaacgttttag

SEQ ID NO: 1150056 - DNA, 15 bp, Homo sapiens
tggaacaacgtttta

SEQ ID NO: 1150057 - DNA, 15 bp, Homo sapiens
atggaacaacgtttt

SEQ ID NO: 1150058 - DNA, 15 bp, Homo sapiens
catggaacaacgttt

SEQ ID NO: 1150059 - DNA, 15 bp, Homo sapiens
acatggaacaacgtt

SEQ ID NO: 1150060 - DNA, 15 bp, Homo sapiens
gacatggaacaacgt

SEQ ID NO: 1150061 - DNA, 15 bp, Homo sapiens
agacatggaacaacg

SEQ ID NO: 1150062 - DNA, 15 bp, Homo sapiens
aagacatggaacaac

SEQ ID NO: 1150063 - DNA, 15 bp, Homo sapiens
gaagacatggaacaa

SEQ ID NO: 1150064 - DNA, 15 bp, Homo sapiens
tgaagacatggaaca

SEQ ID NO: 1150065 - DNA, 15 bp, Homo sapiens
gtgaagacatggaac

SEQ ID NO: 1150066 - DNA, 15 bp, Homo sapiens
agtgaagacatggaa

SEQ ID NO: 1150067 - DNA, 15 bp, Homo sapiens
aagtgaagacatgga

SEQ ID NO: 1150068 - DNA, 15 bp, Homo sapiens
aaagtgaagacatgg

SEQ ID NO: 1150069 - DNA, 15 bp, Homo sapiens
caaagtgaagacatg

SEQ ID NO: 1150070 - DNA, 15 bp, Homo sapiens
tcaaagtgaagacat

SEQ ID NO: 1150071 - DNA, 15 bp, Homo sapiens
gtcaaagtgaagaca

SEQ ID NO: 1150072 - DNA, 15 bp, Homo sapiens
agtcaaagtgaagac

SEQ ID NO: 1150073 - DNA, 15 bp, Homo sapiens
gagtcaaagtgaaga

SEQ ID NO: 1150074 - DNA, 15 bp, Homo sapiens
tgagtcaaagtgaag

SEQ ID NO: 1150075 - DNA, 15 bp, Homo sapiens
gtgagtcaaagtgaa

SEQ ID NO: 1150076 - DNA, 15 bp, Homo sapiens
ggtgagtcaaagtga

SEQ ID NO: 1150077 - DNA, 15 bp, Homo sapiens
gggtgagtcaaagtg

SEQ ID NO: 1150078 - DNA, 15 bp, Homo sapiens
tgggtgagtcaaagt

SEQ ID NO: 1150079 - DNA, 15 bp, Homo sapiens
atgggtgagtcaaag

SEQ ID NO: 1150080 - DNA, 15 bp, Homo sapiens
tatgggtgagtcaaa

SEQ ID NO: 1150081 - DNA, 15 bp, Homo sapiens
ttatgggtgagtcaa

SEQ ID NO: 1150082 - DNA, 15 bp, Homo sapiens
tttatgggtgagtca

SEQ ID NO: 1150083 - DNA, 15 bp, Homo sapiens
ttttatgggtgagtc

SEQ ID NO: 1150084 - DNA, 15 bp, Homo sapiens
tttttatgggtgagt

SEQ ID NO: 1150085 - DNA, 15 bp, Homo sapiens
gtttttatgggtgag

SEQ ID NO: 1150086 - DNA, 15 bp, Homo sapiens
agtttttatgggtga

SEQ ID NO: 1150087 - DNA, 15 bp, Homo sapiens
aagtttttatgggtg

SEQ ID NO: 1150088 - DNA, 15 bp, Homo sapiens
gaagtttttatgggt

SEQ ID NO: 1150089 - DNA, 15 bp, Homo sapiens
tgaagtttttatggg

SEQ ID NO: 1150090 - DNA, 15 bp, Homo sapiens
ttgaagtttttatgg

SEQ ID NO: 1150091 - DNA, 15 bp, Homo sapiens
cttgaagtttttatg

SEQ ID NO: 1150092 - DNA, 15 bp, Homo sapiens
acttgaagtttttat

SEQ ID NO: 1150093 - DNA, 15 bp, Homo sapiens
tacttgaagttttta

SEQ ID NO: 1150094 - DNA, 15 bp, Homo sapiens
gtacttgaagttttt

SEQ ID NO: 1150095 - DNA, 15 bp, Homo sapiens
tgtacttgaagtttt

SEQ ID NO: 1150096 - DNA, 15 bp, Homo sapiens
ttgtacttgaagttt

SEQ ID NO: 1150097 - DNA, 15 bp, Homo sapiens
tttgtacttgaagtt

SEQ ID NO: 1150098 - DNA, 15 bp, Homo sapiens
ctttgtacttgaagt

SEQ ID NO: 1150099 - DNA, 15 bp, Homo sapiens
tctttgtacttgaag

SEQ ID NO: 1150100 - DNA, 15 bp, Homo sapiens
ttctttgtacttgaa

SEQ ID NO: 1150101 - DNA, 15 bp, Homo sapiens
attctttgtacttga

SEQ ID NO: 1150102 - DNA, 15 bp, Homo sapiens
cattctttgtacttg

SEQ ID NO: 1150103 - DNA, 15 bp, Homo sapiens
tcattctttgtactt

SEQ ID NO: 1150104 - DNA, 15 bp, Homo sapiens
ttcattctttgtact

SEQ ID NO: 1150105 - DNA, 15 bp, Homo sapiens
tttcattctttgtac

SEQ ID NO: 1150106 - DNA, 15 bp, Homo sapiens
ttttcattctttgta

SEQ ID NO: 1150107 - DNA, 15 bp, Homo sapiens
tttttcattctttgt

SEQ ID NO: 1150108 - DNA, 15 bp, Homo sapiens
atttttcattctttg

SEQ ID NO: 1150109 - DNA, 15 bp, Homo sapiens
tatttttcattcttt

SEQ ID NO: 1150110 - DNA, 15 bp, Homo sapiens
ttatttttcattctt

SEQ ID NO: 1150111 - DNA, 15 bp, Homo sapiens
gttatttttcattct

SEQ ID NO: 1150112 - DNA, 15 bp, Homo sapiens
ggttatttttcattc

SEQ ID NO: 1150113 - DNA, 15 bp, Homo sapiens
tggttatttttcatt

SEQ ID NO: 1150114 - DNA, 15 bp, Homo sapiens
gtggttatttttcat

SEQ ID NO: 1150115 - DNA, 15 bp, Homo sapiens
tgtggttatttttca

SEQ ID NO: 1150116 - DNA, 15 bp, Homo sapiens
atgtggttatttttc

SEQ ID NO: 1150117 - DNA, 15 bp, Homo sapiens
tatgtggttattttt

SEQ ID NO: 1150118 - DNA, 15 bp, Homo sapiens
atatgtggttatttt

SEQ ID NO: 1150119 - DNA, 15 bp, Homo sapiens
aatatgtggttattt

SEQ ID NO: 1150120 - DNA, 15 bp, Homo sapiens
aaatatgtggttatt

SEQ ID NO: 1150121 - DNA, 15 bp, Homo sapiens
aaaatatgtggttat

SEQ ID NO: 1150122 - DNA, 15 bp, Homo sapiens
gaaaatatgtggtta

SEQ ID NO: 1150123 - DNA, 15 bp, Homo sapiens
agaaaatatgtggtt

SEQ ID NO: 1150124 - DNA, 15 bp, Homo sapiens
tagaaaatatgtggt

SEQ ID NO: 1150125 - DNA, 15 bp, Homo sapiens
ttagaaaatatgtgg

SEQ ID NO: 1150126 - DNA, 15 bp, Homo sapiens
attagaaaatatgtg

SEQ ID NO: 1150127 - DNA, 15 bp, Homo sapiens
cattagaaaatatgt

SEQ ID NO: 1150128 - DNA, 15 bp, Homo sapiens
gcattagaaaatatg

SEQ ID NO: 1150129 - DNA, 15 bp, Homo sapiens
agcattagaaaatat

SEQ ID NO: 1150130 - DNA, 15 bp, Homo sapiens
gagcattagaaaata

SEQ ID NO: 1150131 - DNA, 15 bp, Homo sapiens
tgagcattagaaaat

SEQ ID NO: 1150132 - DNA, 15 bp, Homo sapiens
ttgagcattagaaaa

SEQ ID NO: 1150133 - DNA, 15 bp, Homo sapiens
attgagcattagaaa

SEQ ID NO: 1150134 - DNA, 15 bp, Homo sapiens
tattgagcattagaa

SEQ ID NO: 1150135 - DNA, 15 bp, Homo sapiens
atattgagcattaga

SEQ ID NO: 1150136 - DNA, 15 bp, Homo sapiens
aatattgagcattag

SEQ ID NO: 1150137 - DNA, 15 bp, Homo sapiens
aaatattgagcatta

SEQ ID NO: 1150138 - DNA, 15 bp, Homo sapiens
aaaatattgagcatt

SEQ ID NO: 1150139 - DNA, 15 bp, Homo sapiens
taaaatattgagcat

SEQ ID NO: 1150140 - DNA, 15 bp, Homo sapiens
ataaaatattgagca

SEQ ID NO: 1150141 - DNA, 15 bp, Homo sapiens
aataaaatattgagc

SEQ ID NO: 1150142 - DNA, 15 bp, Homo sapiens
aaataaaatattgag

SEQ ID NO: 1150143 - DNA, 15 bp, Homo sapiens
caaataaaatattga

SEQ ID NO: 1150144 - DNA, 15 bp, Homo sapiens
acaaataaaatattg

SEQ ID NO: 1150145 - DNA, 15 bp, Homo sapiens
tacaaataaaatatt

SEQ ID NO: 1150146 - DNA, 15 bp, Homo sapiens
ctacaaataaaatat

SEQ ID NO: 1150147 - DNA, 15 bp, Homo sapiens
actacaaataaaata

SEQ ID NO: 1150148 - DNA, 15 bp, Homo sapiens
cactacaaataaaat

SEQ ID NO: 1150149 - DNA, 15 bp, Homo sapiens
acactacaaataaaa

SEQ ID NO: 1150150 - DNA, 15 bp, Homo sapiens
aacactacaaataaa

SEQ ID NO: 1150151 - DNA, 15 bp, Homo sapiens
caacactacaaataa

SEQ ID NO: 1150152 - DNA, 15 bp, Homo sapiens
acaacactacaaata

SEQ ID NO: 1150153 - DNA, 15 bp, Homo sapiens
aacaacactacaaat

SEQ ID NO: 1150154 - DNA, 15 bp, Homo sapiens
aaacaacactacaaa

SEQ ID NO: 1150155 - DNA, 15 bp, Homo sapiens
aaaacaacactacaa

SEQ ID NO: 1150156 - DNA, 15 bp, Homo sapiens
gaaaacaacactaca

SEQ ID NO: 1150157 - DNA, 15 bp, Homo sapiens
agaaaacaacactac

SEQ ID NO: 1150158 - DNA, 15 bp, Homo sapiens
tagaaaacaacacta

SEQ ID NO: 1150159 - DNA, 15 bp, Homo sapiens
atagaaaacaacact

SEQ ID NO: 1150160 - DNA, 15 bp, Homo sapiens
tatagaaaacaacac

SEQ ID NO: 1150161 - DNA, 15 bp, Homo sapiens
atatagaaaacaaca

SEQ ID NO: 1150162 - DNA, 15 bp, Homo sapiens
tatatagaaaacaac

SEQ ID NO: 1150163 - DNA, 15 bp, Homo sapiens
ctatatagaaaacaa

SEQ ID NO: 1150164 - DNA, 15 bp, Homo sapiens
tctatatagaaaaca

SEQ ID NO: 1150165 - DNA, 15 bp, Homo sapiens
atctatatagaaaac

SEQ ID NO: 1150166 - DNA, 15 bp, Homo sapiens
tatctatatagaaaa

SEQ ID NO: 1150167 - DNA, 15 bp, Homo sapiens
atatctatatagaaa

SEQ ID NO: 1150168 - DNA, 15 bp, Homo sapiens
catatctatatagaa

SEQ ID NO: 1150169 - DNA, 15 bp, Homo sapiens
tcatatctatataga

SEQ ID NO: 1150170 - DNA, 15 bp, Homo sapiens
atcatatctatatag

SEQ ID NO: 1150171 - DNA, 15 bp, Homo sapiens
tatcatatctatata

SEQ ID NO: 1150172 - DNA, 15 bp, Homo sapiens
ctatcatatctatat

SEQ ID NO: 1150173 - DNA, 15 bp, Homo sapiens
cctatcatatctata

SEQ ID NO: 1150174 - DNA, 15 bp, Homo sapiens
acctatcatatctat

SEQ ID NO: 1150175 - DNA, 15 bp, Homo sapiens
gacctatcatatcta

SEQ ID NO: 1150176 - DNA, 15 bp, Homo sapiens
agacctatcatatct

SEQ ID NO: 1150177 - DNA, 15 bp, Homo sapiens
aagacctatcatatc

SEQ ID NO: 1150178 - DNA, 15 bp, Homo sapiens
gaagacctatcatat

SEQ ID NO: 1150179 - DNA, 15 bp, Homo sapiens
tgaagacctatcata

SEQ ID NO: 1150180 - DNA, 15 bp, Homo sapiens
atgaagacctatcat

SEQ ID NO: 1150181 - DNA, 15 bp, Homo sapiens
catgaagacctatca

SEQ ID NO: 1150182 - DNA, 15 bp, Homo sapiens
tcatgaagacctatc

SEQ ID NO: 1150183 - DNA, 15 bp, Homo sapiens
atcatgaagacctat

SEQ ID NO: 1150184 - DNA, 15 bp, Homo sapiens
aatcatgaagaccta

SEQ ID NO: 1150185 - DNA, 15 bp, Homo sapiens
aaatcatgaagacct

SEQ ID NO: 1150186 - DNA, 15 bp, Homo sapiens
aaaatcatgaagacc

SEQ ID NO: 1150187 - DNA, 15 bp, Homo sapiens
aaaaatcatgaagac

SEQ ID NO: 1150188 - DNA, 15 bp, Homo sapiens
caaaaaatcatgaag

SEQ ID NO: 1150189 - DNA, 15 bp, Homo sapiens
acaaaaaatcatgaa

SEQ ID NO: 1150190 - DNA, 15 bp, Homo sapiens
aacaaaaaatcatga

SEQ ID NO: 1150191 - DNA, 15 bp, Homo sapiens
aaacaaaaaatcatg

SEQ ID NO: 1150192 - DNA, 15 bp, Homo sapiens
caaacaaaaaatcat

SEQ ID NO: 1150193 - DNA, 15 bp, Homo sapiens
acaaacaaaaaatca

SEQ ID NO: 1150194 - DNA, 15 bp, Homo sapiens
aacaaacaaaaaatc

SEQ ID NO: 1150195 - DNA, 15 bp, Homo sapiens
gaaaacaaacaaaaa

SEQ ID NO: 1150196 - DNA, 15 bp, Homo sapiens
ggaaaacaaacaaaa

SEQ ID NO: 1150197 - DNA, 15 bp, Homo sapiens
aggaaaacaaacaaa

SEQ ID NO: 1150198 - DNA, 15 bp, Homo sapiens
aaggaaaacaaacaa

SEQ ID NO: 1150199 - DNA, 15 bp, Homo sapiens
caaggaaaacaaaca

SEQ ID NO: 1150200 - DNA, 15 bp, Homo sapiens
tcaaggaaaacaaac

SEQ ID NO: 1150201 - DNA, 15 bp, Homo sapiens
ttcaaggaaaacaaa

SEQ ID NO: 1150202 - DNA, 15 bp, Homo sapiens
gttcaaggaaaacaa

SEQ ID NO: 1150203 - DNA, 15 bp, Homo sapiens
agttcaaggaaaaca

SEQ ID NO: 1150204 - DNA, 15 bp, Homo sapiens
cagttcaaggaaaac

SEQ ID NO: 1150205 - DNA, 15 bp, Homo sapiens
tcagttcaaggaaaa

SEQ ID NO: 1150206 - DNA, 15 bp, Homo sapiens
atcagttcaaggaaa

SEQ ID NO: 1150207 - DNA, 15 bp, Homo sapiens
aatcagttcaaggaa

SEQ ID NO: 1150208 - DNA, 15 bp, Homo sapiens
gaatcagttcaagga

SEQ ID NO: 1150209 - DNA, 15 bp, Homo sapiens
ggaatcagttcaagg

SEQ ID NO: 1150210 - DNA, 15 bp, Homo sapiens
gggaatcagttcaag

SEQ ID NO: 1150211 - DNA, 15 bp, Homo sapiens
tgggaatcagttcaa

SEQ ID NO: 1150212 - DNA, 15 bp, Homo sapiens
ttgggaatcagttca

SEQ ID NO: 1150213 - DNA, 15 bp, Homo sapiens
tttgggaatcagttc

SEQ ID NO: 1150214 - DNA, 15 bp, Homo sapiens
ctttgggaatcagtt

SEQ ID NO: 1150215 - DNA, 15 bp, Homo sapiens
actttgggaatcagt

SEQ ID NO: 1150216 - DNA, 15 bp, Homo sapiens
tactttgggaatcag

SEQ ID NO: 1150217 - DNA, 15 bp, Homo sapiens
atactttgggaatca

SEQ ID NO: 1150218 - DNA, 15 bp, Homo sapiens
aatactttgggaatc

SEQ ID NO: 1150219 - DNA, 15 bp, Homo sapiens
taatactttgggaat

SEQ ID NO: 1150220 - DNA, 15 bp, Homo sapiens
ctaatactttgggaa

SEQ ID NO: 1150221 - DNA, 15 bp, Homo sapiens
gctaatactttggga

SEQ ID NO: 1150222 - DNA, 15 bp, Homo sapiens
ggctaatactttggg

SEQ ID NO: 1150223 - DNA, 15 bp, Homo sapiens
aggctaatactttgg

SEQ ID NO: 1150224 - DNA, 15 bp, Homo sapiens
gaggctaatactttg

SEQ ID NO: 1150225 - DNA, 15 bp, Homo sapiens
tgaggctaatacttt

SEQ ID NO: 1150226 - DNA, 15 bp, Homo sapiens
atgaggctaatactt

SEQ ID NO: 1150227 - DNA, 15 bp, Homo sapiens
catgaggctaatact

SEQ ID NO: 1150228 - DNA, 15 bp, Homo sapiens
tcatgaggctaatac

SEQ ID NO: 1150229 - DNA, 15 bp, Homo sapiens
ttcatgaggctaata

SEQ ID NO: 1150230 - DNA, 15 bp, Homo sapiens
attcatgaggctaat

SEQ ID NO: 1150231 - DNA, 15 bp, Homo sapiens
gattcatgaggctaa

SEQ ID NO: 1150232 - DNA, 15 bp, Homo sapiens
tgattcatgaggcta

SEQ ID NO: 1150233 - DNA, 15 bp, Homo sapiens
atgattcatgaggct

SEQ ID NO: 1150234 - DNA, 15 bp, Homo sapiens
catgattcatgaggc

SEQ ID NO: 1150235 - DNA, 15 bp, Homo sapiens
acatgattcatgagg

SEQ ID NO: 1150236 - DNA, 15 bp, Homo sapiens
tacatgattcatgag

SEQ ID NO: 1150237 - DNA, 15 bp, Homo sapiens
ctacatgattcatga

SEQ ID NO: 1150238 - DNA, 15 bp, Homo sapiens
actacatgattcatg

SEQ ID NO: 1150239 - DNA, 15 bp, Homo sapiens
gactacatgattcat

SEQ ID NO: 1150240 - DNA, 15 bp, Homo sapiens
tgactacatgattca

SEQ ID NO: 1150241 - DNA, 15 bp, Homo sapiens
atgactacatgattc

SEQ ID NO: 1150242 - DNA, 15 bp, Homo sapiens
tatgactacatgatt

SEQ ID NO: 1150243 - DNA, 15 bp, Homo sapiens
ttatgactacatgat

SEQ ID NO: 1150244 - DNA, 15 bp, Homo sapiens
cttatgactacatga

SEQ ID NO: 1150245 - DNA, 15 bp, Homo sapiens
tcttatgactacatg

SEQ ID NO: 1150246 - DNA, 15 bp, Homo sapiens
ttcttatgactacat

SEQ ID NO: 1150247 - DNA, 15 bp, Homo sapiens
tttcttatgactaca

SEQ ID NO: 1150248 - DNA, 15 bp, Homo sapiens
gtttcttatgactac

SEQ ID NO: 1150249 - DNA, 15 bp, Homo sapiens
tgtttcttatgacta

SEQ ID NO: 1150250 - DNA, 15 bp, Homo sapiens
gtgtttcttatgact

SEQ ID NO: 1150251 - DNA, 15 bp, Homo sapiens
tgtgtttcttatgac

SEQ ID NO: 1150252 - DNA, 15 bp, Homo sapiens
ctgtgtttcttatga

SEQ ID NO: 1150253 - DNA, 15 bp, Homo sapiens
actgtgtttcttatg

SEQ ID NO: 1150254 - DNA, 15 bp, Homo sapiens
gactgtgtttcttat

SEQ ID NO: 1150255 - DNA, 15 bp, Homo sapiens
tgactgtgtttctta

SEQ ID NO: 1150256 - DNA, 15 bp, Homo sapiens
atgactgtgtttctt

SEQ ID NO: 1150257 - DNA, 15 bp, Homo sapiens
aatgactgtgtttct

SEQ ID NO: 1150258 - DNA, 15 bp, Homo sapiens
caatgactgtgtttc

SEQ ID NO: 1150259 - DNA, 15 bp, Homo sapiens
acaatgactgtgttt

SEQ ID NO: 1150260 - DNA, 15 bp, Homo sapiens
tacaatgactgtgtt

SEQ ID NO: 1150261 - DNA, 15 bp, Homo sapiens
atacaatgactgtgt

SEQ ID NO: 1150262 - DNA, 15 bp, Homo sapiens
aatacaatgactgtg

SEQ ID NO: 1150263 - DNA, 15 bp, Homo sapiens
gaatacaatgactgt

SEQ ID NO: 1150264 - DNA, 15 bp, Homo sapiens
agaatacaatgactg

SEQ ID NO: 1150265 - DNA, 15 bp, Homo sapiens
gagaatacaatgact

SEQ ID NO: 1150266 - DNA, 15 bp, Homo sapiens
agagaatacaatgac

SEQ ID NO: 1150267 - DNA, 15 bp, Homo sapiens
aagagaatacaatga

SEQ ID NO: 1150268 - DNA, 15 bp, Homo sapiens
aaagagaatacaatg

SEQ ID NO: 1150269 - DNA, 15 bp, Homo sapiens
caaagagaatacaat

SEQ ID NO: 1150270 - DNA, 15 bp, Homo sapiens
gcaaagagaatacaa

SEQ ID NO: 1150271 - DNA, 15 bp, Homo sapiens
agcaaagagaataca

SEQ ID NO: 1150272 - DNA, 15 bp, Homo sapiens
cagcaaagagaatac

SEQ ID NO: 1150273 - DNA, 15 bp, Homo sapiens
acagcaaagagaata

SEQ ID NO: 1150274 - DNA, 15 bp, Homo sapiens
tacagcaaagagaat

SEQ ID NO: 1150275 - DNA, 15 bp, Homo sapiens
atacagcaaagagaa

SEQ ID NO: 1150276 - DNA, 15 bp, Homo sapiens
tatacagcaaagaga

SEQ ID NO: 1150277 - DNA, 15 bp, Homo sapiens
ttatacagcaaagag

SEQ ID NO: 1150278 - DNA, 15 bp, Homo sapiens
attatacagcaaaga

SEQ ID NO: 1150279 - DNA, 15 bp, Homo sapiens
aattatacagcaaag

SEQ ID NO: 1150280 - DNA, 15 bp, Homo sapiens
aaattatacagcaaa

SEQ ID NO: 1150281 - DNA, 15 bp, Homo sapiens
aaaattatacagcaa

SEQ ID NO: 1150282 - DNA, 15 bp, Homo sapiens
caaaattatacagca

SEQ ID NO: 1150283 - DNA, 15 bp, Homo sapiens
ccaaaattatacagc

SEQ ID NO: 1150284 - DNA, 15 bp, Homo sapiens
accaaaattatacag

SEQ ID NO: 1150285 - DNA, 15 bp, Homo sapiens
aaccaaaattataca

SEQ ID NO: 1150286 - DNA, 15 bp, Homo sapiens
aaaccaaaattatac

SEQ ID NO: 1150287 - DNA, 15 bp, Homo sapiens
gaaaccaaaattata

SEQ ID NO: 1150288 - DNA, 15 bp, Homo sapiens
tgaaaccaaaattat

SEQ ID NO: 1150289 - DNA, 15 bp, Homo sapiens
ctgaaaccaaaatta

SEQ ID NO: 1150290 - DNA, 15 bp, Homo sapiens
actgaaaccaaaatt

SEQ ID NO: 1150291 - DNA, 15 bp, Homo sapiens
aactgaaaccaaaat

SEQ ID NO: 1150292 - DNA, 15 bp, Homo sapiens
aaactgaaaccaaaa

SEQ ID NO: 1150293 - DNA, 15 bp, Homo sapiens
aaaactgaaaccaaa

SEQ ID NO: 1150294 - DNA, 15 bp, Homo sapiens
gaaaactgaaaccaa

SEQ ID NO: 1150295 - DNA, 15 bp, Homo sapiens
ggaaaactgaaacca

SEQ ID NO: 1150296 - DNA, 15 bp, Homo sapiens
aggaaaactgaaacc

SEQ ID NO: 1150297 - DNA, 15 bp, Homo sapiens
aaggaaaactgaaac

SEQ ID NO: 1150298 - DNA, 15 bp, Homo sapiens
taaggaaaactgaaa

SEQ ID NO: 1150299 - DNA, 15 bp, Homo sapiens
gtaaggaaaactgaa

SEQ ID NO: 1150300 - DNA, 15 bp, Homo sapiens
tgtaaggaaaactga

SEQ ID NO: 1150301 - DNA, 15 bp, Homo sapiens
atgtaaggaaaactg

SEQ ID NO: 1150302 - DNA, 15 bp, Homo sapiens
aatgtaaggaaaact

SEQ ID NO: 1150303 - DNA, 15 bp, Homo sapiens
aaatgtaaggaaaac

SEQ ID NO: 1150304 - DNA, 15 bp, Homo sapiens
gaaatgtaaggaaaa

SEQ ID NO: 1150305 - DNA, 15 bp, Homo sapiens
ggaaatgtaaggaaa

SEQ ID NO: 1150306 - DNA, 15 bp, Homo sapiens
aggaaatgtaaggaa

SEQ ID NO: 1150307 - DNA, 15 bp, Homo sapiens
taggaaatgtaagga

SEQ ID NO: 1150308 - DNA, 15 bp, Homo sapiens
ataggaaatgtaagg

SEQ ID NO: 1150309 - DNA, 15 bp, Homo sapiens
aataggaaatgtaag

SEQ ID NO: 1150310 - DNA, 15 bp, Homo sapiens
gaataggaaatgtaa

SEQ ID NO: 1150311 - DNA, 15 bp, Homo sapiens
tgaataggaaatgta

SEQ ID NO: 1150312 - DNA, 15 bp, Homo sapiens
ttgaataggaaatgt

SEQ ID NO: 1150313 - DNA, 15 bp, Homo sapiens
cttgaataggaaatg

SEQ ID NO: 1150314 - DNA, 15 bp, Homo sapiens
ccttgaataggaaat

SEQ ID NO: 1150315 - DNA, 15 bp, Homo sapiens
tccttgaataggaaa

SEQ ID NO: 1150316 - DNA, 15 bp, Homo sapiens
ttccttgaataggaa

SEQ ID NO: 1150317 - DNA, 15 bp, Homo sapiens
gttccttgaatagga

SEQ ID NO: 1150318 - DNA, 15 bp, Homo sapiens
tgttccttgaatagg

SEQ ID NO: 1150319 - DNA, 15 bp, Homo sapiens
atgttccttgaatag

SEQ ID NO: 1150320 - DNA, 15 bp, Homo sapiens
aatgttccttgaata

SEQ ID NO: 1150321 - DNA, 15 bp, Homo sapiens
aaatgttccttgaat

SEQ ID NO: 1150322 - DNA, 15 bp, Homo sapiens
aaaatgttccttgaa

SEQ ID NO: 1150323 - DNA, 15 bp, Homo sapiens
gaaaatgttccttga

SEQ ID NO: 1150324 - DNA, 15 bp, Homo sapiens
ggaaaatgttccttg

SEQ ID NO: 1150325 - DNA, 15 bp, Homo sapiens
aggaaaatgttcctt

SEQ ID NO: 1150326 - DNA, 15 bp, Homo sapiens
caggaaaatgttcct

SEQ ID NO: 1150327 - DNA, 15 bp, Homo sapiens
acaggaaaatgttcc

SEQ ID NO: 1150328 - DNA, 15 bp, Homo sapiens
tacaggaaaatgttc

SEQ ID NO: 1150329 - DNA, 15 bp, Homo sapiens
ttacaggaaaatgtt

SEQ ID NO: 1150330 - DNA, 15 bp, Homo sapiens
tttacaggaaaatgt

SEQ ID NO: 1150331 - DNA, 15 bp, Homo sapiens
ttttacaggaaaatg

SEQ ID NO: 1150332 - DNA, 15 bp, Homo sapiens
attttacaggaaaat

SEQ ID NO: 1150333 - DNA, 15 bp, Homo sapiens
cattttacaggaaaa

SEQ ID NO: 1150334 - DNA, 15 bp, Homo sapiens
tcattttacaggaaa

SEQ ID NO: 1150335 - DNA, 15 bp, Homo sapiens
gtcattttacaggaa

SEQ ID NO: 1150336 - DNA, 15 bp, Homo sapiens
tgtcattttacagga

SEQ ID NO: 1150337 - DNA, 15 bp, Homo sapiens
ctgtcattttacagg

SEQ ID NO: 1150338 - DNA, 15 bp, Homo sapiens
cctgtcattttacag

SEQ ID NO: 1150339 - DNA, 15 bp, Homo sapiens
acctgtcattttaca

SEQ ID NO: 1150340 - DNA, 15 bp, Homo sapiens
aacctgtcattttac

SEQ ID NO: 1150341 - DNA, 15 bp, Homo sapiens
caacctgtcatttta

SEQ ID NO: 1150342 - DNA, 15 bp, Homo sapiens
tcaacctgtcatttt

SEQ ID NO: 1150343 - DNA, 15 bp, Homo sapiens
ttcaacctgtcattt

SEQ ID NO: 1150344 - DNA, 15 bp, Homo sapiens
cttcaacctgtcatt

SEQ ID NO: 1150345 - DNA, 15 bp, Homo sapiens
tcttcaacctgtcat

SEQ ID NO: 1150346 - DNA, 15 bp, Homo sapiens
ttcttcaacctgtca

SEQ ID NO: 1150347 - DNA, 15 bp, Homo sapiens
tttcttcaacctgtc

SEQ ID NO: 1150348 - DNA, 15 bp, Homo sapiens
ttttcttcaacctgt

SEQ ID NO: 1150349 - DNA, 15 bp, Homo sapiens
gttttcttcaacctg

SEQ ID NO: 1150350 - DNA, 15 bp, Homo sapiens
tgttttcttcaacct

SEQ ID NO: 1150351 - DNA, 15 bp, Homo sapiens
ctgttttcttcaacc

SEQ ID NO: 1150352 - DNA, 15 bp, Homo sapiens
gctgttttcttcaac

SEQ ID NO: 1150353 - DNA, 15 bp, Homo sapiens
ggctgttttcttcaa

SEQ ID NO: 1150354 - DNA, 15 bp, Homo sapiens
tggctgttttcttca

SEQ ID NO: 1150355 - DNA, 15 bp, Homo sapiens
atggctgttttcttc

SEQ ID NO: 1150356 - DNA, 15 bp, Homo sapiens
tatggctgttttctt

SEQ ID NO: 1150357 - DNA, 15 bp, Homo sapiens
ttatggctgttttct

SEQ ID NO: 1150358 - DNA, 15 bp, Homo sapiens
attatggctgttttc

SEQ ID NO: 1150359 - DNA, 15 bp, Homo sapiens
aattatggctgtttt

SEQ ID NO: 1150360 - DNA, 15 bp, Homo sapiens
aaattatggctgttt

SEQ ID NO: 1150361 - DNA, 15 bp, Homo sapiens
taaattatggctgtt

SEQ ID NO: 1150362 - DNA, 15 bp, Homo sapiens
ctaaattatggctgt

SEQ ID NO: 1150363 - DNA, 15 bp, Homo sapiens
actaaattatggctg

SEQ ID NO: 1150364 - DNA, 15 bp, Homo sapiens
tactaaattatggct

SEQ ID NO: 1150365 - DNA, 15 bp, Homo sapiens
ctactaaattatggc

SEQ ID NO: 1150366 - DNA, 15 bp, Homo sapiens
tctactaaattatgg

SEQ ID NO: 1150367 - DNA, 15 bp, Homo sapiens
ctctactaaattatg

SEQ ID NO: 1150368 - DNA, 15 bp, Homo sapiens
tctctactaaattat

SEQ ID NO: 1150369 - DNA, 15 bp, Homo sapiens
ttctctactaaatta

SEQ ID NO: 1150370 - DNA, 15 bp, Homo sapiens
attctctactaaatt

SEQ ID NO: 1150371 - DNA, 15 bp, Homo sapiens
tattctctactaaat

SEQ ID NO: 1150372 - DNA, 15 bp, Homo sapiens
ctattctctactaaa

SEQ ID NO: 1150373 - DNA, 15 bp, Homo sapiens
gctattctctactaa

SEQ ID NO: 1150374 - DNA, 15 bp, Homo sapiens
cgctattctctacta

SEQ ID NO: 1150375 - DNA, 15 bp, Homo sapiens
gcgctattctctact

SEQ ID NO: 1150376 - DNA, 15 bp, Homo sapiens
cgcgctattctctac

SEQ ID NO: 1150377 - DNA, 15 bp, Homo sapiens
tcgcgctattctcta

SEQ ID NO: 1150378 - DNA, 15 bp, Homo sapiens
ctcgcgctattctct

SEQ ID NO: 1150379 - DNA, 15 bp, Homo sapiens
tctcgcgctattctc

SEQ ID NO: 1150380 - DNA, 15 bp, Homo sapiens
ctctcgcgctattct

SEQ ID NO: 1150381 - DNA, 15 bp, Homo sapiens
gctctcgcgctattc

SEQ ID NO: 1150382 - DNA, 15 bp, Homo sapiens
agctctcgcgctatt

SEQ ID NO: 1150383 - DNA, 15 bp, Homo sapiens
tagctctcgcgctat

SEQ ID NO: 1150384 - DNA, 15 bp, Homo sapiens
atagctctcgcgcta

SEQ ID NO: 1150385 - DNA, 15 bp, Homo sapiens
aatagctctcgcgct

SEQ ID NO: 1150386 - DNA, 15 bp, Homo sapiens
gaatagctctcgcgc

SEQ ID NO: 1150387 - DNA, 15 bp, Homo sapiens
agaatagctctcgcg

SEQ ID NO: 1150388 - DNA, 15 bp, Homo sapiens
tagaatagctctcgc

SEQ ID NO: 1150389 - DNA, 15 bp, Homo sapiens
ctagaatagctctcg

SEQ ID NO: 1150390 - DNA, 15 bp, Homo sapiens
tctagaatagctctc

SEQ ID NO: 1150391 - DNA, 15 bp, Homo sapiens
gtctagaatagctct

SEQ ID NO: 1150392 - DNA, 15 bp, Homo sapiens
agtctagaatagctc

SEQ ID NO: 1150393 - DNA, 15 bp, Homo sapiens
cagtctagaatagct

SEQ ID NO: 1150394 - DNA, 15 bp, Homo sapiens
acagtctagaatagc

SEQ ID NO: 1150395 - DNA, 15 bp, Homo sapiens
tacagtctagaatag

SEQ ID NO: 1150396 - DNA, 15 bp, Homo sapiens
ttacagtctagaata

SEQ ID NO: 1150397 - DNA, 15 bp, Homo sapiens
gttacagtctagaat

SEQ ID NO: 1150398 - DNA, 15 bp, Homo sapiens
cgttacagtctagaa

SEQ ID NO: 1150399 - DNA, 15 bp, Homo sapiens
tcgttacagtctaga

SEQ ID NO: 1150400 - DNA, 15 bp, Homo sapiens
ttcgttacagtctag

SEQ ID NO: 1150401 - DNA, 15 bp, Homo sapiens
tttcgttacagtcta

SEQ ID NO: 1150402 - DNA, 15 bp, Homo sapiens
ctttcgttacagtct

SEQ ID NO: 1150403 - DNA, 15 bp, Homo sapiens
gctttcgttacagtc

SEQ ID NO: 1150404 - DNA, 15 bp, Homo sapiens
ggctttcgttacagt

SEQ ID NO: 1150405 - DNA, 15 bp, Homo sapiens
tggctttcgttacag

SEQ ID NO: 1150406 - DNA, 15 bp, Homo sapiens
atggctttcgttaca

SEQ ID NO: 1150407 - DNA, 15 bp, Homo sapiens
tatggctttcgttac

SEQ ID NO: 1150408 - DNA, 15 bp, Homo sapiens
atatggctttcgtta

SEQ ID NO: 1150409 - DNA, 15 bp, Homo sapiens
catatggctttcgtt

SEQ ID NO: 1150410 - DNA, 15 bp, Homo sapiens
gcatatggctttcgt

SEQ ID NO: 1150411 - DNA, 15 bp, Homo sapiens
agcatatggctttcg

SEQ ID NO: 1150412 - DNA, 15 bp, Homo sapiens
tagcatatggctttc

SEQ ID NO: 1150413 - DNA, 15 bp, Homo sapiens
atagcatatggcttt

SEQ ID NO: 1150414 - DNA, 15 bp, Homo sapiens
gatagcatatggctt

SEQ ID NO: 1150415 - DNA, 15 bp, Homo sapiens
tgatagcatatggct

SEQ ID NO: 1150416 - DNA, 15 bp, Homo sapiens
gtgatagcatatggc

SEQ ID NO: 1150417 - DNA, 15 bp, Homo sapiens
tgtgatagcatatgg

SEQ ID NO: 1150418 - DNA, 15 bp, Homo sapiens
ttgtgatagcatatg

SEQ ID NO: 1150419 - DNA, 15 bp, Homo sapiens
attgtgatagcatat

SEQ ID NO: 1150420 - DNA, 15 bp, Homo sapiens
aattgtgatagcata

SEQ ID NO: 1150421 - DNA, 15 bp, Homo sapiens
aaattgtgatagcat

SEQ ID NO: 1150422 - DNA, 15 bp, Homo sapiens
taaattgtgatagca

SEQ ID NO: 1150423 - DNA, 15 bp, Homo sapiens
ttaaattgtgatagc

SEQ ID NO: 1150424 - DNA, 15 bp, Homo sapiens
attaaattgtgatag

SEQ ID NO: 1150425 - DNA, 15 bp, Homo sapiens
aattaaattgtgata

SEQ ID NO: 1150426 - DNA, 15 bp, Homo sapiens
aaattaaattgtgat

SEQ ID NO: 1150427 - DNA, 15 bp, Homo sapiens
taaattaaattgtga

SEQ ID NO: 1150428 - DNA, 15 bp, Homo sapiens
ataaattaaattgtg

SEQ ID NO: 1150429 - DNA, 15 bp, Homo sapiens
aataaattaaattgt

SEQ ID NO: 1150430 - DNA, 15 bp, Homo sapiens
aaataaattaaattg

SEQ ID NO: 1150431 - DNA, 15 bp, Homo sapiens
gaaataaattaaatt

SEQ ID NO: 1150432 - DNA, 15 bp, Homo sapiens
tgaaataaattaaat

SEQ ID NO: 1150433 - DNA, 15 bp, Homo sapiens
ttgaaataaattaaa

SEQ ID NO: 1150434 - DNA, 15 bp, Homo sapiens
cttgaaataaattaa

SEQ ID NO: 1150435 - DNA, 15 bp, Homo sapiens
acttgaaataaatta

SEQ ID NO: 1150436 - DNA, 15 bp, Homo sapiens
tacttgaaataaatt

SEQ ID NO: 1150437 - DNA, 15 bp, Homo sapiens
gtacttgaaataaat

SEQ ID NO: 1150438 - DNA, 15 bp, Homo sapiens
agtacttgaaataaa

SEQ ID NO: 1150439 - DNA, 15 bp, Homo sapiens
tagtacttgaaataa

SEQ ID NO: 1150440 - DNA, 15 bp, Homo sapiens
ttagtacttgaaata

SEQ ID NO: 1150441 - DNA, 15 bp, Homo sapiens
attagtacttgaaat

SEQ ID NO: 1150442 - DNA, 15 bp, Homo sapiens
tattagtacttgaaa

SEQ ID NO: 1150443 - DNA, 15 bp, Homo sapiens
ttattagtacttgaa

SEQ ID NO: 1150444 - DNA, 15 bp, Homo sapiens
cttattagtacttga

SEQ ID NO: 1150445 - DNA, 15 bp, Homo sapiens
gcttattagtacttg

SEQ ID NO: 1150446 - DNA, 15 bp, Homo sapiens
agcttattagtactt

SEQ ID NO: 1150447 - DNA, 15 bp, Homo sapiens
cagcttattagtact

SEQ ID NO: 1150448 - DNA, 15 bp, Homo sapiens
tcagcttattagtac

SEQ ID NO: 1150449 - DNA, 15 bp, Homo sapiens
atcagcttattagta

SEQ ID NO: 1150450 - DNA, 15 bp, Homo sapiens
catcagcttattagt

SEQ ID NO: 1150451 - DNA, 15 bp, Homo sapiens
tcatcagcttattag

SEQ ID NO: 1150452 - DNA, 15 bp, Homo sapiens
gtcatcagcttatta

SEQ ID NO: 1150453 - DNA, 15 bp, Homo sapiens
tgtcatcagcttatt

SEQ ID NO: 1150454 - DNA, 15 bp, Homo sapiens
ttgtcatcagcttat

SEQ ID NO: 1150455 - DNA, 15 bp, Homo sapiens
tttgtcatcagctta

SEQ ID NO: 1150456 - DNA, 15 bp, Homo sapiens
ttttgtcatcagctt

SEQ ID NO: 1150457 - DNA, 15 bp, Homo sapiens
gttttgtcatcagct

SEQ ID NO: 1150458 - DNA, 15 bp, Homo sapiens
tgttttgtcatcagc

SEQ ID NO: 1150459 - DNA, 15 bp, Homo sapiens
ctgttttgtcatcag

SEQ ID NO: 1150460 - DNA, 15 bp, Homo sapiens
gctgttttgtcatca

SEQ ID NO: 1150461 - DNA, 15 bp, Homo sapiens
cgctgttttgtcatc

SEQ ID NO: 1150462 - DNA, 15 bp, Homo sapiens
tcgctgttttgtcat

SEQ ID NO: 1150463 - DNA, 15 bp, Homo sapiens
atcgctgttttgtca

SEQ ID NO: 1150464 - DNA, 15 bp, Homo sapiens
catcgctgttttgtc

SEQ ID NO: 1150465 - DNA, 15 bp, Homo sapiens
acatcgctgttttgt

SEQ ID NO: 1150466 - DNA, 15 bp, Homo sapiens
gacatcgctgttttg

SEQ ID NO: 1150467 - DNA, 15 bp, Homo sapiens
agacatcgctgtttt

SEQ ID NO: 1150468 - DNA, 15 bp, Homo sapiens
aagacatcgctgttt

SEQ ID NO: 1150469 - DNA, 15 bp, Homo sapiens
aaagacatcgctgtt

SEQ ID NO: 1150470 - DNA, 15 bp, Homo sapiens
aaaagacatcgctgt

SEQ ID NO: 1150471 - DNA, 15 bp, Homo sapiens
taaaagacatcgctg

SEQ ID NO: 1150472 - DNA, 15 bp, Homo sapiens
ctaaaagacatcgct

SEQ ID NO: 1150473 - DNA, 15 bp, Homo sapiens
actaaaagacatcgc

SEQ ID NO: 1150474 - DNA, 15 bp, Homo sapiens
aactaaaagacatcg

SEQ ID NO: 1150475 - DNA, 15 bp, Homo sapiens
aaactaaaagacatc

SEQ ID NO: 1150476 - DNA, 15 bp, Homo sapiens
taaactaaaagacat

SEQ ID NO: 1150477 - DNA, 15 bp, Homo sapiens
gtaaactaaaagaca

SEQ ID NO: 1150478 - DNA, 15 bp, Homo sapiens
agtaaactaaaagac

SEQ ID NO: 1150479 - DNA, 15 bp, Homo sapiens
gagtaaactaaaaga

SEQ ID NO: 1150480 - DNA, 15 bp, Homo sapiens
tgagtaaactaaaag

SEQ ID NO: 1150481 - DNA, 15 bp, Homo sapiens
gtgagtaaactaaaa

SEQ ID NO: 1150482 - DNA, 15 bp, Homo sapiens
tgtgagtaaactaaa

SEQ ID NO: 1150483 - DNA, 15 bp, Homo sapiens
gtgtgagtaaactaa

SEQ ID NO: 1150484 - DNA, 15 bp, Homo sapiens
cgtgtgagtaaacta

SEQ ID NO: 1150485 - DNA, 15 bp, Homo sapiens
tcgtgtgagtaaact

SEQ ID NO: 1150486 - DNA, 15 bp, Homo sapiens
ttcgtgtgagtaaac

SEQ ID NO: 1150487 - DNA, 15 bp, Homo sapiens
gttcgtgtgagtaaa

SEQ ID NO: 1150488 - DNA, 15 bp, Homo sapiens
agttcgtgtgagtaa

SEQ ID NO: 1150489 - DNA, 15 bp, Homo sapiens
tagttcgtgtgagta

SEQ ID NO: 1150490 - DNA, 15 bp, Homo sapiens
atagttcgtgtgagt

SEQ ID NO: 1150491 - DNA, 15 bp, Homo sapiens
aatagttcgtgtgag

SEQ ID NO: 1150492 - DNA, 15 bp, Homo sapiens
aaatagttcgtgtga

SEQ ID NO: 1150493 - DNA, 15 bp, Homo sapiens
gaaatagttcgtgtg

SEQ ID NO: 1150494 - DNA, 15 bp, Homo sapiens
agaaatagttcgtgt

SEQ ID NO: 1150495 - DNA, 15 bp, Homo sapiens
gagaaatagttcgtg

SEQ ID NO: 1150496 - DNA, 15 bp, Homo sapiens
agagaaatagttcgt

SEQ ID NO: 1150497 - DNA, 15 bp, Homo sapiens
aagagaaatagttcg

SEQ ID NO: 1150498 - DNA, 15 bp, Homo sapiens
aaagagaaatagttc

SEQ ID NO: 1150499 - DNA, 15 bp, Homo sapiens
aaaagagaaatagtt

SEQ ID NO: 1150500 - DNA, 15 bp, Homo sapiens
gaaaagagaaatagt

SEQ ID NO: 1150501 - DNA, 15 bp, Homo sapiens
agaaaagagaaatag

SEQ ID NO: 1150502 - DNA, 15 bp, Homo sapiens
gagaaaagagaaata

SEQ ID NO: 1150503 - DNA, 15 bp, Homo sapiens
ggagaaaagagaaat

SEQ ID NO: 1150504 - DNA, 15 bp, Homo sapiens
aggagaaaagagaaa

SEQ ID NO: 1150505 - DNA, 15 bp, Homo sapiens
aaggagaaaagagaa

SEQ ID NO: 1150506 - DNA, 15 bp, Homo sapiens
aaaggagaaaagaga

SEQ ID NO: 1150507 - DNA, 15 bp, Homo sapiens
aaaaggagaaaagag

SEQ ID NO: 1150508 - DNA, 15 bp, Homo sapiens
caaaaggagaaaaga

SEQ ID NO: 1150509 - DNA, 15 bp, Homo sapiens
tcaaaaggagaaaag

SEQ ID NO: 1150510 - DNA, 15 bp, Homo sapiens
atcaaaaggagaaaa

SEQ ID NO: 1150511 - DNA, 15 bp, Homo sapiens
gatcaaaaggagaaa

SEQ ID NO: 1150512 - DNA, 15 bp, Homo sapiens
tgatcaaaaggagaa

SEQ ID NO: 1150513 - DNA, 15 bp, Homo sapiens
atgatcaaaaggaga

SEQ ID NO: 1150514 - DNA, 15 bp, Homo sapiens
gatgatcaaaaggag

SEQ ID NO: 1150515 - DNA, 15 bp, Homo sapiens
agatgatcaaaagga

SEQ ID NO: 1150516 - DNA, 15 bp, Homo sapiens
tagatgatcaaaagg

SEQ ID NO: 1150517 - DNA, 15 bp, Homo sapiens
ctagatgatcaaaag

SEQ ID NO: 1150518 - DNA, 15 bp, Homo sapiens
tctagatgatcaaaa

SEQ ID NO: 1150519 - DNA, 15 bp, Homo sapiens
ctctagatgatcaaa

SEQ ID NO: 1150520 - DNA, 15 bp, Homo sapiens
cctctagatgatcaa

SEQ ID NO: 1150521 - DNA, 15 bp, Homo sapiens
tcctctagatgatca

SEQ ID NO: 1150522 - DNA, 15 bp, Homo sapiens
ttcctctagatgatc

SEQ ID NO: 1150523 - DNA, 15 bp, Homo sapiens
gttcctctagatgat

SEQ ID NO: 1150524 - DNA, 15 bp, Homo sapiens
cgttcctctagatga

SEQ ID NO: 1150525 - DNA, 15 bp, Homo sapiens
ccgttcctctagatg

SEQ ID NO: 1150526 - DNA, 15 bp, Homo sapiens
cccgttcctctagat

SEQ ID NO: 1150527 - DNA, 15 bp, Homo sapiens
gcccgttcctctaga

SEQ ID NO: 1150528 - DNA, 15 bp, Homo sapiens
tgcccgttcctctag

SEQ ID NO: 1150529 - DNA, 15 bp, Homo sapiens
ttgcccgttcctcta

SEQ ID NO: 1150530 - DNA, 15 bp, Homo sapiens
gttgcccgttcctct

SEQ ID NO: 1150531 - DNA, 15 bp, Homo sapiens
agttgcccgttcctc

SEQ ID NO: 1150532 - DNA, 15 bp, Homo sapiens
aagttgcccgttcct

SEQ ID NO: 1150533 - DNA, 15 bp, Homo sapiens
caagttgcccgttcc

SEQ ID NO: 1150534 - DNA, 15 bp, Homo sapiens
ccaagttgcccgttc

SEQ ID NO: 1150535 - DNA, 15 bp, Homo sapiens
accaagttgcccgtt

SEQ ID NO: 1150536 - DNA, 15 bp, Homo sapiens
aaccaagttgcccgt

SEQ ID NO: 1150537 - DNA, 15 bp, Homo sapiens
aaaccaagttgcccg

SEQ ID NO: 1150538 - DNA, 15 bp, Homo sapiens
gaaaccaagttgccc

SEQ ID NO: 1150539 - DNA, 15 bp, Homo sapiens
agaaaccaagttgcc

SEQ ID NO: 1150540 - DNA, 15 bp, Homo sapiens
aagaaaccaagttgc

SEQ ID NO: 1150541 - DNA, 15 bp, Homo sapiens
gaagaaaccaagttg

SEQ ID NO: 1150542 - DNA, 15 bp, Homo sapiens
agaagaaaccaagtt

SEQ ID NO: 1150543 - DNA, 15 bp, Homo sapiens
aagaagaaaccaagt

SEQ ID NO: 1150544 - DNA, 15 bp, Homo sapiens
aaagaagaaaccaag

SEQ ID NO: 1150545 - DNA, 15 bp, Homo sapiens
taaagaagaaaccaa

SEQ ID NO: 1150546 - DNA, 15 bp, Homo sapiens
ctaaagaagaaacca

SEQ ID NO: 1150547 - DNA, 15 bp, Homo sapiens
gctaaagaagaaacc

SEQ ID NO: 1150548 - DNA, 15 bp, Homo sapiens
agctaaagaagaaac

SEQ ID NO: 1150549 - DNA, 15 bp, Homo sapiens
aagctaaagaagaaa

SEQ ID NO: 1150550 - DNA, 15 bp, Homo sapiens
gaagctaaagaagaa

SEQ ID NO: 1150551 - DNA, 15 bp, Homo sapiens
ggaagctaaagaaga

SEQ ID NO: 1150552 - DNA, 15 bp, Homo sapiens
aggaagctaaagaag

SEQ ID NO: 1150553 - DNA, 15 bp, Homo sapiens
aaggaagctaaagaa

SEQ ID NO: 1150554 - DNA, 15 bp, Homo sapiens
caaggaagctaaaga

SEQ ID NO: 1150555 - DNA, 15 bp, Homo sapiens
acaaggaagctaaag

SEQ ID NO: 1150556 - DNA, 15 bp, Homo sapiens
aacaaggaagctaaa

SEQ ID NO: 1150557 - DNA, 15 bp, Homo sapiens
gaacaaggaagctaa

SEQ ID NO: 1150558 - DNA, 15 bp, Homo sapiens
agaacaaggaagcta

SEQ ID NO: 1150559 - DNA, 15 bp, Homo sapiens
gagaacaaggaagct

SEQ ID NO: 1150560 - DNA, 15 bp, Homo sapiens
tgagaacaaggaagc

SEQ ID NO: 1150561 - DNA, 15 bp, Homo sapiens
atgagaacaaggaag

SEQ ID NO: 1150562 - DNA, 15 bp, Homo sapiens
aatgagaacaaggaa

SEQ ID NO: 1150563 - DNA, 15 bp, Homo sapiens
taatgagaacaagga

SEQ ID NO: 1150564 - DNA, 15 bp, Homo sapiens
ttaatgagaacaagg

SEQ ID NO: 1150565 - DNA, 15 bp, Homo sapiens
cttaatgagaacaag

SEQ ID NO: 1150566 - DNA, 15 bp, Homo sapiens
tcttaatgagaacaa

SEQ ID NO: 1150567 - DNA, 15 bp, Homo sapiens
atcttaatgagaaca

SEQ ID NO: 1150568 - DNA, 15 bp, Homo sapiens
aatcttaatgagaac

SEQ ID NO: 1150569 - DNA, 15 bp, Homo sapiens
caatcttaatgagaa

SEQ ID NO: 1150570 - DNA, 15 bp, Homo sapiens
tcaatcttaatgaga

SEQ ID NO: 1150571 - DNA, 15 bp, Homo sapiens
ttcaatcttaatgag

SEQ ID NO: 1150572 - DNA, 15 bp, Homo sapiens
gttcaatcttaatga

SEQ ID NO: 1150573 - DNA, 15 bp, Homo sapiens
tgttcaatcttaatg

SEQ ID NO: 1150574 - DNA, 15 bp, Homo sapiens
ttgttcaatcttaat

SEQ ID NO: 1150575 - DNA, 15 bp, Homo sapiens
attgttcaatcttaa

SEQ ID NO: 1150576 - DNA, 15 bp, Homo sapiens
cattgttcaatctta

SEQ ID NO: 1150577 - DNA, 15 bp, Homo sapiens
gcattgttcaatctt

SEQ ID NO: 1150578 - DNA, 15 bp, Homo sapiens
ggcattgttcaatct

SEQ ID NO: 1150579 - DNA, 15 bp, Homo sapiens
aggcattgttcaatc

SEQ ID NO: 1150580 - DNA, 15 bp, Homo sapiens
gaggcattgttcaat

SEQ ID NO: 1150581 - DNA, 15 bp, Homo sapiens
agaggcattgttcaa

SEQ ID NO: 1150582 - DNA, 15 bp, Homo sapiens
tagaggcattgttca

SEQ ID NO: 1150583 - DNA, 15 bp, Homo sapiens
ttagaggcattgttc

SEQ ID NO: 1150584 - DNA, 15 bp, Homo sapiens
tttagaggcattgtt

SEQ ID NO: 1150585 - DNA, 15 bp, Homo sapiens
ctttagaggcattgt

SEQ ID NO: 1150586 - DNA, 15 bp, Homo sapiens
actttagaggcattg

SEQ ID NO: 1150587 - DNA, 15 bp, Homo sapiens
cactttagaggcatt

SEQ ID NO: 1150588 - DNA, 15 bp, Homo sapiens
tcactttagaggcat

SEQ ID NO: 1150589 - DNA, 15 bp, Homo sapiens
ttcactttagaggca

SEQ ID NO: 1150590 - DNA, 15 bp, Homo sapiens
gttcactttagaggc

SEQ ID NO: 1150591 - DNA, 15 bp, Homo sapiens
ggttcactttagagg

SEQ ID NO: 1150592 - DNA, 15 bp, Homo sapiens
tggttcactttagag

SEQ ID NO: 1150593 - DNA, 15 bp, Homo sapiens
gtggttcactttaga

SEQ ID NO: 1150594 - DNA, 15 bp, Homo sapiens
tgtggttcactttag

SEQ ID NO: 1150595 - DNA, 15 bp, Homo sapiens
ctgtggttcacttta

SEQ ID NO: 1150596 - DNA, 15 bp, Homo sapiens
tctgtggttcacttt

SEQ ID NO: 1150597 - DNA, 15 bp, Homo sapiens
gtctgtggttcactt

SEQ ID NO: 1150598 - DNA, 15 bp, Homo sapiens
agtctgtggttcact

SEQ ID NO: 1150599 - DNA, 15 bp, Homo sapiens
aagtctgtggttcac

SEQ ID NO: 1150600 - DNA, 15 bp, Homo sapiens
caagtctgtggttca

SEQ ID NO: 1150601 - DNA, 15 bp, Homo sapiens
gcaagtctgtggttc

SEQ ID NO: 1150602 - DNA, 15 bp, Homo sapiens
tgcaagtctgtggtt

SEQ ID NO: 1150603 - DNA, 15 bp, Homo sapiens
atgcaagtctgtggt

SEQ ID NO: 1150604 - DNA, 15 bp, Homo sapiens
catgcaagtctgtgg

SEQ ID NO: 1150605 - DNA, 15 bp, Homo sapiens
gcatgcaagtctgtg

SEQ ID NO: 1150606 - DNA, 15 bp, Homo sapiens
tgcatgcaagtctgt

SEQ ID NO: 1150607 - DNA, 15 bp, Homo sapiens
ttgcatgcaagtctg

SEQ ID NO: 1150608 - DNA, 15 bp, Homo sapiens
cttgcatgcaagtct

SEQ ID NO: 1150609 - DNA, 15 bp, Homo sapiens
gcttgcatgcaagtc

SEQ ID NO: 1150610 - DNA, 15 bp, Homo sapiens
agcttgcatgcaagt

SEQ ID NO: 1150611 - DNA, 15 bp, Homo sapiens
cagcttgcatgcaag

SEQ ID NO: 1150612 - DNA, 15 bp, Homo sapiens
tcagcttgcatgcaa

SEQ ID NO: 1150613 - DNA, 15 bp, Homo sapiens
ttcagcttgcatgca

SEQ ID NO: 1150614 - DNA, 15 bp, Homo sapiens
tttcagcttgcatgc

SEQ ID NO: 1150615 - DNA, 15 bp, Homo sapiens
ttttcagcttgcatg

SEQ ID NO: 1150616 - DNA, 15 bp, Homo sapiens
gttttcagcttgcat

SEQ ID NO: 1150617 - DNA, 15 bp, Homo sapiens
ggttttcagcttgca

SEQ ID NO: 1150618 - DNA, 15 bp, Homo sapiens
aggttttcagcttgc

SEQ ID NO: 1150619 - DNA, 15 bp, Homo sapiens
aaggttttcagcttg

SEQ ID NO: 1150620 - DNA, 15 bp, Homo sapiens
aaaggttttcagctt

SEQ ID NO: 1150621 - DNA, 15 bp, Homo sapiens
taaaggttttcagct

SEQ ID NO: 1150622 - DNA, 15 bp, Homo sapiens
gtaaaggttttcagc

SEQ ID NO: 1150623 - DNA, 15 bp, Homo sapiens
ggtaaaggttttcag

SEQ ID NO: 1150624 - DNA, 15 bp, Homo sapiens
tggtaaaggttttca

SEQ ID NO: 1150625 - DNA, 15 bp, Homo sapiens
ttggtaaaggttttc

SEQ ID NO: 1150626 - DNA, 15 bp, Homo sapiens
tttggtaaaggtttt

SEQ ID NO: 1150627 - DNA, 15 bp, Homo sapiens
atttggtaaaggttt

SEQ ID NO: 1150628 - DNA, 15 bp, Homo sapiens
catttggtaaaggtt

SEQ ID NO: 1150629 - DNA, 15 bp, Homo sapiens
gcatttggtaaaggt

SEQ ID NO: 1150630 - DNA, 15 bp, Homo sapiens
tgcatttggtaaagg

SEQ ID NO: 1150631 - DNA, 15 bp, Homo sapiens
ctgcatttggtaaag

SEQ ID NO: 1150632 - DNA, 15 bp, Homo sapiens
actgcatttggtaaa

SEQ ID NO: 1150633 - DNA, 15 bp, Homo sapiens
gactgcatttggtaa

SEQ ID NO: 1150634 - DNA, 15 bp, Homo sapiens
agactgcatttggta

SEQ ID NO: 1150635 - DNA, 15 bp, Homo sapiens
aagactgcatttggt

SEQ ID NO: 1150636 - DNA, 15 bp, Homo sapiens
taagactgcatttgg

SEQ ID NO: 1150637 - DNA, 15 bp, Homo sapiens
ttaagactgcatttg

SEQ ID NO: 1150638 - DNA, 15 bp, Homo sapiens
attaagactgcattt

SEQ ID NO: 1150639 - DNA, 15 bp, Homo sapiens
aattaagactgcatt

SEQ ID NO: 1150640 - DNA, 15 bp, Homo sapiens
aaattaagactgcat

SEQ ID NO: 1150641 - DNA, 15 bp, Homo sapiens
caaattaagactgca

SEQ ID NO: 1150642 - DNA, 15 bp, Homo sapiens
acaaattaagactgc

SEQ ID NO: 1150643 - DNA, 15 bp, Homo sapiens
tacaaattaagactg

SEQ ID NO: 1150644 - DNA, 15 bp, Homo sapiens
gtacaaattaagact

SEQ ID NO: 1150645 - DNA, 15 bp, Homo sapiens
agtacaaattaagac

SEQ ID NO: 1150646 - DNA, 15 bp, Homo sapiens
aagtacaaattaaga

SEQ ID NO: 1150647 - DNA, 15 bp, Homo sapiens
aaagtacaaattaag

SEQ ID NO: 1150648 - DNA, 15 bp, Homo sapiens
caaagtacaaattaa

SEQ ID NO: 1150649 - DNA, 15 bp, Homo sapiens
tcaaagtacaaatta

SEQ ID NO: 1150650 - DNA, 15 bp, Homo sapiens
ctcaaagtacaaatt

SEQ ID NO: 1150651 - DNA, 15 bp, Homo sapiens
tctcaaagtacaaat

SEQ ID NO: 1150652 - DNA, 15 bp, Homo sapiens
ttctcaaagtacaaa

SEQ ID NO: 1150653 - DNA, 15 bp, Homo sapiens
tttctcaaagtacaa

SEQ ID NO: 1150654 - DNA, 15 bp, Homo sapiens
ttttctcaaagtaca

SEQ ID NO: 1150655 - DNA, 15 bp, Homo sapiens
tttttctcaaagtac

SEQ ID NO: 1150656 - DNA, 15 bp, Homo sapiens
gtttttctcaaagta

SEQ ID NO: 1150657 - DNA, 15 bp, Homo sapiens
tgtttttctcaaagt

SEQ ID NO: 1150658 - DNA, 15 bp, Homo sapiens
atgtttttctcaaag

SEQ ID NO: 1150659 - DNA, 15 bp, Homo sapiens
aatgtttttctcaaa

SEQ ID NO: 1150660 - DNA, 15 bp, Homo sapiens
aaatgtttttctcaa

SEQ ID NO: 1150661 - DNA, 15 bp, Homo sapiens
aaaatgtttttctca

SEQ ID NO: 1150662 - DNA, 15 bp, Homo sapiens
gaaaatgtttttctc

SEQ ID NO: 1150663 - DNA, 15 bp, Homo sapiens
tgaaaatgtttttct

SEQ ID NO: 1150664 - DNA, 15 bp, Homo sapiens
ttgaaaatgtttttc

SEQ ID NO: 1150665 - DNA, 15 bp, Homo sapiens
cttgaaaatgttttt

SEQ ID NO: 1150666 - DNA, 15 bp, Homo sapiens
ccttgaaaatgtttt

SEQ ID NO: 1150667 - DNA, 15 bp, Homo sapiens
accttgaaaatgttt

SEQ ID NO: 1150668 - DNA, 15 bp, Homo sapiens
taccttgaaaatgtt

SEQ ID NO: 1150669 - DNA, 15 bp, Homo sapiens
ataccttgaaaatgt

SEQ ID NO: 1150670 - DNA, 15 bp, Homo sapiens
aataccttgaaaatg

SEQ ID NO: 1150671 - DNA, 15 bp, Homo sapiens
aaataccttgaaaat

SEQ ID NO: 1150672 - DNA, 15 bp, Homo sapiens
aaaataccttgaaaa

SEQ ID NO: 1150673 - DNA, 15 bp, Homo sapiens
taaaataccttgaaa

SEQ ID NO: 1150674 - DNA, 15 bp, Homo sapiens
ataaaataccttgaa

SEQ ID NO: 1150675 - DNA, 15 bp, Homo sapiens
gataaaataccttga

SEQ ID NO: 1150676 - DNA, 15 bp, Homo sapiens
ggataaaataccttg

SEQ ID NO: 1150677 - DNA, 15 bp, Homo sapiens
aggataaaatacctt

SEQ ID NO: 1150678 - DNA, 15 bp, Homo sapiens
aaggataaaatacct

SEQ ID NO: 1150679 - DNA, 15 bp, Homo sapiens
aaaggataaaatacc

SEQ ID NO: 1150680 - DNA, 15 bp, Homo sapiens
aaaaggataaaatac

SEQ ID NO: 1150681 - DNA, 15 bp, Homo sapiens
gaaaaggataaaata

SEQ ID NO: 1150682 - DNA, 15 bp, Homo sapiens
agaaaaggataaaat

SEQ ID NO: 1150683 - DNA, 15 bp, Homo sapiens
gagaaaaggataaaa

SEQ ID NO: 1150684 - DNA, 15 bp, Homo sapiens
ggagaaaaggataaa

SEQ ID NO: 1150685 - DNA, 15 bp, Homo sapiens
tggagaaaaggataa

SEQ ID NO: 1150686 - DNA, 15 bp, Homo sapiens
ttggagaaaaggata

SEQ ID NO: 1150687 - DNA, 15 bp, Homo sapiens
gttggagaaaaggat

SEQ ID NO: 1150688 - DNA, 15 bp, Homo sapiens
agttggagaaaagga

SEQ ID NO: 1150689 - DNA, 15 bp, Homo sapiens
aagttggagaaaagg

SEQ ID NO: 1150690 - DNA, 15 bp, Homo sapiens
aaagttggagaaaag

SEQ ID NO: 1150691 - DNA, 15 bp, Homo sapiens
aaaagttggagaaaa

SEQ ID NO: 1150692 - DNA, 15 bp, Homo sapiens
caaaagttggagaaa

SEQ ID NO: 1150693 - DNA, 15 bp, Homo sapiens
tcaaaagttggagaa

SEQ ID NO: 1150694 - DNA, 15 bp, Homo sapiens
gtcaaaagttggaga

SEQ ID NO: 1150695 - DNA, 15 bp, Homo sapiens
tgtcaaaagttggag

SEQ ID NO: 1150696 - DNA, 15 bp, Homo sapiens
atgtcaaaagttgga

SEQ ID NO: 1150697 - DNA, 15 bp, Homo sapiens
tatgtcaaaagttgg

SEQ ID NO: 1150698 - DNA, 15 bp, Homo sapiens
atatgtcaaaagttg

SEQ ID NO: 1150699 - DNA, 15 bp, Homo sapiens
aatatgtcaaaagtt

SEQ ID NO: 1150700 - DNA, 15 bp, Homo sapiens
taatatgtcaaaagt

SEQ ID NO: 1150701 - DNA, 15 bp, Homo sapiens
gtaatatgtcaaaag

SEQ ID NO: 1150702 - DNA, 15 bp, Homo sapiens
tgtaatatgtcaaaa

SEQ ID NO: 1150703 - DNA, 15 bp, Homo sapiens
ttgtaatatgtcaaa

SEQ ID NO: 1150704 - DNA, 15 bp, Homo sapiens
tttgtaatatgtcaa

SEQ ID NO: 1150705 - DNA, 15 bp, Homo sapiens
ctttgtaatatgtca

SEQ ID NO: 1150706 - DNA, 15 bp, Homo sapiens
actttgtaatatgtc

SEQ ID NO: 1150707 - DNA, 15 bp, Homo sapiens
tactttgtaatatgt

SEQ ID NO: 1150708 - DNA, 15 bp, Homo sapiens
gtactttgtaatatg

SEQ ID NO: 1150709 - DNA, 15 bp, Homo sapiens
ggtactttgtaatat

SEQ ID NO: 1150710 - DNA, 15 bp, Homo sapiens
gggtactttgtaata

SEQ ID NO: 1150711 - DNA, 15 bp, Homo sapiens
tgggtactttgtaat

SEQ ID NO: 1150712 - DNA, 15 bp, Homo sapiens
ttgggtactttgtaa

SEQ ID NO: 1150713 - DNA, 15 bp, Homo sapiens
tttgggtactttgta

SEQ ID NO: 1150714 - DNA, 15 bp, Homo sapiens
atttgggtactttgt

SEQ ID NO: 1150715 - DNA, 15 bp, Homo sapiens
tatttgggtactttg

SEQ ID NO: 1150716 - DNA, 15 bp, Homo sapiens
atatttgggtacttt

SEQ ID NO: 1150717 - DNA, 15 bp, Homo sapiens
catatttgggtactt

SEQ ID NO: 1150718 - DNA, 15 bp, Homo sapiens
gcatatttgggtact

SEQ ID NO: 1150719 - DNA, 15 bp, Homo sapiens
ggcatatttgggtac

SEQ ID NO: 1150720 - DNA, 15 bp, Homo sapiens
tggcatatttgggta

SEQ ID NO: 1150721 - DNA, 15 bp, Homo sapiens
ctggcatatttgggt

SEQ ID NO: 1150722 - DNA, 15 bp, Homo sapiens
tctggcatatttggg

SEQ ID NO: 1150723 - DNA, 15 bp, Homo sapiens
gtctggcatatttgg

SEQ ID NO: 1150724 - DNA, 15 bp, Homo sapiens
agtctggcatatttg

SEQ ID NO: 1150725 - DNA, 15 bp, Homo sapiens
cagtctggcatattt

SEQ ID NO: 1150726 - DNA, 15 bp, Homo sapiens
acagtctggcatatt

SEQ ID NO: 1150727 - DNA, 15 bp, Homo sapiens
aacagtctggcatat

SEQ ID NO: 1150728 - DNA, 15 bp, Homo sapiens
caacagtctggcata

SEQ ID NO: 1150729 - DNA, 15 bp, Homo sapiens
gcaacagtctggcat

SEQ ID NO: 1150730 - DNA, 15 bp, Homo sapiens
ggcaacagtctggca

SEQ ID NO: 1150731 - DNA, 15 bp, Homo sapiens
aggcaacagtctggc

SEQ ID NO: 1150732 - DNA, 15 bp, Homo sapiens
gaggcaacagtctgg

SEQ ID NO: 1150733 - DNA, 15 bp, Homo sapiens
tgaggcaacagtctg

SEQ ID NO: 1150734 - DNA, 15 bp, Homo sapiens
atgaggcaacagtct

SEQ ID NO: 1150735 - DNA, 15 bp, Homo sapiens
gatgaggcaacagtc

SEQ ID NO: 1150736 - DNA, 15 bp, Homo sapiens
tgatgaggcaacagt

SEQ ID NO: 1150737 - DNA, 15 bp, Homo sapiens
ctgatgaggcaacag

SEQ ID NO: 1150738 - DNA, 15 bp, Homo sapiens
gctgatgaggcaaca

SEQ ID NO: 1150739 - DNA, 15 bp, Homo sapiens
ggctgatgaggcaac

SEQ ID NO: 1150740 - DNA, 15 bp, Homo sapiens
gggctgatgaggcaa

SEQ ID NO: 1150741 - DNA, 15 bp, Homo sapiens
ggggctgatgaggca

SEQ ID NO: 1150742 - DNA, 15 bp, Homo sapiens
gggggctgatgaggc

SEQ ID NO: 1150743 - DNA, 15 bp, Homo sapiens
ggggggctgatgagg

SEQ ID NO: 1150744 - DNA, 15 bp, Homo sapiens
cggggggctgatgag

SEQ ID NO: 1150745 - DNA, 15 bp, Homo sapiens
gcggggggctgatga

SEQ ID NO: 1150746 - DNA, 15 bp, Homo sapiens
tgcggggggctgatg

SEQ ID NO: 1150747 - DNA, 15 bp, Homo sapiens
ctgcggggggctgat

SEQ ID NO: 1150748 - DNA, 15 bp, Homo sapiens
actgcggggggctga

SEQ ID NO: 1150749 - DNA, 15 bp, Homo sapiens
gactgcggggggctg

SEQ ID NO: 1150750 - DNA, 15 bp, Homo sapiens
tgactgcggggggct

SEQ ID NO: 1150751 - DNA, 15 bp, Homo sapiens
ctgactgcggggggc

SEQ ID NO: 1150752 - DNA, 15 bp, Homo sapiens
cctgactgcgggggg

SEQ ID NO: 1150753 - DNA, 15 bp, Homo sapiens
acctgactgcggggg

SEQ ID NO: 1150754 - DNA, 15 bp, Homo sapiens
tacctgactgcgggg

SEQ ID NO: 1150755 - DNA, 15 bp, Homo sapiens
gtacctgactgcggg

SEQ ID NO: 1150756 - DNA, 15 bp, Homo sapiens
tgtacctgactgcgg

SEQ ID NO: 1150757 - DNA, 15 bp, Homo sapiens
ctgtacctgactgcg

SEQ ID NO: 1150758 - DNA, 15 bp, Homo sapiens
actgtacctgactgc

SEQ ID NO: 1150759 - DNA, 15 bp, Homo sapiens
aactgtacctgactg

SEQ ID NO: 1150760 - DNA, 15 bp, Homo sapiens
taactgtacctgact

SEQ ID NO: 1150761 - DNA, 15 bp, Homo sapiens
ctaactgtacctgac

SEQ ID NO: 1150762 - DNA, 15 bp, Homo sapiens
tctaactgtacctga

SEQ ID NO: 1150763 - DNA, 15 bp, Homo sapiens
atctaactgtacctg

SEQ ID NO: 1150764 - DNA, 15 bp, Homo sapiens
catctaactgtacct

SEQ ID NO: 1150765 - DNA, 15 bp, Homo sapiens
gcatctaactgtacc

SEQ ID NO: 1150766 - DNA, 15 bp, Homo sapiens
tgcatctaactgtac

SEQ ID NO: 1150767 - DNA, 15 bp, Homo sapiens
ttgcatctaactgta

SEQ ID NO: 1150768 - DNA, 15 bp, Homo sapiens
cttgcatctaactgt

SEQ ID NO: 1150769 - DNA, 15 bp, Homo sapiens
ccttgcatctaactg

SEQ ID NO: 1150770 - DNA, 15 bp, Homo sapiens
gccttgcatctaact

SEQ ID NO: 1150771 - DNA, 15 bp, Homo sapiens
tgccttgcatctaac

SEQ ID NO: 1150772 - DNA, 15 bp, Homo sapiens
ttgccttgcatctaa

SEQ ID NO: 1150773 - DNA, 15 bp, Homo sapiens
attgccttgcatcta

SEQ ID NO: 1150774 - DNA, 15 bp, Homo sapiens
gattgccttgcatct

SEQ ID NO: 1150775 - DNA, 15 bp, Homo sapiens
agattgccttgcatc

SEQ ID NO: 1150776 - DNA, 15 bp, Homo sapiens
aagattgccttgcat

SEQ ID NO: 1150777 - DNA, 15 bp, Homo sapiens
gaagattgccttgca

SEQ ID NO: 1150778 - DNA, 15 bp, Homo sapiens
ggaagattgccttgc

SEQ ID NO: 1150779 - DNA, 15 bp, Homo sapiens
aggaagattgccttg

SEQ ID NO: 1150780 - DNA, 15 bp, Homo sapiens
taggaagattgcctt

SEQ ID NO: 1150781 - DNA, 15 bp, Homo sapiens
ttaggaagattgcct

SEQ ID NO: 1150782 - DNA, 15 bp, Homo sapiens
tttaggaagattgcc

SEQ ID NO: 1150783 - DNA, 15 bp, Homo sapiens
ttttaggaagattgc

SEQ ID NO: 1150784 - DNA, 15 bp, Homo sapiens
cttttaggaagattg

SEQ ID NO: 1150785 - DNA, 15 bp, Homo sapiens
acttttaggaagatt

SEQ ID NO: 1150786 - DNA, 15 bp, Homo sapiens
aacttttaggaagat

SEQ ID NO: 1150787 - DNA, 15 bp, Homo sapiens
taacttttaggaaga

SEQ ID NO: 1150788 - DNA, 15 bp, Homo sapiens
gtaacttttaggaag

SEQ ID NO: 1150789 - DNA, 15 bp, Homo sapiens
agtaacttttaggaa

SEQ ID NO: 1150790 - DNA, 15 bp, Homo sapiens
aagtaacttttagga

SEQ ID NO: 1150791 - DNA, 15 bp, Homo sapiens
taagtaacttttagg

SEQ ID NO: 1150792 - DNA, 15 bp, Homo sapiens
ataagtaacttttag

SEQ ID NO: 1150793 - DNA, 15 bp, Homo sapiens
aataagtaactttta

SEQ ID NO: 1150794 - DNA, 15 bp, Homo sapiens
taataagtaactttt

SEQ ID NO: 1150795 - DNA, 15 bp, Homo sapiens
ctaataagtaacttt

SEQ ID NO: 1150796 - DNA, 15 bp, Homo sapiens
tctaataagtaactt

SEQ ID NO: 1150797 - DNA, 15 bp, Homo sapiens
ctctaataagtaact

SEQ ID NO: 1150798 - DNA, 15 bp, Homo sapiens
tctctaataagtaac

SEQ ID NO: 1150799 - DNA, 15 bp, Homo sapiens
atctctaataagtaa

SEQ ID NO: 1150800 - DNA, 15 bp, Homo sapiens
catctctaataagta

SEQ ID NO: 1150801 - DNA, 15 bp, Homo sapiens
acatctctaataagt

SEQ ID NO: 1150802 - DNA, 15 bp, Homo sapiens
cacatctctaataag

SEQ ID NO: 1150803 - DNA, 15 bp, Homo sapiens
tcacatctctaataa

SEQ ID NO: 1150804 - DNA, 15 bp, Homo sapiens
ctcacatctctaata

SEQ ID NO: 1150805 - DNA, 15 bp, Homo sapiens
tctcacatctctaat

SEQ ID NO: 1150806 - DNA, 15 bp, Homo sapiens
ttctcacatctctaa

SEQ ID NO: 1150807 - DNA, 15 bp, Homo sapiens
cttctcacatctcta

SEQ ID NO: 1150808 - DNA, 15 bp, Homo sapiens
ccttctcacatctct

SEQ ID NO: 1150809 - DNA, 15 bp, Homo sapiens
cccttctcacatctc

SEQ ID NO: 1150810 - DNA, 15 bp, Homo sapiens
gcccttctcacatct

SEQ ID NO: 1150811 - DNA, 15 bp, Homo sapiens
tgcccttctcacatc

SEQ ID NO: 1150812 - DNA, 15 bp, Homo sapiens
ttgcccttctcacat

SEQ ID NO: 1150813 - DNA, 15 bp, Homo sapiens
tttgcccttctcaca

SEQ ID NO: 1150814 - DNA, 15 bp, Homo sapiens
atttgcccttctcac

SEQ ID NO: 1150815 - DNA, 15 bp, Homo sapiens
catttgcccttctca

SEQ ID NO: 1150816 - DNA, 15 bp, Homo sapiens
gcatttgcccttctc

SEQ ID NO: 1150817 - DNA, 15 bp, Homo sapiens
agcatttgcccttct

SEQ ID NO: 1150818 - DNA, 15 bp, Homo sapiens
tagcatttgcccttc

SEQ ID NO: 1150819 - DNA, 15 bp, Homo sapiens
atagcatttgccctt

SEQ ID NO: 1150820 - DNA, 15 bp, Homo sapiens
gatagcatttgccct

SEQ ID NO: 1150821 - DNA, 15 bp, Homo sapiens
tgatagcatttgccc

SEQ ID NO: 1150822 - DNA, 15 bp, Homo sapiens
atgatagcatttgcc

SEQ ID NO: 1150823 - DNA, 15 bp, Homo sapiens
aatgatagcatttgc

SEQ ID NO: 1150824 - DNA, 15 bp, Homo sapiens
caatgatagcatttg

SEQ ID NO: 1150825 - DNA, 15 bp, Homo sapiens
ccaatgatagcattt

SEQ ID NO: 1150826 - DNA, 15 bp, Homo sapiens
tccaatgatagcatt

SEQ ID NO: 1150827 - DNA, 15 bp, Homo sapiens
ttccaatgatagcat

SEQ ID NO: 1150828 - DNA, 15 bp, Homo sapiens
tttccaatgatagca

SEQ ID NO: 1150829 - DNA, 15 bp, Homo sapiens
ttttccaatgatagc

SEQ ID NO: 1150830 - DNA, 15 bp, Homo sapiens
tttttccaatgatag

SEQ ID NO: 1150831 - DNA, 15 bp, Homo sapiens
gtttttccaatgata

SEQ ID NO: 1150832 - DNA, 15 bp, Homo sapiens
agtttttccaatgat

SEQ ID NO: 1150833 - DNA, 15 bp, Homo sapiens
cagtttttccaatga

SEQ ID NO: 1150834 - DNA, 15 bp, Homo sapiens
tcagtttttccaatg

SEQ ID NO: 1150835 - DNA, 15 bp, Homo sapiens
gtcagtttttccaat

SEQ ID NO: 1150836 - DNA, 15 bp, Homo sapiens
tgtcagtttttccaa

SEQ ID NO: 1150837 - DNA, 15 bp, Homo sapiens
ttgtcagtttttcca

SEQ ID NO: 1150838 - DNA, 15 bp, Homo sapiens
tttgtcagtttttcc

SEQ ID NO: 1150839 - DNA, 15 bp, Homo sapiens
ttttgtcagtttttc

SEQ ID NO: 1150840 - DNA, 15 bp, Homo sapiens
cttttgtcagttttt

SEQ ID NO: 1150841 - DNA, 15 bp, Homo sapiens
acttttgtcagtttt

SEQ ID NO: 1150842 - DNA, 15 bp, Homo sapiens
gacttttgtcagttt

SEQ ID NO: 1150843 - DNA, 15 bp, Homo sapiens
ggacttttgtcagtt

SEQ ID NO: 1150844 - DNA, 15 bp, Homo sapiens
gggacttttgtcagt

SEQ ID NO: 1150845 - DNA, 15 bp, Homo sapiens
tgggacttttgtcag

SEQ ID NO: 1150846 - DNA, 15 bp, Homo sapiens
ttgggacttttgtca

SEQ ID NO: 1150847 - DNA, 15 bp, Homo sapiens
attgggacttttgtc

SEQ ID NO: 1150848 - DNA, 15 bp, Homo sapiens
tattgggacttttgt

SEQ ID NO: 1150849 - DNA, 15 bp, Homo sapiens
ctattgggacttttg

SEQ ID NO: 1150850 - DNA, 15 bp, Homo sapiens
cctattgggactttt

SEQ ID NO: 1150851 - DNA, 15 bp, Homo sapiens
tcctattgggacttt

SEQ ID NO: 1150852 - DNA, 15 bp, Homo sapiens
ttcctattgggactt

SEQ ID NO: 1150853 - DNA, 15 bp, Homo sapiens
tttcctattgggact

SEQ ID NO: 1150854 - DNA, 15 bp, Homo sapiens
ttttcctattgggac

SEQ ID NO: 1150855 - DNA, 15 bp, Homo sapiens
tttttcctattggga

SEQ ID NO: 1150856 - DNA, 15 bp, Homo sapiens
atttttcctattggg

SEQ ID NO: 1150857 - DNA, 15 bp, Homo sapiens
tatttttcctattgg

SEQ ID NO: 1150858 - DNA, 15 bp, Homo sapiens
ttatttttcctattg

SEQ ID NO: 1150859 - DNA, 15 bp, Homo sapiens
cttatttttcctatt

SEQ ID NO: 1150860 - DNA, 15 bp, Homo sapiens
ccttatttttcctat

SEQ ID NO: 1150861 - DNA, 15 bp, Homo sapiens
tccttatttttccta

SEQ ID NO: 1150862 - DNA, 15 bp, Homo sapiens
ttccttatttttcct

SEQ ID NO: 1150863 - DNA, 15 bp, Homo sapiens
cttccttatttttcc

SEQ ID NO: 1150864 - DNA, 15 bp, Homo sapiens
acttccttatttttc

SEQ ID NO: 1150865 - DNA, 15 bp, Homo sapiens
cacttccttattttt

SEQ ID NO: 1150866 - DNA, 15 bp, Homo sapiens
ccacttccttatttt

SEQ ID NO: 1150867 - DNA, 15 bp, Homo sapiens
tccacttccttattt

SEQ ID NO: 1150868 - DNA, 15 bp, Homo sapiens
ctccacttccttatt

SEQ ID NO: 1150869 - DNA, 15 bp, Homo sapiens
tctccacttccttat

SEQ ID NO: 1150870 - DNA, 15 bp, Homo sapiens
ctctccacttcctta

SEQ ID NO: 1150871 - DNA, 15 bp, Homo sapiens
actctccacttcctt

SEQ ID NO: 1150872 - DNA, 15 bp, Homo sapiens
aactctccacttcct

SEQ ID NO: 1150873 - DNA, 15 bp, Homo sapiens
taactctccacttcc

SEQ ID NO: 1150874 - DNA, 15 bp, Homo sapiens
gtaactctccacttc

SEQ ID NO: 1150875 - DNA, 15 bp, Homo sapiens
agtaactctccactt

SEQ ID NO: 1150876 - DNA, 15 bp, Homo sapiens
tagtaactctccact

SEQ ID NO: 1150877 - DNA, 15 bp, Homo sapiens
atagtaactctccac

SEQ ID NO: 1150878 - DNA, 15 bp, Homo sapiens
catagtaactctcca

SEQ ID NO: 1150879 - DNA, 15 bp, Homo sapiens
acatagtaactctcc

SEQ ID NO: 1150880 - DNA, 15 bp, Homo sapiens
aacatagtaactctc

SEQ ID NO: 1150881 - DNA, 15 bp, Homo sapiens
aaacatagtaactct

SEQ ID NO: 1150882 - DNA, 15 bp, Homo sapiens
gaaacatagtaactc

SEQ ID NO: 1150883 - DNA, 15 bp, Homo sapiens
agaaacatagtaact

SEQ ID NO: 1150884 - DNA, 15 bp, Homo sapiens
tagaaacatagtaac

SEQ ID NO: 1150885 - DNA, 15 bp, Homo sapiens
ttagaaacatagtaa

SEQ ID NO: 1150886 - DNA, 15 bp, Homo sapiens
attagaaacatagta

SEQ ID NO: 1150887 - DNA, 15 bp, Homo sapiens
aattagaaacatagt

SEQ ID NO: 1150888 - DNA, 15 bp, Homo sapiens
aaattagaaacatag

SEQ ID NO: 1150889 - DNA, 15 bp, Homo sapiens
aaaattagaaacata

SEQ ID NO: 1150890 - DNA, 15 bp, Homo sapiens
aaaaattagaaacat

SEQ ID NO: 1150891 - DNA, 15 bp, Homo sapiens
gaaaaattagaaaca

SEQ ID NO: 1150892 - DNA, 15 bp, Homo sapiens
tgaaaaattagaaac

SEQ ID NO: 1150893 - DNA, 15 bp, Homo sapiens
atgaaaaattagaaa

SEQ ID NO: 1150894 - DNA, 15 bp, Homo sapiens
catgaaaaattagaa

SEQ ID NO: 1150895 - DNA, 15 bp, Homo sapiens
acatgaaaaattaga

SEQ ID NO: 1150896 - DNA, 15 bp, Homo sapiens
cacatgaaaaattag

SEQ ID NO: 1150897 - DNA, 15 bp, Homo sapiens
gcacatgaaaaatta

SEQ ID NO: 1150898 - DNA, 15 bp, Homo sapiens
agcacatgaaaaatt

SEQ ID NO: 1150899 - DNA, 15 bp, Homo sapiens
aagcacatgaaaaat

SEQ ID NO: 1150900 - DNA, 15 bp, Homo sapiens
gaagcacatgaaaaa

SEQ ID NO: 1150901 - DNA, 15 bp, Homo sapiens
agaagcacatgaaaa

SEQ ID NO: 1150902 - DNA, 15 bp, Homo sapiens
tagaagcacatgaaa

SEQ ID NO: 1150903 - DNA, 15 bp, Homo sapiens
atagaagcacatgaa

SEQ ID NO: 1150904 - DNA, 15 bp, Homo sapiens
aatagaagcacatga

SEQ ID NO: 1150905 - DNA, 15 bp, Homo sapiens
aaatagaagcacatg

SEQ ID NO: 1150906 - DNA, 15 bp, Homo sapiens
aaaatagaagcacat

SEQ ID NO: 1150907 - DNA, 15 bp, Homo sapiens
aaaaatagaagcaca

SEQ ID NO: 1150908 - DNA, 15 bp, Homo sapiens
aaaaaatagaagcac

SEQ ID NO: 1150909 - DNA, 15 bp, Homo sapiens
aaaaaaatagaagca

SEQ ID NO: 1150910 - DNA, 15 bp, Homo sapiens
gaaaaaaatagaagc

SEQ ID NO: 1150911 - DNA, 15 bp, Homo sapiens
ggaaaaaaatagaag

SEQ ID NO: 1150912 - DNA, 15 bp, Homo sapiens
aggaaaaaaatagaa

SEQ ID NO: 1150913 - DNA, 15 bp, Homo sapiens
taggaaaaaaataga

SEQ ID NO: 1150914 - DNA, 15 bp, Homo sapiens
gtaggaaaaaaatag

SEQ ID NO: 1150915 - DNA, 15 bp, Homo sapiens
agtaggaaaaaaata

SEQ ID NO: 1150916 - DNA, 15 bp, Homo sapiens
aagtaggaaaaaaat

SEQ ID NO: 1150917 - DNA, 15 bp, Homo sapiens
gaagtaggaaaaaaa

SEQ ID NO: 1150918 - DNA, 15 bp, Homo sapiens
tgaagtaggaaaaaa

SEQ ID NO: 1150919 - DNA, 15 bp, Homo sapiens
ctgaagtaggaaaaa

SEQ ID NO: 1150920 - DNA, 15 bp, Homo sapiens
tctgaagtaggaaaa

SEQ ID NO: 1150921 - DNA, 15 bp, Homo sapiens
ctctgaagtaggaaa

SEQ ID NO: 1150922 - DNA, 15 bp, Homo sapiens
gctctgaagtaggaa

SEQ ID NO: 1150923 - DNA, 15 bp, Homo sapiens
ggctctgaagtagga

SEQ ID NO: 1150924 - DNA, 15 bp, Homo sapiens
tggctctgaagtagg

SEQ ID NO: 1150925 - DNA, 15 bp, Homo sapiens
atggctctgaagtag

SEQ ID NO: 1150926 - DNA, 15 bp, Homo sapiens
aatggctctgaagta

SEQ ID NO: 1150927 - DNA, 15 bp, Homo sapiens
caatggctctgaagt

SEQ ID NO: 1150928 - DNA, 15 bp, Homo sapiens
tcaatggctctgaag

SEQ ID NO: 1150929 - DNA, 15 bp, Homo sapiens
gtcaatggctctgaa

SEQ ID NO: 1150930 - DNA, 15 bp, Homo sapiens
agtcaatggctctga

SEQ ID NO: 1150931 - DNA, 15 bp, Homo sapiens
tagtcaatggctctg

SEQ ID NO: 1150932 - DNA, 15 bp, Homo sapiens
ttagtcaatggctct

SEQ ID NO: 1150933 - DNA, 15 bp, Homo sapiens
attagtcaatggctc

SEQ ID NO: 1150934 - DNA, 15 bp, Homo sapiens
tattagtcaatggct

SEQ ID NO: 1150935 - DNA, 15 bp, Homo sapiens
ctattagtcaatggc

SEQ ID NO: 1150936 - DNA, 15 bp, Homo sapiens
actattagtcaatgg

SEQ ID NO: 1150937 - DNA, 15 bp, Homo sapiens
aactattagtcaatg

SEQ ID NO: 1150938 - DNA, 15 bp, Homo sapiens
caactattagtcaat

SEQ ID NO: 1150939 - DNA, 15 bp, Homo sapiens
tcaactattagtcaa

SEQ ID NO: 1150940 - DNA, 15 bp, Homo sapiens
ctcaactattagtca

SEQ ID NO: 1150941 - DNA, 15 bp, Homo sapiens
actcaactattagtc

SEQ ID NO: 1150942 - DNA, 15 bp, Homo sapiens
tactcaactattagt

SEQ ID NO: 1150943 - DNA, 15 bp, Homo sapiens
atactcaactattag

SEQ ID NO: 1150944 - DNA, 15 bp, Homo sapiens
tatactcaactatta

SEQ ID NO: 1150945 - DNA, 15 bp, Homo sapiens
ttatactcaactatt

SEQ ID NO: 1150946 - DNA, 15 bp, Homo sapiens
gttatactcaactat

SEQ ID NO: 1150947 - DNA, 15 bp, Homo sapiens
tgttatactcaacta

SEQ ID NO: 1150948 - DNA, 15 bp, Homo sapiens
gtgttatactcaact

SEQ ID NO: 1150949 - DNA, 15 bp, Homo sapiens
tgtgttatactcaac

SEQ ID NO: 1150950 - DNA, 15 bp, Homo sapiens
ctgtgttatactcaa

SEQ ID NO: 1150951 - DNA, 15 bp, Homo sapiens
cctgtgttatactca

SEQ ID NO: 1150952 - DNA, 15 bp, Homo sapiens
acctgtgttatactc

SEQ ID NO: 1150953 - DNA, 15 bp, Homo sapiens
aacctgtgttatact

SEQ ID NO: 1150954 - DNA, 15 bp, Homo sapiens
caacctgtgttatac

SEQ ID NO: 1150955 - DNA, 15 bp, Homo sapiens
acaacctgtgttata

SEQ ID NO: 1150956 - DNA, 15 bp, Homo sapiens
cacaacctgtgttat

SEQ ID NO: 1150957 - DNA, 15 bp, Homo sapiens
acacaacctgtgtta

SEQ ID NO: 1150958 - DNA, 15 bp, Homo sapiens
aacacaacctgtgtt

SEQ ID NO: 1150959 - DNA, 15 bp, Homo sapiens
aaacacaacctgtgt

SEQ ID NO: 1150960 - DNA, 15 bp, Homo sapiens
gaaacacaacctgtg

SEQ ID NO: 1150961 - DNA, 15 bp, Homo sapiens
ggaaacacaacctgt

SEQ ID NO: 1150962 - DNA, 15 bp, Homo sapiens
cggaaacacaacctg

SEQ ID NO: 1150963 - DNA, 15 bp, Homo sapiens
ccggaaacacaacct

SEQ ID NO: 1150964 - DNA, 15 bp, Homo sapiens
cccggaaacacaacc

SEQ ID NO: 1150965 - DNA, 15 bp, Homo sapiens
gcccggaaacacaac

SEQ ID NO: 1150966 - DNA, 15 bp, Homo sapiens
agcccggaaacacaa

SEQ ID NO: 1150967 - DNA, 15 bp, Homo sapiens
cagcccggaaacaca

SEQ ID NO: 1150968 - DNA, 15 bp, Homo sapiens
gcagcccggaaacac

SEQ ID NO: 1150969 - DNA, 15 bp, Homo sapiens
agcagcccggaaaca

SEQ ID NO: 1150970 - DNA, 15 bp, Homo sapiens
cagcagcccggaaac

SEQ ID NO: 1150971 - DNA, 15 bp, Homo sapiens
tcagcagcccggaaa

SEQ ID NO: 1150972 - DNA, 15 bp, Homo sapiens
ttcagcagcccggaa

SEQ ID NO: 1150973 - DNA, 15 bp, Homo sapiens
tttcagcagcccgga

SEQ ID NO: 1150974 - DNA, 15 bp, Homo sapiens
gtttcagcagcccgg

SEQ ID NO: 1150975 - DNA, 15 bp, Homo sapiens
tgtttcagcagcccg

SEQ ID NO: 1150976 - DNA, 15 bp, Homo sapiens
atgtttcagcagccc

SEQ ID NO: 1150977 - DNA, 15 bp, Homo sapiens
catgtttcagcagcc

SEQ ID NO: 1150978 - DNA, 15 bp, Homo sapiens
tcatgtttcagcagc

SEQ ID NO: 1150979 - DNA, 15 bp, Homo sapiens
gtcatgtttcagcag

SEQ ID NO: 1150980 - DNA, 15 bp, Homo sapiens
tgtcatgtttcagca

SEQ ID NO: 1150981 - DNA, 15 bp, Homo sapiens
gtgtcatgtttcagc

SEQ ID NO: 1150982 - DNA, 15 bp, Homo sapiens
agtgtcatgtttcag

SEQ ID NO: 1150983 - DNA, 15 bp, Homo sapiens
tagtgtcatgtttca

SEQ ID NO: 1150984 - DNA, 15 bp, Homo sapiens
ttagtgtcatgtttc

SEQ ID NO: 1150985 - DNA, 15 bp, Homo sapiens
attagtgtcatgttt

SEQ ID NO: 1150986 - DNA, 15 bp, Homo sapiens
tattagtgtcatgtt

SEQ ID NO: 1150987 - DNA, 15 bp, Homo sapiens
atattagtgtcatgt

SEQ ID NO: 1150988 - DNA, 15 bp, Homo sapiens
aatattagtgtcatg

SEQ ID NO: 1150989 - DNA, 15 bp, Homo sapiens
aaatattagtgtcat

SEQ ID NO: 1150990 - DNA, 15 bp, Homo sapiens
aaaatattagtgtca

SEQ ID NO: 1150991 - DNA, 15 bp, Homo sapiens
gaaaatattagtgtc

SEQ ID NO: 1150992 - DNA, 15 bp, Homo sapiens
tgaaaatattagtgt

SEQ ID NO: 1150993 - DNA, 15 bp, Homo sapiens
ttgaaaatattagtg

SEQ ID NO: 1150994 - DNA, 15 bp, Homo sapiens
tttgaaaatattagt

SEQ ID NO: 1150995 - DNA, 15 bp, Homo sapiens
ctttgaaaatattag

SEQ ID NO: 1150996 - DNA, 15 bp, Homo sapiens
tctttgaaaatatta

SEQ ID NO: 1150997 - DNA, 15 bp, Homo sapiens
ttctttgaaaatatt

SEQ ID NO: 1150998 - DNA, 15 bp, Homo sapiens
gttctttgaaaatat

SEQ ID NO: 1150999 - DNA, 15 bp, Homo sapiens
agttctttgaaaata

SEQ ID NO: 1151000 - DNA, 15 bp, Homo sapiens
cagttctttgaaaat

SEQ ID NO: 1151001 - DNA, 15 bp, Homo sapiens
acagttctttgaaaa

SEQ ID NO: 1151002 - DNA, 15 bp, Homo sapiens
cacagttctttgaaa

SEQ ID NO: 1151003 - DNA, 15 bp, Homo sapiens
ccacagttctttgaa

SEQ ID NO: 1151004 - DNA, 15 bp, Homo sapiens
tccacagttctttga

SEQ ID NO: 1151005 - DNA, 15 bp, Homo sapiens
ttccacagttctttg

SEQ ID NO: 1151006 - DNA, 15 bp, Homo sapiens
cttccacagttcttt

SEQ ID NO: 1151007 - DNA, 15 bp, Homo sapiens
gcttccacagttctt

SEQ ID NO: 1151008 - DNA, 15 bp, Homo sapiens
ggcttccacagttct

SEQ ID NO: 1151009 - DNA, 15 bp, Homo sapiens
aggcttccacagttc

SEQ ID NO: 1151010 - DNA, 15 bp, Homo sapiens
taggcttccacagtt

SEQ ID NO: 1151011 - DNA, 15 bp, Homo sapiens
ttaggcttccacagt

SEQ ID NO: 1151012 - DNA, 15 bp, Homo sapiens
tttaggcttccacag

SEQ ID NO: 1151013 - DNA, 15 bp, Homo sapiens
ttttaggcttccaca

SEQ ID NO: 1151014 - DNA, 15 bp, Homo sapiens
cttttaggcttccac

SEQ ID NO: 1151015 - DNA, 15 bp, Homo sapiens
ccttttaggcttcca

SEQ ID NO: 1151016 - DNA, 15 bp, Homo sapiens
tccttttaggcttcc

SEQ ID NO: 1151017 - DNA, 15 bp, Homo sapiens
ttccttttaggcttc

SEQ ID NO: 1151018 - DNA, 15 bp, Homo sapiens
cttccttttaggctt

SEQ ID NO: 1151019 - DNA, 15 bp, Homo sapiens
gcttccttttaggct

SEQ ID NO: 1151020 - DNA, 15 bp, Homo sapiens
ggcttccttttaggc

SEQ ID NO: 1151021 - DNA, 15 bp, Homo sapiens
tggcttccttttagg

SEQ ID NO: 1151022 - DNA, 15 bp, Homo sapiens
ttggcttccttttag

SEQ ID NO: 1151023 - DNA, 15 bp, Homo sapiens
attggcttcctttta

SEQ ID NO: 1151024 - DNA, 15 bp, Homo sapiens
cattggcttcctttt

SEQ ID NO: 1151025 - DNA, 15 bp, Homo sapiens
tcattggcttccttt

SEQ ID NO: 1151026 - DNA, 15 bp, Homo sapiens
ctcattggcttcctt

SEQ ID NO: 1151027 - DNA, 15 bp, Homo sapiens
tctcattggcttcct

SEQ ID NO: 1151028 - DNA, 15 bp, Homo sapiens
ttctcattggcttcc

SEQ ID NO: 1151029 - DNA, 15 bp, Homo sapiens
tttctcattggcttc

SEQ ID NO: 1151030 - DNA, 15 bp, Homo sapiens
atttctcattggctt

SEQ ID NO: 1151031 - DNA, 15 bp, Homo sapiens
tatttctcattggct

SEQ ID NO: 1151032 - DNA, 15 bp, Homo sapiens
ttatttctcattggc

SEQ ID NO: 1151033 - DNA, 15 bp, Homo sapiens
gttatttctcattgg

SEQ ID NO: 1151034 - DNA, 15 bp, Homo sapiens
agttatttctcattg

SEQ ID NO: 1151035 - DNA, 15 bp, Homo sapiens
tagttatttctcatt

SEQ ID NO: 1151036 - DNA, 15 bp, Homo sapiens
ttagttatttctcat

SEQ ID NO: 1151037 - DNA, 15 bp, Homo sapiens
tttagttatttctca

SEQ ID NO: 1151038 - DNA, 15 bp, Homo sapiens
atttagttatttctc

SEQ ID NO: 1151039 - DNA, 15 bp, Homo sapiens
catttagttatttct

SEQ ID NO: 1151040 - DNA, 15 bp, Homo sapiens
tcatttagttatttc

SEQ ID NO: 1151041 - DNA, 15 bp, Homo sapiens
ctcatttagttattt

SEQ ID NO: 1151042 - DNA, 15 bp, Homo sapiens
tctcatttagttatt

SEQ ID NO: 1151043 - DNA, 15 bp, Homo sapiens
ctctcatttagttat

SEQ ID NO: 1151044 - DNA, 15 bp, Homo sapiens
actctcatttagtta

SEQ ID NO: 1151045 - DNA, 15 bp, Homo sapiens
aactctcatttagtt

SEQ ID NO: 1151046 - DNA, 15 bp, Homo sapiens
aaactctcatttagt

SEQ ID NO: 1151047 - DNA, 15 bp, Homo sapiens
taaactctcatttag

SEQ ID NO: 1151048 - DNA, 15 bp, Homo sapiens
ctaaactctcattta

SEQ ID NO: 1151049 - DNA, 15 bp, Homo sapiens
cctaaactctcattt

SEQ ID NO: 1151050 - DNA, 15 bp, Homo sapiens
tcctaaactctcatt

SEQ ID NO: 1151051 - DNA, 15 bp, Homo sapiens
gtcctaaactctcat

SEQ ID NO: 1151052 - DNA, 15 bp, Homo sapiens
agtcctaaactctca

SEQ ID NO: 1151053 - DNA, 15 bp, Homo sapiens
cagtcctaaactctc

SEQ ID NO: 1151054 - DNA, 15 bp, Homo sapiens
gcagtcctaaactct

SEQ ID NO: 1151055 - DNA, 15 bp, Homo sapiens
tgcagtcctaaactc

SEQ ID NO: 1151056 - DNA, 15 bp, Homo sapiens
ctgcagtcctaaact

SEQ ID NO: 1151057 - DNA, 15 bp, Homo sapiens
gctgcagtcctaaac

SEQ ID NO: 1151058 - DNA, 15 bp, Homo sapiens
ggctgcagtcctaaa

SEQ ID NO: 1151059 - DNA, 15 bp, Homo sapiens
aggctgcagtcctaa

SEQ ID NO: 1151060 - DNA, 15 bp, Homo sapiens
aaggctgcagtccta

SEQ ID NO: 1151061 - DNA, 15 bp, Homo sapiens
gaaggctgcagtcct

SEQ ID NO: 1151062 - DNA, 15 bp, Homo sapiens
tgaaggctgcagtcc

SEQ ID NO: 1151063 - DNA, 15 bp, Homo sapiens
atgaaggctgcagtc

SEQ ID NO: 1151064 - DNA, 15 bp, Homo sapiens
aatgaaggctgcagt

SEQ ID NO: 1151065 - DNA, 15 bp, Homo sapiens
aaatgaaggctgcag

SEQ ID NO: 1151066 - DNA, 15 bp, Homo sapiens
aaaatgaaggctgca

SEQ ID NO: 1151067 - DNA, 15 bp, Homo sapiens
gaaaatgaaggctgc

SEQ ID NO: 1151068 - DNA, 15 bp, Homo sapiens
tgaaaatgaaggctg

SEQ ID NO: 1151069 - DNA, 15 bp, Homo sapiens
atgaaaatgaaggct

SEQ ID NO: 1151070 - DNA, 15 bp, Homo sapiens
aatgaaaatgaaggc

SEQ ID NO: 1151071 - DNA, 15 bp, Homo sapiens
gaatgaaaatgaagg

SEQ ID NO: 1151072 - DNA, 15 bp, Homo sapiens
tgaatgaaaatgaag

SEQ ID NO: 1151073 - DNA, 15 bp, Homo sapiens
ttgaatgaaaatgaa

SEQ ID NO: 1151074 - DNA, 15 bp, Homo sapiens
tttgaatgaaaatga

SEQ ID NO: 1151075 - DNA, 15 bp, Homo sapiens
ctttgaatgaaaatg

SEQ ID NO: 1151076 - DNA, 15 bp, Homo sapiens
tctttgaatgaaaat

SEQ ID NO: 1151077 - DNA, 15 bp, Homo sapiens
atctttgaatgaaaa

SEQ ID NO: 1151078 - DNA, 15 bp, Homo sapiens
aatctttgaatgaaa

SEQ ID NO: 1151079 - DNA, 15 bp, Homo sapiens
aaatctttgaatgaa

SEQ ID NO: 1151080 - DNA, 15 bp, Homo sapiens
taaatctttgaatga

SEQ ID NO: 1151081 - DNA, 15 bp, Homo sapiens
ttaaatctttgaatg

SEQ ID NO: 1151082 - DNA, 15 bp, Homo sapiens
tttaaatctttgaat

SEQ ID NO: 1151083 - DNA, 15 bp, Homo sapiens
ttttaaatctttgaa

SEQ ID NO: 1151084 - DNA, 15 bp, Homo sapiens
cttttaaatctttga

SEQ ID NO: 1151085 - DNA, 15 bp, Homo sapiens
acttttaaatctttg

SEQ ID NO: 1151086 - DNA, 15 bp, Homo sapiens
aacttttaaatcttt

SEQ ID NO: 1151087 - DNA, 15 bp, Homo sapiens
aaacttttaaatctt

SEQ ID NO: 1151088 - DNA, 15 bp, Homo sapiens
gaaacttttaaatct

SEQ ID NO: 1151089 - DNA, 15 bp, Homo sapiens
ggaaacttttaaatc

SEQ ID NO: 1151090 - DNA, 15 bp, Homo sapiens
tggaaacttttaaat

SEQ ID NO: 1151091 - DNA, 15 bp, Homo sapiens
atggaaacttttaaa

SEQ ID NO: 1151092 - DNA, 15 bp, Homo sapiens
tatggaaacttttaa

SEQ ID NO: 1151093 - DNA, 15 bp, Homo sapiens
ttatggaaactttta

SEQ ID NO: 1151094 - DNA, 15 bp, Homo sapiens
tttatggaaactttt

SEQ ID NO: 1151095 - DNA, 15 bp, Homo sapiens
ctttatggaaacttt

SEQ ID NO: 1151096 - DNA, 15 bp, Homo sapiens
actttatggaaactt

SEQ ID NO: 1151097 - DNA, 15 bp, Homo sapiens
tactttatggaaact

SEQ ID NO: 1151098 - DNA, 15 bp, Homo sapiens
ttactttatggaaac

SEQ ID NO: 1151099 - DNA, 15 bp, Homo sapiens
tttactttatggaaa

SEQ ID NO: 1151100 - DNA, 15 bp, Homo sapiens
ttttactttatggaa

SEQ ID NO: 1151101 - DNA, 15 bp, Homo sapiens
attttactttatgga

SEQ ID NO: 1151102 - DNA, 15 bp, Homo sapiens
cattttactttatgg

SEQ ID NO: 1151103 - DNA, 15 bp, Homo sapiens
acattttactttatg

SEQ ID NO: 1151104 - DNA, 15 bp, Homo sapiens
aacattttactttat

SEQ ID NO: 1151105 - DNA, 15 bp, Homo sapiens
gaacattttacttta

SEQ ID NO: 1151106 - DNA, 15 bp, Homo sapiens
agaacattttacttt

SEQ ID NO: 1151107 - DNA, 15 bp, Homo sapiens
aagaacattttactt

SEQ ID NO: 1151108 - DNA, 15 bp, Homo sapiens
gaagaacattttact

SEQ ID NO: 1151109 - DNA, 15 bp, Homo sapiens
agaagaacattttac

SEQ ID NO: 1151110 - DNA, 15 bp, Homo sapiens
gagaagaacatttta

SEQ ID NO: 1151111 - DNA, 15 bp, Homo sapiens
ggagaagaacatttt

SEQ ID NO: 1151112 - DNA, 15 bp, Homo sapiens
cggagaagaacattt

SEQ ID NO: 1151113 - DNA, 15 bp, Homo sapiens
ccggagaagaacatt

SEQ ID NO: 1151114 - DNA, 15 bp, Homo sapiens
gccggagaagaacat

SEQ ID NO: 1151115 - DNA, 15 bp, Homo sapiens
ggccggagaagaaca

SEQ ID NO: 1151116 - DNA, 15 bp, Homo sapiens
tggccggagaagaac

SEQ ID NO: 1151117 - DNA, 15 bp, Homo sapiens
gtggccggagaagaa

SEQ ID NO: 1151118 - DNA, 15 bp, Homo sapiens
ggtggccggagaaga

SEQ ID NO: 1151119 - DNA, 15 bp, Homo sapiens
aggtggccggagaag

SEQ ID NO: 1151120 - DNA, 15 bp, Homo sapiens
caggtggccggagaa

SEQ ID NO: 1151121 - DNA, 15 bp, Homo sapiens
acaggtggccggaga

SEQ ID NO: 1151122 - DNA, 15 bp, Homo sapiens
aacaggtggccggag

SEQ ID NO: 1151123 - DNA, 15 bp, Homo sapiens
aaacaggtggccgga

SEQ ID NO: 1151124 - DNA, 15 bp, Homo sapiens
aaaacaggtggccgg

SEQ ID NO: 1151125 - DNA, 15 bp, Homo sapiens
gaaaacaggtggccg

SEQ ID NO: 1151126 - DNA, 15 bp, Homo sapiens
tgaaaacaggtggcc

SEQ ID NO: 1151127 - DNA, 15 bp, Homo sapiens
atgaaaacaggtggc

SEQ ID NO: 1151128 - DNA, 15 bp, Homo sapiens
tatgaaaacaggtgg

SEQ ID NO: 1151129 - DNA, 15 bp, Homo sapiens
ctatgaaaacaggtg

SEQ ID NO: 1151130 - DNA, 15 bp, Homo sapiens
actatgaaaacaggt

SEQ ID NO: 1151131 - DNA, 15 bp, Homo sapiens
aactatgaaaacagg

SEQ ID NO: 1151132 - DNA, 15 bp, Homo sapiens
gaactatgaaaacag

SEQ ID NO: 1151133 - DNA, 15 bp, Homo sapiens
agaactatgaaaaca

SEQ ID NO: 1151134 - DNA, 15 bp, Homo sapiens
cagaactatgaaaac

SEQ ID NO: 1151135 - DNA, 15 bp, Homo sapiens
acagaactatgaaaa

SEQ ID NO: 1151136 - DNA, 15 bp, Homo sapiens
cacagaactatgaaa

SEQ ID NO: 1151137 - DNA, 15 bp, Homo sapiens
acacagaactatgaa

SEQ ID NO: 1151138 - DNA, 15 bp, Homo sapiens
aacacagaactatga

SEQ ID NO: 1151139 - DNA, 15 bp, Homo sapiens
aaacacagaactatg

SEQ ID NO: 1151140 - DNA, 15 bp, Homo sapiens
aaaacacagaactat

SEQ ID NO: 1151141 - DNA, 15 bp, Homo sapiens
gaaaacacagaacta

SEQ ID NO: 1151142 - DNA, 15 bp, Homo sapiens
ggaaaacacagaact

SEQ ID NO: 1151143 - DNA, 15 bp, Homo sapiens
aggaaaacacagaac

SEQ ID NO: 1151144 - DNA, 15 bp, Homo sapiens
aaggaaaacacagaa

SEQ ID NO: 1151145 - DNA, 15 bp, Homo sapiens
gaaggaaaacacaga

SEQ ID NO: 1151146 - DNA, 15 bp, Homo sapiens
tgaaggaaaacacag

SEQ ID NO: 1151147 - DNA, 15 bp, Homo sapiens
ctgaaggaaaacaca

SEQ ID NO: 1151148 - DNA, 15 bp, Homo sapiens
cctgaaggaaaacac

SEQ ID NO: 1151149 - DNA, 15 bp, Homo sapiens
gcctgaaggaaaaca

SEQ ID NO: 1151150 - DNA, 15 bp, Homo sapiens
ggcctgaaggaaaac

SEQ ID NO: 1151151 - DNA, 15 bp, Homo sapiens
aggcctgaaggaaaa

SEQ ID NO: 1151152 - DNA, 15 bp, Homo sapiens
aaggcctgaaggaaa

SEQ ID NO: 1151153 - DNA, 15 bp, Homo sapiens
aaaggcctgaaggaa

SEQ ID NO: 1151154 - DNA, 15 bp, Homo sapiens
gaaaggcctgaagga

SEQ ID NO: 1151155 - DNA, 15 bp, Homo sapiens
agaaaggcctgaagg

SEQ ID NO: 1151156 - DNA, 15 bp, Homo sapiens
cagaaaggcctgaag

SEQ ID NO: 1151157 - DNA, 15 bp, Homo sapiens
ccagaaaggcctgaa

SEQ ID NO: 1151158 - DNA, 15 bp, Homo sapiens
gccagaaaggcctga

SEQ ID NO: 1151159 - DNA, 15 bp, Homo sapiens
agccagaaaggcctg

SEQ ID NO: 1151160 - DNA, 15 bp, Homo sapiens
aagccagaaaggcct

SEQ ID NO: 1151161 - DNA, 15 bp, Homo sapiens
gaagccagaaaggcc

SEQ ID NO: 1151162 - DNA, 15 bp, Homo sapiens
ggaagccagaaaggc

SEQ ID NO: 1151163 - DNA, 15 bp, Homo sapiens
aggaagccagaaagg

SEQ ID NO: 1151164 - DNA, 15 bp, Homo sapiens
taggaagccagaaag

SEQ ID NO: 1151165 - DNA, 15 bp, Homo sapiens
ataggaagccagaaa

SEQ ID NO: 1151166 - DNA, 15 bp, Homo sapiens
tataggaagccagaa

SEQ ID NO: 1151167 - DNA, 15 bp, Homo sapiens
atataggaagccaga

SEQ ID NO: 1151168 - DNA, 15 bp, Homo sapiens
catataggaagccag

SEQ ID NO: 1151169 - DNA, 15 bp, Homo sapiens
ccatataggaagcca

SEQ ID NO: 1151170 - DNA, 15 bp, Homo sapiens
gccatataggaagcc

SEQ ID NO: 1151171 - DNA, 15 bp, Homo sapiens
tgccatataggaagc

SEQ ID NO: 1151172 - DNA, 15 bp, Homo sapiens
ctgccatataggaag

SEQ ID NO: 1151173 - DNA, 15 bp, Homo sapiens
actgccatataggaa

SEQ ID NO: 1151174 - DNA, 15 bp, Homo sapiens
tactgccatatagga

SEQ ID NO: 1151175 - DNA, 15 bp, Homo sapiens
ttactgccatatagg

SEQ ID NO: 1151176 - DNA, 15 bp, Homo sapiens
cttactgccatatag

SEQ ID NO: 1151177 - DNA, 15 bp, Homo sapiens
tcttactgccatata

SEQ ID NO: 1151178 - DNA, 15 bp, Homo sapiens
ttcttactgccatat

SEQ ID NO: 1151179 - DNA, 15 bp, Homo sapiens
tttcttactgccata

SEQ ID NO: 1151180 - DNA, 15 bp, Homo sapiens
ttttcttactgccat

SEQ ID NO: 1151181 - DNA, 15 bp, Homo sapiens
attttcttactgcca

SEQ ID NO: 1151182 - DNA, 15 bp, Homo sapiens
cattttcttactgcc

SEQ ID NO: 1151183 - DNA, 15 bp, Homo sapiens
tcattttcttactgc

SEQ ID NO: 1151184 - DNA, 15 bp, Homo sapiens
atcattttcttactg

SEQ ID NO: 1151185 - DNA, 15 bp, Homo sapiens
catcattttcttact

SEQ ID NO: 1151186 - DNA, 15 bp, Homo sapiens
acatcattttcttac

SEQ ID NO: 1151187 - DNA, 15 bp, Homo sapiens
cacatcattttctta

SEQ ID NO: 1151188 - DNA, 15 bp, Homo sapiens
gcacatcattttctt

SEQ ID NO: 1151189 - DNA, 15 bp, Homo sapiens
agcacatcattttct

SEQ ID NO: 1151190 - DNA, 15 bp, Homo sapiens
aagcacatcattttc

SEQ ID NO: 1151191 - DNA, 15 bp, Homo sapiens
taagcacatcatttt

SEQ ID NO: 1151192 - DNA, 15 bp, Homo sapiens
ttaagcacatcattt

SEQ ID NO: 1151193 - DNA, 15 bp, Homo sapiens
attaagcacatcatt

SEQ ID NO: 1151194 - DNA, 15 bp, Homo sapiens
cattaagcacatcat

SEQ ID NO: 1151195 - DNA, 15 bp, Homo sapiens
tcattaagcacatca

SEQ ID NO: 1151196 - DNA, 15 bp, Homo sapiens
atcattaagcacatc

SEQ ID NO: 1151197 - DNA, 15 bp, Homo sapiens
aatcattaagcacat

SEQ ID NO: 1151198 - DNA, 15 bp, Homo sapiens
taatcattaagcaca

SEQ ID NO: 1151199 - DNA, 15 bp, Homo sapiens
gtaatcattaagcac

SEQ ID NO: 1151200 - DNA, 15 bp, Homo sapiens
tgtaatcattaagca

SEQ ID NO: 1151201 - DNA, 15 bp, Homo sapiens
ttgtaatcattaagc

SEQ ID NO: 1151202 - DNA, 15 bp, Homo sapiens
tttgtaatcattaag

SEQ ID NO: 1151203 - DNA, 15 bp, Homo sapiens
atttgtaatcattaa

SEQ ID NO: 1151204 - DNA, 15 bp, Homo sapiens
aatttgtaatcatta

SEQ ID NO: 1151205 - DNA, 15 bp, Homo sapiens
aaatttgtaatcatt

SEQ ID NO: 1151206 - DNA, 15 bp, Homo sapiens
gaaatttgtaatcat

SEQ ID NO: 1151207 - DNA, 15 bp, Homo sapiens
tgaaatttgtaatca

SEQ ID NO: 1151208 - DNA, 15 bp, Homo sapiens
atgaaatttgtaatc

SEQ ID NO: 1151209 - DNA, 15 bp, Homo sapiens
tatgaaatttgtaat

SEQ ID NO: 1151210 - DNA, 15 bp, Homo sapiens
atatgaaatttgtaa

SEQ ID NO: 1151211 - DNA, 15 bp, Homo sapiens
catatgaaatttgta

SEQ ID NO: 1151212 - DNA, 15 bp, Homo sapiens
ccatatgaaatttgt

SEQ ID NO: 1151213 - DNA, 15 bp, Homo sapiens
tccatatgaaatttg

SEQ ID NO: 1151214 - DNA, 15 bp, Homo sapiens
ttccatatgaaattt

SEQ ID NO: 1151215 - DNA, 15 bp, Homo sapiens
attccatatgaaatt

SEQ ID NO: 1151216 - DNA, 15 bp, Homo sapiens
tattccatatgaaat

SEQ ID NO: 1151217 - DNA, 15 bp, Homo sapiens
gtattccatatgaaa

SEQ ID NO: 1151218 - DNA, 15 bp, Homo sapiens
cgtattccatatgaa

SEQ ID NO: 1151219 - DNA, 15 bp, Homo sapiens
tcgtattccatatga

SEQ ID NO: 1151220 - DNA, 15 bp, Homo sapiens
ttcgtattccatatg

SEQ ID NO: 1151221 - DNA, 15 bp, Homo sapiens
gttcgtattccatat

SEQ ID NO: 1151222 - DNA, 15 bp, Homo sapiens
agttcgtattccata

SEQ ID NO: 1151223 - DNA, 15 bp, Homo sapiens
aagttcgtattccat

SEQ ID NO: 1151224 - DNA, 15 bp, Homo sapiens
aaagttcgtattcca

SEQ ID NO: 1151225 - DNA, 15 bp, Homo sapiens
gaaagttcgtattcc

SEQ ID NO: 1151226 - DNA, 15 bp, Homo sapiens
tgaaagttcgtattc

SEQ ID NO: 1151227 - DNA, 15 bp, Homo sapiens
ctgaaagttcgtatt

SEQ ID NO: 1151228 - DNA, 15 bp, Homo sapiens
actgaaagttcgtat

SEQ ID NO: 1151229 - DNA, 15 bp, Homo sapiens
aactgaaagttcgta

SEQ ID NO: 1151230 - DNA, 15 bp, Homo sapiens
aaactgaaagttcgt

SEQ ID NO: 1151231 - DNA, 15 bp, Homo sapiens
caaactgaaagttcg

SEQ ID NO: 1151232 - DNA, 15 bp, Homo sapiens
acaaactgaaagttc

SEQ ID NO: 1151233 - DNA, 15 bp, Homo sapiens
tacaaactgaaagtt

SEQ ID NO: 1151234 - DNA, 15 bp, Homo sapiens
gtacaaactgaaagt

SEQ ID NO: 1151235 - DNA, 15 bp, Homo sapiens
tgtacaaactgaaag

SEQ ID NO: 1151236 - DNA, 15 bp, Homo sapiens
atgtacaaactgaaa

SEQ ID NO: 1151237 - DNA, 15 bp, Homo sapiens
tatgtacaaactgaa

SEQ ID NO: 1151238 - DNA, 15 bp, Homo sapiens
atatgtacaaactga

SEQ ID NO: 1151239 - DNA, 15 bp, Homo sapiens
catatgtacaaactg

SEQ ID NO: 1151240 - DNA, 15 bp, Homo sapiens
tcatatgtacaaact

SEQ ID NO: 1151241 - DNA, 15 bp, Homo sapiens
atcatatgtacaaac

SEQ ID NO: 1151242 - DNA, 15 bp, Homo sapiens
catcatatgtacaaa

SEQ ID NO: 1151243 - DNA, 15 bp, Homo sapiens
gcatcatatgtacaa

SEQ ID NO: 1151244 - DNA, 15 bp, Homo sapiens
tgcatcatatgtaca

SEQ ID NO: 1151245 - DNA, 15 bp, Homo sapiens
gtgcatcatatgtac

SEQ ID NO: 1151246 - DNA, 15 bp, Homo sapiens
tgtgcatcatatgta

SEQ ID NO: 1151247 - DNA, 15 bp, Homo sapiens
ctgtgcatcatatgt

SEQ ID NO: 1151248 - DNA, 15 bp, Homo sapiens
tctgtgcatcatatg

SEQ ID NO: 1151249 - DNA, 15 bp, Homo sapiens
ctctgtgcatcatat

SEQ ID NO: 1151250 - DNA, 15 bp, Homo sapiens
tctctgtgcatcata

SEQ ID NO: 1151251 - DNA, 15 bp, Homo sapiens
atctctgtgcatcat

SEQ ID NO: 1151252 - DNA, 15 bp, Homo sapiens
catctctgtgcatca

SEQ ID NO: 1151253 - DNA, 15 bp, Homo sapiens
gcatctctgtgcatc

SEQ ID NO: 1151254 - DNA, 15 bp, Homo sapiens
agcatctctgtgcat

SEQ ID NO: 1151255 - DNA, 15 bp, Homo sapiens
aagcatctctgtgca

SEQ ID NO: 1151256 - DNA, 15 bp, Homo sapiens
aaagcatctctgtgc

SEQ ID NO: 1151257 - DNA, 15 bp, Homo sapiens
aaaagcatctctgtg

SEQ ID NO: 1151258 - DNA, 15 bp, Homo sapiens
caaaagcatctctgt

SEQ ID NO: 1151259 - DNA, 15 bp, Homo sapiens
acaaaagcatctctg

SEQ ID NO: 1151260 - DNA, 15 bp, Homo sapiens
cacaaaagcatctct

SEQ ID NO: 1151261 - DNA, 15 bp, Homo sapiens
ccacaaaagcatctc

SEQ ID NO: 1151262 - DNA, 15 bp, Homo sapiens
accacaaaagcatct

SEQ ID NO: 1151263 - DNA, 15 bp, Homo sapiens
aaaccacaaaagcat

SEQ ID NO: 1151264 - DNA, 15 bp, Homo sapiens
aaaaccacaaaagca

SEQ ID NO: 1151265 - DNA, 15 bp, Homo sapiens
taaaaccacaaaagc

SEQ ID NO: 1151266 - DNA, 15 bp, Homo sapiens
ataaaaccacaaaag

SEQ ID NO: 1151267 - DNA, 15 bp, Homo sapiens
aataaaaccacaaaa

SEQ ID NO: 1151268 - DNA, 15 bp, Homo sapiens
caataaaaccacaaa

SEQ ID NO: 1151269 - DNA, 15 bp, Homo sapiens
ccaataaaaccacaa

SEQ ID NO: 1151270 - DNA, 15 bp, Homo sapiens
accaataaaaccaca

SEQ ID NO: 1151271 - DNA, 15 bp, Homo sapiens
aaccaataaaaccac

SEQ ID NO: 1151272 - DNA, 15 bp, Homo sapiens
aaaccaataaaacca

SEQ ID NO: 1151273 - DNA, 15 bp, Homo sapiens
aaaaccaataaaacc

SEQ ID NO: 1151274 - DNA, 15 bp, Homo sapiens
gaaaaccaataaaac

SEQ ID NO: 1151275 - DNA, 15 bp, Homo sapiens
tgaaaaccaataaaa

SEQ ID NO: 1151276 - DNA, 15 bp, Homo sapiens
atgaaaaccaataaa

SEQ ID NO: 1151277 - DNA, 15 bp, Homo sapiens
tatgaaaaccaataa

SEQ ID NO: 1151278 - DNA, 15 bp, Homo sapiens
atatgaaaaccaata

SEQ ID NO: 1151279 - DNA, 15 bp, Homo sapiens
aatatgaaaaccaat

SEQ ID NO: 1151280 - DNA, 15 bp, Homo sapiens
taatatgaaaaccaa

SEQ ID NO: 1151281 - DNA, 15 bp, Homo sapiens
gtaatatgaaaacca

SEQ ID NO: 1151282 - DNA, 15 bp, Homo sapiens
tgtaatatgaaaacc

SEQ ID NO: 1151283 - DNA, 15 bp, Homo sapiens
ttgtaatatgaaaac

SEQ ID NO: 1151284 - DNA, 15 bp, Homo sapiens
tttgtaatatgaaaa

SEQ ID NO: 1151285 - DNA, 15 bp, Homo sapiens
gtttgtaatatgaaa

SEQ ID NO: 1151286 - DNA, 15 bp, Homo sapiens
tgtttgtaatatgaa

SEQ ID NO: 1151287 - DNA, 15 bp, Homo sapiens
ttgtttgtaatatga

SEQ ID NO: 1151288 - DNA, 15 bp, Homo sapiens
tttgtttgtaatatg

SEQ ID NO: 1151289 - DNA, 15 bp, Homo sapiens
ctttgtttgtaatat

SEQ ID NO: 1151290 - DNA, 15 bp, Homo sapiens
tctttgtttgtaata

SEQ ID NO: 1151291 - DNA, 15 bp, Homo sapiens
ttctttgtttgtaat

SEQ ID NO: 1151292 - DNA, 15 bp, Homo sapiens
tttctttgtttgtaa

SEQ ID NO: 1151293 - DNA, 15 bp, Homo sapiens
gtttctttgtttgta

SEQ ID NO: 1151294 - DNA, 15 bp, Homo sapiens
agtttctttgtttgt

SEQ ID NO: 1151295 - DNA, 15 bp, Homo sapiens
tagtttctttgtttg

SEQ ID NO: 1151296 - DNA, 15 bp, Homo sapiens
ctagtttctttgttt

SEQ ID NO: 1151297 - DNA, 15 bp, Homo sapiens
tctagtttctttgtt

SEQ ID NO: 1151298 - DNA, 15 bp, Homo sapiens
ttctagtttctttgt

SEQ ID NO: 1151299 - DNA, 15 bp, Homo sapiens
tttctagtttctttg

SEQ ID NO: 1151300 - DNA, 15 bp, Homo sapiens
ttttctagtttcttt

SEQ ID NO: 1151301 - DNA, 15 bp, Homo sapiens
attttctagtttctt

SEQ ID NO: 1151302 - DNA, 15 bp, Homo sapiens
cattttctagtttct

SEQ ID NO: 1151303 - DNA, 15 bp, Homo sapiens
tcattttctagtttc

SEQ ID NO: 1151304 - DNA, 15 bp, Homo sapiens
ttcattttctagttt

SEQ ID NO: 1151305 - DNA, 15 bp, Homo sapiens
tttcattttctagtt

SEQ ID NO: 1151306 - DNA, 15 bp, Homo sapiens
gtttcattttctagt

SEQ ID NO: 1151307 - DNA, 15 bp, Homo sapiens
ggtttcattttctag

SEQ ID NO: 1151308 - DNA, 15 bp, Homo sapiens
tggtttcattttcta

SEQ ID NO: 1151309 - DNA, 15 bp, Homo sapiens
atggtttcattttct

SEQ ID NO: 1151310 - DNA, 15 bp, Homo sapiens
aatggtttcattttc

SEQ ID NO: 1151311 - DNA, 15 bp, Homo sapiens
gaatggtttcatttt

SEQ ID NO: 1151312 - DNA, 15 bp, Homo sapiens
ggaatggtttcattt

SEQ ID NO: 1151313 - DNA, 15 bp, Homo sapiens
tggaatggtttcatt

SEQ ID NO: 1151314 - DNA, 15 bp, Homo sapiens
ttggaatggtttcat

SEQ ID NO: 1151315 - DNA, 15 bp, Homo sapiens
tttggaatggtttca

SEQ ID NO: 1151316 - DNA, 15 bp, Homo sapiens
ttttggaatggtttc

SEQ ID NO: 1151317 - DNA, 15 bp, Homo sapiens
cttttggaatggttt

SEQ ID NO: 1151318 - DNA, 15 bp, Homo sapiens
acttttggaatggtt

SEQ ID NO: 1151319 - DNA, 15 bp, Homo sapiens
cacttttggaatggt

SEQ ID NO: 1151320 - DNA, 15 bp, Homo sapiens
ccacttttggaatgg

SEQ ID NO: 1151321 - DNA, 15 bp, Homo sapiens
tccacttttggaatg

SEQ ID NO: 1151322 - DNA, 15 bp, Homo sapiens
ttccacttttggaat

SEQ ID NO: 1151323 - DNA, 15 bp, Homo sapiens
cttccacttttggaa

SEQ ID NO: 1151324 - DNA, 15 bp, Homo sapiens
acttccacttttgga

SEQ ID NO: 1151325 - DNA, 15 bp, Homo sapiens
tacttccacttttgg

SEQ ID NO: 1151326 - DNA, 15 bp, Homo sapiens
ttacttccacttttg

SEQ ID NO: 1151327 - DNA, 15 bp, Homo sapiens
attacttccactttt

SEQ ID NO: 1151328 - DNA, 15 bp, Homo sapiens
aattacttccacttt

SEQ ID NO: 1151329 - DNA, 15 bp, Homo sapiens
aaattacttccactt

SEQ ID NO: 1151330 - DNA, 15 bp, Homo sapiens
gaaattacttccact

SEQ ID NO: 1151331 - DNA, 15 bp, Homo sapiens
agaaattacttccac

SEQ ID NO: 1151332 - DNA, 15 bp, Homo sapiens
gagaaattacttcca

SEQ ID NO: 1151333 - DNA, 15 bp, Homo sapiens
tgagaaattacttcc

SEQ ID NO: 1151334 - DNA, 15 bp, Homo sapiens
gtgagaaattacttc

SEQ ID NO: 1151335 - DNA, 15 bp, Homo sapiens
agtgagaaattactt

SEQ ID NO: 1151336 - DNA, 15 bp, Homo sapiens
cagtgagaaattact

SEQ ID NO: 1151337 - DNA, 15 bp, Homo sapiens
gcagtgagaaattac

SEQ ID NO: 1151338 - DNA, 15 bp, Homo sapiens
ggcagtgagaaatta

SEQ ID NO: 1151339 - DNA, 15 bp, Homo sapiens
gggcagtgagaaatt

SEQ ID NO: 1151340 - DNA, 15 bp, Homo sapiens
ggggcagtgagaaat

SEQ ID NO: 1151341 - DNA, 15 bp, Homo sapiens
aggggcagtgagaaa

SEQ ID NO: 1151342 - DNA, 15 bp, Homo sapiens
caggggcagtgagaa

SEQ ID NO: 1151343 - DNA, 15 bp, Homo sapiens
acaggggcagtgaga

SEQ ID NO: 1151344 - DNA, 15 bp, Homo sapiens
cacaggggcagtgag

SEQ ID NO: 1151345 - DNA, 15 bp, Homo sapiens
tcacaggggcagtga

SEQ ID NO: 1151346 - DNA, 15 bp, Homo sapiens
atcacaggggcagtg

SEQ ID NO: 1151347 - DNA, 15 bp, Homo sapiens
tatcacaggggcagt

SEQ ID NO: 1151348 - DNA, 15 bp, Homo sapiens
ttatcacaggggcag

SEQ ID NO: 1151349 - DNA, 15 bp, Homo sapiens
tttatcacaggggca

SEQ ID NO: 1151350 - DNA, 15 bp, Homo sapiens
gtttatcacaggggc

SEQ ID NO: 1151351 - DNA, 15 bp, Homo sapiens
agtttatcacagggg

SEQ ID NO: 1151352 - DNA, 15 bp, Homo sapiens
cagtttatcacaggg

SEQ ID NO: 1151353 - DNA, 15 bp, Homo sapiens
acagtttatcacagg

SEQ ID NO: 1151354 - DNA, 15 bp, Homo sapiens
cacagtttatcacag

SEQ ID NO: 1151355 - DNA, 15 bp, Homo sapiens
ccacagtttatcaca

SEQ ID NO: 1151356 - DNA, 15 bp, Homo sapiens
accacagtttatcac

SEQ ID NO: 1151357 - DNA, 15 bp, Homo sapiens
gaccacagtttatca

SEQ ID NO: 1151358 - DNA, 15 bp, Homo sapiens
tgaccacagtttatc

SEQ ID NO: 1151359 - DNA, 15 bp, Homo sapiens
gtgaccacagtttat

SEQ ID NO: 1151360 - DNA, 15 bp, Homo sapiens
agtgaccacagttta

SEQ ID NO: 1151361 - DNA, 15 bp, Homo sapiens
cagtgaccacagttt

SEQ ID NO: 1151362 - DNA, 15 bp, Homo sapiens
ccagtgaccacagtt

SEQ ID NO: 1151363 - DNA, 15 bp, Homo sapiens
gccagtgaccacagt

SEQ ID NO: 1151364 - DNA, 15 bp, Homo sapiens
agccagtgaccacag

SEQ ID NO: 1151365 - DNA, 15 bp, Homo sapiens
cagccagtgaccaca

SEQ ID NO: 1151366 - DNA, 15 bp, Homo sapiens
acagccagtgaccac

SEQ ID NO: 1151367 - DNA, 15 bp, Homo sapiens
cacagccagtgacca

SEQ ID NO: 1151368 - DNA, 15 bp, Homo sapiens
ccacagccagtgacc

SEQ ID NO: 1151369 - DNA, 15 bp, Homo sapiens
gccacagccagtgac

SEQ ID NO: 1151370 - DNA, 15 bp, Homo sapiens
tgccacagccagtga

SEQ ID NO: 1151371 - DNA, 15 bp, Homo sapiens
ctgccacagccagtg

SEQ ID NO: 1151372 - DNA, 15 bp, Homo sapiens
gctgccacagccagt

SEQ ID NO: 1151373 - DNA, 15 bp, Homo sapiens
tgctgccacagccag

SEQ ID NO: 1151374 - DNA, 15 bp, Homo sapiens
ttgctgccacagcca

SEQ ID NO: 1151375 - DNA, 15 bp, Homo sapiens
gttgctgccacagcc

SEQ ID NO: 1151376 - DNA, 15 bp, Homo sapiens
agttgctgccacagc

SEQ ID NO: 1151377 - DNA, 15 bp, Homo sapiens
tagttgctgccacag

SEQ ID NO: 1151378 - DNA, 15 bp, Homo sapiens
atagttgctgccaca

SEQ ID NO: 1151379 - DNA, 15 bp, Homo sapiens
aatagttgctgccac

SEQ ID NO: 1151380 - DNA, 15 bp, Homo sapiens
taatagttgctgcca

SEQ ID NO: 1151381 - DNA, 15 bp, Homo sapiens
ataatagttgctgcc

SEQ ID NO: 1151382 - DNA, 15 bp, Homo sapiens
tataatagttgctgc

SEQ ID NO: 1151383 - DNA, 15 bp, Homo sapiens
ttataatagttgctg

SEQ ID NO: 1151384 - DNA, 15 bp, Homo sapiens
cttataatagttgct

SEQ ID NO: 1151385 - DNA, 15 bp, Homo sapiens
tcttataatagttgc

SEQ ID NO: 1151386 - DNA, 15 bp, Homo sapiens
atcttataatagttg

SEQ ID NO: 1151387 - DNA, 15 bp, Homo sapiens
catcttataatagtt

SEQ ID NO: 1151388 - DNA, 15 bp, Homo sapiens
gcatcttataatagt

SEQ ID NO: 1151389 - DNA, 15 bp, Homo sapiens
agcatcttataatag

SEQ ID NO: 1151390 - DNA, 15 bp, Homo sapiens
gagcatcttataata

SEQ ID NO: 1151391 - DNA, 15 bp, Homo sapiens
agagcatcttataat

SEQ ID NO: 1151392 - DNA, 15 bp, Homo sapiens
cagagcatcttataa

SEQ ID NO: 1151393 - DNA, 15 bp, Homo sapiens
tcagagcatcttata

SEQ ID NO: 1151394 - DNA, 15 bp, Homo sapiens
ttcagagcatcttat

SEQ ID NO: 1151395 - DNA, 15 bp, Homo sapiens
tttcagagcatctta

SEQ ID NO: 1151396 - DNA, 15 bp, Homo sapiens
ttttcagagcatctt

SEQ ID NO: 1151397 - DNA, 15 bp, Homo sapiens
gttttcagagcatct

SEQ ID NO: 1151398 - DNA, 15 bp, Homo sapiens
agttttcagagcatc

SEQ ID NO: 1151399 - DNA, 15 bp, Homo sapiens
gagttttcagagcat

SEQ ID NO: 1151400 - DNA, 15 bp, Homo sapiens
agagttttcagagca

SEQ ID NO: 1151401 - DNA, 15 bp, Homo sapiens
aagagttttcagagc

SEQ ID NO: 1151402 - DNA, 15 bp, Homo sapiens
gaagagttttcagag

SEQ ID NO: 1151403 - DNA, 15 bp, Homo sapiens
tgaagagttttcaga

SEQ ID NO: 1151404 - DNA, 15 bp, Homo sapiens
ctgaagagttttcag

SEQ ID NO: 1151405 - DNA, 15 bp, Homo sapiens
tctgaagagttttca

SEQ ID NO: 1151406 - DNA, 15 bp, Homo sapiens
gtctgaagagttttc

SEQ ID NO: 1151407 - DNA, 15 bp, Homo sapiens
tgtctgaagagtttt

SEQ ID NO: 1151408 - DNA, 15 bp, Homo sapiens
gtgtctgaagagttt

SEQ ID NO: 1151409 - DNA, 15 bp, Homo sapiens
agtgtctgaagagtt

SEQ ID NO: 1151410 - DNA, 15 bp, Homo sapiens
cagtgtctgaagagt

SEQ ID NO: 1151411 - DNA, 15 bp, Homo sapiens
tcagtgtctgaagag

SEQ ID NO: 1151412 - DNA, 15 bp, Homo sapiens
ctcagtgtctgaaga

SEQ ID NO: 1151413 - DNA, 15 bp, Homo sapiens
cctcagtgtctgaag

SEQ ID NO: 1151414 - DNA, 15 bp, Homo sapiens
ccctcagtgtctgaa

SEQ ID NO: 1151415 - DNA, 15 bp, Homo sapiens
cccctcagtgtctga

SEQ ID NO: 1151416 - DNA, 15 bp, Homo sapiens
gcccctcagtgtctg

SEQ ID NO: 1151417 - DNA, 15 bp, Homo sapiens
tgcccctcagtgtct

SEQ ID NO: 1151418 - DNA, 15 bp, Homo sapiens
gtgcccctcagtgtc

SEQ ID NO: 1151419 - DNA, 15 bp, Homo sapiens
ggtgcccctcagtgt

SEQ ID NO: 1151420 - DNA, 15 bp, Homo sapiens
tggtgcccctcagtg

SEQ ID NO: 1151421 - DNA, 15 bp, Homo sapiens
ctggtgcccctcagt

SEQ ID NO: 1151422 - DNA, 15 bp, Homo sapiens
tctggtgcccctcag

SEQ ID NO: 1151423 - DNA, 15 bp, Homo sapiens
ctctggtgcccctca

SEQ ID NO: 1151424 - DNA, 15 bp, Homo sapiens
cctctggtgcccctc

SEQ ID NO: 1151425 - DNA, 15 bp, Homo sapiens
tcctctggtgcccct

SEQ ID NO: 1151426 - DNA, 15 bp, Homo sapiens
ctcctctggtgcccc

SEQ ID NO: 1151427 - DNA, 15 bp, Homo sapiens
gctcctctggtgccc

SEQ ID NO: 1151428 - DNA, 15 bp, Homo sapiens
tgctcctctggtgcc

SEQ ID NO: 1151429 - DNA, 15 bp, Homo sapiens
ctgctcctctggtgc

SEQ ID NO: 1151430 - DNA, 15 bp, Homo sapiens
tctgctcctctggtg

SEQ ID NO: 1151431 - DNA, 15 bp, Homo sapiens
gtctgctcctctggt

SEQ ID NO: 1151432 - DNA, 15 bp, Homo sapiens
agtctgctcctctgg

SEQ ID NO: 1151433 - DNA, 15 bp, Homo sapiens
tagtctgctcctctg

SEQ ID NO: 1151434 - DNA, 15 bp, Homo sapiens
gtagtctgctcctct

SEQ ID NO: 1151435 - DNA, 15 bp, Homo sapiens
tgtagtctgctcctc

SEQ ID NO: 1151436 - DNA, 15 bp, Homo sapiens
ttgtagtctgctcct

SEQ ID NO: 1151437 - DNA, 15 bp, Homo sapiens
cttgtagtctgctcc

SEQ ID NO: 1151438 - DNA, 15 bp, Homo sapiens
tcttgtagtctgctc

SEQ ID NO: 1151439 - DNA, 15 bp, Homo sapiens
ttcttgtagtctgct

SEQ ID NO: 1151440 - DNA, 15 bp, Homo sapiens
attcttgtagtctgc

SEQ ID NO: 1151441 - DNA, 15 bp, Homo sapiens
cattcttgtagtctg

SEQ ID NO: 1151442 - DNA, 15 bp, Homo sapiens
ccattcttgtagtct

SEQ ID NO: 1151443 - DNA, 15 bp, Homo sapiens
gccattcttgtagtc

SEQ ID NO: 1151444 - DNA, 15 bp, Homo sapiens
tgccattcttgtagt

SEQ ID NO: 1151445 - DNA, 15 bp, Homo sapiens
gtgccattcttgtag

SEQ ID NO: 1151446 - DNA, 15 bp, Homo sapiens
tgtgccattcttgta

SEQ ID NO: 1151447 - DNA, 15 bp, Homo sapiens
gtgtgccattcttgt

SEQ ID NO: 1151448 - DNA, 15 bp, Homo sapiens
cgtgtgccattcttg

SEQ ID NO: 1151449 - DNA, 15 bp, Homo sapiens
gcgtgtgccattctt

SEQ ID NO: 1151450 - DNA, 15 bp, Homo sapiens
agcgtgtgccattct

SEQ ID NO: 1151451 - DNA, 15 bp, Homo sapiens
tagcgtgtgccattc

SEQ ID NO: 1151452 - DNA, 15 bp, Homo sapiens
atagcgtgtgccatt

SEQ ID NO: 1151453 - DNA, 15 bp, Homo sapiens
catagcgtgtgccat

SEQ ID NO: 1151454 - DNA, 15 bp, Homo sapiens
ccatagcgtgtgcca

SEQ ID NO: 1151455 - DNA, 15 bp, Homo sapiens
tccatagcgtgtgcc

SEQ ID NO: 1151456 - DNA, 15 bp, Homo sapiens
ttccatagcgtgtgc

SEQ ID NO: 1151457 - DNA, 15 bp, Homo sapiens
tttccatagcgtgtg

SEQ ID NO: 1151458 - DNA, 15 bp, Homo sapiens
ttttccatagcgtgt

SEQ ID NO: 1151459 - DNA, 15 bp, Homo sapiens
gttttccatagcgtg

SEQ ID NO: 1151460 - DNA, 15 bp, Homo sapiens
agttttccatagcgt

SEQ ID NO: 1151461 - DNA, 15 bp, Homo sapiens
gagttttccatagcg

SEQ ID NO: 1151462 - DNA, 15 bp, Homo sapiens
ggagttttccatagc

SEQ ID NO: 1151463 - DNA, 15 bp, Homo sapiens
aggagttttccatag

SEQ ID NO: 1151464 - DNA, 15 bp, Homo sapiens
caggagttttccata

SEQ ID NO: 1151465 - DNA, 15 bp, Homo sapiens
ccaggagttttccat

SEQ ID NO: 1151466 - DNA, 15 bp, Homo sapiens
tccaggagttttcca

SEQ ID NO: 1151467 - DNA, 15 bp, Homo sapiens
gtccaggagttttcc

SEQ ID NO: 1151468 - DNA, 15 bp, Homo sapiens
tgtccaggagttttc

SEQ ID NO: 1151469 - DNA, 15 bp, Homo sapiens
ttgtccaggagtttt

SEQ ID NO: 1151470 - DNA, 15 bp, Homo sapiens
attgtccaggagttt

SEQ ID NO: 1151471 - DNA, 15 bp, Homo sapiens
gattgtccaggagtt

SEQ ID NO: 1151472 - DNA, 15 bp, Homo sapiens
tgattgtccaggagt

SEQ ID NO: 1151473 - DNA, 15 bp, Homo sapiens
ctgattgtccaggag

SEQ ID NO: 1151474 - DNA, 15 bp, Homo sapiens
actgattgtccagga

SEQ ID NO: 1151475 - DNA, 15 bp, Homo sapiens
tactgattgtccagg

SEQ ID NO: 1151476 - DNA, 15 bp, Homo sapiens
ttactgattgtccag

SEQ ID NO: 1151477 - DNA, 15 bp, Homo sapiens
tttactgattgtcca

SEQ ID NO: 1151478 - DNA, 15 bp, Homo sapiens
ctttactgattgtcc

SEQ ID NO: 1151479 - DNA, 15 bp, Homo sapiens
tctttactgattgtc

SEQ ID NO: 1151480 - DNA, 15 bp, Homo sapiens
ctctttactgattgt

SEQ ID NO: 1151481 - DNA, 15 bp, Homo sapiens
actctttactgattg

SEQ ID NO: 1151482 - DNA, 15 bp, Homo sapiens
tactctttactgatt

SEQ ID NO: 1151483 - DNA, 15 bp, Homo sapiens
gtactctttactgat

SEQ ID NO: 1151484 - DNA, 15 bp, Homo sapiens
ggtactctttactga

SEQ ID NO: 1151485 - DNA, 15 bp, Homo sapiens
tggtactctttactg

SEQ ID NO: 1151486 - DNA, 15 bp, Homo sapiens
atggtactctttact

SEQ ID NO: 1151487 - DNA, 15 bp, Homo sapiens
tatggtactctttac

SEQ ID NO: 1151488 - DNA, 15 bp, Homo sapiens
atatggtactcttta

SEQ ID NO: 1151489 - DNA, 15 bp, Homo sapiens
aatatggtactcttt

SEQ ID NO: 1151490 - DNA, 15 bp, Homo sapiens
caatatggtactctt

SEQ ID NO: 1151491 - DNA, 15 bp, Homo sapiens
tcaatatggtactct

SEQ ID NO: 1151492 - DNA, 15 bp, Homo sapiens
atcaatatggtactc

SEQ ID NO: 1151493 - DNA, 15 bp, Homo sapiens
catcaatatggtact

SEQ ID NO: 1151494 - DNA, 15 bp, Homo sapiens
tcatcaatatggtac

SEQ ID NO: 1151495 - DNA, 15 bp, Homo sapiens
ttcatcaatatggta

SEQ ID NO: 1151496 - DNA, 15 bp, Homo sapiens
cttcatcaatatggt

SEQ ID NO: 1151497 - DNA, 15 bp, Homo sapiens
tcttcatcaatatgg

SEQ ID NO: 1151498 - DNA, 15 bp, Homo sapiens
ttcttcatcaatatg

SEQ ID NO: 1151499 - DNA, 15 bp, Homo sapiens
cttcttcatcaatat

SEQ ID NO: 1151500 - DNA, 15 bp, Homo sapiens
acttcttcatcaata

SEQ ID NO: 1151501 - DNA, 15 bp, Homo sapiens
cacttcttcatcaat

SEQ ID NO: 1151502 - DNA, 15 bp, Homo sapiens
ccacttcttcatcaa

SEQ ID NO: 1151503 - DNA, 15 bp, Homo sapiens
cccacttcttcatca

SEQ ID NO: 1151504 - DNA, 15 bp, Homo sapiens
gcccacttcttcatc

SEQ ID NO: 1151505 - DNA, 15 bp, Homo sapiens
agcccacttcttcat

SEQ ID NO: 1151506 - DNA, 15 bp, Homo sapiens
aagcccacttcttca

SEQ ID NO: 1151507 - DNA, 15 bp, Homo sapiens
aaagcccacttcttc

SEQ ID NO: 1151508 - DNA, 15 bp, Homo sapiens
caaagcccacttctt

SEQ ID NO: 1151509 - DNA, 15 bp, Homo sapiens
gcaaagcccacttct

SEQ ID NO: 1151510 - DNA, 15 bp, Homo sapiens
agcaaagcccacttc

SEQ ID NO: 1151511 - DNA, 15 bp, Homo sapiens
gagcaaagcccactt

SEQ ID NO: 1151512 - DNA, 15 bp, Homo sapiens
agagcaaagcccact

SEQ ID NO: 1151513 - DNA, 15 bp, Homo sapiens
cagagcaaagcccac

SEQ ID NO: 1151514 - DNA, 15 bp, Homo sapiens
gcagagcaaagccca

SEQ ID NO: 1151515 - DNA, 15 bp, Homo sapiens
ggcagagcaaagccc

SEQ ID NO: 1151516 - DNA, 15 bp, Homo sapiens
tggcagagcaaagcc

SEQ ID NO: 1151517 - DNA, 15 bp, Homo sapiens
ttggcagagcaaagc

SEQ ID NO: 1151518 - DNA, 15 bp, Homo sapiens
tttggcagagcaaag

SEQ ID NO: 1151519 - DNA, 15 bp, Homo sapiens
atttggcagagcaaa

SEQ ID NO: 1151520 - DNA, 15 bp, Homo sapiens
gatttggcagagcaa

SEQ ID NO: 1151521 - DNA, 15 bp, Homo sapiens
ggatttggcagagca

SEQ ID NO: 1151522 - DNA, 15 bp, Homo sapiens
tggatttggcagagc

SEQ ID NO: 1151523 - DNA, 15 bp, Homo sapiens
gtggatttggcagag

SEQ ID NO: 1151524 - DNA, 15 bp, Homo sapiens
tgtggatttggcaga

SEQ ID NO: 1151525 - DNA, 15 bp, Homo sapiens
ctgtggatttggcag

SEQ ID NO: 1151526 - DNA, 15 bp, Homo sapiens
cctgtggatttggca

SEQ ID NO: 1151527 - DNA, 15 bp, Homo sapiens
acctgtggatttggc

SEQ ID NO: 1151528 - DNA, 15 bp, Homo sapiens
tacctgtggatttgg

SEQ ID NO: 1151529 - DNA, 15 bp, Homo sapiens
ttacctgtggatttg

SEQ ID NO: 1151530 - DNA, 15 bp, Homo sapiens
cttacctgtggattt

SEQ ID NO: 1151531 - DNA, 15 bp, Homo sapiens
tcttacctgtggatt

SEQ ID NO: 1151532 - DNA, 15 bp, Homo sapiens
ctcttacctgtggat

SEQ ID NO: 1151533 - DNA, 15 bp, Homo sapiens
tctcttacctgtgga

SEQ ID NO: 1151534 - DNA, 15 bp, Homo sapiens
ttctcttacctgtgg

SEQ ID NO: 1151535 - DNA, 15 bp, Homo sapiens
cttctcttacctgtg

SEQ ID NO: 1151536 - DNA, 15 bp, Homo sapiens
ccttctcttacctgt

SEQ ID NO: 1151537 - DNA, 15 bp, Homo sapiens
gccttctcttacctg

SEQ ID NO: 1151538 - DNA, 15 bp, Homo sapiens
tgccttctcttacct

SEQ ID NO: 1151539 - DNA, 15 bp, Homo sapiens
ctgccttctcttacc

SEQ ID NO: 1151540 - DNA, 15 bp, Homo sapiens
actgccttctcttac

SEQ ID NO: 1151541 - DNA, 15 bp, Homo sapiens
tactgccttctctta

SEQ ID NO: 1151542 - DNA, 15 bp, Homo sapiens
ttactgccttctctt

SEQ ID NO: 1151543 - DNA, 15 bp, Homo sapiens
tttactgccttctct

SEQ ID NO: 1151544 - DNA, 15 bp, Homo sapiens
ttttactgccttctc

SEQ ID NO: 1151545 - DNA, 15 bp, Homo sapiens
attttactgccttct

SEQ ID NO: 1151546 - DNA, 15 bp, Homo sapiens
cattttactgccttc

SEQ ID NO: 1151547 - DNA, 15 bp, Homo sapiens
acattttactgcctt

SEQ ID NO: 1151548 - DNA, 15 bp, Homo sapiens
cacattttactgcct

SEQ ID NO: 1151549 - DNA, 15 bp, Homo sapiens
ccacattttactgcc

SEQ ID NO: 1151550 - DNA, 15 bp, Homo sapiens
cccacattttactgc

SEQ ID NO: 1151551 - DNA, 15 bp, Homo sapiens
tcccacattttactg

SEQ ID NO: 1151552 - DNA, 15 bp, Homo sapiens
ttcccacattttact

SEQ ID NO: 1151553 - DNA, 15 bp, Homo sapiens
tttcccacattttac

SEQ ID NO: 1151554 - DNA, 15 bp, Homo sapiens
ttttcccacatttta

SEQ ID NO: 1151555 - DNA, 15 bp, Homo sapiens
attttcccacatttt

SEQ ID NO: 1151556 - DNA, 15 bp, Homo sapiens
cattttcccacattt

SEQ ID NO: 1151557 - DNA, 15 bp, Homo sapiens
gcattttcccacatt

SEQ ID NO: 1151558 - DNA, 15 bp, Homo sapiens
tgcattttcccacat

SEQ ID NO: 1151559 - DNA, 15 bp, Homo sapiens
atgcattttcccaca

SEQ ID NO: 1151560 - DNA, 15 bp, Homo sapiens
aatgcattttcccac

SEQ ID NO: 1151561 - DNA, 15 bp, Homo sapiens
gaatgcattttccca

SEQ ID NO: 1151562 - DNA, 15 bp, Homo sapiens
agaatgcattttccc

SEQ ID NO: 1151563 - DNA, 15 bp, Homo sapiens
aagaatgcattttcc

SEQ ID NO: 1151564 - DNA, 15 bp, Homo sapiens
gaagaatgcattttc

SEQ ID NO: 1151565 - DNA, 15 bp, Homo sapiens
agaagaatgcatttt

SEQ ID NO: 1151566 - DNA, 15 bp, Homo sapiens
aagaagaatgcattt

SEQ ID NO: 1151567 - DNA, 15 bp, Homo sapiens
gaagaagaatgcatt

SEQ ID NO: 1151568 - DNA, 15 bp, Homo sapiens
agaagaagaatgcat

SEQ ID NO: 1151569 - DNA, 15 bp, Homo sapiens
gagaagaagaatgca

SEQ ID NO: 1151570 - DNA, 15 bp, Homo sapiens
tgagaagaagaatgc

SEQ ID NO: 1151571 - DNA, 15 bp, Homo sapiens
atgagaagaagaatg

SEQ ID NO: 1151572 - DNA, 15 bp, Homo sapiens
aatgagaagaagaat

SEQ ID NO: 1151573 - DNA, 15 bp, Homo sapiens
gaatgagaagaagaa

SEQ ID NO: 1151574 - DNA, 15 bp, Homo sapiens
ggaatgagaagaaga

SEQ ID NO: 1151575 - DNA, 15 bp, Homo sapiens
aggaatgagaagaag

SEQ ID NO: 1151576 - DNA, 15 bp, Homo sapiens
aaggaatgagaagaa

SEQ ID NO: 1151577 - DNA, 15 bp, Homo sapiens
taaggaatgagaaga

SEQ ID NO: 1151578 - DNA, 15 bp, Homo sapiens
gtaaggaatgagaag

SEQ ID NO: 1151579 - DNA, 15 bp, Homo sapiens
ggtaaggaatgagaa

SEQ ID NO: 1151580 - DNA, 15 bp, Homo sapiens
aggtaaggaatgaga

SEQ ID NO: 1151581 - DNA, 15 bp, Homo sapiens
caggtaaggaatgag

SEQ ID NO: 1151582 - DNA, 15 bp, Homo sapiens
ccaggtaaggaatga

SEQ ID NO: 1151583 - DNA, 15 bp, Homo sapiens
gccaggtaaggaatg

SEQ ID NO: 1151584 - DNA, 15 bp, Homo sapiens
ggccaggtaaggaat

SEQ ID NO: 1151585 - DNA, 15 bp, Homo sapiens
tggccaggtaaggaa

SEQ ID NO: 1151586 - DNA, 15 bp, Homo sapiens
ttggccaggtaagga

SEQ ID NO: 1151587 - DNA, 15 bp, Homo sapiens
cttggccaggtaagg

SEQ ID NO: 1151588 - DNA, 15 bp, Homo sapiens
acttggccaggtaag

SEQ ID NO: 1151589 - DNA, 15 bp, Homo sapiens
aacttggccaggtaa

SEQ ID NO: 1151590 - DNA, 15 bp, Homo sapiens
taacttggccaggta

SEQ ID NO: 1151591 - DNA, 15 bp, Homo sapiens
ttaacttggccaggt

SEQ ID NO: 1151592 - DNA, 15 bp, Homo sapiens
gttaacttggccagg

SEQ ID NO: 1151593 - DNA, 15 bp, Homo sapiens
agttaacttggccag

SEQ ID NO: 1151594 - DNA, 15 bp, Homo sapiens
aagttaacttggcca

SEQ ID NO: 1151595 - DNA, 15 bp, Homo sapiens
gaagttaacttggcc

SEQ ID NO: 1151596 - DNA, 15 bp, Homo sapiens
agaagttaacttggc

SEQ ID NO: 1151597 - DNA, 15 bp, Homo sapiens
tagaagttaacttgg

SEQ ID NO: 1151598 - DNA, 15 bp, Homo sapiens
gtagaagttaacttg

SEQ ID NO: 1151599 - DNA, 15 bp, Homo sapiens
agtagaagttaactt

SEQ ID NO: 1151600 - DNA, 15 bp, Homo sapiens
cagtagaagttaact

SEQ ID NO: 1151601 - DNA, 15 bp, Homo sapiens
tcagtagaagttaac

SEQ ID NO: 1151602 - DNA, 15 bp, Homo sapiens
ttcagtagaagttaa

SEQ ID NO: 1151603 - DNA, 15 bp, Homo sapiens
gttcagtagaagtta

SEQ ID NO: 1151604 - DNA, 15 bp, Homo sapiens
tgttcagtagaagtt

SEQ ID NO: 1151605 - DNA, 15 bp, Homo sapiens
ttgttcagtagaagt

SEQ ID NO: 1151606 - DNA, 15 bp, Homo sapiens
gttgttcagtagaag

SEQ ID NO: 1151607 - DNA, 15 bp, Homo sapiens
agttgttcagtagaa

SEQ ID NO: 1151608 - DNA, 15 bp, Homo sapiens
cagttgttcagtaga

SEQ ID NO: 1151609 - DNA, 15 bp, Homo sapiens
acagttgttcagtag

SEQ ID NO: 1151610 - DNA, 15 bp, Homo sapiens
cacagttgttcagta

SEQ ID NO: 1151611 - DNA, 15 bp, Homo sapiens
ccacagttgttcagt

SEQ ID NO: 1151612 - DNA, 15 bp, Homo sapiens
accacagttgttcag

SEQ ID NO: 1151613 - DNA, 15 bp, Homo sapiens
aaccacagttgttca

SEQ ID NO: 1151614 - DNA, 15 bp, Homo sapiens
gaaccacagttgttc

SEQ ID NO: 1151615 - DNA, 15 bp, Homo sapiens
tgaaccacagttgtt

SEQ ID NO: 1151616 - DNA, 15 bp, Homo sapiens
ctgaaccacagttgt

SEQ ID NO: 1151617 - DNA, 15 bp, Homo sapiens
actgaaccacagttg

SEQ ID NO: 1151618 - DNA, 15 bp, Homo sapiens
tactgaaccacagtt

SEQ ID NO: 1151619 - DNA, 15 bp, Homo sapiens
ttactgaaccacagt

SEQ ID NO: 1151620 - DNA, 15 bp, Homo sapiens
gttactgaaccacag

SEQ ID NO: 1151621 - DNA, 15 bp, Homo sapiens
agttactgaaccaca

SEQ ID NO: 1151622 - DNA, 15 bp, Homo sapiens
aagttactgaaccac

SEQ ID NO: 1151623 - DNA, 15 bp, Homo sapiens
gaagttactgaacca

SEQ ID NO: 1151624 - DNA, 15 bp, Homo sapiens
agaagttactgaacc

SEQ ID NO: 1151625 - DNA, 15 bp, Homo sapiens
tagaagttactgaac

SEQ ID NO: 1151626 - DNA, 15 bp, Homo sapiens
ctagaagttactgaa

SEQ ID NO: 1151627 - DNA, 15 bp, Homo sapiens
actagaagttactga

SEQ ID NO: 1151628 - DNA, 15 bp, Homo sapiens
tactagaagttactg

SEQ ID NO: 1151629 - DNA, 15 bp, Homo sapiens
ttactagaagttact

SEQ ID NO: 1151630 - DNA, 15 bp, Homo sapiens
tttactagaagttac

SEQ ID NO: 1151631 - DNA, 15 bp, Homo sapiens
gtttactagaagtta

SEQ ID NO: 1151632 - DNA, 15 bp, Homo sapiens
tgtttactagaagtt

SEQ ID NO: 1151633 - DNA, 15 bp, Homo sapiens
ttgtttactagaagt

SEQ ID NO: 1151634 - DNA, 15 bp, Homo sapiens
tttgtttactagaag

SEQ ID NO: 1151635 - DNA, 15 bp, Homo sapiens
gtttgtttactagaa

SEQ ID NO: 1151636 - DNA, 15 bp, Homo sapiens
tgtttgtttactaga

SEQ ID NO: 1151637 - DNA, 15 bp, Homo sapiens
gtgtttgtttactag

SEQ ID NO: 1151638 - DNA, 15 bp, Homo sapiens
tgtgtttgtttacta

SEQ ID NO: 1151639 - DNA, 15 bp, Homo sapiens
atgtgtttgtttact

SEQ ID NO: 1151640 - DNA, 15 bp, Homo sapiens
tatgtgtttgtttac

SEQ ID NO: 1151641 - DNA, 15 bp, Homo sapiens
ttatgtgtttgttta

SEQ ID NO: 1151642 - DNA, 15 bp, Homo sapiens
tttatgtgtttgttt

SEQ ID NO: 1151643 - DNA, 15 bp, Homo sapiens
ctttatgtgtttgtt

SEQ ID NO: 1151644 - DNA, 15 bp, Homo sapiens
gctttatgtgtttgt

SEQ ID NO: 1151645 - DNA, 15 bp, Homo sapiens
agctttatgtgtttg

SEQ ID NO: 1151646 - DNA, 15 bp, Homo sapiens
cagctttatgtgttt

SEQ ID NO: 1151647 - DNA, 15 bp, Homo sapiens
acagctttatgtgtt

SEQ ID NO: 1151648 - DNA, 15 bp, Homo sapiens
cacagctttatgtgt

SEQ ID NO: 1151649 - DNA, 15 bp, Homo sapiens
acacagctttatgtg

SEQ ID NO: 1151650 - DNA, 15 bp, Homo sapiens
tacacagctttatgt

SEQ ID NO: 1151651 - DNA, 15 bp, Homo sapiens
ttacacagctttatg

SEQ ID NO: 1151652 - DNA, 15 bp, Homo sapiens
tttacacagctttat

SEQ ID NO: 1151653 - DNA, 15 bp, Homo sapiens
ttttacacagcttta

SEQ ID NO: 1151654 - DNA, 15 bp, Homo sapiens
tttttacacagcttt

SEQ ID NO: 1151655 - DNA, 15 bp, Homo sapiens
atttttacacagctt

SEQ ID NO: 1151656 - DNA, 15 bp, Homo sapiens
aatttttacacagct

SEQ ID NO: 1151657 - DNA, 15 bp, Homo sapiens
taatttttacacagc

SEQ ID NO: 1151658 - DNA, 15 bp, Homo sapiens
ctaatttttacacag

SEQ ID NO: 1151659 - DNA, 15 bp, Homo sapiens
tctaatttttacaca

SEQ ID NO: 1151660 - DNA, 15 bp, Homo sapiens
ctctaatttttacac

SEQ ID NO: 1151661 - DNA, 15 bp, Homo sapiens
tctctaatttttaca

SEQ ID NO: 1151662 - DNA, 15 bp, Homo sapiens
ctctctaatttttac

SEQ ID NO: 1151663 - DNA, 15 bp, Homo sapiens
gctctctaattttta

SEQ ID NO: 1151664 - DNA, 15 bp, Homo sapiens
agctctctaattttt

SEQ ID NO: 1151665 - DNA, 15 bp, Homo sapiens
cagctctctaatttt

SEQ ID NO: 1151666 - DNA, 15 bp, Homo sapiens
acagctctctaattt

SEQ ID NO: 1151667 - DNA, 15 bp, Homo sapiens
tacagctctctaatt

SEQ ID NO: 1151668 - DNA, 15 bp, Homo sapiens
ttacagctctctaat

SEQ ID NO: 1151669 - DNA, 15 bp, Homo sapiens
attacagctctctaa

SEQ ID NO: 1151670 - DNA, 15 bp, Homo sapiens
tattacagctctcta

SEQ ID NO: 1151671 - DNA, 15 bp, Homo sapiens
ttattacagctctct

SEQ ID NO: 1151672 - DNA, 15 bp, Homo sapiens
gttattacagctctc

SEQ ID NO: 1151673 - DNA, 15 bp, Homo sapiens
agttattacagctct

SEQ ID NO: 1151674 - DNA, 15 bp, Homo sapiens
cagttattacagctc

SEQ ID NO: 1151675 - DNA, 15 bp, Homo sapiens
gcagttattacagct

SEQ ID NO: 1151676 - DNA, 15 bp, Homo sapiens
tgcagttattacagc

SEQ ID NO: 1151677 - DNA, 15 bp, Homo sapiens
atgcagttattacag

SEQ ID NO: 1151678 - DNA, 15 bp, Homo sapiens
gatgcagttattaca

SEQ ID NO: 1151679 - DNA, 15 bp, Homo sapiens
agatgcagttattac

SEQ ID NO: 1151680 - DNA, 15 bp, Homo sapiens
gagatgcagttatta

SEQ ID NO: 1151681 - DNA, 15 bp, Homo sapiens
tgagatgcagttatt

SEQ ID NO: 1151682 - DNA, 15 bp, Homo sapiens
gtgagatgcagttat

SEQ ID NO: 1151683 - DNA, 15 bp, Homo sapiens
agtgagatgcagtta

SEQ ID NO: 1151684 - DNA, 15 bp, Homo sapiens
aagtgagatgcagtt

SEQ ID NO: 1151685 - DNA, 15 bp, Homo sapiens
taagtgagatgcagt

SEQ ID NO: 1151686 - DNA, 15 bp, Homo sapiens
ttaagtgagatgcag

SEQ ID NO: 1151687 - DNA, 15 bp, Homo sapiens
attaagtgagatgca

SEQ ID NO: 1151688 - DNA, 15 bp, Homo sapiens
aattaagtgagatgc

SEQ ID NO: 1151689 - DNA, 15 bp, Homo sapiens
aaattaagtgagatg

SEQ ID NO: 1151690 - DNA, 15 bp, Homo sapiens
caaattaagtgagat

SEQ ID NO: 1151691 - DNA, 15 bp, Homo sapiens
acaaattaagtgaga

SEQ ID NO: 1151692 - DNA, 15 bp, Homo sapiens
gacaaattaagtgag

SEQ ID NO: 1151693 - DNA, 15 bp, Homo sapiens
agacaaattaagtga

SEQ ID NO: 1151694 - DNA, 15 bp, Homo sapiens
aagacaaattaagtg

SEQ ID NO: 1151695 - DNA, 15 bp, Homo sapiens
taagacaaattaagt

SEQ ID NO: 1151696 - DNA, 15 bp, Homo sapiens
gtaagacaaattaag

SEQ ID NO: 1151697 - DNA, 15 bp, Homo sapiens
tgtaagacaaattaa

SEQ ID NO: 1151698 - DNA, 15 bp, Homo sapiens
atgtaagacaaatta

SEQ ID NO: 1151699 - DNA, 15 bp, Homo sapiens
aatgtaagacaaatt

SEQ ID NO: 1151700 - DNA, 15 bp, Homo sapiens
aaatgtaagacaaat

SEQ ID NO: 1151701 - DNA, 15 bp, Homo sapiens
aaaatgtaagacaaa

SEQ ID NO: 1151702 - DNA, 15 bp, Homo sapiens
gaaaatgtaagacaa

SEQ ID NO: 1151703 - DNA, 15 bp, Homo sapiens
agaaaatgtaagaca

SEQ ID NO: 1151704 - DNA, 15 bp, Homo sapiens
gagaaaatgtaagac

SEQ ID NO: 1151705 - DNA, 15 bp, Homo sapiens
ggagaaaatgtaaga

SEQ ID NO: 1151706 - DNA, 15 bp, Homo sapiens
gggagaaaatgtaag

SEQ ID NO: 1151707 - DNA, 15 bp, Homo sapiens
agggagaaaatgtaa

SEQ ID NO: 1151708 - DNA, 15 bp, Homo sapiens
tagggagaaaatgta

SEQ ID NO: 1151709 - DNA, 15 bp, Homo sapiens
ctagggagaaaatgt

SEQ ID NO: 1151710 - DNA, 15 bp, Homo sapiens
tctagggagaaaatg

SEQ ID NO: 1151711 - DNA, 15 bp, Homo sapiens
ttctagggagaaaat

SEQ ID NO: 1151712 - DNA, 15 bp, Homo sapiens
tttctagggagaaaa

SEQ ID NO: 1151713 - DNA, 15 bp, Homo sapiens
atttctagggagaaa

SEQ ID NO: 1151714 - DNA, 15 bp, Homo sapiens
catttctagggagaa

SEQ ID NO: 1151715 - DNA, 15 bp, Homo sapiens
ccatttctagggaga

SEQ ID NO: 1151716 - DNA, 15 bp, Homo sapiens
tccatttctagggag

SEQ ID NO: 1151717 - DNA, 15 bp, Homo sapiens
ctccatttctaggga

SEQ ID NO: 1151718 - DNA, 15 bp, Homo sapiens
actccatttctaggg

SEQ ID NO: 1151719 - DNA, 15 bp, Homo sapiens
gactccatttctagg

SEQ ID NO: 1151720 - DNA, 15 bp, Homo sapiens
tgactccatttctag

SEQ ID NO: 1151721 - DNA, 15 bp, Homo sapiens
atgactccatttcta

SEQ ID NO: 1151722 - DNA, 15 bp, Homo sapiens
gatgactccatttct

SEQ ID NO: 1151723 - DNA, 15 bp, Homo sapiens
agatgactccatttc

SEQ ID NO: 1151724 - DNA, 15 bp, Homo sapiens
tagatgactccattt

SEQ ID NO: 1151725 - DNA, 15 bp, Homo sapiens
atagatgactccatt

SEQ ID NO: 1151726 - DNA, 15 bp, Homo sapiens
catagatgactccat

SEQ ID NO: 1151727 - DNA, 15 bp, Homo sapiens
gcatagatgactcca

SEQ ID NO: 1151728 - DNA, 15 bp, Homo sapiens
tgcatagatgactcc

SEQ ID NO: 1151729 - DNA, 15 bp, Homo sapiens
atgcatagatgactc

SEQ ID NO: 1151730 - DNA, 15 bp, Homo sapiens
aatgcatagatgact

SEQ ID NO: 1151731 - DNA, 15 bp, Homo sapiens
aaatgcatagatgac

SEQ ID NO: 1151732 - DNA, 15 bp, Homo sapiens
gaaatgcatagatga

SEQ ID NO: 1151733 - DNA, 15 bp, Homo sapiens
agaaatgcatagatg

SEQ ID NO: 1151734 - DNA, 15 bp, Homo sapiens
aagaaatgcatagat

SEQ ID NO: 1151735 - DNA, 15 bp, Homo sapiens
taagaaatgcataga

SEQ ID NO: 1151736 - DNA, 15 bp, Homo sapiens
gtaagaaatgcatag

SEQ ID NO: 1151737 - DNA, 15 bp, Homo sapiens
agtaagaaatgcata

SEQ ID NO: 1151738 - DNA, 15 bp, Homo sapiens
aagtaagaaatgcat

SEQ ID NO: 1151739 - DNA, 15 bp, Homo sapiens
taagtaagaaatgca

SEQ ID NO: 1151740 - DNA, 15 bp, Homo sapiens
gtaagtaagaaatgc

SEQ ID NO: 1151741 - DNA, 15 bp, Homo sapiens
ggtaagtaagaaatg

SEQ ID NO: 1151742 - DNA, 15 bp, Homo sapiens
aggtaagtaagaaat

SEQ ID NO: 1151743 - DNA, 15 bp, Homo sapiens
taggtaagtaagaaa

SEQ ID NO: 1151744 - DNA, 15 bp, Homo sapiens
ttaggtaagtaagaa

SEQ ID NO: 1151745 - DNA, 15 bp, Homo sapiens
gttaggtaagtaaga

SEQ ID NO: 1151746 - DNA, 15 bp, Homo sapiens
tgttaggtaagtaag

SEQ ID NO: 1151747 - DNA, 15 bp, Homo sapiens
atgttaggtaagtaa

SEQ ID NO: 1151748 - DNA, 15 bp, Homo sapiens
catgttaggtaagta

SEQ ID NO: 1151749 - DNA, 15 bp, Homo sapiens
ccatgttaggtaagt

SEQ ID NO: 1151750 - DNA, 15 bp, Homo sapiens
tccatgttaggtaag

SEQ ID NO: 1151751 - DNA, 15 bp, Homo sapiens
atccatgttaggtaa

SEQ ID NO: 1151752 - DNA, 15 bp, Homo sapiens
tatccatgttaggta

SEQ ID NO: 1151753 - DNA, 15 bp, Homo sapiens
gtatccatgttaggt

SEQ ID NO: 1151754 - DNA, 15 bp, Homo sapiens
cgtatccatgttagg

SEQ ID NO: 1151755 - DNA, 15 bp, Homo sapiens
ccgtatccatgttag

SEQ ID NO: 1151756 - DNA, 15 bp, Homo sapiens
tccgtatccatgtta

SEQ ID NO: 1151757 - DNA, 15 bp, Homo sapiens
ctccgtatccatgtt

SEQ ID NO: 1151758 - DNA, 15 bp, Homo sapiens
tctccgtatccatgt

SEQ ID NO: 1151759 - DNA, 15 bp, Homo sapiens
ctctccgtatccatg

SEQ ID NO: 1151760 - DNA, 15 bp, Homo sapiens
actctccgtatccat

SEQ ID NO: 1151761 - DNA, 15 bp, Homo sapiens
cactctccgtatcca

SEQ ID NO: 1151762 - DNA, 15 bp, Homo sapiens
ccactctccgtatcc

SEQ ID NO: 1151763 - DNA, 15 bp, Homo sapiens
accactctccgtatc

SEQ ID NO: 1151764 - DNA, 15 bp, Homo sapiens
caccactctccgtat

SEQ ID NO: 1151765 - DNA, 15 bp, Homo sapiens
tcaccactctccgta

SEQ ID NO: 1151766 - DNA, 15 bp, Homo sapiens
ctcaccactctccgt

SEQ ID NO: 1151767 - DNA, 15 bp, Homo sapiens
tctcaccactctccg

SEQ ID NO: 1151768 - DNA, 15 bp, Homo sapiens
ttctcaccactctcc

SEQ ID NO: 1151769 - DNA, 15 bp, Homo sapiens
tttctcaccactctc

SEQ ID NO: 1151770 - DNA, 15 bp, Homo sapiens
ctttctcaccactct

SEQ ID NO: 1151771 - DNA, 15 bp, Homo sapiens
cctttctcaccactc

SEQ ID NO: 1151772 - DNA, 15 bp, Homo sapiens
tcctttctcaccact

SEQ ID NO: 1151773 - DNA, 15 bp, Homo sapiens
ttcctttctcaccac

SEQ ID NO: 1151774 - DNA, 15 bp, Homo sapiens
tttcctttctcacca

SEQ ID NO: 1151775 - DNA, 15 bp, Homo sapiens
gtttcctttctcacc

SEQ ID NO: 1151776 - DNA, 15 bp, Homo sapiens
agtttcctttctcac

SEQ ID NO: 1151777 - DNA, 15 bp, Homo sapiens
tagtttcctttctca

SEQ ID NO: 1151778 - DNA, 15 bp, Homo sapiens
atagtttcctttctc

SEQ ID NO: 1151779 - DNA, 15 bp, Homo sapiens
tatagtttcctttct

SEQ ID NO: 1151780 - DNA, 15 bp, Homo sapiens
ctatagtttcctttc

SEQ ID NO: 1151781 - DNA, 15 bp, Homo sapiens
tctatagtttccttt

SEQ ID NO: 1151782 - DNA, 15 bp, Homo sapiens
ttctatagtttcctt

SEQ ID NO: 1151783 - DNA, 15 bp, Homo sapiens
tttctatagtttcct

SEQ ID NO: 1151784 - DNA, 15 bp, Homo sapiens
ctttctatagtttcc

SEQ ID NO: 1151785 - DNA, 15 bp, Homo sapiens
actttctatagtttc

SEQ ID NO: 1151786 - DNA, 15 bp, Homo sapiens
cactttctatagttt

SEQ ID NO: 1151787 - DNA, 15 bp, Homo sapiens
acactttctatagtt

SEQ ID NO: 1151788 - DNA, 15 bp, Homo sapiens
tacactttctatagt

SEQ ID NO: 1151789 - DNA, 15 bp, Homo sapiens
atacactttctatag

SEQ ID NO: 1151790 - DNA, 15 bp, Homo sapiens
gatacactttctata

SEQ ID NO: 1151791 - DNA, 15 bp, Homo sapiens
tgatacactttctat

SEQ ID NO: 1151792 - DNA, 15 bp, Homo sapiens
ctgatacactttcta

SEQ ID NO: 1151793 - DNA, 15 bp, Homo sapiens
gctgatacactttct

SEQ ID NO: 1151794 - DNA, 15 bp, Homo sapiens
agctgatacactttc

SEQ ID NO: 1151795 - DNA, 15 bp, Homo sapiens
aagctgatacacttt

SEQ ID NO: 1151796 - DNA, 15 bp, Homo sapiens
aaagctgatacactt

SEQ ID NO: 1151797 - DNA, 15 bp, Homo sapiens
taaagctgatacact

SEQ ID NO: 1151798 - DNA, 15 bp, Homo sapiens
gtaaagctgatacac

SEQ ID NO: 1151799 - DNA, 15 bp, Homo sapiens
tgtaaagctgataca

SEQ ID NO: 1151800 - DNA, 15 bp, Homo sapiens
atgtaaagctgatac

SEQ ID NO: 1151801 - DNA, 15 bp, Homo sapiens
tatgtaaagctgata

SEQ ID NO: 1151802 - DNA, 15 bp, Homo sapiens
ttatgtaaagctgat

SEQ ID NO: 1151803 - DNA, 15 bp, Homo sapiens
cttatgtaaagctga

SEQ ID NO: 1151804 - DNA, 15 bp, Homo sapiens
tcttatgtaaagctg

SEQ ID NO: 1151805 - DNA, 15 bp, Homo sapiens
ttcttatgtaaagct

SEQ ID NO: 1151806 - DNA, 15 bp, Homo sapiens
attcttatgtaaagc

SEQ ID NO: 1151807 - DNA, 15 bp, Homo sapiens
aattcttatgtaaag

SEQ ID NO: 1151808 - DNA, 15 bp, Homo sapiens
taattcttatgtaaa

SEQ ID NO: 1151809 - DNA, 15 bp, Homo sapiens
ataattcttatgtaa

SEQ ID NO: 1151810 - DNA, 15 bp, Homo sapiens
tataattcttatgta

SEQ ID NO: 1151811 - DNA, 15 bp, Homo sapiens
atataattcttatgt

SEQ ID NO: 1151812 - DNA, 15 bp, Homo sapiens
tatataattcttatg

SEQ ID NO: 1151813 - DNA, 15 bp, Homo sapiens
ctatataattcttat

SEQ ID NO: 1151814 - DNA, 15 bp, Homo sapiens
actatataattctta

SEQ ID NO: 1151815 - DNA, 15 bp, Homo sapiens
tactatataattctt

SEQ ID NO: 1151816 - DNA, 15 bp, Homo sapiens
ttactatataattct

SEQ ID NO: 1151817 - DNA, 15 bp, Homo sapiens
tttactatataattc

SEQ ID NO: 1151818 - DNA, 15 bp, Homo sapiens
ttttactatataatt

SEQ ID NO: 1151819 - DNA, 15 bp, Homo sapiens
attttactatataat

SEQ ID NO: 1151820 - DNA, 15 bp, Homo sapiens
tattttactatataa

SEQ ID NO: 1151821 - DNA, 15 bp, Homo sapiens
gtattttactatata

SEQ ID NO: 1151822 - DNA, 15 bp, Homo sapiens
tgtattttactatat

SEQ ID NO: 1151823 - DNA, 15 bp, Homo sapiens
ttgtattttactata

SEQ ID NO: 1151824 - DNA, 15 bp, Homo sapiens
tttgtattttactat

SEQ ID NO: 1151825 - DNA, 15 bp, Homo sapiens
gtttgtattttacta

SEQ ID NO: 1151826 - DNA, 15 bp, Homo sapiens
tgtttgtattttact

SEQ ID NO: 1151827 - DNA, 15 bp, Homo sapiens
ttgtttgtattttac

SEQ ID NO: 1151828 - DNA, 15 bp, Homo sapiens
attgtttgtatttta

SEQ ID NO: 1151829 - DNA, 15 bp, Homo sapiens
cattgtttgtatttt

SEQ ID NO: 1151830 - DNA, 15 bp, Homo sapiens
tcattgtttgtattt

SEQ ID NO: 1151831 - DNA, 15 bp, Homo sapiens
ctcattgtttgtatt

SEQ ID NO: 1151832 - DNA, 15 bp, Homo sapiens
cctcattgtttgtat

SEQ ID NO: 1151833 - DNA, 15 bp, Homo sapiens
acctcattgtttgta

SEQ ID NO: 1151834 - DNA, 15 bp, Homo sapiens
aacctcattgtttgt

SEQ ID NO: 1151835 - DNA, 15 bp, Homo sapiens
taacctcattgtttg

SEQ ID NO: 1151836 - DNA, 15 bp, Homo sapiens
ataacctcattgttt

SEQ ID NO: 1151837 - DNA, 15 bp, Homo sapiens
aataacctcattgtt

SEQ ID NO: 1151838 - DNA, 15 bp, Homo sapiens
taataacctcattgt

SEQ ID NO: 1151839 - DNA, 15 bp, Homo sapiens
gtaataacctcattg

SEQ ID NO: 1151840 - DNA, 15 bp, Homo sapiens
tgtaataacctcatt

SEQ ID NO: 1151841 - DNA, 15 bp, Homo sapiens
ctgtaataacctcat

SEQ ID NO: 1151842 - DNA, 15 bp, Homo sapiens
actgtaataacctca

SEQ ID NO: 1151843 - DNA, 15 bp, Homo sapiens
aactgtaataacctc

SEQ ID NO: 1151844 - DNA, 15 bp, Homo sapiens
caactgtaataacct

SEQ ID NO: 1151845 - DNA, 15 bp, Homo sapiens
acaactgtaataacc

SEQ ID NO: 1151846 - DNA, 15 bp, Homo sapiens
tacaactgtaataac

SEQ ID NO: 1151847 - DNA, 15 bp, Homo sapiens
atacaactgtaataa

SEQ ID NO: 1151848 - DNA, 15 bp, Homo sapiens
aatacaactgtaata

SEQ ID NO: 1151849 - DNA, 15 bp, Homo sapiens
aaatacaactgtaat

SEQ ID NO: 1151850 - DNA, 15 bp, Homo sapiens
aaaatacaactgtaa

SEQ ID NO: 1151851 - DNA, 15 bp, Homo sapiens
caaaatacaactgta

SEQ ID NO: 1151852 - DNA, 15 bp, Homo sapiens
tcaaaatacaactgt

SEQ ID NO: 1151853 - DNA, 15 bp, Homo sapiens
ctcaaaatacaactg

SEQ ID NO: 1151854 - DNA, 15 bp, Homo sapiens
tctcaaaatacaact

SEQ ID NO: 1151855 - DNA, 15 bp, Homo sapiens
ttctcaaaatacaac

SEQ ID NO: 1151856 - DNA, 15 bp, Homo sapiens
tttctcaaaatacaa

SEQ ID NO: 1151857 - DNA, 15 bp, Homo sapiens
ttttctcaaaataca

SEQ ID NO: 1151858 - DNA, 15 bp, Homo sapiens
cttttctcaaaatac

SEQ ID NO: 1151859 - DNA, 15 bp, Homo sapiens
ccttttctcaaaata

SEQ ID NO: 1151860 - DNA, 15 bp, Homo sapiens
accttttctcaaaat

SEQ ID NO: 1151861 - DNA, 15 bp, Homo sapiens
caccttttctcaaaa

SEQ ID NO: 1151862 - DNA, 15 bp, Homo sapiens
acaccttttctcaaa

SEQ ID NO: 1151863 - DNA, 15 bp, Homo sapiens
aacaccttttctcaa

SEQ ID NO: 1151864 - DNA, 15 bp, Homo sapiens
aaacaccttttctca

SEQ ID NO: 1151865 - DNA, 15 bp, Homo sapiens
aaaacaccttttctc

SEQ ID NO: 1151866 - DNA, 15 bp, Homo sapiens
caaaacaccttttct

SEQ ID NO: 1151867 - DNA, 15 bp, Homo sapiens
gcaaaacaccttttc

SEQ ID NO: 1151868 - DNA, 15 bp, Homo sapiens
tgcaaaacacctttt

SEQ ID NO: 1151869 - DNA, 15 bp, Homo sapiens
ttgcaaaacaccttt

SEQ ID NO: 1151870 - DNA, 15 bp, Homo sapiens
tttgcaaaacacctt

SEQ ID NO: 1151871 - DNA, 15 bp, Homo sapiens
ttttgcaaaacacct

SEQ ID NO: 1151872 - DNA, 15 bp, Homo sapiens
cttttgcaaaacacc

SEQ ID NO: 1151873 - DNA, 15 bp, Homo sapiens
gcttttgcaaaacac

SEQ ID NO: 1151874 - DNA, 15 bp, Homo sapiens
ggcttttgcaaaaca

SEQ ID NO: 1151875 - DNA, 15 bp, Homo sapiens
tggcttttgcaaaac

SEQ ID NO: 1151876 - DNA, 15 bp, Homo sapiens
ctggcttttgcaaaa

SEQ ID NO: 1151877 - DNA, 15 bp, Homo sapiens
tctggcttttgcaaa

SEQ ID NO: 1151878 - DNA, 15 bp, Homo sapiens
ctctggcttttgcaa

SEQ ID NO: 1151879 - DNA, 15 bp, Homo sapiens
actctggcttttgca

SEQ ID NO: 1151880 - DNA, 15 bp, Homo sapiens
aactctggcttttgc

SEQ ID NO: 1151881 - DNA, 15 bp, Homo sapiens
aaactctggcttttg

SEQ ID NO: 1151882 - DNA, 15 bp, Homo sapiens
aaaactctggctttt

SEQ ID NO: 1151883 - DNA, 15 bp, Homo sapiens
taaaactctggcttt

SEQ ID NO: 1151884 - DNA, 15 bp, Homo sapiens
ttaaaactctggctt

SEQ ID NO: 1151885 - DNA, 15 bp, Homo sapiens
tttaaaactctggct

SEQ ID NO: 1151886 - DNA, 15 bp, Homo sapiens
atttaaaactctggc

SEQ ID NO: 1151887 - DNA, 15 bp, Homo sapiens
catttaaaactctgg

SEQ ID NO: 1151888 - DNA, 15 bp, Homo sapiens
tcatttaaaactctg

SEQ ID NO: 1151889 - DNA, 15 bp, Homo sapiens
ctcatttaaaactct

SEQ ID NO: 1151890 - DNA, 15 bp, Homo sapiens
gctcatttaaaactc

SEQ ID NO: 1151891 - DNA, 15 bp, Homo sapiens
ggctcatttaaaact

SEQ ID NO: 1151892 - DNA, 15 bp, Homo sapiens
tggctcatttaaaac

SEQ ID NO: 1151893 - DNA, 15 bp, Homo sapiens
atggctcatttaaaa

SEQ ID NO: 1151894 - DNA, 15 bp, Homo sapiens
catggctcatttaaa

SEQ ID NO: 1151895 - DNA, 15 bp, Homo sapiens
tcatggctcatttaa

SEQ ID NO: 1151896 - DNA, 15 bp, Homo sapiens
ctcatggctcattta

SEQ ID NO: 1151897 - DNA, 15 bp, Homo sapiens
actcatggctcattt

SEQ ID NO: 1151898 - DNA, 15 bp, Homo sapiens
gactcatggctcatt

SEQ ID NO: 1151899 - DNA, 15 bp, Homo sapiens
tgactcatggctcat

SEQ ID NO: 1151900 - DNA, 15 bp, Homo sapiens
ttgactcatggctca

SEQ ID NO: 1151901 - DNA, 15 bp, Homo sapiens
tttgactcatggctc

SEQ ID NO: 1151902 - DNA, 15 bp, Homo sapiens
gtttgactcatggct

SEQ ID NO: 1151903 - DNA, 15 bp, Homo sapiens
tgtttgactcatggc

SEQ ID NO: 1151904 - DNA, 15 bp, Homo sapiens
ctgtttgactcatgg

SEQ ID NO: 1151905 - DNA, 15 bp, Homo sapiens
tctgtttgactcatg

SEQ ID NO: 1151906 - DNA, 15 bp, Homo sapiens
ttctgtttgactcat

SEQ ID NO: 1151907 - DNA, 15 bp, Homo sapiens
tttctgtttgactca

SEQ ID NO: 1151908 - DNA, 15 bp, Homo sapiens
atttctgtttgactc

SEQ ID NO: 1151909 - DNA, 15 bp, Homo sapiens
gatttctgtttgact

SEQ ID NO: 1151910 - DNA, 15 bp, Homo sapiens
ggatttctgtttgac

SEQ ID NO: 1151911 - DNA, 15 bp, Homo sapiens
gggatttctgtttga

SEQ ID NO: 1151912 - DNA, 15 bp, Homo sapiens
agggatttctgtttg

SEQ ID NO: 1151913 - DNA, 15 bp, Homo sapiens
aagggatttctgttt

SEQ ID NO: 1151914 - DNA, 15 bp, Homo sapiens
aaagggatttctgtt

SEQ ID NO: 1151915 - DNA, 15 bp, Homo sapiens
gaaagggatttctgt

SEQ ID NO: 1151916 - DNA, 15 bp, Homo sapiens
agaaagggatttctg

SEQ ID NO: 1151917 - DNA, 15 bp, Homo sapiens
gagaaagggatttct

SEQ ID NO: 1151918 - DNA, 15 bp, Homo sapiens
agagaaagggatttc

SEQ ID NO: 1151919 - DNA, 15 bp, Homo sapiens
aagagaaagggattt

SEQ ID NO: 1151920 - DNA, 15 bp, Homo sapiens
taagagaaagggatt

SEQ ID NO: 1151921 - DNA, 15 bp, Homo sapiens
ctaagagaaagggat

SEQ ID NO: 1151922 - DNA, 15 bp, Homo sapiens
cctaagagaaaggga

SEQ ID NO: 1151923 - DNA, 15 bp, Homo sapiens
ccctaagagaaaggg

SEQ ID NO: 1151924 - DNA, 15 bp, Homo sapiens
tccctaagagaaagg

SEQ ID NO: 1151925 - DNA, 15 bp, Homo sapiens
atccctaagagaaag

SEQ ID NO: 1151926 - DNA, 15 bp, Homo sapiens
tatccctaagagaaa

SEQ ID NO: 1151927 - DNA, 15 bp, Homo sapiens
atatccctaagagaa

SEQ ID NO: 1151928 - DNA, 15 bp, Homo sapiens
tatatccctaagaga

SEQ ID NO: 1151929 - DNA, 15 bp, Homo sapiens
ttatatccctaagag

SEQ ID NO: 1151930 - DNA, 15 bp, Homo sapiens
gttatatccctaaga

SEQ ID NO: 1151931 - DNA, 15 bp, Homo sapiens
agttatatccctaag

SEQ ID NO: 1151932 - DNA, 15 bp, Homo sapiens
aagttatatccctaa

SEQ ID NO: 1151933 - DNA, 15 bp, Homo sapiens
taagttatatcccta

SEQ ID NO: 1151934 - DNA, 15 bp, Homo sapiens
ttaagttatatccct

SEQ ID NO: 1151935 - DNA, 15 bp, Homo sapiens
tttaagttatatccc

SEQ ID NO: 1151936 - DNA, 15 bp, Homo sapiens
atttaagttatatcc

SEQ ID NO: 1151937 - DNA, 15 bp, Homo sapiens
aatttaagttatatc

SEQ ID NO: 1151938 - DNA, 15 bp, Homo sapiens
taatttaagttatat

SEQ ID NO: 1151939 - DNA, 15 bp, Homo sapiens
ataatttaagttata

SEQ ID NO: 1151940 - DNA, 15 bp, Homo sapiens
cataatttaagttat

SEQ ID NO: 1151941 - DNA, 15 bp, Homo sapiens
gcataatttaagtta

SEQ ID NO: 1151942 - DNA, 15 bp, Homo sapiens
tgcataatttaagtt

SEQ ID NO: 1151943 - DNA, 15 bp, Homo sapiens
ttgcataatttaagt

SEQ ID NO: 1151944 - DNA, 15 bp, Homo sapiens
tttgcataatttaag

SEQ ID NO: 1151945 - DNA, 15 bp, Homo sapiens
ttttgcataatttaa

SEQ ID NO: 1151946 - DNA, 15 bp, Homo sapiens
gttttgcataattta

SEQ ID NO: 1151947 - DNA, 15 bp, Homo sapiens
tgttttgcataattt

SEQ ID NO: 1151948 - DNA, 15 bp, Homo sapiens
atgttttgcataatt

SEQ ID NO: 1151949 - DNA, 15 bp, Homo sapiens
catgttttgcataat

SEQ ID NO: 1151950 - DNA, 15 bp, Homo sapiens
acatgttttgcataa

SEQ ID NO: 1151951 - DNA, 15 bp, Homo sapiens
cacatgttttgcata

SEQ ID NO: 1151952 - DNA, 15 bp, Homo sapiens
acacatgttttgcat

SEQ ID NO: 1151953 - DNA, 15 bp, Homo sapiens
aacacatgttttgca

SEQ ID NO: 1151954 - DNA, 15 bp, Homo sapiens
aaacacatgttttgc

SEQ ID NO: 1151955 - DNA, 15 bp, Homo sapiens
gaaacacatgttttg

SEQ ID NO: 1151956 - DNA, 15 bp, Homo sapiens
agaaacacatgtttt

SEQ ID NO: 1151957 - DNA, 15 bp, Homo sapiens
tagaaacacatgttt

SEQ ID NO: 1151958 - DNA, 15 bp, Homo sapiens
ttagaaacacatgtt

SEQ ID NO: 1151959 - DNA, 15 bp, Homo sapiens
attagaaacacatgt

SEQ ID NO: 1151960 - DNA, 15 bp, Homo sapiens
aattagaaacacatg

SEQ ID NO: 1151961 - DNA, 15 bp, Homo sapiens
aaattagaaacacat

SEQ ID NO: 1151962 - DNA, 15 bp, Homo sapiens
caaattagaaacaca

SEQ ID NO: 1151963 - DNA, 15 bp, Homo sapiens
tcaaattagaaacac

SEQ ID NO: 1151964 - DNA, 15 bp, Homo sapiens
atcaaattagaaaca

SEQ ID NO: 1151965 - DNA, 15 bp, Homo sapiens
catcaaattagaaac

SEQ ID NO: 1151966 - DNA, 15 bp, Homo sapiens
ccatcaaattagaaa

SEQ ID NO: 1151967 - DNA, 15 bp, Homo sapiens
cccatcaaattagaa

SEQ ID NO: 1151968 - DNA, 15 bp, Homo sapiens
ccccatcaaattaga

SEQ ID NO: 1151969 - DNA, 15 bp, Homo sapiens
accccatcaaattag

SEQ ID NO: 1151970 - DNA, 15 bp, Homo sapiens
aaccccatcaaatta

SEQ ID NO: 1151971 - DNA, 15 bp, Homo sapiens
aaaccccatcaaatt

SEQ ID NO: 1151972 - DNA, 15 bp, Homo sapiens
taaaccccatcaaat

SEQ ID NO: 1151973 - DNA, 15 bp, Homo sapiens
ataaaccccatcaaa

SEQ ID NO: 1151974 - DNA, 15 bp, Homo sapiens
cataaaccccatcaa

SEQ ID NO: 1151975 - DNA, 15 bp, Homo sapiens
tcataaaccccatca

SEQ ID NO: 1151976 - DNA, 15 bp, Homo sapiens
ctcataaaccccatc

SEQ ID NO: 1151977 - DNA, 15 bp, Homo sapiens
tctcataaaccccat

SEQ ID NO: 1151978 - DNA, 15 bp, Homo sapiens
atctcataaacccca

SEQ ID NO: 1151979 - DNA, 15 bp, Homo sapiens
aatctcataaacccc

SEQ ID NO: 1151980 - DNA, 15 bp, Homo sapiens
caatctcataaaccc

SEQ ID NO: 1151981 - DNA, 15 bp, Homo sapiens
gcaatctcataaacc

SEQ ID NO: 1151982 - DNA, 15 bp, Homo sapiens
tgcaatctcataaac

SEQ ID NO: 1151983 - DNA, 15 bp, Homo sapiens
gtgcaatctcataaa

SEQ ID NO: 1151984 - DNA, 15 bp, Homo sapiens
tgtgcaatctcataa

SEQ ID NO: 1151985 - DNA, 15 bp, Homo sapiens
atgtgcaatctcata

SEQ ID NO: 1151986 - DNA, 15 bp, Homo sapiens
gatgtgcaatctcat

SEQ ID NO: 1151987 - DNA, 15 bp, Homo sapiens
tgatgtgcaatctca

SEQ ID NO: 1151988 - DNA, 15 bp, Homo sapiens
ttgatgtgcaatctc

SEQ ID NO: 1151989 - DNA, 15 bp, Homo sapiens
cttgatgtgcaatct

SEQ ID NO: 1151990 - DNA, 15 bp, Homo sapiens
gcttgatgtgcaatc

SEQ ID NO: 1151991 - DNA, 15 bp, Homo sapiens
tgcttgatgtgcaat

SEQ ID NO: 1151992 - DNA, 15 bp, Homo sapiens
gtgcttgatgtgcaa

SEQ ID NO: 1151993 - DNA, 15 bp, Homo sapiens
ggtgcttgatgtgca

SEQ ID NO: 1151994 - DNA, 15 bp, Homo sapiens
aggtgcttgatgtgc

SEQ ID NO: 1151995 - DNA, 15 bp, Homo sapiens
aaggtgcttgatgtg

SEQ ID NO: 1151996 - DNA, 15 bp, Homo sapiens
gaaggtgcttgatgt

SEQ ID NO: 1151997 - DNA, 15 bp, Homo sapiens
ggaaggtgcttgatg

SEQ ID NO: 1151998 - DNA, 15 bp, Homo sapiens
tggaaggtgcttgat

SEQ ID NO: 1151999 - DNA, 15 bp, Homo sapiens
atggaaggtgcttga

SEQ ID NO: 1152000 - DNA, 15 bp, Homo sapiens
catggaaggtgcttg

SEQ ID NO: 1152001 - DNA, 15 bp, Homo sapiens
acatggaaggtgctt

SEQ ID NO: 1152002 - DNA, 15 bp, Homo sapiens
aacatggaaggtgct

SEQ ID NO: 1152003 - DNA, 15 bp, Homo sapiens
taacatggaaggtgc

SEQ ID NO: 1152004 - DNA, 15 bp, Homo sapiens
ataacatggaaggtg

SEQ ID NO: 1152005 - DNA, 15 bp, Homo sapiens
tataacatggaaggt

SEQ ID NO: 1152006 - DNA, 15 bp, Homo sapiens
atataacatggaagg

SEQ ID NO: 1152007 - DNA, 15 bp, Homo sapiens
aatataacatggaag

SEQ ID NO: 1152008 - DNA, 15 bp, Homo sapiens
taatataacatggaa

SEQ ID NO: 1152009 - DNA, 15 bp, Homo sapiens
ataatataacatgga

SEQ ID NO: 1152010 - DNA, 15 bp, Homo sapiens
gataatataacatgg

SEQ ID NO: 1152011 - DNA, 15 bp, Homo sapiens
tgataatataacatg

SEQ ID NO: 1152012 - DNA, 15 bp, Homo sapiens
atgataatataacat

SEQ ID NO: 1152013 - DNA, 15 bp, Homo sapiens
aatgataatataaca

SEQ ID NO: 1152014 - DNA, 15 bp, Homo sapiens
caatgataatataac

SEQ ID NO: 1152015 - DNA, 15 bp, Homo sapiens
gcaatgataatataa

SEQ ID NO: 1152016 - DNA, 15 bp, Homo sapiens
agcaatgataatata

SEQ ID NO: 1152017 - DNA, 15 bp, Homo sapiens
aagcaatgataatat

SEQ ID NO: 1152018 - DNA, 15 bp, Homo sapiens
caagcaatgataata

SEQ ID NO: 1152019 - DNA, 15 bp, Homo sapiens
acaagcaatgataat

SEQ ID NO: 1152020 - DNA, 15 bp, Homo sapiens
aacaagcaatgataa

SEQ ID NO: 1152021 - DNA, 15 bp, Homo sapiens
taacaagcaatgata

SEQ ID NO: 1152022 - DNA, 15 bp, Homo sapiens
ataacaagcaatgat

SEQ ID NO: 1152023 - DNA, 15 bp, Homo sapiens
aataacaagcaatga

SEQ ID NO: 1152024 - DNA, 15 bp, Homo sapiens
aaataacaagcaatg

SEQ ID NO: 1152025 - DNA, 15 bp, Homo sapiens
taaataacaagcaat

SEQ ID NO: 1152026 - DNA, 15 bp, Homo sapiens
gtaaataacaagcaa

SEQ ID NO: 1152027 - DNA, 15 bp, Homo sapiens
agtaaataacaagca

SEQ ID NO: 1152028 - DNA, 15 bp, Homo sapiens
cagtaaataacaagc

SEQ ID NO: 1152029 - DNA, 15 bp, Homo sapiens
tcagtaaataacaag

SEQ ID NO: 1152030 - DNA, 15 bp, Homo sapiens
ctcagtaaataacaa

SEQ ID NO: 1152031 - DNA, 15 bp, Homo sapiens
gctcagtaaataaca

SEQ ID NO: 1152032 - DNA, 15 bp, Homo sapiens
cgctcagtaaataac

SEQ ID NO: 1152033 - DNA, 15 bp, Homo sapiens
acgctcagtaaataa

SEQ ID NO: 1152034 - DNA, 15 bp, Homo sapiens
tacgctcagtaaata

SEQ ID NO: 1152035 - DNA, 15 bp, Homo sapiens
ttacgctcagtaaat

SEQ ID NO: 1152036 - DNA, 15 bp, Homo sapiens
cttacgctcagtaaa

SEQ ID NO: 1152037 - DNA, 15 bp, Homo sapiens
tcttacgctcagtaa

SEQ ID NO: 1152038 - DNA, 15 bp, Homo sapiens
atcttacgctcagta

SEQ ID NO: 1152039 - DNA, 15 bp, Homo sapiens
aatcttacgctcagt

SEQ ID NO: 1152040 - DNA, 15 bp, Homo sapiens
gaatcttacgctcag

SEQ ID NO: 1152041 - DNA, 15 bp, Homo sapiens
tgaatcttacgctca

SEQ ID NO: 1152042 - DNA, 15 bp, Homo sapiens
ttgaatcttacgctc

SEQ ID NO: 1152043 - DNA, 15 bp, Homo sapiens
cttgaatcttacgct

SEQ ID NO: 1152044 - DNA, 15 bp, Homo sapiens
acttgaatcttacgc

SEQ ID NO: 1152045 - DNA, 15 bp, Homo sapiens
cacttgaatcttacg

SEQ ID NO: 1152046 - DNA, 15 bp, Homo sapiens
tcacttgaatcttac

SEQ ID NO: 1152047 - DNA, 15 bp, Homo sapiens
ctcacttgaatctta

SEQ ID NO: 1152048 - DNA, 15 bp, Homo sapiens
tctcacttgaatctt

SEQ ID NO: 1152049 - DNA, 15 bp, Homo sapiens
ctctcacttgaatct

SEQ ID NO: 1152050 - DNA, 15 bp, Homo sapiens
actctcacttgaatc

SEQ ID NO: 1152051 - DNA, 15 bp, Homo sapiens
gactctcacttgaat

SEQ ID NO: 1152052 - DNA, 15 bp, Homo sapiens
agactctcacttgaa

SEQ ID NO: 1152053 - DNA, 15 bp, Homo sapiens
cagactctcacttga

SEQ ID NO: 1152054 - DNA, 15 bp, Homo sapiens
tcagactctcacttg

SEQ ID NO: 1152055 - DNA, 15 bp, Homo sapiens
ttcagactctcactt

SEQ ID NO: 1152056 - DNA, 15 bp, Homo sapiens
gttcagactctcact

SEQ ID NO: 1152057 - DNA, 15 bp, Homo sapiens
agttcagactctcac

SEQ ID NO: 1152058 - DNA, 15 bp, Homo sapiens
tagttcagactctca

SEQ ID NO: 1152059 - DNA, 15 bp, Homo sapiens
gtagttcagactctc

SEQ ID NO: 1152060 - DNA, 15 bp, Homo sapiens
ggtagttcagactct

SEQ ID NO: 1152061 - DNA, 15 bp, Homo sapiens
aggtagttcagactc

SEQ ID NO: 1152062 - DNA, 15 bp, Homo sapiens
aaggtagttcagact

SEQ ID NO: 1152063 - DNA, 15 bp, Homo sapiens
aaaggtagttcagac

SEQ ID NO: 1152064 - DNA, 15 bp, Homo sapiens
aaaaggtagttcaga

SEQ ID NO: 1152065 - DNA, 15 bp, Homo sapiens
aaaaaggtagttcag

SEQ ID NO: 1152066 - DNA, 15 bp, Homo sapiens
aaaaaaggtagttca

SEQ ID NO: 1152067 - DNA, 15 bp, Homo sapiens
gaaaaaaggtagttc

SEQ ID NO: 1152068 - DNA, 15 bp, Homo sapiens
agaaaaaaggtagtt

SEQ ID NO: 1152069 - DNA, 15 bp, Homo sapiens
aagaaaaaaggtagt

SEQ ID NO: 1152070 - DNA, 15 bp, Homo sapiens
caagaaaaaaggtag

SEQ ID NO: 1152071 - DNA, 15 bp, Homo sapiens
acaagaaaaaaggta

SEQ ID NO: 1152072 - DNA, 15 bp, Homo sapiens
aacaagaaaaaaggt

SEQ ID NO: 1152073 - DNA, 15 bp, Homo sapiens
aaacaagaaaaaagg

SEQ ID NO: 1152074 - DNA, 15 bp, Homo sapiens
caaacaagaaaaaag

SEQ ID NO: 1152075 - DNA, 15 bp, Homo sapiens
gcaaacaagaaaaaa

SEQ ID NO: 1152076 - DNA, 15 bp, Homo sapiens
tgcaaacaagaaaaa

SEQ ID NO: 1152077 - DNA, 15 bp, Homo sapiens
ttgcaaacaagaaaa

SEQ ID NO: 1152078 - DNA, 15 bp, Homo sapiens
cttgcaaacaagaaa

SEQ ID NO: 1152079 - DNA, 15 bp, Homo sapiens
acttgcaaacaagaa

SEQ ID NO: 1152080 - DNA, 15 bp, Homo sapiens
gacttgcaaacaaga

SEQ ID NO: 1152081 - DNA, 15 bp, Homo sapiens
agacttgcaaacaag

SEQ ID NO: 1152082 - DNA, 15 bp, Homo sapiens
aagacttgcaaacaa

SEQ ID NO: 1152083 - DNA, 15 bp, Homo sapiens
taagacttgcaaaca

SEQ ID NO: 1152084 - DNA, 15 bp, Homo sapiens
gtaagacttgcaaac

SEQ ID NO: 1152085 - DNA, 15 bp, Homo sapiens
ggtaagacttgcaaa

SEQ ID NO: 1152086 - DNA, 15 bp, Homo sapiens
aggtaagacttgcaa

SEQ ID NO: 1152087 - DNA, 15 bp, Homo sapiens
taggtaagacttgca

SEQ ID NO: 1152088 - DNA, 15 bp, Homo sapiens
ataggtaagacttgc

SEQ ID NO: 1152089 - DNA, 15 bp, Homo sapiens
tataggtaagacttg

SEQ ID NO: 1152090 - DNA, 15 bp, Homo sapiens
ttataggtaagactt

SEQ ID NO: 1152091 - DNA, 15 bp, Homo sapiens
tttataggtaagact

SEQ ID NO: 1152092 - DNA, 15 bp, Homo sapiens
ctttataggtaagac

SEQ ID NO: 1152093 - DNA, 15 bp, Homo sapiens
actttataggtaaga

SEQ ID NO: 1152094 - DNA, 15 bp, Homo sapiens
tactttataggtaag

SEQ ID NO: 1152095 - DNA, 15 bp, Homo sapiens
gtactttataggtaa

SEQ ID NO: 1152096 - DNA, 15 bp, Homo sapiens
tgtactttataggta

SEQ ID NO: 1152097 - DNA, 15 bp, Homo sapiens
ttgtactttataggt

SEQ ID NO: 1152098 - DNA, 15 bp, Homo sapiens
cttgtactttatagg

SEQ ID NO: 1152099 - DNA, 15 bp, Homo sapiens
ccttgtactttatag

SEQ ID NO: 1152100 - DNA, 15 bp, Homo sapiens
accttgtactttata

SEQ ID NO: 1152101 - DNA, 15 bp, Homo sapiens
taccttgtactttat

SEQ ID NO: 1152102 - DNA, 15 bp, Homo sapiens
ataccttgtacttta

SEQ ID NO: 1152103 - DNA, 15 bp, Homo sapiens
cataccttgtacttt

SEQ ID NO: 1152104 - DNA, 15 bp, Homo sapiens
acataccttgtactt

SEQ ID NO: 1152105 - DNA, 15 bp, Homo sapiens
cacataccttgtact

SEQ ID NO: 1152106 - DNA, 15 bp, Homo sapiens
ccacataccttgtac

SEQ ID NO: 1152107 - DNA, 15 bp, Homo sapiens
tccacataccttgta

SEQ ID NO: 1152108 - DNA, 15 bp, Homo sapiens
ttccacataccttgt

SEQ ID NO: 1152109 - DNA, 15 bp, Homo sapiens
tttccacataccttg

SEQ ID NO: 1152110 - DNA, 15 bp, Homo sapiens
ttttccacatacctt

SEQ ID NO: 1152111 - DNA, 15 bp, Homo sapiens
tttttccacatacct

SEQ ID NO: 1152112 - DNA, 15 bp, Homo sapiens
ttttttccacatacc

SEQ ID NO: 1152113 - DNA, 15 bp, Homo sapiens
cttttttccacatac

SEQ ID NO: 1152114 - DNA, 15 bp, Homo sapiens
ccttttttccacata

SEQ ID NO: 1152115 - DNA, 15 bp, Homo sapiens
accttttttccacat

SEQ ID NO: 1152116 - DNA, 15 bp, Homo sapiens
aaccttttttccaca

SEQ ID NO: 1152117 - DNA, 15 bp, Homo sapiens
aaaccttttttccac

SEQ ID NO: 1152118 - DNA, 15 bp, Homo sapiens
caaaccttttttcca

SEQ ID NO: 1152119 - DNA, 15 bp, Homo sapiens
gcaaaccttttttcc

SEQ ID NO: 1152120 - DNA, 15 bp, Homo sapiens
ggcaaaccttttttc

SEQ ID NO: 1152121 - DNA, 15 bp, Homo sapiens
aggcaaacctttttt

SEQ ID NO: 1152122 - DNA, 15 bp, Homo sapiens
aaggcaaaccttttt

SEQ ID NO: 1152123 - DNA, 15 bp, Homo sapiens
taaggcaaacctttt

SEQ ID NO: 1152124 - DNA, 15 bp, Homo sapiens
ttaaggcaaaccttt

SEQ ID NO: 1152125 - DNA, 15 bp, Homo sapiens
tttaaggcaaacctt

SEQ ID NO: 1152126 - DNA, 15 bp, Homo sapiens
ttttaaggcaaacct

SEQ ID NO: 1152127 - DNA, 15 bp, Homo sapiens
tttttaaggcaaacc

SEQ ID NO: 1152128 - DNA, 15 bp, Homo sapiens
gtttttaaggcaaac

SEQ ID NO: 1152129 - DNA, 15 bp, Homo sapiens
agtttttaaggcaaa

SEQ ID NO: 1152130 - DNA, 15 bp, Homo sapiens
tagtttttaaggcaa

SEQ ID NO: 1152131 - DNA, 15 bp, Homo sapiens
gtagtttttaaggca

SEQ ID NO: 1152132 - DNA, 15 bp, Homo sapiens
tgtagtttttaaggc

SEQ ID NO: 1152133 - DNA, 15 bp, Homo sapiens
atgtagtttttaagg

SEQ ID NO: 1152134 - DNA, 15 bp, Homo sapiens
aatgtagtttttaag

SEQ ID NO: 1152135 - DNA, 15 bp, Homo sapiens
aaatgtagtttttaa

SEQ ID NO: 1152136 - DNA, 15 bp, Homo sapiens
aaaatgtagttttta

SEQ ID NO: 1152137 - DNA, 15 bp, Homo sapiens
gaaaatgtagttttt

SEQ ID NO: 1152138 - DNA, 15 bp, Homo sapiens
agaaaatgtagtttt

SEQ ID NO: 1152139 - DNA, 15 bp, Homo sapiens
tagaaaatgtagttt

SEQ ID NO: 1152140 - DNA, 15 bp, Homo sapiens
ctagaaaatgtagtt

SEQ ID NO: 1152141 - DNA, 15 bp, Homo sapiens
actagaaaatgtagt

SEQ ID NO: 1152142 - DNA, 15 bp, Homo sapiens
gactagaaaatgtag

SEQ ID NO: 1152143 - DNA, 15 bp, Homo sapiens
agactagaaaatgta

SEQ ID NO: 1152144 - DNA, 15 bp, Homo sapiens
cagactagaaaatgt

SEQ ID NO: 1152145 - DNA, 15 bp, Homo sapiens
acagactagaaaatg

SEQ ID NO: 1152146 - DNA, 15 bp, Homo sapiens
gacagactagaaaat

SEQ ID NO: 1152147 - DNA, 15 bp, Homo sapiens
agacagactagaaaa

SEQ ID NO: 1152148 - DNA, 15 bp, Homo sapiens
aagacagactagaaa

SEQ ID NO: 1152149 - DNA, 15 bp, Homo sapiens
gaagacagactagaa

SEQ ID NO: 1152150 - DNA, 15 bp, Homo sapiens
agaagacagactaga

SEQ ID NO: 1152151 - DNA, 15 bp, Homo sapiens
tagaagacagactag

SEQ ID NO: 1152152 - DNA, 15 bp, Homo sapiens
ttagaagacagacta

SEQ ID NO: 1152153 - DNA, 15 bp, Homo sapiens
gttagaagacagact

SEQ ID NO: 1152154 - DNA, 15 bp, Homo sapiens
cgttagaagacagac

SEQ ID NO: 1152155 - DNA, 15 bp, Homo sapiens
tcgttagaagacaga

SEQ ID NO: 1152156 - DNA, 15 bp, Homo sapiens
ttcgttagaagacag

SEQ ID NO: 1152157 - DNA, 15 bp, Homo sapiens
attcgttagaagaca

SEQ ID NO: 1152158 - DNA, 15 bp, Homo sapiens
cattcgttagaagac

SEQ ID NO: 1152159 - DNA, 15 bp, Homo sapiens
gcattcgttagaaga

SEQ ID NO: 1152160 - DNA, 15 bp, Homo sapiens
agcattcgttagaag

SEQ ID NO: 1152161 - DNA, 15 bp, Homo sapiens
tagcattcgttagaa

SEQ ID NO: 1152162 - DNA, 15 bp, Homo sapiens
atagcattcgttaga

SEQ ID NO: 1152163 - DNA, 15 bp, Homo sapiens
catagcattcgttag

SEQ ID NO: 1152164 - DNA, 15 bp, Homo sapiens
acatagcattcgtta

SEQ ID NO: 1152165 - DNA, 15 bp, Homo sapiens
tacatagcattcgtt

SEQ ID NO: 1152166 - DNA, 15 bp, Homo sapiens
ttacatagcattcgt

SEQ ID NO: 1152167 - DNA, 15 bp, Homo sapiens
tttacatagcattcg

SEQ ID NO: 1152168 - DNA, 15 bp, Homo sapiens
gtttacatagcattc

SEQ ID NO: 1152169 - DNA, 15 bp, Homo sapiens
ggtttacatagcatt

SEQ ID NO: 1152170 - DNA, 15 bp, Homo sapiens
tggtttacatagcat

SEQ ID NO: 1152171 - DNA, 15 bp, Homo sapiens
attggtttacatagc

SEQ ID NO: 1152172 - DNA, 15 bp, Homo sapiens
aattggtttacatag

SEQ ID NO: 1152173 - DNA, 15 bp, Homo sapiens
aaattggtttacata

SEQ ID NO: 1152174 - DNA, 15 bp, Homo sapiens
taaattggtttacat

SEQ ID NO: 1152175 - DNA, 15 bp, Homo sapiens
ataaattggtttaca

SEQ ID NO: 1152176 - DNA, 15 bp, Homo sapiens
gataaattggtttac

SEQ ID NO: 1152177 - DNA, 15 bp, Homo sapiens
tgataaattggttta

SEQ ID NO: 1152178 - DNA, 15 bp, Homo sapiens
atgataaattggttt

SEQ ID NO: 1152179 - DNA, 15 bp, Homo sapiens
gatgataaattggtt

SEQ ID NO: 1152180 - DNA, 15 bp, Homo sapiens
tgatgataaattggt

SEQ ID NO: 1152181 - DNA, 15 bp, Homo sapiens
ttgatgataaattgg

SEQ ID NO: 1152182 - DNA, 15 bp, Homo sapiens
attgatgataaattg

SEQ ID NO: 1152183 - DNA, 15 bp, Homo sapiens
tattgatgataaatt

SEQ ID NO: 1152184 - DNA, 15 bp, Homo sapiens
atattgatgataaat

SEQ ID NO: 1152185 - DNA, 15 bp, Homo sapiens
aatattgatgataaa

SEQ ID NO: 1152186 - DNA, 15 bp, Homo sapiens
aaatattgatgataa

SEQ ID NO: 1152187 - DNA, 15 bp, Homo sapiens
aaaatattgatgata

SEQ ID NO: 1152188 - DNA, 15 bp, Homo sapiens
taaaatattgatgat

SEQ ID NO: 1152189 - DNA, 15 bp, Homo sapiens
ttaaaatattgatga

SEQ ID NO: 1152190 - DNA, 15 bp, Homo sapiens
attaaaatattgatg

SEQ ID NO: 1152191 - DNA, 15 bp, Homo sapiens
aattaaaatattgat

SEQ ID NO: 1152192 - DNA, 15 bp, Homo sapiens
taattaaaatattga

SEQ ID NO: 1152193 - DNA, 15 bp, Homo sapiens
ataattaaaatattg

SEQ ID NO: 1152194 - DNA, 15 bp, Homo sapiens
gataattaaaatatt

SEQ ID NO: 1152195 - DNA, 15 bp, Homo sapiens
tgataattaaaatat

SEQ ID NO: 1152196 - DNA, 15 bp, Homo sapiens
ttgataattaaaata

SEQ ID NO: 1152197 - DNA, 15 bp, Homo sapiens
tttgataattaaaat

SEQ ID NO: 1152198 - DNA, 15 bp, Homo sapiens
atttgataattaaaa

SEQ ID NO: 1152199 - DNA, 15 bp, Homo sapiens
tatttgataattaaa

SEQ ID NO: 1152200 - DNA, 15 bp, Homo sapiens
gtatttgataattaa

SEQ ID NO: 1152201 - DNA, 15 bp, Homo sapiens
tgtatttgataatta

SEQ ID NO: 1152202 - DNA, 15 bp, Homo sapiens
ctgtatttgataatt

SEQ ID NO: 1152203 - DNA, 15 bp, Homo sapiens
gctgtatttgataat

SEQ ID NO: 1152204 - DNA, 15 bp, Homo sapiens
tgctgtatttgataa

SEQ ID NO: 1152205 - DNA, 15 bp, Homo sapiens
atgctgtatttgata

SEQ ID NO: 1152206 - DNA, 15 bp, Homo sapiens
aatgctgtatttgat

SEQ ID NO: 1152207 - DNA, 15 bp, Homo sapiens
aaatgctgtatttga

SEQ ID NO: 1152208 - DNA, 15 bp, Homo sapiens
aaaatgctgtatttg

SEQ ID NO: 1152209 - DNA, 15 bp, Homo sapiens
aaaaatgctgtattt

SEQ ID NO: 1152210 - DNA, 15 bp, Homo sapiens
gaaaaatgctgtatt

SEQ ID NO: 1152211 - DNA, 15 bp, Homo sapiens
agaaaaatgctgtat

SEQ ID NO: 1152212 - DNA, 15 bp, Homo sapiens
tagaaaaatgctgta

SEQ ID NO: 1152213 - DNA, 15 bp, Homo sapiens
ttagaaaaatgctgt

SEQ ID NO: 1152214 - DNA, 15 bp, Homo sapiens
cttagaaaaatgctg

SEQ ID NO: 1152215 - DNA, 15 bp, Homo sapiens
gcttagaaaaatgct

SEQ ID NO: 1152216 - DNA, 15 bp, Homo sapiens
tgcttagaaaaatgc

SEQ ID NO: 1152217 - DNA, 15 bp, Homo sapiens
ttgcttagaaaaatg

SEQ ID NO: 1152218 - DNA, 15 bp, Homo sapiens
attgcttagaaaaat

SEQ ID NO: 1152219 - DNA, 15 bp, Homo sapiens
aattgcttagaaaaa

SEQ ID NO: 1152220 - DNA, 15 bp, Homo sapiens
aaattgcttagaaaa

SEQ ID NO: 1152221 - DNA, 15 bp, Homo sapiens
taaattgcttagaaa

SEQ ID NO: 1152222 - DNA, 15 bp, Homo sapiens
gtaaattgcttagaa

SEQ ID NO: 1152223 - DNA, 15 bp, Homo sapiens
tgtaaattgcttaga

SEQ ID NO: 1152224 - DNA, 15 bp, Homo sapiens
ttgtaaattgcttag

SEQ ID NO: 1152225 - DNA, 15 bp, Homo sapiens
tttgtaaattgctta

SEQ ID NO: 1152226 - DNA, 15 bp, Homo sapiens
atttgtaaattgctt

SEQ ID NO: 1152227 - DNA, 15 bp, Homo sapiens
aatttgtaaattgct

SEQ ID NO: 1152228 - DNA, 15 bp, Homo sapiens
taatttgtaaattgc

SEQ ID NO: 1152229 - DNA, 15 bp, Homo sapiens
ttaatttgtaaattg

SEQ ID NO: 1152230 - DNA, 15 bp, Homo sapiens
gttaatttgtaaatt

SEQ ID NO: 1152231 - DNA, 15 bp, Homo sapiens
ggttaatttgtaaat

SEQ ID NO: 1152232 - DNA, 15 bp, Homo sapiens
gggttaatttgtaaa

SEQ ID NO: 1152233 - DNA, 15 bp, Homo sapiens
agggttaatttgtaa

SEQ ID NO: 1152234 - DNA, 15 bp, Homo sapiens
aagggttaatttgta

SEQ ID NO: 1152235 - DNA, 15 bp, Homo sapiens
aaagggttaatttgt

SEQ ID NO: 1152236 - DNA, 15 bp, Homo sapiens
gaaagggttaatttg

SEQ ID NO: 1152237 - DNA, 15 bp, Homo sapiens
ggaaagggttaattt

SEQ ID NO: 1152238 - DNA, 15 bp, Homo sapiens
tggaaagggttaatt

SEQ ID NO: 1152239 - DNA, 15 bp, Homo sapiens
atggaaagggttaat

SEQ ID NO: 1152240 - DNA, 15 bp, Homo sapiens
aatggaaagggttaa

SEQ ID NO: 1152241 - DNA, 15 bp, Homo sapiens
gaatggaaagggtta

SEQ ID NO: 1152242 - DNA, 15 bp, Homo sapiens
agaatggaaagggtt

SEQ ID NO: 1152243 - DNA, 15 bp, Homo sapiens
gagaatggaaagggt

SEQ ID NO: 1152244 - DNA, 15 bp, Homo sapiens
tgagaatggaaaggg

SEQ ID NO: 1152245 - DNA, 15 bp, Homo sapiens
atgagaatggaaagg

SEQ ID NO: 1152246 - DNA, 15 bp, Homo sapiens
tatgagaatggaaag

SEQ ID NO: 1152247 - DNA, 15 bp, Homo sapiens
ctatgagaatggaaa

SEQ ID NO: 1152248 - DNA, 15 bp, Homo sapiens
gctatgagaatggaa

SEQ ID NO: 1152249 - DNA, 15 bp, Homo sapiens
ggctatgagaatgga

SEQ ID NO: 1152250 - DNA, 15 bp, Homo sapiens
tggctatgagaatgg

SEQ ID NO: 1152251 - DNA, 15 bp, Homo sapiens
atggctatgagaatg

SEQ ID NO: 1152252 - DNA, 15 bp, Homo sapiens
gatggctatgagaat

SEQ ID NO: 1152253 - DNA, 15 bp, Homo sapiens
ggatggctatgagaa

SEQ ID NO: 1152254 - DNA, 15 bp, Homo sapiens
gggatggctatgaga

SEQ ID NO: 1152255 - DNA, 15 bp, Homo sapiens
tgggatggctatgag

SEQ ID NO: 1152256 - DNA, 15 bp, Homo sapiens
ttgggatggctatga

SEQ ID NO: 1152257 - DNA, 15 bp, Homo sapiens
tttgggatggctatg

SEQ ID NO: 1152258 - DNA, 15 bp, Homo sapiens
ttttgggatggctat

SEQ ID NO: 1152259 - DNA, 15 bp, Homo sapiens
cttttgggatggcta

SEQ ID NO: 1152260 - DNA, 15 bp, Homo sapiens
acttttgggatggct

SEQ ID NO: 1152261 - DNA, 15 bp, Homo sapiens
aacttttgggatggc

SEQ ID NO: 1152262 - DNA, 15 bp, Homo sapiens
taacttttgggatgg

SEQ ID NO: 1152263 - DNA, 15 bp, Homo sapiens
ataacttttgggatg

SEQ ID NO: 1152264 - DNA, 15 bp, Homo sapiens
cataacttttgggat

SEQ ID NO: 1152265 - DNA, 15 bp, Homo sapiens
acataacttttggga

SEQ ID NO: 1152266 - DNA, 15 bp, Homo sapiens
tacataacttttggg

SEQ ID NO: 1152267 - DNA, 15 bp, Homo sapiens
atacataacttttgg

SEQ ID NO: 1152268 - DNA, 15 bp, Homo sapiens
catacataacttttg

SEQ ID NO: 1152269 - DNA, 15 bp, Homo sapiens
acatacataactttt

SEQ ID NO: 1152270 - DNA, 15 bp, Homo sapiens
aacatacataacttt

SEQ ID NO: 1152271 - DNA, 15 bp, Homo sapiens
taacatacataactt

SEQ ID NO: 1152272 - DNA, 15 bp, Homo sapiens
ataacatacataact

SEQ ID NO: 1152273 - DNA, 15 bp, Homo sapiens
aataacatacataac

SEQ ID NO: 1152274 - DNA, 15 bp, Homo sapiens
aaataacatacataa

SEQ ID NO: 1152275 - DNA, 15 bp, Homo sapiens
taaataacatacata

SEQ ID NO: 1152276 - DNA, 15 bp, Homo sapiens
ataaataacatacat

SEQ ID NO: 1152277 - DNA, 15 bp, Homo sapiens
aataaataacataca

SEQ ID NO: 1152278 - DNA, 15 bp, Homo sapiens
aaataaataacatac

SEQ ID NO: 1152279 - DNA, 15 bp, Homo sapiens
taaataaataacata

SEQ ID NO: 1152280 - DNA, 15 bp, Homo sapiens
ataaataaataacat

SEQ ID NO: 1152281 - DNA, 15 bp, Homo sapiens
aataaataaataaca

SEQ ID NO: 1152282 - DNA, 15 bp, Homo sapiens
taataaataaataac

SEQ ID NO: 1152283 - DNA, 15 bp, Homo sapiens
ataataaataaataa

SEQ ID NO: 1152284 - DNA, 15 bp, Homo sapiens
aataataaataaata

SEQ ID NO: 1152285 - DNA, 15 bp, Homo sapiens
taataataaataaat

SEQ ID NO: 1152286 - DNA, 15 bp, Homo sapiens
ataataataaataaa

SEQ ID NO: 1152287 - DNA, 15 bp, Homo sapiens
aataataataaataa

SEQ ID NO: 1152288 - DNA, 15 bp, Homo sapiens
taataataataaata

SEQ ID NO: 1152289 - DNA, 15 bp, Homo sapiens
atctcaaaataataa

SEQ ID NO: 1152290 - DNA, 15 bp, Homo sapiens
catctcaaaataata

SEQ ID NO: 1152291 - DNA, 15 bp, Homo sapiens
ccatctcaaaataat

SEQ ID NO: 1152292 - DNA, 15 bp, Homo sapiens
aggtgacagagcgag

SEQ ID NO: 1152293 - DNA, 15 bp, Homo sapiens
caggtgacagagcga

SEQ ID NO: 1152294 - DNA, 15 bp, Homo sapiens
ccaggtgacagagcg

SEQ ID NO: 1152295 - DNA, 15 bp, Homo sapiens
cccaggtgacagagc

SEQ ID NO: 1152296 - DNA, 15 bp, Homo sapiens
gcccaggtgacagag

SEQ ID NO: 1152297 - DNA, 15 bp, Homo sapiens
agcccaggtgacaga

SEQ ID NO: 1152298 - DNA, 15 bp, Homo sapiens
cagcccaggtgacag

SEQ ID NO: 1152299 - DNA, 15 bp, Homo sapiens
ccagcccaggtgaca

SEQ ID NO: 1152300 - DNA, 15 bp, Homo sapiens
tccagcccaggtgac

SEQ ID NO: 1152301 - DNA, 15 bp, Homo sapiens
ctccagcccaggtga

SEQ ID NO: 1152302 - DNA, 15 bp, Homo sapiens
actccagcccaggtg

SEQ ID NO: 1152303 - DNA, 15 bp, Homo sapiens
cactccagcccaggt

SEQ ID NO: 1152304 - DNA, 15 bp, Homo sapiens
ctgcactccagccca

SEQ ID NO: 1152305 - DNA, 15 bp, Homo sapiens
actgcactccagccc

SEQ ID NO: 1152306 - DNA, 15 bp, Homo sapiens
tgtggtggcaggtgc

SEQ ID NO: 1152307 - DNA, 15 bp, Homo sapiens
gtgtggtggcaggtg

SEQ ID NO: 1152308 - DNA, 15 bp, Homo sapiens
ggtgtggtggcaggt

SEQ ID NO: 1152309 - DNA, 15 bp, Homo sapiens
gggtgtggtggcagg

SEQ ID NO: 1152310 - DNA, 15 bp, Homo sapiens
tgggtgtggtggcag

SEQ ID NO: 1152311 - DNA, 15 bp, Homo sapiens
aagtagctgggtgtg

SEQ ID NO: 1152312 - DNA, 15 bp, Homo sapiens
aaagtagctgggtgt

SEQ ID NO: 1152313 - DNA, 15 bp, Homo sapiens
aaaagtagctgggtg

SEQ ID NO: 1152314 - DNA, 15 bp, Homo sapiens
aaaaagtagctgggt

SEQ ID NO: 1152315 - DNA, 15 bp, Homo sapiens
aaaaaagtagctggg

SEQ ID NO: 1152316 - DNA, 15 bp, Homo sapiens
caaaaaagtagctgg

SEQ ID NO: 1152317 - DNA, 15 bp, Homo sapiens
acaaaaaagtagctg

SEQ ID NO: 1152318 - DNA, 15 bp, Homo sapiens
tacaaaaaagtagct

SEQ ID NO: 1152319 - DNA, 15 bp, Homo sapiens
atacaaaaaagtagc

SEQ ID NO: 1152320 - DNA, 15 bp, Homo sapiens
aatacaaaaaagtag

SEQ ID NO: 1152321 - DNA, 15 bp, Homo sapiens
aaatacaaaaaagta

SEQ ID NO: 1152322 - DNA, 15 bp, Homo sapiens
aaaatacaaaaaagt

SEQ ID NO: 1152323 - DNA, 15 bp, Homo sapiens
aaaaatacaaaaaag

SEQ ID NO: 1152324 - DNA, 15 bp, Homo sapiens
cggtggatcacctga

SEQ ID NO: 1152325 - DNA, 15 bp, Homo sapiens
tcggtggatcacctg

SEQ ID NO: 1152326 - DNA, 15 bp, Homo sapiens
atcggtggatcacct

SEQ ID NO: 1152327 - DNA, 15 bp, Homo sapiens
gatcggtggatcacc

SEQ ID NO: 1152328 - DNA, 15 bp, Homo sapiens
agatcggtggatcac

SEQ ID NO: 1152329 - DNA, 15 bp, Homo sapiens
aagatcggtggatca

SEQ ID NO: 1152330 - DNA, 15 bp, Homo sapiens
caagatcggtggatc

SEQ ID NO: 1152331 - DNA, 15 bp, Homo sapiens
ccaagatcggtggat

SEQ ID NO: 1152332 - DNA, 15 bp, Homo sapiens
gccaagatcggtgga

SEQ ID NO: 1152333 - DNA, 15 bp, Homo sapiens
ggccaagatcggtgg

SEQ ID NO: 1152334 - DNA, 15 bp, Homo sapiens
aggccaagatcggtg

SEQ ID NO: 1152335 - DNA, 15 bp, Homo sapiens
gaggccaagatcggt

SEQ ID NO: 1152336 - DNA, 15 bp, Homo sapiens
ggaggccaagatcgg

SEQ ID NO: 1152337 - DNA, 15 bp, Homo sapiens
gggaggccaagatcg

SEQ ID NO: 1152338 - DNA, 15 bp, Homo sapiens
tgggaggccaagatc

SEQ ID NO: 1152339 - DNA, 15 bp, Homo sapiens
ttgggaggccaagat

SEQ ID NO: 1152340 - DNA, 15 bp, Homo sapiens
tttgggaggccaaga

SEQ ID NO: 1152341 - DNA, 15 bp, Homo sapiens
tggccgggtgcagtg

SEQ ID NO: 1152342 - DNA, 15 bp, Homo sapiens
ctggccgggtgcagt

SEQ ID NO: 1152343 - DNA, 15 bp, Homo sapiens
tctggccgggtgcag

SEQ ID NO: 1152344 - DNA, 15 bp, Homo sapiens
ttctggccgggtgca

SEQ ID NO: 1152345 - DNA, 15 bp, Homo sapiens
tttctggccgggtgc

SEQ ID NO: 1152346 - DNA, 15 bp, Homo sapiens
gtttctggccgggtg

SEQ ID NO: 1152347 - DNA, 15 bp, Homo sapiens
cgtttctggccgggt

SEQ ID NO: 1152348 - DNA, 15 bp, Homo sapiens
acgtttctggccggg

SEQ ID NO: 1152349 - DNA, 15 bp, Homo sapiens
tacgtttctggccgg

SEQ ID NO: 1152350 - DNA, 15 bp, Homo sapiens
atacgtttctggccg

SEQ ID NO: 1152351 - DNA, 15 bp, Homo sapiens
catacgtttctggcc

SEQ ID NO: 1152352 - DNA, 15 bp, Homo sapiens
acatacgtttctggc

SEQ ID NO: 1152353 - DNA, 15 bp, Homo sapiens
aacatacgtttctgg

SEQ ID NO: 1152354 - DNA, 15 bp, Homo sapiens
taacatacgtttctg

SEQ ID NO: 1152355 - DNA, 15 bp, Homo sapiens
ataacatacgtttct

SEQ ID NO: 1152356 - DNA, 15 bp, Homo sapiens
aataacatacgtttc

SEQ ID NO: 1152357 - DNA, 15 bp, Homo sapiens
taataacatacgttt

SEQ ID NO: 1152358 - DNA, 15 bp, Homo sapiens
ataataacatacgtt

SEQ ID NO: 1152359 - DNA, 15 bp, Homo sapiens
gataataacatacgt

SEQ ID NO: 1152360 - DNA, 15 bp, Homo sapiens
ggataataacatacg

SEQ ID NO: 1152361 - DNA, 15 bp, Homo sapiens
aggataataacatac

SEQ ID NO: 1152362 - DNA, 15 bp, Homo sapiens
gaggataataacata

SEQ ID NO: 1152363 - DNA, 15 bp, Homo sapiens
tgaggataataacat

SEQ ID NO: 1152364 - DNA, 15 bp, Homo sapiens
atgaggataataaca

SEQ ID NO: 1152365 - DNA, 15 bp, Homo sapiens
catgaggataataac

SEQ ID NO: 1152366 - DNA, 15 bp, Homo sapiens
acatgaggataataa

SEQ ID NO: 1152367 - DNA, 15 bp, Homo sapiens
aacatgaggataata

SEQ ID NO: 1152368 - DNA, 15 bp, Homo sapiens
gaacatgaggataat

SEQ ID NO: 1152369 - DNA, 15 bp, Homo sapiens
ggaacatgaggataa

SEQ ID NO: 1152370 - DNA, 15 bp, Homo sapiens
aggaacatgaggata

SEQ ID NO: 1152371 - DNA, 15 bp, Homo sapiens
taggaacatgaggat

SEQ ID NO: 1152372 - DNA, 15 bp, Homo sapiens
ttaggaacatgagga

SEQ ID NO: 1152373 - DNA, 15 bp, Homo sapiens
attaggaacatgagg

SEQ ID NO: 1152374 - DNA, 15 bp, Homo sapiens
cattaggaacatgag

SEQ ID NO: 1152375 - DNA, 15 bp, Homo sapiens
tcattaggaacatga

SEQ ID NO: 1152376 - DNA, 15 bp, Homo sapiens
ctcattaggaacatg

SEQ ID NO: 1152377 - DNA, 15 bp, Homo sapiens
tctcattaggaacat

SEQ ID NO: 1152378 - DNA, 15 bp, Homo sapiens
ttctcattaggaaca

SEQ ID NO: 1152379 - DNA, 15 bp, Homo sapiens
cttctcattaggaac

SEQ ID NO: 1152380 - DNA, 15 bp, Homo sapiens
acttctcattaggaa

SEQ ID NO: 1152381 - DNA, 15 bp, Homo sapiens
tacttctcattagga

SEQ ID NO: 1152382 - DNA, 15 bp, Homo sapiens
atacttctcattagg

SEQ ID NO: 1152383 - DNA, 15 bp, Homo sapiens
tatacttctcattag

SEQ ID NO: 1152384 - DNA, 15 bp, Homo sapiens
ttatacttctcatta

SEQ ID NO: 1152385 - DNA, 15 bp, Homo sapiens
cttatacttctcatt

SEQ ID NO: 1152386 - DNA, 15 bp, Homo sapiens
ccttatacttctcat

SEQ ID NO: 1152387 - DNA, 15 bp, Homo sapiens
gccttatacttctca

SEQ ID NO: 1152388 - DNA, 15 bp, Homo sapiens
tgccttatacttctc

SEQ ID NO: 1152389 - DNA, 15 bp, Homo sapiens
atgccttatacttct

SEQ ID NO: 1152390 - DNA, 15 bp, Homo sapiens
catgccttatacttc

SEQ ID NO: 1152391 - DNA, 15 bp, Homo sapiens
gcatgccttatactt

SEQ ID NO: 1152392 - DNA, 15 bp, Homo sapiens
tgcatgccttatact

SEQ ID NO: 1152393 - DNA, 15 bp, Homo sapiens
ctgcatgccttatac

SEQ ID NO: 1152394 - DNA, 15 bp, Homo sapiens
tctgcatgccttata

SEQ ID NO: 1152395 - DNA, 15 bp, Homo sapiens
ttctgcatgccttat

SEQ ID NO: 1152396 - DNA, 15 bp, Homo sapiens
attctgcatgcctta

SEQ ID NO: 1152397 - DNA, 15 bp, Homo sapiens
cattctgcatgcctt

SEQ ID NO: 1152398 - DNA, 15 bp, Homo sapiens
acattctgcatgcct

SEQ ID NO: 1152399 - DNA, 15 bp, Homo sapiens
tacattctgcatgcc

SEQ ID NO: 1152400 - DNA, 15 bp, Homo sapiens
ttacattctgcatgc

SEQ ID NO: 1152401 - DNA, 15 bp, Homo sapiens
attacattctgcatg

SEQ ID NO: 1152402 - DNA, 15 bp, Homo sapiens
aattacattctgcat

SEQ ID NO: 1152403 - DNA, 15 bp, Homo sapiens
taattacattctgca

SEQ ID NO: 1152404 - DNA, 15 bp, Homo sapiens
ataattacattctgc

SEQ ID NO: 1152405 - DNA, 15 bp, Homo sapiens
gataattacattctg

SEQ ID NO: 1152406 - DNA, 15 bp, Homo sapiens
tgataattacattct

SEQ ID NO: 1152407 - DNA, 15 bp, Homo sapiens
ttgataattacattc

SEQ ID NO: 1152408 - DNA, 15 bp, Homo sapiens
tttgataattacatt

SEQ ID NO: 1152409 - DNA, 15 bp, Homo sapiens
gtttgataattacat

SEQ ID NO: 1152410 - DNA, 15 bp, Homo sapiens
agtttgataattaca

SEQ ID NO: 1152411 - DNA, 15 bp, Homo sapiens
tagtttgataattac

SEQ ID NO: 1152412 - DNA, 15 bp, Homo sapiens
atagtttgataatta

SEQ ID NO: 1152413 - DNA, 15 bp, Homo sapiens
catagtttgataatt

SEQ ID NO: 1152414 - DNA, 15 bp, Homo sapiens
acatagtttgataat

SEQ ID NO: 1152415 - DNA, 15 bp, Homo sapiens
tacatagtttgataa

SEQ ID NO: 1152416 - DNA, 15 bp, Homo sapiens
ctacatagtttgata

SEQ ID NO: 1152417 - DNA, 15 bp, Homo sapiens
gctacatagtttgat

SEQ ID NO: 1152418 - DNA, 15 bp, Homo sapiens
agctacatagtttga

SEQ ID NO: 1152419 - DNA, 15 bp, Homo sapiens
tagctacatagtttg

SEQ ID NO: 1152420 - DNA, 15 bp, Homo sapiens
ctagctacatagttt

SEQ ID NO: 1152421 - DNA, 15 bp, Homo sapiens
gctagctacatagtt

SEQ ID NO: 1152422 - DNA, 15 bp, Homo sapiens
tgctagctacatagt

SEQ ID NO: 1152423 - DNA, 15 bp, Homo sapiens
ttgctagctacatag

SEQ ID NO: 1152424 - DNA, 15 bp, Homo sapiens
cttgctagctacata

SEQ ID NO: 1152425 - DNA, 15 bp, Homo sapiens
acttgctagctacat

SEQ ID NO: 1152426 - DNA, 15 bp, Homo sapiens
cacttgctagctaca

SEQ ID NO: 1152427 - DNA, 15 bp, Homo sapiens
gcacttgctagctac

SEQ ID NO: 1152428 - DNA, 15 bp, Homo sapiens
ggcacttgctagcta

SEQ ID NO: 1152429 - DNA, 15 bp, Homo sapiens
tggcacttgctagct

SEQ ID NO: 1152430 - DNA, 15 bp, Homo sapiens
ctggcacttgctagc

SEQ ID NO: 1152431 - DNA, 15 bp, Homo sapiens
tctggcacttgctag

SEQ ID NO: 1152432 - DNA, 15 bp, Homo sapiens
ctctggcacttgcta

SEQ ID NO: 1152433 - DNA, 15 bp, Homo sapiens
cctctggcacttgct

SEQ ID NO: 1152434 - DNA, 15 bp, Homo sapiens
gcctctggcacttgc

SEQ ID NO: 1152435 - DNA, 15 bp, Homo sapiens
ggcctctggcacttg

SEQ ID NO: 1152436 - DNA, 15 bp, Homo sapiens
tggcctctggcactt

SEQ ID NO: 1152437 - DNA, 15 bp, Homo sapiens
ctggcctctggcact

SEQ ID NO: 1152438 - DNA, 15 bp, Homo sapiens
actggcctctggcac

SEQ ID NO: 1152439 - DNA, 15 bp, Homo sapiens
tactggcctctggca

SEQ ID NO: 1152440 - DNA, 15 bp, Homo sapiens
atactggcctctggc

SEQ ID NO: 1152441 - DNA, 15 bp, Homo sapiens
catactggcctctgg

SEQ ID NO: 1152442 - DNA, 15 bp, Homo sapiens
tcatactggcctctg

SEQ ID NO: 1152443 - DNA, 15 bp, Homo sapiens
ctcatactggcctct

SEQ ID NO: 1152444 - DNA, 15 bp, Homo sapiens
gctcatactggcctc

SEQ ID NO: 1152445 - DNA, 15 bp, Homo sapiens
ggctcatactggcct

SEQ ID NO: 1152446 - DNA, 15 bp, Homo sapiens
aggctcatactggcc

SEQ ID NO: 1152447 - DNA, 15 bp, Homo sapiens
taggctcatactggc

SEQ ID NO: 1152448 - DNA, 15 bp, Homo sapiens
ttaggctcatactgg

SEQ ID NO: 1152449 - DNA, 15 bp, Homo sapiens
cttaggctcatactg

SEQ ID NO: 1152450 - DNA, 15 bp, Homo sapiens
gcttaggctcatact

SEQ ID NO: 1152451 - DNA, 15 bp, Homo sapiens
tgcttaggctcatac

SEQ ID NO: 1152452 - DNA, 15 bp, Homo sapiens
ctgcttaggctcata

SEQ ID NO: 1152453 - DNA, 15 bp, Homo sapiens
gctgcttaggctcat

SEQ ID NO: 1152454 - DNA, 15 bp, Homo sapiens
ggctgcttaggctca

SEQ ID NO: 1152455 - DNA, 15 bp, Homo sapiens
aggctgcttaggctc

SEQ ID NO: 1152456 - DNA, 15 bp, Homo sapiens
caggctgcttaggct

SEQ ID NO: 1152457 - DNA, 15 bp, Homo sapiens
acaggctgcttaggc

SEQ ID NO: 1152458 - DNA, 15 bp, Homo sapiens
gacaggctgcttagg

SEQ ID NO: 1152459 - DNA, 15 bp, Homo sapiens
agacaggctgcttag

SEQ ID NO: 1152460 - DNA, 15 bp, Homo sapiens
gagacaggctgctta

SEQ ID NO: 1152461 - DNA, 15 bp, Homo sapiens
ggagacaggctgctt

SEQ ID NO: 1152462 - DNA, 15 bp, Homo sapiens
tggagacaggctgct

SEQ ID NO: 1152463 - DNA, 15 bp, Homo sapiens
ctggagacaggctgc

SEQ ID NO: 1152464 - DNA, 15 bp, Homo sapiens
tctggagacaggctg

SEQ ID NO: 1152465 - DNA, 15 bp, Homo sapiens
ctctggagacaggct

SEQ ID NO: 1152466 - DNA, 15 bp, Homo sapiens
actctggagacaggc

SEQ ID NO: 1152467 - DNA, 15 bp, Homo sapiens
gactctggagacagg

SEQ ID NO: 1152468 - DNA, 15 bp, Homo sapiens
agactctggagacag

SEQ ID NO: 1152469 - DNA, 15 bp, Homo sapiens
tagactctggagaca

SEQ ID NO: 1152470 - DNA, 15 bp, Homo sapiens
atagactctggagac

SEQ ID NO: 1152471 - DNA, 15 bp, Homo sapiens
catagactctggaga

SEQ ID NO: 1152472 - DNA, 15 bp, Homo sapiens
tcatagactctggag

SEQ ID NO: 1152473 - DNA, 15 bp, Homo sapiens
atcatagactctgga

SEQ ID NO: 1152474 - DNA, 15 bp, Homo sapiens
gatcatagactctgg

SEQ ID NO: 1152475 - DNA, 15 bp, Homo sapiens
agatcatagactctg

SEQ ID NO: 1152476 - DNA, 15 bp, Homo sapiens
aagatcatagactct

SEQ ID NO: 1152477 - DNA, 15 bp, Homo sapiens
taagatcatagactc

SEQ ID NO: 1152478 - DNA, 15 bp, Homo sapiens
ttaagatcatagact

SEQ ID NO: 1152479 - DNA, 15 bp, Homo sapiens
tttaagatcatagac

SEQ ID NO: 1152480 - DNA, 15 bp, Homo sapiens
ttttaagatcataga

SEQ ID NO: 1152481 - DNA, 15 bp, Homo sapiens
gttttaagatcatag

SEQ ID NO: 1152482 - DNA, 15 bp, Homo sapiens
ggttttaagatcata

SEQ ID NO: 1152483 - DNA, 15 bp, Homo sapiens
tggttttaagatcat

SEQ ID NO: 1152484 - DNA, 15 bp, Homo sapiens
atggttttaagatca

SEQ ID NO: 1152485 - DNA, 15 bp, Homo sapiens
aatggttttaagatc

SEQ ID NO: 1152486 - DNA, 15 bp, Homo sapiens
taatggttttaagat

SEQ ID NO: 1152487 - DNA, 15 bp, Homo sapiens
ataatggttttaaga

SEQ ID NO: 1152488 - DNA, 15 bp, Homo sapiens
aataatggttttaag

SEQ ID NO: 1152489 - DNA, 15 bp, Homo sapiens
gaataatggttttaa

SEQ ID NO: 1152490 - DNA, 15 bp, Homo sapiens
ggaataatggtttta

SEQ ID NO: 1152491 - DNA, 15 bp, Homo sapiens
tggaataatggtttt

SEQ ID NO: 1152492 - DNA, 15 bp, Homo sapiens
gtggaataatggttt

SEQ ID NO: 1152493 - DNA, 15 bp, Homo sapiens
tgtggaataatggtt

SEQ ID NO: 1152494 - DNA, 15 bp, Homo sapiens
gtgtggaataatggt

SEQ ID NO: 1152495 - DNA, 15 bp, Homo sapiens
agtgtggaataatgg

SEQ ID NO: 1152496 - DNA, 15 bp, Homo sapiens
cagtgtggaataatg

SEQ ID NO: 1152497 - DNA, 15 bp, Homo sapiens
gcagtgtggaataat

SEQ ID NO: 1152498 - DNA, 15 bp, Homo sapiens
ggcagtgtggaataa

SEQ ID NO: 1152499 - DNA, 15 bp, Homo sapiens
aggcagtgtggaata

SEQ ID NO: 1152500 - DNA, 15 bp, Homo sapiens
gaggcagtgtggaat

SEQ ID NO: 1152501 - DNA, 15 bp, Homo sapiens
agaggcagtgtggaa

SEQ ID NO: 1152502 - DNA, 15 bp, Homo sapiens
gagaggcagtgtgga

SEQ ID NO: 1152503 - DNA, 15 bp, Homo sapiens
agagaggcagtgtgg

SEQ ID NO: 1152504 - DNA, 15 bp, Homo sapiens
aagagaggcagtgtg

SEQ ID NO: 1152505 - DNA, 15 bp, Homo sapiens
taagagaggcagtgt

SEQ ID NO: 1152506 - DNA, 15 bp, Homo sapiens
ttaagagaggcagtg

SEQ ID NO: 1152507 - DNA, 15 bp, Homo sapiens
cttaagagaggcagt

SEQ ID NO: 1152508 - DNA, 15 bp, Homo sapiens
tcttaagagaggcag

SEQ ID NO: 1152509 - DNA, 15 bp, Homo sapiens
ttcttaagagaggca

SEQ ID NO: 1152510 - DNA, 15 bp, Homo sapiens
cttcttaagagaggc

SEQ ID NO: 1152511 - DNA, 15 bp, Homo sapiens
ccttcttaagagagg

SEQ ID NO: 1152512 - DNA, 15 bp, Homo sapiens
cccttcttaagagag

SEQ ID NO: 1152513 - DNA, 15 bp, Homo sapiens
tcccttcttaagaga

SEQ ID NO: 1152514 - DNA, 15 bp, Homo sapiens
atcccttcttaagag

SEQ ID NO: 1152515 - DNA, 15 bp, Homo sapiens
tatcccttcttaaga

SEQ ID NO: 1152516 - DNA, 15 bp, Homo sapiens
ttatcccttcttaag

SEQ ID NO: 1152517 - DNA, 15 bp, Homo sapiens
attatcccttcttaa

SEQ ID NO: 1152518 - DNA, 15 bp, Homo sapiens
tattatcccttctta

SEQ ID NO: 1152519 - DNA, 15 bp, Homo sapiens
ttattatcccttctt

SEQ ID NO: 1152520 - DNA, 15 bp, Homo sapiens
cttattatcccttct

SEQ ID NO: 1152521 - DNA, 15 bp, Homo sapiens
tcttattatcccttc

SEQ ID NO: 1152522 - DNA, 15 bp, Homo sapiens
gtcttattatccctt

SEQ ID NO: 1152523 - DNA, 15 bp, Homo sapiens
tgtcttattatccct

SEQ ID NO: 1152524 - DNA, 15 bp, Homo sapiens
atgtcttattatccc

SEQ ID NO: 1152525 - DNA, 15 bp, Homo sapiens
aatgtcttattatcc

SEQ ID NO: 1152526 - DNA, 15 bp, Homo sapiens
caatgtcttattatc

SEQ ID NO: 1152527 - DNA, 15 bp, Homo sapiens
gcaatgtcttattat

SEQ ID NO: 1152528 - DNA, 15 bp, Homo sapiens
agcaatgtcttatta

SEQ ID NO: 1152529 - DNA, 15 bp, Homo sapiens
aagcaatgtcttatt

SEQ ID NO: 1152530 - DNA, 15 bp, Homo sapiens
taagcaatgtcttat

SEQ ID NO: 1152531 - DNA, 15 bp, Homo sapiens
ataagcaatgtctta

SEQ ID NO: 1152532 - DNA, 15 bp, Homo sapiens
aataagcaatgtctt

SEQ ID NO: 1152533 - DNA, 15 bp, Homo sapiens
aaataagcaatgtct

SEQ ID NO: 1152534 - DNA, 15 bp, Homo sapiens
aaaataagcaatgtc

SEQ ID NO: 1152535 - DNA, 15 bp, Homo sapiens
gaaaataagcaatgt

SEQ ID NO: 1152536 - DNA, 15 bp, Homo sapiens
agaaaataagcaatg

SEQ ID NO: 1152537 - DNA, 15 bp, Homo sapiens
aagaaaataagcaat

SEQ ID NO: 1152538 - DNA, 15 bp, Homo sapiens
aaagaaaataagcaa

SEQ ID NO: 1152539 - DNA, 15 bp, Homo sapiens
gaaagaaaataagca

SEQ ID NO: 1152540 - DNA, 15 bp, Homo sapiens
agaaagaaaataagc

SEQ ID NO: 1152541 - DNA, 15 bp, Homo sapiens
aagaaagaaaataag

SEQ ID NO: 1152542 - DNA, 15 bp, Homo sapiens
aaagaaagaaaataa

SEQ ID NO: 1152543 - DNA, 15 bp, Homo sapiens
gaaagaaagaaaata

SEQ ID NO: 1152544 - DNA, 15 bp, Homo sapiens
tgaaagaaagaaaat

SEQ ID NO: 1152545 - DNA, 15 bp, Homo sapiens
ttgaaagaaagaaaa

SEQ ID NO: 1152546 - DNA, 15 bp, Homo sapiens
attgaaagaaagaaa

SEQ ID NO: 1152547 - DNA, 15 bp, Homo sapiens
gattgaaagaaagaa

SEQ ID NO: 1152548 - DNA, 15 bp, Homo sapiens
agattgaaagaaaga

SEQ ID NO: 1152549 - DNA, 15 bp, Homo sapiens
aagattgaaagaaag

SEQ ID NO: 1152550 - DNA, 15 bp, Homo sapiens
gaagattgaaagaaa

SEQ ID NO: 1152551 - DNA, 15 bp, Homo sapiens
tgaagattgaaagaa

SEQ ID NO: 1152552 - DNA, 15 bp, Homo sapiens
ctgaagattgaaaga

SEQ ID NO: 1152553 - DNA, 15 bp, Homo sapiens
actgaagattgaaag

SEQ ID NO: 1152554 - DNA, 15 bp, Homo sapiens
aactgaagattgaaa

SEQ ID NO: 1152555 - DNA, 15 bp, Homo sapiens
aaactgaagattgaa

SEQ ID NO: 1152556 - DNA, 15 bp, Homo sapiens
taaactgaagattga

SEQ ID NO: 1152557 - DNA, 15 bp, Homo sapiens
ttaaactgaagattg

SEQ ID NO: 1152558 - DNA, 15 bp, Homo sapiens
gttaaactgaagatt

SEQ ID NO: 1152559 - DNA, 15 bp, Homo sapiens
tgttaaactgaagat

SEQ ID NO: 1152560 - DNA, 15 bp, Homo sapiens
ttgttaaactgaaga

SEQ ID NO: 1152561 - DNA, 15 bp, Homo sapiens
cttgttaaactgaag

SEQ ID NO: 1152562 - DNA, 15 bp, Homo sapiens
ccttgttaaactgaa

SEQ ID NO: 1152563 - DNA, 15 bp, Homo sapiens
accttgttaaactga

SEQ ID NO: 1152564 - DNA, 15 bp, Homo sapiens
taccttgttaaactg

SEQ ID NO: 1152565 - DNA, 15 bp, Homo sapiens
gtaccttgttaaact

SEQ ID NO: 1152566 - DNA, 15 bp, Homo sapiens
tgtaccttgttaaac

SEQ ID NO: 1152567 - DNA, 15 bp, Homo sapiens
atgtaccttgttaaa

SEQ ID NO: 1152568 - DNA, 15 bp, Homo sapiens
catgtaccttgttaa

SEQ ID NO: 1152569 - DNA, 15 bp, Homo sapiens
ccatgtaccttgtta

SEQ ID NO: 1152570 - DNA, 15 bp, Homo sapiens
cccatgtaccttgtt

SEQ ID NO: 1152571 - DNA, 15 bp, Homo sapiens
tcccatgtaccttgt

SEQ ID NO: 1152572 - DNA, 15 bp, Homo sapiens
atcccatgtaccttg

SEQ ID NO: 1152573 - DNA, 15 bp, Homo sapiens
aatcccatgtacctt

SEQ ID NO: 1152574 - DNA, 15 bp, Homo sapiens
gaatcccatgtacct

SEQ ID NO: 1152575 - DNA, 15 bp, Homo sapiens
ggaatcccatgtacc

SEQ ID NO: 1152576 - DNA, 15 bp, Homo sapiens
tggaatcccatgtac

SEQ ID NO: 1152577 - DNA, 15 bp, Homo sapiens
ctggaatcccatgta

SEQ ID NO: 1152578 - DNA, 15 bp, Homo sapiens
cctggaatcccatgt

SEQ ID NO: 1152579 - DNA, 15 bp, Homo sapiens
tcctggaatcccatg

SEQ ID NO: 1152580 - DNA, 15 bp, Homo sapiens
ctcctggaatcccat

SEQ ID NO: 1152581 - DNA, 15 bp, Homo sapiens
tctcctggaatccca

SEQ ID NO: 1152582 - DNA, 15 bp, Homo sapiens
ttctcctggaatccc

SEQ ID NO: 1152583 - DNA, 15 bp, Homo sapiens
tcttctcctggaatc

SEQ ID NO: 1152584 - DNA, 15 bp, Homo sapiens
atcttctcctggaat

SEQ ID NO: 1152585 - DNA, 15 bp, Homo sapiens
aatcttctcctggaa

SEQ ID NO: 1152586 - DNA, 15 bp, Homo sapiens
aaatcttctcctgga

SEQ ID NO: 1152587 - DNA, 15 bp, Homo sapiens
gaaatcttctcctgg

SEQ ID NO: 1152588 - DNA, 15 bp, Homo sapiens
agaaatcttctcctg

SEQ ID NO: 1152589 - DNA, 15 bp, Homo sapiens
tagaaatcttctcct

SEQ ID NO: 1152590 - DNA, 15 bp, Homo sapiens
atagaaatcttctcc

SEQ ID NO: 1152591 - DNA, 15 bp, Homo sapiens
catagaaatcttctc

SEQ ID NO: 1152592 - DNA, 15 bp, Homo sapiens
tcatagaaatcttct

SEQ ID NO: 1152593 - DNA, 15 bp, Homo sapiens
ttcatagaaatcttc

SEQ ID NO: 1152594 - DNA, 15 bp, Homo sapiens
gttcatagaaatctt

SEQ ID NO: 1152595 - DNA, 15 bp, Homo sapiens
tgttcatagaaatct

SEQ ID NO: 1152596 - DNA, 15 bp, Homo sapiens
atgttcatagaaatc

SEQ ID NO: 1152597 - DNA, 15 bp, Homo sapiens
catgttcatagaaat

SEQ ID NO: 1152598 - DNA, 15 bp, Homo sapiens
acatgttcatagaaa

SEQ ID NO: 1152599 - DNA, 15 bp, Homo sapiens
aacatgttcatagaa

SEQ ID NO: 1152600 - DNA, 15 bp, Homo sapiens
taacatgttcataga

SEQ ID NO: 1152601 - DNA, 15 bp, Homo sapiens
ataacatgttcatag

SEQ ID NO: 1152602 - DNA, 15 bp, Homo sapiens
tataacatgttcata

SEQ ID NO: 1152603 - DNA, 15 bp, Homo sapiens
ttataacatgttcat

SEQ ID NO: 1152604 - DNA, 15 bp, Homo sapiens
attataacatgttca

SEQ ID NO: 1152605 - DNA, 15 bp, Homo sapiens
tattataacatgttc

SEQ ID NO: 1152606 - DNA, 15 bp, Homo sapiens
ttattataacatgtt

SEQ ID NO: 1152607 - DNA, 15 bp, Homo sapiens
attattataacatgt

SEQ ID NO: 1152608 - DNA, 15 bp, Homo sapiens
aattattataacatg

SEQ ID NO: 1152609 - DNA, 15 bp, Homo sapiens
gaattattataacat

SEQ ID NO: 1152610 - DNA, 15 bp, Homo sapiens
agaattattataaca

SEQ ID NO: 1152611 - DNA, 15 bp, Homo sapiens
cagaattattataac

SEQ ID NO: 1152612 - DNA, 15 bp, Homo sapiens
acagaattattataa

SEQ ID NO: 1152613 - DNA, 15 bp, Homo sapiens
tacagaattattata

SEQ ID NO: 1152614 - DNA, 15 bp, Homo sapiens
ctacagaattattat

SEQ ID NO: 1152615 - DNA, 15 bp, Homo sapiens
tctacagaattatta

SEQ ID NO: 1152616 - DNA, 15 bp, Homo sapiens
gtctacagaattatt

SEQ ID NO: 1152617 - DNA, 15 bp, Homo sapiens
cgtctacagaattat

SEQ ID NO: 1152618 - DNA, 15 bp, Homo sapiens
tcgtctacagaatta

SEQ ID NO: 1152619 - DNA, 15 bp, Homo sapiens
ctcgtctacagaatt

SEQ ID NO: 1152620 - DNA, 15 bp, Homo sapiens
actcgtctacagaat

SEQ ID NO: 1152621 - DNA, 15 bp, Homo sapiens
cactcgtctacagaa

SEQ ID NO: 1152622 - DNA, 15 bp, Homo sapiens
acactcgtctacaga

SEQ ID NO: 1152623 - DNA, 15 bp, Homo sapiens
tacactcgtctacag

SEQ ID NO: 1152624 - DNA, 15 bp, Homo sapiens
atacactcgtctaca

SEQ ID NO: 1152625 - DNA, 15 bp, Homo sapiens
aatacactcgtctac

SEQ ID NO: 1152626 - DNA, 15 bp, Homo sapiens
aaatacactcgtcta

SEQ ID NO: 1152627 - DNA, 15 bp, Homo sapiens
aaaatacactcgtct

SEQ ID NO: 1152628 - DNA, 15 bp, Homo sapiens
aaaaatacactcgtc

SEQ ID NO: 1152629 - DNA, 15 bp, Homo sapiens
caaaaatacactcgt

SEQ ID NO: 1152630 - DNA, 15 bp, Homo sapiens
acaaaaatacactcg

SEQ ID NO: 1152631 - DNA, 15 bp, Homo sapiens
aacaaaaatacactc

SEQ ID NO: 1152632 - DNA, 15 bp, Homo sapiens
aaacaaaaatacact

SEQ ID NO: 1152633 - DNA, 15 bp, Homo sapiens
caaacaaaaatacac

SEQ ID NO: 1152634 - DNA, 15 bp, Homo sapiens
acaaacaaaaataca

SEQ ID NO: 1152635 - DNA, 15 bp, Homo sapiens
tacaaacaaaaatac

SEQ ID NO: 1152636 - DNA, 15 bp, Homo sapiens
ctacaaacaaaaata

SEQ ID NO: 1152637 - DNA, 15 bp, Homo sapiens
gctacaaacaaaaat

SEQ ID NO: 1152638 - DNA, 15 bp, Homo sapiens
agctacaaacaaaaa

SEQ ID NO: 1152639 - DNA, 15 bp, Homo sapiens
gagctacaaacaaaa

SEQ ID NO: 1152640 - DNA, 15 bp, Homo sapiens
tgagctacaaacaaa

SEQ ID NO: 1152641 - DNA, 15 bp, Homo sapiens
ttgagctacaaacaa

SEQ ID NO: 1152642 - DNA, 15 bp, Homo sapiens
tttgagctacaaaca

SEQ ID NO: 1152643 - DNA, 15 bp, Homo sapiens
gtttgagctacaaac

SEQ ID NO: 1152644 - DNA, 15 bp, Homo sapiens
tgtttgagctacaaa

SEQ ID NO: 1152645 - DNA, 15 bp, Homo sapiens
ctgtttgagctacaa

SEQ ID NO: 1152646 - DNA, 15 bp, Homo sapiens
actgtttgagctaca

SEQ ID NO: 1152647 - DNA, 15 bp, Homo sapiens
aactgtttgagctac

SEQ ID NO: 1152648 - DNA, 15 bp, Homo sapiens
taactgtttgagcta

SEQ ID NO: 1152649 - DNA, 15 bp, Homo sapiens
gtaactgtttgagct

SEQ ID NO: 1152650 - DNA, 15 bp, Homo sapiens
tgtaactgtttgagc

SEQ ID NO: 1152651 - DNA, 15 bp, Homo sapiens
ctgtaactgtttgag

SEQ ID NO: 1152652 - DNA, 15 bp, Homo sapiens
actgtaactgtttga

SEQ ID NO: 1152653 - DNA, 15 bp, Homo sapiens
gactgtaactgtttg

SEQ ID NO: 1152654 - DNA, 15 bp, Homo sapiens
ggactgtaactgttt

SEQ ID NO: 1152655 - DNA, 15 bp, Homo sapiens
tggactgtaactgtt

SEQ ID NO: 1152656 - DNA, 15 bp, Homo sapiens
gtggactgtaactgt

SEQ ID NO: 1152657 - DNA, 15 bp, Homo sapiens
tgtggactgtaactg

SEQ ID NO: 1152658 - DNA, 15 bp, Homo sapiens
atgtggactgtaact

SEQ ID NO: 1152659 - DNA, 15 bp, Homo sapiens
tatgtggactgtaac

SEQ ID NO: 1152660 - DNA, 15 bp, Homo sapiens
gtatgtggactgtaa

SEQ ID NO: 1152661 - DNA, 15 bp, Homo sapiens
agtatgtggactgta

SEQ ID NO: 1152662 - DNA, 15 bp, Homo sapiens
tagtatgtggactgt

SEQ ID NO: 1152663 - DNA, 15 bp, Homo sapiens
ctagtatgtggactg

SEQ ID NO: 1152664 - DNA, 15 bp, Homo sapiens
tctagtatgtggact

SEQ ID NO: 1152665 - DNA, 15 bp, Homo sapiens
ctctagtatgtggac

SEQ ID NO: 1152666 - DNA, 15 bp, Homo sapiens
tctctagtatgtgga

SEQ ID NO: 1152667 - DNA, 15 bp, Homo sapiens
ctctctagtatgtgg

SEQ ID NO: 1152668 - DNA, 15 bp, Homo sapiens
gctctctagtatgtg

SEQ ID NO: 1152669 - DNA, 15 bp, Homo sapiens
tgctctctagtatgt

SEQ ID NO: 1152670 - DNA, 15 bp, Homo sapiens
gtgctctctagtatg

SEQ ID NO: 1152671 - DNA, 15 bp, Homo sapiens
ggtgctctctagtat

SEQ ID NO: 1152672 - DNA, 15 bp, Homo sapiens
aggtgctctctagta

SEQ ID NO: 1152673 - DNA, 15 bp, Homo sapiens
aaggtgctctctagt

SEQ ID NO: 1152674 - DNA, 15 bp, Homo sapiens
aaaggtgctctctag

SEQ ID NO: 1152675 - DNA, 15 bp, Homo sapiens
taaaggtgctctcta

SEQ ID NO: 1152676 - DNA, 15 bp, Homo sapiens
ttaaaggtgctctct

SEQ ID NO: 1152677 - DNA, 15 bp, Homo sapiens
tttaaaggtgctctc

SEQ ID NO: 1152678 - DNA, 15 bp, Homo sapiens
gtttaaaggtgctct

SEQ ID NO: 1152679 - DNA, 15 bp, Homo sapiens
tgtttaaaggtgctc

SEQ ID NO: 1152680 - DNA, 15 bp, Homo sapiens
gtgtttaaaggtgct

SEQ ID NO: 1152681 - DNA, 15 bp, Homo sapiens
tgtgtttaaaggtgc

SEQ ID NO: 1152682 - DNA, 15 bp, Homo sapiens
ctgtgtttaaaggtg

SEQ ID NO: 1152683 - DNA, 15 bp, Homo sapiens
gctgtgtttaaaggt

SEQ ID NO: 1152684 - DNA, 15 bp, Homo sapiens
tgctgtgtttaaagg

SEQ ID NO: 1152685 - DNA, 15 bp, Homo sapiens
ttgctgtgtttaaag

SEQ ID NO: 1152686 - DNA, 15 bp, Homo sapiens
tttgctgtgtttaaa

SEQ ID NO: 1152687 - DNA, 15 bp, Homo sapiens
atttgctgtgtttaa

SEQ ID NO: 1152688 - DNA, 15 bp, Homo sapiens
catttgctgtgttta

SEQ ID NO: 1152689 - DNA, 15 bp, Homo sapiens
acatttgctgtgttt

SEQ ID NO: 1152690 - DNA, 15 bp, Homo sapiens
aacatttgctgtgtt

SEQ ID NO: 1152691 - DNA, 15 bp, Homo sapiens
aaacatttgctgtgt

SEQ ID NO: 1152692 - DNA, 15 bp, Homo sapiens
taaacatttgctgtg

SEQ ID NO: 1152693 - DNA, 15 bp, Homo sapiens
ctaaacatttgctgt

SEQ ID NO: 1152694 - DNA, 15 bp, Homo sapiens
actaaacatttgctg

SEQ ID NO: 1152695 - DNA, 15 bp, Homo sapiens
gactaaacatttgct

SEQ ID NO: 1152696 - DNA, 15 bp, Homo sapiens
tgactaaacatttgc

SEQ ID NO: 1152697 - DNA, 15 bp, Homo sapiens
ctgactaaacatttg

SEQ ID NO: 1152698 - DNA, 15 bp, Homo sapiens
tctgactaaacattt

SEQ ID NO: 1152699 - DNA, 15 bp, Homo sapiens
ctctgactaaacatt

SEQ ID NO: 1152700 - DNA, 15 bp, Homo sapiens
tctctgactaaacat

SEQ ID NO: 1152701 - DNA, 15 bp, Homo sapiens
atctctgactaaaca

SEQ ID NO: 1152702 - DNA, 15 bp, Homo sapiens
aatctctgactaaac

SEQ ID NO: 1152703 - DNA, 15 bp, Homo sapiens
aaatctctgactaaa

SEQ ID NO: 1152704 - DNA, 15 bp, Homo sapiens
gaaatctctgactaa

SEQ ID NO: 1152705 - DNA, 15 bp, Homo sapiens
tgaaatctctgacta

SEQ ID NO: 1152706 - DNA, 15 bp, Homo sapiens
ttgaaatctctgact

SEQ ID NO: 1152707 - DNA, 15 bp, Homo sapiens
gttgaaatctctgac

SEQ ID NO: 1152708 - DNA, 15 bp, Homo sapiens
ggttgaaatctctga

SEQ ID NO: 1152709 - DNA, 15 bp, Homo sapiens
aggttgaaatctctg

SEQ ID NO: 1152710 - DNA, 15 bp, Homo sapiens
taggttgaaatctct

SEQ ID NO: 1152711 - DNA, 15 bp, Homo sapiens
ttaggttgaaatctc

SEQ ID NO: 1152712 - DNA, 15 bp, Homo sapiens
gttaggttgaaatct

SEQ ID NO: 1152713 - DNA, 15 bp, Homo sapiens
agttaggttgaaatc

SEQ ID NO: 1152714 - DNA, 15 bp, Homo sapiens
cagttaggttgaaat

SEQ ID NO: 1152715 - DNA, 15 bp, Homo sapiens
acagttaggttgaaa

SEQ ID NO: 1152716 - DNA, 15 bp, Homo sapiens
cacagttaggttgaa

SEQ ID NO: 1152717 - DNA, 15 bp, Homo sapiens
gcacagttaggttga

SEQ ID NO: 1152718 - DNA, 15 bp, Homo sapiens
agcacagttaggttg

SEQ ID NO: 1152719 - DNA, 15 bp, Homo sapiens
aagcacagttaggtt

SEQ ID NO: 1152720 - DNA, 15 bp, Homo sapiens
taagcacagttaggt

SEQ ID NO: 1152721 - DNA, 15 bp, Homo sapiens
ctaagcacagttagg

SEQ ID NO: 1152722 - DNA, 15 bp, Homo sapiens
tctaagcacagttag

SEQ ID NO: 1152723 - DNA, 15 bp, Homo sapiens
ttctaagcacagtta

SEQ ID NO: 1152724 - DNA, 15 bp, Homo sapiens
tttctaagcacagtt

SEQ ID NO: 1152725 - DNA, 15 bp, Homo sapiens
atttctaagcacagt

SEQ ID NO: 1152726 - DNA, 15 bp, Homo sapiens
catttctaagcacag

SEQ ID NO: 1152727 - DNA, 15 bp, Homo sapiens
tcatttctaagcaca

SEQ ID NO: 1152728 - DNA, 15 bp, Homo sapiens
ttcatttctaagcac

SEQ ID NO: 1152729 - DNA, 15 bp, Homo sapiens
tttcatttctaagca

SEQ ID NO: 1152730 - DNA, 15 bp, Homo sapiens
atttcatttctaagc

SEQ ID NO: 1152731 - DNA, 15 bp, Homo sapiens
gatttcatttctaag

SEQ ID NO: 1152732 - DNA, 15 bp, Homo sapiens
ggatttcatttctaa

SEQ ID NO: 1152733 - DNA, 15 bp, Homo sapiens
aggatttcatttcta

SEQ ID NO: 1152734 - DNA, 15 bp, Homo sapiens
caggatttcatttct

SEQ ID NO: 1152735 - DNA, 15 bp, Homo sapiens
acaggatttcatttc

SEQ ID NO: 1152736 - DNA, 15 bp, Homo sapiens
tacaggatttcattt

SEQ ID NO: 1152737 - DNA, 15 bp, Homo sapiens
ttacaggatttcatt

SEQ ID NO: 1152738 - DNA, 15 bp, Homo sapiens
tttacaggatttcat

SEQ ID NO: 1152739 - DNA, 15 bp, Homo sapiens
gtttacaggatttca

SEQ ID NO: 1152740 - DNA, 15 bp, Homo sapiens
tgtttacaggatttc

SEQ ID NO: 1152741 - DNA, 15 bp, Homo sapiens
ttgtttacaggattt

SEQ ID NO: 1152742 - DNA, 15 bp, Homo sapiens
attgtttacaggatt

SEQ ID NO: 1152743 - DNA, 15 bp, Homo sapiens
aattgtttacaggat

SEQ ID NO: 1152744 - DNA, 15 bp, Homo sapiens
aaattgtttacagga

SEQ ID NO: 1152745 - DNA, 15 bp, Homo sapiens
caaattgtttacagg

SEQ ID NO: 1152746 - DNA, 15 bp, Homo sapiens
ccaaattgtttacag

SEQ ID NO: 1152747 - DNA, 15 bp, Homo sapiens
accaaattgtttaca

SEQ ID NO: 1152748 - DNA, 15 bp, Homo sapiens
caccaaattgtttac

SEQ ID NO: 1152749 - DNA, 15 bp, Homo sapiens
tcaccaaattgttta

SEQ ID NO: 1152750 - DNA, 15 bp, Homo sapiens
atcaccaaattgttt

SEQ ID NO: 1152751 - DNA, 15 bp, Homo sapiens
tatcaccaaattgtt

SEQ ID NO: 1152752 - DNA, 15 bp, Homo sapiens
gtatcaccaaattgt

SEQ ID NO: 1152753 - DNA, 15 bp, Homo sapiens
agtatcaccaaattg

SEQ ID NO: 1152754 - DNA, 15 bp, Homo sapiens
cagtatcaccaaatt

SEQ ID NO: 1152755 - DNA, 15 bp, Homo sapiens
ccagtatcaccaaat

SEQ ID NO: 1152756 - DNA, 15 bp, Homo sapiens
gccagtatcaccaaa

SEQ ID NO: 1152757 - DNA, 15 bp, Homo sapiens
tgccagtatcaccaa

SEQ ID NO: 1152758 - DNA, 15 bp, Homo sapiens
ttgccagtatcacca

SEQ ID NO: 1152759 - DNA, 15 bp, Homo sapiens
tttgccagtatcacc

SEQ ID NO: 1152760 - DNA, 15 bp, Homo sapiens
atttgccagtatcac

SEQ ID NO: 1152761 - DNA, 15 bp, Homo sapiens
aatttgccagtatca

SEQ ID NO: 1152762 - DNA, 15 bp, Homo sapiens
aaatttgccagtatc

SEQ ID NO: 1152763 - DNA, 15 bp, Homo sapiens
taaatttgccagtat

SEQ ID NO: 1152764 - DNA, 15 bp, Homo sapiens
ttaaatttgccagta

SEQ ID NO: 1152765 - DNA, 15 bp, Homo sapiens
tttaaatttgccagt

SEQ ID NO: 1152766 - DNA, 15 bp, Homo sapiens
ctttaaatttgccag

SEQ ID NO: 1152767 - DNA, 15 bp, Homo sapiens
gctttaaatttgcca

SEQ ID NO: 1152768 - DNA, 15 bp, Homo sapiens
tgctttaaatttgcc

SEQ ID NO: 1152769 - DNA, 15 bp, Homo sapiens
atgctttaaatttgc

SEQ ID NO: 1152770 - DNA, 15 bp, Homo sapiens
gatgctttaaatttg

SEQ ID NO: 1152771 - DNA, 15 bp, Homo sapiens
agatgctttaaattt

SEQ ID NO: 1152772 - DNA, 15 bp, Homo sapiens
tagatgctttaaatt

SEQ ID NO: 1152773 - DNA, 15 bp, Homo sapiens
gtagatgctttaaat

SEQ ID NO: 1152774 - DNA, 15 bp, Homo sapiens
ggtagatgctttaaa

SEQ ID NO: 1152775 - DNA, 15 bp, Homo sapiens
aggtagatgctttaa

SEQ ID NO: 1152776 - DNA, 15 bp, Homo sapiens
gaggtagatgcttta

SEQ ID NO: 1152777 - DNA, 15 bp, Homo sapiens
ggaggtagatgcttt

SEQ ID NO: 1152778 - DNA, 15 bp, Homo sapiens
aggaggtagatgctt

SEQ ID NO: 1152779 - DNA, 15 bp, Homo sapiens
aaggaggtagatgct

SEQ ID NO: 1152780 - DNA, 15 bp, Homo sapiens
gaaggaggtagatgc

SEQ ID NO: 1152781 - DNA, 15 bp, Homo sapiens
ggaaggaggtagatg

SEQ ID NO: 1152782 - DNA, 15 bp, Homo sapiens
tggaaggaggtagat

SEQ ID NO: 1152783 - DNA, 15 bp, Homo sapiens
ttggaaggaggtaga

SEQ ID NO: 1152784 - DNA, 15 bp, Homo sapiens
attggaaggaggtag

SEQ ID NO: 1152785 - DNA, 15 bp, Homo sapiens
gattggaaggaggta

SEQ ID NO: 1152786 - DNA, 15 bp, Homo sapiens
agattggaaggaggt

SEQ ID NO: 1152787 - DNA, 15 bp, Homo sapiens
tagattggaaggagg

SEQ ID NO: 1152788 - DNA, 15 bp, Homo sapiens
ttagattggaaggag

SEQ ID NO: 1152789 - DNA, 15 bp, Homo sapiens
attagattggaagga

SEQ ID NO: 1152790 - DNA, 15 bp, Homo sapiens
aattagattggaagg

SEQ ID NO: 1152791 - DNA, 15 bp, Homo sapiens
aaattagattggaag

SEQ ID NO: 1152792 - DNA, 15 bp, Homo sapiens
aaaattagattggaa

SEQ ID NO: 1152793 - DNA, 15 bp, Homo sapiens
gaaaattagattgga

SEQ ID NO: 1152794 - DNA, 15 bp, Homo sapiens
ggaaaattagattgg

SEQ ID NO: 1152795 - DNA, 15 bp, Homo sapiens
aggaaaattagattg

SEQ ID NO: 1152796 - DNA, 15 bp, Homo sapiens
gaggaaaattagatt

SEQ ID NO: 1152797 - DNA, 15 bp, Homo sapiens
agaggaaaattagat

SEQ ID NO: 1152798 - DNA, 15 bp, Homo sapiens
aagaggaaaattaga

SEQ ID NO: 1152799 - DNA, 15 bp, Homo sapiens
gaagaggaaaattag

SEQ ID NO: 1152800 - DNA, 15 bp, Homo sapiens
tgaagaggaaaatta

SEQ ID NO: 1152801 - DNA, 15 bp, Homo sapiens
ctgaagaggaaaatt

SEQ ID NO: 1152802 - DNA, 15 bp, Homo sapiens
tctgaagaggaaaat

SEQ ID NO: 1152803 - DNA, 15 bp, Homo sapiens
atctgaagaggaaaa

SEQ ID NO: 1152804 - DNA, 15 bp, Homo sapiens
aatctgaagaggaaa

SEQ ID NO: 1152805 - DNA, 15 bp, Homo sapiens
caatctgaagaggaa

SEQ ID NO: 1152806 - DNA, 15 bp, Homo sapiens
acaatctgaagagga

SEQ ID NO: 1152807 - DNA, 15 bp, Homo sapiens
aacaatctgaagagg

SEQ ID NO: 1152808 - DNA, 15 bp, Homo sapiens
taacaatctgaagag

SEQ ID NO: 1152809 - DNA, 15 bp, Homo sapiens
ttaacaatctgaaga

SEQ ID NO: 1152810 - DNA, 15 bp, Homo sapiens
attaacaatctgaag

SEQ ID NO: 1152811 - DNA, 15 bp, Homo sapiens
aattaacaatctgaa

SEQ ID NO: 1152812 - DNA, 15 bp, Homo sapiens
taattaacaatctga

SEQ ID NO: 1152813 - DNA, 15 bp, Homo sapiens
ttaattaacaatctg

SEQ ID NO: 1152814 - DNA, 15 bp, Homo sapiens
tttaattaacaatct

SEQ ID NO: 1152815 - DNA, 15 bp, Homo sapiens
ctttaattaacaatc

SEQ ID NO: 1152816 - DNA, 15 bp, Homo sapiens
tctttaattaacaat

SEQ ID NO: 1152817 - DNA, 15 bp, Homo sapiens
ttctttaattaacaa

SEQ ID NO: 1152818 - DNA, 15 bp, Homo sapiens
tttctttaattaaca

SEQ ID NO: 1152819 - DNA, 15 bp, Homo sapiens
ttttctttaattaac

SEQ ID NO: 1152820 - DNA, 15 bp, Homo sapiens
attttctttaattaa

SEQ ID NO: 1152821 - DNA, 15 bp, Homo sapiens
cattttctttaatta

SEQ ID NO: 1152822 - DNA, 15 bp, Homo sapiens
tcattttctttaatt

SEQ ID NO: 1152823 - DNA, 15 bp, Homo sapiens
ttcattttctttaat

SEQ ID NO: 1152824 - DNA, 15 bp, Homo sapiens
tttcattttctttaa

SEQ ID NO: 1152825 - DNA, 15 bp, Homo sapiens
ttttcattttcttta

SEQ ID NO: 1152826 - DNA, 15 bp, Homo sapiens
cttttcattttcttt

SEQ ID NO: 1152827 - DNA, 15 bp, Homo sapiens
acttttcattttctt

SEQ ID NO: 1152828 - DNA, 15 bp, Homo sapiens
tacttttcattttct

SEQ ID NO: 1152829 - DNA, 15 bp, Homo sapiens
atacttttcattttc

SEQ ID NO: 1152830 - DNA, 15 bp, Homo sapiens
tatacttttcatttt

SEQ ID NO: 1152831 - DNA, 15 bp, Homo sapiens
gtatacttttcattt

SEQ ID NO: 1152832 - DNA, 15 bp, Homo sapiens
agtatacttttcatt

SEQ ID NO: 1152833 - DNA, 15 bp, Homo sapiens
aagtatacttttcat

SEQ ID NO: 1152834 - DNA, 15 bp, Homo sapiens
aaagtatacttttca

SEQ ID NO: 1152835 - DNA, 15 bp, Homo sapiens
taaagtatacttttc

SEQ ID NO: 1152836 - DNA, 15 bp, Homo sapiens
ttaaagtatactttt

SEQ ID NO: 1152837 - DNA, 15 bp, Homo sapiens
attaaagtatacttt

SEQ ID NO: 1152838 - DNA, 15 bp, Homo sapiens
aattaaagtatactt

SEQ ID NO: 1152839 - DNA, 15 bp, Homo sapiens
aaattaaagtatact

SEQ ID NO: 1152840 - DNA, 15 bp, Homo sapiens
aaaattaaagtatac

SEQ ID NO: 1152841 - DNA, 15 bp, Homo sapiens
taaaattaaagtata

SEQ ID NO: 1152842 - DNA, 15 bp, Homo sapiens
ataaaattaaagtat

SEQ ID NO: 1152843 - DNA, 15 bp, Homo sapiens
aataaaattaaagta

SEQ ID NO: 1152844 - DNA, 15 bp, Homo sapiens
caataaaattaaagt

SEQ ID NO: 1152845 - DNA, 15 bp, Homo sapiens
gcaataaaattaaag

SEQ ID NO: 1152846 - DNA, 15 bp, Homo sapiens
ggcaataaaattaaa

SEQ ID NO: 1152847 - DNA, 15 bp, Homo sapiens
tggcaataaaattaa

SEQ ID NO: 1152848 - DNA, 15 bp, Homo sapiens
ttggcaataaaatta

SEQ ID NO: 1152849 - DNA, 15 bp, Homo sapiens
tttggcaataaaatt

SEQ ID NO: 1152850 - DNA, 15 bp, Homo sapiens
ttttggcaataaaat

SEQ ID NO: 1152851 - DNA, 15 bp, Homo sapiens
cttttggcaataaaa

SEQ ID NO: 1152852 - DNA, 15 bp, Homo sapiens
gcttttggcaataaa

SEQ ID NO: 1152853 - DNA, 15 bp, Homo sapiens
tgcttttggcaataa

SEQ ID NO: 1152854 - DNA, 15 bp, Homo sapiens
gtgcttttggcaata

SEQ ID NO: 1152855 - DNA, 15 bp, Homo sapiens
agtgcttttggcaat

SEQ ID NO: 1152856 - DNA, 15 bp, Homo sapiens
tagtgcttttggcaa

SEQ ID NO: 1152857 - DNA, 15 bp, Homo sapiens
ctagtgcttttggca

SEQ ID NO: 1152858 - DNA, 15 bp, Homo sapiens
actagtgcttttggc

SEQ ID NO: 1152859 - DNA, 15 bp, Homo sapiens
aactagtgcttttgg

SEQ ID NO: 1152860 - DNA, 15 bp, Homo sapiens
aaactagtgcttttg

SEQ ID NO: 1152861 - DNA, 15 bp, Homo sapiens
caaactagtgctttt

SEQ ID NO: 1152862 - DNA, 15 bp, Homo sapiens
gcaaactagtgcttt

SEQ ID NO: 1152863 - DNA, 15 bp, Homo sapiens
agcaaactagtgctt

SEQ ID NO: 1152864 - DNA, 15 bp, Homo sapiens
aagcaaactagtgct

SEQ ID NO: 1152865 - DNA, 15 bp, Homo sapiens
aaagcaaactagtgc

SEQ ID NO: 1152866 - DNA, 15 bp, Homo sapiens
taaagcaaactagtg

SEQ ID NO: 1152867 - DNA, 15 bp, Homo sapiens
ataaagcaaactagt

SEQ ID NO: 1152868 - DNA, 15 bp, Homo sapiens
aataaagcaaactag

SEQ ID NO: 1152869 - DNA, 15 bp, Homo sapiens
gaataaagcaaacta

SEQ ID NO: 1152870 - DNA, 15 bp, Homo sapiens
tgaataaagcaaact

SEQ ID NO: 1152871 - DNA, 15 bp, Homo sapiens
atgaataaagcaaac

SEQ ID NO: 1152872 - DNA, 15 bp, Homo sapiens
catgaataaagcaaa

SEQ ID NO: 1152873 - DNA, 15 bp, Homo sapiens
gcatgaataaagcaa

SEQ ID NO: 1152874 - DNA, 15 bp, Homo sapiens
tgcatgaataaagca

SEQ ID NO: 1152875 - DNA, 15 bp, Homo sapiens
ttgcatgaataaagc

SEQ ID NO: 1152876 - DNA, 15 bp, Homo sapiens
tttgcatgaataaag

SEQ ID NO: 1152877 - DNA, 15 bp, Homo sapiens
ttttgcatgaataaa

SEQ ID NO: 1152878 - DNA, 15 bp, Homo sapiens
gttttgcatgaataa

SEQ ID NO: 1152879 - DNA, 15 bp, Homo sapiens
tgttttgcatgaata

SEQ ID NO: 1152880 - DNA, 15 bp, Homo sapiens
ttgttttgcatgaat

SEQ ID NO: 1152881 - DNA, 15 bp, Homo sapiens
attgttttgcatgaa

SEQ ID NO: 1152882 - DNA, 15 bp, Homo sapiens
tattgttttgcatga

SEQ ID NO: 1152883 - DNA, 15 bp, Homo sapiens
ttattgttttgcatg

SEQ ID NO: 1152884 - DNA, 15 bp, Homo sapiens
attattgttttgcat

SEQ ID NO: 1152885 - DNA, 15 bp, Homo sapiens
tattattgttttgca

SEQ ID NO: 1152886 - DNA, 15 bp, Homo sapiens
gtattattgttttgc

SEQ ID NO: 1152887 - DNA, 15 bp, Homo sapiens
agtattattgttttg

SEQ ID NO: 1152888 - DNA, 15 bp, Homo sapiens
gagtattattgtttt

SEQ ID NO: 1152889 - DNA, 15 bp, Homo sapiens
tgagtattattgttt

SEQ ID NO: 1152890 - DNA, 15 bp, Homo sapiens
ttgagtattattgtt

SEQ ID NO: 1152891 - DNA, 15 bp, Homo sapiens
tttgagtattattgt

SEQ ID NO: 1152892 - DNA, 15 bp, Homo sapiens
gtttgagtattattg

SEQ ID NO: 1152893 - DNA, 15 bp, Homo sapiens
agtttgagtattatt

SEQ ID NO: 1152894 - DNA, 15 bp, Homo sapiens
aagtttgagtattat

SEQ ID NO: 1152895 - DNA, 15 bp, Homo sapiens
caagtttgagtatta

SEQ ID NO: 1152896 - DNA, 15 bp, Homo sapiens
gcaagtttgagtatt

SEQ ID NO: 1152897 - DNA, 15 bp, Homo sapiens
agcaagtttgagtat

SEQ ID NO: 1152898 - DNA, 15 bp, Homo sapiens
tagcaagtttgagta

SEQ ID NO: 1152899 - DNA, 15 bp, Homo sapiens
atagcaagtttgagt

SEQ ID NO: 1152900 - DNA, 15 bp, Homo sapiens
aatagcaagtttgag

SEQ ID NO: 1152901 - DNA, 15 bp, Homo sapiens
aaatagcaagtttga

SEQ ID NO: 1152902 - DNA, 15 bp, Homo sapiens
caaatagcaagtttg

SEQ ID NO: 1152903 - DNA, 15 bp, Homo sapiens
gcaaatagcaagttt

SEQ ID NO: 1152904 - DNA, 15 bp, Homo sapiens
ggcaaatagcaagtt

SEQ ID NO: 1152905 - DNA, 15 bp, Homo sapiens
gggcaaatagcaagt

SEQ ID NO: 1152906 - DNA, 15 bp, Homo sapiens
cgggcaaatagcaag

SEQ ID NO: 1152907 - DNA, 15 bp, Homo sapiens
gcgggcaaatagcaa

SEQ ID NO: 1152908 - DNA, 15 bp, Homo sapiens
tgcgggcaaatagca

SEQ ID NO: 1152909 - DNA, 15 bp, Homo sapiens
ctgcgggcaaatagc

SEQ ID NO: 1152910 - DNA, 15 bp, Homo sapiens
tctgcgggcaaatag

SEQ ID NO: 1152911 - DNA, 15 bp, Homo sapiens
atctgcgggcaaata

SEQ ID NO: 1152912 - DNA, 15 bp, Homo sapiens
gatctgcgggcaaat

SEQ ID NO: 1152913 - DNA, 15 bp, Homo sapiens
agatctgcgggcaaa

SEQ ID NO: 1152914 - DNA, 15 bp, Homo sapiens
tagatctgcgggcaa

SEQ ID NO: 1152915 - DNA, 15 bp, Homo sapiens
gtagatctgcgggca

SEQ ID NO: 1152916 - DNA, 15 bp, Homo sapiens
tgtagatctgcgggc

SEQ ID NO: 1152917 - DNA, 15 bp, Homo sapiens
ttgtagatctgcggg

SEQ ID NO: 1152918 - DNA, 15 bp, Homo sapiens
tttgtagatctgcgg

SEQ ID NO: 1152919 - DNA, 15 bp, Homo sapiens
ttttgtagatctgcg

SEQ ID NO: 1152920 - DNA, 15 bp, Homo sapiens
tttttgtagatctgc

SEQ ID NO: 1152921 - DNA, 15 bp, Homo sapiens
atttttgtagatctg

SEQ ID NO: 1152922 - DNA, 15 bp, Homo sapiens
catttttgtagatct

SEQ ID NO: 1152923 - DNA, 15 bp, Homo sapiens
gcatttttgtagatc

SEQ ID NO: 1152924 - DNA, 15 bp, Homo sapiens
agcatttttgtagat

SEQ ID NO: 1152925 - DNA, 15 bp, Homo sapiens
cagcatttttgtaga

SEQ ID NO: 1152926 - DNA, 15 bp, Homo sapiens
ccagcatttttgtag

SEQ ID NO: 1152927 - DNA, 15 bp, Homo sapiens
cccagcatttttgta

SEQ ID NO: 1152928 - DNA, 15 bp, Homo sapiens
tcccagcatttttgt

SEQ ID NO: 1152929 - DNA, 15 bp, Homo sapiens
gtcccagcatttttg

SEQ ID NO: 1152930 - DNA, 15 bp, Homo sapiens
agtcccagcattttt

SEQ ID NO: 1152931 - DNA, 15 bp, Homo sapiens
cagtcccagcatttt

SEQ ID NO: 1152932 - DNA, 15 bp, Homo sapiens
ccagtcccagcattt

SEQ ID NO: 1152933 - DNA, 15 bp, Homo sapiens
tccagtcccagcatt

SEQ ID NO: 1152934 - DNA, 15 bp, Homo sapiens
atccagtcccagcat

SEQ ID NO: 1152935 - DNA, 15 bp, Homo sapiens
catccagtcccagca

SEQ ID NO: 1152936 - DNA, 15 bp, Homo sapiens
tcatccagtcccagc

SEQ ID NO: 1152937 - DNA, 15 bp, Homo sapiens
atcatccagtcccag

SEQ ID NO: 1152938 - DNA, 15 bp, Homo sapiens
aatcatccagtccca

SEQ ID NO: 1152939 - DNA, 15 bp, Homo sapiens
aaatcatccagtccc

SEQ ID NO: 1152940 - DNA, 15 bp, Homo sapiens
gaaatcatccagtcc

SEQ ID NO: 1152941 - DNA, 15 bp, Homo sapiens
tgaaatcatccagtc

SEQ ID NO: 1152942 - DNA, 15 bp, Homo sapiens
ttgaaatcatccagt

SEQ ID NO: 1152943 - DNA, 15 bp, Homo sapiens
cttgaaatcatccag

SEQ ID NO: 1152944 - DNA, 15 bp, Homo sapiens
ccttgaaatcatcca

SEQ ID NO: 1152945 - DNA, 15 bp, Homo sapiens
tccttgaaatcatcc

SEQ ID NO: 1152946 - DNA, 15 bp, Homo sapiens
atccttgaaatcatc

SEQ ID NO: 1152947 - DNA, 15 bp, Homo sapiens
catccttgaaatcat

SEQ ID NO: 1152948 - DNA, 15 bp, Homo sapiens
acatccttgaaatca

SEQ ID NO: 1152949 - DNA, 15 bp, Homo sapiens
tacatccttgaaatc

SEQ ID NO: 1152950 - DNA, 15 bp, Homo sapiens
gtacatccttgaaat

SEQ ID NO: 1152951 - DNA, 15 bp, Homo sapiens
agtacatccttgaaa

SEQ ID NO: 1152952 - DNA, 15 bp, Homo sapiens
aagtacatccttgaa

SEQ ID NO: 1152953 - DNA, 15 bp, Homo sapiens
taagtacatccttga

SEQ ID NO: 1152954 - DNA, 15 bp, Homo sapiens
ataagtacatccttg

SEQ ID NO: 1152955 - DNA, 15 bp, Homo sapiens
gataagtacatcctt

SEQ ID NO: 1152956 - DNA, 15 bp, Homo sapiens
tgataagtacatcct

SEQ ID NO: 1152957 - DNA, 15 bp, Homo sapiens
ttgataagtacatcc

SEQ ID NO: 1152958 - DNA, 15 bp, Homo sapiens
attgataagtacatc

SEQ ID NO: 1152959 - DNA, 15 bp, Homo sapiens
cattgataagtacat

SEQ ID NO: 1152960 - DNA, 15 bp, Homo sapiens
ccattgataagtaca

SEQ ID NO: 1152961 - DNA, 15 bp, Homo sapiens
accattgataagtac

SEQ ID NO: 1152962 - DNA, 15 bp, Homo sapiens
taccattgataagta

SEQ ID NO: 1152963 - DNA, 15 bp, Homo sapiens
gtaccattgataagt

SEQ ID NO: 1152964 - DNA, 15 bp, Homo sapiens
tgtaccattgataag

SEQ ID NO: 1152965 - DNA, 15 bp, Homo sapiens
ttgtaccattgataa

SEQ ID NO: 1152966 - DNA, 15 bp, Homo sapiens
attgtaccattgata

SEQ ID NO: 1152967 - DNA, 15 bp, Homo sapiens
tattgtaccattgat

SEQ ID NO: 1152968 - DNA, 15 bp, Homo sapiens
ttattgtaccattga

SEQ ID NO: 1152969 - DNA, 15 bp, Homo sapiens
tttattgtaccattg

SEQ ID NO: 1152970 - DNA, 15 bp, Homo sapiens
ttttattgtaccatt

SEQ ID NO: 1152971 - DNA, 15 bp, Homo sapiens
gttttattgtaccat

SEQ ID NO: 1152972 - DNA, 15 bp, Homo sapiens
ggttttattgtacca

SEQ ID NO: 1152973 - DNA, 15 bp, Homo sapiens
tggttttattgtacc

SEQ ID NO: 1152974 - DNA, 15 bp, Homo sapiens
atggttttattgtac

SEQ ID NO: 1152975 - DNA, 15 bp, Homo sapiens
gatggttttattgta

SEQ ID NO: 1152976 - DNA, 15 bp, Homo sapiens
agatggttttattgt

SEQ ID NO: 1152977 - DNA, 15 bp, Homo sapiens
aagatggttttattg

SEQ ID NO: 1152978 - DNA, 15 bp, Homo sapiens
aaagatggttttatt

SEQ ID NO: 1152979 - DNA, 15 bp, Homo sapiens
aaaagatggttttat

SEQ ID NO: 1152980 - DNA, 15 bp, Homo sapiens
aaaaagatggtttta

SEQ ID NO: 1152981 - DNA, 15 bp, Homo sapiens
gaaaaagatggtttt

SEQ ID NO: 1152982 - DNA, 15 bp, Homo sapiens
tgaaaaagatggttt

SEQ ID NO: 1152983 - DNA, 15 bp, Homo sapiens
ctgaaaaagatggtt

SEQ ID NO: 1152984 - DNA, 15 bp, Homo sapiens
tctgaaaaagatggt

SEQ ID NO: 1152985 - DNA, 15 bp, Homo sapiens
ttctgaaaaagatgg

SEQ ID NO: 1152986 - DNA, 15 bp, Homo sapiens
tttctgaaaaagatg

SEQ ID NO: 1152987 - DNA, 15 bp, Homo sapiens
gtttctgaaaaagat

SEQ ID NO: 1152988 - DNA, 15 bp, Homo sapiens
agtttctgaaaaaga

SEQ ID NO: 1152989 - DNA, 15 bp, Homo sapiens
tagtttctgaaaaag

SEQ ID NO: 1152990 - DNA, 15 bp, Homo sapiens
gtagtttctgaaaaa

SEQ ID NO: 1152991 - DNA, 15 bp, Homo sapiens
agtagtttctgaaaa

SEQ ID NO: 1152992 - DNA, 15 bp, Homo sapiens
tagtagtttctgaaa

SEQ ID NO: 1152993 - DNA, 15 bp, Homo sapiens
ttagtagtttctgaa

SEQ ID NO: 1152994 - DNA, 15 bp, Homo sapiens
tttagtagtttctga

SEQ ID NO: 1152995 - DNA, 15 bp, Homo sapiens
gtttagtagtttctg

SEQ ID NO: 1152996 - DNA, 15 bp, Homo sapiens
agtttagtagtttct

SEQ ID NO: 1152997 - DNA, 15 bp, Homo sapiens
aagtttagtagtttc

SEQ ID NO: 1152998 - DNA, 15 bp, Homo sapiens
aaagtttagtagttt

SEQ ID NO: 1152999 - DNA, 15 bp, Homo sapiens
caaagtttagtagtt

SEQ ID NO: 1153000 - DNA, 15 bp, Homo sapiens
acaaagtttagtagt

SEQ ID NO: 1153001 - DNA, 15 bp, Homo sapiens
tacaaagtttagtag

SEQ ID NO: 1153002 - DNA, 15 bp, Homo sapiens
atacaaagtttagta

SEQ ID NO: 1153003 - DNA, 15 bp, Homo sapiens
gatacaaagtttagt

SEQ ID NO: 1153004 - DNA, 15 bp, Homo sapiens
tgatacaaagtttag

SEQ ID NO: 1153005 - DNA, 15 bp, Homo sapiens
atgatacaaagttta

SEQ ID NO: 1153006 - DNA, 15 bp, Homo sapiens
catgatacaaagttt

SEQ ID NO: 1153007 - DNA, 15 bp, Homo sapiens
ccatgatacaaagtt

SEQ ID NO: 1153008 - DNA, 15 bp, Homo sapiens
cccatgatacaaagt

SEQ ID NO: 1153009 - DNA, 15 bp, Homo sapiens
acccatgatacaaag

SEQ ID NO: 1153010 - DNA, 15 bp, Homo sapiens
aacccatgatacaaa

SEQ ID NO: 1153011 - DNA, 15 bp, Homo sapiens
aaacccatgatacaa

SEQ ID NO: 1153012 - DNA, 15 bp, Homo sapiens
aaaacccatgataca

SEQ ID NO: 1153013 - DNA, 15 bp, Homo sapiens
caaaacccatgatac

SEQ ID NO: 1153014 - DNA, 15 bp, Homo sapiens
acaaaacccatgata

SEQ ID NO: 1153015 - DNA, 15 bp, Homo sapiens
aacaaaacccatgat

SEQ ID NO: 1153016 - DNA, 15 bp, Homo sapiens
aaacaaaacccatga

SEQ ID NO: 1153017 - DNA, 15 bp, Homo sapiens
gaaacaaaacccatg

SEQ ID NO: 1153018 - DNA, 15 bp, Homo sapiens
agaaacaaaacccat

SEQ ID NO: 1153019 - DNA, 15 bp, Homo sapiens
gagaaacaaaaccca

SEQ ID NO: 1153020 - DNA, 15 bp, Homo sapiens
tgagaaacaaaaccc

SEQ ID NO: 1153021 - DNA, 15 bp, Homo sapiens
ctgagaaacaaaacc

SEQ ID NO: 1153022 - DNA, 15 bp, Homo sapiens
tctgagaaacaaaac

SEQ ID NO: 1153023 - DNA, 15 bp, Homo sapiens
atctgagaaacaaaa

SEQ ID NO: 1153024 - DNA, 15 bp, Homo sapiens
tatctgagaaacaaa

SEQ ID NO: 1153025 - DNA, 15 bp, Homo sapiens
atatctgagaaacaa

SEQ ID NO: 1153026 - DNA, 15 bp, Homo sapiens
aatatctgagaaaca

SEQ ID NO: 1153027 - DNA, 15 bp, Homo sapiens
gaatatctgagaaac

SEQ ID NO: 1153028 - DNA, 15 bp, Homo sapiens
cgaatatctgagaaa

SEQ ID NO: 1153029 - DNA, 15 bp, Homo sapiens
tcgaatatctgagaa

SEQ ID NO: 1153030 - DNA, 15 bp, Homo sapiens
atcgaatatctgaga

SEQ ID NO: 1153031 - DNA, 15 bp, Homo sapiens
aatcgaatatctgag

SEQ ID NO: 1153032 - DNA, 15 bp, Homo sapiens
gaatcgaatatctga

SEQ ID NO: 1153033 - DNA, 15 bp, Homo sapiens
agaatcgaatatctg

SEQ ID NO: 1153034 - DNA, 15 bp, Homo sapiens
gagaatcgaatatct

SEQ ID NO: 1153035 - DNA, 15 bp, Homo sapiens
ggagaatcgaatatc

SEQ ID NO: 1153036 - DNA, 15 bp, Homo sapiens
aggagaatcgaatat

SEQ ID NO: 1153037 - DNA, 15 bp, Homo sapiens
aaggagaatcgaata

SEQ ID NO: 1153038 - DNA, 15 bp, Homo sapiens
taaggagaatcgaat

SEQ ID NO: 1153039 - DNA, 15 bp, Homo sapiens
ttaaggagaatcgaa

SEQ ID NO: 1153040 - DNA, 15 bp, Homo sapiens
tttaaggagaatcga

SEQ ID NO: 1153041 - DNA, 15 bp, Homo sapiens
ttttaaggagaatcg

SEQ ID NO: 1153042 - DNA, 15 bp, Homo sapiens
tttttaaggagaatc

SEQ ID NO: 1153043 - DNA, 15 bp, Homo sapiens
atttttaaggagaat

SEQ ID NO: 1153044 - DNA, 15 bp, Homo sapiens
catttttaaggagaa

SEQ ID NO: 1153045 - DNA, 15 bp, Homo sapiens
gcatttttaaggaga

SEQ ID NO: 1153046 - DNA, 15 bp, Homo sapiens
tgcatttttaaggag

SEQ ID NO: 1153047 - DNA, 15 bp, Homo sapiens
ttgcatttttaagga

SEQ ID NO: 1153048 - DNA, 15 bp, Homo sapiens
gttgcatttttaagg

SEQ ID NO: 1153049 - DNA, 15 bp, Homo sapiens
tgttgcatttttaag

SEQ ID NO: 1153050 - DNA, 15 bp, Homo sapiens
ttgttgcatttttaa

SEQ ID NO: 1153051 - DNA, 15 bp, Homo sapiens
gttgttgcattttta

SEQ ID NO: 1153052 - DNA, 15 bp, Homo sapiens
agttgttgcattttt

SEQ ID NO: 1153053 - DNA, 15 bp, Homo sapiens
cagttgttgcatttt

SEQ ID NO: 1153054 - DNA, 15 bp, Homo sapiens
acagttgttgcattt

SEQ ID NO: 1153055 - DNA, 15 bp, Homo sapiens
cacagttgttgcatt

SEQ ID NO: 1153056 - DNA, 15 bp, Homo sapiens
tcacagttgttgcat

SEQ ID NO: 1153057 - DNA, 15 bp, Homo sapiens
atcacagttgttgca

SEQ ID NO: 1153058 - DNA, 15 bp, Homo sapiens
tatcacagttgttgc

SEQ ID NO: 1153059 - DNA, 15 bp, Homo sapiens
ttatcacagttgttg

SEQ ID NO: 1153060 - DNA, 15 bp, Homo sapiens
attatcacagttgtt

SEQ ID NO: 1153061 - DNA, 15 bp, Homo sapiens
aattatcacagttgt

SEQ ID NO: 1153062 - DNA, 15 bp, Homo sapiens
taattatcacagttg

SEQ ID NO: 1153063 - DNA, 15 bp, Homo sapiens
ataattatcacagtt

SEQ ID NO: 1153064 - DNA, 15 bp, Homo sapiens
cataattatcacagt

SEQ ID NO: 1153065 - DNA, 15 bp, Homo sapiens
tcataattatcacag

SEQ ID NO: 1153066 - DNA, 15 bp, Homo sapiens
ttcataattatcaca

SEQ ID NO: 1153067 - DNA, 15 bp, Homo sapiens
attcataattatcac

SEQ ID NO: 1153068 - DNA, 15 bp, Homo sapiens
tattcataattatca

SEQ ID NO: 1153069 - DNA, 15 bp, Homo sapiens
gtattcataattatc

SEQ ID NO: 1153070 - DNA, 15 bp, Homo sapiens
ggtattcataattat

SEQ ID NO: 1153071 - DNA, 15 bp, Homo sapiens
aggtattcataatta

SEQ ID NO: 1153072 - DNA, 15 bp, Homo sapiens
caggtattcataatt

SEQ ID NO: 1153073 - DNA, 15 bp, Homo sapiens
acaggtattcataat

SEQ ID NO: 1153074 - DNA, 15 bp, Homo sapiens
tacaggtattcataa

SEQ ID NO: 1153075 - DNA, 15 bp, Homo sapiens
ctacaggtattcata

SEQ ID NO: 1153076 - DNA, 15 bp, Homo sapiens
tctacaggtattcat

SEQ ID NO: 1153077 - DNA, 15 bp, Homo sapiens
ttctacaggtattca

SEQ ID NO: 1153078 - DNA, 15 bp, Homo sapiens
gttctacaggtattc

SEQ ID NO: 1153079 - DNA, 15 bp, Homo sapiens
tgttctacaggtatt

SEQ ID NO: 1153080 - DNA, 15 bp, Homo sapiens
ctgttctacaggtat

SEQ ID NO: 1153081 - DNA, 15 bp, Homo sapiens
tctgttctacaggta

SEQ ID NO: 1153082 - DNA, 15 bp, Homo sapiens
atctgttctacaggt

SEQ ID NO: 1153083 - DNA, 15 bp, Homo sapiens
aatctgttctacagg

SEQ ID NO: 1153084 - DNA, 15 bp, Homo sapiens
gaatctgttctacag

SEQ ID NO: 1153085 - DNA, 15 bp, Homo sapiens
ggaatctgttctaca

SEQ ID NO: 1153086 - DNA, 15 bp, Homo sapiens
tggaatctgttctac

SEQ ID NO: 1153087 - DNA, 15 bp, Homo sapiens
ttggaatctgttcta

SEQ ID NO: 1153088 - DNA, 15 bp, Homo sapiens
cttggaatctgttct

SEQ ID NO: 1153089 - DNA, 15 bp, Homo sapiens
ccttggaatctgttc

SEQ ID NO: 1153090 - DNA, 15 bp, Homo sapiens
tccttggaatctgtt

SEQ ID NO: 1153091 - DNA, 15 bp, Homo sapiens
ctccttggaatctgt

SEQ ID NO: 1153092 - DNA, 15 bp, Homo sapiens
actccttggaatctg

SEQ ID NO: 1153093 - DNA, 15 bp, Homo sapiens
tactccttggaatct

SEQ ID NO: 1153094 - DNA, 15 bp, Homo sapiens
ttactccttggaatc

SEQ ID NO: 1153095 - DNA, 15 bp, Homo sapiens
tttactccttggaat

SEQ ID NO: 1153096 - DNA, 15 bp, Homo sapiens
ctttactccttggaa

SEQ ID NO: 1153097 - DNA, 15 bp, Homo sapiens
gctttactccttgga

SEQ ID NO: 1153098 - DNA, 15 bp, Homo sapiens
tgctttactccttgg

SEQ ID NO: 1153099 - DNA, 15 bp, Homo sapiens
ttgctttactccttg

SEQ ID NO: 1153100 - DNA, 15 bp, Homo sapiens
tttgctttactcctt

SEQ ID NO: 1153101 - DNA, 15 bp, Homo sapiens
ttttgctttactcct

SEQ ID NO: 1153102 - DNA, 15 bp, Homo sapiens
gttttgctttactcc

SEQ ID NO: 1153103 - DNA, 15 bp, Homo sapiens
ggttttgctttactc

SEQ ID NO: 1153104 - DNA, 15 bp, Homo sapiens
gggttttgctttact

SEQ ID NO: 1153105 - DNA, 15 bp, Homo sapiens
ggggttttgctttac

SEQ ID NO: 1153106 - DNA, 15 bp, Homo sapiens
tggggttttgcttta

SEQ ID NO: 1153107 - DNA, 15 bp, Homo sapiens
ttggggttttgcttt

SEQ ID NO: 1153108 - DNA, 15 bp, Homo sapiens
tttggggttttgctt

SEQ ID NO: 1153109 - DNA, 15 bp, Homo sapiens
ttttggggttttgct

SEQ ID NO: 1153110 - DNA, 15 bp, Homo sapiens
cttttggggttttgc

SEQ ID NO: 1153111 - DNA, 15 bp, Homo sapiens
tcttttggggttttg

SEQ ID NO: 1153112 - DNA, 15 bp, Homo sapiens
ttcttttggggtttt

SEQ ID NO: 1153113 - DNA, 15 bp, Homo sapiens
tttcttttggggttt

SEQ ID NO: 1153114 - DNA, 15 bp, Homo sapiens
ttttcttttggggtt

SEQ ID NO: 1153115 - DNA, 15 bp, Homo sapiens
gttttcttttggggt

SEQ ID NO: 1153116 - DNA, 15 bp, Homo sapiens
tgttttcttttgggg

SEQ ID NO: 1153117 - DNA, 15 bp, Homo sapiens
ttgttttcttttggg

SEQ ID NO: 1153118 - DNA, 15 bp, Homo sapiens
tttgttttcttttgg

SEQ ID NO: 1153119 - DNA, 15 bp, Homo sapiens
gtttgttttcttttg

SEQ ID NO: 1153120 - DNA, 15 bp, Homo sapiens
cgtttgttttctttt

SEQ ID NO: 1153121 - DNA, 15 bp, Homo sapiens
tcgtttgttttcttt

SEQ ID NO: 1153122 - DNA, 15 bp, Homo sapiens
ttcgtttgttttctt

SEQ ID NO: 1153123 - DNA, 15 bp, Homo sapiens
tttcgtttgttttct

SEQ ID NO: 1153124 - DNA, 15 bp, Homo sapiens
gtttcgtttgttttc

SEQ ID NO: 1153125 - DNA, 15 bp, Homo sapiens
agtttcgtttgtttt

SEQ ID NO: 1153126 - DNA, 15 bp, Homo sapiens
gagtttcgtttgttt

SEQ ID NO: 1153127 - DNA, 15 bp, Homo sapiens
agagtttcgtttgtt

SEQ ID NO: 1153128 - DNA, 15 bp, Homo sapiens
aagagtttcgtttgt

SEQ ID NO: 1153129 - DNA, 15 bp, Homo sapiens
gaagagtttcgtttg

SEQ ID NO: 1153130 - DNA, 15 bp, Homo sapiens
ggaagagtttcgttt

SEQ ID NO: 1153131 - DNA, 15 bp, Homo sapiens
aggaagagtttcgtt

SEQ ID NO: 1153132 - DNA, 15 bp, Homo sapiens
aaggaagagtttcgt

SEQ ID NO: 1153133 - DNA, 15 bp, Homo sapiens
taaggaagagtttcg

SEQ ID NO: 1153134 - DNA, 15 bp, Homo sapiens
ctaaggaagagtttc

SEQ ID NO: 1153135 - DNA, 15 bp, Homo sapiens
gctaaggaagagttt

SEQ ID NO: 1153136 - DNA, 15 bp, Homo sapiens
agctaaggaagagtt

SEQ ID NO: 1153137 - DNA, 15 bp, Homo sapiens
tagctaaggaagagt

SEQ ID NO: 1153138 - DNA, 15 bp, Homo sapiens
gtagctaaggaagag

SEQ ID NO: 1153139 - DNA, 15 bp, Homo sapiens
agtagctaaggaaga

SEQ ID NO: 1153140 - DNA, 15 bp, Homo sapiens
aagtagctaaggaag

SEQ ID NO: 1153141 - DNA, 15 bp, Homo sapiens
taagtagctaaggaa

SEQ ID NO: 1153142 - DNA, 15 bp, Homo sapiens
ttaagtagctaagga

SEQ ID NO: 1153143 - DNA, 15 bp, Homo sapiens
tttaagtagctaagg

SEQ ID NO: 1153144 - DNA, 15 bp, Homo sapiens
ttttaagtagctaag

SEQ ID NO: 1153145 - DNA, 15 bp, Homo sapiens
tttttaagtagctaa

SEQ ID NO: 1153146 - DNA, 15 bp, Homo sapiens
ttttttaagtagcta

SEQ ID NO: 1153147 - DNA, 15 bp, Homo sapiens
tttttttaagtagct

SEQ ID NO: 1153148 - DNA, 15 bp, Homo sapiens
ttttttttaagtagc

SEQ ID NO: 1153149 - DNA, 15 bp, Homo sapiens
cttttttttaagtag

SEQ ID NO: 1153150 - DNA, 15 bp, Homo sapiens
tcttttttttaagta

SEQ ID NO: 1153151 - DNA, 15 bp, Homo sapiens
atcttttttttaagt

SEQ ID NO: 1153152 - DNA, 15 bp, Homo sapiens
aatcttttttttaag

SEQ ID NO: 1153153 - DNA, 15 bp, Homo sapiens
gaatcttttttttaa

SEQ ID NO: 1153154 - DNA, 15 bp, Homo sapiens
agaatctttttttta

SEQ ID NO: 1153155 - DNA, 15 bp, Homo sapiens
gagaatctttttttt

SEQ ID NO: 1153156 - DNA, 15 bp, Homo sapiens
cgagaatcttttttt

SEQ ID NO: 1153157 - DNA, 15 bp, Homo sapiens
ccgagaatctttttt

SEQ ID NO: 1153158 - DNA, 15 bp, Homo sapiens
gccgagaatcttttt

SEQ ID NO: 1153159 - DNA, 15 bp, Homo sapiens
agccgagaatctttt

SEQ ID NO: 1153160 - DNA, 15 bp, Homo sapiens
cagccgagaatcttt

SEQ ID NO: 1153161 - DNA, 15 bp, Homo sapiens
ccagccgagaatctt

SEQ ID NO: 1153162 - DNA, 15 bp, Homo sapiens
cccagccgagaatct

SEQ ID NO: 1153163 - DNA, 15 bp, Homo sapiens
ccccagccgagaatc

SEQ ID NO: 1153164 - DNA, 15 bp, Homo sapiens
tccccagccgagaat

SEQ ID NO: 1153165 - DNA, 15 bp, Homo sapiens
gtccccagccgagaa

SEQ ID NO: 1153166 - DNA, 15 bp, Homo sapiens
cgtccccagccgaga

SEQ ID NO: 1153167 - DNA, 15 bp, Homo sapiens
ccgtccccagccgag

SEQ ID NO: 1153168 - DNA, 15 bp, Homo sapiens
cccgtccccagccga

SEQ ID NO: 1153169 - DNA, 15 bp, Homo sapiens
acccgtccccagccg

SEQ ID NO: 1153170 - DNA, 15 bp, Homo sapiens
cacccgtccccagcc

SEQ ID NO: 1153171 - DNA, 15 bp, Homo sapiens
ccacccgtccccagc

SEQ ID NO: 1153172 - DNA, 15 bp, Homo sapiens
gccacccgtccccag

SEQ ID NO: 1153173 - DNA, 15 bp, Homo sapiens
agccacccgtcccca

SEQ ID NO: 1153174 - DNA, 15 bp, Homo sapiens
gagccacccgtcccc

SEQ ID NO: 1153175 - DNA, 15 bp, Homo sapiens
tgagccacccgtccc

SEQ ID NO: 1153176 - DNA, 15 bp, Homo sapiens
gtgagccacccgtcc

SEQ ID NO: 1153177 - DNA, 15 bp, Homo sapiens
cgtgagccacccgtc

SEQ ID NO: 1153178 - DNA, 15 bp, Homo sapiens
gcgtgagccacccgt

SEQ ID NO: 1153179 - DNA, 15 bp, Homo sapiens
ggcgtgagccacccg

SEQ ID NO: 1153180 - DNA, 15 bp, Homo sapiens
aggcgtgagccaccc

SEQ ID NO: 1153181 - DNA, 15 bp, Homo sapiens
cgtctcccaaagtgc

SEQ ID NO: 1153182 - DNA, 15 bp, Homo sapiens
ccgtctcccaaagtg

SEQ ID NO: 1153183 - DNA, 15 bp, Homo sapiens
tccgtctcccaaagt

SEQ ID NO: 1153184 - DNA, 15 bp, Homo sapiens
ctccgtctcccaaag

SEQ ID NO: 1153185 - DNA, 15 bp, Homo sapiens
cctccgtctcccaaa

SEQ ID NO: 1153186 - DNA, 15 bp, Homo sapiens
gcctccgtctcccaa

SEQ ID NO: 1153187 - DNA, 15 bp, Homo sapiens
cgcctccgtctccca

SEQ ID NO: 1153188 - DNA, 15 bp, Homo sapiens
ccgcctccgtctccc

SEQ ID NO: 1153189 - DNA, 15 bp, Homo sapiens
cccgcctccgtctcc

SEQ ID NO: 1153190 - DNA, 15 bp, Homo sapiens
acccgcctccgtctc

SEQ ID NO: 1153191 - DNA, 15 bp, Homo sapiens
cacccgcctccgtct

SEQ ID NO: 1153192 - DNA, 15 bp, Homo sapiens
ccacccgcctccgtc

SEQ ID NO: 1153193 - DNA, 15 bp, Homo sapiens
tccacccgcctccgt

SEQ ID NO: 1153194 - DNA, 15 bp, Homo sapiens
atccacccgcctccg

SEQ ID NO: 1153195 - DNA, 15 bp, Homo sapiens
gatccacccgcctcc

SEQ ID NO: 1153196 - DNA, 15 bp, Homo sapiens
catgatccacccgcc

SEQ ID NO: 1153197 - DNA, 15 bp, Homo sapiens
ccacattggccaggc

SEQ ID NO: 1153198 - DNA, 15 bp, Homo sapiens
accacattggccagg

SEQ ID NO: 1153199 - DNA, 15 bp, Homo sapiens
caccacattggccag

SEQ ID NO: 1153200 - DNA, 15 bp, Homo sapiens
tcaccacattggcca

SEQ ID NO: 1153201 - DNA, 15 bp, Homo sapiens
ttcaccacattggcc

SEQ ID NO: 1153202 - DNA, 15 bp, Homo sapiens
tttcaccacattggc

SEQ ID NO: 1153203 - DNA, 15 bp, Homo sapiens
cggggtttcaccaca

SEQ ID NO: 1153204 - DNA, 15 bp, Homo sapiens
acggggtttcaccac

SEQ ID NO: 1153205 - DNA, 15 bp, Homo sapiens
tttttgtattttttt

SEQ ID NO: 1153206 - DNA, 15 bp, Homo sapiens
gaatttttgtatttt

SEQ ID NO: 1153207 - DNA, 15 bp, Homo sapiens
cgaatttttgtattt

SEQ ID NO: 1153208 - DNA, 15 bp, Homo sapiens
gcgaatttttgtatt

SEQ ID NO: 1153209 - DNA, 15 bp, Homo sapiens
tgcgaatttttgtat

SEQ ID NO: 1153210 - DNA, 15 bp, Homo sapiens
ctgcgaatttttgta

SEQ ID NO: 1153211 - DNA, 15 bp, Homo sapiens
cctgcgaatttttgt

SEQ ID NO: 1153212 - DNA, 15 bp, Homo sapiens
ccctgcgaatttttg

SEQ ID NO: 1153213 - DNA, 15 bp, Homo sapiens
gccctgcgaattttt

SEQ ID NO: 1153214 - DNA, 15 bp, Homo sapiens
tgccctgcgaatttt

SEQ ID NO: 1153215 - DNA, 15 bp, Homo sapiens
atgccctgcgaattt

SEQ ID NO: 1153216 - DNA, 15 bp, Homo sapiens
tatgccctgcgaatt

SEQ ID NO: 1153217 - DNA, 15 bp, Homo sapiens
ctatgccctgcgaat

SEQ ID NO: 1153218 - DNA, 15 bp, Homo sapiens
actatgccctgcgaa

SEQ ID NO: 1153219 - DNA, 15 bp, Homo sapiens
cactatgccctgcga

SEQ ID NO: 1153220 - DNA, 15 bp, Homo sapiens
ccactatgccctgcg

SEQ ID NO: 1153221 - DNA, 15 bp, Homo sapiens
gccactatgccctgc

SEQ ID NO: 1153222 - DNA, 15 bp, Homo sapiens
tgccactatgccctg

SEQ ID NO: 1153223 - DNA, 15 bp, Homo sapiens
atgccactatgccct

SEQ ID NO: 1153224 - DNA, 15 bp, Homo sapiens
tatgccactatgccc

SEQ ID NO: 1153225 - DNA, 15 bp, Homo sapiens
gtatgccactatgcc

SEQ ID NO: 1153226 - DNA, 15 bp, Homo sapiens
tgtatgccactatgc

SEQ ID NO: 1153227 - DNA, 15 bp, Homo sapiens
gtgtatgccactatg

SEQ ID NO: 1153228 - DNA, 15 bp, Homo sapiens
ggtgtatgccactat

SEQ ID NO: 1153229 - DNA, 15 bp, Homo sapiens
aggtgtatgccacta

SEQ ID NO: 1153230 - DNA, 15 bp, Homo sapiens
caggtgtatgccact

SEQ ID NO: 1153231 - DNA, 15 bp, Homo sapiens
acaggtgtatgccac

SEQ ID NO: 1153232 - DNA, 15 bp, Homo sapiens
tacaggtgtatgcca

SEQ ID NO: 1153233 - DNA, 15 bp, Homo sapiens
ttacaggtgtatgcc

SEQ ID NO: 1153234 - DNA, 15 bp, Homo sapiens
attacaggtgtatgc

SEQ ID NO: 1153235 - DNA, 15 bp, Homo sapiens
gattacaggtgtatg

SEQ ID NO: 1153236 - DNA, 15 bp, Homo sapiens
ggattacaggtgtat

SEQ ID NO: 1153237 - DNA, 15 bp, Homo sapiens
gaggattacaggtgt

SEQ ID NO: 1153238 - DNA, 15 bp, Homo sapiens
cgaggattacaggtg

SEQ ID NO: 1153239 - DNA, 15 bp, Homo sapiens
gcgaggattacaggt

SEQ ID NO: 1153240 - DNA, 15 bp, Homo sapiens
agcgaggattacagg

SEQ ID NO: 1153241 - DNA, 15 bp, Homo sapiens
tagcgaggattacag

SEQ ID NO: 1153242 - DNA, 15 bp, Homo sapiens
gtagcgaggattaca

SEQ ID NO: 1153243 - DNA, 15 bp, Homo sapiens
agtagcgaggattac

SEQ ID NO: 1153244 - DNA, 15 bp, Homo sapiens
gagtagcgaggatta

SEQ ID NO: 1153245 - DNA, 15 bp, Homo sapiens
tgagtagcgaggatt

SEQ ID NO: 1153246 - DNA, 15 bp, Homo sapiens
ctgagtagcgaggat

SEQ ID NO: 1153247 - DNA, 15 bp, Homo sapiens
cctgagtagcgagga

SEQ ID NO: 1153248 - DNA, 15 bp, Homo sapiens
tcctgagtagcgagg

SEQ ID NO: 1153249 - DNA, 15 bp, Homo sapiens
ctcctgagtagcgag

SEQ ID NO: 1153250 - DNA, 15 bp, Homo sapiens
cctcctgagtagcga

SEQ ID NO: 1153251 - DNA, 15 bp, Homo sapiens
gcctcctgagtagcg

SEQ ID NO: 1153252 - DNA, 15 bp, Homo sapiens
gactcccaggttcaa

SEQ ID NO: 1153253 - DNA, 15 bp, Homo sapiens
cgactcccaggttca

SEQ ID NO: 1153254 - DNA, 15 bp, Homo sapiens
ccgactcccaggttc

SEQ ID NO: 1153255 - DNA, 15 bp, Homo sapiens
tccgactcccaggtt

SEQ ID NO: 1153256 - DNA, 15 bp, Homo sapiens
ctccgactcccaggt

SEQ ID NO: 1153257 - DNA, 15 bp, Homo sapiens
cctccgactcccagg

SEQ ID NO: 1153258 - DNA, 15 bp, Homo sapiens
acctccgactcccag

SEQ ID NO: 1153259 - DNA, 15 bp, Homo sapiens
aacctccgactccca

SEQ ID NO: 1153260 - DNA, 15 bp, Homo sapiens
caacctccgactccc

SEQ ID NO: 1153261 - DNA, 15 bp, Homo sapiens
gcaacctccgactcc

SEQ ID NO: 1153262 - DNA, 15 bp, Homo sapiens
cgtgatctcagctca

SEQ ID NO: 1153263 - DNA, 15 bp, Homo sapiens
gcgtgatctcagctc

SEQ ID NO: 1153264 - DNA, 15 bp, Homo sapiens
ggcgtgatctcagct

SEQ ID NO: 1153265 - DNA, 15 bp, Homo sapiens
tggcgtgatctcagc

SEQ ID NO: 1153266 - DNA, 15 bp, Homo sapiens
gtggcgtgatctcag

SEQ ID NO: 1153267 - DNA, 15 bp, Homo sapiens
ggtggcgtgatctca

SEQ ID NO: 1153268 - DNA, 15 bp, Homo sapiens
cggtggcgtgatctc

SEQ ID NO: 1153269 - DNA, 15 bp, Homo sapiens
gcggtggcgtgatct

SEQ ID NO: 1153270 - DNA, 15 bp, Homo sapiens
tgcggtggcgtgatc

SEQ ID NO: 1153271 - DNA, 15 bp, Homo sapiens
gtgcggtggcgtgat

SEQ ID NO: 1153272 - DNA, 15 bp, Homo sapiens
agtgcggtggcgtga

SEQ ID NO: 1153273 - DNA, 15 bp, Homo sapiens
gagtgcggtggcgtg

SEQ ID NO: 1153274 - DNA, 15 bp, Homo sapiens
ggagtgcggtggcgt

SEQ ID NO: 1153275 - DNA, 15 bp, Homo sapiens
ctgagatggagtctc

SEQ ID NO: 1153276 - DNA, 15 bp, Homo sapiens
cctgagatggagtct

SEQ ID NO: 1153277 - DNA, 15 bp, Homo sapiens
tcctgagatggagtc

SEQ ID NO: 1153278 - DNA, 15 bp, Homo sapiens
ttcctgagatggagt

SEQ ID NO: 1153279 - DNA, 15 bp, Homo sapiens
tttcctgagatggag

SEQ ID NO: 1153280 - DNA, 15 bp, Homo sapiens
atttcctgagatgga

SEQ ID NO: 1153281 - DNA, 15 bp, Homo sapiens
tatttcctgagatgg

SEQ ID NO: 1153282 - DNA, 15 bp, Homo sapiens
ttatttcctgagatg

SEQ ID NO: 1153283 - DNA, 15 bp, Homo sapiens
attatttcctgagat

SEQ ID NO: 1153284 - DNA, 15 bp, Homo sapiens
tattatttcctgaga

SEQ ID NO: 1153285 - DNA, 15 bp, Homo sapiens
ttattatttcctgag

SEQ ID NO: 1153286 - DNA, 15 bp, Homo sapiens
attattatttcctga

SEQ ID NO: 1153287 - DNA, 15 bp, Homo sapiens
tattattatttcctg

SEQ ID NO: 1153288 - DNA, 15 bp, Homo sapiens
ttattattatttcct

SEQ ID NO: 1153289 - DNA, 15 bp, Homo sapiens
attattattatttcc

SEQ ID NO: 1153290 - DNA, 15 bp, Homo sapiens
tattattattatttc

SEQ ID NO: 1153291 - DNA, 15 bp, Homo sapiens
actattattattatt

SEQ ID NO: 1153292 - DNA, 15 bp, Homo sapiens
tactattattattat

SEQ ID NO: 1153293 - DNA, 15 bp, Homo sapiens
ttactattattatta

SEQ ID NO: 1153294 - DNA, 15 bp, Homo sapiens
attactattattatt

SEQ ID NO: 1153295 - DNA, 15 bp, Homo sapiens
aattactattattat

SEQ ID NO: 1153296 - DNA, 15 bp, Homo sapiens
gaattactattatta

SEQ ID NO: 1153297 - DNA, 15 bp, Homo sapiens
agaattactattatt

SEQ ID NO: 1153298 - DNA, 15 bp, Homo sapiens
cagaattactattat

SEQ ID NO: 1153299 - DNA, 15 bp, Homo sapiens
tcagaattactatta

SEQ ID NO: 1153300 - DNA, 15 bp, Homo sapiens
gtcagaattactatt

SEQ ID NO: 1153301 - DNA, 15 bp, Homo sapiens
tgtcagaattactat

SEQ ID NO: 1153302 - DNA, 15 bp, Homo sapiens
ttgtcagaattacta

SEQ ID NO: 1153303 - DNA, 15 bp, Homo sapiens
cttgtcagaattact

SEQ ID NO: 1153304 - DNA, 15 bp, Homo sapiens
ccttgtcagaattac

SEQ ID NO: 1153305 - DNA, 15 bp, Homo sapiens
accttgtcagaatta

SEQ ID NO: 1153306 - DNA, 15 bp, Homo sapiens
caccttgtcagaatt

SEQ ID NO: 1153307 - DNA, 15 bp, Homo sapiens
gcaccttgtcagaat

SEQ ID NO: 1153308 - DNA, 15 bp, Homo sapiens
tgcaccttgtcagaa

SEQ ID NO: 1153309 - DNA, 15 bp, Homo sapiens
ctgcaccttgtcaga

SEQ ID NO: 1153310 - DNA, 15 bp, Homo sapiens
actgcaccttgtcag

SEQ ID NO: 1153311 - DNA, 15 bp, Homo sapiens
cactgcaccttgtca

SEQ ID NO: 1153312 - DNA, 15 bp, Homo sapiens
ccactgcaccttgtc

SEQ ID NO: 1153313 - DNA, 15 bp, Homo sapiens
gccactgcaccttgt

SEQ ID NO: 1153314 - DNA, 15 bp, Homo sapiens
agccactgcaccttg

SEQ ID NO: 1153315 - DNA, 15 bp, Homo sapiens
aagccactgcacctt

SEQ ID NO: 1153316 - DNA, 15 bp, Homo sapiens
gtaagccactgcacc

SEQ ID NO: 1153317 - DNA, 15 bp, Homo sapiens
tgtaagccactgcac

SEQ ID NO: 1153318 - DNA, 15 bp, Homo sapiens
gtgtaagccactgca

SEQ ID NO: 1153319 - DNA, 15 bp, Homo sapiens
acccaccttagcctc

SEQ ID NO: 1153320 - DNA, 15 bp, Homo sapiens
cacccaccttagcct

SEQ ID NO: 1153321 - DNA, 15 bp, Homo sapiens
ccacccaccttagcc

SEQ ID NO: 1153322 - DNA, 15 bp, Homo sapiens
tccacccaccttagc

SEQ ID NO: 1153323 - DNA, 15 bp, Homo sapiens
atccacccaccttag

SEQ ID NO: 1153324 - DNA, 15 bp, Homo sapiens
gatccacccacctta

SEQ ID NO: 1153325 - DNA, 15 bp, Homo sapiens
aggggtttcaccatg

SEQ ID NO: 1153326 - DNA, 15 bp, Homo sapiens
caggggtttcaccat

SEQ ID NO: 1153327 - DNA, 15 bp, Homo sapiens
tcaggggtttcacca

SEQ ID NO: 1153328 - DNA, 15 bp, Homo sapiens
gtcaggggtttcacc

SEQ ID NO: 1153329 - DNA, 15 bp, Homo sapiens
agtcaggggtttcac

SEQ ID NO: 1153330 - DNA, 15 bp, Homo sapiens
gagtcaggggtttca

SEQ ID NO: 1153331 - DNA, 15 bp, Homo sapiens
agagtcaggggtttc

SEQ ID NO: 1153332 - DNA, 15 bp, Homo sapiens
tagagtcaggggttt

SEQ ID NO: 1153333 - DNA, 15 bp, Homo sapiens
gtagagtcaggggtt

SEQ ID NO: 1153334 - DNA, 15 bp, Homo sapiens
agtagagtcaggggt

SEQ ID NO: 1153335 - DNA, 15 bp, Homo sapiens
tagtagagtcagggg

SEQ ID NO: 1153336 - DNA, 15 bp, Homo sapiens
ttagtagagtcaggg

SEQ ID NO: 1153337 - DNA, 15 bp, Homo sapiens
tttagtagagtcagg

SEQ ID NO: 1153338 - DNA, 15 bp, Homo sapiens
ttttagtagagtcag

SEQ ID NO: 1153339 - DNA, 15 bp, Homo sapiens
tttttagtagagtca

SEQ ID NO: 1153340 - DNA, 15 bp, Homo sapiens
atttttagtagagtc

SEQ ID NO: 1153341 - DNA, 15 bp, Homo sapiens
catttttagtagagt

SEQ ID NO: 1153342 - DNA, 15 bp, Homo sapiens
ttttttgcattttta

SEQ ID NO: 1153343 - DNA, 15 bp, Homo sapiens
tttttttgcattttt

SEQ ID NO: 1153344 - DNA, 15 bp, Homo sapiens
ttttttttgcatttt

SEQ ID NO: 1153345 - DNA, 15 bp, Homo sapiens
tttttttttgcattt

SEQ ID NO: 1153346 - DNA, 15 bp, Homo sapiens
atttttttttgcatt

SEQ ID NO: 1153347 - DNA, 15 bp, Homo sapiens
aatttttttttgcat

SEQ ID NO: 1153348 - DNA, 15 bp, Homo sapiens
taatttttttttgca

SEQ ID NO: 1153349 - DNA, 15 bp, Homo sapiens
gtaatttttttttgc

SEQ ID NO: 1153350 - DNA, 15 bp, Homo sapiens
ggtaatttttttttg

SEQ ID NO: 1153351 - DNA, 15 bp, Homo sapiens
gggtaattttttttt

SEQ ID NO: 1153352 - DNA, 15 bp, Homo sapiens
tgggtaatttttttt

SEQ ID NO: 1153353 - DNA, 15 bp, Homo sapiens
ctgggtaattttttt

SEQ ID NO: 1153354 - DNA, 15 bp, Homo sapiens
gctgggtaatttttt

SEQ ID NO: 1153355 - DNA, 15 bp, Homo sapiens
tgctgggtaattttt

SEQ ID NO: 1153356 - DNA, 15 bp, Homo sapiens
atgctgggtaatttt

SEQ ID NO: 1153357 - DNA, 15 bp, Homo sapiens
catgctgggtaattt

SEQ ID NO: 1153358 - DNA, 15 bp, Homo sapiens
acatgctgggtaatt

SEQ ID NO: 1153359 - DNA, 15 bp, Homo sapiens
aacatgctgggtaat

SEQ ID NO: 1153360 - DNA, 15 bp, Homo sapiens
caacatgctgggtaa

SEQ ID NO: 1153361 - DNA, 15 bp, Homo sapiens
ccaacatgctgggta

SEQ ID NO: 1153362 - DNA, 15 bp, Homo sapiens
accaacatgctgggt

SEQ ID NO: 1153363 - DNA, 15 bp, Homo sapiens
caccaacatgctggg

SEQ ID NO: 1153364 - DNA, 15 bp, Homo sapiens
acaccaacatgctgg

SEQ ID NO: 1153365 - DNA, 15 bp, Homo sapiens
cacaccaacatgctg

SEQ ID NO: 1153366 - DNA, 15 bp, Homo sapiens
gcacaccaacatgct

SEQ ID NO: 1153367 - DNA, 15 bp, Homo sapiens
ggcacaccaacatgc

SEQ ID NO: 1153368 - DNA, 15 bp, Homo sapiens
gggcacaccaacatg

SEQ ID NO: 1153369 - DNA, 15 bp, Homo sapiens
cgggcacaccaacat

SEQ ID NO: 1153370 - DNA, 15 bp, Homo sapiens
acgggcacaccaaca

SEQ ID NO: 1153371 - DNA, 15 bp, Homo sapiens
tacgggcacaccaac

SEQ ID NO: 1153372 - DNA, 15 bp, Homo sapiens
ctacgggcacaccaa

SEQ ID NO: 1153373 - DNA, 15 bp, Homo sapiens
actacgggcacacca

SEQ ID NO: 1153374 - DNA, 15 bp, Homo sapiens
gactacgggcacacc

SEQ ID NO: 1153375 - DNA, 15 bp, Homo sapiens
ggactacgggcacac

SEQ ID NO: 1153376 - DNA, 15 bp, Homo sapiens
gggactacgggcaca

SEQ ID NO: 1153377 - DNA, 15 bp, Homo sapiens
tgggactacgggcac

SEQ ID NO: 1153378 - DNA, 15 bp, Homo sapiens
ctgggactacgggca

SEQ ID NO: 1153379 - DNA, 15 bp, Homo sapiens
tagcctctcaagtag

SEQ ID NO: 1153380 - DNA, 15 bp, Homo sapiens
ttagcctctcaagta

SEQ ID NO: 1153381 - DNA, 15 bp, Homo sapiens
cttagcctctcaagt

SEQ ID NO: 1153382 - DNA, 15 bp, Homo sapiens
tcttagcctctcaag

SEQ ID NO: 1153383 - DNA, 15 bp, Homo sapiens
gtcttagcctctcaa

SEQ ID NO: 1153384 - DNA, 15 bp, Homo sapiens
tgtcttagcctctca

SEQ ID NO: 1153385 - DNA, 15 bp, Homo sapiens
ctgtcttagcctctc

SEQ ID NO: 1153386 - DNA, 15 bp, Homo sapiens
cctgtcttagcctct

SEQ ID NO: 1153387 - DNA, 15 bp, Homo sapiens
tcctgtcttagcctc

SEQ ID NO: 1153388 - DNA, 15 bp, Homo sapiens
ctcctgtcttagcct

SEQ ID NO: 1153389 - DNA, 15 bp, Homo sapiens
tctcctgtcttagcc

SEQ ID NO: 1153390 - DNA, 15 bp, Homo sapiens
ttctcctgtcttagc

SEQ ID NO: 1153391 - DNA, 15 bp, Homo sapiens
attctcctgtcttag

SEQ ID NO: 1153392 - DNA, 15 bp, Homo sapiens
aattctcctgtctta

SEQ ID NO: 1153393 - DNA, 15 bp, Homo sapiens
caattctcctgtctt

SEQ ID NO: 1153394 - DNA, 15 bp, Homo sapiens
acaattctcctgtct

SEQ ID NO: 1153395 - DNA, 15 bp, Homo sapiens
aacaattctcctgtc

SEQ ID NO: 1153396 - DNA, 15 bp, Homo sapiens
aaacaattctcctgt

SEQ ID NO: 1153397 - DNA, 15 bp, Homo sapiens
caaacaattctcctg

SEQ ID NO: 1153398 - DNA, 15 bp, Homo sapiens
tcaaacaattctcct

SEQ ID NO: 1153399 - DNA, 15 bp, Homo sapiens
ttcaaacaattctcc

SEQ ID NO: 1153400 - DNA, 15 bp, Homo sapiens
gttcaaacaattctc

SEQ ID NO: 1153401 - DNA, 15 bp, Homo sapiens
ggttcaaacaattct

SEQ ID NO: 1153402 - DNA, 15 bp, Homo sapiens
aggttcaaacaattc

SEQ ID NO: 1153403 - DNA, 15 bp, Homo sapiens
caggttcaaacaatt

SEQ ID NO: 1153404 - DNA, 15 bp, Homo sapiens
ccaggttcaaacaat

SEQ ID NO: 1153405 - DNA, 15 bp, Homo sapiens
cccaggttcaaacaa

SEQ ID NO: 1153406 - DNA, 15 bp, Homo sapiens
tcccaggttcaaaca

SEQ ID NO: 1153407 - DNA, 15 bp, Homo sapiens
ctcccaggttcaaac

SEQ ID NO: 1153408 - DNA, 15 bp, Homo sapiens
cctcccaggttcaaa

SEQ ID NO: 1153409 - DNA, 15 bp, Homo sapiens
taacctccgcctccc

SEQ ID NO: 1153410 - DNA, 15 bp, Homo sapiens
gtaacctccgcctcc

SEQ ID NO: 1153411 - DNA, 15 bp, Homo sapiens
tgtaacctccgcctc

SEQ ID NO: 1153412 - DNA, 15 bp, Homo sapiens
ttcactgtaacctcc

SEQ ID NO: 1153413 - DNA, 15 bp, Homo sapiens
gttcactgtaacctc

SEQ ID NO: 1153414 - DNA, 15 bp, Homo sapiens
agttcactgtaacct

SEQ ID NO: 1153415 - DNA, 15 bp, Homo sapiens
cagttcactgtaacc

SEQ ID NO: 1153416 - DNA, 15 bp, Homo sapiens
tcagttcactgtaac

SEQ ID NO: 1153417 - DNA, 15 bp, Homo sapiens
ctcagttcactgtaa

SEQ ID NO: 1153418 - DNA, 15 bp, Homo sapiens
tctcagttcactgta

SEQ ID NO: 1153419 - DNA, 15 bp, Homo sapiens
atctcagttcactgt

SEQ ID NO: 1153420 - DNA, 15 bp, Homo sapiens
cgcaatctcagttca

SEQ ID NO: 1153421 - DNA, 15 bp, Homo sapiens
gcgcaatctcagttc

SEQ ID NO: 1153422 - DNA, 15 bp, Homo sapiens
ggcgcaatctcagtt

SEQ ID NO: 1153423 - DNA, 15 bp, Homo sapiens
tggcgcaatctcagt

SEQ ID NO: 1153424 - DNA, 15 bp, Homo sapiens
cctcactctgtcacc

SEQ ID NO: 1153425 - DNA, 15 bp, Homo sapiens
gcctcactctgtcac

SEQ ID NO: 1153426 - DNA, 15 bp, Homo sapiens
ggcctcactctgtca

SEQ ID NO: 1153427 - DNA, 15 bp, Homo sapiens
gggcctcactctgtc

SEQ ID NO: 1153428 - DNA, 15 bp, Homo sapiens
agggcctcactctgt

SEQ ID NO: 1153429 - DNA, 15 bp, Homo sapiens
cagggcctcactctg

SEQ ID NO: 1153430 - DNA, 15 bp, Homo sapiens
acagggcctcactct

SEQ ID NO: 1153431 - DNA, 15 bp, Homo sapiens
gacagggcctcactc

SEQ ID NO: 1153432 - DNA, 15 bp, Homo sapiens
agacagggcctcact

SEQ ID NO: 1153433 - DNA, 15 bp, Homo sapiens
cagacagggcctcac

SEQ ID NO: 1153434 - DNA, 15 bp, Homo sapiens
tcagacagggcctca

SEQ ID NO: 1153435 - DNA, 15 bp, Homo sapiens
ttcagacagggcctc

SEQ ID NO: 1153436 - DNA, 15 bp, Homo sapiens
tttcagacagggcct

SEQ ID NO: 1153437 - DNA, 15 bp, Homo sapiens
ttttcagacagggcc

SEQ ID NO: 1153438 - DNA, 15 bp, Homo sapiens
gttttcagacagggc

SEQ ID NO: 1153439 - DNA, 15 bp, Homo sapiens
tgttttcagacaggg

SEQ ID NO: 1153440 - DNA, 15 bp, Homo sapiens
ttgttttcagacagg

SEQ ID NO: 1153441 - DNA, 15 bp, Homo sapiens
attgttttcagacag

SEQ ID NO: 1153442 - DNA, 15 bp, Homo sapiens
tattgttttcagaca

SEQ ID NO: 1153443 - DNA, 15 bp, Homo sapiens
ttattgttttcagac

SEQ ID NO: 1153444 - DNA, 15 bp, Homo sapiens
gttattgttttcaga

SEQ ID NO: 1153445 - DNA, 15 bp, Homo sapiens
tgttattgttttcag

SEQ ID NO: 1153446 - DNA, 15 bp, Homo sapiens
ttgttattgttttca

SEQ ID NO: 1153447 - DNA, 15 bp, Homo sapiens
attgttattgttttc

SEQ ID NO: 1153448 - DNA, 15 bp, Homo sapiens
tattgttattgtttt

SEQ ID NO: 1153449 - DNA, 15 bp, Homo sapiens
ttattgttattgttt

SEQ ID NO: 1153450 - DNA, 15 bp, Homo sapiens
attattgttattgtt

SEQ ID NO: 1153451 - DNA, 15 bp, Homo sapiens
tattattgttattgt

SEQ ID NO: 1153452 - DNA, 15 bp, Homo sapiens
ttattattgttattg

SEQ ID NO: 1153453 - DNA, 15 bp, Homo sapiens
gttattattgttatt

SEQ ID NO: 1153454 - DNA, 15 bp, Homo sapiens
tgttattattgttat

SEQ ID NO: 1153455 - DNA, 15 bp, Homo sapiens
ttgttattattgtta

SEQ ID NO: 1153456 - DNA, 15 bp, Homo sapiens
attgttattattgtt

SEQ ID NO: 1153457 - DNA, 15 bp, Homo sapiens
aattgttattattgt

SEQ ID NO: 1153458 - DNA, 15 bp, Homo sapiens
gaattgttattattg

SEQ ID NO: 1153459 - DNA, 15 bp, Homo sapiens
agaattgttattatt

SEQ ID NO: 1153460 - DNA, 15 bp, Homo sapiens
cagaattgttattat

SEQ ID NO: 1153461 - DNA, 15 bp, Homo sapiens
gcagaattgttatta

SEQ ID NO: 1153462 - DNA, 15 bp, Homo sapiens
agcagaattgttatt

SEQ ID NO: 1153463 - DNA, 15 bp, Homo sapiens
tagcagaattgttat

SEQ ID NO: 1153464 - DNA, 15 bp, Homo sapiens
ctagcagaattgtta

SEQ ID NO: 1153465 - DNA, 15 bp, Homo sapiens
gctagcagaattgtt

SEQ ID NO: 1153466 - DNA, 15 bp, Homo sapiens
agctagcagaattgt

SEQ ID NO: 1153467 - DNA, 15 bp, Homo sapiens
cagctagcagaattg

SEQ ID NO: 1153468 - DNA, 15 bp, Homo sapiens
tcagctagcagaatt

SEQ ID NO: 1153469 - DNA, 15 bp, Homo sapiens
ctcagctagcagaat

SEQ ID NO: 1153470 - DNA, 15 bp, Homo sapiens
tctcagctagcagaa

SEQ ID NO: 1153471 - DNA, 15 bp, Homo sapiens
atctcagctagcaga

SEQ ID NO: 1153472 - DNA, 15 bp, Homo sapiens
catctcagctagcag

SEQ ID NO: 1153473 - DNA, 15 bp, Homo sapiens
gcatctcagctagca

SEQ ID NO: 1153474 - DNA, 15 bp, Homo sapiens
agcatctcagctagc

SEQ ID NO: 1153475 - DNA, 15 bp, Homo sapiens
cagcatctcagctag

SEQ ID NO: 1153476 - DNA, 15 bp, Homo sapiens
gcagcatctcagcta

SEQ ID NO: 1153477 - DNA, 15 bp, Homo sapiens
tgcagcatctcagct

SEQ ID NO: 1153478 - DNA, 15 bp, Homo sapiens
ctgcagcatctcagc

SEQ ID NO: 1153479 - DNA, 15 bp, Homo sapiens
tctgcagcatctcag

SEQ ID NO: 1153480 - DNA, 15 bp, Homo sapiens
ttctgcagcatctca

SEQ ID NO: 1153481 - DNA, 15 bp, Homo sapiens
cttctgcagcatctc

SEQ ID NO: 1153482 - DNA, 15 bp, Homo sapiens
gcttctgcagcatct

SEQ ID NO: 1153483 - DNA, 15 bp, Homo sapiens
agcttctgcagcatc

SEQ ID NO: 1153484 - DNA, 15 bp, Homo sapiens
tagcttctgcagcat

SEQ ID NO: 1153485 - DNA, 15 bp, Homo sapiens
ctagcttctgcagca

SEQ ID NO: 1153486 - DNA, 15 bp, Homo sapiens
tctagcttctgcagc

SEQ ID NO: 1153487 - DNA, 15 bp, Homo sapiens
atctagcttctgcag

SEQ ID NO: 1153488 - DNA, 15 bp, Homo sapiens
aatctagcttctgca

SEQ ID NO: 1153489 - DNA, 15 bp, Homo sapiens
gaatctagcttctgc

SEQ ID NO: 1153490 - DNA, 15 bp, Homo sapiens
tgaatctagcttctg

SEQ ID NO: 1153491 - DNA, 15 bp, Homo sapiens
gtgaatctagcttct

SEQ ID NO: 1153492 - DNA, 15 bp, Homo sapiens
agtgaatctagcttc

SEQ ID NO: 1153493 - DNA, 15 bp, Homo sapiens
cagtgaatctagctt

SEQ ID NO: 1153494 - DNA, 15 bp, Homo sapiens
acagtgaatctagct

SEQ ID NO: 1153495 - DNA, 15 bp, Homo sapiens
gacagtgaatctagc

SEQ ID NO: 1153496 - DNA, 15 bp, Homo sapiens
ggacagtgaatctag

SEQ ID NO: 1153497 - DNA, 15 bp, Homo sapiens
gggacagtgaatcta

SEQ ID NO: 1153498 - DNA, 15 bp, Homo sapiens
cgggacagtgaatct

SEQ ID NO: 1153499 - DNA, 15 bp, Homo sapiens
ccgggacagtgaatc

SEQ ID NO: 1153500 - DNA, 15 bp, Homo sapiens
tccgggacagtgaat

SEQ ID NO: 1153501 - DNA, 15 bp, Homo sapiens
ttccgggacagtgaa

SEQ ID NO: 1153502 - DNA, 15 bp, Homo sapiens
tttccgggacagtga

SEQ ID NO: 1153503 - DNA, 15 bp, Homo sapiens
gtttccgggacagtg

SEQ ID NO: 1153504 - DNA, 15 bp, Homo sapiens
tgtttccgggacagt

SEQ ID NO: 1153505 - DNA, 15 bp, Homo sapiens
atgtttccgggacag

SEQ ID NO: 1153506 - DNA, 15 bp, Homo sapiens
catgtttccgggaca

SEQ ID NO: 1153507 - DNA, 15 bp, Homo sapiens
tcatgtttccgggac

SEQ ID NO: 1153508 - DNA, 15 bp, Homo sapiens
ttcatgtttccggga

SEQ ID NO: 1153509 - DNA, 15 bp, Homo sapiens
tttcatgtttccggg

SEQ ID NO: 1153510 - DNA, 15 bp, Homo sapiens
ttttcatgtttccgg

SEQ ID NO: 1153511 - DNA, 15 bp, Homo sapiens
tttttcatgtttccg

SEQ ID NO: 1153512 - DNA, 15 bp, Homo sapiens
ttttttcatgtttcc

SEQ ID NO: 1153513 - DNA, 15 bp, Homo sapiens
tttttttcatgtttc

SEQ ID NO: 1153514 - DNA, 15 bp, Homo sapiens
ttttttttcatgttt

SEQ ID NO: 1153515 - DNA, 15 bp, Homo sapiens
attttttttcatgtt

SEQ ID NO: 1153516 - DNA, 15 bp, Homo sapiens
aattttttttcatgt

SEQ ID NO: 1153517 - DNA, 15 bp, Homo sapiens
ataattttttttcat

SEQ ID NO: 1153518 - DNA, 15 bp, Homo sapiens
aataattttttttca

SEQ ID NO: 1153519 - DNA, 15 bp, Homo sapiens
caataattttttttc

SEQ ID NO: 1153520 - DNA, 15 bp, Homo sapiens
ccaataatttttttt

SEQ ID NO: 1153521 - DNA, 15 bp, Homo sapiens
accaataattttttt

SEQ ID NO: 1153522 - DNA, 15 bp, Homo sapiens
aaccaataatttttt

SEQ ID NO: 1153523 - DNA, 15 bp, Homo sapiens
taaccaataattttt

SEQ ID NO: 1153524 - DNA, 15 bp, Homo sapiens
gtaaccaataatttt

SEQ ID NO: 1153525 - DNA, 15 bp, Homo sapiens
agtaaccaataattt

SEQ ID NO: 1153526 - DNA, 15 bp, Homo sapiens
aagtaaccaataatt

SEQ ID NO: 1153527 - DNA, 15 bp, Homo sapiens
aaagtaaccaataat

SEQ ID NO: 1153528 - DNA, 15 bp, Homo sapiens
aaaagtaaccaataa

SEQ ID NO: 1153529 - DNA, 15 bp, Homo sapiens
taaaagtaaccaata

SEQ ID NO: 1153530 - DNA, 15 bp, Homo sapiens
ataaaagtaaccaat

SEQ ID NO: 1153531 - DNA, 15 bp, Homo sapiens
aataaaagtaaccaa

SEQ ID NO: 1153532 - DNA, 15 bp, Homo sapiens
aaataaaagtaacca

SEQ ID NO: 1153533 - DNA, 15 bp, Homo sapiens
gaaataaaagtaacc

SEQ ID NO: 1153534 - DNA, 15 bp, Homo sapiens
agaaataaaagtaac

SEQ ID NO: 1153535 - DNA, 15 bp, Homo sapiens
aagaaataaaagtaa

SEQ ID NO: 1153536 - DNA, 15 bp, Homo sapiens
gaagaaataaaagta

SEQ ID NO: 1153537 - DNA, 15 bp, Homo sapiens
tgaagaaataaaagt

SEQ ID NO: 1153538 - DNA, 15 bp, Homo sapiens
gtgaagaaataaaag

SEQ ID NO: 1153539 - DNA, 15 bp, Homo sapiens
agtgaagaaataaaa

SEQ ID NO: 1153540 - DNA, 15 bp, Homo sapiens
cagtgaagaaataaa

SEQ ID NO: 1153541 - DNA, 15 bp, Homo sapiens
tcagtgaagaaataa

SEQ ID NO: 1153542 - DNA, 15 bp, Homo sapiens
ttcagtgaagaaata

SEQ ID NO: 1153543 - DNA, 15 bp, Homo sapiens
cttcagtgaagaaat

SEQ ID NO: 1153544 - DNA, 15 bp, Homo sapiens
tcttcagtgaagaaa

SEQ ID NO: 1153545 - DNA, 15 bp, Homo sapiens
atcttcagtgaagaa

SEQ ID NO: 1153546 - DNA, 15 bp, Homo sapiens
gatcttcagtgaaga

SEQ ID NO: 1153547 - DNA, 15 bp, Homo sapiens
agatcttcagtgaag

SEQ ID NO: 1153548 - DNA, 15 bp, Homo sapiens
aagatcttcagtgaa

SEQ ID NO: 1153549 - DNA, 15 bp, Homo sapiens
aaagatcttcagtga

SEQ ID NO: 1153550 - DNA, 15 bp, Homo sapiens
gaaagatcttcagtg

SEQ ID NO: 1153551 - DNA, 15 bp, Homo sapiens
ggaaagatcttcagt

SEQ ID NO: 1153552 - DNA, 15 bp, Homo sapiens
aggaaagatcttcag

SEQ ID NO: 1153553 - DNA, 15 bp, Homo sapiens
taggaaagatcttca

SEQ ID NO: 1153554 - DNA, 15 bp, Homo sapiens
ctaggaaagatcttc

SEQ ID NO: 1153555 - DNA, 15 bp, Homo sapiens
tctaggaaagatctt

SEQ ID NO: 1153556 - DNA, 15 bp, Homo sapiens
ttctaggaaagatct

SEQ ID NO: 1153557 - DNA, 15 bp, Homo sapiens
tttctaggaaagatc

SEQ ID NO: 1153558 - DNA, 15 bp, Homo sapiens
atttctaggaaagat

SEQ ID NO: 1153559 - DNA, 15 bp, Homo sapiens
aatttctaggaaaga

SEQ ID NO: 1153560 - DNA, 15 bp, Homo sapiens
taatttctaggaaag

SEQ ID NO: 1153561 - DNA, 15 bp, Homo sapiens
ataatttctaggaaa

SEQ ID NO: 1153562 - DNA, 15 bp, Homo sapiens
cataatttctaggaa

SEQ ID NO: 1153563 - DNA, 15 bp, Homo sapiens
tcataatttctagga

SEQ ID NO: 1153564 - DNA, 15 bp, Homo sapiens
ttcataatttctagg

SEQ ID NO: 1153565 - DNA, 15 bp, Homo sapiens
gttcataatttctag

SEQ ID NO: 1153566 - DNA, 15 bp, Homo sapiens
ggttcataatttcta

SEQ ID NO: 1153567 - DNA, 15 bp, Homo sapiens
tggttcataatttct

SEQ ID NO: 1153568 - DNA, 15 bp, Homo sapiens
ttggttcataatttc

SEQ ID NO: 1153569 - DNA, 15 bp, Homo sapiens
tttggttcataattt

SEQ ID NO: 1153570 - DNA, 15 bp, Homo sapiens
ttttggttcataatt

SEQ ID NO: 1153571 - DNA, 15 bp, Homo sapiens
tttttggttcataat

SEQ ID NO: 1153572 - DNA, 15 bp, Homo sapiens
ttttttggttcataa

SEQ ID NO: 1153573 - DNA, 15 bp, Homo sapiens
attttttggttcata

SEQ ID NO: 1153574 - DNA, 15 bp, Homo sapiens
cattttttggttcat

SEQ ID NO: 1153575 - DNA, 15 bp, Homo sapiens
acattttttggttca

SEQ ID NO: 1153576 - DNA, 15 bp, Homo sapiens
gacattttttggttc

SEQ ID NO: 1153577 - DNA, 15 bp, Homo sapiens
agacattttttggtt

SEQ ID NO: 1153578 - DNA, 15 bp, Homo sapiens
cagacattttttggt

SEQ ID NO: 1153579 - DNA, 15 bp, Homo sapiens
acagacattttttgg

SEQ ID NO: 1153580 - DNA, 15 bp, Homo sapiens
aacagacattttttg

SEQ ID NO: 1153581 - DNA, 15 bp, Homo sapiens
aaacagacatttttt

SEQ ID NO: 1153582 - DNA, 15 bp, Homo sapiens
aaaacagacattttt

SEQ ID NO: 1153583 - DNA, 15 bp, Homo sapiens
taaaacagacatttt

SEQ ID NO: 1153584 - DNA, 15 bp, Homo sapiens
ataaaacagacattt

SEQ ID NO: 1153585 - DNA, 15 bp, Homo sapiens
gataaaacagacatt

SEQ ID NO: 1153586 - DNA, 15 bp, Homo sapiens
agataaaacagacat

SEQ ID NO: 1153587 - DNA, 15 bp, Homo sapiens
gagataaaacagaca

SEQ ID NO: 1153588 - DNA, 15 bp, Homo sapiens
agagataaaacagac

SEQ ID NO: 1153589 - DNA, 15 bp, Homo sapiens
gagagataaaacaga

SEQ ID NO: 1153590 - DNA, 15 bp, Homo sapiens
tgagagataaaacag

SEQ ID NO: 1153591 - DNA, 15 bp, Homo sapiens
atgagagataaaaca

SEQ ID NO: 1153592 - DNA, 15 bp, Homo sapiens
tatgagagataaaac

SEQ ID NO: 1153593 - DNA, 15 bp, Homo sapiens
ttatgagagataaaa

SEQ ID NO: 1153594 - DNA, 15 bp, Homo sapiens
attatgagagataaa

SEQ ID NO: 1153595 - DNA, 15 bp, Homo sapiens
gattatgagagataa

SEQ ID NO: 1153596 - DNA, 15 bp, Homo sapiens
agattatgagagata

SEQ ID NO: 1153597 - DNA, 15 bp, Homo sapiens
tagattatgagagat

SEQ ID NO: 1153598 - DNA, 15 bp, Homo sapiens
atagattatgagaga

SEQ ID NO: 1153599 - DNA, 15 bp, Homo sapiens
gatagattatgagag

SEQ ID NO: 1153600 - DNA, 15 bp, Homo sapiens
agatagattatgaga

SEQ ID NO: 1153601 - DNA, 15 bp, Homo sapiens
cagatagattatgag

SEQ ID NO: 1153602 - DNA, 15 bp, Homo sapiens
gcagatagattatga

SEQ ID NO: 1153603 - DNA, 15 bp, Homo sapiens
agcagatagattatg

SEQ ID NO: 1153604 - DNA, 15 bp, Homo sapiens
aagcagatagattat

SEQ ID NO: 1153605 - DNA, 15 bp, Homo sapiens
gaagcagatagatta

SEQ ID NO: 1153606 - DNA, 15 bp, Homo sapiens
agaagcagatagatt

SEQ ID NO: 1153607 - DNA, 15 bp, Homo sapiens
aagaagcagatagat

SEQ ID NO: 1153608 - DNA, 15 bp, Homo sapiens
taagaagcagataga

SEQ ID NO: 1153609 - DNA, 15 bp, Homo sapiens
ctaagaagcagatag

SEQ ID NO: 1153610 - DNA, 15 bp, Homo sapiens
actaagaagcagata

SEQ ID NO: 1153611 - DNA, 15 bp, Homo sapiens
gactaagaagcagat

SEQ ID NO: 1153612 - DNA, 15 bp, Homo sapiens
ggactaagaagcaga

SEQ ID NO: 1153613 - DNA, 15 bp, Homo sapiens
tggactaagaagcag

SEQ ID NO: 1153614 - DNA, 15 bp, Homo sapiens
ttggactaagaagca

SEQ ID NO: 1153615 - DNA, 15 bp, Homo sapiens
tttggactaagaagc

SEQ ID NO: 1153616 - DNA, 15 bp, Homo sapiens
ctttggactaagaag

SEQ ID NO: 1153617 - DNA, 15 bp, Homo sapiens
cctttggactaagaa

SEQ ID NO: 1153618 - DNA, 15 bp, Homo sapiens
tcctttggactaaga

SEQ ID NO: 1153619 - DNA, 15 bp, Homo sapiens
ttcctttggactaag

SEQ ID NO: 1153620 - DNA, 15 bp, Homo sapiens
tttcctttggactaa

SEQ ID NO: 1153621 - DNA, 15 bp, Homo sapiens
ttttcctttggacta

SEQ ID NO: 1153622 - DNA, 15 bp, Homo sapiens
attttcctttggact

SEQ ID NO: 1153623 - DNA, 15 bp, Homo sapiens
tattttcctttggac

SEQ ID NO: 1153624 - DNA, 15 bp, Homo sapiens
ttattttcctttgga

SEQ ID NO: 1153625 - DNA, 15 bp, Homo sapiens
attattttcctttgg

SEQ ID NO: 1153626 - DNA, 15 bp, Homo sapiens
tattattttcctttg

SEQ ID NO: 1153627 - DNA, 15 bp, Homo sapiens
atattattttccttt

SEQ ID NO: 1153628 - DNA, 15 bp, Homo sapiens
catattattttcctt

SEQ ID NO: 1153629 - DNA, 15 bp, Homo sapiens
acatattattttcct

SEQ ID NO: 1153630 - DNA, 15 bp, Homo sapiens
aacatattattttcc

SEQ ID NO: 1153631 - DNA, 15 bp, Homo sapiens
aaacatattattttc

SEQ ID NO: 1153632 - DNA, 15 bp, Homo sapiens
aaaacatattatttt

SEQ ID NO: 1153633 - DNA, 15 bp, Homo sapiens
gaaaacatattattt

SEQ ID NO: 1153634 - DNA, 15 bp, Homo sapiens
agaaaacatattatt

SEQ ID NO: 1153635 - DNA, 15 bp, Homo sapiens
cagaaaacatattat

SEQ ID NO: 1153636 - DNA, 15 bp, Homo sapiens
tcagaaaacatatta

SEQ ID NO: 1153637 - DNA, 15 bp, Homo sapiens
atcagaaaacatatt

SEQ ID NO: 1153638 - DNA, 15 bp, Homo sapiens
aatcagaaaacatat

SEQ ID NO: 1153639 - DNA, 15 bp, Homo sapiens
gaatcagaaaacata

SEQ ID NO: 1153640 - DNA, 15 bp, Homo sapiens
ggaatcagaaaacat

SEQ ID NO: 1153641 - DNA, 15 bp, Homo sapiens
tggaatcagaaaaca

SEQ ID NO: 1153642 - DNA, 15 bp, Homo sapiens
atggaatcagaaaac

SEQ ID NO: 1153643 - DNA, 15 bp, Homo sapiens
tatggaatcagaaaa

SEQ ID NO: 1153644 - DNA, 15 bp, Homo sapiens
atatggaatcagaaa

SEQ ID NO: 1153645 - DNA, 15 bp, Homo sapiens
tatatggaatcagaa

SEQ ID NO: 1153646 - DNA, 15 bp, Homo sapiens
ctatatggaatcaga

SEQ ID NO: 1153647 - DNA, 15 bp, Homo sapiens
tctatatggaatcag

SEQ ID NO: 1153648 - DNA, 15 bp, Homo sapiens
atctatatggaatca

SEQ ID NO: 1153649 - DNA, 15 bp, Homo sapiens
tatctatatggaatc

SEQ ID NO: 1153650 - DNA, 15 bp, Homo sapiens
ctatctatatggaat

SEQ ID NO: 1153651 - DNA, 15 bp, Homo sapiens
tctatctatatggaa

SEQ ID NO: 1153652 - DNA, 15 bp, Homo sapiens
atctatctatatgga

SEQ ID NO: 1153653 - DNA, 15 bp, Homo sapiens
tatctatctatatgg

SEQ ID NO: 1153654 - DNA, 15 bp, Homo sapiens
gtatctatctatatg

SEQ ID NO: 1153655 - DNA, 15 bp, Homo sapiens
tgtatctatctatat

SEQ ID NO: 1153656 - DNA, 15 bp, Homo sapiens
ttgtatctatctata

SEQ ID NO: 1153657 - DNA, 15 bp, Homo sapiens
cttgtatctatctat

SEQ ID NO: 1153658 - DNA, 15 bp, Homo sapiens
ccttgtatctatcta

SEQ ID NO: 1153659 - DNA, 15 bp, Homo sapiens
gccttgtatctatct

SEQ ID NO: 1153660 - DNA, 15 bp, Homo sapiens
tgccttgtatctatc

SEQ ID NO: 1153661 - DNA, 15 bp, Homo sapiens
gtgccttgtatctat

SEQ ID NO: 1153662 - DNA, 15 bp, Homo sapiens
tgtgccttgtatcta

SEQ ID NO: 1153663 - DNA, 15 bp, Homo sapiens
ttgtgccttgtatct

SEQ ID NO: 1153664 - DNA, 15 bp, Homo sapiens
attgtgccttgtatc

SEQ ID NO: 1153665 - DNA, 15 bp, Homo sapiens
gattgtgccttgtat

SEQ ID NO: 1153666 - DNA, 15 bp, Homo sapiens
agattgtgccttgta

SEQ ID NO: 1153667 - DNA, 15 bp, Homo sapiens
gagattgtgccttgt

SEQ ID NO: 1153668 - DNA, 15 bp, Homo sapiens
agagattgtgccttg

SEQ ID NO: 1153669 - DNA, 15 bp, Homo sapiens
tagagattgtgcctt

SEQ ID NO: 1153670 - DNA, 15 bp, Homo sapiens
ttagagattgtgcct

SEQ ID NO: 1153671 - DNA, 15 bp, Homo sapiens
attagagattgtgcc

SEQ ID NO: 1153672 - DNA, 15 bp, Homo sapiens
gattagagattgtgc

SEQ ID NO: 1153673 - DNA, 15 bp, Homo sapiens
agattagagattgtg

SEQ ID NO: 1153674 - DNA, 15 bp, Homo sapiens
tagattagagattgt

SEQ ID NO: 1153675 - DNA, 15 bp, Homo sapiens
ctagattagagattg

SEQ ID NO: 1153676 - DNA, 15 bp, Homo sapiens
gctagattagagatt

SEQ ID NO: 1153677 - DNA, 15 bp, Homo sapiens
tgctagattagagat

SEQ ID NO: 1153678 - DNA, 15 bp, Homo sapiens
ctgctagattagaga

SEQ ID NO: 1153679 - DNA, 15 bp, Homo sapiens
tctgctagattagag

SEQ ID NO: 1153680 - DNA, 15 bp, Homo sapiens
ttctgctagattaga

SEQ ID NO: 1153681 - DNA, 15 bp, Homo sapiens
attctgctagattag

SEQ ID NO: 1153682 - DNA, 15 bp, Homo sapiens
aattctgctagatta

SEQ ID NO: 1153683 - DNA, 15 bp, Homo sapiens
aaattctgctagatt

SEQ ID NO: 1153684 - DNA, 15 bp, Homo sapiens
caaattctgctagat

SEQ ID NO: 1153685 - DNA, 15 bp, Homo sapiens
tcaaattctgctaga

SEQ ID NO: 1153686 - DNA, 15 bp, Homo sapiens
ttcaaattctgctag

SEQ ID NO: 1153687 - DNA, 15 bp, Homo sapiens
attcaaattctgcta

SEQ ID NO: 1153688 - DNA, 15 bp, Homo sapiens
cattcaaattctgct

SEQ ID NO: 1153689 - DNA, 15 bp, Homo sapiens
tcattcaaattctgc

SEQ ID NO: 1153690 - DNA, 15 bp, Homo sapiens
atcattcaaattctg

SEQ ID NO: 1153691 - DNA, 15 bp, Homo sapiens
gatcattcaaattct

SEQ ID NO: 1153692 - DNA, 15 bp, Homo sapiens
ggatcattcaaattc

SEQ ID NO: 1153693 - DNA, 15 bp, Homo sapiens
aggatcattcaaatt

SEQ ID NO: 1153694 - DNA, 15 bp, Homo sapiens
gaggatcattcaaat

SEQ ID NO: 1153695 - DNA, 15 bp, Homo sapiens
tgaggatcattcaaa

SEQ ID NO: 1153696 - DNA, 15 bp, Homo sapiens
ctgaggatcattcaa

SEQ ID NO: 1153697 - DNA, 15 bp, Homo sapiens
actgaggatcattca

SEQ ID NO: 1153698 - DNA, 15 bp, Homo sapiens
tactgaggatcattc

SEQ ID NO: 1153699 - DNA, 15 bp, Homo sapiens
atactgaggatcatt

SEQ ID NO: 1153700 - DNA, 15 bp, Homo sapiens
catactgaggatcat

SEQ ID NO: 1153701 - DNA, 15 bp, Homo sapiens
tcatactgaggatca

SEQ ID NO: 1153702 - DNA, 15 bp, Homo sapiens
atcatactgaggatc

SEQ ID NO: 1153703 - DNA, 15 bp, Homo sapiens
aatcatactgaggat

SEQ ID NO: 1153704 - DNA, 15 bp, Homo sapiens
gaatcatactgagga

SEQ ID NO: 1153705 - DNA, 15 bp, Homo sapiens
tgaatcatactgagg

SEQ ID NO: 1153706 - DNA, 15 bp, Homo sapiens
atgaatcatactgag

SEQ ID NO: 1153707 - DNA, 15 bp, Homo sapiens
aatgaatcatactga

SEQ ID NO: 1153708 - DNA, 15 bp, Homo sapiens
aaatgaatcatactg

SEQ ID NO: 1153709 - DNA, 15 bp, Homo sapiens
aaaatgaatcatact

SEQ ID NO: 1153710 - DNA, 15 bp, Homo sapiens
aaaaatgaatcatac

SEQ ID NO: 1153711 - DNA, 15 bp, Homo sapiens
taaaaatgaatcata

SEQ ID NO: 1153712 - DNA, 15 bp, Homo sapiens
ttaaaaatgaatcat

SEQ ID NO: 1153713 - DNA, 15 bp, Homo sapiens
attaaaaatgaatca

SEQ ID NO: 1153714 - DNA, 15 bp, Homo sapiens
aattaaaaatgaatc

SEQ ID NO: 1153715 - DNA, 15 bp, Homo sapiens
aaattaaaaatgaat

SEQ ID NO: 1153716 - DNA, 15 bp, Homo sapiens
taaattaaaaatgaa

SEQ ID NO: 1153717 - DNA, 15 bp, Homo sapiens
ataaattaaaaatga

SEQ ID NO: 1153718 - DNA, 15 bp, Homo sapiens
tataaattaaaaatg

SEQ ID NO: 1153719 - DNA, 15 bp, Homo sapiens
atataaattaaaaat

SEQ ID NO: 1153720 - DNA, 15 bp, Homo sapiens
aatataaattaaaaa

SEQ ID NO: 1153721 - DNA, 15 bp, Homo sapiens
taatataaattaaaa

SEQ ID NO: 1153722 - DNA, 15 bp, Homo sapiens
ataatataaattaaa

SEQ ID NO: 1153723 - DNA, 15 bp, Homo sapiens
tataatataaattaa

SEQ ID NO: 1153724 - DNA, 15 bp, Homo sapiens
gtataatataaatta

SEQ ID NO: 1153725 - DNA, 15 bp, Homo sapiens
ggtataatataaatt

SEQ ID NO: 1153726 - DNA, 15 bp, Homo sapiens
tggtataatataaat

SEQ ID NO: 1153727 - DNA, 15 bp, Homo sapiens
atggtataatataaa

SEQ ID NO: 1153728 - DNA, 15 bp, Homo sapiens
aatggtataatataa

SEQ ID NO: 1153729 - DNA, 15 bp, Homo sapiens
aaatggtataatata

SEQ ID NO: 1153730 - DNA, 15 bp, Homo sapiens
taaatggtataatat

SEQ ID NO: 1153731 - DNA, 15 bp, Homo sapiens
ctaaatggtataata

SEQ ID NO: 1153732 - DNA, 15 bp, Homo sapiens
cctaaatggtataat

SEQ ID NO: 1153733 - DNA, 15 bp, Homo sapiens
ccctaaatggtataa

SEQ ID NO: 1153734 - DNA, 15 bp, Homo sapiens
tccctaaatggtata

SEQ ID NO: 1153735 - DNA, 15 bp, Homo sapiens
atccctaaatggtat

SEQ ID NO: 1153736 - DNA, 15 bp, Homo sapiens
gatccctaaatggta

SEQ ID NO: 1153737 - DNA, 15 bp, Homo sapiens
ggatccctaaatggt

SEQ ID NO: 1153738 - DNA, 15 bp, Homo sapiens
aggatccctaaatgg

SEQ ID NO: 1153739 - DNA, 15 bp, Homo sapiens
gaggatccctaaatg

SEQ ID NO: 1153740 - DNA, 15 bp, Homo sapiens
agaggatccctaaat

SEQ ID NO: 1153741 - DNA, 15 bp, Homo sapiens
cagaggatccctaaa

SEQ ID NO: 1153742 - DNA, 15 bp, Homo sapiens
tcagaggatccctaa

SEQ ID NO: 1153743 - DNA, 15 bp, Homo sapiens
ttcagaggatcccta

SEQ ID NO: 1153744 - DNA, 15 bp, Homo sapiens
gttcagaggatccct

SEQ ID NO: 1153745 - DNA, 15 bp, Homo sapiens
ggttcagaggatccc

SEQ ID NO: 1153746 - DNA, 15 bp, Homo sapiens
tggttcagaggatcc

SEQ ID NO: 1153747 - DNA, 15 bp, Homo sapiens
ctggttcagaggatc

SEQ ID NO: 1153748 - DNA, 15 bp, Homo sapiens
tctggttcagaggat

SEQ ID NO: 1153749 - DNA, 15 bp, Homo sapiens
ctctggttcagagga

SEQ ID NO: 1153750 - DNA, 15 bp, Homo sapiens
gctctggttcagagg

SEQ ID NO: 1153751 - DNA, 15 bp, Homo sapiens
tgctctggttcagag

SEQ ID NO: 1153752 - DNA, 15 bp, Homo sapiens
atgctctggttcaga

SEQ ID NO: 1153753 - DNA, 15 bp, Homo sapiens
tatgctctggttcag

SEQ ID NO: 1153754 - DNA, 15 bp, Homo sapiens
atatgctctggttca

SEQ ID NO: 1153755 - DNA, 15 bp, Homo sapiens
aatatgctctggttc

SEQ ID NO: 1153756 - DNA, 15 bp, Homo sapiens
taatatgctctggtt

SEQ ID NO: 1153757 - DNA, 15 bp, Homo sapiens
gtaatatgctctggt

SEQ ID NO: 1153758 - DNA, 15 bp, Homo sapiens
agtaatatgctctgg

SEQ ID NO: 1153759 - DNA, 15 bp, Homo sapiens
cagtaatatgctctg

SEQ ID NO: 1153760 - DNA, 15 bp, Homo sapiens
tcagtaatatgctct

SEQ ID NO: 1153761 - DNA, 15 bp, Homo sapiens
atcagtaatatgctc

SEQ ID NO: 1153762 - DNA, 15 bp, Homo sapiens
aatcagtaatatgct

SEQ ID NO: 1153763 - DNA, 15 bp, Homo sapiens
taatcagtaatatgc

SEQ ID NO: 1153764 - DNA, 15 bp, Homo sapiens
ttaatcagtaatatg

SEQ ID NO: 1153765 - DNA, 15 bp, Homo sapiens
tttaatcagtaatat

SEQ ID NO: 1153766 - DNA, 15 bp, Homo sapiens
atttaatcagtaata

SEQ ID NO: 1153767 - DNA, 15 bp, Homo sapiens
aaatttaatcagtaa

SEQ ID NO: 1153768 - DNA, 15 bp, Homo sapiens
aaaatttaatcagta

SEQ ID NO: 1153769 - DNA, 15 bp, Homo sapiens
taaaatttaatcagt

SEQ ID NO: 1153770 - DNA, 15 bp, Homo sapiens
ataaaatttaatcag

SEQ ID NO: 1153771 - DNA, 15 bp, Homo sapiens
tataaaatttaatca

SEQ ID NO: 1153772 - DNA, 15 bp, Homo sapiens
gtataaaatttaatc

SEQ ID NO: 1153773 - DNA, 15 bp, Homo sapiens
agtataaaatttaat

SEQ ID NO: 1153774 - DNA, 15 bp, Homo sapiens
aagtataaaatttaa

SEQ ID NO: 1153775 - DNA, 15 bp, Homo sapiens
caagtataaaattta

SEQ ID NO: 1153776 - DNA, 15 bp, Homo sapiens
acaagtataaaattt

SEQ ID NO: 1153777 - DNA, 15 bp, Homo sapiens
aacaagtataaaatt

SEQ ID NO: 1153778 - DNA, 15 bp, Homo sapiens
caacaagtataaaat

SEQ ID NO: 1153779 - DNA, 15 bp, Homo sapiens
tcaacaagtataaaa

SEQ ID NO: 1153780 - DNA, 15 bp, Homo sapiens
ttcaacaagtataaa

SEQ ID NO: 1153781 - DNA, 15 bp, Homo sapiens
tttcaacaagtataa

SEQ ID NO: 1153782 - DNA, 15 bp, Homo sapiens
ctttcaacaagtata

SEQ ID NO: 1153783 - DNA, 15 bp, Homo sapiens
actttcaacaagtat

SEQ ID NO: 1153784 - DNA, 15 bp, Homo sapiens
cactttcaacaagta

SEQ ID NO: 1153785 - DNA, 15 bp, Homo sapiens
gcactttcaacaagt

SEQ ID NO: 1153786 - DNA, 15 bp, Homo sapiens
agcactttcaacaag

SEQ ID NO: 1153787 - DNA, 15 bp, Homo sapiens
cagcactttcaacaa

SEQ ID NO: 1153788 - DNA, 15 bp, Homo sapiens
acagcactttcaaca

SEQ ID NO: 1153789 - DNA, 15 bp, Homo sapiens
gacagcactttcaac

SEQ ID NO: 1153790 - DNA, 15 bp, Homo sapiens
tgacagcactttcaa

SEQ ID NO: 1153791 - DNA, 15 bp, Homo sapiens
ttgacagcactttca

SEQ ID NO: 1153792 - DNA, 15 bp, Homo sapiens
tttgacagcactttc

SEQ ID NO: 1153793 - DNA, 15 bp, Homo sapiens
atttgacagcacttt

SEQ ID NO: 1153794 - DNA, 15 bp, Homo sapiens
tatttgacagcactt

SEQ ID NO: 1153795 - DNA, 15 bp, Homo sapiens
ttatttgacagcact

SEQ ID NO: 1153796 - DNA, 15 bp, Homo sapiens
tttatttgacagcac

SEQ ID NO: 1153797 - DNA, 15 bp, Homo sapiens
ttttatttgacagca

SEQ ID NO: 1153798 - DNA, 15 bp, Homo sapiens
attttatttgacagc

SEQ ID NO: 1153799 - DNA, 15 bp, Homo sapiens
cattttatttgacag

SEQ ID NO: 1153800 - DNA, 15 bp, Homo sapiens
tcattttatttgaca

SEQ ID NO: 1153801 - DNA, 15 bp, Homo sapiens
atcattttatttgac

SEQ ID NO: 1153802 - DNA, 15 bp, Homo sapiens
gatcattttatttga

SEQ ID NO: 1153803 - DNA, 15 bp, Homo sapiens
tgatcattttatttg

SEQ ID NO: 1153804 - DNA, 15 bp, Homo sapiens
atgatcattttattt

SEQ ID NO: 1153805 - DNA, 15 bp, Homo sapiens
gatgatcattttatt

SEQ ID NO: 1153806 - DNA, 15 bp, Homo sapiens
tgatgatcattttat

SEQ ID NO: 1153807 - DNA, 15 bp, Homo sapiens
atgatgatcatttta

SEQ ID NO: 1153808 - DNA, 15 bp, Homo sapiens
aatgatgatcatttt

SEQ ID NO: 1153809 - DNA, 15 bp, Homo sapiens
caatgatgatcattt

SEQ ID NO: 1153810 - DNA, 15 bp, Homo sapiens
acaatgatgatcatt

SEQ ID NO: 1153811 - DNA, 15 bp, Homo sapiens
cacaatgatgatcat

SEQ ID NO: 1153812 - DNA, 15 bp, Homo sapiens
gcacaatgatgatca

SEQ ID NO: 1153813 - DNA, 15 bp, Homo sapiens
tgcacaatgatgatc

SEQ ID NO: 1153814 - DNA, 15 bp, Homo sapiens
ctgcacaatgatgat

SEQ ID NO: 1153815 - DNA, 15 bp, Homo sapiens
tctgcacaatgatga

SEQ ID NO: 1153816 - DNA, 15 bp, Homo sapiens
ttctgcacaatgatg

SEQ ID NO: 1153817 - DNA, 15 bp, Homo sapiens
gttctgcacaatgat

SEQ ID NO: 1153818 - DNA, 15 bp, Homo sapiens
tgttctgcacaatga

SEQ ID NO: 1153819 - DNA, 15 bp, Homo sapiens
ttgttctgcacaatg

SEQ ID NO: 1153820 - DNA, 15 bp, Homo sapiens
tttgttctgcacaat

SEQ ID NO: 1153821 - DNA, 15 bp, Homo sapiens
ttttgttctgcacaa

SEQ ID NO: 1153822 - DNA, 15 bp, Homo sapiens
tttttgttctgcaca

SEQ ID NO: 1153823 - DNA, 15 bp, Homo sapiens
ttttttgttctgcac

SEQ ID NO: 1153824 - DNA, 15 bp, Homo sapiens
cttttttgttctgca

SEQ ID NO: 1153825 - DNA, 15 bp, Homo sapiens
acttttttgttctgc

SEQ ID NO: 1153826 - DNA, 15 bp, Homo sapiens
tacttttttgttctg

SEQ ID NO: 1153827 - DNA, 15 bp, Homo sapiens
aatacttttttgttc

SEQ ID NO: 1153828 - DNA, 15 bp, Homo sapiens
gaatacttttttgtt

SEQ ID NO: 1153829 - DNA, 15 bp, Homo sapiens
agaatacttttttgt

SEQ ID NO: 1153830 - DNA, 15 bp, Homo sapiens
cagaatacttttttg

SEQ ID NO: 1153831 - DNA, 15 bp, Homo sapiens
acagaatactttttt

SEQ ID NO: 1153832 - DNA, 15 bp, Homo sapiens
aacagaatacttttt

SEQ ID NO: 1153833 - DNA, 15 bp, Homo sapiens
taacagaatactttt

SEQ ID NO: 1153834 - DNA, 15 bp, Homo sapiens
ataacagaatacttt

SEQ ID NO: 1153835 - DNA, 15 bp, Homo sapiens
aataacagaatactt

SEQ ID NO: 1153836 - DNA, 15 bp, Homo sapiens
aaataacagaatact

SEQ ID NO: 1153837 - DNA, 15 bp, Homo sapiens
caaataacagaatac

SEQ ID NO: 1153838 - DNA, 15 bp, Homo sapiens
ccaaataacagaata

SEQ ID NO: 1153839 - DNA, 15 bp, Homo sapiens
tccaaataacagaat

SEQ ID NO: 1153840 - DNA, 15 bp, Homo sapiens
ctccaaataacagaa

SEQ ID NO: 1153841 - DNA, 15 bp, Homo sapiens
tctccaaataacaga

SEQ ID NO: 1153842 - DNA, 15 bp, Homo sapiens
ttctccaaataacag

SEQ ID NO: 1153843 - DNA, 15 bp, Homo sapiens
tttctccaaataaca

SEQ ID NO: 1153844 - DNA, 15 bp, Homo sapiens
ttttctccaaataac

SEQ ID NO: 1153845 - DNA, 15 bp, Homo sapiens
attttctccaaataa

SEQ ID NO: 1153846 - DNA, 15 bp, Homo sapiens
gattttctccaaata

SEQ ID NO: 1153847 - DNA, 15 bp, Homo sapiens
tgattttctccaaat

SEQ ID NO: 1153848 - DNA, 15 bp, Homo sapiens
gtgattttctccaaa

SEQ ID NO: 1153849 - DNA, 15 bp, Homo sapiens
tgtgattttctccaa

SEQ ID NO: 1153850 - DNA, 15 bp, Homo sapiens
ttgtgattttctcca

SEQ ID NO: 1153851 - DNA, 15 bp, Homo sapiens
gttgtgattttctcc

SEQ ID NO: 1153852 - DNA, 15 bp, Homo sapiens
tgttgtgattttctc

SEQ ID NO: 1153853 - DNA, 15 bp, Homo sapiens
ttgttgtgattttct

SEQ ID NO: 1153854 - DNA, 15 bp, Homo sapiens
gttgttgtgattttc

SEQ ID NO: 1153855 - DNA, 15 bp, Homo sapiens
ggttgttgtgatttt

SEQ ID NO: 1153856 - DNA, 15 bp, Homo sapiens
tggttgttgtgattt

SEQ ID NO: 1153857 - DNA, 15 bp, Homo sapiens
ttggttgttgtgatt

SEQ ID NO: 1153858 - DNA, 15 bp, Homo sapiens
tttggttgttgtgat

SEQ ID NO: 1153859 - DNA, 15 bp, Homo sapiens
ttttggttgttgtga

SEQ ID NO: 1153860 - DNA, 15 bp, Homo sapiens
tttttggttgttgtg

SEQ ID NO: 1153861 - DNA, 15 bp, Homo sapiens
ttttttggttgttgt

SEQ ID NO: 1153862 - DNA, 15 bp, Homo sapiens
tttttttggttgttg

SEQ ID NO: 1153863 - DNA, 15 bp, Homo sapiens
atttttttggttgtt

SEQ ID NO: 1153864 - DNA, 15 bp, Homo sapiens
tatttttttggttgt

SEQ ID NO: 1153865 - DNA, 15 bp, Homo sapiens
ttatttttttggttg

SEQ ID NO: 1153866 - DNA, 15 bp, Homo sapiens
cttatttttttggtt

SEQ ID NO: 1153867 - DNA, 15 bp, Homo sapiens
tcttatttttttggt

SEQ ID NO: 1153868 - DNA, 15 bp, Homo sapiens
atcttatttttttgg

SEQ ID NO: 1153869 - DNA, 15 bp, Homo sapiens
catcttatttttttg

SEQ ID NO: 1153870 - DNA, 15 bp, Homo sapiens
acatcttattttttt

SEQ ID NO: 1153871 - DNA, 15 bp, Homo sapiens
tacatcttatttttt

SEQ ID NO: 1153872 - DNA, 15 bp, Homo sapiens
gtacatcttattttt

SEQ ID NO: 1153873 - DNA, 15 bp, Homo sapiens
agtacatcttatttt

SEQ ID NO: 1153874 - DNA, 15 bp, Homo sapiens
tagtacatcttattt

SEQ ID NO: 1153875 - DNA, 15 bp, Homo sapiens
ctagtacatcttatt

SEQ ID NO: 1153876 - DNA, 15 bp, Homo sapiens
tctagtacatcttat

SEQ ID NO: 1153877 - DNA, 15 bp, Homo sapiens
atctagtacatctta

SEQ ID NO: 1153878 - DNA, 15 bp, Homo sapiens
catctagtacatctt

SEQ ID NO: 1153879 - DNA, 15 bp, Homo sapiens
ccatctagtacatct

SEQ ID NO: 1153880 - DNA, 15 bp, Homo sapiens
accatctagtacatc

SEQ ID NO: 1153881 - DNA, 15 bp, Homo sapiens
caccatctagtacat

SEQ ID NO: 1153882 - DNA, 15 bp, Homo sapiens
tcaccatctagtaca

SEQ ID NO: 1153883 - DNA, 15 bp, Homo sapiens
ttcaccatctagtac

SEQ ID NO: 1153884 - DNA, 15 bp, Homo sapiens
tttcaccatctagta

SEQ ID NO: 1153885 - DNA, 15 bp, Homo sapiens
gtttcaccatctagt

SEQ ID NO: 1153886 - DNA, 15 bp, Homo sapiens
tgtttcaccatctag

SEQ ID NO: 1153887 - DNA, 15 bp, Homo sapiens
atgtttcaccatcta

SEQ ID NO: 1153888 - DNA, 15 bp, Homo sapiens
tatgtttcaccatct

SEQ ID NO: 1153889 - DNA, 15 bp, Homo sapiens
ctatgtttcaccatc

SEQ ID NO: 1153890 - DNA, 15 bp, Homo sapiens
tctatgtttcaccat

SEQ ID NO: 1153891 - DNA, 15 bp, Homo sapiens
ttctatgtttcacca

SEQ ID NO: 1153892 - DNA, 15 bp, Homo sapiens
attctatgtttcacc

SEQ ID NO: 1153893 - DNA, 15 bp, Homo sapiens
tattctatgtttcac

SEQ ID NO: 1153894 - DNA, 15 bp, Homo sapiens
ttattctatgtttca

SEQ ID NO: 1153895 - DNA, 15 bp, Homo sapiens
tttattctatgtttc

SEQ ID NO: 1153896 - DNA, 15 bp, Homo sapiens
ttttattctatgttt

SEQ ID NO: 1153897 - DNA, 15 bp, Homo sapiens
tttttattctatgtt

SEQ ID NO: 1153898 - DNA, 15 bp, Homo sapiens
gtttttattctatgt

SEQ ID NO: 1153899 - DNA, 15 bp, Homo sapiens
tgtttttattctatg

SEQ ID NO: 1153900 - DNA, 15 bp, Homo sapiens
ttgtttttattctat

SEQ ID NO: 1153901 - DNA, 15 bp, Homo sapiens
gttgtttttattcta

SEQ ID NO: 1153902 - DNA, 15 bp, Homo sapiens
tgttgtttttattct

SEQ ID NO: 1153903 - DNA, 15 bp, Homo sapiens
ttgttgtttttattc

SEQ ID NO: 1153904 - DNA, 15 bp, Homo sapiens
tttgttgtttttatt

SEQ ID NO: 1153905 - DNA, 15 bp, Homo sapiens
ttttgttgtttttat

SEQ ID NO: 1153906 - DNA, 15 bp, Homo sapiens
tttttgttgttttta

SEQ ID NO: 1153907 - DNA, 15 bp, Homo sapiens
atttttgttgttttt

SEQ ID NO: 1153908 - DNA, 15 bp, Homo sapiens
gtatttttgttgttt

SEQ ID NO: 1153909 - DNA, 15 bp, Homo sapiens
tgtatttttgttgtt

SEQ ID NO: 1153910 - DNA, 15 bp, Homo sapiens
atgtatttttgttgt

SEQ ID NO: 1153911 - DNA, 15 bp, Homo sapiens
aatgtatttttgttg

SEQ ID NO: 1153912 - DNA, 15 bp, Homo sapiens
aaatgtatttttgtt

SEQ ID NO: 1153913 - DNA, 15 bp, Homo sapiens
taaatgtatttttgt

SEQ ID NO: 1153914 - DNA, 15 bp, Homo sapiens
ataaatgtatttttg

SEQ ID NO: 1153915 - DNA, 15 bp, Homo sapiens
aataaatgtattttt

SEQ ID NO: 1153916 - DNA, 15 bp, Homo sapiens
taataaatgtatttt

SEQ ID NO: 1153917 - DNA, 15 bp, Homo sapiens
gtaataaatgtattt

SEQ ID NO: 1153918 - DNA, 15 bp, Homo sapiens
tgtaataaatgtatt

SEQ ID NO: 1153919 - DNA, 15 bp, Homo sapiens
atgtaataaatgtat

SEQ ID NO: 1153920 - DNA, 15 bp, Homo sapiens
aatgtaataaatgta

SEQ ID NO: 1153921 - DNA, 15 bp, Homo sapiens
aaatgtaataaatgt

SEQ ID NO: 1153922 - DNA, 15 bp, Homo sapiens
gaaatgtaataaatg

SEQ ID NO: 1153923 - DNA, 15 bp, Homo sapiens
agaaatgtaataaat

SEQ ID NO: 1153924 - DNA, 15 bp, Homo sapiens
aagaaatgtaataaa

SEQ ID NO: 1153925 - DNA, 15 bp, Homo sapiens
aaagaaatgtaataa

SEQ ID NO: 1153926 - DNA, 15 bp, Homo sapiens
aaaagaaatgtaata

SEQ ID NO: 1153927 - DNA, 15 bp, Homo sapiens
caaaagaaatgtaat

SEQ ID NO: 1153928 - DNA, 15 bp, Homo sapiens
tcaaaagaaatgtaa

SEQ ID NO: 1153929 - DNA, 15 bp, Homo sapiens
ttcaaaagaaatgta

SEQ ID NO: 1153930 - DNA, 15 bp, Homo sapiens
tttcaaaagaaatgt

SEQ ID NO: 1153931 - DNA, 15 bp, Homo sapiens
ctttcaaaagaaatg

SEQ ID NO: 1153932 - DNA, 15 bp, Homo sapiens
actttcaaaagaaat

SEQ ID NO: 1153933 - DNA, 15 bp, Homo sapiens
aactttcaaaagaaa

SEQ ID NO: 1153934 - DNA, 15 bp, Homo sapiens
caactttcaaaagaa

SEQ ID NO: 1153935 - DNA, 15 bp, Homo sapiens
ccaactttcaaaaga

SEQ ID NO: 1153936 - DNA, 15 bp, Homo sapiens
tccaactttcaaaag

SEQ ID NO: 1153937 - DNA, 15 bp, Homo sapiens
ttccaactttcaaaa

SEQ ID NO: 1153938 - DNA, 15 bp, Homo sapiens
tttccaactttcaaa

SEQ ID NO: 1153939 - DNA, 15 bp, Homo sapiens
gtttccaactttcaa

SEQ ID NO: 1153940 - DNA, 15 bp, Homo sapiens
agtttccaactttca

SEQ ID NO: 1153941 - DNA, 15 bp, Homo sapiens
aagtttccaactttc

SEQ ID NO: 1153942 - DNA, 15 bp, Homo sapiens
gaagtttccaacttt

SEQ ID NO: 1153943 - DNA, 15 bp, Homo sapiens
tgaagtttccaactt

SEQ ID NO: 1153944 - DNA, 15 bp, Homo sapiens
gtgaagtttccaact

SEQ ID NO: 1153945 - DNA, 15 bp, Homo sapiens
tgtgaagtttccaac

SEQ ID NO: 1153946 - DNA, 15 bp, Homo sapiens
ttgtgaagtttccaa

SEQ ID NO: 1153947 - DNA, 15 bp, Homo sapiens
attgtgaagtttcca

SEQ ID NO: 1153948 - DNA, 15 bp, Homo sapiens
tattgtgaagtttcc

SEQ ID NO: 1153949 - DNA, 15 bp, Homo sapiens
ttattgtgaagtttc

SEQ ID NO: 1153950 - DNA, 15 bp, Homo sapiens
tttattgtgaagttt

SEQ ID NO: 1153951 - DNA, 15 bp, Homo sapiens
gtttattgtgaagtt

SEQ ID NO: 1153952 - DNA, 15 bp, Homo sapiens
agtttattgtgaagt

SEQ ID NO: 1153953 - DNA, 15 bp, Homo sapiens
gagtttattgtgaag

SEQ ID NO: 1153954 - DNA, 15 bp, Homo sapiens
cgagtttattgtgaa

SEQ ID NO: 1153955 - DNA, 15 bp, Homo sapiens
tcgagtttattgtga

SEQ ID NO: 1153956 - DNA, 15 bp, Homo sapiens
atcgagtttattgtg

SEQ ID NO: 1153957 - DNA, 15 bp, Homo sapiens
tatcgagtttattgt

SEQ ID NO: 1153958 - DNA, 15 bp, Homo sapiens
atatcgagtttattg

SEQ ID NO: 1153959 - DNA, 15 bp, Homo sapiens
tatatcgagtttatt

SEQ ID NO: 1153960 - DNA, 15 bp, Homo sapiens
gtatatcgagtttat

SEQ ID NO: 1153961 - DNA, 15 bp, Homo sapiens
tgtatatcgagttta

SEQ ID NO: 1153962 - DNA, 15 bp, Homo sapiens
ttgtatatcgagttt

SEQ ID NO: 1153963 - DNA, 15 bp, Homo sapiens
tttgtatatcgagtt

SEQ ID NO: 1153964 - DNA, 15 bp, Homo sapiens
ttttgtatatcgagt

SEQ ID NO: 1153965 - DNA, 15 bp, Homo sapiens
tttttgtatatcgag

SEQ ID NO: 1153966 - DNA, 15 bp, Homo sapiens
atttttgtatatcga

SEQ ID NO: 1153967 - DNA, 15 bp, Homo sapiens
gatttttgtatatcg

SEQ ID NO: 1153968 - DNA, 15 bp, Homo sapiens
cgatttttgtatatc

SEQ ID NO: 1153969 - DNA, 15 bp, Homo sapiens
acgatttttgtatat

SEQ ID NO: 1153970 - DNA, 15 bp, Homo sapiens
aacgatttttgtata

SEQ ID NO: 1153971 - DNA, 15 bp, Homo sapiens
taacgatttttgtat

SEQ ID NO: 1153972 - DNA, 15 bp, Homo sapiens
ataacgatttttgta

SEQ ID NO: 1153973 - DNA, 15 bp, Homo sapiens
cataacgatttttgt

SEQ ID NO: 1153974 - DNA, 15 bp, Homo sapiens
acataacgatttttg

SEQ ID NO: 1153975 - DNA, 15 bp, Homo sapiens
tacataacgattttt

SEQ ID NO: 1153976 - DNA, 15 bp, Homo sapiens
ttacataacgatttt

SEQ ID NO: 1153977 - DNA, 15 bp, Homo sapiens
tttacataacgattt

SEQ ID NO: 1153978 - DNA, 15 bp, Homo sapiens
gtttacataacgatt

SEQ ID NO: 1153979 - DNA, 15 bp, Homo sapiens
agtttacataacgat

SEQ ID NO: 1153980 - DNA, 15 bp, Homo sapiens
cagtttacataacga

SEQ ID NO: 1153981 - DNA, 15 bp, Homo sapiens
acagtttacataacg

SEQ ID NO: 1153982 - DNA, 15 bp, Homo sapiens
tacagtttacataac

SEQ ID NO: 1153983 - DNA, 15 bp, Homo sapiens
atacagtttacataa

SEQ ID NO: 1153984 - DNA, 15 bp, Homo sapiens
tatacagtttacata

SEQ ID NO: 1153985 - DNA, 15 bp, Homo sapiens
ttatacagtttacat

SEQ ID NO: 1153986 - DNA, 15 bp, Homo sapiens
cttatacagtttaca

SEQ ID NO: 1153987 - DNA, 15 bp, Homo sapiens
gcttatacagtttac

SEQ ID NO: 1153988 - DNA, 15 bp, Homo sapiens
ggcttatacagttta

SEQ ID NO: 1153989 - DNA, 15 bp, Homo sapiens
aggcttatacagttt

SEQ ID NO: 1153990 - DNA, 15 bp, Homo sapiens
caggcttatacagtt

SEQ ID NO: 1153991 - DNA, 15 bp, Homo sapiens
ccaggcttatacagt

SEQ ID NO: 1153992 - DNA, 15 bp, Homo sapiens
cccaggcttatacag

SEQ ID NO: 1153993 - DNA, 15 bp, Homo sapiens
acccaggcttataca

SEQ ID NO: 1153994 - DNA, 15 bp, Homo sapiens
aacccaggcttatac

SEQ ID NO: 1153995 - DNA, 15 bp, Homo sapiens
aaacccaggcttata

SEQ ID NO: 1153996 - DNA, 15 bp, Homo sapiens
gaaacccaggcttat

SEQ ID NO: 1153997 - DNA, 15 bp, Homo sapiens
ggaaacccaggctta

SEQ ID NO: 1153998 - DNA, 15 bp, Homo sapiens
aggaaacccaggctt

SEQ ID NO: 1153999 - DNA, 15 bp, Homo sapiens
aaggaaacccaggct

SEQ ID NO: 1154000 - DNA, 15 bp, Homo sapiens
taaggaaacccaggc

SEQ ID NO: 1154001 - DNA, 15 bp, Homo sapiens
ataaggaaacccagg

SEQ ID NO: 1154002 - DNA, 15 bp, Homo sapiens
aataaggaaacccag

SEQ ID NO: 1154003 - DNA, 15 bp, Homo sapiens
aaataaggaaaccca

SEQ ID NO: 1154004 - DNA, 15 bp, Homo sapiens
taaataaggaaaccc

SEQ ID NO: 1154005 - DNA, 15 bp, Homo sapiens
ataaataaggaaacc

SEQ ID NO: 1154006 - DNA, 15 bp, Homo sapiens
cataaataaggaaac

SEQ ID NO: 1154007 - DNA, 15 bp, Homo sapiens
tcataaataaggaaa

SEQ ID NO: 1154008 - DNA, 15 bp, Homo sapiens
atcataaataaggaa

SEQ ID NO: 1154009 - DNA, 15 bp, Homo sapiens
tatcataaataagga

SEQ ID NO: 1154010 - DNA, 15 bp, Homo sapiens
gtatcataaataagg

SEQ ID NO: 1154011 - DNA, 15 bp, Homo sapiens
tgtatcataaataag

SEQ ID NO: 1154012 - DNA, 15 bp, Homo sapiens
ctgtatcataaataa

SEQ ID NO: 1154013 - DNA, 15 bp, Homo sapiens
tctgtatcataaata

SEQ ID NO: 1154014 - DNA, 15 bp, Homo sapiens
ctctgtatcataaat

SEQ ID NO: 1154015 - DNA, 15 bp, Homo sapiens
tctctgtatcataaa

SEQ ID NO: 1154016 - DNA, 15 bp, Homo sapiens
atctctgtatcataa

SEQ ID NO: 1154017 - DNA, 15 bp, Homo sapiens
tatctctgtatcata

SEQ ID NO: 1154018 - DNA, 15 bp, Homo sapiens
ttatctctgtatcat

SEQ ID NO: 1154019 - DNA, 15 bp, Homo sapiens
gttatctctgtatca

SEQ ID NO: 1154020 - DNA, 15 bp, Homo sapiens
agttatctctgtatc

SEQ ID NO: 1154021 - DNA, 15 bp, Homo sapiens
aagttatctctgtat

SEQ ID NO: 1154022 - DNA, 15 bp, Homo sapiens
gaagttatctctgta

SEQ ID NO: 1154023 - DNA, 15 bp, Homo sapiens
agaagttatctctgt

SEQ ID NO: 1154024 - DNA, 15 bp, Homo sapiens
aagaagttatctctg

SEQ ID NO: 1154025 - DNA, 15 bp, Homo sapiens
caagaagttatctct

SEQ ID NO: 1154026 - DNA, 15 bp, Homo sapiens
ccaagaagttatctc

SEQ ID NO: 1154027 - DNA, 15 bp, Homo sapiens
cccaagaagttatct

SEQ ID NO: 1154028 - DNA, 15 bp, Homo sapiens
gcccaagaagttatc

SEQ ID NO: 1154029 - DNA, 15 bp, Homo sapiens
ggcccaagaagttat

SEQ ID NO: 1154030 - DNA, 15 bp, Homo sapiens
tggcccaagaagtta

SEQ ID NO: 1154031 - DNA, 15 bp, Homo sapiens
atggcccaagaagtt

SEQ ID NO: 1154032 - DNA, 15 bp, Homo sapiens
aatggcccaagaagt

SEQ ID NO: 1154033 - DNA, 15 bp, Homo sapiens
taatggcccaagaag

SEQ ID NO: 1154034 - DNA, 15 bp, Homo sapiens
gtaatggcccaagaa

SEQ ID NO: 1154035 - DNA, 15 bp, Homo sapiens
tgtaatggcccaaga

SEQ ID NO: 1154036 - DNA, 15 bp, Homo sapiens
ttgtaatggcccaag

SEQ ID NO: 1154037 - DNA, 15 bp, Homo sapiens
attgtaatggcccaa

SEQ ID NO: 1154038 - DNA, 15 bp, Homo sapiens
tattgtaatggccca

SEQ ID NO: 1154039 - DNA, 15 bp, Homo sapiens
ttattgtaatggccc

SEQ ID NO: 1154040 - DNA, 15 bp, Homo sapiens
attattgtaatggcc

SEQ ID NO: 1154041 - DNA, 15 bp, Homo sapiens
aattattgtaatggc

SEQ ID NO: 1154042 - DNA, 15 bp, Homo sapiens
taattattgtaatgg

SEQ ID NO: 1154043 - DNA, 15 bp, Homo sapiens
ttaattattgtaatg

SEQ ID NO: 1154044 - DNA, 15 bp, Homo sapiens
tttaattattgtaat

SEQ ID NO: 1154045 - DNA, 15 bp, Homo sapiens
atttaattattgtaa

SEQ ID NO: 1154046 - DNA, 15 bp, Homo sapiens
tatttaattattgta

SEQ ID NO: 1154047 - DNA, 15 bp, Homo sapiens
atatttaattattgt

SEQ ID NO: 1154048 - DNA, 15 bp, Homo sapiens
catatttaattattg

SEQ ID NO: 1154049 - DNA, 15 bp, Homo sapiens
acatatttaattatt

SEQ ID NO: 1154050 - DNA, 15 bp, Homo sapiens
tacatatttaattat

SEQ ID NO: 1154051 - DNA, 15 bp, Homo sapiens
atacatatttaatta

SEQ ID NO: 1154052 - DNA, 15 bp, Homo sapiens
gatacatatttaatt

SEQ ID NO: 1154053 - DNA, 15 bp, Homo sapiens
agatacatatttaat

SEQ ID NO: 1154054 - DNA, 15 bp, Homo sapiens
aagatacatatttaa

SEQ ID NO: 1154055 - DNA, 15 bp, Homo sapiens
aaagatacatattta

SEQ ID NO: 1154056 - DNA, 15 bp, Homo sapiens
aaaagatacatattt

SEQ ID NO: 1154057 - DNA, 15 bp, Homo sapiens
taaaagatacatatt

SEQ ID NO: 1154058 - DNA, 15 bp, Homo sapiens
ataaaagatacatat

SEQ ID NO: 1154059 - DNA, 15 bp, Homo sapiens
tataaaagatacata

SEQ ID NO: 1154060 - DNA, 15 bp, Homo sapiens
atataaaagatacat

SEQ ID NO: 1154061 - DNA, 15 bp, Homo sapiens
tatataaaagataca

SEQ ID NO: 1154062 - DNA, 15 bp, Homo sapiens
atatataaaagatac

SEQ ID NO: 1154063 - DNA, 15 bp, Homo sapiens
tatatataaaagata

SEQ ID NO: 1154064 - DNA, 15 bp, Homo sapiens
atatatataaaagat

SEQ ID NO: 1154065 - DNA, 15 bp, Homo sapiens
catatatataaaaga

SEQ ID NO: 1154066 - DNA, 15 bp, Homo sapiens
tcatatatataaaag

SEQ ID NO: 1154067 - DNA, 15 bp, Homo sapiens
ttcatatatataaaa

SEQ ID NO: 1154068 - DNA, 15 bp, Homo sapiens
tttcatatatataaa

SEQ ID NO: 1154069 - DNA, 15 bp, Homo sapiens
atttcatatatataa

SEQ ID NO: 1154070 - DNA, 15 bp, Homo sapiens
aatttcatatatata

SEQ ID NO: 1154071 - DNA, 15 bp, Homo sapiens
taatttcatatatat

SEQ ID NO: 1154072 - DNA, 15 bp, Homo sapiens
ataatttcatatata

SEQ ID NO: 1154073 - DNA, 15 bp, Homo sapiens
gataatttcatatat

SEQ ID NO: 1154074 - DNA, 15 bp, Homo sapiens
cgataatttcatata

SEQ ID NO: 1154075 - DNA, 15 bp, Homo sapiens
tcgataatttcatat

SEQ ID NO: 1154076 - DNA, 15 bp, Homo sapiens
ctcgataatttcata

SEQ ID NO: 1154077 - DNA, 15 bp, Homo sapiens
gctcgataatttcat

SEQ ID NO: 1154078 - DNA, 15 bp, Homo sapiens
tgctcgataatttca

SEQ ID NO: 1154079 - DNA, 15 bp, Homo sapiens
ctgctcgataatttc

SEQ ID NO: 1154080 - DNA, 15 bp, Homo sapiens
tctgctcgataattt

SEQ ID NO: 1154081 - DNA, 15 bp, Homo sapiens
ctctgctcgataatt

SEQ ID NO: 1154082 - DNA, 15 bp, Homo sapiens
actctgctcgataat

SEQ ID NO: 1154083 - DNA, 15 bp, Homo sapiens
cactctgctcgataa

SEQ ID NO: 1154084 - DNA, 15 bp, Homo sapiens
gcactctgctcgata

SEQ ID NO: 1154085 - DNA, 15 bp, Homo sapiens
ggcactctgctcgat

SEQ ID NO: 1154086 - DNA, 15 bp, Homo sapiens
aggcactctgctcga

SEQ ID NO: 1154087 - DNA, 15 bp, Homo sapiens
taggcactctgctcg

SEQ ID NO: 1154088 - DNA, 15 bp, Homo sapiens
ctaggcactctgctc

SEQ ID NO: 1154089 - DNA, 15 bp, Homo sapiens
actaggcactctgct

SEQ ID NO: 1154090 - DNA, 15 bp, Homo sapiens
gactaggcactctgc

SEQ ID NO: 1154091 - DNA, 15 bp, Homo sapiens
ggactaggcactctg

SEQ ID NO: 1154092 - DNA, 15 bp, Homo sapiens
tggactaggcactct

SEQ ID NO: 1154093 - DNA, 15 bp, Homo sapiens
gtggactaggcactc

SEQ ID NO: 1154094 - DNA, 15 bp, Homo sapiens
agtggactaggcact

SEQ ID NO: 1154095 - DNA, 15 bp, Homo sapiens
tagtggactaggcac

SEQ ID NO: 1154096 - DNA, 15 bp, Homo sapiens
atagtggactaggca

SEQ ID NO: 1154097 - DNA, 15 bp, Homo sapiens
aatagtggactaggc

SEQ ID NO: 1154098 - DNA, 15 bp, Homo sapiens
caatagtggactagg

SEQ ID NO: 1154099 - DNA, 15 bp, Homo sapiens
tcaatagtggactag

SEQ ID NO: 1154100 - DNA, 15 bp, Homo sapiens
gtcaatagtggacta

SEQ ID NO: 1154101 - DNA, 15 bp, Homo sapiens
tgtcaatagtggact

SEQ ID NO: 1154102 - DNA, 15 bp, Homo sapiens
atgtcaatagtggac

SEQ ID NO: 1154103 - DNA, 15 bp, Homo sapiens
aatgtcaatagtgga

SEQ ID NO: 1154104 - DNA, 15 bp, Homo sapiens
aaatgtcaatagtgg

SEQ ID NO: 1154105 - DNA, 15 bp, Homo sapiens
taaatgtcaatagtg

SEQ ID NO: 1154106 - DNA, 15 bp, Homo sapiens
ttaaatgtcaatagt

SEQ ID NO: 1154107 - DNA, 15 bp, Homo sapiens
tttaaatgtcaatag

SEQ ID NO: 1154108 - DNA, 15 bp, Homo sapiens
ttttaaatgtcaata

SEQ ID NO: 1154109 - DNA, 15 bp, Homo sapiens
gttttaaatgtcaat

SEQ ID NO: 1154110 - DNA, 15 bp, Homo sapiens
tgttttaaatgtcaa

SEQ ID NO: 1154111 - DNA, 15 bp, Homo sapiens
atgttttaaatgtca

SEQ ID NO: 1154112 - DNA, 15 bp, Homo sapiens
gatgttttaaatgtc

SEQ ID NO: 1154113 - DNA, 15 bp, Homo sapiens
agatgttttaaatgt

SEQ ID NO: 1154114 - DNA, 15 bp, Homo sapiens
gagatgttttaaatg

SEQ ID NO: 1154115 - DNA, 15 bp, Homo sapiens
tgagatgttttaaat

SEQ ID NO: 1154116 - DNA, 15 bp, Homo sapiens
atgagatgttttaaa

SEQ ID NO: 1154117 - DNA, 15 bp, Homo sapiens
aatgagatgttttaa

SEQ ID NO: 1154118 - DNA, 15 bp, Homo sapiens
aaatgagatgtttta

SEQ ID NO: 1154119 - DNA, 15 bp, Homo sapiens
aaaatgagatgtttt

SEQ ID NO: 1154120 - DNA, 15 bp, Homo sapiens
gaaaatgagatgttt

SEQ ID NO: 1154121 - DNA, 15 bp, Homo sapiens
ggaaaatgagatgtt

SEQ ID NO: 1154122 - DNA, 15 bp, Homo sapiens
aggaaaatgagatgt

SEQ ID NO: 1154123 - DNA, 15 bp, Homo sapiens
aaggaaaatgagatg

SEQ ID NO: 1154124 - DNA, 15 bp, Homo sapiens
gaaggaaaatgagat

SEQ ID NO: 1154125 - DNA, 15 bp, Homo sapiens
ggaaggaaaatgaga

SEQ ID NO: 1154126 - DNA, 15 bp, Homo sapiens
tggaaggaaaatgag

SEQ ID NO: 1154127 - DNA, 15 bp, Homo sapiens
atggaaggaaaatga

SEQ ID NO: 1154128 - DNA, 15 bp, Homo sapiens
aatggaaggaaaatg

SEQ ID NO: 1154129 - DNA, 15 bp, Homo sapiens
gaatggaaggaaaat

SEQ ID NO: 1154130 - DNA, 15 bp, Homo sapiens
tgaatggaaggaaaa

SEQ ID NO: 1154131 - DNA, 15 bp, Homo sapiens
ttgaatggaaggaaa

SEQ ID NO: 1154132 - DNA, 15 bp, Homo sapiens
tttgaatggaaggaa

SEQ ID NO: 1154133 - DNA, 15 bp, Homo sapiens
ctttgaatggaagga

SEQ ID NO: 1154134 - DNA, 15 bp, Homo sapiens
tctttgaatggaagg

SEQ ID NO: 1154135 - DNA, 15 bp, Homo sapiens
ttctttgaatggaag

SEQ ID NO: 1154136 - DNA, 15 bp, Homo sapiens
gttctttgaatggaa

SEQ ID NO: 1154137 - DNA, 15 bp, Homo sapiens
agttctttgaatgga

SEQ ID NO: 1154138 - DNA, 15 bp, Homo sapiens
aagttctttgaatgg

SEQ ID NO: 1154139 - DNA, 15 bp, Homo sapiens
taagttctttgaatg

SEQ ID NO: 1154140 - DNA, 15 bp, Homo sapiens
ttaagttctttgaat

SEQ ID NO: 1154141 - DNA, 15 bp, Homo sapiens
tttaagttctttgaa

SEQ ID NO: 1154142 - DNA, 15 bp, Homo sapiens
ttttaagttctttga

SEQ ID NO: 1154143 - DNA, 15 bp, Homo sapiens
attttaagttctttg

SEQ ID NO: 1154144 - DNA, 15 bp, Homo sapiens
gattttaagttcttt

SEQ ID NO: 1154145 - DNA, 15 bp, Homo sapiens
agattttaagttctt

SEQ ID NO: 1154146 - DNA, 15 bp, Homo sapiens
tagattttaagttct

SEQ ID NO: 1154147 - DNA, 15 bp, Homo sapiens
ctagattttaagttc

SEQ ID NO: 1154148 - DNA, 15 bp, Homo sapiens
gctagattttaagtt

SEQ ID NO: 1154149 - DNA, 15 bp, Homo sapiens
ggctagattttaagt

SEQ ID NO: 1154150 - DNA, 15 bp, Homo sapiens
tggctagattttaag

SEQ ID NO: 1154151 - DNA, 15 bp, Homo sapiens
ttggctagattttaa

SEQ ID NO: 1154152 - DNA, 15 bp, Homo sapiens
cttggctagatttta

SEQ ID NO: 1154153 - DNA, 15 bp, Homo sapiens
tcttggctagatttt

SEQ ID NO: 1154154 - DNA, 15 bp, Homo sapiens
atcttggctagattt

SEQ ID NO: 1154155 - DNA, 15 bp, Homo sapiens
tatcttggctagatt

SEQ ID NO: 1154156 - DNA, 15 bp, Homo sapiens
ttatcttggctagat

SEQ ID NO: 1154157 - DNA, 15 bp, Homo sapiens
tttatcttggctaga

SEQ ID NO: 1154158 - DNA, 15 bp, Homo sapiens
gtttatcttggctag

SEQ ID NO: 1154159 - DNA, 15 bp, Homo sapiens
ggtttatcttggcta

SEQ ID NO: 1154160 - DNA, 15 bp, Homo sapiens
tggtttatcttggct

SEQ ID NO: 1154161 - DNA, 15 bp, Homo sapiens
ttggtttatcttggc

SEQ ID NO: 1154162 - DNA, 15 bp, Homo sapiens
tttggtttatcttgg

SEQ ID NO: 1154163 - DNA, 15 bp, Homo sapiens
ctttggtttatcttg

SEQ ID NO: 1154164 - DNA, 15 bp, Homo sapiens
actttggtttatctt

SEQ ID NO: 1154165 - DNA, 15 bp, Homo sapiens
tactttggtttatct

SEQ ID NO: 1154166 - DNA, 15 bp, Homo sapiens
ctactttggtttatc

SEQ ID NO: 1154167 - DNA, 15 bp, Homo sapiens
cctactttggtttat

SEQ ID NO: 1154168 - DNA, 15 bp, Homo sapiens
gcctactttggttta

SEQ ID NO: 1154169 - DNA, 15 bp, Homo sapiens
ggcctactttggttt

SEQ ID NO: 1154170 - DNA, 15 bp, Homo sapiens
tggcctactttggtt

SEQ ID NO: 1154171 - DNA, 15 bp, Homo sapiens
ctggcctactttggt

SEQ ID NO: 1154172 - DNA, 15 bp, Homo sapiens
cctggcctactttgg

SEQ ID NO: 1154173 - DNA, 15 bp, Homo sapiens
gcctggcctactttg

SEQ ID NO: 1154174 - DNA, 15 bp, Homo sapiens
cgcctggcctacttt

SEQ ID NO: 1154175 - DNA, 15 bp, Homo sapiens
gcgcctggcctactt

SEQ ID NO: 1154176 - DNA, 15 bp, Homo sapiens
tgcgcctggcctact

SEQ ID NO: 1154177 - DNA, 15 bp, Homo sapiens
ctgcgcctggcctac

SEQ ID NO: 1154178 - DNA, 15 bp, Homo sapiens
actgcgcctggccta

SEQ ID NO: 1154179 - DNA, 15 bp, Homo sapiens
cactgcgcctggcct

SEQ ID NO: 1154180 - DNA, 15 bp, Homo sapiens
cctcctaacctcagg

SEQ ID NO: 1154181 - DNA, 15 bp, Homo sapiens
acctcctaacctcag

SEQ ID NO: 1154182 - DNA, 15 bp, Homo sapiens
gacctcctaacctca

SEQ ID NO: 1154183 - DNA, 15 bp, Homo sapiens
cgacctcctaacctc

SEQ ID NO: 1154184 - DNA, 15 bp, Homo sapiens
tcgacctcctaacct

SEQ ID NO: 1154185 - DNA, 15 bp, Homo sapiens
ctcgacctcctaacc

SEQ ID NO: 1154186 - DNA, 15 bp, Homo sapiens
tctcgacctcctaac

SEQ ID NO: 1154187 - DNA, 15 bp, Homo sapiens
gtctcgacctcctaa

SEQ ID NO: 1154188 - DNA, 15 bp, Homo sapiens
ggtctcgacctccta

SEQ ID NO: 1154189 - DNA, 15 bp, Homo sapiens
tggtctcgacctcct

SEQ ID NO: 1154190 - DNA, 15 bp, Homo sapiens
ttggtctcgacctcc

SEQ ID NO: 1154191 - DNA, 15 bp, Homo sapiens
gttggtctcgacctc

SEQ ID NO: 1154192 - DNA, 15 bp, Homo sapiens
agttggtctcgacct

SEQ ID NO: 1154193 - DNA, 15 bp, Homo sapiens
aagttggtctcgacc

SEQ ID NO: 1154194 - DNA, 15 bp, Homo sapiens
caagttggtctcgac

SEQ ID NO: 1154195 - DNA, 15 bp, Homo sapiens
ccaagttggtctcga

SEQ ID NO: 1154196 - DNA, 15 bp, Homo sapiens
gccaagttggtctcg

SEQ ID NO: 1154197 - DNA, 15 bp, Homo sapiens
ggccaagttggtctc

SEQ ID NO: 1154198 - DNA, 15 bp, Homo sapiens
tggccaagttggtct

SEQ ID NO: 1154199 - DNA, 15 bp, Homo sapiens
ttggccaagttggtc

SEQ ID NO: 1154200 - DNA, 15 bp, Homo sapiens
gttggccaagttggt

SEQ ID NO: 1154201 - DNA, 15 bp, Homo sapiens
tgttggccaagttgg

SEQ ID NO: 1154202 - DNA, 15 bp, Homo sapiens
atgttggccaagttg

SEQ ID NO: 1154203 - DNA, 15 bp, Homo sapiens
catgttggccaagtt

SEQ ID NO: 1154204 - DNA, 15 bp, Homo sapiens
ccatgttggccaagt

SEQ ID NO: 1154205 - DNA, 15 bp, Homo sapiens
gccatgttggccaag

SEQ ID NO: 1154206 - DNA, 15 bp, Homo sapiens
tgccatgttggccaa

SEQ ID NO: 1154207 - DNA, 15 bp, Homo sapiens
tggggttttgccatg

SEQ ID NO: 1154208 - DNA, 15 bp, Homo sapiens
atggggttttgccat

SEQ ID NO: 1154209 - DNA, 15 bp, Homo sapiens
gagatggggttttgc

SEQ ID NO: 1154210 - DNA, 15 bp, Homo sapiens
ttctgtctcctgggt

SEQ ID NO: 1154211 - DNA, 15 bp, Homo sapiens
cttctgtctcctggg

SEQ ID NO: 1154212 - DNA, 15 bp, Homo sapiens
acttctgtctcctgg

SEQ ID NO: 1154213 - DNA, 15 bp, Homo sapiens
aacttctgtctcctg

SEQ ID NO: 1154214 - DNA, 15 bp, Homo sapiens
caacttctgtctcct

SEQ ID NO: 1154215 - DNA, 15 bp, Homo sapiens
acaacttctgtctcc

SEQ ID NO: 1154216 - DNA, 15 bp, Homo sapiens
tacaacttctgtctc

SEQ ID NO: 1154217 - DNA, 15 bp, Homo sapiens
ctacaacttctgtct

SEQ ID NO: 1154218 - DNA, 15 bp, Homo sapiens
actacaacttctgtc

SEQ ID NO: 1154219 - DNA, 15 bp, Homo sapiens
cactacaacttctgt

SEQ ID NO: 1154220 - DNA, 15 bp, Homo sapiens
tcactacaacttctg

SEQ ID NO: 1154221 - DNA, 15 bp, Homo sapiens
ctcactacaacttct

SEQ ID NO: 1154222 - DNA, 15 bp, Homo sapiens
gctcactacaacttc

SEQ ID NO: 1154223 - DNA, 15 bp, Homo sapiens
ggctcactacaactt

SEQ ID NO: 1154224 - DNA, 15 bp, Homo sapiens
tggctcactacaact

SEQ ID NO: 1154225 - DNA, 15 bp, Homo sapiens
atcttggctcactac

SEQ ID NO: 1154226 - DNA, 15 bp, Homo sapiens
aatcttggctcacta

SEQ ID NO: 1154227 - DNA, 15 bp, Homo sapiens
ttggagtctcactct

SEQ ID NO: 1154228 - DNA, 15 bp, Homo sapiens
attggagtctcactc

SEQ ID NO: 1154229 - DNA, 15 bp, Homo sapiens
aattggagtctcact

SEQ ID NO: 1154230 - DNA, 15 bp, Homo sapiens
gaattggagtctcac

SEQ ID NO: 1154231 - DNA, 15 bp, Homo sapiens
tgaattggagtctca

SEQ ID NO: 1154232 - DNA, 15 bp, Homo sapiens
ttgaattggagtctc

SEQ ID NO: 1154233 - DNA, 15 bp, Homo sapiens
tttgaattggagtct

SEQ ID NO: 1154234 - DNA, 15 bp, Homo sapiens
ttttgaattggagtc

SEQ ID NO: 1154235 - DNA, 15 bp, Homo sapiens
tttttgaattggagt

SEQ ID NO: 1154236 - DNA, 15 bp, Homo sapiens
ttttttgaattggag

SEQ ID NO: 1154237 - DNA, 15 bp, Homo sapiens
cttttttgaattgga

SEQ ID NO: 1154238 - DNA, 15 bp, Homo sapiens
tcttttttgaattgg

SEQ ID NO: 1154239 - DNA, 15 bp, Homo sapiens
ttcttttttgaattg

SEQ ID NO: 1154240 - DNA, 15 bp, Homo sapiens
tttcttttttgaatt

SEQ ID NO: 1154241 - DNA, 15 bp, Homo sapiens
ttttcttttttgaat

SEQ ID NO: 1154242 - DNA, 15 bp, Homo sapiens
cttttcttttttgaa

SEQ ID NO: 1154243 - DNA, 15 bp, Homo sapiens
tcttttcttttttga

SEQ ID NO: 1154244 - DNA, 15 bp, Homo sapiens
ttcttttcttttttg

SEQ ID NO: 1154245 - DNA, 15 bp, Homo sapiens
gtttttcttttcttt

SEQ ID NO: 1154246 - DNA, 15 bp, Homo sapiens
ggtttttcttttctt

SEQ ID NO: 1154247 - DNA, 15 bp, Homo sapiens
tggtttttcttttct

SEQ ID NO: 1154248 - DNA, 15 bp, Homo sapiens
ttggtttttcttttc

SEQ ID NO: 1154249 - DNA, 15 bp, Homo sapiens
tttggtttttctttt

SEQ ID NO: 1154250 - DNA, 15 bp, Homo sapiens
ctttggtttttcttt

SEQ ID NO: 1154251 - DNA, 15 bp, Homo sapiens
gctttggtttttctt

SEQ ID NO: 1154252 - DNA, 15 bp, Homo sapiens
tgctttggtttttct

SEQ ID NO: 1154253 - DNA, 15 bp, Homo sapiens
ctgctttggtttttc

SEQ ID NO: 1154254 - DNA, 15 bp, Homo sapiens
gctgctttggttttt

SEQ ID NO: 1154255 - DNA, 15 bp, Homo sapiens
tgctgctttggtttt

SEQ ID NO: 1154256 - DNA, 15 bp, Homo sapiens
ctgctgctttggttt

SEQ ID NO: 1154257 - DNA, 15 bp, Homo sapiens
tctgctgctttggtt

SEQ ID NO: 1154258 - DNA, 15 bp, Homo sapiens
atctgctgctttggt

SEQ ID NO: 1154259 - DNA, 15 bp, Homo sapiens
tatctgctgctttgg

SEQ ID NO: 1154260 - DNA, 15 bp, Homo sapiens
ttatctgctgctttg

SEQ ID NO: 1154261 - DNA, 15 bp, Homo sapiens
attatctgctgcttt

SEQ ID NO: 1154262 - DNA, 15 bp, Homo sapiens
tattatctgctgctt

SEQ ID NO: 1154263 - DNA, 15 bp, Homo sapiens
ttattatctgctgct

SEQ ID NO: 1154264 - DNA, 15 bp, Homo sapiens
attattatctgctgc

SEQ ID NO: 1154265 - DNA, 15 bp, Homo sapiens
aattattatctgctg

SEQ ID NO: 1154266 - DNA, 15 bp, Homo sapiens
caattattatctgct

SEQ ID NO: 1154267 - DNA, 15 bp, Homo sapiens
acaattattatctgc

SEQ ID NO: 1154268 - DNA, 15 bp, Homo sapiens
aacaattattatctg

SEQ ID NO: 1154269 - DNA, 15 bp, Homo sapiens
aaacaattattatct

SEQ ID NO: 1154270 - DNA, 15 bp, Homo sapiens
taaacaattattatc

SEQ ID NO: 1154271 - DNA, 15 bp, Homo sapiens
ttaaacaattattat

SEQ ID NO: 1154272 - DNA, 15 bp, Homo sapiens
gttaaacaattatta

SEQ ID NO: 1154273 - DNA, 15 bp, Homo sapiens
tgttaaacaattatt

SEQ ID NO: 1154274 - DNA, 15 bp, Homo sapiens
ttgttaaacaattat

SEQ ID NO: 1154275 - DNA, 15 bp, Homo sapiens
attgttaaacaatta

SEQ ID NO: 1154276 - DNA, 15 bp, Homo sapiens
aattgttaaacaatt

SEQ ID NO: 1154277 - DNA, 15 bp, Homo sapiens
aaattgttaaacaat

SEQ ID NO: 1154278 - DNA, 15 bp, Homo sapiens
caaattgttaaacaa

SEQ ID NO: 1154279 - DNA, 15 bp, Homo sapiens
tcaaattgttaaaca

SEQ ID NO: 1154280 - DNA, 15 bp, Homo sapiens
ttcaaattgttaaac

SEQ ID NO: 1154281 - DNA, 15 bp, Homo sapiens
tttcaaattgttaaa

SEQ ID NO: 1154282 - DNA, 15 bp, Homo sapiens
ttttcaaattgttaa

SEQ ID NO: 1154283 - DNA, 15 bp, Homo sapiens
cttttcaaattgtta

SEQ ID NO: 1154284 - DNA, 15 bp, Homo sapiens
ccttttcaaattgtt

SEQ ID NO: 1154285 - DNA, 15 bp, Homo sapiens
gccttttcaaattgt

SEQ ID NO: 1154286 - DNA, 15 bp, Homo sapiens
tgccttttcaaattg

SEQ ID NO: 1154287 - DNA, 15 bp, Homo sapiens
atgccttttcaaatt

SEQ ID NO: 1154288 - DNA, 15 bp, Homo sapiens
tatgccttttcaaat

SEQ ID NO: 1154289 - DNA, 15 bp, Homo sapiens
ttatgccttttcaaa

SEQ ID NO: 1154290 - DNA, 15 bp, Homo sapiens
attatgccttttcaa

SEQ ID NO: 1154291 - DNA, 15 bp, Homo sapiens
gattatgccttttca

SEQ ID NO: 1154292 - DNA, 15 bp, Homo sapiens
ggattatgccttttc

SEQ ID NO: 1154293 - DNA, 15 bp, Homo sapiens
tggattatgcctttt

SEQ ID NO: 1154294 - DNA, 15 bp, Homo sapiens
atggattatgccttt

SEQ ID NO: 1154295 - DNA, 15 bp, Homo sapiens
tatggattatgcctt

SEQ ID NO: 1154296 - DNA, 15 bp, Homo sapiens
ctatggattatgcct

SEQ ID NO: 1154297 - DNA, 15 bp, Homo sapiens
tctatggattatgcc

SEQ ID NO: 1154298 - DNA, 15 bp, Homo sapiens
ttctatggattatgc

SEQ ID NO: 1154299 - DNA, 15 bp, Homo sapiens
attctatggattatg

SEQ ID NO: 1154300 - DNA, 15 bp, Homo sapiens
aattctatggattat

SEQ ID NO: 1154301 - DNA, 15 bp, Homo sapiens
aaattctatggatta

SEQ ID NO: 1154302 - DNA, 15 bp, Homo sapiens
taaattctatggatt

SEQ ID NO: 1154303 - DNA, 15 bp, Homo sapiens
ataaattctatggat

SEQ ID NO: 1154304 - DNA, 15 bp, Homo sapiens
tataaattctatgga

SEQ ID NO: 1154305 - DNA, 15 bp, Homo sapiens
ctataaattctatgg

SEQ ID NO: 1154306 - DNA, 15 bp, Homo sapiens
actataaattctatg

SEQ ID NO: 1154307 - DNA, 15 bp, Homo sapiens
cactataaattctat

SEQ ID NO: 1154308 - DNA, 15 bp, Homo sapiens
ccactataaattcta

SEQ ID NO: 1154309 - DNA, 15 bp, Homo sapiens
tccactataaattct

SEQ ID NO: 1154310 - DNA, 15 bp, Homo sapiens
ctccactataaattc

SEQ ID NO: 1154311 - DNA, 15 bp, Homo sapiens
cctccactataaatt

SEQ ID NO: 1154312 - DNA, 15 bp, Homo sapiens
tcctccactataaat

SEQ ID NO: 1154313 - DNA, 15 bp, Homo sapiens
ctcctccactataaa

SEQ ID NO: 1154314 - DNA, 15 bp, Homo sapiens
tctcctccactataa

SEQ ID NO: 1154315 - DNA, 15 bp, Homo sapiens
atctcctccactata

SEQ ID NO: 1154316 - DNA, 15 bp, Homo sapiens
aatctcctccactat

SEQ ID NO: 1154317 - DNA, 15 bp, Homo sapiens
caatctcctccacta

SEQ ID NO: 1154318 - DNA, 15 bp, Homo sapiens
ccaatctcctccact

SEQ ID NO: 1154319 - DNA, 15 bp, Homo sapiens
accaatctcctccac

SEQ ID NO: 1154320 - DNA, 15 bp, Homo sapiens
aaccaatctcctcca

SEQ ID NO: 1154321 - DNA, 15 bp, Homo sapiens
aaaccaatctcctcc

SEQ ID NO: 1154322 - DNA, 15 bp, Homo sapiens
gaaaccaatctcctc

SEQ ID NO: 1154323 - DNA, 15 bp, Homo sapiens
tgaaaccaatctcct

SEQ ID NO: 1154324 - DNA, 15 bp, Homo sapiens
ttgaaaccaatctcc

SEQ ID NO: 1154325 - DNA, 15 bp, Homo sapiens
tttgaaaccaatctc

SEQ ID NO: 1154326 - DNA, 15 bp, Homo sapiens
atttgaaaccaatct

SEQ ID NO: 1154327 - DNA, 15 bp, Homo sapiens
tatttgaaaccaatc

SEQ ID NO: 1154328 - DNA, 15 bp, Homo sapiens
ctatttgaaaccaat

SEQ ID NO: 1154329 - DNA, 15 bp, Homo sapiens
tctatttgaaaccaa

SEQ ID NO: 1154330 - DNA, 15 bp, Homo sapiens
ctctatttgaaacca

SEQ ID NO: 1154331 - DNA, 15 bp, Homo sapiens
actctatttgaaacc

SEQ ID NO: 1154332 - DNA, 15 bp, Homo sapiens
tactctatttgaaac

SEQ ID NO: 1154333 - DNA, 15 bp, Homo sapiens
ctactctatttgaaa

SEQ ID NO: 1154334 - DNA, 15 bp, Homo sapiens
actactctatttgaa

SEQ ID NO: 1154335 - DNA, 15 bp, Homo sapiens
gactactctatttga

SEQ ID NO: 1154336 - DNA, 15 bp, Homo sapiens
tgactactctatttg

SEQ ID NO: 1154337 - DNA, 15 bp, Homo sapiens
ctgactactctattt

SEQ ID NO: 1154338 - DNA, 15 bp, Homo sapiens
cctgactactctatt

SEQ ID NO: 1154339 - DNA, 15 bp, Homo sapiens
tcctgactactctat

SEQ ID NO: 1154340 - DNA, 15 bp, Homo sapiens
ctcctgactactcta

SEQ ID NO: 1154341 - DNA, 15 bp, Homo sapiens
cctcctgactactct

SEQ ID NO: 1154342 - DNA, 15 bp, Homo sapiens
tcctcctgactactc

SEQ ID NO: 1154343 - DNA, 15 bp, Homo sapiens
atcctcctgactact

SEQ ID NO: 1154344 - DNA, 15 bp, Homo sapiens
aatcctcctgactac

SEQ ID NO: 1154345 - DNA, 15 bp, Homo sapiens
aaatcctcctgacta

SEQ ID NO: 1154346 - DNA, 15 bp, Homo sapiens
aaaatcctcctgact

SEQ ID NO: 1154347 - DNA, 15 bp, Homo sapiens
taaaatcctcctgac

SEQ ID NO: 1154348 - DNA, 15 bp, Homo sapiens
ctaaaatcctcctga

SEQ ID NO: 1154349 - DNA, 15 bp, Homo sapiens
actaaaatcctcctg

SEQ ID NO: 1154350 - DNA, 15 bp, Homo sapiens
cactaaaatcctcct

SEQ ID NO: 1154351 - DNA, 15 bp, Homo sapiens
tcactaaaatcctcc

SEQ ID NO: 1154352 - DNA, 15 bp, Homo sapiens
ttcactaaaatcctc

SEQ ID NO: 1154353 - DNA, 15 bp, Homo sapiens
tttcactaaaatcct

SEQ ID NO: 1154354 - DNA, 15 bp, Homo sapiens
gtttcactaaaatcc

SEQ ID NO: 1154355 - DNA, 15 bp, Homo sapiens
ggtttcactaaaatc

SEQ ID NO: 1154356 - DNA, 15 bp, Homo sapiens
aggtttcactaaaat

SEQ ID NO: 1154357 - DNA, 15 bp, Homo sapiens
aaggtttcactaaaa

SEQ ID NO: 1154358 - DNA, 15 bp, Homo sapiens
aaaggtttcactaaa

SEQ ID NO: 1154359 - DNA, 15 bp, Homo sapiens
caaaggtttcactaa

SEQ ID NO: 1154360 - DNA, 15 bp, Homo sapiens
tcaaaggtttcacta

SEQ ID NO: 1154361 - DNA, 15 bp, Homo sapiens
ctcaaaggtttcact

SEQ ID NO: 1154362 - DNA, 15 bp, Homo sapiens
cctcaaaggtttcac

SEQ ID NO: 1154363 - DNA, 15 bp, Homo sapiens
acctcaaaggtttca

SEQ ID NO: 1154364 - DNA, 15 bp, Homo sapiens
cacctcaaaggtttc

SEQ ID NO: 1154365 - DNA, 15 bp, Homo sapiens
tcacctcaaaggttt

SEQ ID NO: 1154366 - DNA, 15 bp, Homo sapiens
ttcacctcaaaggtt

SEQ ID NO: 1154367 - DNA, 15 bp, Homo sapiens
gttcacctcaaaggt

SEQ ID NO: 1154368 - DNA, 15 bp, Homo sapiens
agttcacctcaaagg

SEQ ID NO: 1154369 - DNA, 15 bp, Homo sapiens
aagttcacctcaaag

SEQ ID NO: 1154370 - DNA, 15 bp, Homo sapiens
aaagttcacctcaaa

SEQ ID NO: 1154371 - DNA, 15 bp, Homo sapiens
caaagttcacctcaa

SEQ ID NO: 1154372 - DNA, 15 bp, Homo sapiens
tcaaagttcacctca

SEQ ID NO: 1154373 - DNA, 15 bp, Homo sapiens
ttcaaagttcacctc

SEQ ID NO: 1154374 - DNA, 15 bp, Homo sapiens
tttcaaagttcacct

SEQ ID NO: 1154375 - DNA, 15 bp, Homo sapiens
ttttcaaagttcacc

SEQ ID NO: 1154376 - DNA, 15 bp, Homo sapiens
cttttcaaagttcac

SEQ ID NO: 1154377 - DNA, 15 bp, Homo sapiens
gcttttcaaagttca

SEQ ID NO: 1154378 - DNA, 15 bp, Homo sapiens
agcttttcaaagttc

SEQ ID NO: 1154379 - DNA, 15 bp, Homo sapiens
cagcttttcaaagtt

SEQ ID NO: 1154380 - DNA, 15 bp, Homo sapiens
gcagcttttcaaagt

SEQ ID NO: 1154381 - DNA, 15 bp, Homo sapiens
tgcagcttttcaaag

SEQ ID NO: 1154382 - DNA, 15 bp, Homo sapiens
ttgcagcttttcaaa

SEQ ID NO: 1154383 - DNA, 15 bp, Homo sapiens
tttgcagcttttcaa

SEQ ID NO: 1154384 - DNA, 15 bp, Homo sapiens
atttgcagcttttca

SEQ ID NO: 1154385 - DNA, 15 bp, Homo sapiens
catttgcagcttttc

SEQ ID NO: 1154386 - DNA, 15 bp, Homo sapiens
ccatttgcagctttt

SEQ ID NO: 1154387 - DNA, 15 bp, Homo sapiens
gccatttgcagcttt

SEQ ID NO: 1154388 - DNA, 15 bp, Homo sapiens
tgccatttgcagctt

SEQ ID NO: 1154389 - DNA, 15 bp, Homo sapiens
ctgccatttgcagct

SEQ ID NO: 1154390 - DNA, 15 bp, Homo sapiens
actgccatttgcagc

SEQ ID NO: 1154391 - DNA, 15 bp, Homo sapiens
cactgccatttgcag

SEQ ID NO: 1154392 - DNA, 15 bp, Homo sapiens
acactgccatttgca

SEQ ID NO: 1154393 - DNA, 15 bp, Homo sapiens
aacactgccatttgc

SEQ ID NO: 1154394 - DNA, 15 bp, Homo sapiens
aaacactgccatttg

SEQ ID NO: 1154395 - DNA, 15 bp, Homo sapiens
caaacactgccattt

SEQ ID NO: 1154396 - DNA, 15 bp, Homo sapiens
tcaaacactgccatt

SEQ ID NO: 1154397 - DNA, 15 bp, Homo sapiens
ttcaaacactgccat

SEQ ID NO: 1154398 - DNA, 15 bp, Homo sapiens
cttcaaacactgcca

SEQ ID NO: 1154399 - DNA, 15 bp, Homo sapiens
tcttcaaacactgcc

SEQ ID NO: 1154400 - DNA, 15 bp, Homo sapiens
ctcttcaaacactgc

SEQ ID NO: 1154401 - DNA, 15 bp, Homo sapiens
tctcttcaaacactg

SEQ ID NO: 1154402 - DNA, 15 bp, Homo sapiens
ctctcttcaaacact

SEQ ID NO: 1154403 - DNA, 15 bp, Homo sapiens
tctctcttcaaacac

SEQ ID NO: 1154404 - DNA, 15 bp, Homo sapiens
ctctctcttcaaaca

SEQ ID NO: 1154405 - DNA, 15 bp, Homo sapiens
cctctctcttcaaac

SEQ ID NO: 1154406 - DNA, 15 bp, Homo sapiens
tcctctctcttcaaa

SEQ ID NO: 1154407 - DNA, 15 bp, Homo sapiens
ttcctctctcttcaa

SEQ ID NO: 1154408 - DNA, 15 bp, Homo sapiens
cttcctctctcttca

SEQ ID NO: 1154409 - DNA, 15 bp, Homo sapiens
tcttcctctctcttc

SEQ ID NO: 1154410 - DNA, 15 bp, Homo sapiens
ctcttcctctctctt

SEQ ID NO: 1154411 - DNA, 15 bp, Homo sapiens
cctcttcctctctct

SEQ ID NO: 1154412 - DNA, 15 bp, Homo sapiens
acctcttcctctctc

SEQ ID NO: 1154413 - DNA, 15 bp, Homo sapiens
cacctcttcctctct

SEQ ID NO: 1154414 - DNA, 15 bp, Homo sapiens
ccacctcttcctctc

SEQ ID NO: 1154415 - DNA, 15 bp, Homo sapiens
tccacctcttcctct

SEQ ID NO: 1154416 - DNA, 15 bp, Homo sapiens
ttccacctcttcctc

SEQ ID NO: 1154417 - DNA, 15 bp, Homo sapiens
gttccacctcttcct

SEQ ID NO: 1154418 - DNA, 15 bp, Homo sapiens
tgttccacctcttcc

SEQ ID NO: 1154419 - DNA, 15 bp, Homo sapiens
gtgttccacctcttc

SEQ ID NO: 1154420 - DNA, 15 bp, Homo sapiens
tgtgttccacctctt

SEQ ID NO: 1154421 - DNA, 15 bp, Homo sapiens
ctgtgttccacctct

SEQ ID NO: 1154422 - DNA, 15 bp, Homo sapiens
tctgtgttccacctc

SEQ ID NO: 1154423 - DNA, 15 bp, Homo sapiens
ctctgtgttccacct

SEQ ID NO: 1154424 - DNA, 15 bp, Homo sapiens
tctctgtgttccacc

SEQ ID NO: 1154425 - DNA, 15 bp, Homo sapiens
ctctctgtgttccac

SEQ ID NO: 1154426 - DNA, 15 bp, Homo sapiens
cctctctgtgttcca

SEQ ID NO: 1154427 - DNA, 15 bp, Homo sapiens
ccctctctgtgttcc

SEQ ID NO: 1154428 - DNA, 15 bp, Homo sapiens
accctctctgtgttc

SEQ ID NO: 1154429 - DNA, 15 bp, Homo sapiens
gaccctctctgtgtt

SEQ ID NO: 1154430 - DNA, 15 bp, Homo sapiens
agaccctctctgtgt

SEQ ID NO: 1154431 - DNA, 15 bp, Homo sapiens
aagaccctctctgtg

SEQ ID NO: 1154432 - DNA, 15 bp, Homo sapiens
gaagaccctctctgt

SEQ ID NO: 1154433 - DNA, 15 bp, Homo sapiens
tgaagaccctctctg

SEQ ID NO: 1154434 - DNA, 15 bp, Homo sapiens
ctgaagaccctctct

SEQ ID NO: 1154435 - DNA, 15 bp, Homo sapiens
gctgaagaccctctc

SEQ ID NO: 1154436 - DNA, 15 bp, Homo sapiens
ggctgaagaccctct

SEQ ID NO: 1154437 - DNA, 15 bp, Homo sapiens
gggctgaagaccctc

SEQ ID NO: 1154438 - DNA, 15 bp, Homo sapiens
agggctgaagaccct

SEQ ID NO: 1154439 - DNA, 15 bp, Homo sapiens
cagggctgaagaccc

SEQ ID NO: 1154440 - DNA, 15 bp, Homo sapiens
gcagggctgaagacc

SEQ ID NO: 1154441 - DNA, 15 bp, Homo sapiens
cgcagggctgaagac

SEQ ID NO: 1154442 - DNA, 15 bp, Homo sapiens
acgcagggctgaaga

SEQ ID NO: 1154443 - DNA, 15 bp, Homo sapiens
cacgcagggctgaag

SEQ ID NO: 1154444 - DNA, 15 bp, Homo sapiens
acacgcagggctgaa

SEQ ID NO: 1154445 - DNA, 15 bp, Homo sapiens
cacacgcagggctga

SEQ ID NO: 1154446 - DNA, 15 bp, Homo sapiens
gcacacgcagggctg

SEQ ID NO: 1154447 - DNA, 15 bp, Homo sapiens
tgcacacgcagggct

SEQ ID NO: 1154448 - DNA, 15 bp, Homo sapiens
ctgcacacgcagggc

SEQ ID NO: 1154449 - DNA, 15 bp, Homo sapiens
tctgcacacgcaggg

SEQ ID NO: 1154450 - DNA, 15 bp, Homo sapiens
atctgcacacgcagg

SEQ ID NO: 1154451 - DNA, 15 bp, Homo sapiens
catctgcacacgcag

SEQ ID NO: 1154452 - DNA, 15 bp, Homo sapiens
tcatctgcacacgca

SEQ ID NO: 1154453 - DNA, 15 bp, Homo sapiens
gtcatctgcacacgc

SEQ ID NO: 1154454 - DNA, 15 bp, Homo sapiens
tgtcatctgcacacg

SEQ ID NO: 1154455 - DNA, 15 bp, Homo sapiens
ttgtcatctgcacac

SEQ ID NO: 1154456 - DNA, 15 bp, Homo sapiens
cttgtcatctgcaca

SEQ ID NO: 1154457 - DNA, 15 bp, Homo sapiens
tcttgtcatctgcac

SEQ ID NO: 1154458 - DNA, 15 bp, Homo sapiens
gtcttgtcatctgca

SEQ ID NO: 1154459 - DNA, 15 bp, Homo sapiens
tgtcttgtcatctgc

SEQ ID NO: 1154460 - DNA, 15 bp, Homo sapiens
ctgtcttgtcatctg

SEQ ID NO: 1154461 - DNA, 15 bp, Homo sapiens
tctgtcttgtcatct

SEQ ID NO: 1154462 - DNA, 15 bp, Homo sapiens
ctctgtcttgtcatc

SEQ ID NO: 1154463 - DNA, 15 bp, Homo sapiens
cctctgtcttgtcat

SEQ ID NO: 1154464 - DNA, 15 bp, Homo sapiens
gcctctgtcttgtca

SEQ ID NO: 1154465 - DNA, 15 bp, Homo sapiens
agcctctgtcttgtc

SEQ ID NO: 1154466 - DNA, 15 bp, Homo sapiens
cagcctctgtcttgt

SEQ ID NO: 1154467 - DNA, 15 bp, Homo sapiens
ccagcctctgtcttg

SEQ ID NO: 1154468 - DNA, 15 bp, Homo sapiens
accagcctctgtctt

SEQ ID NO: 1154469 - DNA, 15 bp, Homo sapiens
caccagcctctgtct

SEQ ID NO: 1154470 - DNA, 15 bp, Homo sapiens
acaccagcctctgtc

SEQ ID NO: 1154471 - DNA, 15 bp, Homo sapiens
aacaccagcctctgt

SEQ ID NO: 1154472 - DNA, 15 bp, Homo sapiens
aaacaccagcctctg

SEQ ID NO: 1154473 - DNA, 15 bp, Homo sapiens
gaaacaccagcctct

SEQ ID NO: 1154474 - DNA, 15 bp, Homo sapiens
ggaaacaccagcctc

SEQ ID NO: 1154475 - DNA, 15 bp, Homo sapiens
tggaaacaccagcct

SEQ ID NO: 1154476 - DNA, 15 bp, Homo sapiens
ctggaaacaccagcc

SEQ ID NO: 1154477 - DNA, 15 bp, Homo sapiens
tctggaaacaccagc

SEQ ID NO: 1154478 - DNA, 15 bp, Homo sapiens
gtctggaaacaccag

SEQ ID NO: 1154479 - DNA, 15 bp, Homo sapiens
tgtctggaaacacca

SEQ ID NO: 1154480 - DNA, 15 bp, Homo sapiens
ctgtctggaaacacc

SEQ ID NO: 1154481 - DNA, 15 bp, Homo sapiens
cctgtctggaaacac

SEQ ID NO: 1154482 - DNA, 15 bp, Homo sapiens
acctgtctggaaaca

SEQ ID NO: 1154483 - DNA, 15 bp, Homo sapiens
tacctgtctggaaac

SEQ ID NO: 1154484 - DNA, 15 bp, Homo sapiens
ttacctgtctggaaa

SEQ ID NO: 1154485 - DNA, 15 bp, Homo sapiens
cttacctgtctggaa

SEQ ID NO: 1154486 - DNA, 15 bp, Homo sapiens
gcttacctgtctgga

SEQ ID NO: 1154487 - DNA, 15 bp, Homo sapiens
ggcttacctgtctgg

SEQ ID NO: 1154488 - DNA, 15 bp, Homo sapiens
tggcttacctgtctg

SEQ ID NO: 1154489 - DNA, 15 bp, Homo sapiens
atggcttacctgtct

SEQ ID NO: 1154490 - DNA, 15 bp, Homo sapiens
tatggcttacctgtc

SEQ ID NO: 1154491 - DNA, 15 bp, Homo sapiens
atatggcttacctgt

SEQ ID NO: 1154492 - DNA, 15 bp, Homo sapiens
catatggcttacctg

SEQ ID NO: 1154493 - DNA, 15 bp, Homo sapiens
gcatatggcttacct

SEQ ID NO: 1154494 - DNA, 15 bp, Homo sapiens
ggcatatggcttacc

SEQ ID NO: 1154495 - DNA, 15 bp, Homo sapiens
tggcatatggcttac

SEQ ID NO: 1154496 - DNA, 15 bp, Homo sapiens
ctggcatatggctta

SEQ ID NO: 1154497 - DNA, 15 bp, Homo sapiens
cctggcatatggctt

SEQ ID NO: 1154498 - DNA, 15 bp, Homo sapiens
ccctggcatatggct

SEQ ID NO: 1154499 - DNA, 15 bp, Homo sapiens
gccctggcatatggc

SEQ ID NO: 1154500 - DNA, 15 bp, Homo sapiens
tgccctggcatatgg

SEQ ID NO: 1154501 - DNA, 15 bp, Homo sapiens
ttgccctggcatatg

SEQ ID NO: 1154502 - DNA, 15 bp, Homo sapiens
gttgccctggcatat

SEQ ID NO: 1154503 - DNA, 15 bp, Homo sapiens
tgttgccctggcata

SEQ ID NO: 1154504 - DNA, 15 bp, Homo sapiens
atgttgccctggcat

SEQ ID NO: 1154505 - DNA, 15 bp, Homo sapiens
aatgttgccctggca

SEQ ID NO: 1154506 - DNA, 15 bp, Homo sapiens
caatgttgccctggc

SEQ ID NO: 1154507 - DNA, 15 bp, Homo sapiens
gcaatgttgccctgg

SEQ ID NO: 1154508 - DNA, 15 bp, Homo sapiens
tgcaatgttgccctg

SEQ ID NO: 1154509 - DNA, 15 bp, Homo sapiens
gtgcaatgttgccct

SEQ ID NO: 1154510 - DNA, 15 bp, Homo sapiens
tgtgcaatgttgccc

SEQ ID NO: 1154511 - DNA, 15 bp, Homo sapiens
ctgtgcaatgttgcc

SEQ ID NO: 1154512 - DNA, 15 bp, Homo sapiens
tctgtgcaatgttgc

SEQ ID NO: 1154513 - DNA, 15 bp, Homo sapiens
ttctgtgcaatgttg

SEQ ID NO: 1154514 - DNA, 15 bp, Homo sapiens
attctgtgcaatgtt

SEQ ID NO: 1154515 - DNA, 15 bp, Homo sapiens
cattctgtgcaatgt

SEQ ID NO: 1154516 - DNA, 15 bp, Homo sapiens
ccattctgtgcaatg

SEQ ID NO: 1154517 - DNA, 15 bp, Homo sapiens
tccattctgtgcaat

SEQ ID NO: 1154518 - DNA, 15 bp, Homo sapiens
atccattctgtgcaa

SEQ ID NO: 1154519 - DNA, 15 bp, Homo sapiens
catccattctgtgca

SEQ ID NO: 1154520 - DNA, 15 bp, Homo sapiens
acatccattctgtgc

SEQ ID NO: 1154521 - DNA, 15 bp, Homo sapiens
cacatccattctgtg

SEQ ID NO: 1154522 - DNA, 15 bp, Homo sapiens
tcacatccattctgt

SEQ ID NO: 1154523 - DNA, 15 bp, Homo sapiens
ttcacatccattctg

SEQ ID NO: 1154524 - DNA, 15 bp, Homo sapiens
cttcacatccattct

SEQ ID NO: 1154525 - DNA, 15 bp, Homo sapiens
ccttcacatccattc

SEQ ID NO: 1154526 - DNA, 15 bp, Homo sapiens
gccttcacatccatt

SEQ ID NO: 1154527 - DNA, 15 bp, Homo sapiens
tgccttcacatccat

SEQ ID NO: 1154528 - DNA, 15 bp, Homo sapiens
ttgccttcacatcca

SEQ ID NO: 1154529 - DNA, 15 bp, Homo sapiens
cttgccttcacatcc

SEQ ID NO: 1154530 - DNA, 15 bp, Homo sapiens
ccttgccttcacatc

SEQ ID NO: 1154531 - DNA, 15 bp, Homo sapiens
gccttgccttcacat

SEQ ID NO: 1154532 - DNA, 15 bp, Homo sapiens
tgccttgccttcaca

SEQ ID NO: 1154533 - DNA, 15 bp, Homo sapiens
atgccttgccttcac

SEQ ID NO: 1154534 - DNA, 15 bp, Homo sapiens
tatgccttgccttca

SEQ ID NO: 1154535 - DNA, 15 bp, Homo sapiens
gtatgccttgccttc

SEQ ID NO: 1154536 - DNA, 15 bp, Homo sapiens
agtatgccttgcctt

SEQ ID NO: 1154537 - DNA, 15 bp, Homo sapiens
tagtatgccttgcct

SEQ ID NO: 1154538 - DNA, 15 bp, Homo sapiens
atagtatgccttgcc

SEQ ID NO: 1154539 - DNA, 15 bp, Homo sapiens
gatagtatgccttgc

SEQ ID NO: 1154540 - DNA, 15 bp, Homo sapiens
tgatagtatgccttg

SEQ ID NO: 1154541 - DNA, 15 bp, Homo sapiens
ctgatagtatgcctt

SEQ ID NO: 1154542 - DNA, 15 bp, Homo sapiens
actgatagtatgcct

SEQ ID NO: 1154543 - DNA, 15 bp, Homo sapiens
cactgatagtatgcc

SEQ ID NO: 1154544 - DNA, 15 bp, Homo sapiens
ccactgatagtatgc

SEQ ID NO: 1154545 - DNA, 15 bp, Homo sapiens
cccactgatagtatg

SEQ ID NO: 1154546 - DNA, 15 bp, Homo sapiens
tcccactgatagtat

SEQ ID NO: 1154547 - DNA, 15 bp, Homo sapiens
ttcccactgatagta

SEQ ID NO: 1154548 - DNA, 15 bp, Homo sapiens
cttcccactgatagt

SEQ ID NO: 1154549 - DNA, 15 bp, Homo sapiens
gcttcccactgatag

SEQ ID NO: 1154550 - DNA, 15 bp, Homo sapiens
ggcttcccactgata

SEQ ID NO: 1154551 - DNA, 15 bp, Homo sapiens
tggcttcccactgat

SEQ ID NO: 1154552 - DNA, 15 bp, Homo sapiens
ttggcttcccactga

SEQ ID NO: 1154553 - DNA, 15 bp, Homo sapiens
tttggcttcccactg

SEQ ID NO: 1154554 - DNA, 15 bp, Homo sapiens
atttggcttcccact

SEQ ID NO: 1154555 - DNA, 15 bp, Homo sapiens
gatttggcttcccac

SEQ ID NO: 1154556 - DNA, 15 bp, Homo sapiens
agatttggcttccca

SEQ ID NO: 1154557 - DNA, 15 bp, Homo sapiens
tagatttggcttccc

SEQ ID NO: 1154558 - DNA, 15 bp, Homo sapiens
gtagatttggcttcc

SEQ ID NO: 1154559 - DNA, 15 bp, Homo sapiens
tgtagatttggcttc

SEQ ID NO: 1154560 - DNA, 15 bp, Homo sapiens
ttgtagatttggctt

SEQ ID NO: 1154561 - DNA, 15 bp, Homo sapiens
attgtagatttggct

SEQ ID NO: 1154562 - DNA, 15 bp, Homo sapiens
tattgtagatttggc

SEQ ID NO: 1154563 - DNA, 15 bp, Homo sapiens
ttattgtagatttgg

SEQ ID NO: 1154564 - DNA, 15 bp, Homo sapiens
gttattgtagatttg

SEQ ID NO: 1154565 - DNA, 15 bp, Homo sapiens
agttattgtagattt

SEQ ID NO: 1154566 - DNA, 15 bp, Homo sapiens
cagttattgtagatt

SEQ ID NO: 1154567 - DNA, 15 bp, Homo sapiens
gcagttattgtagat

SEQ ID NO: 1154568 - DNA, 15 bp, Homo sapiens
agcagttattgtaga

SEQ ID NO: 1154569 - DNA, 15 bp, Homo sapiens
tagcagttattgtag

SEQ ID NO: 1154570 - DNA, 15 bp, Homo sapiens
gtagcagttattgta

SEQ ID NO: 1154571 - DNA, 15 bp, Homo sapiens
agtagcagttattgt

SEQ ID NO: 1154572 - DNA, 15 bp, Homo sapiens
tagtagcagttattg

SEQ ID NO: 1154573 - DNA, 15 bp, Homo sapiens
gtagtagcagttatt

SEQ ID NO: 1154574 - DNA, 15 bp, Homo sapiens
agtagtagcagttat

SEQ ID NO: 1154575 - DNA, 15 bp, Homo sapiens
tagtagtagcagtta

SEQ ID NO: 1154576 - DNA, 15 bp, Homo sapiens
ttagtagtagcagtt

SEQ ID NO: 1154577 - DNA, 15 bp, Homo sapiens
tttagtagtagcagt

SEQ ID NO: 1154578 - DNA, 15 bp, Homo sapiens
atttagtagtagcag

SEQ ID NO: 1154579 - DNA, 15 bp, Homo sapiens
tatttagtagtagca

SEQ ID NO: 1154580 - DNA, 15 bp, Homo sapiens
ttatttagtagtagc

SEQ ID NO: 1154581 - DNA, 15 bp, Homo sapiens
tttatttagtagtag

SEQ ID NO: 1154582 - DNA, 15 bp, Homo sapiens
ctttatttagtagta

SEQ ID NO: 1154583 - DNA, 15 bp, Homo sapiens
tctttatttagtagt

SEQ ID NO: 1154584 - DNA, 15 bp, Homo sapiens
atctttatttagtag

SEQ ID NO: 1154585 - DNA, 15 bp, Homo sapiens
gatctttatttagta

SEQ ID NO: 1154586 - DNA, 15 bp, Homo sapiens
agatctttatttagt

SEQ ID NO: 1154587 - DNA, 15 bp, Homo sapiens
aagatctttatttag

SEQ ID NO: 1154588 - DNA, 15 bp, Homo sapiens
aaagatctttattta

SEQ ID NO: 1154589 - DNA, 15 bp, Homo sapiens
aaaagatctttattt

SEQ ID NO: 1154590 - DNA, 15 bp, Homo sapiens
aaaaagatctttatt

SEQ ID NO: 1154591 - DNA, 15 bp, Homo sapiens
aaaaaagatctttat

SEQ ID NO: 1154592 - DNA, 15 bp, Homo sapiens
aaaaaaagatcttta

SEQ ID NO: 1154593 - DNA, 15 bp, Homo sapiens
aaaaaaaagatcttt

SEQ ID NO: 1154594 - DNA, 15 bp, Homo sapiens
aaaaaaaaagatctt

SEQ ID NO: 1154595 - DNA, 15 bp, Homo sapiens
aaaaaaaaaagatct

SEQ ID NO: 1154596 - DNA, 15 bp, Homo sapiens
aaaaaaaaaaagatc

SEQ ID NO: 1154597 - DNA, 15 bp, Homo sapiens
tgaaaaaaaaaaaag

SEQ ID NO: 1154598 - DNA, 15 bp, Homo sapiens
ttgaaaaaaaaaaaa

SEQ ID NO: 1154599 - DNA, 15 bp, Homo sapiens
cttgaaaaaaaaaaa

SEQ ID NO: 1154600 - DNA, 15 bp, Homo sapiens
ccttgaaaaaaaaaa

SEQ ID NO: 1154601 - DNA, 15 bp, Homo sapiens
tccttgaaaaaaaaa

SEQ ID NO: 1154602 - DNA, 15 bp, Homo sapiens
ttccttgaaaaaaaa

SEQ ID NO: 1154603 - DNA, 15 bp, Homo sapiens
tttccttgaaaaaaa

SEQ ID NO: 1154604 - DNA, 15 bp, Homo sapiens
ttttccttgaaaaaa

SEQ ID NO: 1154605 - DNA, 15 bp, Homo sapiens
attttccttgaaaaa

SEQ ID NO: 1154606 - DNA, 15 bp, Homo sapiens
gattttccttgaaaa

SEQ ID NO: 1154607 - DNA, 15 bp, Homo sapiens
agattttccttgaaa

SEQ ID NO: 1154608 - DNA, 15 bp, Homo sapiens
tagattttccttgaa

SEQ ID NO: 1154609 - DNA, 15 bp, Homo sapiens
gtagattttccttga

SEQ ID NO: 1154610 - DNA, 15 bp, Homo sapiens
ggtagattttccttg

SEQ ID NO: 1154611 - DNA, 15 bp, Homo sapiens
aggtagattttcctt

SEQ ID NO: 1154612 - DNA, 15 bp, Homo sapiens
caggtagattttcct

SEQ ID NO: 1154613 - DNA, 15 bp, Homo sapiens
tcaggtagattttcc

SEQ ID NO: 1154614 - DNA, 15 bp, Homo sapiens
atcaggtagattttc

SEQ ID NO: 1154615 - DNA, 15 bp, Homo sapiens
aatcaggtagatttt

SEQ ID NO: 1154616 - DNA, 15 bp, Homo sapiens
aaatcaggtagattt

SEQ ID NO: 1154617 - DNA, 15 bp, Homo sapiens
aaaatcaggtagatt

SEQ ID NO: 1154618 - DNA, 15 bp, Homo sapiens
aaaaatcaggtagat

SEQ ID NO: 1154619 - DNA, 15 bp, Homo sapiens
taaaaatcaggtaga

SEQ ID NO: 1154620 - DNA, 15 bp, Homo sapiens
ataaaaatcaggtag

SEQ ID NO: 1154621 - DNA, 15 bp, Homo sapiens
tataaaaatcaggta

SEQ ID NO: 1154622 - DNA, 15 bp, Homo sapiens
ttataaaaatcaggt

SEQ ID NO: 1154623 - DNA, 15 bp, Homo sapiens
attataaaaatcagg

SEQ ID NO: 1154624 - DNA, 15 bp, Homo sapiens
cattataaaaatcag

SEQ ID NO: 1154625 - DNA, 15 bp, Homo sapiens
tcattataaaaatca

SEQ ID NO: 1154626 - DNA, 15 bp, Homo sapiens
gtcattataaaaatc

SEQ ID NO: 1154627 - DNA, 15 bp, Homo sapiens
agtcattataaaaat

SEQ ID NO: 1154628 - DNA, 15 bp, Homo sapiens
cagtcattataaaaa

SEQ ID NO: 1154629 - DNA, 15 bp, Homo sapiens
ccagtcattataaaa

SEQ ID NO: 1154630 - DNA, 15 bp, Homo sapiens
tccagtcattataaa

SEQ ID NO: 1154631 - DNA, 15 bp, Homo sapiens
atccagtcattataa

SEQ ID NO: 1154632 - DNA, 15 bp, Homo sapiens
catccagtcattata

SEQ ID NO: 1154633 - DNA, 15 bp, Homo sapiens
acatccagtcattat

SEQ ID NO: 1154634 - DNA, 15 bp, Homo sapiens
aacatccagtcatta

SEQ ID NO: 1154635 - DNA, 15 bp, Homo sapiens
gaacatccagtcatt

SEQ ID NO: 1154636 - DNA, 15 bp, Homo sapiens
tgaacatccagtcat

SEQ ID NO: 1154637 - DNA, 15 bp, Homo sapiens
atgaacatccagtca

SEQ ID NO: 1154638 - DNA, 15 bp, Homo sapiens
aatgaacatccagtc

SEQ ID NO: 1154639 - DNA, 15 bp, Homo sapiens
caatgaacatccagt

SEQ ID NO: 1154640 - DNA, 15 bp, Homo sapiens
gcaatgaacatccag

SEQ ID NO: 1154641 - DNA, 15 bp, Homo sapiens
agcaatgaacatcca

SEQ ID NO: 1154642 - DNA, 15 bp, Homo sapiens
tagcaatgaacatcc

SEQ ID NO: 1154643 - DNA, 15 bp, Homo sapiens
ttagcaatgaacatc

SEQ ID NO: 1154644 - DNA, 15 bp, Homo sapiens
tttagcaatgaacat

SEQ ID NO: 1154645 - DNA, 15 bp, Homo sapiens
gtttagcaatgaaca

SEQ ID NO: 1154646 - DNA, 15 bp, Homo sapiens
tgtttagcaatgaac

SEQ ID NO: 1154647 - DNA, 15 bp, Homo sapiens
atgtttagcaatgaa

SEQ ID NO: 1154648 - DNA, 15 bp, Homo sapiens
gatgtttagcaatga

SEQ ID NO: 1154649 - DNA, 15 bp, Homo sapiens
agatgtttagcaatg

SEQ ID NO: 1154650 - DNA, 15 bp, Homo sapiens
cagatgtttagcaat

SEQ ID NO: 1154651 - DNA, 15 bp, Homo sapiens
gcagatgtttagcaa

SEQ ID NO: 1154652 - DNA, 15 bp, Homo sapiens
ggcagatgtttagca

SEQ ID NO: 1154653 - DNA, 15 bp, Homo sapiens
aggcagatgtttagc

SEQ ID NO: 1154654 - DNA, 15 bp, Homo sapiens
caggcagatgtttag

SEQ ID NO: 1154655 - DNA, 15 bp, Homo sapiens
tcaggcagatgttta

SEQ ID NO: 1154656 - DNA, 15 bp, Homo sapiens
atcaggcagatgttt

SEQ ID NO: 1154657 - DNA, 15 bp, Homo sapiens
gatcaggcagatgtt

SEQ ID NO: 1154658 - DNA, 15 bp, Homo sapiens
agatcaggcagatgt

SEQ ID NO: 1154659 - DNA, 15 bp, Homo sapiens
gagatcaggcagatg

SEQ ID NO: 1154660 - DNA, 15 bp, Homo sapiens
tgagatcaggcagat

SEQ ID NO: 1154661 - DNA, 15 bp, Homo sapiens
atgagatcaggcaga

SEQ ID NO: 1154662 - DNA, 15 bp, Homo sapiens
tatgagatcaggcag

SEQ ID NO: 1154663 - DNA, 15 bp, Homo sapiens
ctatgagatcaggca

SEQ ID NO: 1154664 - DNA, 15 bp, Homo sapiens
tctatgagatcaggc

SEQ ID NO: 1154665 - DNA, 15 bp, Homo sapiens
ctctatgagatcagg

SEQ ID NO: 1154666 - DNA, 15 bp, Homo sapiens
actctatgagatcag

SEQ ID NO: 1154667 - DNA, 15 bp, Homo sapiens
gactctatgagatca

SEQ ID NO: 1154668 - DNA, 15 bp, Homo sapiens
agactctatgagatc

SEQ ID NO: 1154669 - DNA, 15 bp, Homo sapiens
cagactctatgagat

SEQ ID NO: 1154670 - DNA, 15 bp, Homo sapiens
ccagactctatgaga

SEQ ID NO: 1154671 - DNA, 15 bp, Homo sapiens
gccagactctatgag

SEQ ID NO: 1154672 - DNA, 15 bp, Homo sapiens
ggccagactctatga

SEQ ID NO: 1154673 - DNA, 15 bp, Homo sapiens
tggccagactctatg

SEQ ID NO: 1154674 - DNA, 15 bp, Homo sapiens
ctggccagactctat

SEQ ID NO: 1154675 - DNA, 15 bp, Homo sapiens
gctggccagactcta

SEQ ID NO: 1154676 - DNA, 15 bp, Homo sapiens
agctggccagactct

SEQ ID NO: 1154677 - DNA, 15 bp, Homo sapiens
aagctggccagactc

SEQ ID NO: 1154678 - DNA, 15 bp, Homo sapiens
gaagctggccagact

SEQ ID NO: 1154679 - DNA, 15 bp, Homo sapiens
cgaagctggccagac

SEQ ID NO: 1154680 - DNA, 15 bp, Homo sapiens
tcgaagctggccaga

SEQ ID NO: 1154681 - DNA, 15 bp, Homo sapiens
ctcgaagctggccag

SEQ ID NO: 1154682 - DNA, 15 bp, Homo sapiens
tctcgaagctggcca

SEQ ID NO: 1154683 - DNA, 15 bp, Homo sapiens
ttctcgaagctggcc

SEQ ID NO: 1154684 - DNA, 15 bp, Homo sapiens
tttctcgaagctggc

SEQ ID NO: 1154685 - DNA, 15 bp, Homo sapiens
ctttctcgaagctgg

SEQ ID NO: 1154686 - DNA, 15 bp, Homo sapiens
tctttctcgaagctg

SEQ ID NO: 1154687 - DNA, 15 bp, Homo sapiens
ctctttctcgaagct

SEQ ID NO: 1154688 - DNA, 15 bp, Homo sapiens
actctttctcgaagc

SEQ ID NO: 1154689 - DNA, 15 bp, Homo sapiens
aactctttctcgaag

SEQ ID NO: 1154690 - DNA, 15 bp, Homo sapiens
caactctttctcgaa

SEQ ID NO: 1154691 - DNA, 15 bp, Homo sapiens
tcaactctttctcga

SEQ ID NO: 1154692 - DNA, 15 bp, Homo sapiens
ctcaactctttctcg

SEQ ID NO: 1154693 - DNA, 15 bp, Homo sapiens
tctcaactctttctc

SEQ ID NO: 1154694 - DNA, 15 bp, Homo sapiens
ttctcaactctttct

SEQ ID NO: 1154695 - DNA, 15 bp, Homo sapiens
cttctcaactctttc

SEQ ID NO: 1154696 - DNA, 15 bp, Homo sapiens
ccttctcaactcttt

SEQ ID NO: 1154697 - DNA, 15 bp, Homo sapiens
accttctcaactctt

SEQ ID NO: 1154698 - DNA, 15 bp, Homo sapiens
aaccttctcaactct

SEQ ID NO: 1154699 - DNA, 15 bp, Homo sapiens
aaaccttctcaactc

SEQ ID NO: 1154700 - DNA, 15 bp, Homo sapiens
caaaccttctcaact

SEQ ID NO: 1154701 - DNA, 15 bp, Homo sapiens
tcaaaccttctcaac

SEQ ID NO: 1154702 - DNA, 15 bp, Homo sapiens
gtcaaaccttctcaa

SEQ ID NO: 1154703 - DNA, 15 bp, Homo sapiens
tgtcaaaccttctca

SEQ ID NO: 1154704 - DNA, 15 bp, Homo sapiens
atgtcaaaccttctc

SEQ ID NO: 1154705 - DNA, 15 bp, Homo sapiens
tatgtcaaaccttct

SEQ ID NO: 1154706 - DNA, 15 bp, Homo sapiens
atatgtcaaaccttc

SEQ ID NO: 1154707 - DNA, 15 bp, Homo sapiens
catatgtcaaacctt

SEQ ID NO: 1154708 - DNA, 15 bp, Homo sapiens
acatatgtcaaacct

SEQ ID NO: 1154709 - DNA, 15 bp, Homo sapiens
tacatatgtcaaacc

SEQ ID NO: 1154710 - DNA, 15 bp, Homo sapiens
atacatatgtcaaac

SEQ ID NO: 1154711 - DNA, 15 bp, Homo sapiens
aatacatatgtcaaa

SEQ ID NO: 1154712 - DNA, 15 bp, Homo sapiens
taatacatatgtcaa

SEQ ID NO: 1154713 - DNA, 15 bp, Homo sapiens
gtaatacatatgtca

SEQ ID NO: 1154714 - DNA, 15 bp, Homo sapiens
tgtaatacatatgtc

SEQ ID NO: 1154715 - DNA, 15 bp, Homo sapiens
atgtaatacatatgt

SEQ ID NO: 1154716 - DNA, 15 bp, Homo sapiens
aatgtaatacatatg

SEQ ID NO: 1154717 - DNA, 15 bp, Homo sapiens
aaatgtaatacatat

SEQ ID NO: 1154718 - DNA, 15 bp, Homo sapiens
caaatgtaatacata

SEQ ID NO: 1154719 - DNA, 15 bp, Homo sapiens
acaaatgtaatacat

SEQ ID NO: 1154720 - DNA, 15 bp, Homo sapiens
gacaaatgtaataca

SEQ ID NO: 1154721 - DNA, 15 bp, Homo sapiens
agacaaatgtaatac

SEQ ID NO: 1154722 - DNA, 15 bp, Homo sapiens
aagacaaatgtaata

SEQ ID NO: 1154723 - DNA, 15 bp, Homo sapiens
gaagacaaatgtaat

SEQ ID NO: 1154724 - DNA, 15 bp, Homo sapiens
agaagacaaatgtaa

SEQ ID NO: 1154725 - DNA, 15 bp, Homo sapiens
aagaagacaaatgta

SEQ ID NO: 1154726 - DNA, 15 bp, Homo sapiens
caagaagacaaatgt

SEQ ID NO: 1154727 - DNA, 15 bp, Homo sapiens
acaagaagacaaatg

SEQ ID NO: 1154728 - DNA, 15 bp, Homo sapiens
tacaagaagacaaat

SEQ ID NO: 1154729 - DNA, 15 bp, Homo sapiens
atacaagaagacaaa

SEQ ID NO: 1154730 - DNA, 15 bp, Homo sapiens
tatacaagaagacaa

SEQ ID NO: 1154731 - DNA, 15 bp, Homo sapiens
ctatacaagaagaca

SEQ ID NO: 1154732 - DNA, 15 bp, Homo sapiens
gctatacaagaagac

SEQ ID NO: 1154733 - DNA, 15 bp, Homo sapiens
agctatacaagaaga

SEQ ID NO: 1154734 - DNA, 15 bp, Homo sapiens
aagctatacaagaag

SEQ ID NO: 1154735 - DNA, 15 bp, Homo sapiens
gaagctatacaagaa

SEQ ID NO: 1154736 - DNA, 15 bp, Homo sapiens
agaagctatacaaga

SEQ ID NO: 1154737 - DNA, 15 bp, Homo sapiens
aagaagctatacaag

SEQ ID NO: 1154738 - DNA, 15 bp, Homo sapiens
taagaagctatacaa

SEQ ID NO: 1154739 - DNA, 15 bp, Homo sapiens
ttaagaagctataca

SEQ ID NO: 1154740 - DNA, 15 bp, Homo sapiens
gttaagaagctatac

SEQ ID NO: 1154741 - DNA, 15 bp, Homo sapiens
tgttaagaagctata

SEQ ID NO: 1154742 - DNA, 15 bp, Homo sapiens
atgttaagaagctat

SEQ ID NO: 1154743 - DNA, 15 bp, Homo sapiens
aatgttaagaagcta

SEQ ID NO: 1154744 - DNA, 15 bp, Homo sapiens
caatgttaagaagct

SEQ ID NO: 1154745 - DNA, 15 bp, Homo sapiens
acaatgttaagaagc

SEQ ID NO: 1154746 - DNA, 15 bp, Homo sapiens
aacaatgttaagaag

SEQ ID NO: 1154747 - DNA, 15 bp, Homo sapiens
taacaatgttaagaa

SEQ ID NO: 1154748 - DNA, 15 bp, Homo sapiens
ttaacaatgttaaga

SEQ ID NO: 1154749 - DNA, 15 bp, Homo sapiens
gttaacaatgttaag

SEQ ID NO: 1154750 - DNA, 15 bp, Homo sapiens
agttaacaatgttaa

SEQ ID NO: 1154751 - DNA, 15 bp, Homo sapiens
aagttaacaatgtta

SEQ ID NO: 1154752 - DNA, 15 bp, Homo sapiens
caagttaacaatgtt

SEQ ID NO: 1154753 - DNA, 15 bp, Homo sapiens
ccaagttaacaatgt

SEQ ID NO: 1154754 - DNA, 15 bp, Homo sapiens
accaagttaacaatg

SEQ ID NO: 1154755 - DNA, 15 bp, Homo sapiens
aaccaagttaacaat

SEQ ID NO: 1154756 - DNA, 15 bp, Homo sapiens
aaaccaagttaacaa

SEQ ID NO: 1154757 - DNA, 15 bp, Homo sapiens
aaaaccaagttaaca

SEQ ID NO: 1154758 - DNA, 15 bp, Homo sapiens
caaaaccaagttaac

SEQ ID NO: 1154759 - DNA, 15 bp, Homo sapiens
tcaaaaccaagttaa

SEQ ID NO: 1154760 - DNA, 15 bp, Homo sapiens
ttcaaaaccaagtta

SEQ ID NO: 1154761 - DNA, 15 bp, Homo sapiens
cttcaaaaccaagtt

SEQ ID NO: 1154762 - DNA, 15 bp, Homo sapiens
gcttcaaaaccaagt

SEQ ID NO: 1154763 - DNA, 15 bp, Homo sapiens
tgcttcaaaaccaag

SEQ ID NO: 1154764 - DNA, 15 bp, Homo sapiens
atgcttcaaaaccaa

SEQ ID NO: 1154765 - DNA, 15 bp, Homo sapiens
tatgcttcaaaacca

SEQ ID NO: 1154766 - DNA, 15 bp, Homo sapiens
ttatgcttcaaaacc

SEQ ID NO: 1154767 - DNA, 15 bp, Homo sapiens
tttatgcttcaaaac

SEQ ID NO: 1154768 - DNA, 15 bp, Homo sapiens
ttttatgcttcaaaa

SEQ ID NO: 1154769 - DNA, 15 bp, Homo sapiens
gttttatgcttcaaa

SEQ ID NO: 1154770 - DNA, 15 bp, Homo sapiens
tgttttatgcttcaa

SEQ ID NO: 1154771 - DNA, 15 bp, Homo sapiens
atgttttatgcttca

SEQ ID NO: 1154772 - DNA, 15 bp, Homo sapiens
aatgttttatgcttc

SEQ ID NO: 1154773 - DNA, 15 bp, Homo sapiens
taatgttttatgctt

SEQ ID NO: 1154774 - DNA, 15 bp, Homo sapiens
gtaatgttttatgct

SEQ ID NO: 1154775 - DNA, 15 bp, Homo sapiens
agtaatgttttatgc

SEQ ID NO: 1154776 - DNA, 15 bp, Homo sapiens
cagtaatgttttatg

SEQ ID NO: 1154777 - DNA, 15 bp, Homo sapiens
tcagtaatgttttat

SEQ ID NO: 1154778 - DNA, 15 bp, Homo sapiens
ctcagtaatgtttta

SEQ ID NO: 1154779 - DNA, 15 bp, Homo sapiens
tctcagtaatgtttt

SEQ ID NO: 1154780 - DNA, 15 bp, Homo sapiens
atctcagtaatgttt

SEQ ID NO: 1154781 - DNA, 15 bp, Homo sapiens
aatctcagtaatgtt

SEQ ID NO: 1154782 - DNA, 15 bp, Homo sapiens
caatctcagtaatgt

SEQ ID NO: 1154783 - DNA, 15 bp, Homo sapiens
tcaatctcagtaatg

SEQ ID NO: 1154784 - DNA, 15 bp, Homo sapiens
atcaatctcagtaat

SEQ ID NO: 1154785 - DNA, 15 bp, Homo sapiens
aatcaatctcagtaa

SEQ ID NO: 1154786 - DNA, 15 bp, Homo sapiens
aaatcaatctcagta

SEQ ID NO: 1154787 - DNA, 15 bp, Homo sapiens
caaatcaatctcagt

SEQ ID NO: 1154788 - DNA, 15 bp, Homo sapiens
tcaaatcaatctcag

SEQ ID NO: 1154789 - DNA, 15 bp, Homo sapiens
ctcaaatcaatctca

SEQ ID NO: 1154790 - DNA, 15 bp, Homo sapiens
actcaaatcaatctc

SEQ ID NO: 1154791 - DNA, 15 bp, Homo sapiens
gactcaaatcaatct

SEQ ID NO: 1154792 - DNA, 15 bp, Homo sapiens
tgactcaaatcaatc

SEQ ID NO: 1154793 - DNA, 15 bp, Homo sapiens
ttgactcaaatcaat

SEQ ID NO: 1154794 - DNA, 15 bp, Homo sapiens
attgactcaaatcaa

SEQ ID NO: 1154795 - DNA, 15 bp, Homo sapiens
aattgactcaaatca

SEQ ID NO: 1154796 - DNA, 15 bp, Homo sapiens
caattgactcaaatc

SEQ ID NO: 1154797 - DNA, 15 bp, Homo sapiens
gcaattgactcaaat

SEQ ID NO: 1154798 - DNA, 15 bp, Homo sapiens
agcaattgactcaaa

SEQ ID NO: 1154799 - DNA, 15 bp, Homo sapiens
gagcaattgactcaa

SEQ ID NO: 1154800 - DNA, 15 bp, Homo sapiens
ggagcaattgactca

SEQ ID NO: 1154801 - DNA, 15 bp, Homo sapiens
tggagcaattgactc

SEQ ID NO: 1154802 - DNA, 15 bp, Homo sapiens
atggagcaattgact

SEQ ID NO: 1154803 - DNA, 15 bp, Homo sapiens
aatggagcaattgac

SEQ ID NO: 1154804 - DNA, 15 bp, Homo sapiens
aaatggagcaattga

SEQ ID NO: 1154805 - DNA, 15 bp, Homo sapiens
caaatggagcaattg

SEQ ID NO: 1154806 - DNA, 15 bp, Homo sapiens
acaaatggagcaatt

SEQ ID NO: 1154807 - DNA, 15 bp, Homo sapiens
aacaaatggagcaat

SEQ ID NO: 1154808 - DNA, 15 bp, Homo sapiens
aaacaaatggagcaa

SEQ ID NO: 1154809 - DNA, 15 bp, Homo sapiens
aaaacaaatggagca

SEQ ID NO: 1154810 - DNA, 15 bp, Homo sapiens
gaaaacaaatggagc

SEQ ID NO: 1154811 - DNA, 15 bp, Homo sapiens
tgaaaacaaatggag

SEQ ID NO: 1154812 - DNA, 15 bp, Homo sapiens
ctgaaaacaaatgga

SEQ ID NO: 1154813 - DNA, 15 bp, Homo sapiens
actgaaaacaaatgg

SEQ ID NO: 1154814 - DNA, 15 bp, Homo sapiens
aactgaaaacaaatg

SEQ ID NO: 1154815 - DNA, 15 bp, Homo sapiens
taactgaaaacaaat

SEQ ID NO: 1154816 - DNA, 15 bp, Homo sapiens
ttaactgaaaacaaa

SEQ ID NO: 1154817 - DNA, 15 bp, Homo sapiens
tttaactgaaaacaa

SEQ ID NO: 1154818 - DNA, 15 bp, Homo sapiens
gtttaactgaaaaca

SEQ ID NO: 1154819 - DNA, 15 bp, Homo sapiens
tgtttaactgaaaac

SEQ ID NO: 1154820 - DNA, 15 bp, Homo sapiens
atgtttaactgaaaa

SEQ ID NO: 1154821 - DNA, 15 bp, Homo sapiens
gcatgtttaactgaa

SEQ ID NO: 1154822 - DNA, 15 bp, Homo sapiens
agcatgtttaactga

SEQ ID NO: 1154823 - DNA, 15 bp, Homo sapiens
gagcatgtttaactg

SEQ ID NO: 1154824 - DNA, 15 bp, Homo sapiens
tgagcatgtttaact

SEQ ID NO: 1154825 - DNA, 15 bp, Homo sapiens
ctgagcatgtttaac

SEQ ID NO: 1154826 - DNA, 15 bp, Homo sapiens
gctgagcatgtttaa

SEQ ID NO: 1154827 - DNA, 15 bp, Homo sapiens
tgctgagcatgttta

SEQ ID NO: 1154828 - DNA, 15 bp, Homo sapiens
atgctgagcatgttt

SEQ ID NO: 1154829 - DNA, 15 bp, Homo sapiens
aatgctgagcatgtt

SEQ ID NO: 1154830 - DNA, 15 bp, Homo sapiens
caatgctgagcatgt

SEQ ID NO: 1154831 - DNA, 15 bp, Homo sapiens
tcaatgctgagcatg

SEQ ID NO: 1154832 - DNA, 15 bp, Homo sapiens
atcaatgctgagcat

SEQ ID NO: 1154833 - DNA, 15 bp, Homo sapiens
gatcaatgctgagca

SEQ ID NO: 1154834 - DNA, 15 bp, Homo sapiens
tgatcaatgctgagc

SEQ ID NO: 1154835 - DNA, 15 bp, Homo sapiens
atgatcaatgctgag

SEQ ID NO: 1154836 - DNA, 15 bp, Homo sapiens
gatgatcaatgctga

SEQ ID NO: 1154837 - DNA, 15 bp, Homo sapiens
agatgatcaatgctg

SEQ ID NO: 1154838 - DNA, 15 bp, Homo sapiens
gagatgatcaatgct

SEQ ID NO: 1154839 - DNA, 15 bp, Homo sapiens
tgagatgatcaatgc

SEQ ID NO: 1154840 - DNA, 15 bp, Homo sapiens
gtgagatgatcaatg

SEQ ID NO: 1154841 - DNA, 15 bp, Homo sapiens
tgtgagatgatcaat

SEQ ID NO: 1154842 - DNA, 15 bp, Homo sapiens
ctgtgagatgatcaa

SEQ ID NO: 1154843 - DNA, 15 bp, Homo sapiens
tctgtgagatgatca

SEQ ID NO: 1154844 - DNA, 15 bp, Homo sapiens
gtctgtgagatgatc

SEQ ID NO: 1154845 - DNA, 15 bp, Homo sapiens
ggtctgtgagatgat

SEQ ID NO: 1154846 - DNA, 15 bp, Homo sapiens
tggtctgtgagatga

SEQ ID NO: 1154847 - DNA, 15 bp, Homo sapiens
gtggtctgtgagatg

SEQ ID NO: 1154848 - DNA, 15 bp, Homo sapiens
tgtggtctgtgagat

SEQ ID NO: 1154849 - DNA, 15 bp, Homo sapiens
ttgtggtctgtgaga

SEQ ID NO: 1154850 - DNA, 15 bp, Homo sapiens
cttgtggtctgtgag

SEQ ID NO: 1154851 - DNA, 15 bp, Homo sapiens
acttgtggtctgtga

SEQ ID NO: 1154852 - DNA, 15 bp, Homo sapiens
gacttgtggtctgtg

SEQ ID NO: 1154853 - DNA, 15 bp, Homo sapiens
tgacttgtggtctgt

SEQ ID NO: 1154854 - DNA, 15 bp, Homo sapiens
gtgacttgtggtctg

SEQ ID NO: 1154855 - DNA, 15 bp, Homo sapiens
tgtgacttgtggtct

SEQ ID NO: 1154856 - DNA, 15 bp, Homo sapiens
ctgtgacttgtggtc

SEQ ID NO: 1154857 - DNA, 15 bp, Homo sapiens
gctgtgacttgtggt

SEQ ID NO: 1154858 - DNA, 15 bp, Homo sapiens
cgctgtgacttgtgg

SEQ ID NO: 1154859 - DNA, 15 bp, Homo sapiens
gcgctgtgacttgtg

SEQ ID NO: 1154860 - DNA, 15 bp, Homo sapiens
ggcgctgtgacttgt

SEQ ID NO: 1154861 - DNA, 15 bp, Homo sapiens
aggcgctgtgacttg

SEQ ID NO: 1154862 - DNA, 15 bp, Homo sapiens
aaggcgctgtgactt

SEQ ID NO: 1154863 - DNA, 15 bp, Homo sapiens
caaggcgctgtgact

SEQ ID NO: 1154864 - DNA, 15 bp, Homo sapiens
gcaaggcgctgtgac

SEQ ID NO: 1154865 - DNA, 15 bp, Homo sapiens
tgcaaggcgctgtga

SEQ ID NO: 1154866 - DNA, 15 bp, Homo sapiens
gtgcaaggcgctgtg

SEQ ID NO: 1154867 - DNA, 15 bp, Homo sapiens
cgtgcaaggcgctgt

SEQ ID NO: 1154868 - DNA, 15 bp, Homo sapiens
acgtgcaaggcgctg

SEQ ID NO: 1154869 - DNA, 15 bp, Homo sapiens
gacgtgcaaggcgct

SEQ ID NO: 1154870 - DNA, 15 bp, Homo sapiens
agacgtgcaaggcgc

SEQ ID NO: 1154871 - DNA, 15 bp, Homo sapiens
tagacgtgcaaggcg

SEQ ID NO: 1154872 - DNA, 15 bp, Homo sapiens
ctagacgtgcaaggc

SEQ ID NO: 1154873 - DNA, 15 bp, Homo sapiens
actagacgtgcaagg

SEQ ID NO: 1154874 - DNA, 15 bp, Homo sapiens
aactagacgtgcaag

SEQ ID NO: 1154875 - DNA, 15 bp, Homo sapiens
gaactagacgtgcaa

SEQ ID NO: 1154876 - DNA, 15 bp, Homo sapiens
agaactagacgtgca

SEQ ID NO: 1154877 - DNA, 15 bp, Homo sapiens
cagaactagacgtgc

SEQ ID NO: 1154878 - DNA, 15 bp, Homo sapiens
ccagaactagacgtg

SEQ ID NO: 1154879 - DNA, 15 bp, Homo sapiens
cccagaactagacgt

SEQ ID NO: 1154880 - DNA, 15 bp, Homo sapiens
tcccagaactagacg

SEQ ID NO: 1154881 - DNA, 15 bp, Homo sapiens
atcccagaactagac

SEQ ID NO: 1154882 - DNA, 15 bp, Homo sapiens
catcccagaactaga

SEQ ID NO: 1154883 - DNA, 15 bp, Homo sapiens
gcatcccagaactag

SEQ ID NO: 1154884 - DNA, 15 bp, Homo sapiens
tgcatcccagaacta

SEQ ID NO: 1154885 - DNA, 15 bp, Homo sapiens
atgcatcccagaact

SEQ ID NO: 1154886 - DNA, 15 bp, Homo sapiens
gatgcatcccagaac

SEQ ID NO: 1154887 - DNA, 15 bp, Homo sapiens
tgatgcatcccagaa

SEQ ID NO: 1154888 - DNA, 15 bp, Homo sapiens
gtgatgcatcccaga

SEQ ID NO: 1154889 - DNA, 15 bp, Homo sapiens
ggtgatgcatcccag

SEQ ID NO: 1154890 - DNA, 15 bp, Homo sapiens
tggtgatgcatccca

SEQ ID NO: 1154891 - DNA, 15 bp, Homo sapiens
atggtgatgcatccc

SEQ ID NO: 1154892 - DNA, 15 bp, Homo sapiens
catggtgatgcatcc

SEQ ID NO: 1154893 - DNA, 15 bp, Homo sapiens
ccatggtgatgcatc

SEQ ID NO: 1154894 - DNA, 15 bp, Homo sapiens
gccatggtgatgcat

SEQ ID NO: 1154895 - DNA, 15 bp, Homo sapiens
tgccatggtgatgca

SEQ ID NO: 1154896 - DNA, 15 bp, Homo sapiens
atgccatggtgatgc

SEQ ID NO: 1154897 - DNA, 15 bp, Homo sapiens
tatgccatggtgatg

SEQ ID NO: 1154898 - DNA, 15 bp, Homo sapiens
atatgccatggtgat

SEQ ID NO: 1154899 - DNA, 15 bp, Homo sapiens
catatgccatggtga

SEQ ID NO: 1154900 - DNA, 15 bp, Homo sapiens
acatatgccatggtg

SEQ ID NO: 1154901 - DNA, 15 bp, Homo sapiens
cacatatgccatggt

SEQ ID NO: 1154902 - DNA, 15 bp, Homo sapiens
acacatatgccatgg

SEQ ID NO: 1154903 - DNA, 15 bp, Homo sapiens
cacacatatgccatg

SEQ ID NO: 1154904 - DNA, 15 bp, Homo sapiens
ccacacatatgccat

SEQ ID NO: 1154905 - DNA, 15 bp, Homo sapiens
cccacacatatgcca

SEQ ID NO: 1154906 - DNA, 15 bp, Homo sapiens
ccccacacatatgcc

SEQ ID NO: 1154907 - DNA, 15 bp, Homo sapiens
gccccacacatatgc

SEQ ID NO: 1154908 - DNA, 15 bp, Homo sapiens
tgccccacacatatg

SEQ ID NO: 1154909 - DNA, 15 bp, Homo sapiens
ttgccccacacatat

SEQ ID NO: 1154910 - DNA, 15 bp, Homo sapiens
tttgccccacacata

SEQ ID NO: 1154911 - DNA, 15 bp, Homo sapiens
ctttgccccacacat

SEQ ID NO: 1154912 - DNA, 15 bp, Homo sapiens
cctttgccccacaca

SEQ ID NO: 1154913 - DNA, 15 bp, Homo sapiens
acctttgccccacac

SEQ ID NO: 1154914 - DNA, 15 bp, Homo sapiens
gacctttgccccaca

SEQ ID NO: 1154915 - DNA, 15 bp, Homo sapiens
tgacctttgccccac

SEQ ID NO: 1154916 - DNA, 15 bp, Homo sapiens
atgacctttgcccca

SEQ ID NO: 1154917 - DNA, 15 bp, Homo sapiens
catgacctttgcccc

SEQ ID NO: 1154918 - DNA, 15 bp, Homo sapiens
ccatgacctttgccc

SEQ ID NO: 1154919 - DNA, 15 bp, Homo sapiens
tccatgacctttgcc

SEQ ID NO: 1154920 - DNA, 15 bp, Homo sapiens
ctccatgacctttgc

SEQ ID NO: 1154921 - DNA, 15 bp, Homo sapiens
tctccatgacctttg

SEQ ID NO: 1154922 - DNA, 15 bp, Homo sapiens
atctccatgaccttt

SEQ ID NO: 1154923 - DNA, 15 bp, Homo sapiens
catctccatgacctt

SEQ ID NO: 1154924 - DNA, 15 bp, Homo sapiens
acatctccatgacct

SEQ ID NO: 1154925 - DNA, 15 bp, Homo sapiens
gacatctccatgacc

SEQ ID NO: 1154926 - DNA, 15 bp, Homo sapiens
ggacatctccatgac

SEQ ID NO: 1154927 - DNA, 15 bp, Homo sapiens
cggacatctccatga

SEQ ID NO: 1154928 - DNA, 15 bp, Homo sapiens
acggacatctccatg

SEQ ID NO: 1154929 - DNA, 15 bp, Homo sapiens
tacggacatctccat

SEQ ID NO: 1154930 - DNA, 15 bp, Homo sapiens
ttacggacatctcca

SEQ ID NO: 1154931 - DNA, 15 bp, Homo sapiens
cttacggacatctcc

SEQ ID NO: 1154932 - DNA, 15 bp, Homo sapiens
ccttacggacatctc

SEQ ID NO: 1154933 - DNA, 15 bp, Homo sapiens
accttacggacatct

SEQ ID NO: 1154934 - DNA, 15 bp, Homo sapiens
aaccttacggacatc

SEQ ID NO: 1154935 - DNA, 15 bp, Homo sapiens
aaaccttacggacat

SEQ ID NO: 1154936 - DNA, 15 bp, Homo sapiens
caaaccttacggaca

SEQ ID NO: 1154937 - DNA, 15 bp, Homo sapiens
ccaaaccttacggac

SEQ ID NO: 1154938 - DNA, 15 bp, Homo sapiens
tccaaaccttacgga

SEQ ID NO: 1154939 - DNA, 15 bp, Homo sapiens
ctccaaaccttacgg

SEQ ID NO: 1154940 - DNA, 15 bp, Homo sapiens
tctccaaaccttacg

SEQ ID NO: 1154941 - DNA, 15 bp, Homo sapiens
atctccaaaccttac

SEQ ID NO: 1154942 - DNA, 15 bp, Homo sapiens
aatctccaaacctta

SEQ ID NO: 1154943 - DNA, 15 bp, Homo sapiens
aaatctccaaacctt

SEQ ID NO: 1154944 - DNA, 15 bp, Homo sapiens
aaaatctccaaacct

SEQ ID NO: 1154945 - DNA, 15 bp, Homo sapiens
gaaaatctccaaacc

SEQ ID NO: 1154946 - DNA, 15 bp, Homo sapiens
agaaaatctccaaac

SEQ ID NO: 1154947 - DNA, 15 bp, Homo sapiens
gagaaaatctccaaa

SEQ ID NO: 1154948 - DNA, 15 bp, Homo sapiens
tgagaaaatctccaa

SEQ ID NO: 1154949 - DNA, 15 bp, Homo sapiens
ctgagaaaatctcca

SEQ ID NO: 1154950 - DNA, 15 bp, Homo sapiens
tctgagaaaatctcc

SEQ ID NO: 1154951 - DNA, 15 bp, Homo sapiens
atctgagaaaatctc

SEQ ID NO: 1154952 - DNA, 15 bp, Homo sapiens
aatctgagaaaatct

SEQ ID NO: 1154953 - DNA, 15 bp, Homo sapiens
aaatctgagaaaatc

SEQ ID NO: 1154954 - DNA, 15 bp, Homo sapiens
gaaatctgagaaaat

SEQ ID NO: 1154955 - DNA, 15 bp, Homo sapiens
agaaatctgagaaaa

SEQ ID NO: 1154956 - DNA, 15 bp, Homo sapiens
aagaaatctgagaaa

SEQ ID NO: 1154957 - DNA, 15 bp, Homo sapiens
taagaaatctgagaa

SEQ ID NO: 1154958 - DNA, 15 bp, Homo sapiens
ataagaaatctgaga

SEQ ID NO: 1154959 - DNA, 15 bp, Homo sapiens
cataagaaatctgag

SEQ ID NO: 1154960 - DNA, 15 bp, Homo sapiens
gcataagaaatctga

SEQ ID NO: 1154961 - DNA, 15 bp, Homo sapiens
agcataagaaatctg

SEQ ID NO: 1154962 - DNA, 15 bp, Homo sapiens
tagcataagaaatct

SEQ ID NO: 1154963 - DNA, 15 bp, Homo sapiens
atagcataagaaatc

SEQ ID NO: 1154964 - DNA, 15 bp, Homo sapiens
catagcataagaaat

SEQ ID NO: 1154965 - DNA, 15 bp, Homo sapiens
acatagcataagaaa

SEQ ID NO: 1154966 - DNA, 15 bp, Homo sapiens
cacatagcataagaa

SEQ ID NO: 1154967 - DNA, 15 bp, Homo sapiens
tcacatagcataaga

SEQ ID NO: 1154968 - DNA, 15 bp, Homo sapiens
gtcacatagcataag

SEQ ID NO: 1154969 - DNA, 15 bp, Homo sapiens
tgtcacatagcataa

SEQ ID NO: 1154970 - DNA, 15 bp, Homo sapiens
ctgtcacatagcata

SEQ ID NO: 1154971 - DNA, 15 bp, Homo sapiens
tctgtcacatagcat

SEQ ID NO: 1154972 - DNA, 15 bp, Homo sapiens
atctgtcacatagca

SEQ ID NO: 1154973 - DNA, 15 bp, Homo sapiens
aatctgtcacatagc

SEQ ID NO: 1154974 - DNA, 15 bp, Homo sapiens
aaatctgtcacatag

SEQ ID NO: 1154975 - DNA, 15 bp, Homo sapiens
aaaatctgtcacata

SEQ ID NO: 1154976 - DNA, 15 bp, Homo sapiens
gaaaatctgtcacat

SEQ ID NO: 1154977 - DNA, 15 bp, Homo sapiens
tgaaaatctgtcaca

SEQ ID NO: 1154978 - DNA, 15 bp, Homo sapiens
atgaaaatctgtcac

SEQ ID NO: 1154979 - DNA, 15 bp, Homo sapiens
gatgaaaatctgtca

SEQ ID NO: 1154980 - DNA, 15 bp, Homo sapiens
agatgaaaatctgtc

SEQ ID NO: 1154981 - DNA, 15 bp, Homo sapiens
tagatgaaaatctgt

SEQ ID NO: 1154982 - DNA, 15 bp, Homo sapiens
ttagatgaaaatctg

SEQ ID NO: 1154983 - DNA, 15 bp, Homo sapiens
attagatgaaaatct

SEQ ID NO: 1154984 - DNA, 15 bp, Homo sapiens
aattagatgaaaatc

SEQ ID NO: 1154985 - DNA, 15 bp, Homo sapiens
aaattagatgaaaat

SEQ ID NO: 1154986 - DNA, 15 bp, Homo sapiens
taaattagatgaaaa

SEQ ID NO: 1154987 - DNA, 15 bp, Homo sapiens
gtaaattagatgaaa

SEQ ID NO: 1154988 - DNA, 15 bp, Homo sapiens
tgtaaattagatgaa

SEQ ID NO: 1154989 - DNA, 15 bp, Homo sapiens
atgtaaattagatga

SEQ ID NO: 1154990 - DNA, 15 bp, Homo sapiens
aatgtaaattagatg

SEQ ID NO: 1154991 - DNA, 15 bp, Homo sapiens
aaatgtaaattagat

SEQ ID NO: 1154992 - DNA, 15 bp, Homo sapiens
taaatgtaaattaga

SEQ ID NO: 1154993 - DNA, 15 bp, Homo sapiens
ttaaatgtaaattag

SEQ ID NO: 1154994 - DNA, 15 bp, Homo sapiens
gttaaatgtaaatta

SEQ ID NO: 1154995 - DNA, 15 bp, Homo sapiens
agttaaatgtaaatt

SEQ ID NO: 1154996 - DNA, 15 bp, Homo sapiens
aagttaaatgtaaat

SEQ ID NO: 1154997 - DNA, 15 bp, Homo sapiens
aaagttaaatgtaaa

SEQ ID NO: 1154998 - DNA, 15 bp, Homo sapiens
gaaagttaaatgtaa

SEQ ID NO: 1154999 - DNA, 15 bp, Homo sapiens
ggaaagttaaatgta

SEQ ID NO: 1155000 - DNA, 15 bp, Homo sapiens
tggaaagttaaatgt

SEQ ID NO: 1155001 - DNA, 15 bp, Homo sapiens
ttggaaagttaaatg

SEQ ID NO: 1155002 - DNA, 15 bp, Homo sapiens
tttggaaagttaaat

SEQ ID NO: 1155003 - DNA, 15 bp, Homo sapiens
ttttggaaagttaaa

SEQ ID NO: 1155004 - DNA, 15 bp, Homo sapiens
tttttggaaagttaa

SEQ ID NO: 1155005 - DNA, 15 bp, Homo sapiens
atttttggaaagtta

SEQ ID NO: 1155006 - DNA, 15 bp, Homo sapiens
aatttttggaaagtt

SEQ ID NO: 1155007 - DNA, 15 bp, Homo sapiens
aaatttttggaaagt

SEQ ID NO: 1155008 - DNA, 15 bp, Homo sapiens
aaaatttttggaaag

SEQ ID NO: 1155009 - DNA, 15 bp, Homo sapiens
gaaaatttttggaaa

SEQ ID NO: 1155010 - DNA, 15 bp, Homo sapiens
agaaaatttttggaa

SEQ ID NO: 1155011 - DNA, 15 bp, Homo sapiens
tagaaaatttttgga

SEQ ID NO: 1155012 - DNA, 15 bp, Homo sapiens
ttagaaaatttttgg

SEQ ID NO: 1155013 - DNA, 15 bp, Homo sapiens
tttagaaaatttttg

SEQ ID NO: 1155014 - DNA, 15 bp, Homo sapiens
ttttagaaaattttt

SEQ ID NO: 1155015 - DNA, 15 bp, Homo sapiens
cttttagaaaatttt

SEQ ID NO: 1155016 - DNA, 15 bp, Homo sapiens
gcttttagaaaattt

SEQ ID NO: 1155017 - DNA, 15 bp, Homo sapiens
tgcttttagaaaatt

SEQ ID NO: 1155018 - DNA, 15 bp, Homo sapiens
atgcttttagaaaat

SEQ ID NO: 1155019 - DNA, 15 bp, Homo sapiens
aatgcttttagaaaa

SEQ ID NO: 1155020 - DNA, 15 bp, Homo sapiens
taatgcttttagaaa

SEQ ID NO: 1155021 - DNA, 15 bp, Homo sapiens
ataatgcttttagaa

SEQ ID NO: 1155022 - DNA, 15 bp, Homo sapiens
tataatgcttttaga

SEQ ID NO: 1155023 - DNA, 15 bp, Homo sapiens
ttataatgcttttag

SEQ ID NO: 1155024 - DNA, 15 bp, Homo sapiens
gttataatgctttta

SEQ ID NO: 1155025 - DNA, 15 bp, Homo sapiens
agttataatgctttt

SEQ ID NO: 1155026 - DNA, 15 bp, Homo sapiens
cagttataatgcttt

SEQ ID NO: 1155027 - DNA, 15 bp, Homo sapiens
gcagttataatgctt

SEQ ID NO: 1155028 - DNA, 15 bp, Homo sapiens
tgcagttataatgct

SEQ ID NO: 1155029 - DNA, 15 bp, Homo sapiens
atgcagttataatgc

SEQ ID NO: 1155030 - DNA, 15 bp, Homo sapiens
gatgcagttataatg

SEQ ID NO: 1155031 - DNA, 15 bp, Homo sapiens
tgatgcagttataat

SEQ ID NO: 1155032 - DNA, 15 bp, Homo sapiens
atgatgcagttataa

SEQ ID NO: 1155033 - DNA, 15 bp, Homo sapiens
catgatgcagttata

SEQ ID NO: 1155034 - DNA, 15 bp, Homo sapiens
gcatgatgcagttat

SEQ ID NO: 1155035 - DNA, 15 bp, Homo sapiens
tgcatgatgcagtta

SEQ ID NO: 1155036 - DNA, 15 bp, Homo sapiens
ttgcatgatgcagtt

SEQ ID NO: 1155037 - DNA, 15 bp, Homo sapiens
tttgcatgatgcagt

SEQ ID NO: 1155038 - DNA, 15 bp, Homo sapiens
ctttgcatgatgcag

SEQ ID NO: 1155039 - DNA, 15 bp, Homo sapiens
actttgcatgatgca

SEQ ID NO: 1155040 - DNA, 15 bp, Homo sapiens
aactttgcatgatgc

SEQ ID NO: 1155041 - DNA, 15 bp, Homo sapiens
aaactttgcatgatg

SEQ ID NO: 1155042 - DNA, 15 bp, Homo sapiens
taaactttgcatgat

SEQ ID NO: 1155043 - DNA, 15 bp, Homo sapiens
ctaaactttgcatga

SEQ ID NO: 1155044 - DNA, 15 bp, Homo sapiens
tctaaactttgcatg

SEQ ID NO: 1155045 - DNA, 15 bp, Homo sapiens
atctaaactttgcat

SEQ ID NO: 1155046 - DNA, 15 bp, Homo sapiens
tatctaaactttgca

SEQ ID NO: 1155047 - DNA, 15 bp, Homo sapiens
ttatctaaactttgc

SEQ ID NO: 1155048 - DNA, 15 bp, Homo sapiens
gttatctaaactttg

SEQ ID NO: 1155049 - DNA, 15 bp, Homo sapiens
tgttatctaaacttt

SEQ ID NO: 1155050 - DNA, 15 bp, Homo sapiens
gtgttatctaaactt

SEQ ID NO: 1155051 - DNA, 15 bp, Homo sapiens
cgtgttatctaaact

SEQ ID NO: 1155052 - DNA, 15 bp, Homo sapiens
tcgtgttatctaaac

SEQ ID NO: 1155053 - DNA, 15 bp, Homo sapiens
gtcgtgttatctaaa

SEQ ID NO: 1155054 - DNA, 15 bp, Homo sapiens
tgtcgtgttatctaa

SEQ ID NO: 1155055 - DNA, 15 bp, Homo sapiens
ttgtcgtgttatcta

SEQ ID NO: 1155056 - DNA, 15 bp, Homo sapiens
tttgtcgtgttatct

SEQ ID NO: 1155057 - DNA, 15 bp, Homo sapiens
ttttgtcgtgttatc

SEQ ID NO: 1155058 - DNA, 15 bp, Homo sapiens
attttgtcgtgttat

SEQ ID NO: 1155059 - DNA, 15 bp, Homo sapiens
cattttgtcgtgtta

SEQ ID NO: 1155060 - DNA, 15 bp, Homo sapiens
tcattttgtcgtgtt

SEQ ID NO: 1155061 - DNA, 15 bp, Homo sapiens
atcattttgtcgtgt

SEQ ID NO: 1155062 - DNA, 15 bp, Homo sapiens
tatcattttgtcgtg

SEQ ID NO: 1155063 - DNA, 15 bp, Homo sapiens
ttatcattttgtcgt

SEQ ID NO: 1155064 - DNA, 15 bp, Homo sapiens
tttatcattttgtcg

SEQ ID NO: 1155065 - DNA, 15 bp, Homo sapiens
ctttatcattttgtc

SEQ ID NO: 1155066 - DNA, 15 bp, Homo sapiens
tctttatcattttgt

SEQ ID NO: 1155067 - DNA, 15 bp, Homo sapiens
ttctttatcattttg

SEQ ID NO: 1155068 - DNA, 15 bp, Homo sapiens
tttctttatcatttt

SEQ ID NO: 1155069 - DNA, 15 bp, Homo sapiens
ttttctttatcattt

SEQ ID NO: 1155070 - DNA, 15 bp, Homo sapiens
attttctttatcatt

SEQ ID NO: 1155071 - DNA, 15 bp, Homo sapiens
tattttctttatcat

SEQ ID NO: 1155072 - DNA, 15 bp, Homo sapiens
atattttctttatca

SEQ ID NO: 1155073 - DNA, 15 bp, Homo sapiens
catattttctttatc

SEQ ID NO: 1155074 - DNA, 15 bp, Homo sapiens
gcatattttctttat

SEQ ID NO: 1155075 - DNA, 15 bp, Homo sapiens
ggcatattttcttta

SEQ ID NO: 1155076 - DNA, 15 bp, Homo sapiens
gggcatattttcttt

SEQ ID NO: 1155077 - DNA, 15 bp, Homo sapiens
agggcatattttctt

SEQ ID NO: 1155078 - DNA, 15 bp, Homo sapiens
cagggcatattttct

SEQ ID NO: 1155079 - DNA, 15 bp, Homo sapiens
ccagggcatattttc

SEQ ID NO: 1155080 - DNA, 15 bp, Homo sapiens
gccagggcatatttt

SEQ ID NO: 1155081 - DNA, 15 bp, Homo sapiens
agccagggcatattt

SEQ ID NO: 1155082 - DNA, 15 bp, Homo sapiens
aagccagggcatatt

SEQ ID NO: 1155083 - DNA, 15 bp, Homo sapiens
caagccagggcatat

SEQ ID NO: 1155084 - DNA, 15 bp, Homo sapiens
tcaagccagggcata

SEQ ID NO: 1155085 - DNA, 15 bp, Homo sapiens
gtcaagccagggcat

SEQ ID NO: 1155086 - DNA, 15 bp, Homo sapiens
tgtcaagccagggca

SEQ ID NO: 1155087 - DNA, 15 bp, Homo sapiens
atgtcaagccagggc

SEQ ID NO: 1155088 - DNA, 15 bp, Homo sapiens
catgtcaagccaggg

SEQ ID NO: 1155089 - DNA, 15 bp, Homo sapiens
acatgtcaagccagg

SEQ ID NO: 1155090 - DNA, 15 bp, Homo sapiens
gacatgtcaagccag

SEQ ID NO: 1155091 - DNA, 15 bp, Homo sapiens
ggacatgtcaagcca

SEQ ID NO: 1155092 - DNA, 15 bp, Homo sapiens
tggacatgtcaagcc

SEQ ID NO: 1155093 - DNA, 15 bp, Homo sapiens
gtggacatgtcaagc

SEQ ID NO: 1155094 - DNA, 15 bp, Homo sapiens
agtggacatgtcaag

SEQ ID NO: 1155095 - DNA, 15 bp, Homo sapiens
cagtggacatgtcaa

SEQ ID NO: 1155096 - DNA, 15 bp, Homo sapiens
acagtggacatgtca

SEQ ID NO: 1155097 - DNA, 15 bp, Homo sapiens
aacagtggacatgtc

SEQ ID NO: 1155098 - DNA, 15 bp, Homo sapiens
taacagtggacatgt

SEQ ID NO: 1155099 - DNA, 15 bp, Homo sapiens
ataacagtggacatg

SEQ ID NO: 1155100 - DNA, 15 bp, Homo sapiens
gataacagtggacat

SEQ ID NO: 1155101 - DNA, 15 bp, Homo sapiens
tgataacagtggaca

SEQ ID NO: 1155102 - DNA, 15 bp, Homo sapiens
atgataacagtggac

SEQ ID NO: 1155103 - DNA, 15 bp, Homo sapiens
aatgataacagtgga

SEQ ID NO: 1155104 - DNA, 15 bp, Homo sapiens
taatgataacagtgg

SEQ ID NO: 1155105 - DNA, 15 bp, Homo sapiens
ataatgataacagtg

SEQ ID NO: 1155106 - DNA, 15 bp, Homo sapiens
aataatgataacagt

SEQ ID NO: 1155107 - DNA, 15 bp, Homo sapiens
taataatgataacag

SEQ ID NO: 1155108 - DNA, 15 bp, Homo sapiens
ataataatgataaca

SEQ ID NO: 1155109 - DNA, 15 bp, Homo sapiens
tataataatgataac

SEQ ID NO: 1155110 - DNA, 15 bp, Homo sapiens
atataataatgataa

SEQ ID NO: 1155111 - DNA, 15 bp, Homo sapiens
aatataataatgata

SEQ ID NO: 1155112 - DNA, 15 bp, Homo sapiens
aaatataataatgat

SEQ ID NO: 1155113 - DNA, 15 bp, Homo sapiens
aaaatataataatga

SEQ ID NO: 1155114 - DNA, 15 bp, Homo sapiens
aaaaatataataatg

SEQ ID NO: 1155115 - DNA, 15 bp, Homo sapiens
taaaaatataataat

SEQ ID NO: 1155116 - DNA, 15 bp, Homo sapiens
ctaaaaatataataa

SEQ ID NO: 1155117 - DNA, 15 bp, Homo sapiens
actaaaaatataata

SEQ ID NO: 1155118 - DNA, 15 bp, Homo sapiens
gactaaaaatataat

SEQ ID NO: 1155119 - DNA, 15 bp, Homo sapiens
agactaaaaatataa

SEQ ID NO: 1155120 - DNA, 15 bp, Homo sapiens
aagactaaaaatata

SEQ ID NO: 1155121 - DNA, 15 bp, Homo sapiens
aaagactaaaaatat

SEQ ID NO: 1155122 - DNA, 15 bp, Homo sapiens
aaaagactaaaaata

SEQ ID NO: 1155123 - DNA, 15 bp, Homo sapiens
taaaagactaaaaat

SEQ ID NO: 1155124 - DNA, 15 bp, Homo sapiens
gtaaaagactaaaaa

SEQ ID NO: 1155125 - DNA, 15 bp, Homo sapiens
agtaaaagactaaaa

SEQ ID NO: 1155126 - DNA, 15 bp, Homo sapiens
aagtaaaagactaaa

SEQ ID NO: 1155127 - DNA, 15 bp, Homo sapiens
gaagtaaaagactaa

SEQ ID NO: 1155128 - DNA, 15 bp, Homo sapiens
tgaagtaaaagacta

SEQ ID NO: 1155129 - DNA, 15 bp, Homo sapiens
atgaagtaaaagact

SEQ ID NO: 1155130 - DNA, 15 bp, Homo sapiens
aatgaagtaaaagac

SEQ ID NO: 1155131 - DNA, 15 bp, Homo sapiens
aaatgaagtaaaaga

SEQ ID NO: 1155132 - DNA, 15 bp, Homo sapiens
aaaatgaagtaaaag

SEQ ID NO: 1155133 - DNA, 15 bp, Homo sapiens
gaaaaatgaagtaaa

SEQ ID NO: 1155134 - DNA, 15 bp, Homo sapiens
tgaaaaatgaagtaa

SEQ ID NO: 1155135 - DNA, 15 bp, Homo sapiens
atgaaaaatgaagta

SEQ ID NO: 1155136 - DNA, 15 bp, Homo sapiens
gatgaaaaatgaagt

SEQ ID NO: 1155137 - DNA, 15 bp, Homo sapiens
ggatgaaaaatgaag

SEQ ID NO: 1155138 - DNA, 15 bp, Homo sapiens
aggatgaaaaatgaa

SEQ ID NO: 1155139 - DNA, 15 bp, Homo sapiens
caggatgaaaaatga

SEQ ID NO: 1155140 - DNA, 15 bp, Homo sapiens
acaggatgaaaaatg

SEQ ID NO: 1155141 - DNA, 15 bp, Homo sapiens
tacaggatgaaaaat

SEQ ID NO: 1155142 - DNA, 15 bp, Homo sapiens
atacaggatgaaaaa

SEQ ID NO: 1155143 - DNA, 15 bp, Homo sapiens
aatacaggatgaaaa

SEQ ID NO: 1155144 - DNA, 15 bp, Homo sapiens
aaatacaggatgaaa

SEQ ID NO: 1155145 - DNA, 15 bp, Homo sapiens
aaaatacaggatgaa

SEQ ID NO: 1155146 - DNA, 15 bp, Homo sapiens
taaaatacaggatga

SEQ ID NO: 1155147 - DNA, 15 bp, Homo sapiens
ataaaatacaggatg

SEQ ID NO: 1155148 - DNA, 15 bp, Homo sapiens
gataaaatacaggat

SEQ ID NO: 1155149 - DNA, 15 bp, Homo sapiens
agataaaatacagga

SEQ ID NO: 1155150 - DNA, 15 bp, Homo sapiens
cagataaaatacagg

SEQ ID NO: 1155151 - DNA, 15 bp, Homo sapiens
ccagataaaatacag

SEQ ID NO: 1155152 - DNA, 15 bp, Homo sapiens
gccagataaaataca

SEQ ID NO: 1155153 - DNA, 15 bp, Homo sapiens
tgccagataaaatac

SEQ ID NO: 1155154 - DNA, 15 bp, Homo sapiens
ttgccagataaaata

SEQ ID NO: 1155155 - DNA, 15 bp, Homo sapiens
gttgccagataaaat

SEQ ID NO: 1155156 - DNA, 15 bp, Homo sapiens
ggttgccagataaaa

SEQ ID NO: 1155157 - DNA, 15 bp, Homo sapiens
gggttgccagataaa

SEQ ID NO: 1155158 - DNA, 15 bp, Homo sapiens
agggttgccagataa

SEQ ID NO: 1155159 - DNA, 15 bp, Homo sapiens
tagggttgccagata

SEQ ID NO: 1155160 - DNA, 15 bp, Homo sapiens
ttagggttgccagat

SEQ ID NO: 1155161 - DNA, 15 bp, Homo sapiens
attagggttgccaga

SEQ ID NO: 1155162 - DNA, 15 bp, Homo sapiens
aattagggttgccag

SEQ ID NO: 1155163 - DNA, 15 bp, Homo sapiens
taattagggttgcca

SEQ ID NO: 1155164 - DNA, 15 bp, Homo sapiens
gtaattagggttgcc

SEQ ID NO: 1155165 - DNA, 15 bp, Homo sapiens
tgtaattagggttgc

SEQ ID NO: 1155166 - DNA, 15 bp, Homo sapiens
atgtaattagggttg

SEQ ID NO: 1155167 - DNA, 15 bp, Homo sapiens
tatgtaattagggtt

SEQ ID NO: 1155168 - DNA, 15 bp, Homo sapiens
ttatgtaattagggt

SEQ ID NO: 1155169 - DNA, 15 bp, Homo sapiens
tttatgtaattaggg

SEQ ID NO: 1155170 - DNA, 15 bp, Homo sapiens
ttttatgtaattagg

SEQ ID NO: 1155171 - DNA, 15 bp, Homo sapiens
gttttatgtaattag

SEQ ID NO: 1155172 - DNA, 15 bp, Homo sapiens
agttttatgtaatta

SEQ ID NO: 1155173 - DNA, 15 bp, Homo sapiens
tagttttatgtaatt

SEQ ID NO: 1155174 - DNA, 15 bp, Homo sapiens
ttagttttatgtaat

SEQ ID NO: 1155175 - DNA, 15 bp, Homo sapiens
attagttttatgtaa

SEQ ID NO: 1155176 - DNA, 15 bp, Homo sapiens
tattagttttatgta

SEQ ID NO: 1155177 - DNA, 15 bp, Homo sapiens
gtattagttttatgt

SEQ ID NO: 1155178 - DNA, 15 bp, Homo sapiens
tgtattagttttatg

SEQ ID NO: 1155179 - DNA, 15 bp, Homo sapiens
ctgtattagttttat

SEQ ID NO: 1155180 - DNA, 15 bp, Homo sapiens
tctgtattagtttta

SEQ ID NO: 1155181 - DNA, 15 bp, Homo sapiens
gtctgtattagtttt

SEQ ID NO: 1155182 - DNA, 15 bp, Homo sapiens
agtctgtattagttt

SEQ ID NO: 1155183 - DNA, 15 bp, Homo sapiens
cagtctgtattagtt

SEQ ID NO: 1155184 - DNA, 15 bp, Homo sapiens
gcagtctgtattagt

SEQ ID NO: 1155185 - DNA, 15 bp, Homo sapiens
tgcagtctgtattag

SEQ ID NO: 1155186 - DNA, 15 bp, Homo sapiens
ttgcagtctgtatta

SEQ ID NO: 1155187 - DNA, 15 bp, Homo sapiens
attgcagtctgtatt

SEQ ID NO: 1155188 - DNA, 15 bp, Homo sapiens
tattgcagtctgtat

SEQ ID NO: 1155189 - DNA, 15 bp, Homo sapiens
atattgcagtctgta

SEQ ID NO: 1155190 - DNA, 15 bp, Homo sapiens
gatattgcagtctgt

SEQ ID NO: 1155191 - DNA, 15 bp, Homo sapiens
agatattgcagtctg

SEQ ID NO: 1155192 - DNA, 15 bp, Homo sapiens
tagatattgcagtct

SEQ ID NO: 1155193 - DNA, 15 bp, Homo sapiens
ttagatattgcagtc

SEQ ID NO: 1155194 - DNA, 15 bp, Homo sapiens
gttagatattgcagt

SEQ ID NO: 1155195 - DNA, 15 bp, Homo sapiens
ggttagatattgcag

SEQ ID NO: 1155196 - DNA, 15 bp, Homo sapiens
aggttagatattgca

SEQ ID NO: 1155197 - DNA, 15 bp, Homo sapiens
aaggttagatattgc

SEQ ID NO: 1155198 - DNA, 15 bp, Homo sapiens
aaaggttagatattg

SEQ ID NO: 1155199 - DNA, 15 bp, Homo sapiens
taaaggttagatatt

SEQ ID NO: 1155200 - DNA, 15 bp, Homo sapiens
ttaaaggttagatat

SEQ ID NO: 1155201 - DNA, 15 bp, Homo sapiens
tttaaaggttagata

SEQ ID NO: 1155202 - DNA, 15 bp, Homo sapiens
ttttaaaggttagat

SEQ ID NO: 1155203 - DNA, 15 bp, Homo sapiens
gttttaaaggttaga

SEQ ID NO: 1155204 - DNA, 15 bp, Homo sapiens
tgttttaaaggttag

SEQ ID NO: 1155205 - DNA, 15 bp, Homo sapiens
gtgttttaaaggtta

SEQ ID NO: 1155206 - DNA, 15 bp, Homo sapiens
tgtgttttaaaggtt

SEQ ID NO: 1155207 - DNA, 15 bp, Homo sapiens
gtgtgttttaaaggt

SEQ ID NO: 1155208 - DNA, 15 bp, Homo sapiens
tgtgtgttttaaagg

SEQ ID NO: 1155209 - DNA, 15 bp, Homo sapiens
atgtgtgttttaaag

SEQ ID NO: 1155210 - DNA, 15 bp, Homo sapiens
catgtgtgttttaaa

SEQ ID NO: 1155211 - DNA, 15 bp, Homo sapiens
ccatgtgtgttttaa

SEQ ID NO: 1155212 - DNA, 15 bp, Homo sapiens
cccatgtgtgtttta

SEQ ID NO: 1155213 - DNA, 15 bp, Homo sapiens
gcccatgtgtgtttt

SEQ ID NO: 1155214 - DNA, 15 bp, Homo sapiens
ggcccatgtgtgttt

SEQ ID NO: 1155215 - DNA, 15 bp, Homo sapiens
aggcccatgtgtgtt

SEQ ID NO: 1155216 - DNA, 15 bp, Homo sapiens
gaggcccatgtgtgt

SEQ ID NO: 1155217 - DNA, 15 bp, Homo sapiens
ggaggcccatgtgtg

SEQ ID NO: 1155218 - DNA, 15 bp, Homo sapiens
gggaggcccatgtgt

SEQ ID NO: 1155219 - DNA, 15 bp, Homo sapiens
tgggaggcccatgtg

SEQ ID NO: 1155220 - DNA, 15 bp, Homo sapiens
ctgggaggcccatgt

SEQ ID NO: 1155221 - DNA, 15 bp, Homo sapiens
gctgggaggcccatg

SEQ ID NO: 1155222 - DNA, 15 bp, Homo sapiens
tgctgggaggcccat

SEQ ID NO: 1155223 - DNA, 15 bp, Homo sapiens
gtgctgggaggccca

SEQ ID NO: 1155224 - DNA, 15 bp, Homo sapiens
agtgctgggaggccc

SEQ ID NO: 1155225 - DNA, 15 bp, Homo sapiens
aagtgctgggaggcc

SEQ ID NO: 1155226 - DNA, 15 bp, Homo sapiens
aaagtgctgggaggc

SEQ ID NO: 1155227 - DNA, 15 bp, Homo sapiens
caaagtgctgggagg

SEQ ID NO: 1155228 - DNA, 15 bp, Homo sapiens
tcaaagtgctgggag

SEQ ID NO: 1155229 - DNA, 15 bp, Homo sapiens
ggcctctcaaagtgc

SEQ ID NO: 1155230 - DNA, 15 bp, Homo sapiens
ggccttggcctctca

SEQ ID NO: 1155231 - DNA, 15 bp, Homo sapiens
cggccttggcctctc

SEQ ID NO: 1155232 - DNA, 15 bp, Homo sapiens
ccggccttggcctct

SEQ ID NO: 1155233 - DNA, 15 bp, Homo sapiens
ctccggccttggcct

SEQ ID NO: 1155234 - DNA, 15 bp, Homo sapiens
cctccggccttggcc

SEQ ID NO: 1155235 - DNA, 15 bp, Homo sapiens
tcctccggccttggc

SEQ ID NO: 1155236 - DNA, 15 bp, Homo sapiens
atcctccggccttgg

SEQ ID NO: 1155237 - DNA, 15 bp, Homo sapiens
gatcctccggccttg

SEQ ID NO: 1155238 - DNA, 15 bp, Homo sapiens
tgatcctccggcctt

SEQ ID NO: 1155239 - DNA, 15 bp, Homo sapiens
gtgatcctccggcct

SEQ ID NO: 1155240 - DNA, 15 bp, Homo sapiens
ggtgatcctccggcc

SEQ ID NO: 1155241 - DNA, 15 bp, Homo sapiens
aggtgatcctccggc

SEQ ID NO: 1155242 - DNA, 15 bp, Homo sapiens
caggtgatcctccgg

SEQ ID NO: 1155243 - DNA, 15 bp, Homo sapiens
tcaggtgatcctccg

SEQ ID NO: 1155244 - DNA, 15 bp, Homo sapiens
ttggtcttgaactcc

SEQ ID NO: 1155245 - DNA, 15 bp, Homo sapiens
gttggtcttgaactc

SEQ ID NO: 1155246 - DNA, 15 bp, Homo sapiens
agttggtcttgaact

SEQ ID NO: 1155247 - DNA, 15 bp, Homo sapiens
aagttggtcttgaac

SEQ ID NO: 1155248 - DNA, 15 bp, Homo sapiens
caagttggtcttgaa

SEQ ID NO: 1155249 - DNA, 15 bp, Homo sapiens
ccaagttggtcttga

SEQ ID NO: 1155250 - DNA, 15 bp, Homo sapiens
gccaagttggtcttg

SEQ ID NO: 1155251 - DNA, 15 bp, Homo sapiens
agccaagttggtctt

SEQ ID NO: 1155252 - DNA, 15 bp, Homo sapiens
tagccaagttggtct

SEQ ID NO: 1155253 - DNA, 15 bp, Homo sapiens
ttagccaagttggtc

SEQ ID NO: 1155254 - DNA, 15 bp, Homo sapiens
gttagccaagttggt

SEQ ID NO: 1155255 - DNA, 15 bp, Homo sapiens
tgttagccaagttgg

SEQ ID NO: 1155256 - DNA, 15 bp, Homo sapiens
atgttagccaagttg

SEQ ID NO: 1155257 - DNA, 15 bp, Homo sapiens
tatgttagccaagtt

SEQ ID NO: 1155258 - DNA, 15 bp, Homo sapiens
ctatgttagccaagt

SEQ ID NO: 1155259 - DNA, 15 bp, Homo sapiens
actatgttagccaag

SEQ ID NO: 1155260 - DNA, 15 bp, Homo sapiens
cactatgttagccaa

SEQ ID NO: 1155261 - DNA, 15 bp, Homo sapiens
tggggtttcactatg

SEQ ID NO: 1155262 - DNA, 15 bp, Homo sapiens
atggggtttcactat

SEQ ID NO: 1155263 - DNA, 15 bp, Homo sapiens
gatggggtttcacta

SEQ ID NO: 1155264 - DNA, 15 bp, Homo sapiens
tattttttgtatttt

SEQ ID NO: 1155265 - DNA, 15 bp, Homo sapiens
ctattttttgtattt

SEQ ID NO: 1155266 - DNA, 15 bp, Homo sapiens
gctattttttgtatt

SEQ ID NO: 1155267 - DNA, 15 bp, Homo sapiens
ggctattttttgtat

SEQ ID NO: 1155268 - DNA, 15 bp, Homo sapiens
tggctattttttgta

SEQ ID NO: 1155269 - DNA, 15 bp, Homo sapiens
ctggctattttttgt

SEQ ID NO: 1155270 - DNA, 15 bp, Homo sapiens
cctggctattttttg

SEQ ID NO: 1155271 - DNA, 15 bp, Homo sapiens
gcctggctatttttt

SEQ ID NO: 1155272 - DNA, 15 bp, Homo sapiens
tgcctggctattttt

SEQ ID NO: 1155273 - DNA, 15 bp, Homo sapiens
atgcctggctatttt

SEQ ID NO: 1155274 - DNA, 15 bp, Homo sapiens
catgcctggctattt

SEQ ID NO: 1155275 - DNA, 15 bp, Homo sapiens
ccatgcctggctatt

SEQ ID NO: 1155276 - DNA, 15 bp, Homo sapiens
accatgcctggctat

SEQ ID NO: 1155277 - DNA, 15 bp, Homo sapiens
aggatctcggctcac

SEQ ID NO: 1155278 - DNA, 15 bp, Homo sapiens
caggatctcggctca

SEQ ID NO: 1155279 - DNA, 15 bp, Homo sapiens
tggcaggatctcggc

SEQ ID NO: 1155280 - DNA, 15 bp, Homo sapiens
gtggcaggatctcgg

SEQ ID NO: 1155281 - DNA, 15 bp, Homo sapiens
agtggcaggatctcg

SEQ ID NO: 1155282 - DNA, 15 bp, Homo sapiens
cgcagtggcaggatc

SEQ ID NO: 1155283 - DNA, 15 bp, Homo sapiens
gcgcagtggcaggat

SEQ ID NO: 1155284 - DNA, 15 bp, Homo sapiens
agcgcagtggcagga

SEQ ID NO: 1155285 - DNA, 15 bp, Homo sapiens
gagcgcagtggcagg

SEQ ID NO: 1155286 - DNA, 15 bp, Homo sapiens
ggagcgcagtggcag

SEQ ID NO: 1155287 - DNA, 15 bp, Homo sapiens
tggagcgcagtggca

SEQ ID NO: 1155288 - DNA, 15 bp, Homo sapiens
ctggagcgcagtggc

SEQ ID NO: 1155289 - DNA, 15 bp, Homo sapiens
gctggagcgcagtgg

SEQ ID NO: 1155290 - DNA, 15 bp, Homo sapiens
ggctggagcgcagtg

SEQ ID NO: 1155291 - DNA, 15 bp, Homo sapiens
aggctggagcgcagt

SEQ ID NO: 1155292 - DNA, 15 bp, Homo sapiens
caggctggagcgcag

SEQ ID NO: 1155293 - DNA, 15 bp, Homo sapiens
ccccaggctggagcg

SEQ ID NO: 1155294 - DNA, 15 bp, Homo sapiens
cccccaggctggagc

SEQ ID NO: 1155295 - DNA, 15 bp, Homo sapiens
ctgtcccccaggctg

SEQ ID NO: 1155296 - DNA, 15 bp, Homo sapiens
cctgtcccccaggct

SEQ ID NO: 1155297 - DNA, 15 bp, Homo sapiens
tcctgtcccccaggc

SEQ ID NO: 1155298 - DNA, 15 bp, Homo sapiens
ctcctgtcccccagg

SEQ ID NO: 1155299 - DNA, 15 bp, Homo sapiens
gctcctgtcccccag

SEQ ID NO: 1155300 - DNA, 15 bp, Homo sapiens
tgctcctgtccccca

SEQ ID NO: 1155301 - DNA, 15 bp, Homo sapiens
ttgctcctgtccccc

SEQ ID NO: 1155302 - DNA, 15 bp, Homo sapiens
cttgctcctgtcccc

SEQ ID NO: 1155303 - DNA, 15 bp, Homo sapiens
tcttgctcctgtccc

SEQ ID NO: 1155304 - DNA, 15 bp, Homo sapiens
gtcttgctcctgtcc

SEQ ID NO: 1155305 - DNA, 15 bp, Homo sapiens
agtcttgctcctgtc

SEQ ID NO: 1155306 - DNA, 15 bp, Homo sapiens
gagtcttgctcctgt

SEQ ID NO: 1155307 - DNA, 15 bp, Homo sapiens
ggagtcttgctcctg

SEQ ID NO: 1155308 - DNA, 15 bp, Homo sapiens
tggagtcttgctcct

SEQ ID NO: 1155309 - DNA, 15 bp, Homo sapiens
gttgttttttttttt

SEQ ID NO: 1155310 - DNA, 15 bp, Homo sapiens
tgttgtttttttttt

SEQ ID NO: 1155311 - DNA, 15 bp, Homo sapiens
ttgttgttttttttt

SEQ ID NO: 1155312 - DNA, 15 bp, Homo sapiens
gttgttgtttttttt

SEQ ID NO: 1155313 - DNA, 15 bp, Homo sapiens
tgttgttgttttttt

SEQ ID NO: 1155314 - DNA, 15 bp, Homo sapiens
ttgttgttgtttttt

SEQ ID NO: 1155315 - DNA, 15 bp, Homo sapiens
gttgttgttgttttt

SEQ ID NO: 1155316 - DNA, 15 bp, Homo sapiens
gttttttgttgttgt

SEQ ID NO: 1155317 - DNA, 15 bp, Homo sapiens
ggttttttgttgttg

SEQ ID NO: 1155318 - DNA, 15 bp, Homo sapiens
aggttttttgttgtt

SEQ ID NO: 1155319 - DNA, 15 bp, Homo sapiens
taggttttttgttgt

SEQ ID NO: 1155320 - DNA, 15 bp, Homo sapiens
ttaggttttttgttg

SEQ ID NO: 1155321 - DNA, 15 bp, Homo sapiens
gttaggttttttgtt

SEQ ID NO: 1155322 - DNA, 15 bp, Homo sapiens
agttaggttttttgt

SEQ ID NO: 1155323 - DNA, 15 bp, Homo sapiens
tagttaggttttttg

SEQ ID NO: 1155324 - DNA, 15 bp, Homo sapiens
gtagttaggtttttt

SEQ ID NO: 1155325 - DNA, 15 bp, Homo sapiens
agtagttaggttttt

SEQ ID NO: 1155326 - DNA, 15 bp, Homo sapiens
cagtagttaggtttt

SEQ ID NO: 1155327 - DNA, 15 bp, Homo sapiens
acagtagttaggttt

SEQ ID NO: 1155328 - DNA, 15 bp, Homo sapiens
tacagtagttaggtt

SEQ ID NO: 1155329 - DNA, 15 bp, Homo sapiens
atacagtagttaggt

SEQ ID NO: 1155330 - DNA, 15 bp, Homo sapiens
aatacagtagttagg

SEQ ID NO: 1155331 - DNA, 15 bp, Homo sapiens
aaatacagtagttag

SEQ ID NO: 1155332 - DNA, 15 bp, Homo sapiens
aaaatacagtagtta

SEQ ID NO: 1155333 - DNA, 15 bp, Homo sapiens
taaaatacagtagtt

SEQ ID NO: 1155334 - DNA, 15 bp, Homo sapiens
ttaaaatacagtagt

SEQ ID NO: 1155335 - DNA, 15 bp, Homo sapiens
attaaaatacagtag

SEQ ID NO: 1155336 - DNA, 15 bp, Homo sapiens
gattaaaatacagta

SEQ ID NO: 1155337 - DNA, 15 bp, Homo sapiens
tgattaaaatacagt

SEQ ID NO: 1155338 - DNA, 15 bp, Homo sapiens
ctgattaaaatacag

SEQ ID NO: 1155339 - DNA, 15 bp, Homo sapiens
cctgattaaaataca

SEQ ID NO: 1155340 - DNA, 15 bp, Homo sapiens
acctgattaaaatac

SEQ ID NO: 1155341 - DNA, 15 bp, Homo sapiens
gacctgattaaaata

SEQ ID NO: 1155342 - DNA, 15 bp, Homo sapiens
agacctgattaaaat

SEQ ID NO: 1155343 - DNA, 15 bp, Homo sapiens
aagacctgattaaaa

SEQ ID NO: 1155344 - DNA, 15 bp, Homo sapiens
caagacctgattaaa

SEQ ID NO: 1155345 - DNA, 15 bp, Homo sapiens
gcaagacctgattaa

SEQ ID NO: 1155346 - DNA, 15 bp, Homo sapiens
ggcaagacctgatta

SEQ ID NO: 1155347 - DNA, 15 bp, Homo sapiens
tggcaagacctgatt

SEQ ID NO: 1155348 - DNA, 15 bp, Homo sapiens
ttggcaagacctgat

SEQ ID NO: 1155349 - DNA, 15 bp, Homo sapiens
cttggcaagacctga

SEQ ID NO: 1155350 - DNA, 15 bp, Homo sapiens
tcttggcaagacctg

SEQ ID NO: 1155351 - DNA, 15 bp, Homo sapiens
ttcttggcaagacct

SEQ ID NO: 1155352 - DNA, 15 bp, Homo sapiens
tttcttggcaagacc

SEQ ID NO: 1155353 - DNA, 15 bp, Homo sapiens
atttcttggcaagac

SEQ ID NO: 1155354 - DNA, 15 bp, Homo sapiens
tatttcttggcaaga

SEQ ID NO: 1155355 - DNA, 15 bp, Homo sapiens
atatttcttggcaag

SEQ ID NO: 1155356 - DNA, 15 bp, Homo sapiens
aatatttcttggcaa

SEQ ID NO: 1155357 - DNA, 15 bp, Homo sapiens
caatatttcttggca

SEQ ID NO: 1155358 - DNA, 15 bp, Homo sapiens
gcaatatttcttggc

SEQ ID NO: 1155359 - DNA, 15 bp, Homo sapiens
agcaatatttcttgg

SEQ ID NO: 1155360 - DNA, 15 bp, Homo sapiens
cagcaatatttcttg

SEQ ID NO: 1155361 - DNA, 15 bp, Homo sapiens
acagcaatatttctt

SEQ ID NO: 1155362 - DNA, 15 bp, Homo sapiens
aacagcaatatttct

SEQ ID NO: 1155363 - DNA, 15 bp, Homo sapiens
gaacagcaatatttc

SEQ ID NO: 1155364 - DNA, 15 bp, Homo sapiens
ggaacagcaatattt

SEQ ID NO: 1155365 - DNA, 15 bp, Homo sapiens
aggaacagcaatatt

SEQ ID NO: 1155366 - DNA, 15 bp, Homo sapiens
aaggaacagcaatat

SEQ ID NO: 1155367 - DNA, 15 bp, Homo sapiens
taaggaacagcaata

SEQ ID NO: 1155368 - DNA, 15 bp, Homo sapiens
gtaaggaacagcaat

SEQ ID NO: 1155369 - DNA, 15 bp, Homo sapiens
agtaaggaacagcaa

SEQ ID NO: 1155370 - DNA, 15 bp, Homo sapiens
cagtaaggaacagca

SEQ ID NO: 1155371 - DNA, 15 bp, Homo sapiens
gcagtaaggaacagc

SEQ ID NO: 1155372 - DNA, 15 bp, Homo sapiens
ggcagtaaggaacag

SEQ ID NO: 1155373 - DNA, 15 bp, Homo sapiens
tggcagtaaggaaca

SEQ ID NO: 1155374 - DNA, 15 bp, Homo sapiens
ttggcagtaaggaac

SEQ ID NO: 1155375 - DNA, 15 bp, Homo sapiens
gttggcagtaaggaa

SEQ ID NO: 1155376 - DNA, 15 bp, Homo sapiens
agttggcagtaagga

SEQ ID NO: 1155377 - DNA, 15 bp, Homo sapiens
gagttggcagtaagg

SEQ ID NO: 1155378 - DNA, 15 bp, Homo sapiens
agagttggcagtaag

SEQ ID NO: 1155379 - DNA, 15 bp, Homo sapiens
gagagttggcagtaa

SEQ ID NO: 1155380 - DNA, 15 bp, Homo sapiens
ggagagttggcagta

SEQ ID NO: 1155381 - DNA, 15 bp, Homo sapiens
tggagagttggcagt

SEQ ID NO: 1155382 - DNA, 15 bp, Homo sapiens
ttggagagttggcag

SEQ ID NO: 1155383 - DNA, 15 bp, Homo sapiens
cttggagagttggca

SEQ ID NO: 1155384 - DNA, 15 bp, Homo sapiens
tcttggagagttggc

SEQ ID NO: 1155385 - DNA, 15 bp, Homo sapiens
ttcttggagagttgg

SEQ ID NO: 1155386 - DNA, 15 bp, Homo sapiens
tttcttggagagttg

SEQ ID NO: 1155387 - DNA, 15 bp, Homo sapiens
gtttcttggagagtt

SEQ ID NO: 1155388 - DNA, 15 bp, Homo sapiens
agtttcttggagagt

SEQ ID NO: 1155389 - DNA, 15 bp, Homo sapiens
cagtttcttggagag

SEQ ID NO: 1155390 - DNA, 15 bp, Homo sapiens
ccagtttcttggaga

SEQ ID NO: 1155391 - DNA, 15 bp, Homo sapiens
tccagtttcttggag

SEQ ID NO: 1155392 - DNA, 15 bp, Homo sapiens
ttccagtttcttgga

SEQ ID NO: 1155393 - DNA, 15 bp, Homo sapiens
gttccagtttcttgg

SEQ ID NO: 1155394 - DNA, 15 bp, Homo sapiens
agttccagtttcttg

SEQ ID NO: 1155395 - DNA, 15 bp, Homo sapiens
cagttccagtttctt

SEQ ID NO: 1155396 - DNA, 15 bp, Homo sapiens
gcagttccagtttct

SEQ ID NO: 1155397 - DNA, 15 bp, Homo sapiens
ggcagttccagtttc

SEQ ID NO: 1155398 - DNA, 15 bp, Homo sapiens
aggcagttccagttt

SEQ ID NO: 1155399 - DNA, 15 bp, Homo sapiens
gaggcagttccagtt

SEQ ID NO: 1155400 - DNA, 15 bp, Homo sapiens
ggaggcagttccagt

SEQ ID NO: 1155401 - DNA, 15 bp, Homo sapiens
aggaggcagttccag

SEQ ID NO: 1155402 - DNA, 15 bp, Homo sapiens
taggaggcagttcca

SEQ ID NO: 1155403 - DNA, 15 bp, Homo sapiens
ataggaggcagttcc

SEQ ID NO: 1155404 - DNA, 15 bp, Homo sapiens
aataggaggcagttc

SEQ ID NO: 1155405 - DNA, 15 bp, Homo sapiens
aaataggaggcagtt

SEQ ID NO: 1155406 - DNA, 15 bp, Homo sapiens
aaaataggaggcagt

SEQ ID NO: 1155407 - DNA, 15 bp, Homo sapiens
caaaataggaggcag

SEQ ID NO: 1155408 - DNA, 15 bp, Homo sapiens
ccaaaataggaggca

SEQ ID NO: 1155409 - DNA, 15 bp, Homo sapiens
accaaaataggaggc

SEQ ID NO: 1155410 - DNA, 15 bp, Homo sapiens
aaccaaaataggagg

SEQ ID NO: 1155411 - DNA, 15 bp, Homo sapiens
aaaccaaaataggag

SEQ ID NO: 1155412 - DNA, 15 bp, Homo sapiens
taaaccaaaatagga

SEQ ID NO: 1155413 - DNA, 15 bp, Homo sapiens
ataaaccaaaatagg

SEQ ID NO: 1155414 - DNA, 15 bp, Homo sapiens
cataaaccaaaatag

SEQ ID NO: 1155415 - DNA, 15 bp, Homo sapiens
gcataaaccaaaata

SEQ ID NO: 1155416 - DNA, 15 bp, Homo sapiens
tgcataaaccaaaat

SEQ ID NO: 1155417 - DNA, 15 bp, Homo sapiens
ctgcataaaccaaaa

SEQ ID NO: 1155418 - DNA, 15 bp, Homo sapiens
tctgcataaaccaaa

SEQ ID NO: 1155419 - DNA, 15 bp, Homo sapiens
gtctgcataaaccaa

SEQ ID NO: 1155420 - DNA, 15 bp, Homo sapiens
agtctgcataaacca

SEQ ID NO: 1155421 - DNA, 15 bp, Homo sapiens
cagtctgcataaacc

SEQ ID NO: 1155422 - DNA, 15 bp, Homo sapiens
acagtctgcataaac

SEQ ID NO: 1155423 - DNA, 15 bp, Homo sapiens
cacagtctgcataaa

SEQ ID NO: 1155424 - DNA, 15 bp, Homo sapiens
acacagtctgcataa

SEQ ID NO: 1155425 - DNA, 15 bp, Homo sapiens
gacacagtctgcata

SEQ ID NO: 1155426 - DNA, 15 bp, Homo sapiens
agacacagtctgcat

SEQ ID NO: 1155427 - DNA, 15 bp, Homo sapiens
aagacacagtctgca

SEQ ID NO: 1155428 - DNA, 15 bp, Homo sapiens
caagacacagtctgc

SEQ ID NO: 1155429 - DNA, 15 bp, Homo sapiens
ccaagacacagtctg

SEQ ID NO: 1155430 - DNA, 15 bp, Homo sapiens
gccaagacacagtct

SEQ ID NO: 1155431 - DNA, 15 bp, Homo sapiens
tgccaagacacagtc

SEQ ID NO: 1155432 - DNA, 15 bp, Homo sapiens
ttgccaagacacagt

SEQ ID NO: 1155433 - DNA, 15 bp, Homo sapiens
tttgccaagacacag

SEQ ID NO: 1155434 - DNA, 15 bp, Homo sapiens
gtttgccaagacaca

SEQ ID NO: 1155435 - DNA, 15 bp, Homo sapiens
agtttgccaagacac

SEQ ID NO: 1155436 - DNA, 15 bp, Homo sapiens
cagtttgccaagaca

SEQ ID NO: 1155437 - DNA, 15 bp, Homo sapiens
ccagtttgccaagac

SEQ ID NO: 1155438 - DNA, 15 bp, Homo sapiens
tccagtttgccaaga

SEQ ID NO: 1155439 - DNA, 15 bp, Homo sapiens
ttccagtttgccaag

SEQ ID NO: 1155440 - DNA, 15 bp, Homo sapiens
cttccagtttgccaa

SEQ ID NO: 1155441 - DNA, 15 bp, Homo sapiens
tcttccagtttgcca

SEQ ID NO: 1155442 - DNA, 15 bp, Homo sapiens
ttcttccagtttgcc

SEQ ID NO: 1155443 - DNA, 15 bp, Homo sapiens
tttcttccagtttgc

SEQ ID NO: 1155444 - DNA, 15 bp, Homo sapiens
ttttcttccagtttg

SEQ ID NO: 1155445 - DNA, 15 bp, Homo sapiens
tttttcttccagttt

SEQ ID NO: 1155446 - DNA, 15 bp, Homo sapiens
ctttttcttccagtt

SEQ ID NO: 1155447 - DNA, 15 bp, Homo sapiens
cctttttcttccagt

SEQ ID NO: 1155448 - DNA, 15 bp, Homo sapiens
tcctttttcttccag

SEQ ID NO: 1155449 - DNA, 15 bp, Homo sapiens
atcctttttcttcca

SEQ ID NO: 1155450 - DNA, 15 bp, Homo sapiens
gatcctttttcttcc

SEQ ID NO: 1155451 - DNA, 15 bp, Homo sapiens
ggatcctttttcttc

SEQ ID NO: 1155452 - DNA, 15 bp, Homo sapiens
aggatcctttttctt

SEQ ID NO: 1155453 - DNA, 15 bp, Homo sapiens
taggatcctttttct

SEQ ID NO: 1155454 - DNA, 15 bp, Homo sapiens
ttaggatcctttttc

SEQ ID NO: 1155455 - DNA, 15 bp, Homo sapiens
attaggatccttttt

SEQ ID NO: 1155456 - DNA, 15 bp, Homo sapiens
tattaggatcctttt

SEQ ID NO: 1155457 - DNA, 15 bp, Homo sapiens
ttattaggatccttt

SEQ ID NO: 1155458 - DNA, 15 bp, Homo sapiens
cttattaggatcctt

SEQ ID NO: 1155459 - DNA, 15 bp, Homo sapiens
acttattaggatcct

SEQ ID NO: 1155460 - DNA, 15 bp, Homo sapiens
tacttattaggatcc

SEQ ID NO: 1155461 - DNA, 15 bp, Homo sapiens
atacttattaggatc

SEQ ID NO: 1155462 - DNA, 15 bp, Homo sapiens
catacttattaggat

SEQ ID NO: 1155463 - DNA, 15 bp, Homo sapiens
acatacttattagga

SEQ ID NO: 1155464 - DNA, 15 bp, Homo sapiens
tacatacttattagg

SEQ ID NO: 1155465 - DNA, 15 bp, Homo sapiens
ttacatacttattag

SEQ ID NO: 1155466 - DNA, 15 bp, Homo sapiens
tttacatacttatta

SEQ ID NO: 1155467 - DNA, 15 bp, Homo sapiens
gtttacatacttatt

SEQ ID NO: 1155468 - DNA, 15 bp, Homo sapiens
tgtttacatacttat

SEQ ID NO: 1155469 - DNA, 15 bp, Homo sapiens
ctgtttacatactta

SEQ ID NO: 1155470 - DNA, 15 bp, Homo sapiens
actgtttacatactt

SEQ ID NO: 1155471 - DNA, 15 bp, Homo sapiens
cactgtttacatact

SEQ ID NO: 1155472 - DNA, 15 bp, Homo sapiens
tcactgtttacatac

SEQ ID NO: 1155473 - DNA, 15 bp, Homo sapiens
atcactgtttacata

SEQ ID NO: 1155474 - DNA, 15 bp, Homo sapiens
tatcactgtttacat

SEQ ID NO: 1155475 - DNA, 15 bp, Homo sapiens
ttatcactgtttaca

SEQ ID NO: 1155476 - DNA, 15 bp, Homo sapiens
gttatcactgtttac

SEQ ID NO: 1155477 - DNA, 15 bp, Homo sapiens
tgttatcactgttta

SEQ ID NO: 1155478 - DNA, 15 bp, Homo sapiens
ttgttatcactgttt

SEQ ID NO: 1155479 - DNA, 15 bp, Homo sapiens
gttgttatcactgtt

SEQ ID NO: 1155480 - DNA, 15 bp, Homo sapiens
tgttgttatcactgt

SEQ ID NO: 1155481 - DNA, 15 bp, Homo sapiens
ctgttgttatcactg

SEQ ID NO: 1155482 - DNA, 15 bp, Homo sapiens
cctgttgttatcact

SEQ ID NO: 1155483 - DNA, 15 bp, Homo sapiens
tcctgttgttatcac

SEQ ID NO: 1155484 - DNA, 15 bp, Homo sapiens
ttcctgttgttatca

SEQ ID NO: 1155485 - DNA, 15 bp, Homo sapiens
attcctgttgttatc

SEQ ID NO: 1155486 - DNA, 15 bp, Homo sapiens
aattcctgttgttat

SEQ ID NO: 1155487 - DNA, 15 bp, Homo sapiens
aaattcctgttgtta

SEQ ID NO: 1155488 - DNA, 15 bp, Homo sapiens
aaaattcctgttgtt

SEQ ID NO: 1155489 - DNA, 15 bp, Homo sapiens
aaaaattcctgttgt

SEQ ID NO: 1155490 - DNA, 15 bp, Homo sapiens
caaaaattcctgttg

SEQ ID NO: 1155491 - DNA, 15 bp, Homo sapiens
ccaaaaattcctgtt

SEQ ID NO: 1155492 - DNA, 15 bp, Homo sapiens
tccaaaaattcctgt

SEQ ID NO: 1155493 - DNA, 15 bp, Homo sapiens
ctccaaaaattcctg

SEQ ID NO: 1155494 - DNA, 15 bp, Homo sapiens
actccaaaaattcct

SEQ ID NO: 1155495 - DNA, 15 bp, Homo sapiens
cactccaaaaattcc

SEQ ID NO: 1155496 - DNA, 15 bp, Homo sapiens
acactccaaaaattc

SEQ ID NO: 1155497 - DNA, 15 bp, Homo sapiens
cacactccaaaaatt

SEQ ID NO: 1155498 - DNA, 15 bp, Homo sapiens
acacactccaaaaat

SEQ ID NO: 1155499 - DNA, 15 bp, Homo sapiens
cacacactccaaaaa

SEQ ID NO: 1155500 - DNA, 15 bp, Homo sapiens
gcacacactccaaaa

SEQ ID NO: 1155501 - DNA, 15 bp, Homo sapiens
ggcacacactccaaa

SEQ ID NO: 1155502 - DNA, 15 bp, Homo sapiens
cggcacacactccaa

SEQ ID NO: 1155503 - DNA, 15 bp, Homo sapiens
tcggcacacactcca

SEQ ID NO: 1155504 - DNA, 15 bp, Homo sapiens
atcggcacacactcc

SEQ ID NO: 1155505 - DNA, 15 bp, Homo sapiens
aatcggcacacactc

SEQ ID NO: 1155506 - DNA, 15 bp, Homo sapiens
taatcggcacacact

SEQ ID NO: 1155507 - DNA, 15 bp, Homo sapiens
ttaatcggcacacac

SEQ ID NO: 1155508 - DNA, 15 bp, Homo sapiens
tttaatcggcacaca

SEQ ID NO: 1155509 - DNA, 15 bp, Homo sapiens
atttaatcggcacac

SEQ ID NO: 1155510 - DNA, 15 bp, Homo sapiens
tatttaatcggcaca

SEQ ID NO: 1155511 - DNA, 15 bp, Homo sapiens
ttatttaatcggcac

SEQ ID NO: 1155512 - DNA, 15 bp, Homo sapiens
tttatttaatcggca

SEQ ID NO: 1155513 - DNA, 15 bp, Homo sapiens
ttttatttaatcggc

SEQ ID NO: 1155514 - DNA, 15 bp, Homo sapiens
gttttatttaatcgg

SEQ ID NO: 1155515 - DNA, 15 bp, Homo sapiens
tgttttatttaatcg

SEQ ID NO: 1155516 - DNA, 15 bp, Homo sapiens
ctgttttatttaatc

SEQ ID NO: 1155517 - DNA, 15 bp, Homo sapiens
cctgttttatttaat

SEQ ID NO: 1155518 - DNA, 15 bp, Homo sapiens
ccctgttttatttaa

SEQ ID NO: 1155519 - DNA, 15 bp, Homo sapiens
cccctgttttattta

SEQ ID NO: 1155520 - DNA, 15 bp, Homo sapiens
acccctgttttattt

SEQ ID NO: 1155521 - DNA, 15 bp, Homo sapiens
aacccctgttttatt

SEQ ID NO: 1155522 - DNA, 15 bp, Homo sapiens
caacccctgttttat

SEQ ID NO: 1155523 - DNA, 15 bp, Homo sapiens
acaacccctgtttta

SEQ ID NO: 1155524 - DNA, 15 bp, Homo sapiens
aacaacccctgtttt

SEQ ID NO: 1155525 - DNA, 15 bp, Homo sapiens
gaacaacccctgttt

SEQ ID NO: 1155526 - DNA, 15 bp, Homo sapiens
tgaacaacccctgtt

SEQ ID NO: 1155527 - DNA, 15 bp, Homo sapiens
atgaacaacccctgt

SEQ ID NO: 1155528 - DNA, 15 bp, Homo sapiens
aatgaacaacccctg

SEQ ID NO: 1155529 - DNA, 15 bp, Homo sapiens
caatgaacaacccct

SEQ ID NO: 1155530 - DNA, 15 bp, Homo sapiens
ccaatgaacaacccc

SEQ ID NO: 1155531 - DNA, 15 bp, Homo sapiens
gccaatgaacaaccc

SEQ ID NO: 1155532 - DNA, 15 bp, Homo sapiens
agccaatgaacaacc

SEQ ID NO: 1155533 - DNA, 15 bp, Homo sapiens
aagccaatgaacaac

SEQ ID NO: 1155534 - DNA, 15 bp, Homo sapiens
taagccaatgaacaa

SEQ ID NO: 1155535 - DNA, 15 bp, Homo sapiens
ttaagccaatgaaca

SEQ ID NO: 1155536 - DNA, 15 bp, Homo sapiens
attaagccaatgaac

SEQ ID NO: 1155537 - DNA, 15 bp, Homo sapiens
aattaagccaatgaa

SEQ ID NO: 1155538 - DNA, 15 bp, Homo sapiens
aaattaagccaatga

SEQ ID NO: 1155539 - DNA, 15 bp, Homo sapiens
aaaattaagccaatg

SEQ ID NO: 1155540 - DNA, 15 bp, Homo sapiens
caaaattaagccaat

SEQ ID NO: 1155541 - DNA, 15 bp, Homo sapiens
ccaaaattaagccaa

SEQ ID NO: 1155542 - DNA, 15 bp, Homo sapiens
cccaaaattaagcca

SEQ ID NO: 1155543 - DNA, 15 bp, Homo sapiens
gcccaaaattaagcc

SEQ ID NO: 1155544 - DNA, 15 bp, Homo sapiens
tgcccaaaattaagc

SEQ ID NO: 1155545 - DNA, 15 bp, Homo sapiens
ctgcccaaaattaag

SEQ ID NO: 1155546 - DNA, 15 bp, Homo sapiens
gctgcccaaaattaa

SEQ ID NO: 1155547 - DNA, 15 bp, Homo sapiens
cgctgcccaaaatta

SEQ ID NO: 1155548 - DNA, 15 bp, Homo sapiens
gcgctgcccaaaatt

SEQ ID NO: 1155549 - DNA, 15 bp, Homo sapiens
tgcgctgcccaaaat

SEQ ID NO: 1155550 - DNA, 15 bp, Homo sapiens
ctgcgctgcccaaaa

SEQ ID NO: 1155551 - DNA, 15 bp, Homo sapiens
gctgcgctgcccaaa

SEQ ID NO: 1155552 - DNA, 15 bp, Homo sapiens
agctgcgctgcccaa

SEQ ID NO: 1155553 - DNA, 15 bp, Homo sapiens
aagctgcgctgccca

SEQ ID NO: 1155554 - DNA, 15 bp, Homo sapiens
aaagctgcgctgccc

SEQ ID NO: 1155555 - DNA, 15 bp, Homo sapiens
gaaagctgcgctgcc

SEQ ID NO: 1155556 - DNA, 15 bp, Homo sapiens
ggaaagctgcgctgc

SEQ ID NO: 1155557 - DNA, 15 bp, Homo sapiens
aggaaagctgcgctg

SEQ ID NO: 1155558 - DNA, 15 bp, Homo sapiens
gaggaaagctgcgct

SEQ ID NO: 1155559 - DNA, 15 bp, Homo sapiens
agaggaaagctgcgc

SEQ ID NO: 1155560 - DNA, 15 bp, Homo sapiens
gagaggaaagctgcg

SEQ ID NO: 1155561 - DNA, 15 bp, Homo sapiens
tgagaggaaagctgc

SEQ ID NO: 1155562 - DNA, 15 bp, Homo sapiens
ctgagaggaaagctg

SEQ ID NO: 1155563 - DNA, 15 bp, Homo sapiens
gctgagaggaaagct

SEQ ID NO: 1155564 - DNA, 15 bp, Homo sapiens
agctgagaggaaagc

SEQ ID NO: 1155565 - DNA, 15 bp, Homo sapiens
cagctgagaggaaag

SEQ ID NO: 1155566 - DNA, 15 bp, Homo sapiens
ccagctgagaggaaa

SEQ ID NO: 1155567 - DNA, 15 bp, Homo sapiens
cccagctgagaggaa

SEQ ID NO: 1155568 - DNA, 15 bp, Homo sapiens
acccagctgagagga

SEQ ID NO: 1155569 - DNA, 15 bp, Homo sapiens
tacccagctgagagg

SEQ ID NO: 1155570 - DNA, 15 bp, Homo sapiens
atacccagctgagag

SEQ ID NO: 1155571 - DNA, 15 bp, Homo sapiens
catacccagctgaga

SEQ ID NO: 1155572 - DNA, 15 bp, Homo sapiens
ccatacccagctgag

SEQ ID NO: 1155573 - DNA, 15 bp, Homo sapiens
accatacccagctga

SEQ ID NO: 1155574 - DNA, 15 bp, Homo sapiens
aaccatacccagctg

SEQ ID NO: 1155575 - DNA, 15 bp, Homo sapiens
gaaccatacccagct

SEQ ID NO: 1155576 - DNA, 15 bp, Homo sapiens
ggaaccatacccagc

SEQ ID NO: 1155577 - DNA, 15 bp, Homo sapiens
aggaaccatacccag

SEQ ID NO: 1155578 - DNA, 15 bp, Homo sapiens
gaggaaccataccca

SEQ ID NO: 1155579 - DNA, 15 bp, Homo sapiens
agaggaaccataccc

SEQ ID NO: 1155580 - DNA, 15 bp, Homo sapiens
gagaggaaccatacc

SEQ ID NO: 1155581 - DNA, 15 bp, Homo sapiens
tgagaggaaccatac

SEQ ID NO: 1155582 - DNA, 15 bp, Homo sapiens
ctgagaggaaccata

SEQ ID NO: 1155583 - DNA, 15 bp, Homo sapiens
actgagaggaaccat

SEQ ID NO: 1155584 - DNA, 15 bp, Homo sapiens
aactgagaggaacca

SEQ ID NO: 1155585 - DNA, 15 bp, Homo sapiens
gaactgagaggaacc

SEQ ID NO: 1155586 - DNA, 15 bp, Homo sapiens
ggaactgagaggaac

SEQ ID NO: 1155587 - DNA, 15 bp, Homo sapiens
aggaactgagaggaa

SEQ ID NO: 1155588 - DNA, 15 bp, Homo sapiens
gaggaactgagagga

SEQ ID NO: 1155589 - DNA, 15 bp, Homo sapiens
cgaggaactgagagg

SEQ ID NO: 1155590 - DNA, 15 bp, Homo sapiens
ccgaggaactgagag

SEQ ID NO: 1155591 - DNA, 15 bp, Homo sapiens
gccgaggaactgaga

SEQ ID NO: 1155592 - DNA, 15 bp, Homo sapiens
agccgaggaactgag

SEQ ID NO: 1155593 - DNA, 15 bp, Homo sapiens
cagccgaggaactga

SEQ ID NO: 1155594 - DNA, 15 bp, Homo sapiens
ccagccgaggaactg

SEQ ID NO: 1155595 - DNA, 15 bp, Homo sapiens
cccagccgaggaact

SEQ ID NO: 1155596 - DNA, 15 bp, Homo sapiens
acccagccgaggaac

SEQ ID NO: 1155597 - DNA, 15 bp, Homo sapiens
tacccagccgaggaa

SEQ ID NO: 1155598 - DNA, 15 bp, Homo sapiens
gtacccagccgagga

SEQ ID NO: 1155599 - DNA, 15 bp, Homo sapiens
cgtacccagccgagg

SEQ ID NO: 1155600 - DNA, 15 bp, Homo sapiens
ccgtacccagccgag

SEQ ID NO: 1155601 - DNA, 15 bp, Homo sapiens
accgtacccagccga

SEQ ID NO: 1155602 - DNA, 15 bp, Homo sapiens
aaccgtacccagccg

SEQ ID NO: 1155603 - DNA, 15 bp, Homo sapiens
aaaccgtacccagcc

SEQ ID NO: 1155604 - DNA, 15 bp, Homo sapiens
gaaaccgtacccagc

SEQ ID NO: 1155605 - DNA, 15 bp, Homo sapiens
agaaaccgtacccag

SEQ ID NO: 1155606 - DNA, 15 bp, Homo sapiens
aagaaaccgtaccca

SEQ ID NO: 1155607 - DNA, 15 bp, Homo sapiens
caagaaaccgtaccc

SEQ ID NO: 1155608 - DNA, 15 bp, Homo sapiens
ccaagaaaccgtacc

SEQ ID NO: 1155609 - DNA, 15 bp, Homo sapiens
tccaagaaaccgtac

SEQ ID NO: 1155610 - DNA, 15 bp, Homo sapiens
gtccaagaaaccgta

SEQ ID NO: 1155611 - DNA, 15 bp, Homo sapiens
agtccaagaaaccgt

SEQ ID NO: 1155612 - DNA, 15 bp, Homo sapiens
cagtccaagaaaccg

SEQ ID NO: 1155613 - DNA, 15 bp, Homo sapiens
gcagtccaagaaacc

SEQ ID NO: 1155614 - DNA, 15 bp, Homo sapiens
agcagtccaagaaac

SEQ ID NO: 1155615 - DNA, 15 bp, Homo sapiens
cagcagtccaagaaa

SEQ ID NO: 1155616 - DNA, 15 bp, Homo sapiens
acagcagtccaagaa

SEQ ID NO: 1155617 - DNA, 15 bp, Homo sapiens
cacagcagtccaaga

SEQ ID NO: 1155618 - DNA, 15 bp, Homo sapiens
acacagcagtccaag

SEQ ID NO: 1155619 - DNA, 15 bp, Homo sapiens
gacacagcagtccaa

SEQ ID NO: 1155620 - DNA, 15 bp, Homo sapiens
agacacagcagtcca

SEQ ID NO: 1155621 - DNA, 15 bp, Homo sapiens
tagacacagcagtcc

SEQ ID NO: 1155622 - DNA, 15 bp, Homo sapiens
gtagacacagcagtc

SEQ ID NO: 1155623 - DNA, 15 bp, Homo sapiens
ggtagacacagcagt

SEQ ID NO: 1155624 - DNA, 15 bp, Homo sapiens
tggtagacacagcag

SEQ ID NO: 1155625 - DNA, 15 bp, Homo sapiens
gtggtagacacagca

SEQ ID NO: 1155626 - DNA, 15 bp, Homo sapiens
agtggtagacacagc

SEQ ID NO: 1155627 - DNA, 15 bp, Homo sapiens
tagtggtagacacag

SEQ ID NO: 1155628 - DNA, 15 bp, Homo sapiens
gtagtggtagacaca

SEQ ID NO: 1155629 - DNA, 15 bp, Homo sapiens
tgtagtggtagacac

SEQ ID NO: 1155630 - DNA, 15 bp, Homo sapiens
ttgtagtggtagaca

SEQ ID NO: 1155631 - DNA, 15 bp, Homo sapiens
tttgtagtggtagac

SEQ ID NO: 1155632 - DNA, 15 bp, Homo sapiens
atttgtagtggtaga

SEQ ID NO: 1155633 - DNA, 15 bp, Homo sapiens
catttgtagtggtag

SEQ ID NO: 1155634 - DNA, 15 bp, Homo sapiens
acatttgtagtggta

SEQ ID NO: 1155635 - DNA, 15 bp, Homo sapiens
tacatttgtagtggt

SEQ ID NO: 1155636 - DNA, 15 bp, Homo sapiens
gtacatttgtagtgg

SEQ ID NO: 1155637 - DNA, 15 bp, Homo sapiens
tgtacatttgtagtg

SEQ ID NO: 1155638 - DNA, 15 bp, Homo sapiens
gtgtacatttgtagt

SEQ ID NO: 1155639 - DNA, 15 bp, Homo sapiens
tgtgtacatttgtag

SEQ ID NO: 1155640 - DNA, 15 bp, Homo sapiens
atgtgtacatttgta

SEQ ID NO: 1155641 - DNA, 15 bp, Homo sapiens
tatgtgtacatttgt

SEQ ID NO: 1155642 - DNA, 15 bp, Homo sapiens
atatgtgtacatttg

SEQ ID NO: 1155643 - DNA, 15 bp, Homo sapiens
catatgtgtacattt

SEQ ID NO: 1155644 - DNA, 15 bp, Homo sapiens
acatatgtgtacatt

SEQ ID NO: 1155645 - DNA, 15 bp, Homo sapiens
cacatatgtgtacat

SEQ ID NO: 1155646 - DNA, 15 bp, Homo sapiens
tcacatatgtgtaca

SEQ ID NO: 1155647 - DNA, 15 bp, Homo sapiens
gtcacatatgtgtac

SEQ ID NO: 1155648 - DNA, 15 bp, Homo sapiens
tgtcacatatgtgta

SEQ ID NO: 1155649 - DNA, 15 bp, Homo sapiens
ctgtcacatatgtgt

SEQ ID NO: 1155650 - DNA, 15 bp, Homo sapiens
cctgtcacatatgtg

SEQ ID NO: 1155651 - DNA, 15 bp, Homo sapiens
acctgtcacatatgt

SEQ ID NO: 1155652 - DNA, 15 bp, Homo sapiens
cacctgtcacatatg

SEQ ID NO: 1155653 - DNA, 15 bp, Homo sapiens
acacctgtcacatat

SEQ ID NO: 1155654 - DNA, 15 bp, Homo sapiens
tacacctgtcacata

SEQ ID NO: 1155655 - DNA, 15 bp, Homo sapiens
atacacctgtcacat

SEQ ID NO: 1155656 - DNA, 15 bp, Homo sapiens
tatacacctgtcaca

SEQ ID NO: 1155657 - DNA, 15 bp, Homo sapiens
ctatacacctgtcac

SEQ ID NO: 1155658 - DNA, 15 bp, Homo sapiens
actatacacctgtca

SEQ ID NO: 1155659 - DNA, 15 bp, Homo sapiens
aactatacacctgtc

SEQ ID NO: 1155660 - DNA, 15 bp, Homo sapiens
taactatacacctgt

SEQ ID NO: 1155661 - DNA, 15 bp, Homo sapiens
ttaactatacacctg

SEQ ID NO: 1155662 - DNA, 15 bp, Homo sapiens
gttaactatacacct

SEQ ID NO: 1155663 - DNA, 15 bp, Homo sapiens
tgttaactatacacc

SEQ ID NO: 1155664 - DNA, 15 bp, Homo sapiens
gtgttaactatacac

SEQ ID NO: 1155665 - DNA, 15 bp, Homo sapiens
tgtgttaactataca

SEQ ID NO: 1155666 - DNA, 15 bp, Homo sapiens
ctgtgttaactatac

SEQ ID NO: 1155667 - DNA, 15 bp, Homo sapiens
actgtgttaactata

SEQ ID NO: 1155668 - DNA, 15 bp, Homo sapiens
tactgtgttaactat

SEQ ID NO: 1155669 - DNA, 15 bp, Homo sapiens
ttactgtgttaacta

SEQ ID NO: 1155670 - DNA, 15 bp, Homo sapiens
tttactgtgttaact

SEQ ID NO: 1155671 - DNA, 15 bp, Homo sapiens
ttttactgtgttaac

SEQ ID NO: 1155672 - DNA, 15 bp, Homo sapiens
attttactgtgttaa

SEQ ID NO: 1155673 - DNA, 15 bp, Homo sapiens
cattttactgtgtta

SEQ ID NO: 1155674 - DNA, 15 bp, Homo sapiens
gcattttactgtgtt

SEQ ID NO: 1155675 - DNA, 15 bp, Homo sapiens
tgcattttactgtgt

SEQ ID NO: 1155676 - DNA, 15 bp, Homo sapiens
gtgcattttactgtg

SEQ ID NO: 1155677 - DNA, 15 bp, Homo sapiens
tgtgcattttactgt

SEQ ID NO: 1155678 - DNA, 15 bp, Homo sapiens
ttgtgcattttactg

SEQ ID NO: 1155679 - DNA, 15 bp, Homo sapiens
tttgtgcattttact

SEQ ID NO: 1155680 - DNA, 15 bp, Homo sapiens
atttgtgcattttac

SEQ ID NO: 1155681 - DNA, 15 bp, Homo sapiens
gatttgtgcatttta

SEQ ID NO: 1155682 - DNA, 15 bp, Homo sapiens
agatttgtgcatttt

SEQ ID NO: 1155683 - DNA, 15 bp, Homo sapiens
aagatttgtgcattt

SEQ ID NO: 1155684 - DNA, 15 bp, Homo sapiens
taagatttgtgcatt

SEQ ID NO: 1155685 - DNA, 15 bp, Homo sapiens
ttaagatttgtgcat

SEQ ID NO: 1155686 - DNA, 15 bp, Homo sapiens
cttaagatttgtgca

SEQ ID NO: 1155687 - DNA, 15 bp, Homo sapiens
acttaagatttgtgc

SEQ ID NO: 1155688 - DNA, 15 bp, Homo sapiens
cacttaagatttgtg

SEQ ID NO: 1155689 - DNA, 15 bp, Homo sapiens
acacttaagatttgt

SEQ ID NO: 1155690 - DNA, 15 bp, Homo sapiens
aacacttaagatttg

SEQ ID NO: 1155691 - DNA, 15 bp, Homo sapiens
gaacacttaagattt

SEQ ID NO: 1155692 - DNA, 15 bp, Homo sapiens
tgaacacttaagatt

SEQ ID NO: 1155693 - DNA, 15 bp, Homo sapiens
ctgaacacttaagat

SEQ ID NO: 1155694 - DNA, 15 bp, Homo sapiens
gctgaacacttaaga

SEQ ID NO: 1155695 - DNA, 15 bp, Homo sapiens
agctgaacacttaag

SEQ ID NO: 1155696 - DNA, 15 bp, Homo sapiens
aagctgaacacttaa

SEQ ID NO: 1155697 - DNA, 15 bp, Homo sapiens
caagctgaacactta

SEQ ID NO: 1155698 - DNA, 15 bp, Homo sapiens
tcaagctgaacactt

SEQ ID NO: 1155699 - DNA, 15 bp, Homo sapiens
ttcaagctgaacact

SEQ ID NO: 1155700 - DNA, 15 bp, Homo sapiens
attcaagctgaacac

SEQ ID NO: 1155701 - DNA, 15 bp, Homo sapiens
aattcaagctgaaca

SEQ ID NO: 1155702 - DNA, 15 bp, Homo sapiens
aaattcaagctgaac

SEQ ID NO: 1155703 - DNA, 15 bp, Homo sapiens
taaattcaagctgaa

SEQ ID NO: 1155704 - DNA, 15 bp, Homo sapiens
ttaaattcaagctga

SEQ ID NO: 1155705 - DNA, 15 bp, Homo sapiens
gttaaattcaagctg

SEQ ID NO: 1155706 - DNA, 15 bp, Homo sapiens
agttaaattcaagct

SEQ ID NO: 1155707 - DNA, 15 bp, Homo sapiens
tagttaaattcaagc

SEQ ID NO: 1155708 - DNA, 15 bp, Homo sapiens
atagttaaattcaag

SEQ ID NO: 1155709 - DNA, 15 bp, Homo sapiens
aatagttaaattcaa

SEQ ID NO: 1155710 - DNA, 15 bp, Homo sapiens
taatagttaaattca

SEQ ID NO: 1155711 - DNA, 15 bp, Homo sapiens
ataatagttaaattc

SEQ ID NO: 1155712 - DNA, 15 bp, Homo sapiens
tataatagttaaatt

SEQ ID NO: 1155713 - DNA, 15 bp, Homo sapiens
atataatagttaaat

SEQ ID NO: 1155714 - DNA, 15 bp, Homo sapiens
tatataatagttaaa

SEQ ID NO: 1155715 - DNA, 15 bp, Homo sapiens
gtatataatagttaa

SEQ ID NO: 1155716 - DNA, 15 bp, Homo sapiens
tgtatataatagtta

SEQ ID NO: 1155717 - DNA, 15 bp, Homo sapiens
atgtatataatagtt

SEQ ID NO: 1155718 - DNA, 15 bp, Homo sapiens
tatgtatataatagt

SEQ ID NO: 1155719 - DNA, 15 bp, Homo sapiens
gtatgtatataatag

SEQ ID NO: 1155720 - DNA, 15 bp, Homo sapiens
tgtatgtatataata

SEQ ID NO: 1155721 - DNA, 15 bp, Homo sapiens
atgtatgtatataat

SEQ ID NO: 1155722 - DNA, 15 bp, Homo sapiens
tatgtatgtatataa

SEQ ID NO: 1155723 - DNA, 15 bp, Homo sapiens
gtatgtatgtatata

SEQ ID NO: 1155724 - DNA, 15 bp, Homo sapiens
tgtatgtatgtatat

SEQ ID NO: 1155725 - DNA, 15 bp, Homo sapiens
gtgtatgtatgtata

SEQ ID NO: 1155726 - DNA, 15 bp, Homo sapiens
ggtgtatgtatgtat

SEQ ID NO: 1155727 - DNA, 15 bp, Homo sapiens
gggtgtatgtatgta

SEQ ID NO: 1155728 - DNA, 15 bp, Homo sapiens
tgggtgtatgtatgt

SEQ ID NO: 1155729 - DNA, 15 bp, Homo sapiens
gtgggtgtatgtatg

SEQ ID NO: 1155730 - DNA, 15 bp, Homo sapiens
ggtgggtgtatgtat

SEQ ID NO: 1155731 - DNA, 15 bp, Homo sapiens
tggtgggtgtatgta

SEQ ID NO: 1155732 - DNA, 15 bp, Homo sapiens
atggtgggtgtatgt

SEQ ID NO: 1155733 - DNA, 15 bp, Homo sapiens
aatggtgggtgtatg

SEQ ID NO: 1155734 - DNA, 15 bp, Homo sapiens
gaatggtgggtgtat

SEQ ID NO: 1155735 - DNA, 15 bp, Homo sapiens
agaatggtgggtgta

SEQ ID NO: 1155736 - DNA, 15 bp, Homo sapiens
gagaatggtgggtgt

SEQ ID NO: 1155737 - DNA, 15 bp, Homo sapiens
tgagaatggtgggtg

SEQ ID NO: 1155738 - DNA, 15 bp, Homo sapiens
ctgagaatggtgggt

SEQ ID NO: 1155739 - DNA, 15 bp, Homo sapiens
actgagaatggtggg

SEQ ID NO: 1155740 - DNA, 15 bp, Homo sapiens
tactgagaatggtgg

SEQ ID NO: 1155741 - DNA, 15 bp, Homo sapiens
ttactgagaatggtg

SEQ ID NO: 1155742 - DNA, 15 bp, Homo sapiens
cttactgagaatggt

SEQ ID NO: 1155743 - DNA, 15 bp, Homo sapiens
tcttactgagaatgg

SEQ ID NO: 1155744 - DNA, 15 bp, Homo sapiens
atcttactgagaatg

SEQ ID NO: 1155745 - DNA, 15 bp, Homo sapiens
tatcttactgagaat

SEQ ID NO: 1155746 - DNA, 15 bp, Homo sapiens
gtatcttactgagaa

SEQ ID NO: 1155747 - DNA, 15 bp, Homo sapiens
tgtatcttactgaga

SEQ ID NO: 1155748 - DNA, 15 bp, Homo sapiens
ctgtatcttactgag

SEQ ID NO: 1155749 - DNA, 15 bp, Homo sapiens
tctgtatcttactga

SEQ ID NO: 1155750 - DNA, 15 bp, Homo sapiens
ttctgtatcttactg

SEQ ID NO: 1155751 - DNA, 15 bp, Homo sapiens
attctgtatcttact

SEQ ID NO: 1155752 - DNA, 15 bp, Homo sapiens
aattctgtatcttac

SEQ ID NO: 1155753 - DNA, 15 bp, Homo sapiens
aaattctgtatctta

SEQ ID NO: 1155754 - DNA, 15 bp, Homo sapiens
aaaattctgtatctt

SEQ ID NO: 1155755 - DNA, 15 bp, Homo sapiens
aaaaattctgtatct

SEQ ID NO: 1155756 - DNA, 15 bp, Homo sapiens
aaaaaattctgtatc

SEQ ID NO: 1155757 - DNA, 15 bp, Homo sapiens
taaaaaattctgtat

SEQ ID NO: 1155758 - DNA, 15 bp, Homo sapiens
ataaaaaattctgta

SEQ ID NO: 1155759 - DNA, 15 bp, Homo sapiens
gataaaaaattctgt

SEQ ID NO: 1155760 - DNA, 15 bp, Homo sapiens
tgataaaaaattctg

SEQ ID NO: 1155761 - DNA, 15 bp, Homo sapiens
gtgataaaaaattct

SEQ ID NO: 1155762 - DNA, 15 bp, Homo sapiens
ggtgataaaaaattc

SEQ ID NO: 1155763 - DNA, 15 bp, Homo sapiens
aggtgataaaaaatt

SEQ ID NO: 1155764 - DNA, 15 bp, Homo sapiens
gaggtgataaaaaat

SEQ ID NO: 1155765 - DNA, 15 bp, Homo sapiens
tgaggtgataaaaaa

SEQ ID NO: 1155766 - DNA, 15 bp, Homo sapiens
ctgaggtgataaaaa

SEQ ID NO: 1155767 - DNA, 15 bp, Homo sapiens
tctgaggtgataaaa

SEQ ID NO: 1155768 - DNA, 15 bp, Homo sapiens
ttctgaggtgataaa

SEQ ID NO: 1155769 - DNA, 15 bp, Homo sapiens
tttctgaggtgataa

SEQ ID NO: 1155770 - DNA, 15 bp, Homo sapiens
ttttctgaggtgata

SEQ ID NO: 1155771 - DNA, 15 bp, Homo sapiens
attttctgaggtgat

SEQ ID NO: 1155772 - DNA, 15 bp, Homo sapiens
aattttctgaggtga

SEQ ID NO: 1155773 - DNA, 15 bp, Homo sapiens
aaattttctgaggtg

SEQ ID NO: 1155774 - DNA, 15 bp, Homo sapiens
gaaattttctgaggt

SEQ ID NO: 1155775 - DNA, 15 bp, Homo sapiens
agaaattttctgagg

SEQ ID NO: 1155776 - DNA, 15 bp, Homo sapiens
aagaaattttctgag

SEQ ID NO: 1155777 - DNA, 15 bp, Homo sapiens
aaagaaattttctga

SEQ ID NO: 1155778 - DNA, 15 bp, Homo sapiens
caaagaaattttctg

SEQ ID NO: 1155779 - DNA, 15 bp, Homo sapiens
acaaagaaattttct

SEQ ID NO: 1155780 - DNA, 15 bp, Homo sapiens
cacaaagaaattttc

SEQ ID NO: 1155781 - DNA, 15 bp, Homo sapiens
gcacaaagaaatttt

SEQ ID NO: 1155782 - DNA, 15 bp, Homo sapiens
ggcacaaagaaattt

SEQ ID NO: 1155783 - DNA, 15 bp, Homo sapiens
aggcacaaagaaatt

SEQ ID NO: 1155784 - DNA, 15 bp, Homo sapiens
gaggcacaaagaaat

SEQ ID NO: 1155785 - DNA, 15 bp, Homo sapiens
agaggcacaaagaaa

SEQ ID NO: 1155786 - DNA, 15 bp, Homo sapiens
aagaggcacaaagaa

SEQ ID NO: 1155787 - DNA, 15 bp, Homo sapiens
aaagaggcacaaaga

SEQ ID NO: 1155788 - DNA, 15 bp, Homo sapiens
gaaagaggcacaaag

SEQ ID NO: 1155789 - DNA, 15 bp, Homo sapiens
tgaaagaggcacaaa

SEQ ID NO: 1155790 - DNA, 15 bp, Homo sapiens
ttgaaagaggcacaa

SEQ ID NO: 1155791 - DNA, 15 bp, Homo sapiens
attgaaagaggcaca

SEQ ID NO: 1155792 - DNA, 15 bp, Homo sapiens
aattgaaagaggcac

SEQ ID NO: 1155793 - DNA, 15 bp, Homo sapiens
gaattgaaagaggca

SEQ ID NO: 1155794 - DNA, 15 bp, Homo sapiens
ggaattgaaagaggc

SEQ ID NO: 1155795 - DNA, 15 bp, Homo sapiens
gggaattgaaagagg

SEQ ID NO: 1155796 - DNA, 15 bp, Homo sapiens
agggaattgaaagag

SEQ ID NO: 1155797 - DNA, 15 bp, Homo sapiens
aagggaattgaaaga

SEQ ID NO: 1155798 - DNA, 15 bp, Homo sapiens
aaagggaattgaaag

SEQ ID NO: 1155799 - DNA, 15 bp, Homo sapiens
gaaagggaattgaaa

SEQ ID NO: 1155800 - DNA, 15 bp, Homo sapiens
ggaaagggaattgaa

SEQ ID NO: 1155801 - DNA, 15 bp, Homo sapiens
aggaaagggaattga

SEQ ID NO: 1155802 - DNA, 15 bp, Homo sapiens
caggaaagggaattg

SEQ ID NO: 1155803 - DNA, 15 bp, Homo sapiens
gcaggaaagggaatt

SEQ ID NO: 1155804 - DNA, 15 bp, Homo sapiens
ggcaggaaagggaat

SEQ ID NO: 1155805 - DNA, 15 bp, Homo sapiens
tggcaggaaagggaa

SEQ ID NO: 1155806 - DNA, 15 bp, Homo sapiens
gtggcaggaaaggga

SEQ ID NO: 1155807 - DNA, 15 bp, Homo sapiens
tgtggcaggaaaggg

SEQ ID NO: 1155808 - DNA, 15 bp, Homo sapiens
ctgtggcaggaaagg

SEQ ID NO: 1155809 - DNA, 15 bp, Homo sapiens
tctgtggcaggaaag

SEQ ID NO: 1155810 - DNA, 15 bp, Homo sapiens
gtctgtggcaggaaa

SEQ ID NO: 1155811 - DNA, 15 bp, Homo sapiens
tgtctgtggcaggaa

SEQ ID NO: 1155812 - DNA, 15 bp, Homo sapiens
ttgtctgtggcagga

SEQ ID NO: 1155813 - DNA, 15 bp, Homo sapiens
tttgtctgtggcagg

SEQ ID NO: 1155814 - DNA, 15 bp, Homo sapiens
atttgtctgtggcag

SEQ ID NO: 1155815 - DNA, 15 bp, Homo sapiens
tatttgtctgtggca

SEQ ID NO: 1155816 - DNA, 15 bp, Homo sapiens
atatttgtctgtggc

SEQ ID NO: 1155817 - DNA, 15 bp, Homo sapiens
tatatttgtctgtgg

SEQ ID NO: 1155818 - DNA, 15 bp, Homo sapiens
atatatttgtctgtg

SEQ ID NO: 1155819 - DNA, 15 bp, Homo sapiens
aatatatttgtctgt

SEQ ID NO: 1155820 - DNA, 15 bp, Homo sapiens
aaatatatttgtctg

SEQ ID NO: 1155821 - DNA, 15 bp, Homo sapiens
aaaatatatttgtct

SEQ ID NO: 1155822 - DNA, 15 bp, Homo sapiens
aaaaatatatttgtc

SEQ ID NO: 1155823 - DNA, 15 bp, Homo sapiens
taaaaatatatttgt

SEQ ID NO: 1155824 - DNA, 15 bp, Homo sapiens
aaataaaaatatatt

SEQ ID NO: 1155825 - DNA, 15 bp, Homo sapiens
caaataaaaatatat

SEQ ID NO: 1155826 - DNA, 15 bp, Homo sapiens
gcaaataaaaatata

SEQ ID NO: 1155827 - DNA, 15 bp, Homo sapiens
ggcaaataaaaatat

SEQ ID NO: 1155828 - DNA, 15 bp, Homo sapiens
aggcaaataaaaata

SEQ ID NO: 1155829 - DNA, 15 bp, Homo sapiens
aaggcaaataaaaat

SEQ ID NO: 1155830 - DNA, 15 bp, Homo sapiens
taaggcaaataaaaa

SEQ ID NO: 1155831 - DNA, 15 bp, Homo sapiens
ataaggcaaataaaa

SEQ ID NO: 1155832 - DNA, 15 bp, Homo sapiens
gataaggcaaataaa

SEQ ID NO: 1155833 - DNA, 15 bp, Homo sapiens
tgataaggcaaataa

SEQ ID NO: 1155834 - DNA, 15 bp, Homo sapiens
ttgataaggcaaata

SEQ ID NO: 1155835 - DNA, 15 bp, Homo sapiens
tttgataaggcaaat

SEQ ID NO: 1155836 - DNA, 15 bp, Homo sapiens
ttttgataaggcaaa

SEQ ID NO: 1155837 - DNA, 15 bp, Homo sapiens
tttttgataaggcaa

SEQ ID NO: 1155838 - DNA, 15 bp, Homo sapiens
atttttgataaggca

SEQ ID NO: 1155839 - DNA, 15 bp, Homo sapiens
aatttttgataaggc

SEQ ID NO: 1155840 - DNA, 15 bp, Homo sapiens
taatttttgataagg

SEQ ID NO: 1155841 - DNA, 15 bp, Homo sapiens
ctaatttttgataag

SEQ ID NO: 1155842 - DNA, 15 bp, Homo sapiens
tctaatttttgataa

SEQ ID NO: 1155843 - DNA, 15 bp, Homo sapiens
atctaatttttgata

SEQ ID NO: 1155844 - DNA, 15 bp, Homo sapiens
catctaatttttgat

SEQ ID NO: 1155845 - DNA, 15 bp, Homo sapiens
tcatctaatttttga

SEQ ID NO: 1155846 - DNA, 15 bp, Homo sapiens
atcatctaatttttg

SEQ ID NO: 1155847 - DNA, 15 bp, Homo sapiens
aatcatctaattttt

SEQ ID NO: 1155848 - DNA, 15 bp, Homo sapiens
aaatcatctaatttt

SEQ ID NO: 1155849 - DNA, 15 bp, Homo sapiens
aaaatcatctaattt

SEQ ID NO: 1155850 - DNA, 15 bp, Homo sapiens
aaaaatcatctaatt

SEQ ID NO: 1155851 - DNA, 15 bp, Homo sapiens
caaaaatcatctaat

SEQ ID NO: 1155852 - DNA, 15 bp, Homo sapiens
acaaaaatcatctaa

SEQ ID NO: 1155853 - DNA, 15 bp, Homo sapiens
aacaaaaatcatcta

SEQ ID NO: 1155854 - DNA, 15 bp, Homo sapiens
taacaaaaatcatct

SEQ ID NO: 1155855 - DNA, 15 bp, Homo sapiens
ataacaaaaatcatc

SEQ ID NO: 1155856 - DNA, 15 bp, Homo sapiens
aataacaaaaatcat

SEQ ID NO: 1155857 - DNA, 15 bp, Homo sapiens
caataacaaaaatca

SEQ ID NO: 1155858 - DNA, 15 bp, Homo sapiens
ccaataacaaaaatc

SEQ ID NO: 1155859 - DNA, 15 bp, Homo sapiens
cccaataacaaaaat

SEQ ID NO: 1155860 - DNA, 15 bp, Homo sapiens
acccaataacaaaaa

SEQ ID NO: 1155861 - DNA, 15 bp, Homo sapiens
aacccaataacaaaa

SEQ ID NO: 1155862 - DNA, 15 bp, Homo sapiens
aaacccaataacaaa

SEQ ID NO: 1155863 - DNA, 15 bp, Homo sapiens
gaaacccaataacaa

SEQ ID NO: 1155864 - DNA, 15 bp, Homo sapiens
tgaaacccaataaca

SEQ ID NO: 1155865 - DNA, 15 bp, Homo sapiens
atgaaacccaataac

SEQ ID NO: 1155866 - DNA, 15 bp, Homo sapiens
tatgaaacccaataa

SEQ ID NO: 1155867 - DNA, 15 bp, Homo sapiens
atatgaaacccaata

SEQ ID NO: 1155868 - DNA, 15 bp, Homo sapiens
gatatgaaacccaat

SEQ ID NO: 1155869 - DNA, 15 bp, Homo sapiens
tgatatgaaacccaa

SEQ ID NO: 1155870 - DNA, 15 bp, Homo sapiens
ttgatatgaaaccca

SEQ ID NO: 1155871 - DNA, 15 bp, Homo sapiens
attgatatgaaaccc

SEQ ID NO: 1155872 - DNA, 15 bp, Homo sapiens
cattgatatgaaacc

SEQ ID NO: 1155873 - DNA, 15 bp, Homo sapiens
tcattgatatgaaac

SEQ ID NO: 1155874 - DNA, 15 bp, Homo sapiens
ttcattgatatgaaa

SEQ ID NO: 1155875 - DNA, 15 bp, Homo sapiens
tttcattgatatgaa

SEQ ID NO: 1155876 - DNA, 15 bp, Homo sapiens
gtttcattgatatga

SEQ ID NO: 1155877 - DNA, 15 bp, Homo sapiens
ggtttcattgatatg

SEQ ID NO: 1155878 - DNA, 15 bp, Homo sapiens
tggtttcattgatat

SEQ ID NO: 1155879 - DNA, 15 bp, Homo sapiens
gtggtttcattgata

SEQ ID NO: 1155880 - DNA, 15 bp, Homo sapiens
tgtggtttcattgat

SEQ ID NO: 1155881 - DNA, 15 bp, Homo sapiens
ctgtggtttcattga

SEQ ID NO: 1155882 - DNA, 15 bp, Homo sapiens
tctgtggtttcattg

SEQ ID NO: 1155883 - DNA, 15 bp, Homo sapiens
ctctgtggtttcatt

SEQ ID NO: 1155884 - DNA, 15 bp, Homo sapiens
actctgtggtttcat

SEQ ID NO: 1155885 - DNA, 15 bp, Homo sapiens
tactctgtggtttca

SEQ ID NO: 1155886 - DNA, 15 bp, Homo sapiens
atactctgtggtttc

SEQ ID NO: 1155887 - DNA, 15 bp, Homo sapiens
tatactctgtggttt

SEQ ID NO: 1155888 - DNA, 15 bp, Homo sapiens
ctatactctgtggtt

SEQ ID NO: 1155889 - DNA, 15 bp, Homo sapiens
tctatactctgtggt

SEQ ID NO: 1155890 - DNA, 15 bp, Homo sapiens
gtctatactctgtgg

SEQ ID NO: 1155891 - DNA, 15 bp, Homo sapiens
agtctatactctgtg

SEQ ID NO: 1155892 - DNA, 15 bp, Homo sapiens
gagtctatactctgt

SEQ ID NO: 1155893 - DNA, 15 bp, Homo sapiens
agagtctatactctg

SEQ ID NO: 1155894 - DNA, 15 bp, Homo sapiens
aagagtctatactct

SEQ ID NO: 1155895 - DNA, 15 bp, Homo sapiens
caagagtctatactc

SEQ ID NO: 1155896 - DNA, 15 bp, Homo sapiens
acaagagtctatact

SEQ ID NO: 1155897 - DNA, 15 bp, Homo sapiens
cacaagagtctatac

SEQ ID NO: 1155898 - DNA, 15 bp, Homo sapiens
acacaagagtctata

SEQ ID NO: 1155899 - DNA, 15 bp, Homo sapiens
gacacaagagtctat

SEQ ID NO: 1155900 - DNA, 15 bp, Homo sapiens
agacacaagagtcta

SEQ ID NO: 1155901 - DNA, 15 bp, Homo sapiens
cagacacaagagtct

SEQ ID NO: 1155902 - DNA, 15 bp, Homo sapiens
ccagacacaagagtc

SEQ ID NO: 1155903 - DNA, 15 bp, Homo sapiens
gccagacacaagagt

SEQ ID NO: 1155904 - DNA, 15 bp, Homo sapiens
aagccagacacaaga

SEQ ID NO: 1155905 - DNA, 15 bp, Homo sapiens
gaagccagacacaag

SEQ ID NO: 1155906 - DNA, 15 bp, Homo sapiens
agaagccagacacaa

SEQ ID NO: 1155907 - DNA, 15 bp, Homo sapiens
aagaagccagacaca

SEQ ID NO: 1155908 - DNA, 15 bp, Homo sapiens
aaagaagccagacac

SEQ ID NO: 1155909 - DNA, 15 bp, Homo sapiens
aaaagaagccagaca

SEQ ID NO: 1155910 - DNA, 15 bp, Homo sapiens
caaaagaagccagac

SEQ ID NO: 1155911 - DNA, 15 bp, Homo sapiens
tcaaaagaagccaga

SEQ ID NO: 1155912 - DNA, 15 bp, Homo sapiens
atcaaaagaagccag

SEQ ID NO: 1155913 - DNA, 15 bp, Homo sapiens
catcaaaagaagcca

SEQ ID NO: 1155914 - DNA, 15 bp, Homo sapiens
tcatcaaaagaagcc

SEQ ID NO: 1155915 - DNA, 15 bp, Homo sapiens
ctcatcaaaagaagc

SEQ ID NO: 1155916 - DNA, 15 bp, Homo sapiens
gctcatcaaaagaag

SEQ ID NO: 1155917 - DNA, 15 bp, Homo sapiens
tgctcatcaaaagaa

SEQ ID NO: 1155918 - DNA, 15 bp, Homo sapiens
atgctcatcaaaaga

SEQ ID NO: 1155919 - DNA, 15 bp, Homo sapiens
catgctcatcaaaag

SEQ ID NO: 1155920 - DNA, 15 bp, Homo sapiens
acatgctcatcaaaa

SEQ ID NO: 1155921 - DNA, 15 bp, Homo sapiens
gacatgctcatcaaa

SEQ ID NO: 1155922 - DNA, 15 bp, Homo sapiens
agacatgctcatcaa

SEQ ID NO: 1155923 - DNA, 15 bp, Homo sapiens
aagacatgctcatca

SEQ ID NO: 1155924 - DNA, 15 bp, Homo sapiens
aaagacatgctcatc

SEQ ID NO: 1155925 - DNA, 15 bp, Homo sapiens
caaagacatgctcat

SEQ ID NO: 1155926 - DNA, 15 bp, Homo sapiens
tcaaagacatgctca

SEQ ID NO: 1155927 - DNA, 15 bp, Homo sapiens
ctcaaagacatgctc

SEQ ID NO: 1155928 - DNA, 15 bp, Homo sapiens
tctcaaagacatgct

SEQ ID NO: 1155929 - DNA, 15 bp, Homo sapiens
atctcaaagacatgc

SEQ ID NO: 1155930 - DNA, 15 bp, Homo sapiens
aatctcaaagacatg

SEQ ID NO: 1155931 - DNA, 15 bp, Homo sapiens
gaatctcaaagacat

SEQ ID NO: 1155932 - DNA, 15 bp, Homo sapiens
agaatctcaaagaca

SEQ ID NO: 1155933 - DNA, 15 bp, Homo sapiens
tagaatctcaaagac

SEQ ID NO: 1155934 - DNA, 15 bp, Homo sapiens
atagaatctcaaaga

SEQ ID NO: 1155935 - DNA, 15 bp, Homo sapiens
aatagaatctcaaag

SEQ ID NO: 1155936 - DNA, 15 bp, Homo sapiens
taatagaatctcaaa

SEQ ID NO: 1155937 - DNA, 15 bp, Homo sapiens
ttaatagaatctcaa

SEQ ID NO: 1155938 - DNA, 15 bp, Homo sapiens
attaatagaatctca

SEQ ID NO: 1155939 - DNA, 15 bp, Homo sapiens
aattaatagaatctc

SEQ ID NO: 1155940 - DNA, 15 bp, Homo sapiens
aaattaatagaatct

SEQ ID NO: 1155941 - DNA, 15 bp, Homo sapiens
taaattaatagaatc

SEQ ID NO: 1155942 - DNA, 15 bp, Homo sapiens
ttaaattaatagaat

SEQ ID NO: 1155943 - DNA, 15 bp, Homo sapiens
attaaattaatagaa

SEQ ID NO: 1155944 - DNA, 15 bp, Homo sapiens
aaattaaattaatag

SEQ ID NO: 1155945 - DNA, 15 bp, Homo sapiens
aaaattaaattaata

SEQ ID NO: 1155946 - DNA, 15 bp, Homo sapiens
aaaaattaaattaat

SEQ ID NO: 1155947 - DNA, 15 bp, Homo sapiens
taaaaaattaaatta

SEQ ID NO: 1155948 - DNA, 15 bp, Homo sapiens
ctaaaaaattaaatt

SEQ ID NO: 1155949 - DNA, 15 bp, Homo sapiens
gctaaaaaattaaat

SEQ ID NO: 1155950 - DNA, 15 bp, Homo sapiens
tgctaaaaaattaaa

SEQ ID NO: 1155951 - DNA, 15 bp, Homo sapiens
ctgctaaaaaattaa

SEQ ID NO: 1155952 - DNA, 15 bp, Homo sapiens
gctgctaaaaaatta

SEQ ID NO: 1155953 - DNA, 15 bp, Homo sapiens
ggctgctaaaaaatt

SEQ ID NO: 1155954 - DNA, 15 bp, Homo sapiens
tggctgctaaaaaat

SEQ ID NO: 1155955 - DNA, 15 bp, Homo sapiens
ttggctgctaaaaaa

SEQ ID NO: 1155956 - DNA, 15 bp, Homo sapiens
attggctgctaaaaa

SEQ ID NO: 1155957 - DNA, 15 bp, Homo sapiens
aattggctgctaaaa

SEQ ID NO: 1155958 - DNA, 15 bp, Homo sapiens
caattggctgctaaa

SEQ ID NO: 1155959 - DNA, 15 bp, Homo sapiens
acaattggctgctaa

SEQ ID NO: 1155960 - DNA, 15 bp, Homo sapiens
cacaattggctgcta

SEQ ID NO: 1155961 - DNA, 15 bp, Homo sapiens
ccacaattggctgct

SEQ ID NO: 1155962 - DNA, 15 bp, Homo sapiens
accacaattggctgc

SEQ ID NO: 1155963 - DNA, 15 bp, Homo sapiens
aaccacaattggctg

SEQ ID NO: 1155964 - DNA, 15 bp, Homo sapiens
taaccacaattggct

SEQ ID NO: 1155965 - DNA, 15 bp, Homo sapiens
ttaaccacaattggc

SEQ ID NO: 1155966 - DNA, 15 bp, Homo sapiens
cttaaccacaattgg

SEQ ID NO: 1155967 - DNA, 15 bp, Homo sapiens
tcttaaccacaattg

SEQ ID NO: 1155968 - DNA, 15 bp, Homo sapiens
ctcttaaccacaatt

SEQ ID NO: 1155969 - DNA, 15 bp, Homo sapiens
actcttaaccacaat

SEQ ID NO: 1155970 - DNA, 15 bp, Homo sapiens
gactcttaaccacaa

SEQ ID NO: 1155971 - DNA, 15 bp, Homo sapiens
tgactcttaaccaca

SEQ ID NO: 1155972 - DNA, 15 bp, Homo sapiens
ttgactcttaaccac

SEQ ID NO: 1155973 - DNA, 15 bp, Homo sapiens
gttgactcttaacca

SEQ ID NO: 1155974 - DNA, 15 bp, Homo sapiens
tgttgactcttaacc

SEQ ID NO: 1155975 - DNA, 15 bp, Homo sapiens
gtgttgactcttaac

SEQ ID NO: 1155976 - DNA, 15 bp, Homo sapiens
tgtgttgactcttaa

SEQ ID NO: 1155977 - DNA, 15 bp, Homo sapiens
atgtgttgactctta

SEQ ID NO: 1155978 - DNA, 15 bp, Homo sapiens
gatgtgttgactctt

SEQ ID NO: 1155979 - DNA, 15 bp, Homo sapiens
agatgtgttgactct

SEQ ID NO: 1155980 - DNA, 15 bp, Homo sapiens
aagatgtgttgactc

SEQ ID NO: 1155981 - DNA, 15 bp, Homo sapiens
aaagatgtgttgact

SEQ ID NO: 1155982 - DNA, 15 bp, Homo sapiens
taaagatgtgttgac

SEQ ID NO: 1155983 - DNA, 15 bp, Homo sapiens
ttaaagatgtgttga

SEQ ID NO: 1155984 - DNA, 15 bp, Homo sapiens
attaaagatgtgttg

SEQ ID NO: 1155985 - DNA, 15 bp, Homo sapiens
aattaaagatgtgtt

SEQ ID NO: 1155986 - DNA, 15 bp, Homo sapiens
taattaaagatgtgt

SEQ ID NO: 1155987 - DNA, 15 bp, Homo sapiens
gtaattaaagatgtg

SEQ ID NO: 1155988 - DNA, 15 bp, Homo sapiens
tgtaattaaagatgt

SEQ ID NO: 1155989 - DNA, 15 bp, Homo sapiens
ctgtaattaaagatg

SEQ ID NO: 1155990 - DNA, 15 bp, Homo sapiens
cctgtaattaaagat

SEQ ID NO: 1155991 - DNA, 15 bp, Homo sapiens
gcctgtaattaaaga

SEQ ID NO: 1155992 - DNA, 15 bp, Homo sapiens
tgcctgtaattaaag

SEQ ID NO: 1155993 - DNA, 15 bp, Homo sapiens
ctgcctgtaattaaa

SEQ ID NO: 1155994 - DNA, 15 bp, Homo sapiens
gctgcctgtaattaa

SEQ ID NO: 1155995 - DNA, 15 bp, Homo sapiens
tgctgcctgtaatta

SEQ ID NO: 1155996 - DNA, 15 bp, Homo sapiens
ttgctgcctgtaatt

SEQ ID NO: 1155997 - DNA, 15 bp, Homo sapiens
attgctgcctgtaat

SEQ ID NO: 1155998 - DNA, 15 bp, Homo sapiens
cattgctgcctgtaa

SEQ ID NO: 1155999 - DNA, 15 bp, Homo sapiens
tcattgctgcctgta

SEQ ID NO: 1156000 - DNA, 15 bp, Homo sapiens
gtcattgctgcctgt

SEQ ID NO: 1156001 - DNA, 15 bp, Homo sapiens
agtcattgctgcctg

SEQ ID NO: 1156002 - DNA, 15 bp, Homo sapiens
cagtcattgctgcct

SEQ ID NO: 1156003 - DNA, 15 bp, Homo sapiens
ccagtcattgctgcc

SEQ ID NO: 1156004 - DNA, 15 bp, Homo sapiens
accagtcattgctgc

SEQ ID NO: 1156005 - DNA, 15 bp, Homo sapiens
aaccagtcattgctg

SEQ ID NO: 1156006 - DNA, 15 bp, Homo sapiens
aaaccagtcattgct

SEQ ID NO: 1156007 - DNA, 15 bp, Homo sapiens
gaaaccagtcattgc

SEQ ID NO: 1156008 - DNA, 15 bp, Homo sapiens
agaaaccagtcattg

SEQ ID NO: 1156009 - DNA, 15 bp, Homo sapiens
gagaaaccagtcatt

SEQ ID NO: 1156010 - DNA, 15 bp, Homo sapiens
tgagaaaccagtcat

SEQ ID NO: 1156011 - DNA, 15 bp, Homo sapiens
ctgagaaaccagtca

SEQ ID NO: 1156012 - DNA, 15 bp, Homo sapiens
tctgagaaaccagtc

SEQ ID NO: 1156013 - DNA, 15 bp, Homo sapiens
ctctgagaaaccagt

SEQ ID NO: 1156014 - DNA, 15 bp, Homo sapiens
gctctgagaaaccag

SEQ ID NO: 1156015 - DNA, 15 bp, Homo sapiens
tgctctgagaaacca

SEQ ID NO: 1156016 - DNA, 15 bp, Homo sapiens
ctgctctgagaaacc

SEQ ID NO: 1156017 - DNA, 15 bp, Homo sapiens
actgctctgagaaac

SEQ ID NO: 1156018 - DNA, 15 bp, Homo sapiens
gactgctctgagaaa

SEQ ID NO: 1156019 - DNA, 15 bp, Homo sapiens
agactgctctgagaa

SEQ ID NO: 1156020 - DNA, 15 bp, Homo sapiens
cagactgctctgaga

SEQ ID NO: 1156021 - DNA, 15 bp, Homo sapiens
gcagactgctctgag

SEQ ID NO: 1156022 - DNA, 15 bp, Homo sapiens
agcagactgctctga

SEQ ID NO: 1156023 - DNA, 15 bp, Homo sapiens
gagcagactgctctg

SEQ ID NO: 1156024 - DNA, 15 bp, Homo sapiens
tgagcagactgctct

SEQ ID NO: 1156025 - DNA, 15 bp, Homo sapiens
ctgagcagactgctc

SEQ ID NO: 1156026 - DNA, 15 bp, Homo sapiens
cctgagcagactgct

SEQ ID NO: 1156027 - DNA, 15 bp, Homo sapiens
tcctgagcagactgc

SEQ ID NO: 1156028 - DNA, 15 bp, Homo sapiens
atcctgagcagactg

SEQ ID NO: 1156029 - DNA, 15 bp, Homo sapiens
tatcctgagcagact

SEQ ID NO: 1156030 - DNA, 15 bp, Homo sapiens
atatcctgagcagac

SEQ ID NO: 1156031 - DNA, 15 bp, Homo sapiens
tatatcctgagcaga

SEQ ID NO: 1156032 - DNA, 15 bp, Homo sapiens
ctatatcctgagcag

SEQ ID NO: 1156033 - DNA, 15 bp, Homo sapiens
cctatatcctgagca

SEQ ID NO: 1156034 - DNA, 15 bp, Homo sapiens
acctatatcctgagc

SEQ ID NO: 1156035 - DNA, 15 bp, Homo sapiens
cacctatatcctgag

SEQ ID NO: 1156036 - DNA, 15 bp, Homo sapiens
tcacctatatcctga

SEQ ID NO: 1156037 - DNA, 15 bp, Homo sapiens
atcacctatatcctg

SEQ ID NO: 1156038 - DNA, 15 bp, Homo sapiens
aatcacctatatcct

SEQ ID NO: 1156039 - DNA, 15 bp, Homo sapiens
aaatcacctatatcc

SEQ ID NO: 1156040 - DNA, 15 bp, Homo sapiens
aaaatcacctatatc

SEQ ID NO: 1156041 - DNA, 15 bp, Homo sapiens
aaaaatcacctatat

SEQ ID NO: 1156042 - DNA, 15 bp, Homo sapiens
taaaaatcacctata

SEQ ID NO: 1156043 - DNA, 15 bp, Homo sapiens
gtaaaaatcacctat

SEQ ID NO: 1156044 - DNA, 15 bp, Homo sapiens
ggtaaaaatcaccta

SEQ ID NO: 1156045 - DNA, 15 bp, Homo sapiens
gggtaaaaatcacct

SEQ ID NO: 1156046 - DNA, 15 bp, Homo sapiens
tgggtaaaaatcacc

SEQ ID NO: 1156047 - DNA, 15 bp, Homo sapiens
atgggtaaaaatcac

SEQ ID NO: 1156048 - DNA, 15 bp, Homo sapiens
aatgggtaaaaatca

SEQ ID NO: 1156049 - DNA, 15 bp, Homo sapiens
aaatgggtaaaaatc

SEQ ID NO: 1156050 - DNA, 15 bp, Homo sapiens
taaatgggtaaaaat

SEQ ID NO: 1156051 - DNA, 15 bp, Homo sapiens
ctaaatgggtaaaaa

SEQ ID NO: 1156052 - DNA, 15 bp, Homo sapiens
cctaaatgggtaaaa

SEQ ID NO: 1156053 - DNA, 15 bp, Homo sapiens
gcctaaatgggtaaa

SEQ ID NO: 1156054 - DNA, 15 bp, Homo sapiens
tgcctaaatgggtaa

SEQ ID NO: 1156055 - DNA, 15 bp, Homo sapiens
atgcctaaatgggta

SEQ ID NO: 1156056 - DNA, 15 bp, Homo sapiens
tatgcctaaatgggt

SEQ ID NO: 1156057 - DNA, 15 bp, Homo sapiens
ttatgcctaaatggg

SEQ ID NO: 1156058 - DNA, 15 bp, Homo sapiens
cttatgcctaaatgg

SEQ ID NO: 1156059 - DNA, 15 bp, Homo sapiens
tcttatgcctaaatg

SEQ ID NO: 1156060 - DNA, 15 bp, Homo sapiens
atcttatgcctaaat

SEQ ID NO: 1156061 - DNA, 15 bp, Homo sapiens
gatcttatgcctaaa

SEQ ID NO: 1156062 - DNA, 15 bp, Homo sapiens
agatcttatgcctaa

SEQ ID NO: 1156063 - DNA, 15 bp, Homo sapiens
cagatcttatgccta

SEQ ID NO: 1156064 - DNA, 15 bp, Homo sapiens
gcagatcttatgcct

SEQ ID NO: 1156065 - DNA, 15 bp, Homo sapiens
agcagatcttatgcc

SEQ ID NO: 1156066 - DNA, 15 bp, Homo sapiens
tagcagatcttatgc

SEQ ID NO: 1156067 - DNA, 15 bp, Homo sapiens
gtagcagatcttatg

SEQ ID NO: 1156068 - DNA, 15 bp, Homo sapiens
tgtagcagatcttat

SEQ ID NO: 1156069 - DNA, 15 bp, Homo sapiens
ttgtagcagatctta

SEQ ID NO: 1156070 - DNA, 15 bp, Homo sapiens
attgtagcagatctt

SEQ ID NO: 1156071 - DNA, 15 bp, Homo sapiens
tattgtagcagatct

SEQ ID NO: 1156072 - DNA, 15 bp, Homo sapiens
ttattgtagcagatc

SEQ ID NO: 1156073 - DNA, 15 bp, Homo sapiens
tttattgtagcagat

SEQ ID NO: 1156074 - DNA, 15 bp, Homo sapiens
ctttattgtagcaga

SEQ ID NO: 1156075 - DNA, 15 bp, Homo sapiens
cctttattgtagcag

SEQ ID NO: 1156076 - DNA, 15 bp, Homo sapiens
tcctttattgtagca

SEQ ID NO: 1156077 - DNA, 15 bp, Homo sapiens
ttcctttattgtagc

SEQ ID NO: 1156078 - DNA, 15 bp, Homo sapiens
tttcctttattgtag

SEQ ID NO: 1156079 - DNA, 15 bp, Homo sapiens
ctttcctttattgta

SEQ ID NO: 1156080 - DNA, 15 bp, Homo sapiens
cctttcctttattgt

SEQ ID NO: 1156081 - DNA, 15 bp, Homo sapiens
ccctttcctttattg

SEQ ID NO: 1156082 - DNA, 15 bp, Homo sapiens
tccctttcctttatt

SEQ ID NO: 1156083 - DNA, 15 bp, Homo sapiens
ctccctttcctttat

SEQ ID NO: 1156084 - DNA, 15 bp, Homo sapiens
tctccctttccttta

SEQ ID NO: 1156085 - DNA, 15 bp, Homo sapiens
ttctccctttccttt

SEQ ID NO: 1156086 - DNA, 15 bp, Homo sapiens
gttctccctttcctt

SEQ ID NO: 1156087 - DNA, 15 bp, Homo sapiens
ggttctccctttcct

SEQ ID NO: 1156088 - DNA, 15 bp, Homo sapiens
tggttctccctttcc

SEQ ID NO: 1156089 - DNA, 15 bp, Homo sapiens
ttggttctccctttc

SEQ ID NO: 1156090 - DNA, 15 bp, Homo sapiens
tttggttctcccttt

SEQ ID NO: 1156091 - DNA, 15 bp, Homo sapiens
ctttggttctccctt

SEQ ID NO: 1156092 - DNA, 15 bp, Homo sapiens
gctttggttctccct

SEQ ID NO: 1156093 - DNA, 15 bp, Homo sapiens
ggctttggttctccc

SEQ ID NO: 1156094 - DNA, 15 bp, Homo sapiens
gggctttggttctcc

SEQ ID NO: 1156095 - DNA, 15 bp, Homo sapiens
tgggctttggttctc

SEQ ID NO: 1156096 - DNA, 15 bp, Homo sapiens
gtgggctttggttct

SEQ ID NO: 1156097 - DNA, 15 bp, Homo sapiens
cgtgggctttggttc

SEQ ID NO: 1156098 - DNA, 15 bp, Homo sapiens
acgtgggctttggtt

SEQ ID NO: 1156099 - DNA, 15 bp, Homo sapiens
gacgtgggctttggt

SEQ ID NO: 1156100 - DNA, 15 bp, Homo sapiens
agacgtgggctttgg

SEQ ID NO: 1156101 - DNA, 15 bp, Homo sapiens
gagacgtgggctttg

SEQ ID NO: 1156102 - DNA, 15 bp, Homo sapiens
agagacgtgggcttt

SEQ ID NO: 1156103 - DNA, 15 bp, Homo sapiens
cagagacgtgggctt

SEQ ID NO: 1156104 - DNA, 15 bp, Homo sapiens
ccagagacgtgggct

SEQ ID NO: 1156105 - DNA, 15 bp, Homo sapiens
cccagagacgtgggc

SEQ ID NO: 1156106 - DNA, 15 bp, Homo sapiens
acccagagacgtggg

SEQ ID NO: 1156107 - DNA, 15 bp, Homo sapiens
cacccagagacgtgg

SEQ ID NO: 1156108 - DNA, 15 bp, Homo sapiens
acacccagagacgtg

SEQ ID NO: 1156109 - DNA, 15 bp, Homo sapiens
cacacccagagacgt

SEQ ID NO: 1156110 - DNA, 15 bp, Homo sapiens
acacacccagagacg

SEQ ID NO: 1156111 - DNA, 15 bp, Homo sapiens
cacacacccagagac

SEQ ID NO: 1156112 - DNA, 15 bp, Homo sapiens
gcacacacccagaga

SEQ ID NO: 1156113 - DNA, 15 bp, Homo sapiens
ggcacacacccagag

SEQ ID NO: 1156114 - DNA, 15 bp, Homo sapiens
aggcacacacccaga

SEQ ID NO: 1156115 - DNA, 15 bp, Homo sapiens
caggcacacacccag

SEQ ID NO: 1156116 - DNA, 15 bp, Homo sapiens
acaggcacacaccca

SEQ ID NO: 1156117 - DNA, 15 bp, Homo sapiens
tacaggcacacaccc

SEQ ID NO: 1156118 - DNA, 15 bp, Homo sapiens
tctacaggcacacac

SEQ ID NO: 1156119 - DNA, 15 bp, Homo sapiens
ttctacaggcacaca

SEQ ID NO: 1156120 - DNA, 15 bp, Homo sapiens
tttctacaggcacac

SEQ ID NO: 1156121 - DNA, 15 bp, Homo sapiens
ttttctacaggcaca

SEQ ID NO: 1156122 - DNA, 15 bp, Homo sapiens
tttttctacaggcac

SEQ ID NO: 1156123 - DNA, 15 bp, Homo sapiens
atttttctacaggca

SEQ ID NO: 1156124 - DNA, 15 bp, Homo sapiens
tatttttctacaggc

SEQ ID NO: 1156125 - DNA, 15 bp, Homo sapiens
atatttttctacagg

SEQ ID NO: 1156126 - DNA, 15 bp, Homo sapiens
aatatttttctacag

SEQ ID NO: 1156127 - DNA, 15 bp, Homo sapiens
gaatatttttctaca

SEQ ID NO: 1156128 - DNA, 15 bp, Homo sapiens
agaatatttttctac

SEQ ID NO: 1156129 - DNA, 15 bp, Homo sapiens
cagaatatttttcta

SEQ ID NO: 1156130 - DNA, 15 bp, Homo sapiens
gcagaatatttttct

SEQ ID NO: 1156131 - DNA, 15 bp, Homo sapiens
tgcagaatatttttc

SEQ ID NO: 1156132 - DNA, 15 bp, Homo sapiens
ttgcagaatattttt

SEQ ID NO: 1156133 - DNA, 15 bp, Homo sapiens
tttgcagaatatttt

SEQ ID NO: 1156134 - DNA, 15 bp, Homo sapiens
atttgcagaatattt

SEQ ID NO: 1156135 - DNA, 15 bp, Homo sapiens
catttgcagaatatt

SEQ ID NO: 1156136 - DNA, 15 bp, Homo sapiens
ccatttgcagaatat

SEQ ID NO: 1156137 - DNA, 15 bp, Homo sapiens
cccatttgcagaata

SEQ ID NO: 1156138 - DNA, 15 bp, Homo sapiens
tcccatttgcagaat

SEQ ID NO: 1156139 - DNA, 15 bp, Homo sapiens
ttcccatttgcagaa

SEQ ID NO: 1156140 - DNA, 15 bp, Homo sapiens
attcccatttgcaga

SEQ ID NO: 1156141 - DNA, 15 bp, Homo sapiens
tattcccatttgcag

SEQ ID NO: 1156142 - DNA, 15 bp, Homo sapiens
atattcccatttgca

SEQ ID NO: 1156143 - DNA, 15 bp, Homo sapiens
gatattcccatttgc

SEQ ID NO: 1156144 - DNA, 15 bp, Homo sapiens
tgatattcccatttg

SEQ ID NO: 1156145 - DNA, 15 bp, Homo sapiens
atgatattcccattt

SEQ ID NO: 1156146 - DNA, 15 bp, Homo sapiens
tatgatattcccatt

SEQ ID NO: 1156147 - DNA, 15 bp, Homo sapiens
ttatgatattcccat

SEQ ID NO: 1156148 - DNA, 15 bp, Homo sapiens
tttatgatattccca

SEQ ID NO: 1156149 - DNA, 15 bp, Homo sapiens
ttttatgatattccc

SEQ ID NO: 1156150 - DNA, 15 bp, Homo sapiens
attttatgatattcc

SEQ ID NO: 1156151 - DNA, 15 bp, Homo sapiens
cattttatgatattc

SEQ ID NO: 1156152 - DNA, 15 bp, Homo sapiens
tcattttatgatatt

SEQ ID NO: 1156153 - DNA, 15 bp, Homo sapiens
ttcattttatgatat

SEQ ID NO: 1156154 - DNA, 15 bp, Homo sapiens
tttcattttatgata

SEQ ID NO: 1156155 - DNA, 15 bp, Homo sapiens
ctttcattttatgat

SEQ ID NO: 1156156 - DNA, 15 bp, Homo sapiens
cctttcattttatga

SEQ ID NO: 1156157 - DNA, 15 bp, Homo sapiens
tcctttcattttatg

SEQ ID NO: 1156158 - DNA, 15 bp, Homo sapiens
atcctttcattttat

SEQ ID NO: 1156159 - DNA, 15 bp, Homo sapiens
aatcctttcatttta

SEQ ID NO: 1156160 - DNA, 15 bp, Homo sapiens
gaatcctttcatttt

SEQ ID NO: 1156161 - DNA, 15 bp, Homo sapiens
tgaatcctttcattt

SEQ ID NO: 1156162 - DNA, 15 bp, Homo sapiens
ttgaatcctttcatt

SEQ ID NO: 1156163 - DNA, 15 bp, Homo sapiens
attgaatcctttcat

SEQ ID NO: 1156164 - DNA, 15 bp, Homo sapiens
gattgaatcctttca

SEQ ID NO: 1156165 - DNA, 15 bp, Homo sapiens
agattgaatcctttc

SEQ ID NO: 1156166 - DNA, 15 bp, Homo sapiens
tagattgaatccttt

SEQ ID NO: 1156167 - DNA, 15 bp, Homo sapiens
ctagattgaatcctt

SEQ ID NO: 1156168 - DNA, 15 bp, Homo sapiens
tctagattgaatcct

SEQ ID NO: 1156169 - DNA, 15 bp, Homo sapiens
ttctagattgaatcc

SEQ ID NO: 1156170 - DNA, 15 bp, Homo sapiens
tttctagattgaatc

SEQ ID NO: 1156171 - DNA, 15 bp, Homo sapiens
ctttctagattgaat

SEQ ID NO: 1156172 - DNA, 15 bp, Homo sapiens
actttctagattgaa

SEQ ID NO: 1156173 - DNA, 15 bp, Homo sapiens
aactttctagattga

SEQ ID NO: 1156174 - DNA, 15 bp, Homo sapiens
aaactttctagattg

SEQ ID NO: 1156175 - DNA, 15 bp, Homo sapiens
gaaactttctagatt

SEQ ID NO: 1156176 - DNA, 15 bp, Homo sapiens
agaaactttctagat

SEQ ID NO: 1156177 - DNA, 15 bp, Homo sapiens
aagaaactttctaga

SEQ ID NO: 1156178 - DNA, 15 bp, Homo sapiens
gaagaaactttctag

SEQ ID NO: 1156179 - DNA, 15 bp, Homo sapiens
agaagaaactttcta

SEQ ID NO: 1156180 - DNA, 15 bp, Homo sapiens
aagaagaaactttct

SEQ ID NO: 1156181 - DNA, 15 bp, Homo sapiens
taagaagaaactttc

SEQ ID NO: 1156182 - DNA, 15 bp, Homo sapiens
ataagaagaaacttt

SEQ ID NO: 1156183 - DNA, 15 bp, Homo sapiens
aataagaagaaactt

SEQ ID NO: 1156184 - DNA, 15 bp, Homo sapiens
taataagaagaaact

SEQ ID NO: 1156185 - DNA, 15 bp, Homo sapiens
ttaataagaagaaac

SEQ ID NO: 1156186 - DNA, 15 bp, Homo sapiens
tttaataagaagaaa

SEQ ID NO: 1156187 - DNA, 15 bp, Homo sapiens
ttttaataagaagaa

SEQ ID NO: 1156188 - DNA, 15 bp, Homo sapiens
tttttaataagaaga

SEQ ID NO: 1156189 - DNA, 15 bp, Homo sapiens
atttttaataagaag

SEQ ID NO: 1156190 - DNA, 15 bp, Homo sapiens
aatttttaataagaa

SEQ ID NO: 1156191 - DNA, 15 bp, Homo sapiens
taatttttaataaga

SEQ ID NO: 1156192 - DNA, 15 bp, Homo sapiens
ctaatttttaataag

SEQ ID NO: 1156193 - DNA, 15 bp, Homo sapiens
actaatttttaataa

SEQ ID NO: 1156194 - DNA, 15 bp, Homo sapiens
aactaatttttaata

SEQ ID NO: 1156195 - DNA, 15 bp, Homo sapiens
aaactaatttttaat

SEQ ID NO: 1156196 - DNA, 15 bp, Homo sapiens
aaaactaatttttaa

SEQ ID NO: 1156197 - DNA, 15 bp, Homo sapiens
aaaaactaattttta

SEQ ID NO: 1156198 - DNA, 15 bp, Homo sapiens
aaaaaactaattttt

SEQ ID NO: 1156199 - DNA, 15 bp, Homo sapiens
aaaaaaactaatttt

SEQ ID NO: 1156200 - DNA, 15 bp, Homo sapiens
taaaaaaactaattt

SEQ ID NO: 1156201 - DNA, 15 bp, Homo sapiens
ttaaaaaaactaatt

SEQ ID NO: 1156202 - DNA, 15 bp, Homo sapiens
tttaaaaaaactaat

SEQ ID NO: 1156203 - DNA, 15 bp, Homo sapiens
ttttaaaaaaactaa

SEQ ID NO: 1156204 - DNA, 15 bp, Homo sapiens
tttttaaaaaaacta

SEQ ID NO: 1156205 - DNA, 15 bp, Homo sapiens
ttttttaaaaaaact

SEQ ID NO: 1156206 - DNA, 15 bp, Homo sapiens
tttttttaaaaaaac

SEQ ID NO: 1156207 - DNA, 15 bp, Homo sapiens
atttttttttaaaaa

SEQ ID NO: 1156208 - DNA, 15 bp, Homo sapiens
aatttttttttaaaa

SEQ ID NO: 1156209 - DNA, 15 bp, Homo sapiens
gaatttttttttaaa

SEQ ID NO: 1156210 - DNA, 15 bp, Homo sapiens
tgaatttttttttaa

SEQ ID NO: 1156211 - DNA, 15 bp, Homo sapiens
gtgaattttttttta

SEQ ID NO: 1156212 - DNA, 15 bp, Homo sapiens
ggtgaattttttttt

SEQ ID NO: 1156213 - DNA, 15 bp, Homo sapiens
cggtgaatttttttt

SEQ ID NO: 1156214 - DNA, 15 bp, Homo sapiens
ccggtgaattttttt

SEQ ID NO: 1156215 - DNA, 15 bp, Homo sapiens
cccggtgaatttttt

SEQ ID NO: 1156216 - DNA, 15 bp, Homo sapiens
tcccggtgaattttt

SEQ ID NO: 1156217 - DNA, 15 bp, Homo sapiens
ttcccggtgaatttt

SEQ ID NO: 1156218 - DNA, 15 bp, Homo sapiens
attcccggtgaattt

SEQ ID NO: 1156219 - DNA, 15 bp, Homo sapiens
cattcccggtgaatt

SEQ ID NO: 1156220 - DNA, 15 bp, Homo sapiens
ccattcccggtgaat

SEQ ID NO: 1156221 - DNA, 15 bp, Homo sapiens
accattcccggtgaa

SEQ ID NO: 1156222 - DNA, 15 bp, Homo sapiens
caccattcccggtga

SEQ ID NO: 1156223 - DNA, 15 bp, Homo sapiens
ccaccattcccggtg

SEQ ID NO: 1156224 - DNA, 15 bp, Homo sapiens
gccaccattcccggt

SEQ ID NO: 1156225 - DNA, 15 bp, Homo sapiens
cgccaccattcccgg

SEQ ID NO: 1156226 - DNA, 15 bp, Homo sapiens
acgccaccattcccg

SEQ ID NO: 1156227 - DNA, 15 bp, Homo sapiens
tacgccaccattccc

SEQ ID NO: 1156228 - DNA, 15 bp, Homo sapiens
atacgccaccattcc

SEQ ID NO: 1156229 - DNA, 15 bp, Homo sapiens
catacgccaccattc

SEQ ID NO: 1156230 - DNA, 15 bp, Homo sapiens
acatacgccaccatt

SEQ ID NO: 1156231 - DNA, 15 bp, Homo sapiens
gacatacgccaccat

SEQ ID NO: 1156232 - DNA, 15 bp, Homo sapiens
agacatacgccacca

SEQ ID NO: 1156233 - DNA, 15 bp, Homo sapiens
cagacatacgccacc

SEQ ID NO: 1156234 - DNA, 15 bp, Homo sapiens
acagacatacgccac

SEQ ID NO: 1156235 - DNA, 15 bp, Homo sapiens
cacagacatacgcca

SEQ ID NO: 1156236 - DNA, 15 bp, Homo sapiens
ccacagacatacgcc

SEQ ID NO: 1156237 - DNA, 15 bp, Homo sapiens
accacagacatacgc

SEQ ID NO: 1156238 - DNA, 15 bp, Homo sapiens
gaccacagacatacg

SEQ ID NO: 1156239 - DNA, 15 bp, Homo sapiens
ggaccacagacatac

SEQ ID NO: 1156240 - DNA, 15 bp, Homo sapiens
gggaccacagacata

SEQ ID NO: 1156241 - DNA, 15 bp, Homo sapiens
tgggaccacagacat

SEQ ID NO: 1156242 - DNA, 15 bp, Homo sapiens
ctgggaccacagaca

SEQ ID NO: 1156243 - DNA, 15 bp, Homo sapiens
gctgggaccacagac

SEQ ID NO: 1156244 - DNA, 15 bp, Homo sapiens
agctgggaccacaga

SEQ ID NO: 1156245 - DNA, 15 bp, Homo sapiens
tgtagctgggaccac

SEQ ID NO: 1156246 - DNA, 15 bp, Homo sapiens
gtgtagctgggacca

SEQ ID NO: 1156247 - DNA, 15 bp, Homo sapiens
tgtgtagctgggacc

SEQ ID NO: 1156248 - DNA, 15 bp, Homo sapiens
ctgtgtagctgggac

SEQ ID NO: 1156249 - DNA, 15 bp, Homo sapiens
cctgtgtagctggga

SEQ ID NO: 1156250 - DNA, 15 bp, Homo sapiens
ccctgtgtagctggg

SEQ ID NO: 1156251 - DNA, 15 bp, Homo sapiens
tccctgtgtagctgg

SEQ ID NO: 1156252 - DNA, 15 bp, Homo sapiens
ctccctgtgtagctg

SEQ ID NO: 1156253 - DNA, 15 bp, Homo sapiens
actccctgtgtagct

SEQ ID NO: 1156254 - DNA, 15 bp, Homo sapiens
aactccctgtgtagc

SEQ ID NO: 1156255 - DNA, 15 bp, Homo sapiens
taactccctgtgtag

SEQ ID NO: 1156256 - DNA, 15 bp, Homo sapiens
ttaactccctgtgta

SEQ ID NO: 1156257 - DNA, 15 bp, Homo sapiens
cttaactccctgtgt

SEQ ID NO: 1156258 - DNA, 15 bp, Homo sapiens
ccttaactccctgtg

SEQ ID NO: 1156259 - DNA, 15 bp, Homo sapiens
gccttaactccctgt

SEQ ID NO: 1156260 - DNA, 15 bp, Homo sapiens
tgccttaactccctg

SEQ ID NO: 1156261 - DNA, 15 bp, Homo sapiens
ctgccttaactccct

SEQ ID NO: 1156262 - DNA, 15 bp, Homo sapiens
cctgccttaactccc

SEQ ID NO: 1156263 - DNA, 15 bp, Homo sapiens
tcctgccttaactcc

SEQ ID NO: 1156264 - DNA, 15 bp, Homo sapiens
ctcctgccttaactc

SEQ ID NO: 1156265 - DNA, 15 bp, Homo sapiens
cctcctgccttaact

SEQ ID NO: 1156266 - DNA, 15 bp, Homo sapiens
tcctcctgccttaac

SEQ ID NO: 1156267 - DNA, 15 bp, Homo sapiens
atcctcctgccttaa

SEQ ID NO: 1156268 - DNA, 15 bp, Homo sapiens
gatcctcctgcctta

SEQ ID NO: 1156269 - DNA, 15 bp, Homo sapiens
tgatcctcctgcctt

SEQ ID NO: 1156270 - DNA, 15 bp, Homo sapiens
gaagtgatcctcctg

SEQ ID NO: 1156271 - DNA, 15 bp, Homo sapiens
tgaagtgatcctcct

SEQ ID NO: 1156272 - DNA, 15 bp, Homo sapiens
ctgaagtgatcctcc

SEQ ID NO: 1156273 - DNA, 15 bp, Homo sapiens
gctgaagtgatcctc

SEQ ID NO: 1156274 - DNA, 15 bp, Homo sapiens
ggctgaagtgatcct

SEQ ID NO: 1156275 - DNA, 15 bp, Homo sapiens
gggctgaagtgatcc

SEQ ID NO: 1156276 - DNA, 15 bp, Homo sapiens
tgggctgaagtgatc

SEQ ID NO: 1156277 - DNA, 15 bp, Homo sapiens
ttgggctgaagtgat

SEQ ID NO: 1156278 - DNA, 15 bp, Homo sapiens
cttgggctgaagtga

SEQ ID NO: 1156279 - DNA, 15 bp, Homo sapiens
tcttgggctgaagtg

SEQ ID NO: 1156280 - DNA, 15 bp, Homo sapiens
ttcttgggctgaagt

SEQ ID NO: 1156281 - DNA, 15 bp, Homo sapiens
cttcttgggctgaag

SEQ ID NO: 1156282 - DNA, 15 bp, Homo sapiens
acttcttgggctgaa

SEQ ID NO: 1156283 - DNA, 15 bp, Homo sapiens
aacttcttgggctga

SEQ ID NO: 1156284 - DNA, 15 bp, Homo sapiens
caacttcttgggctg

SEQ ID NO: 1156285 - DNA, 15 bp, Homo sapiens
tcaacttcttgggct

SEQ ID NO: 1156286 - DNA, 15 bp, Homo sapiens
ctcaacttcttgggc

SEQ ID NO: 1156287 - DNA, 15 bp, Homo sapiens
cctcaacttcttggg

SEQ ID NO: 1156288 - DNA, 15 bp, Homo sapiens
gcctcaacttcttgg

SEQ ID NO: 1156289 - DNA, 15 bp, Homo sapiens
agcctcaacttcttg

SEQ ID NO: 1156290 - DNA, 15 bp, Homo sapiens
cagcctcaacttctt

SEQ ID NO: 1156291 - DNA, 15 bp, Homo sapiens
gcagcctcaacttct

SEQ ID NO: 1156292 - DNA, 15 bp, Homo sapiens
actgcagcctcaact

SEQ ID NO: 1156293 - DNA, 15 bp, Homo sapiens
acatggctcactgca

SEQ ID NO: 1156294 - DNA, 15 bp, Homo sapiens
aacatggctcactgc

SEQ ID NO: 1156295 - DNA, 15 bp, Homo sapiens
gaacatggctcactg

SEQ ID NO: 1156296 - DNA, 15 bp, Homo sapiens
cgaacatggctcact

SEQ ID NO: 1156297 - DNA, 15 bp, Homo sapiens
acgaacatggctcac

SEQ ID NO: 1156298 - DNA, 15 bp, Homo sapiens
cacgaacatggctca

SEQ ID NO: 1156299 - DNA, 15 bp, Homo sapiens
gcacgaacatggctc

SEQ ID NO: 1156300 - DNA, 15 bp, Homo sapiens
ggcacgaacatggct

SEQ ID NO: 1156301 - DNA, 15 bp, Homo sapiens
tggcacgaacatggc

SEQ ID NO: 1156302 - DNA, 15 bp, Homo sapiens
gtggcacgaacatgg

SEQ ID NO: 1156303 - DNA, 15 bp, Homo sapiens
agtggcacgaacatg

SEQ ID NO: 1156304 - DNA, 15 bp, Homo sapiens
cagtggcacgaacat

SEQ ID NO: 1156305 - DNA, 15 bp, Homo sapiens
gcagtggcacgaaca

SEQ ID NO: 1156306 - DNA, 15 bp, Homo sapiens
tgcagtggcacgaac

SEQ ID NO: 1156307 - DNA, 15 bp, Homo sapiens
gtgcagtggcacgaa

SEQ ID NO: 1156308 - DNA, 15 bp, Homo sapiens
tgtgcagtggcacga

SEQ ID NO: 1156309 - DNA, 15 bp, Homo sapiens
gtgtgcagtggcacg

SEQ ID NO: 1156310 - DNA, 15 bp, Homo sapiens
ggtgtgcagtggcac

SEQ ID NO: 1156311 - DNA, 15 bp, Homo sapiens
ccaggctggtgtgca

SEQ ID NO: 1156312 - DNA, 15 bp, Homo sapiens
tcacccaggctggtg

SEQ ID NO: 1156313 - DNA, 15 bp, Homo sapiens
gtcacccaggctggt

SEQ ID NO: 1156314 - DNA, 15 bp, Homo sapiens
ggtctcattctgtca

SEQ ID NO: 1156315 - DNA, 15 bp, Homo sapiens
atttttttgagacag

SEQ ID NO: 1156316 - DNA, 15 bp, Homo sapiens
tgttttatttttatt

SEQ ID NO: 1156317 - DNA, 15 bp, Homo sapiens
ttgttttatttttat

SEQ ID NO: 1156318 - DNA, 15 bp, Homo sapiens
gttgttttattttta

SEQ ID NO: 1156319 - DNA, 15 bp, Homo sapiens
agttgttttattttt

SEQ ID NO: 1156320 - DNA, 15 bp, Homo sapiens
tagttgttttatttt

SEQ ID NO: 1156321 - DNA, 15 bp, Homo sapiens
ctagttgttttattt

SEQ ID NO: 1156322 - DNA, 15 bp, Homo sapiens
actagttgttttatt

SEQ ID NO: 1156323 - DNA, 15 bp, Homo sapiens
aactagttgttttat

SEQ ID NO: 1156324 - DNA, 15 bp, Homo sapiens
aaactagttgtttta

SEQ ID NO: 1156325 - DNA, 15 bp, Homo sapiens
aaaactagttgtttt

SEQ ID NO: 1156326 - DNA, 15 bp, Homo sapiens
caaaactagttgttt

SEQ ID NO: 1156327 - DNA, 15 bp, Homo sapiens
tcaaaactagttgtt

SEQ ID NO: 1156328 - DNA, 15 bp, Homo sapiens
gtcaaaactagttgt

SEQ ID NO: 1156329 - DNA, 15 bp, Homo sapiens
agtcaaaactagttg

SEQ ID NO: 1156330 - DNA, 15 bp, Homo sapiens
cagtcaaaactagtt

SEQ ID NO: 1156331 - DNA, 15 bp, Homo sapiens
acagtcaaaactagt

SEQ ID NO: 1156332 - DNA, 15 bp, Homo sapiens
gacagtcaaaactag

SEQ ID NO: 1156333 - DNA, 15 bp, Homo sapiens
ggacagtcaaaacta

SEQ ID NO: 1156334 - DNA, 15 bp, Homo sapiens
tggacagtcaaaact

SEQ ID NO: 1156335 - DNA, 15 bp, Homo sapiens
atggacagtcaaaac

SEQ ID NO: 1156336 - DNA, 15 bp, Homo sapiens
catggacagtcaaaa

SEQ ID NO: 1156337 - DNA, 15 bp, Homo sapiens
acatggacagtcaaa

SEQ ID NO: 1156338 - DNA, 15 bp, Homo sapiens
cacatggacagtcaa

SEQ ID NO: 1156339 - DNA, 15 bp, Homo sapiens
acacatggacagtca

SEQ ID NO: 1156340 - DNA, 15 bp, Homo sapiens
cacacatggacagtc

SEQ ID NO: 1156341 - DNA, 15 bp, Homo sapiens
acacacatggacagt

SEQ ID NO: 1156342 - DNA, 15 bp, Homo sapiens
aacacacatggacag

SEQ ID NO: 1156343 - DNA, 15 bp, Homo sapiens
gaacacacatggaca

SEQ ID NO: 1156344 - DNA, 15 bp, Homo sapiens
ggaacacacatggac

SEQ ID NO: 1156345 - DNA, 15 bp, Homo sapiens
aggaacacacatgga

SEQ ID NO: 1156346 - DNA, 15 bp, Homo sapiens
aaggaacacacatgg

SEQ ID NO: 1156347 - DNA, 15 bp, Homo sapiens
caaggaacacacatg

SEQ ID NO: 1156348 - DNA, 15 bp, Homo sapiens
gcaaggaacacacat

SEQ ID NO: 1156349 - DNA, 15 bp, Homo sapiens
tgcaaggaacacaca

SEQ ID NO: 1156350 - DNA, 15 bp, Homo sapiens
atgcaaggaacacac

SEQ ID NO: 1156351 - DNA, 15 bp, Homo sapiens
tatgcaaggaacaca

SEQ ID NO: 1156352 - DNA, 15 bp, Homo sapiens
atatgcaaggaacac

SEQ ID NO: 1156353 - DNA, 15 bp, Homo sapiens
aatatgcaaggaaca

SEQ ID NO: 1156354 - DNA, 15 bp, Homo sapiens
aaatatgcaaggaac

SEQ ID NO: 1156355 - DNA, 15 bp, Homo sapiens
taaatatgcaaggaa

SEQ ID NO: 1156356 - DNA, 15 bp, Homo sapiens
ttaaatatgcaagga

SEQ ID NO: 1156357 - DNA, 15 bp, Homo sapiens
attaaatatgcaagg

SEQ ID NO: 1156358 - DNA, 15 bp, Homo sapiens
aattaaatatgcaag

SEQ ID NO: 1156359 - DNA, 15 bp, Homo sapiens
taattaaatatgcaa

SEQ ID NO: 1156360 - DNA, 15 bp, Homo sapiens
ataattaaatatgca

SEQ ID NO: 1156361 - DNA, 15 bp, Homo sapiens
aataattaaatatgc

SEQ ID NO: 1156362 - DNA, 15 bp, Homo sapiens
aaataattaaatatg

SEQ ID NO: 1156363 - DNA, 15 bp, Homo sapiens
gaaataattaaatat

SEQ ID NO: 1156364 - DNA, 15 bp, Homo sapiens
tgaaataattaaata

SEQ ID NO: 1156365 - DNA, 15 bp, Homo sapiens
atgaaataattaaat

SEQ ID NO: 1156366 - DNA, 15 bp, Homo sapiens
aatgaaataattaaa

SEQ ID NO: 1156367 - DNA, 15 bp, Homo sapiens
gaatgaaataattaa

SEQ ID NO: 1156368 - DNA, 15 bp, Homo sapiens
tgaatgaaataatta

SEQ ID NO: 1156369 - DNA, 15 bp, Homo sapiens
atgaatgaaataatt

SEQ ID NO: 1156370 - DNA, 15 bp, Homo sapiens
aatgaatgaaataat

SEQ ID NO: 1156371 - DNA, 15 bp, Homo sapiens
aaatgaatgaaataa

SEQ ID NO: 1156372 - DNA, 15 bp, Homo sapiens
caaatgaatgaaata

SEQ ID NO: 1156373 - DNA, 15 bp, Homo sapiens
acaaatgaatgaaat

SEQ ID NO: 1156374 - DNA, 15 bp, Homo sapiens
tacaaatgaatgaaa

SEQ ID NO: 1156375 - DNA, 15 bp, Homo sapiens
ttacaaatgaatgaa

SEQ ID NO: 1156376 - DNA, 15 bp, Homo sapiens
cttacaaatgaatga

SEQ ID NO: 1156377 - DNA, 15 bp, Homo sapiens
acttacaaatgaatg

SEQ ID NO: 1156378 - DNA, 15 bp, Homo sapiens
aacttacaaatgaat

SEQ ID NO: 1156379 - DNA, 15 bp, Homo sapiens
taacttacaaatgaa

SEQ ID NO: 1156380 - DNA, 15 bp, Homo sapiens
ataacttacaaatga

SEQ ID NO: 1156381 - DNA, 15 bp, Homo sapiens
aataacttacaaatg

SEQ ID NO: 1156382 - DNA, 15 bp, Homo sapiens
taataacttacaaat

SEQ ID NO: 1156383 - DNA, 15 bp, Homo sapiens
ttaataacttacaaa

SEQ ID NO: 1156384 - DNA, 15 bp, Homo sapiens
cttaataacttacaa

SEQ ID NO: 1156385 - DNA, 15 bp, Homo sapiens
acttaataacttaca

SEQ ID NO: 1156386 - DNA, 15 bp, Homo sapiens
aacttaataacttac

SEQ ID NO: 1156387 - DNA, 15 bp, Homo sapiens
taacttaataactta

SEQ ID NO: 1156388 - DNA, 15 bp, Homo sapiens
ttaacttaataactt

SEQ ID NO: 1156389 - DNA, 15 bp, Homo sapiens
tttaacttaataact

SEQ ID NO: 1156390 - DNA, 15 bp, Homo sapiens
atttaacttaataac

SEQ ID NO: 1156391 - DNA, 15 bp, Homo sapiens
catttaacttaataa

SEQ ID NO: 1156392 - DNA, 15 bp, Homo sapiens
acatttaacttaata

SEQ ID NO: 1156393 - DNA, 15 bp, Homo sapiens
tacatttaacttaat

SEQ ID NO: 1156394 - DNA, 15 bp, Homo sapiens
ttacatttaacttaa

SEQ ID NO: 1156395 - DNA, 15 bp, Homo sapiens
attacatttaactta

SEQ ID NO: 1156396 - DNA, 15 bp, Homo sapiens
cattacatttaactt

SEQ ID NO: 1156397 - DNA, 15 bp, Homo sapiens
gcattacatttaact

SEQ ID NO: 1156398 - DNA, 15 bp, Homo sapiens
ggcattacatttaac

SEQ ID NO: 1156399 - DNA, 15 bp, Homo sapiens
aggcattacatttaa

SEQ ID NO: 1156400 - DNA, 15 bp, Homo sapiens
taggcattacattta

SEQ ID NO: 1156401 - DNA, 15 bp, Homo sapiens
gtaggcattacattt

SEQ ID NO: 1156402 - DNA, 15 bp, Homo sapiens
agtaggcattacatt

SEQ ID NO: 1156403 - DNA, 15 bp, Homo sapiens
cagtaggcattacat

SEQ ID NO: 1156404 - DNA, 15 bp, Homo sapiens
tcagtaggcattaca

SEQ ID NO: 1156405 - DNA, 15 bp, Homo sapiens
ttcagtaggcattac

SEQ ID NO: 1156406 - DNA, 15 bp, Homo sapiens
cttcagtaggcatta

SEQ ID NO: 1156407 - DNA, 15 bp, Homo sapiens
tcttcagtaggcatt

SEQ ID NO: 1156408 - DNA, 15 bp, Homo sapiens
ttcttcagtaggcat

SEQ ID NO: 1156409 - DNA, 15 bp, Homo sapiens
tttcttcagtaggca

SEQ ID NO: 1156410 - DNA, 15 bp, Homo sapiens
gtttcttcagtaggc

SEQ ID NO: 1156411 - DNA, 15 bp, Homo sapiens
tgtttcttcagtagg

SEQ ID NO: 1156412 - DNA, 15 bp, Homo sapiens
atgtttcttcagtag

SEQ ID NO: 1156413 - DNA, 15 bp, Homo sapiens
aatgtttcttcagta

SEQ ID NO: 1156414 - DNA, 15 bp, Homo sapiens
aaatgtttcttcagt

SEQ ID NO: 1156415 - DNA, 15 bp, Homo sapiens
aaaatgtttcttcag

SEQ ID NO: 1156416 - DNA, 15 bp, Homo sapiens
taaaatgtttcttca

SEQ ID NO: 1156417 - DNA, 15 bp, Homo sapiens
ttaaaatgtttcttc

SEQ ID NO: 1156418 - DNA, 15 bp, Homo sapiens
attaaaatgtttctt

SEQ ID NO: 1156419 - DNA, 15 bp, Homo sapiens
tattaaaatgtttct

SEQ ID NO: 1156420 - DNA, 15 bp, Homo sapiens
ttattaaaatgtttc

SEQ ID NO: 1156421 - DNA, 15 bp, Homo sapiens
cttattaaaatgttt

SEQ ID NO: 1156422 - DNA, 15 bp, Homo sapiens
gcttattaaaatgtt

SEQ ID NO: 1156423 - DNA, 15 bp, Homo sapiens
agcttattaaaatgt

SEQ ID NO: 1156424 - DNA, 15 bp, Homo sapiens
aagcttattaaaatg

SEQ ID NO: 1156425 - DNA, 15 bp, Homo sapiens
aaagcttattaaaat

SEQ ID NO: 1156426 - DNA, 15 bp, Homo sapiens
aaaagcttattaaaa

SEQ ID NO: 1156427 - DNA, 15 bp, Homo sapiens
aaaaagcttattaaa

SEQ ID NO: 1156428 - DNA, 15 bp, Homo sapiens
ggcactttaggaggc

SEQ ID NO: 1156429 - DNA, 15 bp, Homo sapiens
cggcactttaggagg

SEQ ID NO: 1156430 - DNA, 15 bp, Homo sapiens
ccggcactttaggag

SEQ ID NO: 1156431 - DNA, 15 bp, Homo sapiens
tccggcactttagga

SEQ ID NO: 1156432 - DNA, 15 bp, Homo sapiens
ttccggcactttagg

SEQ ID NO: 1156433 - DNA, 15 bp, Homo sapiens
attccggcactttag

SEQ ID NO: 1156434 - DNA, 15 bp, Homo sapiens
aattccggcacttta

SEQ ID NO: 1156435 - DNA, 15 bp, Homo sapiens
taattccggcacttt

SEQ ID NO: 1156436 - DNA, 15 bp, Homo sapiens
gtaattccggcactt

SEQ ID NO: 1156437 - DNA, 15 bp, Homo sapiens
tgtaattccggcact

SEQ ID NO: 1156438 - DNA, 15 bp, Homo sapiens
ctgtaattccggcac

SEQ ID NO: 1156439 - DNA, 15 bp, Homo sapiens
tctgtaattccggca

SEQ ID NO: 1156440 - DNA, 15 bp, Homo sapiens
atctgtaattccggc

SEQ ID NO: 1156441 - DNA, 15 bp, Homo sapiens
tatctgtaattccgg

SEQ ID NO: 1156442 - DNA, 15 bp, Homo sapiens
gtatctgtaattccg

SEQ ID NO: 1156443 - DNA, 15 bp, Homo sapiens
tgtatctgtaattcc

SEQ ID NO: 1156444 - DNA, 15 bp, Homo sapiens
ctgtatctgtaattc

SEQ ID NO: 1156445 - DNA, 15 bp, Homo sapiens
tctgtatctgtaatt

SEQ ID NO: 1156446 - DNA, 15 bp, Homo sapiens
atctgtatctgtaat

SEQ ID NO: 1156447 - DNA, 15 bp, Homo sapiens
catctgtatctgtaa

SEQ ID NO: 1156448 - DNA, 15 bp, Homo sapiens
acatctgtatctgta

SEQ ID NO: 1156449 - DNA, 15 bp, Homo sapiens
cacatctgtatctgt

SEQ ID NO: 1156450 - DNA, 15 bp, Homo sapiens
tcacatctgtatctg

SEQ ID NO: 1156451 - DNA, 15 bp, Homo sapiens
ttcacatctgtatct

SEQ ID NO: 1156452 - DNA, 15 bp, Homo sapiens
gttcacatctgtatc

SEQ ID NO: 1156453 - DNA, 15 bp, Homo sapiens
agttcacatctgtat

SEQ ID NO: 1156454 - DNA, 15 bp, Homo sapiens
tagttcacatctgta

SEQ ID NO: 1156455 - DNA, 15 bp, Homo sapiens
gtagttcacatctgt

SEQ ID NO: 1156456 - DNA, 15 bp, Homo sapiens
ggtagttcacatctg

SEQ ID NO: 1156457 - DNA, 15 bp, Homo sapiens
tggtagttcacatct

SEQ ID NO: 1156458 - DNA, 15 bp, Homo sapiens
atggtagttcacatc

SEQ ID NO: 1156459 - DNA, 15 bp, Homo sapiens
catggtagttcacat

SEQ ID NO: 1156460 - DNA, 15 bp, Homo sapiens
gcatggtagttcaca

SEQ ID NO: 1156461 - DNA, 15 bp, Homo sapiens
ggcatggtagttcac

SEQ ID NO: 1156462 - DNA, 15 bp, Homo sapiens
gggcatggtagttca

SEQ ID NO: 1156463 - DNA, 15 bp, Homo sapiens
cgggcatggtagttc

SEQ ID NO: 1156464 - DNA, 15 bp, Homo sapiens
ccgggcatggtagtt

SEQ ID NO: 1156465 - DNA, 15 bp, Homo sapiens
gccgggcatggtagt

SEQ ID NO: 1156466 - DNA, 15 bp, Homo sapiens
ggccgggcatggtag

SEQ ID NO: 1156467 - DNA, 15 bp, Homo sapiens
gggccgggcatggta

SEQ ID NO: 1156468 - DNA, 15 bp, Homo sapiens
agggccgggcatggt

SEQ ID NO: 1156469 - DNA, 15 bp, Homo sapiens
tagggccgggcatgg

SEQ ID NO: 1156470 - DNA, 15 bp, Homo sapiens
ctagggccgggcatg

SEQ ID NO: 1156471 - DNA, 15 bp, Homo sapiens
actagggccgggcat

SEQ ID NO: 1156472 - DNA, 15 bp, Homo sapiens
aactagggccgggca

SEQ ID NO: 1156473 - DNA, 15 bp, Homo sapiens
gaactagggccgggc

SEQ ID NO: 1156474 - DNA, 15 bp, Homo sapiens
agaactagggccggg

SEQ ID NO: 1156475 - DNA, 15 bp, Homo sapiens
cagaactagggccgg

SEQ ID NO: 1156476 - DNA, 15 bp, Homo sapiens
tcagaactagggccg

SEQ ID NO: 1156477 - DNA, 15 bp, Homo sapiens
ctcagaactagggcc

SEQ ID NO: 1156478 - DNA, 15 bp, Homo sapiens
actcagaactagggc

SEQ ID NO: 1156479 - DNA, 15 bp, Homo sapiens
aactcagaactaggg

SEQ ID NO: 1156480 - DNA, 15 bp, Homo sapiens
gaactcagaactagg

SEQ ID NO: 1156481 - DNA, 15 bp, Homo sapiens
agaactcagaactag

SEQ ID NO: 1156482 - DNA, 15 bp, Homo sapiens
tagaactcagaacta

SEQ ID NO: 1156483 - DNA, 15 bp, Homo sapiens
ttagaactcagaact

SEQ ID NO: 1156484 - DNA, 15 bp, Homo sapiens
attagaactcagaac

SEQ ID NO: 1156485 - DNA, 15 bp, Homo sapiens
tattagaactcagaa

SEQ ID NO: 1156486 - DNA, 15 bp, Homo sapiens
atattagaactcaga

SEQ ID NO: 1156487 - DNA, 15 bp, Homo sapiens
catattagaactcag

SEQ ID NO: 1156488 - DNA, 15 bp, Homo sapiens
tcatattagaactca

SEQ ID NO: 1156489 - DNA, 15 bp, Homo sapiens
ttcatattagaactc

SEQ ID NO: 1156490 - DNA, 15 bp, Homo sapiens
tttcatattagaact

SEQ ID NO: 1156491 - DNA, 15 bp, Homo sapiens
gtttcatattagaac

SEQ ID NO: 1156492 - DNA, 15 bp, Homo sapiens
agtttcatattagaa

SEQ ID NO: 1156493 - DNA, 15 bp, Homo sapiens
aagtttcatattaga

SEQ ID NO: 1156494 - DNA, 15 bp, Homo sapiens
aaagtttcatattag

SEQ ID NO: 1156495 - DNA, 15 bp, Homo sapiens
taaagtttcatatta

SEQ ID NO: 1156496 - DNA, 15 bp, Homo sapiens
ctaaagtttcatatt

SEQ ID NO: 1156497 - DNA, 15 bp, Homo sapiens
cctaaagtttcatat

SEQ ID NO: 1156498 - DNA, 15 bp, Homo sapiens
acctaaagtttcata

SEQ ID NO: 1156499 - DNA, 15 bp, Homo sapiens
gacctaaagtttcat

SEQ ID NO: 1156500 - DNA, 15 bp, Homo sapiens
agacctaaagtttca

SEQ ID NO: 1156501 - DNA, 15 bp, Homo sapiens
gagacctaaagtttc

SEQ ID NO: 1156502 - DNA, 15 bp, Homo sapiens
tgagacctaaagttt

SEQ ID NO: 1156503 - DNA, 15 bp, Homo sapiens
ctgagacctaaagtt

SEQ ID NO: 1156504 - DNA, 15 bp, Homo sapiens
actgagacctaaagt

SEQ ID NO: 1156505 - DNA, 15 bp, Homo sapiens
aactgagacctaaag

SEQ ID NO: 1156506 - DNA, 15 bp, Homo sapiens
aaactgagacctaaa

SEQ ID NO: 1156507 - DNA, 15 bp, Homo sapiens
taaactgagacctaa

SEQ ID NO: 1156508 - DNA, 15 bp, Homo sapiens
ttaaactgagaccta

SEQ ID NO: 1156509 - DNA, 15 bp, Homo sapiens
gttaaactgagacct

SEQ ID NO: 1156510 - DNA, 15 bp, Homo sapiens
ggttaaactgagacc

SEQ ID NO: 1156511 - DNA, 15 bp, Homo sapiens
aggttaaactgagac

SEQ ID NO: 1156512 - DNA, 15 bp, Homo sapiens
taggttaaactgaga

SEQ ID NO: 1156513 - DNA, 15 bp, Homo sapiens
gtaggttaaactgag

SEQ ID NO: 1156514 - DNA, 15 bp, Homo sapiens
agtaggttaaactga

SEQ ID NO: 1156515 - DNA, 15 bp, Homo sapiens
aagtaggttaaactg

SEQ ID NO: 1156516 - DNA, 15 bp, Homo sapiens
taagtaggttaaact

SEQ ID NO: 1156517 - DNA, 15 bp, Homo sapiens
gtaagtaggttaaac

SEQ ID NO: 1156518 - DNA, 15 bp, Homo sapiens
agtaagtaggttaaa

SEQ ID NO: 1156519 - DNA, 15 bp, Homo sapiens
tagtaagtaggttaa

SEQ ID NO: 1156520 - DNA, 15 bp, Homo sapiens
atagtaagtaggtta

SEQ ID NO: 1156521 - DNA, 15 bp, Homo sapiens
aatagtaagtaggtt

SEQ ID NO: 1156522 - DNA, 15 bp, Homo sapiens
taatagtaagtaggt

SEQ ID NO: 1156523 - DNA, 15 bp, Homo sapiens
ttaatagtaagtagg

SEQ ID NO: 1156524 - DNA, 15 bp, Homo sapiens
attaatagtaagtag

SEQ ID NO: 1156525 - DNA, 15 bp, Homo sapiens
aattaatagtaagta

SEQ ID NO: 1156526 - DNA, 15 bp, Homo sapiens
taattaatagtaagt

SEQ ID NO: 1156527 - DNA, 15 bp, Homo sapiens
ataattaatagtaag

SEQ ID NO: 1156528 - DNA, 15 bp, Homo sapiens
tataattaatagtaa

SEQ ID NO: 1156529 - DNA, 15 bp, Homo sapiens
atataattaatagta

SEQ ID NO: 1156530 - DNA, 15 bp, Homo sapiens
catataattaatagt

SEQ ID NO: 1156531 - DNA, 15 bp, Homo sapiens
tcatataattaatag

SEQ ID NO: 1156532 - DNA, 15 bp, Homo sapiens
atcatataattaata

SEQ ID NO: 1156533 - DNA, 15 bp, Homo sapiens
gatcatataattaat

SEQ ID NO: 1156534 - DNA, 15 bp, Homo sapiens
agatcatataattaa

SEQ ID NO: 1156535 - DNA, 15 bp, Homo sapiens
aagatcatataatta

SEQ ID NO: 1156536 - DNA, 15 bp, Homo sapiens
caagatcatataatt

SEQ ID NO: 1156537 - DNA, 15 bp, Homo sapiens
ccaagatcatataat

SEQ ID NO: 1156538 - DNA, 15 bp, Homo sapiens
tccaagatcatataa

SEQ ID NO: 1156539 - DNA, 15 bp, Homo sapiens
gtccaagatcatata

SEQ ID NO: 1156540 - DNA, 15 bp, Homo sapiens
tgtccaagatcatat

SEQ ID NO: 1156541 - DNA, 15 bp, Homo sapiens
ttgtccaagatcata

SEQ ID NO: 1156542 - DNA, 15 bp, Homo sapiens
attgtccaagatcat

SEQ ID NO: 1156543 - DNA, 15 bp, Homo sapiens
cattgtccaagatca

SEQ ID NO: 1156544 - DNA, 15 bp, Homo sapiens
ccattgtccaagatc

SEQ ID NO: 1156545 - DNA, 15 bp, Homo sapiens
cccattgtccaagat

SEQ ID NO: 1156546 - DNA, 15 bp, Homo sapiens
gcccattgtccaaga

SEQ ID NO: 1156547 - DNA, 15 bp, Homo sapiens
ggcccattgtccaag

SEQ ID NO: 1156548 - DNA, 15 bp, Homo sapiens
aggcccattgtccaa

SEQ ID NO: 1156549 - DNA, 15 bp, Homo sapiens
taggcccattgtcca

SEQ ID NO: 1156550 - DNA, 15 bp, Homo sapiens
ttaggcccattgtcc

SEQ ID NO: 1156551 - DNA, 15 bp, Homo sapiens
tttaggcccattgtc

SEQ ID NO: 1156552 - DNA, 15 bp, Homo sapiens
ttttaggcccattgt

SEQ ID NO: 1156553 - DNA, 15 bp, Homo sapiens
tttttaggcccattg

SEQ ID NO: 1156554 - DNA, 15 bp, Homo sapiens
ttttttaggcccatt

SEQ ID NO: 1156555 - DNA, 15 bp, Homo sapiens
cttttttaggcccat

SEQ ID NO: 1156556 - DNA, 15 bp, Homo sapiens
ccttttttaggccca

SEQ ID NO: 1156557 - DNA, 15 bp, Homo sapiens
tccttttttaggccc

SEQ ID NO: 1156558 - DNA, 15 bp, Homo sapiens
ctccttttttaggcc

SEQ ID NO: 1156559 - DNA, 15 bp, Homo sapiens
actccttttttaggc

SEQ ID NO: 1156560 - DNA, 15 bp, Homo sapiens
gactccttttttagg

SEQ ID NO: 1156561 - DNA, 15 bp, Homo sapiens
agactccttttttag

SEQ ID NO: 1156562 - DNA, 15 bp, Homo sapiens
aagactcctttttta

SEQ ID NO: 1156563 - DNA, 15 bp, Homo sapiens
taagactcctttttt

SEQ ID NO: 1156564 - DNA, 15 bp, Homo sapiens
ttaagactccttttt

SEQ ID NO: 1156565 - DNA, 15 bp, Homo sapiens
attaagactcctttt

SEQ ID NO: 1156566 - DNA, 15 bp, Homo sapiens
tattaagactccttt

SEQ ID NO: 1156567 - DNA, 15 bp, Homo sapiens
atattaagactcctt

SEQ ID NO: 1156568 - DNA, 15 bp, Homo sapiens
aatattaagactcct

SEQ ID NO: 1156569 - DNA, 15 bp, Homo sapiens
gaatattaagactcc

SEQ ID NO: 1156570 - DNA, 15 bp, Homo sapiens
ggaatattaagactc

SEQ ID NO: 1156571 - DNA, 15 bp, Homo sapiens
gggaatattaagact

SEQ ID NO: 1156572 - DNA, 15 bp, Homo sapiens
tgggaatattaagac

SEQ ID NO: 1156573 - DNA, 15 bp, Homo sapiens
ttgggaatattaaga

SEQ ID NO: 1156574 - DNA, 15 bp, Homo sapiens
gttgggaatattaag

SEQ ID NO: 1156575 - DNA, 15 bp, Homo sapiens
agttgggaatattaa

SEQ ID NO: 1156576 - DNA, 15 bp, Homo sapiens
tagttgggaatatta

SEQ ID NO: 1156577 - DNA, 15 bp, Homo sapiens
gtagttgggaatatt

SEQ ID NO: 1156578 - DNA, 15 bp, Homo sapiens
tgtagttgggaatat

SEQ ID NO: 1156579 - DNA, 15 bp, Homo sapiens
atgtagttgggaata

SEQ ID NO: 1156580 - DNA, 15 bp, Homo sapiens
tatgtagttgggaat

SEQ ID NO: 1156581 - DNA, 15 bp, Homo sapiens
ttatgtagttgggaa

SEQ ID NO: 1156582 - DNA, 15 bp, Homo sapiens
attatgtagttggga

SEQ ID NO: 1156583 - DNA, 15 bp, Homo sapiens
cattatgtagttggg

SEQ ID NO: 1156584 - DNA, 15 bp, Homo sapiens
ccattatgtagttgg

SEQ ID NO: 1156585 - DNA, 15 bp, Homo sapiens
tccattatgtagttg

SEQ ID NO: 1156586 - DNA, 15 bp, Homo sapiens
ctccattatgtagtt

SEQ ID NO: 1156587 - DNA, 15 bp, Homo sapiens
tctccattatgtagt

SEQ ID NO: 1156588 - DNA, 15 bp, Homo sapiens
atctccattatgtag

SEQ ID NO: 1156589 - DNA, 15 bp, Homo sapiens
tatctccattatgta

SEQ ID NO: 1156590 - DNA, 15 bp, Homo sapiens
ctatctccattatgt

SEQ ID NO: 1156591 - DNA, 15 bp, Homo sapiens
actatctccattatg

SEQ ID NO: 1156592 - DNA, 15 bp, Homo sapiens
tactatctccattat

SEQ ID NO: 1156593 - DNA, 15 bp, Homo sapiens
ttactatctccatta

SEQ ID NO: 1156594 - DNA, 15 bp, Homo sapiens
cttactatctccatt

SEQ ID NO: 1156595 - DNA, 15 bp, Homo sapiens
ccttactatctccat

SEQ ID NO: 1156596 - DNA, 15 bp, Homo sapiens
gccttactatctcca

SEQ ID NO: 1156597 - DNA, 15 bp, Homo sapiens
ggccttactatctcc

SEQ ID NO: 1156598 - DNA, 15 bp, Homo sapiens
aggccttactatctc

SEQ ID NO: 1156599 - DNA, 15 bp, Homo sapiens
caggccttactatct

SEQ ID NO: 1156600 - DNA, 15 bp, Homo sapiens
gcaggccttactatc

SEQ ID NO: 1156601 - DNA, 15 bp, Homo sapiens
ggcaggccttactat

SEQ ID NO: 1156602 - DNA, 15 bp, Homo sapiens
tggcaggccttacta

SEQ ID NO: 1156603 - DNA, 15 bp, Homo sapiens
gtggcaggccttact

SEQ ID NO: 1156604 - DNA, 15 bp, Homo sapiens
tgtggcaggccttac

SEQ ID NO: 1156605 - DNA, 15 bp, Homo sapiens
gtgtggcaggcctta

SEQ ID NO: 1156606 - DNA, 15 bp, Homo sapiens
ggtgtggcaggcctt

SEQ ID NO: 1156607 - DNA, 15 bp, Homo sapiens
aggtgtggcaggcct

SEQ ID NO: 1156608 - DNA, 15 bp, Homo sapiens
gaggtgtggcaggcc

SEQ ID NO: 1156609 - DNA, 15 bp, Homo sapiens
agaggtgtggcaggc

SEQ ID NO: 1156610 - DNA, 15 bp, Homo sapiens
gagaggtgtggcagg

SEQ ID NO: 1156611 - DNA, 15 bp, Homo sapiens
agagaggtgtggcag

SEQ ID NO: 1156612 - DNA, 15 bp, Homo sapiens
gagagaggtgtggca

SEQ ID NO: 1156613 - DNA, 15 bp, Homo sapiens
tgagagaggtgtggc

SEQ ID NO: 1156614 - DNA, 15 bp, Homo sapiens
atgagagaggtgtgg

SEQ ID NO: 1156615 - DNA, 15 bp, Homo sapiens
tatgagagaggtgtg

SEQ ID NO: 1156616 - DNA, 15 bp, Homo sapiens
ttatgagagaggtgt

SEQ ID NO: 1156617 - DNA, 15 bp, Homo sapiens
tttatgagagaggtg

SEQ ID NO: 1156618 - DNA, 15 bp, Homo sapiens
ttttatgagagaggt

SEQ ID NO: 1156619 - DNA, 15 bp, Homo sapiens
attttatgagagagg

SEQ ID NO: 1156620 - DNA, 15 bp, Homo sapiens
aattttatgagagag

SEQ ID NO: 1156621 - DNA, 15 bp, Homo sapiens
taattttatgagaga

SEQ ID NO: 1156622 - DNA, 15 bp, Homo sapiens
ataattttatgagag

SEQ ID NO: 1156623 - DNA, 15 bp, Homo sapiens
cataattttatgaga

SEQ ID NO: 1156624 - DNA, 15 bp, Homo sapiens
acataattttatgag

SEQ ID NO: 1156625 - DNA, 15 bp, Homo sapiens
aacataattttatga

SEQ ID NO: 1156626 - DNA, 15 bp, Homo sapiens
caacataattttatg

SEQ ID NO: 1156627 - DNA, 15 bp, Homo sapiens
tcaacataattttat

SEQ ID NO: 1156628 - DNA, 15 bp, Homo sapiens
ttcaacataatttta

SEQ ID NO: 1156629 - DNA, 15 bp, Homo sapiens
tttcaacataatttt

SEQ ID NO: 1156630 - DNA, 15 bp, Homo sapiens
gtttcaacataattt

SEQ ID NO: 1156631 - DNA, 15 bp, Homo sapiens
agtttcaacataatt

SEQ ID NO: 1156632 - DNA, 15 bp, Homo sapiens
tagtttcaacataat

SEQ ID NO: 1156633 - DNA, 15 bp, Homo sapiens
ttagtttcaacataa

SEQ ID NO: 1156634 - DNA, 15 bp, Homo sapiens
tttagtttcaacata

SEQ ID NO: 1156635 - DNA, 15 bp, Homo sapiens
ttttagtttcaacat

SEQ ID NO: 1156636 - DNA, 15 bp, Homo sapiens
attttagtttcaaca

SEQ ID NO: 1156637 - DNA, 15 bp, Homo sapiens
tattttagtttcaac

SEQ ID NO: 1156638 - DNA, 15 bp, Homo sapiens
ctattttagtttcaa

SEQ ID NO: 1156639 - DNA, 15 bp, Homo sapiens
gctattttagtttca

SEQ ID NO: 1156640 - DNA, 15 bp, Homo sapiens
tgctattttagtttc

SEQ ID NO: 1156641 - DNA, 15 bp, Homo sapiens
atgctattttagttt

SEQ ID NO: 1156642 - DNA, 15 bp, Homo sapiens
tatgctattttagtt

SEQ ID NO: 1156643 - DNA, 15 bp, Homo sapiens
ttatgctattttagt

SEQ ID NO: 1156644 - DNA, 15 bp, Homo sapiens
tttatgctattttag

SEQ ID NO: 1156645 - DNA, 15 bp, Homo sapiens
atttatgctatttta

SEQ ID NO: 1156646 - DNA, 15 bp, Homo sapiens
tatttatgctatttt

SEQ ID NO: 1156647 - DNA, 15 bp, Homo sapiens
ttatttatgctattt

SEQ ID NO: 1156648 - DNA, 15 bp, Homo sapiens
tttatttatgctatt

SEQ ID NO: 1156649 - DNA, 15 bp, Homo sapiens
ttttatttatgctat

SEQ ID NO: 1156650 - DNA, 15 bp, Homo sapiens
tttttatttatgcta

SEQ ID NO: 1156651 - DNA, 15 bp, Homo sapiens
atttttatttatgct

SEQ ID NO: 1156652 - DNA, 15 bp, Homo sapiens
catttttatttatgc

SEQ ID NO: 1156653 - DNA, 15 bp, Homo sapiens
acatttttatttatg

SEQ ID NO: 1156654 - DNA, 15 bp, Homo sapiens
gacatttttatttat

SEQ ID NO: 1156655 - DNA, 15 bp, Homo sapiens
tgacatttttattta

SEQ ID NO: 1156656 - DNA, 15 bp, Homo sapiens
ttgacatttttattt

SEQ ID NO: 1156657 - DNA, 15 bp, Homo sapiens
tttgacatttttatt

SEQ ID NO: 1156658 - DNA, 15 bp, Homo sapiens
ttttgacatttttat

SEQ ID NO: 1156659 - DNA, 15 bp, Homo sapiens
tttttgacattttta

SEQ ID NO: 1156660 - DNA, 15 bp, Homo sapiens
ttttttgacattttt

SEQ ID NO: 1156661 - DNA, 15 bp, Homo sapiens
attttttgacatttt

SEQ ID NO: 1156662 - DNA, 15 bp, Homo sapiens
tattttttgacattt

SEQ ID NO: 1156663 - DNA, 15 bp, Homo sapiens
atattttttgacatt

SEQ ID NO: 1156664 - DNA, 15 bp, Homo sapiens
gatattttttgacat

SEQ ID NO: 1156665 - DNA, 15 bp, Homo sapiens
ggatattttttgaca

SEQ ID NO: 1156666 - DNA, 15 bp, Homo sapiens
gggatattttttgac

SEQ ID NO: 1156667 - DNA, 15 bp, Homo sapiens
tgggatattttttga

SEQ ID NO: 1156668 - DNA, 15 bp, Homo sapiens
atgggatattttttg

SEQ ID NO: 1156669 - DNA, 15 bp, Homo sapiens
tatgggatatttttt

SEQ ID NO: 1156670 - DNA, 15 bp, Homo sapiens
ttatgggatattttt

SEQ ID NO: 1156671 - DNA, 15 bp, Homo sapiens
attatgggatatttt

SEQ ID NO: 1156672 - DNA, 15 bp, Homo sapiens
aattatgggatattt

SEQ ID NO: 1156673 - DNA, 15 bp, Homo sapiens
aaattatgggatatt

SEQ ID NO: 1156674 - DNA, 15 bp, Homo sapiens
aaaattatgggatat

SEQ ID NO: 1156675 - DNA, 15 bp, Homo sapiens
aaaaattatgggata

SEQ ID NO: 1156676 - DNA, 15 bp, Homo sapiens
caaaaattatgggat

SEQ ID NO: 1156677 - DNA, 15 bp, Homo sapiens
gcaaaaattatggga

SEQ ID NO: 1156678 - DNA, 15 bp, Homo sapiens
agcaaaaattatggg

SEQ ID NO: 1156679 - DNA, 15 bp, Homo sapiens
tagcaaaaattatgg

SEQ ID NO: 1156680 - DNA, 15 bp, Homo sapiens
ttagcaaaaattatg

SEQ ID NO: 1156681 - DNA, 15 bp, Homo sapiens
tttagcaaaaattat

SEQ ID NO: 1156682 - DNA, 15 bp, Homo sapiens
gtttagcaaaaatta

SEQ ID NO: 1156683 - DNA, 15 bp, Homo sapiens
agtttagcaaaaatt

SEQ ID NO: 1156684 - DNA, 15 bp, Homo sapiens
aagtttagcaaaaat

SEQ ID NO: 1156685 - DNA, 15 bp, Homo sapiens
gaagtttagcaaaaa

SEQ ID NO: 1156686 - DNA, 15 bp, Homo sapiens
agaagtttagcaaaa

SEQ ID NO: 1156687 - DNA, 15 bp, Homo sapiens
aagaagtttagcaaa

SEQ ID NO: 1156688 - DNA, 15 bp, Homo sapiens
caagaagtttagcaa

SEQ ID NO: 1156689 - DNA, 15 bp, Homo sapiens
gcaagaagtttagca

SEQ ID NO: 1156690 - DNA, 15 bp, Homo sapiens
ggcaagaagtttagc

SEQ ID NO: 1156691 - DNA, 15 bp, Homo sapiens
aggcaagaagtttag

SEQ ID NO: 1156692 - DNA, 15 bp, Homo sapiens
aaggcaagaagttta

SEQ ID NO: 1156693 - DNA, 15 bp, Homo sapiens
gaaggcaagaagttt

SEQ ID NO: 1156694 - DNA, 15 bp, Homo sapiens
ggaaggcaagaagtt

SEQ ID NO: 1156695 - DNA, 15 bp, Homo sapiens
aggaaggcaagaagt

SEQ ID NO: 1156696 - DNA, 15 bp, Homo sapiens
aaggaaggcaagaag

SEQ ID NO: 1156697 - DNA, 15 bp, Homo sapiens
taaggaaggcaagaa

SEQ ID NO: 1156698 - DNA, 15 bp, Homo sapiens
ataaggaaggcaaga

SEQ ID NO: 1156699 - DNA, 15 bp, Homo sapiens
gataaggaaggcaag

SEQ ID NO: 1156700 - DNA, 15 bp, Homo sapiens
ggataaggaaggcaa

SEQ ID NO: 1156701 - DNA, 15 bp, Homo sapiens
tggataaggaaggca

SEQ ID NO: 1156702 - DNA, 15 bp, Homo sapiens
ttggataaggaaggc

SEQ ID NO: 1156703 - DNA, 15 bp, Homo sapiens
attggataaggaagg

SEQ ID NO: 1156704 - DNA, 15 bp, Homo sapiens
aattggataaggaag

SEQ ID NO: 1156705 - DNA, 15 bp, Homo sapiens
aaattggataaggaa

SEQ ID NO: 1156706 - DNA, 15 bp, Homo sapiens
gaaattggataagga

SEQ ID NO: 1156707 - DNA, 15 bp, Homo sapiens
ggaaattggataagg

SEQ ID NO: 1156708 - DNA, 15 bp, Homo sapiens
aggaaattggataag

SEQ ID NO: 1156709 - DNA, 15 bp, Homo sapiens
gaggaaattggataa

SEQ ID NO: 1156710 - DNA, 15 bp, Homo sapiens
tgaggaaattggata

SEQ ID NO: 1156711 - DNA, 15 bp, Homo sapiens
ctgaggaaattggat

SEQ ID NO: 1156712 - DNA, 15 bp, Homo sapiens
cctgaggaaattgga

SEQ ID NO: 1156713 - DNA, 15 bp, Homo sapiens
tcctgaggaaattgg

SEQ ID NO: 1156714 - DNA, 15 bp, Homo sapiens
ttcctgaggaaattg

SEQ ID NO: 1156715 - DNA, 15 bp, Homo sapiens
gttcctgaggaaatt

SEQ ID NO: 1156716 - DNA, 15 bp, Homo sapiens
tgttcctgaggaaat

SEQ ID NO: 1156717 - DNA, 15 bp, Homo sapiens
atgttcctgaggaaa

SEQ ID NO: 1156718 - DNA, 15 bp, Homo sapiens
catgttcctgaggaa

SEQ ID NO: 1156719 - DNA, 15 bp, Homo sapiens
ccatgttcctgagga

SEQ ID NO: 1156720 - DNA, 15 bp, Homo sapiens
tccatgttcctgagg

SEQ ID NO: 1156721 - DNA, 15 bp, Homo sapiens
gtccatgttcctgag

SEQ ID NO: 1156722 - DNA, 15 bp, Homo sapiens
cgtccatgttcctga

SEQ ID NO: 1156723 - DNA, 15 bp, Homo sapiens
acgtccatgttcctg

SEQ ID NO: 1156724 - DNA, 15 bp, Homo sapiens
aacgtccatgttcct

SEQ ID NO: 1156725 - DNA, 15 bp, Homo sapiens
aaacgtccatgttcc

SEQ ID NO: 1156726 - DNA, 15 bp, Homo sapiens
aaaacgtccatgttc

SEQ ID NO: 1156727 - DNA, 15 bp, Homo sapiens
caaaacgtccatgtt

SEQ ID NO: 1156728 - DNA, 15 bp, Homo sapiens
acaaaacgtccatgt

SEQ ID NO: 1156729 - DNA, 15 bp, Homo sapiens
aacaaaacgtccatg

SEQ ID NO: 1156730 - DNA, 15 bp, Homo sapiens
gaacaaaacgtccat

SEQ ID NO: 1156731 - DNA, 15 bp, Homo sapiens
agaacaaaacgtcca

SEQ ID NO: 1156732 - DNA, 15 bp, Homo sapiens
gagaacaaaacgtcc

SEQ ID NO: 1156733 - DNA, 15 bp, Homo sapiens
tgagaacaaaacgtc

SEQ ID NO: 1156734 - DNA, 15 bp, Homo sapiens
atgagaacaaaacgt

SEQ ID NO: 1156735 - DNA, 15 bp, Homo sapiens
aatgagaacaaaacg

SEQ ID NO: 1156736 - DNA, 15 bp, Homo sapiens
aaatgagaacaaaac

SEQ ID NO: 1156737 - DNA, 15 bp, Homo sapiens
gaaatgagaacaaaa

SEQ ID NO: 1156738 - DNA, 15 bp, Homo sapiens
cgaaatgagaacaaa

SEQ ID NO: 1156739 - DNA, 15 bp, Homo sapiens
acgaaatgagaacaa

SEQ ID NO: 1156740 - DNA, 15 bp, Homo sapiens
cacgaaatgagaaca

SEQ ID NO: 1156741 - DNA, 15 bp, Homo sapiens
tcacgaaatgagaac

SEQ ID NO: 1156742 - DNA, 15 bp, Homo sapiens
atcacgaaatgagaa

SEQ ID NO: 1156743 - DNA, 15 bp, Homo sapiens
catcacgaaatgaga

SEQ ID NO: 1156744 - DNA, 15 bp, Homo sapiens
ccatcacgaaatgag

SEQ ID NO: 1156745 - DNA, 15 bp, Homo sapiens
tccatcacgaaatga

SEQ ID NO: 1156746 - DNA, 15 bp, Homo sapiens
ctccatcacgaaatg

SEQ ID NO: 1156747 - DNA, 15 bp, Homo sapiens
tctccatcacgaaat

SEQ ID NO: 1156748 - DNA, 15 bp, Homo sapiens
gtctccatcacgaaa

SEQ ID NO: 1156749 - DNA, 15 bp, Homo sapiens
agtctccatcacgaa

SEQ ID NO: 1156750 - DNA, 15 bp, Homo sapiens
cagtctccatcacga

SEQ ID NO: 1156751 - DNA, 15 bp, Homo sapiens
gcagtctccatcacg

SEQ ID NO: 1156752 - DNA, 15 bp, Homo sapiens
tgcagtctccatcac

SEQ ID NO: 1156753 - DNA, 15 bp, Homo sapiens
ctgcagtctccatca

SEQ ID NO: 1156754 - DNA, 15 bp, Homo sapiens
actgcagtctccatc

SEQ ID NO: 1156755 - DNA, 15 bp, Homo sapiens
tactgcagtctccat

SEQ ID NO: 1156756 - DNA, 15 bp, Homo sapiens
ttactgcagtctcca

SEQ ID NO: 1156757 - DNA, 15 bp, Homo sapiens
tttactgcagtctcc

SEQ ID NO: 1156758 - DNA, 15 bp, Homo sapiens
ctttactgcagtctc

SEQ ID NO: 1156759 - DNA, 15 bp, Homo sapiens
cctttactgcagtct

SEQ ID NO: 1156760 - DNA, 15 bp, Homo sapiens
tcctttactgcagtc

SEQ ID NO: 1156761 - DNA, 15 bp, Homo sapiens
atcctttactgcagt

SEQ ID NO: 1156762 - DNA, 15 bp, Homo sapiens
aatcctttactgcag

SEQ ID NO: 1156763 - DNA, 15 bp, Homo sapiens
gaatcctttactgca

SEQ ID NO: 1156764 - DNA, 15 bp, Homo sapiens
agaatcctttactgc

SEQ ID NO: 1156765 - DNA, 15 bp, Homo sapiens
aagaatcctttactg

SEQ ID NO: 1156766 - DNA, 15 bp, Homo sapiens
gaagaatcctttact

SEQ ID NO: 1156767 - DNA, 15 bp, Homo sapiens
ggaagaatcctttac

SEQ ID NO: 1156768 - DNA, 15 bp, Homo sapiens
aggaagaatccttta

SEQ ID NO: 1156769 - DNA, 15 bp, Homo sapiens
caggaagaatccttt

SEQ ID NO: 1156770 - DNA, 15 bp, Homo sapiens
ccaggaagaatcctt

SEQ ID NO: 1156771 - DNA, 15 bp, Homo sapiens
accaggaagaatcct

SEQ ID NO: 1156772 - DNA, 15 bp, Homo sapiens
gaccaggaagaatcc

SEQ ID NO: 1156773 - DNA, 15 bp, Homo sapiens
agaccaggaagaatc

SEQ ID NO: 1156774 - DNA, 15 bp, Homo sapiens
gagaccaggaagaat

SEQ ID NO: 1156775 - DNA, 15 bp, Homo sapiens
agagaccaggaagaa

SEQ ID NO: 1156776 - DNA, 15 bp, Homo sapiens
gagagaccaggaaga

SEQ ID NO: 1156777 - DNA, 15 bp, Homo sapiens
agagagaccaggaag

SEQ ID NO: 1156778 - DNA, 15 bp, Homo sapiens
tagagagaccaggaa

SEQ ID NO: 1156779 - DNA, 15 bp, Homo sapiens
atagagagaccagga

SEQ ID NO: 1156780 - DNA, 15 bp, Homo sapiens
aatagagagaccagg

SEQ ID NO: 1156781 - DNA, 15 bp, Homo sapiens
caatagagagaccag

SEQ ID NO: 1156782 - DNA, 15 bp, Homo sapiens
ccaatagagagacca

SEQ ID NO: 1156783 - DNA, 15 bp, Homo sapiens
accaatagagagacc

SEQ ID NO: 1156784 - DNA, 15 bp, Homo sapiens
caccaatagagagac

SEQ ID NO: 1156785 - DNA, 15 bp, Homo sapiens
ccaccaatagagaga

SEQ ID NO: 1156786 - DNA, 15 bp, Homo sapiens
tccaccaatagagag

SEQ ID NO: 1156787 - DNA, 15 bp, Homo sapiens
ttccaccaatagaga

SEQ ID NO: 1156788 - DNA, 15 bp, Homo sapiens
tttccaccaatagag

SEQ ID NO: 1156789 - DNA, 15 bp, Homo sapiens
atttccaccaataga

SEQ ID NO: 1156790 - DNA, 15 bp, Homo sapiens
tatttccaccaatag

SEQ ID NO: 1156791 - DNA, 15 bp, Homo sapiens
ctatttccaccaata

SEQ ID NO: 1156792 - DNA, 15 bp, Homo sapiens
gctatttccaccaat

SEQ ID NO: 1156793 - DNA, 15 bp, Homo sapiens
tgctatttccaccaa

SEQ ID NO: 1156794 - DNA, 15 bp, Homo sapiens
ctgctatttccacca

SEQ ID NO: 1156795 - DNA, 15 bp, Homo sapiens
gctgctatttccacc

SEQ ID NO: 1156796 - DNA, 15 bp, Homo sapiens
agctgctatttccac

SEQ ID NO: 1156797 - DNA, 15 bp, Homo sapiens
cagctgctatttcca

SEQ ID NO: 1156798 - DNA, 15 bp, Homo sapiens
gcagctgctatttcc

SEQ ID NO: 1156799 - DNA, 15 bp, Homo sapiens
agcagctgctatttc

SEQ ID NO: 1156800 - DNA, 15 bp, Homo sapiens
aagcagctgctattt

SEQ ID NO: 1156801 - DNA, 15 bp, Homo sapiens
gaagcagctgctatt

SEQ ID NO: 1156802 - DNA, 15 bp, Homo sapiens
agaagcagctgctat

SEQ ID NO: 1156803 - DNA, 15 bp, Homo sapiens
cagaagcagctgcta

SEQ ID NO: 1156804 - DNA, 15 bp, Homo sapiens
gcagaagcagctgct

SEQ ID NO: 1156805 - DNA, 15 bp, Homo sapiens
tgcagaagcagctgc

SEQ ID NO: 1156806 - DNA, 15 bp, Homo sapiens
ttgcagaagcagctg

SEQ ID NO: 1156807 - DNA, 15 bp, Homo sapiens
attgcagaagcagct

SEQ ID NO: 1156808 - DNA, 15 bp, Homo sapiens
gattgcagaagcagc

SEQ ID NO: 1156809 - DNA, 15 bp, Homo sapiens
tgattgcagaagcag

SEQ ID NO: 1156810 - DNA, 15 bp, Homo sapiens
ttgattgcagaagca

SEQ ID NO: 1156811 - DNA, 15 bp, Homo sapiens
tttgattgcagaagc

SEQ ID NO: 1156812 - DNA, 15 bp, Homo sapiens
ctttgattgcagaag

SEQ ID NO: 1156813 - DNA, 15 bp, Homo sapiens
actttgattgcagaa

SEQ ID NO: 1156814 - DNA, 15 bp, Homo sapiens
tactttgattgcaga

SEQ ID NO: 1156815 - DNA, 15 bp, Homo sapiens
gtactttgattgcag

SEQ ID NO: 1156816 - DNA, 15 bp, Homo sapiens
cgtactttgattgca

SEQ ID NO: 1156817 - DNA, 15 bp, Homo sapiens
acgtactttgattgc

SEQ ID NO: 1156818 - DNA, 15 bp, Homo sapiens
gacgtactttgattg

SEQ ID NO: 1156819 - DNA, 15 bp, Homo sapiens
agacgtactttgatt

SEQ ID NO: 1156820 - DNA, 15 bp, Homo sapiens
tagacgtactttgat

SEQ ID NO: 1156821 - DNA, 15 bp, Homo sapiens
atagacgtactttga

SEQ ID NO: 1156822 - DNA, 15 bp, Homo sapiens
gatagacgtactttg

SEQ ID NO: 1156823 - DNA, 15 bp, Homo sapiens
ggatagacgtacttt

SEQ ID NO: 1156824 - DNA, 15 bp, Homo sapiens
aggatagacgtactt

SEQ ID NO: 1156825 - DNA, 15 bp, Homo sapiens
gaggatagacgtact

SEQ ID NO: 1156826 - DNA, 15 bp, Homo sapiens
tgaggatagacgtac

SEQ ID NO: 1156827 - DNA, 15 bp, Homo sapiens
gtgaggatagacgta

SEQ ID NO: 1156828 - DNA, 15 bp, Homo sapiens
agtgaggatagacgt

SEQ ID NO: 1156829 - DNA, 15 bp, Homo sapiens
aagtgaggatagacg

SEQ ID NO: 1156830 - DNA, 15 bp, Homo sapiens
gaagtgaggatagac

SEQ ID NO: 1156831 - DNA, 15 bp, Homo sapiens
tgaagtgaggataga

SEQ ID NO: 1156832 - DNA, 15 bp, Homo sapiens
ttgaagtgaggatag

SEQ ID NO: 1156833 - DNA, 15 bp, Homo sapiens
tttgaagtgaggata

SEQ ID NO: 1156834 - DNA, 15 bp, Homo sapiens
ttttgaagtgaggat

SEQ ID NO: 1156835 - DNA, 15 bp, Homo sapiens
attttgaagtgagga

SEQ ID NO: 1156836 - DNA, 15 bp, Homo sapiens
aattttgaagtgagg

SEQ ID NO: 1156837 - DNA, 15 bp, Homo sapiens
aaattttgaagtgag

SEQ ID NO: 1156838 - DNA, 15 bp, Homo sapiens
taaattttgaagtga

SEQ ID NO: 1156839 - DNA, 15 bp, Homo sapiens
ataaattttgaagtg

SEQ ID NO: 1156840 - DNA, 15 bp, Homo sapiens
tataaattttgaagt

SEQ ID NO: 1156841 - DNA, 15 bp, Homo sapiens
atataaattttgaag

SEQ ID NO: 1156842 - DNA, 15 bp, Homo sapiens
catataaattttgaa

SEQ ID NO: 1156843 - DNA, 15 bp, Homo sapiens
acatataaattttga

SEQ ID NO: 1156844 - DNA, 15 bp, Homo sapiens
gacatataaattttg

SEQ ID NO: 1156845 - DNA, 15 bp, Homo sapiens
tgacatataaatttt

SEQ ID NO: 1156846 - DNA, 15 bp, Homo sapiens
ttgacatataaattt

SEQ ID NO: 1156847 - DNA, 15 bp, Homo sapiens
attgacatataaatt

SEQ ID NO: 1156848 - DNA, 15 bp, Homo sapiens
aattgacatataaat

SEQ ID NO: 1156849 - DNA, 15 bp, Homo sapiens
aaattgacatataaa

SEQ ID NO: 1156850 - DNA, 15 bp, Homo sapiens
taaattgacatataa

SEQ ID NO: 1156851 - DNA, 15 bp, Homo sapiens
gtaaattgacatata

SEQ ID NO: 1156852 - DNA, 15 bp, Homo sapiens
cgtaaattgacatat

SEQ ID NO: 1156853 - DNA, 15 bp, Homo sapiens
acgtaaattgacata

SEQ ID NO: 1156854 - DNA, 15 bp, Homo sapiens
tacgtaaattgacat

SEQ ID NO: 1156855 - DNA, 15 bp, Homo sapiens
ttacgtaaattgaca

SEQ ID NO: 1156856 - DNA, 15 bp, Homo sapiens
cttacgtaaattgac

SEQ ID NO: 1156857 - DNA, 15 bp, Homo sapiens
gcttacgtaaattga

SEQ ID NO: 1156858 - DNA, 15 bp, Homo sapiens
tgcttacgtaaattg

SEQ ID NO: 1156859 - DNA, 15 bp, Homo sapiens
ctgcttacgtaaatt

SEQ ID NO: 1156860 - DNA, 15 bp, Homo sapiens
tctgcttacgtaaat

SEQ ID NO: 1156861 - DNA, 15 bp, Homo sapiens
ctctgcttacgtaaa

SEQ ID NO: 1156862 - DNA, 15 bp, Homo sapiens
gctctgcttacgtaa

SEQ ID NO: 1156863 - DNA, 15 bp, Homo sapiens
tgctctgcttacgta

SEQ ID NO: 1156864 - DNA, 15 bp, Homo sapiens
ttgctctgcttacgt

SEQ ID NO: 1156865 - DNA, 15 bp, Homo sapiens
attgctctgcttacg

SEQ ID NO: 1156866 - DNA, 15 bp, Homo sapiens
gattgctctgcttac

SEQ ID NO: 1156867 - DNA, 15 bp, Homo sapiens
tgattgctctgctta

SEQ ID NO: 1156868 - DNA, 15 bp, Homo sapiens
gtgattgctctgctt

SEQ ID NO: 1156869 - DNA, 15 bp, Homo sapiens
agtgattgctctgct

SEQ ID NO: 1156870 - DNA, 15 bp, Homo sapiens
aagtgattgctctgc

SEQ ID NO: 1156871 - DNA, 15 bp, Homo sapiens
gaagtgattgctctg

SEQ ID NO: 1156872 - DNA, 15 bp, Homo sapiens
cgaagtgattgctct

SEQ ID NO: 1156873 - DNA, 15 bp, Homo sapiens
ccgaagtgattgctc

SEQ ID NO: 1156874 - DNA, 15 bp, Homo sapiens
tccgaagtgattgct

SEQ ID NO: 1156875 - DNA, 15 bp, Homo sapiens
ctccgaagtgattgc

SEQ ID NO: 1156876 - DNA, 15 bp, Homo sapiens
gctccgaagtgattg

SEQ ID NO: 1156877 - DNA, 15 bp, Homo sapiens
ggctccgaagtgatt

SEQ ID NO: 1156878 - DNA, 15 bp, Homo sapiens
aggctccgaagtgat

SEQ ID NO: 1156879 - DNA, 15 bp, Homo sapiens
taggctccgaagtga

SEQ ID NO: 1156880 - DNA, 15 bp, Homo sapiens
ttaggctccgaagtg

SEQ ID NO: 1156881 - DNA, 15 bp, Homo sapiens
tttaggctccgaagt

SEQ ID NO: 1156882 - DNA, 15 bp, Homo sapiens
gtttaggctccgaag

SEQ ID NO: 1156883 - DNA, 15 bp, Homo sapiens
agtttaggctccgaa

SEQ ID NO: 1156884 - DNA, 15 bp, Homo sapiens
tagtttaggctccga

SEQ ID NO: 1156885 - DNA, 15 bp, Homo sapiens
atagtttaggctccg

SEQ ID NO: 1156886 - DNA, 15 bp, Homo sapiens
tatagtttaggctcc

SEQ ID NO: 1156887 - DNA, 15 bp, Homo sapiens
gtatagtttaggctc

SEQ ID NO: 1156888 - DNA, 15 bp, Homo sapiens
agtatagtttaggct

SEQ ID NO: 1156889 - DNA, 15 bp, Homo sapiens
tagtatagtttaggc

SEQ ID NO: 1156890 - DNA, 15 bp, Homo sapiens
ttagtatagtttagg

SEQ ID NO: 1156891 - DNA, 15 bp, Homo sapiens
cttagtatagtttag

SEQ ID NO: 1156892 - DNA, 15 bp, Homo sapiens
gcttagtatagttta

SEQ ID NO: 1156893 - DNA, 15 bp, Homo sapiens
tgcttagtatagttt

SEQ ID NO: 1156894 - DNA, 15 bp, Homo sapiens
atgcttagtatagtt

SEQ ID NO: 1156895 - DNA, 15 bp, Homo sapiens
catgcttagtatagt

SEQ ID NO: 1156896 - DNA, 15 bp, Homo sapiens
tcatgcttagtatag

SEQ ID NO: 1156897 - DNA, 15 bp, Homo sapiens
ctcatgcttagtata

SEQ ID NO: 1156898 - DNA, 15 bp, Homo sapiens
actcatgcttagtat

SEQ ID NO: 1156899 - DNA, 15 bp, Homo sapiens
aactcatgcttagta

SEQ ID NO: 1156900 - DNA, 15 bp, Homo sapiens
taactcatgcttagt

SEQ ID NO: 1156901 - DNA, 15 bp, Homo sapiens
ttaactcatgcttag

SEQ ID NO: 1156902 - DNA, 15 bp, Homo sapiens
gttaactcatgctta

SEQ ID NO: 1156903 - DNA, 15 bp, Homo sapiens
agttaactcatgctt

SEQ ID NO: 1156904 - DNA, 15 bp, Homo sapiens
aagttaactcatgct

SEQ ID NO: 1156905 - DNA, 15 bp, Homo sapiens
aaagttaactcatgc

SEQ ID NO: 1156906 - DNA, 15 bp, Homo sapiens
taaagttaactcatg

SEQ ID NO: 1156907 - DNA, 15 bp, Homo sapiens
ataaagttaactcat

SEQ ID NO: 1156908 - DNA, 15 bp, Homo sapiens
gataaagttaactca

SEQ ID NO: 1156909 - DNA, 15 bp, Homo sapiens
ggataaagttaactc

SEQ ID NO: 1156910 - DNA, 15 bp, Homo sapiens
aggataaagttaact

SEQ ID NO: 1156911 - DNA, 15 bp, Homo sapiens
aaggataaagttaac

SEQ ID NO: 1156912 - DNA, 15 bp, Homo sapiens
taaggataaagttaa

SEQ ID NO: 1156913 - DNA, 15 bp, Homo sapiens
ttaaggataaagtta

SEQ ID NO: 1156914 - DNA, 15 bp, Homo sapiens
gttaaggataaagtt

SEQ ID NO: 1156915 - DNA, 15 bp, Homo sapiens
tgttaaggataaagt

SEQ ID NO: 1156916 - DNA, 15 bp, Homo sapiens
ttgttaaggataaag

SEQ ID NO: 1156917 - DNA, 15 bp, Homo sapiens
cttgttaaggataaa

SEQ ID NO: 1156918 - DNA, 15 bp, Homo sapiens
acttgttaaggataa

SEQ ID NO: 1156919 - DNA, 15 bp, Homo sapiens
tacttgttaaggata

SEQ ID NO: 1156920 - DNA, 15 bp, Homo sapiens
gtacttgttaaggat

SEQ ID NO: 1156921 - DNA, 15 bp, Homo sapiens
tgtacttgttaagga

SEQ ID NO: 1156922 - DNA, 15 bp, Homo sapiens
ttgtacttgttaagg

SEQ ID NO: 1156923 - DNA, 15 bp, Homo sapiens
gttgtacttgttaag

SEQ ID NO: 1156924 - DNA, 15 bp, Homo sapiens
tgttgtacttgttaa

SEQ ID NO: 1156925 - DNA, 15 bp, Homo sapiens
atgttgtacttgtta

SEQ ID NO: 1156926 - DNA, 15 bp, Homo sapiens
catgttgtacttgtt

SEQ ID NO: 1156927 - DNA, 15 bp, Homo sapiens
ccatgttgtacttgt

SEQ ID NO: 1156928 - DNA, 15 bp, Homo sapiens
cccatgttgtacttg

SEQ ID NO: 1156929 - DNA, 15 bp, Homo sapiens
tcccatgttgtactt

SEQ ID NO: 1156930 - DNA, 15 bp, Homo sapiens
atcccatgttgtact

SEQ ID NO: 1156931 - DNA, 15 bp, Homo sapiens
gatcccatgttgtac

SEQ ID NO: 1156932 - DNA, 15 bp, Homo sapiens
tgatcccatgttgta

SEQ ID NO: 1156933 - DNA, 15 bp, Homo sapiens
atgatcccatgttgt

SEQ ID NO: 1156934 - DNA, 15 bp, Homo sapiens
aatgatcccatgttg

SEQ ID NO: 1156935 - DNA, 15 bp, Homo sapiens
aaatgatcccatgtt

SEQ ID NO: 1156936 - DNA, 15 bp, Homo sapiens
taaatgatcccatgt

SEQ ID NO: 1156937 - DNA, 15 bp, Homo sapiens
ttaaatgatcccatg

SEQ ID NO: 1156938 - DNA, 15 bp, Homo sapiens
attaaatgatcccat

SEQ ID NO: 1156939 - DNA, 15 bp, Homo sapiens
aattaaatgatccca

SEQ ID NO: 1156940 - DNA, 15 bp, Homo sapiens
caattaaatgatccc

SEQ ID NO: 1156941 - DNA, 15 bp, Homo sapiens
ccaattaaatgatcc

SEQ ID NO: 1156942 - DNA, 15 bp, Homo sapiens
cccaattaaatgatc

SEQ ID NO: 1156943 - DNA, 15 bp, Homo sapiens
ccccaattaaatgat

SEQ ID NO: 1156944 - DNA, 15 bp, Homo sapiens
cccccaattaaatga

SEQ ID NO: 1156945 - DNA, 15 bp, Homo sapiens
acccccaattaaatg

SEQ ID NO: 1156946 - DNA, 15 bp, Homo sapiens
tacccccaattaaat

SEQ ID NO: 1156947 - DNA, 15 bp, Homo sapiens
ttacccccaattaaa

SEQ ID NO: 1156948 - DNA, 15 bp, Homo sapiens
tttacccccaattaa

SEQ ID NO: 1156949 - DNA, 15 bp, Homo sapiens
ctttacccccaatta

SEQ ID NO: 1156950 - DNA, 15 bp, Homo sapiens
cctttacccccaatt

SEQ ID NO: 1156951 - DNA, 15 bp, Homo sapiens
tcctttacccccaat

SEQ ID NO: 1156952 - DNA, 15 bp, Homo sapiens
atcctttacccccaa

SEQ ID NO: 1156953 - DNA, 15 bp, Homo sapiens
gatcctttaccccca

SEQ ID NO: 1156954 - DNA, 15 bp, Homo sapiens
tgatcctttaccccc

SEQ ID NO: 1156955 - DNA, 15 bp, Homo sapiens
ttgatcctttacccc

SEQ ID NO: 1156956 - DNA, 15 bp, Homo sapiens
attgatcctttaccc

SEQ ID NO: 1156957 - DNA, 15 bp, Homo sapiens
aattgatcctttacc

SEQ ID NO: 1156958 - DNA, 15 bp, Homo sapiens
taattgatcctttac

SEQ ID NO: 1156959 - DNA, 15 bp, Homo sapiens
ataattgatccttta

SEQ ID NO: 1156960 - DNA, 15 bp, Homo sapiens
aataattgatccttt

SEQ ID NO: 1156961 - DNA, 15 bp, Homo sapiens
aaataattgatcctt

SEQ ID NO: 1156962 - DNA, 15 bp, Homo sapiens
taaataattgatcct

SEQ ID NO: 1156963 - DNA, 15 bp, Homo sapiens
ataaataattgatcc

SEQ ID NO: 1156964 - DNA, 15 bp, Homo sapiens
aataaataattgatc

SEQ ID NO: 1156965 - DNA, 15 bp, Homo sapiens
aaataaataattgat

SEQ ID NO: 1156966 - DNA, 15 bp, Homo sapiens
aaaataaataattga

SEQ ID NO: 1156967 - DNA, 15 bp, Homo sapiens
aaaaataaataattg

SEQ ID NO: 1156968 - DNA, 15 bp, Homo sapiens
caaaaataaataatt

SEQ ID NO: 1156969 - DNA, 15 bp, Homo sapiens
acaaaaataaataat

SEQ ID NO: 1156970 - DNA, 15 bp, Homo sapiens
cacaaaaataaataa

SEQ ID NO: 1156971 - DNA, 15 bp, Homo sapiens
acacaaaaataaata

SEQ ID NO: 1156972 - DNA, 15 bp, Homo sapiens
aatacacaaaaataa

SEQ ID NO: 1156973 - DNA, 15 bp, Homo sapiens
taatacacaaaaata

SEQ ID NO: 1156974 - DNA, 15 bp, Homo sapiens
gtaatacacaaaaat

SEQ ID NO: 1156975 - DNA, 15 bp, Homo sapiens
ggtaatacacaaaaa

SEQ ID NO: 1156976 - DNA, 15 bp, Homo sapiens
aggtaatacacaaaa

SEQ ID NO: 1156977 - DNA, 15 bp, Homo sapiens
taggtaatacacaaa

SEQ ID NO: 1156978 - DNA, 15 bp, Homo sapiens
ttaggtaatacacaa

SEQ ID NO: 1156979 - DNA, 15 bp, Homo sapiens
tttaggtaatacaca

SEQ ID NO: 1156980 - DNA, 15 bp, Homo sapiens
ttttaggtaatacac

SEQ ID NO: 1156981 - DNA, 15 bp, Homo sapiens
attttaggtaataca

SEQ ID NO: 1156982 - DNA, 15 bp, Homo sapiens
tattttaggtaatac

SEQ ID NO: 1156983 - DNA, 15 bp, Homo sapiens
atattttaggtaata

SEQ ID NO: 1156984 - DNA, 15 bp, Homo sapiens
tatattttaggtaat

SEQ ID NO: 1156985 - DNA, 15 bp, Homo sapiens
ttatattttaggtaa

SEQ ID NO: 1156986 - DNA, 15 bp, Homo sapiens
tttatattttaggta

SEQ ID NO: 1156987 - DNA, 15 bp, Homo sapiens
ttttatattttaggt

SEQ ID NO: 1156988 - DNA, 15 bp, Homo sapiens
attttatattttagg

SEQ ID NO: 1156989 - DNA, 15 bp, Homo sapiens
gattttatattttag

SEQ ID NO: 1156990 - DNA, 15 bp, Homo sapiens
agattttatatttta

SEQ ID NO: 1156991 - DNA, 15 bp, Homo sapiens
gagattttatatttt

SEQ ID NO: 1156992 - DNA, 15 bp, Homo sapiens
tgagattttatattt

SEQ ID NO: 1156993 - DNA, 15 bp, Homo sapiens
ctgagattttatatt

SEQ ID NO: 1156994 - DNA, 15 bp, Homo sapiens
tctgagattttatat

SEQ ID NO: 1156995 - DNA, 15 bp, Homo sapiens
ctctgagattttata

SEQ ID NO: 1156996 - DNA, 15 bp, Homo sapiens
gctctgagattttat

SEQ ID NO: 1156997 - DNA, 15 bp, Homo sapiens
ggctctgagatttta

SEQ ID NO: 1156998 - DNA, 15 bp, Homo sapiens
tggctctgagatttt

SEQ ID NO: 1156999 - DNA, 15 bp, Homo sapiens
atggctctgagattt

SEQ ID NO: 1157000 - DNA, 15 bp, Homo sapiens
tatggctctgagatt

SEQ ID NO: 1157001 - DNA, 15 bp, Homo sapiens
atatggctctgagat

SEQ ID NO: 1157002 - DNA, 15 bp, Homo sapiens
tatatggctctgaga

SEQ ID NO: 1157003 - DNA, 15 bp, Homo sapiens
gtatatggctctgag

SEQ ID NO: 1157004 - DNA, 15 bp, Homo sapiens
agtatatggctctga

SEQ ID NO: 1157005 - DNA, 15 bp, Homo sapiens
aagtatatggctctg

SEQ ID NO: 1157006 - DNA, 15 bp, Homo sapiens
taagtatatggctct

SEQ ID NO: 1157007 - DNA, 15 bp, Homo sapiens
ttaagtatatggctc

SEQ ID NO: 1157008 - DNA, 15 bp, Homo sapiens
tttaagtatatggct

SEQ ID NO: 1157009 - DNA, 15 bp, Homo sapiens
ttttaagtatatggc

SEQ ID NO: 1157010 - DNA, 15 bp, Homo sapiens
attttaagtatatgg

SEQ ID NO: 1157011 - DNA, 15 bp, Homo sapiens
gattttaagtatatg

SEQ ID NO: 1157012 - DNA, 15 bp, Homo sapiens
ggattttaagtatat

SEQ ID NO: 1157013 - DNA, 15 bp, Homo sapiens
tggattttaagtata

SEQ ID NO: 1157014 - DNA, 15 bp, Homo sapiens
ttggattttaagtat

SEQ ID NO: 1157015 - DNA, 15 bp, Homo sapiens
gttggattttaagta

SEQ ID NO: 1157016 - DNA, 15 bp, Homo sapiens
agttggattttaagt

SEQ ID NO: 1157017 - DNA, 15 bp, Homo sapiens
aagttggattttaag

SEQ ID NO: 1157018 - DNA, 15 bp, Homo sapiens
caagttggattttaa

SEQ ID NO: 1157019 - DNA, 15 bp, Homo sapiens
tcaagttggatttta

SEQ ID NO: 1157020 - DNA, 15 bp, Homo sapiens
ttcaagttggatttt

SEQ ID NO: 1157021 - DNA, 15 bp, Homo sapiens
tttcaagttggattt

SEQ ID NO: 1157022 - DNA, 15 bp, Homo sapiens
gtttcaagttggatt

SEQ ID NO: 1157023 - DNA, 15 bp, Homo sapiens
ggtttcaagttggat

SEQ ID NO: 1157024 - DNA, 15 bp, Homo sapiens
aggtttcaagttgga

SEQ ID NO: 1157025 - DNA, 15 bp, Homo sapiens
gaggtttcaagttgg

SEQ ID NO: 1157026 - DNA, 15 bp, Homo sapiens
agaggtttcaagttg

SEQ ID NO: 1157027 - DNA, 15 bp, Homo sapiens
cagaggtttcaagtt

SEQ ID NO: 1157028 - DNA, 15 bp, Homo sapiens
acagaggtttcaagt

SEQ ID NO: 1157029 - DNA, 15 bp, Homo sapiens
tacagaggtttcaag

SEQ ID NO: 1157030 - DNA, 15 bp, Homo sapiens
ctacagaggtttcaa

SEQ ID NO: 1157031 - DNA, 15 bp, Homo sapiens
cctacagaggtttca

SEQ ID NO: 1157032 - DNA, 15 bp, Homo sapiens
tcctacagaggtttc

SEQ ID NO: 1157033 - DNA, 15 bp, Homo sapiens
ctcctacagaggttt

SEQ ID NO: 1157034 - DNA, 15 bp, Homo sapiens
tctcctacagaggtt

SEQ ID NO: 1157035 - DNA, 15 bp, Homo sapiens
atctcctacagaggt

SEQ ID NO: 1157036 - DNA, 15 bp, Homo sapiens
tatctcctacagagg

SEQ ID NO: 1157037 - DNA, 15 bp, Homo sapiens
ttatctcctacagag

SEQ ID NO: 1157038 - DNA, 15 bp, Homo sapiens
tttatctcctacaga

SEQ ID NO: 1157039 - DNA, 15 bp, Homo sapiens
ttttatctcctacag

SEQ ID NO: 1157040 - DNA, 15 bp, Homo sapiens
tttttatctcctaca

SEQ ID NO: 1157041 - DNA, 15 bp, Homo sapiens
atttttatctcctac

SEQ ID NO: 1157042 - DNA, 15 bp, Homo sapiens
aatttttatctccta

SEQ ID NO: 1157043 - DNA, 15 bp, Homo sapiens
aaatttttatctcct

SEQ ID NO: 1157044 - DNA, 15 bp, Homo sapiens
aaaatttttatctcc

SEQ ID NO: 1157045 - DNA, 15 bp, Homo sapiens
gaaaatttttatctc

SEQ ID NO: 1157046 - DNA, 15 bp, Homo sapiens
tgaaaatttttatct

SEQ ID NO: 1157047 - DNA, 15 bp, Homo sapiens
ttgaaaatttttatc

SEQ ID NO: 1157048 - DNA, 15 bp, Homo sapiens
attgaaaatttttat

SEQ ID NO: 1157049 - DNA, 15 bp, Homo sapiens
tattgaaaattttta

SEQ ID NO: 1157050 - DNA, 15 bp, Homo sapiens
ttattgaaaattttt

SEQ ID NO: 1157051 - DNA, 15 bp, Homo sapiens
tttattgaaaatttt

SEQ ID NO: 1157052 - DNA, 15 bp, Homo sapiens
ttttattgaaaattt

SEQ ID NO: 1157053 - DNA, 15 bp, Homo sapiens
attttattgaaaatt

SEQ ID NO: 1157054 - DNA, 15 bp, Homo sapiens
gattttattgaaaat

SEQ ID NO: 1157055 - DNA, 15 bp, Homo sapiens
agattttattgaaaa

SEQ ID NO: 1157056 - DNA, 15 bp, Homo sapiens
cagattttattgaaa

SEQ ID NO: 1157057 - DNA, 15 bp, Homo sapiens
ccagattttattgaa

SEQ ID NO: 1157058 - DNA, 15 bp, Homo sapiens
gccagattttattga

SEQ ID NO: 1157059 - DNA, 15 bp, Homo sapiens
agccagattttattg

SEQ ID NO: 1157060 - DNA, 15 bp, Homo sapiens
aagccagattttatt

SEQ ID NO: 1157061 - DNA, 15 bp, Homo sapiens
aaagccagattttat

SEQ ID NO: 1157062 - DNA, 15 bp, Homo sapiens
caaagccagatttta

SEQ ID NO: 1157063 - DNA, 15 bp, Homo sapiens
ccaaagccagatttt

SEQ ID NO: 1157064 - DNA, 15 bp, Homo sapiens
tccaaagccagattt

SEQ ID NO: 1157065 - DNA, 15 bp, Homo sapiens
ttccaaagccagatt

SEQ ID NO: 1157066 - DNA, 15 bp, Homo sapiens
gttccaaagccagat

SEQ ID NO: 1157067 - DNA, 15 bp, Homo sapiens
agttccaaagccaga

SEQ ID NO: 1157068 - DNA, 15 bp, Homo sapiens
tagttccaaagccag

SEQ ID NO: 1157069 - DNA, 15 bp, Homo sapiens
atagttccaaagcca

SEQ ID NO: 1157070 - DNA, 15 bp, Homo sapiens
catagttccaaagcc

SEQ ID NO: 1157071 - DNA, 15 bp, Homo sapiens
tcatagttccaaagc

SEQ ID NO: 1157072 - DNA, 15 bp, Homo sapiens
atcatagttccaaag

SEQ ID NO: 1157073 - DNA, 15 bp, Homo sapiens
tatcatagttccaaa

SEQ ID NO: 1157074 - DNA, 15 bp, Homo sapiens
gtatcatagttccaa

SEQ ID NO: 1157075 - DNA, 15 bp, Homo sapiens
tgtatcatagttcca

SEQ ID NO: 1157076 - DNA, 15 bp, Homo sapiens
ctgtatcatagttcc

SEQ ID NO: 1157077 - DNA, 15 bp, Homo sapiens
actgtatcatagttc

SEQ ID NO: 1157078 - DNA, 15 bp, Homo sapiens
cactgtatcatagtt

SEQ ID NO: 1157079 - DNA, 15 bp, Homo sapiens
acactgtatcatagt

SEQ ID NO: 1157080 - DNA, 15 bp, Homo sapiens
gacactgtatcatag

SEQ ID NO: 1157081 - DNA, 15 bp, Homo sapiens
tgacactgtatcata

SEQ ID NO: 1157082 - DNA, 15 bp, Homo sapiens
atgacactgtatcat

SEQ ID NO: 1157083 - DNA, 15 bp, Homo sapiens
tatgacactgtatca

SEQ ID NO: 1157084 - DNA, 15 bp, Homo sapiens
ttatgacactgtatc

SEQ ID NO: 1157085 - DNA, 15 bp, Homo sapiens
tttatgacactgtat

SEQ ID NO: 1157086 - DNA, 15 bp, Homo sapiens
atttatgacactgta

SEQ ID NO: 1157087 - DNA, 15 bp, Homo sapiens
aatttatgacactgt

SEQ ID NO: 1157088 - DNA, 15 bp, Homo sapiens
gaatttatgacactg

SEQ ID NO: 1157089 - DNA, 15 bp, Homo sapiens
tgaatttatgacact

SEQ ID NO: 1157090 - DNA, 15 bp, Homo sapiens
ttgaatttatgacac

SEQ ID NO: 1157091 - DNA, 15 bp, Homo sapiens
attgaatttatgaca

SEQ ID NO: 1157092 - DNA, 15 bp, Homo sapiens
tattgaatttatgac

SEQ ID NO: 1157093 - DNA, 15 bp, Homo sapiens
ctattgaatttatga

SEQ ID NO: 1157094 - DNA, 15 bp, Homo sapiens
actattgaatttatg

SEQ ID NO: 1157095 - DNA, 15 bp, Homo sapiens
aactattgaatttat

SEQ ID NO: 1157096 - DNA, 15 bp, Homo sapiens
aaactattgaattta

SEQ ID NO: 1157097 - DNA, 15 bp, Homo sapiens
aaaactattgaattt

SEQ ID NO: 1157098 - DNA, 15 bp, Homo sapiens
caaaactattgaatt

SEQ ID NO: 1157099 - DNA, 15 bp, Homo sapiens
tcaaaactattgaat

SEQ ID NO: 1157100 - DNA, 15 bp, Homo sapiens
atcaaaactattgaa

SEQ ID NO: 1157101 - DNA, 15 bp, Homo sapiens
aatcaaaactattga

SEQ ID NO: 1157102 - DNA, 15 bp, Homo sapiens
taatcaaaactattg

SEQ ID NO: 1157103 - DNA, 15 bp, Homo sapiens
ataatcaaaactatt

SEQ ID NO: 1157104 - DNA, 15 bp, Homo sapiens
gataatcaaaactat

SEQ ID NO: 1157105 - DNA, 15 bp, Homo sapiens
tgataatcaaaacta

SEQ ID NO: 1157106 - DNA, 15 bp, Homo sapiens
ttgataatcaaaact

SEQ ID NO: 1157107 - DNA, 15 bp, Homo sapiens
tttgataatcaaaac

SEQ ID NO: 1157108 - DNA, 15 bp, Homo sapiens
ttttgataatcaaaa

SEQ ID NO: 1157109 - DNA, 15 bp, Homo sapiens
tttttgataatcaaa

SEQ ID NO: 1157110 - DNA, 15 bp, Homo sapiens
atttttgataatcaa

SEQ ID NO: 1157111 - DNA, 15 bp, Homo sapiens
tatttttgataatca

SEQ ID NO: 1157112 - DNA, 15 bp, Homo sapiens
ctatttttgataatc

SEQ ID NO: 1157113 - DNA, 15 bp, Homo sapiens
tctatttttgataat

SEQ ID NO: 1157114 - DNA, 15 bp, Homo sapiens
ttctatttttgataa

SEQ ID NO: 1157115 - DNA, 15 bp, Homo sapiens
tttctatttttgata

SEQ ID NO: 1157116 - DNA, 15 bp, Homo sapiens
atttctatttttgat

SEQ ID NO: 1157117 - DNA, 15 bp, Homo sapiens
catttctatttttga

SEQ ID NO: 1157118 - DNA, 15 bp, Homo sapiens
tcatttctatttttg

SEQ ID NO: 1157119 - DNA, 15 bp, Homo sapiens
ttcatttctattttt

SEQ ID NO: 1157120 - DNA, 15 bp, Homo sapiens
tttcatttctatttt

SEQ ID NO: 1157121 - DNA, 15 bp, Homo sapiens
gtttcatttctattt

SEQ ID NO: 1157122 - DNA, 15 bp, Homo sapiens
tgtttcatttctatt

SEQ ID NO: 1157123 - DNA, 15 bp, Homo sapiens
atgtttcatttctat

SEQ ID NO: 1157124 - DNA, 15 bp, Homo sapiens
tatgtttcatttcta

SEQ ID NO: 1157125 - DNA, 15 bp, Homo sapiens
atatgtttcatttct

SEQ ID NO: 1157126 - DNA, 15 bp, Homo sapiens
tatatgtttcatttc

SEQ ID NO: 1157127 - DNA, 15 bp, Homo sapiens
gtatatgtttcattt

SEQ ID NO: 1157128 - DNA, 15 bp, Homo sapiens
tgtatatgtttcatt

SEQ ID NO: 1157129 - DNA, 15 bp, Homo sapiens
ttgtatatgtttcat

SEQ ID NO: 1157130 - DNA, 15 bp, Homo sapiens
gttgtatatgtttca

SEQ ID NO: 1157131 - DNA, 15 bp, Homo sapiens
agttgtatatgtttc

SEQ ID NO: 1157132 - DNA, 15 bp, Homo sapiens
tagttgtatatgttt

SEQ ID NO: 1157133 - DNA, 15 bp, Homo sapiens
atagttgtatatgtt

SEQ ID NO: 1157134 - DNA, 15 bp, Homo sapiens
tatagttgtatatgt

SEQ ID NO: 1157135 - DNA, 15 bp, Homo sapiens
atatagttgtatatg

SEQ ID NO: 1157136 - DNA, 15 bp, Homo sapiens
tatatagttgtatat

SEQ ID NO: 1157137 - DNA, 15 bp, Homo sapiens
ttatatagttgtata

SEQ ID NO: 1157138 - DNA, 15 bp, Homo sapiens
tttatatagttgtat

SEQ ID NO: 1157139 - DNA, 15 bp, Homo sapiens
atttatatagttgta

SEQ ID NO: 1157140 - DNA, 15 bp, Homo sapiens
tatttatatagttgt

SEQ ID NO: 1157141 - DNA, 15 bp, Homo sapiens
atatttatatagttg

SEQ ID NO: 1157142 - DNA, 15 bp, Homo sapiens
gatatttatatagtt

SEQ ID NO: 1157143 - DNA, 15 bp, Homo sapiens
agatatttatatagt

SEQ ID NO: 1157144 - DNA, 15 bp, Homo sapiens
aagatatttatatag

SEQ ID NO: 1157145 - DNA, 15 bp, Homo sapiens
aaagatatttatata

SEQ ID NO: 1157146 - DNA, 15 bp, Homo sapiens
taaagatatttatat

SEQ ID NO: 1157147 - DNA, 15 bp, Homo sapiens
ttaaagatatttata

SEQ ID NO: 1157148 - DNA, 15 bp, Homo sapiens
tttaaagatatttat

SEQ ID NO: 1157149 - DNA, 15 bp, Homo sapiens
atttaaagatattta

SEQ ID NO: 1157150 - DNA, 15 bp, Homo sapiens
aatttaaagatattt

SEQ ID NO: 1157151 - DNA, 15 bp, Homo sapiens
taatttaaagatatt

SEQ ID NO: 1157152 - DNA, 15 bp, Homo sapiens
ttaatttaaagatat

SEQ ID NO: 1157153 - DNA, 15 bp, Homo sapiens
tttaatttaaagata

SEQ ID NO: 1157154 - DNA, 15 bp, Homo sapiens
atttaatttaaagat

SEQ ID NO: 1157155 - DNA, 15 bp, Homo sapiens
catttaatttaaaga

SEQ ID NO: 1157156 - DNA, 15 bp, Homo sapiens
gcatttaatttaaag

SEQ ID NO: 1157157 - DNA, 15 bp, Homo sapiens
agcatttaatttaaa

SEQ ID NO: 1157158 - DNA, 15 bp, Homo sapiens
tagcatttaatttaa

SEQ ID NO: 1157159 - DNA, 15 bp, Homo sapiens
atagcatttaattta

SEQ ID NO: 1157160 - DNA, 15 bp, Homo sapiens
catagcatttaattt

SEQ ID NO: 1157161 - DNA, 15 bp, Homo sapiens
acatagcatttaatt

SEQ ID NO: 1157162 - DNA, 15 bp, Homo sapiens
cacatagcatttaat

SEQ ID NO: 1157163 - DNA, 15 bp, Homo sapiens
tcacatagcatttaa

SEQ ID NO: 1157164 - DNA, 15 bp, Homo sapiens
ttcacatagcattta

SEQ ID NO: 1157165 - DNA, 15 bp, Homo sapiens
attcacatagcattt

SEQ ID NO: 1157166 - DNA, 15 bp, Homo sapiens
tattcacatagcatt

SEQ ID NO: 1157167 - DNA, 15 bp, Homo sapiens
ttattcacatagcat

SEQ ID NO: 1157168 - DNA, 15 bp, Homo sapiens
tttattcacatagca

SEQ ID NO: 1157169 - DNA, 15 bp, Homo sapiens
ttttattcacatagc

SEQ ID NO: 1157170 - DNA, 15 bp, Homo sapiens
tttttattcacatag

SEQ ID NO: 1157171 - DNA, 15 bp, Homo sapiens
gtttttattcacata

SEQ ID NO: 1157172 - DNA, 15 bp, Homo sapiens
tgtttttattcacat

SEQ ID NO: 1157173 - DNA, 15 bp, Homo sapiens
ttgtttttattcaca

SEQ ID NO: 1157174 - DNA, 15 bp, Homo sapiens
tttgtttttattcac

SEQ ID NO: 1157175 - DNA, 15 bp, Homo sapiens
atttgtttttattca

SEQ ID NO: 1157176 - DNA, 15 bp, Homo sapiens
gatttgtttttattc

SEQ ID NO: 1157177 - DNA, 15 bp, Homo sapiens
ggatttgtttttatt

SEQ ID NO: 1157178 - DNA, 15 bp, Homo sapiens
tggatttgtttttat

SEQ ID NO: 1157179 - DNA, 15 bp, Homo sapiens
ttggatttgttttta

SEQ ID NO: 1157180 - DNA, 15 bp, Homo sapiens
cttggatttgttttt

SEQ ID NO: 1157181 - DNA, 15 bp, Homo sapiens
gcttggatttgtttt

SEQ ID NO: 1157182 - DNA, 15 bp, Homo sapiens
agcttggatttgttt

SEQ ID NO: 1157183 - DNA, 15 bp, Homo sapiens
aagcttggatttgtt

SEQ ID NO: 1157184 - DNA, 15 bp, Homo sapiens
gaagcttggatttgt

SEQ ID NO: 1157185 - DNA, 15 bp, Homo sapiens
agaagcttggatttg

SEQ ID NO: 1157186 - DNA, 15 bp, Homo sapiens
tagaagcttggattt

SEQ ID NO: 1157187 - DNA, 15 bp, Homo sapiens
atagaagcttggatt

SEQ ID NO: 1157188 - DNA, 15 bp, Homo sapiens
tatagaagcttggat

SEQ ID NO: 1157189 - DNA, 15 bp, Homo sapiens
ttatagaagcttgga

SEQ ID NO: 1157190 - DNA, 15 bp, Homo sapiens
tttatagaagcttgg

SEQ ID NO: 1157191 - DNA, 15 bp, Homo sapiens
atttatagaagcttg

SEQ ID NO: 1157192 - DNA, 15 bp, Homo sapiens
catttatagaagctt

SEQ ID NO: 1157193 - DNA, 15 bp, Homo sapiens
acatttatagaagct

SEQ ID NO: 1157194 - DNA, 15 bp, Homo sapiens
tacatttatagaagc

SEQ ID NO: 1157195 - DNA, 15 bp, Homo sapiens
ttacatttatagaag

SEQ ID NO: 1157196 - DNA, 15 bp, Homo sapiens
cttacatttatagaa

SEQ ID NO: 1157197 - DNA, 15 bp, Homo sapiens
ccttacatttataga

SEQ ID NO: 1157198 - DNA, 15 bp, Homo sapiens
tccttacatttatag

SEQ ID NO: 1157199 - DNA, 15 bp, Homo sapiens
ttccttacatttata

SEQ ID NO: 1157200 - DNA, 15 bp, Homo sapiens
tttccttacatttat

SEQ ID NO: 1157201 - DNA, 15 bp, Homo sapiens
atttccttacattta

SEQ ID NO: 1157202 - DNA, 15 bp, Homo sapiens
aatttccttacattt

SEQ ID NO: 1157203 - DNA, 15 bp, Homo sapiens
taatttccttacatt

SEQ ID NO: 1157204 - DNA, 15 bp, Homo sapiens
ctaatttccttacat

SEQ ID NO: 1157205 - DNA, 15 bp, Homo sapiens
actaatttccttaca

SEQ ID NO: 1157206 - DNA, 15 bp, Homo sapiens
gactaatttccttac

SEQ ID NO: 1157207 - DNA, 15 bp, Homo sapiens
tgactaatttcctta

SEQ ID NO: 1157208 - DNA, 15 bp, Homo sapiens
ttgactaatttcctt

SEQ ID NO: 1157209 - DNA, 15 bp, Homo sapiens
tttgactaatttcct

SEQ ID NO: 1157210 - DNA, 15 bp, Homo sapiens
atttgactaatttcc

SEQ ID NO: 1157211 - DNA, 15 bp, Homo sapiens
tatttgactaatttc

SEQ ID NO: 1157212 - DNA, 15 bp, Homo sapiens
ctatttgactaattt

SEQ ID NO: 1157213 - DNA, 15 bp, Homo sapiens
tctatttgactaatt

SEQ ID NO: 1157214 - DNA, 15 bp, Homo sapiens
ctctatttgactaat

SEQ ID NO: 1157215 - DNA, 15 bp, Homo sapiens
actctatttgactaa

SEQ ID NO: 1157216 - DNA, 15 bp, Homo sapiens
cactctatttgacta

SEQ ID NO: 1157217 - DNA, 15 bp, Homo sapiens
acactctatttgact

SEQ ID NO: 1157218 - DNA, 15 bp, Homo sapiens
gacactctatttgac

SEQ ID NO: 1157219 - DNA, 15 bp, Homo sapiens
ggacactctatttga

SEQ ID NO: 1157220 - DNA, 15 bp, Homo sapiens
tggacactctatttg

SEQ ID NO: 1157221 - DNA, 15 bp, Homo sapiens
ctggacactctattt

SEQ ID NO: 1157222 - DNA, 15 bp, Homo sapiens
gctggacactctatt

SEQ ID NO: 1157223 - DNA, 15 bp, Homo sapiens
ggctggacactctat

SEQ ID NO: 1157224 - DNA, 15 bp, Homo sapiens
gggctggacactcta

SEQ ID NO: 1157225 - DNA, 15 bp, Homo sapiens
tgggctggacactct

SEQ ID NO: 1157226 - DNA, 15 bp, Homo sapiens
ctgggctggacactc

SEQ ID NO: 1157227 - DNA, 15 bp, Homo sapiens
cctgggctggacact

SEQ ID NO: 1157228 - DNA, 15 bp, Homo sapiens
tcctgggctggacac

SEQ ID NO: 1157229 - DNA, 15 bp, Homo sapiens
ttcctgggctggaca

SEQ ID NO: 1157230 - DNA, 15 bp, Homo sapiens
tttcctgggctggac

SEQ ID NO: 1157231 - DNA, 15 bp, Homo sapiens
ctttcctgggctgga

SEQ ID NO: 1157232 - DNA, 15 bp, Homo sapiens
tctttcctgggctgg

SEQ ID NO: 1157233 - DNA, 15 bp, Homo sapiens
ttctttcctgggctg

SEQ ID NO: 1157234 - DNA, 15 bp, Homo sapiens
tttctttcctgggct

SEQ ID NO: 1157235 - DNA, 15 bp, Homo sapiens
atttctttcctgggc

SEQ ID NO: 1157236 - DNA, 15 bp, Homo sapiens
catttctttcctggg

SEQ ID NO: 1157237 - DNA, 15 bp, Homo sapiens
acatttctttcctgg

SEQ ID NO: 1157238 - DNA, 15 bp, Homo sapiens
tacatttctttcctg

SEQ ID NO: 1157239 - DNA, 15 bp, Homo sapiens
ttacatttctttcct

SEQ ID NO: 1157240 - DNA, 15 bp, Homo sapiens
tttacatttctttcc

SEQ ID NO: 1157241 - DNA, 15 bp, Homo sapiens
ttttacatttctttc

SEQ ID NO: 1157242 - DNA, 15 bp, Homo sapiens
tttttacatttcttt

SEQ ID NO: 1157243 - DNA, 15 bp, Homo sapiens
atttttacatttctt

SEQ ID NO: 1157244 - DNA, 15 bp, Homo sapiens
gatttttacatttct

SEQ ID NO: 1157245 - DNA, 15 bp, Homo sapiens
ggatttttacatttc

SEQ ID NO: 1157246 - DNA, 15 bp, Homo sapiens
gggatttttacattt

SEQ ID NO: 1157247 - DNA, 15 bp, Homo sapiens
tgggatttttacatt

SEQ ID NO: 1157248 - DNA, 15 bp, Homo sapiens
ttgggatttttacat

SEQ ID NO: 1157249 - DNA, 15 bp, Homo sapiens
tttgggatttttaca

SEQ ID NO: 1157250 - DNA, 15 bp, Homo sapiens
atttgggatttttac

SEQ ID NO: 1157251 - DNA, 15 bp, Homo sapiens
aatttgggattttta

SEQ ID NO: 1157252 - DNA, 15 bp, Homo sapiens
aaatttgggattttt

SEQ ID NO: 1157253 - DNA, 15 bp, Homo sapiens
taaatttgggatttt

SEQ ID NO: 1157254 - DNA, 15 bp, Homo sapiens
ttaaatttgggattt

SEQ ID NO: 1157255 - DNA, 15 bp, Homo sapiens
attaaatttgggatt

SEQ ID NO: 1157256 - DNA, 15 bp, Homo sapiens
aattaaatttgggat

SEQ ID NO: 1157257 - DNA, 15 bp, Homo sapiens
aaattaaatttggga

SEQ ID NO: 1157258 - DNA, 15 bp, Homo sapiens
taaattaaatttggg

SEQ ID NO: 1157259 - DNA, 15 bp, Homo sapiens
ataaattaaatttgg

SEQ ID NO: 1157260 - DNA, 15 bp, Homo sapiens
cataaattaaatttg

SEQ ID NO: 1157261 - DNA, 15 bp, Homo sapiens
ccataaattaaattt

SEQ ID NO: 1157262 - DNA, 15 bp, Homo sapiens
tccataaattaaatt

SEQ ID NO: 1157263 - DNA, 15 bp, Homo sapiens
atccataaattaaat

SEQ ID NO: 1157264 - DNA, 15 bp, Homo sapiens
aatccataaattaaa

SEQ ID NO: 1157265 - DNA, 15 bp, Homo sapiens
taatccataaattaa

SEQ ID NO: 1157266 - DNA, 15 bp, Homo sapiens
ttaatccataaatta

SEQ ID NO: 1157267 - DNA, 15 bp, Homo sapiens
cttaatccataaatt

SEQ ID NO: 1157268 - DNA, 15 bp, Homo sapiens
tcttaatccataaat

SEQ ID NO: 1157269 - DNA, 15 bp, Homo sapiens
gtcttaatccataaa

SEQ ID NO: 1157270 - DNA, 15 bp, Homo sapiens
cgtcttaatccataa

SEQ ID NO: 1157271 - DNA, 15 bp, Homo sapiens
ccgtcttaatccata

SEQ ID NO: 1157272 - DNA, 15 bp, Homo sapiens
cccgtcttaatccat

SEQ ID NO: 1157273 - DNA, 15 bp, Homo sapiens
ccccgtcttaatcca

SEQ ID NO: 1157274 - DNA, 15 bp, Homo sapiens
cccccgtcttaatcc

SEQ ID NO: 1157275 - DNA, 15 bp, Homo sapiens
tcccccgtcttaatc

SEQ ID NO: 1157276 - DNA, 15 bp, Homo sapiens
ttcccccgtcttaat

SEQ ID NO: 1157277 - DNA, 15 bp, Homo sapiens
attcccccgtcttaa

SEQ ID NO: 1157278 - DNA, 15 bp, Homo sapiens
aattcccccgtctta

SEQ ID NO: 1157279 - DNA, 15 bp, Homo sapiens
aaattcccccgtctt

SEQ ID NO: 1157280 - DNA, 15 bp, Homo sapiens
caaattcccccgtct

SEQ ID NO: 1157281 - DNA, 15 bp, Homo sapiens
ccaaattcccccgtc

SEQ ID NO: 1157282 - DNA, 15 bp, Homo sapiens
gccaaattcccccgt

SEQ ID NO: 1157283 - DNA, 15 bp, Homo sapiens
tgccaaattcccccg

SEQ ID NO: 1157284 - DNA, 15 bp, Homo sapiens
ctgccaaattccccc

SEQ ID NO: 1157285 - DNA, 15 bp, Homo sapiens
cctgccaaattcccc

SEQ ID NO: 1157286 - DNA, 15 bp, Homo sapiens
ccctgccaaattccc

SEQ ID NO: 1157287 - DNA, 15 bp, Homo sapiens
gccctgccaaattcc

SEQ ID NO: 1157288 - DNA, 15 bp, Homo sapiens
tgccctgccaaattc

SEQ ID NO: 1157289 - DNA, 15 bp, Homo sapiens
gtgccctgccaaatt

SEQ ID NO: 1157290 - DNA, 15 bp, Homo sapiens
tgtgccctgccaaat

SEQ ID NO: 1157291 - DNA, 15 bp, Homo sapiens
ctgtgccctgccaaa

SEQ ID NO: 1157292 - DNA, 15 bp, Homo sapiens
actgtgccctgccaa

SEQ ID NO: 1157293 - DNA, 15 bp, Homo sapiens
cactgtgccctgcca

SEQ ID NO: 1157294 - DNA, 15 bp, Homo sapiens
ccactgtgccctgcc

SEQ ID NO: 1157295 - DNA, 15 bp, Homo sapiens
gccactgtgccctgc

SEQ ID NO: 1157296 - DNA, 15 bp, Homo sapiens
agccactgtgccctg

SEQ ID NO: 1157297 - DNA, 15 bp, Homo sapiens
gagccactgtgccct

SEQ ID NO: 1157298 - DNA, 15 bp, Homo sapiens
gcccacttcagcctc

SEQ ID NO: 1157299 - DNA, 15 bp, Homo sapiens
cgcccacttcagcct

SEQ ID NO: 1157300 - DNA, 15 bp, Homo sapiens
ccgcccacttcagcc

SEQ ID NO: 1157301 - DNA, 15 bp, Homo sapiens
tccgcccacttcagc

SEQ ID NO: 1157302 - DNA, 15 bp, Homo sapiens
atccgcccacttcag

SEQ ID NO: 1157303 - DNA, 15 bp, Homo sapiens
gatccgcccacttca

SEQ ID NO: 1157304 - DNA, 15 bp, Homo sapiens
tgatccgcccacttc

SEQ ID NO: 1157305 - DNA, 15 bp, Homo sapiens
gtgatccgcccactt

SEQ ID NO: 1157306 - DNA, 15 bp, Homo sapiens
agtgatccgcccact

SEQ ID NO: 1157307 - DNA, 15 bp, Homo sapiens
aagtgatccgcccac

SEQ ID NO: 1157308 - DNA, 15 bp, Homo sapiens
caagtgatccgccca

SEQ ID NO: 1157309 - DNA, 15 bp, Homo sapiens
ttcaagtgatccgcc

SEQ ID NO: 1157310 - DNA, 15 bp, Homo sapiens
cttcaagtgatccgc

SEQ ID NO: 1157311 - DNA, 15 bp, Homo sapiens
acttcaagtgatccg

SEQ ID NO: 1157312 - DNA, 15 bp, Homo sapiens
gacttcaagtgatcc

SEQ ID NO: 1157313 - DNA, 15 bp, Homo sapiens
tgacttcaagtgatc

SEQ ID NO: 1157314 - DNA, 15 bp, Homo sapiens
ctgacttcaagtgat

SEQ ID NO: 1157315 - DNA, 15 bp, Homo sapiens
cctgacttcaagtga

SEQ ID NO: 1157316 - DNA, 15 bp, Homo sapiens
tcctgacttcaagtg

SEQ ID NO: 1157317 - DNA, 15 bp, Homo sapiens
ctcctgacttcaagt

SEQ ID NO: 1157318 - DNA, 15 bp, Homo sapiens
actcctgacttcaag

SEQ ID NO: 1157319 - DNA, 15 bp, Homo sapiens
aactcctgacttcaa

SEQ ID NO: 1157320 - DNA, 15 bp, Homo sapiens
cgaactcctgacttc

SEQ ID NO: 1157321 - DNA, 15 bp, Homo sapiens
tcgaactcctgactt

SEQ ID NO: 1157322 - DNA, 15 bp, Homo sapiens
ctcgaactcctgact

SEQ ID NO: 1157323 - DNA, 15 bp, Homo sapiens
cggctaatttttata

SEQ ID NO: 1157324 - DNA, 15 bp, Homo sapiens
ccggctaatttttat

SEQ ID NO: 1157325 - DNA, 15 bp, Homo sapiens
cccggctaattttta

SEQ ID NO: 1157326 - DNA, 15 bp, Homo sapiens
ccaccaccatgcccg

SEQ ID NO: 1157327 - DNA, 15 bp, Homo sapiens
cccaccaccatgccc

SEQ ID NO: 1157328 - DNA, 15 bp, Homo sapiens
gcccaccaccatgcc

SEQ ID NO: 1157329 - DNA, 15 bp, Homo sapiens
tgcccaccaccatgc

SEQ ID NO: 1157330 - DNA, 15 bp, Homo sapiens
gtgcccaccaccatg

SEQ ID NO: 1157331 - DNA, 15 bp, Homo sapiens
ggtgcccaccaccat

SEQ ID NO: 1157332 - DNA, 15 bp, Homo sapiens
ggtgcagtggcgcga

SEQ ID NO: 1157333 - DNA, 15 bp, Homo sapiens
gggtgcagtggcgcg

SEQ ID NO: 1157334 - DNA, 15 bp, Homo sapiens
ggggtgcagtggcgc

SEQ ID NO: 1157335 - DNA, 15 bp, Homo sapiens
tggggtgcagtggcg

SEQ ID NO: 1157336 - DNA, 15 bp, Homo sapiens
ctggggtgcagtggc

SEQ ID NO: 1157337 - DNA, 15 bp, Homo sapiens
gtccaggctggggtg

SEQ ID NO: 1157338 - DNA, 15 bp, Homo sapiens
tgtccaggctggggt

SEQ ID NO: 1157339 - DNA, 15 bp, Homo sapiens
ttgtccaggctgggg

SEQ ID NO: 1157340 - DNA, 15 bp, Homo sapiens
gttgtccaggctggg

SEQ ID NO: 1157341 - DNA, 15 bp, Homo sapiens
agttgtccaggctgg

SEQ ID NO: 1157342 - DNA, 15 bp, Homo sapiens
cagttgtccaggctg

SEQ ID NO: 1157343 - DNA, 15 bp, Homo sapiens
tcagttgtccaggct

SEQ ID NO: 1157344 - DNA, 15 bp, Homo sapiens
ctcagttgtccaggc

SEQ ID NO: 1157345 - DNA, 15 bp, Homo sapiens
gctcagttgtccagg

SEQ ID NO: 1157346 - DNA, 15 bp, Homo sapiens
cgctcagttgtccag

SEQ ID NO: 1157347 - DNA, 15 bp, Homo sapiens
tcgctcagttgtcca

SEQ ID NO: 1157348 - DNA, 15 bp, Homo sapiens
ctcgctcagttgtcc

SEQ ID NO: 1157349 - DNA, 15 bp, Homo sapiens
tctcgctcagttgtc

SEQ ID NO: 1157350 - DNA, 15 bp, Homo sapiens
gtctcgctcagttgt

SEQ ID NO: 1157351 - DNA, 15 bp, Homo sapiens
agtctcgctcagttg

SEQ ID NO: 1157352 - DNA, 15 bp, Homo sapiens
gagtctcgctcagtt

SEQ ID NO: 1157353 - DNA, 15 bp, Homo sapiens
ggagtctcgctcagt

SEQ ID NO: 1157354 - DNA, 15 bp, Homo sapiens
cggagtctcgctcag

SEQ ID NO: 1157355 - DNA, 15 bp, Homo sapiens
acggagtctcgctca

SEQ ID NO: 1157356 - DNA, 15 bp, Homo sapiens
gttttctttctttct

SEQ ID NO: 1157357 - DNA, 15 bp, Homo sapiens
ggttttctttctttc

SEQ ID NO: 1157358 - DNA, 15 bp, Homo sapiens
aggttttctttcttt

SEQ ID NO: 1157359 - DNA, 15 bp, Homo sapiens
aaggttttctttctt

SEQ ID NO: 1157360 - DNA, 15 bp, Homo sapiens
taaggttttctttct

SEQ ID NO: 1157361 - DNA, 15 bp, Homo sapiens
ttaaggttttctttc

SEQ ID NO: 1157362 - DNA, 15 bp, Homo sapiens
tttaaggttttcttt

SEQ ID NO: 1157363 - DNA, 15 bp, Homo sapiens
atttaaggttttctt

SEQ ID NO: 1157364 - DNA, 15 bp, Homo sapiens
catttaaggttttct

SEQ ID NO: 1157365 - DNA, 15 bp, Homo sapiens
acatttaaggttttc

SEQ ID NO: 1157366 - DNA, 15 bp, Homo sapiens
aacatttaaggtttt

SEQ ID NO: 1157367 - DNA, 15 bp, Homo sapiens
aaacatttaaggttt

SEQ ID NO: 1157368 - DNA, 15 bp, Homo sapiens
caaacatttaaggtt

SEQ ID NO: 1157369 - DNA, 15 bp, Homo sapiens
acaaacatttaaggt

SEQ ID NO: 1157370 - DNA, 15 bp, Homo sapiens
cacaaacatttaagg

SEQ ID NO: 1157371 - DNA, 15 bp, Homo sapiens
acacaaacatttaag

SEQ ID NO: 1157372 - DNA, 15 bp, Homo sapiens
aacacaaacatttaa

SEQ ID NO: 1157373 - DNA, 15 bp, Homo sapiens
aaacacaaacattta

SEQ ID NO: 1157374 - DNA, 15 bp, Homo sapiens
aaaacacaaacattt

SEQ ID NO: 1157375 - DNA, 15 bp, Homo sapiens
caaaacacaaacatt

SEQ ID NO: 1157376 - DNA, 15 bp, Homo sapiens
acaaaacacaaacat

SEQ ID NO: 1157377 - DNA, 15 bp, Homo sapiens
aacaaaacacaaaca

SEQ ID NO: 1157378 - DNA, 15 bp, Homo sapiens
aaacaaaacacaaac

SEQ ID NO: 1157379 - DNA, 15 bp, Homo sapiens
caaacaaaacacaaa

SEQ ID NO: 1157380 - DNA, 15 bp, Homo sapiens
acaaacaaaacacaa

SEQ ID NO: 1157381 - DNA, 15 bp, Homo sapiens
aacaaacaaaacaca

SEQ ID NO: 1157382 - DNA, 15 bp, Homo sapiens
aaacaaacaaaacac

SEQ ID NO: 1157383 - DNA, 15 bp, Homo sapiens
caaacaaacaaaaca

SEQ ID NO: 1157384 - DNA, 15 bp, Homo sapiens
acaaacaaacaaaac

SEQ ID NO: 1157385 - DNA, 15 bp, Homo sapiens
ctaaaacaaacaaac

SEQ ID NO: 1157386 - DNA, 15 bp, Homo sapiens
cctaaaacaaacaaa

SEQ ID NO: 1157387 - DNA, 15 bp, Homo sapiens
acctaaaacaaacaa

SEQ ID NO: 1157388 - DNA, 15 bp, Homo sapiens
tacctaaaacaaaca

SEQ ID NO: 1157389 - DNA, 15 bp, Homo sapiens
ttacctaaaacaaac

SEQ ID NO: 1157390 - DNA, 15 bp, Homo sapiens
attacctaaaacaaa

SEQ ID NO: 1157391 - DNA, 15 bp, Homo sapiens
aattacctaaaacaa

SEQ ID NO: 1157392 - DNA, 15 bp, Homo sapiens
gaattacctaaaaca

SEQ ID NO: 1157393 - DNA, 15 bp, Homo sapiens
ggaattacctaaaac

SEQ ID NO: 1157394 - DNA, 15 bp, Homo sapiens
aggaattacctaaaa

SEQ ID NO: 1157395 - DNA, 15 bp, Homo sapiens
taggaattacctaaa

SEQ ID NO: 1157396 - DNA, 15 bp, Homo sapiens
gtaggaattacctaa

SEQ ID NO: 1157397 - DNA, 15 bp, Homo sapiens
agtaggaattaccta

SEQ ID NO: 1157398 - DNA, 15 bp, Homo sapiens
cagtaggaattacct

SEQ ID NO: 1157399 - DNA, 15 bp, Homo sapiens
acagtaggaattacc

SEQ ID NO: 1157400 - DNA, 15 bp, Homo sapiens
tacagtaggaattac

SEQ ID NO: 1157401 - DNA, 15 bp, Homo sapiens
atacagtaggaatta

SEQ ID NO: 1157402 - DNA, 15 bp, Homo sapiens
aatacagtaggaatt

SEQ ID NO: 1157403 - DNA, 15 bp, Homo sapiens
gaatacagtaggaat

SEQ ID NO: 1157404 - DNA, 15 bp, Homo sapiens
tgaatacagtaggaa

SEQ ID NO: 1157405 - DNA, 15 bp, Homo sapiens
ttgaatacagtagga

SEQ ID NO: 1157406 - DNA, 15 bp, Homo sapiens
cttgaatacagtagg

SEQ ID NO: 1157407 - DNA, 15 bp, Homo sapiens
ccttgaatacagtag

SEQ ID NO: 1157408 - DNA, 15 bp, Homo sapiens
gccttgaatacagta

SEQ ID NO: 1157409 - DNA, 15 bp, Homo sapiens
tgccttgaatacagt

SEQ ID NO: 1157410 - DNA, 15 bp, Homo sapiens
ttgccttgaatacag

SEQ ID NO: 1157411 - DNA, 15 bp, Homo sapiens
attgccttgaataca

SEQ ID NO: 1157412 - DNA, 15 bp, Homo sapiens
cattgccttgaatac

SEQ ID NO: 1157413 - DNA, 15 bp, Homo sapiens
gcattgccttgaata

SEQ ID NO: 1157414 - DNA, 15 bp, Homo sapiens
tgcattgccttgaat

SEQ ID NO: 1157415 - DNA, 15 bp, Homo sapiens
ttgcattgccttgaa

SEQ ID NO: 1157416 - DNA, 15 bp, Homo sapiens
tttgcattgccttga

SEQ ID NO: 1157417 - DNA, 15 bp, Homo sapiens
atttgcattgccttg

SEQ ID NO: 1157418 - DNA, 15 bp, Homo sapiens
catttgcattgcctt

SEQ ID NO: 1157419 - DNA, 15 bp, Homo sapiens
gcatttgcattgcct

SEQ ID NO: 1157420 - DNA, 15 bp, Homo sapiens
tgcatttgcattgcc

SEQ ID NO: 1157421 - DNA, 15 bp, Homo sapiens
ttgcatttgcattgc

SEQ ID NO: 1157422 - DNA, 15 bp, Homo sapiens
cttgcatttgcattg

SEQ ID NO: 1157423 - DNA, 15 bp, Homo sapiens
tcttgcatttgcatt

SEQ ID NO: 1157424 - DNA, 15 bp, Homo sapiens
ttcttgcatttgcat

SEQ ID NO: 1157425 - DNA, 15 bp, Homo sapiens
gttcttgcatttgca

SEQ ID NO: 1157426 - DNA, 15 bp, Homo sapiens
cgttcttgcatttgc

SEQ ID NO: 1157427 - DNA, 15 bp, Homo sapiens
ccgttcttgcatttg

SEQ ID NO: 1157428 - DNA, 15 bp, Homo sapiens
cccgttcttgcattt

SEQ ID NO: 1157429 - DNA, 15 bp, Homo sapiens
tcccgttcttgcatt

SEQ ID NO: 1157430 - DNA, 15 bp, Homo sapiens
gtcccgttcttgcat

SEQ ID NO: 1157431 - DNA, 15 bp, Homo sapiens
tgtcccgttcttgca

SEQ ID NO: 1157432 - DNA, 15 bp, Homo sapiens
gtgtcccgttcttgc

SEQ ID NO: 1157433 - DNA, 15 bp, Homo sapiens
agtgtcccgttcttg

SEQ ID NO: 1157434 - DNA, 15 bp, Homo sapiens
aagtgtcccgttctt

SEQ ID NO: 1157435 - DNA, 15 bp, Homo sapiens
aaagtgtcccgttct

SEQ ID NO: 1157436 - DNA, 15 bp, Homo sapiens
caaagtgtcccgttc

SEQ ID NO: 1157437 - DNA, 15 bp, Homo sapiens
gcaaagtgtcccgtt

SEQ ID NO: 1157438 - DNA, 15 bp, Homo sapiens
agcaaagtgtcccgt

SEQ ID NO: 1157439 - DNA, 15 bp, Homo sapiens
tagcaaagtgtcccg

SEQ ID NO: 1157440 - DNA, 15 bp, Homo sapiens
ttagcaaagtgtccc

SEQ ID NO: 1157441 - DNA, 15 bp, Homo sapiens
tttagcaaagtgtcc

SEQ ID NO: 1157442 - DNA, 15 bp, Homo sapiens
ctttagcaaagtgtc

SEQ ID NO: 1157443 - DNA, 15 bp, Homo sapiens
cctttagcaaagtgt

SEQ ID NO: 1157444 - DNA, 15 bp, Homo sapiens
gcctttagcaaagtg

SEQ ID NO: 1157445 - DNA, 15 bp, Homo sapiens
cgcctttagcaaagt

SEQ ID NO: 1157446 - DNA, 15 bp, Homo sapiens
gcgcctttagcaaag

SEQ ID NO: 1157447 - DNA, 15 bp, Homo sapiens
agcgcctttagcaaa

SEQ ID NO: 1157448 - DNA, 15 bp, Homo sapiens
cagcgcctttagcaa

SEQ ID NO: 1157449 - DNA, 15 bp, Homo sapiens
acagcgcctttagca

SEQ ID NO: 1157450 - DNA, 15 bp, Homo sapiens
aacagcgcctttagc

SEQ ID NO: 1157451 - DNA, 15 bp, Homo sapiens
caacagcgcctttag

SEQ ID NO: 1157452 - DNA, 15 bp, Homo sapiens
ccaacagcgccttta

SEQ ID NO: 1157453 - DNA, 15 bp, Homo sapiens
tccaacagcgccttt

SEQ ID NO: 1157454 - DNA, 15 bp, Homo sapiens
ttccaacagcgcctt

SEQ ID NO: 1157455 - DNA, 15 bp, Homo sapiens
tttccaacagcgcct

SEQ ID NO: 1157456 - DNA, 15 bp, Homo sapiens
atttccaacagcgcc

SEQ ID NO: 1157457 - DNA, 15 bp, Homo sapiens
tatttccaacagcgc

SEQ ID NO: 1157458 - DNA, 15 bp, Homo sapiens
ctatttccaacagcg

SEQ ID NO: 1157459 - DNA, 15 bp, Homo sapiens
gctatttccaacagc

SEQ ID NO: 1157460 - DNA, 15 bp, Homo sapiens
agctatttccaacag

SEQ ID NO: 1157461 - DNA, 15 bp, Homo sapiens
aagctatttccaaca

SEQ ID NO: 1157462 - DNA, 15 bp, Homo sapiens
gaagctatttccaac

SEQ ID NO: 1157463 - DNA, 15 bp, Homo sapiens
agaagctatttccaa

SEQ ID NO: 1157464 - DNA, 15 bp, Homo sapiens
aagaagctatttcca

SEQ ID NO: 1157465 - DNA, 15 bp, Homo sapiens
caagaagctatttcc

SEQ ID NO: 1157466 - DNA, 15 bp, Homo sapiens
gcaagaagctatttc

SEQ ID NO: 1157467 - DNA, 15 bp, Homo sapiens
agcaagaagctattt

SEQ ID NO: 1157468 - DNA, 15 bp, Homo sapiens
aagcaagaagctatt

SEQ ID NO: 1157469 - DNA, 15 bp, Homo sapiens
caagcaagaagctat

SEQ ID NO: 1157470 - DNA, 15 bp, Homo sapiens
ccaagcaagaagcta

SEQ ID NO: 1157471 - DNA, 15 bp, Homo sapiens
tccaagcaagaagct

SEQ ID NO: 1157472 - DNA, 15 bp, Homo sapiens
ctccaagcaagaagc

SEQ ID NO: 1157473 - DNA, 15 bp, Homo sapiens
tctccaagcaagaag

SEQ ID NO: 1157474 - DNA, 15 bp, Homo sapiens
ttctccaagcaagaa

SEQ ID NO: 1157475 - DNA, 15 bp, Homo sapiens
tttctccaagcaaga

SEQ ID NO: 1157476 - DNA, 15 bp, Homo sapiens
ctttctccaagcaag

SEQ ID NO: 1157477 - DNA, 15 bp, Homo sapiens
gctttctccaagcaa

SEQ ID NO: 1157478 - DNA, 15 bp, Homo sapiens
ggctttctccaagca

SEQ ID NO: 1157479 - DNA, 15 bp, Homo sapiens
gggctttctccaagc

SEQ ID NO: 1157480 - DNA, 15 bp, Homo sapiens
agggctttctccaag

SEQ ID NO: 1157481 - DNA, 15 bp, Homo sapiens
aagggctttctccaa

SEQ ID NO: 1157482 - DNA, 15 bp, Homo sapiens
gaagggctttctcca

SEQ ID NO: 1157483 - DNA, 15 bp, Homo sapiens
tgaagggctttctcc

SEQ ID NO: 1157484 - DNA, 15 bp, Homo sapiens
ttgaagggctttctc

SEQ ID NO: 1157485 - DNA, 15 bp, Homo sapiens
cttgaagggctttct

SEQ ID NO: 1157486 - DNA, 15 bp, Homo sapiens
acttgaagggctttc

SEQ ID NO: 1157487 - DNA, 15 bp, Homo sapiens
cacttgaagggcttt

SEQ ID NO: 1157488 - DNA, 15 bp, Homo sapiens
acacttgaagggctt

SEQ ID NO: 1157489 - DNA, 15 bp, Homo sapiens
aacacttgaagggct

SEQ ID NO: 1157490 - DNA, 15 bp, Homo sapiens
aaacacttgaagggc

SEQ ID NO: 1157491 - DNA, 15 bp, Homo sapiens
gaaacacttgaaggg

SEQ ID NO: 1157492 - DNA, 15 bp, Homo sapiens
tgaaacacttgaagg

SEQ ID NO: 1157493 - DNA, 15 bp, Homo sapiens
gtgaaacacttgaag

SEQ ID NO: 1157494 - DNA, 15 bp, Homo sapiens
ggtgaaacacttgaa

SEQ ID NO: 1157495 - DNA, 15 bp, Homo sapiens
tggtgaaacacttga

SEQ ID NO: 1157496 - DNA, 15 bp, Homo sapiens
ttggtgaaacacttg

SEQ ID NO: 1157497 - DNA, 15 bp, Homo sapiens
tttggtgaaacactt

SEQ ID NO: 1157498 - DNA, 15 bp, Homo sapiens
atttggtgaaacact

SEQ ID NO: 1157499 - DNA, 15 bp, Homo sapiens
gatttggtgaaacac

SEQ ID NO: 1157500 - DNA, 15 bp, Homo sapiens
ggatttggtgaaaca

SEQ ID NO: 1157501 - DNA, 15 bp, Homo sapiens
tggatttggtgaaac

SEQ ID NO: 1157502 - DNA, 15 bp, Homo sapiens
gtggatttggtgaaa

SEQ ID NO: 1157503 - DNA, 15 bp, Homo sapiens
cgtggatttggtgaa

SEQ ID NO: 1157504 - DNA, 15 bp, Homo sapiens
ccgtggatttggtga

SEQ ID NO: 1157505 - DNA, 15 bp, Homo sapiens
gccgtggatttggtg

SEQ ID NO: 1157506 - DNA, 15 bp, Homo sapiens
tgccgtggatttggt

SEQ ID NO: 1157507 - DNA, 15 bp, Homo sapiens
ttgccgtggatttgg

SEQ ID NO: 1157508 - DNA, 15 bp, Homo sapiens
cttgccgtggatttg

SEQ ID NO: 1157509 - DNA, 15 bp, Homo sapiens
acttgccgtggattt

SEQ ID NO: 1157510 - DNA, 15 bp, Homo sapiens
cacttgccgtggatt

SEQ ID NO: 1157511 - DNA, 15 bp, Homo sapiens
acacttgccgtggat

SEQ ID NO: 1157512 - DNA, 15 bp, Homo sapiens
aacacttgccgtgga

SEQ ID NO: 1157513 - DNA, 15 bp, Homo sapiens
caacacttgccgtgg

SEQ ID NO: 1157514 - DNA, 15 bp, Homo sapiens
acaacacttgccgtg

SEQ ID NO: 1157515 - DNA, 15 bp, Homo sapiens
cacaacacttgccgt

SEQ ID NO: 1157516 - DNA, 15 bp, Homo sapiens
acacaacacttgccg

SEQ ID NO: 1157517 - DNA, 15 bp, Homo sapiens
cacacaacacttgcc

SEQ ID NO: 1157518 - DNA, 15 bp, Homo sapiens
gcacacaacacttgc

SEQ ID NO: 1157519 - DNA, 15 bp, Homo sapiens
tgcacacaacacttg

SEQ ID NO: 1157520 - DNA, 15 bp, Homo sapiens
ctgcacacaacactt

SEQ ID NO: 1157521 - DNA, 15 bp, Homo sapiens
actgcacacaacact

SEQ ID NO: 1157522 - DNA, 15 bp, Homo sapiens
cactgcacacaacac

SEQ ID NO: 1157523 - DNA, 15 bp, Homo sapiens
gcactgcacacaaca

SEQ ID NO: 1157524 - DNA, 15 bp, Homo sapiens
tgcactgcacacaac

SEQ ID NO: 1157525 - DNA, 15 bp, Homo sapiens
ttgcactgcacacaa

SEQ ID NO: 1157526 - DNA, 15 bp, Homo sapiens
attgcactgcacaca

SEQ ID NO: 1157527 - DNA, 15 bp, Homo sapiens
tattgcactgcacac

SEQ ID NO: 1157528 - DNA, 15 bp, Homo sapiens
ctattgcactgcaca

SEQ ID NO: 1157529 - DNA, 15 bp, Homo sapiens
actattgcactgcac

SEQ ID NO: 1157530 - DNA, 15 bp, Homo sapiens
gactattgcactgca

SEQ ID NO: 1157531 - DNA, 15 bp, Homo sapiens
agactattgcactgc

SEQ ID NO: 1157532 - DNA, 15 bp, Homo sapiens
tagactattgcactg

SEQ ID NO: 1157533 - DNA, 15 bp, Homo sapiens
ctagactattgcact

SEQ ID NO: 1157534 - DNA, 15 bp, Homo sapiens
cctagactattgcac

SEQ ID NO: 1157535 - DNA, 15 bp, Homo sapiens
gcctagactattgca

SEQ ID NO: 1157536 - DNA, 15 bp, Homo sapiens
agcctagactattgc

SEQ ID NO: 1157537 - DNA, 15 bp, Homo sapiens
cagcctagactattg

SEQ ID NO: 1157538 - DNA, 15 bp, Homo sapiens
tcagcctagactatt

SEQ ID NO: 1157539 - DNA, 15 bp, Homo sapiens
gtcagcctagactat

SEQ ID NO: 1157540 - DNA, 15 bp, Homo sapiens
tgtcagcctagacta

SEQ ID NO: 1157541 - DNA, 15 bp, Homo sapiens
ttgtcagcctagact

SEQ ID NO: 1157542 - DNA, 15 bp, Homo sapiens
cttgtcagcctagac

SEQ ID NO: 1157543 - DNA, 15 bp, Homo sapiens
acttgtcagcctaga

SEQ ID NO: 1157544 - DNA, 15 bp, Homo sapiens
gacttgtcagcctag

SEQ ID NO: 1157545 - DNA, 15 bp, Homo sapiens
tgacttgtcagccta

SEQ ID NO: 1157546 - DNA, 15 bp, Homo sapiens
ttgacttgtcagcct

SEQ ID NO: 1157547 - DNA, 15 bp, Homo sapiens
tttgacttgtcagcc

SEQ ID NO: 1157548 - DNA, 15 bp, Homo sapiens
atttgacttgtcagc

SEQ ID NO: 1157549 - DNA, 15 bp, Homo sapiens
catttgacttgtcag

SEQ ID NO: 1157550 - DNA, 15 bp, Homo sapiens
acatttgacttgtca

SEQ ID NO: 1157551 - DNA, 15 bp, Homo sapiens
aacatttgacttgtc

SEQ ID NO: 1157552 - DNA, 15 bp, Homo sapiens
gaacatttgacttgt

SEQ ID NO: 1157553 - DNA, 15 bp, Homo sapiens
ggaacatttgacttg

SEQ ID NO: 1157554 - DNA, 15 bp, Homo sapiens
tggaacatttgactt

SEQ ID NO: 1157555 - DNA, 15 bp, Homo sapiens
ctggaacatttgact

SEQ ID NO: 1157556 - DNA, 15 bp, Homo sapiens
cctggaacatttgac

SEQ ID NO: 1157557 - DNA, 15 bp, Homo sapiens
acctggaacatttga

SEQ ID NO: 1157558 - DNA, 15 bp, Homo sapiens
cacctggaacatttg

SEQ ID NO: 1157559 - DNA, 15 bp, Homo sapiens
acacctggaacattt

SEQ ID NO: 1157560 - DNA, 15 bp, Homo sapiens
tacacctggaacatt

SEQ ID NO: 1157561 - DNA, 15 bp, Homo sapiens
ctacacctggaacat

SEQ ID NO: 1157562 - DNA, 15 bp, Homo sapiens
tctacacctggaaca

SEQ ID NO: 1157563 - DNA, 15 bp, Homo sapiens
ttctacacctggaac

SEQ ID NO: 1157564 - DNA, 15 bp, Homo sapiens
attctacacctggaa

SEQ ID NO: 1157565 - DNA, 15 bp, Homo sapiens
tattctacacctgga

SEQ ID NO: 1157566 - DNA, 15 bp, Homo sapiens
ctattctacacctgg

SEQ ID NO: 1157567 - DNA, 15 bp, Homo sapiens
actattctacacctg

SEQ ID NO: 1157568 - DNA, 15 bp, Homo sapiens
aactattctacacct

SEQ ID NO: 1157569 - DNA, 15 bp, Homo sapiens
caactattctacacc

SEQ ID NO: 1157570 - DNA, 15 bp, Homo sapiens
tcaactattctacac

SEQ ID NO: 1157571 - DNA, 15 bp, Homo sapiens
ttcaactattctaca

SEQ ID NO: 1157572 - DNA, 15 bp, Homo sapiens
tttcaactattctac

SEQ ID NO: 1157573 - DNA, 15 bp, Homo sapiens
ttttcaactattcta

SEQ ID NO: 1157574 - DNA, 15 bp, Homo sapiens
tttttcaactattct

SEQ ID NO: 1157575 - DNA, 15 bp, Homo sapiens
ttttttcaactattc

SEQ ID NO: 1157576 - DNA, 15 bp, Homo sapiens
cttttttcaactatt

SEQ ID NO: 1157577 - DNA, 15 bp, Homo sapiens
ccttttttcaactat

SEQ ID NO: 1157578 - DNA, 15 bp, Homo sapiens
cccttttttcaacta

SEQ ID NO: 1157579 - DNA, 15 bp, Homo sapiens
tcccttttttcaact

SEQ ID NO: 1157580 - DNA, 15 bp, Homo sapiens
ttcccttttttcaac

SEQ ID NO: 1157581 - DNA, 15 bp, Homo sapiens
cttcccttttttcaa

SEQ ID NO: 1157582 - DNA, 15 bp, Homo sapiens
gcttcccttttttca

SEQ ID NO: 1157583 - DNA, 15 bp, Homo sapiens
tgcttcccttttttc

SEQ ID NO: 1157584 - DNA, 15 bp, Homo sapiens
ttgcttccctttttt

SEQ ID NO: 1157585 - DNA, 15 bp, Homo sapiens
tttgcttcccttttt

SEQ ID NO: 1157586 - DNA, 15 bp, Homo sapiens
ttttgcttccctttt

SEQ ID NO: 1157587 - DNA, 15 bp, Homo sapiens
tttttgcttcccttt

SEQ ID NO: 1157588 - DNA, 15 bp, Homo sapiens
ctttttgcttccctt

SEQ ID NO: 1157589 - DNA, 15 bp, Homo sapiens
gctttttgcttccct

SEQ ID NO: 1157590 - DNA, 15 bp, Homo sapiens
tgctttttgcttccc

SEQ ID NO: 1157591 - DNA, 15 bp, Homo sapiens
ttgctttttgcttcc

SEQ ID NO: 1157592 - DNA, 15 bp, Homo sapiens
gttgctttttgcttc

SEQ ID NO: 1157593 - DNA, 15 bp, Homo sapiens
agttgctttttgctt

SEQ ID NO: 1157594 - DNA, 15 bp, Homo sapiens
tagttgctttttgct

SEQ ID NO: 1157595 - DNA, 15 bp, Homo sapiens
atagttgctttttgc

SEQ ID NO: 1157596 - DNA, 15 bp, Homo sapiens
gatagttgctttttg

SEQ ID NO: 1157597 - DNA, 15 bp, Homo sapiens
tgatagttgcttttt

SEQ ID NO: 1157598 - DNA, 15 bp, Homo sapiens
gtgatagttgctttt

SEQ ID NO: 1157599 - DNA, 15 bp, Homo sapiens
agtgatagttgcttt

SEQ ID NO: 1157600 - DNA, 15 bp, Homo sapiens
aagtgatagttgctt

SEQ ID NO: 1157601 - DNA, 15 bp, Homo sapiens
taagtgatagttgct

SEQ ID NO: 1157602 - DNA, 15 bp, Homo sapiens
ctaagtgatagttgc

SEQ ID NO: 1157603 - DNA, 15 bp, Homo sapiens
actaagtgatagttg

SEQ ID NO: 1157604 - DNA, 15 bp, Homo sapiens
tactaagtgatagtt

SEQ ID NO: 1157605 - DNA, 15 bp, Homo sapiens
atactaagtgatagt

SEQ ID NO: 1157606 - DNA, 15 bp, Homo sapiens
catactaagtgatag

SEQ ID NO: 1157607 - DNA, 15 bp, Homo sapiens
acatactaagtgata

SEQ ID NO: 1157608 - DNA, 15 bp, Homo sapiens
aacatactaagtgat

SEQ ID NO: 1157609 - DNA, 15 bp, Homo sapiens
aaacatactaagtga

SEQ ID NO: 1157610 - DNA, 15 bp, Homo sapiens
aaaacatactaagtg

SEQ ID NO: 1157611 - DNA, 15 bp, Homo sapiens
gaaaacatactaagt

SEQ ID NO: 1157612 - DNA, 15 bp, Homo sapiens
tgaaaacatactaag

SEQ ID NO: 1157613 - DNA, 15 bp, Homo sapiens
gtgaaaacatactaa

SEQ ID NO: 1157614 - DNA, 15 bp, Homo sapiens
agtgaaaacatacta

SEQ ID NO: 1157615 - DNA, 15 bp, Homo sapiens
aagtgaaaacatact

SEQ ID NO: 1157616 - DNA, 15 bp, Homo sapiens
aaagtgaaaacatac

SEQ ID NO: 1157617 - DNA, 15 bp, Homo sapiens
taaagtgaaaacata

SEQ ID NO: 1157618 - DNA, 15 bp, Homo sapiens
ctaaagtgaaaacat

SEQ ID NO: 1157619 - DNA, 15 bp, Homo sapiens
cctaaagtgaaaaca

SEQ ID NO: 1157620 - DNA, 15 bp, Homo sapiens
acctaaagtgaaaac

SEQ ID NO: 1157621 - DNA, 15 bp, Homo sapiens
tacctaaagtgaaaa

SEQ ID NO: 1157622 - DNA, 15 bp, Homo sapiens
atacctaaagtgaaa

SEQ ID NO: 1157623 - DNA, 15 bp, Homo sapiens
aatacctaaagtgaa

SEQ ID NO: 1157624 - DNA, 15 bp, Homo sapiens
aaatacctaaagtga

SEQ ID NO: 1157625 - DNA, 15 bp, Homo sapiens
aaaatacctaaagtg

SEQ ID NO: 1157626 - DNA, 15 bp, Homo sapiens
taaaatacctaaagt

SEQ ID NO: 1157627 - DNA, 15 bp, Homo sapiens
ataaaatacctaaag

SEQ ID NO: 1157628 - DNA, 15 bp, Homo sapiens
gataaaatacctaaa

SEQ ID NO: 1157629 - DNA, 15 bp, Homo sapiens
agataaaatacctaa

SEQ ID NO: 1157630 - DNA, 15 bp, Homo sapiens
aagataaaataccta

SEQ ID NO: 1157631 - DNA, 15 bp, Homo sapiens
taagataaaatacct

SEQ ID NO: 1157632 - DNA, 15 bp, Homo sapiens
gtaagataaaatacc

SEQ ID NO: 1157633 - DNA, 15 bp, Homo sapiens
agtaagataaaatac

SEQ ID NO: 1157634 - DNA, 15 bp, Homo sapiens
tagtaagataaaata

SEQ ID NO: 1157635 - DNA, 15 bp, Homo sapiens
ttagtaagataaaat

SEQ ID NO: 1157636 - DNA, 15 bp, Homo sapiens
tttagtaagataaaa

SEQ ID NO: 1157637 - DNA, 15 bp, Homo sapiens
gtttagtaagataaa

SEQ ID NO: 1157638 - DNA, 15 bp, Homo sapiens
ggtttagtaagataa

SEQ ID NO: 1157639 - DNA, 15 bp, Homo sapiens
tggtttagtaagata

SEQ ID NO: 1157640 - DNA, 15 bp, Homo sapiens
atggtttagtaagat

SEQ ID NO: 1157641 - DNA, 15 bp, Homo sapiens
aatggtttagtaaga

SEQ ID NO: 1157642 - DNA, 15 bp, Homo sapiens
gaatggtttagtaag

SEQ ID NO: 1157643 - DNA, 15 bp, Homo sapiens
ggaatggtttagtaa

SEQ ID NO: 1157644 - DNA, 15 bp, Homo sapiens
tggaatggtttagta

SEQ ID NO: 1157645 - DNA, 15 bp, Homo sapiens
gtggaatggtttagt

SEQ ID NO: 1157646 - DNA, 15 bp, Homo sapiens
agtggaatggtttag

SEQ ID NO: 1157647 - DNA, 15 bp, Homo sapiens
aagtggaatggttta

SEQ ID NO: 1157648 - DNA, 15 bp, Homo sapiens
aaagtggaatggttt

SEQ ID NO: 1157649 - DNA, 15 bp, Homo sapiens
gaaagtggaatggtt

SEQ ID NO: 1157650 - DNA, 15 bp, Homo sapiens
agaaagtggaatggt

SEQ ID NO: 1157651 - DNA, 15 bp, Homo sapiens
tagaaagtggaatgg

SEQ ID NO: 1157652 - DNA, 15 bp, Homo sapiens
atagaaagtggaatg

SEQ ID NO: 1157653 - DNA, 15 bp, Homo sapiens
catagaaagtggaat

SEQ ID NO: 1157654 - DNA, 15 bp, Homo sapiens
acatagaaagtggaa

SEQ ID NO: 1157655 - DNA, 15 bp, Homo sapiens
cacatagaaagtgga

SEQ ID NO: 1157656 - DNA, 15 bp, Homo sapiens
ccacatagaaagtgg

SEQ ID NO: 1157657 - DNA, 15 bp, Homo sapiens
accacatagaaagtg

SEQ ID NO: 1157658 - DNA, 15 bp, Homo sapiens
taccacatagaaagt

SEQ ID NO: 1157659 - DNA, 15 bp, Homo sapiens
ctaccacatagaaag

SEQ ID NO: 1157660 - DNA, 15 bp, Homo sapiens
cctaccacatagaaa

SEQ ID NO: 1157661 - DNA, 15 bp, Homo sapiens
acctaccacatagaa

SEQ ID NO: 1157662 - DNA, 15 bp, Homo sapiens
aacctaccacataga

SEQ ID NO: 1157663 - DNA, 15 bp, Homo sapiens
aaacctaccacatag

SEQ ID NO: 1157664 - DNA, 15 bp, Homo sapiens
gaaacctaccacata

SEQ ID NO: 1157665 - DNA, 15 bp, Homo sapiens
tgaaacctaccacat

SEQ ID NO: 1157666 - DNA, 15 bp, Homo sapiens
atgaaacctaccaca

SEQ ID NO: 1157667 - DNA, 15 bp, Homo sapiens
aatgaaacctaccac

SEQ ID NO: 1157668 - DNA, 15 bp, Homo sapiens
taatgaaacctacca

SEQ ID NO: 1157669 - DNA, 15 bp, Homo sapiens
ataatgaaacctacc

SEQ ID NO: 1157670 - DNA, 15 bp, Homo sapiens
gataatgaaacctac

SEQ ID NO: 1157671 - DNA, 15 bp, Homo sapiens
agataatgaaaccta

SEQ ID NO: 1157672 - DNA, 15 bp, Homo sapiens
gagataatgaaacct

SEQ ID NO: 1157673 - DNA, 15 bp, Homo sapiens
ggagataatgaaacc

SEQ ID NO: 1157674 - DNA, 15 bp, Homo sapiens
tggagataatgaaac

SEQ ID NO: 1157675 - DNA, 15 bp, Homo sapiens
atggagataatgaaa

SEQ ID NO: 1157676 - DNA, 15 bp, Homo sapiens
aatggagataatgaa

SEQ ID NO: 1157677 - DNA, 15 bp, Homo sapiens
aaatggagataatga

SEQ ID NO: 1157678 - DNA, 15 bp, Homo sapiens
aaaatggagataatg

SEQ ID NO: 1157679 - DNA, 15 bp, Homo sapiens
taaaatggagataat

SEQ ID NO: 1157680 - DNA, 15 bp, Homo sapiens
ataaaatggagataa

SEQ ID NO: 1157681 - DNA, 15 bp, Homo sapiens
tataaaatggagata

SEQ ID NO: 1157682 - DNA, 15 bp, Homo sapiens
ttataaaatggagat

SEQ ID NO: 1157683 - DNA, 15 bp, Homo sapiens
cttataaaatggaga

SEQ ID NO: 1157684 - DNA, 15 bp, Homo sapiens
acttataaaatggag

SEQ ID NO: 1157685 - DNA, 15 bp, Homo sapiens
tacttataaaatgga

SEQ ID NO: 1157686 - DNA, 15 bp, Homo sapiens
ttacttataaaatgg

SEQ ID NO: 1157687 - DNA, 15 bp, Homo sapiens
tttacttataaaatg

SEQ ID NO: 1157688 - DNA, 15 bp, Homo sapiens
ctttacttataaaat

SEQ ID NO: 1157689 - DNA, 15 bp, Homo sapiens
actttacttataaaa

SEQ ID NO: 1157690 - DNA, 15 bp, Homo sapiens
gactttacttataaa

SEQ ID NO: 1157691 - DNA, 15 bp, Homo sapiens
tgactttacttataa

SEQ ID NO: 1157692 - DNA, 15 bp, Homo sapiens
atgactttacttata

SEQ ID NO: 1157693 - DNA, 15 bp, Homo sapiens
gatgactttacttat

SEQ ID NO: 1157694 - DNA, 15 bp, Homo sapiens
agatgactttactta

SEQ ID NO: 1157695 - DNA, 15 bp, Homo sapiens
tagatgactttactt

SEQ ID NO: 1157696 - DNA, 15 bp, Homo sapiens
ttagatgactttact

SEQ ID NO: 1157697 - DNA, 15 bp, Homo sapiens
tttagatgactttac

SEQ ID NO: 1157698 - DNA, 15 bp, Homo sapiens
atttagatgacttta

SEQ ID NO: 1157699 - DNA, 15 bp, Homo sapiens
aatttagatgacttt

SEQ ID NO: 1157700 - DNA, 15 bp, Homo sapiens
gaatttagatgactt

SEQ ID NO: 1157701 - DNA, 15 bp, Homo sapiens
tgaatttagatgact

SEQ ID NO: 1157702 - DNA, 15 bp, Homo sapiens
ctgaatttagatgac

SEQ ID NO: 1157703 - DNA, 15 bp, Homo sapiens
tctgaatttagatga

SEQ ID NO: 1157704 - DNA, 15 bp, Homo sapiens
ttctgaatttagatg

SEQ ID NO: 1157705 - DNA, 15 bp, Homo sapiens
tttctgaatttagat

SEQ ID NO: 1157706 - DNA, 15 bp, Homo sapiens
ctttctgaatttaga

SEQ ID NO: 1157707 - DNA, 15 bp, Homo sapiens
tctttctgaatttag

SEQ ID NO: 1157708 - DNA, 15 bp, Homo sapiens
gtctttctgaattta

SEQ ID NO: 1157709 - DNA, 15 bp, Homo sapiens
tgtctttctgaattt

SEQ ID NO: 1157710 - DNA, 15 bp, Homo sapiens
ctgtctttctgaatt

SEQ ID NO: 1157711 - DNA, 15 bp, Homo sapiens
cctgtctttctgaat

SEQ ID NO: 1157712 - DNA, 15 bp, Homo sapiens
ccctgtctttctgaa

SEQ ID NO: 1157713 - DNA, 15 bp, Homo sapiens
accctgtctttctga

SEQ ID NO: 1157714 - DNA, 15 bp, Homo sapiens
taccctgtctttctg

SEQ ID NO: 1157715 - DNA, 15 bp, Homo sapiens
ttaccctgtctttct

SEQ ID NO: 1157716 - DNA, 15 bp, Homo sapiens
tttaccctgtctttc

SEQ ID NO: 1157717 - DNA, 15 bp, Homo sapiens
atttaccctgtcttt

SEQ ID NO: 1157718 - DNA, 15 bp, Homo sapiens
catttaccctgtctt

SEQ ID NO: 1157719 - DNA, 15 bp, Homo sapiens
tcatttaccctgtct

SEQ ID NO: 1157720 - DNA, 15 bp, Homo sapiens
gtcatttaccctgtc

SEQ ID NO: 1157721 - DNA, 15 bp, Homo sapiens
agtcatttaccctgt

SEQ ID NO: 1157722 - DNA, 15 bp, Homo sapiens
aagtcatttaccctg

SEQ ID NO: 1157723 - DNA, 15 bp, Homo sapiens
gaagtcatttaccct

SEQ ID NO: 1157724 - DNA, 15 bp, Homo sapiens
tgaagtcatttaccc

SEQ ID NO: 1157725 - DNA, 15 bp, Homo sapiens
ctgaagtcatttacc

SEQ ID NO: 1157726 - DNA, 15 bp, Homo sapiens
tctgaagtcatttac

SEQ ID NO: 1157727 - DNA, 15 bp, Homo sapiens
atctgaagtcattta

SEQ ID NO: 1157728 - DNA, 15 bp, Homo sapiens
aatctgaagtcattt

SEQ ID NO: 1157729 - DNA, 15 bp, Homo sapiens
gaatctgaagtcatt

SEQ ID NO: 1157730 - DNA, 15 bp, Homo sapiens
ggaatctgaagtcat

SEQ ID NO: 1157731 - DNA, 15 bp, Homo sapiens
tggaatctgaagtca

SEQ ID NO: 1157732 - DNA, 15 bp, Homo sapiens
gtggaatctgaagtc

SEQ ID NO: 1157733 - DNA, 15 bp, Homo sapiens
tgtggaatctgaagt

SEQ ID NO: 1157734 - DNA, 15 bp, Homo sapiens
ctgtggaatctgaag

SEQ ID NO: 1157735 - DNA, 15 bp, Homo sapiens
cctgtggaatctgaa

SEQ ID NO: 1157736 - DNA, 15 bp, Homo sapiens
gcctgtggaatctga

SEQ ID NO: 1157737 - DNA, 15 bp, Homo sapiens
cgcctgtggaatctg

SEQ ID NO: 1157738 - DNA, 15 bp, Homo sapiens
ccgcctgtggaatct

SEQ ID NO: 1157739 - DNA, 15 bp, Homo sapiens
accgcctgtggaatc

SEQ ID NO: 1157740 - DNA, 15 bp, Homo sapiens
caccgcctgtggaat

SEQ ID NO: 1157741 - DNA, 15 bp, Homo sapiens
tcaccgcctgtggaa

SEQ ID NO: 1157742 - DNA, 15 bp, Homo sapiens
ttcaccgcctgtgga

SEQ ID NO: 1157743 - DNA, 15 bp, Homo sapiens
cttcaccgcctgtgg

SEQ ID NO: 1157744 - DNA, 15 bp, Homo sapiens
gcttcaccgcctgtg

SEQ ID NO: 1157745 - DNA, 15 bp, Homo sapiens
ggcttcaccgcctgt

SEQ ID NO: 1157746 - DNA, 15 bp, Homo sapiens
tggcttcaccgcctg

SEQ ID NO: 1157747 - DNA, 15 bp, Homo sapiens
ctggcttcaccgcct

SEQ ID NO: 1157748 - DNA, 15 bp, Homo sapiens
tctggcttcaccgcc

SEQ ID NO: 1157749 - DNA, 15 bp, Homo sapiens
ctctggcttcaccgc

SEQ ID NO: 1157750 - DNA, 15 bp, Homo sapiens
actctggcttcaccg

SEQ ID NO: 1157751 - DNA, 15 bp, Homo sapiens
aactctggcttcacc

SEQ ID NO: 1157752 - DNA, 15 bp, Homo sapiens
gaactctggcttcac

SEQ ID NO: 1157753 - DNA, 15 bp, Homo sapiens
ggaactctggcttca

SEQ ID NO: 1157754 - DNA, 15 bp, Homo sapiens
tggaactctggcttc

SEQ ID NO: 1157755 - DNA, 15 bp, Homo sapiens
ttggaactctggctt

SEQ ID NO: 1157756 - DNA, 15 bp, Homo sapiens
cttggaactctggct

SEQ ID NO: 1157757 - DNA, 15 bp, Homo sapiens
gcttggaactctggc

SEQ ID NO: 1157758 - DNA, 15 bp, Homo sapiens
agcttggaactctgg

SEQ ID NO: 1157759 - DNA, 15 bp, Homo sapiens
cagcttggaactctg

SEQ ID NO: 1157760 - DNA, 15 bp, Homo sapiens
ccagcttggaactct

SEQ ID NO: 1157761 - DNA, 15 bp, Homo sapiens
cccagcttggaactc

SEQ ID NO: 1157762 - DNA, 15 bp, Homo sapiens
acccagcttggaact

SEQ ID NO: 1157763 - DNA, 15 bp, Homo sapiens
gacccagcttggaac

SEQ ID NO: 1157764 - DNA, 15 bp, Homo sapiens
agacccagcttggaa

SEQ ID NO: 1157765 - DNA, 15 bp, Homo sapiens
tagacccagcttgga

SEQ ID NO: 1157766 - DNA, 15 bp, Homo sapiens
atagacccagcttgg

SEQ ID NO: 1157767 - DNA, 15 bp, Homo sapiens
aatagacccagcttg

SEQ ID NO: 1157768 - DNA, 15 bp, Homo sapiens
aaatagacccagctt

SEQ ID NO: 1157769 - DNA, 15 bp, Homo sapiens
taaatagacccagct

SEQ ID NO: 1157770 - DNA, 15 bp, Homo sapiens
ttaaatagacccagc

SEQ ID NO: 1157771 - DNA, 15 bp, Homo sapiens
gttaaatagacccag

SEQ ID NO: 1157772 - DNA, 15 bp, Homo sapiens
tgttaaatagaccca

SEQ ID NO: 1157773 - DNA, 15 bp, Homo sapiens
gtgttaaatagaccc

SEQ ID NO: 1157774 - DNA, 15 bp, Homo sapiens
agtgttaaatagacc

SEQ ID NO: 1157775 - DNA, 15 bp, Homo sapiens
tagtgttaaatagac

SEQ ID NO: 1157776 - DNA, 15 bp, Homo sapiens
ttagtgttaaataga

SEQ ID NO: 1157777 - DNA, 15 bp, Homo sapiens
cttagtgttaaatag

SEQ ID NO: 1157778 - DNA, 15 bp, Homo sapiens
ccttagtgttaaata

SEQ ID NO: 1157779 - DNA, 15 bp, Homo sapiens
tccttagtgttaaat

SEQ ID NO: 1157780 - DNA, 15 bp, Homo sapiens
ttccttagtgttaaa

SEQ ID NO: 1157781 - DNA, 15 bp, Homo sapiens
gttccttagtgttaa

SEQ ID NO: 1157782 - DNA, 15 bp, Homo sapiens
agttccttagtgtta

SEQ ID NO: 1157783 - DNA, 15 bp, Homo sapiens
aagttccttagtgtt

SEQ ID NO: 1157784 - DNA, 15 bp, Homo sapiens
gaagttccttagtgt

SEQ ID NO: 1157785 - DNA, 15 bp, Homo sapiens
ggaagttccttagtg

SEQ ID NO: 1157786 - DNA, 15 bp, Homo sapiens
aggaagttccttagt

SEQ ID NO: 1157787 - DNA, 15 bp, Homo sapiens
aaggaagttccttag

SEQ ID NO: 1157788 - DNA, 15 bp, Homo sapiens
caaggaagttcctta

SEQ ID NO: 1157789 - DNA, 15 bp, Homo sapiens
gcaaggaagttcctt

SEQ ID NO: 1157790 - DNA, 15 bp, Homo sapiens
ggcaaggaagttcct

SEQ ID NO: 1157791 - DNA, 15 bp, Homo sapiens
aggcaaggaagttcc

SEQ ID NO: 1157792 - DNA, 15 bp, Homo sapiens
gaggcaaggaagttc

SEQ ID NO: 1157793 - DNA, 15 bp, Homo sapiens
ggaggcaaggaagtt

SEQ ID NO: 1157794 - DNA, 15 bp, Homo sapiens
gggaggcaaggaagt

SEQ ID NO: 1157795 - DNA, 15 bp, Homo sapiens
cgggaggcaaggaag

SEQ ID NO: 1157796 - DNA, 15 bp, Homo sapiens
gcgggaggcaaggaa

SEQ ID NO: 1157797 - DNA, 15 bp, Homo sapiens
agcgggaggcaagga

SEQ ID NO: 1157798 - DNA, 15 bp, Homo sapiens
tagcgggaggcaagg

SEQ ID NO: 1157799 - DNA, 15 bp, Homo sapiens
ttagcgggaggcaag

SEQ ID NO: 1157800 - DNA, 15 bp, Homo sapiens
tttagcgggaggcaa

SEQ ID NO: 1157801 - DNA, 15 bp, Homo sapiens
ttttagcgggaggca

SEQ ID NO: 1157802 - DNA, 15 bp, Homo sapiens
tttttagcgggaggc

SEQ ID NO: 1157803 - DNA, 15 bp, Homo sapiens
gtttttagcgggagg

SEQ ID NO: 1157804 - DNA, 15 bp, Homo sapiens
ggtttttagcgggag

SEQ ID NO: 1157805 - DNA, 15 bp, Homo sapiens
aggtttttagcggga

SEQ ID NO: 1157806 - DNA, 15 bp, Homo sapiens
aaggtttttagcggg

SEQ ID NO: 1157807 - DNA, 15 bp, Homo sapiens
taaggtttttagcgg

SEQ ID NO: 1157808 - DNA, 15 bp, Homo sapiens
ctaaggtttttagcg

SEQ ID NO: 1157809 - DNA, 15 bp, Homo sapiens
tctaaggtttttagc

SEQ ID NO: 1157810 - DNA, 15 bp, Homo sapiens
ctctaaggtttttag

SEQ ID NO: 1157811 - DNA, 15 bp, Homo sapiens
tctctaaggttttta

SEQ ID NO: 1157812 - DNA, 15 bp, Homo sapiens
ttctctaaggttttt

SEQ ID NO: 1157813 - DNA, 15 bp, Homo sapiens
tttctctaaggtttt

SEQ ID NO: 1157814 - DNA, 15 bp, Homo sapiens
gtttctctaaggttt

SEQ ID NO: 1157815 - DNA, 15 bp, Homo sapiens
agtttctctaaggtt

SEQ ID NO: 1157816 - DNA, 15 bp, Homo sapiens
aagtttctctaaggt

SEQ ID NO: 1157817 - DNA, 15 bp, Homo sapiens
aaagtttctctaagg

SEQ ID NO: 1157818 - DNA, 15 bp, Homo sapiens
gaaagtttctctaag

SEQ ID NO: 1157819 - DNA, 15 bp, Homo sapiens
ggaaagtttctctaa

SEQ ID NO: 1157820 - DNA, 15 bp, Homo sapiens
tggaaagtttctcta

SEQ ID NO: 1157821 - DNA, 15 bp, Homo sapiens
gtggaaagtttctct

SEQ ID NO: 1157822 - DNA, 15 bp, Homo sapiens
tgtggaaagtttctc

SEQ ID NO: 1157823 - DNA, 15 bp, Homo sapiens
atgtggaaagtttct

SEQ ID NO: 1157824 - DNA, 15 bp, Homo sapiens
catgtggaaagtttc

SEQ ID NO: 1157825 - DNA, 15 bp, Homo sapiens
ccatgtggaaagttt

SEQ ID NO: 1157826 - DNA, 15 bp, Homo sapiens
cccatgtggaaagtt

SEQ ID NO: 1157827 - DNA, 15 bp, Homo sapiens
tcccatgtggaaagt

SEQ ID NO: 1157828 - DNA, 15 bp, Homo sapiens
ctcccatgtggaaag

SEQ ID NO: 1157829 - DNA, 15 bp, Homo sapiens
cctcccatgtggaaa

SEQ ID NO: 1157830 - DNA, 15 bp, Homo sapiens
ccctcccatgtggaa

SEQ ID NO: 1157831 - DNA, 15 bp, Homo sapiens
accctcccatgtgga

SEQ ID NO: 1157832 - DNA, 15 bp, Homo sapiens
caccctcccatgtgg

SEQ ID NO: 1157833 - DNA, 15 bp, Homo sapiens
ccaccctcccatgtg

SEQ ID NO: 1157834 - DNA, 15 bp, Homo sapiens
accaccctcccatgt

SEQ ID NO: 1157835 - DNA, 15 bp, Homo sapiens
aaccaccctcccatg

SEQ ID NO: 1157836 - DNA, 15 bp, Homo sapiens
aaaccaccctcccat

SEQ ID NO: 1157837 - DNA, 15 bp, Homo sapiens
aaaaccaccctccca

SEQ ID NO: 1157838 - DNA, 15 bp, Homo sapiens
taaaaccaccctccc

SEQ ID NO: 1157839 - DNA, 15 bp, Homo sapiens
ttaaaaccaccctcc

SEQ ID NO: 1157840 - DNA, 15 bp, Homo sapiens
cttaaaaccaccctc

SEQ ID NO: 1157841 - DNA, 15 bp, Homo sapiens
acttaaaaccaccct

SEQ ID NO: 1157842 - DNA, 15 bp, Homo sapiens
gacttaaaaccaccc

SEQ ID NO: 1157843 - DNA, 15 bp, Homo sapiens
ggacttaaaaccacc

SEQ ID NO: 1157844 - DNA, 15 bp, Homo sapiens
gggacttaaaaccac

SEQ ID NO: 1157845 - DNA, 15 bp, Homo sapiens
cgggacttaaaacca

SEQ ID NO: 1157846 - DNA, 15 bp, Homo sapiens
tcgggacttaaaacc

SEQ ID NO: 1157847 - DNA, 15 bp, Homo sapiens
ttcgggacttaaaac

SEQ ID NO: 1157848 - DNA, 15 bp, Homo sapiens
tttcgggacttaaaa

SEQ ID NO: 1157849 - DNA, 15 bp, Homo sapiens
ttttcgggacttaaa

SEQ ID NO: 1157850 - DNA, 15 bp, Homo sapiens
tttttcgggacttaa

SEQ ID NO: 1157851 - DNA, 15 bp, Homo sapiens
ttttttcgggactta

SEQ ID NO: 1157852 - DNA, 15 bp, Homo sapiens
tttttttcgggactt

SEQ ID NO: 1157853 - DNA, 15 bp, Homo sapiens
ttttttttcgggact

SEQ ID NO: 1157854 - DNA, 15 bp, Homo sapiens
tttttttttcgggac

SEQ ID NO: 1157855 - DNA, 15 bp, Homo sapiens
ttttttttttcggga

SEQ ID NO: 1157856 - DNA, 15 bp, Homo sapiens
tttttttttttcggg

SEQ ID NO: 1157857 - DNA, 15 bp, Homo sapiens
ttttttttttttcgg

SEQ ID NO: 1157858 - DNA, 15 bp, Homo sapiens
attttttttttttcg

SEQ ID NO: 1157859 - DNA, 15 bp, Homo sapiens
ctatttttttttttt

SEQ ID NO: 1157860 - DNA, 15 bp, Homo sapiens
gctattttttttttt

SEQ ID NO: 1157861 - DNA, 15 bp, Homo sapiens
agctatttttttttt

SEQ ID NO: 1157862 - DNA, 15 bp, Homo sapiens
aagctattttttttt

SEQ ID NO: 1157863 - DNA, 15 bp, Homo sapiens
gaagctatttttttt

SEQ ID NO: 1157864 - DNA, 15 bp, Homo sapiens
agaagctattttttt

SEQ ID NO: 1157865 - DNA, 15 bp, Homo sapiens
cagaagctatttttt

SEQ ID NO: 1157866 - DNA, 15 bp, Homo sapiens
gcagaagctattttt

SEQ ID NO: 1157867 - DNA, 15 bp, Homo sapiens
agcagaagctatttt

SEQ ID NO: 1157868 - DNA, 15 bp, Homo sapiens
aagcagaagctattt

SEQ ID NO: 1157869 - DNA, 15 bp, Homo sapiens
caagcagaagctatt

SEQ ID NO: 1157870 - DNA, 15 bp, Homo sapiens
tcaagcagaagctat

SEQ ID NO: 1157871 - DNA, 15 bp, Homo sapiens
atcaagcagaagcta

SEQ ID NO: 1157872 - DNA, 15 bp, Homo sapiens
tatcaagcagaagct

SEQ ID NO: 1157873 - DNA, 15 bp, Homo sapiens
ttatcaagcagaagc

SEQ ID NO: 1157874 - DNA, 15 bp, Homo sapiens
cttatcaagcagaag

SEQ ID NO: 1157875 - DNA, 15 bp, Homo sapiens
tcttatcaagcagaa

SEQ ID NO: 1157876 - DNA, 15 bp, Homo sapiens
ttcttatcaagcaga

SEQ ID NO: 1157877 - DNA, 15 bp, Homo sapiens
gttcttatcaagcag

SEQ ID NO: 1157878 - DNA, 15 bp, Homo sapiens
agttcttatcaagca

SEQ ID NO: 1157879 - DNA, 15 bp, Homo sapiens
gagttcttatcaagc

SEQ ID NO: 1157880 - DNA, 15 bp, Homo sapiens
ggagttcttatcaag

SEQ ID NO: 1157881 - DNA, 15 bp, Homo sapiens
aggagttcttatcaa

SEQ ID NO: 1157882 - DNA, 15 bp, Homo sapiens
aaggagttcttatca

SEQ ID NO: 1157883 - DNA, 15 bp, Homo sapiens
gaaggagttcttatc

SEQ ID NO: 1157884 - DNA, 15 bp, Homo sapiens
ggaaggagttcttat

SEQ ID NO: 1157885 - DNA, 15 bp, Homo sapiens
aggaaggagttctta

SEQ ID NO: 1157886 - DNA, 15 bp, Homo sapiens
taggaaggagttctt

SEQ ID NO: 1157887 - DNA, 15 bp, Homo sapiens
ttaggaaggagttct

SEQ ID NO: 1157888 - DNA, 15 bp, Homo sapiens
attaggaaggagttc

SEQ ID NO: 1157889 - DNA, 15 bp, Homo sapiens
aattaggaaggagtt

SEQ ID NO: 1157890 - DNA, 15 bp, Homo sapiens
gaattaggaaggagt

SEQ ID NO: 1157891 - DNA, 15 bp, Homo sapiens
agaattaggaaggag

SEQ ID NO: 1157892 - DNA, 15 bp, Homo sapiens
cagaattaggaagga

SEQ ID NO: 1157893 - DNA, 15 bp, Homo sapiens
acagaattaggaagg

SEQ ID NO: 1157894 - DNA, 15 bp, Homo sapiens
aacagaattaggaag

SEQ ID NO: 1157895 - DNA, 15 bp, Homo sapiens
aaacagaattaggaa

SEQ ID NO: 1157896 - DNA, 15 bp, Homo sapiens
aaaacagaattagga

SEQ ID NO: 1157897 - DNA, 15 bp, Homo sapiens
aaaaacagaattagg

SEQ ID NO: 1157898 - DNA, 15 bp, Homo sapiens
aaaaaacagaattag

SEQ ID NO: 1157899 - DNA, 15 bp, Homo sapiens
aaaaaaacagaatta

SEQ ID NO: 1157900 - DNA, 15 bp, Homo sapiens
taaaaaaacagaatt

SEQ ID NO: 1157901 - DNA, 15 bp, Homo sapiens
gtaaaaaaacagaat

SEQ ID NO: 1157902 - DNA, 15 bp, Homo sapiens
tgtaaaaaaacagaa

SEQ ID NO: 1157903 - DNA, 15 bp, Homo sapiens
ttgtaaaaaaacaga

SEQ ID NO: 1157904 - DNA, 15 bp, Homo sapiens
tttgtaaaaaaacag

SEQ ID NO: 1157905 - DNA, 15 bp, Homo sapiens
atttgtaaaaaaaca

SEQ ID NO: 1157906 - DNA, 15 bp, Homo sapiens
aatttgtaaaaaaac

SEQ ID NO: 1157907 - DNA, 15 bp, Homo sapiens
taatttgtaaaaaaa

SEQ ID NO: 1157908 - DNA, 15 bp, Homo sapiens
ttaatttgtaaaaaa

SEQ ID NO: 1157909 - DNA, 15 bp, Homo sapiens
cttaatttgtaaaaa

SEQ ID NO: 1157910 - DNA, 15 bp, Homo sapiens
tcttaatttgtaaaa

SEQ ID NO: 1157911 - DNA, 15 bp, Homo sapiens
ttcttaatttgtaaa

SEQ ID NO: 1157912 - DNA, 15 bp, Homo sapiens
tttcttaatttgtaa

SEQ ID NO: 1157913 - DNA, 15 bp, Homo sapiens
gtttcttaatttgta

SEQ ID NO: 1157914 - DNA, 15 bp, Homo sapiens
tgtttcttaatttgt

SEQ ID NO: 1157915 - DNA, 15 bp, Homo sapiens
ttgtttcttaatttg

SEQ ID NO: 1157916 - DNA, 15 bp, Homo sapiens
attgtttcttaattt

SEQ ID NO: 1157917 - DNA, 15 bp, Homo sapiens
tattgtttcttaatt

SEQ ID NO: 1157918 - DNA, 15 bp, Homo sapiens
gtattgtttcttaat

SEQ ID NO: 1157919 - DNA, 15 bp, Homo sapiens
tgtattgtttcttaa

SEQ ID NO: 1157920 - DNA, 15 bp, Homo sapiens
ctgtattgtttctta

SEQ ID NO: 1157921 - DNA, 15 bp, Homo sapiens
tctgtattgtttctt

SEQ ID NO: 1157922 - DNA, 15 bp, Homo sapiens
ttctgtattgtttct

SEQ ID NO: 1157923 - DNA, 15 bp, Homo sapiens
tttctgtattgtttc

SEQ ID NO: 1157924 - DNA, 15 bp, Homo sapiens
ttttctgtattgttt

SEQ ID NO: 1157925 - DNA, 15 bp, Homo sapiens
cttttctgtattgtt

SEQ ID NO: 1157926 - DNA, 15 bp, Homo sapiens
acttttctgtattgt

SEQ ID NO: 1157927 - DNA, 15 bp, Homo sapiens
gacttttctgtattg

SEQ ID NO: 1157928 - DNA, 15 bp, Homo sapiens
tgacttttctgtatt

SEQ ID NO: 1157929 - DNA, 15 bp, Homo sapiens
atgacttttctgtat

SEQ ID NO: 1157930 - DNA, 15 bp, Homo sapiens
aatgacttttctgta

SEQ ID NO: 1157931 - DNA, 15 bp, Homo sapiens
caatgacttttctgt

SEQ ID NO: 1157932 - DNA, 15 bp, Homo sapiens
tcaatgacttttctg

SEQ ID NO: 1157933 - DNA, 15 bp, Homo sapiens
ctcaatgacttttct

SEQ ID NO: 1157934 - DNA, 15 bp, Homo sapiens
cctcaatgacttttc

SEQ ID NO: 1157935 - DNA, 15 bp, Homo sapiens
acctcaatgactttt

SEQ ID NO: 1157936 - DNA, 15 bp, Homo sapiens
gacctcaatgacttt

SEQ ID NO: 1157937 - DNA, 15 bp, Homo sapiens
tgacctcaatgactt

SEQ ID NO: 1157938 - DNA, 15 bp, Homo sapiens
ttgacctcaatgact

SEQ ID NO: 1157939 - DNA, 15 bp, Homo sapiens
tttgacctcaatgac

SEQ ID NO: 1157940 - DNA, 15 bp, Homo sapiens
ttttgacctcaatga

SEQ ID NO: 1157941 - DNA, 15 bp, Homo sapiens
cttttgacctcaatg

SEQ ID NO: 1157942 - DNA, 15 bp, Homo sapiens
acttttgacctcaat

SEQ ID NO: 1157943 - DNA, 15 bp, Homo sapiens
aacttttgacctcaa

SEQ ID NO: 1157944 - DNA, 15 bp, Homo sapiens
caacttttgacctca

SEQ ID NO: 1157945 - DNA, 15 bp, Homo sapiens
acaacttttgacctc

SEQ ID NO: 1157946 - DNA, 15 bp, Homo sapiens
aacaacttttgacct

SEQ ID NO: 1157947 - DNA, 15 bp, Homo sapiens
caacaacttttgacc

SEQ ID NO: 1157948 - DNA, 15 bp, Homo sapiens
gcaacaacttttgac

SEQ ID NO: 1157949 - DNA, 15 bp, Homo sapiens
tgcaacaacttttga

SEQ ID NO: 1157950 - DNA, 15 bp, Homo sapiens
ttgcaacaacttttg

SEQ ID NO: 1157951 - DNA, 15 bp, Homo sapiens
tttgcaacaactttt

SEQ ID NO: 1157952 - DNA, 15 bp, Homo sapiens
ttttgcaacaacttt

SEQ ID NO: 1157953 - DNA, 15 bp, Homo sapiens
attttgcaacaactt

SEQ ID NO: 1157954 - DNA, 15 bp, Homo sapiens
aattttgcaacaact

SEQ ID NO: 1157955 - DNA, 15 bp, Homo sapiens
taattttgcaacaac

SEQ ID NO: 1157956 - DNA, 15 bp, Homo sapiens
ttaattttgcaacaa

SEQ ID NO: 1157957 - DNA, 15 bp, Homo sapiens
gttaattttgcaaca

SEQ ID NO: 1157958 - DNA, 15 bp, Homo sapiens
tgttaattttgcaac

SEQ ID NO: 1157959 - DNA, 15 bp, Homo sapiens
ctgttaattttgcaa

SEQ ID NO: 1157960 - DNA, 15 bp, Homo sapiens
gctgttaattttgca

SEQ ID NO: 1157961 - DNA, 15 bp, Homo sapiens
agctgttaattttgc

SEQ ID NO: 1157962 - DNA, 15 bp, Homo sapiens
tagctgttaattttg

SEQ ID NO: 1157963 - DNA, 15 bp, Homo sapiens
ttagctgttaatttt

SEQ ID NO: 1157964 - DNA, 15 bp, Homo sapiens
tttagctgttaattt

SEQ ID NO: 1157965 - DNA, 15 bp, Homo sapiens
ttttagctgttaatt

SEQ ID NO: 1157966 - DNA, 15 bp, Homo sapiens
tttttagctgttaat

SEQ ID NO: 1157967 - DNA, 15 bp, Homo sapiens
ttttttagctgttaa

SEQ ID NO: 1157968 - DNA, 15 bp, Homo sapiens
gttttttagctgtta

SEQ ID NO: 1157969 - DNA, 15 bp, Homo sapiens
agttttttagctgtt

SEQ ID NO: 1157970 - DNA, 15 bp, Homo sapiens
tagttttttagctgt

SEQ ID NO: 1157971 - DNA, 15 bp, Homo sapiens
gtagttttttagctg

SEQ ID NO: 1157972 - DNA, 15 bp, Homo sapiens
ggtagttttttagct

SEQ ID NO: 1157973 - DNA, 15 bp, Homo sapiens
gggtagttttttagc

SEQ ID NO: 1157974 - DNA, 15 bp, Homo sapiens
tgggtagttttttag

SEQ ID NO: 1157975 - DNA, 15 bp, Homo sapiens
gtgggtagtttttta

SEQ ID NO: 1157976 - DNA, 15 bp, Homo sapiens
tgtgggtagtttttt

SEQ ID NO: 1157977 - DNA, 15 bp, Homo sapiens
ttgtgggtagttttt

SEQ ID NO: 1157978 - DNA, 15 bp, Homo sapiens
tttgtgggtagtttt

SEQ ID NO: 1157979 - DNA, 15 bp, Homo sapiens
ttttgtgggtagttt

SEQ ID NO: 1157980 - DNA, 15 bp, Homo sapiens
tttttgtgggtagtt

SEQ ID NO: 1157981 - DNA, 15 bp, Homo sapiens
gtttttttgtgggta

SEQ ID NO: 1157982 - DNA, 15 bp, Homo sapiens
tgtttttttgtgggt

SEQ ID NO: 1157983 - DNA, 15 bp, Homo sapiens
gtgtttttttgtggg

SEQ ID NO: 1157984 - DNA, 15 bp, Homo sapiens
tgtgtttttttgtgg

SEQ ID NO: 1157985 - DNA, 15 bp, Homo sapiens
gtgtgtttttttgtg

SEQ ID NO: 1157986 - DNA, 15 bp, Homo sapiens
tgtgtgtttttttgt

SEQ ID NO: 1157987 - DNA, 15 bp, Homo sapiens
ttgtgtgtttttttg

SEQ ID NO: 1157988 - DNA, 15 bp, Homo sapiens
tttgtgtgttttttt

SEQ ID NO: 1157989 - DNA, 15 bp, Homo sapiens
ttttgtgtgtttttt

SEQ ID NO: 1157990 - DNA, 15 bp, Homo sapiens
tttttgtgtgttttt

SEQ ID NO: 1157991 - DNA, 15 bp, Homo sapiens
ttttttgtgtgtttt

SEQ ID NO: 1157992 - DNA, 15 bp, Homo sapiens
cttttttgtgtgttt

SEQ ID NO: 1157993 - DNA, 15 bp, Homo sapiens
acttttttgtgtgtt

SEQ ID NO: 1157994 - DNA, 15 bp, Homo sapiens
cacttttttgtgtgt

SEQ ID NO: 1157995 - DNA, 15 bp, Homo sapiens
gcacttttttgtgtg

SEQ ID NO: 1157996 - DNA, 15 bp, Homo sapiens
tgcacttttttgtgt

SEQ ID NO: 1157997 - DNA, 15 bp, Homo sapiens
atgcacttttttgtg

SEQ ID NO: 1157998 - DNA, 15 bp, Homo sapiens
tatgcacttttttgt

SEQ ID NO: 1157999 - DNA, 15 bp, Homo sapiens
ttatgcacttttttg

SEQ ID NO: 1158000 - DNA, 15 bp, Homo sapiens
cttatgcactttttt

SEQ ID NO: 1158001 - DNA, 15 bp, Homo sapiens
gcttatgcacttttt

SEQ ID NO: 1158002 - DNA, 15 bp, Homo sapiens
tgcttatgcactttt

SEQ ID NO: 1158003 - DNA, 15 bp, Homo sapiens
ctgcttatgcacttt

SEQ ID NO: 1158004 - DNA, 15 bp, Homo sapiens
actgcttatgcactt

SEQ ID NO: 1158005 - DNA, 15 bp, Homo sapiens
tactgcttatgcact

SEQ ID NO: 1158006 - DNA, 15 bp, Homo sapiens
ttactgcttatgcac

SEQ ID NO: 1158007 - DNA, 15 bp, Homo sapiens
attactgcttatgca

SEQ ID NO: 1158008 - DNA, 15 bp, Homo sapiens
aattactgcttatgc

SEQ ID NO: 1158009 - DNA, 15 bp, Homo sapiens
aaattactgcttatg

SEQ ID NO: 1158010 - DNA, 15 bp, Homo sapiens
caaattactgcttat

SEQ ID NO: 1158011 - DNA, 15 bp, Homo sapiens
gcaaattactgctta

SEQ ID NO: 1158012 - DNA, 15 bp, Homo sapiens
tgcaaattactgctt

SEQ ID NO: 1158013 - DNA, 15 bp, Homo sapiens
ttgcaaattactgct

SEQ ID NO: 1158014 - DNA, 15 bp, Homo sapiens
attgcaaattactgc

SEQ ID NO: 1158015 - DNA, 15 bp, Homo sapiens
tattgcaaattactg

SEQ ID NO: 1158016 - DNA, 15 bp, Homo sapiens
ctattgcaaattact

SEQ ID NO: 1158017 - DNA, 15 bp, Homo sapiens
cctattgcaaattac

SEQ ID NO: 1158018 - DNA, 15 bp, Homo sapiens
tcctattgcaaatta

SEQ ID NO: 1158019 - DNA, 15 bp, Homo sapiens
ttcctattgcaaatt

SEQ ID NO: 1158020 - DNA, 15 bp, Homo sapiens
tttcctattgcaaat

SEQ ID NO: 1158021 - DNA, 15 bp, Homo sapiens
atttcctattgcaaa

SEQ ID NO: 1158022 - DNA, 15 bp, Homo sapiens
gatttcctattgcaa

SEQ ID NO: 1158023 - DNA, 15 bp, Homo sapiens
agatttcctattgca

SEQ ID NO: 1158024 - DNA, 15 bp, Homo sapiens
cagatttcctattgc

SEQ ID NO: 1158025 - DNA, 15 bp, Homo sapiens
gcagatttcctattg

SEQ ID NO: 1158026 - DNA, 15 bp, Homo sapiens
ggcagatttcctatt

SEQ ID NO: 1158027 - DNA, 15 bp, Homo sapiens
gggcagatttcctat

SEQ ID NO: 1158028 - DNA, 15 bp, Homo sapiens
agggcagatttccta

SEQ ID NO: 1158029 - DNA, 15 bp, Homo sapiens
tagggcagatttcct

SEQ ID NO: 1158030 - DNA, 15 bp, Homo sapiens
gtagggcagatttcc

SEQ ID NO: 1158031 - DNA, 15 bp, Homo sapiens
agtagggcagatttc

SEQ ID NO: 1158032 - DNA, 15 bp, Homo sapiens
cagtagggcagattt

SEQ ID NO: 1158033 - DNA, 15 bp, Homo sapiens
tcagtagggcagatt

SEQ ID NO: 1158034 - DNA, 15 bp, Homo sapiens
ttcagtagggcagat

SEQ ID NO: 1158035 - DNA, 15 bp, Homo sapiens
gttcagtagggcaga

SEQ ID NO: 1158036 - DNA, 15 bp, Homo sapiens
tgttcagtagggcag

SEQ ID NO: 1158037 - DNA, 15 bp, Homo sapiens
ctgttcagtagggca

SEQ ID NO: 1158038 - DNA, 15 bp, Homo sapiens
tctgttcagtagggc

SEQ ID NO: 1158039 - DNA, 15 bp, Homo sapiens
gtctgttcagtaggg

SEQ ID NO: 1158040 - DNA, 15 bp, Homo sapiens
agtctgttcagtagg

SEQ ID NO: 1158041 - DNA, 15 bp, Homo sapiens
gagtctgttcagtag

SEQ ID NO: 1158042 - DNA, 15 bp, Homo sapiens
tgagtctgttcagta

SEQ ID NO: 1158043 - DNA, 15 bp, Homo sapiens
ttgagtctgttcagt

SEQ ID NO: 1158044 - DNA, 15 bp, Homo sapiens
gttgagtctgttcag

SEQ ID NO: 1158045 - DNA, 15 bp, Homo sapiens
tgttgagtctgttca

SEQ ID NO: 1158046 - DNA, 15 bp, Homo sapiens
ttgttgagtctgttc

SEQ ID NO: 1158047 - DNA, 15 bp, Homo sapiens
tttgttgagtctgtt

SEQ ID NO: 1158048 - DNA, 15 bp, Homo sapiens
atttgttgagtctgt

SEQ ID NO: 1158049 - DNA, 15 bp, Homo sapiens
tatttgttgagtctg

SEQ ID NO: 1158050 - DNA, 15 bp, Homo sapiens
gtatttgttgagtct

SEQ ID NO: 1158051 - DNA, 15 bp, Homo sapiens
agtatttgttgagtc

SEQ ID NO: 1158052 - DNA, 15 bp, Homo sapiens
aagtatttgttgagt

SEQ ID NO: 1158053 - DNA, 15 bp, Homo sapiens
caagtatttgttgag

SEQ ID NO: 1158054 - DNA, 15 bp, Homo sapiens
tcaagtatttgttga

SEQ ID NO: 1158055 - DNA, 15 bp, Homo sapiens
atcaagtatttgttg

SEQ ID NO: 1158056 - DNA, 15 bp, Homo sapiens
aatcaagtatttgtt

SEQ ID NO: 1158057 - DNA, 15 bp, Homo sapiens
caatcaagtatttgt

SEQ ID NO: 1158058 - DNA, 15 bp, Homo sapiens
acaatcaagtatttg

SEQ ID NO: 1158059 - DNA, 15 bp, Homo sapiens
aacaatcaagtattt

SEQ ID NO: 1158060 - DNA, 15 bp, Homo sapiens
aaacaatcaagtatt

SEQ ID NO: 1158061 - DNA, 15 bp, Homo sapiens
gaaacaatcaagtat

SEQ ID NO: 1158062 - DNA, 15 bp, Homo sapiens
agaaacaatcaagta

SEQ ID NO: 1158063 - DNA, 15 bp, Homo sapiens
gagaaacaatcaagt

SEQ ID NO: 1158064 - DNA, 15 bp, Homo sapiens
agagaaacaatcaag

SEQ ID NO: 1158065 - DNA, 15 bp, Homo sapiens
gagagaaacaatcaa

SEQ ID NO: 1158066 - DNA, 15 bp, Homo sapiens
agagagaaacaatca

SEQ ID NO: 1158067 - DNA, 15 bp, Homo sapiens
cagagagaaacaatc

SEQ ID NO: 1158068 - DNA, 15 bp, Homo sapiens
ccagagagaaacaat

SEQ ID NO: 1158069 - DNA, 15 bp, Homo sapiens
cccagagagaaacaa

SEQ ID NO: 1158070 - DNA, 15 bp, Homo sapiens
acccagagagaaaca

SEQ ID NO: 1158071 - DNA, 15 bp, Homo sapiens
aacccagagagaaac

SEQ ID NO: 1158072 - DNA, 15 bp, Homo sapiens
aaacccagagagaaa

SEQ ID NO: 1158073 - DNA, 15 bp, Homo sapiens
aaaacccagagagaa

SEQ ID NO: 1158074 - DNA, 15 bp, Homo sapiens
caaaacccagagaga

SEQ ID NO: 1158075 - DNA, 15 bp, Homo sapiens
tcaaaacccagagag

SEQ ID NO: 1158076 - DNA, 15 bp, Homo sapiens
ctcaaaacccagaga

SEQ ID NO: 1158077 - DNA, 15 bp, Homo sapiens
actcaaaacccagag

SEQ ID NO: 1158078 - DNA, 15 bp, Homo sapiens
aactcaaaacccaga

SEQ ID NO: 1158079 - DNA, 15 bp, Homo sapiens
taactcaaaacccag

SEQ ID NO: 1158080 - DNA, 15 bp, Homo sapiens
ataactcaaaaccca

SEQ ID NO: 1158081 - DNA, 15 bp, Homo sapiens
aataactcaaaaccc

SEQ ID NO: 1158082 - DNA, 15 bp, Homo sapiens
caataactcaaaacc

SEQ ID NO: 1158083 - DNA, 15 bp, Homo sapiens
gcaataactcaaaac

SEQ ID NO: 1158084 - DNA, 15 bp, Homo sapiens
agcaataactcaaaa

SEQ ID NO: 1158085 - DNA, 15 bp, Homo sapiens
cagcaataactcaaa

SEQ ID NO: 1158086 - DNA, 15 bp, Homo sapiens
acagcaataactcaa

SEQ ID NO: 1158087 - DNA, 15 bp, Homo sapiens
aacagcaataactca

SEQ ID NO: 1158088 - DNA, 15 bp, Homo sapiens
aaacagcaataactc

SEQ ID NO: 1158089 - DNA, 15 bp, Homo sapiens
taaacagcaataact

SEQ ID NO: 1158090 - DNA, 15 bp, Homo sapiens
ctaaacagcaataac

SEQ ID NO: 1158091 - DNA, 15 bp, Homo sapiens
actaaacagcaataa

SEQ ID NO: 1158092 - DNA, 15 bp, Homo sapiens
gactaaacagcaata

SEQ ID NO: 1158093 - DNA, 15 bp, Homo sapiens
ggactaaacagcaat

SEQ ID NO: 1158094 - DNA, 15 bp, Homo sapiens
aggactaaacagcaa

SEQ ID NO: 1158095 - DNA, 15 bp, Homo sapiens
aaggactaaacagca

SEQ ID NO: 1158096 - DNA, 15 bp, Homo sapiens
caaggactaaacagc

SEQ ID NO: 1158097 - DNA, 15 bp, Homo sapiens
ccaaggactaaacag

SEQ ID NO: 1158098 - DNA, 15 bp, Homo sapiens
gccaaggactaaaca

SEQ ID NO: 1158099 - DNA, 15 bp, Homo sapiens
tgccaaggactaaac

SEQ ID NO: 1158100 - DNA, 15 bp, Homo sapiens
ttgccaaggactaaa

SEQ ID NO: 1158101 - DNA, 15 bp, Homo sapiens
cttgccaaggactaa

SEQ ID NO: 1158102 - DNA, 15 bp, Homo sapiens
tcttgccaaggacta

SEQ ID NO: 1158103 - DNA, 15 bp, Homo sapiens
ttcttgccaaggact

SEQ ID NO: 1158104 - DNA, 15 bp, Homo sapiens
cttcttgccaaggac

SEQ ID NO: 1158105 - DNA, 15 bp, Homo sapiens
gcttcttgccaagga

SEQ ID NO: 1158106 - DNA, 15 bp, Homo sapiens
agcttcttgccaagg

SEQ ID NO: 1158107 - DNA, 15 bp, Homo sapiens
tagcttcttgccaag

SEQ ID NO: 1158108 - DNA, 15 bp, Homo sapiens
ctagcttcttgccaa

SEQ ID NO: 1158109 - DNA, 15 bp, Homo sapiens
tctagcttcttgcca

SEQ ID NO: 1158110 - DNA, 15 bp, Homo sapiens
atctagcttcttgcc

SEQ ID NO: 1158111 - DNA, 15 bp, Homo sapiens
aatctagcttcttgc

SEQ ID NO: 1158112 - DNA, 15 bp, Homo sapiens
aaatctagcttcttg

SEQ ID NO: 1158113 - DNA, 15 bp, Homo sapiens
aaaatctagcttctt

SEQ ID NO: 1158114 - DNA, 15 bp, Homo sapiens
gaaaatctagcttct

SEQ ID NO: 1158115 - DNA, 15 bp, Homo sapiens
tgaaaatctagcttc

SEQ ID NO: 1158116 - DNA, 15 bp, Homo sapiens
ttgaaaatctagctt

SEQ ID NO: 1158117 - DNA, 15 bp, Homo sapiens
tttgaaaatctagct

SEQ ID NO: 1158118 - DNA, 15 bp, Homo sapiens
atttgaaaatctagc

SEQ ID NO: 1158119 - DNA, 15 bp, Homo sapiens
gatttgaaaatctag

SEQ ID NO: 1158120 - DNA, 15 bp, Homo sapiens
tgatttgaaaatcta

SEQ ID NO: 1158121 - DNA, 15 bp, Homo sapiens
ttgatttgaaaatct

SEQ ID NO: 1158122 - DNA, 15 bp, Homo sapiens
cttgatttgaaaatc

SEQ ID NO: 1158123 - DNA, 15 bp, Homo sapiens
acttgatttgaaaat

SEQ ID NO: 1158124 - DNA, 15 bp, Homo sapiens
tacttgatttgaaaa

SEQ ID NO: 1158125 - DNA, 15 bp, Homo sapiens
ctacttgatttgaaa

SEQ ID NO: 1158126 - DNA, 15 bp, Homo sapiens
cctacttgatttgaa

SEQ ID NO: 1158127 - DNA, 15 bp, Homo sapiens
ccctacttgatttga

SEQ ID NO: 1158128 - DNA, 15 bp, Homo sapiens
accctacttgatttg

SEQ ID NO: 1158129 - DNA, 15 bp, Homo sapiens
taccctacttgattt

SEQ ID NO: 1158130 - DNA, 15 bp, Homo sapiens
ctaccctacttgatt

SEQ ID NO: 1158131 - DNA, 15 bp, Homo sapiens
cctaccctacttgat

SEQ ID NO: 1158132 - DNA, 15 bp, Homo sapiens
tcctaccctacttga

SEQ ID NO: 1158133 - DNA, 15 bp, Homo sapiens
ctcctaccctacttg

SEQ ID NO: 1158134 - DNA, 15 bp, Homo sapiens
tctcctaccctactt

SEQ ID NO: 1158135 - DNA, 15 bp, Homo sapiens
gtctcctaccctact

SEQ ID NO: 1158136 - DNA, 15 bp, Homo sapiens
agtctcctaccctac

SEQ ID NO: 1158137 - DNA, 15 bp, Homo sapiens
cagtctcctacccta

SEQ ID NO: 1158138 - DNA, 15 bp, Homo sapiens
tcagtctcctaccct

SEQ ID NO: 1158139 - DNA, 15 bp, Homo sapiens
ctcagtctcctaccc

SEQ ID NO: 1158140 - DNA, 15 bp, Homo sapiens
actcagtctcctacc

SEQ ID NO: 1158141 - DNA, 15 bp, Homo sapiens
cactcagtctcctac

SEQ ID NO: 1158142 - DNA, 15 bp, Homo sapiens
gcactcagtctccta

SEQ ID NO: 1158143 - DNA, 15 bp, Homo sapiens
cgcactcagtctcct

SEQ ID NO: 1158144 - DNA, 15 bp, Homo sapiens
ccgcactcagtctcc

SEQ ID NO: 1158145 - DNA, 15 bp, Homo sapiens
accgcactcagtctc

SEQ ID NO: 1158146 - DNA, 15 bp, Homo sapiens
caccgcactcagtct

SEQ ID NO: 1158147 - DNA, 15 bp, Homo sapiens
ccaccgcactcagtc

SEQ ID NO: 1158148 - DNA, 15 bp, Homo sapiens
gccaccgcactcagt

SEQ ID NO: 1158149 - DNA, 15 bp, Homo sapiens
atgagccaccgcact

SEQ ID NO: 1158150 - DNA, 15 bp, Homo sapiens
tatgagccaccgcac

SEQ ID NO: 1158151 - DNA, 15 bp, Homo sapiens
atatgagccaccgca

SEQ ID NO: 1158152 - DNA, 15 bp, Homo sapiens
catatgagccaccgc

SEQ ID NO: 1158153 - DNA, 15 bp, Homo sapiens
acatatgagccaccg

SEQ ID NO: 1158154 - DNA, 15 bp, Homo sapiens
cacatatgagccacc

SEQ ID NO: 1158155 - DNA, 15 bp, Homo sapiens
acacatatgagccac

SEQ ID NO: 1158156 - DNA, 15 bp, Homo sapiens
tacacatatgagcca

SEQ ID NO: 1158157 - DNA, 15 bp, Homo sapiens
ctacacatatgagcc

SEQ ID NO: 1158158 - DNA, 15 bp, Homo sapiens
actacacatatgagc

SEQ ID NO: 1158159 - DNA, 15 bp, Homo sapiens
aactacacatatgag

SEQ ID NO: 1158160 - DNA, 15 bp, Homo sapiens
aaactacacatatga

SEQ ID NO: 1158161 - DNA, 15 bp, Homo sapiens
gaaactacacatatg

SEQ ID NO: 1158162 - DNA, 15 bp, Homo sapiens
ggaaactacacatat

SEQ ID NO: 1158163 - DNA, 15 bp, Homo sapiens
tggaaactacacata

SEQ ID NO: 1158164 - DNA, 15 bp, Homo sapiens
ctggaaactacacat

SEQ ID NO: 1158165 - DNA, 15 bp, Homo sapiens
gctggaaactacaca

SEQ ID NO: 1158166 - DNA, 15 bp, Homo sapiens
agctggaaactacac

SEQ ID NO: 1158167 - DNA, 15 bp, Homo sapiens
tagctggaaactaca

SEQ ID NO: 1158168 - DNA, 15 bp, Homo sapiens
gtagctggaaactac

SEQ ID NO: 1158169 - DNA, 15 bp, Homo sapiens
agtagctggaaacta

SEQ ID NO: 1158170 - DNA, 15 bp, Homo sapiens
aagtagctggaaact

SEQ ID NO: 1158171 - DNA, 15 bp, Homo sapiens
caagtagctggaaac

SEQ ID NO: 1158172 - DNA, 15 bp, Homo sapiens
ccaagtagctggaaa

SEQ ID NO: 1158173 - DNA, 15 bp, Homo sapiens
ttcccacctcagcct

SEQ ID NO: 1158174 - DNA, 15 bp, Homo sapiens
cttcccacctcagcc

SEQ ID NO: 1158175 - DNA, 15 bp, Homo sapiens
tcttcccacctcagc

SEQ ID NO: 1158176 - DNA, 15 bp, Homo sapiens
atcttcccacctcag

SEQ ID NO: 1158177 - DNA, 15 bp, Homo sapiens
aatcttcccacctca

SEQ ID NO: 1158178 - DNA, 15 bp, Homo sapiens
caatcttcccacctc

SEQ ID NO: 1158179 - DNA, 15 bp, Homo sapiens
gcaatcttcccacct

SEQ ID NO: 1158180 - DNA, 15 bp, Homo sapiens
agcaatcttcccacc

SEQ ID NO: 1158181 - DNA, 15 bp, Homo sapiens
aagcaatcttcccac

SEQ ID NO: 1158182 - DNA, 15 bp, Homo sapiens
cccaactcctgggct

SEQ ID NO: 1158183 - DNA, 15 bp, Homo sapiens
ccccaactcctgggc

SEQ ID NO: 1158184 - DNA, 15 bp, Homo sapiens
gccccaactcctggg

SEQ ID NO: 1158185 - DNA, 15 bp, Homo sapiens
agccccaactcctgg

SEQ ID NO: 1158186 - DNA, 15 bp, Homo sapiens
cagccccaactcctg

SEQ ID NO: 1158187 - DNA, 15 bp, Homo sapiens
gcagccccaactcct

SEQ ID NO: 1158188 - DNA, 15 bp, Homo sapiens
tgcagccccaactcc

SEQ ID NO: 1158189 - DNA, 15 bp, Homo sapiens
ctgcagccccaactc

SEQ ID NO: 1158190 - DNA, 15 bp, Homo sapiens
actgcagccccaact

SEQ ID NO: 1158191 - DNA, 15 bp, Homo sapiens
cactgcagccccaac

SEQ ID NO: 1158192 - DNA, 15 bp, Homo sapiens
tcactgcagccccaa

SEQ ID NO: 1158193 - DNA, 15 bp, Homo sapiens
ctcactgcagcccca

SEQ ID NO: 1158194 - DNA, 15 bp, Homo sapiens
ttgatcatagctcac

SEQ ID NO: 1158195 - DNA, 15 bp, Homo sapiens
attgatcatagctca

SEQ ID NO: 1158196 - DNA, 15 bp, Homo sapiens
tattgatcatagctc

SEQ ID NO: 1158197 - DNA, 15 bp, Homo sapiens
gtattgatcatagct

SEQ ID NO: 1158198 - DNA, 15 bp, Homo sapiens
tgtattgatcatagc

SEQ ID NO: 1158199 - DNA, 15 bp, Homo sapiens
atgtattgatcatag

SEQ ID NO: 1158200 - DNA, 15 bp, Homo sapiens
aatgtattgatcata

SEQ ID NO: 1158201 - DNA, 15 bp, Homo sapiens
gaatgtattgatcat

SEQ ID NO: 1158202 - DNA, 15 bp, Homo sapiens
ggaatgtattgatca

SEQ ID NO: 1158203 - DNA, 15 bp, Homo sapiens
tggaatgtattgatc

SEQ ID NO: 1158204 - DNA, 15 bp, Homo sapiens
ctggaatgtattgat

SEQ ID NO: 1158205 - DNA, 15 bp, Homo sapiens
gctggaatgtattga

SEQ ID NO: 1158206 - DNA, 15 bp, Homo sapiens
ggctggaatgtattg

SEQ ID NO: 1158207 - DNA, 15 bp, Homo sapiens
aggctggaatgtatt

SEQ ID NO: 1158208 - DNA, 15 bp, Homo sapiens
caggctggaatgtat

SEQ ID NO: 1158209 - DNA, 15 bp, Homo sapiens
tcaggctggaatgta

SEQ ID NO: 1158210 - DNA, 15 bp, Homo sapiens
ctcaggctggaatgt

SEQ ID NO: 1158211 - DNA, 15 bp, Homo sapiens
actcaggctggaatg

SEQ ID NO: 1158212 - DNA, 15 bp, Homo sapiens
cactcaggctggaat

SEQ ID NO: 1158213 - DNA, 15 bp, Homo sapiens
tcactcaggctggaa

SEQ ID NO: 1158214 - DNA, 15 bp, Homo sapiens
atcactcaggctgga

SEQ ID NO: 1158215 - DNA, 15 bp, Homo sapiens
catcactcaggctgg

SEQ ID NO: 1158216 - DNA, 15 bp, Homo sapiens
tcatcactcaggctg

SEQ ID NO: 1158217 - DNA, 15 bp, Homo sapiens
ttcatcactcaggct

SEQ ID NO: 1158218 - DNA, 15 bp, Homo sapiens
cttcatcactcaggc

SEQ ID NO: 1158219 - DNA, 15 bp, Homo sapiens
acttcatcactcagg

SEQ ID NO: 1158220 - DNA, 15 bp, Homo sapiens
cacttcatcactcag

SEQ ID NO: 1158221 - DNA, 15 bp, Homo sapiens
tcacttcatcactca

SEQ ID NO: 1158222 - DNA, 15 bp, Homo sapiens
ctcacttcatcactc

SEQ ID NO: 1158223 - DNA, 15 bp, Homo sapiens
tctcacttcatcact

SEQ ID NO: 1158224 - DNA, 15 bp, Homo sapiens
gtctcacttcatcac

SEQ ID NO: 1158225 - DNA, 15 bp, Homo sapiens
ggtctcacttcatca

SEQ ID NO: 1158226 - DNA, 15 bp, Homo sapiens
gggtctcacttcatc

SEQ ID NO: 1158227 - DNA, 15 bp, Homo sapiens
agggtctcacttcat

SEQ ID NO: 1158228 - DNA, 15 bp, Homo sapiens
cagggtctcacttca

SEQ ID NO: 1158229 - DNA, 15 bp, Homo sapiens
acagggtctcacttc

SEQ ID NO: 1158230 - DNA, 15 bp, Homo sapiens
gtttggagacagggt

SEQ ID NO: 1158231 - DNA, 15 bp, Homo sapiens
tgtttggagacaggg

SEQ ID NO: 1158232 - DNA, 15 bp, Homo sapiens
ttgtttggagacagg

SEQ ID NO: 1158233 - DNA, 15 bp, Homo sapiens
attgtttggagacag

SEQ ID NO: 1158234 - DNA, 15 bp, Homo sapiens
aattgtttggagaca

SEQ ID NO: 1158235 - DNA, 15 bp, Homo sapiens
aaattgtttggagac

SEQ ID NO: 1158236 - DNA, 15 bp, Homo sapiens
aaaattgtttggaga

SEQ ID NO: 1158237 - DNA, 15 bp, Homo sapiens
aaaaattgtttggag

SEQ ID NO: 1158238 - DNA, 15 bp, Homo sapiens
taaaaattgtttgga

SEQ ID NO: 1158239 - DNA, 15 bp, Homo sapiens
ttaaaaattgtttgg

SEQ ID NO: 1158240 - DNA, 15 bp, Homo sapiens
tttaaaaattgtttg

SEQ ID NO: 1158241 - DNA, 15 bp, Homo sapiens
taaaatttttaaaaa

SEQ ID NO: 1158242 - DNA, 15 bp, Homo sapiens
ttaaaatttttaaaa

SEQ ID NO: 1158243 - DNA, 15 bp, Homo sapiens
ttttaaaatttttaa

SEQ ID NO: 1158244 - DNA, 15 bp, Homo sapiens
tttttaaaattttta

SEQ ID NO: 1158245 - DNA, 15 bp, Homo sapiens
atttttaaaattttt

SEQ ID NO: 1158246 - DNA, 15 bp, Homo sapiens
tatttttaaaatttt

SEQ ID NO: 1158247 - DNA, 15 bp, Homo sapiens
ctatttttaaaattt

SEQ ID NO: 1158248 - DNA, 15 bp, Homo sapiens
tctatttttaaaatt

SEQ ID NO: 1158249 - DNA, 15 bp, Homo sapiens
ctctctatttttaaa

SEQ ID NO: 1158250 - DNA, 15 bp, Homo sapiens
cctctctatttttaa

SEQ ID NO: 1158251 - DNA, 15 bp, Homo sapiens
ccctctctattttta

SEQ ID NO: 1158252 - DNA, 15 bp, Homo sapiens
tccctctctattttt

SEQ ID NO: 1158253 - DNA, 15 bp, Homo sapiens
ttccctctctatttt

SEQ ID NO: 1158254 - DNA, 15 bp, Homo sapiens
tttccctctctattt

SEQ ID NO: 1158255 - DNA, 15 bp, Homo sapiens
atttccctctctatt

SEQ ID NO: 1158256 - DNA, 15 bp, Homo sapiens
gatttccctctctat

SEQ ID NO: 1158257 - DNA, 15 bp, Homo sapiens
agatttccctctcta

SEQ ID NO: 1158258 - DNA, 15 bp, Homo sapiens
tagatttccctctct

SEQ ID NO: 1158259 - DNA, 15 bp, Homo sapiens
ctagatttccctctc

SEQ ID NO: 1158260 - DNA, 15 bp, Homo sapiens
actagatttccctct

SEQ ID NO: 1158261 - DNA, 15 bp, Homo sapiens
aactagatttccctc

SEQ ID NO: 1158262 - DNA, 15 bp, Homo sapiens
aaactagatttccct

SEQ ID NO: 1158263 - DNA, 15 bp, Homo sapiens
gaaactagatttccc

SEQ ID NO: 1158264 - DNA, 15 bp, Homo sapiens
agaaactagatttcc

SEQ ID NO: 1158265 - DNA, 15 bp, Homo sapiens
tagaaactagatttc

SEQ ID NO: 1158266 - DNA, 15 bp, Homo sapiens
ctagaaactagattt

SEQ ID NO: 1158267 - DNA, 15 bp, Homo sapiens
cctagaaactagatt

SEQ ID NO: 1158268 - DNA, 15 bp, Homo sapiens
ccctagaaactagat

SEQ ID NO: 1158269 - DNA, 15 bp, Homo sapiens
accctagaaactaga

SEQ ID NO: 1158270 - DNA, 15 bp, Homo sapiens
aaccctagaaactag

SEQ ID NO: 1158271 - DNA, 15 bp, Homo sapiens
aaaccctagaaacta

SEQ ID NO: 1158272 - DNA, 15 bp, Homo sapiens
aaaaccctagaaact

SEQ ID NO: 1158273 - DNA, 15 bp, Homo sapiens
caaaaccctagaaac

SEQ ID NO: 1158274 - DNA, 15 bp, Homo sapiens
acaaaaccctagaaa

SEQ ID NO: 1158275 - DNA, 15 bp, Homo sapiens
aacaaaaccctagaa

SEQ ID NO: 1158276 - DNA, 15 bp, Homo sapiens
aaacaaaaccctaga

SEQ ID NO: 1158277 - DNA, 15 bp, Homo sapiens
aaaacaaaaccctag

SEQ ID NO: 1158278 - DNA, 15 bp, Homo sapiens
caaaacaaaacccta

SEQ ID NO: 1158279 - DNA, 15 bp, Homo sapiens
ccaaaacaaaaccct

SEQ ID NO: 1158280 - DNA, 15 bp, Homo sapiens
accaaaacaaaaccc

SEQ ID NO: 1158281 - DNA, 15 bp, Homo sapiens
aaccaaaacaaaacc

SEQ ID NO: 1158282 - DNA, 15 bp, Homo sapiens
aaaccaaaacaaaac

SEQ ID NO: 1158283 - DNA, 15 bp, Homo sapiens
caaaccaaaacaaaa

SEQ ID NO: 1158284 - DNA, 15 bp, Homo sapiens
acaaaccaaaacaaa

SEQ ID NO: 1158285 - DNA, 15 bp, Homo sapiens
aacaaaccaaaacaa

SEQ ID NO: 1158286 - DNA, 15 bp, Homo sapiens
aaacaaaccaaaaca

SEQ ID NO: 1158287 - DNA, 15 bp, Homo sapiens
aaaacaaaccaaaac

SEQ ID NO: 1158288 - DNA, 15 bp, Homo sapiens
caaaacaaaccaaaa

SEQ ID NO: 1158289 - DNA, 15 bp, Homo sapiens
tcaaaacaaaccaaa

SEQ ID NO: 1158290 - DNA, 15 bp, Homo sapiens
atcaaaacaaaccaa

SEQ ID NO: 1158291 - DNA, 15 bp, Homo sapiens
aatcaaaacaaacca

SEQ ID NO: 1158292 - DNA, 15 bp, Homo sapiens
aaatcaaaacaaacc

SEQ ID NO: 1158293 - DNA, 15 bp, Homo sapiens
caaatcaaaacaaac

SEQ ID NO: 1158294 - DNA, 15 bp, Homo sapiens
acaaatcaaaacaaa

SEQ ID NO: 1158295 - DNA, 15 bp, Homo sapiens
aacaaatcaaaacaa

SEQ ID NO: 1158296 - DNA, 15 bp, Homo sapiens
aaacaaatcaaaaca

SEQ ID NO: 1158297 - DNA, 15 bp, Homo sapiens
aaaacaaatcaaaac

SEQ ID NO: 1158298 - DNA, 15 bp, Homo sapiens
aaaaacaaatcaaaa

SEQ ID NO: 1158299 - DNA, 15 bp, Homo sapiens
aaaaaacaaatcaaa

SEQ ID NO: 1158300 - DNA, 15 bp, Homo sapiens
aaaaaaacaaatcaa

SEQ ID NO: 1158301 - DNA, 15 bp, Homo sapiens
aaaaaaaacaaatca

SEQ ID NO: 1158302 - DNA, 15 bp, Homo sapiens
aaaaaaaaacaaatc

SEQ ID NO: 1158303 - DNA, 15 bp, Homo sapiens
caaaaaaaaacaaat

SEQ ID NO: 1158304 - DNA, 15 bp, Homo sapiens
acaaaaaaaaacaaa

SEQ ID NO: 1158305 - DNA, 15 bp, Homo sapiens
gacaaaaaaaaacaa

SEQ ID NO: 1158306 - DNA, 15 bp, Homo sapiens
agacaaaaaaaaaca

SEQ ID NO: 1158307 - DNA, 15 bp, Homo sapiens
aagacaaaaaaaaac

SEQ ID NO: 1158308 - DNA, 15 bp, Homo sapiens
aaagacaaaaaaaaa

SEQ ID NO: 1158309 - DNA, 15 bp, Homo sapiens
caaagacaaaaaaaa

SEQ ID NO: 1158310 - DNA, 15 bp, Homo sapiens
ccaaagacaaaaaaa

SEQ ID NO: 1158311 - DNA, 15 bp, Homo sapiens
accaaagacaaaaaa

SEQ ID NO: 1158312 - DNA, 15 bp, Homo sapiens
aaccaaagacaaaaa

SEQ ID NO: 1158313 - DNA, 15 bp, Homo sapiens
aaaccaaagacaaaa

SEQ ID NO: 1158314 - DNA, 15 bp, Homo sapiens
caaaccaaagacaaa

SEQ ID NO: 1158315 - DNA, 15 bp, Homo sapiens
acaaaccaaagacaa

SEQ ID NO: 1158316 - DNA, 15 bp, Homo sapiens
aacaaaccaaagaca

SEQ ID NO: 1158317 - DNA, 15 bp, Homo sapiens
aaacaaaccaaagac

SEQ ID NO: 1158318 - DNA, 15 bp, Homo sapiens
taaagaaacaaacca

SEQ ID NO: 1158319 - DNA, 15 bp, Homo sapiens
ataaagaaacaaacc

SEQ ID NO: 1158320 - DNA, 15 bp, Homo sapiens
cataaagaaacaaac

SEQ ID NO: 1158321 - DNA, 15 bp, Homo sapiens
acataaagaaacaaa

SEQ ID NO: 1158322 - DNA, 15 bp, Homo sapiens
tacataaagaaacaa

SEQ ID NO: 1158323 - DNA, 15 bp, Homo sapiens
ttacataaagaaaca

SEQ ID NO: 1158324 - DNA, 15 bp, Homo sapiens
tttacataaagaaac

SEQ ID NO: 1158325 - DNA, 15 bp, Homo sapiens
gtttacataaagaaa

SEQ ID NO: 1158326 - DNA, 15 bp, Homo sapiens
tgtttacataaagaa

SEQ ID NO: 1158327 - DNA, 15 bp, Homo sapiens
ctgtttacataaaga

SEQ ID NO: 1158328 - DNA, 15 bp, Homo sapiens
actgtttacataaag

SEQ ID NO: 1158329 - DNA, 15 bp, Homo sapiens
aactgtttacataaa

SEQ ID NO: 1158330 - DNA, 15 bp, Homo sapiens
aaactgtttacataa

SEQ ID NO: 1158331 - DNA, 15 bp, Homo sapiens
taaactgtttacata

SEQ ID NO: 1158332 - DNA, 15 bp, Homo sapiens
gtaaactgtttacat

SEQ ID NO: 1158333 - DNA, 15 bp, Homo sapiens
agtaaactgtttaca

SEQ ID NO: 1158334 - DNA, 15 bp, Homo sapiens
aagtaaactgtttac

SEQ ID NO: 1158335 - DNA, 15 bp, Homo sapiens
caagtaaactgttta

SEQ ID NO: 1158336 - DNA, 15 bp, Homo sapiens
acaagtaaactgttt

SEQ ID NO: 1158337 - DNA, 15 bp, Homo sapiens
aacaagtaaactgtt

SEQ ID NO: 1158338 - DNA, 15 bp, Homo sapiens
taacaagtaaactgt

SEQ ID NO: 1158339 - DNA, 15 bp, Homo sapiens
gtaacaagtaaactg

SEQ ID NO: 1158340 - DNA, 15 bp, Homo sapiens
cgtaacaagtaaact

SEQ ID NO: 1158341 - DNA, 15 bp, Homo sapiens
acgtaacaagtaaac

SEQ ID NO: 1158342 - DNA, 15 bp, Homo sapiens
gacgtaacaagtaaa

SEQ ID NO: 1158343 - DNA, 15 bp, Homo sapiens
tgacgtaacaagtaa

SEQ ID NO: 1158344 - DNA, 15 bp, Homo sapiens
ctgacgtaacaagta

SEQ ID NO: 1158345 - DNA, 15 bp, Homo sapiens
actgacgtaacaagt

SEQ ID NO: 1158346 - DNA, 15 bp, Homo sapiens
tactgacgtaacaag

SEQ ID NO: 1158347 - DNA, 15 bp, Homo sapiens
ttactgacgtaacaa

SEQ ID NO: 1158348 - DNA, 15 bp, Homo sapiens
cttactgacgtaaca

SEQ ID NO: 1158349 - DNA, 15 bp, Homo sapiens
gcttactgacgtaac

SEQ ID NO: 1158350 - DNA, 15 bp, Homo sapiens
tgcttactgacgtaa

SEQ ID NO: 1158351 - DNA, 15 bp, Homo sapiens
gtgcttactgacgta

SEQ ID NO: 1158352 - DNA, 15 bp, Homo sapiens
cgtgcttactgacgt

SEQ ID NO: 1158353 - DNA, 15 bp, Homo sapiens
acgtgcttactgacg

SEQ ID NO: 1158354 - DNA, 15 bp, Homo sapiens
tacgtgcttactgac

SEQ ID NO: 1158355 - DNA, 15 bp, Homo sapiens
ttacgtgcttactga

SEQ ID NO: 1158356 - DNA, 15 bp, Homo sapiens
tttacgtgcttactg

SEQ ID NO: 1158357 - DNA, 15 bp, Homo sapiens
ctttacgtgcttact

SEQ ID NO: 1158358 - DNA, 15 bp, Homo sapiens
actttacgtgcttac

SEQ ID NO: 1158359 - DNA, 15 bp, Homo sapiens
tactttacgtgctta

SEQ ID NO: 1158360 - DNA, 15 bp, Homo sapiens
ttactttacgtgctt

SEQ ID NO: 1158361 - DNA, 15 bp, Homo sapiens
tttactttacgtgct

SEQ ID NO: 1158362 - DNA, 15 bp, Homo sapiens
ctttactttacgtgc

SEQ ID NO: 1158363 - DNA, 15 bp, Homo sapiens
actttactttacgtg

SEQ ID NO: 1158364 - DNA, 15 bp, Homo sapiens
tactttactttacgt

SEQ ID NO: 1158365 - DNA, 15 bp, Homo sapiens
ctactttactttacg

SEQ ID NO: 1158366 - DNA, 15 bp, Homo sapiens
actactttactttac

SEQ ID NO: 1158367 - DNA, 15 bp, Homo sapiens
cactactttacttta

SEQ ID NO: 1158368 - DNA, 15 bp, Homo sapiens
gcactactttacttt

SEQ ID NO: 1158369 - DNA, 15 bp, Homo sapiens
agcactactttactt

SEQ ID NO: 1158370 - DNA, 15 bp, Homo sapiens
tagcactactttact

SEQ ID NO: 1158371 - DNA, 15 bp, Homo sapiens
ttagcactactttac

SEQ ID NO: 1158372 - DNA, 15 bp, Homo sapiens
tttagcactacttta

SEQ ID NO: 1158373 - DNA, 15 bp, Homo sapiens
atttagcactacttt

SEQ ID NO: 1158374 - DNA, 15 bp, Homo sapiens
tatttagcactactt

SEQ ID NO: 1158375 - DNA, 15 bp, Homo sapiens
ttatttagcactact

SEQ ID NO: 1158376 - DNA, 15 bp, Homo sapiens
tttatttagcactac

SEQ ID NO: 1158377 - DNA, 15 bp, Homo sapiens
atttatttagcacta

SEQ ID NO: 1158378 - DNA, 15 bp, Homo sapiens
tatttatttagcact

SEQ ID NO: 1158379 - DNA, 15 bp, Homo sapiens
ctatttatttagcac

SEQ ID NO: 1158380 - DNA, 15 bp, Homo sapiens
tctatttatttagca

SEQ ID NO: 1158381 - DNA, 15 bp, Homo sapiens
atctatttatttagc

SEQ ID NO: 1158382 - DNA, 15 bp, Homo sapiens
tatctatttatttag

SEQ ID NO: 1158383 - DNA, 15 bp, Homo sapiens
gtatctatttattta

SEQ ID NO: 1158384 - DNA, 15 bp, Homo sapiens
tgtatctatttattt

SEQ ID NO: 1158385 - DNA, 15 bp, Homo sapiens
ctgtatctatttatt

SEQ ID NO: 1158386 - DNA, 15 bp, Homo sapiens
actgtatctatttat

SEQ ID NO: 1158387 - DNA, 15 bp, Homo sapiens
aactgtatctattta

SEQ ID NO: 1158388 - DNA, 15 bp, Homo sapiens
aaactgtatctattt

SEQ ID NO: 1158389 - DNA, 15 bp, Homo sapiens
taaactgtatctatt

SEQ ID NO: 1158390 - DNA, 15 bp, Homo sapiens
ttaaactgtatctat

SEQ ID NO: 1158391 - DNA, 15 bp, Homo sapiens
attaaactgtatcta

SEQ ID NO: 1158392 - DNA, 15 bp, Homo sapiens
cattaaactgtatct

SEQ ID NO: 1158393 - DNA, 15 bp, Homo sapiens
ccattaaactgtatc

SEQ ID NO: 1158394 - DNA, 15 bp, Homo sapiens
cccattaaactgtat

SEQ ID NO: 1158395 - DNA, 15 bp, Homo sapiens
gcccattaaactgta

SEQ ID NO: 1158396 - DNA, 15 bp, Homo sapiens
agcccattaaactgt

SEQ ID NO: 1158397 - DNA, 15 bp, Homo sapiens
aagcccattaaactg

SEQ ID NO: 1158398 - DNA, 15 bp, Homo sapiens
gaagcccattaaact

SEQ ID NO: 1158399 - DNA, 15 bp, Homo sapiens
ggaagcccattaaac

SEQ ID NO: 1158400 - DNA, 15 bp, Homo sapiens
aggaagcccattaaa

SEQ ID NO: 1158401 - DNA, 15 bp, Homo sapiens
caggaagcccattaa

SEQ ID NO: 1158402 - DNA, 15 bp, Homo sapiens
ccaggaagcccatta

SEQ ID NO: 1158403 - DNA, 15 bp, Homo sapiens
tccaggaagcccatt

SEQ ID NO: 1158404 - DNA, 15 bp, Homo sapiens
ttccaggaagcccat

SEQ ID NO: 1158405 - DNA, 15 bp, Homo sapiens
cttccaggaagccca

SEQ ID NO: 1158406 - DNA, 15 bp, Homo sapiens
tcttccaggaagccc

SEQ ID NO: 1158407 - DNA, 15 bp, Homo sapiens
ctcttccaggaagcc

SEQ ID NO: 1158408 - DNA, 15 bp, Homo sapiens
cctcttccaggaagc

SEQ ID NO: 1158409 - DNA, 15 bp, Homo sapiens
ccctcttccaggaag

SEQ ID NO: 1158410 - DNA, 15 bp, Homo sapiens
accctcttccaggaa

SEQ ID NO: 1158411 - DNA, 15 bp, Homo sapiens
taccctcttccagga

SEQ ID NO: 1158412 - DNA, 15 bp, Homo sapiens
ctaccctcttccagg

SEQ ID NO: 1158413 - DNA, 15 bp, Homo sapiens
cctaccctcttccag

SEQ ID NO: 1158414 - DNA, 15 bp, Homo sapiens
tcctaccctcttcca

SEQ ID NO: 1158415 - DNA, 15 bp, Homo sapiens
ttcctaccctcttcc

SEQ ID NO: 1158416 - DNA, 15 bp, Homo sapiens
tttcctaccctcttc

SEQ ID NO: 1158417 - DNA, 15 bp, Homo sapiens
ctttcctaccctctt

SEQ ID NO: 1158418 - DNA, 15 bp, Homo sapiens
actttcctaccctct

SEQ ID NO: 1158419 - DNA, 15 bp, Homo sapiens
cactttcctaccctc

SEQ ID NO: 1158420 - DNA, 15 bp, Homo sapiens
tcactttcctaccct

SEQ ID NO: 1158421 - DNA, 15 bp, Homo sapiens
ttcactttcctaccc

SEQ ID NO: 1158422 - DNA, 15 bp, Homo sapiens
attcactttcctacc

SEQ ID NO: 1158423 - DNA, 15 bp, Homo sapiens
cattcactttcctac

SEQ ID NO: 1158424 - DNA, 15 bp, Homo sapiens
gcattcactttccta

SEQ ID NO: 1158425 - DNA, 15 bp, Homo sapiens
agcattcactttcct

SEQ ID NO: 1158426 - DNA, 15 bp, Homo sapiens
aagcattcactttcc

SEQ ID NO: 1158427 - DNA, 15 bp, Homo sapiens
taagcattcactttc

SEQ ID NO: 1158428 - DNA, 15 bp, Homo sapiens
ataagcattcacttt

SEQ ID NO: 1158429 - DNA, 15 bp, Homo sapiens
gataagcattcactt

SEQ ID NO: 1158430 - DNA, 15 bp, Homo sapiens
agataagcattcact

SEQ ID NO: 1158431 - DNA, 15 bp, Homo sapiens
cagataagcattcac

SEQ ID NO: 1158432 - DNA, 15 bp, Homo sapiens
gcagataagcattca

SEQ ID NO: 1158433 - DNA, 15 bp, Homo sapiens
tgcagataagcattc

SEQ ID NO: 1158434 - DNA, 15 bp, Homo sapiens
ctgcagataagcatt

SEQ ID NO: 1158435 - DNA, 15 bp, Homo sapiens
cctgcagataagcat

SEQ ID NO: 1158436 - DNA, 15 bp, Homo sapiens
ccctgcagataagca

SEQ ID NO: 1158437 - DNA, 15 bp, Homo sapiens
cccctgcagataagc

SEQ ID NO: 1158438 - DNA, 15 bp, Homo sapiens
gcccctgcagataag

SEQ ID NO: 1158439 - DNA, 15 bp, Homo sapiens
agcccctgcagataa

SEQ ID NO: 1158440 - DNA, 15 bp, Homo sapiens
aagcccctgcagata

SEQ ID NO: 1158441 - DNA, 15 bp, Homo sapiens
aaagcccctgcagat

SEQ ID NO: 1158442 - DNA, 15 bp, Homo sapiens
caaagcccctgcaga

SEQ ID NO: 1158443 - DNA, 15 bp, Homo sapiens
acaaagcccctgcag

SEQ ID NO: 1158444 - DNA, 15 bp, Homo sapiens
aacaaagcccctgca

SEQ ID NO: 1158445 - DNA, 15 bp, Homo sapiens
aaacaaagcccctgc

SEQ ID NO: 1158446 - DNA, 15 bp, Homo sapiens
taaacaaagcccctg

SEQ ID NO: 1158447 - DNA, 15 bp, Homo sapiens
ctaaacaaagcccct

SEQ ID NO: 1158448 - DNA, 15 bp, Homo sapiens
gctaaacaaagcccc

SEQ ID NO: 1158449 - DNA, 15 bp, Homo sapiens
tgctaaacaaagccc

SEQ ID NO: 1158450 - DNA, 15 bp, Homo sapiens
atgctaaacaaagcc

SEQ ID NO: 1158451 - DNA, 15 bp, Homo sapiens
tatgctaaacaaagc

SEQ ID NO: 1158452 - DNA, 15 bp, Homo sapiens
ctatgctaaacaaag

SEQ ID NO: 1158453 - DNA, 15 bp, Homo sapiens
tctatgctaaacaaa

SEQ ID NO: 1158454 - DNA, 15 bp, Homo sapiens
gtctatgctaaacaa

SEQ ID NO: 1158455 - DNA, 15 bp, Homo sapiens
agtctatgctaaaca

SEQ ID NO: 1158456 - DNA, 15 bp, Homo sapiens
cagtctatgctaaac

SEQ ID NO: 1158457 - DNA, 15 bp, Homo sapiens
tcagtctatgctaaa

SEQ ID NO: 1158458 - DNA, 15 bp, Homo sapiens
gtcagtctatgctaa

SEQ ID NO: 1158459 - DNA, 15 bp, Homo sapiens
ggtcagtctatgcta

SEQ ID NO: 1158460 - DNA, 15 bp, Homo sapiens
aggtcagtctatgct

SEQ ID NO: 1158461 - DNA, 15 bp, Homo sapiens
taggtcagtctatgc

SEQ ID NO: 1158462 - DNA, 15 bp, Homo sapiens
ttaggtcagtctatg

SEQ ID NO: 1158463 - DNA, 15 bp, Homo sapiens
attaggtcagtctat

SEQ ID NO: 1158464 - DNA, 15 bp, Homo sapiens
cattaggtcagtcta

SEQ ID NO: 1158465 - DNA, 15 bp, Homo sapiens
gcattaggtcagtct

SEQ ID NO: 1158466 - DNA, 15 bp, Homo sapiens
ggcattaggtcagtc

SEQ ID NO: 1158467 - DNA, 15 bp, Homo sapiens
aggcattaggtcagt

SEQ ID NO: 1158468 - DNA, 15 bp, Homo sapiens
aaggcattaggtcag

SEQ ID NO: 1158469 - DNA, 15 bp, Homo sapiens
aggaaaaggcattag

SEQ ID NO: 1158470 - DNA, 15 bp, Homo sapiens
caggaaaaggcatta

SEQ ID NO: 1158471 - DNA, 15 bp, Homo sapiens
gcaggaaaaggcatt

SEQ ID NO: 1158472 - DNA, 15 bp, Homo sapiens
tgcaggaaaaggcat

SEQ ID NO: 1158473 - DNA, 15 bp, Homo sapiens
ctgcaggaaaaggca

SEQ ID NO: 1158474 - DNA, 15 bp, Homo sapiens
gctgcaggaaaaggc

SEQ ID NO: 1158475 - DNA, 15 bp, Homo sapiens
ggctgcaggaaaagg

SEQ ID NO: 1158476 - DNA, 15 bp, Homo sapiens
aggctgcaggaaaag

SEQ ID NO: 1158477 - DNA, 15 bp, Homo sapiens
caggctgcaggaaaa

SEQ ID NO: 1158478 - DNA, 15 bp, Homo sapiens
acaggctgcaggaaa

SEQ ID NO: 1158479 - DNA, 15 bp, Homo sapiens
cacaggctgcaggaa

SEQ ID NO: 1158480 - DNA, 15 bp, Homo sapiens
gcacaggctgcagga

SEQ ID NO: 1158481 - DNA, 15 bp, Homo sapiens
ggcacaggctgcagg

SEQ ID NO: 1158482 - DNA, 15 bp, Homo sapiens
tggcacaggctgcag

SEQ ID NO: 1158483 - DNA, 15 bp, Homo sapiens
ttggcacaggctgca

SEQ ID NO: 1158484 - DNA, 15 bp, Homo sapiens
tttggcacaggctgc

SEQ ID NO: 1158485 - DNA, 15 bp, Homo sapiens
ttttggcacaggctg

SEQ ID NO: 1158486 - DNA, 15 bp, Homo sapiens
attttggcacaggct

SEQ ID NO: 1158487 - DNA, 15 bp, Homo sapiens
gattttggcacaggc

SEQ ID NO: 1158488 - DNA, 15 bp, Homo sapiens
ggattttggcacagg

SEQ ID NO: 1158489 - DNA, 15 bp, Homo sapiens
tggattttggcacag

SEQ ID NO: 1158490 - DNA, 15 bp, Homo sapiens
atggattttggcaca

SEQ ID NO: 1158491 - DNA, 15 bp, Homo sapiens
aatggattttggcac

SEQ ID NO: 1158492 - DNA, 15 bp, Homo sapiens
taatggattttggca

SEQ ID NO: 1158493 - DNA, 15 bp, Homo sapiens
ataatggattttggc

SEQ ID NO: 1158494 - DNA, 15 bp, Homo sapiens
gataatggattttgg

SEQ ID NO: 1158495 - DNA, 15 bp, Homo sapiens
tgataatggattttg

SEQ ID NO: 1158496 - DNA, 15 bp, Homo sapiens
ctgataatggatttt

SEQ ID NO: 1158497 - DNA, 15 bp, Homo sapiens
actgataatggattt

SEQ ID NO: 1158498 - DNA, 15 bp, Homo sapiens
aactgataatggatt

SEQ ID NO: 1158499 - DNA, 15 bp, Homo sapiens
caactgataatggat

SEQ ID NO: 1158500 - DNA, 15 bp, Homo sapiens
acaactgataatgga

SEQ ID NO: 1158501 - DNA, 15 bp, Homo sapiens
tacaactgataatgg

SEQ ID NO: 1158502 - DNA, 15 bp, Homo sapiens
gtacaactgataatg

SEQ ID NO: 1158503 - DNA, 15 bp, Homo sapiens
tgtacaactgataat

SEQ ID NO: 1158504 - DNA, 15 bp, Homo sapiens
gtgtacaactgataa

SEQ ID NO: 1158505 - DNA, 15 bp, Homo sapiens
tgtgtacaactgata

SEQ ID NO: 1158506 - DNA, 15 bp, Homo sapiens
ttgtgtacaactgat

SEQ ID NO: 1158507 - DNA, 15 bp, Homo sapiens
gttgtgtacaactga

SEQ ID NO: 1158508 - DNA, 15 bp, Homo sapiens
tgttgtgtacaactg

SEQ ID NO: 1158509 - DNA, 15 bp, Homo sapiens
gtgttgtgtacaact

SEQ ID NO: 1158510 - DNA, 15 bp, Homo sapiens
ggtgttgtgtacaac

SEQ ID NO: 1158511 - DNA, 15 bp, Homo sapiens
aggtgttgtgtacaa

SEQ ID NO: 1158512 - DNA, 15 bp, Homo sapiens
aaggtgttgtgtaca

SEQ ID NO: 1158513 - DNA, 15 bp, Homo sapiens
caaggtgttgtgtac

SEQ ID NO: 1158514 - DNA, 15 bp, Homo sapiens
tcaaggtgttgtgta

SEQ ID NO: 1158515 - DNA, 15 bp, Homo sapiens
atcaaggtgttgtgt

SEQ ID NO: 1158516 - DNA, 15 bp, Homo sapiens
aatcaaggtgttgtg

SEQ ID NO: 1158517 - DNA, 15 bp, Homo sapiens
aaatcaaggtgttgt

SEQ ID NO: 1158518 - DNA, 15 bp, Homo sapiens
gaaatcaaggtgttg

SEQ ID NO: 1158519 - DNA, 15 bp, Homo sapiens
ggaaatcaaggtgtt

SEQ ID NO: 1158520 - DNA, 15 bp, Homo sapiens
gggaaatcaaggtgt

SEQ ID NO: 1158521 - DNA, 15 bp, Homo sapiens
agggaaatcaaggtg

SEQ ID NO: 1158522 - DNA, 15 bp, Homo sapiens
cagggaaatcaaggt

SEQ ID NO: 1158523 - DNA, 15 bp, Homo sapiens
acagggaaatcaagg

SEQ ID NO: 1158524 - DNA, 15 bp, Homo sapiens
tacagggaaatcaag

SEQ ID NO: 1158525 - DNA, 15 bp, Homo sapiens
atacagggaaatcaa

SEQ ID NO: 1158526 - DNA, 15 bp, Homo sapiens
tatacagggaaatca

SEQ ID NO: 1158527 - DNA, 15 bp, Homo sapiens
gtatacagggaaatc

SEQ ID NO: 1158528 - DNA, 15 bp, Homo sapiens
ggtatacagggaaat

SEQ ID NO: 1158529 - DNA, 15 bp, Homo sapiens
aggtatacagggaaa

SEQ ID NO: 1158530 - DNA, 15 bp, Homo sapiens
gaggtatacagggaa

SEQ ID NO: 1158531 - DNA, 15 bp, Homo sapiens
agaggtatacaggga

SEQ ID NO: 1158532 - DNA, 15 bp, Homo sapiens
cagaggtatacaggg

SEQ ID NO: 1158533 - DNA, 15 bp, Homo sapiens
tcagaggtatacagg

SEQ ID NO: 1158534 - DNA, 15 bp, Homo sapiens
atcagaggtatacag

SEQ ID NO: 1158535 - DNA, 15 bp, Homo sapiens
catcagaggtataca

SEQ ID NO: 1158536 - DNA, 15 bp, Homo sapiens
gcatcagaggtatac

SEQ ID NO: 1158537 - DNA, 15 bp, Homo sapiens
agcatcagaggtata

SEQ ID NO: 1158538 - DNA, 15 bp, Homo sapiens
cagcatcagaggtat

SEQ ID NO: 1158539 - DNA, 15 bp, Homo sapiens
gcagcatcagaggta

SEQ ID NO: 1158540 - DNA, 15 bp, Homo sapiens
agcagcatcagaggt

SEQ ID NO: 1158541 - DNA, 15 bp, Homo sapiens
aagcagcatcagagg

SEQ ID NO: 1158542 - DNA, 15 bp, Homo sapiens
taagcagcatcagag

SEQ ID NO: 1158543 - DNA, 15 bp, Homo sapiens
ttaagcagcatcaga

SEQ ID NO: 1158544 - DNA, 15 bp, Homo sapiens
attaagcagcatcag

SEQ ID NO: 1158545 - DNA, 15 bp, Homo sapiens
aattaagcagcatca

SEQ ID NO: 1158546 - DNA, 15 bp, Homo sapiens
taattaagcagcatc

SEQ ID NO: 1158547 - DNA, 15 bp, Homo sapiens
ttaattaagcagcat

SEQ ID NO: 1158548 - DNA, 15 bp, Homo sapiens
tttaattaagcagca

SEQ ID NO: 1158549 - DNA, 15 bp, Homo sapiens
gtttaattaagcagc

SEQ ID NO: 1158550 - DNA, 15 bp, Homo sapiens
tgtttaattaagcag

SEQ ID NO: 1158551 - DNA, 15 bp, Homo sapiens
atgtttaattaagca

SEQ ID NO: 1158552 - DNA, 15 bp, Homo sapiens
tatgtttaattaagc

SEQ ID NO: 1158553 - DNA, 15 bp, Homo sapiens
atatgtttaattaag

SEQ ID NO: 1158554 - DNA, 15 bp, Homo sapiens
aatatgtttaattaa

SEQ ID NO: 1158555 - DNA, 15 bp, Homo sapiens
gaatatgtttaatta

SEQ ID NO: 1158556 - DNA, 15 bp, Homo sapiens
ggaatatgtttaatt

SEQ ID NO: 1158557 - DNA, 15 bp, Homo sapiens
tggaatatgtttaat

SEQ ID NO: 1158558 - DNA, 15 bp, Homo sapiens
atggaatatgtttaa

SEQ ID NO: 1158559 - DNA, 15 bp, Homo sapiens
gatggaatatgttta

SEQ ID NO: 1158560 - DNA, 15 bp, Homo sapiens
agatggaatatgttt

SEQ ID NO: 1158561 - DNA, 15 bp, Homo sapiens
aagatggaatatgtt

SEQ ID NO: 1158562 - DNA, 15 bp, Homo sapiens
aaagatggaatatgt

SEQ ID NO: 1158563 - DNA, 15 bp, Homo sapiens
aaaagatggaatatg

SEQ ID NO: 1158564 - DNA, 15 bp, Homo sapiens
aaaaagatggaatat

SEQ ID NO: 1158565 - DNA, 15 bp, Homo sapiens
taaaaagatggaata

SEQ ID NO: 1158566 - DNA, 15 bp, Homo sapiens
gtaaaaagatggaat

SEQ ID NO: 1158567 - DNA, 15 bp, Homo sapiens
tgtaaaaagatggaa

SEQ ID NO: 1158568 - DNA, 15 bp, Homo sapiens
ctgtaaaaagatgga

SEQ ID NO: 1158569 - DNA, 15 bp, Homo sapiens
tctgtaaaaagatgg

SEQ ID NO: 1158570 - DNA, 15 bp, Homo sapiens
atctgtaaaaagatg

SEQ ID NO: 1158571 - DNA, 15 bp, Homo sapiens
gatctgtaaaaagat

SEQ ID NO: 1158572 - DNA, 15 bp, Homo sapiens
tgatctgtaaaaaga

SEQ ID NO: 1158573 - DNA, 15 bp, Homo sapiens
atgatctgtaaaaag

SEQ ID NO: 1158574 - DNA, 15 bp, Homo sapiens
catgatctgtaaaaa

SEQ ID NO: 1158575 - DNA, 15 bp, Homo sapiens
acatgatctgtaaaa

SEQ ID NO: 1158576 - DNA, 15 bp, Homo sapiens
cacatgatctgtaaa

SEQ ID NO: 1158577 - DNA, 15 bp, Homo sapiens
tcacatgatctgtaa

SEQ ID NO: 1158578 - DNA, 15 bp, Homo sapiens
ttcacatgatctgta

SEQ ID NO: 1158579 - DNA, 15 bp, Homo sapiens
gttcacatgatctgt

SEQ ID NO: 1158580 - DNA, 15 bp, Homo sapiens
ggttcacatgatctg

SEQ ID NO: 1158581 - DNA, 15 bp, Homo sapiens
gggttcacatgatct

SEQ ID NO: 1158582 - DNA, 15 bp, Homo sapiens
tgggttcacatgatc

SEQ ID NO: 1158583 - DNA, 15 bp, Homo sapiens
ttgggttcacatgat

SEQ ID NO: 1158584 - DNA, 15 bp, Homo sapiens
tttgggttcacatga

SEQ ID NO: 1158585 - DNA, 15 bp, Homo sapiens
ttttgggttcacatg

SEQ ID NO: 1158586 - DNA, 15 bp, Homo sapiens
cttttgggttcacat

SEQ ID NO: 1158587 - DNA, 15 bp, Homo sapiens
gcttttgggttcaca

SEQ ID NO: 1158588 - DNA, 15 bp, Homo sapiens
tgcttttgggttcac

SEQ ID NO: 1158589 - DNA, 15 bp, Homo sapiens
atgcttttgggttca

SEQ ID NO: 1158590 - DNA, 15 bp, Homo sapiens
aatgcttttgggttc

SEQ ID NO: 1158591 - DNA, 15 bp, Homo sapiens
aaatgcttttgggtt

SEQ ID NO: 1158592 - DNA, 15 bp, Homo sapiens
aaaatgcttttgggt

SEQ ID NO: 1158593 - DNA, 15 bp, Homo sapiens
aaaaatgcttttggg

SEQ ID NO: 1158594 - DNA, 15 bp, Homo sapiens
gaaaaatgcttttgg

SEQ ID NO: 1158595 - DNA, 15 bp, Homo sapiens
tgaaaaatgcttttg

SEQ ID NO: 1158596 - DNA, 15 bp, Homo sapiens
ctgaaaaatgctttt

SEQ ID NO: 1158597 - DNA, 15 bp, Homo sapiens
actgaaaaatgcttt

SEQ ID NO: 1158598 - DNA, 15 bp, Homo sapiens
cactgaaaaatgctt

SEQ ID NO: 1158599 - DNA, 15 bp, Homo sapiens
acactgaaaaatgct

SEQ ID NO: 1158600 - DNA, 15 bp, Homo sapiens
aacactgaaaaatgc

SEQ ID NO: 1158601 - DNA, 15 bp, Homo sapiens
gaacactgaaaaatg

SEQ ID NO: 1158602 - DNA, 15 bp, Homo sapiens
agaacactgaaaaat

SEQ ID NO: 1158603 - DNA, 15 bp, Homo sapiens
aagaacactgaaaaa

SEQ ID NO: 1158604 - DNA, 15 bp, Homo sapiens
gaagaacactgaaaa

SEQ ID NO: 1158605 - DNA, 15 bp, Homo sapiens
cgaagaacactgaaa

SEQ ID NO: 1158606 - DNA, 15 bp, Homo sapiens
gcgaagaacactgaa

SEQ ID NO: 1158607 - DNA, 15 bp, Homo sapiens
tgcgaagaacactga

SEQ ID NO: 1158608 - DNA, 15 bp, Homo sapiens
atgcgaagaacactg

SEQ ID NO: 1158609 - DNA, 15 bp, Homo sapiens
tatgcgaagaacact

SEQ ID NO: 1158610 - DNA, 15 bp, Homo sapiens
atatgcgaagaacac

SEQ ID NO: 1158611 - DNA, 15 bp, Homo sapiens
tatatgcgaagaaca

SEQ ID NO: 1158612 - DNA, 15 bp, Homo sapiens
atatatgcgaagaac

SEQ ID NO: 1158613 - DNA, 15 bp, Homo sapiens
aatatatgcgaagaa

SEQ ID NO: 1158614 - DNA, 15 bp, Homo sapiens
aaatatatgcgaaga

SEQ ID NO: 1158615 - DNA, 15 bp, Homo sapiens
caaatatatgcgaag

SEQ ID NO: 1158616 - DNA, 15 bp, Homo sapiens
acaaatatatgcgaa

SEQ ID NO: 1158617 - DNA, 15 bp, Homo sapiens
gacaaatatatgcga

SEQ ID NO: 1158618 - DNA, 15 bp, Homo sapiens
agacaaatatatgcg

SEQ ID NO: 1158619 - DNA, 15 bp, Homo sapiens
cagacaaatatatgc

SEQ ID NO: 1158620 - DNA, 15 bp, Homo sapiens
ccagacaaatatatg

SEQ ID NO: 1158621 - DNA, 15 bp, Homo sapiens
cccagacaaatatat

SEQ ID NO: 1158622 - DNA, 15 bp, Homo sapiens
acccagacaaatata

SEQ ID NO: 1158623 - DNA, 15 bp, Homo sapiens
tacccagacaaatat

SEQ ID NO: 1158624 - DNA, 15 bp, Homo sapiens
atacccagacaaata

SEQ ID NO: 1158625 - DNA, 15 bp, Homo sapiens
catacccagacaaat

SEQ ID NO: 1158626 - DNA, 15 bp, Homo sapiens
acatacccagacaaa

SEQ ID NO: 1158627 - DNA, 15 bp, Homo sapiens
tacatacccagacaa

SEQ ID NO: 1158628 - DNA, 15 bp, Homo sapiens
ctacatacccagaca

SEQ ID NO: 1158629 - DNA, 15 bp, Homo sapiens
actacatacccagac

SEQ ID NO: 1158630 - DNA, 15 bp, Homo sapiens
gactacatacccaga

SEQ ID NO: 1158631 - DNA, 15 bp, Homo sapiens
agactacatacccag

SEQ ID NO: 1158632 - DNA, 15 bp, Homo sapiens
aagactacataccca

SEQ ID NO: 1158633 - DNA, 15 bp, Homo sapiens
taagactacataccc

SEQ ID NO: 1158634 - DNA, 15 bp, Homo sapiens
ataagactacatacc

SEQ ID NO: 1158635 - DNA, 15 bp, Homo sapiens
cataagactacatac

SEQ ID NO: 1158636 - DNA, 15 bp, Homo sapiens
acataagactacata

SEQ ID NO: 1158637 - DNA, 15 bp, Homo sapiens
aacataagactacat

SEQ ID NO: 1158638 - DNA, 15 bp, Homo sapiens
aaacataagactaca

SEQ ID NO: 1158639 - DNA, 15 bp, Homo sapiens
caaacataagactac

SEQ ID NO: 1158640 - DNA, 15 bp, Homo sapiens
tcaaacataagacta

SEQ ID NO: 1158641 - DNA, 15 bp, Homo sapiens
ttcaaacataagact

SEQ ID NO: 1158642 - DNA, 15 bp, Homo sapiens
attcaaacataagac

SEQ ID NO: 1158643 - DNA, 15 bp, Homo sapiens
aattcaaacataaga

SEQ ID NO: 1158644 - DNA, 15 bp, Homo sapiens
aaattcaaacataag

SEQ ID NO: 1158645 - DNA, 15 bp, Homo sapiens
caaattcaaacataa

SEQ ID NO: 1158646 - DNA, 15 bp, Homo sapiens
acaaattcaaacata

SEQ ID NO: 1158647 - DNA, 15 bp, Homo sapiens
aacaaattcaaacat

SEQ ID NO: 1158648 - DNA, 15 bp, Homo sapiens
aaacaaattcaaaca

SEQ ID NO: 1158649 - DNA, 15 bp, Homo sapiens
caaacaaattcaaac

SEQ ID NO: 1158650 - DNA, 15 bp, Homo sapiens
gcaaacaaattcaaa

SEQ ID NO: 1158651 - DNA, 15 bp, Homo sapiens
agcaaacaaattcaa

SEQ ID NO: 1158652 - DNA, 15 bp, Homo sapiens
gagcaaacaaattca

SEQ ID NO: 1158653 - DNA, 15 bp, Homo sapiens
agagcaaacaaattc

SEQ ID NO: 1158654 - DNA, 15 bp, Homo sapiens
gagagcaaacaaatt

SEQ ID NO: 1158655 - DNA, 15 bp, Homo sapiens
tgagagcaaacaaat

SEQ ID NO: 1158656 - DNA, 15 bp, Homo sapiens
gtgagagcaaacaaa

SEQ ID NO: 1158657 - DNA, 15 bp, Homo sapiens
agtgagagcaaacaa

SEQ ID NO: 1158658 - DNA, 15 bp, Homo sapiens
aagtgagagcaaaca

SEQ ID NO: 1158659 - DNA, 15 bp, Homo sapiens
taagtgagagcaaac

SEQ ID NO: 1158660 - DNA, 15 bp, Homo sapiens
ttaagtgagagcaaa

SEQ ID NO: 1158661 - DNA, 15 bp, Homo sapiens
gttaagtgagagcaa

SEQ ID NO: 1158662 - DNA, 15 bp, Homo sapiens
tgttaagtgagagca

SEQ ID NO: 1158663 - DNA, 15 bp, Homo sapiens
ttgttaagtgagagc

SEQ ID NO: 1158664 - DNA, 15 bp, Homo sapiens
tttgttaagtgagag

SEQ ID NO: 1158665 - DNA, 15 bp, Homo sapiens
ctttgttaagtgaga

SEQ ID NO: 1158666 - DNA, 15 bp, Homo sapiens
tctttgttaagtgag

SEQ ID NO: 1158667 - DNA, 15 bp, Homo sapiens
ttctttgttaagtga

SEQ ID NO: 1158668 - DNA, 15 bp, Homo sapiens
gttctttgttaagtg

SEQ ID NO: 1158669 - DNA, 15 bp, Homo sapiens
tgttctttgttaagt

SEQ ID NO: 1158670 - DNA, 15 bp, Homo sapiens
gtgttctttgttaag

SEQ ID NO: 1158671 - DNA, 15 bp, Homo sapiens
ggtgttctttgttaa

SEQ ID NO: 1158672 - DNA, 15 bp, Homo sapiens
tggtgttctttgtta

SEQ ID NO: 1158673 - DNA, 15 bp, Homo sapiens
gtggtgttctttgtt

SEQ ID NO: 1158674 - DNA, 15 bp, Homo sapiens
ggtggtgttctttgt

SEQ ID NO: 1158675 - DNA, 15 bp, Homo sapiens
tggtggtgttctttg

SEQ ID NO: 1158676 - DNA, 15 bp, Homo sapiens
ttggtggtgttcttt

SEQ ID NO: 1158677 - DNA, 15 bp, Homo sapiens
tttggtggtgttctt

SEQ ID NO: 1158678 - DNA, 15 bp, Homo sapiens
atttggtggtgttct

SEQ ID NO: 1158679 - DNA, 15 bp, Homo sapiens
aatttggtggtgttc

SEQ ID NO: 1158680 - DNA, 15 bp, Homo sapiens
gaatttggtggtgtt

SEQ ID NO: 1158681 - DNA, 15 bp, Homo sapiens
agaatttggtggtgt

SEQ ID NO: 1158682 - DNA, 15 bp, Homo sapiens
gagaatttggtggtg

SEQ ID NO: 1158683 - DNA, 15 bp, Homo sapiens
agagaatttggtggt

SEQ ID NO: 1158684 - DNA, 15 bp, Homo sapiens
aagagaatttggtgg

SEQ ID NO: 1158685 - DNA, 15 bp, Homo sapiens
caagagaatttggtg

SEQ ID NO: 1158686 - DNA, 15 bp, Homo sapiens
ccaagagaatttggt

SEQ ID NO: 1158687 - DNA, 15 bp, Homo sapiens
accaagagaatttgg

SEQ ID NO: 1158688 - DNA, 15 bp, Homo sapiens
aaccaagagaatttg

SEQ ID NO: 1158689 - DNA, 15 bp, Homo sapiens
caaccaagagaattt

SEQ ID NO: 1158690 - DNA, 15 bp, Homo sapiens
ccaaccaagagaatt

SEQ ID NO: 1158691 - DNA, 15 bp, Homo sapiens
accaaccaagagaat

SEQ ID NO: 1158692 - DNA, 15 bp, Homo sapiens
gaccaaccaagagaa

SEQ ID NO: 1158693 - DNA, 15 bp, Homo sapiens
ggaccaaccaagaga

SEQ ID NO: 1158694 - DNA, 15 bp, Homo sapiens
gggaccaaccaagag

SEQ ID NO: 1158695 - DNA, 15 bp, Homo sapiens
agggaccaaccaaga

SEQ ID NO: 1158696 - DNA, 15 bp, Homo sapiens
tagggaccaaccaag

SEQ ID NO: 1158697 - DNA, 15 bp, Homo sapiens
ttagggaccaaccaa

SEQ ID NO: 1158698 - DNA, 15 bp, Homo sapiens
attagggaccaacca

SEQ ID NO: 1158699 - DNA, 15 bp, Homo sapiens
tattagggaccaacc

SEQ ID NO: 1158700 - DNA, 15 bp, Homo sapiens
atattagggaccaac

SEQ ID NO: 1158701 - DNA, 15 bp, Homo sapiens
gatattagggaccaa

SEQ ID NO: 1158702 - DNA, 15 bp, Homo sapiens
ggatattagggacca

SEQ ID NO: 1158703 - DNA, 15 bp, Homo sapiens
tggatattagggacc

SEQ ID NO: 1158704 - DNA, 15 bp, Homo sapiens
atggatattagggac

SEQ ID NO: 1158705 - DNA, 15 bp, Homo sapiens
aatggatattaggga

SEQ ID NO: 1158706 - DNA, 15 bp, Homo sapiens
caatggatattaggg

SEQ ID NO: 1158707 - DNA, 15 bp, Homo sapiens
ccaatggatattagg

SEQ ID NO: 1158708 - DNA, 15 bp, Homo sapiens
cccaatggatattag

SEQ ID NO: 1158709 - DNA, 15 bp, Homo sapiens
acccaatggatatta

SEQ ID NO: 1158710 - DNA, 15 bp, Homo sapiens
aacccaatggatatt

SEQ ID NO: 1158711 - DNA, 15 bp, Homo sapiens
aaacccaatggatat

SEQ ID NO: 1158712 - DNA, 15 bp, Homo sapiens
caaacccaatggata

SEQ ID NO: 1158713 - DNA, 15 bp, Homo sapiens
ccaaacccaatggat

SEQ ID NO: 1158714 - DNA, 15 bp, Homo sapiens
gccaaacccaatgga

SEQ ID NO: 1158715 - DNA, 15 bp, Homo sapiens
agccaaacccaatgg

SEQ ID NO: 1158716 - DNA, 15 bp, Homo sapiens
tagccaaacccaatg

SEQ ID NO: 1158717 - DNA, 15 bp, Homo sapiens
ttagccaaacccaat

SEQ ID NO: 1158718 - DNA, 15 bp, Homo sapiens
gttagccaaacccaa

SEQ ID NO: 1158719 - DNA, 15 bp, Homo sapiens
tgttagccaaaccca

SEQ ID NO: 1158720 - DNA, 15 bp, Homo sapiens
ttgttagccaaaccc

SEQ ID NO: 1158721 - DNA, 15 bp, Homo sapiens
attgttagccaaacc

SEQ ID NO: 1158722 - DNA, 15 bp, Homo sapiens
aattgttagccaaac

SEQ ID NO: 1158723 - DNA, 15 bp, Homo sapiens
aaattgttagccaaa

SEQ ID NO: 1158724 - DNA, 15 bp, Homo sapiens
taaattgttagccaa

SEQ ID NO: 1158725 - DNA, 15 bp, Homo sapiens
gtaaattgttagcca

SEQ ID NO: 1158726 - DNA, 15 bp, Homo sapiens
tgtaaattgttagcc

SEQ ID NO: 1158727 - DNA, 15 bp, Homo sapiens
atgtaaattgttagc

SEQ ID NO: 1158728 - DNA, 15 bp, Homo sapiens
gatgtaaattgttag

SEQ ID NO: 1158729 - DNA, 15 bp, Homo sapiens
ggatgtaaattgtta

SEQ ID NO: 1158730 - DNA, 15 bp, Homo sapiens
tggatgtaaattgtt

SEQ ID NO: 1158731 - DNA, 15 bp, Homo sapiens
ttggatgtaaattgt

SEQ ID NO: 1158732 - DNA, 15 bp, Homo sapiens
tttggatgtaaattg

SEQ ID NO: 1158733 - DNA, 15 bp, Homo sapiens
ttttggatgtaaatt

SEQ ID NO: 1158734 - DNA, 15 bp, Homo sapiens
tttttggatgtaaat

SEQ ID NO: 1158735 - DNA, 15 bp, Homo sapiens
atttttggatgtaaa

SEQ ID NO: 1158736 - DNA, 15 bp, Homo sapiens
aatttttggatgtaa

SEQ ID NO: 1158737 - DNA, 15 bp, Homo sapiens
gaatttttggatgta

SEQ ID NO: 1158738 - DNA, 15 bp, Homo sapiens
tgaatttttggatgt

SEQ ID NO: 1158739 - DNA, 15 bp, Homo sapiens
gtgaatttttggatg

SEQ ID NO: 1158740 - DNA, 15 bp, Homo sapiens
tgtgaatttttggat

SEQ ID NO: 1158741 - DNA, 15 bp, Homo sapiens
atgtgaatttttgga

SEQ ID NO: 1158742 - DNA, 15 bp, Homo sapiens
catgtgaatttttgg

SEQ ID NO: 1158743 - DNA, 15 bp, Homo sapiens
ccatgtgaatttttg

SEQ ID NO: 1158744 - DNA, 15 bp, Homo sapiens
accatgtgaattttt

SEQ ID NO: 1158745 - DNA, 15 bp, Homo sapiens
taccatgtgaatttt

SEQ ID NO: 1158746 - DNA, 15 bp, Homo sapiens
ctaccatgtgaattt

SEQ ID NO: 1158747 - DNA, 15 bp, Homo sapiens
tctaccatgtgaatt

SEQ ID NO: 1158748 - DNA, 15 bp, Homo sapiens
ttctaccatgtgaat

SEQ ID NO: 1158749 - DNA, 15 bp, Homo sapiens
tttctaccatgtgaa

SEQ ID NO: 1158750 - DNA, 15 bp, Homo sapiens
ttttctaccatgtga

SEQ ID NO: 1158751 - DNA, 15 bp, Homo sapiens
tttttctaccatgtg

SEQ ID NO: 1158752 - DNA, 15 bp, Homo sapiens
atttttctaccatgt

SEQ ID NO: 1158753 - DNA, 15 bp, Homo sapiens
tatttttctaccatg

SEQ ID NO: 1158754 - DNA, 15 bp, Homo sapiens
gtatttttctaccat

SEQ ID NO: 1158755 - DNA, 15 bp, Homo sapiens
agtatttttctacca

SEQ ID NO: 1158756 - DNA, 15 bp, Homo sapiens
tagtatttttctacc

SEQ ID NO: 1158757 - DNA, 15 bp, Homo sapiens
ctagtatttttctac

SEQ ID NO: 1158758 - DNA, 15 bp, Homo sapiens
tctagtatttttcta

SEQ ID NO: 1158759 - DNA, 15 bp, Homo sapiens
gtctagtatttttct

SEQ ID NO: 1158760 - DNA, 15 bp, Homo sapiens
agtctagtatttttc

SEQ ID NO: 1158761 - DNA, 15 bp, Homo sapiens
cagtctagtattttt

SEQ ID NO: 1158762 - DNA, 15 bp, Homo sapiens
acagtctagtatttt

SEQ ID NO: 1158763 - DNA, 15 bp, Homo sapiens
aacagtctagtattt

SEQ ID NO: 1158764 - DNA, 15 bp, Homo sapiens
gaacagtctagtatt

SEQ ID NO: 1158765 - DNA, 15 bp, Homo sapiens
agaacagtctagtat

SEQ ID NO: 1158766 - DNA, 15 bp, Homo sapiens
cagaacagtctagta

SEQ ID NO: 1158767 - DNA, 15 bp, Homo sapiens
acagaacagtctagt

SEQ ID NO: 1158768 - DNA, 15 bp, Homo sapiens
aacagaacagtctag

SEQ ID NO: 1158769 - DNA, 15 bp, Homo sapiens
taacagaacagtcta

SEQ ID NO: 1158770 - DNA, 15 bp, Homo sapiens
ataacagaacagtct

SEQ ID NO: 1158771 - DNA, 15 bp, Homo sapiens
gataacagaacagtc

SEQ ID NO: 1158772 - DNA, 15 bp, Homo sapiens
tgataacagaacagt

SEQ ID NO: 1158773 - DNA, 15 bp, Homo sapiens
gtgataacagaacag

SEQ ID NO: 1158774 - DNA, 15 bp, Homo sapiens
agtgataacagaaca

SEQ ID NO: 1158775 - DNA, 15 bp, Homo sapiens
aagtgataacagaac

SEQ ID NO: 1158776 - DNA, 15 bp, Homo sapiens
caagtgataacagaa

SEQ ID NO: 1158777 - DNA, 15 bp, Homo sapiens
ccaagtgataacaga

SEQ ID NO: 1158778 - DNA, 15 bp, Homo sapiens
gccaagtgataacag

SEQ ID NO: 1158779 - DNA, 15 bp, Homo sapiens
ggccaagtgataaca

SEQ ID NO: 1158780 - DNA, 15 bp, Homo sapiens
tggccaagtgataac

SEQ ID NO: 1158781 - DNA, 15 bp, Homo sapiens
ctggccaagtgataa

SEQ ID NO: 1158782 - DNA, 15 bp, Homo sapiens
cctggccaagtgata

SEQ ID NO: 1158783 - DNA, 15 bp, Homo sapiens
tcctggccaagtgat

SEQ ID NO: 1158784 - DNA, 15 bp, Homo sapiens
ttcctggccaagtga

SEQ ID NO: 1158785 - DNA, 15 bp, Homo sapiens
attcctggccaagtg

SEQ ID NO: 1158786 - DNA, 15 bp, Homo sapiens
cattcctggccaagt

SEQ ID NO: 1158787 - DNA, 15 bp, Homo sapiens
acattcctggccaag

SEQ ID NO: 1158788 - DNA, 15 bp, Homo sapiens
tacattcctggccaa

SEQ ID NO: 1158789 - DNA, 15 bp, Homo sapiens
gtacattcctggcca

SEQ ID NO: 1158790 - DNA, 15 bp, Homo sapiens
agtacattcctggcc

SEQ ID NO: 1158791 - DNA, 15 bp, Homo sapiens
cagtacattcctggc

SEQ ID NO: 1158792 - DNA, 15 bp, Homo sapiens
ccagtacattcctgg

SEQ ID NO: 1158793 - DNA, 15 bp, Homo sapiens
tccagtacattcctg

SEQ ID NO: 1158794 - DNA, 15 bp, Homo sapiens
ctccagtacattcct

SEQ ID NO: 1158795 - DNA, 15 bp, Homo sapiens
actccagtacattcc

SEQ ID NO: 1158796 - DNA, 15 bp, Homo sapiens
cactccagtacattc

SEQ ID NO: 1158797 - DNA, 15 bp, Homo sapiens
ccactccagtacatt

SEQ ID NO: 1158798 - DNA, 15 bp, Homo sapiens
cccactccagtacat

SEQ ID NO: 1158799 - DNA, 15 bp, Homo sapiens
ccccactccagtaca

SEQ ID NO: 1158800 - DNA, 15 bp, Homo sapiens
cccccactccagtac

SEQ ID NO: 1158801 - DNA, 15 bp, Homo sapiens
tcccccactccagta

SEQ ID NO: 1158802 - DNA, 15 bp, Homo sapiens
gtcccccactccagt

SEQ ID NO: 1158803 - DNA, 15 bp, Homo sapiens
tgtcccccactccag

SEQ ID NO: 1158804 - DNA, 15 bp, Homo sapiens
ctgtcccccactcca

SEQ ID NO: 1158805 - DNA, 15 bp, Homo sapiens
cctgtcccccactcc

SEQ ID NO: 1158806 - DNA, 15 bp, Homo sapiens
tcctgtcccccactc

SEQ ID NO: 1158807 - DNA, 15 bp, Homo sapiens
ttcctgtcccccact

SEQ ID NO: 1158808 - DNA, 15 bp, Homo sapiens
tttcctgtcccccac

SEQ ID NO: 1158809 - DNA, 15 bp, Homo sapiens
ctttcctgtccccca

SEQ ID NO: 1158810 - DNA, 15 bp, Homo sapiens
gctttcctgtccccc

SEQ ID NO: 1158811 - DNA, 15 bp, Homo sapiens
agctttcctgtcccc

SEQ ID NO: 1158812 - DNA, 15 bp, Homo sapiens
tagctttcctgtccc

SEQ ID NO: 1158813 - DNA, 15 bp, Homo sapiens
ctagctttcctgtcc

SEQ ID NO: 1158814 - DNA, 15 bp, Homo sapiens
actagctttcctgtc

SEQ ID NO: 1158815 - DNA, 15 bp, Homo sapiens
aactagctttcctgt

SEQ ID NO: 1158816 - DNA, 15 bp, Homo sapiens
taactagctttcctg

SEQ ID NO: 1158817 - DNA, 15 bp, Homo sapiens
ataactagctttcct

SEQ ID NO: 1158818 - DNA, 15 bp, Homo sapiens
aataactagctttcc

SEQ ID NO: 1158819 - DNA, 15 bp, Homo sapiens
aaataactagctttc

SEQ ID NO: 1158820 - DNA, 15 bp, Homo sapiens
aaaataactagcttt

SEQ ID NO: 1158821 - DNA, 15 bp, Homo sapiens
taaaataactagctt

SEQ ID NO: 1158822 - DNA, 15 bp, Homo sapiens
ttaaaataactagct

SEQ ID NO: 1158823 - DNA, 15 bp, Homo sapiens
tttaaaataactagc

SEQ ID NO: 1158824 - DNA, 15 bp, Homo sapiens
ttttaaaataactag

SEQ ID NO: 1158825 - DNA, 15 bp, Homo sapiens
tttttaaaataacta

SEQ ID NO: 1158826 - DNA, 15 bp, Homo sapiens
ctttttaaaataact

SEQ ID NO: 1158827 - DNA, 15 bp, Homo sapiens
tctttttaaaataac

SEQ ID NO: 1158828 - DNA, 15 bp, Homo sapiens
ctctttttaaaataa

SEQ ID NO: 1158829 - DNA, 15 bp, Homo sapiens
actctttttaaaata

SEQ ID NO: 1158830 - DNA, 15 bp, Homo sapiens
cactctttttaaaat

SEQ ID NO: 1158831 - DNA, 15 bp, Homo sapiens
ccactctttttaaaa

SEQ ID NO: 1158832 - DNA, 15 bp, Homo sapiens
accactctttttaaa

SEQ ID NO: 1158833 - DNA, 15 bp, Homo sapiens
gaccactctttttaa

SEQ ID NO: 1158834 - DNA, 15 bp, Homo sapiens
agaccactcttttta

SEQ ID NO: 1158835 - DNA, 15 bp, Homo sapiens
cagaccactcttttt

SEQ ID NO: 1158836 - DNA, 15 bp, Homo sapiens
acagaccactctttt

SEQ ID NO: 1158837 - DNA, 15 bp, Homo sapiens
cacagaccactcttt

SEQ ID NO: 1158838 - DNA, 15 bp, Homo sapiens
gcacagaccactctt

SEQ ID NO: 1158839 - DNA, 15 bp, Homo sapiens
agcacagaccactct

SEQ ID NO: 1158840 - DNA, 15 bp, Homo sapiens
tagcacagaccactc

SEQ ID NO: 1158841 - DNA, 15 bp, Homo sapiens
ctagcacagaccact

SEQ ID NO: 1158842 - DNA, 15 bp, Homo sapiens
actagcacagaccac

SEQ ID NO: 1158843 - DNA, 15 bp, Homo sapiens
tactagcacagacca

SEQ ID NO: 1158844 - DNA, 15 bp, Homo sapiens
gtactagcacagacc

SEQ ID NO: 1158845 - DNA, 15 bp, Homo sapiens
tgtactagcacagac

SEQ ID NO: 1158846 - DNA, 15 bp, Homo sapiens
ttgtactagcacaga

SEQ ID NO: 1158847 - DNA, 15 bp, Homo sapiens
tttgtactagcacag

SEQ ID NO: 1158848 - DNA, 15 bp, Homo sapiens
ctttgtactagcaca

SEQ ID NO: 1158849 - DNA, 15 bp, Homo sapiens
cctttgtactagcac

SEQ ID NO: 1158850 - DNA, 15 bp, Homo sapiens
acctttgtactagca

SEQ ID NO: 1158851 - DNA, 15 bp, Homo sapiens
tacctttgtactagc

SEQ ID NO: 1158852 - DNA, 15 bp, Homo sapiens
ttacctttgtactag

SEQ ID NO: 1158853 - DNA, 15 bp, Homo sapiens
cttacctttgtacta

SEQ ID NO: 1158854 - DNA, 15 bp, Homo sapiens
tcttacctttgtact

SEQ ID NO: 1158855 - DNA, 15 bp, Homo sapiens
atcttacctttgtac

SEQ ID NO: 1158856 - DNA, 15 bp, Homo sapiens
aatcttacctttgta

SEQ ID NO: 1158857 - DNA, 15 bp, Homo sapiens
gaatcttacctttgt

SEQ ID NO: 1158858 - DNA, 15 bp, Homo sapiens
ggaatcttacctttg

SEQ ID NO: 1158859 - DNA, 15 bp, Homo sapiens
tggaatcttaccttt

SEQ ID NO: 1158860 - DNA, 15 bp, Homo sapiens
atggaatcttacctt

SEQ ID NO: 1158861 - DNA, 15 bp, Homo sapiens
aatggaatcttacct

SEQ ID NO: 1158862 - DNA, 15 bp, Homo sapiens
gaatggaatcttacc

SEQ ID NO: 1158863 - DNA, 15 bp, Homo sapiens
ggaatggaatcttac

SEQ ID NO: 1158864 - DNA, 15 bp, Homo sapiens
aggaatggaatctta

SEQ ID NO: 1158865 - DNA, 15 bp, Homo sapiens
taggaatggaatctt

SEQ ID NO: 1158866 - DNA, 15 bp, Homo sapiens
ctaggaatggaatct

SEQ ID NO: 1158867 - DNA, 15 bp, Homo sapiens
tctaggaatggaatc

SEQ ID NO: 1158868 - DNA, 15 bp, Homo sapiens
ttctaggaatggaat

SEQ ID NO: 1158869 - DNA, 15 bp, Homo sapiens
attctaggaatggaa

SEQ ID NO: 1158870 - DNA, 15 bp, Homo sapiens
tattctaggaatgga

SEQ ID NO: 1158871 - DNA, 15 bp, Homo sapiens
ctattctaggaatgg

SEQ ID NO: 1158872 - DNA, 15 bp, Homo sapiens
actattctaggaatg

SEQ ID NO: 1158873 - DNA, 15 bp, Homo sapiens
aactattctaggaat

SEQ ID NO: 1158874 - DNA, 15 bp, Homo sapiens
taactattctaggaa

SEQ ID NO: 1158875 - DNA, 15 bp, Homo sapiens
ataactattctagga

SEQ ID NO: 1158876 - DNA, 15 bp, Homo sapiens
cataactattctagg

SEQ ID NO: 1158877 - DNA, 15 bp, Homo sapiens
gcataactattctag

SEQ ID NO: 1158878 - DNA, 15 bp, Homo sapiens
ggcataactattcta

SEQ ID NO: 1158879 - DNA, 15 bp, Homo sapiens
tggcataactattct

SEQ ID NO: 1158880 - DNA, 15 bp, Homo sapiens
ttggcataactattc

SEQ ID NO: 1158881 - DNA, 15 bp, Homo sapiens
tttggcataactatt

SEQ ID NO: 1158882 - DNA, 15 bp, Homo sapiens
atttggcataactat

SEQ ID NO: 1158883 - DNA, 15 bp, Homo sapiens
gatttggcataacta

SEQ ID NO: 1158884 - DNA, 15 bp, Homo sapiens
agatttggcataact

SEQ ID NO: 1158885 - DNA, 15 bp, Homo sapiens
cagatttggcataac

SEQ ID NO: 1158886 - DNA, 15 bp, Homo sapiens
gcagatttggcataa

SEQ ID NO: 1158887 - DNA, 15 bp, Homo sapiens
agcagatttggcata

SEQ ID NO: 1158888 - DNA, 15 bp, Homo sapiens
gagcagatttggcat

SEQ ID NO: 1158889 - DNA, 15 bp, Homo sapiens
tgagcagatttggca

SEQ ID NO: 1158890 - DNA, 15 bp, Homo sapiens
ctgagcagatttggc

SEQ ID NO: 1158891 - DNA, 15 bp, Homo sapiens
cctgagcagatttgg

SEQ ID NO: 1158892 - DNA, 15 bp, Homo sapiens
tcctgagcagatttg

SEQ ID NO: 1158893 - DNA, 15 bp, Homo sapiens
atcctgagcagattt

SEQ ID NO: 1158894 - DNA, 15 bp, Homo sapiens
aatcctgagcagatt

SEQ ID NO: 1158895 - DNA, 15 bp, Homo sapiens
taatcctgagcagat

SEQ ID NO: 1158896 - DNA, 15 bp, Homo sapiens
ataatcctgagcaga

SEQ ID NO: 1158897 - DNA, 15 bp, Homo sapiens
tataatcctgagcag

SEQ ID NO: 1158898 - DNA, 15 bp, Homo sapiens
atataatcctgagca

SEQ ID NO: 1158899 - DNA, 15 bp, Homo sapiens
aatataatcctgagc

SEQ ID NO: 1158900 - DNA, 15 bp, Homo sapiens
taatataatcctgag

SEQ ID NO: 1158901 - DNA, 15 bp, Homo sapiens
ataatataatcctga

SEQ ID NO: 1158902 - DNA, 15 bp, Homo sapiens
aataatataatcctg

SEQ ID NO: 1158903 - DNA, 15 bp, Homo sapiens
aaataatataatcct

SEQ ID NO: 1158904 - DNA, 15 bp, Homo sapiens
taaataatataatcc

SEQ ID NO: 1158905 - DNA, 15 bp, Homo sapiens
gtaaataatataatc

SEQ ID NO: 1158906 - DNA, 15 bp, Homo sapiens
agtaaataatataat

SEQ ID NO: 1158907 - DNA, 15 bp, Homo sapiens
tagtaaataatataa

SEQ ID NO: 1158908 - DNA, 15 bp, Homo sapiens
atagtaaataatata

SEQ ID NO: 1158909 - DNA, 15 bp, Homo sapiens
aatagtaaataatat

SEQ ID NO: 1158910 - DNA, 15 bp, Homo sapiens
gaatagtaaataata

SEQ ID NO: 1158911 - DNA, 15 bp, Homo sapiens
agaatagtaaataat

SEQ ID NO: 1158912 - DNA, 15 bp, Homo sapiens
gagaatagtaaataa

SEQ ID NO: 1158913 - DNA, 15 bp, Homo sapiens
tgagaatagtaaata

SEQ ID NO: 1158914 - DNA, 15 bp, Homo sapiens
atgagaatagtaaat

SEQ ID NO: 1158915 - DNA, 15 bp, Homo sapiens
catgagaatagtaaa

SEQ ID NO: 1158916 - DNA, 15 bp, Homo sapiens
gcatgagaatagtaa

SEQ ID NO: 1158917 - DNA, 15 bp, Homo sapiens
agcatgagaatagta

SEQ ID NO: 1158918 - DNA, 15 bp, Homo sapiens
aagcatgagaatagt

SEQ ID NO: 1158919 - DNA, 15 bp, Homo sapiens
caagcatgagaatag

SEQ ID NO: 1158920 - DNA, 15 bp, Homo sapiens
tcaagcatgagaata

SEQ ID NO: 1158921 - DNA, 15 bp, Homo sapiens
ttcaagcatgagaat

SEQ ID NO: 1158922 - DNA, 15 bp, Homo sapiens
tttcaagcatgagaa

SEQ ID NO: 1158923 - DNA, 15 bp, Homo sapiens
ttttcaagcatgaga

SEQ ID NO: 1158924 - DNA, 15 bp, Homo sapiens
attttcaagcatgag

SEQ ID NO: 1158925 - DNA, 15 bp, Homo sapiens
cattttcaagcatga

SEQ ID NO: 1158926 - DNA, 15 bp, Homo sapiens
tcattttcaagcatg

SEQ ID NO: 1158927 - DNA, 15 bp, Homo sapiens
ctcattttcaagcat

SEQ ID NO: 1158928 - DNA, 15 bp, Homo sapiens
gctcattttcaagca

SEQ ID NO: 1158929 - DNA, 15 bp, Homo sapiens
tgctcattttcaagc

SEQ ID NO: 1158930 - DNA, 15 bp, Homo sapiens
ctgctcattttcaag

SEQ ID NO: 1158931 - DNA, 15 bp, Homo sapiens
cctgctcattttcaa

SEQ ID NO: 1158932 - DNA, 15 bp, Homo sapiens
ccctgctcattttca

SEQ ID NO: 1158933 - DNA, 15 bp, Homo sapiens
cccctgctcattttc

SEQ ID NO: 1158934 - DNA, 15 bp, Homo sapiens
gcccctgctcatttt

SEQ ID NO: 1158935 - DNA, 15 bp, Homo sapiens
tgcccctgctcattt

SEQ ID NO: 1158936 - DNA, 15 bp, Homo sapiens
ttgcccctgctcatt

SEQ ID NO: 1158937 - DNA, 15 bp, Homo sapiens
cttgcccctgctcat

SEQ ID NO: 1158938 - DNA, 15 bp, Homo sapiens
ccttgcccctgctca

SEQ ID NO: 1158939 - DNA, 15 bp, Homo sapiens
cccttgcccctgctc

SEQ ID NO: 1158940 - DNA, 15 bp, Homo sapiens
ccccttgcccctgct

SEQ ID NO: 1158941 - DNA, 15 bp, Homo sapiens
cccccttgcccctgc

SEQ ID NO: 1158942 - DNA, 15 bp, Homo sapiens
acccccttgcccctg

SEQ ID NO: 1158943 - DNA, 15 bp, Homo sapiens
tacccccttgcccct

SEQ ID NO: 1158944 - DNA, 15 bp, Homo sapiens
atacccccttgcccc

SEQ ID NO: 1158945 - DNA, 15 bp, Homo sapiens
catacccccttgccc

SEQ ID NO: 1158946 - DNA, 15 bp, Homo sapiens
tcatacccccttgcc

SEQ ID NO: 1158947 - DNA, 15 bp, Homo sapiens
ttcatacccccttgc

SEQ ID NO: 1158948 - DNA, 15 bp, Homo sapiens
tttcatacccccttg

SEQ ID NO: 1158949 - DNA, 15 bp, Homo sapiens
ttttcataccccctt

SEQ ID NO: 1158950 - DNA, 15 bp, Homo sapiens
tttttcataccccct

SEQ ID NO: 1158951 - DNA, 15 bp, Homo sapiens
ttttttcataccccc

SEQ ID NO: 1158952 - DNA, 15 bp, Homo sapiens
cttttttcatacccc

SEQ ID NO: 1158953 - DNA, 15 bp, Homo sapiens
ccttttttcataccc

SEQ ID NO: 1158954 - DNA, 15 bp, Homo sapiens
tccttttttcatacc

SEQ ID NO: 1158955 - DNA, 15 bp, Homo sapiens
atccttttttcatac

SEQ ID NO: 1158956 - DNA, 15 bp, Homo sapiens
gatccttttttcata

SEQ ID NO: 1158957 - DNA, 15 bp, Homo sapiens
tgatccttttttcat

SEQ ID NO: 1158958 - DNA, 15 bp, Homo sapiens
atgatccttttttca

SEQ ID NO: 1158959 - DNA, 15 bp, Homo sapiens
catgatccttttttc

SEQ ID NO: 1158960 - DNA, 15 bp, Homo sapiens
tcatgatcctttttt

SEQ ID NO: 1158961 - DNA, 15 bp, Homo sapiens
ttcatgatccttttt

SEQ ID NO: 1158962 - DNA, 15 bp, Homo sapiens
tttcatgatcctttt

SEQ ID NO: 1158963 - DNA, 15 bp, Homo sapiens
atttcatgatccttt

SEQ ID NO: 1158964 - DNA, 15 bp, Homo sapiens
gatttcatgatcctt

SEQ ID NO: 1158965 - DNA, 15 bp, Homo sapiens
ggatttcatgatcct

SEQ ID NO: 1158966 - DNA, 15 bp, Homo sapiens
tggatttcatgatcc

SEQ ID NO: 1158967 - DNA, 15 bp, Homo sapiens
atggatttcatgatc

SEQ ID NO: 1158968 - DNA, 15 bp, Homo sapiens
gatggatttcatgat

SEQ ID NO: 1158969 - DNA, 15 bp, Homo sapiens
agatggatttcatga

SEQ ID NO: 1158970 - DNA, 15 bp, Homo sapiens
gagatggatttcatg

SEQ ID NO: 1158971 - DNA, 15 bp, Homo sapiens
agagatggatttcat

SEQ ID NO: 1158972 - DNA, 15 bp, Homo sapiens
aagagatggatttca

SEQ ID NO: 1158973 - DNA, 15 bp, Homo sapiens
caagagatggatttc

SEQ ID NO: 1158974 - DNA, 15 bp, Homo sapiens
acaagagatggattt

SEQ ID NO: 1158975 - DNA, 15 bp, Homo sapiens
gacaagagatggatt

SEQ ID NO: 1158976 - DNA, 15 bp, Homo sapiens
tgacaagagatggat

SEQ ID NO: 1158977 - DNA, 15 bp, Homo sapiens
gtgacaagagatgga

SEQ ID NO: 1158978 - DNA, 15 bp, Homo sapiens
ggtgacaagagatgg

SEQ ID NO: 1158979 - DNA, 15 bp, Homo sapiens
aggtgacaagagatg

SEQ ID NO: 1158980 - DNA, 15 bp, Homo sapiens
aaggtgacaagagat

SEQ ID NO: 1158981 - DNA, 15 bp, Homo sapiens
gaaggtgacaagaga

SEQ ID NO: 1158982 - DNA, 15 bp, Homo sapiens
agaaggtgacaagag

SEQ ID NO: 1158983 - DNA, 15 bp, Homo sapiens
cagaaggtgacaaga

SEQ ID NO: 1158984 - DNA, 15 bp, Homo sapiens
acagaaggtgacaag

SEQ ID NO: 1158985 - DNA, 15 bp, Homo sapiens
aacagaaggtgacaa

SEQ ID NO: 1158986 - DNA, 15 bp, Homo sapiens
gaacagaaggtgaca

SEQ ID NO: 1158987 - DNA, 15 bp, Homo sapiens
tgaacagaaggtgac

SEQ ID NO: 1158988 - DNA, 15 bp, Homo sapiens
ctgaacagaaggtga

SEQ ID NO: 1158989 - DNA, 15 bp, Homo sapiens
gctgaacagaaggtg

SEQ ID NO: 1158990 - DNA, 15 bp, Homo sapiens
tgctgaacagaaggt

SEQ ID NO: 1158991 - DNA, 15 bp, Homo sapiens
gtgctgaacagaagg

SEQ ID NO: 1158992 - DNA, 15 bp, Homo sapiens
agtgctgaacagaag

SEQ ID NO: 1158993 - DNA, 15 bp, Homo sapiens
tagtgctgaacagaa

SEQ ID NO: 1158994 - DNA, 15 bp, Homo sapiens
ctagtgctgaacaga

SEQ ID NO: 1158995 - DNA, 15 bp, Homo sapiens
actagtgctgaacag

SEQ ID NO: 1158996 - DNA, 15 bp, Homo sapiens
cactagtgctgaaca

SEQ ID NO: 1158997 - DNA, 15 bp, Homo sapiens
gcactagtgctgaac

SEQ ID NO: 1158998 - DNA, 15 bp, Homo sapiens
tgcactagtgctgaa

SEQ ID NO: 1158999 - DNA, 15 bp, Homo sapiens
ttgcactagtgctga

SEQ ID NO: 1159000 - DNA, 15 bp, Homo sapiens
cttgcactagtgctg

SEQ ID NO: 1159001 - DNA, 15 bp, Homo sapiens
tcttgcactagtgct

SEQ ID NO: 1159002 - DNA, 15 bp, Homo sapiens
atcttgcactagtgc

SEQ ID NO: 1159003 - DNA, 15 bp, Homo sapiens
aatcttgcactagtg

SEQ ID NO: 1159004 - DNA, 15 bp, Homo sapiens
aaatcttgcactagt

SEQ ID NO: 1159005 - DNA, 15 bp, Homo sapiens
caaatcttgcactag

SEQ ID NO: 1159006 - DNA, 15 bp, Homo sapiens
ccaaatcttgcacta

SEQ ID NO: 1159007 - DNA, 15 bp, Homo sapiens
accaaatcttgcact

SEQ ID NO: 1159008 - DNA, 15 bp, Homo sapiens
taccaaatcttgcac

SEQ ID NO: 1159009 - DNA, 15 bp, Homo sapiens
gtaccaaatcttgca

SEQ ID NO: 1159010 - DNA, 15 bp, Homo sapiens
ggtaccaaatcttgc

SEQ ID NO: 1159011 - DNA, 15 bp, Homo sapiens
aggtaccaaatcttg

SEQ ID NO: 1159012 - DNA, 15 bp, Homo sapiens
caggtaccaaatctt

SEQ ID NO: 1159013 - DNA, 15 bp, Homo sapiens
tcaggtaccaaatct

SEQ ID NO: 1159014 - DNA, 15 bp, Homo sapiens
ttcaggtaccaaatc

SEQ ID NO: 1159015 - DNA, 15 bp, Homo sapiens
tttcaggtaccaaat

SEQ ID NO: 1159016 - DNA, 15 bp, Homo sapiens
ttttcaggtaccaaa

SEQ ID NO: 1159017 - DNA, 15 bp, Homo sapiens
attttcaggtaccaa

SEQ ID NO: 1159018 - DNA, 15 bp, Homo sapiens
aattttcaggtacca

SEQ ID NO: 1159019 - DNA, 15 bp, Homo sapiens
taattttcaggtacc

SEQ ID NO: 1159020 - DNA, 15 bp, Homo sapiens
ctaattttcaggtac

SEQ ID NO: 1159021 - DNA, 15 bp, Homo sapiens
gctaattttcaggta

SEQ ID NO: 1159022 - DNA, 15 bp, Homo sapiens
tgctaattttcaggt

SEQ ID NO: 1159023 - DNA, 15 bp, Homo sapiens
ttgctaattttcagg

SEQ ID NO: 1159024 - DNA, 15 bp, Homo sapiens
attgctaattttcag

SEQ ID NO: 1159025 - DNA, 15 bp, Homo sapiens
aattgctaattttca

SEQ ID NO: 1159026 - DNA, 15 bp, Homo sapiens
taattgctaattttc

SEQ ID NO: 1159027 - DNA, 15 bp, Homo sapiens
ttaattgctaatttt

SEQ ID NO: 1159028 - DNA, 15 bp, Homo sapiens
gttaattgctaattt

SEQ ID NO: 1159029 - DNA, 15 bp, Homo sapiens
ggttaattgctaatt

SEQ ID NO: 1159030 - DNA, 15 bp, Homo sapiens
aggttaattgctaat

SEQ ID NO: 1159031 - DNA, 15 bp, Homo sapiens
taggttaattgctaa

SEQ ID NO: 1159032 - DNA, 15 bp, Homo sapiens
ttaggttaattgcta

SEQ ID NO: 1159033 - DNA, 15 bp, Homo sapiens
tttaggttaattgct

SEQ ID NO: 1159034 - DNA, 15 bp, Homo sapiens
ctttaggttaattgc

SEQ ID NO: 1159035 - DNA, 15 bp, Homo sapiens
tctttaggttaattg

SEQ ID NO: 1159036 - DNA, 15 bp, Homo sapiens
ttctttaggttaatt

SEQ ID NO: 1159037 - DNA, 15 bp, Homo sapiens
attctttaggttaat

SEQ ID NO: 1159038 - DNA, 15 bp, Homo sapiens
cattctttaggttaa

SEQ ID NO: 1159039 - DNA, 15 bp, Homo sapiens
tcattctttaggtta

SEQ ID NO: 1159040 - DNA, 15 bp, Homo sapiens
atcattctttaggtt

SEQ ID NO: 1159041 - DNA, 15 bp, Homo sapiens
aatcattctttaggt

SEQ ID NO: 1159042 - DNA, 15 bp, Homo sapiens
aaatcattctttagg

SEQ ID NO: 1159043 - DNA, 15 bp, Homo sapiens
aaaatcattctttag

SEQ ID NO: 1159044 - DNA, 15 bp, Homo sapiens
aaaaatcattcttta

SEQ ID NO: 1159045 - DNA, 15 bp, Homo sapiens
gaaaaatcattcttt

SEQ ID NO: 1159046 - DNA, 15 bp, Homo sapiens
agaaaaatcattctt

SEQ ID NO: 1159047 - DNA, 15 bp, Homo sapiens
aagaaaaatcattct

SEQ ID NO: 1159048 - DNA, 15 bp, Homo sapiens
aaagaaaaatcattc

SEQ ID NO: 1159049 - DNA, 15 bp, Homo sapiens
aaaagaaaaatcatt

SEQ ID NO: 1159050 - DNA, 15 bp, Homo sapiens
aaaaagaaaaatcat

SEQ ID NO: 1159051 - DNA, 15 bp, Homo sapiens
aaaaaagaaaaatca

SEQ ID NO: 1159052 - DNA, 15 bp, Homo sapiens
aaaaaaagaaaaatc

SEQ ID NO: 1159053 - DNA, 15 bp, Homo sapiens
gaaaaaaagaaaaat

SEQ ID NO: 1159054 - DNA, 15 bp, Homo sapiens
gaaagaaaaaaagaa

SEQ ID NO: 1159055 - DNA, 15 bp, Homo sapiens
agaaagaaaaaaaga

SEQ ID NO: 1159056 - DNA, 15 bp, Homo sapiens
aagaaagaaaaaaag

SEQ ID NO: 1159057 - DNA, 15 bp, Homo sapiens
ggaaagaaagaaaaa

SEQ ID NO: 1159058 - DNA, 15 bp, Homo sapiens
gaggaaagaaagaaa

SEQ ID NO: 1159059 - DNA, 15 bp, Homo sapiens
agaggaaagaaagaa

SEQ ID NO: 1159060 - DNA, 15 bp, Homo sapiens
cagaggaaagaaaga

SEQ ID NO: 1159061 - DNA, 15 bp, Homo sapiens
tcagaggaaagaaag

SEQ ID NO: 1159062 - DNA, 15 bp, Homo sapiens
atcagaggaaagaaa

SEQ ID NO: 1159063 - DNA, 15 bp, Homo sapiens
tatcagaggaaagaa

SEQ ID NO: 1159064 - DNA, 15 bp, Homo sapiens
ctatcagaggaaaga

SEQ ID NO: 1159065 - DNA, 15 bp, Homo sapiens
gctatcagaggaaag

SEQ ID NO: 1159066 - DNA, 15 bp, Homo sapiens
agctatcagaggaaa

SEQ ID NO: 1159067 - DNA, 15 bp, Homo sapiens
cagctatcagaggaa

SEQ ID NO: 1159068 - DNA, 15 bp, Homo sapiens
ccagctatcagagga

SEQ ID NO: 1159069 - DNA, 15 bp, Homo sapiens
tccagctatcagagg

SEQ ID NO: 1159070 - DNA, 15 bp, Homo sapiens
ttccagctatcagag

SEQ ID NO: 1159071 - DNA, 15 bp, Homo sapiens
tttccagctatcaga

SEQ ID NO: 1159072 - DNA, 15 bp, Homo sapiens
ctttccagctatcag

SEQ ID NO: 1159073 - DNA, 15 bp, Homo sapiens
cctttccagctatca

SEQ ID NO: 1159074 - DNA, 15 bp, Homo sapiens
gcctttccagctatc

SEQ ID NO: 1159075 - DNA, 15 bp, Homo sapiens
tgcctttccagctat

SEQ ID NO: 1159076 - DNA, 15 bp, Homo sapiens
ttgcctttccagcta

SEQ ID NO: 1159077 - DNA, 15 bp, Homo sapiens
gttgcctttccagct

SEQ ID NO: 1159078 - DNA, 15 bp, Homo sapiens
ggttgcctttccagc

SEQ ID NO: 1159079 - DNA, 15 bp, Homo sapiens
gggttgcctttccag

SEQ ID NO: 1159080 - DNA, 15 bp, Homo sapiens
ggggttgcctttcca

SEQ ID NO: 1159081 - DNA, 15 bp, Homo sapiens
gggggttgcctttcc

SEQ ID NO: 1159082 - DNA, 15 bp, Homo sapiens
tgggggttgcctttc

SEQ ID NO: 1159083 - DNA, 15 bp, Homo sapiens
ctgggggttgccttt

SEQ ID NO: 1159084 - DNA, 15 bp, Homo sapiens
gctgggggttgcctt

SEQ ID NO: 1159085 - DNA, 15 bp, Homo sapiens
agctgggggttgcct

SEQ ID NO: 1159086 - DNA, 15 bp, Homo sapiens
tagctgggggttgcc

SEQ ID NO: 1159087 - DNA, 15 bp, Homo sapiens
atagctgggggttgc

SEQ ID NO: 1159088 - DNA, 15 bp, Homo sapiens
gatagctgggggttg

SEQ ID NO: 1159089 - DNA, 15 bp, Homo sapiens
tgatagctgggggtt

SEQ ID NO: 1159090 - DNA, 15 bp, Homo sapiens
ctgatagctgggggt

SEQ ID NO: 1159091 - DNA, 15 bp, Homo sapiens
tctgatagctggggg

SEQ ID NO: 1159092 - DNA, 15 bp, Homo sapiens
gtctgatagctgggg

SEQ ID NO: 1159093 - DNA, 15 bp, Homo sapiens
cgtctgatagctggg

SEQ ID NO: 1159094 - DNA, 15 bp, Homo sapiens
ccgtctgatagctgg

SEQ ID NO: 1159095 - DNA, 15 bp, Homo sapiens
accgtctgatagctg

SEQ ID NO: 1159096 - DNA, 15 bp, Homo sapiens
gaccgtctgatagct

SEQ ID NO: 1159097 - DNA, 15 bp, Homo sapiens
agaccgtctgatagc

SEQ ID NO: 1159098 - DNA, 15 bp, Homo sapiens
cagaccgtctgatag

SEQ ID NO: 1159099 - DNA, 15 bp, Homo sapiens
ccagaccgtctgata

SEQ ID NO: 1159100 - DNA, 15 bp, Homo sapiens
accagaccgtctgat

SEQ ID NO: 1159101 - DNA, 15 bp, Homo sapiens
caccagaccgtctga

SEQ ID NO: 1159102 - DNA, 15 bp, Homo sapiens
acaccagaccgtctg

SEQ ID NO: 1159103 - DNA, 15 bp, Homo sapiens
tacaccagaccgtct

SEQ ID NO: 1159104 - DNA, 15 bp, Homo sapiens
atacaccagaccgtc

SEQ ID NO: 1159105 - DNA, 15 bp, Homo sapiens
catacaccagaccgt

SEQ ID NO: 1159106 - DNA, 15 bp, Homo sapiens
tcatacaccagaccg

SEQ ID NO: 1159107 - DNA, 15 bp, Homo sapiens
ttcatacaccagacc

SEQ ID NO: 1159108 - DNA, 15 bp, Homo sapiens
cttcatacaccagac

SEQ ID NO: 1159109 - DNA, 15 bp, Homo sapiens
ccttcatacaccaga

SEQ ID NO: 1159110 - DNA, 15 bp, Homo sapiens
cccttcatacaccag

SEQ ID NO: 1159111 - DNA, 15 bp, Homo sapiens
acccttcatacacca

SEQ ID NO: 1159112 - DNA, 15 bp, Homo sapiens
aacccttcatacacc

SEQ ID NO: 1159113 - DNA, 15 bp, Homo sapiens
gaacccttcatacac

SEQ ID NO: 1159114 - DNA, 15 bp, Homo sapiens
agaacccttcataca

SEQ ID NO: 1159115 - DNA, 15 bp, Homo sapiens
cagaacccttcatac

SEQ ID NO: 1159116 - DNA, 15 bp, Homo sapiens
ccagaacccttcata

SEQ ID NO: 1159117 - DNA, 15 bp, Homo sapiens
cccagaacccttcat

SEQ ID NO: 1159118 - DNA, 15 bp, Homo sapiens
tcccagaacccttca

SEQ ID NO: 1159119 - DNA, 15 bp, Homo sapiens
ttcccagaacccttc

SEQ ID NO: 1159120 - DNA, 15 bp, Homo sapiens
cttcccagaaccctt

SEQ ID NO: 1159121 - DNA, 15 bp, Homo sapiens
tcttcccagaaccct

SEQ ID NO: 1159122 - DNA, 15 bp, Homo sapiens
gtcttcccagaaccc

SEQ ID NO: 1159123 - DNA, 15 bp, Homo sapiens
ggtcttcccagaacc

SEQ ID NO: 1159124 - DNA, 15 bp, Homo sapiens
gggtcttcccagaac

SEQ ID NO: 1159125 - DNA, 15 bp, Homo sapiens
tgggtcttcccagaa

SEQ ID NO: 1159126 - DNA, 15 bp, Homo sapiens
ttgggtcttcccaga

SEQ ID NO: 1159127 - DNA, 15 bp, Homo sapiens
tttgggtcttcccag

SEQ ID NO: 1159128 - DNA, 15 bp, Homo sapiens
ctttgggtcttccca

SEQ ID NO: 1159129 - DNA, 15 bp, Homo sapiens
cctttgggtcttccc

SEQ ID NO: 1159130 - DNA, 15 bp, Homo sapiens
tcctttgggtcttcc

SEQ ID NO: 1159131 - DNA, 15 bp, Homo sapiens
ctcctttgggtcttc

SEQ ID NO: 1159132 - DNA, 15 bp, Homo sapiens
actcctttgggtctt

SEQ ID NO: 1159133 - DNA, 15 bp, Homo sapiens
aactcctttgggtct

SEQ ID NO: 1159134 - DNA, 15 bp, Homo sapiens
aaactcctttgggtc

SEQ ID NO: 1159135 - DNA, 15 bp, Homo sapiens
caaactcctttgggt

SEQ ID NO: 1159136 - DNA, 15 bp, Homo sapiens
gcaaactcctttggg

SEQ ID NO: 1159137 - DNA, 15 bp, Homo sapiens
tgcaaactcctttgg

SEQ ID NO: 1159138 - DNA, 15 bp, Homo sapiens
ctgcaaactcctttg

SEQ ID NO: 1159139 - DNA, 15 bp, Homo sapiens
cctgcaaactccttt

SEQ ID NO: 1159140 - DNA, 15 bp, Homo sapiens
ccctgcaaactcctt

SEQ ID NO: 1159141 - DNA, 15 bp, Homo sapiens
cccctgcaaactcct

SEQ ID NO: 1159142 - DNA, 15 bp, Homo sapiens
ccccctgcaaactcc

SEQ ID NO: 1159143 - DNA, 15 bp, Homo sapiens
gccccctgcaaactc

SEQ ID NO: 1159144 - DNA, 15 bp, Homo sapiens
tgccccctgcaaact

SEQ ID NO: 1159145 - DNA, 15 bp, Homo sapiens
ctgccccctgcaaac

SEQ ID NO: 1159146 - DNA, 15 bp, Homo sapiens
actgccccctgcaaa

SEQ ID NO: 1159147 - DNA, 15 bp, Homo sapiens
cactgccccctgcaa

SEQ ID NO: 1159148 - DNA, 15 bp, Homo sapiens
gcactgccccctgca

SEQ ID NO: 1159149 - DNA, 15 bp, Homo sapiens
tgcactgccccctgc

SEQ ID NO: 1159150 - DNA, 15 bp, Homo sapiens
ctgcactgccccctg

SEQ ID NO: 1159151 - DNA, 15 bp, Homo sapiens
cctgcactgccccct

SEQ ID NO: 1159152 - DNA, 15 bp, Homo sapiens
gcctgcactgccccc

SEQ ID NO: 1159153 - DNA, 15 bp, Homo sapiens
ggcctgcactgcccc

SEQ ID NO: 1159154 - DNA, 15 bp, Homo sapiens
tggcctgcactgccc

SEQ ID NO: 1159155 - DNA, 15 bp, Homo sapiens
ttggcctgcactgcc

SEQ ID NO: 1159156 - DNA, 15 bp, Homo sapiens
tttggcctgcactgc

SEQ ID NO: 1159157 - DNA, 15 bp, Homo sapiens
ctttggcctgcactg

SEQ ID NO: 1159158 - DNA, 15 bp, Homo sapiens
gctttggcctgcact

SEQ ID NO: 1159159 - DNA, 15 bp, Homo sapiens
tgctttggcctgcac

SEQ ID NO: 1159160 - DNA, 15 bp, Homo sapiens
ctgctttggcctgca

SEQ ID NO: 1159161 - DNA, 15 bp, Homo sapiens
gctgctttggcctgc

SEQ ID NO: 1159162 - DNA, 15 bp, Homo sapiens
cgctgctttggcctg

SEQ ID NO: 1159163 - DNA, 15 bp, Homo sapiens
acgctgctttggcct

SEQ ID NO: 1159164 - DNA, 15 bp, Homo sapiens
gacgctgctttggcc

SEQ ID NO: 1159165 - DNA, 15 bp, Homo sapiens
agacgctgctttggc

SEQ ID NO: 1159166 - DNA, 15 bp, Homo sapiens
aagacgctgctttgg

SEQ ID NO: 1159167 - DNA, 15 bp, Homo sapiens
aaagacgctgctttg

SEQ ID NO: 1159168 - DNA, 15 bp, Homo sapiens
gaaagacgctgcttt

SEQ ID NO: 1159169 - DNA, 15 bp, Homo sapiens
tgaaagacgctgctt

SEQ ID NO: 1159170 - DNA, 15 bp, Homo sapiens
ctgaaagacgctgct

SEQ ID NO: 1159171 - DNA, 15 bp, Homo sapiens
actgaaagacgctgc

SEQ ID NO: 1159172 - DNA, 15 bp, Homo sapiens
cactgaaagacgctg

SEQ ID NO: 1159173 - DNA, 15 bp, Homo sapiens
gcactgaaagacgct

SEQ ID NO: 1159174 - DNA, 15 bp, Homo sapiens
agcactgaaagacgc

SEQ ID NO: 1159175 - DNA, 15 bp, Homo sapiens
aagcactgaaagacg

SEQ ID NO: 1159176 - DNA, 15 bp, Homo sapiens
aaagcactgaaagac

SEQ ID NO: 1159177 - DNA, 15 bp, Homo sapiens
caaagcactgaaaga

SEQ ID NO: 1159178 - DNA, 15 bp, Homo sapiens
tcaaagcactgaaag

SEQ ID NO: 1159179 - DNA, 15 bp, Homo sapiens
gtcaaagcactgaaa

SEQ ID NO: 1159180 - DNA, 15 bp, Homo sapiens
cgtcaaagcactgaa

SEQ ID NO: 1159181 - DNA, 15 bp, Homo sapiens
acgtcaaagcactga

SEQ ID NO: 1159182 - DNA, 15 bp, Homo sapiens
gacgtcaaagcactg

SEQ ID NO: 1159183 - DNA, 15 bp, Homo sapiens
ggacgtcaaagcact

SEQ ID NO: 1159184 - DNA, 15 bp, Homo sapiens
aggacgtcaaagcac

SEQ ID NO: 1159185 - DNA, 15 bp, Homo sapiens
caggacgtcaaagca

SEQ ID NO: 1159186 - DNA, 15 bp, Homo sapiens
gcaggacgtcaaagc

SEQ ID NO: 1159187 - DNA, 15 bp, Homo sapiens
agcaggacgtcaaag

SEQ ID NO: 1159188 - DNA, 15 bp, Homo sapiens
cagcaggacgtcaaa

SEQ ID NO: 1159189 - DNA, 15 bp, Homo sapiens
ccagcaggacgtcaa

SEQ ID NO: 1159190 - DNA, 15 bp, Homo sapiens
cccagcaggacgtca

SEQ ID NO: 1159191 - DNA, 15 bp, Homo sapiens
gcccagcaggacgtc

SEQ ID NO: 1159192 - DNA, 15 bp, Homo sapiens
tgcccagcaggacgt

SEQ ID NO: 1159193 - DNA, 15 bp, Homo sapiens
atgcccagcaggacg

SEQ ID NO: 1159194 - DNA, 15 bp, Homo sapiens
gatgcccagcaggac

SEQ ID NO: 1159195 - DNA, 15 bp, Homo sapiens
ggatgcccagcagga

SEQ ID NO: 1159196 - DNA, 15 bp, Homo sapiens
tggatgcccagcagg

SEQ ID NO: 1159197 - DNA, 15 bp, Homo sapiens
ctggatgcccagcag

SEQ ID NO: 1159198 - DNA, 15 bp, Homo sapiens
gctggatgcccagca

SEQ ID NO: 1159199 - DNA, 15 bp, Homo sapiens
tgctggatgcccagc

SEQ ID NO: 1159200 - DNA, 15 bp, Homo sapiens
ctgctggatgcccag

SEQ ID NO: 1159201 - DNA, 15 bp, Homo sapiens
tctgctggatgccca

SEQ ID NO: 1159202 - DNA, 15 bp, Homo sapiens
gtctgctggatgccc

SEQ ID NO: 1159203 - DNA, 15 bp, Homo sapiens
agtctgctggatgcc

SEQ ID NO: 1159204 - DNA, 15 bp, Homo sapiens
cagtctgctggatgc

SEQ ID NO: 1159205 - DNA, 15 bp, Homo sapiens
gcagtctgctggatg

SEQ ID NO: 1159206 - DNA, 15 bp, Homo sapiens
agcagtctgctggat

SEQ ID NO: 1159207 - DNA, 15 bp, Homo sapiens
cagcagtctgctgga

SEQ ID NO: 1159208 - DNA, 15 bp, Homo sapiens
ccagcagtctgctgg

SEQ ID NO: 1159209 - DNA, 15 bp, Homo sapiens
accagcagtctgctg

SEQ ID NO: 1159210 - DNA, 15 bp, Homo sapiens
caccagcagtctgct

SEQ ID NO: 1159211 - DNA, 15 bp, Homo sapiens
ccaccagcagtctgc

SEQ ID NO: 1159212 - DNA, 15 bp, Homo sapiens
tccaccagcagtctg

SEQ ID NO: 1159213 - DNA, 15 bp, Homo sapiens
ctccaccagcagtct

SEQ ID NO: 1159214 - DNA, 15 bp, Homo sapiens
cctccaccagcagtc

SEQ ID NO: 1159215 - DNA, 15 bp, Homo sapiens
acctccaccagcagt

SEQ ID NO: 1159216 - DNA, 15 bp, Homo sapiens
cacctccaccagcag

SEQ ID NO: 1159217 - DNA, 15 bp, Homo sapiens
tcacctccaccagca

SEQ ID NO: 1159218 - DNA, 15 bp, Homo sapiens
ctcacctccaccagc

SEQ ID NO: 1159219 - DNA, 15 bp, Homo sapiens
actcacctccaccag

SEQ ID NO: 1159220 - DNA, 15 bp, Homo sapiens
cactcacctccacca

SEQ ID NO: 1159221 - DNA, 15 bp, Homo sapiens
ccactcacctccacc

SEQ ID NO: 1159222 - DNA, 15 bp, Homo sapiens
tccactcacctccac

SEQ ID NO: 1159223 - DNA, 15 bp, Homo sapiens
ttccactcacctcca

SEQ ID NO: 1159224 - DNA, 15 bp, Homo sapiens
tttccactcacctcc

SEQ ID NO: 1159225 - DNA, 15 bp, Homo sapiens
ttttccactcacctc

SEQ ID NO: 1159226 - DNA, 15 bp, Homo sapiens
attttccactcacct

SEQ ID NO: 1159227 - DNA, 15 bp, Homo sapiens
tattttccactcacc

SEQ ID NO: 1159228 - DNA, 15 bp, Homo sapiens
ttattttccactcac

SEQ ID NO: 1159229 - DNA, 15 bp, Homo sapiens
gttattttccactca

SEQ ID NO: 1159230 - DNA, 15 bp, Homo sapiens
tgttattttccactc

SEQ ID NO: 1159231 - DNA, 15 bp, Homo sapiens
ttgttattttccact

SEQ ID NO: 1159232 - DNA, 15 bp, Homo sapiens
cttgttattttccac

SEQ ID NO: 1159233 - DNA, 15 bp, Homo sapiens
tcttgttattttcca

SEQ ID NO: 1159234 - DNA, 15 bp, Homo sapiens
ttcttgttattttcc

SEQ ID NO: 1159235 - DNA, 15 bp, Homo sapiens
tttcttgttattttc

SEQ ID NO: 1159236 - DNA, 15 bp, Homo sapiens
atttcttgttatttt

SEQ ID NO: 1159237 - DNA, 15 bp, Homo sapiens
taattatttcttgtt

SEQ ID NO: 1159238 - DNA, 15 bp, Homo sapiens
ataattatttcttgt

SEQ ID NO: 1159239 - DNA, 15 bp, Homo sapiens
gataattatttcttg

SEQ ID NO: 1159240 - DNA, 15 bp, Homo sapiens
agataattatttctt

SEQ ID NO: 1159241 - DNA, 15 bp, Homo sapiens
gagataattatttct

SEQ ID NO: 1159242 - DNA, 15 bp, Homo sapiens
agagataattatttc

SEQ ID NO: 1159243 - DNA, 15 bp, Homo sapiens
aagagataattattt

SEQ ID NO: 1159244 - DNA, 15 bp, Homo sapiens
taagagataattatt

SEQ ID NO: 1159245 - DNA, 15 bp, Homo sapiens
ataagagataattat

SEQ ID NO: 1159246 - DNA, 15 bp, Homo sapiens
cataagagataatta

SEQ ID NO: 1159247 - DNA, 15 bp, Homo sapiens
acataagagataatt

SEQ ID NO: 1159248 - DNA, 15 bp, Homo sapiens
cacataagagataat

SEQ ID NO: 1159249 - DNA, 15 bp, Homo sapiens
tcacataagagataa

SEQ ID NO: 1159250 - DNA, 15 bp, Homo sapiens
ttcacataagagata

SEQ ID NO: 1159251 - DNA, 15 bp, Homo sapiens
attcacataagagat

SEQ ID NO: 1159252 - DNA, 15 bp, Homo sapiens
tattcacataagaga

SEQ ID NO: 1159253 - DNA, 15 bp, Homo sapiens
gtattcacataagag

SEQ ID NO: 1159254 - DNA, 15 bp, Homo sapiens
tgtattcacataaga

SEQ ID NO: 1159255 - DNA, 15 bp, Homo sapiens
ttgtattcacataag

SEQ ID NO: 1159256 - DNA, 15 bp, Homo sapiens
attgtattcacataa

SEQ ID NO: 1159257 - DNA, 15 bp, Homo sapiens
tattgtattcacata

SEQ ID NO: 1159258 - DNA, 15 bp, Homo sapiens
ctattgtattcacat

SEQ ID NO: 1159259 - DNA, 15 bp, Homo sapiens
actattgtattcaca

SEQ ID NO: 1159260 - DNA, 15 bp, Homo sapiens
tactattgtattcac

SEQ ID NO: 1159261 - DNA, 15 bp, Homo sapiens
atactattgtattca

SEQ ID NO: 1159262 - DNA, 15 bp, Homo sapiens
aatactattgtattc

SEQ ID NO: 1159263 - DNA, 15 bp, Homo sapiens
aaatactattgtatt

SEQ ID NO: 1159264 - DNA, 15 bp, Homo sapiens
caaatactattgtat

SEQ ID NO: 1159265 - DNA, 15 bp, Homo sapiens
ccaaatactattgta

SEQ ID NO: 1159266 - DNA, 15 bp, Homo sapiens
tccaaatactattgt

SEQ ID NO: 1159267 - DNA, 15 bp, Homo sapiens
atccaaatactattg

SEQ ID NO: 1159268 - DNA, 15 bp, Homo sapiens
tatccaaatactatt

SEQ ID NO: 1159269 - DNA, 15 bp, Homo sapiens
atatccaaatactat

SEQ ID NO: 1159270 - DNA, 15 bp, Homo sapiens
gatatccaaatacta

SEQ ID NO: 1159271 - DNA, 15 bp, Homo sapiens
agatatccaaatact

SEQ ID NO: 1159272 - DNA, 15 bp, Homo sapiens
tagatatccaaatac

SEQ ID NO: 1159273 - DNA, 15 bp, Homo sapiens
gtagatatccaaata

SEQ ID NO: 1159274 - DNA, 15 bp, Homo sapiens
tgtagatatccaaat

SEQ ID NO: 1159275 - DNA, 15 bp, Homo sapiens
ttgtagatatccaaa

SEQ ID NO: 1159276 - DNA, 15 bp, Homo sapiens
tttgtagatatccaa

SEQ ID NO: 1159277 - DNA, 15 bp, Homo sapiens
ctttgtagatatcca

SEQ ID NO: 1159278 - DNA, 15 bp, Homo sapiens
gctttgtagatatcc

SEQ ID NO: 1159279 - DNA, 15 bp, Homo sapiens
tgctttgtagatatc

SEQ ID NO: 1159280 - DNA, 15 bp, Homo sapiens
gtgctttgtagatat

SEQ ID NO: 1159281 - DNA, 15 bp, Homo sapiens
ggtgctttgtagata

SEQ ID NO: 1159282 - DNA, 15 bp, Homo sapiens
aggtgctttgtagat

SEQ ID NO: 1159283 - DNA, 15 bp, Homo sapiens
aaggtgctttgtaga

SEQ ID NO: 1159284 - DNA, 15 bp, Homo sapiens
gaaggtgctttgtag

SEQ ID NO: 1159285 - DNA, 15 bp, Homo sapiens
ggaaggtgctttgta

SEQ ID NO: 1159286 - DNA, 15 bp, Homo sapiens
gggaaggtgctttgt

SEQ ID NO: 1159287 - DNA, 15 bp, Homo sapiens
tgggaaggtgctttg

SEQ ID NO: 1159288 - DNA, 15 bp, Homo sapiens
atgggaaggtgcttt

SEQ ID NO: 1159289 - DNA, 15 bp, Homo sapiens
gatgggaaggtgctt

SEQ ID NO: 1159290 - DNA, 15 bp, Homo sapiens
tgatgggaaggtgct

SEQ ID NO: 1159291 - DNA, 15 bp, Homo sapiens
ctgatgggaaggtgc

SEQ ID NO: 1159292 - DNA, 15 bp, Homo sapiens
gctgatgggaaggtg

SEQ ID NO: 1159293 - DNA, 15 bp, Homo sapiens
tgctgatgggaaggt

SEQ ID NO: 1159294 - DNA, 15 bp, Homo sapiens
atgctgatgggaagg

SEQ ID NO: 1159295 - DNA, 15 bp, Homo sapiens
gatgctgatgggaag

SEQ ID NO: 1159296 - DNA, 15 bp, Homo sapiens
agatgctgatgggaa

SEQ ID NO: 1159297 - DNA, 15 bp, Homo sapiens
aagatgctgatggga

SEQ ID NO: 1159298 - DNA, 15 bp, Homo sapiens
taagatgctgatggg

SEQ ID NO: 1159299 - DNA, 15 bp, Homo sapiens
ataagatgctgatgg

SEQ ID NO: 1159300 - DNA, 15 bp, Homo sapiens
gataagatgctgatg

SEQ ID NO: 1159301 - DNA, 15 bp, Homo sapiens
agataagatgctgat

SEQ ID NO: 1159302 - DNA, 15 bp, Homo sapiens
cagataagatgctga

SEQ ID NO: 1159303 - DNA, 15 bp, Homo sapiens
tcagataagatgctg

SEQ ID NO: 1159304 - DNA, 15 bp, Homo sapiens
ctcagataagatgct

SEQ ID NO: 1159305 - DNA, 15 bp, Homo sapiens
gctcagataagatgc

SEQ ID NO: 1159306 - DNA, 15 bp, Homo sapiens
agctcagataagatg

SEQ ID NO: 1159307 - DNA, 15 bp, Homo sapiens
aagctcagataagat

SEQ ID NO: 1159308 - DNA, 15 bp, Homo sapiens
taagctcagataaga

SEQ ID NO: 1159309 - DNA, 15 bp, Homo sapiens
ataagctcagataag

SEQ ID NO: 1159310 - DNA, 15 bp, Homo sapiens
gataagctcagataa

SEQ ID NO: 1159311 - DNA, 15 bp, Homo sapiens
agataagctcagata

SEQ ID NO: 1159312 - DNA, 15 bp, Homo sapiens
cagataagctcagat

SEQ ID NO: 1159313 - DNA, 15 bp, Homo sapiens
tcagataagctcaga

SEQ ID NO: 1159314 - DNA, 15 bp, Homo sapiens
atcagataagctcag

SEQ ID NO: 1159315 - DNA, 15 bp, Homo sapiens
tatcagataagctca

SEQ ID NO: 1159316 - DNA, 15 bp, Homo sapiens
ctatcagataagctc

SEQ ID NO: 1159317 - DNA, 15 bp, Homo sapiens
actatcagataagct

SEQ ID NO: 1159318 - DNA, 15 bp, Homo sapiens
aactatcagataagc

SEQ ID NO: 1159319 - DNA, 15 bp, Homo sapiens
aaactatcagataag

SEQ ID NO: 1159320 - DNA, 15 bp, Homo sapiens
aaaactatcagataa

SEQ ID NO: 1159321 - DNA, 15 bp, Homo sapiens
taaaactatcagata

SEQ ID NO: 1159322 - DNA, 15 bp, Homo sapiens
ctaaaactatcagat

SEQ ID NO: 1159323 - DNA, 15 bp, Homo sapiens
gctaaaactatcaga

SEQ ID NO: 1159324 - DNA, 15 bp, Homo sapiens
tgctaaaactatcag

SEQ ID NO: 1159325 - DNA, 15 bp, Homo sapiens
ctgctaaaactatca

SEQ ID NO: 1159326 - DNA, 15 bp, Homo sapiens
tctgctaaaactatc

SEQ ID NO: 1159327 - DNA, 15 bp, Homo sapiens
ttctgctaaaactat

SEQ ID NO: 1159328 - DNA, 15 bp, Homo sapiens
attctgctaaaacta

SEQ ID NO: 1159329 - DNA, 15 bp, Homo sapiens
gattctgctaaaact

SEQ ID NO: 1159330 - DNA, 15 bp, Homo sapiens
tgattctgctaaaac

SEQ ID NO: 1159331 - DNA, 15 bp, Homo sapiens
ctgattctgctaaaa

SEQ ID NO: 1159332 - DNA, 15 bp, Homo sapiens
cctgattctgctaaa

SEQ ID NO: 1159333 - DNA, 15 bp, Homo sapiens
gcctgattctgctaa

SEQ ID NO: 1159334 - DNA, 15 bp, Homo sapiens
tgcctgattctgcta

SEQ ID NO: 1159335 - DNA, 15 bp, Homo sapiens
ttgcctgattctgct

SEQ ID NO: 1159336 - DNA, 15 bp, Homo sapiens
cttgcctgattctgc

SEQ ID NO: 1159337 - DNA, 15 bp, Homo sapiens
acttgcctgattctg

SEQ ID NO: 1159338 - DNA, 15 bp, Homo sapiens
tacttgcctgattct

SEQ ID NO: 1159339 - DNA, 15 bp, Homo sapiens
ctacttgcctgattc

SEQ ID NO: 1159340 - DNA, 15 bp, Homo sapiens
cctacttgcctgatt

SEQ ID NO: 1159341 - DNA, 15 bp, Homo sapiens
ccctacttgcctgat

SEQ ID NO: 1159342 - DNA, 15 bp, Homo sapiens
tccctacttgcctga

SEQ ID NO: 1159343 - DNA, 15 bp, Homo sapiens
atccctacttgcctg

SEQ ID NO: 1159344 - DNA, 15 bp, Homo sapiens
aatccctacttgcct

SEQ ID NO: 1159345 - DNA, 15 bp, Homo sapiens
aaatccctacttgcc

SEQ ID NO: 1159346 - DNA, 15 bp, Homo sapiens
caaatccctacttgc

SEQ ID NO: 1159347 - DNA, 15 bp, Homo sapiens
ccaaatccctacttg

SEQ ID NO: 1159348 - DNA, 15 bp, Homo sapiens
accaaatccctactt

SEQ ID NO: 1159349 - DNA, 15 bp, Homo sapiens
aaccaaatccctact

SEQ ID NO: 1159350 - DNA, 15 bp, Homo sapiens
caaccaaatccctac

SEQ ID NO: 1159351 - DNA, 15 bp, Homo sapiens
gcaaccaaatcccta

SEQ ID NO: 1159352 - DNA, 15 bp, Homo sapiens
ggcaaccaaatccct

SEQ ID NO: 1159353 - DNA, 15 bp, Homo sapiens
tggcaaccaaatccc

SEQ ID NO: 1159354 - DNA, 15 bp, Homo sapiens
atggcaaccaaatcc

SEQ ID NO: 1159355 - DNA, 15 bp, Homo sapiens
catggcaaccaaatc

SEQ ID NO: 1159356 - DNA, 15 bp, Homo sapiens
tcatggcaaccaaat

SEQ ID NO: 1159357 - DNA, 15 bp, Homo sapiens
atcatggcaaccaaa

SEQ ID NO: 1159358 - DNA, 15 bp, Homo sapiens
gatcatggcaaccaa

SEQ ID NO: 1159359 - DNA, 15 bp, Homo sapiens
ggatcatggcaacca

SEQ ID NO: 1159360 - DNA, 15 bp, Homo sapiens
gggatcatggcaacc

SEQ ID NO: 1159361 - DNA, 15 bp, Homo sapiens
tgggatcatggcaac

SEQ ID NO: 1159362 - DNA, 15 bp, Homo sapiens
atgggatcatggcaa

SEQ ID NO: 1159363 - DNA, 15 bp, Homo sapiens
aatgggatcatggca

SEQ ID NO: 1159364 - DNA, 15 bp, Homo sapiens
aaatgggatcatggc

SEQ ID NO: 1159365 - DNA, 15 bp, Homo sapiens
aaaatgggatcatgg

SEQ ID NO: 1159366 - DNA, 15 bp, Homo sapiens
taaaatgggatcatg

SEQ ID NO: 1159367 - DNA, 15 bp, Homo sapiens
ttaaaatgggatcat

SEQ ID NO: 1159368 - DNA, 15 bp, Homo sapiens
tttaaaatgggatca

SEQ ID NO: 1159369 - DNA, 15 bp, Homo sapiens
ttttaaaatgggatc

SEQ ID NO: 1159370 - DNA, 15 bp, Homo sapiens
tttttaaaatgggat

SEQ ID NO: 1159371 - DNA, 15 bp, Homo sapiens
atttttaaaatggga

SEQ ID NO: 1159372 - DNA, 15 bp, Homo sapiens
catttttaaaatggg

SEQ ID NO: 1159373 - DNA, 15 bp, Homo sapiens
tcatttttaaaatgg

SEQ ID NO: 1159374 - DNA, 15 bp, Homo sapiens
ttcatttttaaaatg

SEQ ID NO: 1159375 - DNA, 15 bp, Homo sapiens
atcttcatttttaaa

SEQ ID NO: 1159376 - DNA, 15 bp, Homo sapiens
catcttcatttttaa

SEQ ID NO: 1159377 - DNA, 15 bp, Homo sapiens
gcatcttcattttta

SEQ ID NO: 1159378 - DNA, 15 bp, Homo sapiens
tgcatcttcattttt

SEQ ID NO: 1159379 - DNA, 15 bp, Homo sapiens
ctgcatcttcatttt

SEQ ID NO: 1159380 - DNA, 15 bp, Homo sapiens
tctgcatcttcattt

SEQ ID NO: 1159381 - DNA, 15 bp, Homo sapiens
ttctgcatcttcatt

SEQ ID NO: 1159382 - DNA, 15 bp, Homo sapiens
tttctgcatcttcat

SEQ ID NO: 1159383 - DNA, 15 bp, Homo sapiens
gtttctgcatcttca

SEQ ID NO: 1159384 - DNA, 15 bp, Homo sapiens
agtttctgcatcttc

SEQ ID NO: 1159385 - DNA, 15 bp, Homo sapiens
aagtttctgcatctt

SEQ ID NO: 1159386 - DNA, 15 bp, Homo sapiens
taagtttctgcatct

SEQ ID NO: 1159387 - DNA, 15 bp, Homo sapiens
ttaagtttctgcatc

SEQ ID NO: 1159388 - DNA, 15 bp, Homo sapiens
attaagtttctgcat

SEQ ID NO: 1159389 - DNA, 15 bp, Homo sapiens
cattaagtttctgca

SEQ ID NO: 1159390 - DNA, 15 bp, Homo sapiens
tcattaagtttctgc

SEQ ID NO: 1159391 - DNA, 15 bp, Homo sapiens
ctcattaagtttctg

SEQ ID NO: 1159392 - DNA, 15 bp, Homo sapiens
tctcattaagtttct

SEQ ID NO: 1159393 - DNA, 15 bp, Homo sapiens
ctctcattaagtttc

SEQ ID NO: 1159394 - DNA, 15 bp, Homo sapiens
actctcattaagttt

SEQ ID NO: 1159395 - DNA, 15 bp, Homo sapiens
gactctcattaagtt

SEQ ID NO: 1159396 - DNA, 15 bp, Homo sapiens
tgactctcattaagt

SEQ ID NO: 1159397 - DNA, 15 bp, Homo sapiens
ctgactctcattaag

SEQ ID NO: 1159398 - DNA, 15 bp, Homo sapiens
actgactctcattaa

SEQ ID NO: 1159399 - DNA, 15 bp, Homo sapiens
cactgactctcatta

SEQ ID NO: 1159400 - DNA, 15 bp, Homo sapiens
tcactgactctcatt

SEQ ID NO: 1159401 - DNA, 15 bp, Homo sapiens
gtcactgactctcat

SEQ ID NO: 1159402 - DNA, 15 bp, Homo sapiens
tgtcactgactctca

SEQ ID NO: 1159403 - DNA, 15 bp, Homo sapiens
ctgtcactgactctc

SEQ ID NO: 1159404 - DNA, 15 bp, Homo sapiens
cctgtcactgactct

SEQ ID NO: 1159405 - DNA, 15 bp, Homo sapiens
acctgtcactgactc

SEQ ID NO: 1159406 - DNA, 15 bp, Homo sapiens
aacctgtcactgact

SEQ ID NO: 1159407 - DNA, 15 bp, Homo sapiens
gaacctgtcactgac

SEQ ID NO: 1159408 - DNA, 15 bp, Homo sapiens
ggaacctgtcactga

SEQ ID NO: 1159409 - DNA, 15 bp, Homo sapiens
aggaacctgtcactg

SEQ ID NO: 1159410 - DNA, 15 bp, Homo sapiens
aaggaacctgtcact

SEQ ID NO: 1159411 - DNA, 15 bp, Homo sapiens
caaggaacctgtcac

SEQ ID NO: 1159412 - DNA, 15 bp, Homo sapiens
acaaggaacctgtca

SEQ ID NO: 1159413 - DNA, 15 bp, Homo sapiens
cacaaggaacctgtc

SEQ ID NO: 1159414 - DNA, 15 bp, Homo sapiens
tcacaaggaacctgt

SEQ ID NO: 1159415 - DNA, 15 bp, Homo sapiens
ttcacaaggaacctg

SEQ ID NO: 1159416 - DNA, 15 bp, Homo sapiens
gttcacaaggaacct

SEQ ID NO: 1159417 - DNA, 15 bp, Homo sapiens
ggttcacaaggaacc

SEQ ID NO: 1159418 - DNA, 15 bp, Homo sapiens
tggttcacaaggaac

SEQ ID NO: 1159419 - DNA, 15 bp, Homo sapiens
ctggttcacaaggaa

SEQ ID NO: 1159420 - DNA, 15 bp, Homo sapiens
gctggttcacaagga

SEQ ID NO: 1159421 - DNA, 15 bp, Homo sapiens
agctggttcacaagg

SEQ ID NO: 1159422 - DNA, 15 bp, Homo sapiens
tagctggttcacaag

SEQ ID NO: 1159423 - DNA, 15 bp, Homo sapiens
ctagctggttcacaa

SEQ ID NO: 1159424 - DNA, 15 bp, Homo sapiens
tctagctggttcaca

SEQ ID NO: 1159425 - DNA, 15 bp, Homo sapiens
ttctagctggttcac

SEQ ID NO: 1159426 - DNA, 15 bp, Homo sapiens
tttctagctggttca

SEQ ID NO: 1159427 - DNA, 15 bp, Homo sapiens
ctttctagctggttc

SEQ ID NO: 1159428 - DNA, 15 bp, Homo sapiens
actttctagctggtt

SEQ ID NO: 1159429 - DNA, 15 bp, Homo sapiens
cactttctagctggt

SEQ ID NO: 1159430 - DNA, 15 bp, Homo sapiens
ccactttctagctgg

SEQ ID NO: 1159431 - DNA, 15 bp, Homo sapiens
gccactttctagctg

SEQ ID NO: 1159432 - DNA, 15 bp, Homo sapiens
tgccactttctagct

SEQ ID NO: 1159433 - DNA, 15 bp, Homo sapiens
ctgccactttctagc

SEQ ID NO: 1159434 - DNA, 15 bp, Homo sapiens
tctgccactttctag

SEQ ID NO: 1159435 - DNA, 15 bp, Homo sapiens
ctctgccactttcta

SEQ ID NO: 1159436 - DNA, 15 bp, Homo sapiens
gctctgccactttct

SEQ ID NO: 1159437 - DNA, 15 bp, Homo sapiens
agctctgccactttc

SEQ ID NO: 1159438 - DNA, 15 bp, Homo sapiens
cagctctgccacttt

SEQ ID NO: 1159439 - DNA, 15 bp, Homo sapiens
ccagctctgccactt

SEQ ID NO: 1159440 - DNA, 15 bp, Homo sapiens
gccagctctgccact

SEQ ID NO: 1159441 - DNA, 15 bp, Homo sapiens
ggccagctctgccac

SEQ ID NO: 1159442 - DNA, 15 bp, Homo sapiens
tggccagctctgcca

SEQ ID NO: 1159443 - DNA, 15 bp, Homo sapiens
ctggccagctctgcc

SEQ ID NO: 1159444 - DNA, 15 bp, Homo sapiens
cctggccagctctgc

SEQ ID NO: 1159445 - DNA, 15 bp, Homo sapiens
acctggccagctctg

SEQ ID NO: 1159446 - DNA, 15 bp, Homo sapiens
cacctggccagctct

SEQ ID NO: 1159447 - DNA, 15 bp, Homo sapiens
gcacctggccagctc

SEQ ID NO: 1159448 - DNA, 15 bp, Homo sapiens
cgcacctggccagct

SEQ ID NO: 1159449 - DNA, 15 bp, Homo sapiens
ccgcacctggccagc

SEQ ID NO: 1159450 - DNA, 15 bp, Homo sapiens
accgcacctggccag

SEQ ID NO: 1159451 - DNA, 15 bp, Homo sapiens
caccgcacctggcca

SEQ ID NO: 1159452 - DNA, 15 bp, Homo sapiens
tcaccgcacctggcc

SEQ ID NO: 1159453 - DNA, 15 bp, Homo sapiens
gtcaccgcacctggc

SEQ ID NO: 1159454 - DNA, 15 bp, Homo sapiens
agtcaccgcacctgg

SEQ ID NO: 1159455 - DNA, 15 bp, Homo sapiens
gagtcaccgcacctg

SEQ ID NO: 1159456 - DNA, 15 bp, Homo sapiens
tgagtcaccgcacct

SEQ ID NO: 1159457 - DNA, 15 bp, Homo sapiens
ttgagtcaccgcacc

SEQ ID NO: 1159458 - DNA, 15 bp, Homo sapiens
cttgagtcaccgcac

SEQ ID NO: 1159459 - DNA, 15 bp, Homo sapiens
gcttgagtcaccgca

SEQ ID NO: 1159460 - DNA, 15 bp, Homo sapiens
ggcttgagtcaccgc

SEQ ID NO: 1159461 - DNA, 15 bp, Homo sapiens
aggcttgagtcaccg

SEQ ID NO: 1159462 - DNA, 15 bp, Homo sapiens
caggcttgagtcacc

SEQ ID NO: 1159463 - DNA, 15 bp, Homo sapiens
acaggcttgagtcac

SEQ ID NO: 1159464 - DNA, 15 bp, Homo sapiens
tacaggcttgagtca

SEQ ID NO: 1159465 - DNA, 15 bp, Homo sapiens
ttacaggcttgagtc

SEQ ID NO: 1159466 - DNA, 15 bp, Homo sapiens
attacaggcttgagt

SEQ ID NO: 1159467 - DNA, 15 bp, Homo sapiens
aggattacaggcttg

SEQ ID NO: 1159468 - DNA, 15 bp, Homo sapiens
taggattacaggctt

SEQ ID NO: 1159469 - DNA, 15 bp, Homo sapiens
ctaggattacaggct

SEQ ID NO: 1159470 - DNA, 15 bp, Homo sapiens
gaagtgctaggatta

SEQ ID NO: 1159471 - DNA, 15 bp, Homo sapiens
cgaagtgctaggatt

SEQ ID NO: 1159472 - DNA, 15 bp, Homo sapiens
ccgaagtgctaggat

SEQ ID NO: 1159473 - DNA, 15 bp, Homo sapiens
cccgaagtgctagga

SEQ ID NO: 1159474 - DNA, 15 bp, Homo sapiens
tcccgaagtgctagg

SEQ ID NO: 1159475 - DNA, 15 bp, Homo sapiens
ctcccgaagtgctag

SEQ ID NO: 1159476 - DNA, 15 bp, Homo sapiens
tctcccgaagtgcta

SEQ ID NO: 1159477 - DNA, 15 bp, Homo sapiens
gtctcccgaagtgct

SEQ ID NO: 1159478 - DNA, 15 bp, Homo sapiens
ggtctcccgaagtgc

SEQ ID NO: 1159479 - DNA, 15 bp, Homo sapiens
aggtctcccgaagtg

SEQ ID NO: 1159480 - DNA, 15 bp, Homo sapiens
taggtctcccgaagt

SEQ ID NO: 1159481 - DNA, 15 bp, Homo sapiens
ctaggtctcccgaag

SEQ ID NO: 1159482 - DNA, 15 bp, Homo sapiens
cctaggtctcccgaa

SEQ ID NO: 1159483 - DNA, 15 bp, Homo sapiens
gcctaggtctcccga

SEQ ID NO: 1159484 - DNA, 15 bp, Homo sapiens
tgcctaggtctcccg

SEQ ID NO: 1159485 - DNA, 15 bp, Homo sapiens
ctgcctaggtctccc

SEQ ID NO: 1159486 - DNA, 15 bp, Homo sapiens
cctgcctaggtctcc

SEQ ID NO: 1159487 - DNA, 15 bp, Homo sapiens
acctgcctaggtctc

SEQ ID NO: 1159488 - DNA, 15 bp, Homo sapiens
cacctgcctaggtct

SEQ ID NO: 1159489 - DNA, 15 bp, Homo sapiens
ccacctgcctaggtc

SEQ ID NO: 1159490 - DNA, 15 bp, Homo sapiens
tccacctgcctaggt

SEQ ID NO: 1159491 - DNA, 15 bp, Homo sapiens
atccacctgcctagg

SEQ ID NO: 1159492 - DNA, 15 bp, Homo sapiens
gatccacctgcctag

SEQ ID NO: 1159493 - DNA, 15 bp, Homo sapiens
tgatccacctgccta

SEQ ID NO: 1159494 - DNA, 15 bp, Homo sapiens
agctagtttttgtat

SEQ ID NO: 1159495 - DNA, 15 bp, Homo sapiens
cagctagtttttgta

SEQ ID NO: 1159496 - DNA, 15 bp, Homo sapiens
tcagctagtttttgt

SEQ ID NO: 1159497 - DNA, 15 bp, Homo sapiens
ctcagctagtttttg

SEQ ID NO: 1159498 - DNA, 15 bp, Homo sapiens
actcagctagttttt

SEQ ID NO: 1159499 - DNA, 15 bp, Homo sapiens
cactcagctagtttt

SEQ ID NO: 1159500 - DNA, 15 bp, Homo sapiens
acactcagctagttt

SEQ ID NO: 1159501 - DNA, 15 bp, Homo sapiens
cacactcagctagtt

SEQ ID NO: 1159502 - DNA, 15 bp, Homo sapiens
ccacactcagctagt

SEQ ID NO: 1159503 - DNA, 15 bp, Homo sapiens
accacactcagctag

SEQ ID NO: 1159504 - DNA, 15 bp, Homo sapiens
caccacactcagcta

SEQ ID NO: 1159505 - DNA, 15 bp, Homo sapiens
ccaccacactcagct

SEQ ID NO: 1159506 - DNA, 15 bp, Homo sapiens
accaccacactcagc

SEQ ID NO: 1159507 - DNA, 15 bp, Homo sapiens
caccaccacactcag

SEQ ID NO: 1159508 - DNA, 15 bp, Homo sapiens
ccaccaccacactca

SEQ ID NO: 1159509 - DNA, 15 bp, Homo sapiens
cccaccaccacactc

SEQ ID NO: 1159510 - DNA, 15 bp, Homo sapiens
acccaccaccacact

SEQ ID NO: 1159511 - DNA, 15 bp, Homo sapiens
gaggcacccaccacc

SEQ ID NO: 1159512 - DNA, 15 bp, Homo sapiens
agaggcacccaccac

SEQ ID NO: 1159513 - DNA, 15 bp, Homo sapiens
tagaggcacccacca

SEQ ID NO: 1159514 - DNA, 15 bp, Homo sapiens
ttagaggcacccacc

SEQ ID NO: 1159515 - DNA, 15 bp, Homo sapiens
attagaggcacccac

SEQ ID NO: 1159516 - DNA, 15 bp, Homo sapiens
gattagaggcaccca

SEQ ID NO: 1159517 - DNA, 15 bp, Homo sapiens
ggattagaggcaccc

SEQ ID NO: 1159518 - DNA, 15 bp, Homo sapiens
gggattagaggcacc

SEQ ID NO: 1159519 - DNA, 15 bp, Homo sapiens
agtagctgggattag

SEQ ID NO: 1159520 - DNA, 15 bp, Homo sapiens
ggcgattctcctgcc

SEQ ID NO: 1159521 - DNA, 15 bp, Homo sapiens
aggcgattctcctgc

SEQ ID NO: 1159522 - DNA, 15 bp, Homo sapiens
gggttcaggcgattc

SEQ ID NO: 1159523 - DNA, 15 bp, Homo sapiens
ggggttcaggcgatt

SEQ ID NO: 1159524 - DNA, 15 bp, Homo sapiens
tggggttcaggcgat

SEQ ID NO: 1159525 - DNA, 15 bp, Homo sapiens
gtggggttcaggcga

SEQ ID NO: 1159526 - DNA, 15 bp, Homo sapiens
tgtggggttcaggcg

SEQ ID NO: 1159527 - DNA, 15 bp, Homo sapiens
ctgtggggttcaggc

SEQ ID NO: 1159528 - DNA, 15 bp, Homo sapiens
cctgtggggttcagg

SEQ ID NO: 1159529 - DNA, 15 bp, Homo sapiens
gcctgtggggttcag

SEQ ID NO: 1159530 - DNA, 15 bp, Homo sapiens
tgcctgtggggttca

SEQ ID NO: 1159531 - DNA, 15 bp, Homo sapiens
ctgcctgtggggttc

SEQ ID NO: 1159532 - DNA, 15 bp, Homo sapiens
tctgcctgtggggtt

SEQ ID NO: 1159533 - DNA, 15 bp, Homo sapiens
ctctgcctgtggggt

SEQ ID NO: 1159534 - DNA, 15 bp, Homo sapiens
cctctgcctgtgggg

SEQ ID NO: 1159535 - DNA, 15 bp, Homo sapiens
acctctgcctgtggg

SEQ ID NO: 1159536 - DNA, 15 bp, Homo sapiens
aacctctgcctgtgg

SEQ ID NO: 1159537 - DNA, 15 bp, Homo sapiens
caacctctgcctgtg

SEQ ID NO: 1159538 - DNA, 15 bp, Homo sapiens
gcaacctctgcctgt

SEQ ID NO: 1159539 - DNA, 15 bp, Homo sapiens
tgcaacctctgcctg

SEQ ID NO: 1159540 - DNA, 15 bp, Homo sapiens
tagcacgatcttggc

SEQ ID NO: 1159541 - DNA, 15 bp, Homo sapiens
gtagcacgatcttgg

SEQ ID NO: 1159542 - DNA, 15 bp, Homo sapiens
agtagcacgatcttg

SEQ ID NO: 1159543 - DNA, 15 bp, Homo sapiens
cagtagcacgatctt

SEQ ID NO: 1159544 - DNA, 15 bp, Homo sapiens
acagtagcacgatct

SEQ ID NO: 1159545 - DNA, 15 bp, Homo sapiens
tacagtagcacgatc

SEQ ID NO: 1159546 - DNA, 15 bp, Homo sapiens
gtacagtagcacgat

SEQ ID NO: 1159547 - DNA, 15 bp, Homo sapiens
agtacagtagcacga

SEQ ID NO: 1159548 - DNA, 15 bp, Homo sapiens
gagtacagtagcacg

SEQ ID NO: 1159549 - DNA, 15 bp, Homo sapiens
ggagtacagtagcac

SEQ ID NO: 1159550 - DNA, 15 bp, Homo sapiens
tggagtacagtagca

SEQ ID NO: 1159551 - DNA, 15 bp, Homo sapiens
ctggagtacagtagc

SEQ ID NO: 1159552 - DNA, 15 bp, Homo sapiens
gctggagtacagtag

SEQ ID NO: 1159553 - DNA, 15 bp, Homo sapiens
ggctggagtacagta

SEQ ID NO: 1159554 - DNA, 15 bp, Homo sapiens
cttttgcccaggctg

SEQ ID NO: 1159555 - DNA, 15 bp, Homo sapiens
tcttttgcccaggct

SEQ ID NO: 1159556 - DNA, 15 bp, Homo sapiens
ctcttttgcccaggc

SEQ ID NO: 1159557 - DNA, 15 bp, Homo sapiens
gctcttttgcccagg

SEQ ID NO: 1159558 - DNA, 15 bp, Homo sapiens
tgctcttttgcccag

SEQ ID NO: 1159559 - DNA, 15 bp, Homo sapiens
ttgctcttttgccca

SEQ ID NO: 1159560 - DNA, 15 bp, Homo sapiens
tttgctcttttgccc

SEQ ID NO: 1159561 - DNA, 15 bp, Homo sapiens
ttttgctcttttgcc

SEQ ID NO: 1159562 - DNA, 15 bp, Homo sapiens
gttttgctcttttgc

SEQ ID NO: 1159563 - DNA, 15 bp, Homo sapiens
agttttgctcttttg

SEQ ID NO: 1159564 - DNA, 15 bp, Homo sapiens
gagttttgctctttt

SEQ ID NO: 1159565 - DNA, 15 bp, Homo sapiens
ggagttttgctcttt

SEQ ID NO: 1159566 - DNA, 15 bp, Homo sapiens
tgagatggagttttg

SEQ ID NO: 1159567 - DNA, 15 bp, Homo sapiens
tttattttgagatgg

SEQ ID NO: 1159568 - DNA, 15 bp, Homo sapiens
ttttattttgagatg

SEQ ID NO: 1159569 - DNA, 15 bp, Homo sapiens
tttttattttgagat

SEQ ID NO: 1159570 - DNA, 15 bp, Homo sapiens
atttttattttgaga

SEQ ID NO: 1159571 - DNA, 15 bp, Homo sapiens
tatttttattttgag

SEQ ID NO: 1159572 - DNA, 15 bp, Homo sapiens
ttatttttattttga

SEQ ID NO: 1159573 - DNA, 15 bp, Homo sapiens
tttatttttattttg

SEQ ID NO: 1159574 - DNA, 15 bp, Homo sapiens
ttttttatttttatt

SEQ ID NO: 1159575 - DNA, 15 bp, Homo sapiens
attttttatttttat

SEQ ID NO: 1159576 - DNA, 15 bp, Homo sapiens
tattttttattttta

SEQ ID NO: 1159577 - DNA, 15 bp, Homo sapiens
ttattttttattttt

SEQ ID NO: 1159578 - DNA, 15 bp, Homo sapiens
tttattttttatttt

SEQ ID NO: 1159579 - DNA, 15 bp, Homo sapiens
ttttattttttattt

SEQ ID NO: 1159580 - DNA, 15 bp, Homo sapiens
tttttattttttatt

SEQ ID NO: 1159581 - DNA, 15 bp, Homo sapiens
ctttttattttttat

SEQ ID NO: 1159582 - DNA, 15 bp, Homo sapiens
gctttttatttttta

SEQ ID NO: 1159583 - DNA, 15 bp, Homo sapiens
ggctttttatttttt

SEQ ID NO: 1159584 - DNA, 15 bp, Homo sapiens
tggctttttattttt

SEQ ID NO: 1159585 - DNA, 15 bp, Homo sapiens
ctggctttttatttt

SEQ ID NO: 1159586 - DNA, 15 bp, Homo sapiens
cctggctttttattt

SEQ ID NO: 1159587 - DNA, 15 bp, Homo sapiens
acctggctttttatt

SEQ ID NO: 1159588 - DNA, 15 bp, Homo sapiens
cacctggctttttat

SEQ ID NO: 1159589 - DNA, 15 bp, Homo sapiens
gcacctggcttttta

SEQ ID NO: 1159590 - DNA, 15 bp, Homo sapiens
tgcacctggcttttt

SEQ ID NO: 1159591 - DNA, 15 bp, Homo sapiens
ctgcacctggctttt

SEQ ID NO: 1159592 - DNA, 15 bp, Homo sapiens
actgcacctggcttt

SEQ ID NO: 1159593 - DNA, 15 bp, Homo sapiens
gactgcacctggctt

SEQ ID NO: 1159594 - DNA, 15 bp, Homo sapiens
cgactgcacctggct

SEQ ID NO: 1159595 - DNA, 15 bp, Homo sapiens
gcgactgcacctggc

SEQ ID NO: 1159596 - DNA, 15 bp, Homo sapiens
agcgactgcacctgg

SEQ ID NO: 1159597 - DNA, 15 bp, Homo sapiens
gagcgactgcacctg

SEQ ID NO: 1159598 - DNA, 15 bp, Homo sapiens
tgagcgactgcacct

SEQ ID NO: 1159599 - DNA, 15 bp, Homo sapiens
gtgagcgactgcacc

SEQ ID NO: 1159600 - DNA, 15 bp, Homo sapiens
cgtgagcgactgcac

SEQ ID NO: 1159601 - DNA, 15 bp, Homo sapiens
gcgtgagcgactgca

SEQ ID NO: 1159602 - DNA, 15 bp, Homo sapiens
ggcgtgagcgactgc

SEQ ID NO: 1159603 - DNA, 15 bp, Homo sapiens
aggcgtgagcgactg

SEQ ID NO: 1159604 - DNA, 15 bp, Homo sapiens
caggcgtgagcgact

SEQ ID NO: 1159605 - DNA, 15 bp, Homo sapiens
acaggcgtgagcgac

SEQ ID NO: 1159606 - DNA, 15 bp, Homo sapiens
tacaggcgtgagcga

SEQ ID NO: 1159607 - DNA, 15 bp, Homo sapiens
ttacaggcgtgagcg

SEQ ID NO: 1159608 - DNA, 15 bp, Homo sapiens
tcttgtgatccgccc

SEQ ID NO: 1159609 - DNA, 15 bp, Homo sapiens
atcttgtgatccgcc

SEQ ID NO: 1159610 - DNA, 15 bp, Homo sapiens
gatcttgtgatccgc

SEQ ID NO: 1159611 - DNA, 15 bp, Homo sapiens
tgatcttgtgatccg

SEQ ID NO: 1159612 - DNA, 15 bp, Homo sapiens
ctgatcttgtgatcc

SEQ ID NO: 1159613 - DNA, 15 bp, Homo sapiens
cctgatcttgtgatc

SEQ ID NO: 1159614 - DNA, 15 bp, Homo sapiens
tcctgatcttgtgat

SEQ ID NO: 1159615 - DNA, 15 bp, Homo sapiens
ctcctgatcttgtga

SEQ ID NO: 1159616 - DNA, 15 bp, Homo sapiens
tctcctgatcttgtg

SEQ ID NO: 1159617 - DNA, 15 bp, Homo sapiens
atctcctgatcttgt

SEQ ID NO: 1159618 - DNA, 15 bp, Homo sapiens
gatctcctgatcttg

SEQ ID NO: 1159619 - DNA, 15 bp, Homo sapiens
cgatctcctgatctt

SEQ ID NO: 1159620 - DNA, 15 bp, Homo sapiens
tcgatctcctgatct

SEQ ID NO: 1159621 - DNA, 15 bp, Homo sapiens
ctcgatctcctgatc

SEQ ID NO: 1159622 - DNA, 15 bp, Homo sapiens
tctcgatctcctgat

SEQ ID NO: 1159623 - DNA, 15 bp, Homo sapiens
gcccagctacttttt

SEQ ID NO: 1159624 - DNA, 15 bp, Homo sapiens
tgcccagctactttt

SEQ ID NO: 1159625 - DNA, 15 bp, Homo sapiens
atgcccagctacttt

SEQ ID NO: 1159626 - DNA, 15 bp, Homo sapiens
catgcccagctactt

SEQ ID NO: 1159627 - DNA, 15 bp, Homo sapiens
ccatgcccagctact

SEQ ID NO: 1159628 - DNA, 15 bp, Homo sapiens
accatgcccagctac

SEQ ID NO: 1159629 - DNA, 15 bp, Homo sapiens
cctcctgggttcacg

SEQ ID NO: 1159630 - DNA, 15 bp, Homo sapiens
caagctccgcctcct

SEQ ID NO: 1159631 - DNA, 15 bp, Homo sapiens
cggttcactgcaagc

SEQ ID NO: 1159632 - DNA, 15 bp, Homo sapiens
tcggttcactgcaag

SEQ ID NO: 1159633 - DNA, 15 bp, Homo sapiens
atcggttcactgcaa

SEQ ID NO: 1159634 - DNA, 15 bp, Homo sapiens
tatcggttcactgca

SEQ ID NO: 1159635 - DNA, 15 bp, Homo sapiens
atatcggttcactgc

SEQ ID NO: 1159636 - DNA, 15 bp, Homo sapiens
catatcggttcactg

SEQ ID NO: 1159637 - DNA, 15 bp, Homo sapiens
ccatatcggttcact

SEQ ID NO: 1159638 - DNA, 15 bp, Homo sapiens
gccatatcggttcac

SEQ ID NO: 1159639 - DNA, 15 bp, Homo sapiens
cgccatatcggttca

SEQ ID NO: 1159640 - DNA, 15 bp, Homo sapiens
gcgccatatcggttc

SEQ ID NO: 1159641 - DNA, 15 bp, Homo sapiens
ggcgccatatcggtt

SEQ ID NO: 1159642 - DNA, 15 bp, Homo sapiens
tggcgccatatcggt

SEQ ID NO: 1159643 - DNA, 15 bp, Homo sapiens
gtggcgccatatcgg

SEQ ID NO: 1159644 - DNA, 15 bp, Homo sapiens
agtggcgccatatcg

SEQ ID NO: 1159645 - DNA, 15 bp, Homo sapiens
cagtggcgccatatc

SEQ ID NO: 1159646 - DNA, 15 bp, Homo sapiens
gcagtggcgccatat

SEQ ID NO: 1159647 - DNA, 15 bp, Homo sapiens
tgcagtggcgccata

SEQ ID NO: 1159648 - DNA, 15 bp, Homo sapiens
cttgcctaggctgga

SEQ ID NO: 1159649 - DNA, 15 bp, Homo sapiens
tcttgcctaggctgg

SEQ ID NO: 1159650 - DNA, 15 bp, Homo sapiens
ctcttgcctaggctg

SEQ ID NO: 1159651 - DNA, 15 bp, Homo sapiens
actcttgcctaggct

SEQ ID NO: 1159652 - DNA, 15 bp, Homo sapiens
cactcttgcctaggc

SEQ ID NO: 1159653 - DNA, 15 bp, Homo sapiens
gcactcttgcctagg

SEQ ID NO: 1159654 - DNA, 15 bp, Homo sapiens
cgcactcttgcctag

SEQ ID NO: 1159655 - DNA, 15 bp, Homo sapiens
tcgcactcttgccta

SEQ ID NO: 1159656 - DNA, 15 bp, Homo sapiens
ctcgcactcttgcct

SEQ ID NO: 1159657 - DNA, 15 bp, Homo sapiens
tctcgcactcttgcc

SEQ ID NO: 1159658 - DNA, 15 bp, Homo sapiens
gtctcgcactcttgc

SEQ ID NO: 1159659 - DNA, 15 bp, Homo sapiens
agtctcgcactcttg

SEQ ID NO: 1159660 - DNA, 15 bp, Homo sapiens
gagtctcgcactctt

SEQ ID NO: 1159661 - DNA, 15 bp, Homo sapiens
ggagtctcgcactct

SEQ ID NO: 1159662 - DNA, 15 bp, Homo sapiens
tggagtctcgcactc

SEQ ID NO: 1159663 - DNA, 15 bp, Homo sapiens
atggagtctcgcact

SEQ ID NO: 1159664 - DNA, 15 bp, Homo sapiens
gatggagtctcgcac

SEQ ID NO: 1159665 - DNA, 15 bp, Homo sapiens
agatggagtctcgca

SEQ ID NO: 1159666 - DNA, 15 bp, Homo sapiens
aattttttttgagat

SEQ ID NO: 1159667 - DNA, 15 bp, Homo sapiens
attaattttttttga

SEQ ID NO: 1159668 - DNA, 15 bp, Homo sapiens
tattaattttttttg

SEQ ID NO: 1159669 - DNA, 15 bp, Homo sapiens
ttattaatttttttt

SEQ ID NO: 1159670 - DNA, 15 bp, Homo sapiens
tttattaattttttt

SEQ ID NO: 1159671 - DNA, 15 bp, Homo sapiens
atttattaatttttt

SEQ ID NO: 1159672 - DNA, 15 bp, Homo sapiens
tatttattaattttt

SEQ ID NO: 1159673 - DNA, 15 bp, Homo sapiens
ttatttattaatttt

SEQ ID NO: 1159674 - DNA, 15 bp, Homo sapiens
tttatttattaattt

SEQ ID NO: 1159675 - DNA, 15 bp, Homo sapiens
ttttatttattaatt

SEQ ID NO: 1159676 - DNA, 15 bp, Homo sapiens
tttttatttattaat

SEQ ID NO: 1159677 - DNA, 15 bp, Homo sapiens
gtttttatttattaa

SEQ ID NO: 1159678 - DNA, 15 bp, Homo sapiens
tgtttttatttatta

SEQ ID NO: 1159679 - DNA, 15 bp, Homo sapiens
ttgtttttatttatt

SEQ ID NO: 1159680 - DNA, 15 bp, Homo sapiens
tttgtttttatttat

SEQ ID NO: 1159681 - DNA, 15 bp, Homo sapiens
ttttgtttttattta

SEQ ID NO: 1159682 - DNA, 15 bp, Homo sapiens
tttttgtttttattt

SEQ ID NO: 1159683 - DNA, 15 bp, Homo sapiens
ctttttgtttttatt

SEQ ID NO: 1159684 - DNA, 15 bp, Homo sapiens
tctttttgtttttat

SEQ ID NO: 1159685 - DNA, 15 bp, Homo sapiens
ttctttttgttttta

SEQ ID NO: 1159686 - DNA, 15 bp, Homo sapiens
tttctttttgttttt

SEQ ID NO: 1159687 - DNA, 15 bp, Homo sapiens
ttttctttttgtttt

SEQ ID NO: 1159688 - DNA, 15 bp, Homo sapiens
tttatttttcttttt

SEQ ID NO: 1159689 - DNA, 15 bp, Homo sapiens
ttttatttttctttt

SEQ ID NO: 1159690 - DNA, 15 bp, Homo sapiens
attttatttttcttt

SEQ ID NO: 1159691 - DNA, 15 bp, Homo sapiens
tattttatttttctt

SEQ ID NO: 1159692 - DNA, 15 bp, Homo sapiens
ttattttatttttct

SEQ ID NO: 1159693 - DNA, 15 bp, Homo sapiens
tttattttatttttc

SEQ ID NO: 1159694 - DNA, 15 bp, Homo sapiens
atttattttatttta

SEQ ID NO: 1159695 - DNA, 15 bp, Homo sapiens
aatttattttatttt

SEQ ID NO: 1159696 - DNA, 15 bp, Homo sapiens
caatttattttattt

SEQ ID NO: 1159697 - DNA, 15 bp, Homo sapiens
ccaatttattttatt

SEQ ID NO: 1159698 - DNA, 15 bp, Homo sapiens
gccaatttattttat

SEQ ID NO: 1159699 - DNA, 15 bp, Homo sapiens
tgccaatttatttta

SEQ ID NO: 1159700 - DNA, 15 bp, Homo sapiens
ctgccaatttatttt

SEQ ID NO: 1159701 - DNA, 15 bp, Homo sapiens
tctgccaatttattt

SEQ ID NO: 1159702 - DNA, 15 bp, Homo sapiens
ctctgccaatttatt

SEQ ID NO: 1159703 - DNA, 15 bp, Homo sapiens
gctctgccaatttat

SEQ ID NO: 1159704 - DNA, 15 bp, Homo sapiens
agctctgccaattta

SEQ ID NO: 1159705 - DNA, 15 bp, Homo sapiens
aagctctgccaattt

SEQ ID NO: 1159706 - DNA, 15 bp, Homo sapiens
aaagctctgccaatt

SEQ ID NO: 1159707 - DNA, 15 bp, Homo sapiens
gaaagctctgccaat

SEQ ID NO: 1159708 - DNA, 15 bp, Homo sapiens
ggaaagctctgccaa

SEQ ID NO: 1159709 - DNA, 15 bp, Homo sapiens
aggaaagctctgcca

SEQ ID NO: 1159710 - DNA, 15 bp, Homo sapiens
gaggaaagctctgcc

SEQ ID NO: 1159711 - DNA, 15 bp, Homo sapiens
tgaggaaagctctgc

SEQ ID NO: 1159712 - DNA, 15 bp, Homo sapiens
gtgaggaaagctctg

SEQ ID NO: 1159713 - DNA, 15 bp, Homo sapiens
tgtgaggaaagctct

SEQ ID NO: 1159714 - DNA, 15 bp, Homo sapiens
gtgtgaggaaagctc

SEQ ID NO: 1159715 - DNA, 15 bp, Homo sapiens
ggtgtgaggaaagct

SEQ ID NO: 1159716 - DNA, 15 bp, Homo sapiens
gggtgtgaggaaagc

SEQ ID NO: 1159717 - DNA, 15 bp, Homo sapiens
tgggtgtgaggaaag

SEQ ID NO: 1159718 - DNA, 15 bp, Homo sapiens
ttgggtgtgaggaaa

SEQ ID NO: 1159719 - DNA, 15 bp, Homo sapiens
cttgggtgtgaggaa

SEQ ID NO: 1159720 - DNA, 15 bp, Homo sapiens
acttgggtgtgagga

SEQ ID NO: 1159721 - DNA, 15 bp, Homo sapiens
aacttgggtgtgagg

SEQ ID NO: 1159722 - DNA, 15 bp, Homo sapiens
gaacttgggtgtgag

SEQ ID NO: 1159723 - DNA, 15 bp, Homo sapiens
ggaacttgggtgtga

SEQ ID NO: 1159724 - DNA, 15 bp, Homo sapiens
tggaacttgggtgtg

SEQ ID NO: 1159725 - DNA, 15 bp, Homo sapiens
atggaacttgggtgt

SEQ ID NO: 1159726 - DNA, 15 bp, Homo sapiens
gatggaacttgggtg

SEQ ID NO: 1159727 - DNA, 15 bp, Homo sapiens
agatggaacttgggt

SEQ ID NO: 1159728 - DNA, 15 bp, Homo sapiens
aagatggaacttggg

SEQ ID NO: 1159729 - DNA, 15 bp, Homo sapiens
caagatggaacttgg

SEQ ID NO: 1159730 - DNA, 15 bp, Homo sapiens
tcaagatggaacttg

SEQ ID NO: 1159731 - DNA, 15 bp, Homo sapiens
ttcaagatggaactt

SEQ ID NO: 1159732 - DNA, 15 bp, Homo sapiens
tttcaagatggaact

SEQ ID NO: 1159733 - DNA, 15 bp, Homo sapiens
atttcaagatggaac

SEQ ID NO: 1159734 - DNA, 15 bp, Homo sapiens
gatttcaagatggaa

SEQ ID NO: 1159735 - DNA, 15 bp, Homo sapiens
agatttcaagatgga

SEQ ID NO: 1159736 - DNA, 15 bp, Homo sapiens
cagatttcaagatgg

SEQ ID NO: 1159737 - DNA, 15 bp, Homo sapiens
tcagatttcaagatg

SEQ ID NO: 1159738 - DNA, 15 bp, Homo sapiens
ttcagatttcaagat

SEQ ID NO: 1159739 - DNA, 15 bp, Homo sapiens
gttcagatttcaaga

SEQ ID NO: 1159740 - DNA, 15 bp, Homo sapiens
tgttcagatttcaag

SEQ ID NO: 1159741 - DNA, 15 bp, Homo sapiens
atgttcagatttcaa

SEQ ID NO: 1159742 - DNA, 15 bp, Homo sapiens
catgttcagatttca

SEQ ID NO: 1159743 - DNA, 15 bp, Homo sapiens
acatgttcagatttc

SEQ ID NO: 1159744 - DNA, 15 bp, Homo sapiens
gacatgttcagattt

SEQ ID NO: 1159745 - DNA, 15 bp, Homo sapiens
agacatgttcagatt

SEQ ID NO: 1159746 - DNA, 15 bp, Homo sapiens
tagacatgttcagat

SEQ ID NO: 1159747 - DNA, 15 bp, Homo sapiens
atagacatgttcaga

SEQ ID NO: 1159748 - DNA, 15 bp, Homo sapiens
tatagacatgttcag

SEQ ID NO: 1159749 - DNA, 15 bp, Homo sapiens
ttatagacatgttca

SEQ ID NO: 1159750 - DNA, 15 bp, Homo sapiens
tttatagacatgttc

SEQ ID NO: 1159751 - DNA, 15 bp, Homo sapiens
ctttatagacatgtt

SEQ ID NO: 1159752 - DNA, 15 bp, Homo sapiens
tctttatagacatgt

SEQ ID NO: 1159753 - DNA, 15 bp, Homo sapiens
gtctttatagacatg

SEQ ID NO: 1159754 - DNA, 15 bp, Homo sapiens
agtctttatagacat

SEQ ID NO: 1159755 - DNA, 15 bp, Homo sapiens
cagtctttatagaca

SEQ ID NO: 1159756 - DNA, 15 bp, Homo sapiens
ccagtctttatagac

SEQ ID NO: 1159757 - DNA, 15 bp, Homo sapiens
accagtctttataga

SEQ ID NO: 1159758 - DNA, 15 bp, Homo sapiens
aaccagtctttatag

SEQ ID NO: 1159759 - DNA, 15 bp, Homo sapiens
caaccagtctttata

SEQ ID NO: 1159760 - DNA, 15 bp, Homo sapiens
tcaaccagtctttat

SEQ ID NO: 1159761 - DNA, 15 bp, Homo sapiens
gtcaaccagtcttta

SEQ ID NO: 1159762 - DNA, 15 bp, Homo sapiens
agtcaaccagtcttt

SEQ ID NO: 1159763 - DNA, 15 bp, Homo sapiens
gagtcaaccagtctt

SEQ ID NO: 1159764 - DNA, 15 bp, Homo sapiens
ggagtcaaccagtct

SEQ ID NO: 1159765 - DNA, 15 bp, Homo sapiens
cggagtcaaccagtc

SEQ ID NO: 1159766 - DNA, 15 bp, Homo sapiens
ccggagtcaaccagt

SEQ ID NO: 1159767 - DNA, 15 bp, Homo sapiens
accggagtcaaccag

SEQ ID NO: 1159768 - DNA, 15 bp, Homo sapiens
caccggagtcaacca

SEQ ID NO: 1159769 - DNA, 15 bp, Homo sapiens
tcaccggagtcaacc

SEQ ID NO: 1159770 - DNA, 15 bp, Homo sapiens
ttcaccggagtcaac

SEQ ID NO: 1159771 - DNA, 15 bp, Homo sapiens
cttcaccggagtcaa

SEQ ID NO: 1159772 - DNA, 15 bp, Homo sapiens
gcttcaccggagtca

SEQ ID NO: 1159773 - DNA, 15 bp, Homo sapiens
ggcttcaccggagtc

SEQ ID NO: 1159774 - DNA, 15 bp, Homo sapiens
tggcttcaccggagt

SEQ ID NO: 1159775 - DNA, 15 bp, Homo sapiens
ttggcttcaccggag

SEQ ID NO: 1159776 - DNA, 15 bp, Homo sapiens
attggcttcaccgga

SEQ ID NO: 1159777 - DNA, 15 bp, Homo sapiens
tattggcttcaccgg

SEQ ID NO: 1159778 - DNA, 15 bp, Homo sapiens
atattggcttcaccg

SEQ ID NO: 1159779 - DNA, 15 bp, Homo sapiens
gatattggcttcacc

SEQ ID NO: 1159780 - DNA, 15 bp, Homo sapiens
tgatattggcttcac

SEQ ID NO: 1159781 - DNA, 15 bp, Homo sapiens
gtgatattggcttca

SEQ ID NO: 1159782 - DNA, 15 bp, Homo sapiens
tgtgatattggcttc

SEQ ID NO: 1159783 - DNA, 15 bp, Homo sapiens
atgtgatattggctt

SEQ ID NO: 1159784 - DNA, 15 bp, Homo sapiens
catgtgatattggct

SEQ ID NO: 1159785 - DNA, 15 bp, Homo sapiens
gcatgtgatattggc

SEQ ID NO: 1159786 - DNA, 15 bp, Homo sapiens
agcatgtgatattgg

SEQ ID NO: 1159787 - DNA, 15 bp, Homo sapiens
gagcatgtgatattg

SEQ ID NO: 1159788 - DNA, 15 bp, Homo sapiens
agagcatgtgatatt

SEQ ID NO: 1159789 - DNA, 15 bp, Homo sapiens
cagagcatgtgatat

SEQ ID NO: 1159790 - DNA, 15 bp, Homo sapiens
tcagagcatgtgata

SEQ ID NO: 1159791 - DNA, 15 bp, Homo sapiens
ttcagagcatgtgat

SEQ ID NO: 1159792 - DNA, 15 bp, Homo sapiens
tttcagagcatgtga

SEQ ID NO: 1159793 - DNA, 15 bp, Homo sapiens
ttttcagagcatgtg

SEQ ID NO: 1159794 - DNA, 15 bp, Homo sapiens
attttcagagcatgt

SEQ ID NO: 1159795 - DNA, 15 bp, Homo sapiens
cattttcagagcatg

SEQ ID NO: 1159796 - DNA, 15 bp, Homo sapiens
acattttcagagcat

SEQ ID NO: 1159797 - DNA, 15 bp, Homo sapiens
tacattttcagagca

SEQ ID NO: 1159798 - DNA, 15 bp, Homo sapiens
atacattttcagagc

SEQ ID NO: 1159799 - DNA, 15 bp, Homo sapiens
catacattttcagag

SEQ ID NO: 1159800 - DNA, 15 bp, Homo sapiens
tcatacattttcaga

SEQ ID NO: 1159801 - DNA, 15 bp, Homo sapiens
atcatacattttcag

SEQ ID NO: 1159802 - DNA, 15 bp, Homo sapiens
gatcatacattttca

SEQ ID NO: 1159803 - DNA, 15 bp, Homo sapiens
tgatcatacattttc

SEQ ID NO: 1159804 - DNA, 15 bp, Homo sapiens
ctgatcatacatttt

SEQ ID NO: 1159805 - DNA, 15 bp, Homo sapiens
tctgatcatacattt

SEQ ID NO: 1159806 - DNA, 15 bp, Homo sapiens
gtctgatcatacatt

SEQ ID NO: 1159807 - DNA, 15 bp, Homo sapiens
agtctgatcatacat

SEQ ID NO: 1159808 - DNA, 15 bp, Homo sapiens
gagtctgatcataca

SEQ ID NO: 1159809 - DNA, 15 bp, Homo sapiens
tgagtctgatcatac

SEQ ID NO: 1159810 - DNA, 15 bp, Homo sapiens
ctgagtctgatcata

SEQ ID NO: 1159811 - DNA, 15 bp, Homo sapiens
tctgagtctgatcat

SEQ ID NO: 1159812 - DNA, 15 bp, Homo sapiens
ttctgagtctgatca

SEQ ID NO: 1159813 - DNA, 15 bp, Homo sapiens
tttctgagtctgatc

SEQ ID NO: 1159814 - DNA, 15 bp, Homo sapiens
ctttctgagtctgat

SEQ ID NO: 1159815 - DNA, 15 bp, Homo sapiens
tctttctgagtctga

SEQ ID NO: 1159816 - DNA, 15 bp, Homo sapiens
ctctttctgagtctg

SEQ ID NO: 1159817 - DNA, 15 bp, Homo sapiens
tctctttctgagtct

SEQ ID NO: 1159818 - DNA, 15 bp, Homo sapiens
gtctctttctgagtc

SEQ ID NO: 1159819 - DNA, 15 bp, Homo sapiens
tgtctctttctgagt

SEQ ID NO: 1159820 - DNA, 15 bp, Homo sapiens
gtgtctctttctgag

SEQ ID NO: 1159821 - DNA, 15 bp, Homo sapiens
agtgtctctttctga

SEQ ID NO: 1159822 - DNA, 15 bp, Homo sapiens
gagtgtctctttctg

SEQ ID NO: 1159823 - DNA, 15 bp, Homo sapiens
tgagtgtctctttct

SEQ ID NO: 1159824 - DNA, 15 bp, Homo sapiens
gtgagtgtctctttc

SEQ ID NO: 1159825 - DNA, 15 bp, Homo sapiens
ggtgagtgtctcttt

SEQ ID NO: 1159826 - DNA, 15 bp, Homo sapiens
aggtgagtgtctctt

SEQ ID NO: 1159827 - DNA, 15 bp, Homo sapiens
caggtgagtgtctct

SEQ ID NO: 1159828 - DNA, 15 bp, Homo sapiens
gcaggtgagtgtctc

SEQ ID NO: 1159829 - DNA, 15 bp, Homo sapiens
tgcaggtgagtgtct

SEQ ID NO: 1159830 - DNA, 15 bp, Homo sapiens
ttgcaggtgagtgtc

SEQ ID NO: 1159831 - DNA, 15 bp, Homo sapiens
tttgcaggtgagtgt

SEQ ID NO: 1159832 - DNA, 15 bp, Homo sapiens
atttgcaggtgagtg

SEQ ID NO: 1159833 - DNA, 15 bp, Homo sapiens
catttgcaggtgagt

SEQ ID NO: 1159834 - DNA, 15 bp, Homo sapiens
tcatttgcaggtgag

SEQ ID NO: 1159835 - DNA, 15 bp, Homo sapiens
ctcatttgcaggtga

SEQ ID NO: 1159836 - DNA, 15 bp, Homo sapiens
tctcatttgcaggtg

SEQ ID NO: 1159837 - DNA, 15 bp, Homo sapiens
gtctcatttgcaggt

SEQ ID NO: 1159838 - DNA, 15 bp, Homo sapiens
tgtctcatttgcagg

SEQ ID NO: 1159839 - DNA, 15 bp, Homo sapiens
ctgtctcatttgcag

SEQ ID NO: 1159840 - DNA, 15 bp, Homo sapiens
cctgtctcatttgca

SEQ ID NO: 1159841 - DNA, 15 bp, Homo sapiens
ccctgtctcatttgc

SEQ ID NO: 1159842 - DNA, 15 bp, Homo sapiens
gccctgtctcatttg

SEQ ID NO: 1159843 - DNA, 15 bp, Homo sapiens
agccctgtctcattt

SEQ ID NO: 1159844 - DNA, 15 bp, Homo sapiens
cagccctgtctcatt

SEQ ID NO: 1159845 - DNA, 15 bp, Homo sapiens
acagccctgtctcat

SEQ ID NO: 1159846 - DNA, 15 bp, Homo sapiens
aacagccctgtctca

SEQ ID NO: 1159847 - DNA, 15 bp, Homo sapiens
taacagccctgtctc

SEQ ID NO: 1159848 - DNA, 15 bp, Homo sapiens
ctaacagccctgtct

SEQ ID NO: 1159849 - DNA, 15 bp, Homo sapiens
actaacagccctgtc

SEQ ID NO: 1159850 - DNA, 15 bp, Homo sapiens
cactaacagccctgt

SEQ ID NO: 1159851 - DNA, 15 bp, Homo sapiens
ccactaacagccctg

SEQ ID NO: 1159852 - DNA, 15 bp, Homo sapiens
cccactaacagccct

SEQ ID NO: 1159853 - DNA, 15 bp, Homo sapiens
ccccactaacagccc

SEQ ID NO: 1159854 - DNA, 15 bp, Homo sapiens
tccccactaacagcc

SEQ ID NO: 1159855 - DNA, 15 bp, Homo sapiens
ctccccactaacagc

SEQ ID NO: 1159856 - DNA, 15 bp, Homo sapiens
tctccccactaacag

SEQ ID NO: 1159857 - DNA, 15 bp, Homo sapiens
atctccccactaaca

SEQ ID NO: 1159858 - DNA, 15 bp, Homo sapiens
tatctccccactaac

SEQ ID NO: 1159859 - DNA, 15 bp, Homo sapiens
ttatctccccactaa

SEQ ID NO: 1159860 - DNA, 15 bp, Homo sapiens
tttatctccccacta

SEQ ID NO: 1159861 - DNA, 15 bp, Homo sapiens
ctttatctccccact

SEQ ID NO: 1159862 - DNA, 15 bp, Homo sapiens
tctttatctccccac

SEQ ID NO: 1159863 - DNA, 15 bp, Homo sapiens
gtctttatctcccca

SEQ ID NO: 1159864 - DNA, 15 bp, Homo sapiens
ggtctttatctcccc

SEQ ID NO: 1159865 - DNA, 15 bp, Homo sapiens
aggtctttatctccc

SEQ ID NO: 1159866 - DNA, 15 bp, Homo sapiens
gaggtctttatctcc

SEQ ID NO: 1159867 - DNA, 15 bp, Homo sapiens
tgaggtctttatctc

SEQ ID NO: 1159868 - DNA, 15 bp, Homo sapiens
ctgaggtctttatct

SEQ ID NO: 1159869 - DNA, 15 bp, Homo sapiens
actgaggtctttatc

SEQ ID NO: 1159870 - DNA, 15 bp, Homo sapiens
cactgaggtctttat

SEQ ID NO: 1159871 - DNA, 15 bp, Homo sapiens
tcactgaggtcttta

SEQ ID NO: 1159872 - DNA, 15 bp, Homo sapiens
gtcactgaggtcttt

SEQ ID NO: 1159873 - DNA, 15 bp, Homo sapiens
tgtcactgaggtctt

SEQ ID NO: 1159874 - DNA, 15 bp, Homo sapiens
ttgtcactgaggtct

SEQ ID NO: 1159875 - DNA, 15 bp, Homo sapiens
cttgtcactgaggtc

SEQ ID NO: 1159876 - DNA, 15 bp, Homo sapiens
gcttgtcactgaggt

SEQ ID NO: 1159877 - DNA, 15 bp, Homo sapiens
tgcttgtcactgagg

SEQ ID NO: 1159878 - DNA, 15 bp, Homo sapiens
ctgcttgtcactgag

SEQ ID NO: 1159879 - DNA, 15 bp, Homo sapiens
tctgcttgtcactga

SEQ ID NO: 1159880 - DNA, 15 bp, Homo sapiens
ctctgcttgtcactg

SEQ ID NO: 1159881 - DNA, 15 bp, Homo sapiens
actctgcttgtcact

SEQ ID NO: 1159882 - DNA, 15 bp, Homo sapiens
gactctgcttgtcac

SEQ ID NO: 1159883 - DNA, 15 bp, Homo sapiens
agactctgcttgtca

SEQ ID NO: 1159884 - DNA, 15 bp, Homo sapiens
cagactctgcttgtc

SEQ ID NO: 1159885 - DNA, 15 bp, Homo sapiens
ccagactctgcttgt

SEQ ID NO: 1159886 - DNA, 15 bp, Homo sapiens
cccagactctgcttg

SEQ ID NO: 1159887 - DNA, 15 bp, Homo sapiens
gcccagactctgctt

SEQ ID NO: 1159888 - DNA, 15 bp, Homo sapiens
ggcccagactctgct

SEQ ID NO: 1159889 - DNA, 15 bp, Homo sapiens
gggcccagactctgc

SEQ ID NO: 1159890 - DNA, 15 bp, Homo sapiens
agggcccagactctg

SEQ ID NO: 1159891 - DNA, 15 bp, Homo sapiens
cagggcccagactct

SEQ ID NO: 1159892 - DNA, 15 bp, Homo sapiens
gcagggcccagactc

SEQ ID NO: 1159893 - DNA, 15 bp, Homo sapiens
agcagggcccagact

SEQ ID NO: 1159894 - DNA, 15 bp, Homo sapiens
gagcagggcccagac

SEQ ID NO: 1159895 - DNA, 15 bp, Homo sapiens
agagcagggcccaga

SEQ ID NO: 1159896 - DNA, 15 bp, Homo sapiens
aagagcagggcccag

SEQ ID NO: 1159897 - DNA, 15 bp, Homo sapiens
caagagcagggccca

SEQ ID NO: 1159898 - DNA, 15 bp, Homo sapiens
acaagagcagggccc

SEQ ID NO: 1159899 - DNA, 15 bp, Homo sapiens
aacaagagcagggcc

SEQ ID NO: 1159900 - DNA, 15 bp, Homo sapiens
gaacaagagcagggc

SEQ ID NO: 1159901 - DNA, 15 bp, Homo sapiens
tgaacaagagcaggg

SEQ ID NO: 1159902 - DNA, 15 bp, Homo sapiens
ctgaacaagagcagg

SEQ ID NO: 1159903 - DNA, 15 bp, Homo sapiens
gctgaacaagagcag

SEQ ID NO: 1159904 - DNA, 15 bp, Homo sapiens
agctgaacaagagca

SEQ ID NO: 1159905 - DNA, 15 bp, Homo sapiens
cagctgaacaagagc

SEQ ID NO: 1159906 - DNA, 15 bp, Homo sapiens
acagctgaacaagag

SEQ ID NO: 1159907 - DNA, 15 bp, Homo sapiens
gacagctgaacaaga

SEQ ID NO: 1159908 - DNA, 15 bp, Homo sapiens
ggacagctgaacaag

SEQ ID NO: 1159909 - DNA, 15 bp, Homo sapiens
gggacagctgaacaa

SEQ ID NO: 1159910 - DNA, 15 bp, Homo sapiens
cgggacagctgaaca

SEQ ID NO: 1159911 - DNA, 15 bp, Homo sapiens
acgggacagctgaac

SEQ ID NO: 1159912 - DNA, 15 bp, Homo sapiens
cacgggacagctgaa

SEQ ID NO: 1159913 - DNA, 15 bp, Homo sapiens
ccacgggacagctga

SEQ ID NO: 1159914 - DNA, 15 bp, Homo sapiens
gccacgggacagctg

SEQ ID NO: 1159915 - DNA, 15 bp, Homo sapiens
ggccacgggacagct

SEQ ID NO: 1159916 - DNA, 15 bp, Homo sapiens
gggccacgggacagc

SEQ ID NO: 1159917 - DNA, 15 bp, Homo sapiens
ggggccacgggacag

SEQ ID NO: 1159918 - DNA, 15 bp, Homo sapiens
tggggccacgggaca

SEQ ID NO: 1159919 - DNA, 15 bp, Homo sapiens
ctggggccacgggac

SEQ ID NO: 1159920 - DNA, 15 bp, Homo sapiens
ggctggggccacggg

SEQ ID NO: 1159921 - DNA, 15 bp, Homo sapiens
tggctggggccacgg

SEQ ID NO: 1159922 - DNA, 15 bp, Homo sapiens
gtggctggggccacg

SEQ ID NO: 1159923 - DNA, 15 bp, Homo sapiens
ggtggctggggccac

SEQ ID NO: 1159924 - DNA, 15 bp, Homo sapiens
gggtggctggggcca

SEQ ID NO: 1159925 - DNA, 15 bp, Homo sapiens
tgggtggctggggcc

SEQ ID NO: 1159926 - DNA, 15 bp, Homo sapiens
ctgggtggctggggc

SEQ ID NO: 1159927 - DNA, 15 bp, Homo sapiens
tctgggtggctgggg

SEQ ID NO: 1159928 - DNA, 15 bp, Homo sapiens
ctctgggtggctggg

SEQ ID NO: 1159929 - DNA, 15 bp, Homo sapiens
gctctgggtggctgg

SEQ ID NO: 1159930 - DNA, 15 bp, Homo sapiens
tgctctgggtggctg

SEQ ID NO: 1159931 - DNA, 15 bp, Homo sapiens
ttgctctgggtggct

SEQ ID NO: 1159932 - DNA, 15 bp, Homo sapiens
attgctctgggtggc

SEQ ID NO: 1159933 - DNA, 15 bp, Homo sapiens
cattgctctgggtgg

SEQ ID NO: 1159934 - DNA, 15 bp, Homo sapiens
gcattgctctgggtg

SEQ ID NO: 1159935 - DNA, 15 bp, Homo sapiens
ggcattgctctgggt

SEQ ID NO: 1159936 - DNA, 15 bp, Homo sapiens
aggcattgctctggg

SEQ ID NO: 1159937 - DNA, 15 bp, Homo sapiens
caggcattgctctgg

SEQ ID NO: 1159938 - DNA, 15 bp, Homo sapiens
gcaggcattgctctg

SEQ ID NO: 1159939 - DNA, 15 bp, Homo sapiens
tgcaggcattgctct

SEQ ID NO: 1159940 - DNA, 15 bp, Homo sapiens
gtgcaggcattgctc

SEQ ID NO: 1159941 - DNA, 15 bp, Homo sapiens
ggtgcaggcattgct

SEQ ID NO: 1159942 - DNA, 15 bp, Homo sapiens
tggtgcaggcattgc

SEQ ID NO: 1159943 - DNA, 15 bp, Homo sapiens
ttggtgcaggcattg

SEQ ID NO: 1159944 - DNA, 15 bp, Homo sapiens
tttggtgcaggcatt

SEQ ID NO: 1159945 - DNA, 15 bp, Homo sapiens
ctttggtgcaggcat

SEQ ID NO: 1159946 - DNA, 15 bp, Homo sapiens
actttggtgcaggca

SEQ ID NO: 1159947 - DNA, 15 bp, Homo sapiens
aactttggtgcaggc

SEQ ID NO: 1159948 - DNA, 15 bp, Homo sapiens
aaactttggtgcagg

SEQ ID NO: 1159949 - DNA, 15 bp, Homo sapiens
taaactttggtgcag

SEQ ID NO: 1159950 - DNA, 15 bp, Homo sapiens
ttaaactttggtgca

SEQ ID NO: 1159951 - DNA, 15 bp, Homo sapiens
tttaaactttggtgc

SEQ ID NO: 1159952 - DNA, 15 bp, Homo sapiens
ctttaaactttggtg

SEQ ID NO: 1159953 - DNA, 15 bp, Homo sapiens
cctttaaactttggt

SEQ ID NO: 1159954 - DNA, 15 bp, Homo sapiens
acctttaaactttgg

SEQ ID NO: 1159955 - DNA, 15 bp, Homo sapiens
cacctttaaactttg

SEQ ID NO: 1159956 - DNA, 15 bp, Homo sapiens
tcacctttaaacttt

SEQ ID NO: 1159957 - DNA, 15 bp, Homo sapiens
ctcacctttaaactt

SEQ ID NO: 1159958 - DNA, 15 bp, Homo sapiens
gctcacctttaaact

SEQ ID NO: 1159959 - DNA, 15 bp, Homo sapiens
ggctcacctttaaac

SEQ ID NO: 1159960 - DNA, 15 bp, Homo sapiens
tggctcacctttaaa

SEQ ID NO: 1159961 - DNA, 15 bp, Homo sapiens
gtggctcacctttaa

SEQ ID NO: 1159962 - DNA, 15 bp, Homo sapiens
tgtggctcaccttta

SEQ ID NO: 1159963 - DNA, 15 bp, Homo sapiens
atgtggctcaccttt

SEQ ID NO: 1159964 - DNA, 15 bp, Homo sapiens
aatgtggctcacctt

SEQ ID NO: 1159965 - DNA, 15 bp, Homo sapiens
gaatgtggctcacct

SEQ ID NO: 1159966 - DNA, 15 bp, Homo sapiens
tgaatgtggctcacc

SEQ ID NO: 1159967 - DNA, 15 bp, Homo sapiens
atgaatgtggctcac

SEQ ID NO: 1159968 - DNA, 15 bp, Homo sapiens
aatgaatgtggctca

SEQ ID NO: 1159969 - DNA, 15 bp, Homo sapiens
caatgaatgtggctc

SEQ ID NO: 1159970 - DNA, 15 bp, Homo sapiens
acaatgaatgtggct

SEQ ID NO: 1159971 - DNA, 15 bp, Homo sapiens
tacaatgaatgtggc

SEQ ID NO: 1159972 - DNA, 15 bp, Homo sapiens
atacaatgaatgtgg

SEQ ID NO: 1159973 - DNA, 15 bp, Homo sapiens
catacaatgaatgtg

SEQ ID NO: 1159974 - DNA, 15 bp, Homo sapiens
gcatacaatgaatgt

SEQ ID NO: 1159975 - DNA, 15 bp, Homo sapiens
ggcatacaatgaatg

SEQ ID NO: 1159976 - DNA, 15 bp, Homo sapiens
aggcatacaatgaat

SEQ ID NO: 1159977 - DNA, 15 bp, Homo sapiens
aaggcatacaatgaa

SEQ ID NO: 1159978 - DNA, 15 bp, Homo sapiens
gaaggcatacaatga

SEQ ID NO: 1159979 - DNA, 15 bp, Homo sapiens
agaaggcatacaatg

SEQ ID NO: 1159980 - DNA, 15 bp, Homo sapiens
tagaaggcatacaat

SEQ ID NO: 1159981 - DNA, 15 bp, Homo sapiens
ctagaaggcatacaa

SEQ ID NO: 1159982 - DNA, 15 bp, Homo sapiens
cctagaaggcataca

SEQ ID NO: 1159983 - DNA, 15 bp, Homo sapiens
ccctagaaggcatac

SEQ ID NO: 1159984 - DNA, 15 bp, Homo sapiens
cccctagaaggcata

SEQ ID NO: 1159985 - DNA, 15 bp, Homo sapiens
gcccctagaaggcat

SEQ ID NO: 1159986 - DNA, 15 bp, Homo sapiens
agcccctagaaggca

SEQ ID NO: 1159987 - DNA, 15 bp, Homo sapiens
aagcccctagaaggc

SEQ ID NO: 1159988 - DNA, 15 bp, Homo sapiens
taagcccctagaagg

SEQ ID NO: 1159989 - DNA, 15 bp, Homo sapiens
ctaagcccctagaag

SEQ ID NO: 1159990 - DNA, 15 bp, Homo sapiens
gctaagcccctagaa

SEQ ID NO: 1159991 - DNA, 15 bp, Homo sapiens
agctaagcccctaga

SEQ ID NO: 1159992 - DNA, 15 bp, Homo sapiens
cagctaagcccctag

SEQ ID NO: 1159993 - DNA, 15 bp, Homo sapiens
ccagctaagccccta

SEQ ID NO: 1159994 - DNA, 15 bp, Homo sapiens
tccagctaagcccct

SEQ ID NO: 1159995 - DNA, 15 bp, Homo sapiens
ctccagctaagcccc

SEQ ID NO: 1159996 - DNA, 15 bp, Homo sapiens
cctccagctaagccc

SEQ ID NO: 1159997 - DNA, 15 bp, Homo sapiens
ccctccagctaagcc

SEQ ID NO: 1159998 - DNA, 15 bp, Homo sapiens
cccctccagctaagc

SEQ ID NO: 1159999 - DNA, 15 bp, Homo sapiens
tcccctccagctaag

SEQ ID NO: 1160000 - DNA, 15 bp, Homo sapiens
ctcccctccagctaa

SEQ ID NO: 1160001 - DNA, 15 bp, Homo sapiens
cctcccctccagcta

SEQ ID NO: 1160002 - DNA, 15 bp, Homo sapiens
tcctcccctccagct

SEQ ID NO: 1160003 - DNA, 15 bp, Homo sapiens
ttcctcccctccagc

SEQ ID NO: 1160004 - DNA, 15 bp, Homo sapiens
attcctcccctccag

SEQ ID NO: 1160005 - DNA, 15 bp, Homo sapiens
tattcctcccctcca

SEQ ID NO: 1160006 - DNA, 15 bp, Homo sapiens
ttattcctcccctcc

SEQ ID NO: 1160007 - DNA, 15 bp, Homo sapiens
cttattcctcccctc

SEQ ID NO: 1160008 - DNA, 15 bp, Homo sapiens
gcttattcctcccct

SEQ ID NO: 1160009 - DNA, 15 bp, Homo sapiens
agcttattcctcccc

SEQ ID NO: 1160010 - DNA, 15 bp, Homo sapiens
gagcttattcctccc

SEQ ID NO: 1160011 - DNA, 15 bp, Homo sapiens
ggagcttattcctcc

SEQ ID NO: 1160012 - DNA, 15 bp, Homo sapiens
tggagcttattcctc

SEQ ID NO: 1160013 - DNA, 15 bp, Homo sapiens
ttggagcttattcct

SEQ ID NO: 1160014 - DNA, 15 bp, Homo sapiens
cttggagcttattcc

SEQ ID NO: 1160015 - DNA, 15 bp, Homo sapiens
tcttggagcttattc

SEQ ID NO: 1160016 - DNA, 15 bp, Homo sapiens
ttcttggagcttatt

SEQ ID NO: 1160017 - DNA, 15 bp, Homo sapiens
cttcttggagcttat

SEQ ID NO: 1160018 - DNA, 15 bp, Homo sapiens
tcttcttggagctta

SEQ ID NO: 1160019 - DNA, 15 bp, Homo sapiens
ttcttcttggagctt

SEQ ID NO: 1160020 - DNA, 15 bp, Homo sapiens
gttcttcttggagct

SEQ ID NO: 1160021 - DNA, 15 bp, Homo sapiens
agttcttcttggagc

SEQ ID NO: 1160022 - DNA, 15 bp, Homo sapiens
aagttcttcttggag

SEQ ID NO: 1160023 - DNA, 15 bp, Homo sapiens
gaagttcttcttgga

SEQ ID NO: 1160024 - DNA, 15 bp, Homo sapiens
agaagttcttcttgg

SEQ ID NO: 1160025 - DNA, 15 bp, Homo sapiens
aagaagttcttcttg

SEQ ID NO: 1160026 - DNA, 15 bp, Homo sapiens
aaagaagttcttctt

SEQ ID NO: 1160027 - DNA, 15 bp, Homo sapiens
aaaagaagttcttct

SEQ ID NO: 1160028 - DNA, 15 bp, Homo sapiens
aaaaagaagttcttc

SEQ ID NO: 1160029 - DNA, 15 bp, Homo sapiens
taaaaagaagttctt

SEQ ID NO: 1160030 - DNA, 15 bp, Homo sapiens
ttaaaaagaagttct

SEQ ID NO: 1160031 - DNA, 15 bp, Homo sapiens
attaaaaagaagttc

SEQ ID NO: 1160032 - DNA, 15 bp, Homo sapiens
aattaaaaagaagtt

SEQ ID NO: 1160033 - DNA, 15 bp, Homo sapiens
agaaaattaaaaaga

SEQ ID NO: 1160034 - DNA, 15 bp, Homo sapiens
gagaaaattaaaaag

SEQ ID NO: 1160035 - DNA, 15 bp, Homo sapiens
agagaaaattaaaaa

SEQ ID NO: 1160036 - DNA, 15 bp, Homo sapiens
cagagaaaattaaaa

SEQ ID NO: 1160037 - DNA, 15 bp, Homo sapiens
acagagaaaattaaa

SEQ ID NO: 1160038 - DNA, 15 bp, Homo sapiens
aacagagaaaattaa

SEQ ID NO: 1160039 - DNA, 15 bp, Homo sapiens
aaaacagagaaaatt

SEQ ID NO: 1160040 - DNA, 15 bp, Homo sapiens
caaaacagagaaaat

SEQ ID NO: 1160041 - DNA, 15 bp, Homo sapiens
acaaaacagagaaaa

SEQ ID NO: 1160042 - DNA, 15 bp, Homo sapiens
aacaaaacagagaaa

SEQ ID NO: 1160043 - DNA, 15 bp, Homo sapiens
taacaaaacagagaa

SEQ ID NO: 1160044 - DNA, 15 bp, Homo sapiens
ttaacaaaacagaga

SEQ ID NO: 1160045 - DNA, 15 bp, Homo sapiens
tttaacaaaacagag

SEQ ID NO: 1160046 - DNA, 15 bp, Homo sapiens
gtttaacaaaacaga

SEQ ID NO: 1160047 - DNA, 15 bp, Homo sapiens
agtttaacaaaacag

SEQ ID NO: 1160048 - DNA, 15 bp, Homo sapiens
aagtttaacaaaaca

SEQ ID NO: 1160049 - DNA, 15 bp, Homo sapiens
gaagtttaacaaaac

SEQ ID NO: 1160050 - DNA, 15 bp, Homo sapiens
agaagtttaacaaaa

SEQ ID NO: 1160051 - DNA, 15 bp, Homo sapiens
cagaagtttaacaaa

SEQ ID NO: 1160052 - DNA, 15 bp, Homo sapiens
acagaagtttaacaa

SEQ ID NO: 1160053 - DNA, 15 bp, Homo sapiens
aacagaagtttaaca

SEQ ID NO: 1160054 - DNA, 15 bp, Homo sapiens
aaacagaagtttaac

SEQ ID NO: 1160055 - DNA, 15 bp, Homo sapiens
taaacagaagtttaa

SEQ ID NO: 1160056 - DNA, 15 bp, Homo sapiens
ttaaacagaagttta

SEQ ID NO: 1160057 - DNA, 15 bp, Homo sapiens
gttaaacagaagttt

SEQ ID NO: 1160058 - DNA, 15 bp, Homo sapiens
tgttaaacagaagtt

SEQ ID NO: 1160059 - DNA, 15 bp, Homo sapiens
ctgttaaacagaagt

SEQ ID NO: 1160060 - DNA, 15 bp, Homo sapiens
actgttaaacagaag

SEQ ID NO: 1160061 - DNA, 15 bp, Homo sapiens
gactgttaaacagaa

SEQ ID NO: 1160062 - DNA, 15 bp, Homo sapiens
tgactgttaaacaga

SEQ ID NO: 1160063 - DNA, 15 bp, Homo sapiens
ttgactgttaaacag

SEQ ID NO: 1160064 - DNA, 15 bp, Homo sapiens
tttgactgttaaaca

SEQ ID NO: 1160065 - DNA, 15 bp, Homo sapiens
ctttgactgttaaac

SEQ ID NO: 1160066 - DNA, 15 bp, Homo sapiens
cctttgactgttaaa

SEQ ID NO: 1160067 - DNA, 15 bp, Homo sapiens
ccctttgactgttaa

SEQ ID NO: 1160068 - DNA, 15 bp, Homo sapiens
cccctttgactgtta

SEQ ID NO: 1160069 - DNA, 15 bp, Homo sapiens
tcccctttgactgtt

SEQ ID NO: 1160070 - DNA, 15 bp, Homo sapiens
ttcccctttgactgt

SEQ ID NO: 1160071 - DNA, 15 bp, Homo sapiens
tttcccctttgactg

SEQ ID NO: 1160072 - DNA, 15 bp, Homo sapiens
ctttcccctttgact

SEQ ID NO: 1160073 - DNA, 15 bp, Homo sapiens
gctttcccctttgac

SEQ ID NO: 1160074 - DNA, 15 bp, Homo sapiens
tgctttcccctttga

SEQ ID NO: 1160075 - DNA, 15 bp, Homo sapiens
atgctttcccctttg

SEQ ID NO: 1160076 - DNA, 15 bp, Homo sapiens
gatgctttccccttt

SEQ ID NO: 1160077 - DNA, 15 bp, Homo sapiens
cgatgctttcccctt

SEQ ID NO: 1160078 - DNA, 15 bp, Homo sapiens
ccgatgctttcccct

SEQ ID NO: 1160079 - DNA, 15 bp, Homo sapiens
cccgatgctttcccc

SEQ ID NO: 1160080 - DNA, 15 bp, Homo sapiens
gcccgatgctttccc

SEQ ID NO: 1160081 - DNA, 15 bp, Homo sapiens
agcccgatgctttcc

SEQ ID NO: 1160082 - DNA, 15 bp, Homo sapiens
cagcccgatgctttc

SEQ ID NO: 1160083 - DNA, 15 bp, Homo sapiens
ccagcccgatgcttt

SEQ ID NO: 1160084 - DNA, 15 bp, Homo sapiens
cccagcccgatgctt

SEQ ID NO: 1160085 - DNA, 15 bp, Homo sapiens
acccagcccgatgct

SEQ ID NO: 1160086 - DNA, 15 bp, Homo sapiens
tacccagcccgatgc

SEQ ID NO: 1160087 - DNA, 15 bp, Homo sapiens
ttacccagcccgatg

SEQ ID NO: 1160088 - DNA, 15 bp, Homo sapiens
tttacccagcccgat

SEQ ID NO: 1160089 - DNA, 15 bp, Homo sapiens
ttttacccagcccga

SEQ ID NO: 1160090 - DNA, 15 bp, Homo sapiens
tttttacccagcccg

SEQ ID NO: 1160091 - DNA, 15 bp, Homo sapiens
gtttttacccagccc

SEQ ID NO: 1160092 - DNA, 15 bp, Homo sapiens
tgtttttacccagcc

SEQ ID NO: 1160093 - DNA, 15 bp, Homo sapiens
atgtttttacccagc

SEQ ID NO: 1160094 - DNA, 15 bp, Homo sapiens
catgtttttacccag

SEQ ID NO: 1160095 - DNA, 15 bp, Homo sapiens
tcatgtttttaccca

SEQ ID NO: 1160096 - DNA, 15 bp, Homo sapiens
ctcatgtttttaccc

SEQ ID NO: 1160097 - DNA, 15 bp, Homo sapiens
actcatgtttttacc

SEQ ID NO: 1160098 - DNA, 15 bp, Homo sapiens
aactcatgtttttac

SEQ ID NO: 1160099 - DNA, 15 bp, Homo sapiens
aaactcatgttttta

SEQ ID NO: 1160100 - DNA, 15 bp, Homo sapiens
aaaactcatgttttt

SEQ ID NO: 1160101 - DNA, 15 bp, Homo sapiens
aaaaactcatgtttt

SEQ ID NO: 1160102 - DNA, 15 bp, Homo sapiens
gaaaaactcatgttt

SEQ ID NO: 1160103 - DNA, 15 bp, Homo sapiens
agaaaaactcatgtt

SEQ ID NO: 1160104 - DNA, 15 bp, Homo sapiens
aagaaaaactcatgt

SEQ ID NO: 1160105 - DNA, 15 bp, Homo sapiens
taagaaaaactcatg

SEQ ID NO: 1160106 - DNA, 15 bp, Homo sapiens
ttaagaaaaactcat

SEQ ID NO: 1160107 - DNA, 15 bp, Homo sapiens
attaagaaaaactca

SEQ ID NO: 1160108 - DNA, 15 bp, Homo sapiens
aattaagaaaaactc

SEQ ID NO: 1160109 - DNA, 15 bp, Homo sapiens
aaattaagaaaaact

SEQ ID NO: 1160110 - DNA, 15 bp, Homo sapiens
caaattaagaaaaac

SEQ ID NO: 1160111 - DNA, 15 bp, Homo sapiens
tcaaattaagaaaaa

SEQ ID NO: 1160112 - DNA, 15 bp, Homo sapiens
ctcaaattaagaaaa

SEQ ID NO: 1160113 - DNA, 15 bp, Homo sapiens
gctcaaattaagaaa

SEQ ID NO: 1160114 - DNA, 15 bp, Homo sapiens
tgctcaaattaagaa

SEQ ID NO: 1160115 - DNA, 15 bp, Homo sapiens
gtgctcaaattaaga

SEQ ID NO: 1160116 - DNA, 15 bp, Homo sapiens
agtgctcaaattaag

SEQ ID NO: 1160117 - DNA, 15 bp, Homo sapiens
gagtgctcaaattaa

SEQ ID NO: 1160118 - DNA, 15 bp, Homo sapiens
tgagtgctcaaatta

SEQ ID NO: 1160119 - DNA, 15 bp, Homo sapiens
atgagtgctcaaatt

SEQ ID NO: 1160120 - DNA, 15 bp, Homo sapiens
aatgagtgctcaaat

SEQ ID NO: 1160121 - DNA, 15 bp, Homo sapiens
aaatgagtgctcaaa

SEQ ID NO: 1160122 - DNA, 15 bp, Homo sapiens
aaaatgagtgctcaa

SEQ ID NO: 1160123 - DNA, 15 bp, Homo sapiens
aaaaatgagtgctca

SEQ ID NO: 1160124 - DNA, 15 bp, Homo sapiens
taaaaatgagtgctc

SEQ ID NO: 1160125 - DNA, 15 bp, Homo sapiens
ttaaaaatgagtgct

SEQ ID NO: 1160126 - DNA, 15 bp, Homo sapiens
tttaaaaatgagtgc

SEQ ID NO: 1160127 - DNA, 15 bp, Homo sapiens
ttttaaaaatgagtg

SEQ ID NO: 1160128 - DNA, 15 bp, Homo sapiens
attttaaaaatgagt

SEQ ID NO: 1160129 - DNA, 15 bp, Homo sapiens
aattttaaaaatgag

SEQ ID NO: 1160130 - DNA, 15 bp, Homo sapiens
aaattttaaaaatga

SEQ ID NO: 1160131 - DNA, 15 bp, Homo sapiens
aaaattttaaaaatg

SEQ ID NO: 1160132 - DNA, 15 bp, Homo sapiens
aaaaaattttaaaaa

SEQ ID NO: 1160133 - DNA, 15 bp, Homo sapiens
aaaaaaattttaaaa

SEQ ID NO: 1160134 - DNA, 15 bp, Homo sapiens
taaaaaaattttaaa

SEQ ID NO: 1160135 - DNA, 15 bp, Homo sapiens
ataaaaaaattttaa

SEQ ID NO: 1160136 - DNA, 15 bp, Homo sapiens
gataaaaaaatttta

SEQ ID NO: 1160137 - DNA, 15 bp, Homo sapiens
tgataaaaaaatttt

SEQ ID NO: 1160138 - DNA, 15 bp, Homo sapiens
atgataaaaaaattt

SEQ ID NO: 1160139 - DNA, 15 bp, Homo sapiens
tatgataaaaaaatt

SEQ ID NO: 1160140 - DNA, 15 bp, Homo sapiens
atatgataaaaaaat

SEQ ID NO: 1160141 - DNA, 15 bp, Homo sapiens
aatatgataaaaaaa

SEQ ID NO: 1160142 - DNA, 15 bp, Homo sapiens
aaatatgataaaaaa

SEQ ID NO: 1160143 - DNA, 15 bp, Homo sapiens
taaatatgataaaaa

SEQ ID NO: 1160144 - DNA, 15 bp, Homo sapiens
ttaaatatgataaaa

SEQ ID NO: 1160145 - DNA, 15 bp, Homo sapiens
gttaaatatgataaa

SEQ ID NO: 1160146 - DNA, 15 bp, Homo sapiens
agttaaatatgataa

SEQ ID NO: 1160147 - DNA, 15 bp, Homo sapiens
aagttaaatatgata

SEQ ID NO: 1160148 - DNA, 15 bp, Homo sapiens
aaagttaaatatgat

SEQ ID NO: 1160149 - DNA, 15 bp, Homo sapiens
aaaagttaaatatga

SEQ ID NO: 1160150 - DNA, 15 bp, Homo sapiens
aaaaagttaaatatg

SEQ ID NO: 1160151 - DNA, 15 bp, Homo sapiens
aaaaaagttaaatat

SEQ ID NO: 1160152 - DNA, 15 bp, Homo sapiens
taaaaaagttaaata

SEQ ID NO: 1160153 - DNA, 15 bp, Homo sapiens
ataaaaaagttaaat

SEQ ID NO: 1160154 - DNA, 15 bp, Homo sapiens
aataaaaaagttaaa

SEQ ID NO: 1160155 - DNA, 15 bp, Homo sapiens
aaataaaaaagttaa

SEQ ID NO: 1160156 - DNA, 15 bp, Homo sapiens
aaaataaaaaagtta

SEQ ID NO: 1160157 - DNA, 15 bp, Homo sapiens
taaaataaaaaagtt

SEQ ID NO: 1160158 - DNA, 15 bp, Homo sapiens
ctaaaataaaaaagt

SEQ ID NO: 1160159 - DNA, 15 bp, Homo sapiens
tctaaaataaaaaag

SEQ ID NO: 1160160 - DNA, 15 bp, Homo sapiens
atctaaaataaaaaa

SEQ ID NO: 1160161 - DNA, 15 bp, Homo sapiens
aatctaaaataaaaa

SEQ ID NO: 1160162 - DNA, 15 bp, Homo sapiens
gaatctaaaataaaa

SEQ ID NO: 1160163 - DNA, 15 bp, Homo sapiens
tgaatctaaaataaa

SEQ ID NO: 1160164 - DNA, 15 bp, Homo sapiens
ctgaatctaaaataa

SEQ ID NO: 1160165 - DNA, 15 bp, Homo sapiens
cctgaatctaaaata

SEQ ID NO: 1160166 - DNA, 15 bp, Homo sapiens
ccctgaatctaaaat

SEQ ID NO: 1160167 - DNA, 15 bp, Homo sapiens
cccctgaatctaaaa

SEQ ID NO: 1160168 - DNA, 15 bp, Homo sapiens
tcccctgaatctaaa

SEQ ID NO: 1160169 - DNA, 15 bp, Homo sapiens
atcccctgaatctaa

SEQ ID NO: 1160170 - DNA, 15 bp, Homo sapiens
tatcccctgaatcta

SEQ ID NO: 1160171 - DNA, 15 bp, Homo sapiens
gtatcccctgaatct

SEQ ID NO: 1160172 - DNA, 15 bp, Homo sapiens
tgtatcccctgaatc

SEQ ID NO: 1160173 - DNA, 15 bp, Homo sapiens
atgtatcccctgaat

SEQ ID NO: 1160174 - DNA, 15 bp, Homo sapiens
catgtatcccctgaa

SEQ ID NO: 1160175 - DNA, 15 bp, Homo sapiens
acatgtatcccctga

SEQ ID NO: 1160176 - DNA, 15 bp, Homo sapiens
cacatgtatcccctg

SEQ ID NO: 1160177 - DNA, 15 bp, Homo sapiens
gcacatgtatcccct

SEQ ID NO: 1160178 - DNA, 15 bp, Homo sapiens
tgcacatgtatcccc

SEQ ID NO: 1160179 - DNA, 15 bp, Homo sapiens
ctgcacatgtatccc

SEQ ID NO: 1160180 - DNA, 15 bp, Homo sapiens
cctgcacatgtatcc

SEQ ID NO: 1160181 - DNA, 15 bp, Homo sapiens
gcctgcacatgtatc

SEQ ID NO: 1160182 - DNA, 15 bp, Homo sapiens
agcctgcacatgtat

SEQ ID NO: 1160183 - DNA, 15 bp, Homo sapiens
aagcctgcacatgta

SEQ ID NO: 1160184 - DNA, 15 bp, Homo sapiens
taagcctgcacatgt

SEQ ID NO: 1160185 - DNA, 15 bp, Homo sapiens
ataagcctgcacatg

SEQ ID NO: 1160186 - DNA, 15 bp, Homo sapiens
aataagcctgcacat

SEQ ID NO: 1160187 - DNA, 15 bp, Homo sapiens
taataagcctgcaca

SEQ ID NO: 1160188 - DNA, 15 bp, Homo sapiens
gtaataagcctgcac

SEQ ID NO: 1160189 - DNA, 15 bp, Homo sapiens
tgtaataagcctgca

SEQ ID NO: 1160190 - DNA, 15 bp, Homo sapiens
gtgtaataagcctgc

SEQ ID NO: 1160191 - DNA, 15 bp, Homo sapiens
tgtgtaataagcctg

SEQ ID NO: 1160192 - DNA, 15 bp, Homo sapiens
ctgtgtaataagcct

SEQ ID NO: 1160193 - DNA, 15 bp, Homo sapiens
cctgtgtaataagcc

SEQ ID NO: 1160194 - DNA, 15 bp, Homo sapiens
acctgtgtaataagc

SEQ ID NO: 1160195 - DNA, 15 bp, Homo sapiens
tacctgtgtaataag

SEQ ID NO: 1160196 - DNA, 15 bp, Homo sapiens
atacctgtgtaataa

SEQ ID NO: 1160197 - DNA, 15 bp, Homo sapiens
tatacctgtgtaata

SEQ ID NO: 1160198 - DNA, 15 bp, Homo sapiens
ttatacctgtgtaat

SEQ ID NO: 1160199 - DNA, 15 bp, Homo sapiens
attatacctgtgtaa

SEQ ID NO: 1160200 - DNA, 15 bp, Homo sapiens
cattatacctgtgta

SEQ ID NO: 1160201 - DNA, 15 bp, Homo sapiens
ccattatacctgtgt

SEQ ID NO: 1160202 - DNA, 15 bp, Homo sapiens
cccattatacctgtg

SEQ ID NO: 1160203 - DNA, 15 bp, Homo sapiens
acccattatacctgt

SEQ ID NO: 1160204 - DNA, 15 bp, Homo sapiens
cacccattatacctg

SEQ ID NO: 1160205 - DNA, 15 bp, Homo sapiens
tcacccattatacct

SEQ ID NO: 1160206 - DNA, 15 bp, Homo sapiens
atcacccattatacc

SEQ ID NO: 1160207 - DNA, 15 bp, Homo sapiens
catcacccattatac

SEQ ID NO: 1160208 - DNA, 15 bp, Homo sapiens
gcatcacccattata

SEQ ID NO: 1160209 - DNA, 15 bp, Homo sapiens
agcatcacccattat

SEQ ID NO: 1160210 - DNA, 15 bp, Homo sapiens
cagcatcacccatta

SEQ ID NO: 1160211 - DNA, 15 bp, Homo sapiens
tcagcatcacccatt

SEQ ID NO: 1160212 - DNA, 15 bp, Homo sapiens
atcagcatcacccat

SEQ ID NO: 1160213 - DNA, 15 bp, Homo sapiens
catcagcatcaccca

SEQ ID NO: 1160214 - DNA, 15 bp, Homo sapiens
acatcagcatcaccc

SEQ ID NO: 1160215 - DNA, 15 bp, Homo sapiens
aacatcagcatcacc

SEQ ID NO: 1160216 - DNA, 15 bp, Homo sapiens
aaacatcagcatcac

SEQ ID NO: 1160217 - DNA, 15 bp, Homo sapiens
caaacatcagcatca

SEQ ID NO: 1160218 - DNA, 15 bp, Homo sapiens
ccaaacatcagcatc

SEQ ID NO: 1160219 - DNA, 15 bp, Homo sapiens
gcccaaacatcagca

SEQ ID NO: 1160220 - DNA, 15 bp, Homo sapiens
agcccaaacatcagc

SEQ ID NO: 1160221 - DNA, 15 bp, Homo sapiens
aagcccaaacatcag

SEQ ID NO: 1160222 - DNA, 15 bp, Homo sapiens
gaagcccaaacatca

SEQ ID NO: 1160223 - DNA, 15 bp, Homo sapiens
agaagcccaaacatc

SEQ ID NO: 1160224 - DNA, 15 bp, Homo sapiens
tagaagcccaaacat

SEQ ID NO: 1160225 - DNA, 15 bp, Homo sapiens
ttagaagcccaaaca

SEQ ID NO: 1160226 - DNA, 15 bp, Homo sapiens
attagaagcccaaac

SEQ ID NO: 1160227 - DNA, 15 bp, Homo sapiens
cattagaagcccaaa

SEQ ID NO: 1160228 - DNA, 15 bp, Homo sapiens
tcattagaagcccaa

SEQ ID NO: 1160229 - DNA, 15 bp, Homo sapiens
atcattagaagccca

SEQ ID NO: 1160230 - DNA, 15 bp, Homo sapiens
gatcattagaagccc

SEQ ID NO: 1160231 - DNA, 15 bp, Homo sapiens
ggatcattagaagcc

SEQ ID NO: 1160232 - DNA, 15 bp, Homo sapiens
gggatcattagaagc

SEQ ID NO: 1160233 - DNA, 15 bp, Homo sapiens
ggggatcattagaag

SEQ ID NO: 1160234 - DNA, 15 bp, Homo sapiens
aggggatcattagaa

SEQ ID NO: 1160235 - DNA, 15 bp, Homo sapiens
gaggggatcattaga

SEQ ID NO: 1160236 - DNA, 15 bp, Homo sapiens
tgaggggatcattag

SEQ ID NO: 1160237 - DNA, 15 bp, Homo sapiens
gtgaggggatcatta

SEQ ID NO: 1160238 - DNA, 15 bp, Homo sapiens
ggtgaggggatcatt

SEQ ID NO: 1160239 - DNA, 15 bp, Homo sapiens
gggtgaggggatcat

SEQ ID NO: 1160240 - DNA, 15 bp, Homo sapiens
tgggtgaggggatca

SEQ ID NO: 1160241 - DNA, 15 bp, Homo sapiens
ttgggtgaggggatc

SEQ ID NO: 1160242 - DNA, 15 bp, Homo sapiens
cttgggtgaggggat

SEQ ID NO: 1160243 - DNA, 15 bp, Homo sapiens
acttgggtgagggga

SEQ ID NO: 1160244 - DNA, 15 bp, Homo sapiens
tacttgggtgagggg

SEQ ID NO: 1160245 - DNA, 15 bp, Homo sapiens
atacttgggtgaggg

SEQ ID NO: 1160246 - DNA, 15 bp, Homo sapiens
tatacttgggtgagg

SEQ ID NO: 1160247 - DNA, 15 bp, Homo sapiens
ctatacttgggtgag

SEQ ID NO: 1160248 - DNA, 15 bp, Homo sapiens
tctatacttgggtga

SEQ ID NO: 1160249 - DNA, 15 bp, Homo sapiens
ttctatacttgggtg

SEQ ID NO: 1160250 - DNA, 15 bp, Homo sapiens
gttctatacttgggt

SEQ ID NO: 1160251 - DNA, 15 bp, Homo sapiens
tgttctatacttggg

SEQ ID NO: 1160252 - DNA, 15 bp, Homo sapiens
atgttctatacttgg

SEQ ID NO: 1160253 - DNA, 15 bp, Homo sapiens
tatgttctatacttg

SEQ ID NO: 1160254 - DNA, 15 bp, Homo sapiens
ctatgttctatactt

SEQ ID NO: 1160255 - DNA, 15 bp, Homo sapiens
actatgttctatact

SEQ ID NO: 1160256 - DNA, 15 bp, Homo sapiens
cactatgttctatac

SEQ ID NO: 1160257 - DNA, 15 bp, Homo sapiens
gcactatgttctata

SEQ ID NO: 1160258 - DNA, 15 bp, Homo sapiens
ggcactatgttctat

SEQ ID NO: 1160259 - DNA, 15 bp, Homo sapiens
gggcactatgttcta

SEQ ID NO: 1160260 - DNA, 15 bp, Homo sapiens
tgggcactatgttct

SEQ ID NO: 1160261 - DNA, 15 bp, Homo sapiens
ttgggcactatgttc

SEQ ID NO: 1160262 - DNA, 15 bp, Homo sapiens
attgggcactatgtt

SEQ ID NO: 1160263 - DNA, 15 bp, Homo sapiens
tattgggcactatgt

SEQ ID NO: 1160264 - DNA, 15 bp, Homo sapiens
ctattgggcactatg

SEQ ID NO: 1160265 - DNA, 15 bp, Homo sapiens
cctattgggcactat

SEQ ID NO: 1160266 - DNA, 15 bp, Homo sapiens
acctattgggcacta

SEQ ID NO: 1160267 - DNA, 15 bp, Homo sapiens
tacctattgggcact

SEQ ID NO: 1160268 - DNA, 15 bp, Homo sapiens
ctacctattgggcac

SEQ ID NO: 1160269 - DNA, 15 bp, Homo sapiens
actacctattgggca

SEQ ID NO: 1160270 - DNA, 15 bp, Homo sapiens
aactacctattgggc

SEQ ID NO: 1160271 - DNA, 15 bp, Homo sapiens
aaaaactacctattg

SEQ ID NO: 1160272 - DNA, 15 bp, Homo sapiens
gaaaaactacctatt

SEQ ID NO: 1160273 - DNA, 15 bp, Homo sapiens
tgaaaaactacctat

SEQ ID NO: 1160274 - DNA, 15 bp, Homo sapiens
ttgaaaaactaccta

SEQ ID NO: 1160275 - DNA, 15 bp, Homo sapiens
gttgaaaaactacct

SEQ ID NO: 1160276 - DNA, 15 bp, Homo sapiens
ggttgaaaaactacc

SEQ ID NO: 1160277 - DNA, 15 bp, Homo sapiens
aggttgaaaaactac

SEQ ID NO: 1160278 - DNA, 15 bp, Homo sapiens
aaggttgaaaaacta

SEQ ID NO: 1160279 - DNA, 15 bp, Homo sapiens
aaaggttgaaaaact

SEQ ID NO: 1160280 - DNA, 15 bp, Homo sapiens
caaaggttgaaaaac

SEQ ID NO: 1160281 - DNA, 15 bp, Homo sapiens
gcaaaggttgaaaaa

SEQ ID NO: 1160282 - DNA, 15 bp, Homo sapiens
agcaaaggttgaaaa

SEQ ID NO: 1160283 - DNA, 15 bp, Homo sapiens
aagcaaaggttgaaa

SEQ ID NO: 1160284 - DNA, 15 bp, Homo sapiens
aaagcaaaggttgaa

SEQ ID NO: 1160285 - DNA, 15 bp, Homo sapiens
gaaagcaaaggttga

SEQ ID NO: 1160286 - DNA, 15 bp, Homo sapiens
ggaaagcaaaggttg

SEQ ID NO: 1160287 - DNA, 15 bp, Homo sapiens
aggaaagcaaaggtt

SEQ ID NO: 1160288 - DNA, 15 bp, Homo sapiens
aaggaaagcaaaggt

SEQ ID NO: 1160289 - DNA, 15 bp, Homo sapiens
gaaggaaagcaaagg

SEQ ID NO: 1160290 - DNA, 15 bp, Homo sapiens
ggaaggaaagcaaag

SEQ ID NO: 1160291 - DNA, 15 bp, Homo sapiens
aggaaggaaagcaaa

SEQ ID NO: 1160292 - DNA, 15 bp, Homo sapiens
gaggaaggaaagcaa

SEQ ID NO: 1160293 - DNA, 15 bp, Homo sapiens
ggaggaaggaaagca

SEQ ID NO: 1160294 - DNA, 15 bp, Homo sapiens
gggaggaaggaaagc

SEQ ID NO: 1160295 - DNA, 15 bp, Homo sapiens
gagggaggaaggaaa

SEQ ID NO: 1160296 - DNA, 15 bp, Homo sapiens
ggagggaggaaggaa

SEQ ID NO: 1160297 - DNA, 15 bp, Homo sapiens
gggagggaggaagga

SEQ ID NO: 1160298 - DNA, 15 bp, Homo sapiens
agggagggaggaagg

SEQ ID NO: 1160299 - DNA, 15 bp, Homo sapiens
gagggagggaggaag

SEQ ID NO: 1160300 - DNA, 15 bp, Homo sapiens
ggagggagggaggaa

SEQ ID NO: 1160301 - DNA, 15 bp, Homo sapiens
ggggagggagggagg

SEQ ID NO: 1160302 - DNA, 15 bp, Homo sapiens
aggggagggagggag

SEQ ID NO: 1160303 - DNA, 15 bp, Homo sapiens
taggggagggaggga

SEQ ID NO: 1160304 - DNA, 15 bp, Homo sapiens
ataggggagggaggg

SEQ ID NO: 1160305 - DNA, 15 bp, Homo sapiens
aataggggagggagg

SEQ ID NO: 1160306 - DNA, 15 bp, Homo sapiens
aaataggggagggag

SEQ ID NO: 1160307 - DNA, 15 bp, Homo sapiens
caaataggggaggga

SEQ ID NO: 1160308 - DNA, 15 bp, Homo sapiens
tcaaataggggaggg

SEQ ID NO: 1160309 - DNA, 15 bp, Homo sapiens
ttcaaataggggagg

SEQ ID NO: 1160310 - DNA, 15 bp, Homo sapiens
tttcaaataggggag

SEQ ID NO: 1160311 - DNA, 15 bp, Homo sapiens
atttcaaatagggga

SEQ ID NO: 1160312 - DNA, 15 bp, Homo sapiens
gatttcaaatagggg

SEQ ID NO: 1160313 - DNA, 15 bp, Homo sapiens
ggatttcaaataggg

SEQ ID NO: 1160314 - DNA, 15 bp, Homo sapiens
aggatttcaaatagg

SEQ ID NO: 1160315 - DNA, 15 bp, Homo sapiens
gaggatttcaaatag

SEQ ID NO: 1160316 - DNA, 15 bp, Homo sapiens
tgaggatttcaaata

SEQ ID NO: 1160317 - DNA, 15 bp, Homo sapiens
gtgaggatttcaaat

SEQ ID NO: 1160318 - DNA, 15 bp, Homo sapiens
agtgaggatttcaaa

SEQ ID NO: 1160319 - DNA, 15 bp, Homo sapiens
cagtgaggatttcaa

SEQ ID NO: 1160320 - DNA, 15 bp, Homo sapiens
acagtgaggatttca

SEQ ID NO: 1160321 - DNA, 15 bp, Homo sapiens
gacagtgaggatttc

SEQ ID NO: 1160322 - DNA, 15 bp, Homo sapiens
agacagtgaggattt

SEQ ID NO: 1160323 - DNA, 15 bp, Homo sapiens
tagacagtgaggatt

SEQ ID NO: 1160324 - DNA, 15 bp, Homo sapiens
atagacagtgaggat

SEQ ID NO: 1160325 - DNA, 15 bp, Homo sapiens
aatagacagtgagga

SEQ ID NO: 1160326 - DNA, 15 bp, Homo sapiens
caatagacagtgagg

SEQ ID NO: 1160327 - DNA, 15 bp, Homo sapiens
acaatagacagtgag

SEQ ID NO: 1160328 - DNA, 15 bp, Homo sapiens
aacaatagacagtga

SEQ ID NO: 1160329 - DNA, 15 bp, Homo sapiens
gaacaatagacagtg

SEQ ID NO: 1160330 - DNA, 15 bp, Homo sapiens
ggaacaatagacagt

SEQ ID NO: 1160331 - DNA, 15 bp, Homo sapiens
aggaacaatagacag

SEQ ID NO: 1160332 - DNA, 15 bp, Homo sapiens
taggaacaatagaca

SEQ ID NO: 1160333 - DNA, 15 bp, Homo sapiens
ataggaacaatagac

SEQ ID NO: 1160334 - DNA, 15 bp, Homo sapiens
gataggaacaataga

SEQ ID NO: 1160335 - DNA, 15 bp, Homo sapiens
agataggaacaatag

SEQ ID NO: 1160336 - DNA, 15 bp, Homo sapiens
aagataggaacaata

SEQ ID NO: 1160337 - DNA, 15 bp, Homo sapiens
aaagataggaacaat

SEQ ID NO: 1160338 - DNA, 15 bp, Homo sapiens
caaagataggaacaa

SEQ ID NO: 1160339 - DNA, 15 bp, Homo sapiens
acaaagataggaaca

SEQ ID NO: 1160340 - DNA, 15 bp, Homo sapiens
cacaaagataggaac

SEQ ID NO: 1160341 - DNA, 15 bp, Homo sapiens
acacaaagataggaa

SEQ ID NO: 1160342 - DNA, 15 bp, Homo sapiens
gacacaaagatagga

SEQ ID NO: 1160343 - DNA, 15 bp, Homo sapiens
ggacacaaagatagg

SEQ ID NO: 1160344 - DNA, 15 bp, Homo sapiens
tggacacaaagatag

SEQ ID NO: 1160345 - DNA, 15 bp, Homo sapiens
atggacacaaagata

SEQ ID NO: 1160346 - DNA, 15 bp, Homo sapiens
catggacacaaagat

SEQ ID NO: 1160347 - DNA, 15 bp, Homo sapiens
acatggacacaaaga

SEQ ID NO: 1160348 - DNA, 15 bp, Homo sapiens
cacatggacacaaag

SEQ ID NO: 1160349 - DNA, 15 bp, Homo sapiens
acacatggacacaaa

SEQ ID NO: 1160350 - DNA, 15 bp, Homo sapiens
tacacatggacacaa

SEQ ID NO: 1160351 - DNA, 15 bp, Homo sapiens
gtacacatggacaca

SEQ ID NO: 1160352 - DNA, 15 bp, Homo sapiens
agtacacatggacac

SEQ ID NO: 1160353 - DNA, 15 bp, Homo sapiens
gagtacacatggaca

SEQ ID NO: 1160354 - DNA, 15 bp, Homo sapiens
tgagtacacatggac

SEQ ID NO: 1160355 - DNA, 15 bp, Homo sapiens
ttgagtacacatgga

SEQ ID NO: 1160356 - DNA, 15 bp, Homo sapiens
attgagtacacatgg

SEQ ID NO: 1160357 - DNA, 15 bp, Homo sapiens
tattgagtacacatg

SEQ ID NO: 1160358 - DNA, 15 bp, Homo sapiens
atattgagtacacat

SEQ ID NO: 1160359 - DNA, 15 bp, Homo sapiens
aatattgagtacaca

SEQ ID NO: 1160360 - DNA, 15 bp, Homo sapiens
aaatattgagtacac

SEQ ID NO: 1160361 - DNA, 15 bp, Homo sapiens
taaatattgagtaca

SEQ ID NO: 1160362 - DNA, 15 bp, Homo sapiens
ttaaatattgagtac

SEQ ID NO: 1160363 - DNA, 15 bp, Homo sapiens
gttaaatattgagta

SEQ ID NO: 1160364 - DNA, 15 bp, Homo sapiens
agttaaatattgagt

SEQ ID NO: 1160365 - DNA, 15 bp, Homo sapiens
gagttaaatattgag

SEQ ID NO: 1160366 - DNA, 15 bp, Homo sapiens
ggagttaaatattga

SEQ ID NO: 1160367 - DNA, 15 bp, Homo sapiens
gggagttaaatattg

SEQ ID NO: 1160368 - DNA, 15 bp, Homo sapiens
tgggagttaaatatt

SEQ ID NO: 1160369 - DNA, 15 bp, Homo sapiens
gtgggagttaaatat

SEQ ID NO: 1160370 - DNA, 15 bp, Homo sapiens
agtgggagttaaata

SEQ ID NO: 1160371 - DNA, 15 bp, Homo sapiens
aagtgggagttaaat

SEQ ID NO: 1160372 - DNA, 15 bp, Homo sapiens
taagtgggagttaaa

SEQ ID NO: 1160373 - DNA, 15 bp, Homo sapiens
ataagtgggagttaa

SEQ ID NO: 1160374 - DNA, 15 bp, Homo sapiens
gataagtgggagtta

SEQ ID NO: 1160375 - DNA, 15 bp, Homo sapiens
cgataagtgggagtt

SEQ ID NO: 1160376 - DNA, 15 bp, Homo sapiens
ccgataagtgggagt

SEQ ID NO: 1160377 - DNA, 15 bp, Homo sapiens
accgataagtgggag

SEQ ID NO: 1160378 - DNA, 15 bp, Homo sapiens
caccgataagtggga

SEQ ID NO: 1160379 - DNA, 15 bp, Homo sapiens
tcaccgataagtggg

SEQ ID NO: 1160380 - DNA, 15 bp, Homo sapiens
ctcaccgataagtgg

SEQ ID NO: 1160381 - DNA, 15 bp, Homo sapiens
tctcaccgataagtg

SEQ ID NO: 1160382 - DNA, 15 bp, Homo sapiens
ttctcaccgataagt

SEQ ID NO: 1160383 - DNA, 15 bp, Homo sapiens
gttctcaccgataag

SEQ ID NO: 1160384 - DNA, 15 bp, Homo sapiens
tgttctcaccgataa

SEQ ID NO: 1160385 - DNA, 15 bp, Homo sapiens
atgttctcaccgata

SEQ ID NO: 1160386 - DNA, 15 bp, Homo sapiens
catgttctcaccgat

SEQ ID NO: 1160387 - DNA, 15 bp, Homo sapiens
acatgttctcaccga

SEQ ID NO: 1160388 - DNA, 15 bp, Homo sapiens
cacatgttctcaccg

SEQ ID NO: 1160389 - DNA, 15 bp, Homo sapiens
ccacatgttctcacc

SEQ ID NO: 1160390 - DNA, 15 bp, Homo sapiens
accacatgttctcac

SEQ ID NO: 1160391 - DNA, 15 bp, Homo sapiens
taccacatgttctca

SEQ ID NO: 1160392 - DNA, 15 bp, Homo sapiens
ataccacatgttctc

SEQ ID NO: 1160393 - DNA, 15 bp, Homo sapiens
aataccacatgttct

SEQ ID NO: 1160394 - DNA, 15 bp, Homo sapiens
aaataccacatgttc

SEQ ID NO: 1160395 - DNA, 15 bp, Homo sapiens
caaataccacatgtt

SEQ ID NO: 1160396 - DNA, 15 bp, Homo sapiens
ccaaataccacatgt

SEQ ID NO: 1160397 - DNA, 15 bp, Homo sapiens
accaaataccacatg

SEQ ID NO: 1160398 - DNA, 15 bp, Homo sapiens
aaccaaataccacat

SEQ ID NO: 1160399 - DNA, 15 bp, Homo sapiens
aaaccaaataccaca

SEQ ID NO: 1160400 - DNA, 15 bp, Homo sapiens
aaaaccaaataccac

SEQ ID NO: 1160401 - DNA, 15 bp, Homo sapiens
gaaaaccaaatacca

SEQ ID NO: 1160402 - DNA, 15 bp, Homo sapiens
agaaaaccaaatacc

SEQ ID NO: 1160403 - DNA, 15 bp, Homo sapiens
cagaaaaccaaatac

SEQ ID NO: 1160404 - DNA, 15 bp, Homo sapiens
acagaaaaccaaata

SEQ ID NO: 1160405 - DNA, 15 bp, Homo sapiens
aacagaaaaccaaat

SEQ ID NO: 1160406 - DNA, 15 bp, Homo sapiens
aaacagaaaaccaaa

SEQ ID NO: 1160407 - DNA, 15 bp, Homo sapiens
gaaacagaaaaccaa

SEQ ID NO: 1160408 - DNA, 15 bp, Homo sapiens
agaaacagaaaacca

SEQ ID NO: 1160409 - DNA, 15 bp, Homo sapiens
cagaaacagaaaacc

SEQ ID NO: 1160410 - DNA, 15 bp, Homo sapiens
gcagaaacagaaaac

SEQ ID NO: 1160411 - DNA, 15 bp, Homo sapiens
tgcagaaacagaaaa

SEQ ID NO: 1160412 - DNA, 15 bp, Homo sapiens
atgcagaaacagaaa

SEQ ID NO: 1160413 - DNA, 15 bp, Homo sapiens
aatgcagaaacagaa

SEQ ID NO: 1160414 - DNA, 15 bp, Homo sapiens
taatgcagaaacaga

SEQ ID NO: 1160415 - DNA, 15 bp, Homo sapiens
ataatgcagaaacag

SEQ ID NO: 1160416 - DNA, 15 bp, Homo sapiens
aataatgcagaaaca

SEQ ID NO: 1160417 - DNA, 15 bp, Homo sapiens
aaataatgcagaaac

SEQ ID NO: 1160418 - DNA, 15 bp, Homo sapiens
gaaataatgcagaaa

SEQ ID NO: 1160419 - DNA, 15 bp, Homo sapiens
tgaaataatgcagaa

SEQ ID NO: 1160420 - DNA, 15 bp, Homo sapiens
gtgaaataatgcaga

SEQ ID NO: 1160421 - DNA, 15 bp, Homo sapiens
agtgaaataatgcag

SEQ ID NO: 1160422 - DNA, 15 bp, Homo sapiens
aagtgaaataatgca

SEQ ID NO: 1160423 - DNA, 15 bp, Homo sapiens
taagtgaaataatgc

SEQ ID NO: 1160424 - DNA, 15 bp, Homo sapiens
ctaagtgaaataatg

SEQ ID NO: 1160425 - DNA, 15 bp, Homo sapiens
cctaagtgaaataat

SEQ ID NO: 1160426 - DNA, 15 bp, Homo sapiens
gcctaagtgaaataa

SEQ ID NO: 1160427 - DNA, 15 bp, Homo sapiens
agcctaagtgaaata

SEQ ID NO: 1160428 - DNA, 15 bp, Homo sapiens
tagcctaagtgaaat

SEQ ID NO: 1160429 - DNA, 15 bp, Homo sapiens
ttagcctaagtgaaa

SEQ ID NO: 1160430 - DNA, 15 bp, Homo sapiens
gttagcctaagtgaa

SEQ ID NO: 1160431 - DNA, 15 bp, Homo sapiens
agttagcctaagtga

SEQ ID NO: 1160432 - DNA, 15 bp, Homo sapiens
aagttagcctaagtg

SEQ ID NO: 1160433 - DNA, 15 bp, Homo sapiens
taagttagcctaagt

SEQ ID NO: 1160434 - DNA, 15 bp, Homo sapiens
ttaagttagcctaag

SEQ ID NO: 1160435 - DNA, 15 bp, Homo sapiens
cttaagttagcctaa

SEQ ID NO: 1160436 - DNA, 15 bp, Homo sapiens
gcttaagttagccta

SEQ ID NO: 1160437 - DNA, 15 bp, Homo sapiens
agcttaagttagcct

SEQ ID NO: 1160438 - DNA, 15 bp, Homo sapiens
tagcttaagttagcc

SEQ ID NO: 1160439 - DNA, 15 bp, Homo sapiens
ttagcttaagttagc

SEQ ID NO: 1160440 - DNA, 15 bp, Homo sapiens
attagcttaagttag

SEQ ID NO: 1160441 - DNA, 15 bp, Homo sapiens
cattagcttaagtta

SEQ ID NO: 1160442 - DNA, 15 bp, Homo sapiens
ccattagcttaagtt

SEQ ID NO: 1160443 - DNA, 15 bp, Homo sapiens
gccattagcttaagt

SEQ ID NO: 1160444 - DNA, 15 bp, Homo sapiens
ggccattagcttaag

SEQ ID NO: 1160445 - DNA, 15 bp, Homo sapiens
aggccattagcttaa

SEQ ID NO: 1160446 - DNA, 15 bp, Homo sapiens
gaggccattagctta

SEQ ID NO: 1160447 - DNA, 15 bp, Homo sapiens
ggaggccattagctt

SEQ ID NO: 1160448 - DNA, 15 bp, Homo sapiens
tggaggccattagct

SEQ ID NO: 1160449 - DNA, 15 bp, Homo sapiens
ctggaggccattagc

SEQ ID NO: 1160450 - DNA, 15 bp, Homo sapiens
gctggaggccattag

SEQ ID NO: 1160451 - DNA, 15 bp, Homo sapiens
agctggaggccatta

SEQ ID NO: 1160452 - DNA, 15 bp, Homo sapiens
cagctggaggccatt

SEQ ID NO: 1160453 - DNA, 15 bp, Homo sapiens
gcagctggaggccat

SEQ ID NO: 1160454 - DNA, 15 bp, Homo sapiens
tgcagctggaggcca

SEQ ID NO: 1160455 - DNA, 15 bp, Homo sapiens
atgcagctggaggcc

SEQ ID NO: 1160456 - DNA, 15 bp, Homo sapiens
gatgcagctggaggc

SEQ ID NO: 1160457 - DNA, 15 bp, Homo sapiens
ggatgcagctggagg

SEQ ID NO: 1160458 - DNA, 15 bp, Homo sapiens
tggatgcagctggag

SEQ ID NO: 1160459 - DNA, 15 bp, Homo sapiens
atggatgcagctgga

SEQ ID NO: 1160460 - DNA, 15 bp, Homo sapiens
catggatgcagctgg

SEQ ID NO: 1160461 - DNA, 15 bp, Homo sapiens
acatggatgcagctg

SEQ ID NO: 1160462 - DNA, 15 bp, Homo sapiens
aacatggatgcagct

SEQ ID NO: 1160463 - DNA, 15 bp, Homo sapiens
caacatggatgcagc

SEQ ID NO: 1160464 - DNA, 15 bp, Homo sapiens
gcaacatggatgcag

SEQ ID NO: 1160465 - DNA, 15 bp, Homo sapiens
agcaacatggatgca

SEQ ID NO: 1160466 - DNA, 15 bp, Homo sapiens
cagcaacatggatgc

SEQ ID NO: 1160467 - DNA, 15 bp, Homo sapiens
acagcaacatggatg

SEQ ID NO: 1160468 - DNA, 15 bp, Homo sapiens
cacagcaacatggat

SEQ ID NO: 1160469 - DNA, 15 bp, Homo sapiens
tcacagcaacatgga

SEQ ID NO: 1160470 - DNA, 15 bp, Homo sapiens
ttcacagcaacatgg

SEQ ID NO: 1160471 - DNA, 15 bp, Homo sapiens
cttcacagcaacatg

SEQ ID NO: 1160472 - DNA, 15 bp, Homo sapiens
gcttcacagcaacat

SEQ ID NO: 1160473 - DNA, 15 bp, Homo sapiens
cgcttcacagcaaca

SEQ ID NO: 1160474 - DNA, 15 bp, Homo sapiens
gcgcttcacagcaac

SEQ ID NO: 1160475 - DNA, 15 bp, Homo sapiens
agcgcttcacagcaa

SEQ ID NO: 1160476 - DNA, 15 bp, Homo sapiens
aagcgcttcacagca

SEQ ID NO: 1160477 - DNA, 15 bp, Homo sapiens
caagcgcttcacagc

SEQ ID NO: 1160478 - DNA, 15 bp, Homo sapiens
tcaagcgcttcacag

SEQ ID NO: 1160479 - DNA, 15 bp, Homo sapiens
atcaagcgcttcaca

SEQ ID NO: 1160480 - DNA, 15 bp, Homo sapiens
aatcaagcgcttcac

SEQ ID NO: 1160481 - DNA, 15 bp, Homo sapiens
aaatcaagcgcttca

SEQ ID NO: 1160482 - DNA, 15 bp, Homo sapiens
gaaatcaagcgcttc

SEQ ID NO: 1160483 - DNA, 15 bp, Homo sapiens
tgaaatcaagcgctt

SEQ ID NO: 1160484 - DNA, 15 bp, Homo sapiens
atgaaatcaagcgct

SEQ ID NO: 1160485 - DNA, 15 bp, Homo sapiens
aatgaaatcaagcgc

SEQ ID NO: 1160486 - DNA, 15 bp, Homo sapiens
gaatgaaatcaagcg

SEQ ID NO: 1160487 - DNA, 15 bp, Homo sapiens
agaatgaaatcaagc

SEQ ID NO: 1160488 - DNA, 15 bp, Homo sapiens
aagaatgaaatcaag

SEQ ID NO: 1160489 - DNA, 15 bp, Homo sapiens
aaagaatgaaatcaa

SEQ ID NO: 1160490 - DNA, 15 bp, Homo sapiens
aaaagaatgaaatca

SEQ ID NO: 1160491 - DNA, 15 bp, Homo sapiens
aaaaagaatgaaatc

SEQ ID NO: 1160492 - DNA, 15 bp, Homo sapiens
gaaaaagaatgaaat

SEQ ID NO: 1160493 - DNA, 15 bp, Homo sapiens
tgaaaaagaatgaaa

SEQ ID NO: 1160494 - DNA, 15 bp, Homo sapiens
atgaaaaagaatgaa

SEQ ID NO: 1160495 - DNA, 15 bp, Homo sapiens
catgaaaaagaatga

SEQ ID NO: 1160496 - DNA, 15 bp, Homo sapiens
ccatgaaaaagaatg

SEQ ID NO: 1160497 - DNA, 15 bp, Homo sapiens
gccatgaaaaagaat

SEQ ID NO: 1160498 - DNA, 15 bp, Homo sapiens
agccatgaaaaagaa

SEQ ID NO: 1160499 - DNA, 15 bp, Homo sapiens
cagccatgaaaaaga

SEQ ID NO: 1160500 - DNA, 15 bp, Homo sapiens
acagccatgaaaaag

SEQ ID NO: 1160501 - DNA, 15 bp, Homo sapiens
cacagccatgaaaaa

SEQ ID NO: 1160502 - DNA, 15 bp, Homo sapiens
acacagccatgaaaa

SEQ ID NO: 1160503 - DNA, 15 bp, Homo sapiens
tacacagccatgaaa

SEQ ID NO: 1160504 - DNA, 15 bp, Homo sapiens
ctacacagccatgaa

SEQ ID NO: 1160505 - DNA, 15 bp, Homo sapiens
actacacagccatga

SEQ ID NO: 1160506 - DNA, 15 bp, Homo sapiens
tactacacagccatg

SEQ ID NO: 1160507 - DNA, 15 bp, Homo sapiens
atactacacagccat

SEQ ID NO: 1160508 - DNA, 15 bp, Homo sapiens
aatactacacagcca

SEQ ID NO: 1160509 - DNA, 15 bp, Homo sapiens
gaatactacacagcc

SEQ ID NO: 1160510 - DNA, 15 bp, Homo sapiens
ggaatactacacagc

SEQ ID NO: 1160511 - DNA, 15 bp, Homo sapiens
tggaatactacacag

SEQ ID NO: 1160512 - DNA, 15 bp, Homo sapiens
atggaatactacaca

SEQ ID NO: 1160513 - DNA, 15 bp, Homo sapiens
catggaatactacac

SEQ ID NO: 1160514 - DNA, 15 bp, Homo sapiens
ccatggaatactaca

SEQ ID NO: 1160515 - DNA, 15 bp, Homo sapiens
accatggaatactac

SEQ ID NO: 1160516 - DNA, 15 bp, Homo sapiens
caccatggaatacta

SEQ ID NO: 1160517 - DNA, 15 bp, Homo sapiens
acaccatggaatact

SEQ ID NO: 1160518 - DNA, 15 bp, Homo sapiens
tacaccatggaatac

SEQ ID NO: 1160519 - DNA, 15 bp, Homo sapiens
gtacaccatggaata

SEQ ID NO: 1160520 - DNA, 15 bp, Homo sapiens
tgtacaccatggaat

SEQ ID NO: 1160521 - DNA, 15 bp, Homo sapiens
atgtacaccatggaa

SEQ ID NO: 1160522 - DNA, 15 bp, Homo sapiens
catgtacaccatgga

SEQ ID NO: 1160523 - DNA, 15 bp, Homo sapiens
acatgtacaccatgg

SEQ ID NO: 1160524 - DNA, 15 bp, Homo sapiens
tacatgtacaccatg

SEQ ID NO: 1160525 - DNA, 15 bp, Homo sapiens
gtacatgtacaccat

SEQ ID NO: 1160526 - DNA, 15 bp, Homo sapiens
ggtacatgtacacca

SEQ ID NO: 1160527 - DNA, 15 bp, Homo sapiens
tggtacatgtacacc

SEQ ID NO: 1160528 - DNA, 15 bp, Homo sapiens
gtggtacatgtacac

SEQ ID NO: 1160529 - DNA, 15 bp, Homo sapiens
tgtggtacatgtaca

SEQ ID NO: 1160530 - DNA, 15 bp, Homo sapiens
atgtggtacatgtac

SEQ ID NO: 1160531 - DNA, 15 bp, Homo sapiens
aatgtggtacatgta

SEQ ID NO: 1160532 - DNA, 15 bp, Homo sapiens
aaatgtggtacatgt

SEQ ID NO: 1160533 - DNA, 15 bp, Homo sapiens
aaaatgtggtacatg

SEQ ID NO: 1160534 - DNA, 15 bp, Homo sapiens
gaaaatgtggtacat

SEQ ID NO: 1160535 - DNA, 15 bp, Homo sapiens
agaaaatgtggtaca

SEQ ID NO: 1160536 - DNA, 15 bp, Homo sapiens
aagaaaatgtggtac

SEQ ID NO: 1160537 - DNA, 15 bp, Homo sapiens
aaagaaaatgtggta

SEQ ID NO: 1160538 - DNA, 15 bp, Homo sapiens
caaagaaaatgtggt

SEQ ID NO: 1160539 - DNA, 15 bp, Homo sapiens
acaaagaaaatgtgg

SEQ ID NO: 1160540 - DNA, 15 bp, Homo sapiens
gacaaagaaaatgtg

SEQ ID NO: 1160541 - DNA, 15 bp, Homo sapiens
ggacaaagaaaatgt

SEQ ID NO: 1160542 - DNA, 15 bp, Homo sapiens
gggacaaagaaaatg

SEQ ID NO: 1160543 - DNA, 15 bp, Homo sapiens
tgggacaaagaaaat

SEQ ID NO: 1160544 - DNA, 15 bp, Homo sapiens
atgggacaaagaaaa

SEQ ID NO: 1160545 - DNA, 15 bp, Homo sapiens
gatgggacaaagaaa

SEQ ID NO: 1160546 - DNA, 15 bp, Homo sapiens
agatgggacaaagaa

SEQ ID NO: 1160547 - DNA, 15 bp, Homo sapiens
tagatgggacaaaga

SEQ ID NO: 1160548 - DNA, 15 bp, Homo sapiens
gtagatgggacaaag

SEQ ID NO: 1160549 - DNA, 15 bp, Homo sapiens
ggtagatgggacaaa

SEQ ID NO: 1160550 - DNA, 15 bp, Homo sapiens
tggtagatgggacaa

SEQ ID NO: 1160551 - DNA, 15 bp, Homo sapiens
atggtagatgggaca

SEQ ID NO: 1160552 - DNA, 15 bp, Homo sapiens
aatggtagatgggac

SEQ ID NO: 1160553 - DNA, 15 bp, Homo sapiens
caatggtagatggga

SEQ ID NO: 1160554 - DNA, 15 bp, Homo sapiens
tcaatggtagatggg

SEQ ID NO: 1160555 - DNA, 15 bp, Homo sapiens
atcaatggtagatgg

SEQ ID NO: 1160556 - DNA, 15 bp, Homo sapiens
catcaatggtagatg

SEQ ID NO: 1160557 - DNA, 15 bp, Homo sapiens
ccatcaatggtagat

SEQ ID NO: 1160558 - DNA, 15 bp, Homo sapiens
cccatcaatggtaga

SEQ ID NO: 1160559 - DNA, 15 bp, Homo sapiens
gcccatcaatggtag

SEQ ID NO: 1160560 - DNA, 15 bp, Homo sapiens
tgcccatcaatggta

SEQ ID NO: 1160561 - DNA, 15 bp, Homo sapiens
gtgcccatcaatggt

SEQ ID NO: 1160562 - DNA, 15 bp, Homo sapiens
ggtgcccatcaatgg

SEQ ID NO: 1160563 - DNA, 15 bp, Homo sapiens
aggtgcccatcaatg

SEQ ID NO: 1160564 - DNA, 15 bp, Homo sapiens
caggtgcccatcaat

SEQ ID NO: 1160565 - DNA, 15 bp, Homo sapiens
ccaggtgcccatcaa

SEQ ID NO: 1160566 - DNA, 15 bp, Homo sapiens
cccaggtgcccatca

SEQ ID NO: 1160567 - DNA, 15 bp, Homo sapiens
acccaggtgcccatc

SEQ ID NO: 1160568 - DNA, 15 bp, Homo sapiens
aacccaggtgcccat

SEQ ID NO: 1160569 - DNA, 15 bp, Homo sapiens
gaacccaggtgccca

SEQ ID NO: 1160570 - DNA, 15 bp, Homo sapiens
tgaacccaggtgccc

SEQ ID NO: 1160571 - DNA, 15 bp, Homo sapiens
atgaacccaggtgcc

SEQ ID NO: 1160572 - DNA, 15 bp, Homo sapiens
aatgaacccaggtgc

SEQ ID NO: 1160573 - DNA, 15 bp, Homo sapiens
gaatgaacccaggtg

SEQ ID NO: 1160574 - DNA, 15 bp, Homo sapiens
ggaatgaacccaggt

SEQ ID NO: 1160575 - DNA, 15 bp, Homo sapiens
tggaatgaacccagg

SEQ ID NO: 1160576 - DNA, 15 bp, Homo sapiens
atggaatgaacccag

SEQ ID NO: 1160577 - DNA, 15 bp, Homo sapiens
catggaatgaaccca

SEQ ID NO: 1160578 - DNA, 15 bp, Homo sapiens
acatggaatgaaccc

SEQ ID NO: 1160579 - DNA, 15 bp, Homo sapiens
gacatggaatgaacc

SEQ ID NO: 1160580 - DNA, 15 bp, Homo sapiens
agacatggaatgaac

SEQ ID NO: 1160581 - DNA, 15 bp, Homo sapiens
aagacatggaatgaa

SEQ ID NO: 1160582 - DNA, 15 bp, Homo sapiens
aaagacatggaatga

SEQ ID NO: 1160583 - DNA, 15 bp, Homo sapiens
caaagacatggaatg

SEQ ID NO: 1160584 - DNA, 15 bp, Homo sapiens
gcaaagacatggaat

SEQ ID NO: 1160585 - DNA, 15 bp, Homo sapiens
agcaaagacatggaa

SEQ ID NO: 1160586 - DNA, 15 bp, Homo sapiens
cagcaaagacatgga

SEQ ID NO: 1160587 - DNA, 15 bp, Homo sapiens
acagcaaagacatgg

SEQ ID NO: 1160588 - DNA, 15 bp, Homo sapiens
aacagcaaagacatg

SEQ ID NO: 1160589 - DNA, 15 bp, Homo sapiens
caacagcaaagacat

SEQ ID NO: 1160590 - DNA, 15 bp, Homo sapiens
acaacagcaaagaca

SEQ ID NO: 1160591 - DNA, 15 bp, Homo sapiens
aacaacagcaaagac

SEQ ID NO: 1160592 - DNA, 15 bp, Homo sapiens
caacaacagcaaaga

SEQ ID NO: 1160593 - DNA, 15 bp, Homo sapiens
tcaacaacagcaaag

SEQ ID NO: 1160594 - DNA, 15 bp, Homo sapiens
ttcaacaacagcaaa

SEQ ID NO: 1160595 - DNA, 15 bp, Homo sapiens
gttcaacaacagcaa

SEQ ID NO: 1160596 - DNA, 15 bp, Homo sapiens
tgttcaacaacagca

SEQ ID NO: 1160597 - DNA, 15 bp, Homo sapiens
gtgttcaacaacagc

SEQ ID NO: 1160598 - DNA, 15 bp, Homo sapiens
agtgttcaacaacag

SEQ ID NO: 1160599 - DNA, 15 bp, Homo sapiens
gagtgttcaacaaca

SEQ ID NO: 1160600 - DNA, 15 bp, Homo sapiens
tgagtgttcaacaac

SEQ ID NO: 1160601 - DNA, 15 bp, Homo sapiens
atgagtgttcaacaa

SEQ ID NO: 1160602 - DNA, 15 bp, Homo sapiens
aatgagtgttcaaca

SEQ ID NO: 1160603 - DNA, 15 bp, Homo sapiens
aaatgagtgttcaac

SEQ ID NO: 1160604 - DNA, 15 bp, Homo sapiens
taaatgagtgttcaa

SEQ ID NO: 1160605 - DNA, 15 bp, Homo sapiens
ttaaatgagtgttca

SEQ ID NO: 1160606 - DNA, 15 bp, Homo sapiens
tttaaatgagtgttc

SEQ ID NO: 1160607 - DNA, 15 bp, Homo sapiens
gtttaaatgagtgtt

SEQ ID NO: 1160608 - DNA, 15 bp, Homo sapiens
tgtttaaatgagtgt

SEQ ID NO: 1160609 - DNA, 15 bp, Homo sapiens
gtgtttaaatgagtg

SEQ ID NO: 1160610 - DNA, 15 bp, Homo sapiens
tgtgtttaaatgagt

SEQ ID NO: 1160611 - DNA, 15 bp, Homo sapiens
ttgtgtttaaatgag

SEQ ID NO: 1160612 - DNA, 15 bp, Homo sapiens
attgtgtttaaatga

SEQ ID NO: 1160613 - DNA, 15 bp, Homo sapiens
gattgtgtttaaatg

SEQ ID NO: 1160614 - DNA, 15 bp, Homo sapiens
agattgtgtttaaat

SEQ ID NO: 1160615 - DNA, 15 bp, Homo sapiens
gagattgtgtttaaa

SEQ ID NO: 1160616 - DNA, 15 bp, Homo sapiens
agagattgtgtttaa

SEQ ID NO: 1160617 - DNA, 15 bp, Homo sapiens
aagagattgtgttta

SEQ ID NO: 1160618 - DNA, 15 bp, Homo sapiens
taagagattgtgttt

SEQ ID NO: 1160619 - DNA, 15 bp, Homo sapiens
ttaagagattgtgtt

SEQ ID NO: 1160620 - DNA, 15 bp, Homo sapiens
tttaagagattgtgt

SEQ ID NO: 1160621 - DNA, 15 bp, Homo sapiens
gtttaagagattgtg

SEQ ID NO: 1160622 - DNA, 15 bp, Homo sapiens
agtttaagagattgt

SEQ ID NO: 1160623 - DNA, 15 bp, Homo sapiens
gagtttaagagattg

SEQ ID NO: 1160624 - DNA, 15 bp, Homo sapiens
agagtttaagagatt

SEQ ID NO: 1160625 - DNA, 15 bp, Homo sapiens
gagagtttaagagat

SEQ ID NO: 1160626 - DNA, 15 bp, Homo sapiens
agagagtttaagaga

SEQ ID NO: 1160627 - DNA, 15 bp, Homo sapiens
aagagagtttaagag

SEQ ID NO: 1160628 - DNA, 15 bp, Homo sapiens
taagagagtttaaga

SEQ ID NO: 1160629 - DNA, 15 bp, Homo sapiens
ttaagagagtttaag

SEQ ID NO: 1160630 - DNA, 15 bp, Homo sapiens
cttaagagagtttaa

SEQ ID NO: 1160631 - DNA, 15 bp, Homo sapiens
tcttaagagagttta

SEQ ID NO: 1160632 - DNA, 15 bp, Homo sapiens
ttcttaagagagttt

SEQ ID NO: 1160633 - DNA, 15 bp, Homo sapiens
attcttaagagagtt

SEQ ID NO: 1160634 - DNA, 15 bp, Homo sapiens
gattcttaagagagt

SEQ ID NO: 1160635 - DNA, 15 bp, Homo sapiens
tgattcttaagagag

SEQ ID NO: 1160636 - DNA, 15 bp, Homo sapiens
ctgattcttaagaga

SEQ ID NO: 1160637 - DNA, 15 bp, Homo sapiens
actgattcttaagag

SEQ ID NO: 1160638 - DNA, 15 bp, Homo sapiens
gactgattcttaaga

SEQ ID NO: 1160639 - DNA, 15 bp, Homo sapiens
tgactgattcttaag

SEQ ID NO: 1160640 - DNA, 15 bp, Homo sapiens
atgactgattcttaa

SEQ ID NO: 1160641 - DNA, 15 bp, Homo sapiens
tatgactgattctta

SEQ ID NO: 1160642 - DNA, 15 bp, Homo sapiens
ttatgactgattctt

SEQ ID NO: 1160643 - DNA, 15 bp, Homo sapiens
attatgactgattct

SEQ ID NO: 1160644 - DNA, 15 bp, Homo sapiens
gattatgactgattc

SEQ ID NO: 1160645 - DNA, 15 bp, Homo sapiens
agattatgactgatt

SEQ ID NO: 1160646 - DNA, 15 bp, Homo sapiens
cagattatgactgat

SEQ ID NO: 1160647 - DNA, 15 bp, Homo sapiens
acagattatgactga

SEQ ID NO: 1160648 - DNA, 15 bp, Homo sapiens
gacagattatgactg

SEQ ID NO: 1160649 - DNA, 15 bp, Homo sapiens
tgacagattatgact

SEQ ID NO: 1160650 - DNA, 15 bp, Homo sapiens
ttgacagattatgac

SEQ ID NO: 1160651 - DNA, 15 bp, Homo sapiens
tttgacagattatga

SEQ ID NO: 1160652 - DNA, 15 bp, Homo sapiens
atttgacagattatg

SEQ ID NO: 1160653 - DNA, 15 bp, Homo sapiens
catttgacagattat

SEQ ID NO: 1160654 - DNA, 15 bp, Homo sapiens
gcatttgacagatta

SEQ ID NO: 1160655 - DNA, 15 bp, Homo sapiens
tgcatttgacagatt

SEQ ID NO: 1160656 - DNA, 15 bp, Homo sapiens
ctgcatttgacagat

SEQ ID NO: 1160657 - DNA, 15 bp, Homo sapiens
tctgcatttgacaga

SEQ ID NO: 1160658 - DNA, 15 bp, Homo sapiens
atctgcatttgacag

SEQ ID NO: 1160659 - DNA, 15 bp, Homo sapiens
aatctgcatttgaca

SEQ ID NO: 1160660 - DNA, 15 bp, Homo sapiens
taatctgcatttgac

SEQ ID NO: 1160661 - DNA, 15 bp, Homo sapiens
ataatctgcatttga

SEQ ID NO: 1160662 - DNA, 15 bp, Homo sapiens
tataatctgcatttg

SEQ ID NO: 1160663 - DNA, 15 bp, Homo sapiens
atataatctgcattt

SEQ ID NO: 1160664 - DNA, 15 bp, Homo sapiens
tatataatctgcatt

SEQ ID NO: 1160665 - DNA, 15 bp, Homo sapiens
atatataatctgcat

SEQ ID NO: 1160666 - DNA, 15 bp, Homo sapiens
catatataatctgca

SEQ ID NO: 1160667 - DNA, 15 bp, Homo sapiens
gcatatataatctgc

SEQ ID NO: 1160668 - DNA, 15 bp, Homo sapiens
ggcatatataatctg

SEQ ID NO: 1160669 - DNA, 15 bp, Homo sapiens
gggcatatataatct

SEQ ID NO: 1160670 - DNA, 15 bp, Homo sapiens
ggggcatatataatc

SEQ ID NO: 1160671 - DNA, 15 bp, Homo sapiens
aggggcatatataat

SEQ ID NO: 1160672 - DNA, 15 bp, Homo sapiens
aaggggcatatataa

SEQ ID NO: 1160673 - DNA, 15 bp, Homo sapiens
caaggggcatatata

SEQ ID NO: 1160674 - DNA, 15 bp, Homo sapiens
acaaggggcatatat

SEQ ID NO: 1160675 - DNA, 15 bp, Homo sapiens
gacaaggggcatata

SEQ ID NO: 1160676 - DNA, 15 bp, Homo sapiens
agacaaggggcatat

SEQ ID NO: 1160677 - DNA, 15 bp, Homo sapiens
tagacaaggggcata

SEQ ID NO: 1160678 - DNA, 15 bp, Homo sapiens
atagacaaggggcat

SEQ ID NO: 1160679 - DNA, 15 bp, Homo sapiens
tatagacaaggggca

SEQ ID NO: 1160680 - DNA, 15 bp, Homo sapiens
gtatagacaaggggc

SEQ ID NO: 1160681 - DNA, 15 bp, Homo sapiens
ggtatagacaagggg

SEQ ID NO: 1160682 - DNA, 15 bp, Homo sapiens
tggtatagacaaggg

SEQ ID NO: 1160683 - DNA, 15 bp, Homo sapiens
atggtatagacaagg

SEQ ID NO: 1160684 - DNA, 15 bp, Homo sapiens
gatggtatagacaag

SEQ ID NO: 1160685 - DNA, 15 bp, Homo sapiens
tgatggtatagacaa

SEQ ID NO: 1160686 - DNA, 15 bp, Homo sapiens
ctgatggtatagaca

SEQ ID NO: 1160687 - DNA, 15 bp, Homo sapiens
gctgatggtatagac

SEQ ID NO: 1160688 - DNA, 15 bp, Homo sapiens
agctgatggtataga

SEQ ID NO: 1160689 - DNA, 15 bp, Homo sapiens
aagctgatggtatag

SEQ ID NO: 1160690 - DNA, 15 bp, Homo sapiens
gaagctgatggtata

SEQ ID NO: 1160691 - DNA, 15 bp, Homo sapiens
agaagctgatggtat

SEQ ID NO: 1160692 - DNA, 15 bp, Homo sapiens
aagaagctgatggta

SEQ ID NO: 1160693 - DNA, 15 bp, Homo sapiens
taagaagctgatggt

SEQ ID NO: 1160694 - DNA, 15 bp, Homo sapiens
gtaagaagctgatgg

SEQ ID NO: 1160695 - DNA, 15 bp, Homo sapiens
tgtaagaagctgatg

SEQ ID NO: 1160696 - DNA, 15 bp, Homo sapiens
ctgtaagaagctgat

SEQ ID NO: 1160697 - DNA, 15 bp, Homo sapiens
actgtaagaagctga

SEQ ID NO: 1160698 - DNA, 15 bp, Homo sapiens
tactgtaagaagctg

SEQ ID NO: 1160699 - DNA, 15 bp, Homo sapiens
ctactgtaagaagct

SEQ ID NO: 1160700 - DNA, 15 bp, Homo sapiens
tctactgtaagaagc

SEQ ID NO: 1160701 - DNA, 15 bp, Homo sapiens
ttctactgtaagaag

SEQ ID NO: 1160702 - DNA, 15 bp, Homo sapiens
tttctactgtaagaa

SEQ ID NO: 1160703 - DNA, 15 bp, Homo sapiens
ttttctactgtaaga

SEQ ID NO: 1160704 - DNA, 15 bp, Homo sapiens
cttttctactgtaag

SEQ ID NO: 1160705 - DNA, 15 bp, Homo sapiens
tcttttctactgtaa

SEQ ID NO: 1160706 - DNA, 15 bp, Homo sapiens
ctcttttctactgta

SEQ ID NO: 1160707 - DNA, 15 bp, Homo sapiens
tctcttttctactgt

SEQ ID NO: 1160708 - DNA, 15 bp, Homo sapiens
ctctcttttctactg

SEQ ID NO: 1160709 - DNA, 15 bp, Homo sapiens
tctctcttttctact

SEQ ID NO: 1160710 - DNA, 15 bp, Homo sapiens
ttctctcttttctac

SEQ ID NO: 1160711 - DNA, 15 bp, Homo sapiens
tttctctcttttcta

SEQ ID NO: 1160712 - DNA, 15 bp, Homo sapiens
ctttctctcttttct

SEQ ID NO: 1160713 - DNA, 15 bp, Homo sapiens
tctttctctcttttc

SEQ ID NO: 1160714 - DNA, 15 bp, Homo sapiens
ttctttctctctttt

SEQ ID NO: 1160715 - DNA, 15 bp, Homo sapiens
tttctttctctcttt

SEQ ID NO: 1160716 - DNA, 15 bp, Homo sapiens
ctttctttctctctt

SEQ ID NO: 1160717 - DNA, 15 bp, Homo sapiens
actttctttctctct

SEQ ID NO: 1160718 - DNA, 15 bp, Homo sapiens
cactttctttctctc

SEQ ID NO: 1160719 - DNA, 15 bp, Homo sapiens
gcactttctttctct

SEQ ID NO: 1160720 - DNA, 15 bp, Homo sapiens
tgcactttctttctc

SEQ ID NO: 1160721 - DNA, 15 bp, Homo sapiens
ttgcactttctttct

SEQ ID NO: 1160722 - DNA, 15 bp, Homo sapiens
tttgcactttctttc

SEQ ID NO: 1160723 - DNA, 15 bp, Homo sapiens
gtttgcactttcttt

SEQ ID NO: 1160724 - DNA, 15 bp, Homo sapiens
tgtttgcactttctt

SEQ ID NO: 1160725 - DNA, 15 bp, Homo sapiens
ttgtttgcactttct

SEQ ID NO: 1160726 - DNA, 15 bp, Homo sapiens
tttgtttgcactttc

SEQ ID NO: 1160727 - DNA, 15 bp, Homo sapiens
ctttgtttgcacttt

SEQ ID NO: 1160728 - DNA, 15 bp, Homo sapiens
cctttgtttgcactt

SEQ ID NO: 1160729 - DNA, 15 bp, Homo sapiens
gcctttgtttgcact

SEQ ID NO: 1160730 - DNA, 15 bp, Homo sapiens
ggcctttgtttgcac

SEQ ID NO: 1160731 - DNA, 15 bp, Homo sapiens
tggcctttgtttgca

SEQ ID NO: 1160732 - DNA, 15 bp, Homo sapiens
ctggcctttgtttgc

SEQ ID NO: 1160733 - DNA, 15 bp, Homo sapiens
cctggcctttgtttg

SEQ ID NO: 1160734 - DNA, 15 bp, Homo sapiens
gcctggcctttgttt

SEQ ID NO: 1160735 - DNA, 15 bp, Homo sapiens
cgcctggcctttgtt

SEQ ID NO: 1160736 - DNA, 15 bp, Homo sapiens
gcgcctggcctttgt

SEQ ID NO: 1160737 - DNA, 15 bp, Homo sapiens
cgcgcctggcctttg

SEQ ID NO: 1160738 - DNA, 15 bp, Homo sapiens
ccgcgcctggccttt

SEQ ID NO: 1160739 - DNA, 15 bp, Homo sapiens
accgcgcctggcctt

SEQ ID NO: 1160740 - DNA, 15 bp, Homo sapiens
caccgcgcctggcct

SEQ ID NO: 1160741 - DNA, 15 bp, Homo sapiens
atgatccacctgcct

SEQ ID NO: 1160742 - DNA, 15 bp, Homo sapiens
gatgatccacctgcc

SEQ ID NO: 1160743 - DNA, 15 bp, Homo sapiens
agatgatccacctgc

SEQ ID NO: 1160744 - DNA, 15 bp, Homo sapiens
cagatgatccacctg

SEQ ID NO: 1160745 - DNA, 15 bp, Homo sapiens
tcagatgatccacct

SEQ ID NO: 1160746 - DNA, 15 bp, Homo sapiens
ctcagatgatccacc

SEQ ID NO: 1160747 - DNA, 15 bp, Homo sapiens
cctcagatgatccac

SEQ ID NO: 1160748 - DNA, 15 bp, Homo sapiens
acctcagatgatcca

SEQ ID NO: 1160749 - DNA, 15 bp, Homo sapiens
gacctcagatgatcc

SEQ ID NO: 1160750 - DNA, 15 bp, Homo sapiens
tgacctcagatgatc

SEQ ID NO: 1160751 - DNA, 15 bp, Homo sapiens
ctgacctcagatgat

SEQ ID NO: 1160752 - DNA, 15 bp, Homo sapiens
cctgacctcagatga

SEQ ID NO: 1160753 - DNA, 15 bp, Homo sapiens
tcctgacctcagatg

SEQ ID NO: 1160754 - DNA, 15 bp, Homo sapiens
ctcctgacctcagat

SEQ ID NO: 1160755 - DNA, 15 bp, Homo sapiens
actcctgacctcaga

SEQ ID NO: 1160756 - DNA, 15 bp, Homo sapiens
gcgccaccatgcccg

SEQ ID NO: 1160757 - DNA, 15 bp, Homo sapiens
ggcatgcgccaccat

SEQ ID NO: 1160758 - DNA, 15 bp, Homo sapiens
tcaggcatgcgccac

SEQ ID NO: 1160759 - DNA, 15 bp, Homo sapiens
ttcaggcatgcgcca

SEQ ID NO: 1160760 - DNA, 15 bp, Homo sapiens
tttcaggcatgcgcc

SEQ ID NO: 1160761 - DNA, 15 bp, Homo sapiens
atttcaggcatgcgc

SEQ ID NO: 1160762 - DNA, 15 bp, Homo sapiens
gatttcaggcatgcg

SEQ ID NO: 1160763 - DNA, 15 bp, Homo sapiens
ggatttcaggcatgc

SEQ ID NO: 1160764 - DNA, 15 bp, Homo sapiens
gggatttcaggcatg

SEQ ID NO: 1160765 - DNA, 15 bp, Homo sapiens
tgggatttcaggcat

SEQ ID NO: 1160766 - DNA, 15 bp, Homo sapiens
ctgggatttcaggca

SEQ ID NO: 1160767 - DNA, 15 bp, Homo sapiens
gctgggatttcaggc

SEQ ID NO: 1160768 - DNA, 15 bp, Homo sapiens
agctgggatttcagg

SEQ ID NO: 1160769 - DNA, 15 bp, Homo sapiens
tagctgggatttcag

SEQ ID NO: 1160770 - DNA, 15 bp, Homo sapiens
gtagctgggatttca

SEQ ID NO: 1160771 - DNA, 15 bp, Homo sapiens
agtagctgggatttc

SEQ ID NO: 1160772 - DNA, 15 bp, Homo sapiens
gagtagctgggattt

SEQ ID NO: 1160773 - DNA, 15 bp, Homo sapiens
cggagtagctgggat

SEQ ID NO: 1160774 - DNA, 15 bp, Homo sapiens
ccggagtagctggga

SEQ ID NO: 1160775 - DNA, 15 bp, Homo sapiens
tccggagtagctggg

SEQ ID NO: 1160776 - DNA, 15 bp, Homo sapiens
ctccggagtagctgg

SEQ ID NO: 1160777 - DNA, 15 bp, Homo sapiens
cctccggagtagctg

SEQ ID NO: 1160778 - DNA, 15 bp, Homo sapiens
gcctccggagtagct

SEQ ID NO: 1160779 - DNA, 15 bp, Homo sapiens
agcctccggagtagc

SEQ ID NO: 1160780 - DNA, 15 bp, Homo sapiens
cagcctccggagtag

SEQ ID NO: 1160781 - DNA, 15 bp, Homo sapiens
tcagcctccggagta

SEQ ID NO: 1160782 - DNA, 15 bp, Homo sapiens
ctcagcctccggagt

SEQ ID NO: 1160783 - DNA, 15 bp, Homo sapiens
cctcagcctccggag

SEQ ID NO: 1160784 - DNA, 15 bp, Homo sapiens
ccgggctcaagcaat

SEQ ID NO: 1160785 - DNA, 15 bp, Homo sapiens
cccgggctcaagcaa

SEQ ID NO: 1160786 - DNA, 15 bp, Homo sapiens
tcccgggctcaagca

SEQ ID NO: 1160787 - DNA, 15 bp, Homo sapiens
ctcccgggctcaagc

SEQ ID NO: 1160788 - DNA, 15 bp, Homo sapiens
cctcccgggctcaag

SEQ ID NO: 1160789 - DNA, 15 bp, Homo sapiens
gcctcccgggctcaa

SEQ ID NO: 1160790 - DNA, 15 bp, Homo sapiens
tgcctcccgggctca

SEQ ID NO: 1160791 - DNA, 15 bp, Homo sapiens
gtgcctcccgggctc

SEQ ID NO: 1160792 - DNA, 15 bp, Homo sapiens
tgtgcctcccgggct

SEQ ID NO: 1160793 - DNA, 15 bp, Homo sapiens
ctgtgcctcccgggc

SEQ ID NO: 1160794 - DNA, 15 bp, Homo sapiens
cctgtgcctcccggg

SEQ ID NO: 1160795 - DNA, 15 bp, Homo sapiens
acctgtgcctcccgg

SEQ ID NO: 1160796 - DNA, 15 bp, Homo sapiens
aacctgtgcctcccg

SEQ ID NO: 1160797 - DNA, 15 bp, Homo sapiens
caacctgtgcctccc

SEQ ID NO: 1160798 - DNA, 15 bp, Homo sapiens
gcaacctgtgcctcc

SEQ ID NO: 1160799 - DNA, 15 bp, Homo sapiens
cgcaacctgtgcctc

SEQ ID NO: 1160800 - DNA, 15 bp, Homo sapiens
ccgcaacctgtgcct

SEQ ID NO: 1160801 - DNA, 15 bp, Homo sapiens
gccgcaacctgtgcc

SEQ ID NO: 1160802 - DNA, 15 bp, Homo sapiens
cgccgcaacctgtgc

SEQ ID NO: 1160803 - DNA, 15 bp, Homo sapiens
tcgccgcaacctgtg

SEQ ID NO: 1160804 - DNA, 15 bp, Homo sapiens
ctcgccgcaacctgt

SEQ ID NO: 1160805 - DNA, 15 bp, Homo sapiens
gctcgccgcaacctg

SEQ ID NO: 1160806 - DNA, 15 bp, Homo sapiens
ggctcgccgcaacct

SEQ ID NO: 1160807 - DNA, 15 bp, Homo sapiens
cggctcgccgcaacc

SEQ ID NO: 1160808 - DNA, 15 bp, Homo sapiens
tcggctcgccgcaac

SEQ ID NO: 1160809 - DNA, 15 bp, Homo sapiens
ctcggctcgccgcaa

SEQ ID NO: 1160810 - DNA, 15 bp, Homo sapiens
tctcggctcgccgca

SEQ ID NO: 1160811 - DNA, 15 bp, Homo sapiens
atctcggctcgccgc

SEQ ID NO: 1160812 - DNA, 15 bp, Homo sapiens
gatctcggctcgccg

SEQ ID NO: 1160813 - DNA, 15 bp, Homo sapiens
cgatctcggctcgcc

SEQ ID NO: 1160814 - DNA, 15 bp, Homo sapiens
acgatctcggctcgc

SEQ ID NO: 1160815 - DNA, 15 bp, Homo sapiens
cacgatctcggctcg

SEQ ID NO: 1160816 - DNA, 15 bp, Homo sapiens
cggccaggctggagt

SEQ ID NO: 1160817 - DNA, 15 bp, Homo sapiens
tcggccaggctggag

SEQ ID NO: 1160818 - DNA, 15 bp, Homo sapiens
gtcggccaggctgga

SEQ ID NO: 1160819 - DNA, 15 bp, Homo sapiens
ctgtcggccaggctg

SEQ ID NO: 1160820 - DNA, 15 bp, Homo sapiens
tctgtcggccaggct

SEQ ID NO: 1160821 - DNA, 15 bp, Homo sapiens
ctctgtcggccaggc

SEQ ID NO: 1160822 - DNA, 15 bp, Homo sapiens
gctctgtcggccagg

SEQ ID NO: 1160823 - DNA, 15 bp, Homo sapiens
cgctctgtcggccag

SEQ ID NO: 1160824 - DNA, 15 bp, Homo sapiens
tcgctctgtcggcca

SEQ ID NO: 1160825 - DNA, 15 bp, Homo sapiens
ctcgctctgtcggcc

SEQ ID NO: 1160826 - DNA, 15 bp, Homo sapiens
tctcgctctgtcggc

SEQ ID NO: 1160827 - DNA, 15 bp, Homo sapiens
gtctcgctctgtcgg

SEQ ID NO: 1160828 - DNA, 15 bp, Homo sapiens
gcgcttttttttttt

SEQ ID NO: 1160829 - DNA, 15 bp, Homo sapiens
tgcgctttttttttt

SEQ ID NO: 1160830 - DNA, 15 bp, Homo sapiens
ttgcgcttttttttt

SEQ ID NO: 1160831 - DNA, 15 bp, Homo sapiens
tttgcgctttttttt

SEQ ID NO: 1160832 - DNA, 15 bp, Homo sapiens
gtttgcgcttttttt

SEQ ID NO: 1160833 - DNA, 15 bp, Homo sapiens
tgtttgcgctttttt

SEQ ID NO: 1160834 - DNA, 15 bp, Homo sapiens
ttgtttgcgcttttt

SEQ ID NO: 1160835 - DNA, 15 bp, Homo sapiens
tttgtttgcgctttt

SEQ ID NO: 1160836 - DNA, 15 bp, Homo sapiens
ttttgtttgcgcttt

SEQ ID NO: 1160837 - DNA, 15 bp, Homo sapiens
tttttgtttgcgctt

SEQ ID NO: 1160838 - DNA, 15 bp, Homo sapiens
atttttgtttgcgct

SEQ ID NO: 1160839 - DNA, 15 bp, Homo sapiens
tatttttgtttgcgc

SEQ ID NO: 1160840 - DNA, 15 bp, Homo sapiens
gtatttttgtttgcg

SEQ ID NO: 1160841 - DNA, 15 bp, Homo sapiens
agtatttttgtttgc

SEQ ID NO: 1160842 - DNA, 15 bp, Homo sapiens
aagtatttttgtttg

SEQ ID NO: 1160843 - DNA, 15 bp, Homo sapiens
taagtatttttgttt

SEQ ID NO: 1160844 - DNA, 15 bp, Homo sapiens
ataagtatttttgtt

SEQ ID NO: 1160845 - DNA, 15 bp, Homo sapiens
aataagtatttttgt

SEQ ID NO: 1160846 - DNA, 15 bp, Homo sapiens
caataagtatttttg

SEQ ID NO: 1160847 - DNA, 15 bp, Homo sapiens
acaataagtattttt

SEQ ID NO: 1160848 - DNA, 15 bp, Homo sapiens
cacaataagtatttt

SEQ ID NO: 1160849 - DNA, 15 bp, Homo sapiens
tcacaataagtattt

SEQ ID NO: 1160850 - DNA, 15 bp, Homo sapiens
ctcacaataagtatt

SEQ ID NO: 1160851 - DNA, 15 bp, Homo sapiens
tctcacaataagtat

SEQ ID NO: 1160852 - DNA, 15 bp, Homo sapiens
ttctcacaataagta

SEQ ID NO: 1160853 - DNA, 15 bp, Homo sapiens
tttctcacaataagt

SEQ ID NO: 1160854 - DNA, 15 bp, Homo sapiens
ttttctcacaataag

SEQ ID NO: 1160855 - DNA, 15 bp, Homo sapiens
attttctcacaataa

SEQ ID NO: 1160856 - DNA, 15 bp, Homo sapiens
cattttctcacaata

SEQ ID NO: 1160857 - DNA, 15 bp, Homo sapiens
tcattttctcacaat

SEQ ID NO: 1160858 - DNA, 15 bp, Homo sapiens
ctcattttctcacaa

SEQ ID NO: 1160859 - DNA, 15 bp, Homo sapiens
actcattttctcaca

SEQ ID NO: 1160860 - DNA, 15 bp, Homo sapiens
aactcattttctcac

SEQ ID NO: 1160861 - DNA, 15 bp, Homo sapiens
aaactcattttctca

SEQ ID NO: 1160862 - DNA, 15 bp, Homo sapiens
taaactcattttctc

SEQ ID NO: 1160863 - DNA, 15 bp, Homo sapiens
ctaaactcattttct

SEQ ID NO: 1160864 - DNA, 15 bp, Homo sapiens
gctaaactcattttc

SEQ ID NO: 1160865 - DNA, 15 bp, Homo sapiens
agctaaactcatttt

SEQ ID NO: 1160866 - DNA, 15 bp, Homo sapiens
gagctaaactcattt

SEQ ID NO: 1160867 - DNA, 15 bp, Homo sapiens
tgagctaaactcatt

SEQ ID NO: 1160868 - DNA, 15 bp, Homo sapiens
atgagctaaactcat

SEQ ID NO: 1160869 - DNA, 15 bp, Homo sapiens
aatgagctaaactca

SEQ ID NO: 1160870 - DNA, 15 bp, Homo sapiens
gaatgagctaaactc

SEQ ID NO: 1160871 - DNA, 15 bp, Homo sapiens
tgaatgagctaaact

SEQ ID NO: 1160872 - DNA, 15 bp, Homo sapiens
ctgaatgagctaaac

SEQ ID NO: 1160873 - DNA, 15 bp, Homo sapiens
actgaatgagctaaa

SEQ ID NO: 1160874 - DNA, 15 bp, Homo sapiens
aactgaatgagctaa

SEQ ID NO: 1160875 - DNA, 15 bp, Homo sapiens
aaactgaatgagcta

SEQ ID NO: 1160876 - DNA, 15 bp, Homo sapiens
aaaactgaatgagct

SEQ ID NO: 1160877 - DNA, 15 bp, Homo sapiens
gaaaactgaatgagc

SEQ ID NO: 1160878 - DNA, 15 bp, Homo sapiens
tgaaaactgaatgag

SEQ ID NO: 1160879 - DNA, 15 bp, Homo sapiens
ttgaaaactgaatga

SEQ ID NO: 1160880 - DNA, 15 bp, Homo sapiens
tttgaaaactgaatg

SEQ ID NO: 1160881 - DNA, 15 bp, Homo sapiens
ttttgaaaactgaat

SEQ ID NO: 1160882 - DNA, 15 bp, Homo sapiens
attttgaaaactgaa

SEQ ID NO: 1160883 - DNA, 15 bp, Homo sapiens
aattttgaaaactga

SEQ ID NO: 1160884 - DNA, 15 bp, Homo sapiens
taattttgaaaactg

SEQ ID NO: 1160885 - DNA, 15 bp, Homo sapiens
ttaattttgaaaact

SEQ ID NO: 1160886 - DNA, 15 bp, Homo sapiens
attaattttgaaaac

SEQ ID NO: 1160887 - DNA, 15 bp, Homo sapiens
tattaattttgaaaa

SEQ ID NO: 1160888 - DNA, 15 bp, Homo sapiens
ttattaattttgaaa

SEQ ID NO: 1160889 - DNA, 15 bp, Homo sapiens
attattaattttgaa

SEQ ID NO: 1160890 - DNA, 15 bp, Homo sapiens
tattattaattttga

SEQ ID NO: 1160891 - DNA, 15 bp, Homo sapiens
atattattaattttg

SEQ ID NO: 1160892 - DNA, 15 bp, Homo sapiens
aatattattaatttt

SEQ ID NO: 1160893 - DNA, 15 bp, Homo sapiens
aaatattattaattt

SEQ ID NO: 1160894 - DNA, 15 bp, Homo sapiens
aaaatattattaatt

SEQ ID NO: 1160895 - DNA, 15 bp, Homo sapiens
taaaatattattaat

SEQ ID NO: 1160896 - DNA, 15 bp, Homo sapiens
gtaaaatattattaa

SEQ ID NO: 1160897 - DNA, 15 bp, Homo sapiens
tgtaaaatattatta

SEQ ID NO: 1160898 - DNA, 15 bp, Homo sapiens
ttgtaaaatattatt

SEQ ID NO: 1160899 - DNA, 15 bp, Homo sapiens
attgtaaaatattat

SEQ ID NO: 1160900 - DNA, 15 bp, Homo sapiens
tattgtaaaatatta

SEQ ID NO: 1160901 - DNA, 15 bp, Homo sapiens
ttattgtaaaatatt

SEQ ID NO: 1160902 - DNA, 15 bp, Homo sapiens
attattgtaaaatat

SEQ ID NO: 1160903 - DNA, 15 bp, Homo sapiens
aattattgtaaaata

SEQ ID NO: 1160904 - DNA, 15 bp, Homo sapiens
taattattgtaaaat

SEQ ID NO: 1160905 - DNA, 15 bp, Homo sapiens
gtaattattgtaaaa

SEQ ID NO: 1160906 - DNA, 15 bp, Homo sapiens
cgtaattattgtaaa

SEQ ID NO: 1160907 - DNA, 15 bp, Homo sapiens
tcgtaattattgtaa

SEQ ID NO: 1160908 - DNA, 15 bp, Homo sapiens
atcgtaattattgta

SEQ ID NO: 1160909 - DNA, 15 bp, Homo sapiens
aatcgtaattattgt

SEQ ID NO: 1160910 - DNA, 15 bp, Homo sapiens
caatcgtaattattg

SEQ ID NO: 1160911 - DNA, 15 bp, Homo sapiens
gcaatcgtaattatt

SEQ ID NO: 1160912 - DNA, 15 bp, Homo sapiens
agcaatcgtaattat

SEQ ID NO: 1160913 - DNA, 15 bp, Homo sapiens
tagcaatcgtaatta

SEQ ID NO: 1160914 - DNA, 15 bp, Homo sapiens
ctagcaatcgtaatt

SEQ ID NO: 1160915 - DNA, 15 bp, Homo sapiens
actagcaatcgtaat

SEQ ID NO: 1160916 - DNA, 15 bp, Homo sapiens
tactagcaatcgtaa

SEQ ID NO: 1160917 - DNA, 15 bp, Homo sapiens
ctactagcaatcgta

SEQ ID NO: 1160918 - DNA, 15 bp, Homo sapiens
gctactagcaatcgt

SEQ ID NO: 1160919 - DNA, 15 bp, Homo sapiens
tgctactagcaatcg

SEQ ID NO: 1160920 - DNA, 15 bp, Homo sapiens
ttgctactagcaatc

SEQ ID NO: 1160921 - DNA, 15 bp, Homo sapiens
cttgctactagcaat

SEQ ID NO: 1160922 - DNA, 15 bp, Homo sapiens
tcttgctactagcaa

SEQ ID NO: 1160923 - DNA, 15 bp, Homo sapiens
gtcttgctactagca

SEQ ID NO: 1160924 - DNA, 15 bp, Homo sapiens
agtcttgctactagc

SEQ ID NO: 1160925 - DNA, 15 bp, Homo sapiens
tagtcttgctactag

SEQ ID NO: 1160926 - DNA, 15 bp, Homo sapiens
ttagtcttgctacta

SEQ ID NO: 1160927 - DNA, 15 bp, Homo sapiens
attagtcttgctact

SEQ ID NO: 1160928 - DNA, 15 bp, Homo sapiens
tattagtcttgctac

SEQ ID NO: 1160929 - DNA, 15 bp, Homo sapiens
ctattagtcttgcta

SEQ ID NO: 1160930 - DNA, 15 bp, Homo sapiens
gctattagtcttgct

SEQ ID NO: 1160931 - DNA, 15 bp, Homo sapiens
ggctattagtcttgc

SEQ ID NO: 1160932 - DNA, 15 bp, Homo sapiens
tggctattagtcttg

SEQ ID NO: 1160933 - DNA, 15 bp, Homo sapiens
ttggctattagtctt

SEQ ID NO: 1160934 - DNA, 15 bp, Homo sapiens
tttggctattagtct

SEQ ID NO: 1160935 - DNA, 15 bp, Homo sapiens
gtttggctattagtc

SEQ ID NO: 1160936 - DNA, 15 bp, Homo sapiens
tgtttggctattagt

SEQ ID NO: 1160937 - DNA, 15 bp, Homo sapiens
atgtttggctattag

SEQ ID NO: 1160938 - DNA, 15 bp, Homo sapiens
aatgtttggctatta

SEQ ID NO: 1160939 - DNA, 15 bp, Homo sapiens
taatgtttggctatt

SEQ ID NO: 1160940 - DNA, 15 bp, Homo sapiens
ctaatgtttggctat

SEQ ID NO: 1160941 - DNA, 15 bp, Homo sapiens
gctaatgtttggcta

SEQ ID NO: 1160942 - DNA, 15 bp, Homo sapiens
ggctaatgtttggct

SEQ ID NO: 1160943 - DNA, 15 bp, Homo sapiens
aggctaatgtttggc

SEQ ID NO: 1160944 - DNA, 15 bp, Homo sapiens
aaggctaatgtttgg

SEQ ID NO: 1160945 - DNA, 15 bp, Homo sapiens
gaaggctaatgtttg

SEQ ID NO: 1160946 - DNA, 15 bp, Homo sapiens
tgaaggctaatgttt

SEQ ID NO: 1160947 - DNA, 15 bp, Homo sapiens
ttgaaggctaatgtt

SEQ ID NO: 1160948 - DNA, 15 bp, Homo sapiens
tttgaaggctaatgt

SEQ ID NO: 1160949 - DNA, 15 bp, Homo sapiens
atttgaaggctaatg

SEQ ID NO: 1160950 - DNA, 15 bp, Homo sapiens
tatttgaaggctaat

SEQ ID NO: 1160951 - DNA, 15 bp, Homo sapiens
ctatttgaaggctaa

SEQ ID NO: 1160952 - DNA, 15 bp, Homo sapiens
tctatttgaaggcta

SEQ ID NO: 1160953 - DNA, 15 bp, Homo sapiens
ttctatttgaaggct

SEQ ID NO: 1160954 - DNA, 15 bp, Homo sapiens
attctatttgaaggc

SEQ ID NO: 1160955 - DNA, 15 bp, Homo sapiens
cattctatttgaagg

SEQ ID NO: 1160956 - DNA, 15 bp, Homo sapiens
tcattctatttgaag

SEQ ID NO: 1160957 - DNA, 15 bp, Homo sapiens
gtcattctatttgaa

SEQ ID NO: 1160958 - DNA, 15 bp, Homo sapiens
ggtcattctatttga

SEQ ID NO: 1160959 - DNA, 15 bp, Homo sapiens
aggtcattctatttg

SEQ ID NO: 1160960 - DNA, 15 bp, Homo sapiens
aaggtcattctattt

SEQ ID NO: 1160961 - DNA, 15 bp, Homo sapiens
caaggtcattctatt

SEQ ID NO: 1160962 - DNA, 15 bp, Homo sapiens
tcaaggtcattctat

SEQ ID NO: 1160963 - DNA, 15 bp, Homo sapiens
gtcaaggtcattcta

SEQ ID NO: 1160964 - DNA, 15 bp, Homo sapiens
ggtcaaggtcattct

SEQ ID NO: 1160965 - DNA, 15 bp, Homo sapiens
aggtcaaggtcattc

SEQ ID NO: 1160966 - DNA, 15 bp, Homo sapiens
gaggtcaaggtcatt

SEQ ID NO: 1160967 - DNA, 15 bp, Homo sapiens
tgaggtcaaggtcat

SEQ ID NO: 1160968 - DNA, 15 bp, Homo sapiens
ctgaggtcaaggtca

SEQ ID NO: 1160969 - DNA, 15 bp, Homo sapiens
actgaggtcaaggtc

SEQ ID NO: 1160970 - DNA, 15 bp, Homo sapiens
cactgaggtcaaggt

SEQ ID NO: 1160971 - DNA, 15 bp, Homo sapiens
tcactgaggtcaagg

SEQ ID NO: 1160972 - DNA, 15 bp, Homo sapiens
ttcactgaggtcaag

SEQ ID NO: 1160973 - DNA, 15 bp, Homo sapiens
attcactgaggtcaa

SEQ ID NO: 1160974 - DNA, 15 bp, Homo sapiens
cattcactgaggtca

SEQ ID NO: 1160975 - DNA, 15 bp, Homo sapiens
gcattcactgaggtc

SEQ ID NO: 1160976 - DNA, 15 bp, Homo sapiens
agcattcactgaggt

SEQ ID NO: 1160977 - DNA, 15 bp, Homo sapiens
tagcattcactgagg

SEQ ID NO: 1160978 - DNA, 15 bp, Homo sapiens
atagcattcactgag

SEQ ID NO: 1160979 - DNA, 15 bp, Homo sapiens
tatagcattcactga

SEQ ID NO: 1160980 - DNA, 15 bp, Homo sapiens
atatagcattcactg

SEQ ID NO: 1160981 - DNA, 15 bp, Homo sapiens
aatatagcattcact

SEQ ID NO: 1160982 - DNA, 15 bp, Homo sapiens
caatatagcattcac

SEQ ID NO: 1160983 - DNA, 15 bp, Homo sapiens
ccaatatagcattca

SEQ ID NO: 1160984 - DNA, 15 bp, Homo sapiens
accaatatagcattc

SEQ ID NO: 1160985 - DNA, 15 bp, Homo sapiens
caccaatatagcatt

SEQ ID NO: 1160986 - DNA, 15 bp, Homo sapiens
tcaccaatatagcat

SEQ ID NO: 1160987 - DNA, 15 bp, Homo sapiens
atcaccaatatagca

SEQ ID NO: 1160988 - DNA, 15 bp, Homo sapiens
gatcaccaatatagc

SEQ ID NO: 1160989 - DNA, 15 bp, Homo sapiens
agatcaccaatatag

SEQ ID NO: 1160990 - DNA, 15 bp, Homo sapiens
gagatcaccaatata

SEQ ID NO: 1160991 - DNA, 15 bp, Homo sapiens
ggagatcaccaatat

SEQ ID NO: 1160992 - DNA, 15 bp, Homo sapiens
aggagatcaccaata

SEQ ID NO: 1160993 - DNA, 15 bp, Homo sapiens
caggagatcaccaat

SEQ ID NO: 1160994 - DNA, 15 bp, Homo sapiens
gcaggagatcaccaa

SEQ ID NO: 1160995 - DNA, 15 bp, Homo sapiens
ggcaggagatcacca

SEQ ID NO: 1160996 - DNA, 15 bp, Homo sapiens
gggcaggagatcacc

SEQ ID NO: 1160997 - DNA, 15 bp, Homo sapiens
tgggcaggagatcac

SEQ ID NO: 1160998 - DNA, 15 bp, Homo sapiens
gtgggcaggagatca

SEQ ID NO: 1160999 - DNA, 15 bp, Homo sapiens
agtgggcaggagatc

SEQ ID NO: 1161000 - DNA, 15 bp, Homo sapiens
gagtgggcaggagat

SEQ ID NO: 1161001 - DNA, 15 bp, Homo sapiens
agagtgggcaggaga

SEQ ID NO: 1161002 - DNA, 15 bp, Homo sapiens
cagagtgggcaggag

SEQ ID NO: 1161003 - DNA, 15 bp, Homo sapiens
tcagagtgggcagga

SEQ ID NO: 1161004 - DNA, 15 bp, Homo sapiens
gtcagagtgggcagg

SEQ ID NO: 1161005 - DNA, 15 bp, Homo sapiens
ggtcagagtgggcag

SEQ ID NO: 1161006 - DNA, 15 bp, Homo sapiens
aggtcagagtgggca

SEQ ID NO: 1161007 - DNA, 15 bp, Homo sapiens
gaggtcagagtgggc

SEQ ID NO: 1161008 - DNA, 15 bp, Homo sapiens
tgaggtcagagtggg

SEQ ID NO: 1161009 - DNA, 15 bp, Homo sapiens
gtgaggtcagagtgg

SEQ ID NO: 1161010 - DNA, 15 bp, Homo sapiens
agtgaggtcagagtg

SEQ ID NO: 1161011 - DNA, 15 bp, Homo sapiens
gagtgaggtcagagt

SEQ ID NO: 1161012 - DNA, 15 bp, Homo sapiens
agagtgaggtcagag

SEQ ID NO: 1161013 - DNA, 15 bp, Homo sapiens
cagagtgaggtcaga

SEQ ID NO: 1161014 - DNA, 15 bp, Homo sapiens
gcagagtgaggtcag

SEQ ID NO: 1161015 - DNA, 15 bp, Homo sapiens
ggcagagtgaggtca

SEQ ID NO: 1161016 - DNA, 15 bp, Homo sapiens
aggcagagtgaggtc

SEQ ID NO: 1161017 - DNA, 15 bp, Homo sapiens
aaggcagagtgaggt

SEQ ID NO: 1161018 - DNA, 15 bp, Homo sapiens
aaaggcagagtgagg

SEQ ID NO: 1161019 - DNA, 15 bp, Homo sapiens
gaaaggcagagtgag

SEQ ID NO: 1161020 - DNA, 15 bp, Homo sapiens
agaaaggcagagtga

SEQ ID NO: 1161021 - DNA, 15 bp, Homo sapiens
gagaaaggcagagtg

SEQ ID NO: 1161022 - DNA, 15 bp, Homo sapiens
agagaaaggcagagt

SEQ ID NO: 1161023 - DNA, 15 bp, Homo sapiens
gagagaaaggcagag

SEQ ID NO: 1161024 - DNA, 15 bp, Homo sapiens
ggagagaaaggcaga

SEQ ID NO: 1161025 - DNA, 15 bp, Homo sapiens
aggagagaaaggcag

SEQ ID NO: 1161026 - DNA, 15 bp, Homo sapiens
caggagagaaaggca

SEQ ID NO: 1161027 - DNA, 15 bp, Homo sapiens
ccaggagagaaaggc

SEQ ID NO: 1161028 - DNA, 15 bp, Homo sapiens
tccaggagagaaagg

SEQ ID NO: 1161029 - DNA, 15 bp, Homo sapiens
atccaggagagaaag

SEQ ID NO: 1161030 - DNA, 15 bp, Homo sapiens
aatccaggagagaaa

SEQ ID NO: 1161031 - DNA, 15 bp, Homo sapiens
caatccaggagagaa

SEQ ID NO: 1161032 - DNA, 15 bp, Homo sapiens
ccaatccaggagaga

SEQ ID NO: 1161033 - DNA, 15 bp, Homo sapiens
cccaatccaggagag

SEQ ID NO: 1161034 - DNA, 15 bp, Homo sapiens
ccccaatccaggaga

SEQ ID NO: 1161035 - DNA, 15 bp, Homo sapiens
tccccaatccaggag

SEQ ID NO: 1161036 - DNA, 15 bp, Homo sapiens
ttccccaatccagga

SEQ ID NO: 1161037 - DNA, 15 bp, Homo sapiens
attccccaatccagg

SEQ ID NO: 1161038 - DNA, 15 bp, Homo sapiens
cattccccaatccag

SEQ ID NO: 1161039 - DNA, 15 bp, Homo sapiens
gcattccccaatcca

SEQ ID NO: 1161040 - DNA, 15 bp, Homo sapiens
agcattccccaatcc

SEQ ID NO: 1161041 - DNA, 15 bp, Homo sapiens
cagcattccccaatc

SEQ ID NO: 1161042 - DNA, 15 bp, Homo sapiens
acagcattccccaat

SEQ ID NO: 1161043 - DNA, 15 bp, Homo sapiens
cacagcattccccaa

SEQ ID NO: 1161044 - DNA, 15 bp, Homo sapiens
tcacagcattcccca

SEQ ID NO: 1161045 - DNA, 15 bp, Homo sapiens
gtcacagcattcccc

SEQ ID NO: 1161046 - DNA, 15 bp, Homo sapiens
ggtcacagcattccc

SEQ ID NO: 1161047 - DNA, 15 bp, Homo sapiens
aggtcacagcattcc

SEQ ID NO: 1161048 - DNA, 15 bp, Homo sapiens
gaggtcacagcattc

SEQ ID NO: 1161049 - DNA, 15 bp, Homo sapiens
ggaggtcacagcatt

SEQ ID NO: 1161050 - DNA, 15 bp, Homo sapiens
cggaggtcacagcat

SEQ ID NO: 1161051 - DNA, 15 bp, Homo sapiens
acggaggtcacagca

SEQ ID NO: 1161052 - DNA, 15 bp, Homo sapiens
tacggaggtcacagc

SEQ ID NO: 1161053 - DNA, 15 bp, Homo sapiens
atacggaggtcacag

SEQ ID NO: 1161054 - DNA, 15 bp, Homo sapiens
aatacggaggtcaca

SEQ ID NO: 1161055 - DNA, 15 bp, Homo sapiens
aaatacggaggtcac

SEQ ID NO: 1161056 - DNA, 15 bp, Homo sapiens
gaaatacggaggtca

SEQ ID NO: 1161057 - DNA, 15 bp, Homo sapiens
ggaaatacggaggtc

SEQ ID NO: 1161058 - DNA, 15 bp, Homo sapiens
aggaaatacggaggt

SEQ ID NO: 1161059 - DNA, 15 bp, Homo sapiens
gaggaaatacggagg

SEQ ID NO: 1161060 - DNA, 15 bp, Homo sapiens
agaggaaatacggag

SEQ ID NO: 1161061 - DNA, 15 bp, Homo sapiens
aagaggaaatacgga

SEQ ID NO: 1161062 - DNA, 15 bp, Homo sapiens
aaagaggaaatacgg

SEQ ID NO: 1161063 - DNA, 15 bp, Homo sapiens
gaaagaggaaatacg

SEQ ID NO: 1161064 - DNA, 15 bp, Homo sapiens
agaaagaggaaatac

SEQ ID NO: 1161065 - DNA, 15 bp, Homo sapiens
gagaaagaggaaata

SEQ ID NO: 1161066 - DNA, 15 bp, Homo sapiens
agagaaagaggaaat

SEQ ID NO: 1161067 - DNA, 15 bp, Homo sapiens
aagagaaagaggaaa

SEQ ID NO: 1161068 - DNA, 15 bp, Homo sapiens
aaagagaaagaggaa

SEQ ID NO: 1161069 - DNA, 15 bp, Homo sapiens
aaaagagaaagagga

SEQ ID NO: 1161070 - DNA, 15 bp, Homo sapiens
aaaaagagaaagagg

SEQ ID NO: 1161071 - DNA, 15 bp, Homo sapiens
gaaaaagagaaagag

SEQ ID NO: 1161072 - DNA, 15 bp, Homo sapiens
ggaaaaagagaaaga

SEQ ID NO: 1161073 - DNA, 15 bp, Homo sapiens
aggaaaaagagaaag

SEQ ID NO: 1161074 - DNA, 15 bp, Homo sapiens
ataggaaaaagagaa

SEQ ID NO: 1161075 - DNA, 15 bp, Homo sapiens
tataggaaaaagaga

SEQ ID NO: 1161076 - DNA, 15 bp, Homo sapiens
ctataggaaaaagag

SEQ ID NO: 1161077 - DNA, 15 bp, Homo sapiens
cctataggaaaaaga

SEQ ID NO: 1161078 - DNA, 15 bp, Homo sapiens
tcctataggaaaaag

SEQ ID NO: 1161079 - DNA, 15 bp, Homo sapiens
gtcctataggaaaaa

SEQ ID NO: 1161080 - DNA, 15 bp, Homo sapiens
tgtcctataggaaaa

SEQ ID NO: 1161081 - DNA, 15 bp, Homo sapiens
atgtcctataggaaa

SEQ ID NO: 1161082 - DNA, 15 bp, Homo sapiens
catgtcctataggaa

SEQ ID NO: 1161083 - DNA, 15 bp, Homo sapiens
gcatgtcctatagga

SEQ ID NO: 1161084 - DNA, 15 bp, Homo sapiens
agcatgtcctatagg

SEQ ID NO: 1161085 - DNA, 15 bp, Homo sapiens
cagcatgtcctatag

SEQ ID NO: 1161086 - DNA, 15 bp, Homo sapiens
gcagcatgtcctata

SEQ ID NO: 1161087 - DNA, 15 bp, Homo sapiens
agcagcatgtcctat

SEQ ID NO: 1161088 - DNA, 15 bp, Homo sapiens
gagcagcatgtccta

SEQ ID NO: 1161089 - DNA, 15 bp, Homo sapiens
tgagcagcatgtcct

SEQ ID NO: 1161090 - DNA, 15 bp, Homo sapiens
ctgagcagcatgtcc

SEQ ID NO: 1161091 - DNA, 15 bp, Homo sapiens
actgagcagcatgtc

SEQ ID NO: 1161092 - DNA, 15 bp, Homo sapiens
aactgagcagcatgt

SEQ ID NO: 1161093 - DNA, 15 bp, Homo sapiens
gaactgagcagcatg

SEQ ID NO: 1161094 - DNA, 15 bp, Homo sapiens
ggaactgagcagcat

SEQ ID NO: 1161095 - DNA, 15 bp, Homo sapiens
aggaactgagcagca

SEQ ID NO: 1161096 - DNA, 15 bp, Homo sapiens
gaggaactgagcagc

SEQ ID NO: 1161097 - DNA, 15 bp, Homo sapiens
ggaggaactgagcag

SEQ ID NO: 1161098 - DNA, 15 bp, Homo sapiens
tggaggaactgagca

SEQ ID NO: 1161099 - DNA, 15 bp, Homo sapiens
ctggaggaactgagc

SEQ ID NO: 1161100 - DNA, 15 bp, Homo sapiens
cctggaggaactgag

SEQ ID NO: 1161101 - DNA, 15 bp, Homo sapiens
tcctggaggaactga

SEQ ID NO: 1161102 - DNA, 15 bp, Homo sapiens
gtcctggaggaactg

SEQ ID NO: 1161103 - DNA, 15 bp, Homo sapiens
tgtcctggaggaact

SEQ ID NO: 1161104 - DNA, 15 bp, Homo sapiens
atgtcctggaggaac

SEQ ID NO: 1161105 - DNA, 15 bp, Homo sapiens
catgtcctggaggaa

SEQ ID NO: 1161106 - DNA, 15 bp, Homo sapiens
tcatgtcctggagga

SEQ ID NO: 1161107 - DNA, 15 bp, Homo sapiens
ctcatgtcctggagg

SEQ ID NO: 1161108 - DNA, 15 bp, Homo sapiens
tctcatgtcctggag

SEQ ID NO: 1161109 - DNA, 15 bp, Homo sapiens
ttctcatgtcctgga

SEQ ID NO: 1161110 - DNA, 15 bp, Homo sapiens
cttctcatgtcctgg

SEQ ID NO: 1161111 - DNA, 15 bp, Homo sapiens
tcttctcatgtcctg

SEQ ID NO: 1161112 - DNA, 15 bp, Homo sapiens
atcttctcatgtcct

SEQ ID NO: 1161113 - DNA, 15 bp, Homo sapiens
tatcttctcatgtcc

SEQ ID NO: 1161114 - DNA, 15 bp, Homo sapiens
atatcttctcatgtc

SEQ ID NO: 1161115 - DNA, 15 bp, Homo sapiens
tatatcttctcatgt

SEQ ID NO: 1161116 - DNA, 15 bp, Homo sapiens
atatatcttctcatg

SEQ ID NO: 1161117 - DNA, 15 bp, Homo sapiens
catatatcttctcat

SEQ ID NO: 1161118 - DNA, 15 bp, Homo sapiens
gcatatatcttctca

SEQ ID NO: 1161119 - DNA, 15 bp, Homo sapiens
ggcatatatcttctc

SEQ ID NO: 1161120 - DNA, 15 bp, Homo sapiens
tggcatatatcttct

SEQ ID NO: 1161121 - DNA, 15 bp, Homo sapiens
gtggcatatatcttc

SEQ ID NO: 1161122 - DNA, 15 bp, Homo sapiens
ggtggcatatatctt

SEQ ID NO: 1161123 - DNA, 15 bp, Homo sapiens
tggtggcatatatct

SEQ ID NO: 1161124 - DNA, 15 bp, Homo sapiens
ctggtggcatatatc

SEQ ID NO: 1161125 - DNA, 15 bp, Homo sapiens
gctggtggcatatat

SEQ ID NO: 1161126 - DNA, 15 bp, Homo sapiens
agctggtggcatata

SEQ ID NO: 1161127 - DNA, 15 bp, Homo sapiens
gagctggtggcatat

SEQ ID NO: 1161128 - DNA, 15 bp, Homo sapiens
tgagctggtggcata

SEQ ID NO: 1161129 - DNA, 15 bp, Homo sapiens
gtgagctggtggcat

SEQ ID NO: 1161130 - DNA, 15 bp, Homo sapiens
tgtgagctggtggca

SEQ ID NO: 1161131 - DNA, 15 bp, Homo sapiens
ctgtgagctggtggc

SEQ ID NO: 1161132 - DNA, 15 bp, Homo sapiens
cctgtgagctggtgg

SEQ ID NO: 1161133 - DNA, 15 bp, Homo sapiens
tcctgtgagctggtg

SEQ ID NO: 1161134 - DNA, 15 bp, Homo sapiens
ttcctgtgagctggt

SEQ ID NO: 1161135 - DNA, 15 bp, Homo sapiens
gttcctgtgagctgg

SEQ ID NO: 1161136 - DNA, 15 bp, Homo sapiens
agttcctgtgagctg

SEQ ID NO: 1161137 - DNA, 15 bp, Homo sapiens
aagttcctgtgagct

SEQ ID NO: 1161138 - DNA, 15 bp, Homo sapiens
gaagttcctgtgagc

SEQ ID NO: 1161139 - DNA, 15 bp, Homo sapiens
ggaagttcctgtgag

SEQ ID NO: 1161140 - DNA, 15 bp, Homo sapiens
aggaagttcctgtga

SEQ ID NO: 1161141 - DNA, 15 bp, Homo sapiens
caggaagttcctgtg

SEQ ID NO: 1161142 - DNA, 15 bp, Homo sapiens
acaggaagttcctgt

SEQ ID NO: 1161143 - DNA, 15 bp, Homo sapiens
cacaggaagttcctg

SEQ ID NO: 1161144 - DNA, 15 bp, Homo sapiens
gcacaggaagttcct

SEQ ID NO: 1161145 - DNA, 15 bp, Homo sapiens
agcacaggaagttcc

SEQ ID NO: 1161146 - DNA, 15 bp, Homo sapiens
gagcacaggaagttc

SEQ ID NO: 1161147 - DNA, 15 bp, Homo sapiens
tgagcacaggaagtt

SEQ ID NO: 1161148 - DNA, 15 bp, Homo sapiens
atgagcacaggaagt

SEQ ID NO: 1161149 - DNA, 15 bp, Homo sapiens
aatgagcacaggaag

SEQ ID NO: 1161150 - DNA, 15 bp, Homo sapiens
taatgagcacaggaa

SEQ ID NO: 1161151 - DNA, 15 bp, Homo sapiens
ctaatgagcacagga

SEQ ID NO: 1161152 - DNA, 15 bp, Homo sapiens
tctaatgagcacagg

SEQ ID NO: 1161153 - DNA, 15 bp, Homo sapiens
ctctaatgagcacag

SEQ ID NO: 1161154 - DNA, 15 bp, Homo sapiens
actctaatgagcaca

SEQ ID NO: 1161155 - DNA, 15 bp, Homo sapiens
gactctaatgagcac

SEQ ID NO: 1161156 - DNA, 15 bp, Homo sapiens
tgactctaatgagca

SEQ ID NO: 1161157 - DNA, 15 bp, Homo sapiens
ttgactctaatgagc

SEQ ID NO: 1161158 - DNA, 15 bp, Homo sapiens
tttgactctaatgag

SEQ ID NO: 1161159 - DNA, 15 bp, Homo sapiens
atttgactctaatga

SEQ ID NO: 1161160 - DNA, 15 bp, Homo sapiens
gatttgactctaatg

SEQ ID NO: 1161161 - DNA, 15 bp, Homo sapiens
ggatttgactctaat

SEQ ID NO: 1161162 - DNA, 15 bp, Homo sapiens
gggatttgactctaa

SEQ ID NO: 1161163 - DNA, 15 bp, Homo sapiens
agggatttgactcta

SEQ ID NO: 1161164 - DNA, 15 bp, Homo sapiens
gagggatttgactct

SEQ ID NO: 1161165 - DNA, 15 bp, Homo sapiens
tgagggatttgactc

SEQ ID NO: 1161166 - DNA, 15 bp, Homo sapiens
ctgagggatttgact

SEQ ID NO: 1161167 - DNA, 15 bp, Homo sapiens
actgagggatttgac

SEQ ID NO: 1161168 - DNA, 15 bp, Homo sapiens
gactgagggatttga

SEQ ID NO: 1161169 - DNA, 15 bp, Homo sapiens
ggactgagggatttg

SEQ ID NO: 1161170 - DNA, 15 bp, Homo sapiens
cggactgagggattt

SEQ ID NO: 1161171 - DNA, 15 bp, Homo sapiens
acggactgagggatt

SEQ ID NO: 1161172 - DNA, 15 bp, Homo sapiens
cacggactgagggat

SEQ ID NO: 1161173 - DNA, 15 bp, Homo sapiens
tcacggactgaggga

SEQ ID NO: 1161174 - DNA, 15 bp, Homo sapiens
ctcacggactgaggg

SEQ ID NO: 1161175 - DNA, 15 bp, Homo sapiens
actcacggactgagg

SEQ ID NO: 1161176 - DNA, 15 bp, Homo sapiens
aactcacggactgag

SEQ ID NO: 1161177 - DNA, 15 bp, Homo sapiens
aaactcacggactga

SEQ ID NO: 1161178 - DNA, 15 bp, Homo sapiens
caaactcacggactg

SEQ ID NO: 1161179 - DNA, 15 bp, Homo sapiens
acaaactcacggact

SEQ ID NO: 1161180 - DNA, 15 bp, Homo sapiens
gacaaactcacggac

SEQ ID NO: 1161181 - DNA, 15 bp, Homo sapiens
ggacaaactcacgga

SEQ ID NO: 1161182 - DNA, 15 bp, Homo sapiens
aggacaaactcacgg

SEQ ID NO: 1161183 - DNA, 15 bp, Homo sapiens
aaggacaaactcacg

SEQ ID NO: 1161184 - DNA, 15 bp, Homo sapiens
aaaggacaaactcac

SEQ ID NO: 1161185 - DNA, 15 bp, Homo sapiens
gaaaggacaaactca

SEQ ID NO: 1161186 - DNA, 15 bp, Homo sapiens
tgaaaggacaaactc

SEQ ID NO: 1161187 - DNA, 15 bp, Homo sapiens
ttgaaaggacaaact

SEQ ID NO: 1161188 - DNA, 15 bp, Homo sapiens
tttgaaaggacaaac

SEQ ID NO: 1161189 - DNA, 15 bp, Homo sapiens
ttttgaaaggacaaa

SEQ ID NO: 1161190 - DNA, 15 bp, Homo sapiens
cttttgaaaggacaa

SEQ ID NO: 1161191 - DNA, 15 bp, Homo sapiens
ccttttgaaaggaca

SEQ ID NO: 1161192 - DNA, 15 bp, Homo sapiens
accttttgaaaggac

SEQ ID NO: 1161193 - DNA, 15 bp, Homo sapiens
caccttttgaaagga

SEQ ID NO: 1161194 - DNA, 15 bp, Homo sapiens
tcaccttttgaaagg

SEQ ID NO: 1161195 - DNA, 15 bp, Homo sapiens
atcaccttttgaaag

SEQ ID NO: 1161196 - DNA, 15 bp, Homo sapiens
catcaccttttgaaa

SEQ ID NO: 1161197 - DNA, 15 bp, Homo sapiens
gcatcaccttttgaa

SEQ ID NO: 1161198 - DNA, 15 bp, Homo sapiens
agcatcaccttttga

SEQ ID NO: 1161199 - DNA, 15 bp, Homo sapiens
cagcatcaccttttg

SEQ ID NO: 1161200 - DNA, 15 bp, Homo sapiens
ccagcatcacctttt

SEQ ID NO: 1161201 - DNA, 15 bp, Homo sapiens
gccagcatcaccttt

SEQ ID NO: 1161202 - DNA, 15 bp, Homo sapiens
ggccagcatcacctt

SEQ ID NO: 1161203 - DNA, 15 bp, Homo sapiens
aggccagcatcacct

SEQ ID NO: 1161204 - DNA, 15 bp, Homo sapiens
caggccagcatcacc

SEQ ID NO: 1161205 - DNA, 15 bp, Homo sapiens
gcaggccagcatcac

SEQ ID NO: 1161206 - DNA, 15 bp, Homo sapiens
cgcaggccagcatca

SEQ ID NO: 1161207 - DNA, 15 bp, Homo sapiens
ccgcaggccagcatc

SEQ ID NO: 1161208 - DNA, 15 bp, Homo sapiens
cccgcaggccagcat

SEQ ID NO: 1161209 - DNA, 15 bp, Homo sapiens
tcccgcaggccagca

SEQ ID NO: 1161210 - DNA, 15 bp, Homo sapiens
ttcccgcaggccagc

SEQ ID NO: 1161211 - DNA, 15 bp, Homo sapiens
cttcccgcaggccag

SEQ ID NO: 1161212 - DNA, 15 bp, Homo sapiens
gcttcccgcaggcca

SEQ ID NO: 1161213 - DNA, 15 bp, Homo sapiens
agcttcccgcaggcc

SEQ ID NO: 1161214 - DNA, 15 bp, Homo sapiens
aagcttcccgcaggc

SEQ ID NO: 1161215 - DNA, 15 bp, Homo sapiens
taagcttcccgcagg

SEQ ID NO: 1161216 - DNA, 15 bp, Homo sapiens
ataagcttcccgcag

SEQ ID NO: 1161217 - DNA, 15 bp, Homo sapiens
cataagcttcccgca

SEQ ID NO: 1161218 - DNA, 15 bp, Homo sapiens
tcataagcttcccgc

SEQ ID NO: 1161219 - DNA, 15 bp, Homo sapiens
gtcataagcttcccg

SEQ ID NO: 1161220 - DNA, 15 bp, Homo sapiens
cgtcataagcttccc

SEQ ID NO: 1161221 - DNA, 15 bp, Homo sapiens
gcgtcataagcttcc

SEQ ID NO: 1161222 - DNA, 15 bp, Homo sapiens
ggcgtcataagcttc

SEQ ID NO: 1161223 - DNA, 15 bp, Homo sapiens
aggcgtcataagctt

SEQ ID NO: 1161224 - DNA, 15 bp, Homo sapiens
caggcgtcataagct

SEQ ID NO: 1161225 - DNA, 15 bp, Homo sapiens
acaggcgtcataagc

SEQ ID NO: 1161226 - DNA, 15 bp, Homo sapiens
cacaggcgtcataag

SEQ ID NO: 1161227 - DNA, 15 bp, Homo sapiens
acacaggcgtcataa

SEQ ID NO: 1161228 - DNA, 15 bp, Homo sapiens
cacacaggcgtcata

SEQ ID NO: 1161229 - DNA, 15 bp, Homo sapiens
tcacacaggcgtcat

SEQ ID NO: 1161230 - DNA, 15 bp, Homo sapiens
ttcacacaggcgtca

SEQ ID NO: 1161231 - DNA, 15 bp, Homo sapiens
tttcacacaggcgtc

SEQ ID NO: 1161232 - DNA, 15 bp, Homo sapiens
ctttcacacaggcgt

SEQ ID NO: 1161233 - DNA, 15 bp, Homo sapiens
gctttcacacaggcg

SEQ ID NO: 1161234 - DNA, 15 bp, Homo sapiens
agctttcacacaggc

SEQ ID NO: 1161235 - DNA, 15 bp, Homo sapiens
gagctttcacacagg

SEQ ID NO: 1161236 - DNA, 15 bp, Homo sapiens
agagctttcacacag

SEQ ID NO: 1161237 - DNA, 15 bp, Homo sapiens
cagagctttcacaca

SEQ ID NO: 1161238 - DNA, 15 bp, Homo sapiens
ccagagctttcacac

SEQ ID NO: 1161239 - DNA, 15 bp, Homo sapiens
accagagctttcaca

SEQ ID NO: 1161240 - DNA, 15 bp, Homo sapiens
gaccagagctttcac

SEQ ID NO: 1161241 - DNA, 15 bp, Homo sapiens
agaccagagctttca

SEQ ID NO: 1161242 - DNA, 15 bp, Homo sapiens
gagaccagagctttc

SEQ ID NO: 1161243 - DNA, 15 bp, Homo sapiens
ggagaccagagcttt

SEQ ID NO: 1161244 - DNA, 15 bp, Homo sapiens
gggagaccagagctt

SEQ ID NO: 1161245 - DNA, 15 bp, Homo sapiens
agggagaccagagct

SEQ ID NO: 1161246 - DNA, 15 bp, Homo sapiens
cagggagaccagagc

SEQ ID NO: 1161247 - DNA, 15 bp, Homo sapiens
tcagggagaccagag

SEQ ID NO: 1161248 - DNA, 15 bp, Homo sapiens
ctcagggagaccaga

SEQ ID NO: 1161249 - DNA, 15 bp, Homo sapiens
cctcagggagaccag

SEQ ID NO: 1161250 - DNA, 15 bp, Homo sapiens
tcctcagggagacca

SEQ ID NO: 1161251 - DNA, 15 bp, Homo sapiens
ctcctcagggagacc

SEQ ID NO: 1161252 - DNA, 15 bp, Homo sapiens
gctcctcagggagac

SEQ ID NO: 1161253 - DNA, 15 bp, Homo sapiens
agctcctcagggaga

SEQ ID NO: 1161254 - DNA, 15 bp, Homo sapiens
tagctcctcagggag

SEQ ID NO: 1161255 - DNA, 15 bp, Homo sapiens
gtagctcctcaggga

SEQ ID NO: 1161256 - DNA, 15 bp, Homo sapiens
ggtagctcctcaggg

SEQ ID NO: 1161257 - DNA, 15 bp, Homo sapiens
tggtagctcctcagg

SEQ ID NO: 1161258 - DNA, 15 bp, Homo sapiens
atggtagctcctcag

SEQ ID NO: 1161259 - DNA, 15 bp, Homo sapiens
gatggtagctcctca

SEQ ID NO: 1161260 - DNA, 15 bp, Homo sapiens
agatggtagctcctc

SEQ ID NO: 1161261 - DNA, 15 bp, Homo sapiens
cagatggtagctcct

SEQ ID NO: 1161262 - DNA, 15 bp, Homo sapiens
gcagatggtagctcc

SEQ ID NO: 1161263 - DNA, 15 bp, Homo sapiens
tgcagatggtagctc

SEQ ID NO: 1161264 - DNA, 15 bp, Homo sapiens
ttgcagatggtagct

SEQ ID NO: 1161265 - DNA, 15 bp, Homo sapiens
tttgcagatggtagc

SEQ ID NO: 1161266 - DNA, 15 bp, Homo sapiens
atttgcagatggtag

SEQ ID NO: 1161267 - DNA, 15 bp, Homo sapiens
gatttgcagatggta

SEQ ID NO: 1161268 - DNA, 15 bp, Homo sapiens
cgatttgcagatggt

SEQ ID NO: 1161269 - DNA, 15 bp, Homo sapiens
acgatttgcagatgg

SEQ ID NO: 1161270 - DNA, 15 bp, Homo sapiens
cacgatttgcagatg

SEQ ID NO: 1161271 - DNA, 15 bp, Homo sapiens
tcacgatttgcagat

SEQ ID NO: 1161272 - DNA, 15 bp, Homo sapiens
gtcacgatttgcaga

SEQ ID NO: 1161273 - DNA, 15 bp, Homo sapiens
agtcacgatttgcag

SEQ ID NO: 1161274 - DNA, 15 bp, Homo sapiens
tagtcacgatttgca

SEQ ID NO: 1161275 - DNA, 15 bp, Homo sapiens
ttagtcacgatttgc

SEQ ID NO: 1161276 - DNA, 15 bp, Homo sapiens
cttagtcacgatttg

SEQ ID NO: 1161277 - DNA, 15 bp, Homo sapiens
acttagtcacgattt

SEQ ID NO: 1161278 - DNA, 15 bp, Homo sapiens
tacttagtcacgatt

SEQ ID NO: 1161279 - DNA, 15 bp, Homo sapiens
gtacttagtcacgat

SEQ ID NO: 1161280 - DNA, 15 bp, Homo sapiens
tgtacttagtcacga

SEQ ID NO: 1161281 - DNA, 15 bp, Homo sapiens
atgtacttagtcacg

SEQ ID NO: 1161282 - DNA, 15 bp, Homo sapiens
gatgtacttagtcac

SEQ ID NO: 1161283 - DNA, 15 bp, Homo sapiens
ggatgtacttagtca

SEQ ID NO: 1161284 - DNA, 15 bp, Homo sapiens
aggatgtacttagtc

SEQ ID NO: 1161285 - DNA, 15 bp, Homo sapiens
caggatgtacttagt

SEQ ID NO: 1161286 - DNA, 15 bp, Homo sapiens
tcaggatgtacttag

SEQ ID NO: 1161287 - DNA, 15 bp, Homo sapiens
atcaggatgtactta

SEQ ID NO: 1161288 - DNA, 15 bp, Homo sapiens
aatcaggatgtactt

SEQ ID NO: 1161289 - DNA, 15 bp, Homo sapiens
gaatcaggatgtact

SEQ ID NO: 1161290 - DNA, 15 bp, Homo sapiens
ggaatcaggatgtac

SEQ ID NO: 1161291 - DNA, 15 bp, Homo sapiens
aggaatcaggatgta

SEQ ID NO: 1161292 - DNA, 15 bp, Homo sapiens
caggaatcaggatgt

SEQ ID NO: 1161293 - DNA, 15 bp, Homo sapiens
gcaggaatcaggatg

SEQ ID NO: 1161294 - DNA, 15 bp, Homo sapiens
tgcaggaatcaggat

SEQ ID NO: 1161295 - DNA, 15 bp, Homo sapiens
ttgcaggaatcagga

SEQ ID NO: 1161296 - DNA, 15 bp, Homo sapiens
cttgcaggaatcagg

SEQ ID NO: 1161297 - DNA, 15 bp, Homo sapiens
gcttgcaggaatcag

SEQ ID NO: 1161298 - DNA, 15 bp, Homo sapiens
ggcttgcaggaatca

SEQ ID NO: 1161299 - DNA, 15 bp, Homo sapiens
tggcttgcaggaatc

SEQ ID NO: 1161300 - DNA, 15 bp, Homo sapiens
ctggcttgcaggaat

SEQ ID NO: 1161301 - DNA, 15 bp, Homo sapiens
gctggcttgcaggaa

SEQ ID NO: 1161302 - DNA, 15 bp, Homo sapiens
tgctggcttgcagga

SEQ ID NO: 1161303 - DNA, 15 bp, Homo sapiens
ctgctggcttgcagg

SEQ ID NO: 1161304 - DNA, 15 bp, Homo sapiens
gctgctggcttgcag

SEQ ID NO: 1161305 - DNA, 15 bp, Homo sapiens
ggctgctggcttgca

SEQ ID NO: 1161306 - DNA, 15 bp, Homo sapiens
tggctgctggcttgc

SEQ ID NO: 1161307 - DNA, 15 bp, Homo sapiens
ttggctgctggcttg

SEQ ID NO: 1161308 - DNA, 15 bp, Homo sapiens
tttggctgctggctt

SEQ ID NO: 1161309 - DNA, 15 bp, Homo sapiens
ctttggctgctggct

SEQ ID NO: 1161310 - DNA, 15 bp, Homo sapiens
cctttggctgctggc

SEQ ID NO: 1161311 - DNA, 15 bp, Homo sapiens
tcctttggctgctgg

SEQ ID NO: 1161312 - DNA, 15 bp, Homo sapiens
ctcctttggctgctg

SEQ ID NO: 1161313 - DNA, 15 bp, Homo sapiens
tctcctttggctgct

SEQ ID NO: 1161314 - DNA, 15 bp, Homo sapiens
ttctcctttggctgc

SEQ ID NO: 1161315 - DNA, 15 bp, Homo sapiens
attctcctttggctg

SEQ ID NO: 1161316 - DNA, 15 bp, Homo sapiens
tattctcctttggct

SEQ ID NO: 1161317 - DNA, 15 bp, Homo sapiens
ttattctcctttggc

SEQ ID NO: 1161318 - DNA, 15 bp, Homo sapiens
cttattctcctttgg

SEQ ID NO: 1161319 - DNA, 15 bp, Homo sapiens
tcttattctcctttg

SEQ ID NO: 1161320 - DNA, 15 bp, Homo sapiens
gtcttattctccttt

SEQ ID NO: 1161321 - DNA, 15 bp, Homo sapiens
ggtcttattctcctt

SEQ ID NO: 1161322 - DNA, 15 bp, Homo sapiens
aggtcttattctcct

SEQ ID NO: 1161323 - DNA, 15 bp, Homo sapiens
gaggtcttattctcc

SEQ ID NO: 1161324 - DNA, 15 bp, Homo sapiens
agaggtcttattctc

SEQ ID NO: 1161325 - DNA, 15 bp, Homo sapiens
cagaggtcttattct

SEQ ID NO: 1161326 - DNA, 15 bp, Homo sapiens
tcagaggtcttattc

SEQ ID NO: 1161327 - DNA, 15 bp, Homo sapiens
ttcagaggtcttatt

SEQ ID NO: 1161328 - DNA, 15 bp, Homo sapiens
cttcagaggtcttat

SEQ ID NO: 1161329 - DNA, 15 bp, Homo sapiens
tcttcagaggtctta

SEQ ID NO: 1161330 - DNA, 15 bp, Homo sapiens
gtcttcagaggtctt

SEQ ID NO: 1161331 - DNA, 15 bp, Homo sapiens
ggtcttcagaggtct

SEQ ID NO: 1161332 - DNA, 15 bp, Homo sapiens
gggtcttcagaggtc

SEQ ID NO: 1161333 - DNA, 15 bp, Homo sapiens
agggtcttcagaggt

SEQ ID NO: 1161334 - DNA, 15 bp, Homo sapiens
aagggtcttcagagg

SEQ ID NO: 1161335 - DNA, 15 bp, Homo sapiens
gaagggtcttcagag

SEQ ID NO: 1161336 - DNA, 15 bp, Homo sapiens
tgaagggtcttcaga

SEQ ID NO: 1161337 - DNA, 15 bp, Homo sapiens
ttgaagggtcttcag

SEQ ID NO: 1161338 - DNA, 15 bp, Homo sapiens
tttgaagggtcttca

SEQ ID NO: 1161339 - DNA, 15 bp, Homo sapiens
ttttgaagggtcttc

SEQ ID NO: 1161340 - DNA, 15 bp, Homo sapiens
gttttgaagggtctt

SEQ ID NO: 1161341 - DNA, 15 bp, Homo sapiens
agttttgaagggtct

SEQ ID NO: 1161342 - DNA, 15 bp, Homo sapiens
cagttttgaagggtc

SEQ ID NO: 1161343 - DNA, 15 bp, Homo sapiens
ccagttttgaagggt

SEQ ID NO: 1161344 - DNA, 15 bp, Homo sapiens
tccagttttgaaggg

SEQ ID NO: 1161345 - DNA, 15 bp, Homo sapiens
ttccagttttgaagg

SEQ ID NO: 1161346 - DNA, 15 bp, Homo sapiens
cttccagttttgaag

SEQ ID NO: 1161347 - DNA, 15 bp, Homo sapiens
gcttccagttttgaa

SEQ ID NO: 1161348 - DNA, 15 bp, Homo sapiens
ggcttccagttttga

SEQ ID NO: 1161349 - DNA, 15 bp, Homo sapiens
tggcttccagttttg

SEQ ID NO: 1161350 - DNA, 15 bp, Homo sapiens
ttggcttccagtttt

SEQ ID NO: 1161351 - DNA, 15 bp, Homo sapiens
tttggcttccagttt

SEQ ID NO: 1161352 - DNA, 15 bp, Homo sapiens
ctttggcttccagtt

SEQ ID NO: 1161353 - DNA, 15 bp, Homo sapiens
cctttggcttccagt

SEQ ID NO: 1161354 - DNA, 15 bp, Homo sapiens
tcctttggcttccag

SEQ ID NO: 1161355 - DNA, 15 bp, Homo sapiens
ttcctttggcttcca

SEQ ID NO: 1161356 - DNA, 15 bp, Homo sapiens
gttcctttggcttcc

SEQ ID NO: 1161357 - DNA, 15 bp, Homo sapiens
agttcctttggcttc

SEQ ID NO: 1161358 - DNA, 15 bp, Homo sapiens
cagttcctttggctt

SEQ ID NO: 1161359 - DNA, 15 bp, Homo sapiens
ccagttcctttggct

SEQ ID NO: 1161360 - DNA, 15 bp, Homo sapiens
tccagttcctttggc

SEQ ID NO: 1161361 - DNA, 15 bp, Homo sapiens
ctccagttcctttgg

SEQ ID NO: 1161362 - DNA, 15 bp, Homo sapiens
cctccagttcctttg

SEQ ID NO: 1161363 - DNA, 15 bp, Homo sapiens
gcctccagttccttt

SEQ ID NO: 1161364 - DNA, 15 bp, Homo sapiens
tgcctccagttcctt

SEQ ID NO: 1161365 - DNA, 15 bp, Homo sapiens
gtgcctccagttcct

SEQ ID NO: 1161366 - DNA, 15 bp, Homo sapiens
agtgcctccagttcc

SEQ ID NO: 1161367 - DNA, 15 bp, Homo sapiens
cagtgcctccagttc

SEQ ID NO: 1161368 - DNA, 15 bp, Homo sapiens
tcagtgcctccagtt

SEQ ID NO: 1161369 - DNA, 15 bp, Homo sapiens
atcagtgcctccagt

SEQ ID NO: 1161370 - DNA, 15 bp, Homo sapiens
aatcagtgcctccag

SEQ ID NO: 1161371 - DNA, 15 bp, Homo sapiens
aaatcagtgcctcca

SEQ ID NO: 1161372 - DNA, 15 bp, Homo sapiens
taaatcagtgcctcc

SEQ ID NO: 1161373 - DNA, 15 bp, Homo sapiens
ttaaatcagtgcctc

SEQ ID NO: 1161374 - DNA, 15 bp, Homo sapiens
attaaatcagtgcct

SEQ ID NO: 1161375 - DNA, 15 bp, Homo sapiens
cattaaatcagtgcc

SEQ ID NO: 1161376 - DNA, 15 bp, Homo sapiens
tcattaaatcagtgc

SEQ ID NO: 1161377 - DNA, 15 bp, Homo sapiens
ttcattaaatcagtg

SEQ ID NO: 1161378 - DNA, 15 bp, Homo sapiens
attcattaaatcagt

SEQ ID NO: 1161379 - DNA, 15 bp, Homo sapiens
aattcattaaatcag

SEQ ID NO: 1161380 - DNA, 15 bp, Homo sapiens
aaattcattaaatca

SEQ ID NO: 1161381 - DNA, 15 bp, Homo sapiens
gaaattcattaaatc

SEQ ID NO: 1161382 - DNA, 15 bp, Homo sapiens
ggaaattcattaaat

SEQ ID NO: 1161383 - DNA, 15 bp, Homo sapiens
aggaaattcattaaa

SEQ ID NO: 1161384 - DNA, 15 bp, Homo sapiens
caggaaattcattaa

SEQ ID NO: 1161385 - DNA, 15 bp, Homo sapiens
tcaggaaattcatta

SEQ ID NO: 1161386 - DNA, 15 bp, Homo sapiens
ttcaggaaattcatt

SEQ ID NO: 1161387 - DNA, 15 bp, Homo sapiens
cttcaggaaattcat

SEQ ID NO: 1161388 - DNA, 15 bp, Homo sapiens
tcttcaggaaattca

SEQ ID NO: 1161389 - DNA, 15 bp, Homo sapiens
gtcttcaggaaattc

SEQ ID NO: 1161390 - DNA, 15 bp, Homo sapiens
agtcttcaggaaatt

SEQ ID NO: 1161391 - DNA, 15 bp, Homo sapiens
cagtcttcaggaaat

SEQ ID NO: 1161392 - DNA, 15 bp, Homo sapiens
acagtcttcaggaaa

SEQ ID NO: 1161393 - DNA, 15 bp, Homo sapiens
tacagtcttcaggaa

SEQ ID NO: 1161394 - DNA, 15 bp, Homo sapiens
ttacagtcttcagga

SEQ ID NO: 1161395 - DNA, 15 bp, Homo sapiens
cttacagtcttcagg

SEQ ID NO: 1161396 - DNA, 15 bp, Homo sapiens
tcttacagtcttcag

SEQ ID NO: 1161397 - DNA, 15 bp, Homo sapiens
ttcttacagtcttca

SEQ ID NO: 1161398 - DNA, 15 bp, Homo sapiens
cttcttacagtcttc

SEQ ID NO: 1161399 - DNA, 15 bp, Homo sapiens
acttcttacagtctt

SEQ ID NO: 1161400 - DNA, 15 bp, Homo sapiens
tacttcttacagtct

SEQ ID NO: 1161401 - DNA, 15 bp, Homo sapiens
gtacttcttacagtc

SEQ ID NO: 1161402 - DNA, 15 bp, Homo sapiens
tgtacttcttacagt

SEQ ID NO: 1161403 - DNA, 15 bp, Homo sapiens
ttgtacttcttacag

SEQ ID NO: 1161404 - DNA, 15 bp, Homo sapiens
gttgtacttcttaca

SEQ ID NO: 1161405 - DNA, 15 bp, Homo sapiens
agttgtacttcttac

SEQ ID NO: 1161406 - DNA, 15 bp, Homo sapiens
cagttgtacttctta

SEQ ID NO: 1161407 - DNA, 15 bp, Homo sapiens
tcagttgtacttctt

SEQ ID NO: 1161408 - DNA, 15 bp, Homo sapiens
ctcagttgtacttct

SEQ ID NO: 1161409 - DNA, 15 bp, Homo sapiens
tctcagttgtacttc

SEQ ID NO: 1161410 - DNA, 15 bp, Homo sapiens
ttctcagttgtactt

SEQ ID NO: 1161411 - DNA, 15 bp, Homo sapiens
tttctcagttgtact

SEQ ID NO: 1161412 - DNA, 15 bp, Homo sapiens
atttctcagttgtac

SEQ ID NO: 1161413 - DNA, 15 bp, Homo sapiens
gatttctcagttgta

SEQ ID NO: 1161414 - DNA, 15 bp, Homo sapiens
ggatttctcagttgt

SEQ ID NO: 1161415 - DNA, 15 bp, Homo sapiens
gggatttctcagttg

SEQ ID NO: 1161416 - DNA, 15 bp, Homo sapiens
agggatttctcagtt

SEQ ID NO: 1161417 - DNA, 15 bp, Homo sapiens
aagggatttctcagt

SEQ ID NO: 1161418 - DNA, 15 bp, Homo sapiens
aaagggatttctcag

SEQ ID NO: 1161419 - DNA, 15 bp, Homo sapiens
aaaagggatttctca

SEQ ID NO: 1161420 - DNA, 15 bp, Homo sapiens
caaaagggatttctc

SEQ ID NO: 1161421 - DNA, 15 bp, Homo sapiens
tcaaaagggatttct

SEQ ID NO: 1161422 - DNA, 15 bp, Homo sapiens
ttcaaaagggatttc

SEQ ID NO: 1161423 - DNA, 15 bp, Homo sapiens
cttcaaaagggattt

SEQ ID NO: 1161424 - DNA, 15 bp, Homo sapiens
ccttcaaaagggatt

SEQ ID NO: 1161425 - DNA, 15 bp, Homo sapiens
tccttcaaaagggat

SEQ ID NO: 1161426 - DNA, 15 bp, Homo sapiens
ttccttcaaaaggga

SEQ ID NO: 1161427 - DNA, 15 bp, Homo sapiens
cttccttcaaaaggg

SEQ ID NO: 1161428 - DNA, 15 bp, Homo sapiens
ccttccttcaaaagg

SEQ ID NO: 1161429 - DNA, 15 bp, Homo sapiens
accttccttcaaaag

SEQ ID NO: 1161430 - DNA, 15 bp, Homo sapiens
aaccttccttcaaaa

SEQ ID NO: 1161431 - DNA, 15 bp, Homo sapiens
taaccttccttcaaa

SEQ ID NO: 1161432 - DNA, 15 bp, Homo sapiens
ttaaccttccttcaa

SEQ ID NO: 1161433 - DNA, 15 bp, Homo sapiens
attaaccttccttca

SEQ ID NO: 1161434 - DNA, 15 bp, Homo sapiens
cattaaccttccttc

SEQ ID NO: 1161435 - DNA, 15 bp, Homo sapiens
acattaaccttcctt

SEQ ID NO: 1161436 - DNA, 15 bp, Homo sapiens
tacattaaccttcct

SEQ ID NO: 1161437 - DNA, 15 bp, Homo sapiens
ttacattaaccttcc

SEQ ID NO: 1161438 - DNA, 15 bp, Homo sapiens
gttacattaaccttc

SEQ ID NO: 1161439 - DNA, 15 bp, Homo sapiens
ggttacattaacctt

SEQ ID NO: 1161440 - DNA, 15 bp, Homo sapiens
gggttacattaacct

SEQ ID NO: 1161441 - DNA, 15 bp, Homo sapiens
tgggttacattaacc

SEQ ID NO: 1161442 - DNA, 15 bp, Homo sapiens
ttgggttacattaac

SEQ ID NO: 1161443 - DNA, 15 bp, Homo sapiens
gttgggttacattaa

SEQ ID NO: 1161444 - DNA, 15 bp, Homo sapiens
tgttgggttacatta

SEQ ID NO: 1161445 - DNA, 15 bp, Homo sapiens
ttgttgggttacatt

SEQ ID NO: 1161446 - DNA, 15 bp, Homo sapiens
cttgttgggttacat

SEQ ID NO: 1161447 - DNA, 15 bp, Homo sapiens
tcttgttgggttaca

SEQ ID NO: 1161448 - DNA, 15 bp, Homo sapiens
ctcttgttgggttac

SEQ ID NO: 1161449 - DNA, 15 bp, Homo sapiens
gctcttgttgggtta

SEQ ID NO: 1161450 - DNA, 15 bp, Homo sapiens
tgctcttgttgggtt

SEQ ID NO: 1161451 - DNA, 15 bp, Homo sapiens
gtgctcttgttgggt

SEQ ID NO: 1161452 - DNA, 15 bp, Homo sapiens
tgtgctcttgttggg

SEQ ID NO: 1161453 - DNA, 15 bp, Homo sapiens
atgtgctcttgttgg

SEQ ID NO: 1161454 - DNA, 15 bp, Homo sapiens
aatgtgctcttgttg

SEQ ID NO: 1161455 - DNA, 15 bp, Homo sapiens
aaatgtgctcttgtt

SEQ ID NO: 1161456 - DNA, 15 bp, Homo sapiens
aaaatgtgctcttgt

SEQ ID NO: 1161457 - DNA, 15 bp, Homo sapiens
taaaatgtgctcttg

SEQ ID NO: 1161458 - DNA, 15 bp, Homo sapiens
ataaaatgtgctctt

SEQ ID NO: 1161459 - DNA, 15 bp, Homo sapiens
gataaaatgtgctct

SEQ ID NO: 1161460 - DNA, 15 bp, Homo sapiens
tgataaaatgtgctc

SEQ ID NO: 1161461 - DNA, 15 bp, Homo sapiens
atgataaaatgtgct

SEQ ID NO: 1161462 - DNA, 15 bp, Homo sapiens
tatgataaaatgtgc

SEQ ID NO: 1161463 - DNA, 15 bp, Homo sapiens
ctatgataaaatgtg

SEQ ID NO: 1161464 - DNA, 15 bp, Homo sapiens
gctatgataaaatgt

SEQ ID NO: 1161465 - DNA, 15 bp, Homo sapiens
tgctatgataaaatg

SEQ ID NO: 1161466 - DNA, 15 bp, Homo sapiens
ctgctatgataaaat

SEQ ID NO: 1161467 - DNA, 15 bp, Homo sapiens
tctgctatgataaaa

SEQ ID NO: 1161468 - DNA, 15 bp, Homo sapiens
ctctgctatgataaa

SEQ ID NO: 1161469 - DNA, 15 bp, Homo sapiens
tctctgctatgataa

SEQ ID NO: 1161470 - DNA, 15 bp, Homo sapiens
gtctctgctatgata

SEQ ID NO: 1161471 - DNA, 15 bp, Homo sapiens
tgtctctgctatgat

SEQ ID NO: 1161472 - DNA, 15 bp, Homo sapiens
atgtctctgctatga

SEQ ID NO: 1161473 - DNA, 15 bp, Homo sapiens
gatgtctctgctatg

SEQ ID NO: 1161474 - DNA, 15 bp, Homo sapiens
agatgtctctgctat

SEQ ID NO: 1161475 - DNA, 15 bp, Homo sapiens
cagatgtctctgcta

SEQ ID NO: 1161476 - DNA, 15 bp, Homo sapiens
acagatgtctctgct

SEQ ID NO: 1161477 - DNA, 15 bp, Homo sapiens
tacagatgtctctgc

SEQ ID NO: 1161478 - DNA, 15 bp, Homo sapiens
atacagatgtctctg

SEQ ID NO: 1161479 - DNA, 15 bp, Homo sapiens
catacagatgtctct

SEQ ID NO: 1161480 - DNA, 15 bp, Homo sapiens
gcatacagatgtctc

SEQ ID NO: 1161481 - DNA, 15 bp, Homo sapiens
tgcatacagatgtct

SEQ ID NO: 1161482 - DNA, 15 bp, Homo sapiens
atgcatacagatgtc

SEQ ID NO: 1161483 - DNA, 15 bp, Homo sapiens
aatgcatacagatgt

SEQ ID NO: 1161484 - DNA, 15 bp, Homo sapiens
gaatgcatacagatg

SEQ ID NO: 1161485 - DNA, 15 bp, Homo sapiens
ggaatgcatacagat

SEQ ID NO: 1161486 - DNA, 15 bp, Homo sapiens
aggaatgcatacaga

SEQ ID NO: 1161487 - DNA, 15 bp, Homo sapiens
caggaatgcatacag

SEQ ID NO: 1161488 - DNA, 15 bp, Homo sapiens
acaggaatgcataca

SEQ ID NO: 1161489 - DNA, 15 bp, Homo sapiens
gacaggaatgcatac

SEQ ID NO: 1161490 - DNA, 15 bp, Homo sapiens
tgacaggaatgcata

SEQ ID NO: 1161491 - DNA, 15 bp, Homo sapiens
atgacaggaatgcat

SEQ ID NO: 1161492 - DNA, 15 bp, Homo sapiens
aatgacaggaatgca

SEQ ID NO: 1161493 - DNA, 15 bp, Homo sapiens
taatgacaggaatgc

SEQ ID NO: 1161494 - DNA, 15 bp, Homo sapiens
gtaatgacaggaatg

SEQ ID NO: 1161495 - DNA, 15 bp, Homo sapiens
ggtaatgacaggaat

SEQ ID NO: 1161496 - DNA, 15 bp, Homo sapiens
gggtaatgacaggaa

SEQ ID NO: 1161497 - DNA, 15 bp, Homo sapiens
tgggtaatgacagga

SEQ ID NO: 1161498 - DNA, 15 bp, Homo sapiens
atgggtaatgacagg

SEQ ID NO: 1161499 - DNA, 15 bp, Homo sapiens
aatgggtaatgacag

SEQ ID NO: 1161500 - DNA, 15 bp, Homo sapiens
caatgggtaatgaca

SEQ ID NO: 1161501 - DNA, 15 bp, Homo sapiens
acaatgggtaatgac

SEQ ID NO: 1161502 - DNA, 15 bp, Homo sapiens
tacaatgggtaatga

SEQ ID NO: 1161503 - DNA, 15 bp, Homo sapiens
ttacaatgggtaatg

SEQ ID NO: 1161504 - DNA, 15 bp, Homo sapiens
gttacaatgggtaat

SEQ ID NO: 1161505 - DNA, 15 bp, Homo sapiens
tgttacaatgggtaa

SEQ ID NO: 1161506 - DNA, 15 bp, Homo sapiens
ctgttacaatgggta

SEQ ID NO: 1161507 - DNA, 15 bp, Homo sapiens
tctgttacaatgggt

SEQ ID NO: 1161508 - DNA, 15 bp, Homo sapiens
ctctgttacaatggg

SEQ ID NO: 1161509 - DNA, 15 bp, Homo sapiens
gctctgttacaatgg

SEQ ID NO: 1161510 - DNA, 15 bp, Homo sapiens
ggctctgttacaatg

SEQ ID NO: 1161511 - DNA, 15 bp, Homo sapiens
tggctctgttacaat

SEQ ID NO: 1161512 - DNA, 15 bp, Homo sapiens
gtggctctgttacaa

SEQ ID NO: 1161513 - DNA, 15 bp, Homo sapiens
tgtggctctgttaca

SEQ ID NO: 1161514 - DNA, 15 bp, Homo sapiens
ttgtggctctgttac

SEQ ID NO: 1161515 - DNA, 15 bp, Homo sapiens
tttgtggctctgtta

SEQ ID NO: 1161516 - DNA, 15 bp, Homo sapiens
gtttgtggctctgtt

SEQ ID NO: 1161517 - DNA, 15 bp, Homo sapiens
agtttgtggctctgt

SEQ ID NO: 1161518 - DNA, 15 bp, Homo sapiens
tagtttgtggctctg

SEQ ID NO: 1161519 - DNA, 15 bp, Homo sapiens
ttagtttgtggctct

SEQ ID NO: 1161520 - DNA, 15 bp, Homo sapiens
attagtttgtggctc

SEQ ID NO: 1161521 - DNA, 15 bp, Homo sapiens
tattagtttgtggct

SEQ ID NO: 1161522 - DNA, 15 bp, Homo sapiens
gtattagtttgtggc

SEQ ID NO: 1161523 - DNA, 15 bp, Homo sapiens
agtattagtttgtgg

SEQ ID NO: 1161524 - DNA, 15 bp, Homo sapiens
tagtattagtttgtg

SEQ ID NO: 1161525 - DNA, 15 bp, Homo sapiens
atagtattagtttgt

SEQ ID NO: 1161526 - DNA, 15 bp, Homo sapiens
catagtattagtttg

SEQ ID NO: 1161527 - DNA, 15 bp, Homo sapiens
gcatagtattagttt

SEQ ID NO: 1161528 - DNA, 15 bp, Homo sapiens
tgcatagtattagtt

SEQ ID NO: 1161529 - DNA, 15 bp, Homo sapiens
ttgcatagtattagt

SEQ ID NO: 1161530 - DNA, 15 bp, Homo sapiens
attgcatagtattag

SEQ ID NO: 1161531 - DNA, 15 bp, Homo sapiens
cattgcatagtatta

SEQ ID NO: 1161532 - DNA, 15 bp, Homo sapiens
acattgcatagtatt

SEQ ID NO: 1161533 - DNA, 15 bp, Homo sapiens
aacattgcatagtat

SEQ ID NO: 1161534 - DNA, 15 bp, Homo sapiens
aaacattgcatagta

SEQ ID NO: 1161535 - DNA, 15 bp, Homo sapiens
aaaacattgcatagt

SEQ ID NO: 1161536 - DNA, 15 bp, Homo sapiens
taaaacattgcatag

SEQ ID NO: 1161537 - DNA, 15 bp, Homo sapiens
gtaaaacattgcata

SEQ ID NO: 1161538 - DNA, 15 bp, Homo sapiens
ggtaaaacattgcat

SEQ ID NO: 1161539 - DNA, 15 bp, Homo sapiens
tggtaaaacattgca

SEQ ID NO: 1161540 - DNA, 15 bp, Homo sapiens
ttggtaaaacattgc

SEQ ID NO: 1161541 - DNA, 15 bp, Homo sapiens
attggtaaaacattg

SEQ ID NO: 1161542 - DNA, 15 bp, Homo sapiens
tattggtaaaacatt

SEQ ID NO: 1161543 - DNA, 15 bp, Homo sapiens
ttattggtaaaacat

SEQ ID NO: 1161544 - DNA, 15 bp, Homo sapiens
attattggtaaaaca

SEQ ID NO: 1161545 - DNA, 15 bp, Homo sapiens
cattattggtaaaac

SEQ ID NO: 1161546 - DNA, 15 bp, Homo sapiens
gcattattggtaaaa

SEQ ID NO: 1161547 - DNA, 15 bp, Homo sapiens
tgcattattggtaaa

SEQ ID NO: 1161548 - DNA, 15 bp, Homo sapiens
ttgcattattggtaa

SEQ ID NO: 1161549 - DNA, 15 bp, Homo sapiens
attgcattattggta

SEQ ID NO: 1161550 - DNA, 15 bp, Homo sapiens
tattgcattattggt

SEQ ID NO: 1161551 - DNA, 15 bp, Homo sapiens
gtattgcattattgg

SEQ ID NO: 1161552 - DNA, 15 bp, Homo sapiens
tgtattgcattattg

SEQ ID NO: 1161553 - DNA, 15 bp, Homo sapiens
ttgtattgcattatt

SEQ ID NO: 1161554 - DNA, 15 bp, Homo sapiens
tttgtattgcattat

SEQ ID NO: 1161555 - DNA, 15 bp, Homo sapiens
ttttgtattgcatta

SEQ ID NO: 1161556 - DNA, 15 bp, Homo sapiens
cttttgtattgcatt

SEQ ID NO: 1161557 - DNA, 15 bp, Homo sapiens
tcttttgtattgcat

SEQ ID NO: 1161558 - DNA, 15 bp, Homo sapiens
gtcttttgtattgca

SEQ ID NO: 1161559 - DNA, 15 bp, Homo sapiens
ggtcttttgtattgc

SEQ ID NO: 1161560 - DNA, 15 bp, Homo sapiens
aggtcttttgtattg

SEQ ID NO: 1161561 - DNA, 15 bp, Homo sapiens
gaggtcttttgtatt

SEQ ID NO: 1161562 - DNA, 15 bp, Homo sapiens
tgaggtcttttgtat

SEQ ID NO: 1161563 - DNA, 15 bp, Homo sapiens
ttgaggtcttttgta

SEQ ID NO: 1161564 - DNA, 15 bp, Homo sapiens
tttgaggtcttttgt

SEQ ID NO: 1161565 - DNA, 15 bp, Homo sapiens
ttttgaggtcttttg

SEQ ID NO: 1161566 - DNA, 15 bp, Homo sapiens
attttgaggtctttt

SEQ ID NO: 1161567 - DNA, 15 bp, Homo sapiens
tattttgaggtcttt

SEQ ID NO: 1161568 - DNA, 15 bp, Homo sapiens
gtattttgaggtctt

SEQ ID NO: 1161569 - DNA, 15 bp, Homo sapiens
ggtattttgaggtct

SEQ ID NO: 1161570 - DNA, 15 bp, Homo sapiens
aggtattttgaggtc

SEQ ID NO: 1161571 - DNA, 15 bp, Homo sapiens
caggtattttgaggt

SEQ ID NO: 1161572 - DNA, 15 bp, Homo sapiens
acaggtattttgagg

SEQ ID NO: 1161573 - DNA, 15 bp, Homo sapiens
cacaggtattttgag

SEQ ID NO: 1161574 - DNA, 15 bp, Homo sapiens
gcacaggtattttga

SEQ ID NO: 1161575 - DNA, 15 bp, Homo sapiens
tgcacaggtattttg

SEQ ID NO: 1161576 - DNA, 15 bp, Homo sapiens
atgcacaggtatttt

SEQ ID NO: 1161577 - DNA, 15 bp, Homo sapiens
aatgcacaggtattt

SEQ ID NO: 1161578 - DNA, 15 bp, Homo sapiens
aaatgcacaggtatt

SEQ ID NO: 1161579 - DNA, 15 bp, Homo sapiens
gaaatgcacaggtat

SEQ ID NO: 1161580 - DNA, 15 bp, Homo sapiens
agaaatgcacaggta

SEQ ID NO: 1161581 - DNA, 15 bp, Homo sapiens
aagaaatgcacaggt

SEQ ID NO: 1161582 - DNA, 15 bp, Homo sapiens
caagaaatgcacagg

SEQ ID NO: 1161583 - DNA, 15 bp, Homo sapiens
acaagaaatgcacag

SEQ ID NO: 1161584 - DNA, 15 bp, Homo sapiens
tacaagaaatgcaca

SEQ ID NO: 1161585 - DNA, 15 bp, Homo sapiens
ctacaagaaatgcac

SEQ ID NO: 1161586 - DNA, 15 bp, Homo sapiens
cctacaagaaatgca

SEQ ID NO: 1161587 - DNA, 15 bp, Homo sapiens
tcctacaagaaatgc

SEQ ID NO: 1161588 - DNA, 15 bp, Homo sapiens
ttcctacaagaaatg

SEQ ID NO: 1161589 - DNA, 15 bp, Homo sapiens
tttcctacaagaaat

SEQ ID NO: 1161590 - DNA, 15 bp, Homo sapiens
ttttcctacaagaaa

SEQ ID NO: 1161591 - DNA, 15 bp, Homo sapiens
gttttcctacaagaa

SEQ ID NO: 1161592 - DNA, 15 bp, Homo sapiens
tgttttcctacaaga

SEQ ID NO: 1161593 - DNA, 15 bp, Homo sapiens
ttgttttcctacaag

SEQ ID NO: 1161594 - DNA, 15 bp, Homo sapiens
gttgttttcctacaa

SEQ ID NO: 1161595 - DNA, 15 bp, Homo sapiens
tgttgttttcctaca

SEQ ID NO: 1161596 - DNA, 15 bp, Homo sapiens
ttgttgttttcctac

SEQ ID NO: 1161597 - DNA, 15 bp, Homo sapiens
tttgttgttttccta

SEQ ID NO: 1161598 - DNA, 15 bp, Homo sapiens
ttttgttgttttcct

SEQ ID NO: 1161599 - DNA, 15 bp, Homo sapiens
cttttgttgttttcc

SEQ ID NO: 1161600 - DNA, 15 bp, Homo sapiens
ccttttgttgttttc

SEQ ID NO: 1161601 - DNA, 15 bp, Homo sapiens
accttttgttgtttt

SEQ ID NO: 1161602 - DNA, 15 bp, Homo sapiens
taccttttgttgttt

SEQ ID NO: 1161603 - DNA, 15 bp, Homo sapiens
ttaccttttgttgtt

SEQ ID NO: 1161604 - DNA, 15 bp, Homo sapiens
attaccttttgttgt

SEQ ID NO: 1161605 - DNA, 15 bp, Homo sapiens
aattaccttttgttg

SEQ ID NO: 1161606 - DNA, 15 bp, Homo sapiens
taattaccttttgtt

SEQ ID NO: 1161607 - DNA, 15 bp, Homo sapiens
ataattaccttttgt

SEQ ID NO: 1161608 - DNA, 15 bp, Homo sapiens
cataattaccttttg

SEQ ID NO: 1161609 - DNA, 15 bp, Homo sapiens
acataattacctttt

SEQ ID NO: 1161610 - DNA, 15 bp, Homo sapiens
cacataattaccttt

SEQ ID NO: 1161611 - DNA, 15 bp, Homo sapiens
acacataattacctt

SEQ ID NO: 1161612 - DNA, 15 bp, Homo sapiens
tacacataattacct

SEQ ID NO: 1161613 - DNA, 15 bp, Homo sapiens
ttacacataattacc

SEQ ID NO: 1161614 - DNA, 15 bp, Homo sapiens
attacacataattac

SEQ ID NO: 1161615 - DNA, 15 bp, Homo sapiens
aattacacataatta

SEQ ID NO: 1161616 - DNA, 15 bp, Homo sapiens
taattacacataatt

SEQ ID NO: 1161617 - DNA, 15 bp, Homo sapiens
ataattacacataat

SEQ ID NO: 1161618 - DNA, 15 bp, Homo sapiens
tataattacacataa

SEQ ID NO: 1161619 - DNA, 15 bp, Homo sapiens
gtataattacacata

SEQ ID NO: 1161620 - DNA, 15 bp, Homo sapiens
agtataattacacat

SEQ ID NO: 1161621 - DNA, 15 bp, Homo sapiens
tagtataattacaca

SEQ ID NO: 1161622 - DNA, 15 bp, Homo sapiens
ttctagtataattac

SEQ ID NO: 1161623 - DNA, 15 bp, Homo sapiens
cttctagtataatta

SEQ ID NO: 1161624 - DNA, 15 bp, Homo sapiens
acttctagtataatt

SEQ ID NO: 1161625 - DNA, 15 bp, Homo sapiens
aacttctagtataat

SEQ ID NO: 1161626 - DNA, 15 bp, Homo sapiens
aaacttctagtataa

SEQ ID NO: 1161627 - DNA, 15 bp, Homo sapiens
aaaacttctagtata

SEQ ID NO: 1161628 - DNA, 15 bp, Homo sapiens
caaaacttctagtat

SEQ ID NO: 1161629 - DNA, 15 bp, Homo sapiens
acaaaacttctagta

SEQ ID NO: 1161630 - DNA, 15 bp, Homo sapiens
tacaaaacttctagt

SEQ ID NO: 1161631 - DNA, 15 bp, Homo sapiens
ttacaaaacttctag

SEQ ID NO: 1161632 - DNA, 15 bp, Homo sapiens
attacaaaacttcta

SEQ ID NO: 1161633 - DNA, 15 bp, Homo sapiens
gattacaaaacttct

SEQ ID NO: 1161634 - DNA, 15 bp, Homo sapiens
agattacaaaacttc

SEQ ID NO: 1161635 - DNA, 15 bp, Homo sapiens
cagattacaaaactt

SEQ ID NO: 1161636 - DNA, 15 bp, Homo sapiens
acagattacaaaact

SEQ ID NO: 1161637 - DNA, 15 bp, Homo sapiens
tacagattacaaaac

SEQ ID NO: 1161638 - DNA, 15 bp, Homo sapiens
atacagattacaaaa

SEQ ID NO: 1161639 - DNA, 15 bp, Homo sapiens
gatacagattacaaa

SEQ ID NO: 1161640 - DNA, 15 bp, Homo sapiens
agatacagattacaa

SEQ ID NO: 1161641 - DNA, 15 bp, Homo sapiens
aagatacagattaca

SEQ ID NO: 1161642 - DNA, 15 bp, Homo sapiens
taagatacagattac

SEQ ID NO: 1161643 - DNA, 15 bp, Homo sapiens
ataagatacagatta

SEQ ID NO: 1161644 - DNA, 15 bp, Homo sapiens
gataagatacagatt

SEQ ID NO: 1161645 - DNA, 15 bp, Homo sapiens
tgataagatacagat

SEQ ID NO: 1161646 - DNA, 15 bp, Homo sapiens
atgataagatacaga

SEQ ID NO: 1161647 - DNA, 15 bp, Homo sapiens
aatgataagatacag

SEQ ID NO: 1161648 - DNA, 15 bp, Homo sapiens
caatgataagataca

SEQ ID NO: 1161649 - DNA, 15 bp, Homo sapiens
ccaatgataagatac

SEQ ID NO: 1161650 - DNA, 15 bp, Homo sapiens
tccaatgataagata

SEQ ID NO: 1161651 - DNA, 15 bp, Homo sapiens
ttccaatgataagat

SEQ ID NO: 1161652 - DNA, 15 bp, Homo sapiens
attccaatgataaga

SEQ ID NO: 1161653 - DNA, 15 bp, Homo sapiens
tattccaatgataag

SEQ ID NO: 1161654 - DNA, 15 bp, Homo sapiens
ttattccaatgataa

SEQ ID NO: 1161655 - DNA, 15 bp, Homo sapiens
tttattccaatgata

SEQ ID NO: 1161656 - DNA, 15 bp, Homo sapiens
ttttattccaatgat

SEQ ID NO: 1161657 - DNA, 15 bp, Homo sapiens
attttattccaatga

SEQ ID NO: 1161658 - DNA, 15 bp, Homo sapiens
cattttattccaatg

SEQ ID NO: 1161659 - DNA, 15 bp, Homo sapiens
tcattttattccaat

SEQ ID NO: 1161660 - DNA, 15 bp, Homo sapiens
gtcattttattccaa

SEQ ID NO: 1161661 - DNA, 15 bp, Homo sapiens
tgtcattttattcca

SEQ ID NO: 1161662 - DNA, 15 bp, Homo sapiens
atgtcattttattcc

SEQ ID NO: 1161663 - DNA, 15 bp, Homo sapiens
aatgtcattttattc

SEQ ID NO: 1161664 - DNA, 15 bp, Homo sapiens
gaatgtcattttatt

SEQ ID NO: 1161665 - DNA, 15 bp, Homo sapiens
tgaatgtcattttat

SEQ ID NO: 1161666 - DNA, 15 bp, Homo sapiens
ttgaatgtcatttta

SEQ ID NO: 1161667 - DNA, 15 bp, Homo sapiens
attgaatgtcatttt

SEQ ID NO: 1161668 - DNA, 15 bp, Homo sapiens
tattgaatgtcattt

SEQ ID NO: 1161669 - DNA, 15 bp, Homo sapiens
ttattgaatgtcatt

SEQ ID NO: 1161670 - DNA, 15 bp, Homo sapiens
tttattgaatgtcat

SEQ ID NO: 1161671 - DNA, 15 bp, Homo sapiens
atttattgaatgtca

SEQ ID NO: 1161672 - DNA, 15 bp, Homo sapiens
tatttattgaatgtc

SEQ ID NO: 1161673 - DNA, 15 bp, Homo sapiens
ttatttattgaatgt

SEQ ID NO: 1161674 - DNA, 15 bp, Homo sapiens
tttatttattgaatg

SEQ ID NO: 1161675 - DNA, 15 bp, Homo sapiens
ttttatttattgaat

SEQ ID NO: 1161676 - DNA, 15 bp, Homo sapiens
tttttatttattgaa

SEQ ID NO: 1161677 - DNA, 15 bp, Homo sapiens
atttttatttattga

SEQ ID NO: 1161678 - DNA, 15 bp, Homo sapiens
catttttatttattg

SEQ ID NO: 1161679 - DNA, 15 bp, Homo sapiens
gcatttttatttatt

SEQ ID NO: 1161680 - DNA, 15 bp, Homo sapiens
tgcatttttatttat

SEQ ID NO: 1161681 - DNA, 15 bp, Homo sapiens
atgcatttttattta

SEQ ID NO: 1161682 - DNA, 15 bp, Homo sapiens
tatgcatttttattt

SEQ ID NO: 1161683 - DNA, 15 bp, Homo sapiens
ttatgcatttttatt

SEQ ID NO: 1161684 - DNA, 15 bp, Homo sapiens
cttatgcatttttat

SEQ ID NO: 1161685 - DNA, 15 bp, Homo sapiens
tcttatgcattttta

SEQ ID NO: 1161686 - DNA, 15 bp, Homo sapiens
atcttatgcattttt

SEQ ID NO: 1161687 - DNA, 15 bp, Homo sapiens
tatcttatgcatttt

SEQ ID NO: 1161688 - DNA, 15 bp, Homo sapiens
atatcttatgcattt

SEQ ID NO: 1161689 - DNA, 15 bp, Homo sapiens
tatatcttatgcatt

SEQ ID NO: 1161690 - DNA, 15 bp, Homo sapiens
atatatcttatgcat

SEQ ID NO: 1161691 - DNA, 15 bp, Homo sapiens
aatatatcttatgca

SEQ ID NO: 1161692 - DNA, 15 bp, Homo sapiens
gaatatatcttatgc

SEQ ID NO: 1161693 - DNA, 15 bp, Homo sapiens
agaatatatcttatg

SEQ ID NO: 1161694 - DNA, 15 bp, Homo sapiens
cagaatatatcttat

SEQ ID NO: 1161695 - DNA, 15 bp, Homo sapiens
acagaatatatctta

SEQ ID NO: 1161696 - DNA, 15 bp, Homo sapiens
gacagaatatatctt

SEQ ID NO: 1161697 - DNA, 15 bp, Homo sapiens
cgacagaatatatct

SEQ ID NO: 1161698 - DNA, 15 bp, Homo sapiens
ccgacagaatatatc

SEQ ID NO: 1161699 - DNA, 15 bp, Homo sapiens
gccgacagaatatat

SEQ ID NO: 1161700 - DNA, 15 bp, Homo sapiens
agccgacagaatata

SEQ ID NO: 1161701 - DNA, 15 bp, Homo sapiens
cagccgacagaatat

SEQ ID NO: 1161702 - DNA, 15 bp, Homo sapiens
ccagccgacagaata

SEQ ID NO: 1161703 - DNA, 15 bp, Homo sapiens
cccagccgacagaat

SEQ ID NO: 1161704 - DNA, 15 bp, Homo sapiens
gcccagccgacagaa

SEQ ID NO: 1161705 - DNA, 15 bp, Homo sapiens
cgcccagccgacaga

SEQ ID NO: 1161706 - DNA, 15 bp, Homo sapiens
gcgcccagccgacag

SEQ ID NO: 1161707 - DNA, 15 bp, Homo sapiens
cgcgcccagccgaca

SEQ ID NO: 1161708 - DNA, 15 bp, Homo sapiens
ccgcgcccagccgac

SEQ ID NO: 1161709 - DNA, 15 bp, Homo sapiens
accgcgcccagccga

SEQ ID NO: 1161710 - DNA, 15 bp, Homo sapiens
gtgttagccaagatg

SEQ ID NO: 1161711 - DNA, 15 bp, Homo sapiens
cgtgttagccaagat

SEQ ID NO: 1161712 - DNA, 15 bp, Homo sapiens
ccgtgttagccaaga

SEQ ID NO: 1161713 - DNA, 15 bp, Homo sapiens
accgtgttagccaag

SEQ ID NO: 1161714 - DNA, 15 bp, Homo sapiens
caccgtgttagccaa

SEQ ID NO: 1161715 - DNA, 15 bp, Homo sapiens
gcgcccggctaattt

SEQ ID NO: 1161716 - DNA, 15 bp, Homo sapiens
cgcgcccggctaatt

SEQ ID NO: 1161717 - DNA, 15 bp, Homo sapiens
ccgcgcccggctaat

SEQ ID NO: 1161718 - DNA, 15 bp, Homo sapiens
accgcgcccggctaa

SEQ ID NO: 1161719 - DNA, 15 bp, Homo sapiens
caccgcgcccggcta

SEQ ID NO: 1161720 - DNA, 15 bp, Homo sapiens
cgccaccgcgcccgg

SEQ ID NO: 1161721 - DNA, 15 bp, Homo sapiens
ccgccaccgcgcccg

SEQ ID NO: 1161722 - DNA, 15 bp, Homo sapiens
cccgccaccgcgccc

SEQ ID NO: 1161723 - DNA, 15 bp, Homo sapiens
gcccgccaccgcgcc

SEQ ID NO: 1161724 - DNA, 15 bp, Homo sapiens
tgcccgccaccgcgc

SEQ ID NO: 1161725 - DNA, 15 bp, Homo sapiens
gtgcccgccaccgcg

SEQ ID NO: 1161726 - DNA, 15 bp, Homo sapiens
ggtgcccgccaccgc

SEQ ID NO: 1161727 - DNA, 15 bp, Homo sapiens
aggtgcccgccaccg

SEQ ID NO: 1161728 - DNA, 15 bp, Homo sapiens
aggttcacgccattc

SEQ ID NO: 1161729 - DNA, 15 bp, Homo sapiens
caggttcacgccatt

SEQ ID NO: 1161730 - DNA, 15 bp, Homo sapiens
acaatcttggctcac

SEQ ID NO: 1161731 - DNA, 15 bp, Homo sapiens
cacaatcttggctca

SEQ ID NO: 1161732 - DNA, 15 bp, Homo sapiens
gcacaatcttggctc

SEQ ID NO: 1161733 - DNA, 15 bp, Homo sapiens
ggcacaatcttggct

SEQ ID NO: 1161734 - DNA, 15 bp, Homo sapiens
tggcacaatcttggc

SEQ ID NO: 1161735 - DNA, 15 bp, Homo sapiens
gtggcacaatcttgg

SEQ ID NO: 1161736 - DNA, 15 bp, Homo sapiens
agtggcacaatcttg

SEQ ID NO: 1161737 - DNA, 15 bp, Homo sapiens
cagtggcacaatctt

SEQ ID NO: 1161738 - DNA, 15 bp, Homo sapiens
ttgcagtggcacaat

SEQ ID NO: 1161739 - DNA, 15 bp, Homo sapiens
attgcagtggcacaa

SEQ ID NO: 1161740 - DNA, 15 bp, Homo sapiens
gattgcagtggcaca

SEQ ID NO: 1161741 - DNA, 15 bp, Homo sapiens
ggattgcagtggcac

SEQ ID NO: 1161742 - DNA, 15 bp, Homo sapiens
cggattgcagtggca

SEQ ID NO: 1161743 - DNA, 15 bp, Homo sapiens
ccggattgcagtggc

SEQ ID NO: 1161744 - DNA, 15 bp, Homo sapiens
gccggattgcagtgg

SEQ ID NO: 1161745 - DNA, 15 bp, Homo sapiens
ggccggattgcagtg

SEQ ID NO: 1161746 - DNA, 15 bp, Homo sapiens
aggccggattgcagt

SEQ ID NO: 1161747 - DNA, 15 bp, Homo sapiens
caggccggattgcag

SEQ ID NO: 1161748 - DNA, 15 bp, Homo sapiens
ccaggccggattgca

SEQ ID NO: 1161749 - DNA, 15 bp, Homo sapiens
cccaggccggattgc

SEQ ID NO: 1161750 - DNA, 15 bp, Homo sapiens
gcccaggccggattg

SEQ ID NO: 1161751 - DNA, 15 bp, Homo sapiens
agcccaggccggatt

SEQ ID NO: 1161752 - DNA, 15 bp, Homo sapiens
tagcccaggccggat

SEQ ID NO: 1161753 - DNA, 15 bp, Homo sapiens
ttagcccaggccgga

SEQ ID NO: 1161754 - DNA, 15 bp, Homo sapiens
tttagcccaggccgg

SEQ ID NO: 1161755 - DNA, 15 bp, Homo sapiens
ctttagcccaggccg

SEQ ID NO: 1161756 - DNA, 15 bp, Homo sapiens
tctttagcccaggcc

SEQ ID NO: 1161757 - DNA, 15 bp, Homo sapiens
ctctttagcccaggc

SEQ ID NO: 1161758 - DNA, 15 bp, Homo sapiens
gctctttagcccagg

SEQ ID NO: 1161759 - DNA, 15 bp, Homo sapiens
cgctctttagcccag

SEQ ID NO: 1161760 - DNA, 15 bp, Homo sapiens
ccgctctttagccca

SEQ ID NO: 1161761 - DNA, 15 bp, Homo sapiens
cccgctctttagccc

SEQ ID NO: 1161762 - DNA, 15 bp, Homo sapiens
tcccgctctttagcc

SEQ ID NO: 1161763 - DNA, 15 bp, Homo sapiens
gtcccgctctttagc

SEQ ID NO: 1161764 - DNA, 15 bp, Homo sapiens
agtcccgctctttag

SEQ ID NO: 1161765 - DNA, 15 bp, Homo sapiens
gagtcccgctcttta

SEQ ID NO: 1161766 - DNA, 15 bp, Homo sapiens
ggagtcccgctcttt

SEQ ID NO: 1161767 - DNA, 15 bp, Homo sapiens
cggagtcccgctctt

SEQ ID NO: 1161768 - DNA, 15 bp, Homo sapiens
acggagtcccgctct

SEQ ID NO: 1161769 - DNA, 15 bp, Homo sapiens
gacggagtcccgctc

SEQ ID NO: 1161770 - DNA, 15 bp, Homo sapiens
agacggagtcccgct

SEQ ID NO: 1161771 - DNA, 15 bp, Homo sapiens
gagacggagtcccgc

SEQ ID NO: 1161772 - DNA, 15 bp, Homo sapiens
tgagacggagtcccg

SEQ ID NO: 1161773 - DNA, 15 bp, Homo sapiens
ttgagacggagtccc

SEQ ID NO: 1161774 - DNA, 15 bp, Homo sapiens
tttgagacggagtcc

SEQ ID NO: 1161775 - DNA, 15 bp, Homo sapiens
atatctttttttttt

SEQ ID NO: 1161776 - DNA, 15 bp, Homo sapiens
tatatcttttttttt

SEQ ID NO: 1161777 - DNA, 15 bp, Homo sapiens
atatatctttttttt

SEQ ID NO: 1161778 - DNA, 15 bp, Homo sapiens
aatatatcttttttt

SEQ ID NO: 1161779 - DNA, 15 bp, Homo sapiens
gaatatatctttttt

SEQ ID NO: 1161780 - DNA, 15 bp, Homo sapiens
agaatatatcttttt

SEQ ID NO: 1161781 - DNA, 15 bp, Homo sapiens
cagaatatatctttt

SEQ ID NO: 1161782 - DNA, 15 bp, Homo sapiens
acagaatatatcttt

SEQ ID NO: 1161783 - DNA, 15 bp, Homo sapiens
tgacagaatatatct

SEQ ID NO: 1161784 - DNA, 15 bp, Homo sapiens
atgacagaatatatc

SEQ ID NO: 1161785 - DNA, 15 bp, Homo sapiens
tatgacagaatatat

SEQ ID NO: 1161786 - DNA, 15 bp, Homo sapiens
ttatgacagaatata

SEQ ID NO: 1161787 - DNA, 15 bp, Homo sapiens
attatgacagaatat

SEQ ID NO: 1161788 - DNA, 15 bp, Homo sapiens
tattatgacagaata

SEQ ID NO: 1161789 - DNA, 15 bp, Homo sapiens
ttattatgacagaat

SEQ ID NO: 1161790 - DNA, 15 bp, Homo sapiens
tttattatgacagaa

SEQ ID NO: 1161791 - DNA, 15 bp, Homo sapiens
atttattatgacaga

SEQ ID NO: 1161792 - DNA, 15 bp, Homo sapiens
tatttattatgacag

SEQ ID NO: 1161793 - DNA, 15 bp, Homo sapiens
ttatttattatgaca

SEQ ID NO: 1161794 - DNA, 15 bp, Homo sapiens
tttatttattatgac

SEQ ID NO: 1161795 - DNA, 15 bp, Homo sapiens
ttttatttattatga

SEQ ID NO: 1161796 - DNA, 15 bp, Homo sapiens
tttttatttattatg

SEQ ID NO: 1161797 - DNA, 15 bp, Homo sapiens
atttttatttattat

SEQ ID NO: 1161798 - DNA, 15 bp, Homo sapiens
catttttatttatta

SEQ ID NO: 1161799 - DNA, 15 bp, Homo sapiens
ttatatcttatgcat

SEQ ID NO: 1161800 - DNA, 15 bp, Homo sapiens
attatatcttatgca

SEQ ID NO: 1161801 - DNA, 15 bp, Homo sapiens
tattatatcttatgc

SEQ ID NO: 1161802 - DNA, 15 bp, Homo sapiens
ttattatatcttatg

SEQ ID NO: 1161803 - DNA, 15 bp, Homo sapiens
tttattatatcttat

SEQ ID NO: 1161804 - DNA, 15 bp, Homo sapiens
atttattatatctta

SEQ ID NO: 1161805 - DNA, 15 bp, Homo sapiens
catttattatatctt

SEQ ID NO: 1161806 - DNA, 15 bp, Homo sapiens
acatttattatatct

SEQ ID NO: 1161807 - DNA, 15 bp, Homo sapiens
aacatttattatatc

SEQ ID NO: 1161808 - DNA, 15 bp, Homo sapiens
caacatttattatat

SEQ ID NO: 1161809 - DNA, 15 bp, Homo sapiens
gcaacatttattata

SEQ ID NO: 1161810 - DNA, 15 bp, Homo sapiens
agcaacatttattat

SEQ ID NO: 1161811 - DNA, 15 bp, Homo sapiens
aagcaacatttatta

SEQ ID NO: 1161812 - DNA, 15 bp, Homo sapiens
gaagcaacatttatt

SEQ ID NO: 1161813 - DNA, 15 bp, Homo sapiens
tgaagcaacatttat

SEQ ID NO: 1161814 - DNA, 15 bp, Homo sapiens
atgaagcaacattta

SEQ ID NO: 1161815 - DNA, 15 bp, Homo sapiens
aatgaagcaacattt

SEQ ID NO: 1161816 - DNA, 15 bp, Homo sapiens
aaatgaagcaacatt

SEQ ID NO: 1161817 - DNA, 15 bp, Homo sapiens
taaatgaagcaacat

SEQ ID NO: 1161818 - DNA, 15 bp, Homo sapiens
ataaatgaagcaaca

SEQ ID NO: 1161819 - DNA, 15 bp, Homo sapiens
tataaatgaagcaac

SEQ ID NO: 1161820 - DNA, 15 bp, Homo sapiens
ttataaatgaagcaa

SEQ ID NO: 1161821 - DNA, 15 bp, Homo sapiens
gttataaatgaagca

SEQ ID NO: 1161822 - DNA, 15 bp, Homo sapiens
ggttataaatgaagc

SEQ ID NO: 1161823 - DNA, 15 bp, Homo sapiens
tggttataaatgaag

SEQ ID NO: 1161824 - DNA, 15 bp, Homo sapiens
atggttataaatgaa

SEQ ID NO: 1161825 - DNA, 15 bp, Homo sapiens
tatggttataaatga

SEQ ID NO: 1161826 - DNA, 15 bp, Homo sapiens
ttatggttataaatg

SEQ ID NO: 1161827 - DNA, 15 bp, Homo sapiens
attatggttataaat

SEQ ID NO: 1161828 - DNA, 15 bp, Homo sapiens
tattatggttataaa

SEQ ID NO: 1161829 - DNA, 15 bp, Homo sapiens
ttattatggttataa

SEQ ID NO: 1161830 - DNA, 15 bp, Homo sapiens
tttattatggttata

SEQ ID NO: 1161831 - DNA, 15 bp, Homo sapiens
ttttattatggttat

SEQ ID NO: 1161832 - DNA, 15 bp, Homo sapiens
attttattatggtta

SEQ ID NO: 1161833 - DNA, 15 bp, Homo sapiens
tattttattatggtt

SEQ ID NO: 1161834 - DNA, 15 bp, Homo sapiens
atattttattatggt

SEQ ID NO: 1161835 - DNA, 15 bp, Homo sapiens
aatattttattatgg

SEQ ID NO: 1161836 - DNA, 15 bp, Homo sapiens
aaatattttattatg

SEQ ID NO: 1161837 - DNA, 15 bp, Homo sapiens
taaatattttattat

SEQ ID NO: 1161838 - DNA, 15 bp, Homo sapiens
ataaatattttatta

SEQ ID NO: 1161839 - DNA, 15 bp, Homo sapiens
aataaatattttatt

SEQ ID NO: 1161840 - DNA, 15 bp, Homo sapiens
aaataaatattttat

SEQ ID NO: 1161841 - DNA, 15 bp, Homo sapiens
taaataaatatttta

SEQ ID NO: 1161842 - DNA, 15 bp, Homo sapiens
ctaaataaatatttt

SEQ ID NO: 1161843 - DNA, 15 bp, Homo sapiens
tctaaataaatattt

SEQ ID NO: 1161844 - DNA, 15 bp, Homo sapiens
atctaaataaatatt

SEQ ID NO: 1161845 - DNA, 15 bp, Homo sapiens
catctaaataaatat

SEQ ID NO: 1161846 - DNA, 15 bp, Homo sapiens
tcatctaaataaata

SEQ ID NO: 1161847 - DNA, 15 bp, Homo sapiens
ctcatctaaataaat

SEQ ID NO: 1161848 - DNA, 15 bp, Homo sapiens
tctcatctaaataaa

SEQ ID NO: 1161849 - DNA, 15 bp, Homo sapiens
gtctcatctaaataa

SEQ ID NO: 1161850 - DNA, 15 bp, Homo sapiens
ggtctcatctaaata

SEQ ID NO: 1161851 - DNA, 15 bp, Homo sapiens
aggtctcatctaaat

SEQ ID NO: 1161852 - DNA, 15 bp, Homo sapiens
taggtctcatctaaa

SEQ ID NO: 1161853 - DNA, 15 bp, Homo sapiens
gtaggtctcatctaa

SEQ ID NO: 1161854 - DNA, 15 bp, Homo sapiens
agtaggtctcatcta

SEQ ID NO: 1161855 - DNA, 15 bp, Homo sapiens
tagtaggtctcatct

SEQ ID NO: 1161856 - DNA, 15 bp, Homo sapiens
atagtaggtctcatc

SEQ ID NO: 1161857 - DNA, 15 bp, Homo sapiens
tatagtaggtctcat

SEQ ID NO: 1161858 - DNA, 15 bp, Homo sapiens
ttatagtaggtctca

SEQ ID NO: 1161859 - DNA, 15 bp, Homo sapiens
tttatagtaggtctc

SEQ ID NO: 1161860 - DNA, 15 bp, Homo sapiens
gtttatagtaggtct

SEQ ID NO: 1161861 - DNA, 15 bp, Homo sapiens
agtttatagtaggtc

SEQ ID NO: 1161862 - DNA, 15 bp, Homo sapiens
cagtttatagtaggt

SEQ ID NO: 1161863 - DNA, 15 bp, Homo sapiens
gcagtttatagtagg

SEQ ID NO: 1161864 - DNA, 15 bp, Homo sapiens
agcagtttatagtag

SEQ ID NO: 1161865 - DNA, 15 bp, Homo sapiens
aagcagtttatagta

SEQ ID NO: 1161866 - DNA, 15 bp, Homo sapiens
aaagcagtttatagt

SEQ ID NO: 1161867 - DNA, 15 bp, Homo sapiens
gaaagcagtttatag

SEQ ID NO: 1161868 - DNA, 15 bp, Homo sapiens
tgaaagcagtttata

SEQ ID NO: 1161869 - DNA, 15 bp, Homo sapiens
ctgaaagcagtttat

SEQ ID NO: 1161870 - DNA, 15 bp, Homo sapiens
gctgaaagcagttta

SEQ ID NO: 1161871 - DNA, 15 bp, Homo sapiens
tgctgaaagcagttt

SEQ ID NO: 1161872 - DNA, 15 bp, Homo sapiens
ctgctgaaagcagtt

SEQ ID NO: 1161873 - DNA, 15 bp, Homo sapiens
cctgctgaaagcagt

SEQ ID NO: 1161874 - DNA, 15 bp, Homo sapiens
ccctgctgaaagcag

SEQ ID NO: 1161875 - DNA, 15 bp, Homo sapiens
gccctgctgaaagca

SEQ ID NO: 1161876 - DNA, 15 bp, Homo sapiens
agccctgctgaaagc

SEQ ID NO: 1161877 - DNA, 15 bp, Homo sapiens
tagccctgctgaaag

SEQ ID NO: 1161878 - DNA, 15 bp, Homo sapiens
ttagccctgctgaaa

SEQ ID NO: 1161879 - DNA, 15 bp, Homo sapiens
attagccctgctgaa

SEQ ID NO: 1161880 - DNA, 15 bp, Homo sapiens
tattagccctgctga

SEQ ID NO: 1161881 - DNA, 15 bp, Homo sapiens
ctattagccctgctg

SEQ ID NO: 1161882 - DNA, 15 bp, Homo sapiens
tctattagccctgct

SEQ ID NO: 1161883 - DNA, 15 bp, Homo sapiens
gtctattagccctgc

SEQ ID NO: 1161884 - DNA, 15 bp, Homo sapiens
agtctattagccctg

SEQ ID NO: 1161885 - DNA, 15 bp, Homo sapiens
gagtctattagccct

SEQ ID NO: 1161886 - DNA, 15 bp, Homo sapiens
ggagtctattagccc

SEQ ID NO: 1161887 - DNA, 15 bp, Homo sapiens
aggagtctattagcc

SEQ ID NO: 1161888 - DNA, 15 bp, Homo sapiens
taggagtctattagc

SEQ ID NO: 1161889 - DNA, 15 bp, Homo sapiens
ataggagtctattag

SEQ ID NO: 1161890 - DNA, 15 bp, Homo sapiens
tataggagtctatta

SEQ ID NO: 1161891 - DNA, 15 bp, Homo sapiens
gtataggagtctatt

SEQ ID NO: 1161892 - DNA, 15 bp, Homo sapiens
agtataggagtctat

SEQ ID NO: 1161893 - DNA, 15 bp, Homo sapiens
aagtataggagtcta

SEQ ID NO: 1161894 - DNA, 15 bp, Homo sapiens
aaagtataggagtct

SEQ ID NO: 1161895 - DNA, 15 bp, Homo sapiens
gaaagtataggagtc

SEQ ID NO: 1161896 - DNA, 15 bp, Homo sapiens
ggaaagtataggagt

SEQ ID NO: 1161897 - DNA, 15 bp, Homo sapiens
gggaaagtataggag

SEQ ID NO: 1161898 - DNA, 15 bp, Homo sapiens
agggaaagtatagga

SEQ ID NO: 1161899 - DNA, 15 bp, Homo sapiens
tagggaaagtatagg

SEQ ID NO: 1161900 - DNA, 15 bp, Homo sapiens
atagggaaagtatag

SEQ ID NO: 1161901 - DNA, 15 bp, Homo sapiens
catagggaaagtata

SEQ ID NO: 1161902 - DNA, 15 bp, Homo sapiens
acatagggaaagtat

SEQ ID NO: 1161903 - DNA, 15 bp, Homo sapiens
aacatagggaaagta

SEQ ID NO: 1161904 - DNA, 15 bp, Homo sapiens
taacatagggaaagt

SEQ ID NO: 1161905 - DNA, 15 bp, Homo sapiens
ttaacatagggaaag

SEQ ID NO: 1161906 - DNA, 15 bp, Homo sapiens
attaacatagggaaa

SEQ ID NO: 1161907 - DNA, 15 bp, Homo sapiens
cattaacatagggaa

SEQ ID NO: 1161908 - DNA, 15 bp, Homo sapiens
acattaacataggga

SEQ ID NO: 1161909 - DNA, 15 bp, Homo sapiens
cacattaacataggg

SEQ ID NO: 1161910 - DNA, 15 bp, Homo sapiens
tcacattaacatagg

SEQ ID NO: 1161911 - DNA, 15 bp, Homo sapiens
ctcacattaacatag

SEQ ID NO: 1161912 - DNA, 15 bp, Homo sapiens
tctcacattaacata

SEQ ID NO: 1161913 - DNA, 15 bp, Homo sapiens
gtctcacattaacat

SEQ ID NO: 1161914 - DNA, 15 bp, Homo sapiens
agtctcacattaaca

SEQ ID NO: 1161915 - DNA, 15 bp, Homo sapiens
aagtctcacattaac

SEQ ID NO: 1161916 - DNA, 15 bp, Homo sapiens
aaagtctcacattaa

SEQ ID NO: 1161917 - DNA, 15 bp, Homo sapiens
aaaagtctcacatta

SEQ ID NO: 1161918 - DNA, 15 bp, Homo sapiens
aaaaagtctcacatt

SEQ ID NO: 1161919 - DNA, 15 bp, Homo sapiens
gaaaaagtctcacat

SEQ ID NO: 1161920 - DNA, 15 bp, Homo sapiens
tgaaaaagtctcaca

SEQ ID NO: 1161921 - DNA, 15 bp, Homo sapiens
atgaaaaagtctcac

SEQ ID NO: 1161922 - DNA, 15 bp, Homo sapiens
tatgaaaaagtctca

SEQ ID NO: 1161923 - DNA, 15 bp, Homo sapiens
ttatgaaaaagtctc

SEQ ID NO: 1161924 - DNA, 15 bp, Homo sapiens
attatgaaaaagtct

SEQ ID NO: 1161925 - DNA, 15 bp, Homo sapiens
aattatgaaaaagtc

SEQ ID NO: 1161926 - DNA, 15 bp, Homo sapiens
taattatgaaaaagt

SEQ ID NO: 1161927 - DNA, 15 bp, Homo sapiens
gtaattatgaaaaag

SEQ ID NO: 1161928 - DNA, 15 bp, Homo sapiens
ggtaattatgaaaaa

SEQ ID NO: 1161929 - DNA, 15 bp, Homo sapiens
aggtaattatgaaaa

SEQ ID NO: 1161930 - DNA, 15 bp, Homo sapiens
caggtaattatgaaa

SEQ ID NO: 1161931 - DNA, 15 bp, Homo sapiens
acaggtaattatgaa

SEQ ID NO: 1161932 - DNA, 15 bp, Homo sapiens
gacaggtaattatga

SEQ ID NO: 1161933 - DNA, 15 bp, Homo sapiens
tgacaggtaattatg

SEQ ID NO: 1161934 - DNA, 15 bp, Homo sapiens
ttgacaggtaattat

SEQ ID NO: 1161935 - DNA, 15 bp, Homo sapiens
gttgacaggtaatta

SEQ ID NO: 1161936 - DNA, 15 bp, Homo sapiens
agttgacaggtaatt

SEQ ID NO: 1161937 - DNA, 15 bp, Homo sapiens
aagttgacaggtaat

SEQ ID NO: 1161938 - DNA, 15 bp, Homo sapiens
caagttgacaggtaa

SEQ ID NO: 1161939 - DNA, 15 bp, Homo sapiens
acaagttgacaggta

SEQ ID NO: 1161940 - DNA, 15 bp, Homo sapiens
gacaagttgacaggt

SEQ ID NO: 1161941 - DNA, 15 bp, Homo sapiens
agacaagttgacagg

SEQ ID NO: 1161942 - DNA, 15 bp, Homo sapiens
tagacaagttgacag

SEQ ID NO: 1161943 - DNA, 15 bp, Homo sapiens
atagacaagttgaca

SEQ ID NO: 1161944 - DNA, 15 bp, Homo sapiens
tatagacaagttgac

SEQ ID NO: 1161945 - DNA, 15 bp, Homo sapiens
atatagacaagttga

SEQ ID NO: 1161946 - DNA, 15 bp, Homo sapiens
aatatagacaagttg

SEQ ID NO: 1161947 - DNA, 15 bp, Homo sapiens
gaatatagacaagtt

SEQ ID NO: 1161948 - DNA, 15 bp, Homo sapiens
agaatatagacaagt

SEQ ID NO: 1161949 - DNA, 15 bp, Homo sapiens
aagaatatagacaag

SEQ ID NO: 1161950 - DNA, 15 bp, Homo sapiens
taagaatatagacaa

SEQ ID NO: 1161951 - DNA, 15 bp, Homo sapiens
ataagaatatagaca

SEQ ID NO: 1161952 - DNA, 15 bp, Homo sapiens
aataagaatatagac

SEQ ID NO: 1161953 - DNA, 15 bp, Homo sapiens
taataagaatataga

SEQ ID NO: 1161954 - DNA, 15 bp, Homo sapiens
gtaataagaatatag

SEQ ID NO: 1161955 - DNA, 15 bp, Homo sapiens
tgtaataagaatata

SEQ ID NO: 1161956 - DNA, 15 bp, Homo sapiens
atgtaataagaatat

SEQ ID NO: 1161957 - DNA, 15 bp, Homo sapiens
catgtaataagaata

SEQ ID NO: 1161958 - DNA, 15 bp, Homo sapiens
tcatgtaataagaat

SEQ ID NO: 1161959 - DNA, 15 bp, Homo sapiens
atcatgtaataagaa

SEQ ID NO: 1161960 - DNA, 15 bp, Homo sapiens
tatcatgtaataaga

SEQ ID NO: 1161961 - DNA, 15 bp, Homo sapiens
ttatcatgtaataag

SEQ ID NO: 1161962 - DNA, 15 bp, Homo sapiens
cttatcatgtaataa

SEQ ID NO: 1161963 - DNA, 15 bp, Homo sapiens
gcttatcatgtaata

SEQ ID NO: 1161964 - DNA, 15 bp, Homo sapiens
agcttatcatgtaat

SEQ ID NO: 1161965 - DNA, 15 bp, Homo sapiens
aagcttatcatgtaa

SEQ ID NO: 1161966 - DNA, 15 bp, Homo sapiens
gaagcttatcatgta

SEQ ID NO: 1161967 - DNA, 15 bp, Homo sapiens
agaagcttatcatgt

SEQ ID NO: 1161968 - DNA, 15 bp, Homo sapiens
aagaagcttatcatg

SEQ ID NO: 1161969 - DNA, 15 bp, Homo sapiens
caagaagcttatcat

SEQ ID NO: 1161970 - DNA, 15 bp, Homo sapiens
tcaagaagcttatca

SEQ ID NO: 1161971 - DNA, 15 bp, Homo sapiens
atcaagaagcttatc

SEQ ID NO: 1161972 - DNA, 15 bp, Homo sapiens
catcaagaagcttat

SEQ ID NO: 1161973 - DNA, 15 bp, Homo sapiens
gcatcaagaagctta

SEQ ID NO: 1161974 - DNA, 15 bp, Homo sapiens
ggcatcaagaagctt

SEQ ID NO: 1161975 - DNA, 15 bp, Homo sapiens
tggcatcaagaagct

SEQ ID NO: 1161976 - DNA, 15 bp, Homo sapiens
ctggcatcaagaagc

SEQ ID NO: 1161977 - DNA, 15 bp, Homo sapiens
cctggcatcaagaag

SEQ ID NO: 1161978 - DNA, 15 bp, Homo sapiens
ccctggcatcaagaa

SEQ ID NO: 1161979 - DNA, 15 bp, Homo sapiens
tccctggcatcaaga

SEQ ID NO: 1161980 - DNA, 15 bp, Homo sapiens
gtccctggcatcaag

SEQ ID NO: 1161981 - DNA, 15 bp, Homo sapiens
tgtccctggcatcaa

SEQ ID NO: 1161982 - DNA, 15 bp, Homo sapiens
gtgtccctggcatca

SEQ ID NO: 1161983 - DNA, 15 bp, Homo sapiens
agtgtccctggcatc

SEQ ID NO: 1161984 - DNA, 15 bp, Homo sapiens
gagtgtccctggcat

SEQ ID NO: 1161985 - DNA, 15 bp, Homo sapiens
agagtgtccctggca

SEQ ID NO: 1161986 - DNA, 15 bp, Homo sapiens
cagagtgtccctggc

SEQ ID NO: 1161987 - DNA, 15 bp, Homo sapiens
acagagtgtccctgg

SEQ ID NO: 1161988 - DNA, 15 bp, Homo sapiens
tacagagtgtccctg

SEQ ID NO: 1161989 - DNA, 15 bp, Homo sapiens
atacagagtgtccct

SEQ ID NO: 1161990 - DNA, 15 bp, Homo sapiens
aatacagagtgtccc

SEQ ID NO: 1161991 - DNA, 15 bp, Homo sapiens
caatacagagtgtcc

SEQ ID NO: 1161992 - DNA, 15 bp, Homo sapiens
acaatacagagtgtc

SEQ ID NO: 1161993 - DNA, 15 bp, Homo sapiens
aacaatacagagtgt

SEQ ID NO: 1161994 - DNA, 15 bp, Homo sapiens
aaacaatacagagtg

SEQ ID NO: 1161995 - DNA, 15 bp, Homo sapiens
taaacaatacagagt

SEQ ID NO: 1161996 - DNA, 15 bp, Homo sapiens
gtaaacaatacagag

SEQ ID NO: 1161997 - DNA, 15 bp, Homo sapiens
ggtaaacaatacaga

SEQ ID NO: 1161998 - DNA, 15 bp, Homo sapiens
tggtaaacaatacag

SEQ ID NO: 1161999 - DNA, 15 bp, Homo sapiens
ctggtaaacaataca

SEQ ID NO: 1162000 - DNA, 15 bp, Homo sapiens
tctggtaaacaatac

SEQ ID NO: 1162001 - DNA, 15 bp, Homo sapiens
atctggtaaacaata

SEQ ID NO: 1162002 - DNA, 15 bp, Homo sapiens
aatctggtaaacaat

SEQ ID NO: 1162003 - DNA, 15 bp, Homo sapiens
aaatctggtaaacaa

SEQ ID NO: 1162004 - DNA, 15 bp, Homo sapiens
taaatctggtaaaca

SEQ ID NO: 1162005 - DNA, 15 bp, Homo sapiens
ataaatctggtaaac

SEQ ID NO: 1162006 - DNA, 15 bp, Homo sapiens
tataaatctggtaaa

SEQ ID NO: 1162007 - DNA, 15 bp, Homo sapiens
gtataaatctggtaa

SEQ ID NO: 1162008 - DNA, 15 bp, Homo sapiens
tgtataaatctggta

SEQ ID NO: 1162009 - DNA, 15 bp, Homo sapiens
atgtataaatctggt

SEQ ID NO: 1162010 - DNA, 15 bp, Homo sapiens
gatgtataaatctgg

SEQ ID NO: 1162011 - DNA, 15 bp, Homo sapiens
ggatgtataaatctg

SEQ ID NO: 1162012 - DNA, 15 bp, Homo sapiens
gggatgtataaatct

SEQ ID NO: 1162013 - DNA, 15 bp, Homo sapiens
tgggatgtataaatc

SEQ ID NO: 1162014 - DNA, 15 bp, Homo sapiens
ctgggatgtataaat

SEQ ID NO: 1162015 - DNA, 15 bp, Homo sapiens
gctgggatgtataaa

SEQ ID NO: 1162016 - DNA, 15 bp, Homo sapiens
agctgggatgtataa

SEQ ID NO: 1162017 - DNA, 15 bp, Homo sapiens
aagctgggatgtata

SEQ ID NO: 1162018 - DNA, 15 bp, Homo sapiens
aaagctgggatgtat

SEQ ID NO: 1162019 - DNA, 15 bp, Homo sapiens
aaaagctgggatgta

SEQ ID NO: 1162020 - DNA, 15 bp, Homo sapiens
aaaaagctgggatgt

SEQ ID NO: 1162021 - DNA, 15 bp, Homo sapiens
aaaaaagctgggatg

SEQ ID NO: 1162022 - DNA, 15 bp, Homo sapiens
aaaaaaagctgggat

SEQ ID NO: 1162023 - DNA, 15 bp, Homo sapiens
aaaaaaaagctggga

SEQ ID NO: 1162024 - DNA, 15 bp, Homo sapiens
caaaaaaaagctggg

SEQ ID NO: 1162025 - DNA, 15 bp, Homo sapiens
acaaaaaaaagctgg

SEQ ID NO: 1162026 - DNA, 15 bp, Homo sapiens
aacaaaaaaaagctg

SEQ ID NO: 1162027 - DNA, 15 bp, Homo sapiens
aaacaaaaaaaagct

SEQ ID NO: 1162028 - DNA, 15 bp, Homo sapiens
caaacaaaaaaaagc

SEQ ID NO: 1162029 - DNA, 15 bp, Homo sapiens
acaaacaaaaaaaag

SEQ ID NO: 1162030 - DNA, 15 bp, Homo sapiens
tcaaaaacaaacaaa

SEQ ID NO: 1162031 - DNA, 15 bp, Homo sapiens
ctcaaaaacaaacaa

SEQ ID NO: 1162032 - DNA, 15 bp, Homo sapiens
tctcaaaaacaaaca

SEQ ID NO: 1162033 - DNA, 15 bp, Homo sapiens
gtctcaaaaacaaac

SEQ ID NO: 1162034 - DNA, 15 bp, Homo sapiens
atgagctgagatcat

SEQ ID NO: 1162035 - DNA, 15 bp, Homo sapiens
aatgagctgagatca

SEQ ID NO: 1162036 - DNA, 15 bp, Homo sapiens
caatgagctgagatc

SEQ ID NO: 1162037 - DNA, 15 bp, Homo sapiens
ctgcaatgagctgag

SEQ ID NO: 1162038 - DNA, 15 bp, Homo sapiens
gctgcaatgagctga

SEQ ID NO: 1162039 - DNA, 15 bp, Homo sapiens
ggctgcaatgagctg

SEQ ID NO: 1162040 - DNA, 15 bp, Homo sapiens
gggctgcaatgagct

SEQ ID NO: 1162041 - DNA, 15 bp, Homo sapiens
agggctgcaatgagc

SEQ ID NO: 1162042 - DNA, 15 bp, Homo sapiens
cagggctgcaatgag

SEQ ID NO: 1162043 - DNA, 15 bp, Homo sapiens
tcagggctgcaatga

SEQ ID NO: 1162044 - DNA, 15 bp, Homo sapiens
gtcagggctgcaatg

SEQ ID NO: 1162045 - DNA, 15 bp, Homo sapiens
ggtcagggctgcaat

SEQ ID NO: 1162046 - DNA, 15 bp, Homo sapiens
aggtcagggctgcaa

SEQ ID NO: 1162047 - DNA, 15 bp, Homo sapiens
gaggtcagggctgca

SEQ ID NO: 1162048 - DNA, 15 bp, Homo sapiens
ggaggtcagggctgc

SEQ ID NO: 1162049 - DNA, 15 bp, Homo sapiens
gggaggtcagggctg

SEQ ID NO: 1162050 - DNA, 15 bp, Homo sapiens
tgggaggtcagggct

SEQ ID NO: 1162051 - DNA, 15 bp, Homo sapiens
ctgggaggtcagggc

SEQ ID NO: 1162052 - DNA, 15 bp, Homo sapiens
tctgggaggtcaggg

SEQ ID NO: 1162053 - DNA, 15 bp, Homo sapiens
gtctgggaggtcagg

SEQ ID NO: 1162054 - DNA, 15 bp, Homo sapiens
ggtctgggaggtcag

SEQ ID NO: 1162055 - DNA, 15 bp, Homo sapiens
aggtctgggaggtca

SEQ ID NO: 1162056 - DNA, 15 bp, Homo sapiens
taggtctgggaggtc

SEQ ID NO: 1162057 - DNA, 15 bp, Homo sapiens
ttaggtctgggaggt

SEQ ID NO: 1162058 - DNA, 15 bp, Homo sapiens
cttaggtctgggagg

SEQ ID NO: 1162059 - DNA, 15 bp, Homo sapiens
acttaggtctgggag

SEQ ID NO: 1162060 - DNA, 15 bp, Homo sapiens
cacttaggtctggga

SEQ ID NO: 1162061 - DNA, 15 bp, Homo sapiens
tcacttaggtctggg

SEQ ID NO: 1162062 - DNA, 15 bp, Homo sapiens
atcacttaggtctgg

SEQ ID NO: 1162063 - DNA, 15 bp, Homo sapiens
gatcacttaggtctg

SEQ ID NO: 1162064 - DNA, 15 bp, Homo sapiens
ggatcacttaggtct

SEQ ID NO: 1162065 - DNA, 15 bp, Homo sapiens
aggatcacttaggtc

SEQ ID NO: 1162066 - DNA, 15 bp, Homo sapiens
gaggatcacttaggt

SEQ ID NO: 1162067 - DNA, 15 bp, Homo sapiens
ggaggatcacttagg

SEQ ID NO: 1162068 - DNA, 15 bp, Homo sapiens
aggaggatcacttag

SEQ ID NO: 1162069 - DNA, 15 bp, Homo sapiens
taggaggatcactta

SEQ ID NO: 1162070 - DNA, 15 bp, Homo sapiens
gtaggaggatcactt

SEQ ID NO: 1162071 - DNA, 15 bp, Homo sapiens
ggtaggaggatcact

SEQ ID NO: 1162072 - DNA, 15 bp, Homo sapiens
aggtaggaggatcac

SEQ ID NO: 1162073 - DNA, 15 bp, Homo sapiens
gaggtaggaggatca

SEQ ID NO: 1162074 - DNA, 15 bp, Homo sapiens
ggctgaggtaggagg

SEQ ID NO: 1162075 - DNA, 15 bp, Homo sapiens
gggctgaggtaggag

SEQ ID NO: 1162076 - DNA, 15 bp, Homo sapiens
ggggctgaggtagga

SEQ ID NO: 1162077 - DNA, 15 bp, Homo sapiens
gggggctgaggtagg

SEQ ID NO: 1162078 - DNA, 15 bp, Homo sapiens
agggggctgaggtag

SEQ ID NO: 1162079 - DNA, 15 bp, Homo sapiens
tagggggctgaggta

SEQ ID NO: 1162080 - DNA, 15 bp, Homo sapiens
ttagggggctgaggt

SEQ ID NO: 1162081 - DNA, 15 bp, Homo sapiens
cttagggggctgagg

SEQ ID NO: 1162082 - DNA, 15 bp, Homo sapiens
acttagggggctgag

SEQ ID NO: 1162083 - DNA, 15 bp, Homo sapiens
tacttagggggctga

SEQ ID NO: 1162084 - DNA, 15 bp, Homo sapiens
ctacttagggggctg

SEQ ID NO: 1162085 - DNA, 15 bp, Homo sapiens
gctacttagggggct

SEQ ID NO: 1162086 - DNA, 15 bp, Homo sapiens
agctacttagggggc

SEQ ID NO: 1162087 - DNA, 15 bp, Homo sapiens
tagctacttaggggg

SEQ ID NO: 1162088 - DNA, 15 bp, Homo sapiens
ttagctacttagggg

SEQ ID NO: 1162089 - DNA, 15 bp, Homo sapiens
cttagctacttaggg

SEQ ID NO: 1162090 - DNA, 15 bp, Homo sapiens
tcttagctacttagg

SEQ ID NO: 1162091 - DNA, 15 bp, Homo sapiens
gtcttagctacttag

SEQ ID NO: 1162092 - DNA, 15 bp, Homo sapiens
agtcttagctactta

SEQ ID NO: 1162093 - DNA, 15 bp, Homo sapiens
tagtcttagctactt

SEQ ID NO: 1162094 - DNA, 15 bp, Homo sapiens
gtagtcttagctact

SEQ ID NO: 1162095 - DNA, 15 bp, Homo sapiens
tgtagtcttagctac

SEQ ID NO: 1162096 - DNA, 15 bp, Homo sapiens
ctgtagtcttagcta

SEQ ID NO: 1162097 - DNA, 15 bp, Homo sapiens
gctgtagtcttagct

SEQ ID NO: 1162098 - DNA, 15 bp, Homo sapiens
agctgtagtcttagc

SEQ ID NO: 1162099 - DNA, 15 bp, Homo sapiens
cagctgtagtcttag

SEQ ID NO: 1162100 - DNA, 15 bp, Homo sapiens
acagctgtagtctta

SEQ ID NO: 1162101 - DNA, 15 bp, Homo sapiens
cacagctgtagtctt

SEQ ID NO: 1162102 - DNA, 15 bp, Homo sapiens
gcacagctgtagtct

SEQ ID NO: 1162103 - DNA, 15 bp, Homo sapiens
tgcacagctgtagtc

SEQ ID NO: 1162104 - DNA, 15 bp, Homo sapiens
gtgcacagctgtagt

SEQ ID NO: 1162105 - DNA, 15 bp, Homo sapiens
ggtgcacagctgtag

SEQ ID NO: 1162106 - DNA, 15 bp, Homo sapiens
tggtgcacagctgta

SEQ ID NO: 1162107 - DNA, 15 bp, Homo sapiens
ttggtgcacagctgt

SEQ ID NO: 1162108 - DNA, 15 bp, Homo sapiens
gttggtgcacagctg

SEQ ID NO: 1162109 - DNA, 15 bp, Homo sapiens
tgttggtgcacagct

SEQ ID NO: 1162110 - DNA, 15 bp, Homo sapiens
atgttggtgcacagc

SEQ ID NO: 1162111 - DNA, 15 bp, Homo sapiens
catgttggtgcacag

SEQ ID NO: 1162112 - DNA, 15 bp, Homo sapiens
gcatgttggtgcaca

SEQ ID NO: 1162113 - DNA, 15 bp, Homo sapiens
agcatgttggtgcac

SEQ ID NO: 1162114 - DNA, 15 bp, Homo sapiens
gagcatgttggtgca

SEQ ID NO: 1162115 - DNA, 15 bp, Homo sapiens
tgagcatgttggtgc

SEQ ID NO: 1162116 - DNA, 15 bp, Homo sapiens
ctgagcatgttggtg

SEQ ID NO: 1162117 - DNA, 15 bp, Homo sapiens
gctgagcatgttggt

SEQ ID NO: 1162118 - DNA, 15 bp, Homo sapiens
ggctgagcatgttgg

SEQ ID NO: 1162119 - DNA, 15 bp, Homo sapiens
tggctgagcatgttg

SEQ ID NO: 1162120 - DNA, 15 bp, Homo sapiens
ttggctgagcatgtt

SEQ ID NO: 1162121 - DNA, 15 bp, Homo sapiens
attggctgagcatgt

SEQ ID NO: 1162122 - DNA, 15 bp, Homo sapiens
aattggctgagcatg

SEQ ID NO: 1162123 - DNA, 15 bp, Homo sapiens
aaattggctgagcat

SEQ ID NO: 1162124 - DNA, 15 bp, Homo sapiens
aaaattggctgagca

SEQ ID NO: 1162125 - DNA, 15 bp, Homo sapiens
aaaaattggctgagc

SEQ ID NO: 1162126 - DNA, 15 bp, Homo sapiens
caaaaattggctgag

SEQ ID NO: 1162127 - DNA, 15 bp, Homo sapiens
acaaaaattggctga

SEQ ID NO: 1162128 - DNA, 15 bp, Homo sapiens
tacaaaaattggctg

SEQ ID NO: 1162129 - DNA, 15 bp, Homo sapiens
atacaaaaattggct

SEQ ID NO: 1162130 - DNA, 15 bp, Homo sapiens
aatacaaaaattggc

SEQ ID NO: 1162131 - DNA, 15 bp, Homo sapiens
aaatacaaaaattgg

SEQ ID NO: 1162132 - DNA, 15 bp, Homo sapiens
aaaatacaaaaattg

SEQ ID NO: 1162133 - DNA, 15 bp, Homo sapiens
gtctctacaaaaaat

SEQ ID NO: 1162134 - DNA, 15 bp, Homo sapiens
ctcaggagttcaaga

SEQ ID NO: 1162135 - DNA, 15 bp, Homo sapiens
gagctcaggagttca

SEQ ID NO: 1162136 - DNA, 15 bp, Homo sapiens
ttgagctcaggagtt

SEQ ID NO: 1162137 - DNA, 15 bp, Homo sapiens
cttgagctcaggagt

SEQ ID NO: 1162138 - DNA, 15 bp, Homo sapiens
acttgagctcaggag

SEQ ID NO: 1162139 - DNA, 15 bp, Homo sapiens
aacttgagctcagga

SEQ ID NO: 1162140 - DNA, 15 bp, Homo sapiens
taacttgagctcagg

SEQ ID NO: 1162141 - DNA, 15 bp, Homo sapiens
ataacttgagctcag

SEQ ID NO: 1162142 - DNA, 15 bp, Homo sapiens
cataacttgagctca

SEQ ID NO: 1162143 - DNA, 15 bp, Homo sapiens
acataacttgagctc

SEQ ID NO: 1162144 - DNA, 15 bp, Homo sapiens
gacataacttgagct

SEQ ID NO: 1162145 - DNA, 15 bp, Homo sapiens
agacataacttgagc

SEQ ID NO: 1162146 - DNA, 15 bp, Homo sapiens
cagacataacttgag

SEQ ID NO: 1162147 - DNA, 15 bp, Homo sapiens
acagacataacttga

SEQ ID NO: 1162148 - DNA, 15 bp, Homo sapiens
tacagacataacttg

SEQ ID NO: 1162149 - DNA, 15 bp, Homo sapiens
atacagacataactt

SEQ ID NO: 1162150 - DNA, 15 bp, Homo sapiens
gatacagacataact

SEQ ID NO: 1162151 - DNA, 15 bp, Homo sapiens
agatacagacataac

SEQ ID NO: 1162152 - DNA, 15 bp, Homo sapiens
aagatacagacataa

SEQ ID NO: 1162153 - DNA, 15 bp, Homo sapiens
taagatacagacata

SEQ ID NO: 1162154 - DNA, 15 bp, Homo sapiens
ataagatacagacat

SEQ ID NO: 1162155 - DNA, 15 bp, Homo sapiens
gataagatacagaca

SEQ ID NO: 1162156 - DNA, 15 bp, Homo sapiens
tgataagatacagac

SEQ ID NO: 1162157 - DNA, 15 bp, Homo sapiens
atattccaatgataa

SEQ ID NO: 1162158 - DNA, 15 bp, Homo sapiens
tatattccaatgata

SEQ ID NO: 1162159 - DNA, 15 bp, Homo sapiens
atatattccaatgat

SEQ ID NO: 1162160 - DNA, 15 bp, Homo sapiens
catatattccaatga

SEQ ID NO: 1162161 - DNA, 15 bp, Homo sapiens
tcatatattccaatg

SEQ ID NO: 1162162 - DNA, 15 bp, Homo sapiens
atcatatattccaat

SEQ ID NO: 1162163 - DNA, 15 bp, Homo sapiens
tatcatatattccaa

SEQ ID NO: 1162164 - DNA, 15 bp, Homo sapiens
ttatcatatattcca

SEQ ID NO: 1162165 - DNA, 15 bp, Homo sapiens
attatcatatattcc

SEQ ID NO: 1162166 - DNA, 15 bp, Homo sapiens
gattatcatatattc

SEQ ID NO: 1162167 - DNA, 15 bp, Homo sapiens
ggattatcatatatt

SEQ ID NO: 1162168 - DNA, 15 bp, Homo sapiens
gggattatcatatat

SEQ ID NO: 1162169 - DNA, 15 bp, Homo sapiens
tgggattatcatata

SEQ ID NO: 1162170 - DNA, 15 bp, Homo sapiens
ctgggattatcatat

SEQ ID NO: 1162171 - DNA, 15 bp, Homo sapiens
gctgggattatcata

SEQ ID NO: 1162172 - DNA, 15 bp, Homo sapiens
tgctgggattatcat

SEQ ID NO: 1162173 - DNA, 15 bp, Homo sapiens
gtgctgggattatca

SEQ ID NO: 1162174 - DNA, 15 bp, Homo sapiens
agtgctgggattatc

SEQ ID NO: 1162175 - DNA, 15 bp, Homo sapiens
ttggccttccaaagt

SEQ ID NO: 1162176 - DNA, 15 bp, Homo sapiens
tttggccttccaaag

SEQ ID NO: 1162177 - DNA, 15 bp, Homo sapiens
ctttggccttccaaa

SEQ ID NO: 1162178 - DNA, 15 bp, Homo sapiens
actttggccttccaa

SEQ ID NO: 1162179 - DNA, 15 bp, Homo sapiens
cactttggccttcca

SEQ ID NO: 1162180 - DNA, 15 bp, Homo sapiens
gcactttggccttcc

SEQ ID NO: 1162181 - DNA, 15 bp, Homo sapiens
agcactttggccttc

SEQ ID NO: 1162182 - DNA, 15 bp, Homo sapiens
cagcactttggcctt

SEQ ID NO: 1162183 - DNA, 15 bp, Homo sapiens
ccagcactttggcct

SEQ ID NO: 1162184 - DNA, 15 bp, Homo sapiens
cccagcactttggcc

SEQ ID NO: 1162185 - DNA, 15 bp, Homo sapiens
tcccagcactttggc

SEQ ID NO: 1162186 - DNA, 15 bp, Homo sapiens
gctataatcccagca

SEQ ID NO: 1162187 - DNA, 15 bp, Homo sapiens
tgctataatcccagc

SEQ ID NO: 1162188 - DNA, 15 bp, Homo sapiens
atgctataatcccag

SEQ ID NO: 1162189 - DNA, 15 bp, Homo sapiens
gatgctataatccca

SEQ ID NO: 1162190 - DNA, 15 bp, Homo sapiens
ggatgctataatccc

SEQ ID NO: 1162191 - DNA, 15 bp, Homo sapiens
gggatgctataatcc

SEQ ID NO: 1162192 - DNA, 15 bp, Homo sapiens
agggatgctataatc

SEQ ID NO: 1162193 - DNA, 15 bp, Homo sapiens
gagggatgctataat

SEQ ID NO: 1162194 - DNA, 15 bp, Homo sapiens
ggagggatgctataa

SEQ ID NO: 1162195 - DNA, 15 bp, Homo sapiens
gggagggatgctata

SEQ ID NO: 1162196 - DNA, 15 bp, Homo sapiens
tgggagggatgctat

SEQ ID NO: 1162197 - DNA, 15 bp, Homo sapiens
ttgggagggatgcta

SEQ ID NO: 1162198 - DNA, 15 bp, Homo sapiens
tttgggagggatgct

SEQ ID NO: 1162199 - DNA, 15 bp, Homo sapiens
ctttgggagggatgc

SEQ ID NO: 1162200 - DNA, 15 bp, Homo sapiens
actttgggagggatg

SEQ ID NO: 1162201 - DNA, 15 bp, Homo sapiens
cactttgggagggat

SEQ ID NO: 1162202 - DNA, 15 bp, Homo sapiens
gcactttgggaggga

SEQ ID NO: 1162203 - DNA, 15 bp, Homo sapiens
gcatcccagcacttt

SEQ ID NO: 1162204 - DNA, 15 bp, Homo sapiens
tgcatcccagcactt

SEQ ID NO: 1162205 - DNA, 15 bp, Homo sapiens
ctgcatcccagcact

SEQ ID NO: 1162206 - DNA, 15 bp, Homo sapiens
gctgcatcccagcac

SEQ ID NO: 1162207 - DNA, 15 bp, Homo sapiens
ggctgcatcccagca

SEQ ID NO: 1162208 - DNA, 15 bp, Homo sapiens
tggctgcatcccagc

SEQ ID NO: 1162209 - DNA, 15 bp, Homo sapiens
ctggctgcatcccag

SEQ ID NO: 1162210 - DNA, 15 bp, Homo sapiens
cctggctgcatccca

SEQ ID NO: 1162211 - DNA, 15 bp, Homo sapiens
acctggctgcatccc

SEQ ID NO: 1162212 - DNA, 15 bp, Homo sapiens
cacctggctgcatcc

SEQ ID NO: 1162213 - DNA, 15 bp, Homo sapiens
acacctggctgcatc

SEQ ID NO: 1162214 - DNA, 15 bp, Homo sapiens
cacacctggctgcat

SEQ ID NO: 1162215 - DNA, 15 bp, Homo sapiens
ccacacctggctgca

SEQ ID NO: 1162216 - DNA, 15 bp, Homo sapiens
accacacctggctgc

SEQ ID NO: 1162217 - DNA, 15 bp, Homo sapiens
caccacacctggctg

SEQ ID NO: 1162218 - DNA, 15 bp, Homo sapiens
atgggattacaggca

SEQ ID NO: 1162219 - DNA, 15 bp, Homo sapiens
catgggattacaggc

SEQ ID NO: 1162220 - DNA, 15 bp, Homo sapiens
acatgggattacagg

SEQ ID NO: 1162221 - DNA, 15 bp, Homo sapiens
cacatgggattacag

SEQ ID NO: 1162222 - DNA, 15 bp, Homo sapiens
tcacatgggattaca

SEQ ID NO: 1162223 - DNA, 15 bp, Homo sapiens
atcacatgggattac

SEQ ID NO: 1162224 - DNA, 15 bp, Homo sapiens
aatcacatgggatta

SEQ ID NO: 1162225 - DNA, 15 bp, Homo sapiens
taatcacatgggatt

SEQ ID NO: 1162226 - DNA, 15 bp, Homo sapiens
ataatcacatgggat

SEQ ID NO: 1162227 - DNA, 15 bp, Homo sapiens
cataatcacatggga

SEQ ID NO: 1162228 - DNA, 15 bp, Homo sapiens
tcataatcacatggg

SEQ ID NO: 1162229 - DNA, 15 bp, Homo sapiens
ttcataatcacatgg

SEQ ID NO: 1162230 - DNA, 15 bp, Homo sapiens
tttcataatcacatg

SEQ ID NO: 1162231 - DNA, 15 bp, Homo sapiens
ctttcataatcacat

SEQ ID NO: 1162232 - DNA, 15 bp, Homo sapiens
tctttcataatcaca

SEQ ID NO: 1162233 - DNA, 15 bp, Homo sapiens
atctttcataatcac

SEQ ID NO: 1162234 - DNA, 15 bp, Homo sapiens
tatctttcataatca

SEQ ID NO: 1162235 - DNA, 15 bp, Homo sapiens
atatctttcataatc

SEQ ID NO: 1162236 - DNA, 15 bp, Homo sapiens
catatctttcataat

SEQ ID NO: 1162237 - DNA, 15 bp, Homo sapiens
tcatatctttcataa

SEQ ID NO: 1162238 - DNA, 15 bp, Homo sapiens
atcatatctttcata

SEQ ID NO: 1162239 - DNA, 15 bp, Homo sapiens
aatcatatctttcat

SEQ ID NO: 1162240 - DNA, 15 bp, Homo sapiens
aaatcatatctttca

SEQ ID NO: 1162241 - DNA, 15 bp, Homo sapiens
caaatcatatctttc

SEQ ID NO: 1162242 - DNA, 15 bp, Homo sapiens
ccaaatcatatcttt

SEQ ID NO: 1162243 - DNA, 15 bp, Homo sapiens
gccaaatcatatctt

SEQ ID NO: 1162244 - DNA, 15 bp, Homo sapiens
ggccaaatcatatct

SEQ ID NO: 1162245 - DNA, 15 bp, Homo sapiens
aggccaaatcatatc

SEQ ID NO: 1162246 - DNA, 15 bp, Homo sapiens
gaggccaaatcatat

SEQ ID NO: 1162247 - DNA, 15 bp, Homo sapiens
ggaggccaaatcata

SEQ ID NO: 1162248 - DNA, 15 bp, Homo sapiens
gggaggccaaatcat

SEQ ID NO: 1162249 - DNA, 15 bp, Homo sapiens
gttgggaggccaaat

SEQ ID NO: 1162250 - DNA, 15 bp, Homo sapiens
cgttgggaggccaaa

SEQ ID NO: 1162251 - DNA, 15 bp, Homo sapiens
acgttgggaggccaa

SEQ ID NO: 1162252 - DNA, 15 bp, Homo sapiens
cacgttgggaggcca

SEQ ID NO: 1162253 - DNA, 15 bp, Homo sapiens
gcacgttgggaggcc

SEQ ID NO: 1162254 - DNA, 15 bp, Homo sapiens
agcacgttgggaggc

SEQ ID NO: 1162255 - DNA, 15 bp, Homo sapiens
cagcacgttgggagg

SEQ ID NO: 1162256 - DNA, 15 bp, Homo sapiens
ccagcacgttgggag

SEQ ID NO: 1162257 - DNA, 15 bp, Homo sapiens
agctgggtgcggtgg

SEQ ID NO: 1162258 - DNA, 15 bp, Homo sapiens
cagctgggtgcggtg

SEQ ID NO: 1162259 - DNA, 15 bp, Homo sapiens
gcagctgggtgcggt

SEQ ID NO: 1162260 - DNA, 15 bp, Homo sapiens
tgcagctgggtgcgg

SEQ ID NO: 1162261 - DNA, 15 bp, Homo sapiens
atgcagctgggtgcg

SEQ ID NO: 1162262 - DNA, 15 bp, Homo sapiens
gatgcagctgggtgc

SEQ ID NO: 1162263 - DNA, 15 bp, Homo sapiens
ggatgcagctgggtg

SEQ ID NO: 1162264 - DNA, 15 bp, Homo sapiens
gggatgcagctgggt

SEQ ID NO: 1162265 - DNA, 15 bp, Homo sapiens
tgggatgcagctggg

SEQ ID NO: 1162266 - DNA, 15 bp, Homo sapiens
ctgggatgcagctgg

SEQ ID NO: 1162267 - DNA, 15 bp, Homo sapiens
gctgggatgcagctg

SEQ ID NO: 1162268 - DNA, 15 bp, Homo sapiens
agctgggatgcagct

SEQ ID NO: 1162269 - DNA, 15 bp, Homo sapiens
aaagctgggatgcag

SEQ ID NO: 1162270 - DNA, 15 bp, Homo sapiens
aaaagctgggatgca

SEQ ID NO: 1162271 - DNA, 15 bp, Homo sapiens
taaaagctgggatgc

SEQ ID NO: 1162272 - DNA, 15 bp, Homo sapiens
ctaaaagctgggatg

SEQ ID NO: 1162273 - DNA, 15 bp, Homo sapiens
tctaaaagctgggat

SEQ ID NO: 1162274 - DNA, 15 bp, Homo sapiens
ttctaaaagctggga

SEQ ID NO: 1162275 - DNA, 15 bp, Homo sapiens
cttctaaaagctggg

SEQ ID NO: 1162276 - DNA, 15 bp, Homo sapiens
tcttctaaaagctgg

SEQ ID NO: 1162277 - DNA, 15 bp, Homo sapiens
gtcttctaaaagctg

SEQ ID NO: 1162278 - DNA, 15 bp, Homo sapiens
tgtcttctaaaagct

SEQ ID NO: 1162279 - DNA, 15 bp, Homo sapiens
gtgtcttctaaaagc

SEQ ID NO: 1162280 - DNA, 15 bp, Homo sapiens
agtgtcttctaaaag

SEQ ID NO: 1162281 - DNA, 15 bp, Homo sapiens
aagtgtcttctaaaa

SEQ ID NO: 1162282 - DNA, 15 bp, Homo sapiens
taagtgtcttctaaa

SEQ ID NO: 1162283 - DNA, 15 bp, Homo sapiens
ctaagtgtcttctaa

SEQ ID NO: 1162284 - DNA, 15 bp, Homo sapiens
gctaagtgtcttcta

SEQ ID NO: 1162285 - DNA, 15 bp, Homo sapiens
tgctaagtgtcttct

SEQ ID NO: 1162286 - DNA, 15 bp, Homo sapiens
ttgctaagtgtcttc

SEQ ID NO: 1162287 - DNA, 15 bp, Homo sapiens
tttgctaagtgtctt

SEQ ID NO: 1162288 - DNA, 15 bp, Homo sapiens
atttgctaagtgtct

SEQ ID NO: 1162289 - DNA, 15 bp, Homo sapiens
aatttgctaagtgtc

SEQ ID NO: 1162290 - DNA, 15 bp, Homo sapiens
aaatttgctaagtgt

SEQ ID NO: 1162291 - DNA, 15 bp, Homo sapiens
taaatttgctaagtg

SEQ ID NO: 1162292 - DNA, 15 bp, Homo sapiens
ataaatttgctaagt

SEQ ID NO: 1162293 - DNA, 15 bp, Homo sapiens
cataaatttgctaag

SEQ ID NO: 1162294 - DNA, 15 bp, Homo sapiens
acataaatttgctaa

SEQ ID NO: 1162295 - DNA, 15 bp, Homo sapiens
aacataaatttgcta

SEQ ID NO: 1162296 - DNA, 15 bp, Homo sapiens
gaacataaatttgct

SEQ ID NO: 1162297 - DNA, 15 bp, Homo sapiens
tgaacataaatttgc

SEQ ID NO: 1162298 - DNA, 15 bp, Homo sapiens
ttgaacataaatttg

SEQ ID NO: 1162299 - DNA, 15 bp, Homo sapiens
attgaacataaattt

SEQ ID NO: 1162300 - DNA, 15 bp, Homo sapiens
tattgaacataaatt

SEQ ID NO: 1162301 - DNA, 15 bp, Homo sapiens
ttattgaacataaat

SEQ ID NO: 1162302 - DNA, 15 bp, Homo sapiens
tttattgaacataaa

SEQ ID NO: 1162303 - DNA, 15 bp, Homo sapiens
atttattgaacataa

SEQ ID NO: 1162304 - DNA, 15 bp, Homo sapiens
tatttattgaacata

SEQ ID NO: 1162305 - DNA, 15 bp, Homo sapiens
gtatttattgaacat

SEQ ID NO: 1162306 - DNA, 15 bp, Homo sapiens
tgtatttattgaaca

SEQ ID NO: 1162307 - DNA, 15 bp, Homo sapiens
atgtatttattgaac

SEQ ID NO: 1162308 - DNA, 15 bp, Homo sapiens
tatgtatttattgaa

SEQ ID NO: 1162309 - DNA, 15 bp, Homo sapiens
ttatgtatttattga

SEQ ID NO: 1162310 - DNA, 15 bp, Homo sapiens
tttatgtatttattg

SEQ ID NO: 1162311 - DNA, 15 bp, Homo sapiens
ttttatgtatttatt

SEQ ID NO: 1162312 - DNA, 15 bp, Homo sapiens
cttttatgtatttat

SEQ ID NO: 1162313 - DNA, 15 bp, Homo sapiens
tcttttatgtattta

SEQ ID NO: 1162314 - DNA, 15 bp, Homo sapiens
ttcttttatgtattt

SEQ ID NO: 1162315 - DNA, 15 bp, Homo sapiens
attcttttatgtatt

SEQ ID NO: 1162316 - DNA, 15 bp, Homo sapiens
tattcttttatgtat

SEQ ID NO: 1162317 - DNA, 15 bp, Homo sapiens
ttattcttttatgta

SEQ ID NO: 1162318 - DNA, 15 bp, Homo sapiens
tttattcttttatgt

SEQ ID NO: 1162319 - DNA, 15 bp, Homo sapiens
atttattcttttatg

SEQ ID NO: 1162320 - DNA, 15 bp, Homo sapiens
catttattcttttat

SEQ ID NO: 1162321 - DNA, 15 bp, Homo sapiens
tcatttattctttta

SEQ ID NO: 1162322 - DNA, 15 bp, Homo sapiens
ttcatttattctttt

SEQ ID NO: 1162323 - DNA, 15 bp, Homo sapiens
attcatttattcttt

SEQ ID NO: 1162324 - DNA, 15 bp, Homo sapiens
cattcatttattctt

SEQ ID NO: 1162325 - DNA, 15 bp, Homo sapiens
acattcatttattct

SEQ ID NO: 1162326 - DNA, 15 bp, Homo sapiens
tacattcatttattc

SEQ ID NO: 1162327 - DNA, 15 bp, Homo sapiens
atacattcatttatt

SEQ ID NO: 1162328 - DNA, 15 bp, Homo sapiens
catacattcatttat

SEQ ID NO: 1162329 - DNA, 15 bp, Homo sapiens
tcatacattcattta

SEQ ID NO: 1162330 - DNA, 15 bp, Homo sapiens
atcatacattcattt

SEQ ID NO: 1162331 - DNA, 15 bp, Homo sapiens
tatcatacattcatt

SEQ ID NO: 1162332 - DNA, 15 bp, Homo sapiens
ttatcatacattcat

SEQ ID NO: 1162333 - DNA, 15 bp, Homo sapiens
tttatcatacattca

SEQ ID NO: 1162334 - DNA, 15 bp, Homo sapiens
atttatcatacattc

SEQ ID NO: 1162335 - DNA, 15 bp, Homo sapiens
aatttatcatacatt

SEQ ID NO: 1162336 - DNA, 15 bp, Homo sapiens
taatttatcatacat

SEQ ID NO: 1162337 - DNA, 15 bp, Homo sapiens
ttaatttatcataca

SEQ ID NO: 1162338 - DNA, 15 bp, Homo sapiens
gttaatttatcatac

SEQ ID NO: 1162339 - DNA, 15 bp, Homo sapiens
ggttaatttatcata

SEQ ID NO: 1162340 - DNA, 15 bp, Homo sapiens
aggttaatttatcat

SEQ ID NO: 1162341 - DNA, 15 bp, Homo sapiens
caggttaatttatca

SEQ ID NO: 1162342 - DNA, 15 bp, Homo sapiens
ccaggttaatttatc

SEQ ID NO: 1162343 - DNA, 15 bp, Homo sapiens
cccaggttaatttat

SEQ ID NO: 1162344 - DNA, 15 bp, Homo sapiens
gcccaggttaattta

SEQ ID NO: 1162345 - DNA, 15 bp, Homo sapiens
agcccaggttaattt

SEQ ID NO: 1162346 - DNA, 15 bp, Homo sapiens
tagcccaggttaatt

SEQ ID NO: 1162347 - DNA, 15 bp, Homo sapiens
ttagcccaggttaat

SEQ ID NO: 1162348 - DNA, 15 bp, Homo sapiens
tttagcccaggttaa

SEQ ID NO: 1162349 - DNA, 15 bp, Homo sapiens
ctttagcccaggtta

SEQ ID NO: 1162350 - DNA, 15 bp, Homo sapiens
tctttagcccaggtt

SEQ ID NO: 1162351 - DNA, 15 bp, Homo sapiens
ctctttagcccaggt

SEQ ID NO: 1162352 - DNA, 15 bp, Homo sapiens
tctctttagcccagg

SEQ ID NO: 1162353 - DNA, 15 bp, Homo sapiens
ttctctttagcccag

SEQ ID NO: 1162354 - DNA, 15 bp, Homo sapiens
cttctctttagccca

SEQ ID NO: 1162355 - DNA, 15 bp, Homo sapiens
tcttctctttagccc

SEQ ID NO: 1162356 - DNA, 15 bp, Homo sapiens
atcttctctttagcc

SEQ ID NO: 1162357 - DNA, 15 bp, Homo sapiens
aatcttctctttagc

SEQ ID NO: 1162358 - DNA, 15 bp, Homo sapiens
gaatcttctctttag

SEQ ID NO: 1162359 - DNA, 15 bp, Homo sapiens
tgaatcttctcttta

SEQ ID NO: 1162360 - DNA, 15 bp, Homo sapiens
gtgaatcttctcttt

SEQ ID NO: 1162361 - DNA, 15 bp, Homo sapiens
ggtgaatcttctctt

SEQ ID NO: 1162362 - DNA, 15 bp, Homo sapiens
aggtgaatcttctct

SEQ ID NO: 1162363 - DNA, 15 bp, Homo sapiens
aaggtgaatcttctc

SEQ ID NO: 1162364 - DNA, 15 bp, Homo sapiens
aaaggtgaatcttct

SEQ ID NO: 1162365 - DNA, 15 bp, Homo sapiens
caaaggtgaatcttc

SEQ ID NO: 1162366 - DNA, 15 bp, Homo sapiens
tcaaaggtgaatctt

SEQ ID NO: 1162367 - DNA, 15 bp, Homo sapiens
ttcaaaggtgaatct

SEQ ID NO: 1162368 - DNA, 15 bp, Homo sapiens
tttcaaaggtgaatc

SEQ ID NO: 1162369 - DNA, 15 bp, Homo sapiens
atttcaaaggtgaat

SEQ ID NO: 1162370 - DNA, 15 bp, Homo sapiens
tatttcaaaggtgaa

SEQ ID NO: 1162371 - DNA, 15 bp, Homo sapiens
ttatttcaaaggtga

SEQ ID NO: 1162372 - DNA, 15 bp, Homo sapiens
gttatttcaaaggtg

SEQ ID NO: 1162373 - DNA, 15 bp, Homo sapiens
tgttatttcaaaggt

SEQ ID NO: 1162374 - DNA, 15 bp, Homo sapiens
gtgttatttcaaagg

SEQ ID NO: 1162375 - DNA, 15 bp, Homo sapiens
agtgttatttcaaag

SEQ ID NO: 1162376 - DNA, 15 bp, Homo sapiens
aagtgttatttcaaa

SEQ ID NO: 1162377 - DNA, 15 bp, Homo sapiens
gaagtgttatttcaa

SEQ ID NO: 1162378 - DNA, 15 bp, Homo sapiens
agaagtgttatttca

SEQ ID NO: 1162379 - DNA, 15 bp, Homo sapiens
gagaagtgttatttc

SEQ ID NO: 1162380 - DNA, 15 bp, Homo sapiens
ggagaagtgttattt

SEQ ID NO: 1162381 - DNA, 15 bp, Homo sapiens
aggagaagtgttatt

SEQ ID NO: 1162382 - DNA, 15 bp, Homo sapiens
caggagaagtgttat

SEQ ID NO: 1162383 - DNA, 15 bp, Homo sapiens
tcaggagaagtgtta

SEQ ID NO: 1162384 - DNA, 15 bp, Homo sapiens
ctcaggagaagtgtt

SEQ ID NO: 1162385 - DNA, 15 bp, Homo sapiens
tctcaggagaagtgt

SEQ ID NO: 1162386 - DNA, 15 bp, Homo sapiens
ctctcaggagaagtg

SEQ ID NO: 1162387 - DNA, 15 bp, Homo sapiens
tctctcaggagaagt

SEQ ID NO: 1162388 - DNA, 15 bp, Homo sapiens
atctctcaggagaag

SEQ ID NO: 1162389 - DNA, 15 bp, Homo sapiens
gatctctcaggagaa

SEQ ID NO: 1162390 - DNA, 15 bp, Homo sapiens
ggatctctcaggaga

SEQ ID NO: 1162391 - DNA, 15 bp, Homo sapiens
tggatctctcaggag

SEQ ID NO: 1162392 - DNA, 15 bp, Homo sapiens
ctggatctctcagga

SEQ ID NO: 1162393 - DNA, 15 bp, Homo sapiens
tctggatctctcagg

SEQ ID NO: 1162394 - DNA, 15 bp, Homo sapiens
atctggatctctcag

SEQ ID NO: 1162395 - DNA, 15 bp, Homo sapiens
aatctggatctctca

SEQ ID NO: 1162396 - DNA, 15 bp, Homo sapiens
taatctggatctctc

SEQ ID NO: 1162397 - DNA, 15 bp, Homo sapiens
ataatctggatctct

SEQ ID NO: 1162398 - DNA, 15 bp, Homo sapiens
aataatctggatctc

SEQ ID NO: 1162399 - DNA, 15 bp, Homo sapiens
caataatctggatct

SEQ ID NO: 1162400 - DNA, 15 bp, Homo sapiens
ccaataatctggatc

SEQ ID NO: 1162401 - DNA, 15 bp, Homo sapiens
cccaataatctggat

SEQ ID NO: 1162402 - DNA, 15 bp, Homo sapiens
gcccaataatctgga

SEQ ID NO: 1162403 - DNA, 15 bp, Homo sapiens
tgcccaataatctgg

SEQ ID NO: 1162404 - DNA, 15 bp, Homo sapiens
gtgcccaataatctg

SEQ ID NO: 1162405 - DNA, 15 bp, Homo sapiens
agtgcccaataatct

SEQ ID NO: 1162406 - DNA, 15 bp, Homo sapiens
gagtgcccaataatc

SEQ ID NO: 1162407 - DNA, 15 bp, Homo sapiens
tgagtgcccaataat

SEQ ID NO: 1162408 - DNA, 15 bp, Homo sapiens
gtgagtgcccaataa

SEQ ID NO: 1162409 - DNA, 15 bp, Homo sapiens
tgtgagtgcccaata

SEQ ID NO: 1162410 - DNA, 15 bp, Homo sapiens
atgtgagtgcccaat

SEQ ID NO: 1162411 - DNA, 15 bp, Homo sapiens
aatgtgagtgcccaa

SEQ ID NO: 1162412 - DNA, 15 bp, Homo sapiens
gaatgtgagtgccca

SEQ ID NO: 1162413 - DNA, 15 bp, Homo sapiens
agaatgtgagtgccc

SEQ ID NO: 1162414 - DNA, 15 bp, Homo sapiens
cagaatgtgagtgcc

SEQ ID NO: 1162415 - DNA, 15 bp, Homo sapiens
ccagaatgtgagtgc

SEQ ID NO: 1162416 - DNA, 15 bp, Homo sapiens
gccagaatgtgagtg

SEQ ID NO: 1162417 - DNA, 15 bp, Homo sapiens
tgccagaatgtgagt

SEQ ID NO: 1162418 - DNA, 15 bp, Homo sapiens
atgccagaatgtgag

SEQ ID NO: 1162419 - DNA, 15 bp, Homo sapiens
catgccagaatgtga

SEQ ID NO: 1162420 - DNA, 15 bp, Homo sapiens
acatgccagaatgtg

SEQ ID NO: 1162421 - DNA, 15 bp, Homo sapiens
tacatgccagaatgt

SEQ ID NO: 1162422 - DNA, 15 bp, Homo sapiens
atacatgccagaatg

SEQ ID NO: 1162423 - DNA, 15 bp, Homo sapiens
tatacatgccagaat

SEQ ID NO: 1162424 - DNA, 15 bp, Homo sapiens
atatacatgccagaa

SEQ ID NO: 1162425 - DNA, 15 bp, Homo sapiens
tatatacatgccaga

SEQ ID NO: 1162426 - DNA, 15 bp, Homo sapiens
atatatacatgccag

SEQ ID NO: 1162427 - DNA, 15 bp, Homo sapiens
aatatatacatgcca

SEQ ID NO: 1162428 - DNA, 15 bp, Homo sapiens
aaatatatacatgcc

SEQ ID NO: 1162429 - DNA, 15 bp, Homo sapiens
taaatatatacatgc

SEQ ID NO: 1162430 - DNA, 15 bp, Homo sapiens
ttaaatatatacatg

SEQ ID NO: 1162431 - DNA, 15 bp, Homo sapiens
attaaatatatacat

SEQ ID NO: 1162432 - DNA, 15 bp, Homo sapiens
tattaaatatataca

SEQ ID NO: 1162433 - DNA, 15 bp, Homo sapiens
ttattaaatatatac

SEQ ID NO: 1162434 - DNA, 15 bp, Homo sapiens
attattaaatatata

SEQ ID NO: 1162435 - DNA, 15 bp, Homo sapiens
tattattaaatatat

SEQ ID NO: 1162436 - DNA, 15 bp, Homo sapiens
ctattattaaatata

SEQ ID NO: 1162437 - DNA, 15 bp, Homo sapiens
tctattattaaatat

SEQ ID NO: 1162438 - DNA, 15 bp, Homo sapiens
ttctattattaaata

SEQ ID NO: 1162439 - DNA, 15 bp, Homo sapiens
gttctattattaaat

SEQ ID NO: 1162440 - DNA, 15 bp, Homo sapiens
ggttctattattaaa

SEQ ID NO: 1162441 - DNA, 15 bp, Homo sapiens
gggttctattattaa

SEQ ID NO: 1162442 - DNA, 15 bp, Homo sapiens
agggttctattatta

SEQ ID NO: 1162443 - DNA, 15 bp, Homo sapiens
tagggttctattatt

SEQ ID NO: 1162444 - DNA, 15 bp, Homo sapiens
ttagggttctattat

SEQ ID NO: 1162445 - DNA, 15 bp, Homo sapiens
cttagggttctatta

SEQ ID NO: 1162446 - DNA, 15 bp, Homo sapiens
tcttagggttctatt

SEQ ID NO: 1162447 - DNA, 15 bp, Homo sapiens
ttcttagggttctat

SEQ ID NO: 1162448 - DNA, 15 bp, Homo sapiens
cttcttagggttcta

SEQ ID NO: 1162449 - DNA, 15 bp, Homo sapiens
gcttcttagggttct

SEQ ID NO: 1162450 - DNA, 15 bp, Homo sapiens
agcttcttagggttc

SEQ ID NO: 1162451 - DNA, 15 bp, Homo sapiens
tagcttcttagggtt

SEQ ID NO: 1162452 - DNA, 15 bp, Homo sapiens
ctagcttcttagggt

SEQ ID NO: 1162453 - DNA, 15 bp, Homo sapiens
tctagcttcttaggg

SEQ ID NO: 1162454 - DNA, 15 bp, Homo sapiens
ctctagcttcttagg

SEQ ID NO: 1162455 - DNA, 15 bp, Homo sapiens
gctctagcttcttag

SEQ ID NO: 1162456 - DNA, 15 bp, Homo sapiens
ggctctagcttctta

SEQ ID NO: 1162457 - DNA, 15 bp, Homo sapiens
aggctctagcttctt

SEQ ID NO: 1162458 - DNA, 15 bp, Homo sapiens
caggctctagcttct

SEQ ID NO: 1162459 - DNA, 15 bp, Homo sapiens
tcaggctctagcttc

SEQ ID NO: 1162460 - DNA, 15 bp, Homo sapiens
ctcaggctctagctt

SEQ ID NO: 1162461 - DNA, 15 bp, Homo sapiens
tctcaggctctagct

SEQ ID NO: 1162462 - DNA, 15 bp, Homo sapiens
ctctcaggctctagc

SEQ ID NO: 1162463 - DNA, 15 bp, Homo sapiens
cctctcaggctctag

SEQ ID NO: 1162464 - DNA, 15 bp, Homo sapiens
tcctctcaggctcta

SEQ ID NO: 1162465 - DNA, 15 bp, Homo sapiens
ttcctctcaggctct

SEQ ID NO: 1162466 - DNA, 15 bp, Homo sapiens
attcctctcaggctc

SEQ ID NO: 1162467 - DNA, 15 bp, Homo sapiens
aattcctctcaggct

SEQ ID NO: 1162468 - DNA, 15 bp, Homo sapiens
aaattcctctcaggc

SEQ ID NO: 1162469 - DNA, 15 bp, Homo sapiens
taaattcctctcagg

SEQ ID NO: 1162470 - DNA, 15 bp, Homo sapiens
ttaaattcctctcag

SEQ ID NO: 1162471 - DNA, 15 bp, Homo sapiens
cttaaattcctctca

SEQ ID NO: 1162472 - DNA, 15 bp, Homo sapiens
tcttaaattcctctc

SEQ ID NO: 1162473 - DNA, 15 bp, Homo sapiens
ttcttaaattcctct

SEQ ID NO: 1162474 - DNA, 15 bp, Homo sapiens
attcttaaattcctc

SEQ ID NO: 1162475 - DNA, 15 bp, Homo sapiens
aattcttaaattcct

SEQ ID NO: 1162476 - DNA, 15 bp, Homo sapiens
taattcttaaattcc

SEQ ID NO: 1162477 - DNA, 15 bp, Homo sapiens
ataattcttaaattc

SEQ ID NO: 1162478 - DNA, 15 bp, Homo sapiens
gataattcttaaatt

SEQ ID NO: 1162479 - DNA, 15 bp, Homo sapiens
tgataattcttaaat

SEQ ID NO: 1162480 - DNA, 15 bp, Homo sapiens
ttgataattcttaaa

SEQ ID NO: 1162481 - DNA, 15 bp, Homo sapiens
tttgataattcttaa

SEQ ID NO: 1162482 - DNA, 15 bp, Homo sapiens
ctttgataattctta

SEQ ID NO: 1162483 - DNA, 15 bp, Homo sapiens
gctttgataattctt

SEQ ID NO: 1162484 - DNA, 15 bp, Homo sapiens
tgctttgataattct

SEQ ID NO: 1162485 - DNA, 15 bp, Homo sapiens
ttgctttgataattc

SEQ ID NO: 1162486 - DNA, 15 bp, Homo sapiens
tttgctttgataatt

SEQ ID NO: 1162487 - DNA, 15 bp, Homo sapiens
ctttgctttgataat

SEQ ID NO: 1162488 - DNA, 15 bp, Homo sapiens
gctttgctttgataa

SEQ ID NO: 1162489 - DNA, 15 bp, Homo sapiens
agctttgctttgata

SEQ ID NO: 1162490 - DNA, 15 bp, Homo sapiens
gagctttgctttgat

SEQ ID NO: 1162491 - DNA, 15 bp, Homo sapiens
agagctttgctttga

SEQ ID NO: 1162492 - DNA, 15 bp, Homo sapiens
aagagctttgctttg

SEQ ID NO: 1162493 - DNA, 15 bp, Homo sapiens
gaagagctttgcttt

SEQ ID NO: 1162494 - DNA, 15 bp, Homo sapiens
tgaagagctttgctt

SEQ ID NO: 1162495 - DNA, 15 bp, Homo sapiens
atgaagagctttgct

SEQ ID NO: 1162496 - DNA, 15 bp, Homo sapiens
aatgaagagctttgc

SEQ ID NO: 1162497 - DNA, 15 bp, Homo sapiens
aaatgaagagctttg

SEQ ID NO: 1162498 - DNA, 15 bp, Homo sapiens
aaaatgaagagcttt

SEQ ID NO: 1162499 - DNA, 15 bp, Homo sapiens
taaaatgaagagctt

SEQ ID NO: 1162500 - DNA, 15 bp, Homo sapiens
ttaaaatgaagagct

SEQ ID NO: 1162501 - DNA, 15 bp, Homo sapiens
tttaaaatgaagagc

SEQ ID NO: 1162502 - DNA, 15 bp, Homo sapiens
ctttaaaatgaagag

SEQ ID NO: 1162503 - DNA, 15 bp, Homo sapiens
tctttaaaatgaaga

SEQ ID NO: 1162504 - DNA, 15 bp, Homo sapiens
atctttaaaatgaag

SEQ ID NO: 1162505 - DNA, 15 bp, Homo sapiens
catctttaaaatgaa

SEQ ID NO: 1162506 - DNA, 15 bp, Homo sapiens
ccatctttaaaatga

SEQ ID NO: 1162507 - DNA, 15 bp, Homo sapiens
gccatctttaaaatg

SEQ ID NO: 1162508 - DNA, 15 bp, Homo sapiens
tgccatctttaaaat

SEQ ID NO: 1162509 - DNA, 15 bp, Homo sapiens
ttgccatctttaaaa

SEQ ID NO: 1162510 - DNA, 15 bp, Homo sapiens
gttgccatctttaaa

SEQ ID NO: 1162511 - DNA, 15 bp, Homo sapiens
tgttgccatctttaa

SEQ ID NO: 1162512 - DNA, 15 bp, Homo sapiens
atgttgccatcttta

SEQ ID NO: 1162513 - DNA, 15 bp, Homo sapiens
aatgttgccatcttt

SEQ ID NO: 1162514 - DNA, 15 bp, Homo sapiens
caatgttgccatctt

SEQ ID NO: 1162515 - DNA, 15 bp, Homo sapiens
tcaatgttgccatct

SEQ ID NO: 1162516 - DNA, 15 bp, Homo sapiens
ctcaatgttgccatc

SEQ ID NO: 1162517 - DNA, 15 bp, Homo sapiens
cctcaatgttgccat

SEQ ID NO: 1162518 - DNA, 15 bp, Homo sapiens
gcctcaatgttgcca

SEQ ID NO: 1162519 - DNA, 15 bp, Homo sapiens
tgcctcaatgttgcc

SEQ ID NO: 1162520 - DNA, 15 bp, Homo sapiens
gtgcctcaatgttgc

SEQ ID NO: 1162521 - DNA, 15 bp, Homo sapiens
tgtgcctcaatgttg

SEQ ID NO: 1162522 - DNA, 15 bp, Homo sapiens
ttgtgcctcaatgtt

SEQ ID NO: 1162523 - DNA, 15 bp, Homo sapiens
tttgtgcctcaatgt

SEQ ID NO: 1162524 - DNA, 15 bp, Homo sapiens
ttttgtgcctcaatg

SEQ ID NO: 1162525 - DNA, 15 bp, Homo sapiens
cttttgtgcctcaat

SEQ ID NO: 1162526 - DNA, 15 bp, Homo sapiens
ccttttgtgcctcaa

SEQ ID NO: 1162527 - DNA, 15 bp, Homo sapiens
cccttttgtgcctca

SEQ ID NO: 1162528 - DNA, 15 bp, Homo sapiens
acccttttgtgcctc

SEQ ID NO: 1162529 - DNA, 15 bp, Homo sapiens
cacccttttgtgcct

SEQ ID NO: 1162530 - DNA, 15 bp, Homo sapiens
tcacccttttgtgcc

SEQ ID NO: 1162531 - DNA, 15 bp, Homo sapiens
ttcacccttttgtgc

SEQ ID NO: 1162532 - DNA, 15 bp, Homo sapiens
tttcacccttttgtg

SEQ ID NO: 1162533 - DNA, 15 bp, Homo sapiens
atttcacccttttgt

SEQ ID NO: 1162534 - DNA, 15 bp, Homo sapiens
tatttcacccttttg

SEQ ID NO: 1162535 - DNA, 15 bp, Homo sapiens
ttatttcaccctttt

SEQ ID NO: 1162536 - DNA, 15 bp, Homo sapiens
gttatttcacccttt

SEQ ID NO: 1162537 - DNA, 15 bp, Homo sapiens
agttatttcaccctt

SEQ ID NO: 1162538 - DNA, 15 bp, Homo sapiens
aagttatttcaccct

SEQ ID NO: 1162539 - DNA, 15 bp, Homo sapiens
taagttatttcaccc

SEQ ID NO: 1162540 - DNA, 15 bp, Homo sapiens
gtaagttatttcacc

SEQ ID NO: 1162541 - DNA, 15 bp, Homo sapiens
agtaagttatttcac

SEQ ID NO: 1162542 - DNA, 15 bp, Homo sapiens
cagtaagttatttca

SEQ ID NO: 1162543 - DNA, 15 bp, Homo sapiens
tcagtaagttatttc

SEQ ID NO: 1162544 - DNA, 15 bp, Homo sapiens
atcagtaagttattt

SEQ ID NO: 1162545 - DNA, 15 bp, Homo sapiens
catcagtaagttatt

SEQ ID NO: 1162546 - DNA, 15 bp, Homo sapiens
ccatcagtaagttat

SEQ ID NO: 1162547 - DNA, 15 bp, Homo sapiens
gccatcagtaagtta

SEQ ID NO: 1162548 - DNA, 15 bp, Homo sapiens
ggccatcagtaagtt

SEQ ID NO: 1162549 - DNA, 15 bp, Homo sapiens
tggccatcagtaagt

SEQ ID NO: 1162550 - DNA, 15 bp, Homo sapiens
gtggccatcagtaag

SEQ ID NO: 1162551 - DNA, 15 bp, Homo sapiens
tgtggccatcagtaa

SEQ ID NO: 1162552 - DNA, 15 bp, Homo sapiens
gtgtggccatcagta

SEQ ID NO: 1162553 - DNA, 15 bp, Homo sapiens
tgtgtggccatcagt

SEQ ID NO: 1162554 - DNA, 15 bp, Homo sapiens
ttgtgtggccatcag

SEQ ID NO: 1162555 - DNA, 15 bp, Homo sapiens
attgtgtggccatca

SEQ ID NO: 1162556 - DNA, 15 bp, Homo sapiens
aattgtgtggccatc

SEQ ID NO: 1162557 - DNA, 15 bp, Homo sapiens
taattgtgtggccat

SEQ ID NO: 1162558 - DNA, 15 bp, Homo sapiens
ctaattgtgtggcca

SEQ ID NO: 1162559 - DNA, 15 bp, Homo sapiens
actaattgtgtggcc

SEQ ID NO: 1162560 - DNA, 15 bp, Homo sapiens
aactaattgtgtggc

SEQ ID NO: 1162561 - DNA, 15 bp, Homo sapiens
caactaattgtgtgg

SEQ ID NO: 1162562 - DNA, 15 bp, Homo sapiens
ccaactaattgtgtg

SEQ ID NO: 1162563 - DNA, 15 bp, Homo sapiens
accaactaattgtgt

SEQ ID NO: 1162564 - DNA, 15 bp, Homo sapiens
aaccaactaattgtg

SEQ ID NO: 1162565 - DNA, 15 bp, Homo sapiens
taaccaactaattgt

SEQ ID NO: 1162566 - DNA, 15 bp, Homo sapiens
ttaaccaactaattg

SEQ ID NO: 1162567 - DNA, 15 bp, Homo sapiens
gttaaccaactaatt

SEQ ID NO: 1162568 - DNA, 15 bp, Homo sapiens
tgttaaccaactaat

SEQ ID NO: 1162569 - DNA, 15 bp, Homo sapiens
ttgttaaccaactaa

SEQ ID NO: 1162570 - DNA, 15 bp, Homo sapiens
attgttaaccaacta

SEQ ID NO: 1162571 - DNA, 15 bp, Homo sapiens
cattgttaaccaact

SEQ ID NO: 1162572 - DNA, 15 bp, Homo sapiens
ccattgttaaccaac

SEQ ID NO: 1162573 - DNA, 15 bp, Homo sapiens
cccattgttaaccaa

SEQ ID NO: 1162574 - DNA, 15 bp, Homo sapiens
tcccattgttaacca

SEQ ID NO: 1162575 - DNA, 15 bp, Homo sapiens
ctcccattgttaacc

SEQ ID NO: 1162576 - DNA, 15 bp, Homo sapiens
tctcccattgttaac

SEQ ID NO: 1162577 - DNA, 15 bp, Homo sapiens
ttctcccattgttaa

SEQ ID NO: 1162578 - DNA, 15 bp, Homo sapiens
tttctcccattgtta

SEQ ID NO: 1162579 - DNA, 15 bp, Homo sapiens
ttttctcccattgtt

SEQ ID NO: 1162580 - DNA, 15 bp, Homo sapiens
tttttctcccattgt

SEQ ID NO: 1162581 - DNA, 15 bp, Homo sapiens
ttttttctcccattg

SEQ ID NO: 1162582 - DNA, 15 bp, Homo sapiens
tttttttctcccatt

SEQ ID NO: 1162583 - DNA, 15 bp, Homo sapiens
atttttttctcccat

SEQ ID NO: 1162584 - DNA, 15 bp, Homo sapiens
aatttttttctccca

SEQ ID NO: 1162585 - DNA, 15 bp, Homo sapiens
aaatttttttctccc

SEQ ID NO: 1162586 - DNA, 15 bp, Homo sapiens
aaaatttttttctcc

SEQ ID NO: 1162587 - DNA, 15 bp, Homo sapiens
caaaatttttttctc

SEQ ID NO: 1162588 - DNA, 15 bp, Homo sapiens
tcaaaatttttttct

SEQ ID NO: 1162589 - DNA, 15 bp, Homo sapiens
atcaaaatttttttc

SEQ ID NO: 1162590 - DNA, 15 bp, Homo sapiens
catcaaaattttttt

SEQ ID NO: 1162591 - DNA, 15 bp, Homo sapiens
tcatcaaaatttttt

SEQ ID NO: 1162592 - DNA, 15 bp, Homo sapiens
gtcatcaaaattttt

SEQ ID NO: 1162593 - DNA, 15 bp, Homo sapiens
agtcatcaaaatttt

SEQ ID NO: 1162594 - DNA, 15 bp, Homo sapiens
gagtcatcaaaattt

SEQ ID NO: 1162595 - DNA, 15 bp, Homo sapiens
tgagtcatcaaaatt

SEQ ID NO: 1162596 - DNA, 15 bp, Homo sapiens
gtgagtcatcaaaat

SEQ ID NO: 1162597 - DNA, 15 bp, Homo sapiens
cgtgagtcatcaaaa

SEQ ID NO: 1162598 - DNA, 15 bp, Homo sapiens
acgtgagtcatcaaa

SEQ ID NO: 1162599 - DNA, 15 bp, Homo sapiens
gacgtgagtcatcaa

SEQ ID NO: 1162600 - DNA, 15 bp, Homo sapiens
agacgtgagtcatca

SEQ ID NO: 1162601 - DNA, 15 bp, Homo sapiens
aagacgtgagtcatc

SEQ ID NO: 1162602 - DNA, 15 bp, Homo sapiens
aaagacgtgagtcat

SEQ ID NO: 1162603 - DNA, 15 bp, Homo sapiens
caaagacgtgagtca

SEQ ID NO: 1162604 - DNA, 15 bp, Homo sapiens
acaaagacgtgagtc

SEQ ID NO: 1162605 - DNA, 15 bp, Homo sapiens
aacaaagacgtgagt

SEQ ID NO: 1162606 - DNA, 15 bp, Homo sapiens
gaacaaagacgtgag

SEQ ID NO: 1162607 - DNA, 15 bp, Homo sapiens
agaacaaagacgtga

SEQ ID NO: 1162608 - DNA, 15 bp, Homo sapiens
aagaacaaagacgtg

SEQ ID NO: 1162609 - DNA, 15 bp, Homo sapiens
aaagaacaaagacgt

SEQ ID NO: 1162610 - DNA, 15 bp, Homo sapiens
aaaagaacaaagacg

SEQ ID NO: 1162611 - DNA, 15 bp, Homo sapiens
aaaaagaacaaagac

SEQ ID NO: 1162612 - DNA, 15 bp, Homo sapiens
caaaaagaacaaaga

SEQ ID NO: 1162613 - DNA, 15 bp, Homo sapiens
gcaaaaagaacaaag

SEQ ID NO: 1162614 - DNA, 15 bp, Homo sapiens
agcaaaaagaacaaa

SEQ ID NO: 1162615 - DNA, 15 bp, Homo sapiens
gagcaaaaagaacaa

SEQ ID NO: 1162616 - DNA, 15 bp, Homo sapiens
agagcaaaaagaaca

SEQ ID NO: 1162617 - DNA, 15 bp, Homo sapiens
tagagcaaaaagaac

SEQ ID NO: 1162618 - DNA, 15 bp, Homo sapiens
gtagagcaaaaagaa

SEQ ID NO: 1162619 - DNA, 15 bp, Homo sapiens
agtagagcaaaaaga

SEQ ID NO: 1162620 - DNA, 15 bp, Homo sapiens
aagtagagcaaaaag

SEQ ID NO: 1162621 - DNA, 15 bp, Homo sapiens
caagtagagcaaaaa

SEQ ID NO: 1162622 - DNA, 15 bp, Homo sapiens
ccaagtagagcaaaa

SEQ ID NO: 1162623 - DNA, 15 bp, Homo sapiens
tccaagtagagcaaa

SEQ ID NO: 1162624 - DNA, 15 bp, Homo sapiens
ctccaagtagagcaa

SEQ ID NO: 1162625 - DNA, 15 bp, Homo sapiens
actccaagtagagca

SEQ ID NO: 1162626 - DNA, 15 bp, Homo sapiens
tactccaagtagagc

SEQ ID NO: 1162627 - DNA, 15 bp, Homo sapiens
ctactccaagtagag

SEQ ID NO: 1162628 - DNA, 15 bp, Homo sapiens
tctactccaagtaga

SEQ ID NO: 1162629 - DNA, 15 bp, Homo sapiens
gtctactccaagtag

SEQ ID NO: 1162630 - DNA, 15 bp, Homo sapiens
agtctactccaagta

SEQ ID NO: 1162631 - DNA, 15 bp, Homo sapiens
tagtctactccaagt

SEQ ID NO: 1162632 - DNA, 15 bp, Homo sapiens
ctagtctactccaag

SEQ ID NO: 1162633 - DNA, 15 bp, Homo sapiens
cctagtctactccaa

SEQ ID NO: 1162634 - DNA, 15 bp, Homo sapiens
acctagtctactcca

SEQ ID NO: 1162635 - DNA, 15 bp, Homo sapiens
aacctagtctactcc

SEQ ID NO: 1162636 - DNA, 15 bp, Homo sapiens
caacctagtctactc

SEQ ID NO: 1162637 - DNA, 15 bp, Homo sapiens
tcaacctagtctact

SEQ ID NO: 1162638 - DNA, 15 bp, Homo sapiens
ttcaacctagtctac

SEQ ID NO: 1162639 - DNA, 15 bp, Homo sapiens
cttcaacctagtcta

SEQ ID NO: 1162640 - DNA, 15 bp, Homo sapiens
ccttcaacctagtct

SEQ ID NO: 1162641 - DNA, 15 bp, Homo sapiens
tccttcaacctagtc

SEQ ID NO: 1162642 - DNA, 15 bp, Homo sapiens
ttccttcaacctagt

SEQ ID NO: 1162643 - DNA, 15 bp, Homo sapiens
tttccttcaacctag

SEQ ID NO: 1162644 - DNA, 15 bp, Homo sapiens
ttttccttcaaccta

SEQ ID NO: 1162645 - DNA, 15 bp, Homo sapiens
tttttccttcaacct

SEQ ID NO: 1162646 - DNA, 15 bp, Homo sapiens
ttttttccttcaacc

SEQ ID NO: 1162647 - DNA, 15 bp, Homo sapiens
attttttccttcaac

SEQ ID NO: 1162648 - DNA, 15 bp, Homo sapiens
tattttttccttcaa

SEQ ID NO: 1162649 - DNA, 15 bp, Homo sapiens
ttattttttccttca

SEQ ID NO: 1162650 - DNA, 15 bp, Homo sapiens
attattttttccttc

SEQ ID NO: 1162651 - DNA, 15 bp, Homo sapiens
aattattttttcctt

SEQ ID NO: 1162652 - DNA, 15 bp, Homo sapiens
aaattattttttcct

SEQ ID NO: 1162653 - DNA, 15 bp, Homo sapiens
aaaattattttttcc

SEQ ID NO: 1162654 - DNA, 15 bp, Homo sapiens
caaaattattttttc

SEQ ID NO: 1162655 - DNA, 15 bp, Homo sapiens
ccaaaattatttttt

SEQ ID NO: 1162656 - DNA, 15 bp, Homo sapiens
tccaaaattattttt

SEQ ID NO: 1162657 - DNA, 15 bp, Homo sapiens
ttccaaaattatttt

SEQ ID NO: 1162658 - DNA, 15 bp, Homo sapiens
cttccaaaattattt

SEQ ID NO: 1162659 - DNA, 15 bp, Homo sapiens
ccttccaaaattatt

SEQ ID NO: 1162660 - DNA, 15 bp, Homo sapiens
cccttccaaaattat

SEQ ID NO: 1162661 - DNA, 15 bp, Homo sapiens
tcccttccaaaatta

SEQ ID NO: 1162662 - DNA, 15 bp, Homo sapiens
ttcccttccaaaatt

SEQ ID NO: 1162663 - DNA, 15 bp, Homo sapiens
tttcccttccaaaat

SEQ ID NO: 1162664 - DNA, 15 bp, Homo sapiens
ctttcccttccaaaa

SEQ ID NO: 1162665 - DNA, 15 bp, Homo sapiens
cctttcccttccaaa

SEQ ID NO: 1162666 - DNA, 15 bp, Homo sapiens
ccctttcccttccaa

SEQ ID NO: 1162667 - DNA, 15 bp, Homo sapiens
cccctttcccttcca

SEQ ID NO: 1162668 - DNA, 15 bp, Homo sapiens
tcccctttcccttcc

SEQ ID NO: 1162669 - DNA, 15 bp, Homo sapiens
ctcccctttcccttc

SEQ ID NO: 1162670 - DNA, 15 bp, Homo sapiens
cctcccctttccctt

SEQ ID NO: 1162671 - DNA, 15 bp, Homo sapiens
tcctcccctttccct

SEQ ID NO: 1162672 - DNA, 15 bp, Homo sapiens
ttcctcccctttccc

SEQ ID NO: 1162673 - DNA, 15 bp, Homo sapiens
tttcctcccctttcc

SEQ ID NO: 1162674 - DNA, 15 bp, Homo sapiens
atttcctcccctttc

SEQ ID NO: 1162675 - DNA, 15 bp, Homo sapiens
catttcctccccttt

SEQ ID NO: 1162676 - DNA, 15 bp, Homo sapiens
tcatttcctcccctt

SEQ ID NO: 1162677 - DNA, 15 bp, Homo sapiens
ttcatttcctcccct

SEQ ID NO: 1162678 - DNA, 15 bp, Homo sapiens
tttcatttcctcccc

SEQ ID NO: 1162679 - DNA, 15 bp, Homo sapiens
atttcatttcctccc

SEQ ID NO: 1162680 - DNA, 15 bp, Homo sapiens
catttcatttcctcc

SEQ ID NO: 1162681 - DNA, 15 bp, Homo sapiens
tcatttcatttcctc

SEQ ID NO: 1162682 - DNA, 15 bp, Homo sapiens
gtcatttcatttcct

SEQ ID NO: 1162683 - DNA, 15 bp, Homo sapiens
agtcatttcatttcc

SEQ ID NO: 1162684 - DNA, 15 bp, Homo sapiens
tagtcatttcatttc

SEQ ID NO: 1162685 - DNA, 15 bp, Homo sapiens
ctagtcatttcattt

SEQ ID NO: 1162686 - DNA, 15 bp, Homo sapiens
cctagtcatttcatt

SEQ ID NO: 1162687 - DNA, 15 bp, Homo sapiens
gcctagtcatttcat

SEQ ID NO: 1162688 - DNA, 15 bp, Homo sapiens
tgcctagtcatttca

SEQ ID NO: 1162689 - DNA, 15 bp, Homo sapiens
ctgcctagtcatttc

SEQ ID NO: 1162690 - DNA, 15 bp, Homo sapiens
cctgcctagtcattt

SEQ ID NO: 1162691 - DNA, 15 bp, Homo sapiens
tcctgcctagtcatt

SEQ ID NO: 1162692 - DNA, 15 bp, Homo sapiens
ttcctgcctagtcat

SEQ ID NO: 1162693 - DNA, 15 bp, Homo sapiens
gttcctgcctagtca

SEQ ID NO: 1162694 - DNA, 15 bp, Homo sapiens
agttcctgcctagtc

SEQ ID NO: 1162695 - DNA, 15 bp, Homo sapiens
gagttcctgcctagt

SEQ ID NO: 1162696 - DNA, 15 bp, Homo sapiens
tgagttcctgcctag

SEQ ID NO: 1162697 - DNA, 15 bp, Homo sapiens
atgagttcctgccta

SEQ ID NO: 1162698 - DNA, 15 bp, Homo sapiens
catgagttcctgcct

SEQ ID NO: 1162699 - DNA, 15 bp, Homo sapiens
tcatgagttcctgcc

SEQ ID NO: 1162700 - DNA, 15 bp, Homo sapiens
ctcatgagttcctgc

SEQ ID NO: 1162701 - DNA, 15 bp, Homo sapiens
tctcatgagttcctg

SEQ ID NO: 1162702 - DNA, 15 bp, Homo sapiens
atctcatgagttcct

SEQ ID NO: 1162703 - DNA, 15 bp, Homo sapiens
aatctcatgagttcc

SEQ ID NO: 1162704 - DNA, 15 bp, Homo sapiens
caatctcatgagttc

SEQ ID NO: 1162705 - DNA, 15 bp, Homo sapiens
acaatctcatgagtt

SEQ ID NO: 1162706 - DNA, 15 bp, Homo sapiens
tacaatctcatgagt

SEQ ID NO: 1162707 - DNA, 15 bp, Homo sapiens
ttacaatctcatgag

SEQ ID NO: 1162708 - DNA, 15 bp, Homo sapiens
tttacaatctcatga

SEQ ID NO: 1162709 - DNA, 15 bp, Homo sapiens
atttacaatctcatg

SEQ ID NO: 1162710 - DNA, 15 bp, Homo sapiens
catttacaatctcat

SEQ ID NO: 1162711 - DNA, 15 bp, Homo sapiens
ccatttacaatctca

SEQ ID NO: 1162712 - DNA, 15 bp, Homo sapiens
accatttacaatctc

SEQ ID NO: 1162713 - DNA, 15 bp, Homo sapiens
gaccatttacaatct

SEQ ID NO: 1162714 - DNA, 15 bp, Homo sapiens
tgaccatttacaatc

SEQ ID NO: 1162715 - DNA, 15 bp, Homo sapiens
ctgaccatttacaat

SEQ ID NO: 1162716 - DNA, 15 bp, Homo sapiens
gctgaccatttacaa

SEQ ID NO: 1162717 - DNA, 15 bp, Homo sapiens
ggctgaccatttaca

SEQ ID NO: 1162718 - DNA, 15 bp, Homo sapiens
tggctgaccatttac

SEQ ID NO: 1162719 - DNA, 15 bp, Homo sapiens
ctggctgaccattta

SEQ ID NO: 1162720 - DNA, 15 bp, Homo sapiens
tctggctgaccattt

SEQ ID NO: 1162721 - DNA, 15 bp, Homo sapiens
ttctggctgaccatt

SEQ ID NO: 1162722 - DNA, 15 bp, Homo sapiens
tttctggctgaccat

SEQ ID NO: 1162723 - DNA, 15 bp, Homo sapiens
atttctggctgacca

SEQ ID NO: 1162724 - DNA, 15 bp, Homo sapiens
gatttctggctgacc

SEQ ID NO: 1162725 - DNA, 15 bp, Homo sapiens
tgatttctggctgac

SEQ ID NO: 1162726 - DNA, 15 bp, Homo sapiens
ttgatttctggctga

SEQ ID NO: 1162727 - DNA, 15 bp, Homo sapiens
cttgatttctggctg

SEQ ID NO: 1162728 - DNA, 15 bp, Homo sapiens
acttgatttctggct

SEQ ID NO: 1162729 - DNA, 15 bp, Homo sapiens
aacttgatttctggc

SEQ ID NO: 1162730 - DNA, 15 bp, Homo sapiens
taacttgatttctgg

SEQ ID NO: 1162731 - DNA, 15 bp, Homo sapiens
ataacttgatttctg

SEQ ID NO: 1162732 - DNA, 15 bp, Homo sapiens
cataacttgatttct

SEQ ID NO: 1162733 - DNA, 15 bp, Homo sapiens
acataacttgatttc

SEQ ID NO: 1162734 - DNA, 15 bp, Homo sapiens
aacataacttgattt

SEQ ID NO: 1162735 - DNA, 15 bp, Homo sapiens
taacataacttgatt

SEQ ID NO: 1162736 - DNA, 15 bp, Homo sapiens
ataacataacttgat

SEQ ID NO: 1162737 - DNA, 15 bp, Homo sapiens
tataacataacttga

SEQ ID NO: 1162738 - DNA, 15 bp, Homo sapiens
ctataacataacttg

SEQ ID NO: 1162739 - DNA, 15 bp, Homo sapiens
tctataacataactt

SEQ ID NO: 1162740 - DNA, 15 bp, Homo sapiens
ttctataacataact

SEQ ID NO: 1162741 - DNA, 15 bp, Homo sapiens
cttctataacataac

SEQ ID NO: 1162742 - DNA, 15 bp, Homo sapiens
tcttctataacataa

SEQ ID NO: 1162743 - DNA, 15 bp, Homo sapiens
atcttctataacata

SEQ ID NO: 1162744 - DNA, 15 bp, Homo sapiens
catcttctataacat

SEQ ID NO: 1162745 - DNA, 15 bp, Homo sapiens
tcatcttctataaca

SEQ ID NO: 1162746 - DNA, 15 bp, Homo sapiens
ctcatcttctataac

SEQ ID NO: 1162747 - DNA, 15 bp, Homo sapiens
tctcatcttctataa

SEQ ID NO: 1162748 - DNA, 15 bp, Homo sapiens
ctctcatcttctata

SEQ ID NO: 1162749 - DNA, 15 bp, Homo sapiens
cctctcatcttctat

SEQ ID NO: 1162750 - DNA, 15 bp, Homo sapiens
tcctctcatcttcta

SEQ ID NO: 1162751 - DNA, 15 bp, Homo sapiens
ctcctctcatcttct

SEQ ID NO: 1162752 - DNA, 15 bp, Homo sapiens
cctcctctcatcttc

SEQ ID NO: 1162753 - DNA, 15 bp, Homo sapiens
ccctcctctcatctt

SEQ ID NO: 1162754 - DNA, 15 bp, Homo sapiens
cccctcctctcatct

SEQ ID NO: 1162755 - DNA, 15 bp, Homo sapiens
ccccctcctctcatc

SEQ ID NO: 1162756 - DNA, 15 bp, Homo sapiens
gccccctcctctcat

SEQ ID NO: 1162757 - DNA, 15 bp, Homo sapiens
agccccctcctctca

SEQ ID NO: 1162758 - DNA, 15 bp, Homo sapiens
cagccccctcctctc

SEQ ID NO: 1162759 - DNA, 15 bp, Homo sapiens
ccagccccctcctct

SEQ ID NO: 1162760 - DNA, 15 bp, Homo sapiens
cccagccccctcctc

SEQ ID NO: 1162761 - DNA, 15 bp, Homo sapiens
gcccagccccctcct

SEQ ID NO: 1162762 - DNA, 15 bp, Homo sapiens
cgcccagccccctcc

SEQ ID NO: 1162763 - DNA, 15 bp, Homo sapiens
acgcccagccccctc

SEQ ID NO: 1162764 - DNA, 15 bp, Homo sapiens
cacgcccagccccct

SEQ ID NO: 1162765 - DNA, 15 bp, Homo sapiens
ccacgcccagccccc

SEQ ID NO: 1162766 - DNA, 15 bp, Homo sapiens
accacgcccagcccc

SEQ ID NO: 1162767 - DNA, 15 bp, Homo sapiens
caccacgcccagccc

SEQ ID NO: 1162768 - DNA, 15 bp, Homo sapiens
ataggcgtgagccac

SEQ ID NO: 1162769 - DNA, 15 bp, Homo sapiens
tataggcgtgagcca

SEQ ID NO: 1162770 - DNA, 15 bp, Homo sapiens
cagatggtctcgatc

SEQ ID NO: 1162771 - DNA, 15 bp, Homo sapiens
ccagatggtctcgat

SEQ ID NO: 1162772 - DNA, 15 bp, Homo sapiens
gccagatggtctcga

SEQ ID NO: 1162773 - DNA, 15 bp, Homo sapiens
agccagatggtctcg

SEQ ID NO: 1162774 - DNA, 15 bp, Homo sapiens
tagccagatggtctc

SEQ ID NO: 1162775 - DNA, 15 bp, Homo sapiens
ttagccagatggtct

SEQ ID NO: 1162776 - DNA, 15 bp, Homo sapiens
gttagccagatggtc

SEQ ID NO: 1162777 - DNA, 15 bp, Homo sapiens
tgttagccagatggt

SEQ ID NO: 1162778 - DNA, 15 bp, Homo sapiens
gtgttagccagatgg

SEQ ID NO: 1162779 - DNA, 15 bp, Homo sapiens
cgtgttagccagatg

SEQ ID NO: 1162780 - DNA, 15 bp, Homo sapiens
ccgtgttagccagat

SEQ ID NO: 1162781 - DNA, 15 bp, Homo sapiens
accgtgttagccaga

SEQ ID NO: 1162782 - DNA, 15 bp, Homo sapiens
attttttttgtattt

SEQ ID NO: 1162783 - DNA, 15 bp, Homo sapiens
aattttttttgtatt

SEQ ID NO: 1162784 - DNA, 15 bp, Homo sapiens
taattttttttgtat

SEQ ID NO: 1162785 - DNA, 15 bp, Homo sapiens
ctaattttttttgta

SEQ ID NO: 1162786 - DNA, 15 bp, Homo sapiens
gctaattttttttgt

SEQ ID NO: 1162787 - DNA, 15 bp, Homo sapiens
ggctaattttttttg

SEQ ID NO: 1162788 - DNA, 15 bp, Homo sapiens
cggctaatttttttt

SEQ ID NO: 1162789 - DNA, 15 bp, Homo sapiens
tccggctaatttttt

SEQ ID NO: 1162790 - DNA, 15 bp, Homo sapiens
gtccggctaattttt

SEQ ID NO: 1162791 - DNA, 15 bp, Homo sapiens
cgtccggctaatttt

SEQ ID NO: 1162792 - DNA, 15 bp, Homo sapiens
acgtccggctaattt

SEQ ID NO: 1162793 - DNA, 15 bp, Homo sapiens
cacgtccggctaatt

SEQ ID NO: 1162794 - DNA, 15 bp, Homo sapiens
ccacgtccggctaat

SEQ ID NO: 1162795 - DNA, 15 bp, Homo sapiens
accacgtccggctaa

SEQ ID NO: 1162796 - DNA, 15 bp, Homo sapiens
caccacgtccggcta

SEQ ID NO: 1162797 - DNA, 15 bp, Homo sapiens
acaccacgtccggct

SEQ ID NO: 1162798 - DNA, 15 bp, Homo sapiens
aacaccacgtccggc

SEQ ID NO: 1162799 - DNA, 15 bp, Homo sapiens
caacaccacgtccgg

SEQ ID NO: 1162800 - DNA, 15 bp, Homo sapiens
ccaacaccacgtccg

SEQ ID NO: 1162801 - DNA, 15 bp, Homo sapiens
cccaacaccacgtcc

SEQ ID NO: 1162802 - DNA, 15 bp, Homo sapiens
gcccaacaccacgtc

SEQ ID NO: 1162803 - DNA, 15 bp, Homo sapiens
cgcccaacaccacgt

SEQ ID NO: 1162804 - DNA, 15 bp, Homo sapiens
gcgcccaacaccacg

SEQ ID NO: 1162805 - DNA, 15 bp, Homo sapiens
ggcgcccaacaccac

SEQ ID NO: 1162806 - DNA, 15 bp, Homo sapiens
aggcgcccaacacca

SEQ ID NO: 1162807 - DNA, 15 bp, Homo sapiens
caggcgcccaacacc

SEQ ID NO: 1162808 - DNA, 15 bp, Homo sapiens
acaggcgcccaacac

SEQ ID NO: 1162809 - DNA, 15 bp, Homo sapiens
tacaggcgcccaaca

SEQ ID NO: 1162810 - DNA, 15 bp, Homo sapiens
ctacaggcgcccaac

SEQ ID NO: 1162811 - DNA, 15 bp, Homo sapiens
actacaggcgcccaa

SEQ ID NO: 1162812 - DNA, 15 bp, Homo sapiens
cattttcctgcctca

SEQ ID NO: 1162813 - DNA, 15 bp, Homo sapiens
ccattttcctgcctc

SEQ ID NO: 1162814 - DNA, 15 bp, Homo sapiens
gccattttcctgcct

SEQ ID NO: 1162815 - DNA, 15 bp, Homo sapiens
cgccattttcctgcc

SEQ ID NO: 1162816 - DNA, 15 bp, Homo sapiens
acgccattttcctgc

SEQ ID NO: 1162817 - DNA, 15 bp, Homo sapiens
gacgccattttcctg

SEQ ID NO: 1162818 - DNA, 15 bp, Homo sapiens
tgacgccattttcct

SEQ ID NO: 1162819 - DNA, 15 bp, Homo sapiens
ttgacgccattttcc

SEQ ID NO: 1162820 - DNA, 15 bp, Homo sapiens
gttgacgccattttc

SEQ ID NO: 1162821 - DNA, 15 bp, Homo sapiens
ggttgacgccatttt

SEQ ID NO: 1162822 - DNA, 15 bp, Homo sapiens
gggttgacgccattt

SEQ ID NO: 1162823 - DNA, 15 bp, Homo sapiens
tgggttgacgccatt

SEQ ID NO: 1162824 - DNA, 15 bp, Homo sapiens
ctgggttgacgccat

SEQ ID NO: 1162825 - DNA, 15 bp, Homo sapiens
cctgggttgacgcca

SEQ ID NO: 1162826 - DNA, 15 bp, Homo sapiens
tcctgggttgacgcc

SEQ ID NO: 1162827 - DNA, 15 bp, Homo sapiens
ctcctgggttgacgc

SEQ ID NO: 1162828 - DNA, 15 bp, Homo sapiens
cctcctgggttgacg

SEQ ID NO: 1162829 - DNA, 15 bp, Homo sapiens
gcctcctgggttgac

SEQ ID NO: 1162830 - DNA, 15 bp, Homo sapiens
tgcctcctgggttga

SEQ ID NO: 1162831 - DNA, 15 bp, Homo sapiens
ctgcctcctgggttg

SEQ ID NO: 1162832 - DNA, 15 bp, Homo sapiens
acactgcaagctctg

SEQ ID NO: 1162833 - DNA, 15 bp, Homo sapiens
cacactgcaagctct

SEQ ID NO: 1162834 - DNA, 15 bp, Homo sapiens
tcacactgcaagctc

SEQ ID NO: 1162835 - DNA, 15 bp, Homo sapiens
ctcacactgcaagct

SEQ ID NO: 1162836 - DNA, 15 bp, Homo sapiens
gctcacactgcaagc

SEQ ID NO: 1162837 - DNA, 15 bp, Homo sapiens
cgctcacactgcaag

SEQ ID NO: 1162838 - DNA, 15 bp, Homo sapiens
ccgctcacactgcaa

SEQ ID NO: 1162839 - DNA, 15 bp, Homo sapiens
tccgctcacactgca

SEQ ID NO: 1162840 - DNA, 15 bp, Homo sapiens
ctccgctcacactgc

SEQ ID NO: 1162841 - DNA, 15 bp, Homo sapiens
tctccgctcacactg

SEQ ID NO: 1162842 - DNA, 15 bp, Homo sapiens
atctccgctcacact

SEQ ID NO: 1162843 - DNA, 15 bp, Homo sapiens
gatctccgctcacac

SEQ ID NO: 1162844 - DNA, 15 bp, Homo sapiens
tgatctccgctcaca

SEQ ID NO: 1162845 - DNA, 15 bp, Homo sapiens
gtgatctccgctcac

SEQ ID NO: 1162846 - DNA, 15 bp, Homo sapiens
cgtgatctccgctca

SEQ ID NO: 1162847 - DNA, 15 bp, Homo sapiens
gcgtgatctccgctc

SEQ ID NO: 1162848 - DNA, 15 bp, Homo sapiens
ggcgtgatctccgct

SEQ ID NO: 1162849 - DNA, 15 bp, Homo sapiens
tggcgtgatctccgc

SEQ ID NO: 1162850 - DNA, 15 bp, Homo sapiens
gtggcgtgatctccg

SEQ ID NO: 1162851 - DNA, 15 bp, Homo sapiens
cgtggcgtgatctcc

SEQ ID NO: 1162852 - DNA, 15 bp, Homo sapiens
ccgtggcgtgatctc

SEQ ID NO: 1162853 - DNA, 15 bp, Homo sapiens
tccgtggcgtgatct

SEQ ID NO: 1162854 - DNA, 15 bp, Homo sapiens
ttccgtggcgtgatc

SEQ ID NO: 1162855 - DNA, 15 bp, Homo sapiens
gttccgtggcgtgat

SEQ ID NO: 1162856 - DNA, 15 bp, Homo sapiens
agttccgtggcgtga

SEQ ID NO: 1162857 - DNA, 15 bp, Homo sapiens
gagttccgtggcgtg

SEQ ID NO: 1162858 - DNA, 15 bp, Homo sapiens
ggagttccgtggcgt

SEQ ID NO: 1162859 - DNA, 15 bp, Homo sapiens
tggagttccgtggcg

SEQ ID NO: 1162860 - DNA, 15 bp, Homo sapiens
ctggagttccgtggc

SEQ ID NO: 1162861 - DNA, 15 bp, Homo sapiens
gctggagttccgtgg

SEQ ID NO: 1162862 - DNA, 15 bp, Homo sapiens
ggctggagttccgtg

SEQ ID NO: 1162863 - DNA, 15 bp, Homo sapiens
aggctggagttccgt

SEQ ID NO: 1162864 - DNA, 15 bp, Homo sapiens
caggctggagttccg

SEQ ID NO: 1162865 - DNA, 15 bp, Homo sapiens
ccaggctggagttcc

SEQ ID NO: 1162866 - DNA, 15 bp, Homo sapiens
cccaggctggagttc

SEQ ID NO: 1162867 - DNA, 15 bp, Homo sapiens
gcccaggctggagtt

SEQ ID NO: 1162868 - DNA, 15 bp, Homo sapiens
gaagtctcgctctgt

SEQ ID NO: 1162869 - DNA, 15 bp, Homo sapiens
cgaagtctcgctctg

SEQ ID NO: 1162870 - DNA, 15 bp, Homo sapiens
acgaagtctcgctct

SEQ ID NO: 1162871 - DNA, 15 bp, Homo sapiens
gacgaagtctcgctc

SEQ ID NO: 1162872 - DNA, 15 bp, Homo sapiens
agacgaagtctcgct

SEQ ID NO: 1162873 - DNA, 15 bp, Homo sapiens
gagacgaagtctcgc

SEQ ID NO: 1162874 - DNA, 15 bp, Homo sapiens
tgagacgaagtctcg

SEQ ID NO: 1162875 - DNA, 15 bp, Homo sapiens
ttgagacgaagtctc

SEQ ID NO: 1162876 - DNA, 15 bp, Homo sapiens
tttgagacgaagtct

SEQ ID NO: 1162877 - DNA, 15 bp, Homo sapiens
ttttgagacgaagtc

SEQ ID NO: 1162878 - DNA, 15 bp, Homo sapiens
tttttgagacgaagt

SEQ ID NO: 1162879 - DNA, 15 bp, Homo sapiens
ttttttgagacgaag

SEQ ID NO: 1162880 - DNA, 15 bp, Homo sapiens
tttttttgagacgaa

SEQ ID NO: 1162881 - DNA, 15 bp, Homo sapiens
tcatctttttttttt

SEQ ID NO: 1162882 - DNA, 15 bp, Homo sapiens
ctcatcttttttttt

SEQ ID NO: 1162883 - DNA, 15 bp, Homo sapiens
tctcatctttttttt

SEQ ID NO: 1162884 - DNA, 15 bp, Homo sapiens
ctctcatcttttttt

SEQ ID NO: 1162885 - DNA, 15 bp, Homo sapiens
cctctcatctttttt

SEQ ID NO: 1162886 - DNA, 15 bp, Homo sapiens
tcctctcatcttttt

SEQ ID NO: 1162887 - DNA, 15 bp, Homo sapiens
ctcctctcatctttt

SEQ ID NO: 1162888 - DNA, 15 bp, Homo sapiens
cctcctctcatcttt

SEQ ID NO: 1162889 - DNA, 15 bp, Homo sapiens
tcctcctctcatctt

SEQ ID NO: 1162890 - DNA, 15 bp, Homo sapiens
ttcctcctctcatct

SEQ ID NO: 1162891 - DNA, 15 bp, Homo sapiens
tttcctcctctcatc

SEQ ID NO: 1162892 - DNA, 15 bp, Homo sapiens
ttttcctcctctcat

SEQ ID NO: 1162893 - DNA, 15 bp, Homo sapiens
tttttcctcctctca

SEQ ID NO: 1162894 - DNA, 15 bp, Homo sapiens
ctttttcctcctctc

SEQ ID NO: 1162895 - DNA, 15 bp, Homo sapiens
gctttttcctcctct

SEQ ID NO: 1162896 - DNA, 15 bp, Homo sapiens
tgctttttcctcctc

SEQ ID NO: 1162897 - DNA, 15 bp, Homo sapiens
gtgctttttcctcct

SEQ ID NO: 1162898 - DNA, 15 bp, Homo sapiens
ggtgctttttcctcc

SEQ ID NO: 1162899 - DNA, 15 bp, Homo sapiens
tggtgctttttcctc

SEQ ID NO: 1162900 - DNA, 15 bp, Homo sapiens
atggtgctttttcct

SEQ ID NO: 1162901 - DNA, 15 bp, Homo sapiens
catggtgctttttcc

SEQ ID NO: 1162902 - DNA, 15 bp, Homo sapiens
ccatggtgctttttc

SEQ ID NO: 1162903 - DNA, 15 bp, Homo sapiens
accatggtgcttttt

SEQ ID NO: 1162904 - DNA, 15 bp, Homo sapiens
gaccatggtgctttt

SEQ ID NO: 1162905 - DNA, 15 bp, Homo sapiens
agaccatggtgcttt

SEQ ID NO: 1162906 - DNA, 15 bp, Homo sapiens
aagaccatggtgctt

SEQ ID NO: 1162907 - DNA, 15 bp, Homo sapiens
taagaccatggtgct

SEQ ID NO: 1162908 - DNA, 15 bp, Homo sapiens
ataagaccatggtgc

SEQ ID NO: 1162909 - DNA, 15 bp, Homo sapiens
cataagaccatggtg

SEQ ID NO: 1162910 - DNA, 15 bp, Homo sapiens
ccataagaccatggt

SEQ ID NO: 1162911 - DNA, 15 bp, Homo sapiens
cccataagaccatgg

SEQ ID NO: 1162912 - DNA, 15 bp, Homo sapiens
acccataagaccatg

SEQ ID NO: 1162913 - DNA, 15 bp, Homo sapiens
cacccataagaccat

SEQ ID NO: 1162914 - DNA, 15 bp, Homo sapiens
acacccataagacca

SEQ ID NO: 1162915 - DNA, 15 bp, Homo sapiens
cacacccataagacc

SEQ ID NO: 1162916 - DNA, 15 bp, Homo sapiens
ccacacccataagac

SEQ ID NO: 1162917 - DNA, 15 bp, Homo sapiens
tccacacccataaga

SEQ ID NO: 1162918 - DNA, 15 bp, Homo sapiens
ttccacacccataag

SEQ ID NO: 1162919 - DNA, 15 bp, Homo sapiens
attccacacccataa

SEQ ID NO: 1162920 - DNA, 15 bp, Homo sapiens
aattccacacccata

SEQ ID NO: 1162921 - DNA, 15 bp, Homo sapiens
taattccacacccat

SEQ ID NO: 1162922 - DNA, 15 bp, Homo sapiens
ctaattccacaccca

SEQ ID NO: 1162923 - DNA, 15 bp, Homo sapiens
gctaattccacaccc

SEQ ID NO: 1162924 - DNA, 15 bp, Homo sapiens
tgctaattccacacc

SEQ ID NO: 1162925 - DNA, 15 bp, Homo sapiens
ttgctaattccacac

SEQ ID NO: 1162926 - DNA, 15 bp, Homo sapiens
cttgctaattccaca

SEQ ID NO: 1162927 - DNA, 15 bp, Homo sapiens
gcttgctaattccac

SEQ ID NO: 1162928 - DNA, 15 bp, Homo sapiens
tgcttgctaattcca

SEQ ID NO: 1162929 - DNA, 15 bp, Homo sapiens
gtgcttgctaattcc

SEQ ID NO: 1162930 - DNA, 15 bp, Homo sapiens
agtgcttgctaattc

SEQ ID NO: 1162931 - DNA, 15 bp, Homo sapiens
aagtgcttgctaatt

SEQ ID NO: 1162932 - DNA, 15 bp, Homo sapiens
aaagtgcttgctaat

SEQ ID NO: 1162933 - DNA, 15 bp, Homo sapiens
caaagtgcttgctaa

SEQ ID NO: 1162934 - DNA, 15 bp, Homo sapiens
tcaaagtgcttgcta

SEQ ID NO: 1162935 - DNA, 15 bp, Homo sapiens
ttcaaagtgcttgct

SEQ ID NO: 1162936 - DNA, 15 bp, Homo sapiens
cttcaaagtgcttgc

SEQ ID NO: 1162937 - DNA, 15 bp, Homo sapiens
acttcaaagtgcttg

SEQ ID NO: 1162938 - DNA, 15 bp, Homo sapiens
aacttcaaagtgctt

SEQ ID NO: 1162939 - DNA, 15 bp, Homo sapiens
taacttcaaagtgct

SEQ ID NO: 1162940 - DNA, 15 bp, Homo sapiens
ataacttcaaagtgc

SEQ ID NO: 1162941 - DNA, 15 bp, Homo sapiens
cataacttcaaagtg

SEQ ID NO: 1162942 - DNA, 15 bp, Homo sapiens
tcataacttcaaagt

SEQ ID NO: 1162943 - DNA, 15 bp, Homo sapiens
ttcataacttcaaag

SEQ ID NO: 1162944 - DNA, 15 bp, Homo sapiens
tttcataacttcaaa

SEQ ID NO: 1162945 - DNA, 15 bp, Homo sapiens
ttttcataacttcaa

SEQ ID NO: 1162946 - DNA, 15 bp, Homo sapiens
gttttcataacttca

SEQ ID NO: 1162947 - DNA, 15 bp, Homo sapiens
ggttttcataacttc

SEQ ID NO: 1162948 - DNA, 15 bp, Homo sapiens
aggttttcataactt

SEQ ID NO: 1162949 - DNA, 15 bp, Homo sapiens
caggttttcataact

SEQ ID NO: 1162950 - DNA, 15 bp, Homo sapiens
tcaggttttcataac

SEQ ID NO: 1162951 - DNA, 15 bp, Homo sapiens
ctcaggttttcataa

SEQ ID NO: 1162952 - DNA, 15 bp, Homo sapiens
actcaggttttcata

SEQ ID NO: 1162953 - DNA, 15 bp, Homo sapiens
aactcaggttttcat

SEQ ID NO: 1162954 - DNA, 15 bp, Homo sapiens
gaactcaggttttca

SEQ ID NO: 1162955 - DNA, 15 bp, Homo sapiens
agaactcaggttttc

SEQ ID NO: 1162956 - DNA, 15 bp, Homo sapiens
cagaactcaggtttt

SEQ ID NO: 1162957 - DNA, 15 bp, Homo sapiens
tcagaactcaggttt

SEQ ID NO: 1162958 - DNA, 15 bp, Homo sapiens
ctcagaactcaggtt

SEQ ID NO: 1162959 - DNA, 15 bp, Homo sapiens
cctcagaactcaggt

SEQ ID NO: 1162960 - DNA, 15 bp, Homo sapiens
tcctcagaactcagg

SEQ ID NO: 1162961 - DNA, 15 bp, Homo sapiens
ctcctcagaactcag

SEQ ID NO: 1162962 - DNA, 15 bp, Homo sapiens
gctcctcagaactca

SEQ ID NO: 1162963 - DNA, 15 bp, Homo sapiens
agctcctcagaactc

SEQ ID NO: 1162964 - DNA, 15 bp, Homo sapiens
gagctcctcagaact

SEQ ID NO: 1162965 - DNA, 15 bp, Homo sapiens
agagctcctcagaac

SEQ ID NO: 1162966 - DNA, 15 bp, Homo sapiens
cagagctcctcagaa

SEQ ID NO: 1162967 - DNA, 15 bp, Homo sapiens
tcagagctcctcaga

SEQ ID NO: 1162968 - DNA, 15 bp, Homo sapiens
ctcagagctcctcag

SEQ ID NO: 1162969 - DNA, 15 bp, Homo sapiens
gctcagagctcctca

SEQ ID NO: 1162970 - DNA, 15 bp, Homo sapiens
agctcagagctcctc

SEQ ID NO: 1162971 - DNA, 15 bp, Homo sapiens
gagctcagagctcct

SEQ ID NO: 1162972 - DNA, 15 bp, Homo sapiens
agagctcagagctcc

SEQ ID NO: 1162973 - DNA, 15 bp, Homo sapiens
aagagctcagagctc

SEQ ID NO: 1162974 - DNA, 15 bp, Homo sapiens
aaagagctcagagct

SEQ ID NO: 1162975 - DNA, 15 bp, Homo sapiens
aaaagagctcagagc

SEQ ID NO: 1162976 - DNA, 15 bp, Homo sapiens
taaaagagctcagag

SEQ ID NO: 1162977 - DNA, 15 bp, Homo sapiens
ttaaaagagctcaga

SEQ ID NO: 1162978 - DNA, 15 bp, Homo sapiens
tttaaaagagctcag

SEQ ID NO: 1162979 - DNA, 15 bp, Homo sapiens
atttaaaagagctca

SEQ ID NO: 1162980 - DNA, 15 bp, Homo sapiens
tatttaaaagagctc

SEQ ID NO: 1162981 - DNA, 15 bp, Homo sapiens
gtatttaaaagagct

SEQ ID NO: 1162982 - DNA, 15 bp, Homo sapiens
tgtatttaaaagagc

SEQ ID NO: 1162983 - DNA, 15 bp, Homo sapiens
gtgtatttaaaagag

SEQ ID NO: 1162984 - DNA, 15 bp, Homo sapiens
tgtgtatttaaaaga

SEQ ID NO: 1162985 - DNA, 15 bp, Homo sapiens
ctgtgtatttaaaag

SEQ ID NO: 1162986 - DNA, 15 bp, Homo sapiens
cctgtgtatttaaaa

SEQ ID NO: 1162987 - DNA, 15 bp, Homo sapiens
tcctgtgtatttaaa

SEQ ID NO: 1162988 - DNA, 15 bp, Homo sapiens
ttcctgtgtatttaa

SEQ ID NO: 1162989 - DNA, 15 bp, Homo sapiens
attcctgtgtattta

SEQ ID NO: 1162990 - DNA, 15 bp, Homo sapiens
aattcctgtgtattt

SEQ ID NO: 1162991 - DNA, 15 bp, Homo sapiens
aaattcctgtgtatt

SEQ ID NO: 1162992 - DNA, 15 bp, Homo sapiens
taaattcctgtgtat

SEQ ID NO: 1162993 - DNA, 15 bp, Homo sapiens
ttaaattcctgtgta

SEQ ID NO: 1162994 - DNA, 15 bp, Homo sapiens
tttaaattcctgtgt

SEQ ID NO: 1162995 - DNA, 15 bp, Homo sapiens
gtttaaattcctgtg

SEQ ID NO: 1162996 - DNA, 15 bp, Homo sapiens
cgtttaaattcctgt

SEQ ID NO: 1162997 - DNA, 15 bp, Homo sapiens
tcgtttaaattcctg

SEQ ID NO: 1162998 - DNA, 15 bp, Homo sapiens
ctcgtttaaattcct

SEQ ID NO: 1162999 - DNA, 15 bp, Homo sapiens
actcgtttaaattcc

SEQ ID NO: 1163000 - DNA, 15 bp, Homo sapiens
tactcgtttaaattc

SEQ ID NO: 1163001 - DNA, 15 bp, Homo sapiens
atactcgtttaaatt

SEQ ID NO: 1163002 - DNA, 15 bp, Homo sapiens
tatactcgtttaaat

SEQ ID NO: 1163003 - DNA, 15 bp, Homo sapiens
gtatactcgtttaaa

SEQ ID NO: 1163004 - DNA, 15 bp, Homo sapiens
ggtatactcgtttaa

SEQ ID NO: 1163005 - DNA, 15 bp, Homo sapiens
gggtatactcgttta

SEQ ID NO: 1163006 - DNA, 15 bp, Homo sapiens
tgggtatactcgttt

SEQ ID NO: 1163007 - DNA, 15 bp, Homo sapiens
ttgggtatactcgtt

SEQ ID NO: 1163008 - DNA, 15 bp, Homo sapiens
tttgggtatactcgt

SEQ ID NO: 1163009 - DNA, 15 bp, Homo sapiens
atttgggtatactcg

SEQ ID NO: 1163010 - DNA, 15 bp, Homo sapiens
tatttgggtatactc

SEQ ID NO: 1163011 - DNA, 15 bp, Homo sapiens
ctatttgggtatact

SEQ ID NO: 1163012 - DNA, 15 bp, Homo sapiens
cctatttgggtatac

SEQ ID NO: 1163013 - DNA, 15 bp, Homo sapiens
acctatttgggtata

SEQ ID NO: 1163014 - DNA, 15 bp, Homo sapiens
aacctatttgggtat

SEQ ID NO: 1163015 - DNA, 15 bp, Homo sapiens
aaacctatttgggta

SEQ ID NO: 1163016 - DNA, 15 bp, Homo sapiens
caaacctatttgggt

SEQ ID NO: 1163017 - DNA, 15 bp, Homo sapiens
tcaaacctatttggg

SEQ ID NO: 1163018 - DNA, 15 bp, Homo sapiens
ctcaaacctatttgg

SEQ ID NO: 1163019 - DNA, 15 bp, Homo sapiens
cctcaaacctatttg

SEQ ID NO: 1163020 - DNA, 15 bp, Homo sapiens
tcctcaaacctattt

SEQ ID NO: 1163021 - DNA, 15 bp, Homo sapiens
ttcctcaaacctatt

SEQ ID NO: 1163022 - DNA, 15 bp, Homo sapiens
cttcctcaaacctat

SEQ ID NO: 1163023 - DNA, 15 bp, Homo sapiens
ccttcctcaaaccta

SEQ ID NO: 1163024 - DNA, 15 bp, Homo sapiens
tccttcctcaaacct

SEQ ID NO: 1163025 - DNA, 15 bp, Homo sapiens
ttccttcctcaaacc

SEQ ID NO: 1163026 - DNA, 15 bp, Homo sapiens
tttccttcctcaaac

SEQ ID NO: 1163027 - DNA, 15 bp, Homo sapiens
atttccttcctcaaa

SEQ ID NO: 1163028 - DNA, 15 bp, Homo sapiens
catttccttcctcaa

SEQ ID NO: 1163029 - DNA, 15 bp, Homo sapiens
acatttccttcctca

SEQ ID NO: 1163030 - DNA, 15 bp, Homo sapiens
tacatttccttcctc

SEQ ID NO: 1163031 - DNA, 15 bp, Homo sapiens
ctacatttccttcct

SEQ ID NO: 1163032 - DNA, 15 bp, Homo sapiens
gctacatttccttcc

SEQ ID NO: 1163033 - DNA, 15 bp, Homo sapiens
ggctacatttccttc

SEQ ID NO: 1163034 - DNA, 15 bp, Homo sapiens
tggctacatttcctt

SEQ ID NO: 1163035 - DNA, 15 bp, Homo sapiens
atggctacatttcct

SEQ ID NO: 1163036 - DNA, 15 bp, Homo sapiens
tatggctacatttcc

SEQ ID NO: 1163037 - DNA, 15 bp, Homo sapiens
atatggctacatttc

SEQ ID NO: 1163038 - DNA, 15 bp, Homo sapiens
tatatggctacattt

SEQ ID NO: 1163039 - DNA, 15 bp, Homo sapiens
atatatggctacatt

SEQ ID NO: 1163040 - DNA, 15 bp, Homo sapiens
aatatatggctacat

SEQ ID NO: 1163041 - DNA, 15 bp, Homo sapiens
aaatatatggctaca

SEQ ID NO: 1163042 - DNA, 15 bp, Homo sapiens
gaaatatatggctac

SEQ ID NO: 1163043 - DNA, 15 bp, Homo sapiens
agaaatatatggcta

SEQ ID NO: 1163044 - DNA, 15 bp, Homo sapiens
tagaaatatatggct

SEQ ID NO: 1163045 - DNA, 15 bp, Homo sapiens
ttagaaatatatggc

SEQ ID NO: 1163046 - DNA, 15 bp, Homo sapiens
tttagaaatatatgg

SEQ ID NO: 1163047 - DNA, 15 bp, Homo sapiens
ttttagaaatatatg

SEQ ID NO: 1163048 - DNA, 15 bp, Homo sapiens
tttttagaaatatat

SEQ ID NO: 1163049 - DNA, 15 bp, Homo sapiens
gtttttagaaatata

SEQ ID NO: 1163050 - DNA, 15 bp, Homo sapiens
ggtttttagaaatat

SEQ ID NO: 1163051 - DNA, 15 bp, Homo sapiens
tggtttttagaaata

SEQ ID NO: 1163052 - DNA, 15 bp, Homo sapiens
ttggtttttagaaat

SEQ ID NO: 1163053 - DNA, 15 bp, Homo sapiens
tttggtttttagaaa

SEQ ID NO: 1163054 - DNA, 15 bp, Homo sapiens
gtttggtttttagaa

SEQ ID NO: 1163055 - DNA, 15 bp, Homo sapiens
agtttggtttttaga

SEQ ID NO: 1163056 - DNA, 15 bp, Homo sapiens
aagtttggtttttag

SEQ ID NO: 1163057 - DNA, 15 bp, Homo sapiens
gaagtttggttttta

SEQ ID NO: 1163058 - DNA, 15 bp, Homo sapiens
agaagtttggttttt

SEQ ID NO: 1163059 - DNA, 15 bp, Homo sapiens
tagaagtttggtttt

SEQ ID NO: 1163060 - DNA, 15 bp, Homo sapiens
ttagaagtttggttt

SEQ ID NO: 1163061 - DNA, 15 bp, Homo sapiens
tttagaagtttggtt

SEQ ID NO: 1163062 - DNA, 15 bp, Homo sapiens
ttttagaagtttggt

SEQ ID NO: 1163063 - DNA, 15 bp, Homo sapiens
tttttagaagtttgg

SEQ ID NO: 1163064 - DNA, 15 bp, Homo sapiens
gtttttagaagtttg

SEQ ID NO: 1163065 - DNA, 15 bp, Homo sapiens
agtttttagaagttt

SEQ ID NO: 1163066 - DNA, 15 bp, Homo sapiens
tagtttttagaagtt

SEQ ID NO: 1163067 - DNA, 15 bp, Homo sapiens
atagtttttagaagt

SEQ ID NO: 1163068 - DNA, 15 bp, Homo sapiens
aatagtttttagaag

SEQ ID NO: 1163069 - DNA, 15 bp, Homo sapiens
taaaatagtttttag

SEQ ID NO: 1163070 - DNA, 15 bp, Homo sapiens
ttaaaatagttttta

SEQ ID NO: 1163071 - DNA, 15 bp, Homo sapiens
attaaaatagttttt

SEQ ID NO: 1163072 - DNA, 15 bp, Homo sapiens
tattaaaatagtttt

SEQ ID NO: 1163073 - DNA, 15 bp, Homo sapiens
atattaaaatagttt

SEQ ID NO: 1163074 - DNA, 15 bp, Homo sapiens
aatattaaaatagtt

SEQ ID NO: 1163075 - DNA, 15 bp, Homo sapiens
caatattaaaatagt

SEQ ID NO: 1163076 - DNA, 15 bp, Homo sapiens
acaatattaaaatag

SEQ ID NO: 1163077 - DNA, 15 bp, Homo sapiens
aacaatattaaaata

SEQ ID NO: 1163078 - DNA, 15 bp, Homo sapiens
aaacaatattaaaat

SEQ ID NO: 1163079 - DNA, 15 bp, Homo sapiens
gaaacaatattaaaa

SEQ ID NO: 1163080 - DNA, 15 bp, Homo sapiens
agaaacaatattaaa

SEQ ID NO: 1163081 - DNA, 15 bp, Homo sapiens
aagaaacaatattaa

SEQ ID NO: 1163082 - DNA, 15 bp, Homo sapiens
taagaaacaatatta

SEQ ID NO: 1163083 - DNA, 15 bp, Homo sapiens
ttaagaaacaatatt

SEQ ID NO: 1163084 - DNA, 15 bp, Homo sapiens
tttaagaaacaatat

SEQ ID NO: 1163085 - DNA, 15 bp, Homo sapiens
atttaagaaacaata

SEQ ID NO: 1163086 - DNA, 15 bp, Homo sapiens
tatttaagaaacaat

SEQ ID NO: 1163087 - DNA, 15 bp, Homo sapiens
gtatttaagaaacaa

SEQ ID NO: 1163088 - DNA, 15 bp, Homo sapiens
tgtatttaagaaaca

SEQ ID NO: 1163089 - DNA, 15 bp, Homo sapiens
gtgtatttaagaaac

SEQ ID NO: 1163090 - DNA, 15 bp, Homo sapiens
ggtgtatttaagaaa

SEQ ID NO: 1163091 - DNA, 15 bp, Homo sapiens
cggtgtatttaagaa

SEQ ID NO: 1163092 - DNA, 15 bp, Homo sapiens
acggtgtatttaaga

SEQ ID NO: 1163093 - DNA, 15 bp, Homo sapiens
tacggtgtatttaag

SEQ ID NO: 1163094 - DNA, 15 bp, Homo sapiens
ttacggtgtatttaa

SEQ ID NO: 1163095 - DNA, 15 bp, Homo sapiens
attacggtgtattta

SEQ ID NO: 1163096 - DNA, 15 bp, Homo sapiens
cattacggtgtattt

SEQ ID NO: 1163097 - DNA, 15 bp, Homo sapiens
gcattacggtgtatt

SEQ ID NO: 1163098 - DNA, 15 bp, Homo sapiens
tgcattacggtgtat

SEQ ID NO: 1163099 - DNA, 15 bp, Homo sapiens
ctgcattacggtgta

SEQ ID NO: 1163100 - DNA, 15 bp, Homo sapiens
actgcattacggtgt

SEQ ID NO: 1163101 - DNA, 15 bp, Homo sapiens
cactgcattacggtg

SEQ ID NO: 1163102 - DNA, 15 bp, Homo sapiens
tcactgcattacggt

SEQ ID NO: 1163103 - DNA, 15 bp, Homo sapiens
ttcactgcattacgg

SEQ ID NO: 1163104 - DNA, 15 bp, Homo sapiens
tttcactgcattacg

SEQ ID NO: 1163105 - DNA, 15 bp, Homo sapiens
atttcactgcattac

SEQ ID NO: 1163106 - DNA, 15 bp, Homo sapiens
gatttcactgcatta

SEQ ID NO: 1163107 - DNA, 15 bp, Homo sapiens
agatttcactgcatt

SEQ ID NO: 1163108 - DNA, 15 bp, Homo sapiens
aagatttcactgcat

SEQ ID NO: 1163109 - DNA, 15 bp, Homo sapiens
gaagatttcactgca

SEQ ID NO: 1163110 - DNA, 15 bp, Homo sapiens
ggaagatttcactgc

SEQ ID NO: 1163111 - DNA, 15 bp, Homo sapiens
aggaagatttcactg

SEQ ID NO: 1163112 - DNA, 15 bp, Homo sapiens
caggaagatttcact

SEQ ID NO: 1163113 - DNA, 15 bp, Homo sapiens
gcaggaagatttcac

SEQ ID NO: 1163114 - DNA, 15 bp, Homo sapiens
agcaggaagatttca

SEQ ID NO: 1163115 - DNA, 15 bp, Homo sapiens
gagcaggaagatttc

SEQ ID NO: 1163116 - DNA, 15 bp, Homo sapiens
tgagcaggaagattt

SEQ ID NO: 1163117 - DNA, 15 bp, Homo sapiens
gtgagcaggaagatt

SEQ ID NO: 1163118 - DNA, 15 bp, Homo sapiens
tgtgagcaggaagat

SEQ ID NO: 1163119 - DNA, 15 bp, Homo sapiens
ctgtgagcaggaaga

SEQ ID NO: 1163120 - DNA, 15 bp, Homo sapiens
gctgtgagcaggaag

SEQ ID NO: 1163121 - DNA, 15 bp, Homo sapiens
tgctgtgagcaggaa

SEQ ID NO: 1163122 - DNA, 15 bp, Homo sapiens
ctgctgtgagcagga

SEQ ID NO: 1163123 - DNA, 15 bp, Homo sapiens
tctgctgtgagcagg

SEQ ID NO: 1163124 - DNA, 15 bp, Homo sapiens
gtctgctgtgagcag

SEQ ID NO: 1163125 - DNA, 15 bp, Homo sapiens
agtctgctgtgagca

SEQ ID NO: 1163126 - DNA, 15 bp, Homo sapiens
aagtctgctgtgagc

SEQ ID NO: 1163127 - DNA, 15 bp, Homo sapiens
aaagtctgctgtgag

SEQ ID NO: 1163128 - DNA, 15 bp, Homo sapiens
gaaagtctgctgtga

SEQ ID NO: 1163129 - DNA, 15 bp, Homo sapiens
tgaaagtctgctgtg

SEQ ID NO: 1163130 - DNA, 15 bp, Homo sapiens
gtgaaagtctgctgt

SEQ ID NO: 1163131 - DNA, 15 bp, Homo sapiens
agtgaaagtctgctg

SEQ ID NO: 1163132 - DNA, 15 bp, Homo sapiens
tagtgaaagtctgct

SEQ ID NO: 1163133 - DNA, 15 bp, Homo sapiens
ctagtgaaagtctgc

SEQ ID NO: 1163134 - DNA, 15 bp, Homo sapiens
tctagtgaaagtctg

SEQ ID NO: 1163135 - DNA, 15 bp, Homo sapiens
atctagtgaaagtct

SEQ ID NO: 1163136 - DNA, 15 bp, Homo sapiens
aatctagtgaaagtc

SEQ ID NO: 1163137 - DNA, 15 bp, Homo sapiens
gaatctagtgaaagt

SEQ ID NO: 1163138 - DNA, 15 bp, Homo sapiens
ggaatctagtgaaag

SEQ ID NO: 1163139 - DNA, 15 bp, Homo sapiens
tggaatctagtgaaa

SEQ ID NO: 1163140 - DNA, 15 bp, Homo sapiens
atggaatctagtgaa

SEQ ID NO: 1163141 - DNA, 15 bp, Homo sapiens
tatggaatctagtga

SEQ ID NO: 1163142 - DNA, 15 bp, Homo sapiens
ctatggaatctagtg

SEQ ID NO: 1163143 - DNA, 15 bp, Homo sapiens
tctatggaatctagt

SEQ ID NO: 1163144 - DNA, 15 bp, Homo sapiens
ttctatggaatctag

SEQ ID NO: 1163145 - DNA, 15 bp, Homo sapiens
tttctatggaatcta

SEQ ID NO: 1163146 - DNA, 15 bp, Homo sapiens
ttttctatggaatct

SEQ ID NO: 1163147 - DNA, 15 bp, Homo sapiens
attttctatggaatc

SEQ ID NO: 1163148 - DNA, 15 bp, Homo sapiens
cattttctatggaat

SEQ ID NO: 1163149 - DNA, 15 bp, Homo sapiens
gcattttctatggaa

SEQ ID NO: 1163150 - DNA, 15 bp, Homo sapiens
tgcattttctatgga

SEQ ID NO: 1163151 - DNA, 15 bp, Homo sapiens
gtgcattttctatgg

SEQ ID NO: 1163152 - DNA, 15 bp, Homo sapiens
ggtgcattttctatg

SEQ ID NO: 1163153 - DNA, 15 bp, Homo sapiens
tggtgcattttctat

SEQ ID NO: 1163154 - DNA, 15 bp, Homo sapiens
ttggtgcattttcta

SEQ ID NO: 1163155 - DNA, 15 bp, Homo sapiens
tttggtgcattttct

SEQ ID NO: 1163156 - DNA, 15 bp, Homo sapiens
atttggtgcattttc

SEQ ID NO: 1163157 - DNA, 15 bp, Homo sapiens
catttggtgcatttt

SEQ ID NO: 1163158 - DNA, 15 bp, Homo sapiens
acatttggtgcattt

SEQ ID NO: 1163159 - DNA, 15 bp, Homo sapiens
gacatttggtgcatt

SEQ ID NO: 1163160 - DNA, 15 bp, Homo sapiens
tgacatttggtgcat

SEQ ID NO: 1163161 - DNA, 15 bp, Homo sapiens
ttgacatttggtgca

SEQ ID NO: 1163162 - DNA, 15 bp, Homo sapiens
gttgacatttggtgc

SEQ ID NO: 1163163 - DNA, 15 bp, Homo sapiens
cgttgacatttggtg

SEQ ID NO: 1163164 - DNA, 15 bp, Homo sapiens
tcgttgacatttggt

SEQ ID NO: 1163165 - DNA, 15 bp, Homo sapiens
atcgttgacatttgg

SEQ ID NO: 1163166 - DNA, 15 bp, Homo sapiens
tatcgttgacatttg

SEQ ID NO: 1163167 - DNA, 15 bp, Homo sapiens
ttatcgttgacattt

SEQ ID NO: 1163168 - DNA, 15 bp, Homo sapiens
gttatcgttgacatt

SEQ ID NO: 1163169 - DNA, 15 bp, Homo sapiens
cgttatcgttgacat

SEQ ID NO: 1163170 - DNA, 15 bp, Homo sapiens
ccgttatcgttgaca

SEQ ID NO: 1163171 - DNA, 15 bp, Homo sapiens
accgttatcgttgac

SEQ ID NO: 1163172 - DNA, 15 bp, Homo sapiens
taccgttatcgttga

SEQ ID NO: 1163173 - DNA, 15 bp, Homo sapiens
ataccgttatcgttg

SEQ ID NO: 1163174 - DNA, 15 bp, Homo sapiens
aataccgttatcgtt

SEQ ID NO: 1163175 - DNA, 15 bp, Homo sapiens
aaataccgttatcgt

SEQ ID NO: 1163176 - DNA, 15 bp, Homo sapiens
taaataccgttatcg

SEQ ID NO: 1163177 - DNA, 15 bp, Homo sapiens
ataaataccgttatc

SEQ ID NO: 1163178 - DNA, 15 bp, Homo sapiens
gataaataccgttat

SEQ ID NO: 1163179 - DNA, 15 bp, Homo sapiens
tgataaataccgtta

SEQ ID NO: 1163180 - DNA, 15 bp, Homo sapiens
ctgataaataccgtt

SEQ ID NO: 1163181 - DNA, 15 bp, Homo sapiens
cctgataaataccgt

SEQ ID NO: 1163182 - DNA, 15 bp, Homo sapiens
gcctgataaataccg

SEQ ID NO: 1163183 - DNA, 15 bp, Homo sapiens
ggcctgataaatacc

SEQ ID NO: 1163184 - DNA, 15 bp, Homo sapiens
cggcctgataaatac

SEQ ID NO: 1163185 - DNA, 15 bp, Homo sapiens
ccggcctgataaata

SEQ ID NO: 1163186 - DNA, 15 bp, Homo sapiens
tccggcctgataaat

SEQ ID NO: 1163187 - DNA, 15 bp, Homo sapiens
gtccggcctgataaa

SEQ ID NO: 1163188 - DNA, 15 bp, Homo sapiens
tgtccggcctgataa

SEQ ID NO: 1163189 - DNA, 15 bp, Homo sapiens
gtgtccggcctgata

SEQ ID NO: 1163190 - DNA, 15 bp, Homo sapiens
tgtgtccggcctgat

SEQ ID NO: 1163191 - DNA, 15 bp, Homo sapiens
atgtgtccggcctga

SEQ ID NO: 1163192 - DNA, 15 bp, Homo sapiens
aatgtgtccggcctg

SEQ ID NO: 1163193 - DNA, 15 bp, Homo sapiens
aaatgtgtccggcct

SEQ ID NO: 1163194 - DNA, 15 bp, Homo sapiens
aaaatgtgtccggcc

SEQ ID NO: 1163195 - DNA, 15 bp, Homo sapiens
gaaaatgtgtccggc

SEQ ID NO: 1163196 - DNA, 15 bp, Homo sapiens
agaaaatgtgtccgg

SEQ ID NO: 1163197 - DNA, 15 bp, Homo sapiens
aagaaaatgtgtccg

SEQ ID NO: 1163198 - DNA, 15 bp, Homo sapiens
gaagaaaatgtgtcc

SEQ ID NO: 1163199 - DNA, 15 bp, Homo sapiens
agaagaaaatgtgtc

SEQ ID NO: 1163200 - DNA, 15 bp, Homo sapiens
aagaagaaaatgtgt

SEQ ID NO: 1163201 - DNA, 15 bp, Homo sapiens
aaagaagaaaatgtg

SEQ ID NO: 1163202 - DNA, 15 bp, Homo sapiens
taaagaagaaaatgt

SEQ ID NO: 1163203 - DNA, 15 bp, Homo sapiens
ataaagaagaaaatg

SEQ ID NO: 1163204 - DNA, 15 bp, Homo sapiens
cataaagaagaaaat

SEQ ID NO: 1163205 - DNA, 15 bp, Homo sapiens
gcataaagaagaaaa

SEQ ID NO: 1163206 - DNA, 15 bp, Homo sapiens
agcataaagaagaaa

SEQ ID NO: 1163207 - DNA, 15 bp, Homo sapiens
aagcataaagaagaa

SEQ ID NO: 1163208 - DNA, 15 bp, Homo sapiens
gaagcataaagaaga

SEQ ID NO: 1163209 - DNA, 15 bp, Homo sapiens
agaagcataaagaag

SEQ ID NO: 1163210 - DNA, 15 bp, Homo sapiens
cagaagcataaagaa

SEQ ID NO: 1163211 - DNA, 15 bp, Homo sapiens
acagaagcataaaga

SEQ ID NO: 1163212 - DNA, 15 bp, Homo sapiens
gacagaagcataaag

SEQ ID NO: 1163213 - DNA, 15 bp, Homo sapiens
tgacagaagcataaa

SEQ ID NO: 1163214 - DNA, 15 bp, Homo sapiens
ttgacagaagcataa

SEQ ID NO: 1163215 - DNA, 15 bp, Homo sapiens
attgacagaagcata

SEQ ID NO: 1163216 - DNA, 15 bp, Homo sapiens
cattgacagaagcat

SEQ ID NO: 1163217 - DNA, 15 bp, Homo sapiens
acattgacagaagca

SEQ ID NO: 1163218 - DNA, 15 bp, Homo sapiens
aacattgacagaagc

SEQ ID NO: 1163219 - DNA, 15 bp, Homo sapiens
aaacattgacagaag

SEQ ID NO: 1163220 - DNA, 15 bp, Homo sapiens
gaaacattgacagaa

SEQ ID NO: 1163221 - DNA, 15 bp, Homo sapiens
agaaacattgacaga

SEQ ID NO: 1163222 - DNA, 15 bp, Homo sapiens
cagaaacattgacag

SEQ ID NO: 1163223 - DNA, 15 bp, Homo sapiens
gcagaaacattgaca

SEQ ID NO: 1163224 - DNA, 15 bp, Homo sapiens
tgcagaaacattgac

SEQ ID NO: 1163225 - DNA, 15 bp, Homo sapiens
ttgcagaaacattga

SEQ ID NO: 1163226 - DNA, 15 bp, Homo sapiens
attgcagaaacattg

SEQ ID NO: 1163227 - DNA, 15 bp, Homo sapiens
cattgcagaaacatt

SEQ ID NO: 1163228 - DNA, 15 bp, Homo sapiens
tcattgcagaaacat

SEQ ID NO: 1163229 - DNA, 15 bp, Homo sapiens
ctcattgcagaaaca

SEQ ID NO: 1163230 - DNA, 15 bp, Homo sapiens
cctcattgcagaaac

SEQ ID NO: 1163231 - DNA, 15 bp, Homo sapiens
tcctcattgcagaaa

SEQ ID NO: 1163232 - DNA, 15 bp, Homo sapiens
gtcctcattgcagaa

SEQ ID NO: 1163233 - DNA, 15 bp, Homo sapiens
tgtcctcattgcaga

SEQ ID NO: 1163234 - DNA, 15 bp, Homo sapiens
atgtcctcattgcag

SEQ ID NO: 1163235 - DNA, 15 bp, Homo sapiens
tatgtcctcattgca

SEQ ID NO: 1163236 - DNA, 15 bp, Homo sapiens
atatgtcctcattgc

SEQ ID NO: 1163237 - DNA, 15 bp, Homo sapiens
tatatgtcctcattg

SEQ ID NO: 1163238 - DNA, 15 bp, Homo sapiens
ttatatgtcctcatt

SEQ ID NO: 1163239 - DNA, 15 bp, Homo sapiens
attatatgtcctcat

SEQ ID NO: 1163240 - DNA, 15 bp, Homo sapiens
aattatatgtcctca

SEQ ID NO: 1163241 - DNA, 15 bp, Homo sapiens
gaattatatgtcctc

SEQ ID NO: 1163242 - DNA, 15 bp, Homo sapiens
agaattatatgtcct

SEQ ID NO: 1163243 - DNA, 15 bp, Homo sapiens
tagaattatatgtcc

SEQ ID NO: 1163244 - DNA, 15 bp, Homo sapiens
atagaattatatgtc

SEQ ID NO: 1163245 - DNA, 15 bp, Homo sapiens
tatagaattatatgt

SEQ ID NO: 1163246 - DNA, 15 bp, Homo sapiens
ttatagaattatatg

SEQ ID NO: 1163247 - DNA, 15 bp, Homo sapiens
attatagaattatat

SEQ ID NO: 1163248 - DNA, 15 bp, Homo sapiens
cattatagaattata

SEQ ID NO: 1163249 - DNA, 15 bp, Homo sapiens
tcattatagaattat

SEQ ID NO: 1163250 - DNA, 15 bp, Homo sapiens
ttcattatagaatta

SEQ ID NO: 1163251 - DNA, 15 bp, Homo sapiens
tttcattatagaatt

SEQ ID NO: 1163252 - DNA, 15 bp, Homo sapiens
ttttcattatagaat

SEQ ID NO: 1163253 - DNA, 15 bp, Homo sapiens
tttttcattatagaa

SEQ ID NO: 1163254 - DNA, 15 bp, Homo sapiens
ttttttcattataga

SEQ ID NO: 1163255 - DNA, 15 bp, Homo sapiens
cttttttcattatag

SEQ ID NO: 1163256 - DNA, 15 bp, Homo sapiens
acttttttcattata

SEQ ID NO: 1163257 - DNA, 15 bp, Homo sapiens
tacttttttcattat

SEQ ID NO: 1163258 - DNA, 15 bp, Homo sapiens
ttacttttttcatta

SEQ ID NO: 1163259 - DNA, 15 bp, Homo sapiens
tttacttttttcatt

SEQ ID NO: 1163260 - DNA, 15 bp, Homo sapiens
atttacttttttcat

SEQ ID NO: 1163261 - DNA, 15 bp, Homo sapiens
tatttacttttttca

SEQ ID NO: 1163262 - DNA, 15 bp, Homo sapiens
atatttacttttttc

SEQ ID NO: 1163263 - DNA, 15 bp, Homo sapiens
catatttactttttt

SEQ ID NO: 1163264 - DNA, 15 bp, Homo sapiens
gcatatttacttttt

SEQ ID NO: 1163265 - DNA, 15 bp, Homo sapiens
tgcatatttactttt

SEQ ID NO: 1163266 - DNA, 15 bp, Homo sapiens
atgcatatttacttt

SEQ ID NO: 1163267 - DNA, 15 bp, Homo sapiens
gatgcatatttactt

SEQ ID NO: 1163268 - DNA, 15 bp, Homo sapiens
tgatgcatatttact

SEQ ID NO: 1163269 - DNA, 15 bp, Homo sapiens
atgatgcatatttac

SEQ ID NO: 1163270 - DNA, 15 bp, Homo sapiens
catgatgcatattta

SEQ ID NO: 1163271 - DNA, 15 bp, Homo sapiens
gcatgatgcatattt

SEQ ID NO: 1163272 - DNA, 15 bp, Homo sapiens
ggcatgatgcatatt

SEQ ID NO: 1163273 - DNA, 15 bp, Homo sapiens
gggcatgatgcatat

SEQ ID NO: 1163274 - DNA, 15 bp, Homo sapiens
tgggcatgatgcata

SEQ ID NO: 1163275 - DNA, 15 bp, Homo sapiens
atgggcatgatgcat

SEQ ID NO: 1163276 - DNA, 15 bp, Homo sapiens
catgggcatgatgca

SEQ ID NO: 1163277 - DNA, 15 bp, Homo sapiens
acatgggcatgatgc

SEQ ID NO: 1163278 - DNA, 15 bp, Homo sapiens
tacatgggcatgatg

SEQ ID NO: 1163279 - DNA, 15 bp, Homo sapiens
gtacatgggcatgat

SEQ ID NO: 1163280 - DNA, 15 bp, Homo sapiens
ggtacatgggcatga

SEQ ID NO: 1163281 - DNA, 15 bp, Homo sapiens
aggtacatgggcatg

SEQ ID NO: 1163282 - DNA, 15 bp, Homo sapiens
taggtacatgggcat

SEQ ID NO: 1163283 - DNA, 15 bp, Homo sapiens
gtaggtacatgggca

SEQ ID NO: 1163284 - DNA, 15 bp, Homo sapiens
ggtaggtacatgggc

SEQ ID NO: 1163285 - DNA, 15 bp, Homo sapiens
tggtaggtacatggg

SEQ ID NO: 1163286 - DNA, 15 bp, Homo sapiens
ttggtaggtacatgg

SEQ ID NO: 1163287 - DNA, 15 bp, Homo sapiens
tttggtaggtacatg

SEQ ID NO: 1163288 - DNA, 15 bp, Homo sapiens
atttggtaggtacat

SEQ ID NO: 1163289 - DNA, 15 bp, Homo sapiens
tatttggtaggtaca

SEQ ID NO: 1163290 - DNA, 15 bp, Homo sapiens
gtatttggtaggtac

SEQ ID NO: 1163291 - DNA, 15 bp, Homo sapiens
tgtatttggtaggta

SEQ ID NO: 1163292 - DNA, 15 bp, Homo sapiens
atgtatttggtaggt

SEQ ID NO: 1163293 - DNA, 15 bp, Homo sapiens
tatgtatttggtagg

SEQ ID NO: 1163294 - DNA, 15 bp, Homo sapiens
atatgtatttggtag

SEQ ID NO: 1163295 - DNA, 15 bp, Homo sapiens
tatatgtatttggta

SEQ ID NO: 1163296 - DNA, 15 bp, Homo sapiens
atatatgtatttggt

SEQ ID NO: 1163297 - DNA, 15 bp, Homo sapiens
catatatgtatttgg

SEQ ID NO: 1163298 - DNA, 15 bp, Homo sapiens
acatatatgtatttg

SEQ ID NO: 1163299 - DNA, 15 bp, Homo sapiens
cacatatatgtattt

SEQ ID NO: 1163300 - DNA, 15 bp, Homo sapiens
acacatatatgtatt

SEQ ID NO: 1163301 - DNA, 15 bp, Homo sapiens
cacacatatatgtat

SEQ ID NO: 1163302 - DNA, 15 bp, Homo sapiens
acacacatatatgta

SEQ ID NO: 1163303 - DNA, 15 bp, Homo sapiens
cacacacatatatgt

SEQ ID NO: 1163304 - DNA, 15 bp, Homo sapiens
gcacacacatatatg

SEQ ID NO: 1163305 - DNA, 15 bp, Homo sapiens
tgcacacacatatat

SEQ ID NO: 1163306 - DNA, 15 bp, Homo sapiens
gtgcacacacatata

SEQ ID NO: 1163307 - DNA, 15 bp, Homo sapiens
tgtgcacacacatat

SEQ ID NO: 1163308 - DNA, 15 bp, Homo sapiens
atgtgcacacacata

SEQ ID NO: 1163309 - DNA, 15 bp, Homo sapiens
catgtgcacacacat

SEQ ID NO: 1163310 - DNA, 15 bp, Homo sapiens
tgcatgtgcacacac

SEQ ID NO: 1163311 - DNA, 15 bp, Homo sapiens
atgcatgtgcacaca

SEQ ID NO: 1163312 - DNA, 15 bp, Homo sapiens
catgcatgtgcacac

SEQ ID NO: 1163313 - DNA, 15 bp, Homo sapiens
acatgcatgtgcaca

SEQ ID NO: 1163314 - DNA, 15 bp, Homo sapiens
tacatgcatgtgcac

SEQ ID NO: 1163315 - DNA, 15 bp, Homo sapiens
ttacatgcatgtgca

SEQ ID NO: 1163316 - DNA, 15 bp, Homo sapiens
cttacatgcatgtgc

SEQ ID NO: 1163317 - DNA, 15 bp, Homo sapiens
acttacatgcatgtg

SEQ ID NO: 1163318 - DNA, 15 bp, Homo sapiens
aacttacatgcatgt

SEQ ID NO: 1163319 - DNA, 15 bp, Homo sapiens
aaacttacatgcatg

SEQ ID NO: 1163320 - DNA, 15 bp, Homo sapiens
aaaacttacatgcat

SEQ ID NO: 1163321 - DNA, 15 bp, Homo sapiens
caaaacttacatgca

SEQ ID NO: 1163322 - DNA, 15 bp, Homo sapiens
acaaaacttacatgc

SEQ ID NO: 1163323 - DNA, 15 bp, Homo sapiens
aacaaaacttacatg

SEQ ID NO: 1163324 - DNA, 15 bp, Homo sapiens
aaacaaaacttacat

SEQ ID NO: 1163325 - DNA, 15 bp, Homo sapiens
aaaacaaaacttaca

SEQ ID NO: 1163326 - DNA, 15 bp, Homo sapiens
aaaaacaaaacttac

SEQ ID NO: 1163327 - DNA, 15 bp, Homo sapiens
gaaaaacaaaactta

SEQ ID NO: 1163328 - DNA, 15 bp, Homo sapiens
agaaaaacaaaactt

SEQ ID NO: 1163329 - DNA, 15 bp, Homo sapiens
aagaaaaacaaaact

SEQ ID NO: 1163330 - DNA, 15 bp, Homo sapiens
aaagaaaaacaaaac

SEQ ID NO: 1163331 - DNA, 15 bp, Homo sapiens
gaaagaaaaacaaaa

SEQ ID NO: 1163332 - DNA, 15 bp, Homo sapiens
agaaagaaaaacaaa

SEQ ID NO: 1163333 - DNA, 15 bp, Homo sapiens
aagaaagaaaaacaa

SEQ ID NO: 1163334 - DNA, 15 bp, Homo sapiens
aaagaaagaaaaaca

SEQ ID NO: 1163335 - DNA, 15 bp, Homo sapiens
gaaaaaaaaaaaaag

SEQ ID NO: 1163336 - DNA, 15 bp, Homo sapiens
cagggaaaaaaaaaa

SEQ ID NO: 1163337 - DNA, 15 bp, Homo sapiens
tcagggaaaaaaaaa

SEQ ID NO: 1163338 - DNA, 15 bp, Homo sapiens
ctcagggaaaaaaaa

SEQ ID NO: 1163339 - DNA, 15 bp, Homo sapiens
tctcagggaaaaaaa

SEQ ID NO: 1163340 - DNA, 15 bp, Homo sapiens
gtctcagggaaaaaa

SEQ ID NO: 1163341 - DNA, 15 bp, Homo sapiens
tgtctcagggaaaaa

SEQ ID NO: 1163342 - DNA, 15 bp, Homo sapiens
ctgtctcagggaaaa

SEQ ID NO: 1163343 - DNA, 15 bp, Homo sapiens
tctgtctcagggaaa

SEQ ID NO: 1163344 - DNA, 15 bp, Homo sapiens
ctctgtctcagggaa

SEQ ID NO: 1163345 - DNA, 15 bp, Homo sapiens
actctgtctcaggga

SEQ ID NO: 1163346 - DNA, 15 bp, Homo sapiens
gactctgtctcaggg

SEQ ID NO: 1163347 - DNA, 15 bp, Homo sapiens
agactctgtctcagg

SEQ ID NO: 1163348 - DNA, 15 bp, Homo sapiens
gagactctgtctcag

SEQ ID NO: 1163349 - DNA, 15 bp, Homo sapiens
cactccagccttggt

SEQ ID NO: 1163350 - DNA, 15 bp, Homo sapiens
gcactccagccttgg

SEQ ID NO: 1163351 - DNA, 15 bp, Homo sapiens
tgcactccagccttg

SEQ ID NO: 1163352 - DNA, 15 bp, Homo sapiens
ctgcactccagcctt

SEQ ID NO: 1163353 - DNA, 15 bp, Homo sapiens
acaccgctgcactcc

SEQ ID NO: 1163354 - DNA, 15 bp, Homo sapiens
cacaccgctgcactc

SEQ ID NO: 1163355 - DNA, 15 bp, Homo sapiens
tcacaccgctgcact

SEQ ID NO: 1163356 - DNA, 15 bp, Homo sapiens
atcacaccgctgcac

SEQ ID NO: 1163357 - DNA, 15 bp, Homo sapiens
gatcacaccgctgca

SEQ ID NO: 1163358 - DNA, 15 bp, Homo sapiens
agatcacaccgctgc

SEQ ID NO: 1163359 - DNA, 15 bp, Homo sapiens
cagatcacaccgctg

SEQ ID NO: 1163360 - DNA, 15 bp, Homo sapiens
ccagatcacaccgct

SEQ ID NO: 1163361 - DNA, 15 bp, Homo sapiens
cccagatcacaccgc

SEQ ID NO: 1163362 - DNA, 15 bp, Homo sapiens
gcccagatcacaccg

SEQ ID NO: 1163363 - DNA, 15 bp, Homo sapiens
agcccagatcacacc

SEQ ID NO: 1163364 - DNA, 15 bp, Homo sapiens
gagcccagatcacac

SEQ ID NO: 1163365 - DNA, 15 bp, Homo sapiens
tgagcccagatcaca

SEQ ID NO: 1163366 - DNA, 15 bp, Homo sapiens
gtgagcccagatcac

SEQ ID NO: 1163367 - DNA, 15 bp, Homo sapiens
agtgagcccagatca

SEQ ID NO: 1163368 - DNA, 15 bp, Homo sapiens
aattcccagctactc

SEQ ID NO: 1163369 - DNA, 15 bp, Homo sapiens
taattcccagctact

SEQ ID NO: 1163370 - DNA, 15 bp, Homo sapiens
gtaattcccagctac

SEQ ID NO: 1163371 - DNA, 15 bp, Homo sapiens
tgtaattcccagcta

SEQ ID NO: 1163372 - DNA, 15 bp, Homo sapiens
ctgtaattcccagct

SEQ ID NO: 1163373 - DNA, 15 bp, Homo sapiens
cctgtaattcccagc

SEQ ID NO: 1163374 - DNA, 15 bp, Homo sapiens
gcctgtaattcccag

SEQ ID NO: 1163375 - DNA, 15 bp, Homo sapiens
cgcctgtaattccca

SEQ ID NO: 1163376 - DNA, 15 bp, Homo sapiens
gcgcctgtaattccc

SEQ ID NO: 1163377 - DNA, 15 bp, Homo sapiens
tgggcgcctgtaatt

SEQ ID NO: 1163378 - DNA, 15 bp, Homo sapiens
tgggcttggtggtgg

SEQ ID NO: 1163379 - DNA, 15 bp, Homo sapiens
ctgggcttggtggtg

SEQ ID NO: 1163380 - DNA, 15 bp, Homo sapiens
gctgggcttggtggt

SEQ ID NO: 1163381 - DNA, 15 bp, Homo sapiens
agctgggcttggtgg

SEQ ID NO: 1163382 - DNA, 15 bp, Homo sapiens
tagctgggcttggtg

SEQ ID NO: 1163383 - DNA, 15 bp, Homo sapiens
ttagctgggcttggt

SEQ ID NO: 1163384 - DNA, 15 bp, Homo sapiens
attagctgggcttgg

SEQ ID NO: 1163385 - DNA, 15 bp, Homo sapiens
aattagctgggcttg

SEQ ID NO: 1163386 - DNA, 15 bp, Homo sapiens
aaattagctgggctt

SEQ ID NO: 1163387 - DNA, 15 bp, Homo sapiens
aaaattagctgggct

SEQ ID NO: 1163388 - DNA, 15 bp, Homo sapiens
cagaccagcctagcc

SEQ ID NO: 1163389 - DNA, 15 bp, Homo sapiens
tcagaccagcctagc

SEQ ID NO: 1163390 - DNA, 15 bp, Homo sapiens
ttcagaccagcctag

SEQ ID NO: 1163391 - DNA, 15 bp, Homo sapiens
tttcagaccagccta

SEQ ID NO: 1163392 - DNA, 15 bp, Homo sapiens
gaggtcaggagtttc

SEQ ID NO: 1163393 - DNA, 15 bp, Homo sapiens
ttctgaggtcaggag

SEQ ID NO: 1163394 - DNA, 15 bp, Homo sapiens
cttctgaggtcagga

SEQ ID NO: 1163395 - DNA, 15 bp, Homo sapiens
tcttctgaggtcagg

SEQ ID NO: 1163396 - DNA, 15 bp, Homo sapiens
atcttctgaggtcag

SEQ ID NO: 1163397 - DNA, 15 bp, Homo sapiens
gatcttctgaggtca

SEQ ID NO: 1163398 - DNA, 15 bp, Homo sapiens
ggatcttctgaggtc

SEQ ID NO: 1163399 - DNA, 15 bp, Homo sapiens
tggatcttctgaggt

SEQ ID NO: 1163400 - DNA, 15 bp, Homo sapiens
gtggatcttctgagg

SEQ ID NO: 1163401 - DNA, 15 bp, Homo sapiens
ggtggatcttctgag

SEQ ID NO: 1163402 - DNA, 15 bp, Homo sapiens
aggtggatcttctga

SEQ ID NO: 1163403 - DNA, 15 bp, Homo sapiens
caggtggatcttctg

SEQ ID NO: 1163404 - DNA, 15 bp, Homo sapiens
acaggtggatcttct

SEQ ID NO: 1163405 - DNA, 15 bp, Homo sapiens
gacaggtggatcttc

SEQ ID NO: 1163406 - DNA, 15 bp, Homo sapiens
agacaggtggatctt

SEQ ID NO: 1163407 - DNA, 15 bp, Homo sapiens
aagacaggtggatct

SEQ ID NO: 1163408 - DNA, 15 bp, Homo sapiens
caagacaggtggatc

SEQ ID NO: 1163409 - DNA, 15 bp, Homo sapiens
tcaagacaggtggat

SEQ ID NO: 1163410 - DNA, 15 bp, Homo sapiens
gtcaagacaggtgga

SEQ ID NO: 1163411 - DNA, 15 bp, Homo sapiens
ggtcaagacaggtgg

SEQ ID NO: 1163412 - DNA, 15 bp, Homo sapiens
aggtcaagacaggtg

SEQ ID NO: 1163413 - DNA, 15 bp, Homo sapiens
gaggtcaagacaggt

SEQ ID NO: 1163414 - DNA, 15 bp, Homo sapiens
ggaggtcaagacagg

SEQ ID NO: 1163415 - DNA, 15 bp, Homo sapiens
gggaggtcaagacag

SEQ ID NO: 1163416 - DNA, 15 bp, Homo sapiens
tgggaggtcaagaca

SEQ ID NO: 1163417 - DNA, 15 bp, Homo sapiens
ttgggaggtcaagac

SEQ ID NO: 1163418 - DNA, 15 bp, Homo sapiens
tttgggaggtcaaga

SEQ ID NO: 1163419 - DNA, 15 bp, Homo sapiens
ctttgggaggtcaag

SEQ ID NO: 1163420 - DNA, 15 bp, Homo sapiens
actttgggaggtcaa

SEQ ID NO: 1163421 - DNA, 15 bp, Homo sapiens
cactttgggaggtca

SEQ ID NO: 1163422 - DNA, 15 bp, Homo sapiens
cgcacggtggctcac

SEQ ID NO: 1163423 - DNA, 15 bp, Homo sapiens
acgcacggtggctca

SEQ ID NO: 1163424 - DNA, 15 bp, Homo sapiens
cacgcacggtggctc

SEQ ID NO: 1163425 - DNA, 15 bp, Homo sapiens
ccacgcacggtggct

SEQ ID NO: 1163426 - DNA, 15 bp, Homo sapiens
gccacgcacggtggc

SEQ ID NO: 1163427 - DNA, 15 bp, Homo sapiens
ggccacgcacggtgg

SEQ ID NO: 1163428 - DNA, 15 bp, Homo sapiens
aggccacgcacggtg

SEQ ID NO: 1163429 - DNA, 15 bp, Homo sapiens
caggccacgcacggt

SEQ ID NO: 1163430 - DNA, 15 bp, Homo sapiens
acaggccacgcacgg

SEQ ID NO: 1163431 - DNA, 15 bp, Homo sapiens
cacaggccacgcacg

SEQ ID NO: 1163432 - DNA, 15 bp, Homo sapiens
acacaggccacgcac

SEQ ID NO: 1163433 - DNA, 15 bp, Homo sapiens
cacacaggccacgca

SEQ ID NO: 1163434 - DNA, 15 bp, Homo sapiens
acacacaggccacgc

SEQ ID NO: 1163435 - DNA, 15 bp, Homo sapiens
tacacacaggccacg

SEQ ID NO: 1163436 - DNA, 15 bp, Homo sapiens
ttacacacaggccac

SEQ ID NO: 1163437 - DNA, 15 bp, Homo sapiens
cttacacacaggcca

SEQ ID NO: 1163438 - DNA, 15 bp, Homo sapiens
acttacacacaggcc

SEQ ID NO: 1163439 - DNA, 15 bp, Homo sapiens
aacttacacacaggc

SEQ ID NO: 1163440 - DNA, 15 bp, Homo sapiens
aaacttacacacagg

SEQ ID NO: 1163441 - DNA, 15 bp, Homo sapiens
aaaacttacacacag

SEQ ID NO: 1163442 - DNA, 15 bp, Homo sapiens
taaaacttacacaca

SEQ ID NO: 1163443 - DNA, 15 bp, Homo sapiens
ttaaaacttacacac

SEQ ID NO: 1163444 - DNA, 15 bp, Homo sapiens
cttaaaacttacaca

SEQ ID NO: 1163445 - DNA, 15 bp, Homo sapiens
ccttaaaacttacac

SEQ ID NO: 1163446 - DNA, 15 bp, Homo sapiens
cccttaaaacttaca

SEQ ID NO: 1163447 - DNA, 15 bp, Homo sapiens
tcccttaaaacttac

SEQ ID NO: 1163448 - DNA, 15 bp, Homo sapiens
atcccttaaaactta

SEQ ID NO: 1163449 - DNA, 15 bp, Homo sapiens
tatcccttaaaactt

SEQ ID NO: 1163450 - DNA, 15 bp, Homo sapiens
ttatcccttaaaact

SEQ ID NO: 1163451 - DNA, 15 bp, Homo sapiens
gttatcccttaaaac

SEQ ID NO: 1163452 - DNA, 15 bp, Homo sapiens
ggttatcccttaaaa

SEQ ID NO: 1163453 - DNA, 15 bp, Homo sapiens
tggttatcccttaaa

SEQ ID NO: 1163454 - DNA, 15 bp, Homo sapiens
ctggttatcccttaa

SEQ ID NO: 1163455 - DNA, 15 bp, Homo sapiens
tctggttatccctta

SEQ ID NO: 1163456 - DNA, 15 bp, Homo sapiens
ttctggttatccctt

SEQ ID NO: 1163457 - DNA, 15 bp, Homo sapiens
attctggttatccct

SEQ ID NO: 1163458 - DNA, 15 bp, Homo sapiens
cattctggttatccc

SEQ ID NO: 1163459 - DNA, 15 bp, Homo sapiens
tcattctggttatcc

SEQ ID NO: 1163460 - DNA, 15 bp, Homo sapiens
gtcattctggttatc

SEQ ID NO: 1163461 - DNA, 15 bp, Homo sapiens
ggtcattctggttat

SEQ ID NO: 1163462 - DNA, 15 bp, Homo sapiens
tggtcattctggtta

SEQ ID NO: 1163463 - DNA, 15 bp, Homo sapiens
atggtcattctggtt

SEQ ID NO: 1163464 - DNA, 15 bp, Homo sapiens
gatggtcattctggt

SEQ ID NO: 1163465 - DNA, 15 bp, Homo sapiens
tgatggtcattctgg

SEQ ID NO: 1163466 - DNA, 15 bp, Homo sapiens
gtgatggtcattctg

SEQ ID NO: 1163467 - DNA, 15 bp, Homo sapiens
tgtgatggtcattct

SEQ ID NO: 1163468 - DNA, 15 bp, Homo sapiens
atgtgatggtcattc

SEQ ID NO: 1163469 - DNA, 15 bp, Homo sapiens
aatgtgatggtcatt

SEQ ID NO: 1163470 - DNA, 15 bp, Homo sapiens
gaatgtgatggtcat

SEQ ID NO: 1163471 - DNA, 15 bp, Homo sapiens
agaatgtgatggtca

SEQ ID NO: 1163472 - DNA, 15 bp, Homo sapiens
aagaatgtgatggtc

SEQ ID NO: 1163473 - DNA, 15 bp, Homo sapiens
caagaatgtgatggt

SEQ ID NO: 1163474 - DNA, 15 bp, Homo sapiens
ccaagaatgtgatgg

SEQ ID NO: 1163475 - DNA, 15 bp, Homo sapiens
tccaagaatgtgatg

SEQ ID NO: 1163476 - DNA, 15 bp, Homo sapiens
ctccaagaatgtgat

SEQ ID NO: 1163477 - DNA, 15 bp, Homo sapiens
actccaagaatgtga

SEQ ID NO: 1163478 - DNA, 15 bp, Homo sapiens
aactccaagaatgtg

SEQ ID NO: 1163479 - DNA, 15 bp, Homo sapiens
taactccaagaatgt

SEQ ID NO: 1163480 - DNA, 15 bp, Homo sapiens
ttaactccaagaatg

SEQ ID NO: 1163481 - DNA, 15 bp, Homo sapiens
tttaactccaagaat

SEQ ID NO: 1163482 - DNA, 15 bp, Homo sapiens
atttaactccaagaa

SEQ ID NO: 1163483 - DNA, 15 bp, Homo sapiens
catttaactccaaga

SEQ ID NO: 1163484 - DNA, 15 bp, Homo sapiens
acatttaactccaag

SEQ ID NO: 1163485 - DNA, 15 bp, Homo sapiens
cacatttaactccaa

SEQ ID NO: 1163486 - DNA, 15 bp, Homo sapiens
ccacatttaactcca

SEQ ID NO: 1163487 - DNA, 15 bp, Homo sapiens
accacatttaactcc

SEQ ID NO: 1163488 - DNA, 15 bp, Homo sapiens
taccacatttaactc

SEQ ID NO: 1163489 - DNA, 15 bp, Homo sapiens
gtaccacatttaact

SEQ ID NO: 1163490 - DNA, 15 bp, Homo sapiens
tgtaccacatttaac

SEQ ID NO: 1163491 - DNA, 15 bp, Homo sapiens
ctgtaccacatttaa

SEQ ID NO: 1163492 - DNA, 15 bp, Homo sapiens
tctgtaccacattta

SEQ ID NO: 1163493 - DNA, 15 bp, Homo sapiens
ttctgtaccacattt

SEQ ID NO: 1163494 - DNA, 15 bp, Homo sapiens
tttctgtaccacatt

SEQ ID NO: 1163495 - DNA, 15 bp, Homo sapiens
atttctgtaccacat

SEQ ID NO: 1163496 - DNA, 15 bp, Homo sapiens
gatttctgtaccaca

SEQ ID NO: 1163497 - DNA, 15 bp, Homo sapiens
agatttctgtaccac

SEQ ID NO: 1163498 - DNA, 15 bp, Homo sapiens
gagatttctgtacca

SEQ ID NO: 1163499 - DNA, 15 bp, Homo sapiens
agagatttctgtacc

SEQ ID NO: 1163500 - DNA, 15 bp, Homo sapiens
tagagatttctgtac

SEQ ID NO: 1163501 - DNA, 15 bp, Homo sapiens
ttagagatttctgta

SEQ ID NO: 1163502 - DNA, 15 bp, Homo sapiens
gttagagatttctgt

SEQ ID NO: 1163503 - DNA, 15 bp, Homo sapiens
ggttagagatttctg

SEQ ID NO: 1163504 - DNA, 15 bp, Homo sapiens
aggttagagatttct

SEQ ID NO: 1163505 - DNA, 15 bp, Homo sapiens
caggttagagatttc

SEQ ID NO: 1163506 - DNA, 15 bp, Homo sapiens
tcaggttagagattt

SEQ ID NO: 1163507 - DNA, 15 bp, Homo sapiens
ctcaggttagagatt

SEQ ID NO: 1163508 - DNA, 15 bp, Homo sapiens
tctcaggttagagat

SEQ ID NO: 1163509 - DNA, 15 bp, Homo sapiens
ctctcaggttagaga

SEQ ID NO: 1163510 - DNA, 15 bp, Homo sapiens
actctcaggttagag

SEQ ID NO: 1163511 - DNA, 15 bp, Homo sapiens
gactctcaggttaga

SEQ ID NO: 1163512 - DNA, 15 bp, Homo sapiens
tgactctcaggttag

SEQ ID NO: 1163513 - DNA, 15 bp, Homo sapiens
ttgactctcaggtta

SEQ ID NO: 1163514 - DNA, 15 bp, Homo sapiens
cttgactctcaggtt

SEQ ID NO: 1163515 - DNA, 15 bp, Homo sapiens
tcttgactctcaggt

SEQ ID NO: 1163516 - DNA, 15 bp, Homo sapiens
ctcttgactctcagg

SEQ ID NO: 1163517 - DNA, 15 bp, Homo sapiens
tctcttgactctcag

SEQ ID NO: 1163518 - DNA, 15 bp, Homo sapiens
gtctcttgactctca

SEQ ID NO: 1163519 - DNA, 15 bp, Homo sapiens
ggtctcttgactctc

SEQ ID NO: 1163520 - DNA, 15 bp, Homo sapiens
tggtctcttgactct

SEQ ID NO: 1163521 - DNA, 15 bp, Homo sapiens
ctggtctcttgactc

SEQ ID NO: 1163522 - DNA, 15 bp, Homo sapiens
cctggtctcttgact

SEQ ID NO: 1163523 - DNA, 15 bp, Homo sapiens
acctggtctcttgac

SEQ ID NO: 1163524 - DNA, 15 bp, Homo sapiens
gacctggtctcttga

SEQ ID NO: 1163525 - DNA, 15 bp, Homo sapiens
tgacctggtctcttg

SEQ ID NO: 1163526 - DNA, 15 bp, Homo sapiens
atgacctggtctctt

SEQ ID NO: 1163527 - DNA, 15 bp, Homo sapiens
catgacctggtctct

SEQ ID NO: 1163528 - DNA, 15 bp, Homo sapiens
ccatgacctggtctc

SEQ ID NO: 1163529 - DNA, 15 bp, Homo sapiens
cccatgacctggtct

SEQ ID NO: 1163530 - DNA, 15 bp, Homo sapiens
acccatgacctggtc

SEQ ID NO: 1163531 - DNA, 15 bp, Homo sapiens
aacccatgacctggt

SEQ ID NO: 1163532 - DNA, 15 bp, Homo sapiens
gaacccatgacctgg

SEQ ID NO: 1163533 - DNA, 15 bp, Homo sapiens
ggaacccatgacctg

SEQ ID NO: 1163534 - DNA, 15 bp, Homo sapiens
tggaacccatgacct

SEQ ID NO: 1163535 - DNA, 15 bp, Homo sapiens
atggaacccatgacc

SEQ ID NO: 1163536 - DNA, 15 bp, Homo sapiens
aatggaacccatgac

SEQ ID NO: 1163537 - DNA, 15 bp, Homo sapiens
aaatggaacccatga

SEQ ID NO: 1163538 - DNA, 15 bp, Homo sapiens
caaatggaacccatg

SEQ ID NO: 1163539 - DNA, 15 bp, Homo sapiens
ccaaatggaacccat

SEQ ID NO: 1163540 - DNA, 15 bp, Homo sapiens
tccaaatggaaccca

SEQ ID NO: 1163541 - DNA, 15 bp, Homo sapiens
gtccaaatggaaccc

SEQ ID NO: 1163542 - DNA, 15 bp, Homo sapiens
tgtccaaatggaacc

SEQ ID NO: 1163543 - DNA, 15 bp, Homo sapiens
atgtccaaatggaac

SEQ ID NO: 1163544 - DNA, 15 bp, Homo sapiens
gatgtccaaatggaa

SEQ ID NO: 1163545 - DNA, 15 bp, Homo sapiens
agatgtccaaatgga

SEQ ID NO: 1163546 - DNA, 15 bp, Homo sapiens
aagatgtccaaatgg

SEQ ID NO: 1163547 - DNA, 15 bp, Homo sapiens
aaagatgtccaaatg

SEQ ID NO: 1163548 - DNA, 15 bp, Homo sapiens
gaaagatgtccaaat

SEQ ID NO: 1163549 - DNA, 15 bp, Homo sapiens
tgaaagatgtccaaa

SEQ ID NO: 1163550 - DNA, 15 bp, Homo sapiens
ctgaaagatgtccaa

SEQ ID NO: 1163551 - DNA, 15 bp, Homo sapiens
gctgaaagatgtcca

SEQ ID NO: 1163552 - DNA, 15 bp, Homo sapiens
agctgaaagatgtcc

SEQ ID NO: 1163553 - DNA, 15 bp, Homo sapiens
aagctgaaagatgtc

SEQ ID NO: 1163554 - DNA, 15 bp, Homo sapiens
aaagctgaaagatgt

SEQ ID NO: 1163555 - DNA, 15 bp, Homo sapiens
caaagctgaaagatg

SEQ ID NO: 1163556 - DNA, 15 bp, Homo sapiens
acaaagctgaaagat

SEQ ID NO: 1163557 - DNA, 15 bp, Homo sapiens
cacaaagctgaaaga

SEQ ID NO: 1163558 - DNA, 15 bp, Homo sapiens
tcacaaagctgaaag

SEQ ID NO: 1163559 - DNA, 15 bp, Homo sapiens
gtcacaaagctgaaa

SEQ ID NO: 1163560 - DNA, 15 bp, Homo sapiens
ggtcacaaagctgaa

SEQ ID NO: 1163561 - DNA, 15 bp, Homo sapiens
tggtcacaaagctga

SEQ ID NO: 1163562 - DNA, 15 bp, Homo sapiens
atggtcacaaagctg

SEQ ID NO: 1163563 - DNA, 15 bp, Homo sapiens
aatggtcacaaagct

SEQ ID NO: 1163564 - DNA, 15 bp, Homo sapiens
aaatggtcacaaagc

SEQ ID NO: 1163565 - DNA, 15 bp, Homo sapiens
aaaatggtcacaaag

SEQ ID NO: 1163566 - DNA, 15 bp, Homo sapiens
taaaatggtcacaaa

SEQ ID NO: 1163567 - DNA, 15 bp, Homo sapiens
ataaaatggtcacaa

SEQ ID NO: 1163568 - DNA, 15 bp, Homo sapiens
cataaaatggtcaca

SEQ ID NO: 1163569 - DNA, 15 bp, Homo sapiens
acataaaatggtcac

SEQ ID NO: 1163570 - DNA, 15 bp, Homo sapiens
gacataaaatggtca

SEQ ID NO: 1163571 - DNA, 15 bp, Homo sapiens
agacataaaatggtc

SEQ ID NO: 1163572 - DNA, 15 bp, Homo sapiens
cagacataaaatggt

SEQ ID NO: 1163573 - DNA, 15 bp, Homo sapiens
gcagacataaaatgg

SEQ ID NO: 1163574 - DNA, 15 bp, Homo sapiens
tgcagacataaaatg

SEQ ID NO: 1163575 - DNA, 15 bp, Homo sapiens
ttgcagacataaaat

SEQ ID NO: 1163576 - DNA, 15 bp, Homo sapiens
tttgcagacataaaa

SEQ ID NO: 1163577 - DNA, 15 bp, Homo sapiens
ttttgcagacataaa

SEQ ID NO: 1163578 - DNA, 15 bp, Homo sapiens
attttgcagacataa

SEQ ID NO: 1163579 - DNA, 15 bp, Homo sapiens
tattttgcagacata

SEQ ID NO: 1163580 - DNA, 15 bp, Homo sapiens
ttattttgcagacat

SEQ ID NO: 1163581 - DNA, 15 bp, Homo sapiens
cttattttgcagaca

SEQ ID NO: 1163582 - DNA, 15 bp, Homo sapiens
gcttattttgcagac

SEQ ID NO: 1163583 - DNA, 15 bp, Homo sapiens
tgcttattttgcaga

SEQ ID NO: 1163584 - DNA, 15 bp, Homo sapiens
atgcttattttgcag

SEQ ID NO: 1163585 - DNA, 15 bp, Homo sapiens
tatgcttattttgca

SEQ ID NO: 1163586 - DNA, 15 bp, Homo sapiens
ttatgcttattttgc

SEQ ID NO: 1163587 - DNA, 15 bp, Homo sapiens
gttatgcttattttg

SEQ ID NO: 1163588 - DNA, 15 bp, Homo sapiens
tgttatgcttatttt

SEQ ID NO: 1163589 - DNA, 15 bp, Homo sapiens
ttgttatgcttattt

SEQ ID NO: 1163590 - DNA, 15 bp, Homo sapiens
gttgttatgcttatt

SEQ ID NO: 1163591 - DNA, 15 bp, Homo sapiens
tgttgttatgcttat

SEQ ID NO: 1163592 - DNA, 15 bp, Homo sapiens
gtgttgttatgctta

SEQ ID NO: 1163593 - DNA, 15 bp, Homo sapiens
agtgttgttatgctt

SEQ ID NO: 1163594 - DNA, 15 bp, Homo sapiens
tagtgttgttatgct

SEQ ID NO: 1163595 - DNA, 15 bp, Homo sapiens
ctagtgttgttatgc

SEQ ID NO: 1163596 - DNA, 15 bp, Homo sapiens
gctagtgttgttatg

SEQ ID NO: 1163597 - DNA, 15 bp, Homo sapiens
ggctagtgttgttat

SEQ ID NO: 1163598 - DNA, 15 bp, Homo sapiens
gggctagtgttgtta

SEQ ID NO: 1163599 - DNA, 15 bp, Homo sapiens
agggctagtgttgtt

SEQ ID NO: 1163600 - DNA, 15 bp, Homo sapiens
cagggctagtgttgt

SEQ ID NO: 1163601 - DNA, 15 bp, Homo sapiens
gcagggctagtgttg

SEQ ID NO: 1163602 - DNA, 15 bp, Homo sapiens
ggcagggctagtgtt

SEQ ID NO: 1163603 - DNA, 15 bp, Homo sapiens
aggcagggctagtgt

SEQ ID NO: 1163604 - DNA, 15 bp, Homo sapiens
aaggcagggctagtg

SEQ ID NO: 1163605 - DNA, 15 bp, Homo sapiens
taaggcagggctagt

SEQ ID NO: 1163606 - DNA, 15 bp, Homo sapiens
ataaggcagggctag

SEQ ID NO: 1163607 - DNA, 15 bp, Homo sapiens
aataaggcagggcta

SEQ ID NO: 1163608 - DNA, 15 bp, Homo sapiens
gaataaggcagggct

SEQ ID NO: 1163609 - DNA, 15 bp, Homo sapiens
tgaataaggcagggc

SEQ ID NO: 1163610 - DNA, 15 bp, Homo sapiens
gtgaataaggcaggg

SEQ ID NO: 1163611 - DNA, 15 bp, Homo sapiens
tgtgaataaggcagg

SEQ ID NO: 1163612 - DNA, 15 bp, Homo sapiens
ttgtgaataaggcag

SEQ ID NO: 1163613 - DNA, 15 bp, Homo sapiens
cttgtgaataaggca

SEQ ID NO: 1163614 - DNA, 15 bp, Homo sapiens
ccttgtgaataaggc

SEQ ID NO: 1163615 - DNA, 15 bp, Homo sapiens
accttgtgaataagg

SEQ ID NO: 1163616 - DNA, 15 bp, Homo sapiens
aaccttgtgaataag

SEQ ID NO: 1163617 - DNA, 15 bp, Homo sapiens
taaccttgtgaataa

SEQ ID NO: 1163618 - DNA, 15 bp, Homo sapiens
gtaaccttgtgaata

SEQ ID NO: 1163619 - DNA, 15 bp, Homo sapiens
agtaaccttgtgaat

SEQ ID NO: 1163620 - DNA, 15 bp, Homo sapiens
cagtaaccttgtgaa

SEQ ID NO: 1163621 - DNA, 15 bp, Homo sapiens
acagtaaccttgtga

SEQ ID NO: 1163622 - DNA, 15 bp, Homo sapiens
cacagtaaccttgtg

SEQ ID NO: 1163623 - DNA, 15 bp, Homo sapiens
tcacagtaaccttgt

SEQ ID NO: 1163624 - DNA, 15 bp, Homo sapiens
ctcacagtaaccttg

SEQ ID NO: 1163625 - DNA, 15 bp, Homo sapiens
cctcacagtaacctt

SEQ ID NO: 1163626 - DNA, 15 bp, Homo sapiens
gcctcacagtaacct

SEQ ID NO: 1163627 - DNA, 15 bp, Homo sapiens
ggcctcacagtaacc

SEQ ID NO: 1163628 - DNA, 15 bp, Homo sapiens
aggcctcacagtaac

SEQ ID NO: 1163629 - DNA, 15 bp, Homo sapiens
caggcctcacagtaa

SEQ ID NO: 1163630 - DNA, 15 bp, Homo sapiens
tcaggcctcacagta

SEQ ID NO: 1163631 - DNA, 15 bp, Homo sapiens
ctcaggcctcacagt

SEQ ID NO: 1163632 - DNA, 15 bp, Homo sapiens
actcaggcctcacag

SEQ ID NO: 1163633 - DNA, 15 bp, Homo sapiens
cactcaggcctcaca

SEQ ID NO: 1163634 - DNA, 15 bp, Homo sapiens
ccactcaggcctcac

SEQ ID NO: 1163635 - DNA, 15 bp, Homo sapiens
tccactcaggcctca

SEQ ID NO: 1163636 - DNA, 15 bp, Homo sapiens
ttccactcaggcctc

SEQ ID NO: 1163637 - DNA, 15 bp, Homo sapiens
attccactcaggcct

SEQ ID NO: 1163638 - DNA, 15 bp, Homo sapiens
tattccactcaggcc

SEQ ID NO: 1163639 - DNA, 15 bp, Homo sapiens
atattccactcaggc

SEQ ID NO: 1163640 - DNA, 15 bp, Homo sapiens
catattccactcagg

SEQ ID NO: 1163641 - DNA, 15 bp, Homo sapiens
ccatattccactcag

SEQ ID NO: 1163642 - DNA, 15 bp, Homo sapiens
accatattccactca

SEQ ID NO: 1163643 - DNA, 15 bp, Homo sapiens
caccatattccactc

SEQ ID NO: 1163644 - DNA, 15 bp, Homo sapiens
acaccatattccact

SEQ ID NO: 1163645 - DNA, 15 bp, Homo sapiens
aacaccatattccac

SEQ ID NO: 1163646 - DNA, 15 bp, Homo sapiens
caacaccatattcca

SEQ ID NO: 1163647 - DNA, 15 bp, Homo sapiens
tcaacaccatattcc

SEQ ID NO: 1163648 - DNA, 15 bp, Homo sapiens
ttcaacaccatattc

SEQ ID NO: 1163649 - DNA, 15 bp, Homo sapiens
cttcaacaccatatt

SEQ ID NO: 1163650 - DNA, 15 bp, Homo sapiens
acttcaacaccatat

SEQ ID NO: 1163651 - DNA, 15 bp, Homo sapiens
tacttcaacaccata

SEQ ID NO: 1163652 - DNA, 15 bp, Homo sapiens
atacttcaacaccat

SEQ ID NO: 1163653 - DNA, 15 bp, Homo sapiens
aatacttcaacacca

SEQ ID NO: 1163654 - DNA, 15 bp, Homo sapiens
taatacttcaacacc

SEQ ID NO: 1163655 - DNA, 15 bp, Homo sapiens
ctaatacttcaacac

SEQ ID NO: 1163656 - DNA, 15 bp, Homo sapiens
cctaatacttcaaca

SEQ ID NO: 1163657 - DNA, 15 bp, Homo sapiens
tcctaatacttcaac

SEQ ID NO: 1163658 - DNA, 15 bp, Homo sapiens
ttcctaatacttcaa

SEQ ID NO: 1163659 - DNA, 15 bp, Homo sapiens
cttcctaatacttca

SEQ ID NO: 1163660 - DNA, 15 bp, Homo sapiens
gcttcctaatacttc

SEQ ID NO: 1163661 - DNA, 15 bp, Homo sapiens
agcttcctaatactt

SEQ ID NO: 1163662 - DNA, 15 bp, Homo sapiens
tagcttcctaatact

SEQ ID NO: 1163663 - DNA, 15 bp, Homo sapiens
atagcttcctaatac

SEQ ID NO: 1163664 - DNA, 15 bp, Homo sapiens
tatagcttcctaata

SEQ ID NO: 1163665 - DNA, 15 bp, Homo sapiens
ttatagcttcctaat

SEQ ID NO: 1163666 - DNA, 15 bp, Homo sapiens
tttatagcttcctaa

SEQ ID NO: 1163667 - DNA, 15 bp, Homo sapiens
ctttatagcttccta

SEQ ID NO: 1163668 - DNA, 15 bp, Homo sapiens
actttatagcttcct

SEQ ID NO: 1163669 - DNA, 15 bp, Homo sapiens
tactttatagcttcc

SEQ ID NO: 1163670 - DNA, 15 bp, Homo sapiens
gtactttatagcttc

SEQ ID NO: 1163671 - DNA, 15 bp, Homo sapiens
agtactttatagctt

SEQ ID NO: 1163672 - DNA, 15 bp, Homo sapiens
tagtactttatagct

SEQ ID NO: 1163673 - DNA, 15 bp, Homo sapiens
gtagtactttatagc

SEQ ID NO: 1163674 - DNA, 15 bp, Homo sapiens
agtagtactttatag

SEQ ID NO: 1163675 - DNA, 15 bp, Homo sapiens
tagtagtactttata

SEQ ID NO: 1163676 - DNA, 15 bp, Homo sapiens
ctagtagtactttat

SEQ ID NO: 1163677 - DNA, 15 bp, Homo sapiens
gctagtagtacttta

SEQ ID NO: 1163678 - DNA, 15 bp, Homo sapiens
tgctagtagtacttt

SEQ ID NO: 1163679 - DNA, 15 bp, Homo sapiens
atgctagtagtactt

SEQ ID NO: 1163680 - DNA, 15 bp, Homo sapiens
tatgctagtagtact

SEQ ID NO: 1163681 - DNA, 15 bp, Homo sapiens
ctatgctagtagtac

SEQ ID NO: 1163682 - DNA, 15 bp, Homo sapiens
cctatgctagtagta

SEQ ID NO: 1163683 - DNA, 15 bp, Homo sapiens
acctatgctagtagt

SEQ ID NO: 1163684 - DNA, 15 bp, Homo sapiens
tacctatgctagtag

SEQ ID NO: 1163685 - DNA, 15 bp, Homo sapiens
ttacctatgctagta

SEQ ID NO: 1163686 - DNA, 15 bp, Homo sapiens
cttacctatgctagt

SEQ ID NO: 1163687 - DNA, 15 bp, Homo sapiens
acttacctatgctag

SEQ ID NO: 1163688 - DNA, 15 bp, Homo sapiens
tacttacctatgcta

SEQ ID NO: 1163689 - DNA, 15 bp, Homo sapiens
ttacttacctatgct

SEQ ID NO: 1163690 - DNA, 15 bp, Homo sapiens
gttacttacctatgc

SEQ ID NO: 1163691 - DNA, 15 bp, Homo sapiens
agttacttacctatg

SEQ ID NO: 1163692 - DNA, 15 bp, Homo sapiens
aagttacttacctat

SEQ ID NO: 1163693 - DNA, 15 bp, Homo sapiens
caagttacttaccta

SEQ ID NO: 1163694 - DNA, 15 bp, Homo sapiens
gcaagttacttacct

SEQ ID NO: 1163695 - DNA, 15 bp, Homo sapiens
agcaagttacttacc

SEQ ID NO: 1163696 - DNA, 15 bp, Homo sapiens
tagcaagttacttac

SEQ ID NO: 1163697 - DNA, 15 bp, Homo sapiens
ttagcaagttactta

SEQ ID NO: 1163698 - DNA, 15 bp, Homo sapiens
cttagcaagttactt

SEQ ID NO: 1163699 - DNA, 15 bp, Homo sapiens
ccttagcaagttact

SEQ ID NO: 1163700 - DNA, 15 bp, Homo sapiens
tccttagcaagttac

SEQ ID NO: 1163701 - DNA, 15 bp, Homo sapiens
atccttagcaagtta

SEQ ID NO: 1163702 - DNA, 15 bp, Homo sapiens
gatccttagcaagtt

SEQ ID NO: 1163703 - DNA, 15 bp, Homo sapiens
agatccttagcaagt

SEQ ID NO: 1163704 - DNA, 15 bp, Homo sapiens
aagatccttagcaag

SEQ ID NO: 1163705 - DNA, 15 bp, Homo sapiens
aaagatccttagcaa

SEQ ID NO: 1163706 - DNA, 15 bp, Homo sapiens
aaaagatccttagca

SEQ ID NO: 1163707 - DNA, 15 bp, Homo sapiens
aaaaagatccttagc

SEQ ID NO: 1163708 - DNA, 15 bp, Homo sapiens
aaaaaagatccttag

SEQ ID NO: 1163709 - DNA, 15 bp, Homo sapiens
aaaaaaagatcctta

SEQ ID NO: 1163710 - DNA, 15 bp, Homo sapiens
aaaaaaaagatcctt

SEQ ID NO: 1163711 - DNA, 15 bp, Homo sapiens
aaaaaaaaagatcct

SEQ ID NO: 1163712 - DNA, 15 bp, Homo sapiens
aaaaaaaaaagatcc

SEQ ID NO: 1163713 - DNA, 15 bp, Homo sapiens
ttctcaaagaaaaaa

SEQ ID NO: 1163714 - DNA, 15 bp, Homo sapiens
cttctcaaagaaaaa

SEQ ID NO: 1163715 - DNA, 15 bp, Homo sapiens
ccttctcaaagaaaa

SEQ ID NO: 1163716 - DNA, 15 bp, Homo sapiens
tccttctcaaagaaa

SEQ ID NO: 1163717 - DNA, 15 bp, Homo sapiens
ctccttctcaaagaa

SEQ ID NO: 1163718 - DNA, 15 bp, Homo sapiens
actccttctcaaaga

SEQ ID NO: 1163719 - DNA, 15 bp, Homo sapiens
gactccttctcaaag

SEQ ID NO: 1163720 - DNA, 15 bp, Homo sapiens
agactccttctcaaa

SEQ ID NO: 1163721 - DNA, 15 bp, Homo sapiens
aagactccttctcaa

SEQ ID NO: 1163722 - DNA, 15 bp, Homo sapiens
caagactccttctca

SEQ ID NO: 1163723 - DNA, 15 bp, Homo sapiens
gcaagactccttctc

SEQ ID NO: 1163724 - DNA, 15 bp, Homo sapiens
agcaagactccttct

SEQ ID NO: 1163725 - DNA, 15 bp, Homo sapiens
gagcaagactccttc

SEQ ID NO: 1163726 - DNA, 15 bp, Homo sapiens
agagcaagactcctt

SEQ ID NO: 1163727 - DNA, 15 bp, Homo sapiens
cagagcaagactcct

SEQ ID NO: 1163728 - DNA, 15 bp, Homo sapiens
ggacagagcaagact

SEQ ID NO: 1163729 - DNA, 15 bp, Homo sapiens
aggacagagcaagac

SEQ ID NO: 1163730 - DNA, 15 bp, Homo sapiens
gaggacagagcaaga

SEQ ID NO: 1163731 - DNA, 15 bp, Homo sapiens
ggaggacagagcaag

SEQ ID NO: 1163732 - DNA, 15 bp, Homo sapiens
tggaggacagagcaa

SEQ ID NO: 1163733 - DNA, 15 bp, Homo sapiens
ctggaggacagagca

SEQ ID NO: 1163734 - DNA, 15 bp, Homo sapiens
cctggaggacagagc

SEQ ID NO: 1163735 - DNA, 15 bp, Homo sapiens
gcctggaggacagag

SEQ ID NO: 1163736 - DNA, 15 bp, Homo sapiens
agcctggaggacaga

SEQ ID NO: 1163737 - DNA, 15 bp, Homo sapiens
cagcctggaggacag

SEQ ID NO: 1163738 - DNA, 15 bp, Homo sapiens
ccagcctggaggaca

SEQ ID NO: 1163739 - DNA, 15 bp, Homo sapiens
tccagcctggaggac

SEQ ID NO: 1163740 - DNA, 15 bp, Homo sapiens
ctccagcctggagga

SEQ ID NO: 1163741 - DNA, 15 bp, Homo sapiens
actccagcctggagg

SEQ ID NO: 1163742 - DNA, 15 bp, Homo sapiens
cactccagcctggag

SEQ ID NO: 1163743 - DNA, 15 bp, Homo sapiens
cagatcgcaccattg

SEQ ID NO: 1163744 - DNA, 15 bp, Homo sapiens
ccagatcgcaccatt

SEQ ID NO: 1163745 - DNA, 15 bp, Homo sapiens
cccagatcgcaccat

SEQ ID NO: 1163746 - DNA, 15 bp, Homo sapiens
agttgcagtgagccc

SEQ ID NO: 1163747 - DNA, 15 bp, Homo sapiens
gggaggcagaagttg

SEQ ID NO: 1163748 - DNA, 15 bp, Homo sapiens
tgggaggcagaagtt

SEQ ID NO: 1163749 - DNA, 15 bp, Homo sapiens
ctgggaggcagaagt

SEQ ID NO: 1163750 - DNA, 15 bp, Homo sapiens
cctgggaggcagaag

SEQ ID NO: 1163751 - DNA, 15 bp, Homo sapiens
acctgggaggcagaa

SEQ ID NO: 1163752 - DNA, 15 bp, Homo sapiens
ggaacctgggaggca

SEQ ID NO: 1163753 - DNA, 15 bp, Homo sapiens
tggaacctgggaggc

SEQ ID NO: 1163754 - DNA, 15 bp, Homo sapiens
ttggaacctgggagg

SEQ ID NO: 1163755 - DNA, 15 bp, Homo sapiens
gttggaacctgggag

SEQ ID NO: 1163756 - DNA, 15 bp, Homo sapiens
tgttggaacctggga

SEQ ID NO: 1163757 - DNA, 15 bp, Homo sapiens
ttgttggaacctggg

SEQ ID NO: 1163758 - DNA, 15 bp, Homo sapiens
attgttggaacctgg

SEQ ID NO: 1163759 - DNA, 15 bp, Homo sapiens
aattgttggaacctg

SEQ ID NO: 1163760 - DNA, 15 bp, Homo sapiens
gaattgttggaacct

SEQ ID NO: 1163761 - DNA, 15 bp, Homo sapiens
agaattgttggaacc

SEQ ID NO: 1163762 - DNA, 15 bp, Homo sapiens
gagaattgttggaac

SEQ ID NO: 1163763 - DNA, 15 bp, Homo sapiens
ggagaattgttggaa

SEQ ID NO: 1163764 - DNA, 15 bp, Homo sapiens
aggagaattgttgga

SEQ ID NO: 1163765 - DNA, 15 bp, Homo sapiens
caggagaattgttgg

SEQ ID NO: 1163766 - DNA, 15 bp, Homo sapiens
gcaggagaattgttg

SEQ ID NO: 1163767 - DNA, 15 bp, Homo sapiens
ggcaggagaattgtt

SEQ ID NO: 1163768 - DNA, 15 bp, Homo sapiens
aggcaggagaattgt

SEQ ID NO: 1163769 - DNA, 15 bp, Homo sapiens
taaggcaggagaatt

SEQ ID NO: 1163770 - DNA, 15 bp, Homo sapiens
agaggctaaggcagg

SEQ ID NO: 1163771 - DNA, 15 bp, Homo sapiens
aagaggctaaggcag

SEQ ID NO: 1163772 - DNA, 15 bp, Homo sapiens
caagaggctaaggca

SEQ ID NO: 1163773 - DNA, 15 bp, Homo sapiens
tcaagaggctaaggc

SEQ ID NO: 1163774 - DNA, 15 bp, Homo sapiens
ctcaagaggctaagg

SEQ ID NO: 1163775 - DNA, 15 bp, Homo sapiens
actcaagaggctaag

SEQ ID NO: 1163776 - DNA, 15 bp, Homo sapiens
tactcaagaggctaa

SEQ ID NO: 1163777 - DNA, 15 bp, Homo sapiens
ctactcaagaggcta

SEQ ID NO: 1163778 - DNA, 15 bp, Homo sapiens
gctactcaagaggct

SEQ ID NO: 1163779 - DNA, 15 bp, Homo sapiens
agctactcaagaggc

SEQ ID NO: 1163780 - DNA, 15 bp, Homo sapiens
tcagctactcaagag

SEQ ID NO: 1163781 - DNA, 15 bp, Homo sapiens
ctcagctactcaaga

SEQ ID NO: 1163782 - DNA, 15 bp, Homo sapiens
tctcagctactcaag

SEQ ID NO: 1163783 - DNA, 15 bp, Homo sapiens
gtctcagctactcaa

SEQ ID NO: 1163784 - DNA, 15 bp, Homo sapiens
atagtctcagctact

SEQ ID NO: 1163785 - DNA, 15 bp, Homo sapiens
tatagtctcagctac

SEQ ID NO: 1163786 - DNA, 15 bp, Homo sapiens
ctatagtctcagcta

SEQ ID NO: 1163787 - DNA, 15 bp, Homo sapiens
cctatagtctcagct

SEQ ID NO: 1163788 - DNA, 15 bp, Homo sapiens
gcctatagtctcagc

SEQ ID NO: 1163789 - DNA, 15 bp, Homo sapiens
tgcctatagtctcag

SEQ ID NO: 1163790 - DNA, 15 bp, Homo sapiens
gtgcctatagtctca

SEQ ID NO: 1163791 - DNA, 15 bp, Homo sapiens
ggtgcctatagtctc

SEQ ID NO: 1163792 - DNA, 15 bp, Homo sapiens
aggtgcctatagtct

SEQ ID NO: 1163793 - DNA, 15 bp, Homo sapiens
caggtgcctatagtc

SEQ ID NO: 1163794 - DNA, 15 bp, Homo sapiens
gcaggtgcctatagt

SEQ ID NO: 1163795 - DNA, 15 bp, Homo sapiens
ggcaggtgcctatag

SEQ ID NO: 1163796 - DNA, 15 bp, Homo sapiens
atggtggcaggtgcc

SEQ ID NO: 1163797 - DNA, 15 bp, Homo sapiens
catggtggcaggtgc

SEQ ID NO: 1163798 - DNA, 15 bp, Homo sapiens
ccatggtggcaggtg

SEQ ID NO: 1163799 - DNA, 15 bp, Homo sapiens
gccatggtggcaggt

SEQ ID NO: 1163800 - DNA, 15 bp, Homo sapiens
ggccatggtggcagg

SEQ ID NO: 1163801 - DNA, 15 bp, Homo sapiens
tggccatggtggcag

SEQ ID NO: 1163802 - DNA, 15 bp, Homo sapiens
ctggccatggtggca

SEQ ID NO: 1163803 - DNA, 15 bp, Homo sapiens
gctggccatggtggc

SEQ ID NO: 1163804 - DNA, 15 bp, Homo sapiens
agctggccatggtgg

SEQ ID NO: 1163805 - DNA, 15 bp, Homo sapiens
tagctggccatggtg

SEQ ID NO: 1163806 - DNA, 15 bp, Homo sapiens
ttagctggccatggt

SEQ ID NO: 1163807 - DNA, 15 bp, Homo sapiens
attagctggccatgg

SEQ ID NO: 1163808 - DNA, 15 bp, Homo sapiens
aattagctggccatg

SEQ ID NO: 1163809 - DNA, 15 bp, Homo sapiens
aaattagctggccat

SEQ ID NO: 1163810 - DNA, 15 bp, Homo sapiens
caaattagctggcca

SEQ ID NO: 1163811 - DNA, 15 bp, Homo sapiens
acaaattagctggcc

SEQ ID NO: 1163812 - DNA, 15 bp, Homo sapiens
aacaaattagctggc

SEQ ID NO: 1163813 - DNA, 15 bp, Homo sapiens
caacaaattagctgg

SEQ ID NO: 1163814 - DNA, 15 bp, Homo sapiens
acaacaaattagctg

SEQ ID NO: 1163815 - DNA, 15 bp, Homo sapiens
tacaacaaattagct

SEQ ID NO: 1163816 - DNA, 15 bp, Homo sapiens
atacaacaaattagc

SEQ ID NO: 1163817 - DNA, 15 bp, Homo sapiens
aatacaacaaattag

SEQ ID NO: 1163818 - DNA, 15 bp, Homo sapiens
caatacaacaaatta

SEQ ID NO: 1163819 - DNA, 15 bp, Homo sapiens
acaatacaacaaatt

SEQ ID NO: 1163820 - DNA, 15 bp, Homo sapiens
aacaatacaacaaat

SEQ ID NO: 1163821 - DNA, 15 bp, Homo sapiens
taacaatacaacaaa

SEQ ID NO: 1163822 - DNA, 15 bp, Homo sapiens
ctaacaatacaacaa

SEQ ID NO: 1163823 - DNA, 15 bp, Homo sapiens
actaacaatacaaca

SEQ ID NO: 1163824 - DNA, 15 bp, Homo sapiens
tactaacaatacaac

SEQ ID NO: 1163825 - DNA, 15 bp, Homo sapiens
ctactaacaatacaa

SEQ ID NO: 1163826 - DNA, 15 bp, Homo sapiens
tctactaacaataca

SEQ ID NO: 1163827 - DNA, 15 bp, Homo sapiens
ctctactaacaatac

SEQ ID NO: 1163828 - DNA, 15 bp, Homo sapiens
tctctactaacaata

SEQ ID NO: 1163829 - DNA, 15 bp, Homo sapiens
gtctctactaacaat

SEQ ID NO: 1163830 - DNA, 15 bp, Homo sapiens
cgtctctactaacaa

SEQ ID NO: 1163831 - DNA, 15 bp, Homo sapiens
ccgtctctactaaca

SEQ ID NO: 1163832 - DNA, 15 bp, Homo sapiens
cccgtctctactaac

SEQ ID NO: 1163833 - DNA, 15 bp, Homo sapiens
acgagaccagcctgg

SEQ ID NO: 1163834 - DNA, 15 bp, Homo sapiens
aacgagaccagcctg

SEQ ID NO: 1163835 - DNA, 15 bp, Homo sapiens
gaacgagaccagcct

SEQ ID NO: 1163836 - DNA, 15 bp, Homo sapiens
agaacgagaccagcc

SEQ ID NO: 1163837 - DNA, 15 bp, Homo sapiens
gagaacgagaccagc

SEQ ID NO: 1163838 - DNA, 15 bp, Homo sapiens
ggagaacgagaccag

SEQ ID NO: 1163839 - DNA, 15 bp, Homo sapiens
aggagaacgagacca

SEQ ID NO: 1163840 - DNA, 15 bp, Homo sapiens
caggagaacgagacc

SEQ ID NO: 1163841 - DNA, 15 bp, Homo sapiens
tcaggagaacgagac

SEQ ID NO: 1163842 - DNA, 15 bp, Homo sapiens
gtcaggagaacgaga

SEQ ID NO: 1163843 - DNA, 15 bp, Homo sapiens
ggtcaggagaacgag

SEQ ID NO: 1163844 - DNA, 15 bp, Homo sapiens
aggtcaggagaacga

SEQ ID NO: 1163845 - DNA, 15 bp, Homo sapiens
gaggtcaggagaacg

SEQ ID NO: 1163846 - DNA, 15 bp, Homo sapiens
tgaggtcaggagaac

SEQ ID NO: 1163847 - DNA, 15 bp, Homo sapiens
ctgaggtcaggagaa

SEQ ID NO: 1163848 - DNA, 15 bp, Homo sapiens
cctgaggtcaggaga

SEQ ID NO: 1163849 - DNA, 15 bp, Homo sapiens
acagcactttgggag

SEQ ID NO: 1163850 - DNA, 15 bp, Homo sapiens
cacagcactttggga

SEQ ID NO: 1163851 - DNA, 15 bp, Homo sapiens
tcacagcactttggg

SEQ ID NO: 1163852 - DNA, 15 bp, Homo sapiens
atcacagcactttgg

SEQ ID NO: 1163853 - DNA, 15 bp, Homo sapiens
aatcacagcactttg

SEQ ID NO: 1163854 - DNA, 15 bp, Homo sapiens
taatcacagcacttt

SEQ ID NO: 1163855 - DNA, 15 bp, Homo sapiens
ataatcacagcactt

SEQ ID NO: 1163856 - DNA, 15 bp, Homo sapiens
tataatcacagcact

SEQ ID NO: 1163857 - DNA, 15 bp, Homo sapiens
ctataatcacagcac

SEQ ID NO: 1163858 - DNA, 15 bp, Homo sapiens
cctataatcacagca

SEQ ID NO: 1163859 - DNA, 15 bp, Homo sapiens
tcctataatcacagc

SEQ ID NO: 1163860 - DNA, 15 bp, Homo sapiens
ctcctataatcacag

SEQ ID NO: 1163861 - DNA, 15 bp, Homo sapiens
actcctataatcaca

SEQ ID NO: 1163862 - DNA, 15 bp, Homo sapiens
cactcctataatcac

SEQ ID NO: 1163863 - DNA, 15 bp, Homo sapiens
ccactcctataatca

SEQ ID NO: 1163864 - DNA, 15 bp, Homo sapiens
cccactcctataatc

SEQ ID NO: 1163865 - DNA, 15 bp, Homo sapiens
gcccactcctataat

SEQ ID NO: 1163866 - DNA, 15 bp, Homo sapiens
ggcccactcctataa

SEQ ID NO: 1163867 - DNA, 15 bp, Homo sapiens
tggcccactcctata

SEQ ID NO: 1163868 - DNA, 15 bp, Homo sapiens
gtggcccactcctat

SEQ ID NO: 1163869 - DNA, 15 bp, Homo sapiens
agtggcccactccta

SEQ ID NO: 1163870 - DNA, 15 bp, Homo sapiens
cagtggcccactcct

SEQ ID NO: 1163871 - DNA, 15 bp, Homo sapiens
acagtggcccactcc

SEQ ID NO: 1163872 - DNA, 15 bp, Homo sapiens
cacagtggcccactc

SEQ ID NO: 1163873 - DNA, 15 bp, Homo sapiens
gcacagtggcccact

SEQ ID NO: 1163874 - DNA, 15 bp, Homo sapiens
ggcacagtggcccac

SEQ ID NO: 1163875 - DNA, 15 bp, Homo sapiens
aggcacagtggccca

SEQ ID NO: 1163876 - DNA, 15 bp, Homo sapiens
caggcacagtggccc

SEQ ID NO: 1163877 - DNA, 15 bp, Homo sapiens
ccaggcacagtggcc

SEQ ID NO: 1163878 - DNA, 15 bp, Homo sapiens
agcaggccaggcaca

SEQ ID NO: 1163879 - DNA, 15 bp, Homo sapiens
tagcaggccaggcac

SEQ ID NO: 1163880 - DNA, 15 bp, Homo sapiens
ttagcaggccaggca

SEQ ID NO: 1163881 - DNA, 15 bp, Homo sapiens
cttagcaggccaggc

SEQ ID NO: 1163882 - DNA, 15 bp, Homo sapiens
ccttagcaggccagg

SEQ ID NO: 1163883 - DNA, 15 bp, Homo sapiens
tccttagcaggccag

SEQ ID NO: 1163884 - DNA, 15 bp, Homo sapiens
atccttagcaggcca

SEQ ID NO: 1163885 - DNA, 15 bp, Homo sapiens
gatccttagcaggcc

SEQ ID NO: 1163886 - DNA, 15 bp, Homo sapiens
agatccttagcaggc

SEQ ID NO: 1163887 - DNA, 15 bp, Homo sapiens
aagatccttagcagg

SEQ ID NO: 1163888 - DNA, 15 bp, Homo sapiens
aaagatccttagcag

SEQ ID NO: 1163889 - DNA, 15 bp, Homo sapiens
taaaagatccttagc

SEQ ID NO: 1163890 - DNA, 15 bp, Homo sapiens
ataaaagatccttag

SEQ ID NO: 1163891 - DNA, 15 bp, Homo sapiens
aataaaagatcctta

SEQ ID NO: 1163892 - DNA, 15 bp, Homo sapiens
caataaaagatcctt

SEQ ID NO: 1163893 - DNA, 15 bp, Homo sapiens
ccaataaaagatcct

SEQ ID NO: 1163894 - DNA, 15 bp, Homo sapiens
gccaataaaagatcc

SEQ ID NO: 1163895 - DNA, 15 bp, Homo sapiens
ggccaataaaagatc

SEQ ID NO: 1163896 - DNA, 15 bp, Homo sapiens
aggccaataaaagat

SEQ ID NO: 1163897 - DNA, 15 bp, Homo sapiens
gaggccaataaaaga

SEQ ID NO: 1163898 - DNA, 15 bp, Homo sapiens
ggaggccaataaaag

SEQ ID NO: 1163899 - DNA, 15 bp, Homo sapiens
aggaggccaataaaa

SEQ ID NO: 1163900 - DNA, 15 bp, Homo sapiens
taggaggccaataaa

SEQ ID NO: 1163901 - DNA, 15 bp, Homo sapiens
ttaggaggccaataa

SEQ ID NO: 1163902 - DNA, 15 bp, Homo sapiens
cttaggaggccaata

SEQ ID NO: 1163903 - DNA, 15 bp, Homo sapiens
ccttaggaggccaat

SEQ ID NO: 1163904 - DNA, 15 bp, Homo sapiens
tccttaggaggccaa

SEQ ID NO: 1163905 - DNA, 15 bp, Homo sapiens
atccttaggaggcca

SEQ ID NO: 1163906 - DNA, 15 bp, Homo sapiens
gatccttaggaggcc

SEQ ID NO: 1163907 - DNA, 15 bp, Homo sapiens
agatccttaggaggc

SEQ ID NO: 1163908 - DNA, 15 bp, Homo sapiens
aagatccttaggagg

SEQ ID NO: 1163909 - DNA, 15 bp, Homo sapiens
aaagatccttaggag

SEQ ID NO: 1163910 - DNA, 15 bp, Homo sapiens
aaaagatccttagga

SEQ ID NO: 1163911 - DNA, 15 bp, Homo sapiens
taaaagatccttagg

SEQ ID NO: 1163912 - DNA, 15 bp, Homo sapiens
agccaataaaagatc

SEQ ID NO: 1163913 - DNA, 15 bp, Homo sapiens
gagccaataaaagat

SEQ ID NO: 1163914 - DNA, 15 bp, Homo sapiens
ggagccaataaaaga

SEQ ID NO: 1163915 - DNA, 15 bp, Homo sapiens
tggagccaataaaag

SEQ ID NO: 1163916 - DNA, 15 bp, Homo sapiens
ctggagccaataaaa

SEQ ID NO: 1163917 - DNA, 15 bp, Homo sapiens
cctggagccaataaa

SEQ ID NO: 1163918 - DNA, 15 bp, Homo sapiens
acctggagccaataa

SEQ ID NO: 1163919 - DNA, 15 bp, Homo sapiens
gacctggagccaata

SEQ ID NO: 1163920 - DNA, 15 bp, Homo sapiens
tgacctggagccaat

SEQ ID NO: 1163921 - DNA, 15 bp, Homo sapiens
ttgacctggagccaa

SEQ ID NO: 1163922 - DNA, 15 bp, Homo sapiens
cttgacctggagcca

SEQ ID NO: 1163923 - DNA, 15 bp, Homo sapiens
tcttgacctggagcc

SEQ ID NO: 1163924 - DNA, 15 bp, Homo sapiens
atcttgacctggagc

SEQ ID NO: 1163925 - DNA, 15 bp, Homo sapiens
catcttgacctggag

SEQ ID NO: 1163926 - DNA, 15 bp, Homo sapiens
gcatcttgacctgga

SEQ ID NO: 1163927 - DNA, 15 bp, Homo sapiens
agcatcttgacctgg

SEQ ID NO: 1163928 - DNA, 15 bp, Homo sapiens
tagcatcttgacctg

SEQ ID NO: 1163929 - DNA, 15 bp, Homo sapiens
atagcatcttgacct

SEQ ID NO: 1163930 - DNA, 15 bp, Homo sapiens
gatagcatcttgacc

SEQ ID NO: 1163931 - DNA, 15 bp, Homo sapiens
agatagcatcttgac

SEQ ID NO: 1163932 - DNA, 15 bp, Homo sapiens
tagatagcatcttga

SEQ ID NO: 1163933 - DNA, 15 bp, Homo sapiens
atagatagcatcttg

SEQ ID NO: 1163934 - DNA, 15 bp, Homo sapiens
gatagatagcatctt

SEQ ID NO: 1163935 - DNA, 15 bp, Homo sapiens
agatagatagcatct

SEQ ID NO: 1163936 - DNA, 15 bp, Homo sapiens
aagatagatagcatc

SEQ ID NO: 1163937 - DNA, 15 bp, Homo sapiens
caagatagatagcat

SEQ ID NO: 1163938 - DNA, 15 bp, Homo sapiens
acaagatagatagca

SEQ ID NO: 1163939 - DNA, 15 bp, Homo sapiens
cacaagatagatagc

SEQ ID NO: 1163940 - DNA, 15 bp, Homo sapiens
acacaagatagatag

SEQ ID NO: 1163941 - DNA, 15 bp, Homo sapiens
aacacaagatagata

SEQ ID NO: 1163942 - DNA, 15 bp, Homo sapiens
gaacacaagatagat

SEQ ID NO: 1163943 - DNA, 15 bp, Homo sapiens
agaacacaagataga

SEQ ID NO: 1163944 - DNA, 15 bp, Homo sapiens
gagaacacaagatag

SEQ ID NO: 1163945 - DNA, 15 bp, Homo sapiens
ggagaacacaagata

SEQ ID NO: 1163946 - DNA, 15 bp, Homo sapiens
gggagaacacaagat

SEQ ID NO: 1163947 - DNA, 15 bp, Homo sapiens
tgggagaacacaaga

SEQ ID NO: 1163948 - DNA, 15 bp, Homo sapiens
gtgggagaacacaag

SEQ ID NO: 1163949 - DNA, 15 bp, Homo sapiens
ggtgggagaacacaa

SEQ ID NO: 1163950 - DNA, 15 bp, Homo sapiens
aggtgggagaacaca

SEQ ID NO: 1163951 - DNA, 15 bp, Homo sapiens
caggtgggagaacac

SEQ ID NO: 1163952 - DNA, 15 bp, Homo sapiens
gcaggtgggagaaca

SEQ ID NO: 1163953 - DNA, 15 bp, Homo sapiens
tgcaggtgggagaac

SEQ ID NO: 1163954 - DNA, 15 bp, Homo sapiens
ctgcaggtgggagaa

SEQ ID NO: 1163955 - DNA, 15 bp, Homo sapiens
gctgcaggtgggaga

SEQ ID NO: 1163956 - DNA, 15 bp, Homo sapiens
tgctgcaggtgggag

SEQ ID NO: 1163957 - DNA, 15 bp, Homo sapiens
gtgctgcaggtggga

SEQ ID NO: 1163958 - DNA, 15 bp, Homo sapiens
agtgctgcaggtggg

SEQ ID NO: 1163959 - DNA, 15 bp, Homo sapiens
cagtgctgcaggtgg

SEQ ID NO: 1163960 - DNA, 15 bp, Homo sapiens
tcagtgctgcaggtg

SEQ ID NO: 1163961 - DNA, 15 bp, Homo sapiens
atcagtgctgcaggt

SEQ ID NO: 1163962 - DNA, 15 bp, Homo sapiens
catcagtgctgcagg

SEQ ID NO: 1163963 - DNA, 15 bp, Homo sapiens
ccatcagtgctgcag

SEQ ID NO: 1163964 - DNA, 15 bp, Homo sapiens
gccatcagtgctgca

SEQ ID NO: 1163965 - DNA, 15 bp, Homo sapiens
ggccatcagtgctgc

SEQ ID NO: 1163966 - DNA, 15 bp, Homo sapiens
gggccatcagtgctg

SEQ ID NO: 1163967 - DNA, 15 bp, Homo sapiens
tgggccatcagtgct

SEQ ID NO: 1163968 - DNA, 15 bp, Homo sapiens
gtgggccatcagtgc

SEQ ID NO: 1163969 - DNA, 15 bp, Homo sapiens
tgtgggccatcagtg

SEQ ID NO: 1163970 - DNA, 15 bp, Homo sapiens
ttgtgggccatcagt

SEQ ID NO: 1163971 - DNA, 15 bp, Homo sapiens
gttgtgggccatcag

SEQ ID NO: 1163972 - DNA, 15 bp, Homo sapiens
ggttgtgggccatca

SEQ ID NO: 1163973 - DNA, 15 bp, Homo sapiens
gggttgtgggccatc

SEQ ID NO: 1163974 - DNA, 15 bp, Homo sapiens
agggttgtgggccat

SEQ ID NO: 1163975 - DNA, 15 bp, Homo sapiens
cagggttgtgggcca

SEQ ID NO: 1163976 - DNA, 15 bp, Homo sapiens
ccagggttgtgggcc

SEQ ID NO: 1163977 - DNA, 15 bp, Homo sapiens
tccagggttgtgggc

SEQ ID NO: 1163978 - DNA, 15 bp, Homo sapiens
ttccagggttgtggg

SEQ ID NO: 1163979 - DNA, 15 bp, Homo sapiens
tttccagggttgtgg

SEQ ID NO: 1163980 - DNA, 15 bp, Homo sapiens
ctttccagggttgtg

SEQ ID NO: 1163981 - DNA, 15 bp, Homo sapiens
cctttccagggttgt

SEQ ID NO: 1163982 - DNA, 15 bp, Homo sapiens
gcctttccagggttg

SEQ ID NO: 1163983 - DNA, 15 bp, Homo sapiens
agcctttccagggtt

SEQ ID NO: 1163984 - DNA, 15 bp, Homo sapiens
tagcctttccagggt

SEQ ID NO: 1163985 - DNA, 15 bp, Homo sapiens
gtagcctttccaggg

SEQ ID NO: 1163986 - DNA, 15 bp, Homo sapiens
tgtagcctttccagg

SEQ ID NO: 1163987 - DNA, 15 bp, Homo sapiens
gtgtagcctttccag

SEQ ID NO: 1163988 - DNA, 15 bp, Homo sapiens
agtgtagcctttcca

SEQ ID NO: 1163989 - DNA, 15 bp, Homo sapiens
aagtgtagcctttcc

SEQ ID NO: 1163990 - DNA, 15 bp, Homo sapiens
gaagtgtagcctttc

SEQ ID NO: 1163991 - DNA, 15 bp, Homo sapiens
tgaagtgtagccttt

SEQ ID NO: 1163992 - DNA, 15 bp, Homo sapiens
ctgaagtgtagcctt

SEQ ID NO: 1163993 - DNA, 15 bp, Homo sapiens
cctgaagtgtagcct

SEQ ID NO: 1163994 - DNA, 15 bp, Homo sapiens
gcctgaagtgtagcc

SEQ ID NO: 1163995 - DNA, 15 bp, Homo sapiens
tgcctgaagtgtagc

SEQ ID NO: 1163996 - DNA, 15 bp, Homo sapiens
gtgcctgaagtgtag

SEQ ID NO: 1163997 - DNA, 15 bp, Homo sapiens
tgtgcctgaagtgta

SEQ ID NO: 1163998 - DNA, 15 bp, Homo sapiens
atgtgcctgaagtgt

SEQ ID NO: 1163999 - DNA, 15 bp, Homo sapiens
gatgtgcctgaagtg

SEQ ID NO: 1164000 - DNA, 15 bp, Homo sapiens
tgatgtgcctgaagt

SEQ ID NO: 1164001 - DNA, 15 bp, Homo sapiens
ctgatgtgcctgaag

SEQ ID NO: 1164002 - DNA, 15 bp, Homo sapiens
cctgatgtgcctgaa

SEQ ID NO: 1164003 - DNA, 15 bp, Homo sapiens
gcctgatgtgcctga

SEQ ID NO: 1164004 - DNA, 15 bp, Homo sapiens
tgcctgatgtgcctg

SEQ ID NO: 1164005 - DNA, 15 bp, Homo sapiens
atgcctgatgtgcct

SEQ ID NO: 1164006 - DNA, 15 bp, Homo sapiens
aatgcctgatgtgcc

SEQ ID NO: 1164007 - DNA, 15 bp, Homo sapiens
aaatgcctgatgtgc

SEQ ID NO: 1164008 - DNA, 15 bp, Homo sapiens
gaaatgcctgatgtg

SEQ ID NO: 1164009 - DNA, 15 bp, Homo sapiens
agaaatgcctgatgt

SEQ ID NO: 1164010 - DNA, 15 bp, Homo sapiens
gagaaatgcctgatg

SEQ ID NO: 1164011 - DNA, 15 bp, Homo sapiens
agagaaatgcctgat

SEQ ID NO: 1164012 - DNA, 15 bp, Homo sapiens
gagagaaatgcctga

SEQ ID NO: 1164013 - DNA, 15 bp, Homo sapiens
agagagaaatgcctg

SEQ ID NO: 1164014 - DNA, 15 bp, Homo sapiens
aagagagaaatgcct

SEQ ID NO: 1164015 - DNA, 15 bp, Homo sapiens
gaagagagaaatgcc

SEQ ID NO: 1164016 - DNA, 15 bp, Homo sapiens
ggaagagagaaatgc

SEQ ID NO: 1164017 - DNA, 15 bp, Homo sapiens
tggaagagagaaatg

SEQ ID NO: 1164018 - DNA, 15 bp, Homo sapiens
ctggaagagagaaat

SEQ ID NO: 1164019 - DNA, 15 bp, Homo sapiens
tctggaagagagaaa

SEQ ID NO: 1164020 - DNA, 15 bp, Homo sapiens
ctctggaagagagaa

SEQ ID NO: 1164021 - DNA, 15 bp, Homo sapiens
actctggaagagaga

SEQ ID NO: 1164022 - DNA, 15 bp, Homo sapiens
aactctggaagagag

SEQ ID NO: 1164023 - DNA, 15 bp, Homo sapiens
caactctggaagaga

SEQ ID NO: 1164024 - DNA, 15 bp, Homo sapiens
ccaactctggaagag

SEQ ID NO: 1164025 - DNA, 15 bp, Homo sapiens
accaactctggaaga

SEQ ID NO: 1164026 - DNA, 15 bp, Homo sapiens
aaccaactctggaag

SEQ ID NO: 1164027 - DNA, 15 bp, Homo sapiens
aaaccaactctggaa

SEQ ID NO: 1164028 - DNA, 15 bp, Homo sapiens
gaaaccaactctgga

SEQ ID NO: 1164029 - DNA, 15 bp, Homo sapiens
tgaaaccaactctgg

SEQ ID NO: 1164030 - DNA, 15 bp, Homo sapiens
gtgaaaccaactctg

SEQ ID NO: 1164031 - DNA, 15 bp, Homo sapiens
ggtgaaaccaactct

SEQ ID NO: 1164032 - DNA, 15 bp, Homo sapiens
aggtgaaaccaactc

SEQ ID NO: 1164033 - DNA, 15 bp, Homo sapiens
taggtgaaaccaact

SEQ ID NO: 1164034 - DNA, 15 bp, Homo sapiens
ttaggtgaaaccaac

SEQ ID NO: 1164035 - DNA, 15 bp, Homo sapiens
attaggtgaaaccaa

SEQ ID NO: 1164036 - DNA, 15 bp, Homo sapiens
aattaggtgaaacca

SEQ ID NO: 1164037 - DNA, 15 bp, Homo sapiens
taattaggtgaaacc

SEQ ID NO: 1164038 - DNA, 15 bp, Homo sapiens
ctaattaggtgaaac

SEQ ID NO: 1164039 - DNA, 15 bp, Homo sapiens
actaattaggtgaaa

SEQ ID NO: 1164040 - DNA, 15 bp, Homo sapiens
tactaattaggtgaa

SEQ ID NO: 1164041 - DNA, 15 bp, Homo sapiens
atactaattaggtga

SEQ ID NO: 1164042 - DNA, 15 bp, Homo sapiens
aatactaattaggtg

SEQ ID NO: 1164043 - DNA, 15 bp, Homo sapiens
caatactaattaggt

SEQ ID NO: 1164044 - DNA, 15 bp, Homo sapiens
tcaatactaattagg

SEQ ID NO: 1164045 - DNA, 15 bp, Homo sapiens
gtcaatactaattag

SEQ ID NO: 1164046 - DNA, 15 bp, Homo sapiens
cgtcaatactaatta

SEQ ID NO: 1164047 - DNA, 15 bp, Homo sapiens
acgtcaatactaatt

SEQ ID NO: 1164048 - DNA, 15 bp, Homo sapiens
cacgtcaatactaat

SEQ ID NO: 1164049 - DNA, 15 bp, Homo sapiens
gcacgtcaatactaa

SEQ ID NO: 1164050 - DNA, 15 bp, Homo sapiens
tgcacgtcaatacta

SEQ ID NO: 1164051 - DNA, 15 bp, Homo sapiens
ctgcacgtcaatact

SEQ ID NO: 1164052 - DNA, 15 bp, Homo sapiens
tctgcacgtcaatac

SEQ ID NO: 1164053 - DNA, 15 bp, Homo sapiens
ctctgcacgtcaata

SEQ ID NO: 1164054 - DNA, 15 bp, Homo sapiens
tctctgcacgtcaat

SEQ ID NO: 1164055 - DNA, 15 bp, Homo sapiens
ctctctgcacgtcaa

SEQ ID NO: 1164056 - DNA, 15 bp, Homo sapiens
actctctgcacgtca

SEQ ID NO: 1164057 - DNA, 15 bp, Homo sapiens
gactctctgcacgtc

SEQ ID NO: 1164058 - DNA, 15 bp, Homo sapiens
agactctctgcacgt

SEQ ID NO: 1164059 - DNA, 15 bp, Homo sapiens
gagactctctgcacg

SEQ ID NO: 1164060 - DNA, 15 bp, Homo sapiens
agagactctctgcac

SEQ ID NO: 1164061 - DNA, 15 bp, Homo sapiens
cagagactctctgca

SEQ ID NO: 1164062 - DNA, 15 bp, Homo sapiens
ccagagactctctgc

SEQ ID NO: 1164063 - DNA, 15 bp, Homo sapiens
accagagactctctg

SEQ ID NO: 1164064 - DNA, 15 bp, Homo sapiens
aaccagagactctct

SEQ ID NO: 1164065 - DNA, 15 bp, Homo sapiens
caaccagagactctc

SEQ ID NO: 1164066 - DNA, 15 bp, Homo sapiens
gcaaccagagactct

SEQ ID NO: 1164067 - DNA, 15 bp, Homo sapiens
agcaaccagagactc

SEQ ID NO: 1164068 - DNA, 15 bp, Homo sapiens
tagcaaccagagact

SEQ ID NO: 1164069 - DNA, 15 bp, Homo sapiens
ttagcaaccagagac

SEQ ID NO: 1164070 - DNA, 15 bp, Homo sapiens
tttagcaaccagaga

SEQ ID NO: 1164071 - DNA, 15 bp, Homo sapiens
ctttagcaaccagag

SEQ ID NO: 1164072 - DNA, 15 bp, Homo sapiens
tctttagcaaccaga

SEQ ID NO: 1164073 - DNA, 15 bp, Homo sapiens
ttctttagcaaccag

SEQ ID NO: 1164074 - DNA, 15 bp, Homo sapiens
tttctttagcaacca

SEQ ID NO: 1164075 - DNA, 15 bp, Homo sapiens
ctttctttagcaacc

SEQ ID NO: 1164076 - DNA, 15 bp, Homo sapiens
tctttctttagcaac

SEQ ID NO: 1164077 - DNA, 15 bp, Homo sapiens
gtctttctttagcaa

SEQ ID NO: 1164078 - DNA, 15 bp, Homo sapiens
ggtctttctttagca

SEQ ID NO: 1164079 - DNA, 15 bp, Homo sapiens
gggtctttctttagc

SEQ ID NO: 1164080 - DNA, 15 bp, Homo sapiens
agggtctttctttag

SEQ ID NO: 1164081 - DNA, 15 bp, Homo sapiens
cagggtctttcttta

SEQ ID NO: 1164082 - DNA, 15 bp, Homo sapiens
acagggtctttcttt

SEQ ID NO: 1164083 - DNA, 15 bp, Homo sapiens
tacagggtctttctt

SEQ ID NO: 1164084 - DNA, 15 bp, Homo sapiens
ctacagggtctttct

SEQ ID NO: 1164085 - DNA, 15 bp, Homo sapiens
actacagggtctttc

SEQ ID NO: 1164086 - DNA, 15 bp, Homo sapiens
gactacagggtcttt

SEQ ID NO: 1164087 - DNA, 15 bp, Homo sapiens
tgactacagggtctt

SEQ ID NO: 1164088 - DNA, 15 bp, Homo sapiens
atgactacagggtct

SEQ ID NO: 1164089 - DNA, 15 bp, Homo sapiens
catgactacagggtc

SEQ ID NO: 1164090 - DNA, 15 bp, Homo sapiens
gcatgactacagggt

SEQ ID NO: 1164091 - DNA, 15 bp, Homo sapiens
ggcatgactacaggg

SEQ ID NO: 1164092 - DNA, 15 bp, Homo sapiens
aggcatgactacagg

SEQ ID NO: 1164093 - DNA, 15 bp, Homo sapiens
aaggcatgactacag

SEQ ID NO: 1164094 - DNA, 15 bp, Homo sapiens
gaaggcatgactaca

SEQ ID NO: 1164095 - DNA, 15 bp, Homo sapiens
agaaggcatgactac

SEQ ID NO: 1164096 - DNA, 15 bp, Homo sapiens
gagaaggcatgacta

SEQ ID NO: 1164097 - DNA, 15 bp, Homo sapiens
ggagaaggcatgact

SEQ ID NO: 1164098 - DNA, 15 bp, Homo sapiens
aggagaaggcatgac

SEQ ID NO: 1164099 - DNA, 15 bp, Homo sapiens
aaggagaaggcatga

SEQ ID NO: 1164100 - DNA, 15 bp, Homo sapiens
aaaggagaaggcatg

SEQ ID NO: 1164101 - DNA, 15 bp, Homo sapiens
taaaggagaaggcat

SEQ ID NO: 1164102 - DNA, 15 bp, Homo sapiens
ctaaaggagaaggca

SEQ ID NO: 1164103 - DNA, 15 bp, Homo sapiens
tctaaaggagaaggc

SEQ ID NO: 1164104 - DNA, 15 bp, Homo sapiens
ttctaaaggagaagg

SEQ ID NO: 1164105 - DNA, 15 bp, Homo sapiens
gttctaaaggagaag

SEQ ID NO: 1164106 - DNA, 15 bp, Homo sapiens
tgttctaaaggagaa

SEQ ID NO: 1164107 - DNA, 15 bp, Homo sapiens
atgttctaaaggaga

SEQ ID NO: 1164108 - DNA, 15 bp, Homo sapiens
gatgttctaaaggag

SEQ ID NO: 1164109 - DNA, 15 bp, Homo sapiens
tgatgttctaaagga

SEQ ID NO: 1164110 - DNA, 15 bp, Homo sapiens
gtgatgttctaaagg

SEQ ID NO: 1164111 - DNA, 15 bp, Homo sapiens
ggtgatgttctaaag

SEQ ID NO: 1164112 - DNA, 15 bp, Homo sapiens
aggtgatgttctaaa

SEQ ID NO: 1164113 - DNA, 15 bp, Homo sapiens
aaggtgatgttctaa

SEQ ID NO: 1164114 - DNA, 15 bp, Homo sapiens
aaaggtgatgttcta

SEQ ID NO: 1164115 - DNA, 15 bp, Homo sapiens
taaaggtgatgttct

SEQ ID NO: 1164116 - DNA, 15 bp, Homo sapiens
ataaaggtgatgttc

SEQ ID NO: 1164117 - DNA, 15 bp, Homo sapiens
aataaaggtgatgtt

SEQ ID NO: 1164118 - DNA, 15 bp, Homo sapiens
gaataaaggtgatgt

SEQ ID NO: 1164119 - DNA, 15 bp, Homo sapiens
agaataaaggtgatg

SEQ ID NO: 1164120 - DNA, 15 bp, Homo sapiens
cagaataaaggtgat

SEQ ID NO: 1164121 - DNA, 15 bp, Homo sapiens
tcagaataaaggtga

SEQ ID NO: 1164122 - DNA, 15 bp, Homo sapiens
atcagaataaaggtg

SEQ ID NO: 1164123 - DNA, 15 bp, Homo sapiens
tatcagaataaaggt

SEQ ID NO: 1164124 - DNA, 15 bp, Homo sapiens
ttatcagaataaagg

SEQ ID NO: 1164125 - DNA, 15 bp, Homo sapiens
attatcagaataaag

SEQ ID NO: 1164126 - DNA, 15 bp, Homo sapiens
tattatcagaataaa

SEQ ID NO: 1164127 - DNA, 15 bp, Homo sapiens
ttattatcagaataa

SEQ ID NO: 1164128 - DNA, 15 bp, Homo sapiens
cttattatcagaata

SEQ ID NO: 1164129 - DNA, 15 bp, Homo sapiens
ccttattatcagaat

SEQ ID NO: 1164130 - DNA, 15 bp, Homo sapiens
cccttattatcagaa

SEQ ID NO: 1164131 - DNA, 15 bp, Homo sapiens
tcccttattatcaga

SEQ ID NO: 1164132 - DNA, 15 bp, Homo sapiens
ctcccttattatcag

SEQ ID NO: 1164133 - DNA, 15 bp, Homo sapiens
tctcccttattatca

SEQ ID NO: 1164134 - DNA, 15 bp, Homo sapiens
ctctcccttattatc

SEQ ID NO: 1164135 - DNA, 15 bp, Homo sapiens
tctctcccttattat

SEQ ID NO: 1164136 - DNA, 15 bp, Homo sapiens
ctctctcccttatta

SEQ ID NO: 1164137 - DNA, 15 bp, Homo sapiens
cctctctcccttatt

SEQ ID NO: 1164138 - DNA, 15 bp, Homo sapiens
ccctctctcccttat

SEQ ID NO: 1164139 - DNA, 15 bp, Homo sapiens
tccctctctccctta

SEQ ID NO: 1164140 - DNA, 15 bp, Homo sapiens
tttccctctctccct

SEQ ID NO: 1164141 - DNA, 15 bp, Homo sapiens
ctttccctctctccc

SEQ ID NO: 1164142 - DNA, 15 bp, Homo sapiens
cctttccctctctcc

SEQ ID NO: 1164143 - DNA, 15 bp, Homo sapiens
tcctttccctctctc

SEQ ID NO: 1164144 - DNA, 15 bp, Homo sapiens
ttcctttccctctct

SEQ ID NO: 1164145 - DNA, 15 bp, Homo sapiens
cttcctttccctctc

SEQ ID NO: 1164146 - DNA, 15 bp, Homo sapiens
acttcctttccctct

SEQ ID NO: 1164147 - DNA, 15 bp, Homo sapiens
tacttcctttccctc

SEQ ID NO: 1164148 - DNA, 15 bp, Homo sapiens
ttacttcctttccct

SEQ ID NO: 1164149 - DNA, 15 bp, Homo sapiens
cttacttcctttccc

SEQ ID NO: 1164150 - DNA, 15 bp, Homo sapiens
ccttacttcctttcc

SEQ ID NO: 1164151 - DNA, 15 bp, Homo sapiens
tccttacttcctttc

SEQ ID NO: 1164152 - DNA, 15 bp, Homo sapiens
ctccttacttccttt

SEQ ID NO: 1164153 - DNA, 15 bp, Homo sapiens
gctccttacttcctt

SEQ ID NO: 1164154 - DNA, 15 bp, Homo sapiens
tgctccttacttcct

SEQ ID NO: 1164155 - DNA, 15 bp, Homo sapiens
atgctccttacttcc

SEQ ID NO: 1164156 - DNA, 15 bp, Homo sapiens
aatgctccttacttc

SEQ ID NO: 1164157 - DNA, 15 bp, Homo sapiens
caatgctccttactt

SEQ ID NO: 1164158 - DNA, 15 bp, Homo sapiens
acaatgctccttact

SEQ ID NO: 1164159 - DNA, 15 bp, Homo sapiens
gacaatgctccttac

SEQ ID NO: 1164160 - DNA, 15 bp, Homo sapiens
tgacaatgctcctta

SEQ ID NO: 1164161 - DNA, 15 bp, Homo sapiens
atgacaatgctcctt

SEQ ID NO: 1164162 - DNA, 15 bp, Homo sapiens
tatgacaatgctcct

SEQ ID NO: 1164163 - DNA, 15 bp, Homo sapiens
ttatgacaatgctcc

SEQ ID NO: 1164164 - DNA, 15 bp, Homo sapiens
tttatgacaatgctc

SEQ ID NO: 1164165 - DNA, 15 bp, Homo sapiens
ttttatgacaatgct

SEQ ID NO: 1164166 - DNA, 15 bp, Homo sapiens
tttttatgacaatgc

SEQ ID NO: 1164167 - DNA, 15 bp, Homo sapiens
atttttatgacaatg

SEQ ID NO: 1164168 - DNA, 15 bp, Homo sapiens
aatttttatgacaat

SEQ ID NO: 1164169 - DNA, 15 bp, Homo sapiens
caatttttatgacaa

SEQ ID NO: 1164170 - DNA, 15 bp, Homo sapiens
gcaatttttatgaca

SEQ ID NO: 1164171 - DNA, 15 bp, Homo sapiens
tgcaatttttatgac

SEQ ID NO: 1164172 - DNA, 15 bp, Homo sapiens
gtgcaatttttatga

SEQ ID NO: 1164173 - DNA, 15 bp, Homo sapiens
ggtgcaatttttatg

SEQ ID NO: 1164174 - DNA, 15 bp, Homo sapiens
gggtgcaatttttat

SEQ ID NO: 1164175 - DNA, 15 bp, Homo sapiens
tgggtgcaattttta

SEQ ID NO: 1164176 - DNA, 15 bp, Homo sapiens
gtgggtgcaattttt

SEQ ID NO: 1164177 - DNA, 15 bp, Homo sapiens
agtgggtgcaatttt

SEQ ID NO: 1164178 - DNA, 15 bp, Homo sapiens
cagtgggtgcaattt

SEQ ID NO: 1164179 - DNA, 15 bp, Homo sapiens
gcagtgggtgcaatt

SEQ ID NO: 1164180 - DNA, 15 bp, Homo sapiens
agcagtgggtgcaat

SEQ ID NO: 1164181 - DNA, 15 bp, Homo sapiens
cagcagtgggtgcaa

SEQ ID NO: 1164182 - DNA, 15 bp, Homo sapiens
gcagcagtgggtgca

SEQ ID NO: 1164183 - DNA, 15 bp, Homo sapiens
ggcagcagtgggtgc

SEQ ID NO: 1164184 - DNA, 15 bp, Homo sapiens
aggcagcagtgggtg

SEQ ID NO: 1164185 - DNA, 15 bp, Homo sapiens
aaggcagcagtgggt

SEQ ID NO: 1164186 - DNA, 15 bp, Homo sapiens
caaggcagcagtggg

SEQ ID NO: 1164187 - DNA, 15 bp, Homo sapiens
acaaggcagcagtgg

SEQ ID NO: 1164188 - DNA, 15 bp, Homo sapiens
tacaaggcagcagtg

SEQ ID NO: 1164189 - DNA, 15 bp, Homo sapiens
ctacaaggcagcagt

SEQ ID NO: 1164190 - DNA, 15 bp, Homo sapiens
cctacaaggcagcag

SEQ ID NO: 1164191 - DNA, 15 bp, Homo sapiens
acctacaaggcagca

SEQ ID NO: 1164192 - DNA, 15 bp, Homo sapiens
cacctacaaggcagc

SEQ ID NO: 1164193 - DNA, 15 bp, Homo sapiens
tcacctacaaggcag

SEQ ID NO: 1164194 - DNA, 15 bp, Homo sapiens
ctcacctacaaggca

SEQ ID NO: 1164195 - DNA, 15 bp, Homo sapiens
tctcacctacaaggc

SEQ ID NO: 1164196 - DNA, 15 bp, Homo sapiens
ctctcacctacaagg

SEQ ID NO: 1164197 - DNA, 15 bp, Homo sapiens
tctctcacctacaag

SEQ ID NO: 1164198 - DNA, 15 bp, Homo sapiens
ctctctcacctacaa

SEQ ID NO: 1164199 - DNA, 15 bp, Homo sapiens
cctctctcacctaca

SEQ ID NO: 1164200 - DNA, 15 bp, Homo sapiens
ccctctctcacctac

SEQ ID NO: 1164201 - DNA, 15 bp, Homo sapiens
tccctctctcaccta

SEQ ID NO: 1164202 - DNA, 15 bp, Homo sapiens
gtccctctctcacct

SEQ ID NO: 1164203 - DNA, 15 bp, Homo sapiens
agtccctctctcacc

SEQ ID NO: 1164204 - DNA, 15 bp, Homo sapiens
cagtccctctctcac

SEQ ID NO: 1164205 - DNA, 15 bp, Homo sapiens
tcagtccctctctca

SEQ ID NO: 1164206 - DNA, 15 bp, Homo sapiens
gtcagtccctctctc

SEQ ID NO: 1164207 - DNA, 15 bp, Homo sapiens
tgtcagtccctctct

SEQ ID NO: 1164208 - DNA, 15 bp, Homo sapiens
gtgtcagtccctctc

SEQ ID NO: 1164209 - DNA, 15 bp, Homo sapiens
agtgtcagtccctct

SEQ ID NO: 1164210 - DNA, 15 bp, Homo sapiens
cagtgtcagtccctc

SEQ ID NO: 1164211 - DNA, 15 bp, Homo sapiens
ccagtgtcagtccct

SEQ ID NO: 1164212 - DNA, 15 bp, Homo sapiens
cccagtgtcagtccc

SEQ ID NO: 1164213 - DNA, 15 bp, Homo sapiens
gcccagtgtcagtcc

SEQ ID NO: 1164214 - DNA, 15 bp, Homo sapiens
agcccagtgtcagtc

SEQ ID NO: 1164215 - DNA, 15 bp, Homo sapiens
gagcccagtgtcagt

SEQ ID NO: 1164216 - DNA, 15 bp, Homo sapiens
ggagcccagtgtcag

SEQ ID NO: 1164217 - DNA, 15 bp, Homo sapiens
tggagcccagtgtca

SEQ ID NO: 1164218 - DNA, 15 bp, Homo sapiens
gtggagcccagtgtc

SEQ ID NO: 1164219 - DNA, 15 bp, Homo sapiens
cgtggagcccagtgt

SEQ ID NO: 1164220 - DNA, 15 bp, Homo sapiens
acgtggagcccagtg

SEQ ID NO: 1164221 - DNA, 15 bp, Homo sapiens
cacgtggagcccagt

SEQ ID NO: 1164222 - DNA, 15 bp, Homo sapiens
gcacgtggagcccag

SEQ ID NO: 1164223 - DNA, 15 bp, Homo sapiens
agcacgtggagccca

SEQ ID NO: 1164224 - DNA, 15 bp, Homo sapiens
gagcacgtggagccc

SEQ ID NO: 1164225 - DNA, 15 bp, Homo sapiens
ggagcacgtggagcc

SEQ ID NO: 1164226 - DNA, 15 bp, Homo sapiens
aggagcacgtggagc

SEQ ID NO: 1164227 - DNA, 15 bp, Homo sapiens
taggagcacgtggag

SEQ ID NO: 1164228 - DNA, 15 bp, Homo sapiens
gtaggagcacgtgga

SEQ ID NO: 1164229 - DNA, 15 bp, Homo sapiens
tgtaggagcacgtgg

SEQ ID NO: 1164230 - DNA, 15 bp, Homo sapiens
ctgtaggagcacgtg

SEQ ID NO: 1164231 - DNA, 15 bp, Homo sapiens
tctgtaggagcacgt

SEQ ID NO: 1164232 - DNA, 15 bp, Homo sapiens
ctctgtaggagcacg

SEQ ID NO: 1164233 - DNA, 15 bp, Homo sapiens
cctctgtaggagcac

SEQ ID NO: 1164234 - DNA, 15 bp, Homo sapiens
ccctctgtaggagca

SEQ ID NO: 1164235 - DNA, 15 bp, Homo sapiens
accctctgtaggagc

SEQ ID NO: 1164236 - DNA, 15 bp, Homo sapiens
caccctctgtaggag

SEQ ID NO: 1164237 - DNA, 15 bp, Homo sapiens
acaccctctgtagga

SEQ ID NO: 1164238 - DNA, 15 bp, Homo sapiens
cacaccctctgtagg

SEQ ID NO: 1164239 - DNA, 15 bp, Homo sapiens
tcacaccctctgtag

SEQ ID NO: 1164240 - DNA, 15 bp, Homo sapiens
ttcacaccctctgta

SEQ ID NO: 1164241 - DNA, 15 bp, Homo sapiens
gttcacaccctctgt

SEQ ID NO: 1164242 - DNA, 15 bp, Homo sapiens
tgttcacaccctctg

SEQ ID NO: 1164243 - DNA, 15 bp, Homo sapiens
gtgttcacaccctct

SEQ ID NO: 1164244 - DNA, 15 bp, Homo sapiens
agtgttcacaccctc

SEQ ID NO: 1164245 - DNA, 15 bp, Homo sapiens
tagtgttcacaccct

SEQ ID NO: 1164246 - DNA, 15 bp, Homo sapiens
ctagtgttcacaccc

SEQ ID NO: 1164247 - DNA, 15 bp, Homo sapiens
gctagtgttcacacc

SEQ ID NO: 1164248 - DNA, 15 bp, Homo sapiens
agctagtgttcacac

SEQ ID NO: 1164249 - DNA, 15 bp, Homo sapiens
gagctagtgttcaca

SEQ ID NO: 1164250 - DNA, 15 bp, Homo sapiens
ggagctagtgttcac

SEQ ID NO: 1164251 - DNA, 15 bp, Homo sapiens
tggagctagtgttca

SEQ ID NO: 1164252 - DNA, 15 bp, Homo sapiens
ctggagctagtgttc

SEQ ID NO: 1164253 - DNA, 15 bp, Homo sapiens
tctggagctagtgtt

SEQ ID NO: 1164254 - DNA, 15 bp, Homo sapiens
ctctggagctagtgt

SEQ ID NO: 1164255 - DNA, 15 bp, Homo sapiens
actctggagctagtg

SEQ ID NO: 1164256 - DNA, 15 bp, Homo sapiens
gactctggagctagt

SEQ ID NO: 1164257 - DNA, 15 bp, Homo sapiens
agactctggagctag

SEQ ID NO: 1164258 - DNA, 15 bp, Homo sapiens
gagactctggagcta

SEQ ID NO: 1164259 - DNA, 15 bp, Homo sapiens
agagactctggagct

SEQ ID NO: 1164260 - DNA, 15 bp, Homo sapiens
aagagactctggagc

SEQ ID NO: 1164261 - DNA, 15 bp, Homo sapiens
gaagagactctggag

SEQ ID NO: 1164262 - DNA, 15 bp, Homo sapiens
agaagagactctgga

SEQ ID NO: 1164263 - DNA, 15 bp, Homo sapiens
cagaagagactctgg

SEQ ID NO: 1164264 - DNA, 15 bp, Homo sapiens
acagaagagactctg

SEQ ID NO: 1164265 - DNA, 15 bp, Homo sapiens
cacagaagagactct

SEQ ID NO: 1164266 - DNA, 15 bp, Homo sapiens
acacagaagagactc

SEQ ID NO: 1164267 - DNA, 15 bp, Homo sapiens
aacacagaagagact

SEQ ID NO: 1164268 - DNA, 15 bp, Homo sapiens
aaacacagaagagac

SEQ ID NO: 1164269 - DNA, 15 bp, Homo sapiens
gaaacacagaagaga

SEQ ID NO: 1164270 - DNA, 15 bp, Homo sapiens
ggaaacacagaagag

SEQ ID NO: 1164271 - DNA, 15 bp, Homo sapiens
tggaaacacagaaga

SEQ ID NO: 1164272 - DNA, 15 bp, Homo sapiens
gtggaaacacagaag

SEQ ID NO: 1164273 - DNA, 15 bp, Homo sapiens
tgtggaaacacagaa

SEQ ID NO: 1164274 - DNA, 15 bp, Homo sapiens
atgtggaaacacaga

SEQ ID NO: 1164275 - DNA, 15 bp, Homo sapiens
tatgtggaaacacag

SEQ ID NO: 1164276 - DNA, 15 bp, Homo sapiens
ttatgtggaaacaca

SEQ ID NO: 1164277 - DNA, 15 bp, Homo sapiens
attatgtggaaacac

SEQ ID NO: 1164278 - DNA, 15 bp, Homo sapiens
tattatgtggaaaca

SEQ ID NO: 1164279 - DNA, 15 bp, Homo sapiens
ctattatgtggaaac

SEQ ID NO: 1164280 - DNA, 15 bp, Homo sapiens
tctattatgtggaaa

SEQ ID NO: 1164281 - DNA, 15 bp, Homo sapiens
ttctattatgtggaa

SEQ ID NO: 1164282 - DNA, 15 bp, Homo sapiens
tttctattatgtgga

SEQ ID NO: 1164283 - DNA, 15 bp, Homo sapiens
gtttctattatgtgg

SEQ ID NO: 1164284 - DNA, 15 bp, Homo sapiens
ggtttctattatgtg

SEQ ID NO: 1164285 - DNA, 15 bp, Homo sapiens
tggtttctattatgt

SEQ ID NO: 1164286 - DNA, 15 bp, Homo sapiens
ttggtttctattatg

SEQ ID NO: 1164287 - DNA, 15 bp, Homo sapiens
tttggtttctattat

SEQ ID NO: 1164288 - DNA, 15 bp, Homo sapiens
ctttggtttctatta

SEQ ID NO: 1164289 - DNA, 15 bp, Homo sapiens
cctttggtttctatt

SEQ ID NO: 1164290 - DNA, 15 bp, Homo sapiens
gcctttggtttctat

SEQ ID NO: 1164291 - DNA, 15 bp, Homo sapiens
ggcctttggtttcta

SEQ ID NO: 1164292 - DNA, 15 bp, Homo sapiens
tggcctttggtttct

SEQ ID NO: 1164293 - DNA, 15 bp, Homo sapiens
ctggcctttggtttc

SEQ ID NO: 1164294 - DNA, 15 bp, Homo sapiens
cctggcctttggttt

SEQ ID NO: 1164295 - DNA, 15 bp, Homo sapiens
gcctggcctttggtt

SEQ ID NO: 1164296 - DNA, 15 bp, Homo sapiens
tgcctggcctttggt

SEQ ID NO: 1164297 - DNA, 15 bp, Homo sapiens
atgcctggcctttgg

SEQ ID NO: 1164298 - DNA, 15 bp, Homo sapiens
catgcctggcctttg

SEQ ID NO: 1164299 - DNA, 15 bp, Homo sapiens
ccatgcctggccttt

SEQ ID NO: 1164300 - DNA, 15 bp, Homo sapiens
accatgcctggcctt

SEQ ID NO: 1164301 - DNA, 15 bp, Homo sapiens
ccaccatgcctggcc

SEQ ID NO: 1164302 - DNA, 15 bp, Homo sapiens
cgattacaggtgtga

SEQ ID NO: 1164303 - DNA, 15 bp, Homo sapiens
gcgattacaggtgtg

SEQ ID NO: 1164304 - DNA, 15 bp, Homo sapiens
tgcgattacaggtgt

SEQ ID NO: 1164305 - DNA, 15 bp, Homo sapiens
ctgcgattacaggtg

SEQ ID NO: 1164306 - DNA, 15 bp, Homo sapiens
gctgcgattacaggt

SEQ ID NO: 1164307 - DNA, 15 bp, Homo sapiens
tagtgctgcgattac

SEQ ID NO: 1164308 - DNA, 15 bp, Homo sapiens
atagtgctgcgatta

SEQ ID NO: 1164309 - DNA, 15 bp, Homo sapiens
catagtgctgcgatt

SEQ ID NO: 1164310 - DNA, 15 bp, Homo sapiens
ccatagtgctgcgat

SEQ ID NO: 1164311 - DNA, 15 bp, Homo sapiens
cccatagtgctgcga

SEQ ID NO: 1164312 - DNA, 15 bp, Homo sapiens
tcccatagtgctgcg

SEQ ID NO: 1164313 - DNA, 15 bp, Homo sapiens
ctcccatagtgctgc

SEQ ID NO: 1164314 - DNA, 15 bp, Homo sapiens
cctcccatagtgctg

SEQ ID NO: 1164315 - DNA, 15 bp, Homo sapiens
gcctcccatagtgct

SEQ ID NO: 1164316 - DNA, 15 bp, Homo sapiens
agcctcccatagtgc

SEQ ID NO: 1164317 - DNA, 15 bp, Homo sapiens
cagcctcccatagtg

SEQ ID NO: 1164318 - DNA, 15 bp, Homo sapiens
tcagcctcccatagt

SEQ ID NO: 1164319 - DNA, 15 bp, Homo sapiens
ttcagcctcccatag

SEQ ID NO: 1164320 - DNA, 15 bp, Homo sapiens
cttcagcctcccata

SEQ ID NO: 1164321 - DNA, 15 bp, Homo sapiens
gcttcagcctcccat

SEQ ID NO: 1164322 - DNA, 15 bp, Homo sapiens
cgcttcagcctccca

SEQ ID NO: 1164323 - DNA, 15 bp, Homo sapiens
ccgcttcagcctccc

SEQ ID NO: 1164324 - DNA, 15 bp, Homo sapiens
cccgcttcagcctcc

SEQ ID NO: 1164325 - DNA, 15 bp, Homo sapiens
acccgcttcagcctc

SEQ ID NO: 1164326 - DNA, 15 bp, Homo sapiens
cacccgcttcagcct

SEQ ID NO: 1164327 - DNA, 15 bp, Homo sapiens
acacccgcttcagcc

SEQ ID NO: 1164328 - DNA, 15 bp, Homo sapiens
tacacccgcttcagc

SEQ ID NO: 1164329 - DNA, 15 bp, Homo sapiens
atacacccgcttcag

SEQ ID NO: 1164330 - DNA, 15 bp, Homo sapiens
gatacacccgcttca

SEQ ID NO: 1164331 - DNA, 15 bp, Homo sapiens
tgatacacccgcttc

SEQ ID NO: 1164332 - DNA, 15 bp, Homo sapiens
atgatacacccgctt

SEQ ID NO: 1164333 - DNA, 15 bp, Homo sapiens
catgatacacccgct

SEQ ID NO: 1164334 - DNA, 15 bp, Homo sapiens
tcatgatacacccgc

SEQ ID NO: 1164335 - DNA, 15 bp, Homo sapiens
ctcatgatacacccg

SEQ ID NO: 1164336 - DNA, 15 bp, Homo sapiens
cctcatgatacaccc

SEQ ID NO: 1164337 - DNA, 15 bp, Homo sapiens
acctcatgatacacc

SEQ ID NO: 1164338 - DNA, 15 bp, Homo sapiens
gacctcatgatacac

SEQ ID NO: 1164339 - DNA, 15 bp, Homo sapiens
tgacctcatgataca

SEQ ID NO: 1164340 - DNA, 15 bp, Homo sapiens
ctgacctcatgatac

SEQ ID NO: 1164341 - DNA, 15 bp, Homo sapiens
cctgacctcatgata

SEQ ID NO: 1164342 - DNA, 15 bp, Homo sapiens
attttgtattttagt

SEQ ID NO: 1164343 - DNA, 15 bp, Homo sapiens
aattttgtattttag

SEQ ID NO: 1164344 - DNA, 15 bp, Homo sapiens
aaattttgtatttta

SEQ ID NO: 1164345 - DNA, 15 bp, Homo sapiens
taaattttgtatttt

SEQ ID NO: 1164346 - DNA, 15 bp, Homo sapiens
ctaaattttgtattt

SEQ ID NO: 1164347 - DNA, 15 bp, Homo sapiens
gctaaattttgtatt

SEQ ID NO: 1164348 - DNA, 15 bp, Homo sapiens
ggctaaattttgtat

SEQ ID NO: 1164349 - DNA, 15 bp, Homo sapiens
tggctaaattttgta

SEQ ID NO: 1164350 - DNA, 15 bp, Homo sapiens
gtggctaaattttgt

SEQ ID NO: 1164351 - DNA, 15 bp, Homo sapiens
cgtggctaaattttg

SEQ ID NO: 1164352 - DNA, 15 bp, Homo sapiens
gcgtggctaaatttt

SEQ ID NO: 1164353 - DNA, 15 bp, Homo sapiens
tgcgtggctaaattt

SEQ ID NO: 1164354 - DNA, 15 bp, Homo sapiens
atgcgtggctaaatt

SEQ ID NO: 1164355 - DNA, 15 bp, Homo sapiens
catgcgtggctaaat

SEQ ID NO: 1164356 - DNA, 15 bp, Homo sapiens
ccatgcgtggctaaa

SEQ ID NO: 1164357 - DNA, 15 bp, Homo sapiens
accatgcgtggctaa

SEQ ID NO: 1164358 - DNA, 15 bp, Homo sapiens
caccatgcgtggcta

SEQ ID NO: 1164359 - DNA, 15 bp, Homo sapiens
ccaccatgcgtggct

SEQ ID NO: 1164360 - DNA, 15 bp, Homo sapiens
gccaccatgcgtggc

SEQ ID NO: 1164361 - DNA, 15 bp, Homo sapiens
cgccaccatgcgtgg

SEQ ID NO: 1164362 - DNA, 15 bp, Homo sapiens
acgccaccatgcgtg

SEQ ID NO: 1164363 - DNA, 15 bp, Homo sapiens
cacgccaccatgcgt

SEQ ID NO: 1164364 - DNA, 15 bp, Homo sapiens
acacgccaccatgcg

SEQ ID NO: 1164365 - DNA, 15 bp, Homo sapiens
cacacgccaccatgc

SEQ ID NO: 1164366 - DNA, 15 bp, Homo sapiens
gcacacgccaccatg

SEQ ID NO: 1164367 - DNA, 15 bp, Homo sapiens
ggcacacgccaccat

SEQ ID NO: 1164368 - DNA, 15 bp, Homo sapiens
ttacaggcacacgcc

SEQ ID NO: 1164369 - DNA, 15 bp, Homo sapiens
attacaggcacacgc

SEQ ID NO: 1164370 - DNA, 15 bp, Homo sapiens
gattacaggcacacg

SEQ ID NO: 1164371 - DNA, 15 bp, Homo sapiens
ggggattacaggcac

SEQ ID NO: 1164372 - DNA, 15 bp, Homo sapiens
tggggattacaggca

SEQ ID NO: 1164373 - DNA, 15 bp, Homo sapiens
gtggggattacaggc

SEQ ID NO: 1164374 - DNA, 15 bp, Homo sapiens
cgtggggattacagg

SEQ ID NO: 1164375 - DNA, 15 bp, Homo sapiens
gcgtggggattacag

SEQ ID NO: 1164376 - DNA, 15 bp, Homo sapiens
tgcgtggggattaca

SEQ ID NO: 1164377 - DNA, 15 bp, Homo sapiens
atgcgtggggattac

SEQ ID NO: 1164378 - DNA, 15 bp, Homo sapiens
catgcgtggggatta

SEQ ID NO: 1164379 - DNA, 15 bp, Homo sapiens
ccatgcgtggggatt

SEQ ID NO: 1164380 - DNA, 15 bp, Homo sapiens
accatgcgtggggat

SEQ ID NO: 1164381 - DNA, 15 bp, Homo sapiens
caccatgcgtgggga

SEQ ID NO: 1164382 - DNA, 15 bp, Homo sapiens
ccaccatgcgtgggg

SEQ ID NO: 1164383 - DNA, 15 bp, Homo sapiens
gccaccatgcgtggg

SEQ ID NO: 1164384 - DNA, 15 bp, Homo sapiens
cccttagcctcctga

SEQ ID NO: 1164385 - DNA, 15 bp, Homo sapiens
tcccttagcctcctg

SEQ ID NO: 1164386 - DNA, 15 bp, Homo sapiens
ctcccttagcctcct

SEQ ID NO: 1164387 - DNA, 15 bp, Homo sapiens
cctcccttagcctcc

SEQ ID NO: 1164388 - DNA, 15 bp, Homo sapiens
tcctcccttagcctc

SEQ ID NO: 1164389 - DNA, 15 bp, Homo sapiens
ctcctcccttagcct

SEQ ID NO: 1164390 - DNA, 15 bp, Homo sapiens
tctcctcccttagcc

SEQ ID NO: 1164391 - DNA, 15 bp, Homo sapiens
ttctcctcccttagc

SEQ ID NO: 1164392 - DNA, 15 bp, Homo sapiens
attctcctcccttag

SEQ ID NO: 1164393 - DNA, 15 bp, Homo sapiens
gattctcctccctta

SEQ ID NO: 1164394 - DNA, 15 bp, Homo sapiens
cgattctcctccctt

SEQ ID NO: 1164395 - DNA, 15 bp, Homo sapiens
gcgattctcctccct

SEQ ID NO: 1164396 - DNA, 15 bp, Homo sapiens
agcgattctcctccc

SEQ ID NO: 1164397 - DNA, 15 bp, Homo sapiens
aagcgattctcctcc

SEQ ID NO: 1164398 - DNA, 15 bp, Homo sapiens
caagcgattctcctc

SEQ ID NO: 1164399 - DNA, 15 bp, Homo sapiens
tagagtctcactctg

SEQ ID NO: 1164400 - DNA, 15 bp, Homo sapiens
atagagtctcactct

SEQ ID NO: 1164401 - DNA, 15 bp, Homo sapiens
gatagagtctcactc

SEQ ID NO: 1164402 - DNA, 15 bp, Homo sapiens
agatagagtctcact

SEQ ID NO: 1164403 - DNA, 15 bp, Homo sapiens
gagatagagtctcac

SEQ ID NO: 1164404 - DNA, 15 bp, Homo sapiens
tgagatagagtctca

SEQ ID NO: 1164405 - DNA, 15 bp, Homo sapiens
ttgagatagagtctc

SEQ ID NO: 1164406 - DNA, 15 bp, Homo sapiens
tctattttttttttt

SEQ ID NO: 1164407 - DNA, 15 bp, Homo sapiens
ttctatttttttttt

SEQ ID NO: 1164408 - DNA, 15 bp, Homo sapiens
tttctattttttttt

SEQ ID NO: 1164409 - DNA, 15 bp, Homo sapiens
gtttctatttttttt

SEQ ID NO: 1164410 - DNA, 15 bp, Homo sapiens
ggtttctattttttt

SEQ ID NO: 1164411 - DNA, 15 bp, Homo sapiens
tggtttctatttttt

SEQ ID NO: 1164412 - DNA, 15 bp, Homo sapiens
ttggtttctattttt

SEQ ID NO: 1164413 - DNA, 15 bp, Homo sapiens
cttggtttctatttt

SEQ ID NO: 1164414 - DNA, 15 bp, Homo sapiens
tcttggtttctattt

SEQ ID NO: 1164415 - DNA, 15 bp, Homo sapiens
atcttggtttctatt

SEQ ID NO: 1164416 - DNA, 15 bp, Homo sapiens
aatcttggtttctat

SEQ ID NO: 1164417 - DNA, 15 bp, Homo sapiens
gaatcttggtttcta

SEQ ID NO: 1164418 - DNA, 15 bp, Homo sapiens
ggaatcttggtttct

SEQ ID NO: 1164419 - DNA, 15 bp, Homo sapiens
aggaatcttggtttc

SEQ ID NO: 1164420 - DNA, 15 bp, Homo sapiens
caggaatcttggttt

SEQ ID NO: 1164421 - DNA, 15 bp, Homo sapiens
tcaggaatcttggtt

SEQ ID NO: 1164422 - DNA, 15 bp, Homo sapiens
ttcaggaatcttggt

SEQ ID NO: 1164423 - DNA, 15 bp, Homo sapiens
attcaggaatcttgg

SEQ ID NO: 1164424 - DNA, 15 bp, Homo sapiens
aattcaggaatcttg

SEQ ID NO: 1164425 - DNA, 15 bp, Homo sapiens
taattcaggaatctt

SEQ ID NO: 1164426 - DNA, 15 bp, Homo sapiens
gtaattcaggaatct

SEQ ID NO: 1164427 - DNA, 15 bp, Homo sapiens
agtaattcaggaatc

SEQ ID NO: 1164428 - DNA, 15 bp, Homo sapiens
gagtaattcaggaat

SEQ ID NO: 1164429 - DNA, 15 bp, Homo sapiens
agagtaattcaggaa

SEQ ID NO: 1164430 - DNA, 15 bp, Homo sapiens
tagagtaattcagga

SEQ ID NO: 1164431 - DNA, 15 bp, Homo sapiens
ttagagtaattcagg

SEQ ID NO: 1164432 - DNA, 15 bp, Homo sapiens
attagagtaattcag

SEQ ID NO: 1164433 - DNA, 15 bp, Homo sapiens
aattagagtaattca

SEQ ID NO: 1164434 - DNA, 15 bp, Homo sapiens
taattagagtaattc

SEQ ID NO: 1164435 - DNA, 15 bp, Homo sapiens
ttaattagagtaatt

SEQ ID NO: 1164436 - DNA, 15 bp, Homo sapiens
tttaattagagtaat

SEQ ID NO: 1164437 - DNA, 15 bp, Homo sapiens
atttaattagagtaa

SEQ ID NO: 1164438 - DNA, 15 bp, Homo sapiens
gatttaattagagta

SEQ ID NO: 1164439 - DNA, 15 bp, Homo sapiens
tgatttaattagagt

SEQ ID NO: 1164440 - DNA, 15 bp, Homo sapiens
atgatttaattagag

SEQ ID NO: 1164441 - DNA, 15 bp, Homo sapiens
gatgatttaattaga

SEQ ID NO: 1164442 - DNA, 15 bp, Homo sapiens
agatgatttaattag

SEQ ID NO: 1164443 - DNA, 15 bp, Homo sapiens
gagatgatttaatta

SEQ ID NO: 1164444 - DNA, 15 bp, Homo sapiens
agagatgatttaatt

SEQ ID NO: 1164445 - DNA, 15 bp, Homo sapiens
cagagatgatttaat

SEQ ID NO: 1164446 - DNA, 15 bp, Homo sapiens
ccagagatgatttaa

SEQ ID NO: 1164447 - DNA, 15 bp, Homo sapiens
tccagagatgattta

SEQ ID NO: 1164448 - DNA, 15 bp, Homo sapiens
ctccagagatgattt

SEQ ID NO: 1164449 - DNA, 15 bp, Homo sapiens
actccagagatgatt

SEQ ID NO: 1164450 - DNA, 15 bp, Homo sapiens
cactccagagatgat

SEQ ID NO: 1164451 - DNA, 15 bp, Homo sapiens
ccactccagagatga

SEQ ID NO: 1164452 - DNA, 15 bp, Homo sapiens
cccactccagagatg

SEQ ID NO: 1164453 - DNA, 15 bp, Homo sapiens
tcccactccagagat

SEQ ID NO: 1164454 - DNA, 15 bp, Homo sapiens
ttcccactccagaga

SEQ ID NO: 1164455 - DNA, 15 bp, Homo sapiens
tttcccactccagag

SEQ ID NO: 1164456 - DNA, 15 bp, Homo sapiens
ctttcccactccaga

SEQ ID NO: 1164457 - DNA, 15 bp, Homo sapiens
cctttcccactccag

SEQ ID NO: 1164458 - DNA, 15 bp, Homo sapiens
gcctttcccactcca

SEQ ID NO: 1164459 - DNA, 15 bp, Homo sapiens
gtgcctttcccactc

SEQ ID NO: 1164460 - DNA, 15 bp, Homo sapiens
tgtgcctttcccact

SEQ ID NO: 1164461 - DNA, 15 bp, Homo sapiens
ttgtgcctttcccac

SEQ ID NO: 1164462 - DNA, 15 bp, Homo sapiens
gttgtgcctttccca

SEQ ID NO: 1164463 - DNA, 15 bp, Homo sapiens
tgttgtgcctttccc

SEQ ID NO: 1164464 - DNA, 15 bp, Homo sapiens
ttgttgtgcctttcc

SEQ ID NO: 1164465 - DNA, 15 bp, Homo sapiens
tttgttgtgcctttc

SEQ ID NO: 1164466 - DNA, 15 bp, Homo sapiens
ttttgttgtgccttt

SEQ ID NO: 1164467 - DNA, 15 bp, Homo sapiens
attttgttgtgcctt

SEQ ID NO: 1164468 - DNA, 15 bp, Homo sapiens
cattttgttgtgcct

SEQ ID NO: 1164469 - DNA, 15 bp, Homo sapiens
gcattttgttgtgcc

SEQ ID NO: 1164470 - DNA, 15 bp, Homo sapiens
agcattttgttgtgc

SEQ ID NO: 1164471 - DNA, 15 bp, Homo sapiens
aagcattttgttgtg

SEQ ID NO: 1164472 - DNA, 15 bp, Homo sapiens
caagcattttgttgt

SEQ ID NO: 1164473 - DNA, 15 bp, Homo sapiens
ccaagcattttgttg

SEQ ID NO: 1164474 - DNA, 15 bp, Homo sapiens
accaagcattttgtt

SEQ ID NO: 1164475 - DNA, 15 bp, Homo sapiens
taccaagcattttgt

SEQ ID NO: 1164476 - DNA, 15 bp, Homo sapiens
ataccaagcattttg

SEQ ID NO: 1164477 - DNA, 15 bp, Homo sapiens
cataccaagcatttt

SEQ ID NO: 1164478 - DNA, 15 bp, Homo sapiens
acataccaagcattt

SEQ ID NO: 1164479 - DNA, 15 bp, Homo sapiens
aacataccaagcatt

SEQ ID NO: 1164480 - DNA, 15 bp, Homo sapiens
aaacataccaagcat

SEQ ID NO: 1164481 - DNA, 15 bp, Homo sapiens
gaaacataccaagca

SEQ ID NO: 1164482 - DNA, 15 bp, Homo sapiens
tgaaacataccaagc

SEQ ID NO: 1164483 - DNA, 15 bp, Homo sapiens
atgaaacataccaag

SEQ ID NO: 1164484 - DNA, 15 bp, Homo sapiens
catgaaacataccaa

SEQ ID NO: 1164485 - DNA, 15 bp, Homo sapiens
tcatgaaacatacca

SEQ ID NO: 1164486 - DNA, 15 bp, Homo sapiens
ctcatgaaacatacc

SEQ ID NO: 1164487 - DNA, 15 bp, Homo sapiens
tctcatgaaacatac

SEQ ID NO: 1164488 - DNA, 15 bp, Homo sapiens
ttctcatgaaacata

SEQ ID NO: 1164489 - DNA, 15 bp, Homo sapiens
cttctcatgaaacat

SEQ ID NO: 1164490 - DNA, 15 bp, Homo sapiens
gcttctcatgaaaca

SEQ ID NO: 1164491 - DNA, 15 bp, Homo sapiens
ggcttctcatgaaac

SEQ ID NO: 1164492 - DNA, 15 bp, Homo sapiens
gggcttctcatgaaa

SEQ ID NO: 1164493 - DNA, 15 bp, Homo sapiens
agggcttctcatgaa

SEQ ID NO: 1164494 - DNA, 15 bp, Homo sapiens
cagggcttctcatga

SEQ ID NO: 1164495 - DNA, 15 bp, Homo sapiens
gcagggcttctcatg

SEQ ID NO: 1164496 - DNA, 15 bp, Homo sapiens
agcagggcttctcat

SEQ ID NO: 1164497 - DNA, 15 bp, Homo sapiens
cagcagggcttctca

SEQ ID NO: 1164498 - DNA, 15 bp, Homo sapiens
gcagcagggcttctc

SEQ ID NO: 1164499 - DNA, 15 bp, Homo sapiens
agcagcagggcttct

SEQ ID NO: 1164500 - DNA, 15 bp, Homo sapiens
aagcagcagggcttc

SEQ ID NO: 1164501 - DNA, 15 bp, Homo sapiens
gaagcagcagggctt

SEQ ID NO: 1164502 - DNA, 15 bp, Homo sapiens
agaagcagcagggct

SEQ ID NO: 1164503 - DNA, 15 bp, Homo sapiens
cagaagcagcagggc

SEQ ID NO: 1164504 - DNA, 15 bp, Homo sapiens
gcagaagcagcaggg

SEQ ID NO: 1164505 - DNA, 15 bp, Homo sapiens
ggcagaagcagcagg

SEQ ID NO: 1164506 - DNA, 15 bp, Homo sapiens
gggcagaagcagcag

SEQ ID NO: 1164507 - DNA, 15 bp, Homo sapiens
tgggcagaagcagca

SEQ ID NO: 1164508 - DNA, 15 bp, Homo sapiens
gtgggcagaagcagc

SEQ ID NO: 1164509 - DNA, 15 bp, Homo sapiens
ggtgggcagaagcag

SEQ ID NO: 1164510 - DNA, 15 bp, Homo sapiens
tggtgggcagaagca

SEQ ID NO: 1164511 - DNA, 15 bp, Homo sapiens
gtggtgggcagaagc

SEQ ID NO: 1164512 - DNA, 15 bp, Homo sapiens
agtggtgggcagaag

SEQ ID NO: 1164513 - DNA, 15 bp, Homo sapiens
gagtggtgggcagaa

SEQ ID NO: 1164514 - DNA, 15 bp, Homo sapiens
cgagtggtgggcaga

SEQ ID NO: 1164515 - DNA, 15 bp, Homo sapiens
gcgagtggtgggcag

SEQ ID NO: 1164516 - DNA, 15 bp, Homo sapiens
ggcgagtggtgggca

SEQ ID NO: 1164517 - DNA, 15 bp, Homo sapiens
gggcgagtggtgggc

SEQ ID NO: 1164518 - DNA, 15 bp, Homo sapiens
cgggcgagtggtggg

SEQ ID NO: 1164519 - DNA, 15 bp, Homo sapiens
gcgggcgagtggtgg

SEQ ID NO: 1164520 - DNA, 15 bp, Homo sapiens
ggcgggcgagtggtg

SEQ ID NO: 1164521 - DNA, 15 bp, Homo sapiens
gggcgggcgagtggt

SEQ ID NO: 1164522 - DNA, 15 bp, Homo sapiens
ggggcgggcgagtgg

SEQ ID NO: 1164523 - DNA, 15 bp, Homo sapiens
gggggcgggcgagtg

SEQ ID NO: 1164524 - DNA, 15 bp, Homo sapiens
tgggggcgggcgagt

SEQ ID NO: 1164525 - DNA, 15 bp, Homo sapiens
atgggggcgggcgag

SEQ ID NO: 1164526 - DNA, 15 bp, Homo sapiens
gatgggggcgggcga

SEQ ID NO: 1164527 - DNA, 15 bp, Homo sapiens
ggatgggggcgggcg

SEQ ID NO: 1164528 - DNA, 15 bp, Homo sapiens
gggatgggggcgggc

SEQ ID NO: 1164529 - DNA, 15 bp, Homo sapiens
tgggatgggggcggg

SEQ ID NO: 1164530 - DNA, 15 bp, Homo sapiens
ctgggatgggggcgg

SEQ ID NO: 1164531 - DNA, 15 bp, Homo sapiens
cctgggatgggggcg

SEQ ID NO: 1164532 - DNA, 15 bp, Homo sapiens
gcctgggatgggggc

SEQ ID NO: 1164533 - DNA, 15 bp, Homo sapiens
tgcctgggatggggg

SEQ ID NO: 1164534 - DNA, 15 bp, Homo sapiens
atgcctgggatgggg

SEQ ID NO: 1164535 - DNA, 15 bp, Homo sapiens
aatgcctgggatggg

SEQ ID NO: 1164536 - DNA, 15 bp, Homo sapiens
aaatgcctgggatgg

SEQ ID NO: 1164537 - DNA, 15 bp, Homo sapiens
aaaatgcctgggatg

SEQ ID NO: 1164538 - DNA, 15 bp, Homo sapiens
gaaaatgcctgggat

SEQ ID NO: 1164539 - DNA, 15 bp, Homo sapiens
agaaaatgcctggga

SEQ ID NO: 1164540 - DNA, 15 bp, Homo sapiens
cagaaaatgcctggg

SEQ ID NO: 1164541 - DNA, 15 bp, Homo sapiens
gcagaaaatgcctgg

SEQ ID NO: 1164542 - DNA, 15 bp, Homo sapiens
tgcagaaaatgcctg

SEQ ID NO: 1164543 - DNA, 15 bp, Homo sapiens
gtgcagaaaatgcct

SEQ ID NO: 1164544 - DNA, 15 bp, Homo sapiens
tgtgcagaaaatgcc

SEQ ID NO: 1164545 - DNA, 15 bp, Homo sapiens
gatgtgcagaaaatg

SEQ ID NO: 1164546 - DNA, 15 bp, Homo sapiens
cgatgtgcagaaaat

SEQ ID NO: 1164547 - DNA, 15 bp, Homo sapiens
gcgatgtgcagaaaa

SEQ ID NO: 1164548 - DNA, 15 bp, Homo sapiens
tgcgatgtgcagaaa

SEQ ID NO: 1164549 - DNA, 15 bp, Homo sapiens
ctgcgatgtgcagaa

SEQ ID NO: 1164550 - DNA, 15 bp, Homo sapiens
actgcgatgtgcaga

SEQ ID NO: 1164551 - DNA, 15 bp, Homo sapiens
cactgcgatgtgcag

SEQ ID NO: 1164552 - DNA, 15 bp, Homo sapiens
tcactgcgatgtgca

SEQ ID NO: 1164553 - DNA, 15 bp, Homo sapiens
ctcactgcgatgtgc

SEQ ID NO: 1164554 - DNA, 15 bp, Homo sapiens
actcactgcgatgtg

SEQ ID NO: 1164555 - DNA, 15 bp, Homo sapiens
cactcactgcgatgt

SEQ ID NO: 1164556 - DNA, 15 bp, Homo sapiens
gcactcactgcgatg

SEQ ID NO: 1164557 - DNA, 15 bp, Homo sapiens
agcactcactgcgat

SEQ ID NO: 1164558 - DNA, 15 bp, Homo sapiens
gagcactcactgcga

SEQ ID NO: 1164559 - DNA, 15 bp, Homo sapiens
ggagcactcactgcg

SEQ ID NO: 1164560 - DNA, 15 bp, Homo sapiens
aggagcactcactgc

SEQ ID NO: 1164561 - DNA, 15 bp, Homo sapiens
gaggagcactcactg

SEQ ID NO: 1164562 - DNA, 15 bp, Homo sapiens
ggaggagcactcact

SEQ ID NO: 1164563 - DNA, 15 bp, Homo sapiens
tggaggagcactcac

SEQ ID NO: 1164564 - DNA, 15 bp, Homo sapiens
ctggaggagcactca

SEQ ID NO: 1164565 - DNA, 15 bp, Homo sapiens
cctggaggagcactc

SEQ ID NO: 1164566 - DNA, 15 bp, Homo sapiens
ccctggaggagcact

SEQ ID NO: 1164567 - DNA, 15 bp, Homo sapiens
cccctggaggagcac

SEQ ID NO: 1164568 - DNA, 15 bp, Homo sapiens
acccctggaggagca

SEQ ID NO: 1164569 - DNA, 15 bp, Homo sapiens
tacccctggaggagc

SEQ ID NO: 1164570 - DNA, 15 bp, Homo sapiens
ctacccctggaggag

SEQ ID NO: 1164571 - DNA, 15 bp, Homo sapiens
cctacccctggagga

SEQ ID NO: 1164572 - DNA, 15 bp, Homo sapiens
ccctacccctggagg

SEQ ID NO: 1164573 - DNA, 15 bp, Homo sapiens
accctacccctggag

SEQ ID NO: 1164574 - DNA, 15 bp, Homo sapiens
caccctacccctgga

SEQ ID NO: 1164575 - DNA, 15 bp, Homo sapiens
ccaccctacccctgg

SEQ ID NO: 1164576 - DNA, 15 bp, Homo sapiens
cccaccctacccctg

SEQ ID NO: 1164577 - DNA, 15 bp, Homo sapiens
tcccaccctacccct

SEQ ID NO: 1164578 - DNA, 15 bp, Homo sapiens
atcccaccctacccc

SEQ ID NO: 1164579 - DNA, 15 bp, Homo sapiens
gatcccaccctaccc

SEQ ID NO: 1164580 - DNA, 15 bp, Homo sapiens
tgatcccaccctacc

SEQ ID NO: 1164581 - DNA, 15 bp, Homo sapiens
gtgatcccaccctac

SEQ ID NO: 1164582 - DNA, 15 bp, Homo sapiens
ggtgatcccacccta

SEQ ID NO: 1164583 - DNA, 15 bp, Homo sapiens
tggtgatcccaccct

SEQ ID NO: 1164584 - DNA, 15 bp, Homo sapiens
ctggtgatcccaccc

SEQ ID NO: 1164585 - DNA, 15 bp, Homo sapiens
tctggtgatcccacc

SEQ ID NO: 1164586 - DNA, 15 bp, Homo sapiens
atctggtgatcccac

SEQ ID NO: 1164587 - DNA, 15 bp, Homo sapiens
catctggtgatccca

SEQ ID NO: 1164588 - DNA, 15 bp, Homo sapiens
ccatctggtgatccc

SEQ ID NO: 1164589 - DNA, 15 bp, Homo sapiens
accatctggtgatcc

SEQ ID NO: 1164590 - DNA, 15 bp, Homo sapiens
caccatctggtgatc

SEQ ID NO: 1164591 - DNA, 15 bp, Homo sapiens
tcaccatctggtgat

SEQ ID NO: 1164592 - DNA, 15 bp, Homo sapiens
ttcaccatctggtga

SEQ ID NO: 1164593 - DNA, 15 bp, Homo sapiens
cttcaccatctggtg

SEQ ID NO: 1164594 - DNA, 15 bp, Homo sapiens
ccttcaccatctggt

SEQ ID NO: 1164595 - DNA, 15 bp, Homo sapiens
accttcaccatctgg

SEQ ID NO: 1164596 - DNA, 15 bp, Homo sapiens
caccttcaccatctg

SEQ ID NO: 1164597 - DNA, 15 bp, Homo sapiens
ccaccttcaccatct

SEQ ID NO: 1164598 - DNA, 15 bp, Homo sapiens
accaccttcaccatc

SEQ ID NO: 1164599 - DNA, 15 bp, Homo sapiens
taccaccttcaccat

SEQ ID NO: 1164600 - DNA, 15 bp, Homo sapiens
ataccaccttcacca

SEQ ID NO: 1164601 - DNA, 15 bp, Homo sapiens
gataccaccttcacc

SEQ ID NO: 1164602 - DNA, 15 bp, Homo sapiens
ggataccaccttcac

SEQ ID NO: 1164603 - DNA, 15 bp, Homo sapiens
aggataccaccttca

SEQ ID NO: 1164604 - DNA, 15 bp, Homo sapiens
taggataccaccttc

SEQ ID NO: 1164605 - DNA, 15 bp, Homo sapiens
ataggataccacctt

SEQ ID NO: 1164606 - DNA, 15 bp, Homo sapiens
gataggataccacct

SEQ ID NO: 1164607 - DNA, 15 bp, Homo sapiens
tgataggataccacc

SEQ ID NO: 1164608 - DNA, 15 bp, Homo sapiens
gtgataggataccac

SEQ ID NO: 1164609 - DNA, 15 bp, Homo sapiens
tgtgataggatacca

SEQ ID NO: 1164610 - DNA, 15 bp, Homo sapiens
ctgtgataggatacc

SEQ ID NO: 1164611 - DNA, 15 bp, Homo sapiens
cctgtgataggatac

SEQ ID NO: 1164612 - DNA, 15 bp, Homo sapiens
tcctgtgataggata

SEQ ID NO: 1164613 - DNA, 15 bp, Homo sapiens
ctcctgtgataggat

SEQ ID NO: 1164614 - DNA, 15 bp, Homo sapiens
tctcctgtgatagga

SEQ ID NO: 1164615 - DNA, 15 bp, Homo sapiens
atctcctgtgatagg

SEQ ID NO: 1164616 - DNA, 15 bp, Homo sapiens
catctcctgtgatag

SEQ ID NO: 1164617 - DNA, 15 bp, Homo sapiens
ccatctcctgtgata

SEQ ID NO: 1164618 - DNA, 15 bp, Homo sapiens
accatctcctgtgat

SEQ ID NO: 1164619 - DNA, 15 bp, Homo sapiens
aaccatctcctgtga

SEQ ID NO: 1164620 - DNA, 15 bp, Homo sapiens
aaaccatctcctgtg

SEQ ID NO: 1164621 - DNA, 15 bp, Homo sapiens
aaaaccatctcctgt

SEQ ID NO: 1164622 - DNA, 15 bp, Homo sapiens
taaaaccatctcctg

SEQ ID NO: 1164623 - DNA, 15 bp, Homo sapiens
ttaaaaccatctcct

SEQ ID NO: 1164624 - DNA, 15 bp, Homo sapiens
gttaaaaccatctcc

SEQ ID NO: 1164625 - DNA, 15 bp, Homo sapiens
cgttaaaaccatctc

SEQ ID NO: 1164626 - DNA, 15 bp, Homo sapiens
tcgttaaaaccatct

SEQ ID NO: 1164627 - DNA, 15 bp, Homo sapiens
ctcgttaaaaccatc

SEQ ID NO: 1164628 - DNA, 15 bp, Homo sapiens
tctcgttaaaaccat

SEQ ID NO: 1164629 - DNA, 15 bp, Homo sapiens
atctcgttaaaacca

SEQ ID NO: 1164630 - DNA, 15 bp, Homo sapiens
catctcgttaaaacc

SEQ ID NO: 1164631 - DNA, 15 bp, Homo sapiens
acatctcgttaaaac

SEQ ID NO: 1164632 - DNA, 15 bp, Homo sapiens
aacatctcgttaaaa

SEQ ID NO: 1164633 - DNA, 15 bp, Homo sapiens
taacatctcgttaaa

SEQ ID NO: 1164634 - DNA, 15 bp, Homo sapiens
ataacatctcgttaa

SEQ ID NO: 1164635 - DNA, 15 bp, Homo sapiens
cataacatctcgtta

SEQ ID NO: 1164636 - DNA, 15 bp, Homo sapiens
acataacatctcgtt

SEQ ID NO: 1164637 - DNA, 15 bp, Homo sapiens
tacataacatctcgt

SEQ ID NO: 1164638 - DNA, 15 bp, Homo sapiens
atacataacatctcg

SEQ ID NO: 1164639 - DNA, 15 bp, Homo sapiens
aatacataacatctc

SEQ ID NO: 1164640 - DNA, 15 bp, Homo sapiens
aaatacataacatct

SEQ ID NO: 1164641 - DNA, 15 bp, Homo sapiens
aaaatacataacatc

SEQ ID NO: 1164642 - DNA, 15 bp, Homo sapiens
taaaatacataacat

SEQ ID NO: 1164643 - DNA, 15 bp, Homo sapiens
ttaaaatacataaca

SEQ ID NO: 1164644 - DNA, 15 bp, Homo sapiens
cttaaaatacataac

SEQ ID NO: 1164645 - DNA, 15 bp, Homo sapiens
acttaaaatacataa

SEQ ID NO: 1164646 - DNA, 15 bp, Homo sapiens
tacttaaaatacata

SEQ ID NO: 1164647 - DNA, 15 bp, Homo sapiens
ttacttaaaatacat

SEQ ID NO: 1164648 - DNA, 15 bp, Homo sapiens
gttacttaaaataca

SEQ ID NO: 1164649 - DNA, 15 bp, Homo sapiens
tgttacttaaaatac

SEQ ID NO: 1164650 - DNA, 15 bp, Homo sapiens
atgttacttaaaata

SEQ ID NO: 1164651 - DNA, 15 bp, Homo sapiens
catgttacttaaaat

SEQ ID NO: 1164652 - DNA, 15 bp, Homo sapiens
ccatgttacttaaaa

SEQ ID NO: 1164653 - DNA, 15 bp, Homo sapiens
accatgttacttaaa

SEQ ID NO: 1164654 - DNA, 15 bp, Homo sapiens
aaccatgttacttaa

SEQ ID NO: 1164655 - DNA, 15 bp, Homo sapiens
gaaccatgttactta

SEQ ID NO: 1164656 - DNA, 15 bp, Homo sapiens
ggaaccatgttactt

SEQ ID NO: 1164657 - DNA, 15 bp, Homo sapiens
aggaaccatgttact

SEQ ID NO: 1164658 - DNA, 15 bp, Homo sapiens
taggaaccatgttac

SEQ ID NO: 1164659 - DNA, 15 bp, Homo sapiens
ataggaaccatgtta

SEQ ID NO: 1164660 - DNA, 15 bp, Homo sapiens
aataggaaccatgtt

SEQ ID NO: 1164661 - DNA, 15 bp, Homo sapiens
aaataggaaccatgt

SEQ ID NO: 1164662 - DNA, 15 bp, Homo sapiens
caaataggaaccatg

SEQ ID NO: 1164663 - DNA, 15 bp, Homo sapiens
tcaaataggaaccat

SEQ ID NO: 1164664 - DNA, 15 bp, Homo sapiens
ttcaaataggaacca

SEQ ID NO: 1164665 - DNA, 15 bp, Homo sapiens
attcaaataggaacc

SEQ ID NO: 1164666 - DNA, 15 bp, Homo sapiens
cattcaaataggaac

SEQ ID NO: 1164667 - DNA, 15 bp, Homo sapiens
tcattcaaataggaa

SEQ ID NO: 1164668 - DNA, 15 bp, Homo sapiens
ttcattcaaatagga

SEQ ID NO: 1164669 - DNA, 15 bp, Homo sapiens
tttcattcaaatagg

SEQ ID NO: 1164670 - DNA, 15 bp, Homo sapiens
atttcattcaaatag

SEQ ID NO: 1164671 - DNA, 15 bp, Homo sapiens
aatttcattcaaata

SEQ ID NO: 1164672 - DNA, 15 bp, Homo sapiens
taatttcattcaaat

SEQ ID NO: 1164673 - DNA, 15 bp, Homo sapiens
ttaatttcattcaaa

SEQ ID NO: 1164674 - DNA, 15 bp, Homo sapiens
tttaatttcattcaa

SEQ ID NO: 1164675 - DNA, 15 bp, Homo sapiens
ctttaatttcattca

SEQ ID NO: 1164676 - DNA, 15 bp, Homo sapiens
tctttaatttcattc

SEQ ID NO: 1164677 - DNA, 15 bp, Homo sapiens
atctttaatttcatt

SEQ ID NO: 1164678 - DNA, 15 bp, Homo sapiens
tatctttaatttcat

SEQ ID NO: 1164679 - DNA, 15 bp, Homo sapiens
ttatctttaatttca

SEQ ID NO: 1164680 - DNA, 15 bp, Homo sapiens
attatctttaatttc

SEQ ID NO: 1164681 - DNA, 15 bp, Homo sapiens
aattatctttaattt

SEQ ID NO: 1164682 - DNA, 15 bp, Homo sapiens
gaattatctttaatt

SEQ ID NO: 1164683 - DNA, 15 bp, Homo sapiens
agaattatctttaat

SEQ ID NO: 1164684 - DNA, 15 bp, Homo sapiens
tagaattatctttaa

SEQ ID NO: 1164685 - DNA, 15 bp, Homo sapiens
atagaattatcttta

SEQ ID NO: 1164686 - DNA, 15 bp, Homo sapiens
gatagaattatcttt

SEQ ID NO: 1164687 - DNA, 15 bp, Homo sapiens
ggatagaattatctt

SEQ ID NO: 1164688 - DNA, 15 bp, Homo sapiens
gggatagaattatct

SEQ ID NO: 1164689 - DNA, 15 bp, Homo sapiens
tgggatagaattatc

SEQ ID NO: 1164690 - DNA, 15 bp, Homo sapiens
ctgggatagaattat

SEQ ID NO: 1164691 - DNA, 15 bp, Homo sapiens
actgggatagaatta

SEQ ID NO: 1164692 - DNA, 15 bp, Homo sapiens
gactgggatagaatt

SEQ ID NO: 1164693 - DNA, 15 bp, Homo sapiens
agactgggatagaat

SEQ ID NO: 1164694 - DNA, 15 bp, Homo sapiens
cagactgggatagaa

SEQ ID NO: 1164695 - DNA, 15 bp, Homo sapiens
acagactgggataga

SEQ ID NO: 1164696 - DNA, 15 bp, Homo sapiens
cacagactgggatag

SEQ ID NO: 1164697 - DNA, 15 bp, Homo sapiens
acacagactgggata

SEQ ID NO: 1164698 - DNA, 15 bp, Homo sapiens
gacacagactgggat

SEQ ID NO: 1164699 - DNA, 15 bp, Homo sapiens
tgacacagactggga

SEQ ID NO: 1164700 - DNA, 15 bp, Homo sapiens
atgacacagactggg

SEQ ID NO: 1164701 - DNA, 15 bp, Homo sapiens
catgacacagactgg

SEQ ID NO: 1164702 - DNA, 15 bp, Homo sapiens
ccatgacacagactg

SEQ ID NO: 1164703 - DNA, 15 bp, Homo sapiens
cccatgacacagact

SEQ ID NO: 1164704 - DNA, 15 bp, Homo sapiens
tcccatgacacagac

SEQ ID NO: 1164705 - DNA, 15 bp, Homo sapiens
ttcccatgacacaga

SEQ ID NO: 1164706 - DNA, 15 bp, Homo sapiens
tttcccatgacacag

SEQ ID NO: 1164707 - DNA, 15 bp, Homo sapiens
ttttcccatgacaca

SEQ ID NO: 1164708 - DNA, 15 bp, Homo sapiens
tttttcccatgacac

SEQ ID NO: 1164709 - DNA, 15 bp, Homo sapiens
gtttttcccatgaca

SEQ ID NO: 1164710 - DNA, 15 bp, Homo sapiens
tgtttttcccatgac

SEQ ID NO: 1164711 - DNA, 15 bp, Homo sapiens
ctgtttttcccatga

SEQ ID NO: 1164712 - DNA, 15 bp, Homo sapiens
tctgtttttcccatg

SEQ ID NO: 1164713 - DNA, 15 bp, Homo sapiens
ttctgtttttcccat

SEQ ID NO: 1164714 - DNA, 15 bp, Homo sapiens
tttctgtttttccca

SEQ ID NO: 1164715 - DNA, 15 bp, Homo sapiens
atttctgtttttccc

SEQ ID NO: 1164716 - DNA, 15 bp, Homo sapiens
aatttctgtttttcc

SEQ ID NO: 1164717 - DNA, 15 bp, Homo sapiens
gaatttctgtttttc

SEQ ID NO: 1164718 - DNA, 15 bp, Homo sapiens
tgaatttctgttttt

SEQ ID NO: 1164719 - DNA, 15 bp, Homo sapiens
atgaatttctgtttt

SEQ ID NO: 1164720 - DNA, 15 bp, Homo sapiens
tatgaatttctgttt

SEQ ID NO: 1164721 - DNA, 15 bp, Homo sapiens
ctatgaatttctgtt

SEQ ID NO: 1164722 - DNA, 15 bp, Homo sapiens
actatgaatttctgt

SEQ ID NO: 1164723 - DNA, 15 bp, Homo sapiens
cactatgaatttctg

SEQ ID NO: 1164724 - DNA, 15 bp, Homo sapiens
ccactatgaatttct

SEQ ID NO: 1164725 - DNA, 15 bp, Homo sapiens
accactatgaatttc

SEQ ID NO: 1164726 - DNA, 15 bp, Homo sapiens
caccactatgaattt

SEQ ID NO: 1164727 - DNA, 15 bp, Homo sapiens
ccaccactatgaatt

SEQ ID NO: 1164728 - DNA, 15 bp, Homo sapiens
accaccactatgaat

SEQ ID NO: 1164729 - DNA, 15 bp, Homo sapiens
caccaccactatgaa

SEQ ID NO: 1164730 - DNA, 15 bp, Homo sapiens
ccaccaccactatga

SEQ ID NO: 1164731 - DNA, 15 bp, Homo sapiens
cccaccaccactatg

SEQ ID NO: 1164732 - DNA, 15 bp, Homo sapiens
ccccaccaccactat

SEQ ID NO: 1164733 - DNA, 15 bp, Homo sapiens
gccccaccaccacta

SEQ ID NO: 1164734 - DNA, 15 bp, Homo sapiens
tgccccaccaccact

SEQ ID NO: 1164735 - DNA, 15 bp, Homo sapiens
gtgccccaccaccac

SEQ ID NO: 1164736 - DNA, 15 bp, Homo sapiens
cgtgccccaccacca

SEQ ID NO: 1164737 - DNA, 15 bp, Homo sapiens
gcgtgccccaccacc

SEQ ID NO: 1164738 - DNA, 15 bp, Homo sapiens
agcgtgccccaccac

SEQ ID NO: 1164739 - DNA, 15 bp, Homo sapiens
cagcgtgccccacca

SEQ ID NO: 1164740 - DNA, 15 bp, Homo sapiens
ccagcgtgccccacc

SEQ ID NO: 1164741 - DNA, 15 bp, Homo sapiens
gccagcgtgccccac

SEQ ID NO: 1164742 - DNA, 15 bp, Homo sapiens
agccagcgtgcccca

SEQ ID NO: 1164743 - DNA, 15 bp, Homo sapiens
gagccagcgtgcccc

SEQ ID NO: 1164744 - DNA, 15 bp, Homo sapiens
tgagccagcgtgccc

SEQ ID NO: 1164745 - DNA, 15 bp, Homo sapiens
atgagccagcgtgcc

SEQ ID NO: 1164746 - DNA, 15 bp, Homo sapiens
catgagccagcgtgc

SEQ ID NO: 1164747 - DNA, 15 bp, Homo sapiens
gcatgagccagcgtg

SEQ ID NO: 1164748 - DNA, 15 bp, Homo sapiens
ggcatgagccagcgt

SEQ ID NO: 1164749 - DNA, 15 bp, Homo sapiens
aggcatgagccagcg

SEQ ID NO: 1164750 - DNA, 15 bp, Homo sapiens
taggcatgagccagc

SEQ ID NO: 1164751 - DNA, 15 bp, Homo sapiens
ataggcatgagccag

SEQ ID NO: 1164752 - DNA, 15 bp, Homo sapiens
agggattataggcat

SEQ ID NO: 1164753 - DNA, 15 bp, Homo sapiens
cagggattataggca

SEQ ID NO: 1164754 - DNA, 15 bp, Homo sapiens
gcagggattataggc

SEQ ID NO: 1164755 - DNA, 15 bp, Homo sapiens
tgcagggattatagg

SEQ ID NO: 1164756 - DNA, 15 bp, Homo sapiens
gtgcagggattatag

SEQ ID NO: 1164757 - DNA, 15 bp, Homo sapiens
agtgcagggattata

SEQ ID NO: 1164758 - DNA, 15 bp, Homo sapiens
aagtgcagggattat

SEQ ID NO: 1164759 - DNA, 15 bp, Homo sapiens
ctcccaaagtgcagg

SEQ ID NO: 1164760 - DNA, 15 bp, Homo sapiens
cctcccaaagtgcag

SEQ ID NO: 1164761 - DNA, 15 bp, Homo sapiens
gcctcccaaagtgca

SEQ ID NO: 1164762 - DNA, 15 bp, Homo sapiens
ccctcggcctcccaa

SEQ ID NO: 1164763 - DNA, 15 bp, Homo sapiens
cccctcggcctccca

SEQ ID NO: 1164764 - DNA, 15 bp, Homo sapiens
ccccctcggcctccc

SEQ ID NO: 1164765 - DNA, 15 bp, Homo sapiens
cccccctcggcctcc

SEQ ID NO: 1164766 - DNA, 15 bp, Homo sapiens
ccccccctcggcctc

SEQ ID NO: 1164767 - DNA, 15 bp, Homo sapiens
gccccccctcggcct

SEQ ID NO: 1164768 - DNA, 15 bp, Homo sapiens
tgccccccctcggcc

SEQ ID NO: 1164769 - DNA, 15 bp, Homo sapiens
ctgccccccctcggc

SEQ ID NO: 1164770 - DNA, 15 bp, Homo sapiens
tctgccccccctcgg

SEQ ID NO: 1164771 - DNA, 15 bp, Homo sapiens
atctgccccccctcg

SEQ ID NO: 1164772 - DNA, 15 bp, Homo sapiens
tatctgccccccctc

SEQ ID NO: 1164773 - DNA, 15 bp, Homo sapiens
ttatctgccccccct

SEQ ID NO: 1164774 - DNA, 15 bp, Homo sapiens
gttatctgccccccc

SEQ ID NO: 1164775 - DNA, 15 bp, Homo sapiens
agttatctgcccccc

SEQ ID NO: 1164776 - DNA, 15 bp, Homo sapiens
aagttatctgccccc

SEQ ID NO: 1164777 - DNA, 15 bp, Homo sapiens
caagttatctgcccc

SEQ ID NO: 1164778 - DNA, 15 bp, Homo sapiens
tcaagttatctgccc

SEQ ID NO: 1164779 - DNA, 15 bp, Homo sapiens
ctcaagttatctgcc

SEQ ID NO: 1164780 - DNA, 15 bp, Homo sapiens
cctcaagttatctgc

SEQ ID NO: 1164781 - DNA, 15 bp, Homo sapiens
acctcaagttatctg

SEQ ID NO: 1164782 - DNA, 15 bp, Homo sapiens
gacctcaagttatct

SEQ ID NO: 1164783 - DNA, 15 bp, Homo sapiens
tgacctcaagttatc

SEQ ID NO: 1164784 - DNA, 15 bp, Homo sapiens
ctgacctcaagttat

SEQ ID NO: 1164785 - DNA, 15 bp, Homo sapiens
cctgacctcaagtta

SEQ ID NO: 1164786 - DNA, 15 bp, Homo sapiens
tcctgacctcaagtt

SEQ ID NO: 1164787 - DNA, 15 bp, Homo sapiens
cgtgttgaccaggct

SEQ ID NO: 1164788 - DNA, 15 bp, Homo sapiens
ccgtgttgaccaggc

SEQ ID NO: 1164789 - DNA, 15 bp, Homo sapiens
accgtgttgaccagg

SEQ ID NO: 1164790 - DNA, 15 bp, Homo sapiens
caccgtgttgaccag

SEQ ID NO: 1164791 - DNA, 15 bp, Homo sapiens
tcaccgtgttgacca

SEQ ID NO: 1164792 - DNA, 15 bp, Homo sapiens
ttcaccgtgttgacc

SEQ ID NO: 1164793 - DNA, 15 bp, Homo sapiens
tttcaccgtgttgac

SEQ ID NO: 1164794 - DNA, 15 bp, Homo sapiens
gtttcaccgtgttga

SEQ ID NO: 1164795 - DNA, 15 bp, Homo sapiens
ggtttcaccgtgttg

SEQ ID NO: 1164796 - DNA, 15 bp, Homo sapiens
tttttagcagagaca

SEQ ID NO: 1164797 - DNA, 15 bp, Homo sapiens
ctttttgtattttta

SEQ ID NO: 1164798 - DNA, 15 bp, Homo sapiens
actttttgtattttt

SEQ ID NO: 1164799 - DNA, 15 bp, Homo sapiens
tactttttgtatttt

SEQ ID NO: 1164800 - DNA, 15 bp, Homo sapiens
ctactttttgtattt

SEQ ID NO: 1164801 - DNA, 15 bp, Homo sapiens
gctactttttgtatt

SEQ ID NO: 1164802 - DNA, 15 bp, Homo sapiens
tgctactttttgtat

SEQ ID NO: 1164803 - DNA, 15 bp, Homo sapiens
ctgctactttttgta

SEQ ID NO: 1164804 - DNA, 15 bp, Homo sapiens
cctgctactttttgt

SEQ ID NO: 1164805 - DNA, 15 bp, Homo sapiens
ccctgctactttttg

SEQ ID NO: 1164806 - DNA, 15 bp, Homo sapiens
tccctgctacttttt

SEQ ID NO: 1164807 - DNA, 15 bp, Homo sapiens
ctccctgctactttt

SEQ ID NO: 1164808 - DNA, 15 bp, Homo sapiens
actccctgctacttt

SEQ ID NO: 1164809 - DNA, 15 bp, Homo sapiens
cactccctgctactt

SEQ ID NO: 1164810 - DNA, 15 bp, Homo sapiens
ccactccctgctact

SEQ ID NO: 1164811 - DNA, 15 bp, Homo sapiens
accactccctgctac

SEQ ID NO: 1164812 - DNA, 15 bp, Homo sapiens
caccactccctgcta

SEQ ID NO: 1164813 - DNA, 15 bp, Homo sapiens
ccaccactccctgct

SEQ ID NO: 1164814 - DNA, 15 bp, Homo sapiens
accaccactccctgc

SEQ ID NO: 1164815 - DNA, 15 bp, Homo sapiens
caccaccactccctg

SEQ ID NO: 1164816 - DNA, 15 bp, Homo sapiens
ccaccaccactccct

SEQ ID NO: 1164817 - DNA, 15 bp, Homo sapiens
tcgattctcctgctt

SEQ ID NO: 1164818 - DNA, 15 bp, Homo sapiens
atcgattctcctgct

SEQ ID NO: 1164819 - DNA, 15 bp, Homo sapiens
aatcgattctcctgc

SEQ ID NO: 1164820 - DNA, 15 bp, Homo sapiens
caatcgattctcctg

SEQ ID NO: 1164821 - DNA, 15 bp, Homo sapiens
tcaatcgattctcct

SEQ ID NO: 1164822 - DNA, 15 bp, Homo sapiens
ttcaatcgattctcc

SEQ ID NO: 1164823 - DNA, 15 bp, Homo sapiens
gttcaatcgattctc

SEQ ID NO: 1164824 - DNA, 15 bp, Homo sapiens
ggttcaatcgattct

SEQ ID NO: 1164825 - DNA, 15 bp, Homo sapiens
gggttcaatcgattc

SEQ ID NO: 1164826 - DNA, 15 bp, Homo sapiens
tgggttcaatcgatt

SEQ ID NO: 1164827 - DNA, 15 bp, Homo sapiens
ctgggttcaatcgat

SEQ ID NO: 1164828 - DNA, 15 bp, Homo sapiens
cctgggttcaatcga

SEQ ID NO: 1164829 - DNA, 15 bp, Homo sapiens
tcctgggttcaatcg

SEQ ID NO: 1164830 - DNA, 15 bp, Homo sapiens
ctcctgggttcaatc

SEQ ID NO: 1164831 - DNA, 15 bp, Homo sapiens
gactcactacaacct

SEQ ID NO: 1164832 - DNA, 15 bp, Homo sapiens
tgactcactacaacc

SEQ ID NO: 1164833 - DNA, 15 bp, Homo sapiens
ttgactcactacaac

SEQ ID NO: 1164834 - DNA, 15 bp, Homo sapiens
cttgactcactacaa

SEQ ID NO: 1164835 - DNA, 15 bp, Homo sapiens
tcttgactcactaca

SEQ ID NO: 1164836 - DNA, 15 bp, Homo sapiens
atcttgactcactac

SEQ ID NO: 1164837 - DNA, 15 bp, Homo sapiens
gatcttgactcacta

SEQ ID NO: 1164838 - DNA, 15 bp, Homo sapiens
tgatcttgactcact

SEQ ID NO: 1164839 - DNA, 15 bp, Homo sapiens
atgatcttgactcac

SEQ ID NO: 1164840 - DNA, 15 bp, Homo sapiens
gatgatcttgactca

SEQ ID NO: 1164841 - DNA, 15 bp, Homo sapiens
ggatgatcttgactc

SEQ ID NO: 1164842 - DNA, 15 bp, Homo sapiens
aggatgatcttgact

SEQ ID NO: 1164843 - DNA, 15 bp, Homo sapiens
taggatgatcttgac

SEQ ID NO: 1164844 - DNA, 15 bp, Homo sapiens
gtaggatgatcttga

SEQ ID NO: 1164845 - DNA, 15 bp, Homo sapiens
agtaggatgatcttg

SEQ ID NO: 1164846 - DNA, 15 bp, Homo sapiens
gtgcagtaggatgat

SEQ ID NO: 1164847 - DNA, 15 bp, Homo sapiens
agtgcagtaggatga

SEQ ID NO: 1164848 - DNA, 15 bp, Homo sapiens
gagtgcagtaggatg

SEQ ID NO: 1164849 - DNA, 15 bp, Homo sapiens
ggagtgcagtaggat

SEQ ID NO: 1164850 - DNA, 15 bp, Homo sapiens
tggagtgcagtagga

SEQ ID NO: 1164851 - DNA, 15 bp, Homo sapiens
ctggagtgcagtagg

SEQ ID NO: 1164852 - DNA, 15 bp, Homo sapiens
actggagtgcagtag

SEQ ID NO: 1164853 - DNA, 15 bp, Homo sapiens
gactggagtgcagta

SEQ ID NO: 1164854 - DNA, 15 bp, Homo sapiens
gccagactggagtgc

SEQ ID NO: 1164855 - DNA, 15 bp, Homo sapiens
tgccagactggagtg

SEQ ID NO: 1164856 - DNA, 15 bp, Homo sapiens
ttgccagactggagt

SEQ ID NO: 1164857 - DNA, 15 bp, Homo sapiens
tttgccagactggag

SEQ ID NO: 1164858 - DNA, 15 bp, Homo sapiens
gtttgccagactgga

SEQ ID NO: 1164859 - DNA, 15 bp, Homo sapiens
tgtttgccagactgg

SEQ ID NO: 1164860 - DNA, 15 bp, Homo sapiens
ctgtttgccagactg

SEQ ID NO: 1164861 - DNA, 15 bp, Homo sapiens
tctgtttgccagact

SEQ ID NO: 1164862 - DNA, 15 bp, Homo sapiens
ctctgtttgccagac

SEQ ID NO: 1164863 - DNA, 15 bp, Homo sapiens
gctctgtttgccaga

SEQ ID NO: 1164864 - DNA, 15 bp, Homo sapiens
tgctctgtttgccag

SEQ ID NO: 1164865 - DNA, 15 bp, Homo sapiens
ttgctctgtttgcca

SEQ ID NO: 1164866 - DNA, 15 bp, Homo sapiens
cttgctctgtttgcc

SEQ ID NO: 1164867 - DNA, 15 bp, Homo sapiens
tcttgctctgtttgc

SEQ ID NO: 1164868 - DNA, 15 bp, Homo sapiens
gtcttgctctgtttg

SEQ ID NO: 1164869 - DNA, 15 bp, Homo sapiens
aaggagtcttgctct

SEQ ID NO: 1164870 - DNA, 15 bp, Homo sapiens
gaaggagtcttgctc

SEQ ID NO: 1164871 - DNA, 15 bp, Homo sapiens
agaaggagtcttgct

SEQ ID NO: 1164872 - DNA, 15 bp, Homo sapiens
gagaaggagtcttgc

SEQ ID NO: 1164873 - DNA, 15 bp, Homo sapiens
tgagaaggagtcttg

SEQ ID NO: 1164874 - DNA, 15 bp, Homo sapiens
ttgagaaggagtctt

SEQ ID NO: 1164875 - DNA, 15 bp, Homo sapiens
tttgagaaggagtct

SEQ ID NO: 1164876 - DNA, 15 bp, Homo sapiens
ttttgagaaggagtc

SEQ ID NO: 1164877 - DNA, 15 bp, Homo sapiens
tttttgagaaggagt

SEQ ID NO: 1164878 - DNA, 15 bp, Homo sapiens
ttcattctttttttt

SEQ ID NO: 1164879 - DNA, 15 bp, Homo sapiens
ctttcattctttttt

SEQ ID NO: 1164880 - DNA, 15 bp, Homo sapiens
tctttcattcttttt

SEQ ID NO: 1164881 - DNA, 15 bp, Homo sapiens
ttctttcattctttt

SEQ ID NO: 1164882 - DNA, 15 bp, Homo sapiens
tttctttcattcttt

SEQ ID NO: 1164883 - DNA, 15 bp, Homo sapiens
ctttctttcattctt

SEQ ID NO: 1164884 - DNA, 15 bp, Homo sapiens
tctttctttcattct

SEQ ID NO: 1164885 - DNA, 15 bp, Homo sapiens
ttctttctttcattc

SEQ ID NO: 1164886 - DNA, 15 bp, Homo sapiens
tttctttctttcatt

SEQ ID NO: 1164887 - DNA, 15 bp, Homo sapiens
atttctttctttcat

SEQ ID NO: 1164888 - DNA, 15 bp, Homo sapiens
aatttctttctttca

SEQ ID NO: 1164889 - DNA, 15 bp, Homo sapiens
gaatttctttctttc

SEQ ID NO: 1164890 - DNA, 15 bp, Homo sapiens
tgaatttctttcttt

SEQ ID NO: 1164891 - DNA, 15 bp, Homo sapiens
atgaatttctttctt

SEQ ID NO: 1164892 - DNA, 15 bp, Homo sapiens
tatgaatttctttct

SEQ ID NO: 1164893 - DNA, 15 bp, Homo sapiens
ctatgaatttctttc

SEQ ID NO: 1164894 - DNA, 15 bp, Homo sapiens
actatgaatttcttt

SEQ ID NO: 1164895 - DNA, 15 bp, Homo sapiens
cactatgaatttctt

SEQ ID NO: 1164896 - DNA, 15 bp, Homo sapiens
acaccactatgaatt

SEQ ID NO: 1164897 - DNA, 15 bp, Homo sapiens
tacaccactatgaat

SEQ ID NO: 1164898 - DNA, 15 bp, Homo sapiens
atacaccactatgaa

SEQ ID NO: 1164899 - DNA, 15 bp, Homo sapiens
aatacaccactatga

SEQ ID NO: 1164900 - DNA, 15 bp, Homo sapiens
aaatacaccactatg

SEQ ID NO: 1164901 - DNA, 15 bp, Homo sapiens
gaaatacaccactat

SEQ ID NO: 1164902 - DNA, 15 bp, Homo sapiens
agaaatacaccacta

SEQ ID NO: 1164903 - DNA, 15 bp, Homo sapiens
aagaaatacaccact

SEQ ID NO: 1164904 - DNA, 15 bp, Homo sapiens
gaagaaatacaccac

SEQ ID NO: 1164905 - DNA, 15 bp, Homo sapiens
tgaagaaatacacca

SEQ ID NO: 1164906 - DNA, 15 bp, Homo sapiens
gtgaagaaatacacc

SEQ ID NO: 1164907 - DNA, 15 bp, Homo sapiens
tgtgaagaaatacac

SEQ ID NO: 1164908 - DNA, 15 bp, Homo sapiens
atgtgaagaaataca

SEQ ID NO: 1164909 - DNA, 15 bp, Homo sapiens
catgtgaagaaatac

SEQ ID NO: 1164910 - DNA, 15 bp, Homo sapiens
ccatgtgaagaaata

SEQ ID NO: 1164911 - DNA, 15 bp, Homo sapiens
accatgtgaagaaat

SEQ ID NO: 1164912 - DNA, 15 bp, Homo sapiens
aaccatgtgaagaaa

SEQ ID NO: 1164913 - DNA, 15 bp, Homo sapiens
caaccatgtgaagaa

SEQ ID NO: 1164914 - DNA, 15 bp, Homo sapiens
acaaccatgtgaaga

SEQ ID NO: 1164915 - DNA, 15 bp, Homo sapiens
aacaaccatgtgaag

SEQ ID NO: 1164916 - DNA, 15 bp, Homo sapiens
aaacaaccatgtgaa

SEQ ID NO: 1164917 - DNA, 15 bp, Homo sapiens
aaaacaaccatgtga

SEQ ID NO: 1164918 - DNA, 15 bp, Homo sapiens
gaaaacaaccatgtg

SEQ ID NO: 1164919 - DNA, 15 bp, Homo sapiens
ggaaaacaaccatgt

SEQ ID NO: 1164920 - DNA, 15 bp, Homo sapiens
tggaaaacaaccatg

SEQ ID NO: 1164921 - DNA, 15 bp, Homo sapiens
atggaaaacaaccat

SEQ ID NO: 1164922 - DNA, 15 bp, Homo sapiens
tatggaaaacaacca

SEQ ID NO: 1164923 - DNA, 15 bp, Homo sapiens
ttatggaaaacaacc

SEQ ID NO: 1164924 - DNA, 15 bp, Homo sapiens
cttatggaaaacaac

SEQ ID NO: 1164925 - DNA, 15 bp, Homo sapiens
acttatggaaaacaa

SEQ ID NO: 1164926 - DNA, 15 bp, Homo sapiens
tacttatggaaaaca

SEQ ID NO: 1164927 - DNA, 15 bp, Homo sapiens
ttacttatggaaaac

SEQ ID NO: 1164928 - DNA, 15 bp, Homo sapiens
cttacttatggaaaa

SEQ ID NO: 1164929 - DNA, 15 bp, Homo sapiens
ccttacttatggaaa

SEQ ID NO: 1164930 - DNA, 15 bp, Homo sapiens
tccttacttatggaa

SEQ ID NO: 1164931 - DNA, 15 bp, Homo sapiens
atccttacttatgga

SEQ ID NO: 1164932 - DNA, 15 bp, Homo sapiens
tatccttacttatgg

SEQ ID NO: 1164933 - DNA, 15 bp, Homo sapiens
ttatccttacttatg

SEQ ID NO: 1164934 - DNA, 15 bp, Homo sapiens
attatccttacttat

SEQ ID NO: 1164935 - DNA, 15 bp, Homo sapiens
aattatccttactta

SEQ ID NO: 1164936 - DNA, 15 bp, Homo sapiens
aaattatccttactt

SEQ ID NO: 1164937 - DNA, 15 bp, Homo sapiens
taaattatccttact

SEQ ID NO: 1164938 - DNA, 15 bp, Homo sapiens
ctaaattatccttac

SEQ ID NO: 1164939 - DNA, 15 bp, Homo sapiens
gctaaattatcctta

SEQ ID NO: 1164940 - DNA, 15 bp, Homo sapiens
agctaaattatcctt

SEQ ID NO: 1164941 - DNA, 15 bp, Homo sapiens
aagctaaattatcct

SEQ ID NO: 1164942 - DNA, 15 bp, Homo sapiens
taagctaaattatcc

SEQ ID NO: 1164943 - DNA, 15 bp, Homo sapiens
ttaagctaaattatc

SEQ ID NO: 1164944 - DNA, 15 bp, Homo sapiens
tttaagctaaattat

SEQ ID NO: 1164945 - DNA, 15 bp, Homo sapiens
ttttaagctaaatta

SEQ ID NO: 1164946 - DNA, 15 bp, Homo sapiens
attttaagctaaatt

SEQ ID NO: 1164947 - DNA, 15 bp, Homo sapiens
tattttaagctaaat

SEQ ID NO: 1164948 - DNA, 15 bp, Homo sapiens
atattttaagctaaa

SEQ ID NO: 1164949 - DNA, 15 bp, Homo sapiens
catattttaagctaa

SEQ ID NO: 1164950 - DNA, 15 bp, Homo sapiens
acatattttaagcta

SEQ ID NO: 1164951 - DNA, 15 bp, Homo sapiens
tacatattttaagct

SEQ ID NO: 1164952 - DNA, 15 bp, Homo sapiens
atacatattttaagc

SEQ ID NO: 1164953 - DNA, 15 bp, Homo sapiens
gatacatattttaag

SEQ ID NO: 1164954 - DNA, 15 bp, Homo sapiens
cgatacatattttaa

SEQ ID NO: 1164955 - DNA, 15 bp, Homo sapiens
acgatacatatttta

SEQ ID NO: 1164956 - DNA, 15 bp, Homo sapiens
aacgatacatatttt

SEQ ID NO: 1164957 - DNA, 15 bp, Homo sapiens
aaacgatacatattt

SEQ ID NO: 1164958 - DNA, 15 bp, Homo sapiens
aaaacgatacatatt

SEQ ID NO: 1164959 - DNA, 15 bp, Homo sapiens
gaaaacgatacatat

SEQ ID NO: 1164960 - DNA, 15 bp, Homo sapiens
tgaaaacgatacata

SEQ ID NO: 1164961 - DNA, 15 bp, Homo sapiens
atgaaaacgatacat

SEQ ID NO: 1164962 - DNA, 15 bp, Homo sapiens
tatgaaaacgataca

SEQ ID NO: 1164963 - DNA, 15 bp, Homo sapiens
atatgaaaacgatac

SEQ ID NO: 1164964 - DNA, 15 bp, Homo sapiens
gatatgaaaacgata

SEQ ID NO: 1164965 - DNA, 15 bp, Homo sapiens
tgatatgaaaacgat

SEQ ID NO: 1164966 - DNA, 15 bp, Homo sapiens
ttgatatgaaaacga

SEQ ID NO: 1164967 - DNA, 15 bp, Homo sapiens
cttgatatgaaaacg

SEQ ID NO: 1164968 - DNA, 15 bp, Homo sapiens
ccttgatatgaaaac

SEQ ID NO: 1164969 - DNA, 15 bp, Homo sapiens
gccttgatatgaaaa

SEQ ID NO: 1164970 - DNA, 15 bp, Homo sapiens
agccttgatatgaaa

SEQ ID NO: 1164971 - DNA, 15 bp, Homo sapiens
gagccttgatatgaa

SEQ ID NO: 1164972 - DNA, 15 bp, Homo sapiens
tgagccttgatatga

SEQ ID NO: 1164973 - DNA, 15 bp, Homo sapiens
ttgagccttgatatg

SEQ ID NO: 1164974 - DNA, 15 bp, Homo sapiens
tttgagccttgatat

SEQ ID NO: 1164975 - DNA, 15 bp, Homo sapiens
ttttgagccttgata

SEQ ID NO: 1164976 - DNA, 15 bp, Homo sapiens
tttttgagccttgat

SEQ ID NO: 1164977 - DNA, 15 bp, Homo sapiens
ttttttgagccttga

SEQ ID NO: 1164978 - DNA, 15 bp, Homo sapiens
cttttttgagccttg

SEQ ID NO: 1164979 - DNA, 15 bp, Homo sapiens
acttttttgagcctt

SEQ ID NO: 1164980 - DNA, 15 bp, Homo sapiens
tacttttttgagcct

SEQ ID NO: 1164981 - DNA, 15 bp, Homo sapiens
atacttttttgagcc

SEQ ID NO: 1164982 - DNA, 15 bp, Homo sapiens
aatacttttttgagc

SEQ ID NO: 1164983 - DNA, 15 bp, Homo sapiens
gaatacttttttgag

SEQ ID NO: 1164984 - DNA, 15 bp, Homo sapiens
agaatacttttttga

SEQ ID NO: 1164985 - DNA, 15 bp, Homo sapiens
tacagaatacttttt

SEQ ID NO: 1164986 - DNA, 15 bp, Homo sapiens
ctacagaatactttt

SEQ ID NO: 1164987 - DNA, 15 bp, Homo sapiens
gctacagaatacttt

SEQ ID NO: 1164988 - DNA, 15 bp, Homo sapiens
agctacagaatactt

SEQ ID NO: 1164989 - DNA, 15 bp, Homo sapiens
gagctacagaatact

SEQ ID NO: 1164990 - DNA, 15 bp, Homo sapiens
agagctacagaatac

SEQ ID NO: 1164991 - DNA, 15 bp, Homo sapiens
aagagctacagaata

SEQ ID NO: 1164992 - DNA, 15 bp, Homo sapiens
caagagctacagaat

SEQ ID NO: 1164993 - DNA, 15 bp, Homo sapiens
gcaagagctacagaa

SEQ ID NO: 1164994 - DNA, 15 bp, Homo sapiens
ggcaagagctacaga

SEQ ID NO: 1164995 - DNA, 15 bp, Homo sapiens
aggcaagagctacag

SEQ ID NO: 1164996 - DNA, 15 bp, Homo sapiens
gaggcaagagctaca

SEQ ID NO: 1164997 - DNA, 15 bp, Homo sapiens
tgaggcaagagctac

SEQ ID NO: 1164998 - DNA, 15 bp, Homo sapiens
atgaggcaagagcta

SEQ ID NO: 1164999 - DNA, 15 bp, Homo sapiens
tatgaggcaagagct

SEQ ID NO: 1165000 - DNA, 15 bp, Homo sapiens
atatgaggcaagagc

SEQ ID NO: 1165001 - DNA, 15 bp, Homo sapiens
tatatgaggcaagag

SEQ ID NO: 1165002 - DNA, 15 bp, Homo sapiens
ttatatgaggcaaga

SEQ ID NO: 1165003 - DNA, 15 bp, Homo sapiens
attatatgaggcaag

SEQ ID NO: 1165004 - DNA, 15 bp, Homo sapiens
aattatatgaggcaa

SEQ ID NO: 1165005 - DNA, 15 bp, Homo sapiens
gaattatatgaggca

SEQ ID NO: 1165006 - DNA, 15 bp, Homo sapiens
tgaattatatgaggc

SEQ ID NO: 1165007 - DNA, 15 bp, Homo sapiens
ctgaattatatgagg

SEQ ID NO: 1165008 - DNA, 15 bp, Homo sapiens
actgaattatatgag

SEQ ID NO: 1165009 - DNA, 15 bp, Homo sapiens
aactgaattatatga

SEQ ID NO: 1165010 - DNA, 15 bp, Homo sapiens
aaactgaattatatg

SEQ ID NO: 1165011 - DNA, 15 bp, Homo sapiens
aaaactgaattatat

SEQ ID NO: 1165012 - DNA, 15 bp, Homo sapiens
caaaactgaattata

SEQ ID NO: 1165013 - DNA, 15 bp, Homo sapiens
gcaaaactgaattat

SEQ ID NO: 1165014 - DNA, 15 bp, Homo sapiens
tgcaaaactgaatta

SEQ ID NO: 1165015 - DNA, 15 bp, Homo sapiens
atgcaaaactgaatt

SEQ ID NO: 1165016 - DNA, 15 bp, Homo sapiens
tatgcaaaactgaat

SEQ ID NO: 1165017 - DNA, 15 bp, Homo sapiens
atatgcaaaactgaa

SEQ ID NO: 1165018 - DNA, 15 bp, Homo sapiens
aatatgcaaaactga

SEQ ID NO: 1165019 - DNA, 15 bp, Homo sapiens
taatatgcaaaactg

SEQ ID NO: 1165020 - DNA, 15 bp, Homo sapiens
ttaatatgcaaaact

SEQ ID NO: 1165021 - DNA, 15 bp, Homo sapiens
tttaatatgcaaaac

SEQ ID NO: 1165022 - DNA, 15 bp, Homo sapiens
atttaatatgcaaaa

SEQ ID NO: 1165023 - DNA, 15 bp, Homo sapiens
catttaatatgcaaa

SEQ ID NO: 1165024 - DNA, 15 bp, Homo sapiens
acatttaatatgcaa

SEQ ID NO: 1165025 - DNA, 15 bp, Homo sapiens
aacatttaatatgca

SEQ ID NO: 1165026 - DNA, 15 bp, Homo sapiens
caacatttaatatgc

SEQ ID NO: 1165027 - DNA, 15 bp, Homo sapiens
tcaacatttaatatg

SEQ ID NO: 1165028 - DNA, 15 bp, Homo sapiens
ttcaacatttaatat

SEQ ID NO: 1165029 - DNA, 15 bp, Homo sapiens
cttcaacatttaata

SEQ ID NO: 1165030 - DNA, 15 bp, Homo sapiens
acttcaacatttaat

SEQ ID NO: 1165031 - DNA, 15 bp, Homo sapiens
aacttcaacatttaa

SEQ ID NO: 1165032 - DNA, 15 bp, Homo sapiens
taacttcaacattta

SEQ ID NO: 1165033 - DNA, 15 bp, Homo sapiens
ataacttcaacattt

SEQ ID NO: 1165034 - DNA, 15 bp, Homo sapiens
aataacttcaacatt

SEQ ID NO: 1165035 - DNA, 15 bp, Homo sapiens
aaataacttcaacat

SEQ ID NO: 1165036 - DNA, 15 bp, Homo sapiens
taaataacttcaaca

SEQ ID NO: 1165037 - DNA, 15 bp, Homo sapiens
ataaataacttcaac

SEQ ID NO: 1165038 - DNA, 15 bp, Homo sapiens
cataaataacttcaa

SEQ ID NO: 1165039 - DNA, 15 bp, Homo sapiens
acataaataacttca

SEQ ID NO: 1165040 - DNA, 15 bp, Homo sapiens
tacataaataacttc

SEQ ID NO: 1165041 - DNA, 15 bp, Homo sapiens
atacataaataactt

SEQ ID NO: 1165042 - DNA, 15 bp, Homo sapiens
gatacataaataact

SEQ ID NO: 1165043 - DNA, 15 bp, Homo sapiens
tgatacataaataac

SEQ ID NO: 1165044 - DNA, 15 bp, Homo sapiens
atgatacataaataa

SEQ ID NO: 1165045 - DNA, 15 bp, Homo sapiens
aatgatacataaata

SEQ ID NO: 1165046 - DNA, 15 bp, Homo sapiens
aaatgatacataaat

SEQ ID NO: 1165047 - DNA, 15 bp, Homo sapiens
taaatgatacataaa

SEQ ID NO: 1165048 - DNA, 15 bp, Homo sapiens
ttaaatgatacataa

SEQ ID NO: 1165049 - DNA, 15 bp, Homo sapiens
attaaatgatacata

SEQ ID NO: 1165050 - DNA, 15 bp, Homo sapiens
gattaaatgatacat

SEQ ID NO: 1165051 - DNA, 15 bp, Homo sapiens
ggattaaatgataca

SEQ ID NO: 1165052 - DNA, 15 bp, Homo sapiens
aggattaaatgatac

SEQ ID NO: 1165053 - DNA, 15 bp, Homo sapiens
taggattaaatgata

SEQ ID NO: 1165054 - DNA, 15 bp, Homo sapiens
ataggattaaatgat

SEQ ID NO: 1165055 - DNA, 15 bp, Homo sapiens
aataggattaaatga

SEQ ID NO: 1165056 - DNA, 15 bp, Homo sapiens
aaataggattaaatg

SEQ ID NO: 1165057 - DNA, 15 bp, Homo sapiens
aaaataggattaaat

SEQ ID NO: 1165058 - DNA, 15 bp, Homo sapiens
aaaaataggattaaa

SEQ ID NO: 1165059 - DNA, 15 bp, Homo sapiens
aaaaaataggattaa

SEQ ID NO: 1165060 - DNA, 15 bp, Homo sapiens
gaaaaaataggatta

SEQ ID NO: 1165061 - DNA, 15 bp, Homo sapiens
tgaaaaaataggatt

SEQ ID NO: 1165062 - DNA, 15 bp, Homo sapiens
gtgaaaaaataggat

SEQ ID NO: 1165063 - DNA, 15 bp, Homo sapiens
agtgaaaaaatagga

SEQ ID NO: 1165064 - DNA, 15 bp, Homo sapiens
gagtgaaaaaatagg

SEQ ID NO: 1165065 - DNA, 15 bp, Homo sapiens
agagtgaaaaaatag

SEQ ID NO: 1165066 - DNA, 15 bp, Homo sapiens
tagagtgaaaaaata

SEQ ID NO: 1165067 - DNA, 15 bp, Homo sapiens
gtagagtgaaaaaat

SEQ ID NO: 1165068 - DNA, 15 bp, Homo sapiens
agtagagtgaaaaaa

SEQ ID NO: 1165069 - DNA, 15 bp, Homo sapiens
tagtagagtgaaaaa

SEQ ID NO: 1165070 - DNA, 15 bp, Homo sapiens
atagtagagtgaaaa

SEQ ID NO: 1165071 - DNA, 15 bp, Homo sapiens
tatagtagagtgaaa

SEQ ID NO: 1165072 - DNA, 15 bp, Homo sapiens
atatagtagagtgaa

SEQ ID NO: 1165073 - DNA, 15 bp, Homo sapiens
aatatagtagagtga

SEQ ID NO: 1165074 - DNA, 15 bp, Homo sapiens
taatatagtagagtg

SEQ ID NO: 1165075 - DNA, 15 bp, Homo sapiens
ttaatatagtagagt

SEQ ID NO: 1165076 - DNA, 15 bp, Homo sapiens
tttaatatagtagag

SEQ ID NO: 1165077 - DNA, 15 bp, Homo sapiens
atttaatatagtaga

SEQ ID NO: 1165078 - DNA, 15 bp, Homo sapiens
tatttaatatagtag

SEQ ID NO: 1165079 - DNA, 15 bp, Homo sapiens
atatttaatatagta

SEQ ID NO: 1165080 - DNA, 15 bp, Homo sapiens
tatatttaatatagt

SEQ ID NO: 1165081 - DNA, 15 bp, Homo sapiens
ttatatttaatatag

SEQ ID NO: 1165082 - DNA, 15 bp, Homo sapiens
attatatttaatata

SEQ ID NO: 1165083 - DNA, 15 bp, Homo sapiens
gattatatttaatat

SEQ ID NO: 1165084 - DNA, 15 bp, Homo sapiens
agattatatttaata

SEQ ID NO: 1165085 - DNA, 15 bp, Homo sapiens
gagattatatttaat

SEQ ID NO: 1165086 - DNA, 15 bp, Homo sapiens
tgagattatatttaa

SEQ ID NO: 1165087 - DNA, 15 bp, Homo sapiens
gtgagattatattta

SEQ ID NO: 1165088 - DNA, 15 bp, Homo sapiens
tgtgagattatattt

SEQ ID NO: 1165089 - DNA, 15 bp, Homo sapiens
ttgtgagattatatt

SEQ ID NO: 1165090 - DNA, 15 bp, Homo sapiens
cttgtgagattatat

SEQ ID NO: 1165091 - DNA, 15 bp, Homo sapiens
ccttgtgagattata

SEQ ID NO: 1165092 - DNA, 15 bp, Homo sapiens
tccttgtgagattat

SEQ ID NO: 1165093 - DNA, 15 bp, Homo sapiens
ttccttgtgagatta

SEQ ID NO: 1165094 - DNA, 15 bp, Homo sapiens
tttccttgtgagatt

SEQ ID NO: 1165095 - DNA, 15 bp, Homo sapiens
atttccttgtgagat

SEQ ID NO: 1165096 - DNA, 15 bp, Homo sapiens
tatttccttgtgaga

SEQ ID NO: 1165097 - DNA, 15 bp, Homo sapiens
ttatttccttgtgag

SEQ ID NO: 1165098 - DNA, 15 bp, Homo sapiens
cttatttccttgtga

SEQ ID NO: 1165099 - DNA, 15 bp, Homo sapiens
tcttatttccttgtg

SEQ ID NO: 1165100 - DNA, 15 bp, Homo sapiens
atcttatttccttgt

SEQ ID NO: 1165101 - DNA, 15 bp, Homo sapiens
tatcttatttccttg

SEQ ID NO: 1165102 - DNA, 15 bp, Homo sapiens
atatcttatttcctt

SEQ ID NO: 1165103 - DNA, 15 bp, Homo sapiens
tatatcttatttcct

SEQ ID NO: 1165104 - DNA, 15 bp, Homo sapiens
atatatcttatttcc

SEQ ID NO: 1165105 - DNA, 15 bp, Homo sapiens
aatatatcttatttc

SEQ ID NO: 1165106 - DNA, 15 bp, Homo sapiens
aaatatatcttattt

SEQ ID NO: 1165107 - DNA, 15 bp, Homo sapiens
aaaatatatcttatt

SEQ ID NO: 1165108 - DNA, 15 bp, Homo sapiens
aaaaatatatcttat

SEQ ID NO: 1165109 - DNA, 15 bp, Homo sapiens
gaaaaatatatctta

SEQ ID NO: 1165110 - DNA, 15 bp, Homo sapiens
agaaaaatatatctt

SEQ ID NO: 1165111 - DNA, 15 bp, Homo sapiens
gagaaaaatatatct

SEQ ID NO: 1165112 - DNA, 15 bp, Homo sapiens
cgagaaaaatatatc

SEQ ID NO: 1165113 - DNA, 15 bp, Homo sapiens
ccgagaaaaatatat

SEQ ID NO: 1165114 - DNA, 15 bp, Homo sapiens
accgagaaaaatata

SEQ ID NO: 1165115 - DNA, 15 bp, Homo sapiens
aaccgagaaaaatat

SEQ ID NO: 1165116 - DNA, 15 bp, Homo sapiens
gaaccgagaaaaata

SEQ ID NO: 1165117 - DNA, 15 bp, Homo sapiens
tgaaccgagaaaaat

SEQ ID NO: 1165118 - DNA, 15 bp, Homo sapiens
gtgaaccgagaaaaa

SEQ ID NO: 1165119 - DNA, 15 bp, Homo sapiens
cgtgaaccgagaaaa

SEQ ID NO: 1165120 - DNA, 15 bp, Homo sapiens
gcgtgaaccgagaaa

SEQ ID NO: 1165121 - DNA, 15 bp, Homo sapiens
ggcgtgaaccgagaa

SEQ ID NO: 1165122 - DNA, 15 bp, Homo sapiens
tggcgtgaaccgaga

SEQ ID NO: 1165123 - DNA, 15 bp, Homo sapiens
gtggcgtgaaccgag

SEQ ID NO: 1165124 - DNA, 15 bp, Homo sapiens
agtggcgtgaaccga

SEQ ID NO: 1165125 - DNA, 15 bp, Homo sapiens
gagtggcgtgaaccg

SEQ ID NO: 1165126 - DNA, 15 bp, Homo sapiens
cagagtggcgtgaac

SEQ ID NO: 1165127 - DNA, 15 bp, Homo sapiens
tcagagtggcgtgaa

SEQ ID NO: 1165128 - DNA, 15 bp, Homo sapiens
ttcagagtggcgtga

SEQ ID NO: 1165129 - DNA, 15 bp, Homo sapiens
gttcagagtggcgtg

SEQ ID NO: 1165130 - DNA, 15 bp, Homo sapiens
agttcagagtggcgt

SEQ ID NO: 1165131 - DNA, 15 bp, Homo sapiens
aagttcagagtggcg

SEQ ID NO: 1165132 - DNA, 15 bp, Homo sapiens
gaagttcagagtggc

SEQ ID NO: 1165133 - DNA, 15 bp, Homo sapiens
agaagttcagagtgg

SEQ ID NO: 1165134 - DNA, 15 bp, Homo sapiens
gagaagttcagagtg

SEQ ID NO: 1165135 - DNA, 15 bp, Homo sapiens
tgagaagttcagagt

SEQ ID NO: 1165136 - DNA, 15 bp, Homo sapiens
atgagaagttcagag

SEQ ID NO: 1165137 - DNA, 15 bp, Homo sapiens
catgagaagttcaga

SEQ ID NO: 1165138 - DNA, 15 bp, Homo sapiens
gcatgagaagttcag

SEQ ID NO: 1165139 - DNA, 15 bp, Homo sapiens
ggcatgagaagttca

SEQ ID NO: 1165140 - DNA, 15 bp, Homo sapiens
gggcatgagaagttc

SEQ ID NO: 1165141 - DNA, 15 bp, Homo sapiens
agggcatgagaagtt

SEQ ID NO: 1165142 - DNA, 15 bp, Homo sapiens
aagggcatgagaagt

SEQ ID NO: 1165143 - DNA, 15 bp, Homo sapiens
aaagggcatgagaag

SEQ ID NO: 1165144 - DNA, 15 bp, Homo sapiens
taaagggcatgagaa

SEQ ID NO: 1165145 - DNA, 15 bp, Homo sapiens
ttaaagggcatgaga

SEQ ID NO: 1165146 - DNA, 15 bp, Homo sapiens
tttaaagggcatgag

SEQ ID NO: 1165147 - DNA, 15 bp, Homo sapiens
gtttaaagggcatga

SEQ ID NO: 1165148 - DNA, 15 bp, Homo sapiens
tgtttaaagggcatg

SEQ ID NO: 1165149 - DNA, 15 bp, Homo sapiens
ttgtttaaagggcat

SEQ ID NO: 1165150 - DNA, 15 bp, Homo sapiens
cttgtttaaagggca

SEQ ID NO: 1165151 - DNA, 15 bp, Homo sapiens
tcttgtttaaagggc

SEQ ID NO: 1165152 - DNA, 15 bp, Homo sapiens
ctcttgtttaaaggg

SEQ ID NO: 1165153 - DNA, 15 bp, Homo sapiens
gctcttgtttaaagg

SEQ ID NO: 1165154 - DNA, 15 bp, Homo sapiens
agctcttgtttaaag

SEQ ID NO: 1165155 - DNA, 15 bp, Homo sapiens
tagctcttgtttaaa

SEQ ID NO: 1165156 - DNA, 15 bp, Homo sapiens
ctagctcttgtttaa

SEQ ID NO: 1165157 - DNA, 15 bp, Homo sapiens
actagctcttgttta

SEQ ID NO: 1165158 - DNA, 15 bp, Homo sapiens
cactagctcttgttt

SEQ ID NO: 1165159 - DNA, 15 bp, Homo sapiens
gcactagctcttgtt

SEQ ID NO: 1165160 - DNA, 15 bp, Homo sapiens
tgcactagctcttgt

SEQ ID NO: 1165161 - DNA, 15 bp, Homo sapiens
ctgcactagctcttg

SEQ ID NO: 1165162 - DNA, 15 bp, Homo sapiens
actgcactagctctt

SEQ ID NO: 1165163 - DNA, 15 bp, Homo sapiens
gactgcactagctct

SEQ ID NO: 1165164 - DNA, 15 bp, Homo sapiens
tgactgcactagctc

SEQ ID NO: 1165165 - DNA, 15 bp, Homo sapiens
atgactgcactagct

SEQ ID NO: 1165166 - DNA, 15 bp, Homo sapiens
catgactgcactagc

SEQ ID NO: 1165167 - DNA, 15 bp, Homo sapiens
gcatgactgcactag

SEQ ID NO: 1165168 - DNA, 15 bp, Homo sapiens
tgcatgactgcacta

SEQ ID NO: 1165169 - DNA, 15 bp, Homo sapiens
ctgcatgactgcact

SEQ ID NO: 1165170 - DNA, 15 bp, Homo sapiens
actgcatgactgcac

SEQ ID NO: 1165171 - DNA, 15 bp, Homo sapiens
aactgcatgactgca

SEQ ID NO: 1165172 - DNA, 15 bp, Homo sapiens
caactgcatgactgc

SEQ ID NO: 1165173 - DNA, 15 bp, Homo sapiens
acaactgcatgactg

SEQ ID NO: 1165174 - DNA, 15 bp, Homo sapiens
tacaactgcatgact

SEQ ID NO: 1165175 - DNA, 15 bp, Homo sapiens
ttacaactgcatgac

SEQ ID NO: 1165176 - DNA, 15 bp, Homo sapiens
attacaactgcatga

SEQ ID NO: 1165177 - DNA, 15 bp, Homo sapiens
cattacaactgcatg

SEQ ID NO: 1165178 - DNA, 15 bp, Homo sapiens
ccattacaactgcat

SEQ ID NO: 1165179 - DNA, 15 bp, Homo sapiens
accattacaactgca

SEQ ID NO: 1165180 - DNA, 15 bp, Homo sapiens
aaccattacaactgc

SEQ ID NO: 1165181 - DNA, 15 bp, Homo sapiens
caaccattacaactg

SEQ ID NO: 1165182 - DNA, 15 bp, Homo sapiens
ccaaccattacaact

SEQ ID NO: 1165183 - DNA, 15 bp, Homo sapiens
tccaaccattacaac

SEQ ID NO: 1165184 - DNA, 15 bp, Homo sapiens
ttccaaccattacaa

SEQ ID NO: 1165185 - DNA, 15 bp, Homo sapiens
tttccaaccattaca

SEQ ID NO: 1165186 - DNA, 15 bp, Homo sapiens
atttccaaccattac

SEQ ID NO: 1165187 - DNA, 15 bp, Homo sapiens
aatttccaaccatta

SEQ ID NO: 1165188 - DNA, 15 bp, Homo sapiens
taatttccaaccatt

SEQ ID NO: 1165189 - DNA, 15 bp, Homo sapiens
ttaatttccaaccat

SEQ ID NO: 1165190 - DNA, 15 bp, Homo sapiens
tttaatttccaacca

SEQ ID NO: 1165191 - DNA, 15 bp, Homo sapiens
ctttaatttccaacc

SEQ ID NO: 1165192 - DNA, 15 bp, Homo sapiens
actttaatttccaac

SEQ ID NO: 1165193 - DNA, 15 bp, Homo sapiens
aactttaatttccaa

SEQ ID NO: 1165194 - DNA, 15 bp, Homo sapiens
aaactttaatttcca

SEQ ID NO: 1165195 - DNA, 15 bp, Homo sapiens
caaactttaatttcc

SEQ ID NO: 1165196 - DNA, 15 bp, Homo sapiens
gcaaactttaatttc

SEQ ID NO: 1165197 - DNA, 15 bp, Homo sapiens
agcaaactttaattt

SEQ ID NO: 1165198 - DNA, 15 bp, Homo sapiens
gagcaaactttaatt

SEQ ID NO: 1165199 - DNA, 15 bp, Homo sapiens
tgagcaaactttaat

SEQ ID NO: 1165200 - DNA, 15 bp, Homo sapiens
atgagcaaactttaa

SEQ ID NO: 1165201 - DNA, 15 bp, Homo sapiens
aatgagcaaacttta

SEQ ID NO: 1165202 - DNA, 15 bp, Homo sapiens
aaatgagcaaacttt

SEQ ID NO: 1165203 - DNA, 15 bp, Homo sapiens
gaaatgagcaaactt

SEQ ID NO: 1165204 - DNA, 15 bp, Homo sapiens
ggaaatgagcaaact

SEQ ID NO: 1165205 - DNA, 15 bp, Homo sapiens
tggaaatgagcaaac

SEQ ID NO: 1165206 - DNA, 15 bp, Homo sapiens
gtggaaatgagcaaa

SEQ ID NO: 1165207 - DNA, 15 bp, Homo sapiens
tgtggaaatgagcaa

SEQ ID NO: 1165208 - DNA, 15 bp, Homo sapiens
atgtggaaatgagca

SEQ ID NO: 1165209 - DNA, 15 bp, Homo sapiens
tatgtggaaatgagc

SEQ ID NO: 1165210 - DNA, 15 bp, Homo sapiens
ttatgtggaaatgag

SEQ ID NO: 1165211 - DNA, 15 bp, Homo sapiens
attatgtggaaatga

SEQ ID NO: 1165212 - DNA, 15 bp, Homo sapiens
aattatgtggaaatg

SEQ ID NO: 1165213 - DNA, 15 bp, Homo sapiens
caattatgtggaaat

SEQ ID NO: 1165214 - DNA, 15 bp, Homo sapiens
acaattatgtggaaa

SEQ ID NO: 1165215 - DNA, 15 bp, Homo sapiens
aacaattatgtggaa

SEQ ID NO: 1165216 - DNA, 15 bp, Homo sapiens
aaacaattatgtgga

SEQ ID NO: 1165217 - DNA, 15 bp, Homo sapiens
aaaacaattatgtgg

SEQ ID NO: 1165218 - DNA, 15 bp, Homo sapiens
taaaacaattatgtg

SEQ ID NO: 1165219 - DNA, 15 bp, Homo sapiens
ataaaacaattatgt

SEQ ID NO: 1165220 - DNA, 15 bp, Homo sapiens
cataaaacaattatg

SEQ ID NO: 1165221 - DNA, 15 bp, Homo sapiens
acataaaacaattat

SEQ ID NO: 1165222 - DNA, 15 bp, Homo sapiens
gacataaaacaatta

SEQ ID NO: 1165223 - DNA, 15 bp, Homo sapiens
tgacataaaacaatt

SEQ ID NO: 1165224 - DNA, 15 bp, Homo sapiens
ttgacataaaacaat

SEQ ID NO: 1165225 - DNA, 15 bp, Homo sapiens
attgacataaaacaa

SEQ ID NO: 1165226 - DNA, 15 bp, Homo sapiens
tattgacataaaaca

SEQ ID NO: 1165227 - DNA, 15 bp, Homo sapiens
ttattgacataaaac

SEQ ID NO: 1165228 - DNA, 15 bp, Homo sapiens
tttattgacataaaa

SEQ ID NO: 1165229 - DNA, 15 bp, Homo sapiens
gtttattgacataaa

SEQ ID NO: 1165230 - DNA, 15 bp, Homo sapiens
tgtttattgacataa

SEQ ID NO: 1165231 - DNA, 15 bp, Homo sapiens
ttgtttattgacata

SEQ ID NO: 1165232 - DNA, 15 bp, Homo sapiens
attgtttattgacat

SEQ ID NO: 1165233 - DNA, 15 bp, Homo sapiens
tattgtttattgaca

SEQ ID NO: 1165234 - DNA, 15 bp, Homo sapiens
ttattgtttattgac

SEQ ID NO: 1165235 - DNA, 15 bp, Homo sapiens
tttattgtttattga

SEQ ID NO: 1165236 - DNA, 15 bp, Homo sapiens
gtttattgtttattg

SEQ ID NO: 1165237 - DNA, 15 bp, Homo sapiens
tgtttattgtttatt

SEQ ID NO: 1165238 - DNA, 15 bp, Homo sapiens
ttgtttattgtttat

SEQ ID NO: 1165239 - DNA, 15 bp, Homo sapiens
attgtttattgttta

SEQ ID NO: 1165240 - DNA, 15 bp, Homo sapiens
aattgtttattgttt

SEQ ID NO: 1165241 - DNA, 15 bp, Homo sapiens
caattgtttattgtt

SEQ ID NO: 1165242 - DNA, 15 bp, Homo sapiens
tcaattgtttattgt

SEQ ID NO: 1165243 - DNA, 15 bp, Homo sapiens
ttcaattgtttattg

SEQ ID NO: 1165244 - DNA, 15 bp, Homo sapiens
tttcaattgtttatt

SEQ ID NO: 1165245 - DNA, 15 bp, Homo sapiens
ttttcaattgtttat

SEQ ID NO: 1165246 - DNA, 15 bp, Homo sapiens
cttttcaattgttta

SEQ ID NO: 1165247 - DNA, 15 bp, Homo sapiens
acttttcaattgttt

SEQ ID NO: 1165248 - DNA, 15 bp, Homo sapiens
aacttttcaattgtt

SEQ ID NO: 1165249 - DNA, 15 bp, Homo sapiens
taacttttcaattgt

SEQ ID NO: 1165250 - DNA, 15 bp, Homo sapiens
ctaacttttcaattg

SEQ ID NO: 1165251 - DNA, 15 bp, Homo sapiens
tctaacttttcaatt

SEQ ID NO: 1165252 - DNA, 15 bp, Homo sapiens
ttctaacttttcaat

SEQ ID NO: 1165253 - DNA, 15 bp, Homo sapiens
cttctaacttttcaa

SEQ ID NO: 1165254 - DNA, 15 bp, Homo sapiens
acttctaacttttca

SEQ ID NO: 1165255 - DNA, 15 bp, Homo sapiens
aacttctaacttttc

SEQ ID NO: 1165256 - DNA, 15 bp, Homo sapiens
gaacttctaactttt

SEQ ID NO: 1165257 - DNA, 15 bp, Homo sapiens
tgaacttctaacttt

SEQ ID NO: 1165258 - DNA, 15 bp, Homo sapiens
gtgaacttctaactt

SEQ ID NO: 1165259 - DNA, 15 bp, Homo sapiens
tgtgaacttctaact

SEQ ID NO: 1165260 - DNA, 15 bp, Homo sapiens
gtgtgaacttctaac

SEQ ID NO: 1165261 - DNA, 15 bp, Homo sapiens
tgtgtgaacttctaa

SEQ ID NO: 1165262 - DNA, 15 bp, Homo sapiens
ttgtgtgaacttcta

SEQ ID NO: 1165263 - DNA, 15 bp, Homo sapiens
cttgtgtgaacttct

SEQ ID NO: 1165264 - DNA, 15 bp, Homo sapiens
gcttgtgtgaacttc

SEQ ID NO: 1165265 - DNA, 15 bp, Homo sapiens
ggcttgtgtgaactt

SEQ ID NO: 1165266 - DNA, 15 bp, Homo sapiens
tggcttgtgtgaact

SEQ ID NO: 1165267 - DNA, 15 bp, Homo sapiens
ttggcttgtgtgaac

SEQ ID NO: 1165268 - DNA, 15 bp, Homo sapiens
tttggcttgtgtgaa

SEQ ID NO: 1165269 - DNA, 15 bp, Homo sapiens
ttttggcttgtgtga

SEQ ID NO: 1165270 - DNA, 15 bp, Homo sapiens
tttttggcttgtgtg

SEQ ID NO: 1165271 - DNA, 15 bp, Homo sapiens
atttttggcttgtgt

SEQ ID NO: 1165272 - DNA, 15 bp, Homo sapiens
aatttttggcttgtg

SEQ ID NO: 1165273 - DNA, 15 bp, Homo sapiens
aaatttttggcttgt

SEQ ID NO: 1165274 - DNA, 15 bp, Homo sapiens
aaaatttttggcttg

SEQ ID NO: 1165275 - DNA, 15 bp, Homo sapiens
aaaaatttttggctt

SEQ ID NO: 1165276 - DNA, 15 bp, Homo sapiens
gaaaaatttttggct

SEQ ID NO: 1165277 - DNA, 15 bp, Homo sapiens
tgaaaaatttttggc

SEQ ID NO: 1165278 - DNA, 15 bp, Homo sapiens
atgaaaaatttttgg

SEQ ID NO: 1165279 - DNA, 15 bp, Homo sapiens
tatgaaaaatttttg

SEQ ID NO: 1165280 - DNA, 15 bp, Homo sapiens
atatgaaaaattttt

SEQ ID NO: 1165281 - DNA, 15 bp, Homo sapiens
tatatgaaaaatttt

SEQ ID NO: 1165282 - DNA, 15 bp, Homo sapiens
ttatatgaaaaattt

SEQ ID NO: 1165283 - DNA, 15 bp, Homo sapiens
tttatatgaaaaatt

SEQ ID NO: 1165284 - DNA, 15 bp, Homo sapiens
gtttatatgaaaaat

SEQ ID NO: 1165285 - DNA, 15 bp, Homo sapiens
tgtttatatgaaaaa

SEQ ID NO: 1165286 - DNA, 15 bp, Homo sapiens
atgtttatatgaaaa

SEQ ID NO: 1165287 - DNA, 15 bp, Homo sapiens
tatgtttatatgaaa

SEQ ID NO: 1165288 - DNA, 15 bp, Homo sapiens
gtatgtttatatgaa

SEQ ID NO: 1165289 - DNA, 15 bp, Homo sapiens
tgtatgtttatatga

SEQ ID NO: 1165290 - DNA, 15 bp, Homo sapiens
gtgtatgtttatatg

SEQ ID NO: 1165291 - DNA, 15 bp, Homo sapiens
agtgtatgtttatat

SEQ ID NO: 1165292 - DNA, 15 bp, Homo sapiens
aagtgtatgtttata

SEQ ID NO: 1165293 - DNA, 15 bp, Homo sapiens
taagtgtatgtttat

SEQ ID NO: 1165294 - DNA, 15 bp, Homo sapiens
ttaagtgtatgttta

SEQ ID NO: 1165295 - DNA, 15 bp, Homo sapiens
attaagtgtatgttt

SEQ ID NO: 1165296 - DNA, 15 bp, Homo sapiens
cattaagtgtatgtt

SEQ ID NO: 1165297 - DNA, 15 bp, Homo sapiens
ccattaagtgtatgt

SEQ ID NO: 1165298 - DNA, 15 bp, Homo sapiens
accattaagtgtatg

SEQ ID NO: 1165299 - DNA, 15 bp, Homo sapiens
aaccattaagtgtat

SEQ ID NO: 1165300 - DNA, 15 bp, Homo sapiens
aaaccattaagtgta

SEQ ID NO: 1165301 - DNA, 15 bp, Homo sapiens
taaaccattaagtgt

SEQ ID NO: 1165302 - DNA, 15 bp, Homo sapiens
ataaaccattaagtg

SEQ ID NO: 1165303 - DNA, 15 bp, Homo sapiens
tataaaccattaagt

SEQ ID NO: 1165304 - DNA, 15 bp, Homo sapiens
ttataaaccattaag

SEQ ID NO: 1165305 - DNA, 15 bp, Homo sapiens
cttataaaccattaa

SEQ ID NO: 1165306 - DNA, 15 bp, Homo sapiens
tcttataaaccatta

SEQ ID NO: 1165307 - DNA, 15 bp, Homo sapiens
atcttataaaccatt

SEQ ID NO: 1165308 - DNA, 15 bp, Homo sapiens
aatcttataaaccat

SEQ ID NO: 1165309 - DNA, 15 bp, Homo sapiens
gaatcttataaacca

SEQ ID NO: 1165310 - DNA, 15 bp, Homo sapiens
agaatcttataaacc

SEQ ID NO: 1165311 - DNA, 15 bp, Homo sapiens
aagaatcttataaac

SEQ ID NO: 1165312 - DNA, 15 bp, Homo sapiens
caagaatcttataaa

SEQ ID NO: 1165313 - DNA, 15 bp, Homo sapiens
gcaagaatcttataa

SEQ ID NO: 1165314 - DNA, 15 bp, Homo sapiens
ggcaagaatcttata

SEQ ID NO: 1165315 - DNA, 15 bp, Homo sapiens
tggcaagaatcttat

SEQ ID NO: 1165316 - DNA, 15 bp, Homo sapiens
ttggcaagaatctta

SEQ ID NO: 1165317 - DNA, 15 bp, Homo sapiens
tttggcaagaatctt

SEQ ID NO: 1165318 - DNA, 15 bp, Homo sapiens
atttggcaagaatct

SEQ ID NO: 1165319 - DNA, 15 bp, Homo sapiens
tatttggcaagaatc

SEQ ID NO: 1165320 - DNA, 15 bp, Homo sapiens
atatttggcaagaat

SEQ ID NO: 1165321 - DNA, 15 bp, Homo sapiens
catatttggcaagaa

SEQ ID NO: 1165322 - DNA, 15 bp, Homo sapiens
tcatatttggcaaga

SEQ ID NO: 1165323 - DNA, 15 bp, Homo sapiens
ctcatatttggcaag

SEQ ID NO: 1165324 - DNA, 15 bp, Homo sapiens
tctcatatttggcaa

SEQ ID NO: 1165325 - DNA, 15 bp, Homo sapiens
gtctcatatttggca

SEQ ID NO: 1165326 - DNA, 15 bp, Homo sapiens
tgtctcatatttggc

SEQ ID NO: 1165327 - DNA, 15 bp, Homo sapiens
ttgtctcatatttgg

SEQ ID NO: 1165328 - DNA, 15 bp, Homo sapiens
tttgtctcatatttg

SEQ ID NO: 1165329 - DNA, 15 bp, Homo sapiens
ttttgtctcatattt

SEQ ID NO: 1165330 - DNA, 15 bp, Homo sapiens
attttgtctcatatt

SEQ ID NO: 1165331 - DNA, 15 bp, Homo sapiens
cattttgtctcatat

SEQ ID NO: 1165332 - DNA, 15 bp, Homo sapiens
ccattttgtctcata

SEQ ID NO: 1165333 - DNA, 15 bp, Homo sapiens
gccattttgtctcat

SEQ ID NO: 1165334 - DNA, 15 bp, Homo sapiens
ggccattttgtctca

SEQ ID NO: 1165335 - DNA, 15 bp, Homo sapiens
gggccattttgtctc

SEQ ID NO: 1165336 - DNA, 15 bp, Homo sapiens
tgggccattttgtct

SEQ ID NO: 1165337 - DNA, 15 bp, Homo sapiens
gtgggccattttgtc

SEQ ID NO: 1165338 - DNA, 15 bp, Homo sapiens
tgtgggccattttgt

SEQ ID NO: 1165339 - DNA, 15 bp, Homo sapiens
gtgtgggccattttg

SEQ ID NO: 1165340 - DNA, 15 bp, Homo sapiens
tgtgtgggccatttt

SEQ ID NO: 1165341 - DNA, 15 bp, Homo sapiens
ctgtgtgggccattt

SEQ ID NO: 1165342 - DNA, 15 bp, Homo sapiens
cctgtgtgggccatt

SEQ ID NO: 1165343 - DNA, 15 bp, Homo sapiens
gcctgtgtgggccat

SEQ ID NO: 1165344 - DNA, 15 bp, Homo sapiens
tgcctgtgtgggcca

SEQ ID NO: 1165345 - DNA, 15 bp, Homo sapiens
ctgcctgtgtgggcc

SEQ ID NO: 1165346 - DNA, 15 bp, Homo sapiens
tctgcctgtgtgggc

SEQ ID NO: 1165347 - DNA, 15 bp, Homo sapiens
ttctgcctgtgtggg

SEQ ID NO: 1165348 - DNA, 15 bp, Homo sapiens
tttctgcctgtgtgg

SEQ ID NO: 1165349 - DNA, 15 bp, Homo sapiens
atttctgcctgtgtg

SEQ ID NO: 1165350 - DNA, 15 bp, Homo sapiens
aatttctgcctgtgt

SEQ ID NO: 1165351 - DNA, 15 bp, Homo sapiens
gaatttctgcctgtg

SEQ ID NO: 1165352 - DNA, 15 bp, Homo sapiens
ggaatttctgcctgt

SEQ ID NO: 1165353 - DNA, 15 bp, Homo sapiens
tggaatttctgcctg

SEQ ID NO: 1165354 - DNA, 15 bp, Homo sapiens
atggaatttctgcct

SEQ ID NO: 1165355 - DNA, 15 bp, Homo sapiens
gatggaatttctgcc

SEQ ID NO: 1165356 - DNA, 15 bp, Homo sapiens
agatggaatttctgc

SEQ ID NO: 1165357 - DNA, 15 bp, Homo sapiens
gagatggaatttctg

SEQ ID NO: 1165358 - DNA, 15 bp, Homo sapiens
agagatggaatttct

SEQ ID NO: 1165359 - DNA, 15 bp, Homo sapiens
tagagatggaatttc

SEQ ID NO: 1165360 - DNA, 15 bp, Homo sapiens
ctagagatggaattt

SEQ ID NO: 1165361 - DNA, 15 bp, Homo sapiens
tctagagatggaatt

SEQ ID NO: 1165362 - DNA, 15 bp, Homo sapiens
atctagagatggaat

SEQ ID NO: 1165363 - DNA, 15 bp, Homo sapiens
gatctagagatggaa

SEQ ID NO: 1165364 - DNA, 15 bp, Homo sapiens
ggatctagagatgga

SEQ ID NO: 1165365 - DNA, 15 bp, Homo sapiens
aggatctagagatgg

SEQ ID NO: 1165366 - DNA, 15 bp, Homo sapiens
gaggatctagagatg

SEQ ID NO: 1165367 - DNA, 15 bp, Homo sapiens
agaggatctagagat

SEQ ID NO: 1165368 - DNA, 15 bp, Homo sapiens
cagaggatctagaga

SEQ ID NO: 1165369 - DNA, 15 bp, Homo sapiens
ccagaggatctagag

SEQ ID NO: 1165370 - DNA, 15 bp, Homo sapiens
cccagaggatctaga

SEQ ID NO: 1165371 - DNA, 15 bp, Homo sapiens
tcccagaggatctag

SEQ ID NO: 1165372 - DNA, 15 bp, Homo sapiens
ttcccagaggatcta

SEQ ID NO: 1165373 - DNA, 15 bp, Homo sapiens
tttcccagaggatct

SEQ ID NO: 1165374 - DNA, 15 bp, Homo sapiens
gtttcccagaggatc

SEQ ID NO: 1165375 - DNA, 15 bp, Homo sapiens
tgtttcccagaggat

SEQ ID NO: 1165376 - DNA, 15 bp, Homo sapiens
ctgtttcccagagga

SEQ ID NO: 1165377 - DNA, 15 bp, Homo sapiens
gctgtttcccagagg

SEQ ID NO: 1165378 - DNA, 15 bp, Homo sapiens
tgctgtttcccagag

SEQ ID NO: 1165379 - DNA, 15 bp, Homo sapiens
ttgctgtttcccaga

SEQ ID NO: 1165380 - DNA, 15 bp, Homo sapiens
tttgctgtttcccag

SEQ ID NO: 1165381 - DNA, 15 bp, Homo sapiens
gtttgctgtttccca

SEQ ID NO: 1165382 - DNA, 15 bp, Homo sapiens
agtttgctgtttccc

SEQ ID NO: 1165383 - DNA, 15 bp, Homo sapiens
aagtttgctgtttcc

SEQ ID NO: 1165384 - DNA, 15 bp, Homo sapiens
taagtttgctgtttc

SEQ ID NO: 1165385 - DNA, 15 bp, Homo sapiens
ataagtttgctgttt

SEQ ID NO: 1165386 - DNA, 15 bp, Homo sapiens
tataagtttgctgtt

SEQ ID NO: 1165387 - DNA, 15 bp, Homo sapiens
atataagtttgctgt

SEQ ID NO: 1165388 - DNA, 15 bp, Homo sapiens
aatataagtttgctg

SEQ ID NO: 1165389 - DNA, 15 bp, Homo sapiens
aaatataagtttgct

SEQ ID NO: 1165390 - DNA, 15 bp, Homo sapiens
taaatataagtttgc

SEQ ID NO: 1165391 - DNA, 15 bp, Homo sapiens
ctaaatataagtttg

SEQ ID NO: 1165392 - DNA, 15 bp, Homo sapiens
tctaaatataagttt

SEQ ID NO: 1165393 - DNA, 15 bp, Homo sapiens
ttctaaatataagtt

SEQ ID NO: 1165394 - DNA, 15 bp, Homo sapiens
gttctaaatataagt

SEQ ID NO: 1165395 - DNA, 15 bp, Homo sapiens
agttctaaatataag

SEQ ID NO: 1165396 - DNA, 15 bp, Homo sapiens
gagttctaaatataa

SEQ ID NO: 1165397 - DNA, 15 bp, Homo sapiens
tgagttctaaatata

SEQ ID NO: 1165398 - DNA, 15 bp, Homo sapiens
gtgagttctaaatat

SEQ ID NO: 1165399 - DNA, 15 bp, Homo sapiens
tgtgagttctaaata

SEQ ID NO: 1165400 - DNA, 15 bp, Homo sapiens
gtgtgagttctaaat

SEQ ID NO: 1165401 - DNA, 15 bp, Homo sapiens
ggtgtgagttctaaa

SEQ ID NO: 1165402 - DNA, 15 bp, Homo sapiens
tggtgtgagttctaa

SEQ ID NO: 1165403 - DNA, 15 bp, Homo sapiens
atggtgtgagttcta

SEQ ID NO: 1165404 - DNA, 15 bp, Homo sapiens
gatggtgtgagttct

SEQ ID NO: 1165405 - DNA, 15 bp, Homo sapiens
tgatggtgtgagttc

SEQ ID NO: 1165406 - DNA, 15 bp, Homo sapiens
ttgatggtgtgagtt

SEQ ID NO: 1165407 - DNA, 15 bp, Homo sapiens
attgatggtgtgagt

SEQ ID NO: 1165408 - DNA, 15 bp, Homo sapiens
aattgatggtgtgag

SEQ ID NO: 1165409 - DNA, 15 bp, Homo sapiens
taattgatggtgtga

SEQ ID NO: 1165410 - DNA, 15 bp, Homo sapiens
gtaattgatggtgtg

SEQ ID NO: 1165411 - DNA, 15 bp, Homo sapiens
agtaattgatggtgt

SEQ ID NO: 1165412 - DNA, 15 bp, Homo sapiens
cagtaattgatggtg

SEQ ID NO: 1165413 - DNA, 15 bp, Homo sapiens
gcagtaattgatggt

SEQ ID NO: 1165414 - DNA, 15 bp, Homo sapiens
agcagtaattgatgg

SEQ ID NO: 1165415 - DNA, 15 bp, Homo sapiens
gagcagtaattgatg

SEQ ID NO: 1165416 - DNA, 15 bp, Homo sapiens
ggagcagtaattgat

SEQ ID NO: 1165417 - DNA, 15 bp, Homo sapiens
aggagcagtaattga

SEQ ID NO: 1165418 - DNA, 15 bp, Homo sapiens
taggagcagtaattg

SEQ ID NO: 1165419 - DNA, 15 bp, Homo sapiens
ttaggagcagtaatt

SEQ ID NO: 1165420 - DNA, 15 bp, Homo sapiens
attaggagcagtaat

SEQ ID NO: 1165421 - DNA, 15 bp, Homo sapiens
cattaggagcagtaa

SEQ ID NO: 1165422 - DNA, 15 bp, Homo sapiens
ccattaggagcagta

SEQ ID NO: 1165423 - DNA, 15 bp, Homo sapiens
accattaggagcagt

SEQ ID NO: 1165424 - DNA, 15 bp, Homo sapiens
gaccattaggagcag

SEQ ID NO: 1165425 - DNA, 15 bp, Homo sapiens
agaccattaggagca

SEQ ID NO: 1165426 - DNA, 15 bp, Homo sapiens
aagaccattaggagc

SEQ ID NO: 1165427 - DNA, 15 bp, Homo sapiens
aaagaccattaggag

SEQ ID NO: 1165428 - DNA, 15 bp, Homo sapiens
taaagaccattagga

SEQ ID NO: 1165429 - DNA, 15 bp, Homo sapiens
ataaagaccattagg

SEQ ID NO: 1165430 - DNA, 15 bp, Homo sapiens
tataaagaccattag

SEQ ID NO: 1165431 - DNA, 15 bp, Homo sapiens
atataaagaccatta

SEQ ID NO: 1165432 - DNA, 15 bp, Homo sapiens
tatataaagaccatt

SEQ ID NO: 1165433 - DNA, 15 bp, Homo sapiens
ttatataaagaccat

SEQ ID NO: 1165434 - DNA, 15 bp, Homo sapiens
cttatataaagacca

SEQ ID NO: 1165435 - DNA, 15 bp, Homo sapiens
acttatataaagacc

SEQ ID NO: 1165436 - DNA, 15 bp, Homo sapiens
gacttatataaagac

SEQ ID NO: 1165437 - DNA, 15 bp, Homo sapiens
tgacttatataaaga

SEQ ID NO: 1165438 - DNA, 15 bp, Homo sapiens
atgacttatataaag

SEQ ID NO: 1165439 - DNA, 15 bp, Homo sapiens
aatgacttatataaa

SEQ ID NO: 1165440 - DNA, 15 bp, Homo sapiens
aaatgacttatataa

SEQ ID NO: 1165441 - DNA, 15 bp, Homo sapiens
taaatgacttatata

SEQ ID NO: 1165442 - DNA, 15 bp, Homo sapiens
ttaaatgacttatat

SEQ ID NO: 1165443 - DNA, 15 bp, Homo sapiens
attaaatgacttata

SEQ ID NO: 1165444 - DNA, 15 bp, Homo sapiens
gattaaatgacttat

SEQ ID NO: 1165445 - DNA, 15 bp, Homo sapiens
agattaaatgactta

SEQ ID NO: 1165446 - DNA, 15 bp, Homo sapiens
aagattaaatgactt

SEQ ID NO: 1165447 - DNA, 15 bp, Homo sapiens
gaagattaaatgact

SEQ ID NO: 1165448 - DNA, 15 bp, Homo sapiens
tgaagattaaatgac

SEQ ID NO: 1165449 - DNA, 15 bp, Homo sapiens
ttgaagattaaatga

SEQ ID NO: 1165450 - DNA, 15 bp, Homo sapiens
tttgaagattaaatg

SEQ ID NO: 1165451 - DNA, 15 bp, Homo sapiens
ctttgaagattaaat

SEQ ID NO: 1165452 - DNA, 15 bp, Homo sapiens
gctttgaagattaaa

SEQ ID NO: 1165453 - DNA, 15 bp, Homo sapiens
tgctttgaagattaa

SEQ ID NO: 1165454 - DNA, 15 bp, Homo sapiens
ttgctttgaagatta

SEQ ID NO: 1165455 - DNA, 15 bp, Homo sapiens
attgctttgaagatt

SEQ ID NO: 1165456 - DNA, 15 bp, Homo sapiens
aattgctttgaagat

SEQ ID NO: 1165457 - DNA, 15 bp, Homo sapiens
gaattgctttgaaga

SEQ ID NO: 1165458 - DNA, 15 bp, Homo sapiens
agaattgctttgaag

SEQ ID NO: 1165459 - DNA, 15 bp, Homo sapiens
tagaattgctttgaa

SEQ ID NO: 1165460 - DNA, 15 bp, Homo sapiens
atagaattgctttga

SEQ ID NO: 1165461 - DNA, 15 bp, Homo sapiens
tatagaattgctttg

SEQ ID NO: 1165462 - DNA, 15 bp, Homo sapiens
atatagaattgcttt

SEQ ID NO: 1165463 - DNA, 15 bp, Homo sapiens
tatatagaattgctt

SEQ ID NO: 1165464 - DNA, 15 bp, Homo sapiens
atatatagaattgct

SEQ ID NO: 1165465 - DNA, 15 bp, Homo sapiens
aatatatagaattgc

SEQ ID NO: 1165466 - DNA, 15 bp, Homo sapiens
taatatatagaattg

SEQ ID NO: 1165467 - DNA, 15 bp, Homo sapiens
ataatatatagaatt

SEQ ID NO: 1165468 - DNA, 15 bp, Homo sapiens
aataatatatagaat

SEQ ID NO: 1165469 - DNA, 15 bp, Homo sapiens
taataatatatagaa

SEQ ID NO: 1165470 - DNA, 15 bp, Homo sapiens
gtaataatatataga

SEQ ID NO: 1165471 - DNA, 15 bp, Homo sapiens
agtaataatatatag

SEQ ID NO: 1165472 - DNA, 15 bp, Homo sapiens
gagtaataatatata

SEQ ID NO: 1165473 - DNA, 15 bp, Homo sapiens
agagtaataatatat

SEQ ID NO: 1165474 - DNA, 15 bp, Homo sapiens
gagagtaataatata

SEQ ID NO: 1165475 - DNA, 15 bp, Homo sapiens
aggagagtaataata

SEQ ID NO: 1165476 - DNA, 15 bp, Homo sapiens
gaggagagtaataat

SEQ ID NO: 1165477 - DNA, 15 bp, Homo sapiens
tgaggagagtaataa

SEQ ID NO: 1165478 - DNA, 15 bp, Homo sapiens
atgaggagagtaata

SEQ ID NO: 1165479 - DNA, 15 bp, Homo sapiens
aatgaggagagtaat

SEQ ID NO: 1165480 - DNA, 15 bp, Homo sapiens
aaatgaggagagtaa

SEQ ID NO: 1165481 - DNA, 15 bp, Homo sapiens
aaaatgaggagagta

SEQ ID NO: 1165482 - DNA, 15 bp, Homo sapiens
taaaatgaggagagt

SEQ ID NO: 1165483 - DNA, 15 bp, Homo sapiens
gtaaaatgaggagag

SEQ ID NO: 1165484 - DNA, 15 bp, Homo sapiens
tgtaaaatgaggaga

SEQ ID NO: 1165485 - DNA, 15 bp, Homo sapiens
ctgtaaaatgaggag

SEQ ID NO: 1165486 - DNA, 15 bp, Homo sapiens
tctgtaaaatgagga

SEQ ID NO: 1165487 - DNA, 15 bp, Homo sapiens
atctgtaaaatgagg

SEQ ID NO: 1165488 - DNA, 15 bp, Homo sapiens
catctgtaaaatgag

SEQ ID NO: 1165489 - DNA, 15 bp, Homo sapiens
gcatctgtaaaatga

SEQ ID NO: 1165490 - DNA, 15 bp, Homo sapiens
ctgcatctgtaaaat

SEQ ID NO: 1165491 - DNA, 15 bp, Homo sapiens
tctgcatctgtaaaa

SEQ ID NO: 1165492 - DNA, 15 bp, Homo sapiens
ctctgcatctgtaaa

SEQ ID NO: 1165493 - DNA, 15 bp, Homo sapiens
cctctgcatctgtaa

SEQ ID NO: 1165494 - DNA, 15 bp, Homo sapiens
gcctctgcatctgta

SEQ ID NO: 1165495 - DNA, 15 bp, Homo sapiens
ggcctctgcatctgt

SEQ ID NO: 1165496 - DNA, 15 bp, Homo sapiens
tggcctctgcatctg

SEQ ID NO: 1165497 - DNA, 15 bp, Homo sapiens
ttggcctctgcatct

SEQ ID NO: 1165498 - DNA, 15 bp, Homo sapiens
cttggcctctgcatc

SEQ ID NO: 1165499 - DNA, 15 bp, Homo sapiens
tcttggcctctgcat

SEQ ID NO: 1165500 - DNA, 15 bp, Homo sapiens
ttcttggcctctgca

SEQ ID NO: 1165501 - DNA, 15 bp, Homo sapiens
tttcttggcctctgc

SEQ ID NO: 1165502 - DNA, 15 bp, Homo sapiens
atttcttggcctctg

SEQ ID NO: 1165503 - DNA, 15 bp, Homo sapiens
aatttcttggcctct

SEQ ID NO: 1165504 - DNA, 15 bp, Homo sapiens
aaatttcttggcctc

SEQ ID NO: 1165505 - DNA, 15 bp, Homo sapiens
caaatttcttggcct

SEQ ID NO: 1165506 - DNA, 15 bp, Homo sapiens
acaaatttcttggcc

SEQ ID NO: 1165507 - DNA, 15 bp, Homo sapiens
aacaaatttcttggc

SEQ ID NO: 1165508 - DNA, 15 bp, Homo sapiens
gaacaaatttcttgg

SEQ ID NO: 1165509 - DNA, 15 bp, Homo sapiens
tgaacaaatttcttg

SEQ ID NO: 1165510 - DNA, 15 bp, Homo sapiens
ttgaacaaatttctt

SEQ ID NO: 1165511 - DNA, 15 bp, Homo sapiens
cttgaacaaatttct

SEQ ID NO: 1165512 - DNA, 15 bp, Homo sapiens
tcttgaacaaatttc

SEQ ID NO: 1165513 - DNA, 15 bp, Homo sapiens
ttcttgaacaaattt

SEQ ID NO: 1165514 - DNA, 15 bp, Homo sapiens
attcttgaacaaatt

SEQ ID NO: 1165515 - DNA, 15 bp, Homo sapiens
tattcttgaacaaat

SEQ ID NO: 1165516 - DNA, 15 bp, Homo sapiens
atattcttgaacaaa

SEQ ID NO: 1165517 - DNA, 15 bp, Homo sapiens
tatattcttgaacaa

SEQ ID NO: 1165518 - DNA, 15 bp, Homo sapiens
ctatattcttgaaca

SEQ ID NO: 1165519 - DNA, 15 bp, Homo sapiens
gctatattcttgaac

SEQ ID NO: 1165520 - DNA, 15 bp, Homo sapiens
tgctatattcttgaa

SEQ ID NO: 1165521 - DNA, 15 bp, Homo sapiens
ttgctatattcttga

SEQ ID NO: 1165522 - DNA, 15 bp, Homo sapiens
cttgctatattcttg

SEQ ID NO: 1165523 - DNA, 15 bp, Homo sapiens
ccttgctatattctt

SEQ ID NO: 1165524 - DNA, 15 bp, Homo sapiens
tccttgctatattct

SEQ ID NO: 1165525 - DNA, 15 bp, Homo sapiens
ttccttgctatattc

SEQ ID NO: 1165526 - DNA, 15 bp, Homo sapiens
cttccttgctatatt

SEQ ID NO: 1165527 - DNA, 15 bp, Homo sapiens
tcttccttgctatat

SEQ ID NO: 1165528 - DNA, 15 bp, Homo sapiens
ctcttccttgctata

SEQ ID NO: 1165529 - DNA, 15 bp, Homo sapiens
tctcttccttgctat

SEQ ID NO: 1165530 - DNA, 15 bp, Homo sapiens
gtctcttccttgcta

SEQ ID NO: 1165531 - DNA, 15 bp, Homo sapiens
tgtctcttccttgct

SEQ ID NO: 1165532 - DNA, 15 bp, Homo sapiens
ttgtctcttccttgc

SEQ ID NO: 1165533 - DNA, 15 bp, Homo sapiens
attgtctcttccttg

SEQ ID NO: 1165534 - DNA, 15 bp, Homo sapiens
cattgtctcttcctt

SEQ ID NO: 1165535 - DNA, 15 bp, Homo sapiens
gcattgtctcttcct

SEQ ID NO: 1165536 - DNA, 15 bp, Homo sapiens
agcattgtctcttcc

SEQ ID NO: 1165537 - DNA, 15 bp, Homo sapiens
tagcattgtctcttc

SEQ ID NO: 1165538 - DNA, 15 bp, Homo sapiens
ctagcattgtctctt

SEQ ID NO: 1165539 - DNA, 15 bp, Homo sapiens
cctagcattgtctct

SEQ ID NO: 1165540 - DNA, 15 bp, Homo sapiens
ccctagcattgtctc

SEQ ID NO: 1165541 - DNA, 15 bp, Homo sapiens
accctagcattgtct

SEQ ID NO: 1165542 - DNA, 15 bp, Homo sapiens
taccctagcattgtc

SEQ ID NO: 1165543 - DNA, 15 bp, Homo sapiens
ataccctagcattgt

SEQ ID NO: 1165544 - DNA, 15 bp, Homo sapiens
tataccctagcattg

SEQ ID NO: 1165545 - DNA, 15 bp, Homo sapiens
ttataccctagcatt

SEQ ID NO: 1165546 - DNA, 15 bp, Homo sapiens
tttataccctagcat

SEQ ID NO: 1165547 - DNA, 15 bp, Homo sapiens
atttataccctagca

SEQ ID NO: 1165548 - DNA, 15 bp, Homo sapiens
aatttataccctagc

SEQ ID NO: 1165549 - DNA, 15 bp, Homo sapiens
aaatttataccctag

SEQ ID NO: 1165550 - DNA, 15 bp, Homo sapiens
caaatttatacccta

SEQ ID NO: 1165551 - DNA, 15 bp, Homo sapiens
gcaaatttataccct

SEQ ID NO: 1165552 - DNA, 15 bp, Homo sapiens
tgcaaatttataccc

SEQ ID NO: 1165553 - DNA, 15 bp, Homo sapiens
atgcaaatttatacc

SEQ ID NO: 1165554 - DNA, 15 bp, Homo sapiens
tatgcaaatttatac

SEQ ID NO: 1165555 - DNA, 15 bp, Homo sapiens
ctatgcaaatttata

SEQ ID NO: 1165556 - DNA, 15 bp, Homo sapiens
actatgcaaatttat

SEQ ID NO: 1165557 - DNA, 15 bp, Homo sapiens
gactatgcaaattta

SEQ ID NO: 1165558 - DNA, 15 bp, Homo sapiens
tgactatgcaaattt

SEQ ID NO: 1165559 - DNA, 15 bp, Homo sapiens
ctgactatgcaaatt

SEQ ID NO: 1165560 - DNA, 15 bp, Homo sapiens
cctgactatgcaaat

SEQ ID NO: 1165561 - DNA, 15 bp, Homo sapiens
gcctgactatgcaaa

SEQ ID NO: 1165562 - DNA, 15 bp, Homo sapiens
agcctgactatgcaa

SEQ ID NO: 1165563 - DNA, 15 bp, Homo sapiens
gagcctgactatgca

SEQ ID NO: 1165564 - DNA, 15 bp, Homo sapiens
agagcctgactatgc

SEQ ID NO: 1165565 - DNA, 15 bp, Homo sapiens
tagagcctgactatg

SEQ ID NO: 1165566 - DNA, 15 bp, Homo sapiens
ttagagcctgactat

SEQ ID NO: 1165567 - DNA, 15 bp, Homo sapiens
tttagagcctgacta

SEQ ID NO: 1165568 - DNA, 15 bp, Homo sapiens
ctttagagcctgact

SEQ ID NO: 1165569 - DNA, 15 bp, Homo sapiens
tctttagagcctgac

SEQ ID NO: 1165570 - DNA, 15 bp, Homo sapiens
atctttagagcctga

SEQ ID NO: 1165571 - DNA, 15 bp, Homo sapiens
catctttagagcctg

SEQ ID NO: 1165572 - DNA, 15 bp, Homo sapiens
tcatctttagagcct

SEQ ID NO: 1165573 - DNA, 15 bp, Homo sapiens
ctcatctttagagcc

SEQ ID NO: 1165574 - DNA, 15 bp, Homo sapiens
gctcatctttagagc

SEQ ID NO: 1165575 - DNA, 15 bp, Homo sapiens
agctcatctttagag

SEQ ID NO: 1165576 - DNA, 15 bp, Homo sapiens
gagctcatctttaga

SEQ ID NO: 1165577 - DNA, 15 bp, Homo sapiens
agagctcatctttag

SEQ ID NO: 1165578 - DNA, 15 bp, Homo sapiens
aagagctcatcttta

SEQ ID NO: 1165579 - DNA, 15 bp, Homo sapiens
taagagctcatcttt

SEQ ID NO: 1165580 - DNA, 15 bp, Homo sapiens
ttaagagctcatctt

SEQ ID NO: 1165581 - DNA, 15 bp, Homo sapiens
attaagagctcatct

SEQ ID NO: 1165582 - DNA, 15 bp, Homo sapiens
aattaagagctcatc

SEQ ID NO: 1165583 - DNA, 15 bp, Homo sapiens
taattaagagctcat

SEQ ID NO: 1165584 - DNA, 15 bp, Homo sapiens
gtaattaagagctca

SEQ ID NO: 1165585 - DNA, 15 bp, Homo sapiens
agtaattaagagctc

SEQ ID NO: 1165586 - DNA, 15 bp, Homo sapiens
tagtaattaagagct

SEQ ID NO: 1165587 - DNA, 15 bp, Homo sapiens
atagtaattaagagc

SEQ ID NO: 1165588 - DNA, 15 bp, Homo sapiens
tatagtaattaagag

SEQ ID NO: 1165589 - DNA, 15 bp, Homo sapiens
ttatagtaattaaga

SEQ ID NO: 1165590 - DNA, 15 bp, Homo sapiens
attatagtaattaag

SEQ ID NO: 1165591 - DNA, 15 bp, Homo sapiens
tattatagtaattaa

SEQ ID NO: 1165592 - DNA, 15 bp, Homo sapiens
atattatagtaatta

SEQ ID NO: 1165593 - DNA, 15 bp, Homo sapiens
tatattatagtaatt

SEQ ID NO: 1165594 - DNA, 15 bp, Homo sapiens
atatattatagtaat

SEQ ID NO: 1165595 - DNA, 15 bp, Homo sapiens
tatatattatagtaa

SEQ ID NO: 1165596 - DNA, 15 bp, Homo sapiens
ctatatattatagta

SEQ ID NO: 1165597 - DNA, 15 bp, Homo sapiens
cctatatattatagt

SEQ ID NO: 1165598 - DNA, 15 bp, Homo sapiens
tcctatatattatag

SEQ ID NO: 1165599 - DNA, 15 bp, Homo sapiens
ctcctatatattata

SEQ ID NO: 1165600 - DNA, 15 bp, Homo sapiens
cctcctatatattat

SEQ ID NO: 1165601 - DNA, 15 bp, Homo sapiens
gcctcctatatatta

SEQ ID NO: 1165602 - DNA, 15 bp, Homo sapiens
tgcctcctatatatt

SEQ ID NO: 1165603 - DNA, 15 bp, Homo sapiens
ttgcctcctatatat

SEQ ID NO: 1165604 - DNA, 15 bp, Homo sapiens
gttgcctcctatata

SEQ ID NO: 1165605 - DNA, 15 bp, Homo sapiens
cgttgcctcctatat

SEQ ID NO: 1165606 - DNA, 15 bp, Homo sapiens
acgttgcctcctata

SEQ ID NO: 1165607 - DNA, 15 bp, Homo sapiens
tacgttgcctcctat

SEQ ID NO: 1165608 - DNA, 15 bp, Homo sapiens
atacgttgcctccta

SEQ ID NO: 1165609 - DNA, 15 bp, Homo sapiens
gatacgttgcctcct

SEQ ID NO: 1165610 - DNA, 15 bp, Homo sapiens
ggatacgttgcctcc

SEQ ID NO: 1165611 - DNA, 15 bp, Homo sapiens
tggatacgttgcctc

SEQ ID NO: 1165612 - DNA, 15 bp, Homo sapiens
ctggatacgttgcct

SEQ ID NO: 1165613 - DNA, 15 bp, Homo sapiens
gctggatacgttgcc

SEQ ID NO: 1165614 - DNA, 15 bp, Homo sapiens
agctggatacgttgc

SEQ ID NO: 1165615 - DNA, 15 bp, Homo sapiens
aagctggatacgttg

SEQ ID NO: 1165616 - DNA, 15 bp, Homo sapiens
gaagctggatacgtt

SEQ ID NO: 1165617 - DNA, 15 bp, Homo sapiens
agaagctggatacgt

SEQ ID NO: 1165618 - DNA, 15 bp, Homo sapiens
cagaagctggatacg

SEQ ID NO: 1165619 - DNA, 15 bp, Homo sapiens
acagaagctggatac

SEQ ID NO: 1165620 - DNA, 15 bp, Homo sapiens
cacagaagctggata

SEQ ID NO: 1165621 - DNA, 15 bp, Homo sapiens
ccacagaagctggat

SEQ ID NO: 1165622 - DNA, 15 bp, Homo sapiens
cccacagaagctgga

SEQ ID NO: 1165623 - DNA, 15 bp, Homo sapiens
tcccacagaagctgg

SEQ ID NO: 1165624 - DNA, 15 bp, Homo sapiens
ttcccacagaagctg

SEQ ID NO: 1165625 - DNA, 15 bp, Homo sapiens
attcccacagaagct

SEQ ID NO: 1165626 - DNA, 15 bp, Homo sapiens
tattcccacagaagc

SEQ ID NO: 1165627 - DNA, 15 bp, Homo sapiens
gtattcccacagaag

SEQ ID NO: 1165628 - DNA, 15 bp, Homo sapiens
ggtattcccacagaa

SEQ ID NO: 1165629 - DNA, 15 bp, Homo sapiens
aggtattcccacaga

SEQ ID NO: 1165630 - DNA, 15 bp, Homo sapiens
gaggtattcccacag

SEQ ID NO: 1165631 - DNA, 15 bp, Homo sapiens
agaggtattcccaca

SEQ ID NO: 1165632 - DNA, 15 bp, Homo sapiens
tagaggtattcccac

SEQ ID NO: 1165633 - DNA, 15 bp, Homo sapiens
ctagaggtattccca

SEQ ID NO: 1165634 - DNA, 15 bp, Homo sapiens
tctagaggtattccc

SEQ ID NO: 1165635 - DNA, 15 bp, Homo sapiens
ctctagaggtattcc

SEQ ID NO: 1165636 - DNA, 15 bp, Homo sapiens
tctctagaggtattc

SEQ ID NO: 1165637 - DNA, 15 bp, Homo sapiens
ttctctagaggtatt

SEQ ID NO: 1165638 - DNA, 15 bp, Homo sapiens
cttctctagaggtat

SEQ ID NO: 1165639 - DNA, 15 bp, Homo sapiens
ccttctctagaggta

SEQ ID NO: 1165640 - DNA, 15 bp, Homo sapiens
cccttctctagaggt

SEQ ID NO: 1165641 - DNA, 15 bp, Homo sapiens
ccccttctctagagg

SEQ ID NO: 1165642 - DNA, 15 bp, Homo sapiens
tccccttctctagag

SEQ ID NO: 1165643 - DNA, 15 bp, Homo sapiens
atccccttctctaga

SEQ ID NO: 1165644 - DNA, 15 bp, Homo sapiens
catccccttctctag

SEQ ID NO: 1165645 - DNA, 15 bp, Homo sapiens
acatccccttctcta

SEQ ID NO: 1165646 - DNA, 15 bp, Homo sapiens
gacatccccttctct

SEQ ID NO: 1165647 - DNA, 15 bp, Homo sapiens
tgacatccccttctc

SEQ ID NO: 1165648 - DNA, 15 bp, Homo sapiens
ttgacatccccttct

SEQ ID NO: 1165649 - DNA, 15 bp, Homo sapiens
attgacatccccttc

SEQ ID NO: 1165650 - DNA, 15 bp, Homo sapiens
tattgacatcccctt

SEQ ID NO: 1165651 - DNA, 15 bp, Homo sapiens
ttattgacatcccct

SEQ ID NO: 1165652 - DNA, 15 bp, Homo sapiens
gttattgacatcccc

SEQ ID NO: 1165653 - DNA, 15 bp, Homo sapiens
tgttattgacatccc

SEQ ID NO: 1165654 - DNA, 15 bp, Homo sapiens
gtgttattgacatcc

SEQ ID NO: 1165655 - DNA, 15 bp, Homo sapiens
tgtgttattgacatc

SEQ ID NO: 1165656 - DNA, 15 bp, Homo sapiens
atgtgttattgacat

SEQ ID NO: 1165657 - DNA, 15 bp, Homo sapiens
tatgtgttattgaca

SEQ ID NO: 1165658 - DNA, 15 bp, Homo sapiens
atatgtgttattgac

SEQ ID NO: 1165659 - DNA, 15 bp, Homo sapiens
tatatgtgttattga

SEQ ID NO: 1165660 - DNA, 15 bp, Homo sapiens
gtatatgtgttattg

SEQ ID NO: 1165661 - DNA, 15 bp, Homo sapiens
tgtatatgtgttatt

SEQ ID NO: 1165662 - DNA, 15 bp, Homo sapiens
ctgtatatgtgttat

SEQ ID NO: 1165663 - DNA, 15 bp, Homo sapiens
gctgtatatgtgtta

SEQ ID NO: 1165664 - DNA, 15 bp, Homo sapiens
agctgtatatgtgtt

SEQ ID NO: 1165665 - DNA, 15 bp, Homo sapiens
gagctgtatatgtgt

SEQ ID NO: 1165666 - DNA, 15 bp, Homo sapiens
tgagctgtatatgtg

SEQ ID NO: 1165667 - DNA, 15 bp, Homo sapiens
ttgagctgtatatgt

SEQ ID NO: 1165668 - DNA, 15 bp, Homo sapiens
gttgagctgtatatg

SEQ ID NO: 1165669 - DNA, 15 bp, Homo sapiens
agttgagctgtatat

SEQ ID NO: 1165670 - DNA, 15 bp, Homo sapiens
gagttgagctgtata

SEQ ID NO: 1165671 - DNA, 15 bp, Homo sapiens
ggagttgagctgtat

SEQ ID NO: 1165672 - DNA, 15 bp, Homo sapiens
gggagttgagctgta

SEQ ID NO: 1165673 - DNA, 15 bp, Homo sapiens
agggagttgagctgt

SEQ ID NO: 1165674 - DNA, 15 bp, Homo sapiens
aagggagttgagctg

SEQ ID NO: 1165675 - DNA, 15 bp, Homo sapiens
aaagggagttgagct

SEQ ID NO: 1165676 - DNA, 15 bp, Homo sapiens
aaaagggagttgagc

SEQ ID NO: 1165677 - DNA, 15 bp, Homo sapiens
caaaagggagttgag

SEQ ID NO: 1165678 - DNA, 15 bp, Homo sapiens
gcaaaagggagttga

SEQ ID NO: 1165679 - DNA, 15 bp, Homo sapiens
tgcaaaagggagttg

SEQ ID NO: 1165680 - DNA, 15 bp, Homo sapiens
gtgcaaaagggagtt

SEQ ID NO: 1165681 - DNA, 15 bp, Homo sapiens
tgtgcaaaagggagt

SEQ ID NO: 1165682 - DNA, 15 bp, Homo sapiens
ctgtgcaaaagggag

SEQ ID NO: 1165683 - DNA, 15 bp, Homo sapiens
tctgtgcaaaaggga

SEQ ID NO: 1165684 - DNA, 15 bp, Homo sapiens
gtctgtgcaaaaggg

SEQ ID NO: 1165685 - DNA, 15 bp, Homo sapiens
tgtctgtgcaaaagg

SEQ ID NO: 1165686 - DNA, 15 bp, Homo sapiens
gtgtctgtgcaaaag

SEQ ID NO: 1165687 - DNA, 15 bp, Homo sapiens
agtgtctgtgcaaaa

SEQ ID NO: 1165688 - DNA, 15 bp, Homo sapiens
gagtgtctgtgcaaa

SEQ ID NO: 1165689 - DNA, 15 bp, Homo sapiens
tgagtgtctgtgcaa

SEQ ID NO: 1165690 - DNA, 15 bp, Homo sapiens
gtgagtgtctgtgca

SEQ ID NO: 1165691 - DNA, 15 bp, Homo sapiens
agtgagtgtctgtgc

SEQ ID NO: 1165692 - DNA, 15 bp, Homo sapiens
gagtgagtgtctgtg

SEQ ID NO: 1165693 - DNA, 15 bp, Homo sapiens
agagtgagtgtctgt

SEQ ID NO: 1165694 - DNA, 15 bp, Homo sapiens
aagagtgagtgtctg

SEQ ID NO: 1165695 - DNA, 15 bp, Homo sapiens
aaagagtgagtgtct

SEQ ID NO: 1165696 - DNA, 15 bp, Homo sapiens
gaaagagtgagtgtc

SEQ ID NO: 1165697 - DNA, 15 bp, Homo sapiens
tgaaagagtgagtgt

SEQ ID NO: 1165698 - DNA, 15 bp, Homo sapiens
ctgaaagagtgagtg

SEQ ID NO: 1165699 - DNA, 15 bp, Homo sapiens
actgaaagagtgagt

SEQ ID NO: 1165700 - DNA, 15 bp, Homo sapiens
aactgaaagagtgag

SEQ ID NO: 1165701 - DNA, 15 bp, Homo sapiens
caactgaaagagtga

SEQ ID NO: 1165702 - DNA, 15 bp, Homo sapiens
gcaactgaaagagtg

SEQ ID NO: 1165703 - DNA, 15 bp, Homo sapiens
agcaactgaaagagt

SEQ ID NO: 1165704 - DNA, 15 bp, Homo sapiens
aagcaactgaaagag

SEQ ID NO: 1165705 - DNA, 15 bp, Homo sapiens
caagcaactgaaaga

SEQ ID NO: 1165706 - DNA, 15 bp, Homo sapiens
tcaagcaactgaaag

SEQ ID NO: 1165707 - DNA, 15 bp, Homo sapiens
gtcaagcaactgaaa

SEQ ID NO: 1165708 - DNA, 15 bp, Homo sapiens
tgtcaagcaactgaa

SEQ ID NO: 1165709 - DNA, 15 bp, Homo sapiens
atgtcaagcaactga

SEQ ID NO: 1165710 - DNA, 15 bp, Homo sapiens
aatgtcaagcaactg

SEQ ID NO: 1165711 - DNA, 15 bp, Homo sapiens
aaatgtcaagcaact

SEQ ID NO: 1165712 - DNA, 15 bp, Homo sapiens
taaatgtcaagcaac

SEQ ID NO: 1165713 - DNA, 15 bp, Homo sapiens
ttaaatgtcaagcaa

SEQ ID NO: 1165714 - DNA, 15 bp, Homo sapiens
tttaaatgtcaagca

SEQ ID NO: 1165715 - DNA, 15 bp, Homo sapiens
atttaaatgtcaagc

SEQ ID NO: 1165716 - DNA, 15 bp, Homo sapiens
tatttaaatgtcaag

SEQ ID NO: 1165717 - DNA, 15 bp, Homo sapiens
atatttaaatgtcaa

SEQ ID NO: 1165718 - DNA, 15 bp, Homo sapiens
gatatttaaatgtca

SEQ ID NO: 1165719 - DNA, 15 bp, Homo sapiens
tgatatttaaatgtc

SEQ ID NO: 1165720 - DNA, 15 bp, Homo sapiens
ttgatatttaaatgt

SEQ ID NO: 1165721 - DNA, 15 bp, Homo sapiens
attgatatttaaatg

SEQ ID NO: 1165722 - DNA, 15 bp, Homo sapiens
tattgatatttaaat

SEQ ID NO: 1165723 - DNA, 15 bp, Homo sapiens
ttattgatatttaaa

SEQ ID NO: 1165724 - DNA, 15 bp, Homo sapiens
tttattgatatttaa

SEQ ID NO: 1165725 - DNA, 15 bp, Homo sapiens
ttttattgatattta

SEQ ID NO: 1165726 - DNA, 15 bp, Homo sapiens
tttttattgatattt

SEQ ID NO: 1165727 - DNA, 15 bp, Homo sapiens
atttttattgatatt

SEQ ID NO: 1165728 - DNA, 15 bp, Homo sapiens
catttttattgatat

SEQ ID NO: 1165729 - DNA, 15 bp, Homo sapiens
acatttttattgata

SEQ ID NO: 1165730 - DNA, 15 bp, Homo sapiens
aacatttttattgat

SEQ ID NO: 1165731 - DNA, 15 bp, Homo sapiens
aaacatttttattga

SEQ ID NO: 1165732 - DNA, 15 bp, Homo sapiens
aaaacatttttattg

SEQ ID NO: 1165733 - DNA, 15 bp, Homo sapiens
taaaacatttttatt

SEQ ID NO: 1165734 - DNA, 15 bp, Homo sapiens
gttaaaacattttta

SEQ ID NO: 1165735 - DNA, 15 bp, Homo sapiens
agttaaaacattttt

SEQ ID NO: 1165736 - DNA, 15 bp, Homo sapiens
aagttaaaacatttt

SEQ ID NO: 1165737 - DNA, 15 bp, Homo sapiens
aaagttaaaacattt

SEQ ID NO: 1165738 - DNA, 15 bp, Homo sapiens
gaaagttaaaacatt

SEQ ID NO: 1165739 - DNA, 15 bp, Homo sapiens
agaaagttaaaacat

SEQ ID NO: 1165740 - DNA, 15 bp, Homo sapiens
gagaaagttaaaaca

SEQ ID NO: 1165741 - DNA, 15 bp, Homo sapiens
agagaaagttaaaac

SEQ ID NO: 1165742 - DNA, 15 bp, Homo sapiens
tagagaaagttaaaa

SEQ ID NO: 1165743 - DNA, 15 bp, Homo sapiens
ttagagaaagttaaa

SEQ ID NO: 1165744 - DNA, 15 bp, Homo sapiens
attagagaaagttaa

SEQ ID NO: 1165745 - DNA, 15 bp, Homo sapiens
gattagagaaagtta

SEQ ID NO: 1165746 - DNA, 15 bp, Homo sapiens
agattagagaaagtt

SEQ ID NO: 1165747 - DNA, 15 bp, Homo sapiens
gagattagagaaagt

SEQ ID NO: 1165748 - DNA, 15 bp, Homo sapiens
tgagattagagaaag

SEQ ID NO: 1165749 - DNA, 15 bp, Homo sapiens
ttgagattagagaaa

SEQ ID NO: 1165750 - DNA, 15 bp, Homo sapiens
attgagattagagaa

SEQ ID NO: 1165751 - DNA, 15 bp, Homo sapiens
aattgagattagaga

SEQ ID NO: 1165752 - DNA, 15 bp, Homo sapiens
taattgagattagag

SEQ ID NO: 1165753 - DNA, 15 bp, Homo sapiens
ctaattgagattaga

SEQ ID NO: 1165754 - DNA, 15 bp, Homo sapiens
gctaattgagattag

SEQ ID NO: 1165755 - DNA, 15 bp, Homo sapiens
tgctaattgagatta

SEQ ID NO: 1165756 - DNA, 15 bp, Homo sapiens
atgctaattgagatt

SEQ ID NO: 1165757 - DNA, 15 bp, Homo sapiens
tatgctaattgagat

SEQ ID NO: 1165758 - DNA, 15 bp, Homo sapiens
gtatgctaattgaga

SEQ ID NO: 1165759 - DNA, 15 bp, Homo sapiens
tgtatgctaattgag

SEQ ID NO: 1165760 - DNA, 15 bp, Homo sapiens
ctgtatgctaattga

SEQ ID NO: 1165761 - DNA, 15 bp, Homo sapiens
tctgtatgctaattg

SEQ ID NO: 1165762 - DNA, 15 bp, Homo sapiens
ctctgtatgctaatt

SEQ ID NO: 1165763 - DNA, 15 bp, Homo sapiens
tctctgtatgctaat

SEQ ID NO: 1165764 - DNA, 15 bp, Homo sapiens
gtctctgtatgctaa

SEQ ID NO: 1165765 - DNA, 15 bp, Homo sapiens
tgtctctgtatgcta

SEQ ID NO: 1165766 - DNA, 15 bp, Homo sapiens
ttgtctctgtatgct

SEQ ID NO: 1165767 - DNA, 15 bp, Homo sapiens
cttgtctctgtatgc

SEQ ID NO: 1165768 - DNA, 15 bp, Homo sapiens
tcttgtctctgtatg

SEQ ID NO: 1165769 - DNA, 15 bp, Homo sapiens
gtcttgtctctgtat

SEQ ID NO: 1165770 - DNA, 15 bp, Homo sapiens
tgtcttgtctctgta

SEQ ID NO: 1165771 - DNA, 15 bp, Homo sapiens
atgtcttgtctctgt

SEQ ID NO: 1165772 - DNA, 15 bp, Homo sapiens
gatgtcttgtctctg

SEQ ID NO: 1165773 - DNA, 15 bp, Homo sapiens
tgatgtcttgtctct

SEQ ID NO: 1165774 - DNA, 15 bp, Homo sapiens
atgatgtcttgtctc

SEQ ID NO: 1165775 - DNA, 15 bp, Homo sapiens
tatgatgtcttgtct

SEQ ID NO: 1165776 - DNA, 15 bp, Homo sapiens
atatgatgtcttgtc

SEQ ID NO: 1165777 - DNA, 15 bp, Homo sapiens
aatatgatgtcttgt

SEQ ID NO: 1165778 - DNA, 15 bp, Homo sapiens
caatatgatgtcttg

SEQ ID NO: 1165779 - DNA, 15 bp, Homo sapiens
acaatatgatgtctt

SEQ ID NO: 1165780 - DNA, 15 bp, Homo sapiens
cacaatatgatgtct

SEQ ID NO: 1165781 - DNA, 15 bp, Homo sapiens
acacaatatgatgtc

SEQ ID NO: 1165782 - DNA, 15 bp, Homo sapiens
aacacaatatgatgt

SEQ ID NO: 1165783 - DNA, 15 bp, Homo sapiens
aaacacaatatgatg

SEQ ID NO: 1165784 - DNA, 15 bp, Homo sapiens
gaaacacaatatgat

SEQ ID NO: 1165785 - DNA, 15 bp, Homo sapiens
agaaacacaatatga

SEQ ID NO: 1165786 - DNA, 15 bp, Homo sapiens
aagaaacacaatatg

SEQ ID NO: 1165787 - DNA, 15 bp, Homo sapiens
aaagaaacacaatat

SEQ ID NO: 1165788 - DNA, 15 bp, Homo sapiens
caaagaaacacaata

SEQ ID NO: 1165789 - DNA, 15 bp, Homo sapiens
ccaaagaaacacaat

SEQ ID NO: 1165790 - DNA, 15 bp, Homo sapiens
cccaaagaaacacaa

SEQ ID NO: 1165791 - DNA, 15 bp, Homo sapiens
ccccaaagaaacaca

SEQ ID NO: 1165792 - DNA, 15 bp, Homo sapiens
cccccaaagaaacac

SEQ ID NO: 1165793 - DNA, 15 bp, Homo sapiens
acccccaaagaaaca

SEQ ID NO: 1165794 - DNA, 15 bp, Homo sapiens
cacccccaaagaaac

SEQ ID NO: 1165795 - DNA, 15 bp, Homo sapiens
tcacccccaaagaaa

SEQ ID NO: 1165796 - DNA, 15 bp, Homo sapiens
atcacccccaaagaa

SEQ ID NO: 1165797 - DNA, 15 bp, Homo sapiens
aatcacccccaaaga

SEQ ID NO: 1165798 - DNA, 15 bp, Homo sapiens
taatcacccccaaag

SEQ ID NO: 1165799 - DNA, 15 bp, Homo sapiens
gtaatcacccccaaa

SEQ ID NO: 1165800 - DNA, 15 bp, Homo sapiens
ggtaatcacccccaa

SEQ ID NO: 1165801 - DNA, 15 bp, Homo sapiens
aggtaatcaccccca

SEQ ID NO: 1165802 - DNA, 15 bp, Homo sapiens
gaggtaatcaccccc

SEQ ID NO: 1165803 - DNA, 15 bp, Homo sapiens
agaggtaatcacccc

SEQ ID NO: 1165804 - DNA, 15 bp, Homo sapiens
cagaggtaatcaccc

SEQ ID NO: 1165805 - DNA, 15 bp, Homo sapiens
acagaggtaatcacc

SEQ ID NO: 1165806 - DNA, 15 bp, Homo sapiens
tacagaggtaatcac

SEQ ID NO: 1165807 - DNA, 15 bp, Homo sapiens
ttacagaggtaatca

SEQ ID NO: 1165808 - DNA, 15 bp, Homo sapiens
attacagaggtaatc

SEQ ID NO: 1165809 - DNA, 15 bp, Homo sapiens
gattacagaggtaat

SEQ ID NO: 1165810 - DNA, 15 bp, Homo sapiens
cgattacagaggtaa

SEQ ID NO: 1165811 - DNA, 15 bp, Homo sapiens
acgattacagaggta

SEQ ID NO: 1165812 - DNA, 15 bp, Homo sapiens
aacgattacagaggt

SEQ ID NO: 1165813 - DNA, 15 bp, Homo sapiens
taacgattacagagg

SEQ ID NO: 1165814 - DNA, 15 bp, Homo sapiens
ctaacgattacagag

SEQ ID NO: 1165815 - DNA, 15 bp, Homo sapiens
tctaacgattacaga

SEQ ID NO: 1165816 - DNA, 15 bp, Homo sapiens
gtctaacgattacag

SEQ ID NO: 1165817 - DNA, 15 bp, Homo sapiens
agtctaacgattaca

SEQ ID NO: 1165818 - DNA, 15 bp, Homo sapiens
tagtctaacgattac

SEQ ID NO: 1165819 - DNA, 15 bp, Homo sapiens
ttagtctaacgatta

SEQ ID NO: 1165820 - DNA, 15 bp, Homo sapiens
gttagtctaacgatt

SEQ ID NO: 1165821 - DNA, 15 bp, Homo sapiens
tgttagtctaacgat

SEQ ID NO: 1165822 - DNA, 15 bp, Homo sapiens
ttgttagtctaacga

SEQ ID NO: 1165823 - DNA, 15 bp, Homo sapiens
cttgttagtctaacg

SEQ ID NO: 1165824 - DNA, 15 bp, Homo sapiens
tcttgttagtctaac

SEQ ID NO: 1165825 - DNA, 15 bp, Homo sapiens
ttcttgttagtctaa

SEQ ID NO: 1165826 - DNA, 15 bp, Homo sapiens
tttcttgttagtcta

SEQ ID NO: 1165827 - DNA, 15 bp, Homo sapiens
ttttcttgttagtct

SEQ ID NO: 1165828 - DNA, 15 bp, Homo sapiens
attttcttgttagtc

SEQ ID NO: 1165829 - DNA, 15 bp, Homo sapiens
aattttcttgttagt

SEQ ID NO: 1165830 - DNA, 15 bp, Homo sapiens
caattttcttgttag

SEQ ID NO: 1165831 - DNA, 15 bp, Homo sapiens
acaattttcttgtta

SEQ ID NO: 1165832 - DNA, 15 bp, Homo sapiens
cacaattttcttgtt

SEQ ID NO: 1165833 - DNA, 15 bp, Homo sapiens
acacaattttcttgt

SEQ ID NO: 1165834 - DNA, 15 bp, Homo sapiens
cacacaattttcttg

SEQ ID NO: 1165835 - DNA, 15 bp, Homo sapiens
acacacaattttctt

SEQ ID NO: 1165836 - DNA, 15 bp, Homo sapiens
cacacacaattttct

SEQ ID NO: 1165837 - DNA, 15 bp, Homo sapiens
tcacacacaattttc

SEQ ID NO: 1165838 - DNA, 15 bp, Homo sapiens
atcacacacaatttt

SEQ ID NO: 1165839 - DNA, 15 bp, Homo sapiens
tatcacacacaattt

SEQ ID NO: 1165840 - DNA, 15 bp, Homo sapiens
ctatcacacacaatt

SEQ ID NO: 1165841 - DNA, 15 bp, Homo sapiens
tctatcacacacaat

SEQ ID NO: 1165842 - DNA, 15 bp, Homo sapiens
ctctatcacacacaa

SEQ ID NO: 1165843 - DNA, 15 bp, Homo sapiens
cctctatcacacaca

SEQ ID NO: 1165844 - DNA, 15 bp, Homo sapiens
gcctctatcacacac

SEQ ID NO: 1165845 - DNA, 15 bp, Homo sapiens
tgcctctatcacaca

SEQ ID NO: 1165846 - DNA, 15 bp, Homo sapiens
gtgcctctatcacac

SEQ ID NO: 1165847 - DNA, 15 bp, Homo sapiens
tgtgcctctatcaca

SEQ ID NO: 1165848 - DNA, 15 bp, Homo sapiens
ttgtgcctctatcac

SEQ ID NO: 1165849 - DNA, 15 bp, Homo sapiens
tttgtgcctctatca

SEQ ID NO: 1165850 - DNA, 15 bp, Homo sapiens
ttttgtgcctctatc

SEQ ID NO: 1165851 - DNA, 15 bp, Homo sapiens
attttgtgcctctat

SEQ ID NO: 1165852 - DNA, 15 bp, Homo sapiens
tattttgtgcctcta

SEQ ID NO: 1165853 - DNA, 15 bp, Homo sapiens
ctattttgtgcctct

SEQ ID NO: 1165854 - DNA, 15 bp, Homo sapiens
tctattttgtgcctc

SEQ ID NO: 1165855 - DNA, 15 bp, Homo sapiens
ttctattttgtgcct

SEQ ID NO: 1165856 - DNA, 15 bp, Homo sapiens
tttctattttgtgcc

SEQ ID NO: 1165857 - DNA, 15 bp, Homo sapiens
ttttctattttgtgc

SEQ ID NO: 1165858 - DNA, 15 bp, Homo sapiens
attttctattttgtg

SEQ ID NO: 1165859 - DNA, 15 bp, Homo sapiens
cattttctattttgt

SEQ ID NO: 1165860 - DNA, 15 bp, Homo sapiens
tcattttctattttg

SEQ ID NO: 1165861 - DNA, 15 bp, Homo sapiens
atcattttctatttt

SEQ ID NO: 1165862 - DNA, 15 bp, Homo sapiens
aatcattttctattt

SEQ ID NO: 1165863 - DNA, 15 bp, Homo sapiens
gaatcattttctatt

SEQ ID NO: 1165864 - DNA, 15 bp, Homo sapiens
agaatcattttctat

SEQ ID NO: 1165865 - DNA, 15 bp, Homo sapiens
aagaatcattttcta

SEQ ID NO: 1165866 - DNA, 15 bp, Homo sapiens
aaagaatcattttct

SEQ ID NO: 1165867 - DNA, 15 bp, Homo sapiens
gaaagaatcattttc

SEQ ID NO: 1165868 - DNA, 15 bp, Homo sapiens
agaaagaatcatttt

SEQ ID NO: 1165869 - DNA, 15 bp, Homo sapiens
cagaaagaatcattt

SEQ ID NO: 1165870 - DNA, 15 bp, Homo sapiens
acagaaagaatcatt

SEQ ID NO: 1165871 - DNA, 15 bp, Homo sapiens
aacagaaagaatcat

SEQ ID NO: 1165872 - DNA, 15 bp, Homo sapiens
aaacagaaagaatca

SEQ ID NO: 1165873 - DNA, 15 bp, Homo sapiens
caaacagaaagaatc

SEQ ID NO: 1165874 - DNA, 15 bp, Homo sapiens
tcaaacagaaagaat

SEQ ID NO: 1165875 - DNA, 15 bp, Homo sapiens
ttcaaacagaaagaa

SEQ ID NO: 1165876 - DNA, 15 bp, Homo sapiens
tttcaaacagaaaga

SEQ ID NO: 1165877 - DNA, 15 bp, Homo sapiens
ttttcaaacagaaag

SEQ ID NO: 1165878 - DNA, 15 bp, Homo sapiens
cttttcaaacagaaa

SEQ ID NO: 1165879 - DNA, 15 bp, Homo sapiens
acttttcaaacagaa

SEQ ID NO: 1165880 - DNA, 15 bp, Homo sapiens
aacttttcaaacaga

SEQ ID NO: 1165881 - DNA, 15 bp, Homo sapiens
caacttttcaaacag

SEQ ID NO: 1165882 - DNA, 15 bp, Homo sapiens
tcaacttttcaaaca

SEQ ID NO: 1165883 - DNA, 15 bp, Homo sapiens
ctcaacttttcaaac

SEQ ID NO: 1165884 - DNA, 15 bp, Homo sapiens
cctcaacttttcaaa

SEQ ID NO: 1165885 - DNA, 15 bp, Homo sapiens
tcctcaacttttcaa

SEQ ID NO: 1165886 - DNA, 15 bp, Homo sapiens
ttcctcaacttttca

SEQ ID NO: 1165887 - DNA, 15 bp, Homo sapiens
attcctcaacttttc

SEQ ID NO: 1165888 - DNA, 15 bp, Homo sapiens
cattcctcaactttt

SEQ ID NO: 1165889 - DNA, 15 bp, Homo sapiens
acattcctcaacttt

SEQ ID NO: 1165890 - DNA, 15 bp, Homo sapiens
aacattcctcaactt

SEQ ID NO: 1165891 - DNA, 15 bp, Homo sapiens
aaacattcctcaact

SEQ ID NO: 1165892 - DNA, 15 bp, Homo sapiens
aaaacattcctcaac

SEQ ID NO: 1165893 - DNA, 15 bp, Homo sapiens
aaaaacattcctcaa

SEQ ID NO: 1165894 - DNA, 15 bp, Homo sapiens
aaaaaacattcctca

SEQ ID NO: 1165895 - DNA, 15 bp, Homo sapiens
taaaaaacattcctc

SEQ ID NO: 1165896 - DNA, 15 bp, Homo sapiens
gtaaaaaacattcct

SEQ ID NO: 1165897 - DNA, 15 bp, Homo sapiens
tgtaaaaaacattcc

SEQ ID NO: 1165898 - DNA, 15 bp, Homo sapiens
ctgtaaaaaacattc

SEQ ID NO: 1165899 - DNA, 15 bp, Homo sapiens
cctgtaaaaaacatt

SEQ ID NO: 1165900 - DNA, 15 bp, Homo sapiens
tcctgtaaaaaacat

SEQ ID NO: 1165901 - DNA, 15 bp, Homo sapiens
ctcctgtaaaaaaca

SEQ ID NO: 1165902 - DNA, 15 bp, Homo sapiens
cctcctgtaaaaaac

SEQ ID NO: 1165903 - DNA, 15 bp, Homo sapiens
acctcctgtaaaaaa

SEQ ID NO: 1165904 - DNA, 15 bp, Homo sapiens
tacctcctgtaaaaa

SEQ ID NO: 1165905 - DNA, 15 bp, Homo sapiens
ttacctcctgtaaaa

SEQ ID NO: 1165906 - DNA, 15 bp, Homo sapiens
cttacctcctgtaaa

SEQ ID NO: 1165907 - DNA, 15 bp, Homo sapiens
acttacctcctgtaa

SEQ ID NO: 1165908 - DNA, 15 bp, Homo sapiens
aacttacctcctgta

SEQ ID NO: 1165909 - DNA, 15 bp, Homo sapiens
aaacttacctcctgt

SEQ ID NO: 1165910 - DNA, 15 bp, Homo sapiens
caaacttacctcctg

SEQ ID NO: 1165911 - DNA, 15 bp, Homo sapiens
tcaaacttacctcct

SEQ ID NO: 1165912 - DNA, 15 bp, Homo sapiens
atcaaacttacctcc

SEQ ID NO: 1165913 - DNA, 15 bp, Homo sapiens
tatcaaacttacctc

SEQ ID NO: 1165914 - DNA, 15 bp, Homo sapiens
gtatcaaacttacct

SEQ ID NO: 1165915 - DNA, 15 bp, Homo sapiens
agtatcaaacttacc

SEQ ID NO: 1165916 - DNA, 15 bp, Homo sapiens
aagtatcaaacttac

SEQ ID NO: 1165917 - DNA, 15 bp, Homo sapiens
taagtatcaaactta

SEQ ID NO: 1165918 - DNA, 15 bp, Homo sapiens
ttaagtatcaaactt

SEQ ID NO: 1165919 - DNA, 15 bp, Homo sapiens
gttaagtatcaaact

SEQ ID NO: 1165920 - DNA, 15 bp, Homo sapiens
agttaagtatcaaac

SEQ ID NO: 1165921 - DNA, 15 bp, Homo sapiens
aagttaagtatcaaa

SEQ ID NO: 1165922 - DNA, 15 bp, Homo sapiens
aaagttaagtatcaa

SEQ ID NO: 1165923 - DNA, 15 bp, Homo sapiens
taaagttaagtatca

SEQ ID NO: 1165924 - DNA, 15 bp, Homo sapiens
ttaaagttaagtatc

SEQ ID NO: 1165925 - DNA, 15 bp, Homo sapiens
tttaaagttaagtat

SEQ ID NO: 1165926 - DNA, 15 bp, Homo sapiens
ctttaaagttaagta

SEQ ID NO: 1165927 - DNA, 15 bp, Homo sapiens
actttaaagttaagt

SEQ ID NO: 1165928 - DNA, 15 bp, Homo sapiens
aactttaaagttaag

SEQ ID NO: 1165929 - DNA, 15 bp, Homo sapiens
caactttaaagttaa

SEQ ID NO: 1165930 - DNA, 15 bp, Homo sapiens
tcaactttaaagtta

SEQ ID NO: 1165931 - DNA, 15 bp, Homo sapiens
ttcaactttaaagtt

SEQ ID NO: 1165932 - DNA, 15 bp, Homo sapiens
attcaactttaaagt

SEQ ID NO: 1165933 - DNA, 15 bp, Homo sapiens
aattcaactttaaag

SEQ ID NO: 1165934 - DNA, 15 bp, Homo sapiens
caattcaactttaaa

SEQ ID NO: 1165935 - DNA, 15 bp, Homo sapiens
tcaattcaactttaa

SEQ ID NO: 1165936 - DNA, 15 bp, Homo sapiens
atcaattcaacttta

SEQ ID NO: 1165937 - DNA, 15 bp, Homo sapiens
aatcaattcaacttt

SEQ ID NO: 1165938 - DNA, 15 bp, Homo sapiens
caatcaattcaactt

SEQ ID NO: 1165939 - DNA, 15 bp, Homo sapiens
ccaatcaattcaact

SEQ ID NO: 1165940 - DNA, 15 bp, Homo sapiens
accaatcaattcaac

SEQ ID NO: 1165941 - DNA, 15 bp, Homo sapiens
caccaatcaattcaa

SEQ ID NO: 1165942 - DNA, 15 bp, Homo sapiens
acaccaatcaattca

SEQ ID NO: 1165943 - DNA, 15 bp, Homo sapiens
tacaccaatcaattc

SEQ ID NO: 1165944 - DNA, 15 bp, Homo sapiens
gtacaccaatcaatt

SEQ ID NO: 1165945 - DNA, 15 bp, Homo sapiens
ggtacaccaatcaat

SEQ ID NO: 1165946 - DNA, 15 bp, Homo sapiens
aaggtacaccaatca

SEQ ID NO: 1165947 - DNA, 15 bp, Homo sapiens
gaaggtacaccaatc

SEQ ID NO: 1165948 - DNA, 15 bp, Homo sapiens
tgaaggtacaccaat

SEQ ID NO: 1165949 - DNA, 15 bp, Homo sapiens
atgaaggtacaccaa

SEQ ID NO: 1165950 - DNA, 15 bp, Homo sapiens
aatgaaggtacacca

SEQ ID NO: 1165951 - DNA, 15 bp, Homo sapiens
caatgaaggtacacc

SEQ ID NO: 1165952 - DNA, 15 bp, Homo sapiens
tcaatgaaggtacac

SEQ ID NO: 1165953 - DNA, 15 bp, Homo sapiens
ttcaatgaaggtaca

SEQ ID NO: 1165954 - DNA, 15 bp, Homo sapiens
tttcaatgaaggtac

SEQ ID NO: 1165955 - DNA, 15 bp, Homo sapiens
ttttcaatgaaggta

SEQ ID NO: 1165956 - DNA, 15 bp, Homo sapiens
attttcaatgaaggt

SEQ ID NO: 1165957 - DNA, 15 bp, Homo sapiens
aattttcaatgaagg

SEQ ID NO: 1165958 - DNA, 15 bp, Homo sapiens
aaattttcaatgaag

SEQ ID NO: 1165959 - DNA, 15 bp, Homo sapiens
aaaattttcaatgaa

SEQ ID NO: 1165960 - DNA, 15 bp, Homo sapiens
gaaaattttcaatga

SEQ ID NO: 1165961 - DNA, 15 bp, Homo sapiens
agaaaattttcaatg

SEQ ID NO: 1165962 - DNA, 15 bp, Homo sapiens
gagaaaattttcaat

SEQ ID NO: 1165963 - DNA, 15 bp, Homo sapiens
ggagaaaattttcaa

SEQ ID NO: 1165964 - DNA, 15 bp, Homo sapiens
aggagaaaattttca

SEQ ID NO: 1165965 - DNA, 15 bp, Homo sapiens
caggagaaaattttc

SEQ ID NO: 1165966 - DNA, 15 bp, Homo sapiens
tcaggagaaaatttt

SEQ ID NO: 1165967 - DNA, 15 bp, Homo sapiens
ttcaggagaaaattt

SEQ ID NO: 1165968 - DNA, 15 bp, Homo sapiens
attcaggagaaaatt

SEQ ID NO: 1165969 - DNA, 15 bp, Homo sapiens
cattcaggagaaaat

SEQ ID NO: 1165970 - DNA, 15 bp, Homo sapiens
gcattcaggagaaaa

SEQ ID NO: 1165971 - DNA, 15 bp, Homo sapiens
ggcattcaggagaaa

SEQ ID NO: 1165972 - DNA, 15 bp, Homo sapiens
gggcattcaggagaa

SEQ ID NO: 1165973 - DNA, 15 bp, Homo sapiens
tgggcattcaggaga

SEQ ID NO: 1165974 - DNA, 15 bp, Homo sapiens
ctgggcattcaggag

SEQ ID NO: 1165975 - DNA, 15 bp, Homo sapiens
gctgggcattcagga

SEQ ID NO: 1165976 - DNA, 15 bp, Homo sapiens
tgctgggcattcagg

SEQ ID NO: 1165977 - DNA, 15 bp, Homo sapiens
atgctgggcattcag

SEQ ID NO: 1165978 - DNA, 15 bp, Homo sapiens
aatgctgggcattca

SEQ ID NO: 1165979 - DNA, 15 bp, Homo sapiens
taatgctgggcattc

SEQ ID NO: 1165980 - DNA, 15 bp, Homo sapiens
ttaatgctgggcatt

SEQ ID NO: 1165981 - DNA, 15 bp, Homo sapiens
tttaatgctgggcat

SEQ ID NO: 1165982 - DNA, 15 bp, Homo sapiens
atttaatgctgggca

SEQ ID NO: 1165983 - DNA, 15 bp, Homo sapiens
tatttaatgctgggc

SEQ ID NO: 1165984 - DNA, 15 bp, Homo sapiens
ttatttaatgctggg

SEQ ID NO: 1165985 - DNA, 15 bp, Homo sapiens
tttatttaatgctgg

SEQ ID NO: 1165986 - DNA, 15 bp, Homo sapiens
atttatttaatgctg

SEQ ID NO: 1165987 - DNA, 15 bp, Homo sapiens
tatttatttaatgct

SEQ ID NO: 1165988 - DNA, 15 bp, Homo sapiens
ttatttatttaatgc

SEQ ID NO: 1165989 - DNA, 15 bp, Homo sapiens
cttatttatttaatg

SEQ ID NO: 1165990 - DNA, 15 bp, Homo sapiens
gcttatttatttaat

SEQ ID NO: 1165991 - DNA, 15 bp, Homo sapiens
tgcttatttatttaa

SEQ ID NO: 1165992 - DNA, 15 bp, Homo sapiens
ttgcttatttattta

SEQ ID NO: 1165993 - DNA, 15 bp, Homo sapiens
tttgcttatttattt

SEQ ID NO: 1165994 - DNA, 15 bp, Homo sapiens
gtttgcttatttatt

SEQ ID NO: 1165995 - DNA, 15 bp, Homo sapiens
tgtttgcttatttat

SEQ ID NO: 1165996 - DNA, 15 bp, Homo sapiens
atgtttgcttattta

SEQ ID NO: 1165997 - DNA, 15 bp, Homo sapiens
tatgtttgcttattt

SEQ ID NO: 1165998 - DNA, 15 bp, Homo sapiens
atatgtttgcttatt

SEQ ID NO: 1165999 - DNA, 15 bp, Homo sapiens
tatatgtttgcttat

SEQ ID NO: 1166000 - DNA, 15 bp, Homo sapiens
ttatatgtttgctta

SEQ ID NO: 1166001 - DNA, 15 bp, Homo sapiens
cttatatgtttgctt

SEQ ID NO: 1166002 - DNA, 15 bp, Homo sapiens
acttatatgtttgct

SEQ ID NO: 1166003 - DNA, 15 bp, Homo sapiens
aacttatatgtttgc

SEQ ID NO: 1166004 - DNA, 15 bp, Homo sapiens
caacttatatgtttg

SEQ ID NO: 1166005 - DNA, 15 bp, Homo sapiens
gcaacttatatgttt

SEQ ID NO: 1166006 - DNA, 15 bp, Homo sapiens
agcaacttatatgtt

SEQ ID NO: 1166007 - DNA, 15 bp, Homo sapiens
aagcaacttatatgt

SEQ ID NO: 1166008 - DNA, 15 bp, Homo sapiens
caagcaacttatatg

SEQ ID NO: 1166009 - DNA, 15 bp, Homo sapiens
acaagcaacttatat

SEQ ID NO: 1166010 - DNA, 15 bp, Homo sapiens
aacaagcaacttata

SEQ ID NO: 1166011 - DNA, 15 bp, Homo sapiens
caacaagcaacttat

SEQ ID NO: 1166012 - DNA, 15 bp, Homo sapiens
tcaacaagcaactta

SEQ ID NO: 1166013 - DNA, 15 bp, Homo sapiens
gtcaacaagcaactt

SEQ ID NO: 1166014 - DNA, 15 bp, Homo sapiens
ggtcaacaagcaact

SEQ ID NO: 1166015 - DNA, 15 bp, Homo sapiens
aggtcaacaagcaac

SEQ ID NO: 1166016 - DNA, 15 bp, Homo sapiens
taggtcaacaagcaa

SEQ ID NO: 1166017 - DNA, 15 bp, Homo sapiens
ctaggtcaacaagca

SEQ ID NO: 1166018 - DNA, 15 bp, Homo sapiens
gctaggtcaacaagc

SEQ ID NO: 1166019 - DNA, 15 bp, Homo sapiens
ggctaggtcaacaag

SEQ ID NO: 1166020 - DNA, 15 bp, Homo sapiens
aggctaggtcaacaa

SEQ ID NO: 1166021 - DNA, 15 bp, Homo sapiens
gaggctaggtcaaca

SEQ ID NO: 1166022 - DNA, 15 bp, Homo sapiens
tgaggctaggtcaac

SEQ ID NO: 1166023 - DNA, 15 bp, Homo sapiens
atgaggctaggtcaa

SEQ ID NO: 1166024 - DNA, 15 bp, Homo sapiens
tatgaggctaggtca

SEQ ID NO: 1166025 - DNA, 15 bp, Homo sapiens
atatgaggctaggtc

SEQ ID NO: 1166026 - DNA, 15 bp, Homo sapiens
tatatgaggctaggt

SEQ ID NO: 1166027 - DNA, 15 bp, Homo sapiens
atatatgaggctagg

SEQ ID NO: 1166028 - DNA, 15 bp, Homo sapiens
tatatatgaggctag

SEQ ID NO: 1166029 - DNA, 15 bp, Homo sapiens
ttatatatgaggcta

SEQ ID NO: 1166030 - DNA, 15 bp, Homo sapiens
attatatatgaggct

SEQ ID NO: 1166031 - DNA, 15 bp, Homo sapiens
cattatatatgaggc

SEQ ID NO: 1166032 - DNA, 15 bp, Homo sapiens
gcattatatatgagg

SEQ ID NO: 1166033 - DNA, 15 bp, Homo sapiens
tgcattatatatgag

SEQ ID NO: 1166034 - DNA, 15 bp, Homo sapiens
ttgcattatatatga

SEQ ID NO: 1166035 - DNA, 15 bp, Homo sapiens
cttgcattatatatg

SEQ ID NO: 1166036 - DNA, 15 bp, Homo sapiens
tcttgcattatatat

SEQ ID NO: 1166037 - DNA, 15 bp, Homo sapiens
ttcttgcattatata

SEQ ID NO: 1166038 - DNA, 15 bp, Homo sapiens
cttcttgcattatat

SEQ ID NO: 1166039 - DNA, 15 bp, Homo sapiens
acttcttgcattata

SEQ ID NO: 1166040 - DNA, 15 bp, Homo sapiens
tacttcttgcattat

SEQ ID NO: 1166041 - DNA, 15 bp, Homo sapiens
ttacttcttgcatta

SEQ ID NO: 1166042 - DNA, 15 bp, Homo sapiens
tttacttcttgcatt

SEQ ID NO: 1166043 - DNA, 15 bp, Homo sapiens
gtttacttcttgcat

SEQ ID NO: 1166044 - DNA, 15 bp, Homo sapiens
tgtttacttcttgca

SEQ ID NO: 1166045 - DNA, 15 bp, Homo sapiens
atgtttacttcttgc

SEQ ID NO: 1166046 - DNA, 15 bp, Homo sapiens
tatgtttacttcttg

SEQ ID NO: 1166047 - DNA, 15 bp, Homo sapiens
ttatgtttacttctt

SEQ ID NO: 1166048 - DNA, 15 bp, Homo sapiens
tttatgtttacttct

SEQ ID NO: 1166049 - DNA, 15 bp, Homo sapiens
gtttatgtttacttc

SEQ ID NO: 1166050 - DNA, 15 bp, Homo sapiens
tgtttatgtttactt

SEQ ID NO: 1166051 - DNA, 15 bp, Homo sapiens
atgtttatgtttact

SEQ ID NO: 1166052 - DNA, 15 bp, Homo sapiens
tatgtttatgtttac

SEQ ID NO: 1166053 - DNA, 15 bp, Homo sapiens
atatgtttatgttta

SEQ ID NO: 1166054 - DNA, 15 bp, Homo sapiens
tatatgtttatgttt

SEQ ID NO: 1166055 - DNA, 15 bp, Homo sapiens
ttatatgtttatgtt

SEQ ID NO: 1166056 - DNA, 15 bp, Homo sapiens
tttatatgtttatgt

SEQ ID NO: 1166057 - DNA, 15 bp, Homo sapiens
atttatatgtttatg

SEQ ID NO: 1166058 - DNA, 15 bp, Homo sapiens
catttatatgtttat

SEQ ID NO: 1166059 - DNA, 15 bp, Homo sapiens
acatttatatgttta

SEQ ID NO: 1166060 - DNA, 15 bp, Homo sapiens
aacatttatatgttt

SEQ ID NO: 1166061 - DNA, 15 bp, Homo sapiens
caacatttatatgtt

SEQ ID NO: 1166062 - DNA, 15 bp, Homo sapiens
acaacatttatatgt

SEQ ID NO: 1166063 - DNA, 15 bp, Homo sapiens
tacaacatttatatg

SEQ ID NO: 1166064 - DNA, 15 bp, Homo sapiens
ttacaacatttatat

SEQ ID NO: 1166065 - DNA, 15 bp, Homo sapiens
tttacaacatttata

SEQ ID NO: 1166066 - DNA, 15 bp, Homo sapiens
atttacaacatttat

SEQ ID NO: 1166067 - DNA, 15 bp, Homo sapiens
catttacaacattta

SEQ ID NO: 1166068 - DNA, 15 bp, Homo sapiens
tcatttacaacattt

SEQ ID NO: 1166069 - DNA, 15 bp, Homo sapiens
ctcatttacaacatt

SEQ ID NO: 1166070 - DNA, 15 bp, Homo sapiens
gctcatttacaacat

SEQ ID NO: 1166071 - DNA, 15 bp, Homo sapiens
tgctcatttacaaca

SEQ ID NO: 1166072 - DNA, 15 bp, Homo sapiens
atgctcatttacaac

SEQ ID NO: 1166073 - DNA, 15 bp, Homo sapiens
gatgctcatttacaa

SEQ ID NO: 1166074 - DNA, 15 bp, Homo sapiens
tgatgctcatttaca

SEQ ID NO: 1166075 - DNA, 15 bp, Homo sapiens
ctgatgctcatttac

SEQ ID NO: 1166076 - DNA, 15 bp, Homo sapiens
tctgatgctcattta

SEQ ID NO: 1166077 - DNA, 15 bp, Homo sapiens
ttctgatgctcattt

SEQ ID NO: 1166078 - DNA, 15 bp, Homo sapiens
attctgatgctcatt

SEQ ID NO: 1166079 - DNA, 15 bp, Homo sapiens
gattctgatgctcat

SEQ ID NO: 1166080 - DNA, 15 bp, Homo sapiens
tgattctgatgctca

SEQ ID NO: 1166081 - DNA, 15 bp, Homo sapiens
atgattctgatgctc

SEQ ID NO: 1166082 - DNA, 15 bp, Homo sapiens
gatgattctgatgct

SEQ ID NO: 1166083 - DNA, 15 bp, Homo sapiens
agatgattctgatgc

SEQ ID NO: 1166084 - DNA, 15 bp, Homo sapiens
tagatgattctgatg

SEQ ID NO: 1166085 - DNA, 15 bp, Homo sapiens
ttagatgattctgat

SEQ ID NO: 1166086 - DNA, 15 bp, Homo sapiens
attagatgattctga

SEQ ID NO: 1166087 - DNA, 15 bp, Homo sapiens
tattagatgattctg

SEQ ID NO: 1166088 - DNA, 15 bp, Homo sapiens
atattagatgattct

SEQ ID NO: 1166089 - DNA, 15 bp, Homo sapiens
tatattagatgattc

SEQ ID NO: 1166090 - DNA, 15 bp, Homo sapiens
atatattagatgatt

SEQ ID NO: 1166091 - DNA, 15 bp, Homo sapiens
tatatattagatgat

SEQ ID NO: 1166092 - DNA, 15 bp, Homo sapiens
ctatatattagatga

SEQ ID NO: 1166093 - DNA, 15 bp, Homo sapiens
tctatatattagatg

SEQ ID NO: 1166094 - DNA, 15 bp, Homo sapiens
ttctatatattagat

SEQ ID NO: 1166095 - DNA, 15 bp, Homo sapiens
attctatatattaga

SEQ ID NO: 1166096 - DNA, 15 bp, Homo sapiens
gattctatatattag

SEQ ID NO: 1166097 - DNA, 15 bp, Homo sapiens
agattctatatatta

SEQ ID NO: 1166098 - DNA, 15 bp, Homo sapiens
aagattctatatatt

SEQ ID NO: 1166099 - DNA, 15 bp, Homo sapiens
gaagattctatatat

SEQ ID NO: 1166100 - DNA, 15 bp, Homo sapiens
agaagattctatata

SEQ ID NO: 1166101 - DNA, 15 bp, Homo sapiens
cagaagattctatat

SEQ ID NO: 1166102 - DNA, 15 bp, Homo sapiens
ccagaagattctata

SEQ ID NO: 1166103 - DNA, 15 bp, Homo sapiens
cccagaagattctat

SEQ ID NO: 1166104 - DNA, 15 bp, Homo sapiens
tcccagaagattcta

SEQ ID NO: 1166105 - DNA, 15 bp, Homo sapiens
ctcccagaagattct

SEQ ID NO: 1166106 - DNA, 15 bp, Homo sapiens
tctcccagaagattc

SEQ ID NO: 1166107 - DNA, 15 bp, Homo sapiens
ctctcccagaagatt

SEQ ID NO: 1166108 - DNA, 15 bp, Homo sapiens
gctctcccagaagat

SEQ ID NO: 1166109 - DNA, 15 bp, Homo sapiens
agctctcccagaaga

SEQ ID NO: 1166110 - DNA, 15 bp, Homo sapiens
tagctctcccagaag

SEQ ID NO: 1166111 - DNA, 15 bp, Homo sapiens
gtagctctcccagaa

SEQ ID NO: 1166112 - DNA, 15 bp, Homo sapiens
agtagctctcccaga

SEQ ID NO: 1166113 - DNA, 15 bp, Homo sapiens
aagtagctctcccag

SEQ ID NO: 1166114 - DNA, 15 bp, Homo sapiens
aaagtagctctccca

SEQ ID NO: 1166115 - DNA, 15 bp, Homo sapiens
aaaagtagctctccc

SEQ ID NO: 1166116 - DNA, 15 bp, Homo sapiens
aaaaagtagctctcc

SEQ ID NO: 1166117 - DNA, 15 bp, Homo sapiens
taaaaagtagctctc

SEQ ID NO: 1166118 - DNA, 15 bp, Homo sapiens
ttaaaaagtagctct

SEQ ID NO: 1166119 - DNA, 15 bp, Homo sapiens
tttaaaaagtagctc

SEQ ID NO: 1166120 - DNA, 15 bp, Homo sapiens
ttttaaaaagtagct

SEQ ID NO: 1166121 - DNA, 15 bp, Homo sapiens
gttttaaaaagtagc

SEQ ID NO: 1166122 - DNA, 15 bp, Homo sapiens
agttttaaaaagtag

SEQ ID NO: 1166123 - DNA, 15 bp, Homo sapiens
tagttttaaaaagta

SEQ ID NO: 1166124 - DNA, 15 bp, Homo sapiens
atagttttaaaaagt

SEQ ID NO: 1166125 - DNA, 15 bp, Homo sapiens
tatagttttaaaaag

SEQ ID NO: 1166126 - DNA, 15 bp, Homo sapiens
ttatagttttaaaaa

SEQ ID NO: 1166127 - DNA, 15 bp, Homo sapiens
tttatagttttaaaa

SEQ ID NO: 1166128 - DNA, 15 bp, Homo sapiens
atttatagttttaaa

SEQ ID NO: 1166129 - DNA, 15 bp, Homo sapiens
aatttatagttttaa

SEQ ID NO: 1166130 - DNA, 15 bp, Homo sapiens
taatttatagtttta

SEQ ID NO: 1166131 - DNA, 15 bp, Homo sapiens
ttaatttatagtttt

SEQ ID NO: 1166132 - DNA, 15 bp, Homo sapiens
attaatttatagttt

SEQ ID NO: 1166133 - DNA, 15 bp, Homo sapiens
cattaatttatagtt

SEQ ID NO: 1166134 - DNA, 15 bp, Homo sapiens
tcattaatttatagt

SEQ ID NO: 1166135 - DNA, 15 bp, Homo sapiens
atcattaatttatag

SEQ ID NO: 1166136 - DNA, 15 bp, Homo sapiens
catcattaatttata

SEQ ID NO: 1166137 - DNA, 15 bp, Homo sapiens
tcatcattaatttat

SEQ ID NO: 1166138 - DNA, 15 bp, Homo sapiens
atcatcattaattta

SEQ ID NO: 1166139 - DNA, 15 bp, Homo sapiens
tatcatcattaattt

SEQ ID NO: 1166140 - DNA, 15 bp, Homo sapiens
ctatcatcattaatt

SEQ ID NO: 1166141 - DNA, 15 bp, Homo sapiens
gctatcatcattaat

SEQ ID NO: 1166142 - DNA, 15 bp, Homo sapiens
agctatcatcattaa

SEQ ID NO: 1166143 - DNA, 15 bp, Homo sapiens
tagctatcatcatta

SEQ ID NO: 1166144 - DNA, 15 bp, Homo sapiens
ttagctatcatcatt

SEQ ID NO: 1166145 - DNA, 15 bp, Homo sapiens
attagctatcatcat

SEQ ID NO: 1166146 - DNA, 15 bp, Homo sapiens
tattagctatcatca

SEQ ID NO: 1166147 - DNA, 15 bp, Homo sapiens
ttattagctatcatc

SEQ ID NO: 1166148 - DNA, 15 bp, Homo sapiens
attattagctatcat

SEQ ID NO: 1166149 - DNA, 15 bp, Homo sapiens
aattattagctatca

SEQ ID NO: 1166150 - DNA, 15 bp, Homo sapiens
taattattagctatc

SEQ ID NO: 1166151 - DNA, 15 bp, Homo sapiens
gtaattattagctat

SEQ ID NO: 1166152 - DNA, 15 bp, Homo sapiens
agtaattattagcta

SEQ ID NO: 1166153 - DNA, 15 bp, Homo sapiens
aagtaattattagct

SEQ ID NO: 1166154 - DNA, 15 bp, Homo sapiens
taagtaattattagc

SEQ ID NO: 1166155 - DNA, 15 bp, Homo sapiens
ttaagtaattattag

SEQ ID NO: 1166156 - DNA, 15 bp, Homo sapiens
attaagtaattatta

SEQ ID NO: 1166157 - DNA, 15 bp, Homo sapiens
aattaagtaattatt

SEQ ID NO: 1166158 - DNA, 15 bp, Homo sapiens
gaattaagtaattat

SEQ ID NO: 1166159 - DNA, 15 bp, Homo sapiens
agaattaagtaatta

SEQ ID NO: 1166160 - DNA, 15 bp, Homo sapiens
aagaattaagtaatt

SEQ ID NO: 1166161 - DNA, 15 bp, Homo sapiens
aaagaattaagtaat

SEQ ID NO: 1166162 - DNA, 15 bp, Homo sapiens
gaaagaattaagtaa

SEQ ID NO: 1166163 - DNA, 15 bp, Homo sapiens
tgaaagaattaagta

SEQ ID NO: 1166164 - DNA, 15 bp, Homo sapiens
atgaaagaattaagt

SEQ ID NO: 1166165 - DNA, 15 bp, Homo sapiens
tatgaaagaattaag

SEQ ID NO: 1166166 - DNA, 15 bp, Homo sapiens
atatgaaagaattaa

SEQ ID NO: 1166167 - DNA, 15 bp, Homo sapiens
catatgaaagaatta

SEQ ID NO: 1166168 - DNA, 15 bp, Homo sapiens
gcatatgaaagaatt

SEQ ID NO: 1166169 - DNA, 15 bp, Homo sapiens
ggcatatgaaagaat

SEQ ID NO: 1166170 - DNA, 15 bp, Homo sapiens
aggcatatgaaagaa

SEQ ID NO: 1166171 - DNA, 15 bp, Homo sapiens
gaggcatatgaaaga

SEQ ID NO: 1166172 - DNA, 15 bp, Homo sapiens
agaggcatatgaaag

SEQ ID NO: 1166173 - DNA, 15 bp, Homo sapiens
aagaggcatatgaaa

SEQ ID NO: 1166174 - DNA, 15 bp, Homo sapiens
taagaggcatatgaa

SEQ ID NO: 1166175 - DNA, 15 bp, Homo sapiens
gtaagaggcatatga

SEQ ID NO: 1166176 - DNA, 15 bp, Homo sapiens
agtaagaggcatatg

SEQ ID NO: 1166177 - DNA, 15 bp, Homo sapiens
cagtaagaggcatat

SEQ ID NO: 1166178 - DNA, 15 bp, Homo sapiens
acagtaagaggcata

SEQ ID NO: 1166179 - DNA, 15 bp, Homo sapiens
gacagtaagaggcat

SEQ ID NO: 1166180 - DNA, 15 bp, Homo sapiens
ggacagtaagaggca

SEQ ID NO: 1166181 - DNA, 15 bp, Homo sapiens
tggacagtaagaggc

SEQ ID NO: 1166182 - DNA, 15 bp, Homo sapiens
ttggacagtaagagg

SEQ ID NO: 1166183 - DNA, 15 bp, Homo sapiens
tttggacagtaagag

SEQ ID NO: 1166184 - DNA, 15 bp, Homo sapiens
ttttggacagtaaga

SEQ ID NO: 1166185 - DNA, 15 bp, Homo sapiens
tttttggacagtaag

SEQ ID NO: 1166186 - DNA, 15 bp, Homo sapiens
ctttttggacagtaa

SEQ ID NO: 1166187 - DNA, 15 bp, Homo sapiens
actttttggacagta

SEQ ID NO: 1166188 - DNA, 15 bp, Homo sapiens
cactttttggacagt

SEQ ID NO: 1166189 - DNA, 15 bp, Homo sapiens
acactttttggacag

SEQ ID NO: 1166190 - DNA, 15 bp, Homo sapiens
gacactttttggaca

SEQ ID NO: 1166191 - DNA, 15 bp, Homo sapiens
tgacactttttggac

SEQ ID NO: 1166192 - DNA, 15 bp, Homo sapiens
atgacactttttgga

SEQ ID NO: 1166193 - DNA, 15 bp, Homo sapiens
tatgacactttttgg

SEQ ID NO: 1166194 - DNA, 15 bp, Homo sapiens
atatgacactttttg

SEQ ID NO: 1166195 - DNA, 15 bp, Homo sapiens
tatatgacacttttt

SEQ ID NO: 1166196 - DNA, 15 bp, Homo sapiens
gtatatgacactttt

SEQ ID NO: 1166197 - DNA, 15 bp, Homo sapiens
tgtatatgacacttt

SEQ ID NO: 1166198 - DNA, 15 bp, Homo sapiens
atgtatatgacactt

SEQ ID NO: 1166199 - DNA, 15 bp, Homo sapiens
aatgtatatgacact

SEQ ID NO: 1166200 - DNA, 15 bp, Homo sapiens
taatgtatatgacac

SEQ ID NO: 1166201 - DNA, 15 bp, Homo sapiens
ttaatgtatatgaca

SEQ ID NO: 1166202 - DNA, 15 bp, Homo sapiens
attaatgtatatgac

SEQ ID NO: 1166203 - DNA, 15 bp, Homo sapiens
gattaatgtatatga

SEQ ID NO: 1166204 - DNA, 15 bp, Homo sapiens
tgattaatgtatatg

SEQ ID NO: 1166205 - DNA, 15 bp, Homo sapiens
agtgattaatgtata

SEQ ID NO: 1166206 - DNA, 15 bp, Homo sapiens
aagtgattaatgtat

SEQ ID NO: 1166207 - DNA, 15 bp, Homo sapiens
caagtgattaatgta

SEQ ID NO: 1166208 - DNA, 15 bp, Homo sapiens
tcaagtgattaatgt

SEQ ID NO: 1166209 - DNA, 15 bp, Homo sapiens
atcaagtgattaatg

SEQ ID NO: 1166210 - DNA, 15 bp, Homo sapiens
gatcaagtgattaat

SEQ ID NO: 1166211 - DNA, 15 bp, Homo sapiens
tgatcaagtgattaa

SEQ ID NO: 1166212 - DNA, 15 bp, Homo sapiens
ttgatcaagtgatta

SEQ ID NO: 1166213 - DNA, 15 bp, Homo sapiens
tttgatcaagtgatt

SEQ ID NO: 1166214 - DNA, 15 bp, Homo sapiens
ttttgatcaagtgat

SEQ ID NO: 1166215 - DNA, 15 bp, Homo sapiens
gttttgatcaagtga

SEQ ID NO: 1166216 - DNA, 15 bp, Homo sapiens
tgttttgatcaagtg

SEQ ID NO: 1166217 - DNA, 15 bp, Homo sapiens
ttgttttgatcaagt

SEQ ID NO: 1166218 - DNA, 15 bp, Homo sapiens
attgttttgatcaag

SEQ ID NO: 1166219 - DNA, 15 bp, Homo sapiens
cattgttttgatcaa

SEQ ID NO: 1166220 - DNA, 15 bp, Homo sapiens
tcattgttttgatca

SEQ ID NO: 1166221 - DNA, 15 bp, Homo sapiens
ttcattgttttgatc

SEQ ID NO: 1166222 - DNA, 15 bp, Homo sapiens
attcattgttttgat

SEQ ID NO: 1166223 - DNA, 15 bp, Homo sapiens
gattcattgttttga

SEQ ID NO: 1166224 - DNA, 15 bp, Homo sapiens
agattcattgttttg

SEQ ID NO: 1166225 - DNA, 15 bp, Homo sapiens
tagattcattgtttt

SEQ ID NO: 1166226 - DNA, 15 bp, Homo sapiens
ctagattcattgttt

SEQ ID NO: 1166227 - DNA, 15 bp, Homo sapiens
tctagattcattgtt

SEQ ID NO: 1166228 - DNA, 15 bp, Homo sapiens
ctctagattcattgt

SEQ ID NO: 1166229 - DNA, 15 bp, Homo sapiens
tctctagattcattg

SEQ ID NO: 1166230 - DNA, 15 bp, Homo sapiens
gtctctagattcatt

SEQ ID NO: 1166231 - DNA, 15 bp, Homo sapiens
tgtctctagattcat

SEQ ID NO: 1166232 - DNA, 15 bp, Homo sapiens
ctgtctctagattca

SEQ ID NO: 1166233 - DNA, 15 bp, Homo sapiens
cctgtctctagattc

SEQ ID NO: 1166234 - DNA, 15 bp, Homo sapiens
acctgtctctagatt

SEQ ID NO: 1166235 - DNA, 15 bp, Homo sapiens
tacctgtctctagat

SEQ ID NO: 1166236 - DNA, 15 bp, Homo sapiens
gtacctgtctctaga

SEQ ID NO: 1166237 - DNA, 15 bp, Homo sapiens
agtacctgtctctag

SEQ ID NO: 1166238 - DNA, 15 bp, Homo sapiens
tagtacctgtctcta

SEQ ID NO: 1166239 - DNA, 15 bp, Homo sapiens
atagtacctgtctct

SEQ ID NO: 1166240 - DNA, 15 bp, Homo sapiens
aatagtacctgtctc

SEQ ID NO: 1166241 - DNA, 15 bp, Homo sapiens
taatagtacctgtct

SEQ ID NO: 1166242 - DNA, 15 bp, Homo sapiens
gtaatagtacctgtc

SEQ ID NO: 1166243 - DNA, 15 bp, Homo sapiens
agtaatagtacctgt

SEQ ID NO: 1166244 - DNA, 15 bp, Homo sapiens
tagtaatagtacctg

SEQ ID NO: 1166245 - DNA, 15 bp, Homo sapiens
ctagtaatagtacct

SEQ ID NO: 1166246 - DNA, 15 bp, Homo sapiens
actagtaatagtacc

SEQ ID NO: 1166247 - DNA, 15 bp, Homo sapiens
tactagtaatagtac

SEQ ID NO: 1166248 - DNA, 15 bp, Homo sapiens
gtactagtaatagta

SEQ ID NO: 1166249 - DNA, 15 bp, Homo sapiens
agtactagtaatagt

SEQ ID NO: 1166250 - DNA, 15 bp, Homo sapiens
aagtactagtaatag

SEQ ID NO: 1166251 - DNA, 15 bp, Homo sapiens
gaagtactagtaata

SEQ ID NO: 1166252 - DNA, 15 bp, Homo sapiens
agaagtactagtaat

SEQ ID NO: 1166253 - DNA, 15 bp, Homo sapiens
aagaagtactagtaa

SEQ ID NO: 1166254 - DNA, 15 bp, Homo sapiens
aaagaagtactagta

SEQ ID NO: 1166255 - DNA, 15 bp, Homo sapiens
aaaagaagtactagt

SEQ ID NO: 1166256 - DNA, 15 bp, Homo sapiens
aaaaagaagtactag

SEQ ID NO: 1166257 - DNA, 15 bp, Homo sapiens
gaaaaagaagtacta

SEQ ID NO: 1166258 - DNA, 15 bp, Homo sapiens
ggaaaaagaagtact

SEQ ID NO: 1166259 - DNA, 15 bp, Homo sapiens
aggaaaaagaagtac

SEQ ID NO: 1166260 - DNA, 15 bp, Homo sapiens
taggaaaaagaagta

SEQ ID NO: 1166261 - DNA, 15 bp, Homo sapiens
ataggaaaaagaagt

SEQ ID NO: 1166262 - DNA, 15 bp, Homo sapiens
tataggaaaaagaag

SEQ ID NO: 1166263 - DNA, 15 bp, Homo sapiens
atataggaaaaagaa

SEQ ID NO: 1166264 - DNA, 15 bp, Homo sapiens
catataggaaaaaga

SEQ ID NO: 1166265 - DNA, 15 bp, Homo sapiens
ccatataggaaaaag

SEQ ID NO: 1166266 - DNA, 15 bp, Homo sapiens
cccatataggaaaaa

SEQ ID NO: 1166267 - DNA, 15 bp, Homo sapiens
tcccatataggaaaa

SEQ ID NO: 1166268 - DNA, 15 bp, Homo sapiens
ttcccatataggaaa

SEQ ID NO: 1166269 - DNA, 15 bp, Homo sapiens
attcccatataggaa

SEQ ID NO: 1166270 - DNA, 15 bp, Homo sapiens
aattcccatatagga

SEQ ID NO: 1166271 - DNA, 15 bp, Homo sapiens
caattcccatatagg

SEQ ID NO: 1166272 - DNA, 15 bp, Homo sapiens
tcaattcccatatag

SEQ ID NO: 1166273 - DNA, 15 bp, Homo sapiens
atcaattcccatata

SEQ ID NO: 1166274 - DNA, 15 bp, Homo sapiens
tatcaattcccatat

SEQ ID NO: 1166275 - DNA, 15 bp, Homo sapiens
gtatcaattcccata

SEQ ID NO: 1166276 - DNA, 15 bp, Homo sapiens
ggtatcaattcccat

SEQ ID NO: 1166277 - DNA, 15 bp, Homo sapiens
gggtatcaattccca

SEQ ID NO: 1166278 - DNA, 15 bp, Homo sapiens
tgggtatcaattccc

SEQ ID NO: 1166279 - DNA, 15 bp, Homo sapiens
ttgggtatcaattcc

SEQ ID NO: 1166280 - DNA, 15 bp, Homo sapiens
attgggtatcaattc

SEQ ID NO: 1166281 - DNA, 15 bp, Homo sapiens
tattgggtatcaatt

SEQ ID NO: 1166282 - DNA, 15 bp, Homo sapiens
atattgggtatcaat

SEQ ID NO: 1166283 - DNA, 15 bp, Homo sapiens
tatattgggtatcaa

SEQ ID NO: 1166284 - DNA, 15 bp, Homo sapiens
ctatattgggtatca

SEQ ID NO: 1166285 - DNA, 15 bp, Homo sapiens
actatattgggtatc

SEQ ID NO: 1166286 - DNA, 15 bp, Homo sapiens
aactatattgggtat

SEQ ID NO: 1166287 - DNA, 15 bp, Homo sapiens
gaactatattgggta

SEQ ID NO: 1166288 - DNA, 15 bp, Homo sapiens
tgaactatattgggt

SEQ ID NO: 1166289 - DNA, 15 bp, Homo sapiens
ctgaactatattggg

SEQ ID NO: 1166290 - DNA, 15 bp, Homo sapiens
actgaactatattgg

SEQ ID NO: 1166291 - DNA, 15 bp, Homo sapiens
tactgaactatattg

SEQ ID NO: 1166292 - DNA, 15 bp, Homo sapiens
ctactgaactatatt

SEQ ID NO: 1166293 - DNA, 15 bp, Homo sapiens
actactgaactatat

SEQ ID NO: 1166294 - DNA, 15 bp, Homo sapiens
aactactgaactata

SEQ ID NO: 1166295 - DNA, 15 bp, Homo sapiens
aaactactgaactat

SEQ ID NO: 1166296 - DNA, 15 bp, Homo sapiens
aaaactactgaacta

SEQ ID NO: 1166297 - DNA, 15 bp, Homo sapiens
gaaaactactgaact

SEQ ID NO: 1166298 - DNA, 15 bp, Homo sapiens
tgaaaactactgaac

SEQ ID NO: 1166299 - DNA, 15 bp, Homo sapiens
cttgaaaactactga

SEQ ID NO: 1166300 - DNA, 15 bp, Homo sapiens
tcttgaaaactactg

SEQ ID NO: 1166301 - DNA, 15 bp, Homo sapiens
ctcttgaaaactact

SEQ ID NO: 1166302 - DNA, 15 bp, Homo sapiens
gctcttgaaaactac

SEQ ID NO: 1166303 - DNA, 15 bp, Homo sapiens
ggctcttgaaaacta

SEQ ID NO: 1166304 - DNA, 15 bp, Homo sapiens
tggctcttgaaaact

SEQ ID NO: 1166305 - DNA, 15 bp, Homo sapiens
gtggctcttgaaaac

SEQ ID NO: 1166306 - DNA, 15 bp, Homo sapiens
tgtggctcttgaaaa

SEQ ID NO: 1166307 - DNA, 15 bp, Homo sapiens
gtgtggctcttgaaa

SEQ ID NO: 1166308 - DNA, 15 bp, Homo sapiens
tgtgtggctcttgaa

SEQ ID NO: 1166309 - DNA, 15 bp, Homo sapiens
ctgtgtggctcttga

SEQ ID NO: 1166310 - DNA, 15 bp, Homo sapiens
gctgtgtggctcttg

SEQ ID NO: 1166311 - DNA, 15 bp, Homo sapiens
agctgtgtggctctt

SEQ ID NO: 1166312 - DNA, 15 bp, Homo sapiens
tagctgtgtggctct

SEQ ID NO: 1166313 - DNA, 15 bp, Homo sapiens
atagctgtgtggctc

SEQ ID NO: 1166314 - DNA, 15 bp, Homo sapiens
catagctgtgtggct

SEQ ID NO: 1166315 - DNA, 15 bp, Homo sapiens
tcatagctgtgtggc

SEQ ID NO: 1166316 - DNA, 15 bp, Homo sapiens
gtcatagctgtgtgg

SEQ ID NO: 1166317 - DNA, 15 bp, Homo sapiens
tgtcatagctgtgtg

SEQ ID NO: 1166318 - DNA, 15 bp, Homo sapiens
ttgtcatagctgtgt

SEQ ID NO: 1166319 - DNA, 15 bp, Homo sapiens
tttgtcatagctgtg

SEQ ID NO: 1166320 - DNA, 15 bp, Homo sapiens
ctttgtcatagctgt

SEQ ID NO: 1166321 - DNA, 15 bp, Homo sapiens
actttgtcatagctg

SEQ ID NO: 1166322 - DNA, 15 bp, Homo sapiens
tactttgtcatagct

SEQ ID NO: 1166323 - DNA, 15 bp, Homo sapiens
ttactttgtcatagc

SEQ ID NO: 1166324 - DNA, 15 bp, Homo sapiens
tttactttgtcatag

SEQ ID NO: 1166325 - DNA, 15 bp, Homo sapiens
ttttactttgtcata

SEQ ID NO: 1166326 - DNA, 15 bp, Homo sapiens
cttttactttgtcat

SEQ ID NO: 1166327 - DNA, 15 bp, Homo sapiens
tcttttactttgtca

SEQ ID NO: 1166328 - DNA, 15 bp, Homo sapiens
atcttttactttgtc

SEQ ID NO: 1166329 - DNA, 15 bp, Homo sapiens
aatcttttactttgt

SEQ ID NO: 1166330 - DNA, 15 bp, Homo sapiens
caatcttttactttg

SEQ ID NO: 1166331 - DNA, 15 bp, Homo sapiens
tcaatcttttacttt

SEQ ID NO: 1166332 - DNA, 15 bp, Homo sapiens
ttcaatcttttactt

SEQ ID NO: 1166333 - DNA, 15 bp, Homo sapiens
gttcaatcttttact

SEQ ID NO: 1166334 - DNA, 15 bp, Homo sapiens
ggttcaatcttttac

SEQ ID NO: 1166335 - DNA, 15 bp, Homo sapiens
gggttcaatctttta

SEQ ID NO: 1166336 - DNA, 15 bp, Homo sapiens
tgggttcaatctttt

SEQ ID NO: 1166337 - DNA, 15 bp, Homo sapiens
ctgggttcaatcttt

SEQ ID NO: 1166338 - DNA, 15 bp, Homo sapiens
cctgggttcaatctt

SEQ ID NO: 1166339 - DNA, 15 bp, Homo sapiens
gcctgggttcaatct

SEQ ID NO: 1166340 - DNA, 15 bp, Homo sapiens
tgcctgggttcaatc

SEQ ID NO: 1166341 - DNA, 15 bp, Homo sapiens
ttgcctgggttcaat

SEQ ID NO: 1166342 - DNA, 15 bp, Homo sapiens
attgcctgggttcaa

SEQ ID NO: 1166343 - DNA, 15 bp, Homo sapiens
gattgcctgggttca

SEQ ID NO: 1166344 - DNA, 15 bp, Homo sapiens
agattgcctgggttc

SEQ ID NO: 1166345 - DNA, 15 bp, Homo sapiens
cagattgcctgggtt

SEQ ID NO: 1166346 - DNA, 15 bp, Homo sapiens
tcagattgcctgggt

SEQ ID NO: 1166347 - DNA, 15 bp, Homo sapiens
gtcagattgcctggg

SEQ ID NO: 1166348 - DNA, 15 bp, Homo sapiens
agtcagattgcctgg

SEQ ID NO: 1166349 - DNA, 15 bp, Homo sapiens
cagtcagattgcctg

SEQ ID NO: 1166350 - DNA, 15 bp, Homo sapiens
gcagtcagattgcct

SEQ ID NO: 1166351 - DNA, 15 bp, Homo sapiens
tgcagtcagattgcc

SEQ ID NO: 1166352 - DNA, 15 bp, Homo sapiens
ctgcagtcagattgc

SEQ ID NO: 1166353 - DNA, 15 bp, Homo sapiens
tctgcagtcagattg

SEQ ID NO: 1166354 - DNA, 15 bp, Homo sapiens
ttctgcagtcagatt

SEQ ID NO: 1166355 - DNA, 15 bp, Homo sapiens
attctgcagtcagat

SEQ ID NO: 1166356 - DNA, 15 bp, Homo sapiens
tattctgcagtcaga

SEQ ID NO: 1166357 - DNA, 15 bp, Homo sapiens
gtattctgcagtcag

SEQ ID NO: 1166358 - DNA, 15 bp, Homo sapiens
agtattctgcagtca

SEQ ID NO: 1166359 - DNA, 15 bp, Homo sapiens
aagtattctgcagtc

SEQ ID NO: 1166360 - DNA, 15 bp, Homo sapiens
gaagtattctgcagt

SEQ ID NO: 1166361 - DNA, 15 bp, Homo sapiens
tgaagtattctgcag

SEQ ID NO: 1166362 - DNA, 15 bp, Homo sapiens
ttgaagtattctgca

SEQ ID NO: 1166363 - DNA, 15 bp, Homo sapiens
tttgaagtattctgc

SEQ ID NO: 1166364 - DNA, 15 bp, Homo sapiens
gtttgaagtattctg

SEQ ID NO: 1166365 - DNA, 15 bp, Homo sapiens
ggtttgaagtattct

SEQ ID NO: 1166366 - DNA, 15 bp, Homo sapiens
cggtttgaagtattc

SEQ ID NO: 1166367 - DNA, 15 bp, Homo sapiens
gcggtttgaagtatt

SEQ ID NO: 1166368 - DNA, 15 bp, Homo sapiens
agcggtttgaagtat

SEQ ID NO: 1166369 - DNA, 15 bp, Homo sapiens
tagcggtttgaagta

SEQ ID NO: 1166370 - DNA, 15 bp, Homo sapiens
gtagcggtttgaagt

SEQ ID NO: 1166371 - DNA, 15 bp, Homo sapiens
tgtagcggtttgaag

SEQ ID NO: 1166372 - DNA, 15 bp, Homo sapiens
gtgtagcggtttgaa

SEQ ID NO: 1166373 - DNA, 15 bp, Homo sapiens
tgtgtagcggtttga

SEQ ID NO: 1166374 - DNA, 15 bp, Homo sapiens
ttgtgtagcggtttg

SEQ ID NO: 1166375 - DNA, 15 bp, Homo sapiens
attgtgtagcggttt

SEQ ID NO: 1166376 - DNA, 15 bp, Homo sapiens
tattgtgtagcggtt

SEQ ID NO: 1166377 - DNA, 15 bp, Homo sapiens
gtattgtgtagcggt

SEQ ID NO: 1166378 - DNA, 15 bp, Homo sapiens
tgtattgtgtagcgg

SEQ ID NO: 1166379 - DNA, 15 bp, Homo sapiens
ttgtattgtgtagcg

SEQ ID NO: 1166380 - DNA, 15 bp, Homo sapiens
attgtattgtgtagc

SEQ ID NO: 1166381 - DNA, 15 bp, Homo sapiens
gattgtattgtgtag

SEQ ID NO: 1166382 - DNA, 15 bp, Homo sapiens
agattgtattgtgta

SEQ ID NO: 1166383 - DNA, 15 bp, Homo sapiens
gagattgtattgtgt

SEQ ID NO: 1166384 - DNA, 15 bp, Homo sapiens
ggagattgtattgtg

SEQ ID NO: 1166385 - DNA, 15 bp, Homo sapiens
aggagattgtattgt

SEQ ID NO: 1166386 - DNA, 15 bp, Homo sapiens
gaggagattgtattg

SEQ ID NO: 1166387 - DNA, 15 bp, Homo sapiens
agaggagattgtatt

SEQ ID NO: 1166388 - DNA, 15 bp, Homo sapiens
gagaggagattgtat

SEQ ID NO: 1166389 - DNA, 15 bp, Homo sapiens
agagaggagattgta

SEQ ID NO: 1166390 - DNA, 15 bp, Homo sapiens
aagagaggagattgt

SEQ ID NO: 1166391 - DNA, 15 bp, Homo sapiens
caagagaggagattg

SEQ ID NO: 1166392 - DNA, 15 bp, Homo sapiens
ccaagagaggagatt

SEQ ID NO: 1166393 - DNA, 15 bp, Homo sapiens
tccaagagaggagat

SEQ ID NO: 1166394 - DNA, 15 bp, Homo sapiens
ttccaagagaggaga

SEQ ID NO: 1166395 - DNA, 15 bp, Homo sapiens
tttccaagagaggag

SEQ ID NO: 1166396 - DNA, 15 bp, Homo sapiens
ttttccaagagagga

SEQ ID NO: 1166397 - DNA, 15 bp, Homo sapiens
attttccaagagagg

SEQ ID NO: 1166398 - DNA, 15 bp, Homo sapiens
cattttccaagagag

SEQ ID NO: 1166399 - DNA, 15 bp, Homo sapiens
acattttccaagaga

SEQ ID NO: 1166400 - DNA, 15 bp, Homo sapiens
aacattttccaagag

SEQ ID NO: 1166401 - DNA, 15 bp, Homo sapiens
gaacattttccaaga

SEQ ID NO: 1166402 - DNA, 15 bp, Homo sapiens
agaacattttccaag

SEQ ID NO: 1166403 - DNA, 15 bp, Homo sapiens
aagaacattttccaa

SEQ ID NO: 1166404 - DNA, 15 bp, Homo sapiens
aaagaacattttcca

SEQ ID NO: 1166405 - DNA, 15 bp, Homo sapiens
aaaagaacattttcc

SEQ ID NO: 1166406 - DNA, 15 bp, Homo sapiens
gtaaaagaacatttt

SEQ ID NO: 1166407 - DNA, 15 bp, Homo sapiens
tgtaaaagaacattt

SEQ ID NO: 1166408 - DNA, 15 bp, Homo sapiens
ttgtaaaagaacatt

SEQ ID NO: 1166409 - DNA, 15 bp, Homo sapiens
cttgtaaaagaacat

SEQ ID NO: 1166410 - DNA, 15 bp, Homo sapiens
ccttgtaaaagaaca

SEQ ID NO: 1166411 - DNA, 15 bp, Homo sapiens
cccttgtaaaagaac

SEQ ID NO: 1166412 - DNA, 15 bp, Homo sapiens
tcccttgtaaaagaa

SEQ ID NO: 1166413 - DNA, 15 bp, Homo sapiens
ttcccttgtaaaaga

SEQ ID NO: 1166414 - DNA, 15 bp, Homo sapiens
gttcccttgtaaaag

SEQ ID NO: 1166415 - DNA, 15 bp, Homo sapiens
agttcccttgtaaaa

SEQ ID NO: 1166416 - DNA, 15 bp, Homo sapiens
tagttcccttgtaaa

SEQ ID NO: 1166417 - DNA, 15 bp, Homo sapiens
ctagttcccttgtaa

SEQ ID NO: 1166418 - DNA, 15 bp, Homo sapiens
cctagttcccttgta

SEQ ID NO: 1166419 - DNA, 15 bp, Homo sapiens
acctagttcccttgt

SEQ ID NO: 1166420 - DNA, 15 bp, Homo sapiens
aacctagttcccttg

SEQ ID NO: 1166421 - DNA, 15 bp, Homo sapiens
gaacctagttccctt

SEQ ID NO: 1166422 - DNA, 15 bp, Homo sapiens
ggaacctagttccct

SEQ ID NO: 1166423 - DNA, 15 bp, Homo sapiens
aggaacctagttccc

SEQ ID NO: 1166424 - DNA, 15 bp, Homo sapiens
aaggaacctagttcc

SEQ ID NO: 1166425 - DNA, 15 bp, Homo sapiens
aaaggaacctagttc

SEQ ID NO: 1166426 - DNA, 15 bp, Homo sapiens
aaaaggaacctagtt

SEQ ID NO: 1166427 - DNA, 15 bp, Homo sapiens
caaaaggaacctagt

SEQ ID NO: 1166428 - DNA, 15 bp, Homo sapiens
tcaaaaggaacctag

SEQ ID NO: 1166429 - DNA, 15 bp, Homo sapiens
ttcaaaaggaaccta

SEQ ID NO: 1166430 - DNA, 15 bp, Homo sapiens
gttcaaaaggaacct

SEQ ID NO: 1166431 - DNA, 15 bp, Homo sapiens
agttcaaaaggaacc

SEQ ID NO: 1166432 - DNA, 15 bp, Homo sapiens
aagttcaaaaggaac

SEQ ID NO: 1166433 - DNA, 15 bp, Homo sapiens
aaagttcaaaaggaa

SEQ ID NO: 1166434 - DNA, 15 bp, Homo sapiens
caaagttcaaaagga

SEQ ID NO: 1166435 - DNA, 15 bp, Homo sapiens
gcaaagttcaaaagg

SEQ ID NO: 1166436 - DNA, 15 bp, Homo sapiens
agcaaagttcaaaag

SEQ ID NO: 1166437 - DNA, 15 bp, Homo sapiens
tagcaaagttcaaaa

SEQ ID NO: 1166438 - DNA, 15 bp, Homo sapiens
atagcaaagttcaaa

SEQ ID NO: 1166439 - DNA, 15 bp, Homo sapiens
gatagcaaagttcaa

SEQ ID NO: 1166440 - DNA, 15 bp, Homo sapiens
tgatagcaaagttca

SEQ ID NO: 1166441 - DNA, 15 bp, Homo sapiens
gtgatagcaaagttc

SEQ ID NO: 1166442 - DNA, 15 bp, Homo sapiens
tgtgatagcaaagtt

SEQ ID NO: 1166443 - DNA, 15 bp, Homo sapiens
ctgtgatagcaaagt

SEQ ID NO: 1166444 - DNA, 15 bp, Homo sapiens
actgtgatagcaaag

SEQ ID NO: 1166445 - DNA, 15 bp, Homo sapiens
tactgtgatagcaaa

SEQ ID NO: 1166446 - DNA, 15 bp, Homo sapiens
atactgtgatagcaa

SEQ ID NO: 1166447 - DNA, 15 bp, Homo sapiens
aatactgtgatagca

SEQ ID NO: 1166448 - DNA, 15 bp, Homo sapiens
caatactgtgatagc

SEQ ID NO: 1166449 - DNA, 15 bp, Homo sapiens
ccaatactgtgatag

SEQ ID NO: 1166450 - DNA, 15 bp, Homo sapiens
tccaatactgtgata

SEQ ID NO: 1166451 - DNA, 15 bp, Homo sapiens
atccaatactgtgat

SEQ ID NO: 1166452 - DNA, 15 bp, Homo sapiens
tatccaatactgtga

SEQ ID NO: 1166453 - DNA, 15 bp, Homo sapiens
ttatccaatactgtg

SEQ ID NO: 1166454 - DNA, 15 bp, Homo sapiens
attatccaatactgt

SEQ ID NO: 1166455 - DNA, 15 bp, Homo sapiens
aattatccaatactg

SEQ ID NO: 1166456 - DNA, 15 bp, Homo sapiens
caattatccaatact

SEQ ID NO: 1166457 - DNA, 15 bp, Homo sapiens
tcaattatccaatac

SEQ ID NO: 1166458 - DNA, 15 bp, Homo sapiens
gtcaattatccaata

SEQ ID NO: 1166459 - DNA, 15 bp, Homo sapiens
agtcaattatccaat

SEQ ID NO: 1166460 - DNA, 15 bp, Homo sapiens
cagtcaattatccaa

SEQ ID NO: 1166461 - DNA, 15 bp, Homo sapiens
gcagtcaattatcca

SEQ ID NO: 1166462 - DNA, 15 bp, Homo sapiens
cgcagtcaattatcc

SEQ ID NO: 1166463 - DNA, 15 bp, Homo sapiens
gcgcagtcaattatc

SEQ ID NO: 1166464 - DNA, 15 bp, Homo sapiens
tgcgcagtcaattat

SEQ ID NO: 1166465 - DNA, 15 bp, Homo sapiens
ttgcgcagtcaatta

SEQ ID NO: 1166466 - DNA, 15 bp, Homo sapiens
cttgcgcagtcaatt

SEQ ID NO: 1166467 - DNA, 15 bp, Homo sapiens
acttgcgcagtcaat

SEQ ID NO: 1166468 - DNA, 15 bp, Homo sapiens
gacttgcgcagtcaa

SEQ ID NO: 1166469 - DNA, 15 bp, Homo sapiens
agacttgcgcagtca

SEQ ID NO: 1166470 - DNA, 15 bp, Homo sapiens
gagacttgcgcagtc

SEQ ID NO: 1166471 - DNA, 15 bp, Homo sapiens
agagacttgcgcagt

SEQ ID NO: 1166472 - DNA, 15 bp, Homo sapiens
gagagacttgcgcag

SEQ ID NO: 1166473 - DNA, 15 bp, Homo sapiens
ggagagacttgcgca

SEQ ID NO: 1166474 - DNA, 15 bp, Homo sapiens
aggagagacttgcgc

SEQ ID NO: 1166475 - DNA, 15 bp, Homo sapiens
gaggagagacttgcg

SEQ ID NO: 1166476 - DNA, 15 bp, Homo sapiens
tgaggagagacttgc

SEQ ID NO: 1166477 - DNA, 15 bp, Homo sapiens
ttgaggagagacttg

SEQ ID NO: 1166478 - DNA, 15 bp, Homo sapiens
tttgaggagagactt

SEQ ID NO: 1166479 - DNA, 15 bp, Homo sapiens
atttgaggagagact

SEQ ID NO: 1166480 - DNA, 15 bp, Homo sapiens
aatttgaggagagac

SEQ ID NO: 1166481 - DNA, 15 bp, Homo sapiens
gaatttgaggagaga

SEQ ID NO: 1166482 - DNA, 15 bp, Homo sapiens
ggaatttgaggagag

SEQ ID NO: 1166483 - DNA, 15 bp, Homo sapiens
gggaatttgaggaga

SEQ ID NO: 1166484 - DNA, 15 bp, Homo sapiens
tgggaatttgaggag

SEQ ID NO: 1166485 - DNA, 15 bp, Homo sapiens
ttgggaatttgagga

SEQ ID NO: 1166486 - DNA, 15 bp, Homo sapiens
gttgggaatttgagg

SEQ ID NO: 1166487 - DNA, 15 bp, Homo sapiens
agttgggaatttgag

SEQ ID NO: 1166488 - DNA, 15 bp, Homo sapiens
gagttgggaatttga

SEQ ID NO: 1166489 - DNA, 15 bp, Homo sapiens
tgagttgggaatttg

SEQ ID NO: 1166490 - DNA, 15 bp, Homo sapiens
atgagttgggaattt

SEQ ID NO: 1166491 - DNA, 15 bp, Homo sapiens
catgagttgggaatt

SEQ ID NO: 1166492 - DNA, 15 bp, Homo sapiens
gcatgagttgggaat

SEQ ID NO: 1166493 - DNA, 15 bp, Homo sapiens
tgcatgagttgggaa

SEQ ID NO: 1166494 - DNA, 15 bp, Homo sapiens
atgcatgagttggga

SEQ ID NO: 1166495 - DNA, 15 bp, Homo sapiens
catgcatgagttggg

SEQ ID NO: 1166496 - DNA, 15 bp, Homo sapiens
tcatgcatgagttgg

SEQ ID NO: 1166497 - DNA, 15 bp, Homo sapiens
gtcatgcatgagttg

SEQ ID NO: 1166498 - DNA, 15 bp, Homo sapiens
agtcatgcatgagtt

SEQ ID NO: 1166499 - DNA, 15 bp, Homo sapiens
aagtcatgcatgagt

SEQ ID NO: 1166500 - DNA, 15 bp, Homo sapiens
aaagtcatgcatgag

SEQ ID NO: 1166501 - DNA, 15 bp, Homo sapiens
aaaagtcatgcatga

SEQ ID NO: 1166502 - DNA, 15 bp, Homo sapiens
aaaaagtcatgcatg

SEQ ID NO: 1166503 - DNA, 15 bp, Homo sapiens
taaaaagtcatgcat

SEQ ID NO: 1166504 - DNA, 15 bp, Homo sapiens
ataaaaagtcatgca

SEQ ID NO: 1166505 - DNA, 15 bp, Homo sapiens
aataaaaagtcatgc

SEQ ID NO: 1166506 - DNA, 15 bp, Homo sapiens
taataaaaagtcatg

SEQ ID NO: 1166507 - DNA, 15 bp, Homo sapiens
gtaataaaaagtcat

SEQ ID NO: 1166508 - DNA, 15 bp, Homo sapiens
cgtaataaaaagtca

SEQ ID NO: 1166509 - DNA, 15 bp, Homo sapiens
acgtaataaaaagtc

SEQ ID NO: 1166510 - DNA, 15 bp, Homo sapiens
aacgtaataaaaagt

SEQ ID NO: 1166511 - DNA, 15 bp, Homo sapiens
caacgtaataaaaag

SEQ ID NO: 1166512 - DNA, 15 bp, Homo sapiens
acaacgtaataaaaa

SEQ ID NO: 1166513 - DNA, 15 bp, Homo sapiens
tacaacgtaataaaa

SEQ ID NO: 1166514 - DNA, 15 bp, Homo sapiens
ctacaacgtaataaa

SEQ ID NO: 1166515 - DNA, 15 bp, Homo sapiens
gctacaacgtaataa

SEQ ID NO: 1166516 - DNA, 15 bp, Homo sapiens
tgctacaacgtaata

SEQ ID NO: 1166517 - DNA, 15 bp, Homo sapiens
ttgctacaacgtaat

SEQ ID NO: 1166518 - DNA, 15 bp, Homo sapiens
attgctacaacgtaa

SEQ ID NO: 1166519 - DNA, 15 bp, Homo sapiens
tattgctacaacgta

SEQ ID NO: 1166520 - DNA, 15 bp, Homo sapiens
ttattgctacaacgt

SEQ ID NO: 1166521 - DNA, 15 bp, Homo sapiens
tttattgctacaacg

SEQ ID NO: 1166522 - DNA, 15 bp, Homo sapiens
ttttattgctacaac

SEQ ID NO: 1166523 - DNA, 15 bp, Homo sapiens
cttttattgctacaa

SEQ ID NO: 1166524 - DNA, 15 bp, Homo sapiens
tcttttattgctaca

SEQ ID NO: 1166525 - DNA, 15 bp, Homo sapiens
ctcttttattgctac

SEQ ID NO: 1166526 - DNA, 15 bp, Homo sapiens
gctcttttattgcta

SEQ ID NO: 1166527 - DNA, 15 bp, Homo sapiens
tgctcttttattgct

SEQ ID NO: 1166528 - DNA, 15 bp, Homo sapiens
ctgctcttttattgc

SEQ ID NO: 1166529 - DNA, 15 bp, Homo sapiens
actgctcttttattg

SEQ ID NO: 1166530 - DNA, 15 bp, Homo sapiens
cactgctcttttatt

SEQ ID NO: 1166531 - DNA, 15 bp, Homo sapiens
ccactgctcttttat

SEQ ID NO: 1166532 - DNA, 15 bp, Homo sapiens
tccactgctctttta

SEQ ID NO: 1166533 - DNA, 15 bp, Homo sapiens
ctccactgctctttt

SEQ ID NO: 1166534 - DNA, 15 bp, Homo sapiens
cctccactgctcttt

SEQ ID NO: 1166535 - DNA, 15 bp, Homo sapiens
acctccactgctctt

SEQ ID NO: 1166536 - DNA, 15 bp, Homo sapiens
cacctccactgctct

SEQ ID NO: 1166537 - DNA, 15 bp, Homo sapiens
ccacctccactgctc

SEQ ID NO: 1166538 - DNA, 15 bp, Homo sapiens
cccacctccactgct

SEQ ID NO: 1166539 - DNA, 15 bp, Homo sapiens
ccccacctccactgc

SEQ ID NO: 1166540 - DNA, 15 bp, Homo sapiens
accccacctccactg

SEQ ID NO: 1166541 - DNA, 15 bp, Homo sapiens
caccccacctccact

SEQ ID NO: 1166542 - DNA, 15 bp, Homo sapiens
ccaccccacctccac

SEQ ID NO: 1166543 - DNA, 15 bp, Homo sapiens
tccaccccacctcca

SEQ ID NO: 1166544 - DNA, 15 bp, Homo sapiens
ttccaccccacctcc

SEQ ID NO: 1166545 - DNA, 15 bp, Homo sapiens
cttccaccccacctc

SEQ ID NO: 1166546 - DNA, 15 bp, Homo sapiens
tcttccaccccacct

SEQ ID NO: 1166547 - DNA, 15 bp, Homo sapiens
ttcttccaccccacc

SEQ ID NO: 1166548 - DNA, 15 bp, Homo sapiens
cttcttccaccccac

SEQ ID NO: 1166549 - DNA, 15 bp, Homo sapiens
tcttcttccacccca

SEQ ID NO: 1166550 - DNA, 15 bp, Homo sapiens
gtcttcttccacccc

SEQ ID NO: 1166551 - DNA, 15 bp, Homo sapiens
agtcttcttccaccc

SEQ ID NO: 1166552 - DNA, 15 bp, Homo sapiens
gagtcttcttccacc

SEQ ID NO: 1166553 - DNA, 15 bp, Homo sapiens
tgagtcttcttccac

SEQ ID NO: 1166554 - DNA, 15 bp, Homo sapiens
atgagtcttcttcca

SEQ ID NO: 1166555 - DNA, 15 bp, Homo sapiens
aatgagtcttcttcc

SEQ ID NO: 1166556 - DNA, 15 bp, Homo sapiens
aaatgagtcttcttc

SEQ ID NO: 1166557 - DNA, 15 bp, Homo sapiens
aaaatgagtcttctt

SEQ ID NO: 1166558 - DNA, 15 bp, Homo sapiens
aaaaatgagtcttct

SEQ ID NO: 1166559 - DNA, 15 bp, Homo sapiens
caaaaatgagtcttc

SEQ ID NO: 1166560 - DNA, 15 bp, Homo sapiens
acaaaaatgagtctt

SEQ ID NO: 1166561 - DNA, 15 bp, Homo sapiens
gacaaaaatgagtct

SEQ ID NO: 1166562 - DNA, 15 bp, Homo sapiens
agacaaaaatgagtc

SEQ ID NO: 1166563 - DNA, 15 bp, Homo sapiens
aagacaaaaatgagt

SEQ ID NO: 1166564 - DNA, 15 bp, Homo sapiens
gaagacaaaaatgag

SEQ ID NO: 1166565 - DNA, 15 bp, Homo sapiens
tgaagacaaaaatga

SEQ ID NO: 1166566 - DNA, 15 bp, Homo sapiens
atgaagacaaaaatg

SEQ ID NO: 1166567 - DNA, 15 bp, Homo sapiens
aatgaagacaaaaat

SEQ ID NO: 1166568 - DNA, 15 bp, Homo sapiens
taatgaagacaaaaa

SEQ ID NO: 1166569 - DNA, 15 bp, Homo sapiens
gtaatgaagacaaaa

SEQ ID NO: 1166570 - DNA, 15 bp, Homo sapiens
agtaatgaagacaaa

SEQ ID NO: 1166571 - DNA, 15 bp, Homo sapiens
cagtaatgaagacaa

SEQ ID NO: 1166572 - DNA, 15 bp, Homo sapiens
gcagtaatgaagaca

SEQ ID NO: 1166573 - DNA, 15 bp, Homo sapiens
agcagtaatgaagac

SEQ ID NO: 1166574 - DNA, 15 bp, Homo sapiens
tagcagtaatgaaga

SEQ ID NO: 1166575 - DNA, 15 bp, Homo sapiens
atagcagtaatgaag

SEQ ID NO: 1166576 - DNA, 15 bp, Homo sapiens
catagcagtaatgaa

SEQ ID NO: 1166577 - DNA, 15 bp, Homo sapiens
acatagcagtaatga

SEQ ID NO: 1166578 - DNA, 15 bp, Homo sapiens
cacatagcagtaatg

SEQ ID NO: 1166579 - DNA, 15 bp, Homo sapiens
ccacatagcagtaat

SEQ ID NO: 1166580 - DNA, 15 bp, Homo sapiens
tccacatagcagtaa

SEQ ID NO: 1166581 - DNA, 15 bp, Homo sapiens
ctccacatagcagta

SEQ ID NO: 1166582 - DNA, 15 bp, Homo sapiens
gctccacatagcagt

SEQ ID NO: 1166583 - DNA, 15 bp, Homo sapiens
tgctccacatagcag

SEQ ID NO: 1166584 - DNA, 15 bp, Homo sapiens
ttgctccacatagca

SEQ ID NO: 1166585 - DNA, 15 bp, Homo sapiens
cttgctccacatagc

SEQ ID NO: 1166586 - DNA, 15 bp, Homo sapiens
ccttgctccacatag

SEQ ID NO: 1166587 - DNA, 15 bp, Homo sapiens
cccttgctccacata

SEQ ID NO: 1166588 - DNA, 15 bp, Homo sapiens
gcccttgctccacat

SEQ ID NO: 1166589 - DNA, 15 bp, Homo sapiens
ggcccttgctccaca

SEQ ID NO: 1166590 - DNA, 15 bp, Homo sapiens
gggcccttgctccac

SEQ ID NO: 1166591 - DNA, 15 bp, Homo sapiens
tgggcccttgctcca

SEQ ID NO: 1166592 - DNA, 15 bp, Homo sapiens
ttgggcccttgctcc

SEQ ID NO: 1166593 - DNA, 15 bp, Homo sapiens
cttgggcccttgctc

SEQ ID NO: 1166594 - DNA, 15 bp, Homo sapiens
gcttgggcccttgct

SEQ ID NO: 1166595 - DNA, 15 bp, Homo sapiens
agcttgggcccttgc

SEQ ID NO: 1166596 - DNA, 15 bp, Homo sapiens
aagcttgggcccttg

SEQ ID NO: 1166597 - DNA, 15 bp, Homo sapiens
aaagcttgggccctt

SEQ ID NO: 1166598 - DNA, 15 bp, Homo sapiens
aaaagcttgggccct

SEQ ID NO: 1166599 - DNA, 15 bp, Homo sapiens
taaaagcttgggccc

SEQ ID NO: 1166600 - DNA, 15 bp, Homo sapiens
ttaaaagcttgggcc

SEQ ID NO: 1166601 - DNA, 15 bp, Homo sapiens
tttaaaagcttgggc

SEQ ID NO: 1166602 - DNA, 15 bp, Homo sapiens
ttttaaaagcttggg

SEQ ID NO: 1166603 - DNA, 15 bp, Homo sapiens
tttttaaaagcttgg

SEQ ID NO: 1166604 - DNA, 15 bp, Homo sapiens
gtttttaaaagcttg

SEQ ID NO: 1166605 - DNA, 15 bp, Homo sapiens
tgtttttaaaagctt

SEQ ID NO: 1166606 - DNA, 15 bp, Homo sapiens
ttgtttttaaaagct

SEQ ID NO: 1166607 - DNA, 15 bp, Homo sapiens
cttgtttttaaaagc

SEQ ID NO: 1166608 - DNA, 15 bp, Homo sapiens
tcttgtttttaaaag

SEQ ID NO: 1166609 - DNA, 15 bp, Homo sapiens
ctcttgtttttaaaa

SEQ ID NO: 1166610 - DNA, 15 bp, Homo sapiens
gctcttgtttttaaa

SEQ ID NO: 1166611 - DNA, 15 bp, Homo sapiens
agctcttgtttttaa

SEQ ID NO: 1166612 - DNA, 15 bp, Homo sapiens
gagctcttgttttta

SEQ ID NO: 1166613 - DNA, 15 bp, Homo sapiens
tgagctcttgttttt

SEQ ID NO: 1166614 - DNA, 15 bp, Homo sapiens
ctgagctcttgtttt

SEQ ID NO: 1166615 - DNA, 15 bp, Homo sapiens
tctgagctcttgttt

SEQ ID NO: 1166616 - DNA, 15 bp, Homo sapiens
ctctgagctcttgtt

SEQ ID NO: 1166617 - DNA, 15 bp, Homo sapiens
tctctgagctcttgt

SEQ ID NO: 1166618 - DNA, 15 bp, Homo sapiens
gtctctgagctcttg

SEQ ID NO: 1166619 - DNA, 15 bp, Homo sapiens
tgtctctgagctctt

SEQ ID NO: 1166620 - DNA, 15 bp, Homo sapiens
atgtctctgagctct

SEQ ID NO: 1166621 - DNA, 15 bp, Homo sapiens
catgtctctgagctc

SEQ ID NO: 1166622 - DNA, 15 bp, Homo sapiens
ccatgtctctgagct

SEQ ID NO: 1166623 - DNA, 15 bp, Homo sapiens
gccatgtctctgagc

SEQ ID NO: 1166624 - DNA, 15 bp, Homo sapiens
ggccatgtctctgag

SEQ ID NO: 1166625 - DNA, 15 bp, Homo sapiens
gggccatgtctctga

SEQ ID NO: 1166626 - DNA, 15 bp, Homo sapiens
agggccatgtctctg

SEQ ID NO: 1166627 - DNA, 15 bp, Homo sapiens
cagggccatgtctct

SEQ ID NO: 1166628 - DNA, 15 bp, Homo sapiens
ccagggccatgtctc

SEQ ID NO: 1166629 - DNA, 15 bp, Homo sapiens
gccagggccatgtct

SEQ ID NO: 1166630 - DNA, 15 bp, Homo sapiens
ggccagggccatgtc

SEQ ID NO: 1166631 - DNA, 15 bp, Homo sapiens
aggccagggccatgt

SEQ ID NO: 1166632 - DNA, 15 bp, Homo sapiens
aaggccagggccatg

SEQ ID NO: 1166633 - DNA, 15 bp, Homo sapiens
caaggccagggccat

SEQ ID NO: 1166634 - DNA, 15 bp, Homo sapiens
ccaaggccagggcca

SEQ ID NO: 1166635 - DNA, 15 bp, Homo sapiens
tccaaggccagggcc

SEQ ID NO: 1166636 - DNA, 15 bp, Homo sapiens
ttccaaggccagggc

SEQ ID NO: 1166637 - DNA, 15 bp, Homo sapiens
cttccaaggccaggg

SEQ ID NO: 1166638 - DNA, 15 bp, Homo sapiens
tcttccaaggccagg

SEQ ID NO: 1166639 - DNA, 15 bp, Homo sapiens
atcttccaaggccag

SEQ ID NO: 1166640 - DNA, 15 bp, Homo sapiens
catcttccaaggcca

SEQ ID NO: 1166641 - DNA, 15 bp, Homo sapiens
gcatcttccaaggcc

SEQ ID NO: 1166642 - DNA, 15 bp, Homo sapiens
ggcatcttccaaggc

SEQ ID NO: 1166643 - DNA, 15 bp, Homo sapiens
gggcatcttccaagg

SEQ ID NO: 1166644 - DNA, 15 bp, Homo sapiens
agggcatcttccaag

SEQ ID NO: 1166645 - DNA, 15 bp, Homo sapiens
tagggcatcttccaa

SEQ ID NO: 1166646 - DNA, 15 bp, Homo sapiens
ctagggcatcttcca

SEQ ID NO: 1166647 - DNA, 15 bp, Homo sapiens
tctagggcatcttcc

SEQ ID NO: 1166648 - DNA, 15 bp, Homo sapiens
ctctagggcatcttc

SEQ ID NO: 1166649 - DNA, 15 bp, Homo sapiens
tctctagggcatctt

SEQ ID NO: 1166650 - DNA, 15 bp, Homo sapiens
gtctctagggcatct

SEQ ID NO: 1166651 - DNA, 15 bp, Homo sapiens
cgtctctagggcatc

SEQ ID NO: 1166652 - DNA, 15 bp, Homo sapiens
gcgtctctagggcat

SEQ ID NO: 1166653 - DNA, 15 bp, Homo sapiens
agcgtctctagggca

SEQ ID NO: 1166654 - DNA, 15 bp, Homo sapiens
cagcgtctctagggc

SEQ ID NO: 1166655 - DNA, 15 bp, Homo sapiens
tcagcgtctctaggg

SEQ ID NO: 1166656 - DNA, 15 bp, Homo sapiens
ctcagcgtctctagg

SEQ ID NO: 1166657 - DNA, 15 bp, Homo sapiens
cctcagcgtctctag

SEQ ID NO: 1166658 - DNA, 15 bp, Homo sapiens
acctcagcgtctcta

SEQ ID NO: 1166659 - DNA, 15 bp, Homo sapiens
cacctcagcgtctct

SEQ ID NO: 1166660 - DNA, 15 bp, Homo sapiens
accacctcagcgtct

SEQ ID NO: 1166661 - DNA, 15 bp, Homo sapiens
aaccacctcagcgtc

SEQ ID NO: 1166662 - DNA, 15 bp, Homo sapiens
caaccacctcagcgt

SEQ ID NO: 1166663 - DNA, 15 bp, Homo sapiens
acaaccacctcagcg

SEQ ID NO: 1166664 - DNA, 15 bp, Homo sapiens
tacaaccacctcagc

SEQ ID NO: 1166665 - DNA, 15 bp, Homo sapiens
gtacaaccacctcag

SEQ ID NO: 1166666 - DNA, 15 bp, Homo sapiens
agtacaaccacctca

SEQ ID NO: 1166667 - DNA, 15 bp, Homo sapiens
aagtacaaccacctc

SEQ ID NO: 1166668 - DNA, 15 bp, Homo sapiens
aaagtacaaccacct

SEQ ID NO: 1166669 - DNA, 15 bp, Homo sapiens
aaaagtacaaccacc

SEQ ID NO: 1166670 - DNA, 15 bp, Homo sapiens
caaaagtacaaccac

SEQ ID NO: 1166671 - DNA, 15 bp, Homo sapiens
gcaaaagtacaacca

SEQ ID NO: 1166672 - DNA, 15 bp, Homo sapiens
ggcaaaagtacaacc

SEQ ID NO: 1166673 - DNA, 15 bp, Homo sapiens
tggcaaaagtacaac

SEQ ID NO: 1166674 - DNA, 15 bp, Homo sapiens
atggcaaaagtacaa

SEQ ID NO: 1166675 - DNA, 15 bp, Homo sapiens
tatggcaaaagtaca

SEQ ID NO: 1166676 - DNA, 15 bp, Homo sapiens
ctatggcaaaagtac

SEQ ID NO: 1166677 - DNA, 15 bp, Homo sapiens
cctatggcaaaagta

SEQ ID NO: 1166678 - DNA, 15 bp, Homo sapiens
tcctatggcaaaagt

SEQ ID NO: 1166679 - DNA, 15 bp, Homo sapiens
ctcctatggcaaaag

SEQ ID NO: 1166680 - DNA, 15 bp, Homo sapiens
actcctatggcaaaa

SEQ ID NO: 1166681 - DNA, 15 bp, Homo sapiens
cactcctatggcaaa

SEQ ID NO: 1166682 - DNA, 15 bp, Homo sapiens
ccactcctatggcaa

SEQ ID NO: 1166683 - DNA, 15 bp, Homo sapiens
gccactcctatggca

SEQ ID NO: 1166684 - DNA, 15 bp, Homo sapiens
tgccactcctatggc

SEQ ID NO: 1166685 - DNA, 15 bp, Homo sapiens
ctgccactcctatgg

SEQ ID NO: 1166686 - DNA, 15 bp, Homo sapiens
gctgccactcctatg

SEQ ID NO: 1166687 - DNA, 15 bp, Homo sapiens
ggctgccactcctat

SEQ ID NO: 1166688 - DNA, 15 bp, Homo sapiens
tggctgccactccta

SEQ ID NO: 1166689 - DNA, 15 bp, Homo sapiens
ctggctgccactcct

SEQ ID NO: 1166690 - DNA, 15 bp, Homo sapiens
tctggctgccactcc

SEQ ID NO: 1166691 - DNA, 15 bp, Homo sapiens
ctctggctgccactc

SEQ ID NO: 1166692 - DNA, 15 bp, Homo sapiens
tctctggctgccact

SEQ ID NO: 1166693 - DNA, 15 bp, Homo sapiens
ttctctggctgccac

SEQ ID NO: 1166694 - DNA, 15 bp, Homo sapiens
gttctctggctgcca

SEQ ID NO: 1166695 - DNA, 15 bp, Homo sapiens
agttctctggctgcc

SEQ ID NO: 1166696 - DNA, 15 bp, Homo sapiens
cagttctctggctgc

SEQ ID NO: 1166697 - DNA, 15 bp, Homo sapiens
tcagttctctggctg

SEQ ID NO: 1166698 - DNA, 15 bp, Homo sapiens
ctcagttctctggct

SEQ ID NO: 1166699 - DNA, 15 bp, Homo sapiens
gctcagttctctggc

SEQ ID NO: 1166700 - DNA, 15 bp, Homo sapiens
ggctcagttctctgg

SEQ ID NO: 1166701 - DNA, 15 bp, Homo sapiens
gggctcagttctctg

SEQ ID NO: 1166702 - DNA, 15 bp, Homo sapiens
tgggctcagttctct

SEQ ID NO: 1166703 - DNA, 15 bp, Homo sapiens
ttgggctcagttctc

SEQ ID NO: 1166704 - DNA, 15 bp, Homo sapiens
attgggctcagttct

SEQ ID NO: 1166705 - DNA, 15 bp, Homo sapiens
cattgggctcagttc

SEQ ID NO: 1166706 - DNA, 15 bp, Homo sapiens
tcattgggctcagtt

SEQ ID NO: 1166707 - DNA, 15 bp, Homo sapiens
ttcattgggctcagt

SEQ ID NO: 1166708 - DNA, 15 bp, Homo sapiens
attcattgggctcag

SEQ ID NO: 1166709 - DNA, 15 bp, Homo sapiens
cattcattgggctca

SEQ ID NO: 1166710 - DNA, 15 bp, Homo sapiens
gcattcattgggctc

SEQ ID NO: 1166711 - DNA, 15 bp, Homo sapiens
tgcattcattgggct

SEQ ID NO: 1166712 - DNA, 15 bp, Homo sapiens
ttgcattcattgggc

SEQ ID NO: 1166713 - DNA, 15 bp, Homo sapiens
tttgcattcattggg

SEQ ID NO: 1166714 - DNA, 15 bp, Homo sapiens
ctttgcattcattgg

SEQ ID NO: 1166715 - DNA, 15 bp, Homo sapiens
cctttgcattcattg

SEQ ID NO: 1166716 - DNA, 15 bp, Homo sapiens
gcctttgcattcatt

SEQ ID NO: 1166717 - DNA, 15 bp, Homo sapiens
agcctttgcattcat

SEQ ID NO: 1166718 - DNA, 15 bp, Homo sapiens
cagcctttgcattca

SEQ ID NO: 1166719 - DNA, 15 bp, Homo sapiens
ccagcctttgcattc

SEQ ID NO: 1166720 - DNA, 15 bp, Homo sapiens
accagcctttgcatt

SEQ ID NO: 1166721 - DNA, 15 bp, Homo sapiens
caccagcctttgcat

SEQ ID NO: 1166722 - DNA, 15 bp, Homo sapiens
gcaccagcctttgca

SEQ ID NO: 1166723 - DNA, 15 bp, Homo sapiens
ggcaccagcctttgc

SEQ ID NO: 1166724 - DNA, 15 bp, Homo sapiens
aggcaccagcctttg

SEQ ID NO: 1166725 - DNA, 15 bp, Homo sapiens
caggcaccagccttt

SEQ ID NO: 1166726 - DNA, 15 bp, Homo sapiens
ccaggcaccagcctt

SEQ ID NO: 1166727 - DNA, 15 bp, Homo sapiens
tccaggcaccagcct

SEQ ID NO: 1166728 - DNA, 15 bp, Homo sapiens
ttccaggcaccagcc

SEQ ID NO: 1166729 - DNA, 15 bp, Homo sapiens
tttccaggcaccagc

SEQ ID NO: 1166730 - DNA, 15 bp, Homo sapiens
atttccaggcaccag

SEQ ID NO: 1166731 - DNA, 15 bp, Homo sapiens
tatttccaggcacca

SEQ ID NO: 1166732 - DNA, 15 bp, Homo sapiens
atatttccaggcacc

SEQ ID NO: 1166733 - DNA, 15 bp, Homo sapiens
aatatttccaggcac

SEQ ID NO: 1166734 - DNA, 15 bp, Homo sapiens
caatatttccaggca

SEQ ID NO: 1166735 - DNA, 15 bp, Homo sapiens
acaatatttccaggc

SEQ ID NO: 1166736 - DNA, 15 bp, Homo sapiens
cacaatatttccagg

SEQ ID NO: 1166737 - DNA, 15 bp, Homo sapiens
tcacaatatttccag

SEQ ID NO: 1166738 - DNA, 15 bp, Homo sapiens
gtcacaatatttcca

SEQ ID NO: 1166739 - DNA, 15 bp, Homo sapiens
agtcacaatatttcc

SEQ ID NO: 1166740 - DNA, 15 bp, Homo sapiens
aagtcacaatatttc

SEQ ID NO: 1166741 - DNA, 15 bp, Homo sapiens
aaagtcacaatattt

SEQ ID NO: 1166742 - DNA, 15 bp, Homo sapiens
caaagtcacaatatt

SEQ ID NO: 1166743 - DNA, 15 bp, Homo sapiens
gcaaagtcacaatat

SEQ ID NO: 1166744 - DNA, 15 bp, Homo sapiens
ggcaaagtcacaata

SEQ ID NO: 1166745 - DNA, 15 bp, Homo sapiens
tggcaaagtcacaat

SEQ ID NO: 1166746 - DNA, 15 bp, Homo sapiens
gtggcaaagtcacaa

SEQ ID NO: 1166747 - DNA, 15 bp, Homo sapiens
tgtggcaaagtcaca

SEQ ID NO: 1166748 - DNA, 15 bp, Homo sapiens
ctgtggcaaagtcac

SEQ ID NO: 1166749 - DNA, 15 bp, Homo sapiens
tctgtggcaaagtca

SEQ ID NO: 1166750 - DNA, 15 bp, Homo sapiens
ttctgtggcaaagtc

SEQ ID NO: 1166751 - DNA, 15 bp, Homo sapiens
tttctgtggcaaagt

SEQ ID NO: 1166752 - DNA, 15 bp, Homo sapiens
ctttctgtggcaaag

SEQ ID NO: 1166753 - DNA, 15 bp, Homo sapiens
tctttctgtggcaaa

SEQ ID NO: 1166754 - DNA, 15 bp, Homo sapiens
ttctttctgtggcaa

SEQ ID NO: 1166755 - DNA, 15 bp, Homo sapiens
cttctttctgtggca

SEQ ID NO: 1166756 - DNA, 15 bp, Homo sapiens
tcttctttctgtggc

SEQ ID NO: 1166757 - DNA, 15 bp, Homo sapiens
atcttctttctgtgg

SEQ ID NO: 1166758 - DNA, 15 bp, Homo sapiens
catcttctttctgtg

SEQ ID NO: 1166759 - DNA, 15 bp, Homo sapiens
ccatcttctttctgt

SEQ ID NO: 1166760 - DNA, 15 bp, Homo sapiens
tccatcttctttctg

SEQ ID NO: 1166761 - DNA, 15 bp, Homo sapiens
ctccatcttctttct

SEQ ID NO: 1166762 - DNA, 15 bp, Homo sapiens
tctccatcttctttc

SEQ ID NO: 1166763 - DNA, 15 bp, Homo sapiens
ttctccatcttcttt

SEQ ID NO: 1166764 - DNA, 15 bp, Homo sapiens
attctccatcttctt

SEQ ID NO: 1166765 - DNA, 15 bp, Homo sapiens
aattctccatcttct

SEQ ID NO: 1166766 - DNA, 15 bp, Homo sapiens
aaattctccatcttc

SEQ ID NO: 1166767 - DNA, 15 bp, Homo sapiens
aaaattctccatctt

SEQ ID NO: 1166768 - DNA, 15 bp, Homo sapiens
taaaattctccatct

SEQ ID NO: 1166769 - DNA, 15 bp, Homo sapiens
ttaaaattctccatc

SEQ ID NO: 1166770 - DNA, 15 bp, Homo sapiens
tttaaaattctccat

SEQ ID NO: 1166771 - DNA, 15 bp, Homo sapiens
ctttaaaattctcca

SEQ ID NO: 1166772 - DNA, 15 bp, Homo sapiens
actttaaaattctcc

SEQ ID NO: 1166773 - DNA, 15 bp, Homo sapiens
aactttaaaattctc

SEQ ID NO: 1166774 - DNA, 15 bp, Homo sapiens
caactttaaaattct

SEQ ID NO: 1166775 - DNA, 15 bp, Homo sapiens
ccaactttaaaattc

SEQ ID NO: 1166776 - DNA, 15 bp, Homo sapiens
tccaactttaaaatt

SEQ ID NO: 1166777 - DNA, 15 bp, Homo sapiens
ttccaactttaaaat

SEQ ID NO: 1166778 - DNA, 15 bp, Homo sapiens
tttccaactttaaaa

SEQ ID NO: 1166779 - DNA, 15 bp, Homo sapiens
atttccaactttaaa

SEQ ID NO: 1166780 - DNA, 15 bp, Homo sapiens
gatttccaactttaa

SEQ ID NO: 1166781 - DNA, 15 bp, Homo sapiens
agatttccaacttta

SEQ ID NO: 1166782 - DNA, 15 bp, Homo sapiens
cagatttccaacttt

SEQ ID NO: 1166783 - DNA, 15 bp, Homo sapiens
gcagatttccaactt

SEQ ID NO: 1166784 - DNA, 15 bp, Homo sapiens
ggcagatttccaact

SEQ ID NO: 1166785 - DNA, 15 bp, Homo sapiens
aggcagatttccaac

SEQ ID NO: 1166786 - DNA, 15 bp, Homo sapiens
caggcagatttccaa

SEQ ID NO: 1166787 - DNA, 15 bp, Homo sapiens
ccaggcagatttcca

SEQ ID NO: 1166788 - DNA, 15 bp, Homo sapiens
accaggcagatttcc

SEQ ID NO: 1166789 - DNA, 15 bp, Homo sapiens
taccaggcagatttc

SEQ ID NO: 1166790 - DNA, 15 bp, Homo sapiens
ttaccaggcagattt

SEQ ID NO: 1166791 - DNA, 15 bp, Homo sapiens
cttaccaggcagatt

SEQ ID NO: 1166792 - DNA, 15 bp, Homo sapiens
ccttaccaggcagat

SEQ ID NO: 1166793 - DNA, 15 bp, Homo sapiens
cccttaccaggcaga

SEQ ID NO: 1166794 - DNA, 15 bp, Homo sapiens
tcccttaccaggcag

SEQ ID NO: 1166795 - DNA, 15 bp, Homo sapiens
atcccttaccaggca

SEQ ID NO: 1166796 - DNA, 15 bp, Homo sapiens
gatcccttaccaggc

SEQ ID NO: 1166797 - DNA, 15 bp, Homo sapiens
tgatcccttaccagg

SEQ ID NO: 1166798 - DNA, 15 bp, Homo sapiens
atgatcccttaccag

SEQ ID NO: 1166799 - DNA, 15 bp, Homo sapiens
aatgatcccttacca

SEQ ID NO: 1166800 - DNA, 15 bp, Homo sapiens
aaatgatcccttacc

SEQ ID NO: 1166801 - DNA, 15 bp, Homo sapiens
caaatgatcccttac

SEQ ID NO: 1166802 - DNA, 15 bp, Homo sapiens
gcaaatgatccctta

SEQ ID NO: 1166803 - DNA, 15 bp, Homo sapiens
agcaaatgatccctt

SEQ ID NO: 1166804 - DNA, 15 bp, Homo sapiens
cagcaaatgatccct

SEQ ID NO: 1166805 - DNA, 15 bp, Homo sapiens
ccagcaaatgatccc

SEQ ID NO: 1166806 - DNA, 15 bp, Homo sapiens
accagcaaatgatcc

SEQ ID NO: 1166807 - DNA, 15 bp, Homo sapiens
caccagcaaatgatc

SEQ ID NO: 1166808 - DNA, 15 bp, Homo sapiens
acaccagcaaatgat

SEQ ID NO: 1166809 - DNA, 15 bp, Homo sapiens
gacaccagcaaatga

SEQ ID NO: 1166810 - DNA, 15 bp, Homo sapiens
agacaccagcaaatg

SEQ ID NO: 1166811 - DNA, 15 bp, Homo sapiens
cagacaccagcaaat

SEQ ID NO: 1166812 - DNA, 15 bp, Homo sapiens
gcagacaccagcaaa

SEQ ID NO: 1166813 - DNA, 15 bp, Homo sapiens
tgcagacaccagcaa

SEQ ID NO: 1166814 - DNA, 15 bp, Homo sapiens
ttgcagacaccagca

SEQ ID NO: 1166815 - DNA, 15 bp, Homo sapiens
tttgcagacaccagc

SEQ ID NO: 1166816 - DNA, 15 bp, Homo sapiens
ctttgcagacaccag

SEQ ID NO: 1166817 - DNA, 15 bp, Homo sapiens
actttgcagacacca

SEQ ID NO: 1166818 - DNA, 15 bp, Homo sapiens
aactttgcagacacc

SEQ ID NO: 1166819 - DNA, 15 bp, Homo sapiens
caactttgcagacac

SEQ ID NO: 1166820 - DNA, 15 bp, Homo sapiens
tcaactttgcagaca

SEQ ID NO: 1166821 - DNA, 15 bp, Homo sapiens
ctcaactttgcagac

SEQ ID NO: 1166822 - DNA, 15 bp, Homo sapiens
actcaactttgcaga

SEQ ID NO: 1166823 - DNA, 15 bp, Homo sapiens
gactcaactttgcag

SEQ ID NO: 1166824 - DNA, 15 bp, Homo sapiens
ggactcaactttgca

SEQ ID NO: 1166825 - DNA, 15 bp, Homo sapiens
tggactcaactttgc

SEQ ID NO: 1166826 - DNA, 15 bp, Homo sapiens
atggactcaactttg

SEQ ID NO: 1166827 - DNA, 15 bp, Homo sapiens
tatggactcaacttt

SEQ ID NO: 1166828 - DNA, 15 bp, Homo sapiens
gtatggactcaactt

SEQ ID NO: 1166829 - DNA, 15 bp, Homo sapiens
tgtatggactcaact

SEQ ID NO: 1166830 - DNA, 15 bp, Homo sapiens
gtgtatggactcaac

SEQ ID NO: 1166831 - DNA, 15 bp, Homo sapiens
tgtgtatggactcaa

SEQ ID NO: 1166832 - DNA, 15 bp, Homo sapiens
gtgtgtatggactca

SEQ ID NO: 1166833 - DNA, 15 bp, Homo sapiens
agtgtgtatggactc

SEQ ID NO: 1166834 - DNA, 15 bp, Homo sapiens
cagtgtgtatggact

SEQ ID NO: 1166835 - DNA, 15 bp, Homo sapiens
ccagtgtgtatggac

SEQ ID NO: 1166836 - DNA, 15 bp, Homo sapiens
accagtgtgtatgga

SEQ ID NO: 1166837 - DNA, 15 bp, Homo sapiens
aaccagtgtgtatgg

SEQ ID NO: 1166838 - DNA, 15 bp, Homo sapiens
aaaccagtgtgtatg

SEQ ID NO: 1166839 - DNA, 15 bp, Homo sapiens
caaaccagtgtgtat

SEQ ID NO: 1166840 - DNA, 15 bp, Homo sapiens
ccaaaccagtgtgta

SEQ ID NO: 1166841 - DNA, 15 bp, Homo sapiens
tccaaaccagtgtgt

SEQ ID NO: 1166842 - DNA, 15 bp, Homo sapiens
ttccaaaccagtgtg

SEQ ID NO: 1166843 - DNA, 15 bp, Homo sapiens
tttccaaaccagtgt

SEQ ID NO: 1166844 - DNA, 15 bp, Homo sapiens
atttccaaaccagtg

SEQ ID NO: 1166845 - DNA, 15 bp, Homo sapiens
aatttccaaaccagt

SEQ ID NO: 1166846 - DNA, 15 bp, Homo sapiens
aaatttccaaaccag

SEQ ID NO: 1166847 - DNA, 15 bp, Homo sapiens
gaaatttccaaacca

SEQ ID NO: 1166848 - DNA, 15 bp, Homo sapiens
tgaaatttccaaacc

SEQ ID NO: 1166849 - DNA, 15 bp, Homo sapiens
ctgaaatttccaaac

SEQ ID NO: 1166850 - DNA, 15 bp, Homo sapiens
actgaaatttccaaa

SEQ ID NO: 1166851 - DNA, 15 bp, Homo sapiens
gactgaaatttccaa

SEQ ID NO: 1166852 - DNA, 15 bp, Homo sapiens
ggactgaaatttcca

SEQ ID NO: 1166853 - DNA, 15 bp, Homo sapiens
tggactgaaatttcc

SEQ ID NO: 1166854 - DNA, 15 bp, Homo sapiens
ctggactgaaatttc

SEQ ID NO: 1166855 - DNA, 15 bp, Homo sapiens
tctggactgaaattt

SEQ ID NO: 1166856 - DNA, 15 bp, Homo sapiens
atctggactgaaatt

SEQ ID NO: 1166857 - DNA, 15 bp, Homo sapiens
catctggactgaaat

SEQ ID NO: 1166858 - DNA, 15 bp, Homo sapiens
tcatctggactgaaa

SEQ ID NO: 1166859 - DNA, 15 bp, Homo sapiens
atcatctggactgaa

SEQ ID NO: 1166860 - DNA, 15 bp, Homo sapiens
tatcatctggactga

SEQ ID NO: 1166861 - DNA, 15 bp, Homo sapiens
ctatcatctggactg

SEQ ID NO: 1166862 - DNA, 15 bp, Homo sapiens
actatcatctggact

SEQ ID NO: 1166863 - DNA, 15 bp, Homo sapiens
aactatcatctggac

SEQ ID NO: 1166864 - DNA, 15 bp, Homo sapiens
taactatcatctgga

SEQ ID NO: 1166865 - DNA, 15 bp, Homo sapiens
ttaactatcatctgg

SEQ ID NO: 1166866 - DNA, 15 bp, Homo sapiens
cttaactatcatctg

SEQ ID NO: 1166867 - DNA, 15 bp, Homo sapiens
tcttaactatcatct

SEQ ID NO: 1166868 - DNA, 15 bp, Homo sapiens
ttcttaactatcatc

SEQ ID NO: 1166869 - DNA, 15 bp, Homo sapiens
tttcttaactatcat

SEQ ID NO: 1166870 - DNA, 15 bp, Homo sapiens
ctttcttaactatca

SEQ ID NO: 1166871 - DNA, 15 bp, Homo sapiens
gctttcttaactatc

SEQ ID NO: 1166872 - DNA, 15 bp, Homo sapiens
tgctttcttaactat

SEQ ID NO: 1166873 - DNA, 15 bp, Homo sapiens
ctgctttcttaacta

SEQ ID NO: 1166874 - DNA, 15 bp, Homo sapiens
actgctttcttaact

SEQ ID NO: 1166875 - DNA, 15 bp, Homo sapiens
tactgctttcttaac

SEQ ID NO: 1166876 - DNA, 15 bp, Homo sapiens
ttactgctttcttaa

SEQ ID NO: 1166877 - DNA, 15 bp, Homo sapiens
cttactgctttctta

SEQ ID NO: 1166878 - DNA, 15 bp, Homo sapiens
tcttactgctttctt

SEQ ID NO: 1166879 - DNA, 15 bp, Homo sapiens
ttcttactgctttct

SEQ ID NO: 1166880 - DNA, 15 bp, Homo sapiens
attcttactgctttc

SEQ ID NO: 1166881 - DNA, 15 bp, Homo sapiens
tattcttactgcttt

SEQ ID NO: 1166882 - DNA, 15 bp, Homo sapiens
gtattcttactgctt

SEQ ID NO: 1166883 - DNA, 15 bp, Homo sapiens
tgtattcttactgct

SEQ ID NO: 1166884 - DNA, 15 bp, Homo sapiens
ctgtattcttactgc

SEQ ID NO: 1166885 - DNA, 15 bp, Homo sapiens
tctgtattcttactg

SEQ ID NO: 1166886 - DNA, 15 bp, Homo sapiens
ctctgtattcttact

SEQ ID NO: 1166887 - DNA, 15 bp, Homo sapiens
tctctgtattcttac

SEQ ID NO: 1166888 - DNA, 15 bp, Homo sapiens
ctctctgtattctta

SEQ ID NO: 1166889 - DNA, 15 bp, Homo sapiens
actctctgtattctt

SEQ ID NO: 1166890 - DNA, 15 bp, Homo sapiens
gactctctgtattct

SEQ ID NO: 1166891 - DNA, 15 bp, Homo sapiens
ggactctctgtattc

SEQ ID NO: 1166892 - DNA, 15 bp, Homo sapiens
tggactctctgtatt

SEQ ID NO: 1166893 - DNA, 15 bp, Homo sapiens
gtggactctctgtat

SEQ ID NO: 1166894 - DNA, 15 bp, Homo sapiens
tgtggactctctgta

SEQ ID NO: 1166895 - DNA, 15 bp, Homo sapiens
ttgtggactctctgt

SEQ ID NO: 1166896 - DNA, 15 bp, Homo sapiens
attgtggactctctg

SEQ ID NO: 1166897 - DNA, 15 bp, Homo sapiens
cattgtggactctct

SEQ ID NO: 1166898 - DNA, 15 bp, Homo sapiens
tcattgtggactctc

SEQ ID NO: 1166899 - DNA, 15 bp, Homo sapiens
ctcattgtggactct

SEQ ID NO: 1166900 - DNA, 15 bp, Homo sapiens
tctcattgtggactc

SEQ ID NO: 1166901 - DNA, 15 bp, Homo sapiens
atctcattgtggact

SEQ ID NO: 1166902 - DNA, 15 bp, Homo sapiens
catctcattgtggac

SEQ ID NO: 1166903 - DNA, 15 bp, Homo sapiens
tcatctcattgtgga

SEQ ID NO: 1166904 - DNA, 15 bp, Homo sapiens
ttcatctcattgtgg

SEQ ID NO: 1166905 - DNA, 15 bp, Homo sapiens
tttcatctcattgtg

SEQ ID NO: 1166906 - DNA, 15 bp, Homo sapiens
ttttcatctcattgt

SEQ ID NO: 1166907 - DNA, 15 bp, Homo sapiens
attttcatctcattg

SEQ ID NO: 1166908 - DNA, 15 bp, Homo sapiens
cattttcatctcatt

SEQ ID NO: 1166909 - DNA, 15 bp, Homo sapiens
gcattttcatctcat

SEQ ID NO: 1166910 - DNA, 15 bp, Homo sapiens
tgcattttcatctca

SEQ ID NO: 1166911 - DNA, 15 bp, Homo sapiens
gtgcattttcatctc

SEQ ID NO: 1166912 - DNA, 15 bp, Homo sapiens
agtgcattttcatct

SEQ ID NO: 1166913 - DNA, 15 bp, Homo sapiens
cagtgcattttcatc

SEQ ID NO: 1166914 - DNA, 15 bp, Homo sapiens
gcagtgcattttcat

SEQ ID NO: 1166915 - DNA, 15 bp, Homo sapiens
ggcagtgcattttca

SEQ ID NO: 1166916 - DNA, 15 bp, Homo sapiens
tggcagtgcattttc

SEQ ID NO: 1166917 - DNA, 15 bp, Homo sapiens
ctggcagtgcatttt

SEQ ID NO: 1166918 - DNA, 15 bp, Homo sapiens
actggcagtgcattt

SEQ ID NO: 1166919 - DNA, 15 bp, Homo sapiens
aactggcagtgcatt

SEQ ID NO: 1166920 - DNA, 15 bp, Homo sapiens
caactggcagtgcat

SEQ ID NO: 1166921 - DNA, 15 bp, Homo sapiens
tcaactggcagtgca

SEQ ID NO: 1166922 - DNA, 15 bp, Homo sapiens
ttcaactggcagtgc

SEQ ID NO: 1166923 - DNA, 15 bp, Homo sapiens
tttcaactggcagtg

SEQ ID NO: 1166924 - DNA, 15 bp, Homo sapiens
gtttcaactggcagt

SEQ ID NO: 1166925 - DNA, 15 bp, Homo sapiens
tgtttcaactggcag

SEQ ID NO: 1166926 - DNA, 15 bp, Homo sapiens
atgtttcaactggca

SEQ ID NO: 1166927 - DNA, 15 bp, Homo sapiens
gatgtttcaactggc

SEQ ID NO: 1166928 - DNA, 15 bp, Homo sapiens
ggatgtttcaactgg

SEQ ID NO: 1166929 - DNA, 15 bp, Homo sapiens
aggatgtttcaactg

SEQ ID NO: 1166930 - DNA, 15 bp, Homo sapiens
gaggatgtttcaact

SEQ ID NO: 1166931 - DNA, 15 bp, Homo sapiens
ggaggatgtttcaac

SEQ ID NO: 1166932 - DNA, 15 bp, Homo sapiens
aggaggatgtttcaa

SEQ ID NO: 1166933 - DNA, 15 bp, Homo sapiens
taggaggatgtttca

SEQ ID NO: 1166934 - DNA, 15 bp, Homo sapiens
gtaggaggatgtttc

SEQ ID NO: 1166935 - DNA, 15 bp, Homo sapiens
tgtaggaggatgttt

SEQ ID NO: 1166936 - DNA, 15 bp, Homo sapiens
gtgtaggaggatgtt

SEQ ID NO: 1166937 - DNA, 15 bp, Homo sapiens
agtgtaggaggatgt

SEQ ID NO: 1166938 - DNA, 15 bp, Homo sapiens
cagtgtaggaggatg

SEQ ID NO: 1166939 - DNA, 15 bp, Homo sapiens
ccagtgtaggaggat

SEQ ID NO: 1166940 - DNA, 15 bp, Homo sapiens
tccagtgtaggagga

SEQ ID NO: 1166941 - DNA, 15 bp, Homo sapiens
ctccagtgtaggagg

SEQ ID NO: 1166942 - DNA, 15 bp, Homo sapiens
gctccagtgtaggag

SEQ ID NO: 1166943 - DNA, 15 bp, Homo sapiens
agctccagtgtagga

SEQ ID NO: 1166944 - DNA, 15 bp, Homo sapiens
aagctccagtgtagg

SEQ ID NO: 1166945 - DNA, 15 bp, Homo sapiens
aaagctccagtgtag

SEQ ID NO: 1166946 - DNA, 15 bp, Homo sapiens
taaagctccagtgta

SEQ ID NO: 1166947 - DNA, 15 bp, Homo sapiens
ataaagctccagtgt

SEQ ID NO: 1166948 - DNA, 15 bp, Homo sapiens
tataaagctccagtg

SEQ ID NO: 1166949 - DNA, 15 bp, Homo sapiens
ttataaagctccagt

SEQ ID NO: 1166950 - DNA, 15 bp, Homo sapiens
tttataaagctccag

SEQ ID NO: 1166951 - DNA, 15 bp, Homo sapiens
atttataaagctcca

SEQ ID NO: 1166952 - DNA, 15 bp, Homo sapiens
tatttataaagctcc

SEQ ID NO: 1166953 - DNA, 15 bp, Homo sapiens
atatttataaagctc

SEQ ID NO: 1166954 - DNA, 15 bp, Homo sapiens
aatatttataaagct

SEQ ID NO: 1166955 - DNA, 15 bp, Homo sapiens
aaatatttataaagc

SEQ ID NO: 1166956 - DNA, 15 bp, Homo sapiens
aaaatatttataaag

SEQ ID NO: 1166957 - DNA, 15 bp, Homo sapiens
ttaaaatatttataa

SEQ ID NO: 1166958 - DNA, 15 bp, Homo sapiens
tttaaaatatttata

SEQ ID NO: 1166959 - DNA, 15 bp, Homo sapiens
ctttaaaatatttat

SEQ ID NO: 1166960 - DNA, 15 bp, Homo sapiens
tctttaaaatattta

SEQ ID NO: 1166961 - DNA, 15 bp, Homo sapiens
gtctttaaaatattt

SEQ ID NO: 1166962 - DNA, 15 bp, Homo sapiens
tgtctttaaaatatt

SEQ ID NO: 1166963 - DNA, 15 bp, Homo sapiens
ttgtctttaaaatat

SEQ ID NO: 1166964 - DNA, 15 bp, Homo sapiens
cttgtctttaaaata

SEQ ID NO: 1166965 - DNA, 15 bp, Homo sapiens
ccttgtctttaaaat

SEQ ID NO: 1166966 - DNA, 15 bp, Homo sapiens
tccttgtctttaaaa

SEQ ID NO: 1166967 - DNA, 15 bp, Homo sapiens
atccttgtctttaaa

SEQ ID NO: 1166968 - DNA, 15 bp, Homo sapiens
aatccttgtctttaa

SEQ ID NO: 1166969 - DNA, 15 bp, Homo sapiens
caatccttgtcttta

SEQ ID NO: 1166970 - DNA, 15 bp, Homo sapiens
ccaatccttgtcttt

SEQ ID NO: 1166971 - DNA, 15 bp, Homo sapiens
tccaatccttgtctt

SEQ ID NO: 1166972 - DNA, 15 bp, Homo sapiens
atccaatccttgtct

SEQ ID NO: 1166973 - DNA, 15 bp, Homo sapiens
aatccaatccttgtc

SEQ ID NO: 1166974 - DNA, 15 bp, Homo sapiens
taatccaatccttgt

SEQ ID NO: 1166975 - DNA, 15 bp, Homo sapiens
ctaatccaatccttg

SEQ ID NO: 1166976 - DNA, 15 bp, Homo sapiens
tctaatccaatcctt

SEQ ID NO: 1166977 - DNA, 15 bp, Homo sapiens
atctaatccaatcct

SEQ ID NO: 1166978 - DNA, 15 bp, Homo sapiens
aatctaatccaatcc

SEQ ID NO: 1166979 - DNA, 15 bp, Homo sapiens
aaatctaatccaatc

SEQ ID NO: 1166980 - DNA, 15 bp, Homo sapiens
caaatctaatccaat

SEQ ID NO: 1166981 - DNA, 15 bp, Homo sapiens
tcaaatctaatccaa

SEQ ID NO: 1166982 - DNA, 15 bp, Homo sapiens
gtcaaatctaatcca

SEQ ID NO: 1166983 - DNA, 15 bp, Homo sapiens
tgtcaaatctaatcc

SEQ ID NO: 1166984 - DNA, 15 bp, Homo sapiens
atgtcaaatctaatc

SEQ ID NO: 1166985 - DNA, 15 bp, Homo sapiens
aatgtcaaatctaat

SEQ ID NO: 1166986 - DNA, 15 bp, Homo sapiens
taatgtcaaatctaa

SEQ ID NO: 1166987 - DNA, 15 bp, Homo sapiens
ctaatgtcaaatcta

SEQ ID NO: 1166988 - DNA, 15 bp, Homo sapiens
tctaatgtcaaatct

SEQ ID NO: 1166989 - DNA, 15 bp, Homo sapiens
ttctaatgtcaaatc

SEQ ID NO: 1166990 - DNA, 15 bp, Homo sapiens
tttctaatgtcaaat

SEQ ID NO: 1166991 - DNA, 15 bp, Homo sapiens
atttctaatgtcaaa

SEQ ID NO: 1166992 - DNA, 15 bp, Homo sapiens
catttctaatgtcaa

SEQ ID NO: 1166993 - DNA, 15 bp, Homo sapiens
acatttctaatgtca

SEQ ID NO: 1166994 - DNA, 15 bp, Homo sapiens
tacatttctaatgtc

SEQ ID NO: 1166995 - DNA, 15 bp, Homo sapiens
gtacatttctaatgt

SEQ ID NO: 1166996 - DNA, 15 bp, Homo sapiens
ggtacatttctaatg

SEQ ID NO: 1166997 - DNA, 15 bp, Homo sapiens
tggtacatttctaat

SEQ ID NO: 1166998 - DNA, 15 bp, Homo sapiens
atggtacatttctaa

SEQ ID NO: 1166999 - DNA, 15 bp, Homo sapiens
tatggtacatttcta

SEQ ID NO: 1167000 - DNA, 15 bp, Homo sapiens
ttatggtacatttct

SEQ ID NO: 1167001 - DNA, 15 bp, Homo sapiens
attatggtacatttc

SEQ ID NO: 1167002 - DNA, 15 bp, Homo sapiens
tattatggtacattt

SEQ ID NO: 1167003 - DNA, 15 bp, Homo sapiens
gtattatggtacatt

SEQ ID NO: 1167004 - DNA, 15 bp, Homo sapiens
tgtattatggtacat

SEQ ID NO: 1167005 - DNA, 15 bp, Homo sapiens
ctgtattatggtaca

SEQ ID NO: 1167006 - DNA, 15 bp, Homo sapiens
tctgtattatggtac

SEQ ID NO: 1167007 - DNA, 15 bp, Homo sapiens
ttctgtattatggta

SEQ ID NO: 1167008 - DNA, 15 bp, Homo sapiens
cttctgtattatggt

SEQ ID NO: 1167009 - DNA, 15 bp, Homo sapiens
ccttctgtattatgg

SEQ ID NO: 1167010 - DNA, 15 bp, Homo sapiens
gccttctgtattatg

SEQ ID NO: 1167011 - DNA, 15 bp, Homo sapiens
tgccttctgtattat

SEQ ID NO: 1167012 - DNA, 15 bp, Homo sapiens
ttgccttctgtatta

SEQ ID NO: 1167013 - DNA, 15 bp, Homo sapiens
attgccttctgtatt

SEQ ID NO: 1167014 - DNA, 15 bp, Homo sapiens
cattgccttctgtat

SEQ ID NO: 1167015 - DNA, 15 bp, Homo sapiens
ccattgccttctgta

SEQ ID NO: 1167016 - DNA, 15 bp, Homo sapiens
tccattgccttctgt

SEQ ID NO: 1167017 - DNA, 15 bp, Homo sapiens
gtccattgccttctg

SEQ ID NO: 1167018 - DNA, 15 bp, Homo sapiens
tgtccattgccttct

SEQ ID NO: 1167019 - DNA, 15 bp, Homo sapiens
gtgtccattgccttc

SEQ ID NO: 1167020 - DNA, 15 bp, Homo sapiens
ggtgtccattgcctt

SEQ ID NO: 1167021 - DNA, 15 bp, Homo sapiens
aggtgtccattgcct

SEQ ID NO: 1167022 - DNA, 15 bp, Homo sapiens
taggtgtccattgcc

SEQ ID NO: 1167023 - DNA, 15 bp, Homo sapiens
ttaggtgtccattgc

SEQ ID NO: 1167024 - DNA, 15 bp, Homo sapiens
tttaggtgtccattg

SEQ ID NO: 1167025 - DNA, 15 bp, Homo sapiens
ctttaggtgtccatt

SEQ ID NO: 1167026 - DNA, 15 bp, Homo sapiens
tctttaggtgtccat

SEQ ID NO: 1167027 - DNA, 15 bp, Homo sapiens
ttctttaggtgtcca

SEQ ID NO: 1167028 - DNA, 15 bp, Homo sapiens
gttctttaggtgtcc

SEQ ID NO: 1167029 - DNA, 15 bp, Homo sapiens
tgttctttaggtgtc

SEQ ID NO: 1167030 - DNA, 15 bp, Homo sapiens
ctgttctttaggtgt

SEQ ID NO: 1167031 - DNA, 15 bp, Homo sapiens
tctgttctttaggtg

SEQ ID NO: 1167032 - DNA, 15 bp, Homo sapiens
ttctgttctttaggt

SEQ ID NO: 1167033 - DNA, 15 bp, Homo sapiens
attctgttctttagg

SEQ ID NO: 1167034 - DNA, 15 bp, Homo sapiens
cattctgttctttag

SEQ ID NO: 1167035 - DNA, 15 bp, Homo sapiens
tcattctgttcttta

SEQ ID NO: 1167036 - DNA, 15 bp, Homo sapiens
ttcattctgttcttt

SEQ ID NO: 1167037 - DNA, 15 bp, Homo sapiens
tttcattctgttctt

SEQ ID NO: 1167038 - DNA, 15 bp, Homo sapiens
ttttcattctgttct

SEQ ID NO: 1167039 - DNA, 15 bp, Homo sapiens
gttttcattctgttc

SEQ ID NO: 1167040 - DNA, 15 bp, Homo sapiens
ggttttcattctgtt

SEQ ID NO: 1167041 - DNA, 15 bp, Homo sapiens
aggttttcattctgt

SEQ ID NO: 1167042 - DNA, 15 bp, Homo sapiens
aaggttttcattctg

SEQ ID NO: 1167043 - DNA, 15 bp, Homo sapiens
gaaggttttcattct

SEQ ID NO: 1167044 - DNA, 15 bp, Homo sapiens
agaaggttttcattc

SEQ ID NO: 1167045 - DNA, 15 bp, Homo sapiens
aagaaggttttcatt

SEQ ID NO: 1167046 - DNA, 15 bp, Homo sapiens
taagaaggttttcat

SEQ ID NO: 1167047 - DNA, 15 bp, Homo sapiens
ctaagaaggttttca

SEQ ID NO: 1167048 - DNA, 15 bp, Homo sapiens
cctaagaaggttttc

SEQ ID NO: 1167049 - DNA, 15 bp, Homo sapiens
tcctaagaaggtttt

SEQ ID NO: 1167050 - DNA, 15 bp, Homo sapiens
ttcctaagaaggttt

SEQ ID NO: 1167051 - DNA, 15 bp, Homo sapiens
tttcctaagaaggtt

SEQ ID NO: 1167052 - DNA, 15 bp, Homo sapiens
atttcctaagaaggt

SEQ ID NO: 1167053 - DNA, 15 bp, Homo sapiens
catttcctaagaagg

SEQ ID NO: 1167054 - DNA, 15 bp, Homo sapiens
tcatttcctaagaag

SEQ ID NO: 1167055 - DNA, 15 bp, Homo sapiens
ttcatttcctaagaa

SEQ ID NO: 1167056 - DNA, 15 bp, Homo sapiens
cttcatttcctaaga

SEQ ID NO: 1167057 - DNA, 15 bp, Homo sapiens
gcttcatttcctaag

SEQ ID NO: 1167058 - DNA, 15 bp, Homo sapiens
agcttcatttcctaa

SEQ ID NO: 1167059 - DNA, 15 bp, Homo sapiens
aagcttcatttccta

SEQ ID NO: 1167060 - DNA, 15 bp, Homo sapiens
caagcttcatttcct

SEQ ID NO: 1167061 - DNA, 15 bp, Homo sapiens
tcaagcttcatttcc

SEQ ID NO: 1167062 - DNA, 15 bp, Homo sapiens
gtcaagcttcatttc

SEQ ID NO: 1167063 - DNA, 15 bp, Homo sapiens
tgtcaagcttcattt

SEQ ID NO: 1167064 - DNA, 15 bp, Homo sapiens
gtgtcaagcttcatt

SEQ ID NO: 1167065 - DNA, 15 bp, Homo sapiens
agtgtcaagcttcat

SEQ ID NO: 1167066 - DNA, 15 bp, Homo sapiens
aagtgtcaagcttca

SEQ ID NO: 1167067 - DNA, 15 bp, Homo sapiens
gaagtgtcaagcttc

SEQ ID NO: 1167068 - DNA, 15 bp, Homo sapiens
tgaagtgtcaagctt

SEQ ID NO: 1167069 - DNA, 15 bp, Homo sapiens
gtgaagtgtcaagct

SEQ ID NO: 1167070 - DNA, 15 bp, Homo sapiens
ggtgaagtgtcaagc

SEQ ID NO: 1167071 - DNA, 15 bp, Homo sapiens
gggtgaagtgtcaag

SEQ ID NO: 1167072 - DNA, 15 bp, Homo sapiens
tgggtgaagtgtcaa

SEQ ID NO: 1167073 - DNA, 15 bp, Homo sapiens
gtgggtgaagtgtca

SEQ ID NO: 1167074 - DNA, 15 bp, Homo sapiens
ggtgggtgaagtgtc

SEQ ID NO: 1167075 - DNA, 15 bp, Homo sapiens
tggtgggtgaagtgt

SEQ ID NO: 1167076 - DNA, 15 bp, Homo sapiens
ctggtgggtgaagtg

SEQ ID NO: 1167077 - DNA, 15 bp, Homo sapiens
cctggtgggtgaagt

SEQ ID NO: 1167078 - DNA, 15 bp, Homo sapiens
gcctggtgggtgaag

SEQ ID NO: 1167079 - DNA, 15 bp, Homo sapiens
ggcctggtgggtgaa

SEQ ID NO: 1167080 - DNA, 15 bp, Homo sapiens
tggcctggtgggtga

SEQ ID NO: 1167081 - DNA, 15 bp, Homo sapiens
gtggcctggtgggtg

SEQ ID NO: 1167082 - DNA, 15 bp, Homo sapiens
ggtggcctggtgggt

SEQ ID NO: 1167083 - DNA, 15 bp, Homo sapiens
tggtggcctggtggg

SEQ ID NO: 1167084 - DNA, 15 bp, Homo sapiens
gtggtggcctggtgg

SEQ ID NO: 1167085 - DNA, 15 bp, Homo sapiens
tgtggtggcctggtg

SEQ ID NO: 1167086 - DNA, 15 bp, Homo sapiens
ttgtggtggcctggt

SEQ ID NO: 1167087 - DNA, 15 bp, Homo sapiens
cttgtggtggcctgg

SEQ ID NO: 1167088 - DNA, 15 bp, Homo sapiens
tcttgtggtggcctg

SEQ ID NO: 1167089 - DNA, 15 bp, Homo sapiens
ttcttgtggtggcct

SEQ ID NO: 1167090 - DNA, 15 bp, Homo sapiens
attcttgtggtggcc

SEQ ID NO: 1167091 - DNA, 15 bp, Homo sapiens
cattcttgtggtggc

SEQ ID NO: 1167092 - DNA, 15 bp, Homo sapiens
acattcttgtggtgg

SEQ ID NO: 1167093 - DNA, 15 bp, Homo sapiens
aacattcttgtggtg

SEQ ID NO: 1167094 - DNA, 15 bp, Homo sapiens
caacattcttgtggt

SEQ ID NO: 1167095 - DNA, 15 bp, Homo sapiens
gcaacattcttgtgg

SEQ ID NO: 1167096 - DNA, 15 bp, Homo sapiens
tgcaacattcttgtg

SEQ ID NO: 1167097 - DNA, 15 bp, Homo sapiens
atgcaacattcttgt

SEQ ID NO: 1167098 - DNA, 15 bp, Homo sapiens
aatgcaacattcttg

SEQ ID NO: 1167099 - DNA, 15 bp, Homo sapiens
aaatgcaacattctt

SEQ ID NO: 1167100 - DNA, 15 bp, Homo sapiens
aaaatgcaacattct

SEQ ID NO: 1167101 - DNA, 15 bp, Homo sapiens
gaaaatgcaacattc

SEQ ID NO: 1167102 - DNA, 15 bp, Homo sapiens
tgaaaatgcaacatt

SEQ ID NO: 1167103 - DNA, 15 bp, Homo sapiens
atgaaaatgcaacat

SEQ ID NO: 1167104 - DNA, 15 bp, Homo sapiens
aatgaaaatgcaaca

SEQ ID NO: 1167105 - DNA, 15 bp, Homo sapiens
taatgaaaatgcaac

SEQ ID NO: 1167106 - DNA, 15 bp, Homo sapiens
ataatgaaaatgcaa

SEQ ID NO: 1167107 - DNA, 15 bp, Homo sapiens
aataatgaaaatgca

SEQ ID NO: 1167108 - DNA, 15 bp, Homo sapiens
taataatgaaaatgc

SEQ ID NO: 1167109 - DNA, 15 bp, Homo sapiens
ataataatgaaaatg

SEQ ID NO: 1167110 - DNA, 15 bp, Homo sapiens
cataataatgaaaat

SEQ ID NO: 1167111 - DNA, 15 bp, Homo sapiens
ccataataatgaaaa

SEQ ID NO: 1167112 - DNA, 15 bp, Homo sapiens
accataataatgaaa

SEQ ID NO: 1167113 - DNA, 15 bp, Homo sapiens
taccataataatgaa

SEQ ID NO: 1167114 - DNA, 15 bp, Homo sapiens
ttaccataataatga

SEQ ID NO: 1167115 - DNA, 15 bp, Homo sapiens
cttaccataataatg

SEQ ID NO: 1167116 - DNA, 15 bp, Homo sapiens
acttaccataataat

SEQ ID NO: 1167117 - DNA, 15 bp, Homo sapiens
tacttaccataataa

SEQ ID NO: 1167118 - DNA, 15 bp, Homo sapiens
gtacttaccataata

SEQ ID NO: 1167119 - DNA, 15 bp, Homo sapiens
tgtacttaccataat

SEQ ID NO: 1167120 - DNA, 15 bp, Homo sapiens
gtgtacttaccataa

SEQ ID NO: 1167121 - DNA, 15 bp, Homo sapiens
agtgtacttaccata

SEQ ID NO: 1167122 - DNA, 15 bp, Homo sapiens
cagtgtacttaccat

SEQ ID NO: 1167123 - DNA, 15 bp, Homo sapiens
ccagtgtacttacca

SEQ ID NO: 1167124 - DNA, 15 bp, Homo sapiens
accagtgtacttacc

SEQ ID NO: 1167125 - DNA, 15 bp, Homo sapiens
taccagtgtacttac

SEQ ID NO: 1167126 - DNA, 15 bp, Homo sapiens
ttaccagtgtactta

SEQ ID NO: 1167127 - DNA, 15 bp, Homo sapiens
gttaccagtgtactt

SEQ ID NO: 1167128 - DNA, 15 bp, Homo sapiens
agttaccagtgtact

SEQ ID NO: 1167129 - DNA, 15 bp, Homo sapiens
aagttaccagtgtac

SEQ ID NO: 1167130 - DNA, 15 bp, Homo sapiens
gaagttaccagtgta

SEQ ID NO: 1167131 - DNA, 15 bp, Homo sapiens
agaagttaccagtgt

SEQ ID NO: 1167132 - DNA, 15 bp, Homo sapiens
aagaagttaccagtg

SEQ ID NO: 1167133 - DNA, 15 bp, Homo sapiens
aaagaagttaccagt

SEQ ID NO: 1167134 - DNA, 15 bp, Homo sapiens
aaaagaagttaccag

SEQ ID NO: 1167135 - DNA, 15 bp, Homo sapiens
gaaaagaagttacca

SEQ ID NO: 1167136 - DNA, 15 bp, Homo sapiens
agaaaagaagttacc

SEQ ID NO: 1167137 - DNA, 15 bp, Homo sapiens
tagaaaagaagttac

SEQ ID NO: 1167138 - DNA, 15 bp, Homo sapiens
ttagaaaagaagtta

SEQ ID NO: 1167139 - DNA, 15 bp, Homo sapiens
gttagaaaagaagtt

SEQ ID NO: 1167140 - DNA, 15 bp, Homo sapiens
ggttagaaaagaagt

SEQ ID NO: 1167141 - DNA, 15 bp, Homo sapiens
aggttagaaaagaag

SEQ ID NO: 1167142 - DNA, 15 bp, Homo sapiens
gaggttagaaaagaa

SEQ ID NO: 1167143 - DNA, 15 bp, Homo sapiens
cgaggttagaaaaga

SEQ ID NO: 1167144 - DNA, 15 bp, Homo sapiens
acgaggttagaaaag

SEQ ID NO: 1167145 - DNA, 15 bp, Homo sapiens
tacgaggttagaaaa

SEQ ID NO: 1167146 - DNA, 15 bp, Homo sapiens
atacgaggttagaaa

SEQ ID NO: 1167147 - DNA, 15 bp, Homo sapiens
catacgaggttagaa

SEQ ID NO: 1167148 - DNA, 15 bp, Homo sapiens
gcatacgaggttaga

SEQ ID NO: 1167149 - DNA, 15 bp, Homo sapiens
tgcatacgaggttag

SEQ ID NO: 1167150 - DNA, 15 bp, Homo sapiens
atgcatacgaggtta

SEQ ID NO: 1167151 - DNA, 15 bp, Homo sapiens
tatgcatacgaggtt

SEQ ID NO: 1167152 - DNA, 15 bp, Homo sapiens
ttatgcatacgaggt

SEQ ID NO: 1167153 - DNA, 15 bp, Homo sapiens
attatgcatacgagg

SEQ ID NO: 1167154 - DNA, 15 bp, Homo sapiens
cattatgcatacgag

SEQ ID NO: 1167155 - DNA, 15 bp, Homo sapiens
acattatgcatacga

SEQ ID NO: 1167156 - DNA, 15 bp, Homo sapiens
tacattatgcatacg

SEQ ID NO: 1167157 - DNA, 15 bp, Homo sapiens
ttacattatgcatac

SEQ ID NO: 1167158 - DNA, 15 bp, Homo sapiens
tttacattatgcata

SEQ ID NO: 1167159 - DNA, 15 bp, Homo sapiens
gtttacattatgcat

SEQ ID NO: 1167160 - DNA, 15 bp, Homo sapiens
tgtttacattatgca

SEQ ID NO: 1167161 - DNA, 15 bp, Homo sapiens
atgtttacattatgc

SEQ ID NO: 1167162 - DNA, 15 bp, Homo sapiens
gatgtttacattatg

SEQ ID NO: 1167163 - DNA, 15 bp, Homo sapiens
tgatgtttacattat

SEQ ID NO: 1167164 - DNA, 15 bp, Homo sapiens
ttgatgtttacatta

SEQ ID NO: 1167165 - DNA, 15 bp, Homo sapiens
cttgatgtttacatt

SEQ ID NO: 1167166 - DNA, 15 bp, Homo sapiens
tcttgatgtttacat

SEQ ID NO: 1167167 - DNA, 15 bp, Homo sapiens
gtcttgatgtttaca

SEQ ID NO: 1167168 - DNA, 15 bp, Homo sapiens
agtcttgatgtttac

SEQ ID NO: 1167169 - DNA, 15 bp, Homo sapiens
cagtcttgatgttta

SEQ ID NO: 1167170 - DNA, 15 bp, Homo sapiens
tcagtcttgatgttt

SEQ ID NO: 1167171 - DNA, 15 bp, Homo sapiens
gtcagtcttgatgtt

SEQ ID NO: 1167172 - DNA, 15 bp, Homo sapiens
tgtcagtcttgatgt

SEQ ID NO: 1167173 - DNA, 15 bp, Homo sapiens
ttgtcagtcttgatg

SEQ ID NO: 1167174 - DNA, 15 bp, Homo sapiens
attgtcagtcttgat

SEQ ID NO: 1167175 - DNA, 15 bp, Homo sapiens
aattgtcagtcttga

SEQ ID NO: 1167176 - DNA, 15 bp, Homo sapiens
aaattgtcagtcttg

SEQ ID NO: 1167177 - DNA, 15 bp, Homo sapiens
caaattgtcagtctt

SEQ ID NO: 1167178 - DNA, 15 bp, Homo sapiens
ccaaattgtcagtct

SEQ ID NO: 1167179 - DNA, 15 bp, Homo sapiens
cccaaattgtcagtc

SEQ ID NO: 1167180 - DNA, 15 bp, Homo sapiens
ccccaaattgtcagt

SEQ ID NO: 1167181 - DNA, 15 bp, Homo sapiens
gccccaaattgtcag

SEQ ID NO: 1167182 - DNA, 15 bp, Homo sapiens
agccccaaattgtca

SEQ ID NO: 1167183 - DNA, 15 bp, Homo sapiens
tagccccaaattgtc

SEQ ID NO: 1167184 - DNA, 15 bp, Homo sapiens
ctagccccaaattgt

SEQ ID NO: 1167185 - DNA, 15 bp, Homo sapiens
gctagccccaaattg

SEQ ID NO: 1167186 - DNA, 15 bp, Homo sapiens
tgctagccccaaatt

SEQ ID NO: 1167187 - DNA, 15 bp, Homo sapiens
ttgctagccccaaat

SEQ ID NO: 1167188 - DNA, 15 bp, Homo sapiens
gttgctagccccaaa

SEQ ID NO: 1167189 - DNA, 15 bp, Homo sapiens
agttgctagccccaa

SEQ ID NO: 1167190 - DNA, 15 bp, Homo sapiens
gagttgctagcccca

SEQ ID NO: 1167191 - DNA, 15 bp, Homo sapiens
tgagttgctagcccc

SEQ ID NO: 1167192 - DNA, 15 bp, Homo sapiens
ttgagttgctagccc

SEQ ID NO: 1167193 - DNA, 15 bp, Homo sapiens
attgagttgctagcc

SEQ ID NO: 1167194 - DNA, 15 bp, Homo sapiens
aattgagttgctagc

SEQ ID NO: 1167195 - DNA, 15 bp, Homo sapiens
caattgagttgctag

SEQ ID NO: 1167196 - DNA, 15 bp, Homo sapiens
ccaattgagttgcta

SEQ ID NO: 1167197 - DNA, 15 bp, Homo sapiens
tccaattgagttgct

SEQ ID NO: 1167198 - DNA, 15 bp, Homo sapiens
ttccaattgagttgc

SEQ ID NO: 1167199 - DNA, 15 bp, Homo sapiens
tttccaattgagttg

SEQ ID NO: 1167200 - DNA, 15 bp, Homo sapiens
ttttccaattgagtt

SEQ ID NO: 1167201 - DNA, 15 bp, Homo sapiens
attttccaattgagt

SEQ ID NO: 1167202 - DNA, 15 bp, Homo sapiens
gattttccaattgag

SEQ ID NO: 1167203 - DNA, 15 bp, Homo sapiens
tgattttccaattga

SEQ ID NO: 1167204 - DNA, 15 bp, Homo sapiens
gtgattttccaattg

SEQ ID NO: 1167205 - DNA, 15 bp, Homo sapiens
agtgattttccaatt

SEQ ID NO: 1167206 - DNA, 15 bp, Homo sapiens
cagtgattttccaat

SEQ ID NO: 1167207 - DNA, 15 bp, Homo sapiens
acagtgattttccaa

SEQ ID NO: 1167208 - DNA, 15 bp, Homo sapiens
aacagtgattttcca

SEQ ID NO: 1167209 - DNA, 15 bp, Homo sapiens
gaacagtgattttcc

SEQ ID NO: 1167210 - DNA, 15 bp, Homo sapiens
agaacagtgattttc

SEQ ID NO: 1167211 - DNA, 15 bp, Homo sapiens
gagaacagtgatttt

SEQ ID NO: 1167212 - DNA, 15 bp, Homo sapiens
agagaacagtgattt

SEQ ID NO: 1167213 - DNA, 15 bp, Homo sapiens
tagagaacagtgatt

SEQ ID NO: 1167214 - DNA, 15 bp, Homo sapiens
atagagaacagtgat

SEQ ID NO: 1167215 - DNA, 15 bp, Homo sapiens
aatagagaacagtga

SEQ ID NO: 1167216 - DNA, 15 bp, Homo sapiens
caatagagaacagtg

SEQ ID NO: 1167217 - DNA, 15 bp, Homo sapiens
acaatagagaacagt

SEQ ID NO: 1167218 - DNA, 15 bp, Homo sapiens
tacaatagagaacag

SEQ ID NO: 1167219 - DNA, 15 bp, Homo sapiens
ttacaatagagaaca

SEQ ID NO: 1167220 - DNA, 15 bp, Homo sapiens
tttacaatagagaac

SEQ ID NO: 1167221 - DNA, 15 bp, Homo sapiens
ttttacaatagagaa

SEQ ID NO: 1167222 - DNA, 15 bp, Homo sapiens
attttacaatagaga

SEQ ID NO: 1167223 - DNA, 15 bp, Homo sapiens
aattttacaatagag

SEQ ID NO: 1167224 - DNA, 15 bp, Homo sapiens
gaattttacaataga

SEQ ID NO: 1167225 - DNA, 15 bp, Homo sapiens
ggaattttacaatag

SEQ ID NO: 1167226 - DNA, 15 bp, Homo sapiens
aggaattttacaata

SEQ ID NO: 1167227 - DNA, 15 bp, Homo sapiens
taggaattttacaat

SEQ ID NO: 1167228 - DNA, 15 bp, Homo sapiens
ttaggaattttacaa

SEQ ID NO: 1167229 - DNA, 15 bp, Homo sapiens
attaggaattttaca

SEQ ID NO: 1167230 - DNA, 15 bp, Homo sapiens
aattaggaattttac

SEQ ID NO: 1167231 - DNA, 15 bp, Homo sapiens
taattaggaatttta

SEQ ID NO: 1167232 - DNA, 15 bp, Homo sapiens
ataattaggaatttt

SEQ ID NO: 1167233 - DNA, 15 bp, Homo sapiens
cataattaggaattt

SEQ ID NO: 1167234 - DNA, 15 bp, Homo sapiens
acataattaggaatt

SEQ ID NO: 1167235 - DNA, 15 bp, Homo sapiens
aacataattaggaat

SEQ ID NO: 1167236 - DNA, 15 bp, Homo sapiens
aaacataattaggaa

SEQ ID NO: 1167237 - DNA, 15 bp, Homo sapiens
gaaacataattagga

SEQ ID NO: 1167238 - DNA, 15 bp, Homo sapiens
ggaaacataattagg

SEQ ID NO: 1167239 - DNA, 15 bp, Homo sapiens
gggaaacataattag

SEQ ID NO: 1167240 - DNA, 15 bp, Homo sapiens
agggaaacataatta

SEQ ID NO: 1167241 - DNA, 15 bp, Homo sapiens
tagggaaacataatt

SEQ ID NO: 1167242 - DNA, 15 bp, Homo sapiens
ctagggaaacataat

SEQ ID NO: 1167243 - DNA, 15 bp, Homo sapiens
tctagggaaacataa

SEQ ID NO: 1167244 - DNA, 15 bp, Homo sapiens
ttctagggaaacata

SEQ ID NO: 1167245 - DNA, 15 bp, Homo sapiens
tttctagggaaacat

SEQ ID NO: 1167246 - DNA, 15 bp, Homo sapiens
atttctagggaaaca

SEQ ID NO: 1167247 - DNA, 15 bp, Homo sapiens
aatttctagggaaac

SEQ ID NO: 1167248 - DNA, 15 bp, Homo sapiens
caatttctagggaaa

SEQ ID NO: 1167249 - DNA, 15 bp, Homo sapiens
gcaatttctagggaa

SEQ ID NO: 1167250 - DNA, 15 bp, Homo sapiens
tgcaatttctaggga

SEQ ID NO: 1167251 - DNA, 15 bp, Homo sapiens
ttgcaatttctaggg

SEQ ID NO: 1167252 - DNA, 15 bp, Homo sapiens
tttgcaatttctagg

SEQ ID NO: 1167253 - DNA, 15 bp, Homo sapiens
ctttgcaatttctag

SEQ ID NO: 1167254 - DNA, 15 bp, Homo sapiens
actttgcaatttcta

SEQ ID NO: 1167255 - DNA, 15 bp, Homo sapiens
cactttgcaatttct

SEQ ID NO: 1167256 - DNA, 15 bp, Homo sapiens
gcactttgcaatttc

SEQ ID NO: 1167257 - DNA, 15 bp, Homo sapiens
tgcactttgcaattt

SEQ ID NO: 1167258 - DNA, 15 bp, Homo sapiens
gtgcactttgcaatt

SEQ ID NO: 1167259 - DNA, 15 bp, Homo sapiens
tgtgcactttgcaat

SEQ ID NO: 1167260 - DNA, 15 bp, Homo sapiens
atgtgcactttgcaa

SEQ ID NO: 1167261 - DNA, 15 bp, Homo sapiens
catgtgcactttgca

SEQ ID NO: 1167262 - DNA, 15 bp, Homo sapiens
acatgtgcactttgc

SEQ ID NO: 1167263 - DNA, 15 bp, Homo sapiens
tacatgtgcactttg

SEQ ID NO: 1167264 - DNA, 15 bp, Homo sapiens
gtacatgtgcacttt

SEQ ID NO: 1167265 - DNA, 15 bp, Homo sapiens
agtacatgtgcactt

SEQ ID NO: 1167266 - DNA, 15 bp, Homo sapiens
aagtacatgtgcact

SEQ ID NO: 1167267 - DNA, 15 bp, Homo sapiens
caagtacatgtgcac

SEQ ID NO: 1167268 - DNA, 15 bp, Homo sapiens
gcaagtacatgtgca

SEQ ID NO: 1167269 - DNA, 15 bp, Homo sapiens
tgcaagtacatgtgc

SEQ ID NO: 1167270 - DNA, 15 bp, Homo sapiens
atgcaagtacatgtg

SEQ ID NO: 1167271 - DNA, 15 bp, Homo sapiens
aatgcaagtacatgt

SEQ ID NO: 1167272 - DNA, 15 bp, Homo sapiens
aaatgcaagtacatg

SEQ ID NO: 1167273 - DNA, 15 bp, Homo sapiens
taaatgcaagtacat

SEQ ID NO: 1167274 - DNA, 15 bp, Homo sapiens
ttaaatgcaagtaca

SEQ ID NO: 1167275 - DNA, 15 bp, Homo sapiens
attaaatgcaagtac

SEQ ID NO: 1167276 - DNA, 15 bp, Homo sapiens
cattaaatgcaagta

SEQ ID NO: 1167277 - DNA, 15 bp, Homo sapiens
acattaaatgcaagt

SEQ ID NO: 1167278 - DNA, 15 bp, Homo sapiens
aacattaaatgcaag

SEQ ID NO: 1167279 - DNA, 15 bp, Homo sapiens
aaacattaaatgcaa

SEQ ID NO: 1167280 - DNA, 15 bp, Homo sapiens
caaacattaaatgca

SEQ ID NO: 1167281 - DNA, 15 bp, Homo sapiens
ccaaacattaaatgc

SEQ ID NO: 1167282 - DNA, 15 bp, Homo sapiens
accaaacattaaatg

SEQ ID NO: 1167283 - DNA, 15 bp, Homo sapiens
gaccaaacattaaat

SEQ ID NO: 1167284 - DNA, 15 bp, Homo sapiens
ggaccaaacattaaa

SEQ ID NO: 1167285 - DNA, 15 bp, Homo sapiens
tggaccaaacattaa

SEQ ID NO: 1167286 - DNA, 15 bp, Homo sapiens
atggaccaaacatta

SEQ ID NO: 1167287 - DNA, 15 bp, Homo sapiens
catggaccaaacatt

SEQ ID NO: 1167288 - DNA, 15 bp, Homo sapiens
ccatggaccaaacat

SEQ ID NO: 1167289 - DNA, 15 bp, Homo sapiens
cccatggaccaaaca

SEQ ID NO: 1167290 - DNA, 15 bp, Homo sapiens
gcccatggaccaaac

SEQ ID NO: 1167291 - DNA, 15 bp, Homo sapiens
agcccatggaccaaa

SEQ ID NO: 1167292 - DNA, 15 bp, Homo sapiens
cagcccatggaccaa

SEQ ID NO: 1167293 - DNA, 15 bp, Homo sapiens
tcagcccatggacca

SEQ ID NO: 1167294 - DNA, 15 bp, Homo sapiens
ttcagcccatggacc

SEQ ID NO: 1167295 - DNA, 15 bp, Homo sapiens
attcagcccatggac

SEQ ID NO: 1167296 - DNA, 15 bp, Homo sapiens
cattcagcccatgga

SEQ ID NO: 1167297 - DNA, 15 bp, Homo sapiens
gcattcagcccatgg

SEQ ID NO: 1167298 - DNA, 15 bp, Homo sapiens
agcattcagcccatg

SEQ ID NO: 1167299 - DNA, 15 bp, Homo sapiens
aagcattcagcccat

SEQ ID NO: 1167300 - DNA, 15 bp, Homo sapiens
aaagcattcagccca

SEQ ID NO: 1167301 - DNA, 15 bp, Homo sapiens
caaagcattcagccc

SEQ ID NO: 1167302 - DNA, 15 bp, Homo sapiens
acaaagcattcagcc

SEQ ID NO: 1167303 - DNA, 15 bp, Homo sapiens
cacaaagcattcagc

SEQ ID NO: 1167304 - DNA, 15 bp, Homo sapiens
gcacaaagcattcag

SEQ ID NO: 1167305 - DNA, 15 bp, Homo sapiens
tgcacaaagcattca

SEQ ID NO: 1167306 - DNA, 15 bp, Homo sapiens
atgcacaaagcattc

SEQ ID NO: 1167307 - DNA, 15 bp, Homo sapiens
aatgcacaaagcatt

SEQ ID NO: 1167308 - DNA, 15 bp, Homo sapiens
taatgcacaaagcat

SEQ ID NO: 1167309 - DNA, 15 bp, Homo sapiens
gtaatgcacaaagca

SEQ ID NO: 1167310 - DNA, 15 bp, Homo sapiens
agtaatgcacaaagc

SEQ ID NO: 1167311 - DNA, 15 bp, Homo sapiens
aagtaatgcacaaag

SEQ ID NO: 1167312 - DNA, 15 bp, Homo sapiens
aaagtaatgcacaaa

SEQ ID NO: 1167313 - DNA, 15 bp, Homo sapiens
aaaagtaatgcacaa

SEQ ID NO: 1167314 - DNA, 15 bp, Homo sapiens
gaaaagtaatgcaca

SEQ ID NO: 1167315 - DNA, 15 bp, Homo sapiens
agaaaagtaatgcac

SEQ ID NO: 1167316 - DNA, 15 bp, Homo sapiens
cagaaaagtaatgca

SEQ ID NO: 1167317 - DNA, 15 bp, Homo sapiens
ccagaaaagtaatgc

SEQ ID NO: 1167318 - DNA, 15 bp, Homo sapiens
accagaaaagtaatg

SEQ ID NO: 1167319 - DNA, 15 bp, Homo sapiens
aaccagaaaagtaat

SEQ ID NO: 1167320 - DNA, 15 bp, Homo sapiens
caaccagaaaagtaa

SEQ ID NO: 1167321 - DNA, 15 bp, Homo sapiens
acaaccagaaaagta

SEQ ID NO: 1167322 - DNA, 15 bp, Homo sapiens
aacaaccagaaaagt

SEQ ID NO: 1167323 - DNA, 15 bp, Homo sapiens
caacaaccagaaaag

SEQ ID NO: 1167324 - DNA, 15 bp, Homo sapiens
acaacaaccagaaaa

SEQ ID NO: 1167325 - DNA, 15 bp, Homo sapiens
aacaacaaccagaaa

SEQ ID NO: 1167326 - DNA, 15 bp, Homo sapiens
caacaacaaccagaa

SEQ ID NO: 1167327 - DNA, 15 bp, Homo sapiens
acaacaacaaccaga

SEQ ID NO: 1167328 - DNA, 15 bp, Homo sapiens
aacaacaacaaccag

SEQ ID NO: 1167329 - DNA, 15 bp, Homo sapiens
caacaacaacaacca

SEQ ID NO: 1167330 - DNA, 15 bp, Homo sapiens
acaacaacaacaacc

SEQ ID NO: 1167331 - DNA, 15 bp, Homo sapiens
tcaaaacaacaacaa

SEQ ID NO: 1167332 - DNA, 15 bp, Homo sapiens
ctcaaaacaacaaca

SEQ ID NO: 1167333 - DNA, 15 bp, Homo sapiens
tctcaaaacaacaac

SEQ ID NO: 1167334 - DNA, 15 bp, Homo sapiens
gtctcaaaacaacaa

SEQ ID NO: 1167335 - DNA, 15 bp, Homo sapiens
tgtctcaaaacaaca

SEQ ID NO: 1167336 - DNA, 15 bp, Homo sapiens
ctgtctcaaaacaac

SEQ ID NO: 1167337 - DNA, 15 bp, Homo sapiens
tctgtctcaaaacaa

SEQ ID NO: 1167338 - DNA, 15 bp, Homo sapiens
ctctgtctcaaaaca

SEQ ID NO: 1167339 - DNA, 15 bp, Homo sapiens
actctgtctcaaaac

SEQ ID NO: 1167340 - DNA, 15 bp, Homo sapiens
tggcaacagagtgag

SEQ ID NO: 1167341 - DNA, 15 bp, Homo sapiens
ctggcaacagagtga

SEQ ID NO: 1167342 - DNA, 15 bp, Homo sapiens
cctggcaacagagtg

SEQ ID NO: 1167343 - DNA, 15 bp, Homo sapiens
gcctggcaacagagt

SEQ ID NO: 1167344 - DNA, 15 bp, Homo sapiens
tggcagaagaattgc

SEQ ID NO: 1167345 - DNA, 15 bp, Homo sapiens
gtggcagaagaattg

SEQ ID NO: 1167346 - DNA, 15 bp, Homo sapiens
tgtggcagaagaatt

SEQ ID NO: 1167347 - DNA, 15 bp, Homo sapiens
ctgtggcagaagaat

SEQ ID NO: 1167348 - DNA, 15 bp, Homo sapiens
gctgtggcagaagaa

SEQ ID NO: 1167349 - DNA, 15 bp, Homo sapiens
ggctgtggcagaaga

SEQ ID NO: 1167350 - DNA, 15 bp, Homo sapiens
aggctgtggcagaag

SEQ ID NO: 1167351 - DNA, 15 bp, Homo sapiens
aaggctgtggcagaa

SEQ ID NO: 1167352 - DNA, 15 bp, Homo sapiens
gaaggctgtggcaga

SEQ ID NO: 1167353 - DNA, 15 bp, Homo sapiens
ggaaggctgtggcag

SEQ ID NO: 1167354 - DNA, 15 bp, Homo sapiens
tggaaggctgtggca

SEQ ID NO: 1167355 - DNA, 15 bp, Homo sapiens
ttggaaggctgtggc

SEQ ID NO: 1167356 - DNA, 15 bp, Homo sapiens
cttggaaggctgtgg

SEQ ID NO: 1167357 - DNA, 15 bp, Homo sapiens
acttggaaggctgtg

SEQ ID NO: 1167358 - DNA, 15 bp, Homo sapiens
tacttggaaggctgt

SEQ ID NO: 1167359 - DNA, 15 bp, Homo sapiens
ttacttggaaggctg

SEQ ID NO: 1167360 - DNA, 15 bp, Homo sapiens
gttacttggaaggct

SEQ ID NO: 1167361 - DNA, 15 bp, Homo sapiens
agttacttggaaggc

SEQ ID NO: 1167362 - DNA, 15 bp, Homo sapiens
cagttacttggaagg

SEQ ID NO: 1167363 - DNA, 15 bp, Homo sapiens
ccagttacttggaag

SEQ ID NO: 1167364 - DNA, 15 bp, Homo sapiens
cccagttacttggaa

SEQ ID NO: 1167365 - DNA, 15 bp, Homo sapiens
tcccagttacttgga

SEQ ID NO: 1167366 - DNA, 15 bp, Homo sapiens
atcccagttacttgg

SEQ ID NO: 1167367 - DNA, 15 bp, Homo sapiens
aatcccagttacttg

SEQ ID NO: 1167368 - DNA, 15 bp, Homo sapiens
taatcccagttactt

SEQ ID NO: 1167369 - DNA, 15 bp, Homo sapiens
agcgcctgtaatccc

SEQ ID NO: 1167370 - DNA, 15 bp, Homo sapiens
gagcgcctgtaatcc

SEQ ID NO: 1167371 - DNA, 15 bp, Homo sapiens
tgagcgcctgtaatc

SEQ ID NO: 1167372 - DNA, 15 bp, Homo sapiens
gtgagcgcctgtaat

SEQ ID NO: 1167373 - DNA, 15 bp, Homo sapiens
ggtgagcgcctgtaa

SEQ ID NO: 1167374 - DNA, 15 bp, Homo sapiens
tggtgagcgcctgta

SEQ ID NO: 1167375 - DNA, 15 bp, Homo sapiens
gtggtgagcgcctgt

SEQ ID NO: 1167376 - DNA, 15 bp, Homo sapiens
ggtggtgagcgcctg

SEQ ID NO: 1167377 - DNA, 15 bp, Homo sapiens
tggtggtgagcgcct

SEQ ID NO: 1167378 - DNA, 15 bp, Homo sapiens
gtggtggtgagcgcc

SEQ ID NO: 1167379 - DNA, 15 bp, Homo sapiens
tgtggtggtgagcgc

SEQ ID NO: 1167380 - DNA, 15 bp, Homo sapiens
gtgtggtggtgagcg

SEQ ID NO: 1167381 - DNA, 15 bp, Homo sapiens
ggtgtggtggtgagc

SEQ ID NO: 1167382 - DNA, 15 bp, Homo sapiens
gggtgtggtggtgag

SEQ ID NO: 1167383 - DNA, 15 bp, Homo sapiens
agggtgtggtggtga

SEQ ID NO: 1167384 - DNA, 15 bp, Homo sapiens
cagggtgtggtggtg

SEQ ID NO: 1167385 - DNA, 15 bp, Homo sapiens
gcagggtgtggtggt

SEQ ID NO: 1167386 - DNA, 15 bp, Homo sapiens
agcagggtgtggtgg

SEQ ID NO: 1167387 - DNA, 15 bp, Homo sapiens
tagcagggtgtggtg

SEQ ID NO: 1167388 - DNA, 15 bp, Homo sapiens
ttagcagggtgtggt

SEQ ID NO: 1167389 - DNA, 15 bp, Homo sapiens
attagcagggtgtgg

SEQ ID NO: 1167390 - DNA, 15 bp, Homo sapiens
aattagcagggtgtg

SEQ ID NO: 1167391 - DNA, 15 bp, Homo sapiens
aaattagcagggtgt

SEQ ID NO: 1167392 - DNA, 15 bp, Homo sapiens
aaaattagcagggtg

SEQ ID NO: 1167393 - DNA, 15 bp, Homo sapiens
aaaaattagcagggt

SEQ ID NO: 1167394 - DNA, 15 bp, Homo sapiens
caaaaattagcaggg

SEQ ID NO: 1167395 - DNA, 15 bp, Homo sapiens
acaaaaattagcagg

SEQ ID NO: 1167396 - DNA, 15 bp, Homo sapiens
tacaaaaattagcag

SEQ ID NO: 1167397 - DNA, 15 bp, Homo sapiens
gtacaaaaattagca

SEQ ID NO: 1167398 - DNA, 15 bp, Homo sapiens
tgaggccagcctggc

SEQ ID NO: 1167399 - DNA, 15 bp, Homo sapiens
ttgaggccagcctgg

SEQ ID NO: 1167400 - DNA, 15 bp, Homo sapiens
tttgaggccagcctg

SEQ ID NO: 1167401 - DNA, 15 bp, Homo sapiens
gtttgaggccagcct

SEQ ID NO: 1167402 - DNA, 15 bp, Homo sapiens
agtttgaggccagcc

SEQ ID NO: 1167403 - DNA, 15 bp, Homo sapiens
gagtttgaggccagc

SEQ ID NO: 1167404 - DNA, 15 bp, Homo sapiens
ggagtttgaggccag

SEQ ID NO: 1167405 - DNA, 15 bp, Homo sapiens
aggagtttgaggcca

SEQ ID NO: 1167406 - DNA, 15 bp, Homo sapiens
caggagtttgaggcc

SEQ ID NO: 1167407 - DNA, 15 bp, Homo sapiens
tcaggagtttgaggc

SEQ ID NO: 1167408 - DNA, 15 bp, Homo sapiens
gtcaggagtttgagg

SEQ ID NO: 1167409 - DNA, 15 bp, Homo sapiens
aaagcaggtggatca

SEQ ID NO: 1167410 - DNA, 15 bp, Homo sapiens
caaagcaggtggatc

SEQ ID NO: 1167411 - DNA, 15 bp, Homo sapiens
tcaaagcaggtggat

SEQ ID NO: 1167412 - DNA, 15 bp, Homo sapiens
gtcaaagcaggtgga

SEQ ID NO: 1167413 - DNA, 15 bp, Homo sapiens
ggtcaaagcaggtgg

SEQ ID NO: 1167414 - DNA, 15 bp, Homo sapiens
aggtcaaagcaggtg

SEQ ID NO: 1167415 - DNA, 15 bp, Homo sapiens
gaggtcaaagcaggt

SEQ ID NO: 1167416 - DNA, 15 bp, Homo sapiens
ggaggtcaaagcagg

SEQ ID NO: 1167417 - DNA, 15 bp, Homo sapiens
gggaggtcaaagcag

SEQ ID NO: 1167418 - DNA, 15 bp, Homo sapiens
tgggaggtcaaagca

SEQ ID NO: 1167419 - DNA, 15 bp, Homo sapiens
ttgggaggtcaaagc

SEQ ID NO: 1167420 - DNA, 15 bp, Homo sapiens
tttgggaggtcaaag

SEQ ID NO: 1167421 - DNA, 15 bp, Homo sapiens
ttttgggaggtcaaa

SEQ ID NO: 1167422 - DNA, 15 bp, Homo sapiens
attttgggaggtcaa

SEQ ID NO: 1167423 - DNA, 15 bp, Homo sapiens
cattttgggaggtca

SEQ ID NO: 1167424 - DNA, 15 bp, Homo sapiens
gcattttgggaggtc

SEQ ID NO: 1167425 - DNA, 15 bp, Homo sapiens
agcattttgggaggt

SEQ ID NO: 1167426 - DNA, 15 bp, Homo sapiens
aggtggctcatgcct

SEQ ID NO: 1167427 - DNA, 15 bp, Homo sapiens
aaggtggctcatgcc

SEQ ID NO: 1167428 - DNA, 15 bp, Homo sapiens
caaggtggctcatgc

SEQ ID NO: 1167429 - DNA, 15 bp, Homo sapiens
gcaaggtggctcatg

SEQ ID NO: 1167430 - DNA, 15 bp, Homo sapiens
ggcaaggtggctcat

SEQ ID NO: 1167431 - DNA, 15 bp, Homo sapiens
tgggcaaggtggctc

SEQ ID NO: 1167432 - DNA, 15 bp, Homo sapiens
ctgggcaaggtggct

SEQ ID NO: 1167433 - DNA, 15 bp, Homo sapiens
gctgggcaaggtggc

SEQ ID NO: 1167434 - DNA, 15 bp, Homo sapiens
ggctgggcaaggtgg

SEQ ID NO: 1167435 - DNA, 15 bp, Homo sapiens
aggctgggcaaggtg

SEQ ID NO: 1167436 - DNA, 15 bp, Homo sapiens
caggctgggcaaggt

SEQ ID NO: 1167437 - DNA, 15 bp, Homo sapiens
acaggctgggcaagg

SEQ ID NO: 1167438 - DNA, 15 bp, Homo sapiens
cacaggctgggcaag

SEQ ID NO: 1167439 - DNA, 15 bp, Homo sapiens
gcacaggctgggcaa

SEQ ID NO: 1167440 - DNA, 15 bp, Homo sapiens
tgcacaggctgggca

SEQ ID NO: 1167441 - DNA, 15 bp, Homo sapiens
atgcacaggctgggc

SEQ ID NO: 1167442 - DNA, 15 bp, Homo sapiens
aatgcacaggctggg

SEQ ID NO: 1167443 - DNA, 15 bp, Homo sapiens
taatgcacaggctgg

SEQ ID NO: 1167444 - DNA, 15 bp, Homo sapiens
gtaatgcacaggctg

SEQ ID NO: 1167445 - DNA, 15 bp, Homo sapiens
agtaatgcacaggct

SEQ ID NO: 1167446 - DNA, 15 bp, Homo sapiens
aagtaatgcacaggc

SEQ ID NO: 1167447 - DNA, 15 bp, Homo sapiens
aaagtaatgcacagg

SEQ ID NO: 1167448 - DNA, 15 bp, Homo sapiens
aaaagtaatgcacag

SEQ ID NO: 1167449 - DNA, 15 bp, Homo sapiens
caaaagtaatgcaca

SEQ ID NO: 1167450 - DNA, 15 bp, Homo sapiens
tcaaaagtaatgcac

SEQ ID NO: 1167451 - DNA, 15 bp, Homo sapiens
ctcaaaagtaatgca

SEQ ID NO: 1167452 - DNA, 15 bp, Homo sapiens
cctcaaaagtaatgc

SEQ ID NO: 1167453 - DNA, 15 bp, Homo sapiens
tcctcaaaagtaatg

SEQ ID NO: 1167454 - DNA, 15 bp, Homo sapiens
gtcctcaaaagtaat

SEQ ID NO: 1167455 - DNA, 15 bp, Homo sapiens
tgtcctcaaaagtaa

SEQ ID NO: 1167456 - DNA, 15 bp, Homo sapiens
gtgtcctcaaaagta

SEQ ID NO: 1167457 - DNA, 15 bp, Homo sapiens
tgtgtcctcaaaagt

SEQ ID NO: 1167458 - DNA, 15 bp, Homo sapiens
atgtgtcctcaaaag

SEQ ID NO: 1167459 - DNA, 15 bp, Homo sapiens
aatgtgtcctcaaaa

SEQ ID NO: 1167460 - DNA, 15 bp, Homo sapiens
aaatgtgtcctcaaa

SEQ ID NO: 1167461 - DNA, 15 bp, Homo sapiens
caaatgtgtcctcaa

SEQ ID NO: 1167462 - DNA, 15 bp, Homo sapiens
tcaaatgtgtcctca

SEQ ID NO: 1167463 - DNA, 15 bp, Homo sapiens
gtcaaatgtgtcctc

SEQ ID NO: 1167464 - DNA, 15 bp, Homo sapiens
tgtcaaatgtgtcct

SEQ ID NO: 1167465 - DNA, 15 bp, Homo sapiens
ttgtcaaatgtgtcc

SEQ ID NO: 1167466 - DNA, 15 bp, Homo sapiens
attgtcaaatgtgtc

SEQ ID NO: 1167467 - DNA, 15 bp, Homo sapiens
cattgtcaaatgtgt

SEQ ID NO: 1167468 - DNA, 15 bp, Homo sapiens
ccattgtcaaatgtg

SEQ ID NO: 1167469 - DNA, 15 bp, Homo sapiens
gccattgtcaaatgt

SEQ ID NO: 1167470 - DNA, 15 bp, Homo sapiens
tgccattgtcaaatg

SEQ ID NO: 1167471 - DNA, 15 bp, Homo sapiens
gtgccattgtcaaat

SEQ ID NO: 1167472 - DNA, 15 bp, Homo sapiens
tgtgccattgtcaaa

SEQ ID NO: 1167473 - DNA, 15 bp, Homo sapiens
ctgtgccattgtcaa

SEQ ID NO: 1167474 - DNA, 15 bp, Homo sapiens
actgtgccattgtca

SEQ ID NO: 1167475 - DNA, 15 bp, Homo sapiens
gactgtgccattgtc

SEQ ID NO: 1167476 - DNA, 15 bp, Homo sapiens
tgactgtgccattgt

SEQ ID NO: 1167477 - DNA, 15 bp, Homo sapiens
ttgactgtgccattg

SEQ ID NO: 1167478 - DNA, 15 bp, Homo sapiens
cttgactgtgccatt

SEQ ID NO: 1167479 - DNA, 15 bp, Homo sapiens
tcttgactgtgccat

SEQ ID NO: 1167480 - DNA, 15 bp, Homo sapiens
ttcttgactgtgcca

SEQ ID NO: 1167481 - DNA, 15 bp, Homo sapiens
gttcttgactgtgcc

SEQ ID NO: 1167482 - DNA, 15 bp, Homo sapiens
tgttcttgactgtgc

SEQ ID NO: 1167483 - DNA, 15 bp, Homo sapiens
gtgttcttgactgtg

SEQ ID NO: 1167484 - DNA, 15 bp, Homo sapiens
ggtgttcttgactgt

SEQ ID NO: 1167485 - DNA, 15 bp, Homo sapiens
tggtgttcttgactg

SEQ ID NO: 1167486 - DNA, 15 bp, Homo sapiens
gtggtgttcttgact

SEQ ID NO: 1167487 - DNA, 15 bp, Homo sapiens
tgtggtgttcttgac

SEQ ID NO: 1167488 - DNA, 15 bp, Homo sapiens
atgtggtgttcttga

SEQ ID NO: 1167489 - DNA, 15 bp, Homo sapiens
tatgtggtgttcttg

SEQ ID NO: 1167490 - DNA, 15 bp, Homo sapiens
ttatgtggtgttctt

SEQ ID NO: 1167491 - DNA, 15 bp, Homo sapiens
tttatgtggtgttct

SEQ ID NO: 1167492 - DNA, 15 bp, Homo sapiens
ctttatgtggtgttc

SEQ ID NO: 1167493 - DNA, 15 bp, Homo sapiens
actttatgtggtgtt

SEQ ID NO: 1167494 - DNA, 15 bp, Homo sapiens
tactttatgtggtgt

SEQ ID NO: 1167495 - DNA, 15 bp, Homo sapiens
ctactttatgtggtg

SEQ ID NO: 1167496 - DNA, 15 bp, Homo sapiens
actactttatgtggt

SEQ ID NO: 1167497 - DNA, 15 bp, Homo sapiens
tactactttatgtgg

SEQ ID NO: 1167498 - DNA, 15 bp, Homo sapiens
atactactttatgtg

SEQ ID NO: 1167499 - DNA, 15 bp, Homo sapiens
aatactactttatgt

SEQ ID NO: 1167500 - DNA, 15 bp, Homo sapiens
caatactactttatg

SEQ ID NO: 1167501 - DNA, 15 bp, Homo sapiens
ccaatactactttat

SEQ ID NO: 1167502 - DNA, 15 bp, Homo sapiens
gccaatactacttta

SEQ ID NO: 1167503 - DNA, 15 bp, Homo sapiens
tgccaatactacttt

SEQ ID NO: 1167504 - DNA, 15 bp, Homo sapiens
ctgccaatactactt

SEQ ID NO: 1167505 - DNA, 15 bp, Homo sapiens
tctgccaatactact

SEQ ID NO: 1167506 - DNA, 15 bp, Homo sapiens
atctgccaatactac

SEQ ID NO: 1167507 - DNA, 15 bp, Homo sapiens
aatctgccaatacta

SEQ ID NO: 1167508 - DNA, 15 bp, Homo sapiens
taatctgccaatact

SEQ ID NO: 1167509 - DNA, 15 bp, Homo sapiens
ataatctgccaatac

SEQ ID NO: 1167510 - DNA, 15 bp, Homo sapiens
cataatctgccaata

SEQ ID NO: 1167511 - DNA, 15 bp, Homo sapiens
tcataatctgccaat

SEQ ID NO: 1167512 - DNA, 15 bp, Homo sapiens
ttcataatctgccaa

SEQ ID NO: 1167513 - DNA, 15 bp, Homo sapiens
tttcataatctgcca

SEQ ID NO: 1167514 - DNA, 15 bp, Homo sapiens
atttcataatctgcc

SEQ ID NO: 1167515 - DNA, 15 bp, Homo sapiens
tatttcataatctgc

SEQ ID NO: 1167516 - DNA, 15 bp, Homo sapiens
ctatttcataatctg

SEQ ID NO: 1167517 - DNA, 15 bp, Homo sapiens
gctatttcataatct

SEQ ID NO: 1167518 - DNA, 15 bp, Homo sapiens
tgctatttcataatc

SEQ ID NO: 1167519 - DNA, 15 bp, Homo sapiens
ttgctatttcataat

SEQ ID NO: 1167520 - DNA, 15 bp, Homo sapiens
attgctatttcataa

SEQ ID NO: 1167521 - DNA, 15 bp, Homo sapiens
aattgctatttcata

SEQ ID NO: 1167522 - DNA, 15 bp, Homo sapiens
caattgctatttcat

SEQ ID NO: 1167523 - DNA, 15 bp, Homo sapiens
acaattgctatttca

SEQ ID NO: 1167524 - DNA, 15 bp, Homo sapiens
aacaattgctatttc

SEQ ID NO: 1167525 - DNA, 15 bp, Homo sapiens
aaacaattgctattt

SEQ ID NO: 1167526 - DNA, 15 bp, Homo sapiens
aaaacaattgctatt

SEQ ID NO: 1167527 - DNA, 15 bp, Homo sapiens
caaaacaattgctat

SEQ ID NO: 1167528 - DNA, 15 bp, Homo sapiens
ccaaaacaattgcta

SEQ ID NO: 1167529 - DNA, 15 bp, Homo sapiens
tccaaaacaattgct

SEQ ID NO: 1167530 - DNA, 15 bp, Homo sapiens
ttccaaaacaattgc

SEQ ID NO: 1167531 - DNA, 15 bp, Homo sapiens
cttccaaaacaattg

SEQ ID NO: 1167532 - DNA, 15 bp, Homo sapiens
tcttccaaaacaatt

SEQ ID NO: 1167533 - DNA, 15 bp, Homo sapiens
gtcttccaaaacaat

SEQ ID NO: 1167534 - DNA, 15 bp, Homo sapiens
tgtcttccaaaacaa

SEQ ID NO: 1167535 - DNA, 15 bp, Homo sapiens
ctgtcttccaaaaca

SEQ ID NO: 1167536 - DNA, 15 bp, Homo sapiens
gctgtcttccaaaac

SEQ ID NO: 1167537 - DNA, 15 bp, Homo sapiens
tgctgtcttccaaaa

SEQ ID NO: 1167538 - DNA, 15 bp, Homo sapiens
ttgctgtcttccaaa

SEQ ID NO: 1167539 - DNA, 15 bp, Homo sapiens
tttgctgtcttccaa

SEQ ID NO: 1167540 - DNA, 15 bp, Homo sapiens
ttttgctgtcttcca

SEQ ID NO: 1167541 - DNA, 15 bp, Homo sapiens
gttttgctgtcttcc

SEQ ID NO: 1167542 - DNA, 15 bp, Homo sapiens
ggttttgctgtcttc

SEQ ID NO: 1167543 - DNA, 15 bp, Homo sapiens
aggttttgctgtctt

SEQ ID NO: 1167544 - DNA, 15 bp, Homo sapiens
caggttttgctgtct

SEQ ID NO: 1167545 - DNA, 15 bp, Homo sapiens
tcaggttttgctgtc

SEQ ID NO: 1167546 - DNA, 15 bp, Homo sapiens
ttcaggttttgctgt

SEQ ID NO: 1167547 - DNA, 15 bp, Homo sapiens
cttcaggttttgctg

SEQ ID NO: 1167548 - DNA, 15 bp, Homo sapiens
acttcaggttttgct

SEQ ID NO: 1167549 - DNA, 15 bp, Homo sapiens
tacttcaggttttgc

SEQ ID NO: 1167550 - DNA, 15 bp, Homo sapiens
atacttcaggttttg

SEQ ID NO: 1167551 - DNA, 15 bp, Homo sapiens
aatacttcaggtttt

SEQ ID NO: 1167552 - DNA, 15 bp, Homo sapiens
aaatacttcaggttt

SEQ ID NO: 1167553 - DNA, 15 bp, Homo sapiens
aaaatacttcaggtt

SEQ ID NO: 1167554 - DNA, 15 bp, Homo sapiens
gaaaatacttcaggt

SEQ ID NO: 1167555 - DNA, 15 bp, Homo sapiens
tgaaaatacttcagg

SEQ ID NO: 1167556 - DNA, 15 bp, Homo sapiens
ctgaaaatacttcag

SEQ ID NO: 1167557 - DNA, 15 bp, Homo sapiens
tctgaaaatacttca

SEQ ID NO: 1167558 - DNA, 15 bp, Homo sapiens
gtctgaaaatacttc

SEQ ID NO: 1167559 - DNA, 15 bp, Homo sapiens
tgtctgaaaatactt

SEQ ID NO: 1167560 - DNA, 15 bp, Homo sapiens
atgtctgaaaatact

SEQ ID NO: 1167561 - DNA, 15 bp, Homo sapiens
catgtctgaaaatac

SEQ ID NO: 1167562 - DNA, 15 bp, Homo sapiens
acatgtctgaaaata

SEQ ID NO: 1167563 - DNA, 15 bp, Homo sapiens
tacatgtctgaaaat

SEQ ID NO: 1167564 - DNA, 15 bp, Homo sapiens
gtacatgtctgaaaa

SEQ ID NO: 1167565 - DNA, 15 bp, Homo sapiens
tgtacatgtctgaaa

SEQ ID NO: 1167566 - DNA, 15 bp, Homo sapiens
atgtacatgtctgaa

SEQ ID NO: 1167567 - DNA, 15 bp, Homo sapiens
aatgtacatgtctga

SEQ ID NO: 1167568 - DNA, 15 bp, Homo sapiens
taatgtacatgtctg

SEQ ID NO: 1167569 - DNA, 15 bp, Homo sapiens
ataatgtacatgtct

SEQ ID NO: 1167570 - DNA, 15 bp, Homo sapiens
cataatgtacatgtc

SEQ ID NO: 1167571 - DNA, 15 bp, Homo sapiens
tcataatgtacatgt

SEQ ID NO: 1167572 - DNA, 15 bp, Homo sapiens
ttcataatgtacatg

SEQ ID NO: 1167573 - DNA, 15 bp, Homo sapiens
cttcataatgtacat

SEQ ID NO: 1167574 - DNA, 15 bp, Homo sapiens
acttcataatgtaca

SEQ ID NO: 1167575 - DNA, 15 bp, Homo sapiens
tacttcataatgtac

SEQ ID NO: 1167576 - DNA, 15 bp, Homo sapiens
atacttcataatgta

SEQ ID NO: 1167577 - DNA, 15 bp, Homo sapiens
aatacttcataatgt

SEQ ID NO: 1167578 - DNA, 15 bp, Homo sapiens
taatacttcataatg

SEQ ID NO: 1167579 - DNA, 15 bp, Homo sapiens
ataatacttcataat

SEQ ID NO: 1167580 - DNA, 15 bp, Homo sapiens
tataatacttcataa

SEQ ID NO: 1167581 - DNA, 15 bp, Homo sapiens
gtataatacttcata

SEQ ID NO: 1167582 - DNA, 15 bp, Homo sapiens
ggtataatacttcat

SEQ ID NO: 1167583 - DNA, 15 bp, Homo sapiens
aggtataatacttca

SEQ ID NO: 1167584 - DNA, 15 bp, Homo sapiens
aaggtataatacttc

SEQ ID NO: 1167585 - DNA, 15 bp, Homo sapiens
gaaggtataatactt

SEQ ID NO: 1167586 - DNA, 15 bp, Homo sapiens
agaaggtataatact

SEQ ID NO: 1167587 - DNA, 15 bp, Homo sapiens
aagaaggtataatac

SEQ ID NO: 1167588 - DNA, 15 bp, Homo sapiens
aaagaaggtataata

SEQ ID NO: 1167589 - DNA, 15 bp, Homo sapiens
taaagaaggtataat

SEQ ID NO: 1167590 - DNA, 15 bp, Homo sapiens
ttaaagaaggtataa

SEQ ID NO: 1167591 - DNA, 15 bp, Homo sapiens
gttaaagaaggtata

SEQ ID NO: 1167592 - DNA, 15 bp, Homo sapiens
agttaaagaaggtat

SEQ ID NO: 1167593 - DNA, 15 bp, Homo sapiens
tagttaaagaaggta

SEQ ID NO: 1167594 - DNA, 15 bp, Homo sapiens
atagttaaagaaggt

SEQ ID NO: 1167595 - DNA, 15 bp, Homo sapiens
catagttaaagaagg

SEQ ID NO: 1167596 - DNA, 15 bp, Homo sapiens
acatagttaaagaag

SEQ ID NO: 1167597 - DNA, 15 bp, Homo sapiens
cacatagttaaagaa

SEQ ID NO: 1167598 - DNA, 15 bp, Homo sapiens
gcacatagttaaaga

SEQ ID NO: 1167599 - DNA, 15 bp, Homo sapiens
tgcacatagttaaag

SEQ ID NO: 1167600 - DNA, 15 bp, Homo sapiens
ttgcacatagttaaa

SEQ ID NO: 1167601 - DNA, 15 bp, Homo sapiens
cttgcacatagttaa

SEQ ID NO: 1167602 - DNA, 15 bp, Homo sapiens
acttgcacatagtta

SEQ ID NO: 1167603 - DNA, 15 bp, Homo sapiens
aacttgcacatagtt

SEQ ID NO: 1167604 - DNA, 15 bp, Homo sapiens
taacttgcacatagt

SEQ ID NO: 1167605 - DNA, 15 bp, Homo sapiens
ttaacttgcacatag

SEQ ID NO: 1167606 - DNA, 15 bp, Homo sapiens
tttaacttgcacata

SEQ ID NO: 1167607 - DNA, 15 bp, Homo sapiens
ttttaacttgcacat

SEQ ID NO: 1167608 - DNA, 15 bp, Homo sapiens
attttaacttgcaca

SEQ ID NO: 1167609 - DNA, 15 bp, Homo sapiens
gattttaacttgcac

SEQ ID NO: 1167610 - DNA, 15 bp, Homo sapiens
tgattttaacttgca

SEQ ID NO: 1167611 - DNA, 15 bp, Homo sapiens
ctgattttaacttgc

SEQ ID NO: 1167612 - DNA, 15 bp, Homo sapiens
actgattttaacttg

SEQ ID NO: 1167613 - DNA, 15 bp, Homo sapiens
gactgattttaactt

SEQ ID NO: 1167614 - DNA, 15 bp, Homo sapiens
tgactgattttaact

SEQ ID NO: 1167615 - DNA, 15 bp, Homo sapiens
atgactgattttaac

SEQ ID NO: 1167616 - DNA, 15 bp, Homo sapiens
tatgactgattttaa

SEQ ID NO: 1167617 - DNA, 15 bp, Homo sapiens
ttatgactgatttta

SEQ ID NO: 1167618 - DNA, 15 bp, Homo sapiens
gttatgactgatttt

SEQ ID NO: 1167619 - DNA, 15 bp, Homo sapiens
agttatgactgattt

SEQ ID NO: 1167620 - DNA, 15 bp, Homo sapiens
cagttatgactgatt

SEQ ID NO: 1167621 - DNA, 15 bp, Homo sapiens
tcagttatgactgat

SEQ ID NO: 1167622 - DNA, 15 bp, Homo sapiens
ttcagttatgactga

SEQ ID NO: 1167623 - DNA, 15 bp, Homo sapiens
tttcagttatgactg

SEQ ID NO: 1167624 - DNA, 15 bp, Homo sapiens
ttttcagttatgact

SEQ ID NO: 1167625 - DNA, 15 bp, Homo sapiens
attttcagttatgac

SEQ ID NO: 1167626 - DNA, 15 bp, Homo sapiens
gattttcagttatga

SEQ ID NO: 1167627 - DNA, 15 bp, Homo sapiens
tgattttcagttatg

SEQ ID NO: 1167628 - DNA, 15 bp, Homo sapiens
ttgattttcagttat

SEQ ID NO: 1167629 - DNA, 15 bp, Homo sapiens
tttgattttcagtta

SEQ ID NO: 1167630 - DNA, 15 bp, Homo sapiens
ttttgattttcagtt

SEQ ID NO: 1167631 - DNA, 15 bp, Homo sapiens
cttttgattttcagt

SEQ ID NO: 1167632 - DNA, 15 bp, Homo sapiens
ccttttgattttcag

SEQ ID NO: 1167633 - DNA, 15 bp, Homo sapiens
cccttttgattttca

SEQ ID NO: 1167634 - DNA, 15 bp, Homo sapiens
gcccttttgattttc

SEQ ID NO: 1167635 - DNA, 15 bp, Homo sapiens
tgcccttttgatttt

SEQ ID NO: 1167636 - DNA, 15 bp, Homo sapiens
ttgcccttttgattt

SEQ ID NO: 1167637 - DNA, 15 bp, Homo sapiens
attgcccttttgatt

SEQ ID NO: 1167638 - DNA, 15 bp, Homo sapiens
tattgcccttttgat

SEQ ID NO: 1167639 - DNA, 15 bp, Homo sapiens
ttattgcccttttga

SEQ ID NO: 1167640 - DNA, 15 bp, Homo sapiens
attattgcccttttg

SEQ ID NO: 1167641 - DNA, 15 bp, Homo sapiens
cattattgccctttt

SEQ ID NO: 1167642 - DNA, 15 bp, Homo sapiens
tcattattgcccttt

SEQ ID NO: 1167643 - DNA, 15 bp, Homo sapiens
ttcattattgccctt

SEQ ID NO: 1167644 - DNA, 15 bp, Homo sapiens
gttcattattgccct

SEQ ID NO: 1167645 - DNA, 15 bp, Homo sapiens
tgttcattattgccc

SEQ ID NO: 1167646 - DNA, 15 bp, Homo sapiens
atgttcattattgcc

SEQ ID NO: 1167647 - DNA, 15 bp, Homo sapiens
tatgttcattattgc

SEQ ID NO: 1167648 - DNA, 15 bp, Homo sapiens
gtatgttcattattg

SEQ ID NO: 1167649 - DNA, 15 bp, Homo sapiens
agtatgttcattatt

SEQ ID NO: 1167650 - DNA, 15 bp, Homo sapiens
aagtatgttcattat

SEQ ID NO: 1167651 - DNA, 15 bp, Homo sapiens
gaagtatgttcatta

SEQ ID NO: 1167652 - DNA, 15 bp, Homo sapiens
tgaagtatgttcatt

SEQ ID NO: 1167653 - DNA, 15 bp, Homo sapiens
atgaagtatgttcat

SEQ ID NO: 1167654 - DNA, 15 bp, Homo sapiens
gatgaagtatgttca

SEQ ID NO: 1167655 - DNA, 15 bp, Homo sapiens
ggatgaagtatgttc

SEQ ID NO: 1167656 - DNA, 15 bp, Homo sapiens
tggatgaagtatgtt

SEQ ID NO: 1167657 - DNA, 15 bp, Homo sapiens
ctggatgaagtatgt

SEQ ID NO: 1167658 - DNA, 15 bp, Homo sapiens
tctggatgaagtatg

SEQ ID NO: 1167659 - DNA, 15 bp, Homo sapiens
ttctggatgaagtat

SEQ ID NO: 1167660 - DNA, 15 bp, Homo sapiens
cttctggatgaagta

SEQ ID NO: 1167661 - DNA, 15 bp, Homo sapiens
tcttctggatgaagt

SEQ ID NO: 1167662 - DNA, 15 bp, Homo sapiens
ctcttctggatgaag

SEQ ID NO: 1167663 - DNA, 15 bp, Homo sapiens
cctcttctggatgaa

SEQ ID NO: 1167664 - DNA, 15 bp, Homo sapiens
acctcttctggatga

SEQ ID NO: 1167665 - DNA, 15 bp, Homo sapiens
tacctcttctggatg

SEQ ID NO: 1167666 - DNA, 15 bp, Homo sapiens
atacctcttctggat

SEQ ID NO: 1167667 - DNA, 15 bp, Homo sapiens
gatacctcttctgga

SEQ ID NO: 1167668 - DNA, 15 bp, Homo sapiens
ggatacctcttctgg

SEQ ID NO: 1167669 - DNA, 15 bp, Homo sapiens
tggatacctcttctg

SEQ ID NO: 1167670 - DNA, 15 bp, Homo sapiens
gtggatacctcttct

SEQ ID NO: 1167671 - DNA, 15 bp, Homo sapiens
tgtggatacctcttc

SEQ ID NO: 1167672 - DNA, 15 bp, Homo sapiens
ttgtggatacctctt

SEQ ID NO: 1167673 - DNA, 15 bp, Homo sapiens
tttgtggatacctct

SEQ ID NO: 1167674 - DNA, 15 bp, Homo sapiens
ttttgtggatacctc

SEQ ID NO: 1167675 - DNA, 15 bp, Homo sapiens
gttttgtggatacct

SEQ ID NO: 1167676 - DNA, 15 bp, Homo sapiens
agttttgtggatacc

SEQ ID NO: 1167677 - DNA, 15 bp, Homo sapiens
aagttttgtggatac

SEQ ID NO: 1167678 - DNA, 15 bp, Homo sapiens
gaagttttgtggata

SEQ ID NO: 1167679 - DNA, 15 bp, Homo sapiens
agaagttttgtggat

SEQ ID NO: 1167680 - DNA, 15 bp, Homo sapiens
cagaagttttgtgga

SEQ ID NO: 1167681 - DNA, 15 bp, Homo sapiens
tcagaagttttgtgg

SEQ ID NO: 1167682 - DNA, 15 bp, Homo sapiens
ttcagaagttttgtg

SEQ ID NO: 1167683 - DNA, 15 bp, Homo sapiens
tttcagaagttttgt

SEQ ID NO: 1167684 - DNA, 15 bp, Homo sapiens
ctttcagaagttttg

SEQ ID NO: 1167685 - DNA, 15 bp, Homo sapiens
tctttcagaagtttt

SEQ ID NO: 1167686 - DNA, 15 bp, Homo sapiens
ctctttcagaagttt

SEQ ID NO: 1167687 - DNA, 15 bp, Homo sapiens
cctctttcagaagtt

SEQ ID NO: 1167688 - DNA, 15 bp, Homo sapiens
acctctttcagaagt

SEQ ID NO: 1167689 - DNA, 15 bp, Homo sapiens
gacctctttcagaag

SEQ ID NO: 1167690 - DNA, 15 bp, Homo sapiens
agacctctttcagaa

SEQ ID NO: 1167691 - DNA, 15 bp, Homo sapiens
aagacctctttcaga

SEQ ID NO: 1167692 - DNA, 15 bp, Homo sapiens
taagacctctttcag

SEQ ID NO: 1167693 - DNA, 15 bp, Homo sapiens
ctaagacctctttca

SEQ ID NO: 1167694 - DNA, 15 bp, Homo sapiens
actaagacctctttc

SEQ ID NO: 1167695 - DNA, 15 bp, Homo sapiens
tactaagacctcttt

SEQ ID NO: 1167696 - DNA, 15 bp, Homo sapiens
atactaagacctctt

SEQ ID NO: 1167697 - DNA, 15 bp, Homo sapiens
tatactaagacctct

SEQ ID NO: 1167698 - DNA, 15 bp, Homo sapiens
atatactaagacctc

SEQ ID NO: 1167699 - DNA, 15 bp, Homo sapiens
gatatactaagacct

SEQ ID NO: 1167700 - DNA, 15 bp, Homo sapiens
ggatatactaagacc

SEQ ID NO: 1167701 - DNA, 15 bp, Homo sapiens
tggatatactaagac

SEQ ID NO: 1167702 - DNA, 15 bp, Homo sapiens
ctggatatactaaga

SEQ ID NO: 1167703 - DNA, 15 bp, Homo sapiens
cctggatatactaag

SEQ ID NO: 1167704 - DNA, 15 bp, Homo sapiens
ccctggatatactaa

SEQ ID NO: 1167705 - DNA, 15 bp, Homo sapiens
tccctggatatacta

SEQ ID NO: 1167706 - DNA, 15 bp, Homo sapiens
atccctggatatact

SEQ ID NO: 1167707 - DNA, 15 bp, Homo sapiens
catccctggatatac

SEQ ID NO: 1167708 - DNA, 15 bp, Homo sapiens
ccatccctggatata

SEQ ID NO: 1167709 - DNA, 15 bp, Homo sapiens
tccatccctggatat

SEQ ID NO: 1167710 - DNA, 15 bp, Homo sapiens
ctccatccctggata

SEQ ID NO: 1167711 - DNA, 15 bp, Homo sapiens
tctccatccctggat

SEQ ID NO: 1167712 - DNA, 15 bp, Homo sapiens
atctccatccctgga

SEQ ID NO: 1167713 - DNA, 15 bp, Homo sapiens
tatctccatccctgg

SEQ ID NO: 1167714 - DNA, 15 bp, Homo sapiens
atatctccatccctg

SEQ ID NO: 1167715 - DNA, 15 bp, Homo sapiens
aatatctccatccct

SEQ ID NO: 1167716 - DNA, 15 bp, Homo sapiens
taatatctccatccc

SEQ ID NO: 1167717 - DNA, 15 bp, Homo sapiens
ataatatctccatcc

SEQ ID NO: 1167718 - DNA, 15 bp, Homo sapiens
aataatatctccatc

SEQ ID NO: 1167719 - DNA, 15 bp, Homo sapiens
taataatatctccat

SEQ ID NO: 1167720 - DNA, 15 bp, Homo sapiens
gtaataatatctcca

SEQ ID NO: 1167721 - DNA, 15 bp, Homo sapiens
tgtaataatatctcc

SEQ ID NO: 1167722 - DNA, 15 bp, Homo sapiens
ttgtaataatatctc

SEQ ID NO: 1167723 - DNA, 15 bp, Homo sapiens
attgtaataatatct

SEQ ID NO: 1167724 - DNA, 15 bp, Homo sapiens
cattgtaataatatc

SEQ ID NO: 1167725 - DNA, 15 bp, Homo sapiens
acattgtaataatat

SEQ ID NO: 1167726 - DNA, 15 bp, Homo sapiens
tacattgtaataata

SEQ ID NO: 1167727 - DNA, 15 bp, Homo sapiens
atacattgtaataat

SEQ ID NO: 1167728 - DNA, 15 bp, Homo sapiens
aatacattgtaataa

SEQ ID NO: 1167729 - DNA, 15 bp, Homo sapiens
taatacattgtaata

SEQ ID NO: 1167730 - DNA, 15 bp, Homo sapiens
ataatacattgtaat

SEQ ID NO: 1167731 - DNA, 15 bp, Homo sapiens
gataatacattgtaa

SEQ ID NO: 1167732 - DNA, 15 bp, Homo sapiens
ggataatacattgta

SEQ ID NO: 1167733 - DNA, 15 bp, Homo sapiens
tggataatacattgt

SEQ ID NO: 1167734 - DNA, 15 bp, Homo sapiens
ttggataatacattg

SEQ ID NO: 1167735 - DNA, 15 bp, Homo sapiens
tttggataatacatt

SEQ ID NO: 1167736 - DNA, 15 bp, Homo sapiens
atttggataatacat

SEQ ID NO: 1167737 - DNA, 15 bp, Homo sapiens
catttggataataca

SEQ ID NO: 1167738 - DNA, 15 bp, Homo sapiens
tcatttggataatac

SEQ ID NO: 1167739 - DNA, 15 bp, Homo sapiens
atcatttggataata

SEQ ID NO: 1167740 - DNA, 15 bp, Homo sapiens
catcatttggataat

SEQ ID NO: 1167741 - DNA, 15 bp, Homo sapiens
ccatcatttggataa

SEQ ID NO: 1167742 - DNA, 15 bp, Homo sapiens
tccatcatttggata

SEQ ID NO: 1167743 - DNA, 15 bp, Homo sapiens
ttccatcatttggat

SEQ ID NO: 1167744 - DNA, 15 bp, Homo sapiens
cttccatcatttgga

SEQ ID NO: 1167745 - DNA, 15 bp, Homo sapiens
acttccatcatttgg

SEQ ID NO: 1167746 - DNA, 15 bp, Homo sapiens
aacttccatcatttg

SEQ ID NO: 1167747 - DNA, 15 bp, Homo sapiens
aaacttccatcattt

SEQ ID NO: 1167748 - DNA, 15 bp, Homo sapiens
aaaacttccatcatt

SEQ ID NO: 1167749 - DNA, 15 bp, Homo sapiens
gaaaacttccatcat

SEQ ID NO: 1167750 - DNA, 15 bp, Homo sapiens
agaaaacttccatca

SEQ ID NO: 1167751 - DNA, 15 bp, Homo sapiens
gagaaaacttccatc

SEQ ID NO: 1167752 - DNA, 15 bp, Homo sapiens
agagaaaacttccat

SEQ ID NO: 1167753 - DNA, 15 bp, Homo sapiens
aagagaaaacttcca

SEQ ID NO: 1167754 - DNA, 15 bp, Homo sapiens
caagagaaaacttcc

SEQ ID NO: 1167755 - DNA, 15 bp, Homo sapiens
gcaagagaaaacttc

SEQ ID NO: 1167756 - DNA, 15 bp, Homo sapiens
agcaagagaaaactt

SEQ ID NO: 1167757 - DNA, 15 bp, Homo sapiens
cagcaagagaaaact

SEQ ID NO: 1167758 - DNA, 15 bp, Homo sapiens
tcagcaagagaaaac

SEQ ID NO: 1167759 - DNA, 15 bp, Homo sapiens
atcagcaagagaaaa

SEQ ID NO: 1167760 - DNA, 15 bp, Homo sapiens
tatcagcaagagaaa

SEQ ID NO: 1167761 - DNA, 15 bp, Homo sapiens
ctatcagcaagagaa

SEQ ID NO: 1167762 - DNA, 15 bp, Homo sapiens
tctatcagcaagaga

SEQ ID NO: 1167763 - DNA, 15 bp, Homo sapiens
ttctatcagcaagag

SEQ ID NO: 1167764 - DNA, 15 bp, Homo sapiens
attctatcagcaaga

SEQ ID NO: 1167765 - DNA, 15 bp, Homo sapiens
cattctatcagcaag

SEQ ID NO: 1167766 - DNA, 15 bp, Homo sapiens
gcattctatcagcaa

SEQ ID NO: 1167767 - DNA, 15 bp, Homo sapiens
tgcattctatcagca

SEQ ID NO: 1167768 - DNA, 15 bp, Homo sapiens
atgcattctatcagc

SEQ ID NO: 1167769 - DNA, 15 bp, Homo sapiens
gatgcattctatcag

SEQ ID NO: 1167770 - DNA, 15 bp, Homo sapiens
ggatgcattctatca

SEQ ID NO: 1167771 - DNA, 15 bp, Homo sapiens
tggatgcattctatc

SEQ ID NO: 1167772 - DNA, 15 bp, Homo sapiens
gtggatgcattctat

SEQ ID NO: 1167773 - DNA, 15 bp, Homo sapiens
ggtggatgcattcta

SEQ ID NO: 1167774 - DNA, 15 bp, Homo sapiens
aggtggatgcattct

SEQ ID NO: 1167775 - DNA, 15 bp, Homo sapiens
taggtggatgcattc

SEQ ID NO: 1167776 - DNA, 15 bp, Homo sapiens
gtaggtggatgcatt

SEQ ID NO: 1167777 - DNA, 15 bp, Homo sapiens
agtaggtggatgcat

SEQ ID NO: 1167778 - DNA, 15 bp, Homo sapiens
tagtaggtggatgca

SEQ ID NO: 1167779 - DNA, 15 bp, Homo sapiens
ttagtaggtggatgc

SEQ ID NO: 1167780 - DNA, 15 bp, Homo sapiens
gttagtaggtggatg

SEQ ID NO: 1167781 - DNA, 15 bp, Homo sapiens
tgttagtaggtggat

SEQ ID NO: 1167782 - DNA, 15 bp, Homo sapiens
atgttagtaggtgga

SEQ ID NO: 1167783 - DNA, 15 bp, Homo sapiens
gatgttagtaggtgg

SEQ ID NO: 1167784 - DNA, 15 bp, Homo sapiens
tgatgttagtaggtg

SEQ ID NO: 1167785 - DNA, 15 bp, Homo sapiens
ctgatgttagtaggt

SEQ ID NO: 1167786 - DNA, 15 bp, Homo sapiens
actgatgttagtagg

SEQ ID NO: 1167787 - DNA, 15 bp, Homo sapiens
tactgatgttagtag

SEQ ID NO: 1167788 - DNA, 15 bp, Homo sapiens
ttactgatgttagta

SEQ ID NO: 1167789 - DNA, 15 bp, Homo sapiens
cttactgatgttagt

SEQ ID NO: 1167790 - DNA, 15 bp, Homo sapiens
acttactgatgttag

SEQ ID NO: 1167791 - DNA, 15 bp, Homo sapiens
tacttactgatgtta

SEQ ID NO: 1167792 - DNA, 15 bp, Homo sapiens
gtacttactgatgtt

SEQ ID NO: 1167793 - DNA, 15 bp, Homo sapiens
tgtacttactgatgt

SEQ ID NO: 1167794 - DNA, 15 bp, Homo sapiens
ctgtacttactgatg

SEQ ID NO: 1167795 - DNA, 15 bp, Homo sapiens
cctgtacttactgat

SEQ ID NO: 1167796 - DNA, 15 bp, Homo sapiens
acctgtacttactga

SEQ ID NO: 1167797 - DNA, 15 bp, Homo sapiens
aacctgtacttactg

SEQ ID NO: 1167798 - DNA, 15 bp, Homo sapiens
aaacctgtacttact

SEQ ID NO: 1167799 - DNA, 15 bp, Homo sapiens
taaacctgtacttac

SEQ ID NO: 1167800 - DNA, 15 bp, Homo sapiens
ttaaacctgtactta

SEQ ID NO: 1167801 - DNA, 15 bp, Homo sapiens
gttaaacctgtactt

SEQ ID NO: 1167802 - DNA, 15 bp, Homo sapiens
tgttaaacctgtact

SEQ ID NO: 1167803 - DNA, 15 bp, Homo sapiens
ttgttaaacctgtac

SEQ ID NO: 1167804 - DNA, 15 bp, Homo sapiens
attgttaaacctgta

SEQ ID NO: 1167805 - DNA, 15 bp, Homo sapiens
aattgttaaacctgt

SEQ ID NO: 1167806 - DNA, 15 bp, Homo sapiens
aaattgttaaacctg

SEQ ID NO: 1167807 - DNA, 15 bp, Homo sapiens
taaattgttaaacct

SEQ ID NO: 1167808 - DNA, 15 bp, Homo sapiens
gtaaattgttaaacc

SEQ ID NO: 1167809 - DNA, 15 bp, Homo sapiens
ggtaaattgttaaac

SEQ ID NO: 1167810 - DNA, 15 bp, Homo sapiens
tggtaaattgttaaa

SEQ ID NO: 1167811 - DNA, 15 bp, Homo sapiens
ctggtaaattgttaa

SEQ ID NO: 1167812 - DNA, 15 bp, Homo sapiens
tctggtaaattgtta

SEQ ID NO: 1167813 - DNA, 15 bp, Homo sapiens
ttctggtaaattgtt

SEQ ID NO: 1167814 - DNA, 15 bp, Homo sapiens
tttctggtaaattgt

SEQ ID NO: 1167815 - DNA, 15 bp, Homo sapiens
atttctggtaaattg

SEQ ID NO: 1167816 - DNA, 15 bp, Homo sapiens
catttctggtaaatt

SEQ ID NO: 1167817 - DNA, 15 bp, Homo sapiens
acatttctggtaaat

SEQ ID NO: 1167818 - DNA, 15 bp, Homo sapiens
tacatttctggtaaa

SEQ ID NO: 1167819 - DNA, 15 bp, Homo sapiens
gtacatttctggtaa

SEQ ID NO: 1167820 - DNA, 15 bp, Homo sapiens
agtacatttctggta

SEQ ID NO: 1167821 - DNA, 15 bp, Homo sapiens
cagtacatttctggt

SEQ ID NO: 1167822 - DNA, 15 bp, Homo sapiens
ccagtacatttctgg

SEQ ID NO: 1167823 - DNA, 15 bp, Homo sapiens
tccagtacatttctg

SEQ ID NO: 1167824 - DNA, 15 bp, Homo sapiens
ctccagtacatttct

SEQ ID NO: 1167825 - DNA, 15 bp, Homo sapiens
cctccagtacatttc

SEQ ID NO: 1167826 - DNA, 15 bp, Homo sapiens
tcctccagtacattt

SEQ ID NO: 1167827 - DNA, 15 bp, Homo sapiens
ttcctccagtacatt

SEQ ID NO: 1167828 - DNA, 15 bp, Homo sapiens
tttcctccagtacat

SEQ ID NO: 1167829 - DNA, 15 bp, Homo sapiens
atttcctccagtaca

SEQ ID NO: 1167830 - DNA, 15 bp, Homo sapiens
tatttcctccagtac

SEQ ID NO: 1167831 - DNA, 15 bp, Homo sapiens
atatttcctccagta

SEQ ID NO: 1167832 - DNA, 15 bp, Homo sapiens
catatttcctccagt

SEQ ID NO: 1167833 - DNA, 15 bp, Homo sapiens
tcatatttcctccag

SEQ ID NO: 1167834 - DNA, 15 bp, Homo sapiens
ttcatatttcctcca

SEQ ID NO: 1167835 - DNA, 15 bp, Homo sapiens
attcatatttcctcc

SEQ ID NO: 1167836 - DNA, 15 bp, Homo sapiens
tattcatatttcctc

SEQ ID NO: 1167837 - DNA, 15 bp, Homo sapiens
atattcatatttcct

SEQ ID NO: 1167838 - DNA, 15 bp, Homo sapiens
catattcatatttcc

SEQ ID NO: 1167839 - DNA, 15 bp, Homo sapiens
gcatattcatatttc

SEQ ID NO: 1167840 - DNA, 15 bp, Homo sapiens
agcatattcatattt

SEQ ID NO: 1167841 - DNA, 15 bp, Homo sapiens
aagcatattcatatt

SEQ ID NO: 1167842 - DNA, 15 bp, Homo sapiens
gaagcatattcatat

SEQ ID NO: 1167843 - DNA, 15 bp, Homo sapiens
ggaagcatattcata

SEQ ID NO: 1167844 - DNA, 15 bp, Homo sapiens
tggaagcatattcat

SEQ ID NO: 1167845 - DNA, 15 bp, Homo sapiens
ctggaagcatattca

SEQ ID NO: 1167846 - DNA, 15 bp, Homo sapiens
tctggaagcatattc

SEQ ID NO: 1167847 - DNA, 15 bp, Homo sapiens
atctggaagcatatt

SEQ ID NO: 1167848 - DNA, 15 bp, Homo sapiens
aatctggaagcatat

SEQ ID NO: 1167849 - DNA, 15 bp, Homo sapiens
aaatctggaagcata

SEQ ID NO: 1167850 - DNA, 15 bp, Homo sapiens
taaatctggaagcat

SEQ ID NO: 1167851 - DNA, 15 bp, Homo sapiens
ataaatctggaagca

SEQ ID NO: 1167852 - DNA, 15 bp, Homo sapiens
aataaatctggaagc

SEQ ID NO: 1167853 - DNA, 15 bp, Homo sapiens
gaataaatctggaag

SEQ ID NO: 1167854 - DNA, 15 bp, Homo sapiens
agaataaatctggaa

SEQ ID NO: 1167855 - DNA, 15 bp, Homo sapiens
tagaataaatctgga

SEQ ID NO: 1167856 - DNA, 15 bp, Homo sapiens
gtagaataaatctgg

SEQ ID NO: 1167857 - DNA, 15 bp, Homo sapiens
ggtagaataaatctg

SEQ ID NO: 1167858 - DNA, 15 bp, Homo sapiens
aggtagaataaatct

SEQ ID NO: 1167859 - DNA, 15 bp, Homo sapiens
taggtagaataaatc

SEQ ID NO: 1167860 - DNA, 15 bp, Homo sapiens
ttaggtagaataaat

SEQ ID NO: 1167861 - DNA, 15 bp, Homo sapiens
tttaggtagaataaa

SEQ ID NO: 1167862 - DNA, 15 bp, Homo sapiens
ctttaggtagaataa

SEQ ID NO: 1167863 - DNA, 15 bp, Homo sapiens
cctttaggtagaata

SEQ ID NO: 1167864 - DNA, 15 bp, Homo sapiens
tcctttaggtagaat

SEQ ID NO: 1167865 - DNA, 15 bp, Homo sapiens
atcctttaggtagaa

SEQ ID NO: 1167866 - DNA, 15 bp, Homo sapiens
gatcctttaggtaga

SEQ ID NO: 1167867 - DNA, 15 bp, Homo sapiens
agatcctttaggtag

SEQ ID NO: 1167868 - DNA, 15 bp, Homo sapiens
cagatcctttaggta

SEQ ID NO: 1167869 - DNA, 15 bp, Homo sapiens
ccagatcctttaggt

SEQ ID NO: 1167870 - DNA, 15 bp, Homo sapiens
gccagatcctttagg

SEQ ID NO: 1167871 - DNA, 15 bp, Homo sapiens
agccagatcctttag

SEQ ID NO: 1167872 - DNA, 15 bp, Homo sapiens
gagccagatccttta

SEQ ID NO: 1167873 - DNA, 15 bp, Homo sapiens
agagccagatccttt

SEQ ID NO: 1167874 - DNA, 15 bp, Homo sapiens
tagagccagatcctt

SEQ ID NO: 1167875 - DNA, 15 bp, Homo sapiens
atagagccagatcct

SEQ ID NO: 1167876 - DNA, 15 bp, Homo sapiens
aatagagccagatcc

SEQ ID NO: 1167877 - DNA, 15 bp, Homo sapiens
aaatagagccagatc

SEQ ID NO: 1167878 - DNA, 15 bp, Homo sapiens
aaaatagagccagat

SEQ ID NO: 1167879 - DNA, 15 bp, Homo sapiens
taaaatagagccaga

SEQ ID NO: 1167880 - DNA, 15 bp, Homo sapiens
gtaaaatagagccag

SEQ ID NO: 1167881 - DNA, 15 bp, Homo sapiens
tgtaaaatagagcca

SEQ ID NO: 1167882 - DNA, 15 bp, Homo sapiens
ttgtaaaatagagcc

SEQ ID NO: 1167883 - DNA, 15 bp, Homo sapiens
cttgtaaaatagagc

SEQ ID NO: 1167884 - DNA, 15 bp, Homo sapiens
ccttgtaaaatagag

SEQ ID NO: 1167885 - DNA, 15 bp, Homo sapiens
accttgtaaaataga

SEQ ID NO: 1167886 - DNA, 15 bp, Homo sapiens
gaccttgtaaaatag

SEQ ID NO: 1167887 - DNA, 15 bp, Homo sapiens
tgaccttgtaaaata

SEQ ID NO: 1167888 - DNA, 15 bp, Homo sapiens
atgaccttgtaaaat

SEQ ID NO: 1167889 - DNA, 15 bp, Homo sapiens
gatgaccttgtaaaa

SEQ ID NO: 1167890 - DNA, 15 bp, Homo sapiens
agatgaccttgtaaa

SEQ ID NO: 1167891 - DNA, 15 bp, Homo sapiens
tagatgaccttgtaa

SEQ ID NO: 1167892 - DNA, 15 bp, Homo sapiens
atagatgaccttgta

SEQ ID NO: 1167893 - DNA, 15 bp, Homo sapiens
aatagatgaccttgt

SEQ ID NO: 1167894 - DNA, 15 bp, Homo sapiens
aaatagatgaccttg

SEQ ID NO: 1167895 - DNA, 15 bp, Homo sapiens
aaaatagatgacctt

SEQ ID NO: 1167896 - DNA, 15 bp, Homo sapiens
taaaatagatgacct

SEQ ID NO: 1167897 - DNA, 15 bp, Homo sapiens
gtaaaatagatgacc

SEQ ID NO: 1167898 - DNA, 15 bp, Homo sapiens
tgtaaaatagatgac

SEQ ID NO: 1167899 - DNA, 15 bp, Homo sapiens
ttgtaaaatagatga

SEQ ID NO: 1167900 - DNA, 15 bp, Homo sapiens
cttgtaaaatagatg

SEQ ID NO: 1167901 - DNA, 15 bp, Homo sapiens
ccttgtaaaatagat

SEQ ID NO: 1167902 - DNA, 15 bp, Homo sapiens
taccttgtaaaatag

SEQ ID NO: 1167903 - DNA, 15 bp, Homo sapiens
gtaccttgtaaaata

SEQ ID NO: 1167904 - DNA, 15 bp, Homo sapiens
agtaccttgtaaaat

SEQ ID NO: 1167905 - DNA, 15 bp, Homo sapiens
cagtaccttgtaaaa

SEQ ID NO: 1167906 - DNA, 15 bp, Homo sapiens
acagtaccttgtaaa

SEQ ID NO: 1167907 - DNA, 15 bp, Homo sapiens
tacagtaccttgtaa

SEQ ID NO: 1167908 - DNA, 15 bp, Homo sapiens
ctacagtaccttgta

SEQ ID NO: 1167909 - DNA, 15 bp, Homo sapiens
tctacagtaccttgt

SEQ ID NO: 1167910 - DNA, 15 bp, Homo sapiens
atctacagtaccttg

SEQ ID NO: 1167911 - DNA, 15 bp, Homo sapiens
catctacagtacctt

SEQ ID NO: 1167912 - DNA, 15 bp, Homo sapiens
gcatctacagtacct

SEQ ID NO: 1167913 - DNA, 15 bp, Homo sapiens
tgcatctacagtacc

SEQ ID NO: 1167914 - DNA, 15 bp, Homo sapiens
atgcatctacagtac

SEQ ID NO: 1167915 - DNA, 15 bp, Homo sapiens
aatgcatctacagta

SEQ ID NO: 1167916 - DNA, 15 bp, Homo sapiens
aaatgcatctacagt

SEQ ID NO: 1167917 - DNA, 15 bp, Homo sapiens
aaaatgcatctacag

SEQ ID NO: 1167918 - DNA, 15 bp, Homo sapiens
caaaatgcatctaca

SEQ ID NO: 1167919 - DNA, 15 bp, Homo sapiens
tcaaaatgcatctac

SEQ ID NO: 1167920 - DNA, 15 bp, Homo sapiens
atcaaaatgcatcta

SEQ ID NO: 1167921 - DNA, 15 bp, Homo sapiens
catcaaaatgcatct

SEQ ID NO: 1167922 - DNA, 15 bp, Homo sapiens
tcatcaaaatgcatc

SEQ ID NO: 1167923 - DNA, 15 bp, Homo sapiens
ttcatcaaaatgcat

SEQ ID NO: 1167924 - DNA, 15 bp, Homo sapiens
tttcatcaaaatgca

SEQ ID NO: 1167925 - DNA, 15 bp, Homo sapiens
ttttcatcaaaatgc

SEQ ID NO: 1167926 - DNA, 15 bp, Homo sapiens
tttttcatcaaaatg

SEQ ID NO: 1167927 - DNA, 15 bp, Homo sapiens
ttttttcatcaaaat

SEQ ID NO: 1167928 - DNA, 15 bp, Homo sapiens
tttttttcatcaaaa

SEQ ID NO: 1167929 - DNA, 15 bp, Homo sapiens
atttttttcatcaaa

SEQ ID NO: 1167930 - DNA, 15 bp, Homo sapiens
aatttttttcatcaa

SEQ ID NO: 1167931 - DNA, 15 bp, Homo sapiens
taatttttttcatca

SEQ ID NO: 1167932 - DNA, 15 bp, Homo sapiens
gtaatttttttcatc

SEQ ID NO: 1167933 - DNA, 15 bp, Homo sapiens
ggtaatttttttcat

SEQ ID NO: 1167934 - DNA, 15 bp, Homo sapiens
gggtaatttttttca

SEQ ID NO: 1167935 - DNA, 15 bp, Homo sapiens
agggtaatttttttc

SEQ ID NO: 1167936 - DNA, 15 bp, Homo sapiens
cagggtaattttttt

SEQ ID NO: 1167937 - DNA, 15 bp, Homo sapiens
gcagggtaatttttt

SEQ ID NO: 1167938 - DNA, 15 bp, Homo sapiens
agcagggtaattttt

SEQ ID NO: 1167939 - DNA, 15 bp, Homo sapiens
tagcagggtaatttt

SEQ ID NO: 1167940 - DNA, 15 bp, Homo sapiens
atagcagggtaattt

SEQ ID NO: 1167941 - DNA, 15 bp, Homo sapiens
aatagcagggtaatt

SEQ ID NO: 1167942 - DNA, 15 bp, Homo sapiens
caatagcagggtaat

SEQ ID NO: 1167943 - DNA, 15 bp, Homo sapiens
tcaatagcagggtaa

SEQ ID NO: 1167944 - DNA, 15 bp, Homo sapiens
atcaatagcagggta

SEQ ID NO: 1167945 - DNA, 15 bp, Homo sapiens
aatcaatagcagggt

SEQ ID NO: 1167946 - DNA, 15 bp, Homo sapiens
aaatcaatagcaggg

SEQ ID NO: 1167947 - DNA, 15 bp, Homo sapiens
aaaatcaatagcagg

SEQ ID NO: 1167948 - DNA, 15 bp, Homo sapiens
caaaatcaatagcag

SEQ ID NO: 1167949 - DNA, 15 bp, Homo sapiens
tcaaaatcaatagca

SEQ ID NO: 1167950 - DNA, 15 bp, Homo sapiens
ctcaaaatcaatagc

SEQ ID NO: 1167951 - DNA, 15 bp, Homo sapiens
cctcaaaatcaatag

SEQ ID NO: 1167952 - DNA, 15 bp, Homo sapiens
acctcaaaatcaata

SEQ ID NO: 1167953 - DNA, 15 bp, Homo sapiens
gacctcaaaatcaat

SEQ ID NO: 1167954 - DNA, 15 bp, Homo sapiens
agacctcaaaatcaa

SEQ ID NO: 1167955 - DNA, 15 bp, Homo sapiens
cagacctcaaaatca

SEQ ID NO: 1167956 - DNA, 15 bp, Homo sapiens
ccagacctcaaaatc

SEQ ID NO: 1167957 - DNA, 15 bp, Homo sapiens
accagacctcaaaat

SEQ ID NO: 1167958 - DNA, 15 bp, Homo sapiens
taccagacctcaaaa

SEQ ID NO: 1167959 - DNA, 15 bp, Homo sapiens
ataccagacctcaaa

SEQ ID NO: 1167960 - DNA, 15 bp, Homo sapiens
aataccagacctcaa

SEQ ID NO: 1167961 - DNA, 15 bp, Homo sapiens
taataccagacctca

SEQ ID NO: 1167962 - DNA, 15 bp, Homo sapiens
ataataccagacctc

SEQ ID NO: 1167963 - DNA, 15 bp, Homo sapiens
cataataccagacct

SEQ ID NO: 1167964 - DNA, 15 bp, Homo sapiens
tcataataccagacc

SEQ ID NO: 1167965 - DNA, 15 bp, Homo sapiens
atcataataccagac

SEQ ID NO: 1167966 - DNA, 15 bp, Homo sapiens
tatcataataccaga

SEQ ID NO: 1167967 - DNA, 15 bp, Homo sapiens
ctatcataataccag

SEQ ID NO: 1167968 - DNA, 15 bp, Homo sapiens
tctatcataatacca

SEQ ID NO: 1167969 - DNA, 15 bp, Homo sapiens
ctctatcataatacc

SEQ ID NO: 1167970 - DNA, 15 bp, Homo sapiens
gctctatcataatac

SEQ ID NO: 1167971 - DNA, 15 bp, Homo sapiens
tgctctatcataata

SEQ ID NO: 1167972 - DNA, 15 bp, Homo sapiens
ttgctctatcataat

SEQ ID NO: 1167973 - DNA, 15 bp, Homo sapiens
tttgctctatcataa

SEQ ID NO: 1167974 - DNA, 15 bp, Homo sapiens
ttttgctctatcata

SEQ ID NO: 1167975 - DNA, 15 bp, Homo sapiens
tttttgctctatcat

SEQ ID NO: 1167976 - DNA, 15 bp, Homo sapiens
gtttttgctctatca

SEQ ID NO: 1167977 - DNA, 15 bp, Homo sapiens
agtttttgctctatc

SEQ ID NO: 1167978 - DNA, 15 bp, Homo sapiens
tagtttttgctctat

SEQ ID NO: 1167979 - DNA, 15 bp, Homo sapiens
atagtttttgctcta

SEQ ID NO: 1167980 - DNA, 15 bp, Homo sapiens
gatagtttttgctct

SEQ ID NO: 1167981 - DNA, 15 bp, Homo sapiens
ggatagtttttgctc

SEQ ID NO: 1167982 - DNA, 15 bp, Homo sapiens
tggatagtttttgct

SEQ ID NO: 1167983 - DNA, 15 bp, Homo sapiens
ttggatagtttttgc

SEQ ID NO: 1167984 - DNA, 15 bp, Homo sapiens
tttggatagtttttg

SEQ ID NO: 1167985 - DNA, 15 bp, Homo sapiens
ttttggatagttttt

SEQ ID NO: 1167986 - DNA, 15 bp, Homo sapiens
cttttggatagtttt

SEQ ID NO: 1167987 - DNA, 15 bp, Homo sapiens
tcttttggatagttt

SEQ ID NO: 1167988 - DNA, 15 bp, Homo sapiens
ctcttttggatagtt

SEQ ID NO: 1167989 - DNA, 15 bp, Homo sapiens
tctcttttggatagt

SEQ ID NO: 1167990 - DNA, 15 bp, Homo sapiens
atctcttttggatag

SEQ ID NO: 1167991 - DNA, 15 bp, Homo sapiens
aatctcttttggata

SEQ ID NO: 1167992 - DNA, 15 bp, Homo sapiens
aaatctcttttggat

SEQ ID NO: 1167993 - DNA, 15 bp, Homo sapiens
taaatctcttttgga

SEQ ID NO: 1167994 - DNA, 15 bp, Homo sapiens
ttaaatctcttttgg

SEQ ID NO: 1167995 - DNA, 15 bp, Homo sapiens
attaaatctcttttg

SEQ ID NO: 1167996 - DNA, 15 bp, Homo sapiens
aattaaatctctttt

SEQ ID NO: 1167997 - DNA, 15 bp, Homo sapiens
gaattaaatctcttt

SEQ ID NO: 1167998 - DNA, 15 bp, Homo sapiens
tgaattaaatctctt

SEQ ID NO: 1167999 - DNA, 15 bp, Homo sapiens
ttgaattaaatctct

SEQ ID NO: 1168000 - DNA, 15 bp, Homo sapiens
cttgaattaaatctc

SEQ ID NO: 1168001 - DNA, 15 bp, Homo sapiens
acttgaattaaatct

SEQ ID NO: 1168002 - DNA, 15 bp, Homo sapiens
gacttgaattaaatc

SEQ ID NO: 1168003 - DNA, 15 bp, Homo sapiens
tgacttgaattaaat

SEQ ID NO: 1168004 - DNA, 15 bp, Homo sapiens
atgacttgaattaaa

SEQ ID NO: 1168005 - DNA, 15 bp, Homo sapiens
aatgacttgaattaa

SEQ ID NO: 1168006 - DNA, 15 bp, Homo sapiens
caatgacttgaatta

SEQ ID NO: 1168007 - DNA, 15 bp, Homo sapiens
gcaatgacttgaatt

SEQ ID NO: 1168008 - DNA, 15 bp, Homo sapiens
tgcaatgacttgaat

SEQ ID NO: 1168009 - DNA, 15 bp, Homo sapiens
ttgcaatgacttgaa

SEQ ID NO: 1168010 - DNA, 15 bp, Homo sapiens
tttgcaatgacttga

SEQ ID NO: 1168011 - DNA, 15 bp, Homo sapiens
ttttgcaatgacttg

SEQ ID NO: 1168012 - DNA, 15 bp, Homo sapiens
attttgcaatgactt

SEQ ID NO: 1168013 - DNA, 15 bp, Homo sapiens
gattttgcaatgact

SEQ ID NO: 1168014 - DNA, 15 bp, Homo sapiens
agattttgcaatgac

SEQ ID NO: 1168015 - DNA, 15 bp, Homo sapiens
aagattttgcaatga

SEQ ID NO: 1168016 - DNA, 15 bp, Homo sapiens
caagattttgcaatg

SEQ ID NO: 1168017 - DNA, 15 bp, Homo sapiens
ccaagattttgcaat

SEQ ID NO: 1168018 - DNA, 15 bp, Homo sapiens
tccaagattttgcaa

SEQ ID NO: 1168019 - DNA, 15 bp, Homo sapiens
ttccaagattttgca

SEQ ID NO: 1168020 - DNA, 15 bp, Homo sapiens
tttccaagattttgc

SEQ ID NO: 1168021 - DNA, 15 bp, Homo sapiens
ttttccaagattttg

SEQ ID NO: 1168022 - DNA, 15 bp, Homo sapiens
attttccaagatttt

SEQ ID NO: 1168023 - DNA, 15 bp, Homo sapiens
cattttccaagattt

SEQ ID NO: 1168024 - DNA, 15 bp, Homo sapiens
acattttccaagatt

SEQ ID NO: 1168025 - DNA, 15 bp, Homo sapiens
cacattttccaagat

SEQ ID NO: 1168026 - DNA, 15 bp, Homo sapiens
acacattttccaaga

SEQ ID NO: 1168027 - DNA, 15 bp, Homo sapiens
cacacattttccaag

SEQ ID NO: 1168028 - DNA, 15 bp, Homo sapiens
tcacacattttccaa

SEQ ID NO: 1168029 - DNA, 15 bp, Homo sapiens
ctcacacattttcca

SEQ ID NO: 1168030 - DNA, 15 bp, Homo sapiens
tctcacacattttcc

SEQ ID NO: 1168031 - DNA, 15 bp, Homo sapiens
ttctcacacattttc

SEQ ID NO: 1168032 - DNA, 15 bp, Homo sapiens
tttctcacacatttt

SEQ ID NO: 1168033 - DNA, 15 bp, Homo sapiens
atttctcacacattt

SEQ ID NO: 1168034 - DNA, 15 bp, Homo sapiens
gatttctcacacatt

SEQ ID NO: 1168035 - DNA, 15 bp, Homo sapiens
agatttctcacacat

SEQ ID NO: 1168036 - DNA, 15 bp, Homo sapiens
aagatttctcacaca

SEQ ID NO: 1168037 - DNA, 15 bp, Homo sapiens
taagatttctcacac

SEQ ID NO: 1168038 - DNA, 15 bp, Homo sapiens
gtaagatttctcaca

SEQ ID NO: 1168039 - DNA, 15 bp, Homo sapiens
tgtaagatttctcac

SEQ ID NO: 1168040 - DNA, 15 bp, Homo sapiens
gtgtaagatttctca

SEQ ID NO: 1168041 - DNA, 15 bp, Homo sapiens
tgtgtaagatttctc

SEQ ID NO: 1168042 - DNA, 15 bp, Homo sapiens
atgtgtaagatttct

SEQ ID NO: 1168043 - DNA, 15 bp, Homo sapiens
catgtgtaagatttc

SEQ ID NO: 1168044 - DNA, 15 bp, Homo sapiens
ccatgtgtaagattt

SEQ ID NO: 1168045 - DNA, 15 bp, Homo sapiens
tccatgtgtaagatt

SEQ ID NO: 1168046 - DNA, 15 bp, Homo sapiens
ttccatgtgtaagat

SEQ ID NO: 1168047 - DNA, 15 bp, Homo sapiens
tttccatgtgtaaga

SEQ ID NO: 1168048 - DNA, 15 bp, Homo sapiens
ctttccatgtgtaag

SEQ ID NO: 1168049 - DNA, 15 bp, Homo sapiens
cctttccatgtgtaa

SEQ ID NO: 1168050 - DNA, 15 bp, Homo sapiens
tcctttccatgtgta

SEQ ID NO: 1168051 - DNA, 15 bp, Homo sapiens
ctcctttccatgtgt

SEQ ID NO: 1168052 - DNA, 15 bp, Homo sapiens
cctcctttccatgtg

SEQ ID NO: 1168053 - DNA, 15 bp, Homo sapiens
tcctcctttccatgt

SEQ ID NO: 1168054 - DNA, 15 bp, Homo sapiens
ttcctcctttccatg

SEQ ID NO: 1168055 - DNA, 15 bp, Homo sapiens
cttcctcctttccat

SEQ ID NO: 1168056 - DNA, 15 bp, Homo sapiens
acttcctcctttcca

SEQ ID NO: 1168057 - DNA, 15 bp, Homo sapiens
tacttcctcctttcc

SEQ ID NO: 1168058 - DNA, 15 bp, Homo sapiens
ttacttcctcctttc

SEQ ID NO: 1168059 - DNA, 15 bp, Homo sapiens
tttacttcctccttt

SEQ ID NO: 1168060 - DNA, 15 bp, Homo sapiens
ctttacttcctcctt

SEQ ID NO: 1168061 - DNA, 15 bp, Homo sapiens
tctttacttcctcct

SEQ ID NO: 1168062 - DNA, 15 bp, Homo sapiens
atctttacttcctcc

SEQ ID NO: 1168063 - DNA, 15 bp, Homo sapiens
catctttacttcctc

SEQ ID NO: 1168064 - DNA, 15 bp, Homo sapiens
ccatctttacttcct

SEQ ID NO: 1168065 - DNA, 15 bp, Homo sapiens
accatctttacttcc

SEQ ID NO: 1168066 - DNA, 15 bp, Homo sapiens
taccatctttacttc

SEQ ID NO: 1168067 - DNA, 15 bp, Homo sapiens
ctaccatctttactt

SEQ ID NO: 1168068 - DNA, 15 bp, Homo sapiens
gctaccatctttact

SEQ ID NO: 1168069 - DNA, 15 bp, Homo sapiens
agctaccatctttac

SEQ ID NO: 1168070 - DNA, 15 bp, Homo sapiens
aagctaccatcttta

SEQ ID NO: 1168071 - DNA, 15 bp, Homo sapiens
taagctaccatcttt

SEQ ID NO: 1168072 - DNA, 15 bp, Homo sapiens
ttaagctaccatctt

SEQ ID NO: 1168073 - DNA, 15 bp, Homo sapiens
tttaagctaccatct

SEQ ID NO: 1168074 - DNA, 15 bp, Homo sapiens
gtttaagctaccatc

SEQ ID NO: 1168075 - DNA, 15 bp, Homo sapiens
tgtttaagctaccat

SEQ ID NO: 1168076 - DNA, 15 bp, Homo sapiens
atgtttaagctacca

SEQ ID NO: 1168077 - DNA, 15 bp, Homo sapiens
catgtttaagctacc

SEQ ID NO: 1168078 - DNA, 15 bp, Homo sapiens
acatgtttaagctac

SEQ ID NO: 1168079 - DNA, 15 bp, Homo sapiens
cacatgtttaagcta

SEQ ID NO: 1168080 - DNA, 15 bp, Homo sapiens
acacatgtttaagct

SEQ ID NO: 1168081 - DNA, 15 bp, Homo sapiens
aacacatgtttaagc

SEQ ID NO: 1168082 - DNA, 15 bp, Homo sapiens
gaacacatgtttaag

SEQ ID NO: 1168083 - DNA, 15 bp, Homo sapiens
ggaacacatgtttaa

SEQ ID NO: 1168084 - DNA, 15 bp, Homo sapiens
tggaacacatgttta

SEQ ID NO: 1168085 - DNA, 15 bp, Homo sapiens
gtggaacacatgttt

SEQ ID NO: 1168086 - DNA, 15 bp, Homo sapiens
agtggaacacatgtt

SEQ ID NO: 1168087 - DNA, 15 bp, Homo sapiens
cagtggaacacatgt

SEQ ID NO: 1168088 - DNA, 15 bp, Homo sapiens
acagtggaacacatg

SEQ ID NO: 1168089 - DNA, 15 bp, Homo sapiens
cacagtggaacacat

SEQ ID NO: 1168090 - DNA, 15 bp, Homo sapiens
tcacagtggaacaca

SEQ ID NO: 1168091 - DNA, 15 bp, Homo sapiens
ttcacagtggaacac

SEQ ID NO: 1168092 - DNA, 15 bp, Homo sapiens
gttcacagtggaaca

SEQ ID NO: 1168093 - DNA, 15 bp, Homo sapiens
tgttcacagtggaac

SEQ ID NO: 1168094 - DNA, 15 bp, Homo sapiens
ttgttcacagtggaa

SEQ ID NO: 1168095 - DNA, 15 bp, Homo sapiens
attgttcacagtgga

SEQ ID NO: 1168096 - DNA, 15 bp, Homo sapiens
aattgttcacagtgg

SEQ ID NO: 1168097 - DNA, 15 bp, Homo sapiens
gaattgttcacagtg

SEQ ID NO: 1168098 - DNA, 15 bp, Homo sapiens
agaattgttcacagt

SEQ ID NO: 1168099 - DNA, 15 bp, Homo sapiens
gagaattgttcacag

SEQ ID NO: 1168100 - DNA, 15 bp, Homo sapiens
agagaattgttcaca

SEQ ID NO: 1168101 - DNA, 15 bp, Homo sapiens
cagagaattgttcac

SEQ ID NO: 1168102 - DNA, 15 bp, Homo sapiens
gcagagaattgttca

SEQ ID NO: 1168103 - DNA, 15 bp, Homo sapiens
tgcagagaattgttc

SEQ ID NO: 1168104 - DNA, 15 bp, Homo sapiens
ttgcagagaattgtt

SEQ ID NO: 1168105 - DNA, 15 bp, Homo sapiens
tttgcagagaattgt

SEQ ID NO: 1168106 - DNA, 15 bp, Homo sapiens
gtttgcagagaattg

SEQ ID NO: 1168107 - DNA, 15 bp, Homo sapiens
ggtttgcagagaatt

SEQ ID NO: 1168108 - DNA, 15 bp, Homo sapiens
gggtttgcagagaat

SEQ ID NO: 1168109 - DNA, 15 bp, Homo sapiens
tgggtttgcagagaa

SEQ ID NO: 1168110 - DNA, 15 bp, Homo sapiens
gtgggtttgcagaga

SEQ ID NO: 1168111 - DNA, 15 bp, Homo sapiens
ggtgggtttgcagag

SEQ ID NO: 1168112 - DNA, 15 bp, Homo sapiens
gggtgggtttgcaga

SEQ ID NO: 1168113 - DNA, 15 bp, Homo sapiens
ggggtgggtttgcag

SEQ ID NO: 1168114 - DNA, 15 bp, Homo sapiens
gggggtgggtttgca

SEQ ID NO: 1168115 - DNA, 15 bp, Homo sapiens
tgggggtgggtttgc

SEQ ID NO: 1168116 - DNA, 15 bp, Homo sapiens
ttgggggtgggtttg

SEQ ID NO: 1168117 - DNA, 15 bp, Homo sapiens
tttgggggtgggttt

SEQ ID NO: 1168118 - DNA, 15 bp, Homo sapiens
ttttgggggtgggtt

SEQ ID NO: 1168119 - DNA, 15 bp, Homo sapiens
cttttgggggtgggt

SEQ ID NO: 1168120 - DNA, 15 bp, Homo sapiens
acttttgggggtggg

SEQ ID NO: 1168121 - DNA, 15 bp, Homo sapiens
gacttttgggggtgg

SEQ ID NO: 1168122 - DNA, 15 bp, Homo sapiens
tgacttttgggggtg

SEQ ID NO: 1168123 - DNA, 15 bp, Homo sapiens
ttgacttttgggggt

SEQ ID NO: 1168124 - DNA, 15 bp, Homo sapiens
cttgacttttggggg

SEQ ID NO: 1168125 - DNA, 15 bp, Homo sapiens
ccttgacttttgggg

SEQ ID NO: 1168126 - DNA, 15 bp, Homo sapiens
tccttgacttttggg

SEQ ID NO: 1168127 - DNA, 15 bp, Homo sapiens
ctccttgacttttgg

SEQ ID NO: 1168128 - DNA, 15 bp, Homo sapiens
cctccttgacttttg

SEQ ID NO: 1168129 - DNA, 15 bp, Homo sapiens
gcctccttgactttt

SEQ ID NO: 1168130 - DNA, 15 bp, Homo sapiens
agcctccttgacttt

SEQ ID NO: 1168131 - DNA, 15 bp, Homo sapiens
cagcctccttgactt

SEQ ID NO: 1168132 - DNA, 15 bp, Homo sapiens
tcagcctccttgact

SEQ ID NO: 1168133 - DNA, 15 bp, Homo sapiens
gtcagcctccttgac

SEQ ID NO: 1168134 - DNA, 15 bp, Homo sapiens
tgtcagcctccttga

SEQ ID NO: 1168135 - DNA, 15 bp, Homo sapiens
ctgtcagcctccttg

SEQ ID NO: 1168136 - DNA, 15 bp, Homo sapiens
cctgtcagcctcctt

SEQ ID NO: 1168137 - DNA, 15 bp, Homo sapiens
gcctgtcagcctcct

SEQ ID NO: 1168138 - DNA, 15 bp, Homo sapiens
agcctgtcagcctcc

SEQ ID NO: 1168139 - DNA, 15 bp, Homo sapiens
cagcctgtcagcctc

SEQ ID NO: 1168140 - DNA, 15 bp, Homo sapiens
tcagcctgtcagcct

SEQ ID NO: 1168141 - DNA, 15 bp, Homo sapiens
ttcagcctgtcagcc

SEQ ID NO: 1168142 - DNA, 15 bp, Homo sapiens
cttcagcctgtcagc

SEQ ID NO: 1168143 - DNA, 15 bp, Homo sapiens
tcttcagcctgtcag

SEQ ID NO: 1168144 - DNA, 15 bp, Homo sapiens
ttcttcagcctgtca

SEQ ID NO: 1168145 - DNA, 15 bp, Homo sapiens
tttcttcagcctgtc

SEQ ID NO: 1168146 - DNA, 15 bp, Homo sapiens
ctttcttcagcctgt

SEQ ID NO: 1168147 - DNA, 15 bp, Homo sapiens
tctttcttcagcctg

SEQ ID NO: 1168148 - DNA, 15 bp, Homo sapiens
ctctttcttcagcct

SEQ ID NO: 1168149 - DNA, 15 bp, Homo sapiens
cctctttcttcagcc

SEQ ID NO: 1168150 - DNA, 15 bp, Homo sapiens
gcctctttcttcagc

SEQ ID NO: 1168151 - DNA, 15 bp, Homo sapiens
agcctctttcttcag

SEQ ID NO: 1168152 - DNA, 15 bp, Homo sapiens
cagcctctttcttca

SEQ ID NO: 1168153 - DNA, 15 bp, Homo sapiens
acagcctctttcttc

SEQ ID NO: 1168154 - DNA, 15 bp, Homo sapiens
gacagcctctttctt

SEQ ID NO: 1168155 - DNA, 15 bp, Homo sapiens
tgacagcctctttct

SEQ ID NO: 1168156 - DNA, 15 bp, Homo sapiens
ttgacagcctctttc

SEQ ID NO: 1168157 - DNA, 15 bp, Homo sapiens
tttgacagcctcttt

SEQ ID NO: 1168158 - DNA, 15 bp, Homo sapiens
atttgacagcctctt

SEQ ID NO: 1168159 - DNA, 15 bp, Homo sapiens
gatttgacagcctct

SEQ ID NO: 1168160 - DNA, 15 bp, Homo sapiens
agatttgacagcctc

SEQ ID NO: 1168161 - DNA, 15 bp, Homo sapiens
tagatttgacagcct

SEQ ID NO: 1168162 - DNA, 15 bp, Homo sapiens
ctagatttgacagcc

SEQ ID NO: 1168163 - DNA, 15 bp, Homo sapiens
actagatttgacagc

SEQ ID NO: 1168164 - DNA, 15 bp, Homo sapiens
aactagatttgacag

SEQ ID NO: 1168165 - DNA, 15 bp, Homo sapiens
aaactagatttgaca

SEQ ID NO: 1168166 - DNA, 15 bp, Homo sapiens
gaaactagatttgac

SEQ ID NO: 1168167 - DNA, 15 bp, Homo sapiens
agaaactagatttga

SEQ ID NO: 1168168 - DNA, 15 bp, Homo sapiens
gagaaactagatttg

SEQ ID NO: 1168169 - DNA, 15 bp, Homo sapiens
tgagaaactagattt

SEQ ID NO: 1168170 - DNA, 15 bp, Homo sapiens
ctgagaaactagatt

SEQ ID NO: 1168171 - DNA, 15 bp, Homo sapiens
tctgagaaactagat

SEQ ID NO: 1168172 - DNA, 15 bp, Homo sapiens
ttctgagaaactaga

SEQ ID NO: 1168173 - DNA, 15 bp, Homo sapiens
tttctgagaaactag

SEQ ID NO: 1168174 - DNA, 15 bp, Homo sapiens
ttttctgagaaacta

SEQ ID NO: 1168175 - DNA, 15 bp, Homo sapiens
tttttctgagaaact

SEQ ID NO: 1168176 - DNA, 15 bp, Homo sapiens
ctttttctgagaaac

SEQ ID NO: 1168177 - DNA, 15 bp, Homo sapiens
tctttttctgagaaa

SEQ ID NO: 1168178 - DNA, 15 bp, Homo sapiens
ttctttttctgagaa

SEQ ID NO: 1168179 - DNA, 15 bp, Homo sapiens
tttctttttctgaga

SEQ ID NO: 1168180 - DNA, 15 bp, Homo sapiens
ttttctttttctgag

SEQ ID NO: 1168181 - DNA, 15 bp, Homo sapiens
tttttctttttctga

SEQ ID NO: 1168182 - DNA, 15 bp, Homo sapiens
atttttctttttctg

SEQ ID NO: 1168183 - DNA, 15 bp, Homo sapiens
taatttttctttttc

SEQ ID NO: 1168184 - DNA, 15 bp, Homo sapiens
ttaatttttcttttt

SEQ ID NO: 1168185 - DNA, 15 bp, Homo sapiens
attaatttttctttt

SEQ ID NO: 1168186 - DNA, 15 bp, Homo sapiens
tattaatttttcttt

SEQ ID NO: 1168187 - DNA, 15 bp, Homo sapiens
ctattaatttttctt

SEQ ID NO: 1168188 - DNA, 15 bp, Homo sapiens
cctattaatttttct

SEQ ID NO: 1168189 - DNA, 15 bp, Homo sapiens
ccctattaatttttc

SEQ ID NO: 1168190 - DNA, 15 bp, Homo sapiens
tccctattaattttt

SEQ ID NO: 1168191 - DNA, 15 bp, Homo sapiens
gtccctattaatttt

SEQ ID NO: 1168192 - DNA, 15 bp, Homo sapiens
agtccctattaattt

SEQ ID NO: 1168193 - DNA, 15 bp, Homo sapiens
aagtccctattaatt

SEQ ID NO: 1168194 - DNA, 15 bp, Homo sapiens
taagtccctattaat

SEQ ID NO: 1168195 - DNA, 15 bp, Homo sapiens
ttaagtccctattaa

SEQ ID NO: 1168196 - DNA, 15 bp, Homo sapiens
cttaagtccctatta

SEQ ID NO: 1168197 - DNA, 15 bp, Homo sapiens
tcttaagtccctatt

SEQ ID NO: 1168198 - DNA, 15 bp, Homo sapiens
ttcttaagtccctat

SEQ ID NO: 1168199 - DNA, 15 bp, Homo sapiens
gttcttaagtcccta

SEQ ID NO: 1168200 - DNA, 15 bp, Homo sapiens
tgttcttaagtccct

SEQ ID NO: 1168201 - DNA, 15 bp, Homo sapiens
ctgttcttaagtccc

SEQ ID NO: 1168202 - DNA, 15 bp, Homo sapiens
tctgttcttaagtcc

SEQ ID NO: 1168203 - DNA, 15 bp, Homo sapiens
ttctgttcttaagtc

SEQ ID NO: 1168204 - DNA, 15 bp, Homo sapiens
cttctgttcttaagt

SEQ ID NO: 1168205 - DNA, 15 bp, Homo sapiens
gcttctgttcttaag

SEQ ID NO: 1168206 - DNA, 15 bp, Homo sapiens
ggcttctgttcttaa

SEQ ID NO: 1168207 - DNA, 15 bp, Homo sapiens
tggcttctgttctta

SEQ ID NO: 1168208 - DNA, 15 bp, Homo sapiens
atggcttctgttctt

SEQ ID NO: 1168209 - DNA, 15 bp, Homo sapiens
tatggcttctgttct

SEQ ID NO: 1168210 - DNA, 15 bp, Homo sapiens
atatggcttctgttc

SEQ ID NO: 1168211 - DNA, 15 bp, Homo sapiens
tatatggcttctgtt

SEQ ID NO: 1168212 - DNA, 15 bp, Homo sapiens
atatatggcttctgt

SEQ ID NO: 1168213 - DNA, 15 bp, Homo sapiens
gatatatggcttctg

SEQ ID NO: 1168214 - DNA, 15 bp, Homo sapiens
agatatatggcttct

SEQ ID NO: 1168215 - DNA, 15 bp, Homo sapiens
cagatatatggcttc

SEQ ID NO: 1168216 - DNA, 15 bp, Homo sapiens
gcagatatatggctt

SEQ ID NO: 1168217 - DNA, 15 bp, Homo sapiens
ggcagatatatggct

SEQ ID NO: 1168218 - DNA, 15 bp, Homo sapiens
gggcagatatatggc

SEQ ID NO: 1168219 - DNA, 15 bp, Homo sapiens
agggcagatatatgg

SEQ ID NO: 1168220 - DNA, 15 bp, Homo sapiens
cagggcagatatatg

SEQ ID NO: 1168221 - DNA, 15 bp, Homo sapiens
tcagggcagatatat

SEQ ID NO: 1168222 - DNA, 15 bp, Homo sapiens
ctcagggcagatata

SEQ ID NO: 1168223 - DNA, 15 bp, Homo sapiens
tctcagggcagatat

SEQ ID NO: 1168224 - DNA, 15 bp, Homo sapiens
atctcagggcagata

SEQ ID NO: 1168225 - DNA, 15 bp, Homo sapiens
catctcagggcagat

SEQ ID NO: 1168226 - DNA, 15 bp, Homo sapiens
tcatctcagggcaga

SEQ ID NO: 1168227 - DNA, 15 bp, Homo sapiens
ctcatctcagggcag

SEQ ID NO: 1168228 - DNA, 15 bp, Homo sapiens
gctcatctcagggca

SEQ ID NO: 1168229 - DNA, 15 bp, Homo sapiens
agctcatctcagggc

SEQ ID NO: 1168230 - DNA, 15 bp, Homo sapiens
cagctcatctcaggg

SEQ ID NO: 1168231 - DNA, 15 bp, Homo sapiens
ccagctcatctcagg

SEQ ID NO: 1168232 - DNA, 15 bp, Homo sapiens
accagctcatctcag

SEQ ID NO: 1168233 - DNA, 15 bp, Homo sapiens
caccagctcatctca

SEQ ID NO: 1168234 - DNA, 15 bp, Homo sapiens
ccaccagctcatctc

SEQ ID NO: 1168235 - DNA, 15 bp, Homo sapiens
tccaccagctcatct

SEQ ID NO: 1168236 - DNA, 15 bp, Homo sapiens
atccaccagctcatc

SEQ ID NO: 1168237 - DNA, 15 bp, Homo sapiens
gatccaccagctcat

SEQ ID NO: 1168238 - DNA, 15 bp, Homo sapiens
ggatccaccagctca

SEQ ID NO: 1168239 - DNA, 15 bp, Homo sapiens
aggatccaccagctc

SEQ ID NO: 1168240 - DNA, 15 bp, Homo sapiens
gaggatccaccagct

SEQ ID NO: 1168241 - DNA, 15 bp, Homo sapiens
tgaggatccaccagc

SEQ ID NO: 1168242 - DNA, 15 bp, Homo sapiens
gtgaggatccaccag

SEQ ID NO: 1168243 - DNA, 15 bp, Homo sapiens
tgtgaggatccacca

SEQ ID NO: 1168244 - DNA, 15 bp, Homo sapiens
gtgtgaggatccacc

SEQ ID NO: 1168245 - DNA, 15 bp, Homo sapiens
agtgtgaggatccac

SEQ ID NO: 1168246 - DNA, 15 bp, Homo sapiens
cagtgtgaggatcca

SEQ ID NO: 1168247 - DNA, 15 bp, Homo sapiens
acagtgtgaggatcc

SEQ ID NO: 1168248 - DNA, 15 bp, Homo sapiens
aacagtgtgaggatc

SEQ ID NO: 1168249 - DNA, 15 bp, Homo sapiens
taacagtgtgaggat

SEQ ID NO: 1168250 - DNA, 15 bp, Homo sapiens
gtaacagtgtgagga

SEQ ID NO: 1168251 - DNA, 15 bp, Homo sapiens
ggtaacagtgtgagg

SEQ ID NO: 1168252 - DNA, 15 bp, Homo sapiens
gggtaacagtgtgag

SEQ ID NO: 1168253 - DNA, 15 bp, Homo sapiens
ggggtaacagtgtga

SEQ ID NO: 1168254 - DNA, 15 bp, Homo sapiens
gggggtaacagtgtg

SEQ ID NO: 1168255 - DNA, 15 bp, Homo sapiens
tgggggtaacagtgt

SEQ ID NO: 1168256 - DNA, 15 bp, Homo sapiens
ctgggggtaacagtg

SEQ ID NO: 1168257 - DNA, 15 bp, Homo sapiens
tctgggggtaacagt

SEQ ID NO: 1168258 - DNA, 15 bp, Homo sapiens
gtctgggggtaacag

SEQ ID NO: 1168259 - DNA, 15 bp, Homo sapiens
ggtctgggggtaaca

SEQ ID NO: 1168260 - DNA, 15 bp, Homo sapiens
gggtctgggggtaac

SEQ ID NO: 1168261 - DNA, 15 bp, Homo sapiens
tgggtctgggggtaa

SEQ ID NO: 1168262 - DNA, 15 bp, Homo sapiens
ctgggtctgggggta

SEQ ID NO: 1168263 - DNA, 15 bp, Homo sapiens
cctgggtctgggggt

SEQ ID NO: 1168264 - DNA, 15 bp, Homo sapiens
ccctgggtctggggg

SEQ ID NO: 1168265 - DNA, 15 bp, Homo sapiens
gccctgggtctgggg

SEQ ID NO: 1168266 - DNA, 15 bp, Homo sapiens
agccctgggtctggg

SEQ ID NO: 1168267 - DNA, 15 bp, Homo sapiens
aagccctgggtctgg

SEQ ID NO: 1168268 - DNA, 15 bp, Homo sapiens
taagccctgggtctg

SEQ ID NO: 1168269 - DNA, 15 bp, Homo sapiens
ataagccctgggtct

SEQ ID NO: 1168270 - DNA, 15 bp, Homo sapiens
tataagccctgggtc

SEQ ID NO: 1168271 - DNA, 15 bp, Homo sapiens
atataagccctgggt

SEQ ID NO: 1168272 - DNA, 15 bp, Homo sapiens
tatataagccctggg

SEQ ID NO: 1168273 - DNA, 15 bp, Homo sapiens
gtatataagccctgg

SEQ ID NO: 1168274 - DNA, 15 bp, Homo sapiens
ggtatataagccctg

SEQ ID NO: 1168275 - DNA, 15 bp, Homo sapiens
tggtatataagccct

SEQ ID NO: 1168276 - DNA, 15 bp, Homo sapiens
gtggtatataagccc

SEQ ID NO: 1168277 - DNA, 15 bp, Homo sapiens
tgtggtatataagcc

SEQ ID NO: 1168278 - DNA, 15 bp, Homo sapiens
ctgtggtatataagc

SEQ ID NO: 1168279 - DNA, 15 bp, Homo sapiens
cctgtggtatataag

SEQ ID NO: 1168280 - DNA, 15 bp, Homo sapiens
ccctgtggtatataa

SEQ ID NO: 1168281 - DNA, 15 bp, Homo sapiens
tccctgtggtatata

SEQ ID NO: 1168282 - DNA, 15 bp, Homo sapiens
ttccctgtggtatat

SEQ ID NO: 1168283 - DNA, 15 bp, Homo sapiens
tttccctgtggtata

SEQ ID NO: 1168284 - DNA, 15 bp, Homo sapiens
ctttccctgtggtat

SEQ ID NO: 1168285 - DNA, 15 bp, Homo sapiens
tctttccctgtggta

SEQ ID NO: 1168286 - DNA, 15 bp, Homo sapiens
gtctttccctgtggt

SEQ ID NO: 1168287 - DNA, 15 bp, Homo sapiens
tgtctttccctgtgg

SEQ ID NO: 1168288 - DNA, 15 bp, Homo sapiens
ttgtctttccctgtg

SEQ ID NO: 1168289 - DNA, 15 bp, Homo sapiens
attgtctttccctgt

SEQ ID NO: 1168290 - DNA, 15 bp, Homo sapiens
aattgtctttccctg

SEQ ID NO: 1168291 - DNA, 15 bp, Homo sapiens
caattgtctttccct

SEQ ID NO: 1168292 - DNA, 15 bp, Homo sapiens
gcaattgtctttccc

SEQ ID NO: 1168293 - DNA, 15 bp, Homo sapiens
tgcaattgtctttcc

SEQ ID NO: 1168294 - DNA, 15 bp, Homo sapiens
ctgcaattgtctttc

SEQ ID NO: 1168295 - DNA, 15 bp, Homo sapiens
actgcaattgtcttt

SEQ ID NO: 1168296 - DNA, 15 bp, Homo sapiens
tactgcaattgtctt

SEQ ID NO: 1168297 - DNA, 15 bp, Homo sapiens
ttactgcaattgtct

SEQ ID NO: 1168298 - DNA, 15 bp, Homo sapiens
attactgcaattgtc

SEQ ID NO: 1168299 - DNA, 15 bp, Homo sapiens
aattactgcaattgt

SEQ ID NO: 1168300 - DNA, 15 bp, Homo sapiens
aaattactgcaattg

SEQ ID NO: 1168301 - DNA, 15 bp, Homo sapiens
caaattactgcaatt

SEQ ID NO: 1168302 - DNA, 15 bp, Homo sapiens
gcaaattactgcaat

SEQ ID NO: 1168303 - DNA, 15 bp, Homo sapiens
agcaaattactgcaa

SEQ ID NO: 1168304 - DNA, 15 bp, Homo sapiens
aagcaaattactgca

SEQ ID NO: 1168305 - DNA, 15 bp, Homo sapiens
taagcaaattactgc

SEQ ID NO: 1168306 - DNA, 15 bp, Homo sapiens
ttaagcaaattactg

SEQ ID NO: 1168307 - DNA, 15 bp, Homo sapiens
gttaagcaaattact

SEQ ID NO: 1168308 - DNA, 15 bp, Homo sapiens
cgttaagcaaattac

SEQ ID NO: 1168309 - DNA, 15 bp, Homo sapiens
ccgttaagcaaatta

SEQ ID NO: 1168310 - DNA, 15 bp, Homo sapiens
gccgttaagcaaatt

SEQ ID NO: 1168311 - DNA, 15 bp, Homo sapiens
tgccgttaagcaaat

SEQ ID NO: 1168312 - DNA, 15 bp, Homo sapiens
ctgccgttaagcaaa

SEQ ID NO: 1168313 - DNA, 15 bp, Homo sapiens
cctgccgttaagcaa

SEQ ID NO: 1168314 - DNA, 15 bp, Homo sapiens
tcctgccgttaagca

SEQ ID NO: 1168315 - DNA, 15 bp, Homo sapiens
atcctgccgttaagc

SEQ ID NO: 1168316 - DNA, 15 bp, Homo sapiens
aatcctgccgttaag

SEQ ID NO: 1168317 - DNA, 15 bp, Homo sapiens
aaatcctgccgttaa

SEQ ID NO: 1168318 - DNA, 15 bp, Homo sapiens
taaatcctgccgtta

SEQ ID NO: 1168319 - DNA, 15 bp, Homo sapiens
gtaaatcctgccgtt

SEQ ID NO: 1168320 - DNA, 15 bp, Homo sapiens
cgtaaatcctgccgt

SEQ ID NO: 1168321 - DNA, 15 bp, Homo sapiens
ccgtaaatcctgccg

SEQ ID NO: 1168322 - DNA, 15 bp, Homo sapiens
gccgtaaatcctgcc

SEQ ID NO: 1168323 - DNA, 15 bp, Homo sapiens
tgccgtaaatcctgc

SEQ ID NO: 1168324 - DNA, 15 bp, Homo sapiens
ttgccgtaaatcctg

SEQ ID NO: 1168325 - DNA, 15 bp, Homo sapiens
cttgccgtaaatcct

SEQ ID NO: 1168326 - DNA, 15 bp, Homo sapiens
acttgccgtaaatcc

SEQ ID NO: 1168327 - DNA, 15 bp, Homo sapiens
tacttgccgtaaatc

SEQ ID NO: 1168328 - DNA, 15 bp, Homo sapiens
gtacttgccgtaaat

SEQ ID NO: 1168329 - DNA, 15 bp, Homo sapiens
tgtacttgccgtaaa

SEQ ID NO: 1168330 - DNA, 15 bp, Homo sapiens
atgtacttgccgtaa

SEQ ID NO: 1168331 - DNA, 15 bp, Homo sapiens
catgtacttgccgta

SEQ ID NO: 1168332 - DNA, 15 bp, Homo sapiens
gcatgtacttgccgt

SEQ ID NO: 1168333 - DNA, 15 bp, Homo sapiens
agcatgtacttgccg

SEQ ID NO: 1168334 - DNA, 15 bp, Homo sapiens
gagcatgtacttgcc

SEQ ID NO: 1168335 - DNA, 15 bp, Homo sapiens
agagcatgtacttgc

SEQ ID NO: 1168336 - DNA, 15 bp, Homo sapiens
aagagcatgtacttg

SEQ ID NO: 1168337 - DNA, 15 bp, Homo sapiens
taagagcatgtactt

SEQ ID NO: 1168338 - DNA, 15 bp, Homo sapiens
ttaagagcatgtact

SEQ ID NO: 1168339 - DNA, 15 bp, Homo sapiens
cttaagagcatgtac

SEQ ID NO: 1168340 - DNA, 15 bp, Homo sapiens
tcttaagagcatgta

SEQ ID NO: 1168341 - DNA, 15 bp, Homo sapiens
ctcttaagagcatgt

SEQ ID NO: 1168342 - DNA, 15 bp, Homo sapiens
actcttaagagcatg

SEQ ID NO: 1168343 - DNA, 15 bp, Homo sapiens
tactcttaagagcat

SEQ ID NO: 1168344 - DNA, 15 bp, Homo sapiens
ctactcttaagagca

SEQ ID NO: 1168345 - DNA, 15 bp, Homo sapiens
tctactcttaagagc

SEQ ID NO: 1168346 - DNA, 15 bp, Homo sapiens
atctactcttaagag

SEQ ID NO: 1168347 - DNA, 15 bp, Homo sapiens
aatctactcttaaga

SEQ ID NO: 1168348 - DNA, 15 bp, Homo sapiens
taatctactcttaag

SEQ ID NO: 1168349 - DNA, 15 bp, Homo sapiens
ttaatctactcttaa

SEQ ID NO: 1168350 - DNA, 15 bp, Homo sapiens
cttaatctactctta

SEQ ID NO: 1168351 - DNA, 15 bp, Homo sapiens
acttaatctactctt

SEQ ID NO: 1168352 - DNA, 15 bp, Homo sapiens
tacttaatctactct

SEQ ID NO: 1168353 - DNA, 15 bp, Homo sapiens
ctacttaatctactc

SEQ ID NO: 1168354 - DNA, 15 bp, Homo sapiens
actacttaatctact

SEQ ID NO: 1168355 - DNA, 15 bp, Homo sapiens
tactacttaatctac

SEQ ID NO: 1168356 - DNA, 15 bp, Homo sapiens
ttactacttaatcta

SEQ ID NO: 1168357 - DNA, 15 bp, Homo sapiens
gttactacttaatct

SEQ ID NO: 1168358 - DNA, 15 bp, Homo sapiens
ggttactacttaatc

SEQ ID NO: 1168359 - DNA, 15 bp, Homo sapiens
aggttactacttaat

SEQ ID NO: 1168360 - DNA, 15 bp, Homo sapiens
aaggttactacttaa

SEQ ID NO: 1168361 - DNA, 15 bp, Homo sapiens
taaggttactactta

SEQ ID NO: 1168362 - DNA, 15 bp, Homo sapiens
ctaaggttactactt

SEQ ID NO: 1168363 - DNA, 15 bp, Homo sapiens
tctaaggttactact

SEQ ID NO: 1168364 - DNA, 15 bp, Homo sapiens
ctctaaggttactac

SEQ ID NO: 1168365 - DNA, 15 bp, Homo sapiens
cctctaaggttacta

SEQ ID NO: 1168366 - DNA, 15 bp, Homo sapiens
gcctctaaggttact

SEQ ID NO: 1168367 - DNA, 15 bp, Homo sapiens
tgcctctaaggttac

SEQ ID NO: 1168368 - DNA, 15 bp, Homo sapiens
atgcctctaaggtta

SEQ ID NO: 1168369 - DNA, 15 bp, Homo sapiens
aatgcctctaaggtt

SEQ ID NO: 1168370 - DNA, 15 bp, Homo sapiens
gaatgcctctaaggt

SEQ ID NO: 1168371 - DNA, 15 bp, Homo sapiens
ggaatgcctctaagg

SEQ ID NO: 1168372 - DNA, 15 bp, Homo sapiens
aggaatgcctctaag

SEQ ID NO: 1168373 - DNA, 15 bp, Homo sapiens
taggaatgcctctaa

SEQ ID NO: 1168374 - DNA, 15 bp, Homo sapiens
ctaggaatgcctcta

SEQ ID NO: 1168375 - DNA, 15 bp, Homo sapiens
tctaggaatgcctct

SEQ ID NO: 1168376 - DNA, 15 bp, Homo sapiens
ttctaggaatgcctc

SEQ ID NO: 1168377 - DNA, 15 bp, Homo sapiens
gttctaggaatgcct

SEQ ID NO: 1168378 - DNA, 15 bp, Homo sapiens
agttctaggaatgcc

SEQ ID NO: 1168379 - DNA, 15 bp, Homo sapiens
cagttctaggaatgc

SEQ ID NO: 1168380 - DNA, 15 bp, Homo sapiens
ccagttctaggaatg

SEQ ID NO: 1168381 - DNA, 15 bp, Homo sapiens
tccagttctaggaat

SEQ ID NO: 1168382 - DNA, 15 bp, Homo sapiens
ctccagttctaggaa

SEQ ID NO: 1168383 - DNA, 15 bp, Homo sapiens
actccagttctagga

SEQ ID NO: 1168384 - DNA, 15 bp, Homo sapiens
aactccagttctagg

SEQ ID NO: 1168385 - DNA, 15 bp, Homo sapiens
taactccagttctag

SEQ ID NO: 1168386 - DNA, 15 bp, Homo sapiens
ttaactccagttcta

SEQ ID NO: 1168387 - DNA, 15 bp, Homo sapiens
attaactccagttct

SEQ ID NO: 1168388 - DNA, 15 bp, Homo sapiens
gattaactccagttc

SEQ ID NO: 1168389 - DNA, 15 bp, Homo sapiens
tgattaactccagtt

SEQ ID NO: 1168390 - DNA, 15 bp, Homo sapiens
ctgattaactccagt

SEQ ID NO: 1168391 - DNA, 15 bp, Homo sapiens
tctgattaactccag

SEQ ID NO: 1168392 - DNA, 15 bp, Homo sapiens
ttctgattaactcca

SEQ ID NO: 1168393 - DNA, 15 bp, Homo sapiens
cttctgattaactcc

SEQ ID NO: 1168394 - DNA, 15 bp, Homo sapiens
acttctgattaactc

SEQ ID NO: 1168395 - DNA, 15 bp, Homo sapiens
gacttctgattaact

SEQ ID NO: 1168396 - DNA, 15 bp, Homo sapiens
tgacttctgattaac

SEQ ID NO: 1168397 - DNA, 15 bp, Homo sapiens
ttgacttctgattaa

SEQ ID NO: 1168398 - DNA, 15 bp, Homo sapiens
gttgacttctgatta

SEQ ID NO: 1168399 - DNA, 15 bp, Homo sapiens
tgttgacttctgatt

SEQ ID NO: 1168400 - DNA, 15 bp, Homo sapiens
gtgttgacttctgat

SEQ ID NO: 1168401 - DNA, 15 bp, Homo sapiens
tgtgttgacttctga

SEQ ID NO: 1168402 - DNA, 15 bp, Homo sapiens
ctgtgttgacttctg

SEQ ID NO: 1168403 - DNA, 15 bp, Homo sapiens
actgtgttgacttct

SEQ ID NO: 1168404 - DNA, 15 bp, Homo sapiens
cactgtgttgacttc

SEQ ID NO: 1168405 - DNA, 15 bp, Homo sapiens
ccactgtgttgactt

SEQ ID NO: 1168406 - DNA, 15 bp, Homo sapiens
tccactgtgttgact

SEQ ID NO: 1168407 - DNA, 15 bp, Homo sapiens
atccactgtgttgac

SEQ ID NO: 1168408 - DNA, 15 bp, Homo sapiens
aatccactgtgttga

SEQ ID NO: 1168409 - DNA, 15 bp, Homo sapiens
taatccactgtgttg

SEQ ID NO: 1168410 - DNA, 15 bp, Homo sapiens
ctaatccactgtgtt

SEQ ID NO: 1168411 - DNA, 15 bp, Homo sapiens
gctaatccactgtgt

SEQ ID NO: 1168412 - DNA, 15 bp, Homo sapiens
tgctaatccactgtg

SEQ ID NO: 1168413 - DNA, 15 bp, Homo sapiens
atgctaatccactgt

SEQ ID NO: 1168414 - DNA, 15 bp, Homo sapiens
gatgctaatccactg

SEQ ID NO: 1168415 - DNA, 15 bp, Homo sapiens
ggatgctaatccact

SEQ ID NO: 1168416 - DNA, 15 bp, Homo sapiens
tggatgctaatccac

SEQ ID NO: 1168417 - DNA, 15 bp, Homo sapiens
ttggatgctaatcca

SEQ ID NO: 1168418 - DNA, 15 bp, Homo sapiens
cttggatgctaatcc

SEQ ID NO: 1168419 - DNA, 15 bp, Homo sapiens
tcttggatgctaatc

SEQ ID NO: 1168420 - DNA, 15 bp, Homo sapiens
atcttggatgctaat

SEQ ID NO: 1168421 - DNA, 15 bp, Homo sapiens
catcttggatgctaa

SEQ ID NO: 1168422 - DNA, 15 bp, Homo sapiens
ccatcttggatgcta

SEQ ID NO: 1168423 - DNA, 15 bp, Homo sapiens
tccatcttggatgct

SEQ ID NO: 1168424 - DNA, 15 bp, Homo sapiens
ctccatcttggatgc

SEQ ID NO: 1168425 - DNA, 15 bp, Homo sapiens
actccatcttggatg

SEQ ID NO: 1168426 - DNA, 15 bp, Homo sapiens
aactccatcttggat

SEQ ID NO: 1168427 - DNA, 15 bp, Homo sapiens
caactccatcttgga

SEQ ID NO: 1168428 - DNA, 15 bp, Homo sapiens
gcaactccatcttgg

SEQ ID NO: 1168429 - DNA, 15 bp, Homo sapiens
agcaactccatcttg

SEQ ID NO: 1168430 - DNA, 15 bp, Homo sapiens
aagcaactccatctt

SEQ ID NO: 1168431 - DNA, 15 bp, Homo sapiens
aaagcaactccatct

SEQ ID NO: 1168432 - DNA, 15 bp, Homo sapiens
taaagcaactccatc

SEQ ID NO: 1168433 - DNA, 15 bp, Homo sapiens
ctaaagcaactccat

SEQ ID NO: 1168434 - DNA, 15 bp, Homo sapiens
gctaaagcaactcca

SEQ ID NO: 1168435 - DNA, 15 bp, Homo sapiens
ggctaaagcaactcc

SEQ ID NO: 1168436 - DNA, 15 bp, Homo sapiens
aggctaaagcaactc

SEQ ID NO: 1168437 - DNA, 15 bp, Homo sapiens
gaggctaaagcaact

SEQ ID NO: 1168438 - DNA, 15 bp, Homo sapiens
ggaggctaaagcaac

SEQ ID NO: 1168439 - DNA, 15 bp, Homo sapiens
tggaggctaaagcaa

SEQ ID NO: 1168440 - DNA, 15 bp, Homo sapiens
gtggaggctaaagca

SEQ ID NO: 1168441 - DNA, 15 bp, Homo sapiens
tgtggaggctaaagc

SEQ ID NO: 1168442 - DNA, 15 bp, Homo sapiens
ttgtggaggctaaag

SEQ ID NO: 1168443 - DNA, 15 bp, Homo sapiens
tttgtggaggctaaa

SEQ ID NO: 1168444 - DNA, 15 bp, Homo sapiens
ctttgtggaggctaa

SEQ ID NO: 1168445 - DNA, 15 bp, Homo sapiens
tctttgtggaggcta

SEQ ID NO: 1168446 - DNA, 15 bp, Homo sapiens
ctctttgtggaggct

SEQ ID NO: 1168447 - DNA, 15 bp, Homo sapiens
tctctttgtggaggc

SEQ ID NO: 1168448 - DNA, 15 bp, Homo sapiens
ttctctttgtggagg

SEQ ID NO: 1168449 - DNA, 15 bp, Homo sapiens
tttctctttgtggag

SEQ ID NO: 1168450 - DNA, 15 bp, Homo sapiens
ttttctctttgtgga

SEQ ID NO: 1168451 - DNA, 15 bp, Homo sapiens
attttctctttgtgg

SEQ ID NO: 1168452 - DNA, 15 bp, Homo sapiens
cattttctctttgtg

SEQ ID NO: 1168453 - DNA, 15 bp, Homo sapiens
tcattttctctttgt

SEQ ID NO: 1168454 - DNA, 15 bp, Homo sapiens
ttcattttctctttg

SEQ ID NO: 1168455 - DNA, 15 bp, Homo sapiens
cttcattttctcttt

SEQ ID NO: 1168456 - DNA, 15 bp, Homo sapiens
tcttcattttctctt

SEQ ID NO: 1168457 - DNA, 15 bp, Homo sapiens
atcttcattttctct

SEQ ID NO: 1168458 - DNA, 15 bp, Homo sapiens
tatcttcattttctc

SEQ ID NO: 1168459 - DNA, 15 bp, Homo sapiens
ttatcttcattttct

SEQ ID NO: 1168460 - DNA, 15 bp, Homo sapiens
tttatcttcattttc

SEQ ID NO: 1168461 - DNA, 15 bp, Homo sapiens
atttatcttcatttt

SEQ ID NO: 1168462 - DNA, 15 bp, Homo sapiens
aatttatcttcattt

SEQ ID NO: 1168463 - DNA, 15 bp, Homo sapiens
aaatttatcttcatt

SEQ ID NO: 1168464 - DNA, 15 bp, Homo sapiens
caaatttatcttcat

SEQ ID NO: 1168465 - DNA, 15 bp, Homo sapiens
ccaaatttatcttca

SEQ ID NO: 1168466 - DNA, 15 bp, Homo sapiens
accaaatttatcttc

SEQ ID NO: 1168467 - DNA, 15 bp, Homo sapiens
gaccaaatttatctt

SEQ ID NO: 1168468 - DNA, 15 bp, Homo sapiens
ggaccaaatttatct

SEQ ID NO: 1168469 - DNA, 15 bp, Homo sapiens
tggaccaaatttatc

SEQ ID NO: 1168470 - DNA, 15 bp, Homo sapiens
atggaccaaatttat

SEQ ID NO: 1168471 - DNA, 15 bp, Homo sapiens
catggaccaaattta

SEQ ID NO: 1168472 - DNA, 15 bp, Homo sapiens
gcatggaccaaattt

SEQ ID NO: 1168473 - DNA, 15 bp, Homo sapiens
agcatggaccaaatt

SEQ ID NO: 1168474 - DNA, 15 bp, Homo sapiens
tagcatggaccaaat

SEQ ID NO: 1168475 - DNA, 15 bp, Homo sapiens
ttagcatggaccaaa

SEQ ID NO: 1168476 - DNA, 15 bp, Homo sapiens
attagcatggaccaa

SEQ ID NO: 1168477 - DNA, 15 bp, Homo sapiens
aattagcatggacca

SEQ ID NO: 1168478 - DNA, 15 bp, Homo sapiens
taattagcatggacc

SEQ ID NO: 1168479 - DNA, 15 bp, Homo sapiens
ctaattagcatggac

SEQ ID NO: 1168480 - DNA, 15 bp, Homo sapiens
cctaattagcatgga

SEQ ID NO: 1168481 - DNA, 15 bp, Homo sapiens
ccctaattagcatgg

SEQ ID NO: 1168482 - DNA, 15 bp, Homo sapiens
cccctaattagcatg

SEQ ID NO: 1168483 - DNA, 15 bp, Homo sapiens
ccccctaattagcat

SEQ ID NO: 1168484 - DNA, 15 bp, Homo sapiens
accccctaattagca

SEQ ID NO: 1168485 - DNA, 15 bp, Homo sapiens
caccccctaattagc

SEQ ID NO: 1168486 - DNA, 15 bp, Homo sapiens
acaccccctaattag

SEQ ID NO: 1168487 - DNA, 15 bp, Homo sapiens
aacaccccctaatta

SEQ ID NO: 1168488 - DNA, 15 bp, Homo sapiens
gaacaccccctaatt

SEQ ID NO: 1168489 - DNA, 15 bp, Homo sapiens
ggaacaccccctaat

SEQ ID NO: 1168490 - DNA, 15 bp, Homo sapiens
tggaacaccccctaa

SEQ ID NO: 1168491 - DNA, 15 bp, Homo sapiens
atggaacacccccta

SEQ ID NO: 1168492 - DNA, 15 bp, Homo sapiens
aatggaacaccccct

SEQ ID NO: 1168493 - DNA, 15 bp, Homo sapiens
aaatggaacaccccc

SEQ ID NO: 1168494 - DNA, 15 bp, Homo sapiens
caaatggaacacccc

SEQ ID NO: 1168495 - DNA, 15 bp, Homo sapiens
acaaatggaacaccc

SEQ ID NO: 1168496 - DNA, 15 bp, Homo sapiens
aacaaatggaacacc

SEQ ID NO: 1168497 - DNA, 15 bp, Homo sapiens
aaacaaatggaacac

SEQ ID NO: 1168498 - DNA, 15 bp, Homo sapiens
caaacaaatggaaca

SEQ ID NO: 1168499 - DNA, 15 bp, Homo sapiens
tcaaacaaatggaac

SEQ ID NO: 1168500 - DNA, 15 bp, Homo sapiens
ttcaaacaaatggaa

SEQ ID NO: 1168501 - DNA, 15 bp, Homo sapiens
tttcaaacaaatgga

SEQ ID NO: 1168502 - DNA, 15 bp, Homo sapiens
gtttcaaacaaatgg

SEQ ID NO: 1168503 - DNA, 15 bp, Homo sapiens
agtttcaaacaaatg

SEQ ID NO: 1168504 - DNA, 15 bp, Homo sapiens
cagtttcaaacaaat

SEQ ID NO: 1168505 - DNA, 15 bp, Homo sapiens
tcagtttcaaacaaa

SEQ ID NO: 1168506 - DNA, 15 bp, Homo sapiens
ttcagtttcaaacaa

SEQ ID NO: 1168507 - DNA, 15 bp, Homo sapiens
tttcagtttcaaaca

SEQ ID NO: 1168508 - DNA, 15 bp, Homo sapiens
atttcagtttcaaac

SEQ ID NO: 1168509 - DNA, 15 bp, Homo sapiens
gatttcagtttcaaa

SEQ ID NO: 1168510 - DNA, 15 bp, Homo sapiens
agatttcagtttcaa

SEQ ID NO: 1168511 - DNA, 15 bp, Homo sapiens
tagatttcagtttca

SEQ ID NO: 1168512 - DNA, 15 bp, Homo sapiens
atagatttcagtttc

SEQ ID NO: 1168513 - DNA, 15 bp, Homo sapiens
tatagatttcagttt

SEQ ID NO: 1168514 - DNA, 15 bp, Homo sapiens
ttatagatttcagtt

SEQ ID NO: 1168515 - DNA, 15 bp, Homo sapiens
attatagatttcagt

SEQ ID NO: 1168516 - DNA, 15 bp, Homo sapiens
aattatagatttcag

SEQ ID NO: 1168517 - DNA, 15 bp, Homo sapiens
aaattatagatttca

SEQ ID NO: 1168518 - DNA, 15 bp, Homo sapiens
gaaattatagatttc

SEQ ID NO: 1168519 - DNA, 15 bp, Homo sapiens
ggaaattatagattt

SEQ ID NO: 1168520 - DNA, 15 bp, Homo sapiens
tggaaattatagatt

SEQ ID NO: 1168521 - DNA, 15 bp, Homo sapiens
ttggaaattatagat

SEQ ID NO: 1168522 - DNA, 15 bp, Homo sapiens
tttggaaattataga

SEQ ID NO: 1168523 - DNA, 15 bp, Homo sapiens
ctttggaaattatag

SEQ ID NO: 1168524 - DNA, 15 bp, Homo sapiens
tctttggaaattata

SEQ ID NO: 1168525 - DNA, 15 bp, Homo sapiens
ttctttggaaattat

SEQ ID NO: 1168526 - DNA, 15 bp, Homo sapiens
cttctttggaaatta

SEQ ID NO: 1168527 - DNA, 15 bp, Homo sapiens
tcttctttggaaatt

SEQ ID NO: 1168528 - DNA, 15 bp, Homo sapiens
ttcttctttggaaat

SEQ ID NO: 1168529 - DNA, 15 bp, Homo sapiens
tttcttctttggaaa

SEQ ID NO: 1168530 - DNA, 15 bp, Homo sapiens
ttttcttctttggaa

SEQ ID NO: 1168531 - DNA, 15 bp, Homo sapiens
attttcttctttgga

SEQ ID NO: 1168532 - DNA, 15 bp, Homo sapiens
tattttcttctttgg

SEQ ID NO: 1168533 - DNA, 15 bp, Homo sapiens
ttattttcttctttg

SEQ ID NO: 1168534 - DNA, 15 bp, Homo sapiens
tttattttcttcttt

SEQ ID NO: 1168535 - DNA, 15 bp, Homo sapiens
gtttattttcttctt

SEQ ID NO: 1168536 - DNA, 15 bp, Homo sapiens
cgtttattttcttct

SEQ ID NO: 1168537 - DNA, 15 bp, Homo sapiens
acgtttattttcttc

SEQ ID NO: 1168538 - DNA, 15 bp, Homo sapiens
cacgtttattttctt

SEQ ID NO: 1168539 - DNA, 15 bp, Homo sapiens
ccacgtttattttct

SEQ ID NO: 1168540 - DNA, 15 bp, Homo sapiens
tccacgtttattttc

SEQ ID NO: 1168541 - DNA, 15 bp, Homo sapiens
ttccacgtttatttt

SEQ ID NO: 1168542 - DNA, 15 bp, Homo sapiens
cttccacgtttattt

SEQ ID NO: 1168543 - DNA, 15 bp, Homo sapiens
acttccacgtttatt

SEQ ID NO: 1168544 - DNA, 15 bp, Homo sapiens
gacttccacgtttat

SEQ ID NO: 1168545 - DNA, 15 bp, Homo sapiens
cgacttccacgttta

SEQ ID NO: 1168546 - DNA, 15 bp, Homo sapiens
acgacttccacgttt

SEQ ID NO: 1168547 - DNA, 15 bp, Homo sapiens
gacgacttccacgtt

SEQ ID NO: 1168548 - DNA, 15 bp, Homo sapiens
ggacgacttccacgt

SEQ ID NO: 1168549 - DNA, 15 bp, Homo sapiens
aggacgacttccacg

SEQ ID NO: 1168550 - DNA, 15 bp, Homo sapiens
aaggacgacttccac

SEQ ID NO: 1168551 - DNA, 15 bp, Homo sapiens
gaaggacgacttcca

SEQ ID NO: 1168552 - DNA, 15 bp, Homo sapiens
ggaaggacgacttcc

SEQ ID NO: 1168553 - DNA, 15 bp, Homo sapiens
aggaaggacgacttc

SEQ ID NO: 1168554 - DNA, 15 bp, Homo sapiens
aaggaaggacgactt

SEQ ID NO: 1168555 - DNA, 15 bp, Homo sapiens
aaaggaaggacgact

SEQ ID NO: 1168556 - DNA, 15 bp, Homo sapiens
aaaaggaaggacgac

SEQ ID NO: 1168557 - DNA, 15 bp, Homo sapiens
aaaaaggaaggacga

SEQ ID NO: 1168558 - DNA, 15 bp, Homo sapiens
caaaaaggaaggacg

SEQ ID NO: 1168559 - DNA, 15 bp, Homo sapiens
ccaaaaaggaaggac

SEQ ID NO: 1168560 - DNA, 15 bp, Homo sapiens
accaaaaaggaagga

SEQ ID NO: 1168561 - DNA, 15 bp, Homo sapiens
taccaaaaaggaagg

SEQ ID NO: 1168562 - DNA, 15 bp, Homo sapiens
ataccaaaaaggaag

SEQ ID NO: 1168563 - DNA, 15 bp, Homo sapiens
cataccaaaaaggaa

SEQ ID NO: 1168564 - DNA, 15 bp, Homo sapiens
gcataccaaaaagga

SEQ ID NO: 1168565 - DNA, 15 bp, Homo sapiens
tgcataccaaaaagg

SEQ ID NO: 1168566 - DNA, 15 bp, Homo sapiens
atgcataccaaaaag

SEQ ID NO: 1168567 - DNA, 15 bp, Homo sapiens
tatgcataccaaaaa

SEQ ID NO: 1168568 - DNA, 15 bp, Homo sapiens
ctatgcataccaaaa

SEQ ID NO: 1168569 - DNA, 15 bp, Homo sapiens
tctatgcataccaaa

SEQ ID NO: 1168570 - DNA, 15 bp, Homo sapiens
gtctatgcataccaa

SEQ ID NO: 1168571 - DNA, 15 bp, Homo sapiens
tgtctatgcatacca

SEQ ID NO: 1168572 - DNA, 15 bp, Homo sapiens
ttgtctatgcatacc

SEQ ID NO: 1168573 - DNA, 15 bp, Homo sapiens
attgtctatgcatac

SEQ ID NO: 1168574 - DNA, 15 bp, Homo sapiens
gattgtctatgcata

SEQ ID NO: 1168575 - DNA, 15 bp, Homo sapiens
agattgtctatgcat

SEQ ID NO: 1168576 - DNA, 15 bp, Homo sapiens
cagattgtctatgca

SEQ ID NO: 1168577 - DNA, 15 bp, Homo sapiens
ccagattgtctatgc

SEQ ID NO: 1168578 - DNA, 15 bp, Homo sapiens
gccagattgtctatg

SEQ ID NO: 1168579 - DNA, 15 bp, Homo sapiens
tgccagattgtctat

SEQ ID NO: 1168580 - DNA, 15 bp, Homo sapiens
ctgccagattgtcta

SEQ ID NO: 1168581 - DNA, 15 bp, Homo sapiens
actgccagattgtct

SEQ ID NO: 1168582 - DNA, 15 bp, Homo sapiens
cactgccagattgtc

SEQ ID NO: 1168583 - DNA, 15 bp, Homo sapiens
acactgccagattgt

SEQ ID NO: 1168584 - DNA, 15 bp, Homo sapiens
aacactgccagattg

SEQ ID NO: 1168585 - DNA, 15 bp, Homo sapiens
taacactgccagatt

SEQ ID NO: 1168586 - DNA, 15 bp, Homo sapiens
ctaacactgccagat

SEQ ID NO: 1168587 - DNA, 15 bp, Homo sapiens
cctaacactgccaga

SEQ ID NO: 1168588 - DNA, 15 bp, Homo sapiens
gcctaacactgccag

SEQ ID NO: 1168589 - DNA, 15 bp, Homo sapiens
ggcctaacactgcca

SEQ ID NO: 1168590 - DNA, 15 bp, Homo sapiens
gggcctaacactgcc

SEQ ID NO: 1168591 - DNA, 15 bp, Homo sapiens
ggggcctaacactgc

SEQ ID NO: 1168592 - DNA, 15 bp, Homo sapiens
aggggcctaacactg

SEQ ID NO: 1168593 - DNA, 15 bp, Homo sapiens
taggggcctaacact

SEQ ID NO: 1168594 - DNA, 15 bp, Homo sapiens
ttaggggcctaacac

SEQ ID NO: 1168595 - DNA, 15 bp, Homo sapiens
cttaggggcctaaca

SEQ ID NO: 1168596 - DNA, 15 bp, Homo sapiens
ccttaggggcctaac

SEQ ID NO: 1168597 - DNA, 15 bp, Homo sapiens
gccttaggggcctaa

SEQ ID NO: 1168598 - DNA, 15 bp, Homo sapiens
ggccttaggggccta

SEQ ID NO: 1168599 - DNA, 15 bp, Homo sapiens
aggccttaggggcct

SEQ ID NO: 1168600 - DNA, 15 bp, Homo sapiens
aaggccttaggggcc

SEQ ID NO: 1168601 - DNA, 15 bp, Homo sapiens
taaggccttaggggc

SEQ ID NO: 1168602 - DNA, 15 bp, Homo sapiens
ataaggccttagggg

SEQ ID NO: 1168603 - DNA, 15 bp, Homo sapiens
gataaggccttaggg

SEQ ID NO: 1168604 - DNA, 15 bp, Homo sapiens
tgataaggccttagg

SEQ ID NO: 1168605 - DNA, 15 bp, Homo sapiens
gtgataaggccttag

SEQ ID NO: 1168606 - DNA, 15 bp, Homo sapiens
ggtgataaggcctta

SEQ ID NO: 1168607 - DNA, 15 bp, Homo sapiens
aggtgataaggcctt

SEQ ID NO: 1168608 - DNA, 15 bp, Homo sapiens
gaggtgataaggcct

SEQ ID NO: 1168609 - DNA, 15 bp, Homo sapiens
ggaggtgataaggcc

SEQ ID NO: 1168610 - DNA, 15 bp, Homo sapiens
aggaggtgataaggc

SEQ ID NO: 1168611 - DNA, 15 bp, Homo sapiens
gaggaggtgataagg

SEQ ID NO: 1168612 - DNA, 15 bp, Homo sapiens
ggaggaggtgataag

SEQ ID NO: 1168613 - DNA, 15 bp, Homo sapiens
aggaggaggtgataa

SEQ ID NO: 1168614 - DNA, 15 bp, Homo sapiens
aaggaggaggtgata

SEQ ID NO: 1168615 - DNA, 15 bp, Homo sapiens
gaaggaggaggtgat

SEQ ID NO: 1168616 - DNA, 15 bp, Homo sapiens
agaaggaggaggtga

SEQ ID NO: 1168617 - DNA, 15 bp, Homo sapiens
cagaaggaggaggtg

SEQ ID NO: 1168618 - DNA, 15 bp, Homo sapiens
acagaaggaggaggt

SEQ ID NO: 1168619 - DNA, 15 bp, Homo sapiens
cacagaaggaggagg

SEQ ID NO: 1168620 - DNA, 15 bp, Homo sapiens
ccacagaaggaggag

SEQ ID NO: 1168621 - DNA, 15 bp, Homo sapiens
cccacagaaggagga

SEQ ID NO: 1168622 - DNA, 15 bp, Homo sapiens
acccacagaaggagg

SEQ ID NO: 1168623 - DNA, 15 bp, Homo sapiens
gacccacagaaggag

SEQ ID NO: 1168624 - DNA, 15 bp, Homo sapiens
tgacccacagaagga

SEQ ID NO: 1168625 - DNA, 15 bp, Homo sapiens
ttgacccacagaagg

SEQ ID NO: 1168626 - DNA, 15 bp, Homo sapiens
tttgacccacagaag

SEQ ID NO: 1168627 - DNA, 15 bp, Homo sapiens
gtttgacccacagaa

SEQ ID NO: 1168628 - DNA, 15 bp, Homo sapiens
agtttgacccacaga

SEQ ID NO: 1168629 - DNA, 15 bp, Homo sapiens
aagtttgacccacag

SEQ ID NO: 1168630 - DNA, 15 bp, Homo sapiens
aaagtttgacccaca

SEQ ID NO: 1168631 - DNA, 15 bp, Homo sapiens
taaagtttgacccac

SEQ ID NO: 1168632 - DNA, 15 bp, Homo sapiens
gtaaagtttgaccca

SEQ ID NO: 1168633 - DNA, 15 bp, Homo sapiens
tgtaaagtttgaccc

SEQ ID NO: 1168634 - DNA, 15 bp, Homo sapiens
ctgtaaagtttgacc

SEQ ID NO: 1168635 - DNA, 15 bp, Homo sapiens
actgtaaagtttgac

SEQ ID NO: 1168636 - DNA, 15 bp, Homo sapiens
cactgtaaagtttga

SEQ ID NO: 1168637 - DNA, 15 bp, Homo sapiens
tcactgtaaagtttg

SEQ ID NO: 1168638 - DNA, 15 bp, Homo sapiens
ctcactgtaaagttt

SEQ ID NO: 1168639 - DNA, 15 bp, Homo sapiens
tctcactgtaaagtt

SEQ ID NO: 1168640 - DNA, 15 bp, Homo sapiens
ctctcactgtaaagt

SEQ ID NO: 1168641 - DNA, 15 bp, Homo sapiens
cctctcactgtaaag

SEQ ID NO: 1168642 - DNA, 15 bp, Homo sapiens
tcctctcactgtaaa

SEQ ID NO: 1168643 - DNA, 15 bp, Homo sapiens
ttcctctcactgtaa

SEQ ID NO: 1168644 - DNA, 15 bp, Homo sapiens
tttcctctcactgta

SEQ ID NO: 1168645 - DNA, 15 bp, Homo sapiens
ctttcctctcactgt

SEQ ID NO: 1168646 - DNA, 15 bp, Homo sapiens
tctttcctctcactg

SEQ ID NO: 1168647 - DNA, 15 bp, Homo sapiens
gtctttcctctcact

SEQ ID NO: 1168648 - DNA, 15 bp, Homo sapiens
tgtctttcctctcac

SEQ ID NO: 1168649 - DNA, 15 bp, Homo sapiens
atgtctttcctctca

SEQ ID NO: 1168650 - DNA, 15 bp, Homo sapiens
gatgtctttcctctc

SEQ ID NO: 1168651 - DNA, 15 bp, Homo sapiens
agatgtctttcctct

SEQ ID NO: 1168652 - DNA, 15 bp, Homo sapiens
aagatgtctttcctc

SEQ ID NO: 1168653 - DNA, 15 bp, Homo sapiens
aaagatgtctttcct

SEQ ID NO: 1168654 - DNA, 15 bp, Homo sapiens
aaaagatgtctttcc

SEQ ID NO: 1168655 - DNA, 15 bp, Homo sapiens
taaaagatgtctttc

SEQ ID NO: 1168656 - DNA, 15 bp, Homo sapiens
ttaaaagatgtcttt

SEQ ID NO: 1168657 - DNA, 15 bp, Homo sapiens
tttaaaagatgtctt

SEQ ID NO: 1168658 - DNA, 15 bp, Homo sapiens
ttttaaaagatgtct

SEQ ID NO: 1168659 - DNA, 15 bp, Homo sapiens
cttttaaaagatgtc

SEQ ID NO: 1168660 - DNA, 15 bp, Homo sapiens
tcttttaaaagatgt

SEQ ID NO: 1168661 - DNA, 15 bp, Homo sapiens
ttcttttaaaagatg

SEQ ID NO: 1168662 - DNA, 15 bp, Homo sapiens
cttcttttaaaagat

SEQ ID NO: 1168663 - DNA, 15 bp, Homo sapiens
tcttcttttaaaaga

SEQ ID NO: 1168664 - DNA, 15 bp, Homo sapiens
ttcttcttttaaaag

SEQ ID NO: 1168665 - DNA, 15 bp, Homo sapiens
attcttcttttaaaa

SEQ ID NO: 1168666 - DNA, 15 bp, Homo sapiens
tattcttcttttaaa

SEQ ID NO: 1168667 - DNA, 15 bp, Homo sapiens
ttattcttcttttaa

SEQ ID NO: 1168668 - DNA, 15 bp, Homo sapiens
attattcttctttta

SEQ ID NO: 1168669 - DNA, 15 bp, Homo sapiens
gattattcttctttt

SEQ ID NO: 1168670 - DNA, 15 bp, Homo sapiens
tgattattcttcttt

SEQ ID NO: 1168671 - DNA, 15 bp, Homo sapiens
atgattattcttctt

SEQ ID NO: 1168672 - DNA, 15 bp, Homo sapiens
catgattattcttct

SEQ ID NO: 1168673 - DNA, 15 bp, Homo sapiens
tcatgattattcttc

SEQ ID NO: 1168674 - DNA, 15 bp, Homo sapiens
gtcatgattattctt

SEQ ID NO: 1168675 - DNA, 15 bp, Homo sapiens
agtcatgattattct

SEQ ID NO: 1168676 - DNA, 15 bp, Homo sapiens
tagtcatgattattc

SEQ ID NO: 1168677 - DNA, 15 bp, Homo sapiens
ctagtcatgattatt

SEQ ID NO: 1168678 - DNA, 15 bp, Homo sapiens
actagtcatgattat

SEQ ID NO: 1168679 - DNA, 15 bp, Homo sapiens
aactagtcatgatta

SEQ ID NO: 1168680 - DNA, 15 bp, Homo sapiens
aaactagtcatgatt

SEQ ID NO: 1168681 - DNA, 15 bp, Homo sapiens
taaactagtcatgat

SEQ ID NO: 1168682 - DNA, 15 bp, Homo sapiens
ttaaactagtcatga

SEQ ID NO: 1168683 - DNA, 15 bp, Homo sapiens
attaaactagtcatg

SEQ ID NO: 1168684 - DNA, 15 bp, Homo sapiens
gattaaactagtcat

SEQ ID NO: 1168685 - DNA, 15 bp, Homo sapiens
tgattaaactagtca

SEQ ID NO: 1168686 - DNA, 15 bp, Homo sapiens
atgattaaactagtc

SEQ ID NO: 1168687 - DNA, 15 bp, Homo sapiens
catgattaaactagt

SEQ ID NO: 1168688 - DNA, 15 bp, Homo sapiens
tcatgattaaactag

SEQ ID NO: 1168689 - DNA, 15 bp, Homo sapiens
gtcatgattaaacta

SEQ ID NO: 1168690 - DNA, 15 bp, Homo sapiens
agtcatgattaaact

SEQ ID NO: 1168691 - DNA, 15 bp, Homo sapiens
tagtcatgattaaac

SEQ ID NO: 1168692 - DNA, 15 bp, Homo sapiens
ctagtcatgattaaa

SEQ ID NO: 1168693 - DNA, 15 bp, Homo sapiens
actagtcatgattaa

SEQ ID NO: 1168694 - DNA, 15 bp, Homo sapiens
gaactagtcatgatt

SEQ ID NO: 1168695 - DNA, 15 bp, Homo sapiens
tgaactagtcatgat

SEQ ID NO: 1168696 - DNA, 15 bp, Homo sapiens
atgaactagtcatga

SEQ ID NO: 1168697 - DNA, 15 bp, Homo sapiens
gatgaactagtcatg

SEQ ID NO: 1168698 - DNA, 15 bp, Homo sapiens
agatgaactagtcat

SEQ ID NO: 1168699 - DNA, 15 bp, Homo sapiens
aagatgaactagtca

SEQ ID NO: 1168700 - DNA, 15 bp, Homo sapiens
gaagatgaactagtc

SEQ ID NO: 1168701 - DNA, 15 bp, Homo sapiens
ggaagatgaactagt

SEQ ID NO: 1168702 - DNA, 15 bp, Homo sapiens
gggaagatgaactag

SEQ ID NO: 1168703 - DNA, 15 bp, Homo sapiens
agggaagatgaacta

SEQ ID NO: 1168704 - DNA, 15 bp, Homo sapiens
cagggaagatgaact

SEQ ID NO: 1168705 - DNA, 15 bp, Homo sapiens
gcagggaagatgaac

SEQ ID NO: 1168706 - DNA, 15 bp, Homo sapiens
tgcagggaagatgaa

SEQ ID NO: 1168707 - DNA, 15 bp, Homo sapiens
ttgcagggaagatga

SEQ ID NO: 1168708 - DNA, 15 bp, Homo sapiens
attgcagggaagatg

SEQ ID NO: 1168709 - DNA, 15 bp, Homo sapiens
tattgcagggaagat

SEQ ID NO: 1168710 - DNA, 15 bp, Homo sapiens
ctattgcagggaaga

SEQ ID NO: 1168711 - DNA, 15 bp, Homo sapiens
tctattgcagggaag

SEQ ID NO: 1168712 - DNA, 15 bp, Homo sapiens
atctattgcagggaa

SEQ ID NO: 1168713 - DNA, 15 bp, Homo sapiens
tatctattgcaggga

SEQ ID NO: 1168714 - DNA, 15 bp, Homo sapiens
gtatctattgcaggg

SEQ ID NO: 1168715 - DNA, 15 bp, Homo sapiens
ggtatctattgcagg

SEQ ID NO: 1168716 - DNA, 15 bp, Homo sapiens
gggtatctattgcag

SEQ ID NO: 1168717 - DNA, 15 bp, Homo sapiens
tgggtatctattgca

SEQ ID NO: 1168718 - DNA, 15 bp, Homo sapiens
atgggtatctattgc

SEQ ID NO: 1168719 - DNA, 15 bp, Homo sapiens
tatgggtatctattg

SEQ ID NO: 1168720 - DNA, 15 bp, Homo sapiens
atatgggtatctatt

SEQ ID NO: 1168721 - DNA, 15 bp, Homo sapiens
aatatgggtatctat

SEQ ID NO: 1168722 - DNA, 15 bp, Homo sapiens
aaatatgggtatcta

SEQ ID NO: 1168723 - DNA, 15 bp, Homo sapiens
taaatatgggtatct

SEQ ID NO: 1168724 - DNA, 15 bp, Homo sapiens
ttaaatatgggtatc

SEQ ID NO: 1168725 - DNA, 15 bp, Homo sapiens
gttaaatatgggtat

SEQ ID NO: 1168726 - DNA, 15 bp, Homo sapiens
tgttaaatatgggta

SEQ ID NO: 1168727 - DNA, 15 bp, Homo sapiens
atgttaaatatgggt

SEQ ID NO: 1168728 - DNA, 15 bp, Homo sapiens
tatgttaaatatggg

SEQ ID NO: 1168729 - DNA, 15 bp, Homo sapiens
gtatgttaaatatgg

SEQ ID NO: 1168730 - DNA, 15 bp, Homo sapiens
ggtatgttaaatatg

SEQ ID NO: 1168731 - DNA, 15 bp, Homo sapiens
aggtatgttaaatat

SEQ ID NO: 1168732 - DNA, 15 bp, Homo sapiens
taggtatgttaaata

SEQ ID NO: 1168733 - DNA, 15 bp, Homo sapiens
ataggtatgttaaat

SEQ ID NO: 1168734 - DNA, 15 bp, Homo sapiens
aataggtatgttaaa

SEQ ID NO: 1168735 - DNA, 15 bp, Homo sapiens
caataggtatgttaa

SEQ ID NO: 1168736 - DNA, 15 bp, Homo sapiens
acaataggtatgtta

SEQ ID NO: 1168737 - DNA, 15 bp, Homo sapiens
tacaataggtatgtt

SEQ ID NO: 1168738 - DNA, 15 bp, Homo sapiens
gtacaataggtatgt

SEQ ID NO: 1168739 - DNA, 15 bp, Homo sapiens
tgtacaataggtatg

SEQ ID NO: 1168740 - DNA, 15 bp, Homo sapiens
ttgtacaataggtat

SEQ ID NO: 1168741 - DNA, 15 bp, Homo sapiens
tttgtacaataggta

SEQ ID NO: 1168742 - DNA, 15 bp, Homo sapiens
ctttgtacaataggt

SEQ ID NO: 1168743 - DNA, 15 bp, Homo sapiens
tctttgtacaatagg

SEQ ID NO: 1168744 - DNA, 15 bp, Homo sapiens
ttctttgtacaatag

SEQ ID NO: 1168745 - DNA, 15 bp, Homo sapiens
attctttgtacaata

SEQ ID NO: 1168746 - DNA, 15 bp, Homo sapiens
tattctttgtacaat

SEQ ID NO: 1168747 - DNA, 15 bp, Homo sapiens
atattctttgtacaa

SEQ ID NO: 1168748 - DNA, 15 bp, Homo sapiens
catattctttgtaca

SEQ ID NO: 1168749 - DNA, 15 bp, Homo sapiens
tcatattctttgtac

SEQ ID NO: 1168750 - DNA, 15 bp, Homo sapiens
atcatattctttgta

SEQ ID NO: 1168751 - DNA, 15 bp, Homo sapiens
aatcatattctttgt

SEQ ID NO: 1168752 - DNA, 15 bp, Homo sapiens
caatcatattctttg

SEQ ID NO: 1168753 - DNA, 15 bp, Homo sapiens
gcaatcatattcttt

SEQ ID NO: 1168754 - DNA, 15 bp, Homo sapiens
tgcaatcatattctt

SEQ ID NO: 1168755 - DNA, 15 bp, Homo sapiens
gtgcaatcatattct

SEQ ID NO: 1168756 - DNA, 15 bp, Homo sapiens
tgtgcaatcatattc

SEQ ID NO: 1168757 - DNA, 15 bp, Homo sapiens
ctgtgcaatcatatt

SEQ ID NO: 1168758 - DNA, 15 bp, Homo sapiens
gctgtgcaatcatat

SEQ ID NO: 1168759 - DNA, 15 bp, Homo sapiens
agctgtgcaatcata

SEQ ID NO: 1168760 - DNA, 15 bp, Homo sapiens
tagctgtgcaatcat

SEQ ID NO: 1168761 - DNA, 15 bp, Homo sapiens
gtagctgtgcaatca

SEQ ID NO: 1168762 - DNA, 15 bp, Homo sapiens
tgtagctgtgcaatc

SEQ ID NO: 1168763 - DNA, 15 bp, Homo sapiens
ttgtagctgtgcaat

SEQ ID NO: 1168764 - DNA, 15 bp, Homo sapiens
gttgtagctgtgcaa

SEQ ID NO: 1168765 - DNA, 15 bp, Homo sapiens
agttgtagctgtgca

SEQ ID NO: 1168766 - DNA, 15 bp, Homo sapiens
aagttgtagctgtgc

SEQ ID NO: 1168767 - DNA, 15 bp, Homo sapiens
aaagttgtagctgtg

SEQ ID NO: 1168768 - DNA, 15 bp, Homo sapiens
caaagttgtagctgt

SEQ ID NO: 1168769 - DNA, 15 bp, Homo sapiens
ccaaagttgtagctg

SEQ ID NO: 1168770 - DNA, 15 bp, Homo sapiens
cccaaagttgtagct

SEQ ID NO: 1168771 - DNA, 15 bp, Homo sapiens
tcccaaagttgtagc

SEQ ID NO: 1168772 - DNA, 15 bp, Homo sapiens
gtcccaaagttgtag

SEQ ID NO: 1168773 - DNA, 15 bp, Homo sapiens
tgtcccaaagttgta

SEQ ID NO: 1168774 - DNA, 15 bp, Homo sapiens
ttgtcccaaagttgt

SEQ ID NO: 1168775 - DNA, 15 bp, Homo sapiens
tttgtcccaaagttg

SEQ ID NO: 1168776 - DNA, 15 bp, Homo sapiens
gtttgtcccaaagtt

SEQ ID NO: 1168777 - DNA, 15 bp, Homo sapiens
agtttgtcccaaagt

SEQ ID NO: 1168778 - DNA, 15 bp, Homo sapiens
gagtttgtcccaaag

SEQ ID NO: 1168779 - DNA, 15 bp, Homo sapiens
ggagtttgtcccaaa

SEQ ID NO: 1168780 - DNA, 15 bp, Homo sapiens
aggagtttgtcccaa

SEQ ID NO: 1168781 - DNA, 15 bp, Homo sapiens
aaggagtttgtccca

SEQ ID NO: 1168782 - DNA, 15 bp, Homo sapiens
aaaggagtttgtccc

SEQ ID NO: 1168783 - DNA, 15 bp, Homo sapiens
aaaaggagtttgtcc

SEQ ID NO: 1168784 - DNA, 15 bp, Homo sapiens
gaaaaggagtttgtc

SEQ ID NO: 1168785 - DNA, 15 bp, Homo sapiens
agaaaaggagtttgt

SEQ ID NO: 1168786 - DNA, 15 bp, Homo sapiens
cagaaaaggagtttg

SEQ ID NO: 1168787 - DNA, 15 bp, Homo sapiens
gcagaaaaggagttt

SEQ ID NO: 1168788 - DNA, 15 bp, Homo sapiens
ggcagaaaaggagtt

SEQ ID NO: 1168789 - DNA, 15 bp, Homo sapiens
cggcagaaaaggagt

SEQ ID NO: 1168790 - DNA, 15 bp, Homo sapiens
gcggcagaaaaggag

SEQ ID NO: 1168791 - DNA, 15 bp, Homo sapiens
agcggcagaaaagga

SEQ ID NO: 1168792 - DNA, 15 bp, Homo sapiens
aagcggcagaaaagg

SEQ ID NO: 1168793 - DNA, 15 bp, Homo sapiens
aaagcggcagaaaag

SEQ ID NO: 1168794 - DNA, 15 bp, Homo sapiens
gaaagcggcagaaaa

SEQ ID NO: 1168795 - DNA, 15 bp, Homo sapiens
tgaaagcggcagaaa

SEQ ID NO: 1168796 - DNA, 15 bp, Homo sapiens
ttgaaagcggcagaa

SEQ ID NO: 1168797 - DNA, 15 bp, Homo sapiens
attgaaagcggcaga

SEQ ID NO: 1168798 - DNA, 15 bp, Homo sapiens
cattgaaagcggcag

SEQ ID NO: 1168799 - DNA, 15 bp, Homo sapiens
tcattgaaagcggca

SEQ ID NO: 1168800 - DNA, 15 bp, Homo sapiens
atcattgaaagcggc

SEQ ID NO: 1168801 - DNA, 15 bp, Homo sapiens
gatcattgaaagcgg

SEQ ID NO: 1168802 - DNA, 15 bp, Homo sapiens
cgatcattgaaagcg

SEQ ID NO: 1168803 - DNA, 15 bp, Homo sapiens
acgatcattgaaagc

SEQ ID NO: 1168804 - DNA, 15 bp, Homo sapiens
gacgatcattgaaag

SEQ ID NO: 1168805 - DNA, 15 bp, Homo sapiens
agacgatcattgaaa

SEQ ID NO: 1168806 - DNA, 15 bp, Homo sapiens
aagacgatcattgaa

SEQ ID NO: 1168807 - DNA, 15 bp, Homo sapiens
gaagacgatcattga

SEQ ID NO: 1168808 - DNA, 15 bp, Homo sapiens
ggaagacgatcattg

SEQ ID NO: 1168809 - DNA, 15 bp, Homo sapiens
tggaagacgatcatt

SEQ ID NO: 1168810 - DNA, 15 bp, Homo sapiens
ttggaagacgatcat

SEQ ID NO: 1168811 - DNA, 15 bp, Homo sapiens
tttggaagacgatca

SEQ ID NO: 1168812 - DNA, 15 bp, Homo sapiens
ttttggaagacgatc

SEQ ID NO: 1168813 - DNA, 15 bp, Homo sapiens
attttggaagacgat

SEQ ID NO: 1168814 - DNA, 15 bp, Homo sapiens
gattttggaagacga

SEQ ID NO: 1168815 - DNA, 15 bp, Homo sapiens
tgattttggaagacg

SEQ ID NO: 1168816 - DNA, 15 bp, Homo sapiens
ctgattttggaagac

SEQ ID NO: 1168817 - DNA, 15 bp, Homo sapiens
tctgattttggaaga

SEQ ID NO: 1168818 - DNA, 15 bp, Homo sapiens
ttctgattttggaag

SEQ ID NO: 1168819 - DNA, 15 bp, Homo sapiens
gttctgattttggaa

SEQ ID NO: 1168820 - DNA, 15 bp, Homo sapiens
tgttctgattttgga

SEQ ID NO: 1168821 - DNA, 15 bp, Homo sapiens
ctgttctgattttgg

SEQ ID NO: 1168822 - DNA, 15 bp, Homo sapiens
gctgttctgattttg

SEQ ID NO: 1168823 - DNA, 15 bp, Homo sapiens
agctgttctgatttt

SEQ ID NO: 1168824 - DNA, 15 bp, Homo sapiens
aagctgttctgattt

SEQ ID NO: 1168825 - DNA, 15 bp, Homo sapiens
aaagctgttctgatt

SEQ ID NO: 1168826 - DNA, 15 bp, Homo sapiens
aaaagctgttctgat

SEQ ID NO: 1168827 - DNA, 15 bp, Homo sapiens
caaaagctgttctga

SEQ ID NO: 1168828 - DNA, 15 bp, Homo sapiens
tcaaaagctgttctg

SEQ ID NO: 1168829 - DNA, 15 bp, Homo sapiens
ttcaaaagctgttct

SEQ ID NO: 1168830 - DNA, 15 bp, Homo sapiens
attcaaaagctgttc

SEQ ID NO: 1168831 - DNA, 15 bp, Homo sapiens
aattcaaaagctgtt

SEQ ID NO: 1168832 - DNA, 15 bp, Homo sapiens
aaattcaaaagctgt

SEQ ID NO: 1168833 - DNA, 15 bp, Homo sapiens
aaaattcaaaagctg

SEQ ID NO: 1168834 - DNA, 15 bp, Homo sapiens
taaaattcaaaagct

SEQ ID NO: 1168835 - DNA, 15 bp, Homo sapiens
ataaaattcaaaagc

SEQ ID NO: 1168836 - DNA, 15 bp, Homo sapiens
aataaaattcaaaag

SEQ ID NO: 1168837 - DNA, 15 bp, Homo sapiens
aaataaaattcaaaa

SEQ ID NO: 1168838 - DNA, 15 bp, Homo sapiens
aaaataaaattcaaa

SEQ ID NO: 1168839 - DNA, 15 bp, Homo sapiens
caaaataaaattcaa

SEQ ID NO: 1168840 - DNA, 15 bp, Homo sapiens
acaaaataaaattca

SEQ ID NO: 1168841 - DNA, 15 bp, Homo sapiens
cacaaaataaaattc

SEQ ID NO: 1168842 - DNA, 15 bp, Homo sapiens
tcacaaaataaaatt

SEQ ID NO: 1168843 - DNA, 15 bp, Homo sapiens
ttcacaaaataaaat

SEQ ID NO: 1168844 - DNA, 15 bp, Homo sapiens
tttcacaaaataaaa

SEQ ID NO: 1168845 - DNA, 15 bp, Homo sapiens
ttttcacaaaataaa

SEQ ID NO: 1168846 - DNA, 15 bp, Homo sapiens
tttttcacaaaataa

SEQ ID NO: 1168847 - DNA, 15 bp, Homo sapiens
atttttcacaaaata

SEQ ID NO: 1168848 - DNA, 15 bp, Homo sapiens
catttttcacaaaat

SEQ ID NO: 1168849 - DNA, 15 bp, Homo sapiens
acatttttcacaaaa

SEQ ID NO: 1168850 - DNA, 15 bp, Homo sapiens
gacatttttcacaaa

SEQ ID NO: 1168851 - DNA, 15 bp, Homo sapiens
cgacatttttcacaa

SEQ ID NO: 1168852 - DNA, 15 bp, Homo sapiens
acgacatttttcaca

SEQ ID NO: 1168853 - DNA, 15 bp, Homo sapiens
aacgacatttttcac

SEQ ID NO: 1168854 - DNA, 15 bp, Homo sapiens
aaacgacatttttca

SEQ ID NO: 1168855 - DNA, 15 bp, Homo sapiens
caaacgacatttttc

SEQ ID NO: 1168856 - DNA, 15 bp, Homo sapiens
tcaaacgacattttt

SEQ ID NO: 1168857 - DNA, 15 bp, Homo sapiens
ctcaaacgacatttt

SEQ ID NO: 1168858 - DNA, 15 bp, Homo sapiens
actcaaacgacattt

SEQ ID NO: 1168859 - DNA, 15 bp, Homo sapiens
cactcaaacgacatt

SEQ ID NO: 1168860 - DNA, 15 bp, Homo sapiens
tcactcaaacgacat

SEQ ID NO: 1168861 - DNA, 15 bp, Homo sapiens
gtcactcaaacgaca

SEQ ID NO: 1168862 - DNA, 15 bp, Homo sapiens
tgtcactcaaacgac

SEQ ID NO: 1168863 - DNA, 15 bp, Homo sapiens
gtgtcactcaaacga

SEQ ID NO: 1168864 - DNA, 15 bp, Homo sapiens
tgtgtcactcaaacg

SEQ ID NO: 1168865 - DNA, 15 bp, Homo sapiens
ctgtgtcactcaaac

SEQ ID NO: 1168866 - DNA, 15 bp, Homo sapiens
actgtgtcactcaaa

SEQ ID NO: 1168867 - DNA, 15 bp, Homo sapiens
tactgtgtcactcaa

SEQ ID NO: 1168868 - DNA, 15 bp, Homo sapiens
ttactgtgtcactca

SEQ ID NO: 1168869 - DNA, 15 bp, Homo sapiens
tttactgtgtcactc

SEQ ID NO: 1168870 - DNA, 15 bp, Homo sapiens
gtttactgtgtcact

SEQ ID NO: 1168871 - DNA, 15 bp, Homo sapiens
agtttactgtgtcac

SEQ ID NO: 1168872 - DNA, 15 bp, Homo sapiens
gagtttactgtgtca

SEQ ID NO: 1168873 - DNA, 15 bp, Homo sapiens
agagtttactgtgtc

SEQ ID NO: 1168874 - DNA, 15 bp, Homo sapiens
cagagtttactgtgt

SEQ ID NO: 1168875 - DNA, 15 bp, Homo sapiens
acagagtttactgtg

SEQ ID NO: 1168876 - DNA, 15 bp, Homo sapiens
cacagagtttactgt

SEQ ID NO: 1168877 - DNA, 15 bp, Homo sapiens
ccacagagtttactg

SEQ ID NO: 1168878 - DNA, 15 bp, Homo sapiens
tccacagagtttact

SEQ ID NO: 1168879 - DNA, 15 bp, Homo sapiens
ctccacagagtttac

SEQ ID NO: 1168880 - DNA, 15 bp, Homo sapiens
gctccacagagttta

SEQ ID NO: 1168881 - DNA, 15 bp, Homo sapiens
agctccacagagttt

SEQ ID NO: 1168882 - DNA, 15 bp, Homo sapiens
gagctccacagagtt

SEQ ID NO: 1168883 - DNA, 15 bp, Homo sapiens
agagctccacagagt

SEQ ID NO: 1168884 - DNA, 15 bp, Homo sapiens
cagagctccacagag

SEQ ID NO: 1168885 - DNA, 15 bp, Homo sapiens
acagagctccacaga

SEQ ID NO: 1168886 - DNA, 15 bp, Homo sapiens
cacagagctccacag

SEQ ID NO: 1168887 - DNA, 15 bp, Homo sapiens
ccacagagctccaca

SEQ ID NO: 1168888 - DNA, 15 bp, Homo sapiens
tccacagagctccac

SEQ ID NO: 1168889 - DNA, 15 bp, Homo sapiens
atccacagagctcca

SEQ ID NO: 1168890 - DNA, 15 bp, Homo sapiens
tatccacagagctcc

SEQ ID NO: 1168891 - DNA, 15 bp, Homo sapiens
gtatccacagagctc

SEQ ID NO: 1168892 - DNA, 15 bp, Homo sapiens
tgtatccacagagct

SEQ ID NO: 1168893 - DNA, 15 bp, Homo sapiens
ctgtatccacagagc

SEQ ID NO: 1168894 - DNA, 15 bp, Homo sapiens
actgtatccacagag

SEQ ID NO: 1168895 - DNA, 15 bp, Homo sapiens
aactgtatccacaga

SEQ ID NO: 1168896 - DNA, 15 bp, Homo sapiens
caactgtatccacag

SEQ ID NO: 1168897 - DNA, 15 bp, Homo sapiens
tcaactgtatccaca

SEQ ID NO: 1168898 - DNA, 15 bp, Homo sapiens
ttcaactgtatccac

SEQ ID NO: 1168899 - DNA, 15 bp, Homo sapiens
attcaactgtatcca

SEQ ID NO: 1168900 - DNA, 15 bp, Homo sapiens
cattcaactgtatcc

SEQ ID NO: 1168901 - DNA, 15 bp, Homo sapiens
tcattcaactgtatc

SEQ ID NO: 1168902 - DNA, 15 bp, Homo sapiens
atcattcaactgtat

SEQ ID NO: 1168903 - DNA, 15 bp, Homo sapiens
catcattcaactgta

SEQ ID NO: 1168904 - DNA, 15 bp, Homo sapiens
ccatcattcaactgt

SEQ ID NO: 1168905 - DNA, 15 bp, Homo sapiens
gccatcattcaactg

SEQ ID NO: 1168906 - DNA, 15 bp, Homo sapiens
agccatcattcaact

SEQ ID NO: 1168907 - DNA, 15 bp, Homo sapiens
gagccatcattcaac

SEQ ID NO: 1168908 - DNA, 15 bp, Homo sapiens
ggagccatcattcaa

SEQ ID NO: 1168909 - DNA, 15 bp, Homo sapiens
gggagccatcattca

SEQ ID NO: 1168910 - DNA, 15 bp, Homo sapiens
tgggagccatcattc

SEQ ID NO: 1168911 - DNA, 15 bp, Homo sapiens
ctgggagccatcatt

SEQ ID NO: 1168912 - DNA, 15 bp, Homo sapiens
actgggagccatcat

SEQ ID NO: 1168913 - DNA, 15 bp, Homo sapiens
aactgggagccatca

SEQ ID NO: 1168914 - DNA, 15 bp, Homo sapiens
aaactgggagccatc

SEQ ID NO: 1168915 - DNA, 15 bp, Homo sapiens
taaactgggagccat

SEQ ID NO: 1168916 - DNA, 15 bp, Homo sapiens
ataaactgggagcca

SEQ ID NO: 1168917 - DNA, 15 bp, Homo sapiens
gataaactgggagcc

SEQ ID NO: 1168918 - DNA, 15 bp, Homo sapiens
tgataaactgggagc

SEQ ID NO: 1168919 - DNA, 15 bp, Homo sapiens
atgataaactgggag

SEQ ID NO: 1168920 - DNA, 15 bp, Homo sapiens
catgataaactggga

SEQ ID NO: 1168921 - DNA, 15 bp, Homo sapiens
gcatgataaactggg

SEQ ID NO: 1168922 - DNA, 15 bp, Homo sapiens
tgcatgataaactgg

SEQ ID NO: 1168923 - DNA, 15 bp, Homo sapiens
ctgcatgataaactg

SEQ ID NO: 1168924 - DNA, 15 bp, Homo sapiens
cctgcatgataaact

SEQ ID NO: 1168925 - DNA, 15 bp, Homo sapiens
acctgcatgataaac

SEQ ID NO: 1168926 - DNA, 15 bp, Homo sapiens
cacctgcatgataaa

SEQ ID NO: 1168927 - DNA, 15 bp, Homo sapiens
ccacctgcatgataa

SEQ ID NO: 1168928 - DNA, 15 bp, Homo sapiens
cccacctgcatgata

SEQ ID NO: 1168929 - DNA, 15 bp, Homo sapiens
tcccacctgcatgat

SEQ ID NO: 1168930 - DNA, 15 bp, Homo sapiens
atcccacctgcatga

SEQ ID NO: 1168931 - DNA, 15 bp, Homo sapiens
aatcccacctgcatg

SEQ ID NO: 1168932 - DNA, 15 bp, Homo sapiens
taatcccacctgcat

SEQ ID NO: 1168933 - DNA, 15 bp, Homo sapiens
ataatcccacctgca

SEQ ID NO: 1168934 - DNA, 15 bp, Homo sapiens
tataatcccacctgc

SEQ ID NO: 1168935 - DNA, 15 bp, Homo sapiens
atataatcccacctg

SEQ ID NO: 1168936 - DNA, 15 bp, Homo sapiens
aatataatcccacct

SEQ ID NO: 1168937 - DNA, 15 bp, Homo sapiens
gaatataatcccacc

SEQ ID NO: 1168938 - DNA, 15 bp, Homo sapiens
ggaatataatcccac

SEQ ID NO: 1168939 - DNA, 15 bp, Homo sapiens
tggaatataatccca

SEQ ID NO: 1168940 - DNA, 15 bp, Homo sapiens
ttggaatataatccc

SEQ ID NO: 1168941 - DNA, 15 bp, Homo sapiens
gttggaatataatcc

SEQ ID NO: 1168942 - DNA, 15 bp, Homo sapiens
tgttggaatataatc

SEQ ID NO: 1168943 - DNA, 15 bp, Homo sapiens
ctgttggaatataat

SEQ ID NO: 1168944 - DNA, 15 bp, Homo sapiens
actgttggaatataa

SEQ ID NO: 1168945 - DNA, 15 bp, Homo sapiens
aactgttggaatata

SEQ ID NO: 1168946 - DNA, 15 bp, Homo sapiens
taactgttggaatat

SEQ ID NO: 1168947 - DNA, 15 bp, Homo sapiens
ataactgttggaata

SEQ ID NO: 1168948 - DNA, 15 bp, Homo sapiens
cataactgttggaat

SEQ ID NO: 1168949 - DNA, 15 bp, Homo sapiens
acataactgttggaa

SEQ ID NO: 1168950 - DNA, 15 bp, Homo sapiens
aacataactgttgga

SEQ ID NO: 1168951 - DNA, 15 bp, Homo sapiens
aaacataactgttgg

SEQ ID NO: 1168952 - DNA, 15 bp, Homo sapiens
gaaacataactgttg

SEQ ID NO: 1168953 - DNA, 15 bp, Homo sapiens
tgaaacataactgtt

SEQ ID NO: 1168954 - DNA, 15 bp, Homo sapiens
gtgaaacataactgt

SEQ ID NO: 1168955 - DNA, 15 bp, Homo sapiens
tgtgaaacataactg

SEQ ID NO: 1168956 - DNA, 15 bp, Homo sapiens
ctgtgaaacataact

SEQ ID NO: 1168957 - DNA, 15 bp, Homo sapiens
tctgtgaaacataac

SEQ ID NO: 1168958 - DNA, 15 bp, Homo sapiens
ttctgtgaaacataa

SEQ ID NO: 1168959 - DNA, 15 bp, Homo sapiens
tttctgtgaaacata

SEQ ID NO: 1168960 - DNA, 15 bp, Homo sapiens
ctttctgtgaaacat

SEQ ID NO: 1168961 - DNA, 15 bp, Homo sapiens
cctttctgtgaaaca

SEQ ID NO: 1168962 - DNA, 15 bp, Homo sapiens
gcctttctgtgaaac

SEQ ID NO: 1168963 - DNA, 15 bp, Homo sapiens
tgcctttctgtgaaa

SEQ ID NO: 1168964 - DNA, 15 bp, Homo sapiens
ttgcctttctgtgaa

SEQ ID NO: 1168965 - DNA, 15 bp, Homo sapiens
tttgcctttctgtga

SEQ ID NO: 1168966 - DNA, 15 bp, Homo sapiens
ttttgcctttctgtg

SEQ ID NO: 1168967 - DNA, 15 bp, Homo sapiens
attttgcctttctgt

SEQ ID NO: 1168968 - DNA, 15 bp, Homo sapiens
tattttgcctttctg

SEQ ID NO: 1168969 - DNA, 15 bp, Homo sapiens
ttattttgcctttct

SEQ ID NO: 1168970 - DNA, 15 bp, Homo sapiens
gttattttgcctttc

SEQ ID NO: 1168971 - DNA, 15 bp, Homo sapiens
ggttattttgccttt

SEQ ID NO: 1168972 - DNA, 15 bp, Homo sapiens
tggttattttgcctt

SEQ ID NO: 1168973 - DNA, 15 bp, Homo sapiens
ctggttattttgcct

SEQ ID NO: 1168974 - DNA, 15 bp, Homo sapiens
cctggttattttgcc

SEQ ID NO: 1168975 - DNA, 15 bp, Homo sapiens
acctggttattttgc

SEQ ID NO: 1168976 - DNA, 15 bp, Homo sapiens
tacctggttattttg

SEQ ID NO: 1168977 - DNA, 15 bp, Homo sapiens
gtacctggttatttt

SEQ ID NO: 1168978 - DNA, 15 bp, Homo sapiens
cgtacctggttattt

SEQ ID NO: 1168979 - DNA, 15 bp, Homo sapiens
ccgtacctggttatt

SEQ ID NO: 1168980 - DNA, 15 bp, Homo sapiens
tccgtacctggttat

SEQ ID NO: 1168981 - DNA, 15 bp, Homo sapiens
ttccgtacctggtta

SEQ ID NO: 1168982 - DNA, 15 bp, Homo sapiens
tttccgtacctggtt

SEQ ID NO: 1168983 - DNA, 15 bp, Homo sapiens
ttttccgtacctggt

SEQ ID NO: 1168984 - DNA, 15 bp, Homo sapiens
tttttccgtacctgg

SEQ ID NO: 1168985 - DNA, 15 bp, Homo sapiens
ttttttccgtacctg

SEQ ID NO: 1168986 - DNA, 15 bp, Homo sapiens
attttttccgtacct

SEQ ID NO: 1168987 - DNA, 15 bp, Homo sapiens
cattttttccgtacc

SEQ ID NO: 1168988 - DNA, 15 bp, Homo sapiens
tcattttttccgtac

SEQ ID NO: 1168989 - DNA, 15 bp, Homo sapiens
ttcattttttccgta

SEQ ID NO: 1168990 - DNA, 15 bp, Homo sapiens
tttcattttttccgt

SEQ ID NO: 1168991 - DNA, 15 bp, Homo sapiens
ttttcattttttccg

SEQ ID NO: 1168992 - DNA, 15 bp, Homo sapiens
tttttcattttttcc

SEQ ID NO: 1168993 - DNA, 15 bp, Homo sapiens
atttttcattttttc

SEQ ID NO: 1168994 - DNA, 15 bp, Homo sapiens
aatttttcatttttt

SEQ ID NO: 1168995 - DNA, 15 bp, Homo sapiens
aaatttttcattttt

SEQ ID NO: 1168996 - DNA, 15 bp, Homo sapiens
caaatttttcatttt

SEQ ID NO: 1168997 - DNA, 15 bp, Homo sapiens
gcaaatttttcattt

SEQ ID NO: 1168998 - DNA, 15 bp, Homo sapiens
tgcaaatttttcatt

SEQ ID NO: 1168999 - DNA, 15 bp, Homo sapiens
ctgcaaatttttcat

SEQ ID NO: 1169000 - DNA, 15 bp, Homo sapiens
gctgcaaatttttca

SEQ ID NO: 1169001 - DNA, 15 bp, Homo sapiens
agctgcaaatttttc

SEQ ID NO: 1169002 - DNA, 15 bp, Homo sapiens
aagctgcaaattttt

SEQ ID NO: 1169003 - DNA, 15 bp, Homo sapiens
taagctgcaaatttt

SEQ ID NO: 1169004 - DNA, 15 bp, Homo sapiens
gtaagctgcaaattt

SEQ ID NO: 1169005 - DNA, 15 bp, Homo sapiens
tgtaagctgcaaatt

SEQ ID NO: 1169006 - DNA, 15 bp, Homo sapiens
atgtaagctgcaaat

SEQ ID NO: 1169007 - DNA, 15 bp, Homo sapiens
gatgtaagctgcaaa

SEQ ID NO: 1169008 - DNA, 15 bp, Homo sapiens
tgatgtaagctgcaa

SEQ ID NO: 1169009 - DNA, 15 bp, Homo sapiens
ttgatgtaagctgca

SEQ ID NO: 1169010 - DNA, 15 bp, Homo sapiens
tttgatgtaagctgc

SEQ ID NO: 1169011 - DNA, 15 bp, Homo sapiens
gtttgatgtaagctg

SEQ ID NO: 1169012 - DNA, 15 bp, Homo sapiens
tgtttgatgtaagct

SEQ ID NO: 1169013 - DNA, 15 bp, Homo sapiens
ctgtttgatgtaagc

SEQ ID NO: 1169014 - DNA, 15 bp, Homo sapiens
tctgtttgatgtaag

SEQ ID NO: 1169015 - DNA, 15 bp, Homo sapiens
ttctgtttgatgtaa

SEQ ID NO: 1169016 - DNA, 15 bp, Homo sapiens
tttctgtttgatgta

SEQ ID NO: 1169017 - DNA, 15 bp, Homo sapiens
atttctgtttgatgt

SEQ ID NO: 1169018 - DNA, 15 bp, Homo sapiens
aatttctgtttgatg

SEQ ID NO: 1169019 - DNA, 15 bp, Homo sapiens
caatttctgtttgat

SEQ ID NO: 1169020 - DNA, 15 bp, Homo sapiens
gcaatttctgtttga

SEQ ID NO: 1169021 - DNA, 15 bp, Homo sapiens
tgcaatttctgtttg

SEQ ID NO: 1169022 - DNA, 15 bp, Homo sapiens
ctgcaatttctgttt

SEQ ID NO: 1169023 - DNA, 15 bp, Homo sapiens
actgcaatttctgtt

SEQ ID NO: 1169024 - DNA, 15 bp, Homo sapiens
cactgcaatttctgt

SEQ ID NO: 1169025 - DNA, 15 bp, Homo sapiens
acactgcaatttctg

SEQ ID NO: 1169026 - DNA, 15 bp, Homo sapiens
gacactgcaatttct

SEQ ID NO: 1169027 - DNA, 15 bp, Homo sapiens
agacactgcaatttc

SEQ ID NO: 1169028 - DNA, 15 bp, Homo sapiens
aagacactgcaattt

SEQ ID NO: 1169029 - DNA, 15 bp, Homo sapiens
aaagacactgcaatt

SEQ ID NO: 1169030 - DNA, 15 bp, Homo sapiens
gaaagacactgcaat

SEQ ID NO: 1169031 - DNA, 15 bp, Homo sapiens
tgaaagacactgcaa

SEQ ID NO: 1169032 - DNA, 15 bp, Homo sapiens
atgaaagacactgca

SEQ ID NO: 1169033 - DNA, 15 bp, Homo sapiens
gatgaaagacactgc

SEQ ID NO: 1169034 - DNA, 15 bp, Homo sapiens
agatgaaagacactg

SEQ ID NO: 1169035 - DNA, 15 bp, Homo sapiens
gagatgaaagacact

SEQ ID NO: 1169036 - DNA, 15 bp, Homo sapiens
agagatgaaagacac

SEQ ID NO: 1169037 - DNA, 15 bp, Homo sapiens
aagagatgaaagaca

SEQ ID NO: 1169038 - DNA, 15 bp, Homo sapiens
aaagagatgaaagac

SEQ ID NO: 1169039 - DNA, 15 bp, Homo sapiens
taaagagatgaaaga

SEQ ID NO: 1169040 - DNA, 15 bp, Homo sapiens
ttaaagagatgaaag

SEQ ID NO: 1169041 - DNA, 15 bp, Homo sapiens
tttaaagagatgaaa

SEQ ID NO: 1169042 - DNA, 15 bp, Homo sapiens
ctttaaagagatgaa

SEQ ID NO: 1169043 - DNA, 15 bp, Homo sapiens
actttaaagagatga

SEQ ID NO: 1169044 - DNA, 15 bp, Homo sapiens
aactttaaagagatg

SEQ ID NO: 1169045 - DNA, 15 bp, Homo sapiens
aaactttaaagagat

SEQ ID NO: 1169046 - DNA, 15 bp, Homo sapiens
aaaactttaaagaga

SEQ ID NO: 1169047 - DNA, 15 bp, Homo sapiens
gaaaactttaaagag

SEQ ID NO: 1169048 - DNA, 15 bp, Homo sapiens
agaaaactttaaaga

SEQ ID NO: 1169049 - DNA, 15 bp, Homo sapiens
tagaaaactttaaag

SEQ ID NO: 1169050 - DNA, 15 bp, Homo sapiens
ttagaaaactttaaa

SEQ ID NO: 1169051 - DNA, 15 bp, Homo sapiens
attagaaaactttaa

SEQ ID NO: 1169052 - DNA, 15 bp, Homo sapiens
gattagaaaacttta

SEQ ID NO: 1169053 - DNA, 15 bp, Homo sapiens
tgattagaaaacttt

SEQ ID NO: 1169054 - DNA, 15 bp, Homo sapiens
ttgattagaaaactt

SEQ ID NO: 1169055 - DNA, 15 bp, Homo sapiens
tttgattagaaaact

SEQ ID NO: 1169056 - DNA, 15 bp, Homo sapiens
ttttgattagaaaac

SEQ ID NO: 1169057 - DNA, 15 bp, Homo sapiens
attttgattagaaaa

SEQ ID NO: 1169058 - DNA, 15 bp, Homo sapiens
aattttgattagaaa

SEQ ID NO: 1169059 - DNA, 15 bp, Homo sapiens
gaattttgattagaa

SEQ ID NO: 1169060 - DNA, 15 bp, Homo sapiens
agaattttgattaga

SEQ ID NO: 1169061 - DNA, 15 bp, Homo sapiens
tagaattttgattag

SEQ ID NO: 1169062 - DNA, 15 bp, Homo sapiens
ctagaattttgatta

SEQ ID NO: 1169063 - DNA, 15 bp, Homo sapiens
actagaattttgatt

SEQ ID NO: 1169064 - DNA, 15 bp, Homo sapiens
aactagaattttgat

SEQ ID NO: 1169065 - DNA, 15 bp, Homo sapiens
aaactagaattttga

SEQ ID NO: 1169066 - DNA, 15 bp, Homo sapiens
aaaactagaattttg

SEQ ID NO: 1169067 - DNA, 15 bp, Homo sapiens
gaaaactagaatttt

SEQ ID NO: 1169068 - DNA, 15 bp, Homo sapiens
tgaaaactagaattt

SEQ ID NO: 1169069 - DNA, 15 bp, Homo sapiens
atgaaaactagaatt

SEQ ID NO: 1169070 - DNA, 15 bp, Homo sapiens
gatgaaaactagaat

SEQ ID NO: 1169071 - DNA, 15 bp, Homo sapiens
tgatgaaaactagaa

SEQ ID NO: 1169072 - DNA, 15 bp, Homo sapiens
ttgatgaaaactaga

SEQ ID NO: 1169073 - DNA, 15 bp, Homo sapiens
attgatgaaaactag

SEQ ID NO: 1169074 - DNA, 15 bp, Homo sapiens
aattgatgaaaacta

SEQ ID NO: 1169075 - DNA, 15 bp, Homo sapiens
taattgatgaaaact

SEQ ID NO: 1169076 - DNA, 15 bp, Homo sapiens
ttaattgatgaaaac

SEQ ID NO: 1169077 - DNA, 15 bp, Homo sapiens
tttaattgatgaaaa

SEQ ID NO: 1169078 - DNA, 15 bp, Homo sapiens
ttttaattgatgaaa

SEQ ID NO: 1169079 - DNA, 15 bp, Homo sapiens
gttttaattgatgaa

SEQ ID NO: 1169080 - DNA, 15 bp, Homo sapiens
agttttaattgatga

SEQ ID NO: 1169081 - DNA, 15 bp, Homo sapiens
aagttttaattgatg

SEQ ID NO: 1169082 - DNA, 15 bp, Homo sapiens
aaagttttaattgat

SEQ ID NO: 1169083 - DNA, 15 bp, Homo sapiens
taaagttttaattga

SEQ ID NO: 1169084 - DNA, 15 bp, Homo sapiens
ataaagttttaattg

SEQ ID NO: 1169085 - DNA, 15 bp, Homo sapiens
aataaagttttaatt

SEQ ID NO: 1169086 - DNA, 15 bp, Homo sapiens
aaataaagttttaat

SEQ ID NO: 1169087 - DNA, 15 bp, Homo sapiens
taaataaagttttaa

SEQ ID NO: 1169088 - DNA, 15 bp, Homo sapiens
ctaaataaagtttta

SEQ ID NO: 1169089 - DNA, 15 bp, Homo sapiens
cctaaataaagtttt

SEQ ID NO: 1169090 - DNA, 15 bp, Homo sapiens
acctaaataaagttt

SEQ ID NO: 1169091 - DNA, 15 bp, Homo sapiens
tacctaaataaagtt

SEQ ID NO: 1169092 - DNA, 15 bp, Homo sapiens
ctacctaaataaagt

SEQ ID NO: 1169093 - DNA, 15 bp, Homo sapiens
tctacctaaataaag

SEQ ID NO: 1169094 - DNA, 15 bp, Homo sapiens
atctacctaaataaa

SEQ ID NO: 1169095 - DNA, 15 bp, Homo sapiens
tatctacctaaataa

SEQ ID NO: 1169096 - DNA, 15 bp, Homo sapiens
gtatctacctaaata

SEQ ID NO: 1169097 - DNA, 15 bp, Homo sapiens
tgtatctacctaaat

SEQ ID NO: 1169098 - DNA, 15 bp, Homo sapiens
atgtatctacctaaa

SEQ ID NO: 1169099 - DNA, 15 bp, Homo sapiens
aatgtatctacctaa

SEQ ID NO: 1169100 - DNA, 15 bp, Homo sapiens
aaatgtatctaccta

SEQ ID NO: 1169101 - DNA, 15 bp, Homo sapiens
taaatgtatctacct

SEQ ID NO: 1169102 - DNA, 15 bp, Homo sapiens
ttaaatgtatctacc

SEQ ID NO: 1169103 - DNA, 15 bp, Homo sapiens
attaaatgtatctac

SEQ ID NO: 1169104 - DNA, 15 bp, Homo sapiens
tattaaatgtatcta

SEQ ID NO: 1169105 - DNA, 15 bp, Homo sapiens
ttattaaatgtatct

SEQ ID NO: 1169106 - DNA, 15 bp, Homo sapiens
cttattaaatgtatc

SEQ ID NO: 1169107 - DNA, 15 bp, Homo sapiens
acttattaaatgtat

SEQ ID NO: 1169108 - DNA, 15 bp, Homo sapiens
tacttattaaatgta

SEQ ID NO: 1169109 - DNA, 15 bp, Homo sapiens
ttacttattaaatgt

SEQ ID NO: 1169110 - DNA, 15 bp, Homo sapiens
gttacttattaaatg

SEQ ID NO: 1169111 - DNA, 15 bp, Homo sapiens
agttacttattaaat

SEQ ID NO: 1169112 - DNA, 15 bp, Homo sapiens
aagttacttattaaa

SEQ ID NO: 1169113 - DNA, 15 bp, Homo sapiens
aaagttacttattaa

SEQ ID NO: 1169114 - DNA, 15 bp, Homo sapiens
aaaaagttacttatt

SEQ ID NO: 1169115 - DNA, 15 bp, Homo sapiens
caaaaagttacttat

SEQ ID NO: 1169116 - DNA, 15 bp, Homo sapiens
acaaaaagttactta

SEQ ID NO: 1169117 - DNA, 15 bp, Homo sapiens
aacaaaaagttactt

SEQ ID NO: 1169118 - DNA, 15 bp, Homo sapiens
caacaaaaagttact

SEQ ID NO: 1169119 - DNA, 15 bp, Homo sapiens
ccaacaaaaagttac

SEQ ID NO: 1169120 - DNA, 15 bp, Homo sapiens
gccaacaaaaagtta

SEQ ID NO: 1169121 - DNA, 15 bp, Homo sapiens
agccaacaaaaagtt

SEQ ID NO: 1169122 - DNA, 15 bp, Homo sapiens
aagccaacaaaaagt

SEQ ID NO: 1169123 - DNA, 15 bp, Homo sapiens
taagccaacaaaaag

SEQ ID NO: 1169124 - DNA, 15 bp, Homo sapiens
ttaagccaacaaaaa

SEQ ID NO: 1169125 - DNA, 15 bp, Homo sapiens
tttaagccaacaaaa

SEQ ID NO: 1169126 - DNA, 15 bp, Homo sapiens
ctttaagccaacaaa

SEQ ID NO: 1169127 - DNA, 15 bp, Homo sapiens
cctttaagccaacaa

SEQ ID NO: 1169128 - DNA, 15 bp, Homo sapiens
ccctttaagccaaca

SEQ ID NO: 1169129 - DNA, 15 bp, Homo sapiens
tccctttaagccaac

SEQ ID NO: 1169130 - DNA, 15 bp, Homo sapiens
ttccctttaagccaa

SEQ ID NO: 1169131 - DNA, 15 bp, Homo sapiens
attccctttaagcca

SEQ ID NO: 1169132 - DNA, 15 bp, Homo sapiens
cattccctttaagcc

SEQ ID NO: 1169133 - DNA, 15 bp, Homo sapiens
tcattccctttaagc

SEQ ID NO: 1169134 - DNA, 15 bp, Homo sapiens
ttcattccctttaag

SEQ ID NO: 1169135 - DNA, 15 bp, Homo sapiens
gttcattccctttaa

SEQ ID NO: 1169136 - DNA, 15 bp, Homo sapiens
agttcattcccttta

SEQ ID NO: 1169137 - DNA, 15 bp, Homo sapiens
aagttcattcccttt

SEQ ID NO: 1169138 - DNA, 15 bp, Homo sapiens
aaagttcattccctt

SEQ ID NO: 1169139 - DNA, 15 bp, Homo sapiens
taaagttcattccct

SEQ ID NO: 1169140 - DNA, 15 bp, Homo sapiens
ataaagttcattccc

SEQ ID NO: 1169141 - DNA, 15 bp, Homo sapiens
cataaagttcattcc

SEQ ID NO: 1169142 - DNA, 15 bp, Homo sapiens
acataaagttcattc

SEQ ID NO: 1169143 - DNA, 15 bp, Homo sapiens
tacataaagttcatt

SEQ ID NO: 1169144 - DNA, 15 bp, Homo sapiens
ttacataaagttcat

SEQ ID NO: 1169145 - DNA, 15 bp, Homo sapiens
attacataaagttca

SEQ ID NO: 1169146 - DNA, 15 bp, Homo sapiens
cattacataaagttc

SEQ ID NO: 1169147 - DNA, 15 bp, Homo sapiens
acattacataaagtt

SEQ ID NO: 1169148 - DNA, 15 bp, Homo sapiens
tacattacataaagt

SEQ ID NO: 1169149 - DNA, 15 bp, Homo sapiens
ttacattacataaag

SEQ ID NO: 1169150 - DNA, 15 bp, Homo sapiens
gttacattacataaa

SEQ ID NO: 1169151 - DNA, 15 bp, Homo sapiens
agttacattacataa

SEQ ID NO: 1169152 - DNA, 15 bp, Homo sapiens
cagttacattacata

SEQ ID NO: 1169153 - DNA, 15 bp, Homo sapiens
acagttacattacat

SEQ ID NO: 1169154 - DNA, 15 bp, Homo sapiens
gacagttacattaca

SEQ ID NO: 1169155 - DNA, 15 bp, Homo sapiens
agacagttacattac

SEQ ID NO: 1169156 - DNA, 15 bp, Homo sapiens
tagacagttacatta

SEQ ID NO: 1169157 - DNA, 15 bp, Homo sapiens
atagacagttacatt

SEQ ID NO: 1169158 - DNA, 15 bp, Homo sapiens
aatagacagttacat

SEQ ID NO: 1169159 - DNA, 15 bp, Homo sapiens
aaatagacagttaca

SEQ ID NO: 1169160 - DNA, 15 bp, Homo sapiens
gaaatagacagttac

SEQ ID NO: 1169161 - DNA, 15 bp, Homo sapiens
tgaaatagacagtta

SEQ ID NO: 1169162 - DNA, 15 bp, Homo sapiens
ctgaaatagacagtt

SEQ ID NO: 1169163 - DNA, 15 bp, Homo sapiens
cctgaaatagacagt

SEQ ID NO: 1169164 - DNA, 15 bp, Homo sapiens
tcctgaaatagacag

SEQ ID NO: 1169165 - DNA, 15 bp, Homo sapiens
ttcctgaaatagaca

SEQ ID NO: 1169166 - DNA, 15 bp, Homo sapiens
cttcctgaaatagac

SEQ ID NO: 1169167 - DNA, 15 bp, Homo sapiens
gcttcctgaaataga

SEQ ID NO: 1169168 - DNA, 15 bp, Homo sapiens
agcttcctgaaatag

SEQ ID NO: 1169169 - DNA, 15 bp, Homo sapiens
aagcttcctgaaata

SEQ ID NO: 1169170 - DNA, 15 bp, Homo sapiens
aaagcttcctgaaat

SEQ ID NO: 1169171 - DNA, 15 bp, Homo sapiens
aaaagcttcctgaaa

SEQ ID NO: 1169172 - DNA, 15 bp, Homo sapiens
gaaaagcttcctgaa

SEQ ID NO: 1169173 - DNA, 15 bp, Homo sapiens
agaaaagcttcctga

SEQ ID NO: 1169174 - DNA, 15 bp, Homo sapiens
tagaaaagcttcctg

SEQ ID NO: 1169175 - DNA, 15 bp, Homo sapiens
atagaaaagcttcct

SEQ ID NO: 1169176 - DNA, 15 bp, Homo sapiens
catagaaaagcttcc

SEQ ID NO: 1169177 - DNA, 15 bp, Homo sapiens
tcatagaaaagcttc

SEQ ID NO: 1169178 - DNA, 15 bp, Homo sapiens
ctcatagaaaagctt

SEQ ID NO: 1169179 - DNA, 15 bp, Homo sapiens
tctcatagaaaagct

SEQ ID NO: 1169180 - DNA, 15 bp, Homo sapiens
ttctcatagaaaagc

SEQ ID NO: 1169181 - DNA, 15 bp, Homo sapiens
attctcatagaaaag

SEQ ID NO: 1169182 - DNA, 15 bp, Homo sapiens
aattctcatagaaaa

SEQ ID NO: 1169183 - DNA, 15 bp, Homo sapiens
aaattctcatagaaa

SEQ ID NO: 1169184 - DNA, 15 bp, Homo sapiens
taaattctcatagaa

SEQ ID NO: 1169185 - DNA, 15 bp, Homo sapiens
ttaaattctcataga

SEQ ID NO: 1169186 - DNA, 15 bp, Homo sapiens
tttaaattctcatag

SEQ ID NO: 1169187 - DNA, 15 bp, Homo sapiens
ttttaaattctcata

SEQ ID NO: 1169188 - DNA, 15 bp, Homo sapiens
gttttaaattctcat

SEQ ID NO: 1169189 - DNA, 15 bp, Homo sapiens
agttttaaattctca

SEQ ID NO: 1169190 - DNA, 15 bp, Homo sapiens
tagttttaaattctc

SEQ ID NO: 1169191 - DNA, 15 bp, Homo sapiens
gtagttttaaattct

SEQ ID NO: 1169192 - DNA, 15 bp, Homo sapiens
tgtagttttaaattc

SEQ ID NO: 1169193 - DNA, 15 bp, Homo sapiens
gtgtagttttaaatt

SEQ ID NO: 1169194 - DNA, 15 bp, Homo sapiens
ggtgtagttttaaat

SEQ ID NO: 1169195 - DNA, 15 bp, Homo sapiens
tggtgtagttttaaa

SEQ ID NO: 1169196 - DNA, 15 bp, Homo sapiens
ttggtgtagttttaa

SEQ ID NO: 1169197 - DNA, 15 bp, Homo sapiens
tttggtgtagtttta

SEQ ID NO: 1169198 - DNA, 15 bp, Homo sapiens
ttttggtgtagtttt

SEQ ID NO: 1169199 - DNA, 15 bp, Homo sapiens
attttggtgtagttt

SEQ ID NO: 1169200 - DNA, 15 bp, Homo sapiens
tattttggtgtagtt

SEQ ID NO: 1169201 - DNA, 15 bp, Homo sapiens
atattttggtgtagt

SEQ ID NO: 1169202 - DNA, 15 bp, Homo sapiens
gatattttggtgtag

SEQ ID NO: 1169203 - DNA, 15 bp, Homo sapiens
agatattttggtgta

SEQ ID NO: 1169204 - DNA, 15 bp, Homo sapiens
aagatattttggtgt

SEQ ID NO: 1169205 - DNA, 15 bp, Homo sapiens
gaagatattttggtg

SEQ ID NO: 1169206 - DNA, 15 bp, Homo sapiens
agaagatattttggt

SEQ ID NO: 1169207 - DNA, 15 bp, Homo sapiens
aagaagatattttgg

SEQ ID NO: 1169208 - DNA, 15 bp, Homo sapiens
aaagaagatattttg

SEQ ID NO: 1169209 - DNA, 15 bp, Homo sapiens
aaaagaagatatttt

SEQ ID NO: 1169210 - DNA, 15 bp, Homo sapiens
aaaaagaagatattt

SEQ ID NO: 1169211 - DNA, 15 bp, Homo sapiens
aaaaaagaagatatt

SEQ ID NO: 1169212 - DNA, 15 bp, Homo sapiens
aaaaaaagaagatat

SEQ ID NO: 1169213 - DNA, 15 bp, Homo sapiens
aaaaaaaagaagata

SEQ ID NO: 1169214 - DNA, 15 bp, Homo sapiens
aaaaaaaaagaagat

SEQ ID NO: 1169215 - DNA, 15 bp, Homo sapiens
caccttgtctcaaaa

SEQ ID NO: 1169216 - DNA, 15 bp, Homo sapiens
acaccttgtctcaaa

SEQ ID NO: 1169217 - DNA, 15 bp, Homo sapiens
gacaccttgtctcaa

SEQ ID NO: 1169218 - DNA, 15 bp, Homo sapiens
tgacaccttgtctca

SEQ ID NO: 1169219 - DNA, 15 bp, Homo sapiens
gtgacaccttgtctc

SEQ ID NO: 1169220 - DNA, 15 bp, Homo sapiens
tgtgacaccttgtct

SEQ ID NO: 1169221 - DNA, 15 bp, Homo sapiens
atgtgacaccttgtc

SEQ ID NO: 1169222 - DNA, 15 bp, Homo sapiens
aatgtgacaccttgt

SEQ ID NO: 1169223 - DNA, 15 bp, Homo sapiens
caatgtgacaccttg

SEQ ID NO: 1169224 - DNA, 15 bp, Homo sapiens
acaatgtgacacctt

SEQ ID NO: 1169225 - DNA, 15 bp, Homo sapiens
gacaatgtgacacct

SEQ ID NO: 1169226 - DNA, 15 bp, Homo sapiens
agacaatgtgacacc

SEQ ID NO: 1169227 - DNA, 15 bp, Homo sapiens
gagacaatgtgacac

SEQ ID NO: 1169228 - DNA, 15 bp, Homo sapiens
agagacaatgtgaca

SEQ ID NO: 1169229 - DNA, 15 bp, Homo sapiens
gagagacaatgtgac

SEQ ID NO: 1169230 - DNA, 15 bp, Homo sapiens
tgagagacaatgtga

SEQ ID NO: 1169231 - DNA, 15 bp, Homo sapiens
ctgagagacaatgtg

SEQ ID NO: 1169232 - DNA, 15 bp, Homo sapiens
cctgagagacaatgt

SEQ ID NO: 1169233 - DNA, 15 bp, Homo sapiens
gcctgagagacaatg

SEQ ID NO: 1169234 - DNA, 15 bp, Homo sapiens
agcctgagagacaat

SEQ ID NO: 1169235 - DNA, 15 bp, Homo sapiens
cagcctgagagacaa

SEQ ID NO: 1169236 - DNA, 15 bp, Homo sapiens
ccagcctgagagaca

SEQ ID NO: 1169237 - DNA, 15 bp, Homo sapiens
tccagcctgagagac

SEQ ID NO: 1169238 - DNA, 15 bp, Homo sapiens
ctccagcctgagaga

SEQ ID NO: 1169239 - DNA, 15 bp, Homo sapiens
actccagcctgagag

SEQ ID NO: 1169240 - DNA, 15 bp, Homo sapiens
cactccagcctgaga

SEQ ID NO: 1169241 - DNA, 15 bp, Homo sapiens
ggatcacaccactgc

SEQ ID NO: 1169242 - DNA, 15 bp, Homo sapiens
aggatcacaccactg

SEQ ID NO: 1169243 - DNA, 15 bp, Homo sapiens
taggatcacaccact

SEQ ID NO: 1169244 - DNA, 15 bp, Homo sapiens
ctaggatcacaccac

SEQ ID NO: 1169245 - DNA, 15 bp, Homo sapiens
gctaggatcacacca

SEQ ID NO: 1169246 - DNA, 15 bp, Homo sapiens
agctaggatcacacc

SEQ ID NO: 1169247 - DNA, 15 bp, Homo sapiens
gagctaggatcacac

SEQ ID NO: 1169248 - DNA, 15 bp, Homo sapiens
tgagctaggatcaca

SEQ ID NO: 1169249 - DNA, 15 bp, Homo sapiens
gtgagctaggatcac

SEQ ID NO: 1169250 - DNA, 15 bp, Homo sapiens
agtgagctaggatca

SEQ ID NO: 1169251 - DNA, 15 bp, Homo sapiens
cagtgagctaggatc

SEQ ID NO: 1169252 - DNA, 15 bp, Homo sapiens
acagtgagctaggat

SEQ ID NO: 1169253 - DNA, 15 bp, Homo sapiens
tacagtgagctagga

SEQ ID NO: 1169254 - DNA, 15 bp, Homo sapiens
ctacagtgagctagg

SEQ ID NO: 1169255 - DNA, 15 bp, Homo sapiens
gctacagtgagctag

SEQ ID NO: 1169256 - DNA, 15 bp, Homo sapiens
ggctacagtgagcta

SEQ ID NO: 1169257 - DNA, 15 bp, Homo sapiens
aggctacagtgagct

SEQ ID NO: 1169258 - DNA, 15 bp, Homo sapiens
aaggctacagtgagc

SEQ ID NO: 1169259 - DNA, 15 bp, Homo sapiens
caaggctacagtgag

SEQ ID NO: 1169260 - DNA, 15 bp, Homo sapiens
attcaaggctacagt

SEQ ID NO: 1169261 - DNA, 15 bp, Homo sapiens
aattcaaggctacag

SEQ ID NO: 1169262 - DNA, 15 bp, Homo sapiens
gaattcaaggctaca

SEQ ID NO: 1169263 - DNA, 15 bp, Homo sapiens
ggaattcaaggctac

SEQ ID NO: 1169264 - DNA, 15 bp, Homo sapiens
aggaattcaaggcta

SEQ ID NO: 1169265 - DNA, 15 bp, Homo sapiens
caggaattcaaggct

SEQ ID NO: 1169266 - DNA, 15 bp, Homo sapiens
ccaggaattcaaggc

SEQ ID NO: 1169267 - DNA, 15 bp, Homo sapiens
cccaggaattcaagg

SEQ ID NO: 1169268 - DNA, 15 bp, Homo sapiens
gttgagcccaggaat

SEQ ID NO: 1169269 - DNA, 15 bp, Homo sapiens
agttgagcccaggaa

SEQ ID NO: 1169270 - DNA, 15 bp, Homo sapiens
caggatcagttgagc

SEQ ID NO: 1169271 - DNA, 15 bp, Homo sapiens
gcaggatcagttgag

SEQ ID NO: 1169272 - DNA, 15 bp, Homo sapiens
agcaggatcagttga

SEQ ID NO: 1169273 - DNA, 15 bp, Homo sapiens
tagcaggatcagttg

SEQ ID NO: 1169274 - DNA, 15 bp, Homo sapiens
gtagcaggatcagtt

SEQ ID NO: 1169275 - DNA, 15 bp, Homo sapiens
ggtagcaggatcagt

SEQ ID NO: 1169276 - DNA, 15 bp, Homo sapiens
aggtagcaggatcag

SEQ ID NO: 1169277 - DNA, 15 bp, Homo sapiens
gaggtagcaggatca

SEQ ID NO: 1169278 - DNA, 15 bp, Homo sapiens
tgaggtagcaggatc

SEQ ID NO: 1169279 - DNA, 15 bp, Homo sapiens
ttgaggtagcaggat

SEQ ID NO: 1169280 - DNA, 15 bp, Homo sapiens
gttgaggtagcagga

SEQ ID NO: 1169281 - DNA, 15 bp, Homo sapiens
ggttgaggtagcagg

SEQ ID NO: 1169282 - DNA, 15 bp, Homo sapiens
gggttgaggtagcag

SEQ ID NO: 1169283 - DNA, 15 bp, Homo sapiens
ggggttgaggtagca

SEQ ID NO: 1169284 - DNA, 15 bp, Homo sapiens
gggggttgaggtagc

SEQ ID NO: 1169285 - DNA, 15 bp, Homo sapiens
ggggggttgaggtag

SEQ ID NO: 1169286 - DNA, 15 bp, Homo sapiens
tggggggttgaggta

SEQ ID NO: 1169287 - DNA, 15 bp, Homo sapiens
gtggggggttgaggt

SEQ ID NO: 1169288 - DNA, 15 bp, Homo sapiens
cgtggggggttgagg

SEQ ID NO: 1169289 - DNA, 15 bp, Homo sapiens
acgtggggggttgag

SEQ ID NO: 1169290 - DNA, 15 bp, Homo sapiens
tacgtggggggttga

SEQ ID NO: 1169291 - DNA, 15 bp, Homo sapiens
ctacgtggggggttg

SEQ ID NO: 1169292 - DNA, 15 bp, Homo sapiens
gctacgtggggggtt

SEQ ID NO: 1169293 - DNA, 15 bp, Homo sapiens
agctacgtggggggt

SEQ ID NO: 1169294 - DNA, 15 bp, Homo sapiens
tagctacgtgggggg

SEQ ID NO: 1169295 - DNA, 15 bp, Homo sapiens
ctagctacgtggggg

SEQ ID NO: 1169296 - DNA, 15 bp, Homo sapiens
cctagctacgtgggg

SEQ ID NO: 1169297 - DNA, 15 bp, Homo sapiens
tcctagctacgtggg

SEQ ID NO: 1169298 - DNA, 15 bp, Homo sapiens
gtcctagctacgtgg

SEQ ID NO: 1169299 - DNA, 15 bp, Homo sapiens
agtcctagctacgtg

SEQ ID NO: 1169300 - DNA, 15 bp, Homo sapiens
tagtcctagctacgt

SEQ ID NO: 1169301 - DNA, 15 bp, Homo sapiens
gtagtcctagctacg

SEQ ID NO: 1169302 - DNA, 15 bp, Homo sapiens
ggcctgtagtcctag

SEQ ID NO: 1169303 - DNA, 15 bp, Homo sapiens
aggcctgtagtccta

SEQ ID NO: 1169304 - DNA, 15 bp, Homo sapiens
caggcctgtagtcct

SEQ ID NO: 1169305 - DNA, 15 bp, Homo sapiens
gcaggcctgtagtcc

SEQ ID NO: 1169306 - DNA, 15 bp, Homo sapiens
tgcaggcctgtagtc

SEQ ID NO: 1169307 - DNA, 15 bp, Homo sapiens
gtgcaggcctgtagt

SEQ ID NO: 1169308 - DNA, 15 bp, Homo sapiens
ggtgcaggcctgtag

SEQ ID NO: 1169309 - DNA, 15 bp, Homo sapiens
tggtgcaggcctgta

SEQ ID NO: 1169310 - DNA, 15 bp, Homo sapiens
gtggtgcaggcctgt

SEQ ID NO: 1169311 - DNA, 15 bp, Homo sapiens
ggtggtgcaggcctg

SEQ ID NO: 1169312 - DNA, 15 bp, Homo sapiens
tggtggtgcaggcct

SEQ ID NO: 1169313 - DNA, 15 bp, Homo sapiens
gtggtggtgcaggcc

SEQ ID NO: 1169314 - DNA, 15 bp, Homo sapiens
tgtggtggtgcaggc

SEQ ID NO: 1169315 - DNA, 15 bp, Homo sapiens
atgtggtggtgcagg

SEQ ID NO: 1169316 - DNA, 15 bp, Homo sapiens
gatgtggtggtgcag

SEQ ID NO: 1169317 - DNA, 15 bp, Homo sapiens
agatgtggtggtgca

SEQ ID NO: 1169318 - DNA, 15 bp, Homo sapiens
cagatgtggtggtgc

SEQ ID NO: 1169319 - DNA, 15 bp, Homo sapiens
ccagatgtggtggtg

SEQ ID NO: 1169320 - DNA, 15 bp, Homo sapiens
gccagatgtggtggt

SEQ ID NO: 1169321 - DNA, 15 bp, Homo sapiens
aaaaaattagccaga

SEQ ID NO: 1169322 - DNA, 15 bp, Homo sapiens
tataaaaaattagcc

SEQ ID NO: 1169323 - DNA, 15 bp, Homo sapiens
atataaaaaattagc

SEQ ID NO: 1169324 - DNA, 15 bp, Homo sapiens
aatataaaaaattag

SEQ ID NO: 1169325 - DNA, 15 bp, Homo sapiens
aaatataaaaaatta

SEQ ID NO: 1169326 - DNA, 15 bp, Homo sapiens
aaaatataaaaaatt

SEQ ID NO: 1169327 - DNA, 15 bp, Homo sapiens
aaaaatataaaaaat

SEQ ID NO: 1169328 - DNA, 15 bp, Homo sapiens
caaaaatataaaaaa

SEQ ID NO: 1169329 - DNA, 15 bp, Homo sapiens
acaaaaatataaaaa

SEQ ID NO: 1169330 - DNA, 15 bp, Homo sapiens
tacaaaaatataaaa

SEQ ID NO: 1169331 - DNA, 15 bp, Homo sapiens
ctacaaaaatataaa

SEQ ID NO: 1169332 - DNA, 15 bp, Homo sapiens
tctacaaaaatataa

SEQ ID NO: 1169333 - DNA, 15 bp, Homo sapiens
ctctacaaaaatata

SEQ ID NO: 1169334 - DNA, 15 bp, Homo sapiens
tctctacaaaaatat

SEQ ID NO: 1169335 - DNA, 15 bp, Homo sapiens
ttctctacaaaaata

SEQ ID NO: 1169336 - DNA, 15 bp, Homo sapiens
tttctctacaaaaat

SEQ ID NO: 1169337 - DNA, 15 bp, Homo sapiens
atttctctacaaaaa

SEQ ID NO: 1169338 - DNA, 15 bp, Homo sapiens
catttctctacaaaa

SEQ ID NO: 1169339 - DNA, 15 bp, Homo sapiens
ccatttctctacaaa

SEQ ID NO: 1169340 - DNA, 15 bp, Homo sapiens
accatttctctacaa

SEQ ID NO: 1169341 - DNA, 15 bp, Homo sapiens
gaccatttctctaca

SEQ ID NO: 1169342 - DNA, 15 bp, Homo sapiens
agaccatttctctac

SEQ ID NO: 1169343 - DNA, 15 bp, Homo sapiens
cagaccatttctcta

SEQ ID NO: 1169344 - DNA, 15 bp, Homo sapiens
ccagaccatttctct

SEQ ID NO: 1169345 - DNA, 15 bp, Homo sapiens
gccagaccatttctc

SEQ ID NO: 1169346 - DNA, 15 bp, Homo sapiens
agccagaccatttct

SEQ ID NO: 1169347 - DNA, 15 bp, Homo sapiens
tagccagaccatttc

SEQ ID NO: 1169348 - DNA, 15 bp, Homo sapiens
gtagccagaccattt

SEQ ID NO: 1169349 - DNA, 15 bp, Homo sapiens
cgtagccagaccatt

SEQ ID NO: 1169350 - DNA, 15 bp, Homo sapiens
acgtagccagaccat

SEQ ID NO: 1169351 - DNA, 15 bp, Homo sapiens
aacgtagccagacca

SEQ ID NO: 1169352 - DNA, 15 bp, Homo sapiens
caacgtagccagacc

SEQ ID NO: 1169353 - DNA, 15 bp, Homo sapiens
gcaacgtagccagac

SEQ ID NO: 1169354 - DNA, 15 bp, Homo sapiens
ggcaacgtagccaga

SEQ ID NO: 1169355 - DNA, 15 bp, Homo sapiens
gggcaacgtagccag

SEQ ID NO: 1169356 - DNA, 15 bp, Homo sapiens
tgggcaacgtagcca

SEQ ID NO: 1169357 - DNA, 15 bp, Homo sapiens
ctgggcaacgtagcc

SEQ ID NO: 1169358 - DNA, 15 bp, Homo sapiens
cctgggcaacgtagc

SEQ ID NO: 1169359 - DNA, 15 bp, Homo sapiens
gcctgggcaacgtag

SEQ ID NO: 1169360 - DNA, 15 bp, Homo sapiens
agcctgggcaacgta

SEQ ID NO: 1169361 - DNA, 15 bp, Homo sapiens
cagcctgggcaacgt

SEQ ID NO: 1169362 - DNA, 15 bp, Homo sapiens
ccagcctgggcaacg

SEQ ID NO: 1169363 - DNA, 15 bp, Homo sapiens
ggaccagcctgggca

SEQ ID NO: 1169364 - DNA, 15 bp, Homo sapiens
gggaccagcctgggc

SEQ ID NO: 1169365 - DNA, 15 bp, Homo sapiens
tgggaccagcctggg

SEQ ID NO: 1169366 - DNA, 15 bp, Homo sapiens
ttgggaccagcctgg

SEQ ID NO: 1169367 - DNA, 15 bp, Homo sapiens
tttgggaccagcctg

SEQ ID NO: 1169368 - DNA, 15 bp, Homo sapiens
gtttgggaccagcct

SEQ ID NO: 1169369 - DNA, 15 bp, Homo sapiens
agtttgggaccagcc

SEQ ID NO: 1169370 - DNA, 15 bp, Homo sapiens
gagtttgggaccagc

SEQ ID NO: 1169371 - DNA, 15 bp, Homo sapiens
ggagtttgggaccag

SEQ ID NO: 1169372 - DNA, 15 bp, Homo sapiens
aggagtttgggacca

SEQ ID NO: 1169373 - DNA, 15 bp, Homo sapiens
caggagtttgggacc

SEQ ID NO: 1169374 - DNA, 15 bp, Homo sapiens
ccaggagtttgggac

SEQ ID NO: 1169375 - DNA, 15 bp, Homo sapiens
gccaggagtttggga

SEQ ID NO: 1169376 - DNA, 15 bp, Homo sapiens
ggccaggagtttggg

SEQ ID NO: 1169377 - DNA, 15 bp, Homo sapiens
aggccaggagtttgg

SEQ ID NO: 1169378 - DNA, 15 bp, Homo sapiens
cacctgaggccagga

SEQ ID NO: 1169379 - DNA, 15 bp, Homo sapiens
tcacctgaggccagg

SEQ ID NO: 1169380 - DNA, 15 bp, Homo sapiens
atcacctgaggccag

SEQ ID NO: 1169381 - DNA, 15 bp, Homo sapiens
gatcacctgaggcca

SEQ ID NO: 1169382 - DNA, 15 bp, Homo sapiens
ggatcacctgaggcc

SEQ ID NO: 1169383 - DNA, 15 bp, Homo sapiens
aggatcacctgaggc

SEQ ID NO: 1169384 - DNA, 15 bp, Homo sapiens
aggaggatcacctga

SEQ ID NO: 1169385 - DNA, 15 bp, Homo sapiens
caggaggatcacctg

SEQ ID NO: 1169386 - DNA, 15 bp, Homo sapiens
gcaggaggatcacct

SEQ ID NO: 1169387 - DNA, 15 bp, Homo sapiens
cgcaggaggatcacc

SEQ ID NO: 1169388 - DNA, 15 bp, Homo sapiens
acgcaggaggatcac

SEQ ID NO: 1169389 - DNA, 15 bp, Homo sapiens
gacgcaggaggatca

SEQ ID NO: 1169390 - DNA, 15 bp, Homo sapiens
tgacgcaggaggatc

SEQ ID NO: 1169391 - DNA, 15 bp, Homo sapiens
ttgacgcaggaggat

SEQ ID NO: 1169392 - DNA, 15 bp, Homo sapiens
gttgacgcaggagga

SEQ ID NO: 1169393 - DNA, 15 bp, Homo sapiens
ggttgacgcaggagg

SEQ ID NO: 1169394 - DNA, 15 bp, Homo sapiens
aggttgacgcaggag

SEQ ID NO: 1169395 - DNA, 15 bp, Homo sapiens
gaggttgacgcagga

SEQ ID NO: 1169396 - DNA, 15 bp, Homo sapiens
ggaggttgacgcagg

SEQ ID NO: 1169397 - DNA, 15 bp, Homo sapiens
gggaggttgacgcag

SEQ ID NO: 1169398 - DNA, 15 bp, Homo sapiens
tgggaggttgacgca

SEQ ID NO: 1169399 - DNA, 15 bp, Homo sapiens
ttgggaggttgacgc

SEQ ID NO: 1169400 - DNA, 15 bp, Homo sapiens
tttgggaggttgacg

SEQ ID NO: 1169401 - DNA, 15 bp, Homo sapiens
ctttgggaggttgac

SEQ ID NO: 1169402 - DNA, 15 bp, Homo sapiens
acactttgggaggtt

SEQ ID NO: 1169403 - DNA, 15 bp, Homo sapiens
aacactttgggaggt

SEQ ID NO: 1169404 - DNA, 15 bp, Homo sapiens
tgctcacacctgtaa

SEQ ID NO: 1169405 - DNA, 15 bp, Homo sapiens
ttgctcacacctgta

SEQ ID NO: 1169406 - DNA, 15 bp, Homo sapiens
tttgctcacacctgt

SEQ ID NO: 1169407 - DNA, 15 bp, Homo sapiens
gtttgctcacacctg

SEQ ID NO: 1169408 - DNA, 15 bp, Homo sapiens
ggtttgctcacacct

SEQ ID NO: 1169409 - DNA, 15 bp, Homo sapiens
aggtttgctcacacc

SEQ ID NO: 1169410 - DNA, 15 bp, Homo sapiens
caggtttgctcacac

SEQ ID NO: 1169411 - DNA, 15 bp, Homo sapiens
gcaggtttgctcaca

SEQ ID NO: 1169412 - DNA, 15 bp, Homo sapiens
ggcaggtttgctcac

SEQ ID NO: 1169413 - DNA, 15 bp, Homo sapiens
tggcaggtttgctca

SEQ ID NO: 1169414 - DNA, 15 bp, Homo sapiens
atggcaggtttgctc

SEQ ID NO: 1169415 - DNA, 15 bp, Homo sapiens
gatggcaggtttgct

SEQ ID NO: 1169416 - DNA, 15 bp, Homo sapiens
agatggcaggtttgc

SEQ ID NO: 1169417 - DNA, 15 bp, Homo sapiens
gagatggcaggtttg

SEQ ID NO: 1169418 - DNA, 15 bp, Homo sapiens
tgagatggcaggttt

SEQ ID NO: 1169419 - DNA, 15 bp, Homo sapiens
ttgagatggcaggtt

SEQ ID NO: 1169420 - DNA, 15 bp, Homo sapiens
tttgagatggcaggt

SEQ ID NO: 1169421 - DNA, 15 bp, Homo sapiens
ttttgagatggcagg

SEQ ID NO: 1169422 - DNA, 15 bp, Homo sapiens
gttttgagatggcag

SEQ ID NO: 1169423 - DNA, 15 bp, Homo sapiens
tgttttgagatggca

SEQ ID NO: 1169424 - DNA, 15 bp, Homo sapiens
atgttttgagatggc

SEQ ID NO: 1169425 - DNA, 15 bp, Homo sapiens
catgttttgagatgg

SEQ ID NO: 1169426 - DNA, 15 bp, Homo sapiens
acatgttttgagatg

SEQ ID NO: 1169427 - DNA, 15 bp, Homo sapiens
cacatgttttgagat

SEQ ID NO: 1169428 - DNA, 15 bp, Homo sapiens
acacatgttttgaga

SEQ ID NO: 1169429 - DNA, 15 bp, Homo sapiens
tacacatgttttgag

SEQ ID NO: 1169430 - DNA, 15 bp, Homo sapiens
atacacatgttttga

SEQ ID NO: 1169431 - DNA, 15 bp, Homo sapiens
aatacacatgttttg

SEQ ID NO: 1169432 - DNA, 15 bp, Homo sapiens
aaaatacacatgttt

SEQ ID NO: 1169433 - DNA, 15 bp, Homo sapiens
taaaatacacatgtt

SEQ ID NO: 1169434 - DNA, 15 bp, Homo sapiens
ttaaaatacacatgt

SEQ ID NO: 1169435 - DNA, 15 bp, Homo sapiens
attaaaatacacatg

SEQ ID NO: 1169436 - DNA, 15 bp, Homo sapiens
cattaaaatacacat

SEQ ID NO: 1169437 - DNA, 15 bp, Homo sapiens
tcattaaaatacaca

SEQ ID NO: 1169438 - DNA, 15 bp, Homo sapiens
ctcattaaaatacac

SEQ ID NO: 1169439 - DNA, 15 bp, Homo sapiens
tctcattaaaataca

SEQ ID NO: 1169440 - DNA, 15 bp, Homo sapiens
gtctcattaaaatac

SEQ ID NO: 1169441 - DNA, 15 bp, Homo sapiens
tgtctcattaaaata

SEQ ID NO: 1169442 - DNA, 15 bp, Homo sapiens
ttgtctcattaaaat

SEQ ID NO: 1169443 - DNA, 15 bp, Homo sapiens
gttgtctcattaaaa

SEQ ID NO: 1169444 - DNA, 15 bp, Homo sapiens
tgttgtctcattaaa

SEQ ID NO: 1169445 - DNA, 15 bp, Homo sapiens
ttgttgtctcattaa

SEQ ID NO: 1169446 - DNA, 15 bp, Homo sapiens
tttgttgtctcatta

SEQ ID NO: 1169447 - DNA, 15 bp, Homo sapiens
ctttgttgtctcatt

SEQ ID NO: 1169448 - DNA, 15 bp, Homo sapiens
tctttgttgtctcat

SEQ ID NO: 1169449 - DNA, 15 bp, Homo sapiens
atctttgttgtctca

SEQ ID NO: 1169450 - DNA, 15 bp, Homo sapiens
gatctttgttgtctc

SEQ ID NO: 1169451 - DNA, 15 bp, Homo sapiens
tgatctttgttgtct

SEQ ID NO: 1169452 - DNA, 15 bp, Homo sapiens
ttgatctttgttgtc

SEQ ID NO: 1169453 - DNA, 15 bp, Homo sapiens
cttgatctttgttgt

SEQ ID NO: 1169454 - DNA, 15 bp, Homo sapiens
ccttgatctttgttg

SEQ ID NO: 1169455 - DNA, 15 bp, Homo sapiens
cccttgatctttgtt

SEQ ID NO: 1169456 - DNA, 15 bp, Homo sapiens
tcccttgatctttgt

SEQ ID NO: 1169457 - DNA, 15 bp, Homo sapiens
ttcccttgatctttg

SEQ ID NO: 1169458 - DNA, 15 bp, Homo sapiens
gttcccttgatcttt

SEQ ID NO: 1169459 - DNA, 15 bp, Homo sapiens
agttcccttgatctt

SEQ ID NO: 1169460 - DNA, 15 bp, Homo sapiens
aagttcccttgatct

SEQ ID NO: 1169461 - DNA, 15 bp, Homo sapiens
aaagttcccttgatc

SEQ ID NO: 1169462 - DNA, 15 bp, Homo sapiens
taaagttcccttgat

SEQ ID NO: 1169463 - DNA, 15 bp, Homo sapiens
ctaaagttcccttga

SEQ ID NO: 1169464 - DNA, 15 bp, Homo sapiens
actaaagttcccttg

SEQ ID NO: 1169465 - DNA, 15 bp, Homo sapiens
gactaaagttccctt

SEQ ID NO: 1169466 - DNA, 15 bp, Homo sapiens
ggactaaagttccct

SEQ ID NO: 1169467 - DNA, 15 bp, Homo sapiens
aggactaaagttccc

SEQ ID NO: 1169468 - DNA, 15 bp, Homo sapiens
aaggactaaagttcc

SEQ ID NO: 1169469 - DNA, 15 bp, Homo sapiens
taaggactaaagttc

SEQ ID NO: 1169470 - DNA, 15 bp, Homo sapiens
gtaaggactaaagtt

SEQ ID NO: 1169471 - DNA, 15 bp, Homo sapiens
tgtaaggactaaagt

SEQ ID NO: 1169472 - DNA, 15 bp, Homo sapiens
ttgtaaggactaaag

SEQ ID NO: 1169473 - DNA, 15 bp, Homo sapiens
attgtaaggactaaa

SEQ ID NO: 1169474 - DNA, 15 bp, Homo sapiens
cattgtaaggactaa

SEQ ID NO: 1169475 - DNA, 15 bp, Homo sapiens
acattgtaaggacta

SEQ ID NO: 1169476 - DNA, 15 bp, Homo sapiens
tacattgtaaggact

SEQ ID NO: 1169477 - DNA, 15 bp, Homo sapiens
ttacattgtaaggac

SEQ ID NO: 1169478 - DNA, 15 bp, Homo sapiens
attacattgtaagga

SEQ ID NO: 1169479 - DNA, 15 bp, Homo sapiens
cattacattgtaagg

SEQ ID NO: 1169480 - DNA, 15 bp, Homo sapiens
tcattacattgtaag

SEQ ID NO: 1169481 - DNA, 15 bp, Homo sapiens
atcattacattgtaa

SEQ ID NO: 1169482 - DNA, 15 bp, Homo sapiens
gatcattacattgta

SEQ ID NO: 1169483 - DNA, 15 bp, Homo sapiens
tgatcattacattgt

SEQ ID NO: 1169484 - DNA, 15 bp, Homo sapiens
ttgatcattacattg

SEQ ID NO: 1169485 - DNA, 15 bp, Homo sapiens
tttgatcattacatt

SEQ ID NO: 1169486 - DNA, 15 bp, Homo sapiens
ttttgatcattacat

SEQ ID NO: 1169487 - DNA, 15 bp, Homo sapiens
tttttgatcattaca

SEQ ID NO: 1169488 - DNA, 15 bp, Homo sapiens
ttttttgatcattac

SEQ ID NO: 1169489 - DNA, 15 bp, Homo sapiens
cttttttgatcatta

SEQ ID NO: 1169490 - DNA, 15 bp, Homo sapiens
acttttttgatcatt

SEQ ID NO: 1169491 - DNA, 15 bp, Homo sapiens
cacttttttgatcat

SEQ ID NO: 1169492 - DNA, 15 bp, Homo sapiens
tcacttttttgatca

SEQ ID NO: 1169493 - DNA, 15 bp, Homo sapiens
ttcacttttttgatc

SEQ ID NO: 1169494 - DNA, 15 bp, Homo sapiens
tttcacttttttgat

SEQ ID NO: 1169495 - DNA, 15 bp, Homo sapiens
atttcacttttttga

SEQ ID NO: 1169496 - DNA, 15 bp, Homo sapiens
tatttcacttttttg

SEQ ID NO: 1169497 - DNA, 15 bp, Homo sapiens
ctatttcactttttt

SEQ ID NO: 1169498 - DNA, 15 bp, Homo sapiens
tctatttcacttttt

SEQ ID NO: 1169499 - DNA, 15 bp, Homo sapiens
atctatttcactttt

SEQ ID NO: 1169500 - DNA, 15 bp, Homo sapiens
tatctatttcacttt

SEQ ID NO: 1169501 - DNA, 15 bp, Homo sapiens
ttatctatttcactt

SEQ ID NO: 1169502 - DNA, 15 bp, Homo sapiens
attatctatttcact

SEQ ID NO: 1169503 - DNA, 15 bp, Homo sapiens
gattatctatttcac

SEQ ID NO: 1169504 - DNA, 15 bp, Homo sapiens
tgattatctatttca

SEQ ID NO: 1169505 - DNA, 15 bp, Homo sapiens
ttgattatctatttc

SEQ ID NO: 1169506 - DNA, 15 bp, Homo sapiens
gttgattatctattt

SEQ ID NO: 1169507 - DNA, 15 bp, Homo sapiens
tgttgattatctatt

SEQ ID NO: 1169508 - DNA, 15 bp, Homo sapiens
atgttgattatctat

SEQ ID NO: 1169509 - DNA, 15 bp, Homo sapiens
tatgttgattatcta

SEQ ID NO: 1169510 - DNA, 15 bp, Homo sapiens
ttatgttgattatct

SEQ ID NO: 1169511 - DNA, 15 bp, Homo sapiens
gttatgttgattatc

SEQ ID NO: 1169512 - DNA, 15 bp, Homo sapiens
tgttatgttgattat

SEQ ID NO: 1169513 - DNA, 15 bp, Homo sapiens
atgttatgttgatta

SEQ ID NO: 1169514 - DNA, 15 bp, Homo sapiens
aatgttatgttgatt

SEQ ID NO: 1169515 - DNA, 15 bp, Homo sapiens
caatgttatgttgat

SEQ ID NO: 1169516 - DNA, 15 bp, Homo sapiens
gcaatgttatgttga

SEQ ID NO: 1169517 - DNA, 15 bp, Homo sapiens
agcaatgttatgttg

SEQ ID NO: 1169518 - DNA, 15 bp, Homo sapiens
aagcaatgttatgtt

SEQ ID NO: 1169519 - DNA, 15 bp, Homo sapiens
caagcaatgttatgt

SEQ ID NO: 1169520 - DNA, 15 bp, Homo sapiens
acaagcaatgttatg

SEQ ID NO: 1169521 - DNA, 15 bp, Homo sapiens
tacaagcaatgttat

SEQ ID NO: 1169522 - DNA, 15 bp, Homo sapiens
ctacaagcaatgtta

SEQ ID NO: 1169523 - DNA, 15 bp, Homo sapiens
tctacaagcaatgtt

SEQ ID NO: 1169524 - DNA, 15 bp, Homo sapiens
gtctacaagcaatgt

SEQ ID NO: 1169525 - DNA, 15 bp, Homo sapiens
ggtctacaagcaatg

SEQ ID NO: 1169526 - DNA, 15 bp, Homo sapiens
tggtctacaagcaat

SEQ ID NO: 1169527 - DNA, 15 bp, Homo sapiens
atggtctacaagcaa

SEQ ID NO: 1169528 - DNA, 15 bp, Homo sapiens
catggtctacaagca

SEQ ID NO: 1169529 - DNA, 15 bp, Homo sapiens
gcatggtctacaagc

SEQ ID NO: 1169530 - DNA, 15 bp, Homo sapiens
tgcatggtctacaag

SEQ ID NO: 1169531 - DNA, 15 bp, Homo sapiens
ttgcatggtctacaa

SEQ ID NO: 1169532 - DNA, 15 bp, Homo sapiens
tttgcatggtctaca

SEQ ID NO: 1169533 - DNA, 15 bp, Homo sapiens
gtttgcatggtctac

SEQ ID NO: 1169534 - DNA, 15 bp, Homo sapiens
tgtttgcatggtcta

SEQ ID NO: 1169535 - DNA, 15 bp, Homo sapiens
ttgtttgcatggtct

SEQ ID NO: 1169536 - DNA, 15 bp, Homo sapiens
attgtttgcatggtc

SEQ ID NO: 1169537 - DNA, 15 bp, Homo sapiens
gattgtttgcatggt

SEQ ID NO: 1169538 - DNA, 15 bp, Homo sapiens
agattgtttgcatgg

SEQ ID NO: 1169539 - DNA, 15 bp, Homo sapiens
aagattgtttgcatg

SEQ ID NO: 1169540 - DNA, 15 bp, Homo sapiens
taagattgtttgcat

SEQ ID NO: 1169541 - DNA, 15 bp, Homo sapiens
ataagattgtttgca

SEQ ID NO: 1169542 - DNA, 15 bp, Homo sapiens
aataagattgtttgc

SEQ ID NO: 1169543 - DNA, 15 bp, Homo sapiens
caataagattgtttg

SEQ ID NO: 1169544 - DNA, 15 bp, Homo sapiens
gcaataagattgttt

SEQ ID NO: 1169545 - DNA, 15 bp, Homo sapiens
tgcaataagattgtt

SEQ ID NO: 1169546 - DNA, 15 bp, Homo sapiens
atgcaataagattgt

SEQ ID NO: 1169547 - DNA, 15 bp, Homo sapiens
aatgcaataagattg

SEQ ID NO: 1169548 - DNA, 15 bp, Homo sapiens
aaatgcaataagatt

SEQ ID NO: 1169549 - DNA, 15 bp, Homo sapiens
caaatgcaataagat

SEQ ID NO: 1169550 - DNA, 15 bp, Homo sapiens
acaaatgcaataaga

SEQ ID NO: 1169551 - DNA, 15 bp, Homo sapiens
tacaaatgcaataag

SEQ ID NO: 1169552 - DNA, 15 bp, Homo sapiens
atacaaatgcaataa

SEQ ID NO: 1169553 - DNA, 15 bp, Homo sapiens
tatacaaatgcaata

SEQ ID NO: 1169554 - DNA, 15 bp, Homo sapiens
atatacaaatgcaat

SEQ ID NO: 1169555 - DNA, 15 bp, Homo sapiens
aatatacaaatgcaa

SEQ ID NO: 1169556 - DNA, 15 bp, Homo sapiens
aaatatacaaatgca

SEQ ID NO: 1169557 - DNA, 15 bp, Homo sapiens
caaatatacaaatgc

SEQ ID NO: 1169558 - DNA, 15 bp, Homo sapiens
acaaatatacaaatg

SEQ ID NO: 1169559 - DNA, 15 bp, Homo sapiens
tacaaatatacaaat

SEQ ID NO: 1169560 - DNA, 15 bp, Homo sapiens
ttacaaatatacaaa

SEQ ID NO: 1169561 - DNA, 15 bp, Homo sapiens
attacaaatatacaa

SEQ ID NO: 1169562 - DNA, 15 bp, Homo sapiens
cattacaaatataca

SEQ ID NO: 1169563 - DNA, 15 bp, Homo sapiens
tcattacaaatatac

SEQ ID NO: 1169564 - DNA, 15 bp, Homo sapiens
ttcattacaaatata

SEQ ID NO: 1169565 - DNA, 15 bp, Homo sapiens
gttcattacaaatat

SEQ ID NO: 1169566 - DNA, 15 bp, Homo sapiens
agttcattacaaata

SEQ ID NO: 1169567 - DNA, 15 bp, Homo sapiens
cagttcattacaaat

SEQ ID NO: 1169568 - DNA, 15 bp, Homo sapiens
acagttcattacaaa

SEQ ID NO: 1169569 - DNA, 15 bp, Homo sapiens
aacagttcattacaa

SEQ ID NO: 1169570 - DNA, 15 bp, Homo sapiens
aaacagttcattaca

SEQ ID NO: 1169571 - DNA, 15 bp, Homo sapiens
aaaacagttcattac

SEQ ID NO: 1169572 - DNA, 15 bp, Homo sapiens
taaaacagttcatta

SEQ ID NO: 1169573 - DNA, 15 bp, Homo sapiens
ataaaacagttcatt

SEQ ID NO: 1169574 - DNA, 15 bp, Homo sapiens
tataaaacagttcat

SEQ ID NO: 1169575 - DNA, 15 bp, Homo sapiens
ttataaaacagttca

SEQ ID NO: 1169576 - DNA, 15 bp, Homo sapiens
attataaaacagttc

SEQ ID NO: 1169577 - DNA, 15 bp, Homo sapiens
tattataaaacagtt

SEQ ID NO: 1169578 - DNA, 15 bp, Homo sapiens
ttattataaaacagt

SEQ ID NO: 1169579 - DNA, 15 bp, Homo sapiens
gttattataaaacag

SEQ ID NO: 1169580 - DNA, 15 bp, Homo sapiens
tgttattataaaaca

SEQ ID NO: 1169581 - DNA, 15 bp, Homo sapiens
ttgttattataaaac

SEQ ID NO: 1169582 - DNA, 15 bp, Homo sapiens
tttgttattataaaa

SEQ ID NO: 1169583 - DNA, 15 bp, Homo sapiens
ttttgttattataaa

SEQ ID NO: 1169584 - DNA, 15 bp, Homo sapiens
attttgttattataa

SEQ ID NO: 1169585 - DNA, 15 bp, Homo sapiens
cattttgttattata

SEQ ID NO: 1169586 - DNA, 15 bp, Homo sapiens
acattttgttattat

SEQ ID NO: 1169587 - DNA, 15 bp, Homo sapiens
tacattttgttatta

SEQ ID NO: 1169588 - DNA, 15 bp, Homo sapiens
ttacattttgttatt

SEQ ID NO: 1169589 - DNA, 15 bp, Homo sapiens
tttacattttgttat

SEQ ID NO: 1169590 - DNA, 15 bp, Homo sapiens
ttttacattttgtta

SEQ ID NO: 1169591 - DNA, 15 bp, Homo sapiens
attttacattttgtt

SEQ ID NO: 1169592 - DNA, 15 bp, Homo sapiens
cattttacattttgt

SEQ ID NO: 1169593 - DNA, 15 bp, Homo sapiens
acattttacattttg

SEQ ID NO: 1169594 - DNA, 15 bp, Homo sapiens
cacattttacatttt

SEQ ID NO: 1169595 - DNA, 15 bp, Homo sapiens
acacattttacattt

SEQ ID NO: 1169596 - DNA, 15 bp, Homo sapiens
tacacattttacatt

SEQ ID NO: 1169597 - DNA, 15 bp, Homo sapiens
atacacattttacat

SEQ ID NO: 1169598 - DNA, 15 bp, Homo sapiens
aatacacattttaca

SEQ ID NO: 1169599 - DNA, 15 bp, Homo sapiens
aaatacacattttac

SEQ ID NO: 1169600 - DNA, 15 bp, Homo sapiens
aaaatacacatttta

SEQ ID NO: 1169601 - DNA, 15 bp, Homo sapiens
taaaatacacatttt

SEQ ID NO: 1169602 - DNA, 15 bp, Homo sapiens
ataaaatacacattt

SEQ ID NO: 1169603 - DNA, 15 bp, Homo sapiens
aataaaatacacatt

SEQ ID NO: 1169604 - DNA, 15 bp, Homo sapiens
aaataaaatacacat

SEQ ID NO: 1169605 - DNA, 15 bp, Homo sapiens
caaataaaatacaca

SEQ ID NO: 1169606 - DNA, 15 bp, Homo sapiens
acaaataaaatacac

SEQ ID NO: 1169607 - DNA, 15 bp, Homo sapiens
gacaaataaaataca

SEQ ID NO: 1169608 - DNA, 15 bp, Homo sapiens
ggacaaataaaatac

SEQ ID NO: 1169609 - DNA, 15 bp, Homo sapiens
aggacaaataaaata

SEQ ID NO: 1169610 - DNA, 15 bp, Homo sapiens
aaggacaaataaaat

SEQ ID NO: 1169611 - DNA, 15 bp, Homo sapiens
aaaggacaaataaaa

SEQ ID NO: 1169612 - DNA, 15 bp, Homo sapiens
aaaaggacaaataaa

SEQ ID NO: 1169613 - DNA, 15 bp, Homo sapiens
taaaaggacaaataa

SEQ ID NO: 1169614 - DNA, 15 bp, Homo sapiens
ataaaaggacaaata

SEQ ID NO: 1169615 - DNA, 15 bp, Homo sapiens
aataaaaggacaaat

SEQ ID NO: 1169616 - DNA, 15 bp, Homo sapiens
caataaaaggacaaa

SEQ ID NO: 1169617 - DNA, 15 bp, Homo sapiens
acaataaaaggacaa

SEQ ID NO: 1169618 - DNA, 15 bp, Homo sapiens
aacaataaaaggaca

SEQ ID NO: 1169619 - DNA, 15 bp, Homo sapiens
aaacaataaaaggac

SEQ ID NO: 1169620 - DNA, 15 bp, Homo sapiens
aaaacaataaaagga

SEQ ID NO: 1169621 - DNA, 15 bp, Homo sapiens
gaaaacaataaaagg

SEQ ID NO: 1169622 - DNA, 15 bp, Homo sapiens
ggaaaacaataaaag

SEQ ID NO: 1169623 - DNA, 15 bp, Homo sapiens
aggaaaacaataaaa

SEQ ID NO: 1169624 - DNA, 15 bp, Homo sapiens
taggaaaacaataaa

SEQ ID NO: 1169625 - DNA, 15 bp, Homo sapiens
gtaggaaaacaataa

SEQ ID NO: 1169626 - DNA, 15 bp, Homo sapiens
agtaggaaaacaata

SEQ ID NO: 1169627 - DNA, 15 bp, Homo sapiens
aagtaggaaaacaat

SEQ ID NO: 1169628 - DNA, 15 bp, Homo sapiens
gaagtaggaaaacaa

SEQ ID NO: 1169629 - DNA, 15 bp, Homo sapiens
agaagtaggaaaaca

SEQ ID NO: 1169630 - DNA, 15 bp, Homo sapiens
aagaagtaggaaaac

SEQ ID NO: 1169631 - DNA, 15 bp, Homo sapiens
taagaagtaggaaaa

SEQ ID NO: 1169632 - DNA, 15 bp, Homo sapiens
ctaagaagtaggaaa

SEQ ID NO: 1169633 - DNA, 15 bp, Homo sapiens
tctaagaagtaggaa

SEQ ID NO: 1169634 - DNA, 15 bp, Homo sapiens
gtctaagaagtagga

SEQ ID NO: 1169635 - DNA, 15 bp, Homo sapiens
tgtctaagaagtagg

SEQ ID NO: 1169636 - DNA, 15 bp, Homo sapiens
atgtctaagaagtag

SEQ ID NO: 1169637 - DNA, 15 bp, Homo sapiens
catgtctaagaagta

SEQ ID NO: 1169638 - DNA, 15 bp, Homo sapiens
acatgtctaagaagt

SEQ ID NO: 1169639 - DNA, 15 bp, Homo sapiens
aacatgtctaagaag

SEQ ID NO: 1169640 - DNA, 15 bp, Homo sapiens
taacatgtctaagaa

SEQ ID NO: 1169641 - DNA, 15 bp, Homo sapiens
ttaacatgtctaaga

SEQ ID NO: 1169642 - DNA, 15 bp, Homo sapiens
cttaacatgtctaag

SEQ ID NO: 1169643 - DNA, 15 bp, Homo sapiens
tcttaacatgtctaa

SEQ ID NO: 1169644 - DNA, 15 bp, Homo sapiens
ttcttaacatgtcta

SEQ ID NO: 1169645 - DNA, 15 bp, Homo sapiens
gttcttaacatgtct

SEQ ID NO: 1169646 - DNA, 15 bp, Homo sapiens
agttcttaacatgtc

SEQ ID NO: 1169647 - DNA, 15 bp, Homo sapiens
tagttcttaacatgt

SEQ ID NO: 1169648 - DNA, 15 bp, Homo sapiens
atagttcttaacatg

SEQ ID NO: 1169649 - DNA, 15 bp, Homo sapiens
catagttcttaacat

SEQ ID NO: 1169650 - DNA, 15 bp, Homo sapiens
ccatagttcttaaca

SEQ ID NO: 1169651 - DNA, 15 bp, Homo sapiens
tccatagttcttaac

SEQ ID NO: 1169652 - DNA, 15 bp, Homo sapiens
ttccatagttcttaa

SEQ ID NO: 1169653 - DNA, 15 bp, Homo sapiens
tttccatagttctta

SEQ ID NO: 1169654 - DNA, 15 bp, Homo sapiens
ttttccatagttctt

SEQ ID NO: 1169655 - DNA, 15 bp, Homo sapiens
tttttccatagttct

SEQ ID NO: 1169656 - DNA, 15 bp, Homo sapiens
ctttttccatagttc

SEQ ID NO: 1169657 - DNA, 15 bp, Homo sapiens
tctttttccatagtt

SEQ ID NO: 1169658 - DNA, 15 bp, Homo sapiens
atctttttccatagt

SEQ ID NO: 1169659 - DNA, 15 bp, Homo sapiens
tatctttttccatag

SEQ ID NO: 1169660 - DNA, 15 bp, Homo sapiens
atatctttttccata

SEQ ID NO: 1169661 - DNA, 15 bp, Homo sapiens
catatctttttccat

SEQ ID NO: 1169662 - DNA, 15 bp, Homo sapiens
ccatatctttttcca

SEQ ID NO: 1169663 - DNA, 15 bp, Homo sapiens
cccatatctttttcc

SEQ ID NO: 1169664 - DNA, 15 bp, Homo sapiens
tcccatatctttttc

SEQ ID NO: 1169665 - DNA, 15 bp, Homo sapiens
ctcccatatcttttt

SEQ ID NO: 1169666 - DNA, 15 bp, Homo sapiens
actcccatatctttt

SEQ ID NO: 1169667 - DNA, 15 bp, Homo sapiens
aactcccatatcttt

SEQ ID NO: 1169668 - DNA, 15 bp, Homo sapiens
aaactcccatatctt

SEQ ID NO: 1169669 - DNA, 15 bp, Homo sapiens
caaactcccatatct

SEQ ID NO: 1169670 - DNA, 15 bp, Homo sapiens
acaaactcccatatc

SEQ ID NO: 1169671 - DNA, 15 bp, Homo sapiens
cacaaactcccatat

SEQ ID NO: 1169672 - DNA, 15 bp, Homo sapiens
tcacaaactcccata

SEQ ID NO: 1169673 - DNA, 15 bp, Homo sapiens
ttcacaaactcccat

SEQ ID NO: 1169674 - DNA, 15 bp, Homo sapiens
tttcacaaactccca

SEQ ID NO: 1169675 - DNA, 15 bp, Homo sapiens
ttttcacaaactccc

SEQ ID NO: 1169676 - DNA, 15 bp, Homo sapiens
attttcacaaactcc

SEQ ID NO: 1169677 - DNA, 15 bp, Homo sapiens
aattttcacaaactc

SEQ ID NO: 1169678 - DNA, 15 bp, Homo sapiens
aaattttcacaaact

SEQ ID NO: 1169679 - DNA, 15 bp, Homo sapiens
taaattttcacaaac

SEQ ID NO: 1169680 - DNA, 15 bp, Homo sapiens
ttaaattttcacaaa

SEQ ID NO: 1169681 - DNA, 15 bp, Homo sapiens
tttaaattttcacaa

SEQ ID NO: 1169682 - DNA, 15 bp, Homo sapiens
atttaaattttcaca

SEQ ID NO: 1169683 - DNA, 15 bp, Homo sapiens
tatttaaattttcac

SEQ ID NO: 1169684 - DNA, 15 bp, Homo sapiens
ttatttaaattttca

SEQ ID NO: 1169685 - DNA, 15 bp, Homo sapiens
attatttaaattttc

SEQ ID NO: 1169686 - DNA, 15 bp, Homo sapiens
aattatttaaatttt

SEQ ID NO: 1169687 - DNA, 15 bp, Homo sapiens
gaattatttaaattt

SEQ ID NO: 1169688 - DNA, 15 bp, Homo sapiens
tgaattatttaaatt

SEQ ID NO: 1169689 - DNA, 15 bp, Homo sapiens
atgaattatttaaat

SEQ ID NO: 1169690 - DNA, 15 bp, Homo sapiens
tatgaattatttaaa

SEQ ID NO: 1169691 - DNA, 15 bp, Homo sapiens
atatgaattatttaa

SEQ ID NO: 1169692 - DNA, 15 bp, Homo sapiens
aatatgaattattta

SEQ ID NO: 1169693 - DNA, 15 bp, Homo sapiens
aaatatgaattattt

SEQ ID NO: 1169694 - DNA, 15 bp, Homo sapiens
taaatatgaattatt

SEQ ID NO: 1169695 - DNA, 15 bp, Homo sapiens
ataaatatgaattat

SEQ ID NO: 1169696 - DNA, 15 bp, Homo sapiens
tataaatatgaatta

SEQ ID NO: 1169697 - DNA, 15 bp, Homo sapiens
atataaatatgaatt

SEQ ID NO: 1169698 - DNA, 15 bp, Homo sapiens
aatataaatatgaat

SEQ ID NO: 1169699 - DNA, 15 bp, Homo sapiens
taatataaatatgaa

SEQ ID NO: 1169700 - DNA, 15 bp, Homo sapiens
gtaatataaatatga

SEQ ID NO: 1169701 - DNA, 15 bp, Homo sapiens
tgtaatataaatatg

SEQ ID NO: 1169702 - DNA, 15 bp, Homo sapiens
ttgtaatataaatat

SEQ ID NO: 1169703 - DNA, 15 bp, Homo sapiens
cttgtaatataaata

SEQ ID NO: 1169704 - DNA, 15 bp, Homo sapiens
tcttgtaatataaat

SEQ ID NO: 1169705 - DNA, 15 bp, Homo sapiens
ttcttgtaatataaa

SEQ ID NO: 1169706 - DNA, 15 bp, Homo sapiens
tttcttgtaatataa

SEQ ID NO: 1169707 - DNA, 15 bp, Homo sapiens
gtttcttgtaatata

SEQ ID NO: 1169708 - DNA, 15 bp, Homo sapiens
tgtttcttgtaatat

SEQ ID NO: 1169709 - DNA, 15 bp, Homo sapiens
ctgtttcttgtaata

SEQ ID NO: 1169710 - DNA, 15 bp, Homo sapiens
tctgtttcttgtaat

SEQ ID NO: 1169711 - DNA, 15 bp, Homo sapiens
atctgtttcttgtaa

SEQ ID NO: 1169712 - DNA, 15 bp, Homo sapiens
tatctgtttcttgta

SEQ ID NO: 1169713 - DNA, 15 bp, Homo sapiens
atatctgtttcttgt

SEQ ID NO: 1169714 - DNA, 15 bp, Homo sapiens
aatatctgtttcttg

SEQ ID NO: 1169715 - DNA, 15 bp, Homo sapiens
taatatctgtttctt

SEQ ID NO: 1169716 - DNA, 15 bp, Homo sapiens
ctaatatctgtttct

SEQ ID NO: 1169717 - DNA, 15 bp, Homo sapiens
tctaatatctgtttc

SEQ ID NO: 1169718 - DNA, 15 bp, Homo sapiens
ttctaatatctgttt

SEQ ID NO: 1169719 - DNA, 15 bp, Homo sapiens
attctaatatctgtt

SEQ ID NO: 1169720 - DNA, 15 bp, Homo sapiens
tattctaatatctgt

SEQ ID NO: 1169721 - DNA, 15 bp, Homo sapiens
atattctaatatctg

SEQ ID NO: 1169722 - DNA, 15 bp, Homo sapiens
catattctaatatct

SEQ ID NO: 1169723 - DNA, 15 bp, Homo sapiens
acatattctaatatc

SEQ ID NO: 1169724 - DNA, 15 bp, Homo sapiens
aacatattctaatat

SEQ ID NO: 1169725 - DNA, 15 bp, Homo sapiens
aaacatattctaata

SEQ ID NO: 1169726 - DNA, 15 bp, Homo sapiens
caaacatattctaat

SEQ ID NO: 1169727 - DNA, 15 bp, Homo sapiens
acaaacatattctaa

SEQ ID NO: 1169728 - DNA, 15 bp, Homo sapiens
aacaaacatattcta

SEQ ID NO: 1169729 - DNA, 15 bp, Homo sapiens
aaacaaacatattct

SEQ ID NO: 1169730 - DNA, 15 bp, Homo sapiens
aaaacaaacatattc

SEQ ID NO: 1169731 - DNA, 15 bp, Homo sapiens
taaaacaaacatatt

SEQ ID NO: 1169732 - DNA, 15 bp, Homo sapiens
ataaaacaaacatat

SEQ ID NO: 1169733 - DNA, 15 bp, Homo sapiens
tataaaacaaacata

SEQ ID NO: 1169734 - DNA, 15 bp, Homo sapiens
atataaaacaaacat

SEQ ID NO: 1169735 - DNA, 15 bp, Homo sapiens
aatataaaacaaaca

SEQ ID NO: 1169736 - DNA, 15 bp, Homo sapiens
aaatataaaacaaac

SEQ ID NO: 1169737 - DNA, 15 bp, Homo sapiens
gaaatataaaacaaa

SEQ ID NO: 1169738 - DNA, 15 bp, Homo sapiens
agaaatataaaacaa

SEQ ID NO: 1169739 - DNA, 15 bp, Homo sapiens
aagaaatataaaaca

SEQ ID NO: 1169740 - DNA, 15 bp, Homo sapiens
aaagaaatataaaac

SEQ ID NO: 1169741 - DNA, 15 bp, Homo sapiens
aaaagaaatataaaa

SEQ ID NO: 1169742 - DNA, 15 bp, Homo sapiens
caaaagaaatataaa

SEQ ID NO: 1169743 - DNA, 15 bp, Homo sapiens
acaaaagaaatataa

SEQ ID NO: 1169744 - DNA, 15 bp, Homo sapiens
tacaaaagaaatata

SEQ ID NO: 1169745 - DNA, 15 bp, Homo sapiens
ctacaaaagaaatat

SEQ ID NO: 1169746 - DNA, 15 bp, Homo sapiens
gctacaaaagaaata

SEQ ID NO: 1169747 - DNA, 15 bp, Homo sapiens
tgctacaaaagaaat

SEQ ID NO: 1169748 - DNA, 15 bp, Homo sapiens
ctgctacaaaagaaa

SEQ ID NO: 1169749 - DNA, 15 bp, Homo sapiens
tctgctacaaaagaa

SEQ ID NO: 1169750 - DNA, 15 bp, Homo sapiens
ttctgctacaaaaga

SEQ ID NO: 1169751 - DNA, 15 bp, Homo sapiens
attctgctacaaaag

SEQ ID NO: 1169752 - DNA, 15 bp, Homo sapiens
aattctgctacaaaa

SEQ ID NO: 1169753 - DNA, 15 bp, Homo sapiens
aaattctgctacaaa

SEQ ID NO: 1169754 - DNA, 15 bp, Homo sapiens
aaaattctgctacaa

SEQ ID NO: 1169755 - DNA, 15 bp, Homo sapiens
gaaaattctgctaca

SEQ ID NO: 1169756 - DNA, 15 bp, Homo sapiens
agaaaattctgctac

SEQ ID NO: 1169757 - DNA, 15 bp, Homo sapiens
tagaaaattctgcta

SEQ ID NO: 1169758 - DNA, 15 bp, Homo sapiens
ctagaaaattctgct

SEQ ID NO: 1169759 - DNA, 15 bp, Homo sapiens
gctagaaaattctgc

SEQ ID NO: 1169760 - DNA, 15 bp, Homo sapiens
ggctagaaaattctg

SEQ ID NO: 1169761 - DNA, 15 bp, Homo sapiens
tggctagaaaattct

SEQ ID NO: 1169762 - DNA, 15 bp, Homo sapiens
ctggctagaaaattc

SEQ ID NO: 1169763 - DNA, 15 bp, Homo sapiens
cctggctagaaaatt

SEQ ID NO: 1169764 - DNA, 15 bp, Homo sapiens
gcctggctagaaaat

SEQ ID NO: 1169765 - DNA, 15 bp, Homo sapiens
tgcctggctagaaaa

SEQ ID NO: 1169766 - DNA, 15 bp, Homo sapiens
atgcctggctagaaa

SEQ ID NO: 1169767 - DNA, 15 bp, Homo sapiens
aatgcctggctagaa

SEQ ID NO: 1169768 - DNA, 15 bp, Homo sapiens
caatgcctggctaga

SEQ ID NO: 1169769 - DNA, 15 bp, Homo sapiens
acaatgcctggctag

SEQ ID NO: 1169770 - DNA, 15 bp, Homo sapiens
agccacaatgcctgg

SEQ ID NO: 1169771 - DNA, 15 bp, Homo sapiens
aagccacaatgcctg

SEQ ID NO: 1169772 - DNA, 15 bp, Homo sapiens
taagccacaatgcct

SEQ ID NO: 1169773 - DNA, 15 bp, Homo sapiens
gtaagccacaatgcc

SEQ ID NO: 1169774 - DNA, 15 bp, Homo sapiens
tgtaagccacaatgc

SEQ ID NO: 1169775 - DNA, 15 bp, Homo sapiens
gtgtaagccacaatg

SEQ ID NO: 1169776 - DNA, 15 bp, Homo sapiens
ggtgtaagccacaat

SEQ ID NO: 1169777 - DNA, 15 bp, Homo sapiens
aggtgtaagccacaa

SEQ ID NO: 1169778 - DNA, 15 bp, Homo sapiens
caggtgtaagccaca

SEQ ID NO: 1169779 - DNA, 15 bp, Homo sapiens
aattacaggtgtaag

SEQ ID NO: 1169780 - DNA, 15 bp, Homo sapiens
gaattacaggtgtaa

SEQ ID NO: 1169781 - DNA, 15 bp, Homo sapiens
ggaattacaggtgta

SEQ ID NO: 1169782 - DNA, 15 bp, Homo sapiens
tgtcccacctcagcc

SEQ ID NO: 1169783 - DNA, 15 bp, Homo sapiens
ttgtcccacctcagc

SEQ ID NO: 1169784 - DNA, 15 bp, Homo sapiens
attgtcccacctcag

SEQ ID NO: 1169785 - DNA, 15 bp, Homo sapiens
gattgtcccacctca

SEQ ID NO: 1169786 - DNA, 15 bp, Homo sapiens
tgattgtcccacctc

SEQ ID NO: 1169787 - DNA, 15 bp, Homo sapiens
gtgattgtcccacct

SEQ ID NO: 1169788 - DNA, 15 bp, Homo sapiens
agtgattgtcccacc

SEQ ID NO: 1169789 - DNA, 15 bp, Homo sapiens
aagtgattgtcccac

SEQ ID NO: 1169790 - DNA, 15 bp, Homo sapiens
taagtgattgtccca

SEQ ID NO: 1169791 - DNA, 15 bp, Homo sapiens
ttaagtgattgtccc

SEQ ID NO: 1169792 - DNA, 15 bp, Homo sapiens
cttaagtgattgtcc

SEQ ID NO: 1169793 - DNA, 15 bp, Homo sapiens
gcttaagtgattgtc

SEQ ID NO: 1169794 - DNA, 15 bp, Homo sapiens
ggcttaagtgattgt

SEQ ID NO: 1169795 - DNA, 15 bp, Homo sapiens
gggcttaagtgattg

SEQ ID NO: 1169796 - DNA, 15 bp, Homo sapiens
tgggcttaagtgatt

SEQ ID NO: 1169797 - DNA, 15 bp, Homo sapiens
ttgggcttaagtgat

SEQ ID NO: 1169798 - DNA, 15 bp, Homo sapiens
cttgggcttaagtga

SEQ ID NO: 1169799 - DNA, 15 bp, Homo sapiens
tcttgggcttaagtg

SEQ ID NO: 1169800 - DNA, 15 bp, Homo sapiens
ctcttgggcttaagt

SEQ ID NO: 1169801 - DNA, 15 bp, Homo sapiens
actcttgggcttaag

SEQ ID NO: 1169802 - DNA, 15 bp, Homo sapiens
aactcttgggcttaa

SEQ ID NO: 1169803 - DNA, 15 bp, Homo sapiens
aaactcttgggctta

SEQ ID NO: 1169804 - DNA, 15 bp, Homo sapiens
caaactcttgggctt

SEQ ID NO: 1169805 - DNA, 15 bp, Homo sapiens
tcaaactcttgggct

SEQ ID NO: 1169806 - DNA, 15 bp, Homo sapiens
ttcaaactcttgggc

SEQ ID NO: 1169807 - DNA, 15 bp, Homo sapiens
tttcaaactcttggg

SEQ ID NO: 1169808 - DNA, 15 bp, Homo sapiens
atttcaaactcttgg

SEQ ID NO: 1169809 - DNA, 15 bp, Homo sapiens
gatttcaaactcttg

SEQ ID NO: 1169810 - DNA, 15 bp, Homo sapiens
tgatttcaaactctt

SEQ ID NO: 1169811 - DNA, 15 bp, Homo sapiens
ctgatttcaaactct

SEQ ID NO: 1169812 - DNA, 15 bp, Homo sapiens
actgatttcaaactc

SEQ ID NO: 1169813 - DNA, 15 bp, Homo sapiens
cactgatttcaaact

SEQ ID NO: 1169814 - DNA, 15 bp, Homo sapiens
tcactgatttcaaac

SEQ ID NO: 1169815 - DNA, 15 bp, Homo sapiens
ctcactgatttcaaa

SEQ ID NO: 1169816 - DNA, 15 bp, Homo sapiens
cctcactgatttcaa

SEQ ID NO: 1169817 - DNA, 15 bp, Homo sapiens
ccctcactgatttca

SEQ ID NO: 1169818 - DNA, 15 bp, Homo sapiens
gccctcactgatttc

SEQ ID NO: 1169819 - DNA, 15 bp, Homo sapiens
tgccctcactgattt

SEQ ID NO: 1169820 - DNA, 15 bp, Homo sapiens
ttgccctcactgatt

SEQ ID NO: 1169821 - DNA, 15 bp, Homo sapiens
gttgccctcactgat

SEQ ID NO: 1169822 - DNA, 15 bp, Homo sapiens
tgttgccctcactga

SEQ ID NO: 1169823 - DNA, 15 bp, Homo sapiens
atgttgccctcactg

SEQ ID NO: 1169824 - DNA, 15 bp, Homo sapiens
tatgttgccctcact

SEQ ID NO: 1169825 - DNA, 15 bp, Homo sapiens
ctatgttgccctcac

SEQ ID NO: 1169826 - DNA, 15 bp, Homo sapiens
actatgttgccctca

SEQ ID NO: 1169827 - DNA, 15 bp, Homo sapiens
cactatgttgccctc

SEQ ID NO: 1169828 - DNA, 15 bp, Homo sapiens
tcactatgttgccct

SEQ ID NO: 1169829 - DNA, 15 bp, Homo sapiens
tagagtctcactatg

SEQ ID NO: 1169830 - DNA, 15 bp, Homo sapiens
atagagtctcactat

SEQ ID NO: 1169831 - DNA, 15 bp, Homo sapiens
gatagagtctcacta

SEQ ID NO: 1169832 - DNA, 15 bp, Homo sapiens
agagatagagtctca

SEQ ID NO: 1169833 - DNA, 15 bp, Homo sapiens
tagagatagagtctc

SEQ ID NO: 1169834 - DNA, 15 bp, Homo sapiens
gtagagatagagtct

SEQ ID NO: 1169835 - DNA, 15 bp, Homo sapiens
tgtagagatagagtc

SEQ ID NO: 1169836 - DNA, 15 bp, Homo sapiens
ttgtagagatagagt

SEQ ID NO: 1169837 - DNA, 15 bp, Homo sapiens
tttgtagagatagag

SEQ ID NO: 1169838 - DNA, 15 bp, Homo sapiens
ttttgtagagataga

SEQ ID NO: 1169839 - DNA, 15 bp, Homo sapiens
agaattttttgtaga

SEQ ID NO: 1169840 - DNA, 15 bp, Homo sapiens
gagaattttttgtag

SEQ ID NO: 1169841 - DNA, 15 bp, Homo sapiens
agagaattttttgta

SEQ ID NO: 1169842 - DNA, 15 bp, Homo sapiens
tagagaattttttgt

SEQ ID NO: 1169843 - DNA, 15 bp, Homo sapiens
atagagaattttttg

SEQ ID NO: 1169844 - DNA, 15 bp, Homo sapiens
gatagagaatttttt

SEQ ID NO: 1169845 - DNA, 15 bp, Homo sapiens
agatagagaattttt

SEQ ID NO: 1169846 - DNA, 15 bp, Homo sapiens
tagatagagaatttt

SEQ ID NO: 1169847 - DNA, 15 bp, Homo sapiens
atagatagagaattt

SEQ ID NO: 1169848 - DNA, 15 bp, Homo sapiens
tatagatagagaatt

SEQ ID NO: 1169849 - DNA, 15 bp, Homo sapiens
atatagatagagaat

SEQ ID NO: 1169850 - DNA, 15 bp, Homo sapiens
gatatagatagagaa

SEQ ID NO: 1169851 - DNA, 15 bp, Homo sapiens
agatatagatagaga

SEQ ID NO: 1169852 - DNA, 15 bp, Homo sapiens
tagatatagatagag

SEQ ID NO: 1169853 - DNA, 15 bp, Homo sapiens
atagatatagataga

SEQ ID NO: 1169854 - DNA, 15 bp, Homo sapiens
tatagatatagatag

SEQ ID NO: 1169855 - DNA, 15 bp, Homo sapiens
atatagatatagata

SEQ ID NO: 1169856 - DNA, 15 bp, Homo sapiens
tatatagatatagat

SEQ ID NO: 1169857 - DNA, 15 bp, Homo sapiens
ttatatagatataga

SEQ ID NO: 1169858 - DNA, 15 bp, Homo sapiens
tttatatagatatag

SEQ ID NO: 1169859 - DNA, 15 bp, Homo sapiens
ctttatatagatata

SEQ ID NO: 1169860 - DNA, 15 bp, Homo sapiens
cctttatatagatat

SEQ ID NO: 1169861 - DNA, 15 bp, Homo sapiens
tcctttatatagata

SEQ ID NO: 1169862 - DNA, 15 bp, Homo sapiens
ttcctttatatagat

SEQ ID NO: 1169863 - DNA, 15 bp, Homo sapiens
attcctttatataga

SEQ ID NO: 1169864 - DNA, 15 bp, Homo sapiens
aattcctttatatag

SEQ ID NO: 1169865 - DNA, 15 bp, Homo sapiens
aaattcctttatata

SEQ ID NO: 1169866 - DNA, 15 bp, Homo sapiens
aaaattcctttatat

SEQ ID NO: 1169867 - DNA, 15 bp, Homo sapiens
caaaattcctttata

SEQ ID NO: 1169868 - DNA, 15 bp, Homo sapiens
acaaaattcctttat

SEQ ID NO: 1169869 - DNA, 15 bp, Homo sapiens
cacaaaattccttta

SEQ ID NO: 1169870 - DNA, 15 bp, Homo sapiens
tcacaaaattccttt

SEQ ID NO: 1169871 - DNA, 15 bp, Homo sapiens
ctcacaaaattcctt

SEQ ID NO: 1169872 - DNA, 15 bp, Homo sapiens
cctcacaaaattcct

SEQ ID NO: 1169873 - DNA, 15 bp, Homo sapiens
tcctcacaaaattcc

SEQ ID NO: 1169874 - DNA, 15 bp, Homo sapiens
ttcctcacaaaattc

SEQ ID NO: 1169875 - DNA, 15 bp, Homo sapiens
tttcctcacaaaatt

SEQ ID NO: 1169876 - DNA, 15 bp, Homo sapiens
ttttcctcacaaaat

SEQ ID NO: 1169877 - DNA, 15 bp, Homo sapiens
gttttcctcacaaaa

SEQ ID NO: 1169878 - DNA, 15 bp, Homo sapiens
agttttcctcacaaa

SEQ ID NO: 1169879 - DNA, 15 bp, Homo sapiens
tagttttcctcacaa

SEQ ID NO: 1169880 - DNA, 15 bp, Homo sapiens
atagttttcctcaca

SEQ ID NO: 1169881 - DNA, 15 bp, Homo sapiens
tatagttttcctcac

SEQ ID NO: 1169882 - DNA, 15 bp, Homo sapiens
atatagttttcctca

SEQ ID NO: 1169883 - DNA, 15 bp, Homo sapiens
tatatagttttcctc

SEQ ID NO: 1169884 - DNA, 15 bp, Homo sapiens
atatatagttttcct

SEQ ID NO: 1169885 - DNA, 15 bp, Homo sapiens
aatatatagttttcc

SEQ ID NO: 1169886 - DNA, 15 bp, Homo sapiens
aaatatatagttttc

SEQ ID NO: 1169887 - DNA, 15 bp, Homo sapiens
aaaatatatagtttt

SEQ ID NO: 1169888 - DNA, 15 bp, Homo sapiens
caaaatatatagttt

SEQ ID NO: 1169889 - DNA, 15 bp, Homo sapiens
acaaaatatatagtt

SEQ ID NO: 1169890 - DNA, 15 bp, Homo sapiens
tatacaaaatatata

SEQ ID NO: 1169891 - DNA, 15 bp, Homo sapiens
atatacaaaatatat

SEQ ID NO: 1169892 - DNA, 15 bp, Homo sapiens
tatatacaaaatata

SEQ ID NO: 1169893 - DNA, 15 bp, Homo sapiens
ttatatacaaaatat

SEQ ID NO: 1169894 - DNA, 15 bp, Homo sapiens
tttatatacaaaata

SEQ ID NO: 1169895 - DNA, 15 bp, Homo sapiens
atttatatacaaaat

SEQ ID NO: 1169896 - DNA, 15 bp, Homo sapiens
catttatatacaaaa

SEQ ID NO: 1169897 - DNA, 15 bp, Homo sapiens
tcatttatatacaaa

SEQ ID NO: 1169898 - DNA, 15 bp, Homo sapiens
ttcatttatatacaa

SEQ ID NO: 1169899 - DNA, 15 bp, Homo sapiens
attcatttatataca

SEQ ID NO: 1169900 - DNA, 15 bp, Homo sapiens
aattcatttatatac

SEQ ID NO: 1169901 - DNA, 15 bp, Homo sapiens
aaattcatttatata

SEQ ID NO: 1169902 - DNA, 15 bp, Homo sapiens
aaaattcatttatat

SEQ ID NO: 1169903 - DNA, 15 bp, Homo sapiens
taaaattcatttata

SEQ ID NO: 1169904 - DNA, 15 bp, Homo sapiens
ataaaattcatttat

SEQ ID NO: 1169905 - DNA, 15 bp, Homo sapiens
gataaaattcattta

SEQ ID NO: 1169906 - DNA, 15 bp, Homo sapiens
tgataaaattcattt

SEQ ID NO: 1169907 - DNA, 15 bp, Homo sapiens
ctgataaaattcatt

SEQ ID NO: 1169908 - DNA, 15 bp, Homo sapiens
cctgataaaattcat

SEQ ID NO: 1169909 - DNA, 15 bp, Homo sapiens
tcctgataaaattca

SEQ ID NO: 1169910 - DNA, 15 bp, Homo sapiens
ttcctgataaaattc

SEQ ID NO: 1169911 - DNA, 15 bp, Homo sapiens
tttcctgataaaatt

SEQ ID NO: 1169912 - DNA, 15 bp, Homo sapiens
atttcctgataaaat

SEQ ID NO: 1169913 - DNA, 15 bp, Homo sapiens
tatttcctgataaaa

SEQ ID NO: 1169914 - DNA, 15 bp, Homo sapiens
atatttcctgataaa

SEQ ID NO: 1169915 - DNA, 15 bp, Homo sapiens
tatatttcctgataa

SEQ ID NO: 1169916 - DNA, 15 bp, Homo sapiens
atatatttcctgata

SEQ ID NO: 1169917 - DNA, 15 bp, Homo sapiens
gatatatttcctgat

SEQ ID NO: 1169918 - DNA, 15 bp, Homo sapiens
agatatatttcctga

SEQ ID NO: 1169919 - DNA, 15 bp, Homo sapiens
cagatatatttcctg

SEQ ID NO: 1169920 - DNA, 15 bp, Homo sapiens
acagatatatttcct

SEQ ID NO: 1169921 - DNA, 15 bp, Homo sapiens
tacagatatatttcc

SEQ ID NO: 1169922 - DNA, 15 bp, Homo sapiens
ttacagatatatttc

SEQ ID NO: 1169923 - DNA, 15 bp, Homo sapiens
tttacagatatattt

SEQ ID NO: 1169924 - DNA, 15 bp, Homo sapiens
atttacagatatatt

SEQ ID NO: 1169925 - DNA, 15 bp, Homo sapiens
catttacagatatat

SEQ ID NO: 1169926 - DNA, 15 bp, Homo sapiens
tcatttacagatata

SEQ ID NO: 1169927 - DNA, 15 bp, Homo sapiens
ttcatttacagatat

SEQ ID NO: 1169928 - DNA, 15 bp, Homo sapiens
attcatttacagata

SEQ ID NO: 1169929 - DNA, 15 bp, Homo sapiens
aattcatttacagat

SEQ ID NO: 1169930 - DNA, 15 bp, Homo sapiens
aaattcatttacaga

SEQ ID NO: 1169931 - DNA, 15 bp, Homo sapiens
aaaattcatttacag

SEQ ID NO: 1169932 - DNA, 15 bp, Homo sapiens
taaaattcatttaca

SEQ ID NO: 1169933 - DNA, 15 bp, Homo sapiens
ataaaattcatttac

SEQ ID NO: 1169934 - DNA, 15 bp, Homo sapiens
tataaaattcattta

SEQ ID NO: 1169935 - DNA, 15 bp, Homo sapiens
ttataaaattcattt

SEQ ID NO: 1169936 - DNA, 15 bp, Homo sapiens
tttataaaattcatt

SEQ ID NO: 1169937 - DNA, 15 bp, Homo sapiens
ttttataaaattcat

SEQ ID NO: 1169938 - DNA, 15 bp, Homo sapiens
attttataaaattca

SEQ ID NO: 1169939 - DNA, 15 bp, Homo sapiens
tattttataaaattc

SEQ ID NO: 1169940 - DNA, 15 bp, Homo sapiens
atattttataaaatt

SEQ ID NO: 1169941 - DNA, 15 bp, Homo sapiens
tatattttataaaat

SEQ ID NO: 1169942 - DNA, 15 bp, Homo sapiens
ctatattttataaaa

SEQ ID NO: 1169943 - DNA, 15 bp, Homo sapiens
gctatattttataaa

SEQ ID NO: 1169944 - DNA, 15 bp, Homo sapiens
tgctatattttataa

SEQ ID NO: 1169945 - DNA, 15 bp, Homo sapiens
atgctatattttata

SEQ ID NO: 1169946 - DNA, 15 bp, Homo sapiens
gatgctatattttat

SEQ ID NO: 1169947 - DNA, 15 bp, Homo sapiens
tgatgctatatttta

SEQ ID NO: 1169948 - DNA, 15 bp, Homo sapiens
gtgatgctatatttt

SEQ ID NO: 1169949 - DNA, 15 bp, Homo sapiens
agtgatgctatattt

SEQ ID NO: 1169950 - DNA, 15 bp, Homo sapiens
aagtgatgctatatt

SEQ ID NO: 1169951 - DNA, 15 bp, Homo sapiens
aaagtgatgctatat

SEQ ID NO: 1169952 - DNA, 15 bp, Homo sapiens
taaagtgatgctata

SEQ ID NO: 1169953 - DNA, 15 bp, Homo sapiens
ataaagtgatgctat

SEQ ID NO: 1169954 - DNA, 15 bp, Homo sapiens
gataaagtgatgcta

SEQ ID NO: 1169955 - DNA, 15 bp, Homo sapiens
ggataaagtgatgct

SEQ ID NO: 1169956 - DNA, 15 bp, Homo sapiens
aggataaagtgatgc

SEQ ID NO: 1169957 - DNA, 15 bp, Homo sapiens
aaggataaagtgatg

SEQ ID NO: 1169958 - DNA, 15 bp, Homo sapiens
caaggataaagtgat

SEQ ID NO: 1169959 - DNA, 15 bp, Homo sapiens
tcaaggataaagtga

SEQ ID NO: 1169960 - DNA, 15 bp, Homo sapiens
atcaaggataaagtg

SEQ ID NO: 1169961 - DNA, 15 bp, Homo sapiens
aatcaaggataaagt

SEQ ID NO: 1169962 - DNA, 15 bp, Homo sapiens
aaatcaaggataaag

SEQ ID NO: 1169963 - DNA, 15 bp, Homo sapiens
taaatcaaggataaa

SEQ ID NO: 1169964 - DNA, 15 bp, Homo sapiens
ataaatcaaggataa

SEQ ID NO: 1169965 - DNA, 15 bp, Homo sapiens
aataaatcaaggata

SEQ ID NO: 1169966 - DNA, 15 bp, Homo sapiens
aaataaatcaaggat

SEQ ID NO: 1169967 - DNA, 15 bp, Homo sapiens
gaaataaatcaagga

SEQ ID NO: 1169968 - DNA, 15 bp, Homo sapiens
tgaaataaatcaagg

SEQ ID NO: 1169969 - DNA, 15 bp, Homo sapiens
atgaaataaatcaag

SEQ ID NO: 1169970 - DNA, 15 bp, Homo sapiens
aatgaaataaatcaa

SEQ ID NO: 1169971 - DNA, 15 bp, Homo sapiens
aaatgaaataaatca

SEQ ID NO: 1169972 - DNA, 15 bp, Homo sapiens
taaatgaaataaatc

SEQ ID NO: 1169973 - DNA, 15 bp, Homo sapiens
attaaatgaaataaa

SEQ ID NO: 1169974 - DNA, 15 bp, Homo sapiens
tattaaatgaaataa

SEQ ID NO: 1169975 - DNA, 15 bp, Homo sapiens
ttattaaatgaaata

SEQ ID NO: 1169976 - DNA, 15 bp, Homo sapiens
attattaaatgaaat

SEQ ID NO: 1169977 - DNA, 15 bp, Homo sapiens
aattattaaatgaaa

SEQ ID NO: 1169978 - DNA, 15 bp, Homo sapiens
taattattaaatgaa

SEQ ID NO: 1169979 - DNA, 15 bp, Homo sapiens
ataattattaaatga

SEQ ID NO: 1169980 - DNA, 15 bp, Homo sapiens
aataattattaaatg

SEQ ID NO: 1169981 - DNA, 15 bp, Homo sapiens
aaataattattaaat

SEQ ID NO: 1169982 - DNA, 15 bp, Homo sapiens
aaaataattattaaa

SEQ ID NO: 1169983 - DNA, 15 bp, Homo sapiens
taaaataattattaa

SEQ ID NO: 1169984 - DNA, 15 bp, Homo sapiens
ttaaaataattatta

SEQ ID NO: 1169985 - DNA, 15 bp, Homo sapiens
ctttaaaataattat

SEQ ID NO: 1169986 - DNA, 15 bp, Homo sapiens
actttaaaataatta

SEQ ID NO: 1169987 - DNA, 15 bp, Homo sapiens
tactttaaaataatt

SEQ ID NO: 1169988 - DNA, 15 bp, Homo sapiens
ttactttaaaataat

SEQ ID NO: 1169989 - DNA, 15 bp, Homo sapiens
attactttaaaataa

SEQ ID NO: 1169990 - DNA, 15 bp, Homo sapiens
tattactttaaaata

SEQ ID NO: 1169991 - DNA, 15 bp, Homo sapiens
atattactttaaaat

SEQ ID NO: 1169992 - DNA, 15 bp, Homo sapiens
tatattactttaaaa

SEQ ID NO: 1169993 - DNA, 15 bp, Homo sapiens
gtatattactttaaa

SEQ ID NO: 1169994 - DNA, 15 bp, Homo sapiens
agtatattactttaa

SEQ ID NO: 1169995 - DNA, 15 bp, Homo sapiens
tagtatattacttta

SEQ ID NO: 1169996 - DNA, 15 bp, Homo sapiens
ttagtatattacttt

SEQ ID NO: 1169997 - DNA, 15 bp, Homo sapiens
attagtatattactt

SEQ ID NO: 1169998 - DNA, 15 bp, Homo sapiens
tattagtatattact

SEQ ID NO: 1169999 - DNA, 15 bp, Homo sapiens
ttattagtatattac

SEQ ID NO: 1170000 - DNA, 15 bp, Homo sapiens
tttattagtatatta

SEQ ID NO: 1170001 - DNA, 15 bp, Homo sapiens
gtttattagtatatt

SEQ ID NO: 1170002 - DNA, 15 bp, Homo sapiens
agtttattagtatat

SEQ ID NO: 1170003 - DNA, 15 bp, Homo sapiens
gagtttattagtata

SEQ ID NO: 1170004 - DNA, 15 bp, Homo sapiens
tgagtttattagtat

SEQ ID NO: 1170005 - DNA, 15 bp, Homo sapiens
atgagtttattagta

SEQ ID NO: 1170006 - DNA, 15 bp, Homo sapiens
aatgagtttattagt

SEQ ID NO: 1170007 - DNA, 15 bp, Homo sapiens
aaatgagtttattag

SEQ ID NO: 1170008 - DNA, 15 bp, Homo sapiens
aaaatgagtttatta

SEQ ID NO: 1170009 - DNA, 15 bp, Homo sapiens
taaaatgagtttatt

SEQ ID NO: 1170010 - DNA, 15 bp, Homo sapiens
ttaaaatgagtttat

SEQ ID NO: 1170011 - DNA, 15 bp, Homo sapiens
tttaaaatgagttta

SEQ ID NO: 1170012 - DNA, 15 bp, Homo sapiens
ttttaaaatgagttt

SEQ ID NO: 1170013 - DNA, 15 bp, Homo sapiens
tttttaaaatgagtt

SEQ ID NO: 1170014 - DNA, 15 bp, Homo sapiens
gtttttaaaatgagt

SEQ ID NO: 1170015 - DNA, 15 bp, Homo sapiens
agtttttaaaatgag

SEQ ID NO: 1170016 - DNA, 15 bp, Homo sapiens
cagtttttaaaatga

SEQ ID NO: 1170017 - DNA, 15 bp, Homo sapiens
gcagtttttaaaatg

SEQ ID NO: 1170018 - DNA, 15 bp, Homo sapiens
agcagtttttaaaat

SEQ ID NO: 1170019 - DNA, 15 bp, Homo sapiens
tagcagtttttaaaa

SEQ ID NO: 1170020 - DNA, 15 bp, Homo sapiens
atagcagtttttaaa

SEQ ID NO: 1170021 - DNA, 15 bp, Homo sapiens
catagcagtttttaa

SEQ ID NO: 1170022 - DNA, 15 bp, Homo sapiens
tcatagcagttttta

SEQ ID NO: 1170023 - DNA, 15 bp, Homo sapiens
gtcatagcagttttt

SEQ ID NO: 1170024 - DNA, 15 bp, Homo sapiens
ggtcatagcagtttt

SEQ ID NO: 1170025 - DNA, 15 bp, Homo sapiens
tggtcatagcagttt

SEQ ID NO: 1170026 - DNA, 15 bp, Homo sapiens
atggtcatagcagtt

SEQ ID NO: 1170027 - DNA, 15 bp, Homo sapiens
tatggtcatagcagt

SEQ ID NO: 1170028 - DNA, 15 bp, Homo sapiens
ttatggtcatagcag

SEQ ID NO: 1170029 - DNA, 15 bp, Homo sapiens
tttatggtcatagca

SEQ ID NO: 1170030 - DNA, 15 bp, Homo sapiens
ttttatggtcatagc

SEQ ID NO: 1170031 - DNA, 15 bp, Homo sapiens
gttttatggtcatag

SEQ ID NO: 1170032 - DNA, 15 bp, Homo sapiens
agttttatggtcata

SEQ ID NO: 1170033 - DNA, 15 bp, Homo sapiens
tagttttatggtcat

SEQ ID NO: 1170034 - DNA, 15 bp, Homo sapiens
atagttttatggtca

SEQ ID NO: 1170035 - DNA, 15 bp, Homo sapiens
aatagttttatggtc

SEQ ID NO: 1170036 - DNA, 15 bp, Homo sapiens
taatagttttatggt

SEQ ID NO: 1170037 - DNA, 15 bp, Homo sapiens
ctaatagttttatgg

SEQ ID NO: 1170038 - DNA, 15 bp, Homo sapiens
tctaatagttttatg

SEQ ID NO: 1170039 - DNA, 15 bp, Homo sapiens
ctctaatagttttat

SEQ ID NO: 1170040 - DNA, 15 bp, Homo sapiens
tctctaatagtttta

SEQ ID NO: 1170041 - DNA, 15 bp, Homo sapiens
atctctaatagtttt

SEQ ID NO: 1170042 - DNA, 15 bp, Homo sapiens
tatctctaatagttt

SEQ ID NO: 1170043 - DNA, 15 bp, Homo sapiens
ttatctctaatagtt

SEQ ID NO: 1170044 - DNA, 15 bp, Homo sapiens
gttatctctaatagt

SEQ ID NO: 1170045 - DNA, 15 bp, Homo sapiens
tgttatctctaatag

SEQ ID NO: 1170046 - DNA, 15 bp, Homo sapiens
atgttatctctaata

SEQ ID NO: 1170047 - DNA, 15 bp, Homo sapiens
tatgttatctctaat

SEQ ID NO: 1170048 - DNA, 15 bp, Homo sapiens
ttatgttatctctaa

SEQ ID NO: 1170049 - DNA, 15 bp, Homo sapiens
cttatgttatctcta

SEQ ID NO: 1170050 - DNA, 15 bp, Homo sapiens
tcttatgttatctct

SEQ ID NO: 1170051 - DNA, 15 bp, Homo sapiens
ctcttatgttatctc

SEQ ID NO: 1170052 - DNA, 15 bp, Homo sapiens
tctcttatgttatct

SEQ ID NO: 1170053 - DNA, 15 bp, Homo sapiens
ttctcttatgttatc

SEQ ID NO: 1170054 - DNA, 15 bp, Homo sapiens
tttctcttatgttat

SEQ ID NO: 1170055 - DNA, 15 bp, Homo sapiens
ttttctcttatgtta

SEQ ID NO: 1170056 - DNA, 15 bp, Homo sapiens
attttctcttatgtt

SEQ ID NO: 1170057 - DNA, 15 bp, Homo sapiens
gattttctcttatgt

SEQ ID NO: 1170058 - DNA, 15 bp, Homo sapiens
agattttctcttatg

SEQ ID NO: 1170059 - DNA, 15 bp, Homo sapiens
tagattttctcttat

SEQ ID NO: 1170060 - DNA, 15 bp, Homo sapiens
ctagattttctctta

SEQ ID NO: 1170061 - DNA, 15 bp, Homo sapiens
cctagattttctctt

SEQ ID NO: 1170062 - DNA, 15 bp, Homo sapiens
acctagattttctct

SEQ ID NO: 1170063 - DNA, 15 bp, Homo sapiens
cacctagattttctc

SEQ ID NO: 1170064 - DNA, 15 bp, Homo sapiens
tcacctagattttct

SEQ ID NO: 1170065 - DNA, 15 bp, Homo sapiens
gtcacctagattttc

SEQ ID NO: 1170066 - DNA, 15 bp, Homo sapiens
ggtcacctagatttt

SEQ ID NO: 1170067 - DNA, 15 bp, Homo sapiens
aggtcacctagattt

SEQ ID NO: 1170068 - DNA, 15 bp, Homo sapiens
aaggtcacctagatt

SEQ ID NO: 1170069 - DNA, 15 bp, Homo sapiens
caaggtcacctagat

SEQ ID NO: 1170070 - DNA, 15 bp, Homo sapiens
ccaaggtcacctaga

SEQ ID NO: 1170071 - DNA, 15 bp, Homo sapiens
cccaaggtcacctag

SEQ ID NO: 1170072 - DNA, 15 bp, Homo sapiens
acccaaggtcaccta

SEQ ID NO: 1170073 - DNA, 15 bp, Homo sapiens
aacccaaggtcacct

SEQ ID NO: 1170074 - DNA, 15 bp, Homo sapiens
aaacccaaggtcacc

SEQ ID NO: 1170075 - DNA, 15 bp, Homo sapiens
caaacccaaggtcac

SEQ ID NO: 1170076 - DNA, 15 bp, Homo sapiens
ccaaacccaaggtca

SEQ ID NO: 1170077 - DNA, 15 bp, Homo sapiens
tccaaacccaaggtc

SEQ ID NO: 1170078 - DNA, 15 bp, Homo sapiens
ctccaaacccaaggt

SEQ ID NO: 1170079 - DNA, 15 bp, Homo sapiens
tctccaaacccaagg

SEQ ID NO: 1170080 - DNA, 15 bp, Homo sapiens
atctccaaacccaag

SEQ ID NO: 1170081 - DNA, 15 bp, Homo sapiens
tatctccaaacccaa

SEQ ID NO: 1170082 - DNA, 15 bp, Homo sapiens
ttatctccaaaccca

SEQ ID NO: 1170083 - DNA, 15 bp, Homo sapiens
gttatctccaaaccc

SEQ ID NO: 1170084 - DNA, 15 bp, Homo sapiens
agttatctccaaacc

SEQ ID NO: 1170085 - DNA, 15 bp, Homo sapiens
aagttatctccaaac

SEQ ID NO: 1170086 - DNA, 15 bp, Homo sapiens
aaagttatctccaaa

SEQ ID NO: 1170087 - DNA, 15 bp, Homo sapiens
aaaagttatctccaa

SEQ ID NO: 1170088 - DNA, 15 bp, Homo sapiens
aaaaagttatctcca

SEQ ID NO: 1170089 - DNA, 15 bp, Homo sapiens
taaaaagttatctcc

SEQ ID NO: 1170090 - DNA, 15 bp, Homo sapiens
ataaaaagttatctc

SEQ ID NO: 1170091 - DNA, 15 bp, Homo sapiens
tataaaaagttatct

SEQ ID NO: 1170092 - DNA, 15 bp, Homo sapiens
atataaaaagttatc

SEQ ID NO: 1170093 - DNA, 15 bp, Homo sapiens
tatataaaaagttat

SEQ ID NO: 1170094 - DNA, 15 bp, Homo sapiens
atatataaaaagtta

SEQ ID NO: 1170095 - DNA, 15 bp, Homo sapiens
tatatataaaaagtt

SEQ ID NO: 1170096 - DNA, 15 bp, Homo sapiens
ttatatataaaaagt

SEQ ID NO: 1170097 - DNA, 15 bp, Homo sapiens
gttatatataaaaag

SEQ ID NO: 1170098 - DNA, 15 bp, Homo sapiens
tgttatatataaaaa

SEQ ID NO: 1170099 - DNA, 15 bp, Homo sapiens
gtgttatatataaaa

SEQ ID NO: 1170100 - DNA, 15 bp, Homo sapiens
ggtgttatatataaa

SEQ ID NO: 1170101 - DNA, 15 bp, Homo sapiens
tggtgttatatataa

SEQ ID NO: 1170102 - DNA, 15 bp, Homo sapiens
ttggtgttatatata

SEQ ID NO: 1170103 - DNA, 15 bp, Homo sapiens
tttggtgttatatat

SEQ ID NO: 1170104 - DNA, 15 bp, Homo sapiens
ctttggtgttatata

SEQ ID NO: 1170105 - DNA, 15 bp, Homo sapiens
cctttggtgttatat

SEQ ID NO: 1170106 - DNA, 15 bp, Homo sapiens
gcctttggtgttata

SEQ ID NO: 1170107 - DNA, 15 bp, Homo sapiens
cgcctttggtgttat

SEQ ID NO: 1170108 - DNA, 15 bp, Homo sapiens
gcgcctttggtgtta

SEQ ID NO: 1170109 - DNA, 15 bp, Homo sapiens
tgcgcctttggtgtt

SEQ ID NO: 1170110 - DNA, 15 bp, Homo sapiens
ttgcgcctttggtgt

SEQ ID NO: 1170111 - DNA, 15 bp, Homo sapiens
attgcgcctttggtg

SEQ ID NO: 1170112 - DNA, 15 bp, Homo sapiens
gattgcgcctttggt

SEQ ID NO: 1170113 - DNA, 15 bp, Homo sapiens
tgattgcgcctttgg

SEQ ID NO: 1170114 - DNA, 15 bp, Homo sapiens
ttgattgcgcctttg

SEQ ID NO: 1170115 - DNA, 15 bp, Homo sapiens
attgattgcgccttt

SEQ ID NO: 1170116 - DNA, 15 bp, Homo sapiens
cattgattgcgcctt

SEQ ID NO: 1170117 - DNA, 15 bp, Homo sapiens
tcattgattgcgcct

SEQ ID NO: 1170118 - DNA, 15 bp, Homo sapiens
ttcattgattgcgcc

SEQ ID NO: 1170119 - DNA, 15 bp, Homo sapiens
tttcattgattgcgc

SEQ ID NO: 1170120 - DNA, 15 bp, Homo sapiens
ttttcattgattgcg

SEQ ID NO: 1170121 - DNA, 15 bp, Homo sapiens
tttttcattgattgc

SEQ ID NO: 1170122 - DNA, 15 bp, Homo sapiens
ttttttcattgattg

SEQ ID NO: 1170123 - DNA, 15 bp, Homo sapiens
tttttttcattgatt

SEQ ID NO: 1170124 - DNA, 15 bp, Homo sapiens
ttttttttcattgat

SEQ ID NO: 1170125 - DNA, 15 bp, Homo sapiens
attttttttcattga

SEQ ID NO: 1170126 - DNA, 15 bp, Homo sapiens
cattttttttcattg

SEQ ID NO: 1170127 - DNA, 15 bp, Homo sapiens
tcattttttttcatt

SEQ ID NO: 1170128 - DNA, 15 bp, Homo sapiens
gtcattttttttcat

SEQ ID NO: 1170129 - DNA, 15 bp, Homo sapiens
tgtcattttttttca

SEQ ID NO: 1170130 - DNA, 15 bp, Homo sapiens
ttgtcattttttttc

SEQ ID NO: 1170131 - DNA, 15 bp, Homo sapiens
cttgtcatttttttt

SEQ ID NO: 1170132 - DNA, 15 bp, Homo sapiens
gcttgtcattttttt

SEQ ID NO: 1170133 - DNA, 15 bp, Homo sapiens
agcttgtcatttttt

SEQ ID NO: 1170134 - DNA, 15 bp, Homo sapiens
gagcttgtcattttt

SEQ ID NO: 1170135 - DNA, 15 bp, Homo sapiens
agagcttgtcatttt

SEQ ID NO: 1170136 - DNA, 15 bp, Homo sapiens
tagagcttgtcattt

SEQ ID NO: 1170137 - DNA, 15 bp, Homo sapiens
atagagcttgtcatt

SEQ ID NO: 1170138 - DNA, 15 bp, Homo sapiens
tatagagcttgtcat

SEQ ID NO: 1170139 - DNA, 15 bp, Homo sapiens
atatagagcttgtca

SEQ ID NO: 1170140 - DNA, 15 bp, Homo sapiens
gatatagagcttgtc

SEQ ID NO: 1170141 - DNA, 15 bp, Homo sapiens
tgatatagagcttgt

SEQ ID NO: 1170142 - DNA, 15 bp, Homo sapiens
gtgatatagagcttg

SEQ ID NO: 1170143 - DNA, 15 bp, Homo sapiens
tgtgatatagagctt

SEQ ID NO: 1170144 - DNA, 15 bp, Homo sapiens
atgtgatatagagct

SEQ ID NO: 1170145 - DNA, 15 bp, Homo sapiens
tatgtgatatagagc

SEQ ID NO: 1170146 - DNA, 15 bp, Homo sapiens
atatgtgatatagag

SEQ ID NO: 1170147 - DNA, 15 bp, Homo sapiens
gatatgtgatataga

SEQ ID NO: 1170148 - DNA, 15 bp, Homo sapiens
tgatatgtgatatag

SEQ ID NO: 1170149 - DNA, 15 bp, Homo sapiens
ttgatatgtgatata

SEQ ID NO: 1170150 - DNA, 15 bp, Homo sapiens
attgatatgtgatat

SEQ ID NO: 1170151 - DNA, 15 bp, Homo sapiens
tattgatatgtgata

SEQ ID NO: 1170152 - DNA, 15 bp, Homo sapiens
atattgatatgtgat

SEQ ID NO: 1170153 - DNA, 15 bp, Homo sapiens
aatattgatatgtga

SEQ ID NO: 1170154 - DNA, 15 bp, Homo sapiens
taatattgatatgtg

SEQ ID NO: 1170155 - DNA, 15 bp, Homo sapiens
ttaatattgatatgt

SEQ ID NO: 1170156 - DNA, 15 bp, Homo sapiens
tttaatattgatatg

SEQ ID NO: 1170157 - DNA, 15 bp, Homo sapiens
ttttaatattgatat

SEQ ID NO: 1170158 - DNA, 15 bp, Homo sapiens
attttaatattgata

SEQ ID NO: 1170159 - DNA, 15 bp, Homo sapiens
cattttaatattgat

SEQ ID NO: 1170160 - DNA, 15 bp, Homo sapiens
acattttaatattga

SEQ ID NO: 1170161 - DNA, 15 bp, Homo sapiens
cacattttaatattg

SEQ ID NO: 1170162 - DNA, 15 bp, Homo sapiens
tcacattttaatatt

SEQ ID NO: 1170163 - DNA, 15 bp, Homo sapiens
atcacattttaatat

SEQ ID NO: 1170164 - DNA, 15 bp, Homo sapiens
gatcacattttaata

SEQ ID NO: 1170165 - DNA, 15 bp, Homo sapiens
agatcacattttaat

SEQ ID NO: 1170166 - DNA, 15 bp, Homo sapiens
cagatcacattttaa

SEQ ID NO: 1170167 - DNA, 15 bp, Homo sapiens
acagatcacatttta

SEQ ID NO: 1170168 - DNA, 15 bp, Homo sapiens
cacagatcacatttt

SEQ ID NO: 1170169 - DNA, 15 bp, Homo sapiens
tcacagatcacattt

SEQ ID NO: 1170170 - DNA, 15 bp, Homo sapiens
ttcacagatcacatt

SEQ ID NO: 1170171 - DNA, 15 bp, Homo sapiens
tttcacagatcacat

SEQ ID NO: 1170172 - DNA, 15 bp, Homo sapiens
ctttcacagatcaca

SEQ ID NO: 1170173 - DNA, 15 bp, Homo sapiens
cctttcacagatcac

SEQ ID NO: 1170174 - DNA, 15 bp, Homo sapiens
gcctttcacagatca

SEQ ID NO: 1170175 - DNA, 15 bp, Homo sapiens
tgcctttcacagatc

SEQ ID NO: 1170176 - DNA, 15 bp, Homo sapiens
atgcctttcacagat

SEQ ID NO: 1170177 - DNA, 15 bp, Homo sapiens
gatgcctttcacaga

SEQ ID NO: 1170178 - DNA, 15 bp, Homo sapiens
cgatgcctttcacag

SEQ ID NO: 1170179 - DNA, 15 bp, Homo sapiens
acgatgcctttcaca

SEQ ID NO: 1170180 - DNA, 15 bp, Homo sapiens
gacgatgcctttcac

SEQ ID NO: 1170181 - DNA, 15 bp, Homo sapiens
tgacgatgcctttca

SEQ ID NO: 1170182 - DNA, 15 bp, Homo sapiens
ttgacgatgcctttc

SEQ ID NO: 1170183 - DNA, 15 bp, Homo sapiens
cttgacgatgccttt

SEQ ID NO: 1170184 - DNA, 15 bp, Homo sapiens
tcttgacgatgcctt

SEQ ID NO: 1170185 - DNA, 15 bp, Homo sapiens
ctcttgacgatgcct

SEQ ID NO: 1170186 - DNA, 15 bp, Homo sapiens
tctcttgacgatgcc

SEQ ID NO: 1170187 - DNA, 15 bp, Homo sapiens
ttctcttgacgatgc

SEQ ID NO: 1170188 - DNA, 15 bp, Homo sapiens
gttctcttgacgatg

SEQ ID NO: 1170189 - DNA, 15 bp, Homo sapiens
tgttctcttgacgat

SEQ ID NO: 1170190 - DNA, 15 bp, Homo sapiens
ttgttctcttgacga

SEQ ID NO: 1170191 - DNA, 15 bp, Homo sapiens
tttgttctcttgacg

SEQ ID NO: 1170192 - DNA, 15 bp, Homo sapiens
ttttgttctcttgac

SEQ ID NO: 1170193 - DNA, 15 bp, Homo sapiens
tttttgttctcttga

SEQ ID NO: 1170194 - DNA, 15 bp, Homo sapiens
ctttttgttctcttg

SEQ ID NO: 1170195 - DNA, 15 bp, Homo sapiens
tctttttgttctctt

SEQ ID NO: 1170196 - DNA, 15 bp, Homo sapiens
gtctttttgttctct

SEQ ID NO: 1170197 - DNA, 15 bp, Homo sapiens
tgtctttttgttctc

SEQ ID NO: 1170198 - DNA, 15 bp, Homo sapiens
ttgtctttttgttct

SEQ ID NO: 1170199 - DNA, 15 bp, Homo sapiens
cttgtctttttgttc

SEQ ID NO: 1170200 - DNA, 15 bp, Homo sapiens
gcttgtctttttgtt

SEQ ID NO: 1170201 - DNA, 15 bp, Homo sapiens
ggcttgtctttttgt

SEQ ID NO: 1170202 - DNA, 15 bp, Homo sapiens
tggcttgtctttttg

SEQ ID NO: 1170203 - DNA, 15 bp, Homo sapiens
gtggcttgtcttttt

SEQ ID NO: 1170204 - DNA, 15 bp, Homo sapiens
tgtggcttgtctttt

SEQ ID NO: 1170205 - DNA, 15 bp, Homo sapiens
ctgtggcttgtcttt

SEQ ID NO: 1170206 - DNA, 15 bp, Homo sapiens
tctgtggcttgtctt

SEQ ID NO: 1170207 - DNA, 15 bp, Homo sapiens
gtctgtggcttgtct

SEQ ID NO: 1170208 - DNA, 15 bp, Homo sapiens
agtctgtggcttgtc

SEQ ID NO: 1170209 - DNA, 15 bp, Homo sapiens
cagtctgtggcttgt

SEQ ID NO: 1170210 - DNA, 15 bp, Homo sapiens
ccagtctgtggcttg

SEQ ID NO: 1170211 - DNA, 15 bp, Homo sapiens
cccagtctgtggctt

SEQ ID NO: 1170212 - DNA, 15 bp, Homo sapiens
tcccagtctgtggct

SEQ ID NO: 1170213 - DNA, 15 bp, Homo sapiens
ctcccagtctgtggc

SEQ ID NO: 1170214 - DNA, 15 bp, Homo sapiens
tctcccagtctgtgg

SEQ ID NO: 1170215 - DNA, 15 bp, Homo sapiens
ttctcccagtctgtg

SEQ ID NO: 1170216 - DNA, 15 bp, Homo sapiens
tttctcccagtctgt

SEQ ID NO: 1170217 - DNA, 15 bp, Homo sapiens
ttttctcccagtctg

SEQ ID NO: 1170218 - DNA, 15 bp, Homo sapiens
attttctcccagtct

SEQ ID NO: 1170219 - DNA, 15 bp, Homo sapiens
tattttctcccagtc

SEQ ID NO: 1170220 - DNA, 15 bp, Homo sapiens
atattttctcccagt

SEQ ID NO: 1170221 - DNA, 15 bp, Homo sapiens
aatattttctcccag

SEQ ID NO: 1170222 - DNA, 15 bp, Homo sapiens
aaatattttctccca

SEQ ID NO: 1170223 - DNA, 15 bp, Homo sapiens
caaatattttctccc

SEQ ID NO: 1170224 - DNA, 15 bp, Homo sapiens
gcaaatattttctcc

SEQ ID NO: 1170225 - DNA, 15 bp, Homo sapiens
tgcaaatattttctc

SEQ ID NO: 1170226 - DNA, 15 bp, Homo sapiens
ttgcaaatattttct

SEQ ID NO: 1170227 - DNA, 15 bp, Homo sapiens
tttgcaaatattttc

SEQ ID NO: 1170228 - DNA, 15 bp, Homo sapiens
ttttgcaaatatttt

SEQ ID NO: 1170229 - DNA, 15 bp, Homo sapiens
cttttgcaaatattt

SEQ ID NO: 1170230 - DNA, 15 bp, Homo sapiens
tcttttgcaaatatt

SEQ ID NO: 1170231 - DNA, 15 bp, Homo sapiens
gtcttttgcaaatat

SEQ ID NO: 1170232 - DNA, 15 bp, Homo sapiens
tgtcttttgcaaata

SEQ ID NO: 1170233 - DNA, 15 bp, Homo sapiens
atgtcttttgcaaat

SEQ ID NO: 1170234 - DNA, 15 bp, Homo sapiens
tatgtcttttgcaaa

SEQ ID NO: 1170235 - DNA, 15 bp, Homo sapiens
atatgtcttttgcaa

SEQ ID NO: 1170236 - DNA, 15 bp, Homo sapiens
catatgtcttttgca

SEQ ID NO: 1170237 - DNA, 15 bp, Homo sapiens
acatatgtcttttgc

SEQ ID NO: 1170238 - DNA, 15 bp, Homo sapiens
cacatatgtcttttg

SEQ ID NO: 1170239 - DNA, 15 bp, Homo sapiens
tcacatatgtctttt

SEQ ID NO: 1170240 - DNA, 15 bp, Homo sapiens
atcacatatgtcttt

SEQ ID NO: 1170241 - DNA, 15 bp, Homo sapiens
tatcacatatgtctt

SEQ ID NO: 1170242 - DNA, 15 bp, Homo sapiens
ttatcacatatgtct

SEQ ID NO: 1170243 - DNA, 15 bp, Homo sapiens
tttatcacatatgtc

SEQ ID NO: 1170244 - DNA, 15 bp, Homo sapiens
ttttatcacatatgt

SEQ ID NO: 1170245 - DNA, 15 bp, Homo sapiens
cttttatcacatatg

SEQ ID NO: 1170246 - DNA, 15 bp, Homo sapiens
tcttttatcacatat

SEQ ID NO: 1170247 - DNA, 15 bp, Homo sapiens
gtcttttatcacata

SEQ ID NO: 1170248 - DNA, 15 bp, Homo sapiens
tgtcttttatcacat

SEQ ID NO: 1170249 - DNA, 15 bp, Homo sapiens
ttgtcttttatcaca

SEQ ID NO: 1170250 - DNA, 15 bp, Homo sapiens
attgtcttttatcac

SEQ ID NO: 1170251 - DNA, 15 bp, Homo sapiens
aattgtcttttatca

SEQ ID NO: 1170252 - DNA, 15 bp, Homo sapiens
taattgtcttttatc

SEQ ID NO: 1170253 - DNA, 15 bp, Homo sapiens
ataattgtcttttat

SEQ ID NO: 1170254 - DNA, 15 bp, Homo sapiens
gataattgtctttta

SEQ ID NO: 1170255 - DNA, 15 bp, Homo sapiens
tgataattgtctttt

SEQ ID NO: 1170256 - DNA, 15 bp, Homo sapiens
ttgataattgtcttt

SEQ ID NO: 1170257 - DNA, 15 bp, Homo sapiens
tttgataattgtctt

SEQ ID NO: 1170258 - DNA, 15 bp, Homo sapiens
ttttgataattgtct

SEQ ID NO: 1170259 - DNA, 15 bp, Homo sapiens
attttgataattgtc

SEQ ID NO: 1170260 - DNA, 15 bp, Homo sapiens
tattttgataattgt

SEQ ID NO: 1170261 - DNA, 15 bp, Homo sapiens
atattttgataattg

SEQ ID NO: 1170262 - DNA, 15 bp, Homo sapiens
tatattttgataatt

SEQ ID NO: 1170263 - DNA, 15 bp, Homo sapiens
gtatattttgataat

SEQ ID NO: 1170264 - DNA, 15 bp, Homo sapiens
tgtatattttgataa

SEQ ID NO: 1170265 - DNA, 15 bp, Homo sapiens
ttgtatattttgata

SEQ ID NO: 1170266 - DNA, 15 bp, Homo sapiens
tttgtatattttgat

SEQ ID NO: 1170267 - DNA, 15 bp, Homo sapiens
atttgtatattttga

SEQ ID NO: 1170268 - DNA, 15 bp, Homo sapiens
tatttgtatattttg

SEQ ID NO: 1170269 - DNA, 15 bp, Homo sapiens
ttatttgtatatttt

SEQ ID NO: 1170270 - DNA, 15 bp, Homo sapiens
attatttgtatattt

SEQ ID NO: 1170271 - DNA, 15 bp, Homo sapiens
aattatttgtatatt

SEQ ID NO: 1170272 - DNA, 15 bp, Homo sapiens
gaattatttgtatat

SEQ ID NO: 1170273 - DNA, 15 bp, Homo sapiens
agaattatttgtata

SEQ ID NO: 1170274 - DNA, 15 bp, Homo sapiens
aagaattatttgtat

SEQ ID NO: 1170275 - DNA, 15 bp, Homo sapiens
taagaattatttgta

SEQ ID NO: 1170276 - DNA, 15 bp, Homo sapiens
ttaagaattatttgt

SEQ ID NO: 1170277 - DNA, 15 bp, Homo sapiens
tttaagaattatttg

SEQ ID NO: 1170278 - DNA, 15 bp, Homo sapiens
ttttaagaattattt

SEQ ID NO: 1170279 - DNA, 15 bp, Homo sapiens
gttttaagaattatt

SEQ ID NO: 1170280 - DNA, 15 bp, Homo sapiens
agttttaagaattat

SEQ ID NO: 1170281 - DNA, 15 bp, Homo sapiens
gagttttaagaatta

SEQ ID NO: 1170282 - DNA, 15 bp, Homo sapiens
tgagttttaagaatt

SEQ ID NO: 1170283 - DNA, 15 bp, Homo sapiens
ttgagttttaagaat

SEQ ID NO: 1170284 - DNA, 15 bp, Homo sapiens
tttgagttttaagaa

SEQ ID NO: 1170285 - DNA, 15 bp, Homo sapiens
ttttgagttttaaga

SEQ ID NO: 1170286 - DNA, 15 bp, Homo sapiens
tttttgagttttaag

SEQ ID NO: 1170287 - DNA, 15 bp, Homo sapiens
atttttgagttttaa

SEQ ID NO: 1170288 - DNA, 15 bp, Homo sapiens
tatttttgagtttta

SEQ ID NO: 1170289 - DNA, 15 bp, Homo sapiens
ttatttttgagtttt

SEQ ID NO: 1170290 - DNA, 15 bp, Homo sapiens
cttatttttgagttt

SEQ ID NO: 1170291 - DNA, 15 bp, Homo sapiens
tcttatttttgagtt

SEQ ID NO: 1170292 - DNA, 15 bp, Homo sapiens
ttcttatttttgagt

SEQ ID NO: 1170293 - DNA, 15 bp, Homo sapiens
tttcttatttttgag

SEQ ID NO: 1170294 - DNA, 15 bp, Homo sapiens
ttttcttatttttga

SEQ ID NO: 1170295 - DNA, 15 bp, Homo sapiens
attttcttatttttg

SEQ ID NO: 1170296 - DNA, 15 bp, Homo sapiens
cattttcttattttt

SEQ ID NO: 1170297 - DNA, 15 bp, Homo sapiens
tcattttcttatttt

SEQ ID NO: 1170298 - DNA, 15 bp, Homo sapiens
ttcattttcttattt

SEQ ID NO: 1170299 - DNA, 15 bp, Homo sapiens
gttcattttcttatt

SEQ ID NO: 1170300 - DNA, 15 bp, Homo sapiens
tgttcattttcttat

SEQ ID NO: 1170301 - DNA, 15 bp, Homo sapiens
ttgttcattttctta

SEQ ID NO: 1170302 - DNA, 15 bp, Homo sapiens
gttgttcattttctt

SEQ ID NO: 1170303 - DNA, 15 bp, Homo sapiens
agttgttcattttct

SEQ ID NO: 1170304 - DNA, 15 bp, Homo sapiens
gagttgttcattttc

SEQ ID NO: 1170305 - DNA, 15 bp, Homo sapiens
tgagttgttcatttt

SEQ ID NO: 1170306 - DNA, 15 bp, Homo sapiens
ctgagttgttcattt

SEQ ID NO: 1170307 - DNA, 15 bp, Homo sapiens
actgagttgttcatt

SEQ ID NO: 1170308 - DNA, 15 bp, Homo sapiens
aactgagttgttcat

SEQ ID NO: 1170309 - DNA, 15 bp, Homo sapiens
taactgagttgttca

SEQ ID NO: 1170310 - DNA, 15 bp, Homo sapiens
ttaactgagttgttc

SEQ ID NO: 1170311 - DNA, 15 bp, Homo sapiens
tttaactgagttgtt

SEQ ID NO: 1170312 - DNA, 15 bp, Homo sapiens
atttaactgagttgt

SEQ ID NO: 1170313 - DNA, 15 bp, Homo sapiens
tatttaactgagttg

SEQ ID NO: 1170314 - DNA, 15 bp, Homo sapiens
ttatttaactgagtt

SEQ ID NO: 1170315 - DNA, 15 bp, Homo sapiens
attatttaactgagt

SEQ ID NO: 1170316 - DNA, 15 bp, Homo sapiens
cattatttaactgag

SEQ ID NO: 1170317 - DNA, 15 bp, Homo sapiens
ccattatttaactga

SEQ ID NO: 1170318 - DNA, 15 bp, Homo sapiens
cccattatttaactg

SEQ ID NO: 1170319 - DNA, 15 bp, Homo sapiens
gcccattatttaact

SEQ ID NO: 1170320 - DNA, 15 bp, Homo sapiens
tgcccattatttaac

SEQ ID NO: 1170321 - DNA, 15 bp, Homo sapiens
ttgcccattatttaa

SEQ ID NO: 1170322 - DNA, 15 bp, Homo sapiens
tttgcccattattta

SEQ ID NO: 1170323 - DNA, 15 bp, Homo sapiens
ttttgcccattattt

SEQ ID NO: 1170324 - DNA, 15 bp, Homo sapiens
cttttgcccattatt

SEQ ID NO: 1170325 - DNA, 15 bp, Homo sapiens
tcttttgcccattat

SEQ ID NO: 1170326 - DNA, 15 bp, Homo sapiens
atcttttgcccatta

SEQ ID NO: 1170327 - DNA, 15 bp, Homo sapiens
gatcttttgcccatt

SEQ ID NO: 1170328 - DNA, 15 bp, Homo sapiens
agatcttttgcccat

SEQ ID NO: 1170329 - DNA, 15 bp, Homo sapiens
gagatcttttgccca

SEQ ID NO: 1170330 - DNA, 15 bp, Homo sapiens
tgagatcttttgccc

SEQ ID NO: 1170331 - DNA, 15 bp, Homo sapiens
ttgagatcttttgcc

SEQ ID NO: 1170332 - DNA, 15 bp, Homo sapiens
gttgagatcttttgc

SEQ ID NO: 1170333 - DNA, 15 bp, Homo sapiens
tgttgagatcttttg

SEQ ID NO: 1170334 - DNA, 15 bp, Homo sapiens
ctgttgagatctttt

SEQ ID NO: 1170335 - DNA, 15 bp, Homo sapiens
tctgttgagatcttt

SEQ ID NO: 1170336 - DNA, 15 bp, Homo sapiens
ttctgttgagatctt

SEQ ID NO: 1170337 - DNA, 15 bp, Homo sapiens
tttctgttgagatct

SEQ ID NO: 1170338 - DNA, 15 bp, Homo sapiens
gtttctgttgagatc

SEQ ID NO: 1170339 - DNA, 15 bp, Homo sapiens
ggtttctgttgagat

SEQ ID NO: 1170340 - DNA, 15 bp, Homo sapiens
gggtttctgttgaga

SEQ ID NO: 1170341 - DNA, 15 bp, Homo sapiens
ggggtttctgttgag

SEQ ID NO: 1170342 - DNA, 15 bp, Homo sapiens
tggggtttctgttga

SEQ ID NO: 1170343 - DNA, 15 bp, Homo sapiens
atggggtttctgttg

SEQ ID NO: 1170344 - DNA, 15 bp, Homo sapiens
gatggggtttctgtt

SEQ ID NO: 1170345 - DNA, 15 bp, Homo sapiens
tgatggggtttctgt

SEQ ID NO: 1170346 - DNA, 15 bp, Homo sapiens
ttgatggggtttctg

SEQ ID NO: 1170347 - DNA, 15 bp, Homo sapiens
tttgatggggtttct

SEQ ID NO: 1170348 - DNA, 15 bp, Homo sapiens
ctttgatggggtttc

SEQ ID NO: 1170349 - DNA, 15 bp, Homo sapiens
tctttgatggggttt

SEQ ID NO: 1170350 - DNA, 15 bp, Homo sapiens
ttctttgatggggtt

SEQ ID NO: 1170351 - DNA, 15 bp, Homo sapiens
cttctttgatggggt

SEQ ID NO: 1170352 - DNA, 15 bp, Homo sapiens
tcttctttgatgggg

SEQ ID NO: 1170353 - DNA, 15 bp, Homo sapiens
ttcttctttgatggg

SEQ ID NO: 1170354 - DNA, 15 bp, Homo sapiens
tttcttctttgatgg

SEQ ID NO: 1170355 - DNA, 15 bp, Homo sapiens
gtttcttctttgatg

SEQ ID NO: 1170356 - DNA, 15 bp, Homo sapiens
tgtttcttctttgat

SEQ ID NO: 1170357 - DNA, 15 bp, Homo sapiens
gtgtttcttctttga

SEQ ID NO: 1170358 - DNA, 15 bp, Homo sapiens
tgtgtttcttctttg

SEQ ID NO: 1170359 - DNA, 15 bp, Homo sapiens
ctgtgtttcttcttt

SEQ ID NO: 1170360 - DNA, 15 bp, Homo sapiens
actgtgtttcttctt

SEQ ID NO: 1170361 - DNA, 15 bp, Homo sapiens
cactgtgtttcttct

SEQ ID NO: 1170362 - DNA, 15 bp, Homo sapiens
ccactgtgtttcttc

SEQ ID NO: 1170363 - DNA, 15 bp, Homo sapiens
gccactgtgtttctt

SEQ ID NO: 1170364 - DNA, 15 bp, Homo sapiens
tgccactgtgtttct

SEQ ID NO: 1170365 - DNA, 15 bp, Homo sapiens
ttgccactgtgtttc

SEQ ID NO: 1170366 - DNA, 15 bp, Homo sapiens
cttgccactgtgttt

SEQ ID NO: 1170367 - DNA, 15 bp, Homo sapiens
gcttgccactgtgtt

SEQ ID NO: 1170368 - DNA, 15 bp, Homo sapiens
tgcttgccactgtgt

SEQ ID NO: 1170369 - DNA, 15 bp, Homo sapiens
atgcttgccactgtg

SEQ ID NO: 1170370 - DNA, 15 bp, Homo sapiens
tatgcttgccactgt

SEQ ID NO: 1170371 - DNA, 15 bp, Homo sapiens
atatgcttgccactg

SEQ ID NO: 1170372 - DNA, 15 bp, Homo sapiens
catatgcttgccact

SEQ ID NO: 1170373 - DNA, 15 bp, Homo sapiens
tcatatgcttgccac

SEQ ID NO: 1170374 - DNA, 15 bp, Homo sapiens
ttcatatgcttgcca

SEQ ID NO: 1170375 - DNA, 15 bp, Homo sapiens
tttcatatgcttgcc

SEQ ID NO: 1170376 - DNA, 15 bp, Homo sapiens
ttttcatatgcttgc

SEQ ID NO: 1170377 - DNA, 15 bp, Homo sapiens
attttcatatgcttg

SEQ ID NO: 1170378 - DNA, 15 bp, Homo sapiens
tattttcatatgctt

SEQ ID NO: 1170379 - DNA, 15 bp, Homo sapiens
atattttcatatgct

SEQ ID NO: 1170380 - DNA, 15 bp, Homo sapiens
catattttcatatgc

SEQ ID NO: 1170381 - DNA, 15 bp, Homo sapiens
tcatattttcatatg

SEQ ID NO: 1170382 - DNA, 15 bp, Homo sapiens
atcatattttcatat

SEQ ID NO: 1170383 - DNA, 15 bp, Homo sapiens
gatcatattttcata

SEQ ID NO: 1170384 - DNA, 15 bp, Homo sapiens
agatcatattttcat

SEQ ID NO: 1170385 - DNA, 15 bp, Homo sapiens
tagatcatattttca

SEQ ID NO: 1170386 - DNA, 15 bp, Homo sapiens
gtagatcatattttc

SEQ ID NO: 1170387 - DNA, 15 bp, Homo sapiens
tgtagatcatatttt

SEQ ID NO: 1170388 - DNA, 15 bp, Homo sapiens
atgtagatcatattt

SEQ ID NO: 1170389 - DNA, 15 bp, Homo sapiens
gatgtagatcatatt

SEQ ID NO: 1170390 - DNA, 15 bp, Homo sapiens
tgatgtagatcatat

SEQ ID NO: 1170391 - DNA, 15 bp, Homo sapiens
atgatgtagatcata

SEQ ID NO: 1170392 - DNA, 15 bp, Homo sapiens
tatgatgtagatcat

SEQ ID NO: 1170393 - DNA, 15 bp, Homo sapiens
atatgatgtagatca

SEQ ID NO: 1170394 - DNA, 15 bp, Homo sapiens
catatgatgtagatc

SEQ ID NO: 1170395 - DNA, 15 bp, Homo sapiens
gcatatgatgtagat

SEQ ID NO: 1170396 - DNA, 15 bp, Homo sapiens
ggcatatgatgtaga

SEQ ID NO: 1170397 - DNA, 15 bp, Homo sapiens
tggcatatgatgtag

SEQ ID NO: 1170398 - DNA, 15 bp, Homo sapiens
atggcatatgatgta

SEQ ID NO: 1170399 - DNA, 15 bp, Homo sapiens
aatggcatatgatgt

SEQ ID NO: 1170400 - DNA, 15 bp, Homo sapiens
taatggcatatgatg

SEQ ID NO: 1170401 - DNA, 15 bp, Homo sapiens
ctaatggcatatgat

SEQ ID NO: 1170402 - DNA, 15 bp, Homo sapiens
cctaatggcatatga

SEQ ID NO: 1170403 - DNA, 15 bp, Homo sapiens
tcctaatggcatatg

SEQ ID NO: 1170404 - DNA, 15 bp, Homo sapiens
ttcctaatggcatat

SEQ ID NO: 1170405 - DNA, 15 bp, Homo sapiens
tttcctaatggcata

SEQ ID NO: 1170406 - DNA, 15 bp, Homo sapiens
atttcctaatggcat

SEQ ID NO: 1170407 - DNA, 15 bp, Homo sapiens
aatttcctaatggca

SEQ ID NO: 1170408 - DNA, 15 bp, Homo sapiens
caatttcctaatggc

SEQ ID NO: 1170409 - DNA, 15 bp, Homo sapiens
gcaatttcctaatgg

SEQ ID NO: 1170410 - DNA, 15 bp, Homo sapiens
tgcaatttcctaatg

SEQ ID NO: 1170411 - DNA, 15 bp, Homo sapiens
ttgcaatttcctaat

SEQ ID NO: 1170412 - DNA, 15 bp, Homo sapiens
tttgcaatttcctaa

SEQ ID NO: 1170413 - DNA, 15 bp, Homo sapiens
atttgcaatttccta

SEQ ID NO: 1170414 - DNA, 15 bp, Homo sapiens
aatttgcaatttcct

SEQ ID NO: 1170415 - DNA, 15 bp, Homo sapiens
taatttgcaatttcc

SEQ ID NO: 1170416 - DNA, 15 bp, Homo sapiens
ttaatttgcaatttc

SEQ ID NO: 1170417 - DNA, 15 bp, Homo sapiens
tttaatttgcaattt

SEQ ID NO: 1170418 - DNA, 15 bp, Homo sapiens
ttttaatttgcaatt

SEQ ID NO: 1170419 - DNA, 15 bp, Homo sapiens
gttttaatttgcaat

SEQ ID NO: 1170420 - DNA, 15 bp, Homo sapiens
tgttttaatttgcaa

SEQ ID NO: 1170421 - DNA, 15 bp, Homo sapiens
ttgttttaatttgca

SEQ ID NO: 1170422 - DNA, 15 bp, Homo sapiens
attgttttaatttgc

SEQ ID NO: 1170423 - DNA, 15 bp, Homo sapiens
cattgttttaatttg

SEQ ID NO: 1170424 - DNA, 15 bp, Homo sapiens
tcattgttttaattt

SEQ ID NO: 1170425 - DNA, 15 bp, Homo sapiens
ctcattgttttaatt

SEQ ID NO: 1170426 - DNA, 15 bp, Homo sapiens
tctcattgttttaat

SEQ ID NO: 1170427 - DNA, 15 bp, Homo sapiens
atctcattgttttaa

SEQ ID NO: 1170428 - DNA, 15 bp, Homo sapiens
tatctcattgtttta

SEQ ID NO: 1170429 - DNA, 15 bp, Homo sapiens
gtatctcattgtttt

SEQ ID NO: 1170430 - DNA, 15 bp, Homo sapiens
ggtatctcattgttt

SEQ ID NO: 1170431 - DNA, 15 bp, Homo sapiens
tggtatctcattgtt

SEQ ID NO: 1170432 - DNA, 15 bp, Homo sapiens
gtggtatctcattgt

SEQ ID NO: 1170433 - DNA, 15 bp, Homo sapiens
agtggtatctcattg

SEQ ID NO: 1170434 - DNA, 15 bp, Homo sapiens
tagtggtatctcatt

SEQ ID NO: 1170435 - DNA, 15 bp, Homo sapiens
gtagtggtatctcat

SEQ ID NO: 1170436 - DNA, 15 bp, Homo sapiens
tgtagtggtatctca

SEQ ID NO: 1170437 - DNA, 15 bp, Homo sapiens
atgtagtggtatctc

SEQ ID NO: 1170438 - DNA, 15 bp, Homo sapiens
aatgtagtggtatct

SEQ ID NO: 1170439 - DNA, 15 bp, Homo sapiens
aaatgtagtggtatc

SEQ ID NO: 1170440 - DNA, 15 bp, Homo sapiens
gaaatgtagtggtat

SEQ ID NO: 1170441 - DNA, 15 bp, Homo sapiens
agaaatgtagtggta

SEQ ID NO: 1170442 - DNA, 15 bp, Homo sapiens
tagaaatgtagtggt

SEQ ID NO: 1170443 - DNA, 15 bp, Homo sapiens
gtagaaatgtagtgg

SEQ ID NO: 1170444 - DNA, 15 bp, Homo sapiens
tgtagaaatgtagtg

SEQ ID NO: 1170445 - DNA, 15 bp, Homo sapiens
atgtagaaatgtagt

SEQ ID NO: 1170446 - DNA, 15 bp, Homo sapiens
aatgtagaaatgtag

SEQ ID NO: 1170447 - DNA, 15 bp, Homo sapiens
caatgtagaaatgta

SEQ ID NO: 1170448 - DNA, 15 bp, Homo sapiens
ccaatgtagaaatgt

SEQ ID NO: 1170449 - DNA, 15 bp, Homo sapiens
accaatgtagaaatg

SEQ ID NO: 1170450 - DNA, 15 bp, Homo sapiens
caccaatgtagaaat

SEQ ID NO: 1170451 - DNA, 15 bp, Homo sapiens
tcaccaatgtagaaa

SEQ ID NO: 1170452 - DNA, 15 bp, Homo sapiens
ttcaccaatgtagaa

SEQ ID NO: 1170453 - DNA, 15 bp, Homo sapiens
tttcaccaatgtaga

SEQ ID NO: 1170454 - DNA, 15 bp, Homo sapiens
ttttcaccaatgtag

SEQ ID NO: 1170455 - DNA, 15 bp, Homo sapiens
attttcaccaatgta

SEQ ID NO: 1170456 - DNA, 15 bp, Homo sapiens
aattttcaccaatgt

SEQ ID NO: 1170457 - DNA, 15 bp, Homo sapiens
gaattttcaccaatg

SEQ ID NO: 1170458 - DNA, 15 bp, Homo sapiens
ggaattttcaccaat

SEQ ID NO: 1170459 - DNA, 15 bp, Homo sapiens
tggaattttcaccaa

SEQ ID NO: 1170460 - DNA, 15 bp, Homo sapiens
ttggaattttcacca

SEQ ID NO: 1170461 - DNA, 15 bp, Homo sapiens
cttggaattttcacc

SEQ ID NO: 1170462 - DNA, 15 bp, Homo sapiens
acttggaattttcac

SEQ ID NO: 1170463 - DNA, 15 bp, Homo sapiens
tacttggaattttca

SEQ ID NO: 1170464 - DNA, 15 bp, Homo sapiens
gtacttggaattttc

SEQ ID NO: 1170465 - DNA, 15 bp, Homo sapiens
agtacttggaatttt

SEQ ID NO: 1170466 - DNA, 15 bp, Homo sapiens
cagtacttggaattt

SEQ ID NO: 1170467 - DNA, 15 bp, Homo sapiens
tcagtacttggaatt

SEQ ID NO: 1170468 - DNA, 15 bp, Homo sapiens
gtcagtacttggaat

SEQ ID NO: 1170469 - DNA, 15 bp, Homo sapiens
tgtcagtacttggaa

SEQ ID NO: 1170470 - DNA, 15 bp, Homo sapiens
ctgtcagtacttgga

SEQ ID NO: 1170471 - DNA, 15 bp, Homo sapiens
gctgtcagtacttgg

SEQ ID NO: 1170472 - DNA, 15 bp, Homo sapiens
tgctgtcagtacttg

SEQ ID NO: 1170473 - DNA, 15 bp, Homo sapiens
gtgctgtcagtactt

SEQ ID NO: 1170474 - DNA, 15 bp, Homo sapiens
agtgctgtcagtact

SEQ ID NO: 1170475 - DNA, 15 bp, Homo sapiens
gagtgctgtcagtac

SEQ ID NO: 1170476 - DNA, 15 bp, Homo sapiens
agagtgctgtcagta

SEQ ID NO: 1170477 - DNA, 15 bp, Homo sapiens
gagagtgctgtcagt

SEQ ID NO: 1170478 - DNA, 15 bp, Homo sapiens
tgagagtgctgtcag

SEQ ID NO: 1170479 - DNA, 15 bp, Homo sapiens
ctgagagtgctgtca

SEQ ID NO: 1170480 - DNA, 15 bp, Homo sapiens
actgagagtgctgtc

SEQ ID NO: 1170481 - DNA, 15 bp, Homo sapiens
cactgagagtgctgt

SEQ ID NO: 1170482 - DNA, 15 bp, Homo sapiens
gcactgagagtgctg

SEQ ID NO: 1170483 - DNA, 15 bp, Homo sapiens
agcactgagagtgct

SEQ ID NO: 1170484 - DNA, 15 bp, Homo sapiens
cagcactgagagtgc

SEQ ID NO: 1170485 - DNA, 15 bp, Homo sapiens
ccagcactgagagtg

SEQ ID NO: 1170486 - DNA, 15 bp, Homo sapiens
accagcactgagagt

SEQ ID NO: 1170487 - DNA, 15 bp, Homo sapiens
caccagcactgagag

SEQ ID NO: 1170488 - DNA, 15 bp, Homo sapiens
tcaccagcactgaga

SEQ ID NO: 1170489 - DNA, 15 bp, Homo sapiens
ctcaccagcactgag

SEQ ID NO: 1170490 - DNA, 15 bp, Homo sapiens
cctcaccagcactga

SEQ ID NO: 1170491 - DNA, 15 bp, Homo sapiens
tcctcaccagcactg

SEQ ID NO: 1170492 - DNA, 15 bp, Homo sapiens
atcctcaccagcact

SEQ ID NO: 1170493 - DNA, 15 bp, Homo sapiens
tatcctcaccagcac

SEQ ID NO: 1170494 - DNA, 15 bp, Homo sapiens
atatcctcaccagca

SEQ ID NO: 1170495 - DNA, 15 bp, Homo sapiens
catatcctcaccagc

SEQ ID NO: 1170496 - DNA, 15 bp, Homo sapiens
ccatatcctcaccag

SEQ ID NO: 1170497 - DNA, 15 bp, Homo sapiens
accatatcctcacca

SEQ ID NO: 1170498 - DNA, 15 bp, Homo sapiens
caccatatcctcacc

SEQ ID NO: 1170499 - DNA, 15 bp, Homo sapiens
gcaccatatcctcac

SEQ ID NO: 1170500 - DNA, 15 bp, Homo sapiens
tgcaccatatcctca

SEQ ID NO: 1170501 - DNA, 15 bp, Homo sapiens
ctgcaccatatcctc

SEQ ID NO: 1170502 - DNA, 15 bp, Homo sapiens
actgcaccatatcct

SEQ ID NO: 1170503 - DNA, 15 bp, Homo sapiens
tactgcaccatatcc

SEQ ID NO: 1170504 - DNA, 15 bp, Homo sapiens
ctactgcaccatatc

SEQ ID NO: 1170505 - DNA, 15 bp, Homo sapiens
tctactgcaccatat

SEQ ID NO: 1170506 - DNA, 15 bp, Homo sapiens
ttctactgcaccata

SEQ ID NO: 1170507 - DNA, 15 bp, Homo sapiens
tttctactgcaccat

SEQ ID NO: 1170508 - DNA, 15 bp, Homo sapiens
atttctactgcacca

SEQ ID NO: 1170509 - DNA, 15 bp, Homo sapiens
gatttctactgcacc

SEQ ID NO: 1170510 - DNA, 15 bp, Homo sapiens
ggatttctactgcac

SEQ ID NO: 1170511 - DNA, 15 bp, Homo sapiens
tggatttctactgca

SEQ ID NO: 1170512 - DNA, 15 bp, Homo sapiens
gtggatttctactgc

SEQ ID NO: 1170513 - DNA, 15 bp, Homo sapiens
tgtggatttctactg

SEQ ID NO: 1170514 - DNA, 15 bp, Homo sapiens
gtgtggatttctact

SEQ ID NO: 1170515 - DNA, 15 bp, Homo sapiens
agtgtggatttctac

SEQ ID NO: 1170516 - DNA, 15 bp, Homo sapiens
gagtgtggatttcta

SEQ ID NO: 1170517 - DNA, 15 bp, Homo sapiens
tgagtgtggatttct

SEQ ID NO: 1170518 - DNA, 15 bp, Homo sapiens
atgagtgtggatttc

SEQ ID NO: 1170519 - DNA, 15 bp, Homo sapiens
catgagtgtggattt

SEQ ID NO: 1170520 - DNA, 15 bp, Homo sapiens
gcatgagtgtggatt

SEQ ID NO: 1170521 - DNA, 15 bp, Homo sapiens
ggcatgagtgtggat

SEQ ID NO: 1170522 - DNA, 15 bp, Homo sapiens
cggcatgagtgtgga

SEQ ID NO: 1170523 - DNA, 15 bp, Homo sapiens
ccggcatgagtgtgg

SEQ ID NO: 1170524 - DNA, 15 bp, Homo sapiens
cccggcatgagtgtg

SEQ ID NO: 1170525 - DNA, 15 bp, Homo sapiens
gcccggcatgagtgt

SEQ ID NO: 1170526 - DNA, 15 bp, Homo sapiens
tgcccggcatgagtg

SEQ ID NO: 1170527 - DNA, 15 bp, Homo sapiens
gtgcccggcatgagt

SEQ ID NO: 1170528 - DNA, 15 bp, Homo sapiens
tgtgcccggcatgag

SEQ ID NO: 1170529 - DNA, 15 bp, Homo sapiens
ctgtgcccggcatga

SEQ ID NO: 1170530 - DNA, 15 bp, Homo sapiens
actgtgcccggcatg

SEQ ID NO: 1170531 - DNA, 15 bp, Homo sapiens
cactgtgcccggcat

SEQ ID NO: 1170532 - DNA, 15 bp, Homo sapiens
ccactgtgcccggca

SEQ ID NO: 1170533 - DNA, 15 bp, Homo sapiens
cctggtgatccaccc

SEQ ID NO: 1170534 - DNA, 15 bp, Homo sapiens
acctggtgatccacc

SEQ ID NO: 1170535 - DNA, 15 bp, Homo sapiens
gacctggtgatccac

SEQ ID NO: 1170536 - DNA, 15 bp, Homo sapiens
tgacctggtgatcca

SEQ ID NO: 1170537 - DNA, 15 bp, Homo sapiens
ctgacctggtgatcc

SEQ ID NO: 1170538 - DNA, 15 bp, Homo sapiens
cctgacctggtgatc

SEQ ID NO: 1170539 - DNA, 15 bp, Homo sapiens
tcctgacctggtgat

SEQ ID NO: 1170540 - DNA, 15 bp, Homo sapiens
ctcctgacctggtga

SEQ ID NO: 1170541 - DNA, 15 bp, Homo sapiens
actcctgacctggtg

SEQ ID NO: 1170542 - DNA, 15 bp, Homo sapiens
aactcctgacctggt

SEQ ID NO: 1170543 - DNA, 15 bp, Homo sapiens
aaactcctgacctgg

SEQ ID NO: 1170544 - DNA, 15 bp, Homo sapiens
caaactcctgacctg

SEQ ID NO: 1170545 - DNA, 15 bp, Homo sapiens
atctcaaactcctga

SEQ ID NO: 1170546 - DNA, 15 bp, Homo sapiens
gatctcaaactcctg

SEQ ID NO: 1170547 - DNA, 15 bp, Homo sapiens
tgatctcaaactcct

SEQ ID NO: 1170548 - DNA, 15 bp, Homo sapiens
ctgatctcaaactcc

SEQ ID NO: 1170549 - DNA, 15 bp, Homo sapiens
gctgatctcaaactc

SEQ ID NO: 1170550 - DNA, 15 bp, Homo sapiens
ggctgatctcaaact

SEQ ID NO: 1170551 - DNA, 15 bp, Homo sapiens
aggctgatctcaaac

SEQ ID NO: 1170552 - DNA, 15 bp, Homo sapiens
caggctgatctcaaa

SEQ ID NO: 1170553 - DNA, 15 bp, Homo sapiens
tcaggctgatctcaa

SEQ ID NO: 1170554 - DNA, 15 bp, Homo sapiens
gtcaggctgatctca

SEQ ID NO: 1170555 - DNA, 15 bp, Homo sapiens
ggtcaggctgatctc

SEQ ID NO: 1170556 - DNA, 15 bp, Homo sapiens
tggtcaggctgatct

SEQ ID NO: 1170557 - DNA, 15 bp, Homo sapiens
ttggtcaggctgatc

SEQ ID NO: 1170558 - DNA, 15 bp, Homo sapiens
gttggtcaggctgat

SEQ ID NO: 1170559 - DNA, 15 bp, Homo sapiens
tgttggtcaggctga

SEQ ID NO: 1170560 - DNA, 15 bp, Homo sapiens
ccggggtttcaccat

SEQ ID NO: 1170561 - DNA, 15 bp, Homo sapiens
gccggggtttcacca

SEQ ID NO: 1170562 - DNA, 15 bp, Homo sapiens
agccggggtttcacc

SEQ ID NO: 1170563 - DNA, 15 bp, Homo sapiens
gagccggggtttcac

SEQ ID NO: 1170564 - DNA, 15 bp, Homo sapiens
agagccggggtttca

SEQ ID NO: 1170565 - DNA, 15 bp, Homo sapiens
tagagccggggtttc

SEQ ID NO: 1170566 - DNA, 15 bp, Homo sapiens
gtagagccggggttt

SEQ ID NO: 1170567 - DNA, 15 bp, Homo sapiens
agtagagccggggtt

SEQ ID NO: 1170568 - DNA, 15 bp, Homo sapiens
tagtagagccggggt

SEQ ID NO: 1170569 - DNA, 15 bp, Homo sapiens
ttagtagagccgggg

SEQ ID NO: 1170570 - DNA, 15 bp, Homo sapiens
tttagtagagccggg

SEQ ID NO: 1170571 - DNA, 15 bp, Homo sapiens
ttttagtagagccgg

SEQ ID NO: 1170572 - DNA, 15 bp, Homo sapiens
tttttagtagagccg

SEQ ID NO: 1170573 - DNA, 15 bp, Homo sapiens
atttttagtagagcc

SEQ ID NO: 1170574 - DNA, 15 bp, Homo sapiens
tatttttagtagagc

SEQ ID NO: 1170575 - DNA, 15 bp, Homo sapiens
cgggctaatttttgt

SEQ ID NO: 1170576 - DNA, 15 bp, Homo sapiens
ccgggctaatttttg

SEQ ID NO: 1170577 - DNA, 15 bp, Homo sapiens
accgggctaattttt

SEQ ID NO: 1170578 - DNA, 15 bp, Homo sapiens
caccgggctaatttt

SEQ ID NO: 1170579 - DNA, 15 bp, Homo sapiens
acaccgggctaattt

SEQ ID NO: 1170580 - DNA, 15 bp, Homo sapiens
cacaccgggctaatt

SEQ ID NO: 1170581 - DNA, 15 bp, Homo sapiens
ccacaccgggctaat

SEQ ID NO: 1170582 - DNA, 15 bp, Homo sapiens
accacaccgggctaa

SEQ ID NO: 1170583 - DNA, 15 bp, Homo sapiens
caccacaccgggcta

SEQ ID NO: 1170584 - DNA, 15 bp, Homo sapiens
ccaccacaccgggct

SEQ ID NO: 1170585 - DNA, 15 bp, Homo sapiens
gccaccacaccgggc

SEQ ID NO: 1170586 - DNA, 15 bp, Homo sapiens
cgccaccacaccggg

SEQ ID NO: 1170587 - DNA, 15 bp, Homo sapiens
ccgccaccacaccgg

SEQ ID NO: 1170588 - DNA, 15 bp, Homo sapiens
cccgccaccacaccg

SEQ ID NO: 1170589 - DNA, 15 bp, Homo sapiens
cgcccgccaccacac

SEQ ID NO: 1170590 - DNA, 15 bp, Homo sapiens
gcgcccgccaccaca

SEQ ID NO: 1170591 - DNA, 15 bp, Homo sapiens
gcaggcgcccgccac

SEQ ID NO: 1170592 - DNA, 15 bp, Homo sapiens
agcaggcgcccgcca

SEQ ID NO: 1170593 - DNA, 15 bp, Homo sapiens
tagcaggcgcccgcc

SEQ ID NO: 1170594 - DNA, 15 bp, Homo sapiens
gtagcaggcgcccgc

SEQ ID NO: 1170595 - DNA, 15 bp, Homo sapiens
agtagcaggcgcccg

SEQ ID NO: 1170596 - DNA, 15 bp, Homo sapiens
gagtagcaggcgccc

SEQ ID NO: 1170597 - DNA, 15 bp, Homo sapiens
cgagtagcaggcgcc

SEQ ID NO: 1170598 - DNA, 15 bp, Homo sapiens
ccgagtagcaggcgc

SEQ ID NO: 1170599 - DNA, 15 bp, Homo sapiens
cccgagtagcaggcg

SEQ ID NO: 1170600 - DNA, 15 bp, Homo sapiens
tcccgagtagcaggc

SEQ ID NO: 1170601 - DNA, 15 bp, Homo sapiens
ctcccgagtagcagg

SEQ ID NO: 1170602 - DNA, 15 bp, Homo sapiens
actcccgagtagcag

SEQ ID NO: 1170603 - DNA, 15 bp, Homo sapiens
gactcccgagtagca

SEQ ID NO: 1170604 - DNA, 15 bp, Homo sapiens
agactcccgagtagc

SEQ ID NO: 1170605 - DNA, 15 bp, Homo sapiens
cagactcccgagtag

SEQ ID NO: 1170606 - DNA, 15 bp, Homo sapiens
tcagactcccgagta

SEQ ID NO: 1170607 - DNA, 15 bp, Homo sapiens
ctcagactcccgagt

SEQ ID NO: 1170608 - DNA, 15 bp, Homo sapiens
cctcagactcccgag

SEQ ID NO: 1170609 - DNA, 15 bp, Homo sapiens
gcctcagactcccga

SEQ ID NO: 1170610 - DNA, 15 bp, Homo sapiens
tgcctcagactcccg

SEQ ID NO: 1170611 - DNA, 15 bp, Homo sapiens
ggcctcttttttttt

SEQ ID NO: 1170612 - DNA, 15 bp, Homo sapiens
tggcctctttttttt

SEQ ID NO: 1170613 - DNA, 15 bp, Homo sapiens
ctggcctcttttttt

SEQ ID NO: 1170614 - DNA, 15 bp, Homo sapiens
cctggcctctttttt

SEQ ID NO: 1170615 - DNA, 15 bp, Homo sapiens
tcctggcctcttttt

SEQ ID NO: 1170616 - DNA, 15 bp, Homo sapiens
ctcctggcctctttt

SEQ ID NO: 1170617 - DNA, 15 bp, Homo sapiens
actcctggcctcttt

SEQ ID NO: 1170618 - DNA, 15 bp, Homo sapiens
cactcctggcctctt

SEQ ID NO: 1170619 - DNA, 15 bp, Homo sapiens
ccactcctggcctct

SEQ ID NO: 1170620 - DNA, 15 bp, Homo sapiens
accactcctggcctc

SEQ ID NO: 1170621 - DNA, 15 bp, Homo sapiens
caccactcctggcct

SEQ ID NO: 1170622 - DNA, 15 bp, Homo sapiens
ccaccactcctggcc

SEQ ID NO: 1170623 - DNA, 15 bp, Homo sapiens
gccaccactcctggc

SEQ ID NO: 1170624 - DNA, 15 bp, Homo sapiens
agccaccactcctgg

SEQ ID NO: 1170625 - DNA, 15 bp, Homo sapiens
gagccaccactcctg

SEQ ID NO: 1170626 - DNA, 15 bp, Homo sapiens
tgagccaccactcct

SEQ ID NO: 1170627 - DNA, 15 bp, Homo sapiens
gtgagccaccactcc

SEQ ID NO: 1170628 - DNA, 15 bp, Homo sapiens
tgtgagccaccactc

SEQ ID NO: 1170629 - DNA, 15 bp, Homo sapiens
gtgtgagccaccact

SEQ ID NO: 1170630 - DNA, 15 bp, Homo sapiens
agtctcccaaagtgc

SEQ ID NO: 1170631 - DNA, 15 bp, Homo sapiens
cagtctcccaaagtg

SEQ ID NO: 1170632 - DNA, 15 bp, Homo sapiens
tcagtctcccaaagt

SEQ ID NO: 1170633 - DNA, 15 bp, Homo sapiens
ctcagtctcccaaag

SEQ ID NO: 1170634 - DNA, 15 bp, Homo sapiens
cctcagtctcccaaa

SEQ ID NO: 1170635 - DNA, 15 bp, Homo sapiens
acctcagtctcccaa

SEQ ID NO: 1170636 - DNA, 15 bp, Homo sapiens
tacctcagtctccca

SEQ ID NO: 1170637 - DNA, 15 bp, Homo sapiens
ctacctcagtctccc

SEQ ID NO: 1170638 - DNA, 15 bp, Homo sapiens
cctacctcagtctcc

SEQ ID NO: 1170639 - DNA, 15 bp, Homo sapiens
gcctacctcagtctc

SEQ ID NO: 1170640 - DNA, 15 bp, Homo sapiens
cgcctacctcagtct

SEQ ID NO: 1170641 - DNA, 15 bp, Homo sapiens
ccgcctacctcagtc

SEQ ID NO: 1170642 - DNA, 15 bp, Homo sapiens
tccgcctacctcagt

SEQ ID NO: 1170643 - DNA, 15 bp, Homo sapiens
aaggctggtctccaa

SEQ ID NO: 1170644 - DNA, 15 bp, Homo sapiens
caaggctggtctcca

SEQ ID NO: 1170645 - DNA, 15 bp, Homo sapiens
gcaaggctggtctcc

SEQ ID NO: 1170646 - DNA, 15 bp, Homo sapiens
ggcaaggctggtctc

SEQ ID NO: 1170647 - DNA, 15 bp, Homo sapiens
tggcaaggctggtct

SEQ ID NO: 1170648 - DNA, 15 bp, Homo sapiens
ttggcaaggctggtc

SEQ ID NO: 1170649 - DNA, 15 bp, Homo sapiens
gttggcaaggctggt

SEQ ID NO: 1170650 - DNA, 15 bp, Homo sapiens
tgttggcaaggctgg

SEQ ID NO: 1170651 - DNA, 15 bp, Homo sapiens
atgttggcaaggctg

SEQ ID NO: 1170652 - DNA, 15 bp, Homo sapiens
catgttggcaaggct

SEQ ID NO: 1170653 - DNA, 15 bp, Homo sapiens
tcatgttggcaaggc

SEQ ID NO: 1170654 - DNA, 15 bp, Homo sapiens
gtcatgttggcaagg

SEQ ID NO: 1170655 - DNA, 15 bp, Homo sapiens
tgtcatgttggcaag

SEQ ID NO: 1170656 - DNA, 15 bp, Homo sapiens
ttgtcatgttggcaa

SEQ ID NO: 1170657 - DNA, 15 bp, Homo sapiens
tttgtcatgttggca

SEQ ID NO: 1170658 - DNA, 15 bp, Homo sapiens
ttttgtcatgttggc

SEQ ID NO: 1170659 - DNA, 15 bp, Homo sapiens
gttttgtcatgttgg

SEQ ID NO: 1170660 - DNA, 15 bp, Homo sapiens
ggttttgtcatgttg

SEQ ID NO: 1170661 - DNA, 15 bp, Homo sapiens
gggttttgtcatgtt

SEQ ID NO: 1170662 - DNA, 15 bp, Homo sapiens
agggttttgtcatgt

SEQ ID NO: 1170663 - DNA, 15 bp, Homo sapiens
cagggttttgtcatg

SEQ ID NO: 1170664 - DNA, 15 bp, Homo sapiens
acagggttttgtcat

SEQ ID NO: 1170665 - DNA, 15 bp, Homo sapiens
gttttagtagagaca

SEQ ID NO: 1170666 - DNA, 15 bp, Homo sapiens
ggttttagtagagac

SEQ ID NO: 1170667 - DNA, 15 bp, Homo sapiens
tggttttagtagaga

SEQ ID NO: 1170668 - DNA, 15 bp, Homo sapiens
gtggttttagtagag

SEQ ID NO: 1170669 - DNA, 15 bp, Homo sapiens
tgtggttttagtaga

SEQ ID NO: 1170670 - DNA, 15 bp, Homo sapiens
ttgtggttttagtag

SEQ ID NO: 1170671 - DNA, 15 bp, Homo sapiens
tttgtggttttagta

SEQ ID NO: 1170672 - DNA, 15 bp, Homo sapiens
ttttgtggttttagt

SEQ ID NO: 1170673 - DNA, 15 bp, Homo sapiens
tttttgtggttttag

SEQ ID NO: 1170674 - DNA, 15 bp, Homo sapiens
atttttgtggtttta

SEQ ID NO: 1170675 - DNA, 15 bp, Homo sapiens
aatttttgtggtttt

SEQ ID NO: 1170676 - DNA, 15 bp, Homo sapiens
taatttttgtggttt

SEQ ID NO: 1170677 - DNA, 15 bp, Homo sapiens
ctaatttttgtggtt

SEQ ID NO: 1170678 - DNA, 15 bp, Homo sapiens
gctaatttttgtggt

SEQ ID NO: 1170679 - DNA, 15 bp, Homo sapiens
ggctaatttttgtgg

SEQ ID NO: 1170680 - DNA, 15 bp, Homo sapiens
tggctaatttttgtg

SEQ ID NO: 1170681 - DNA, 15 bp, Homo sapiens
tcctggctaattttt

SEQ ID NO: 1170682 - DNA, 15 bp, Homo sapiens
ctcctggctaatttt

SEQ ID NO: 1170683 - DNA, 15 bp, Homo sapiens
actcctggctaattt

SEQ ID NO: 1170684 - DNA, 15 bp, Homo sapiens
tactcctggctaatt

SEQ ID NO: 1170685 - DNA, 15 bp, Homo sapiens
atactcctggctaat

SEQ ID NO: 1170686 - DNA, 15 bp, Homo sapiens
aatactcctggctaa

SEQ ID NO: 1170687 - DNA, 15 bp, Homo sapiens
caatactcctggcta

SEQ ID NO: 1170688 - DNA, 15 bp, Homo sapiens
ccaatactcctggct

SEQ ID NO: 1170689 - DNA, 15 bp, Homo sapiens
gccaatactcctggc

SEQ ID NO: 1170690 - DNA, 15 bp, Homo sapiens
tgccaatactcctgg

SEQ ID NO: 1170691 - DNA, 15 bp, Homo sapiens
gtgccaatactcctg

SEQ ID NO: 1170692 - DNA, 15 bp, Homo sapiens
tgtgccaatactcct

SEQ ID NO: 1170693 - DNA, 15 bp, Homo sapiens
atgtgccaatactcc

SEQ ID NO: 1170694 - DNA, 15 bp, Homo sapiens
catgtgccaatactc

SEQ ID NO: 1170695 - DNA, 15 bp, Homo sapiens
gcatgtgccaatact

SEQ ID NO: 1170696 - DNA, 15 bp, Homo sapiens
ggcatgtgccaatac

SEQ ID NO: 1170697 - DNA, 15 bp, Homo sapiens
aggcatgtgccaata

SEQ ID NO: 1170698 - DNA, 15 bp, Homo sapiens
caggcatgtgccaat

SEQ ID NO: 1170699 - DNA, 15 bp, Homo sapiens
acaggcatgtgccaa

SEQ ID NO: 1170700 - DNA, 15 bp, Homo sapiens
actgggactacaggc

SEQ ID NO: 1170701 - DNA, 15 bp, Homo sapiens
aactgggactacagg

SEQ ID NO: 1170702 - DNA, 15 bp, Homo sapiens
gagtaactgggacta

SEQ ID NO: 1170703 - DNA, 15 bp, Homo sapiens
cgagtaactgggact

SEQ ID NO: 1170704 - DNA, 15 bp, Homo sapiens
ccgagtaactgggac

SEQ ID NO: 1170705 - DNA, 15 bp, Homo sapiens
tctcagcctcccgag

SEQ ID NO: 1170706 - DNA, 15 bp, Homo sapiens
gtctcagcctcccga

SEQ ID NO: 1170707 - DNA, 15 bp, Homo sapiens
aaattctcctgtctc

SEQ ID NO: 1170708 - DNA, 15 bp, Homo sapiens
gaaattctcctgtct

SEQ ID NO: 1170709 - DNA, 15 bp, Homo sapiens
agaaattctcctgtc

SEQ ID NO: 1170710 - DNA, 15 bp, Homo sapiens
aagaaattctcctgt

SEQ ID NO: 1170711 - DNA, 15 bp, Homo sapiens
caagaaattctcctg

SEQ ID NO: 1170712 - DNA, 15 bp, Homo sapiens
tcaagaaattctcct

SEQ ID NO: 1170713 - DNA, 15 bp, Homo sapiens
ttcaagaaattctcc

SEQ ID NO: 1170714 - DNA, 15 bp, Homo sapiens
gttcaagaaattctc

SEQ ID NO: 1170715 - DNA, 15 bp, Homo sapiens
ggttcaagaaattct

SEQ ID NO: 1170716 - DNA, 15 bp, Homo sapiens
gggttcaagaaattc

SEQ ID NO: 1170717 - DNA, 15 bp, Homo sapiens
cgggttcaagaaatt

SEQ ID NO: 1170718 - DNA, 15 bp, Homo sapiens
ccgggttcaagaaat

SEQ ID NO: 1170719 - DNA, 15 bp, Homo sapiens
cccgggttcaagaaa

SEQ ID NO: 1170720 - DNA, 15 bp, Homo sapiens
tcccgggttcaagaa

SEQ ID NO: 1170721 - DNA, 15 bp, Homo sapiens
gcctccgcctcccgg

SEQ ID NO: 1170722 - DNA, 15 bp, Homo sapiens
agcctccgcctcccg

SEQ ID NO: 1170723 - DNA, 15 bp, Homo sapiens
cagcctccgcctccc

SEQ ID NO: 1170724 - DNA, 15 bp, Homo sapiens
gcagcctccgcctcc

SEQ ID NO: 1170725 - DNA, 15 bp, Homo sapiens
tgcagcctccgcctc

SEQ ID NO: 1170726 - DNA, 15 bp, Homo sapiens
ctgcagcctccgcct

SEQ ID NO: 1170727 - DNA, 15 bp, Homo sapiens
actgcagcctccgcc

SEQ ID NO: 1170728 - DNA, 15 bp, Homo sapiens
cactgcagcctccgc

SEQ ID NO: 1170729 - DNA, 15 bp, Homo sapiens
tcactgcagcctccg

SEQ ID NO: 1170730 - DNA, 15 bp, Homo sapiens
atcggctcactgcag

SEQ ID NO: 1170731 - DNA, 15 bp, Homo sapiens
acagtggtgcgatat

SEQ ID NO: 1170732 - DNA, 15 bp, Homo sapiens
tacagtggtgcgata

SEQ ID NO: 1170733 - DNA, 15 bp, Homo sapiens
tcaggctggagtaca

SEQ ID NO: 1170734 - DNA, 15 bp, Homo sapiens
ttcaggctggagtac

SEQ ID NO: 1170735 - DNA, 15 bp, Homo sapiens
gttcaggctggagta

SEQ ID NO: 1170736 - DNA, 15 bp, Homo sapiens
cctgtcgttcaggct

SEQ ID NO: 1170737 - DNA, 15 bp, Homo sapiens
ccctgtcgttcaggc

SEQ ID NO: 1170738 - DNA, 15 bp, Homo sapiens
gccctgtcgttcagg

SEQ ID NO: 1170739 - DNA, 15 bp, Homo sapiens
cgccctgtcgttcag

SEQ ID NO: 1170740 - DNA, 15 bp, Homo sapiens
tcgccctgtcgttca

SEQ ID NO: 1170741 - DNA, 15 bp, Homo sapiens
ctcgccctgtcgttc

SEQ ID NO: 1170742 - DNA, 15 bp, Homo sapiens
tctcgccctgtcgtt

SEQ ID NO: 1170743 - DNA, 15 bp, Homo sapiens
gtctcgccctgtcgt

SEQ ID NO: 1170744 - DNA, 15 bp, Homo sapiens
agtctcgccctgtcg

SEQ ID NO: 1170745 - DNA, 15 bp, Homo sapiens
gagtctcgccctgtc

SEQ ID NO: 1170746 - DNA, 15 bp, Homo sapiens
agagtctcgccctgt

SEQ ID NO: 1170747 - DNA, 15 bp, Homo sapiens
cagagtctcgccctg

SEQ ID NO: 1170748 - DNA, 15 bp, Homo sapiens
acagagtctcgccct

SEQ ID NO: 1170749 - DNA, 15 bp, Homo sapiens
gacagagtctcgccc

SEQ ID NO: 1170750 - DNA, 15 bp, Homo sapiens
ctttccttttttttt

SEQ ID NO: 1170751 - DNA, 15 bp, Homo sapiens
tctttcctttttttt

SEQ ID NO: 1170752 - DNA, 15 bp, Homo sapiens
ttctttccttttttt

SEQ ID NO: 1170753 - DNA, 15 bp, Homo sapiens
tttctttcctttttt

SEQ ID NO: 1170754 - DNA, 15 bp, Homo sapiens
ctttctttccttttt

SEQ ID NO: 1170755 - DNA, 15 bp, Homo sapiens
tctttctttctttcc

SEQ ID NO: 1170756 - DNA, 15 bp, Homo sapiens
cttttttctttcttt

SEQ ID NO: 1170757 - DNA, 15 bp, Homo sapiens
tcttttttctttctt

SEQ ID NO: 1170758 - DNA, 15 bp, Homo sapiens
ttcttttttctttct

SEQ ID NO: 1170759 - DNA, 15 bp, Homo sapiens
attttcttttttctt

SEQ ID NO: 1170760 - DNA, 15 bp, Homo sapiens
aattttcttttttct

SEQ ID NO: 1170761 - DNA, 15 bp, Homo sapiens
gaattttcttttttc

SEQ ID NO: 1170762 - DNA, 15 bp, Homo sapiens
ggaattttctttttt

SEQ ID NO: 1170763 - DNA, 15 bp, Homo sapiens
cggaattttcttttt

SEQ ID NO: 1170764 - DNA, 15 bp, Homo sapiens
acggaattttctttt

SEQ ID NO: 1170765 - DNA, 15 bp, Homo sapiens
cacggaattttcttt

SEQ ID NO: 1170766 - DNA, 15 bp, Homo sapiens
tcacggaattttctt

SEQ ID NO: 1170767 - DNA, 15 bp, Homo sapiens
atcacggaattttct

SEQ ID NO: 1170768 - DNA, 15 bp, Homo sapiens
aatcacggaattttc

SEQ ID NO: 1170769 - DNA, 15 bp, Homo sapiens
caatcacggaatttt

SEQ ID NO: 1170770 - DNA, 15 bp, Homo sapiens
gcaatcacggaattt

SEQ ID NO: 1170771 - DNA, 15 bp, Homo sapiens
tgcaatcacggaatt

SEQ ID NO: 1170772 - DNA, 15 bp, Homo sapiens
ctgcaatcacggaat

SEQ ID NO: 1170773 - DNA, 15 bp, Homo sapiens
actgcaatcacggaa

SEQ ID NO: 1170774 - DNA, 15 bp, Homo sapiens
gactgcaatcacgga

SEQ ID NO: 1170775 - DNA, 15 bp, Homo sapiens
agactgcaatcacgg

SEQ ID NO: 1170776 - DNA, 15 bp, Homo sapiens
aagactgcaatcacg

SEQ ID NO: 1170777 - DNA, 15 bp, Homo sapiens
aaagactgcaatcac

SEQ ID NO: 1170778 - DNA, 15 bp, Homo sapiens
taaagactgcaatca

SEQ ID NO: 1170779 - DNA, 15 bp, Homo sapiens
gtaaagactgcaatc

SEQ ID NO: 1170780 - DNA, 15 bp, Homo sapiens
cgtaaagactgcaat

SEQ ID NO: 1170781 - DNA, 15 bp, Homo sapiens
acgtaaagactgcaa

SEQ ID NO: 1170782 - DNA, 15 bp, Homo sapiens
tacgtaaagactgca

SEQ ID NO: 1170783 - DNA, 15 bp, Homo sapiens
atacgtaaagactgc

SEQ ID NO: 1170784 - DNA, 15 bp, Homo sapiens
aatacgtaaagactg

SEQ ID NO: 1170785 - DNA, 15 bp, Homo sapiens
aaatacgtaaagact

SEQ ID NO: 1170786 - DNA, 15 bp, Homo sapiens
taaatacgtaaagac

SEQ ID NO: 1170787 - DNA, 15 bp, Homo sapiens
ataaatacgtaaaga

SEQ ID NO: 1170788 - DNA, 15 bp, Homo sapiens
aataaatacgtaaag

SEQ ID NO: 1170789 - DNA, 15 bp, Homo sapiens
aaataaatacgtaaa

SEQ ID NO: 1170790 - DNA, 15 bp, Homo sapiens
caaataaatacgtaa

SEQ ID NO: 1170791 - DNA, 15 bp, Homo sapiens
acaaataaatacgta

SEQ ID NO: 1170792 - DNA, 15 bp, Homo sapiens
aacaaataaatacgt

SEQ ID NO: 1170793 - DNA, 15 bp, Homo sapiens
taacaaataaatacg

SEQ ID NO: 1170794 - DNA, 15 bp, Homo sapiens
ataacaaataaatac

SEQ ID NO: 1170795 - DNA, 15 bp, Homo sapiens
aataacaaataaata

SEQ ID NO: 1170796 - DNA, 15 bp, Homo sapiens
taataacaaataaat

SEQ ID NO: 1170797 - DNA, 15 bp, Homo sapiens
ttaataacaaataaa

SEQ ID NO: 1170798 - DNA, 15 bp, Homo sapiens
cttaataacaaataa

SEQ ID NO: 1170799 - DNA, 15 bp, Homo sapiens
acttaataacaaata

SEQ ID NO: 1170800 - DNA, 15 bp, Homo sapiens
tacttaataacaaat

SEQ ID NO: 1170801 - DNA, 15 bp, Homo sapiens
gtacttaataacaaa

SEQ ID NO: 1170802 - DNA, 15 bp, Homo sapiens
tgtacttaataacaa

SEQ ID NO: 1170803 - DNA, 15 bp, Homo sapiens
ctgtacttaataaca

SEQ ID NO: 1170804 - DNA, 15 bp, Homo sapiens
actgtacttaataac

SEQ ID NO: 1170805 - DNA, 15 bp, Homo sapiens
tactgtacttaataa

SEQ ID NO: 1170806 - DNA, 15 bp, Homo sapiens
ttactgtacttaata

SEQ ID NO: 1170807 - DNA, 15 bp, Homo sapiens
tttactgtacttaat

SEQ ID NO: 1170808 - DNA, 15 bp, Homo sapiens
ttttactgtacttaa

SEQ ID NO: 1170809 - DNA, 15 bp, Homo sapiens
attttactgtactta

SEQ ID NO: 1170810 - DNA, 15 bp, Homo sapiens
tattttactgtactt

SEQ ID NO: 1170811 - DNA, 15 bp, Homo sapiens
ttattttactgtact

SEQ ID NO: 1170812 - DNA, 15 bp, Homo sapiens
tttattttactgtac

SEQ ID NO: 1170813 - DNA, 15 bp, Homo sapiens
ctttattttactgta

SEQ ID NO: 1170814 - DNA, 15 bp, Homo sapiens
tctttattttactgt

SEQ ID NO: 1170815 - DNA, 15 bp, Homo sapiens
ttctttattttactg

SEQ ID NO: 1170816 - DNA, 15 bp, Homo sapiens
cttctttattttact

SEQ ID NO: 1170817 - DNA, 15 bp, Homo sapiens
ccttctttattttac

SEQ ID NO: 1170818 - DNA, 15 bp, Homo sapiens
tccttctttatttta

SEQ ID NO: 1170819 - DNA, 15 bp, Homo sapiens
atccttctttatttt

SEQ ID NO: 1170820 - DNA, 15 bp, Homo sapiens
tatccttctttattt

SEQ ID NO: 1170821 - DNA, 15 bp, Homo sapiens
ctatccttctttatt

SEQ ID NO: 1170822 - DNA, 15 bp, Homo sapiens
tctatccttctttat

SEQ ID NO: 1170823 - DNA, 15 bp, Homo sapiens
atctatccttcttta

SEQ ID NO: 1170824 - DNA, 15 bp, Homo sapiens
catctatccttcttt

SEQ ID NO: 1170825 - DNA, 15 bp, Homo sapiens
acatctatccttctt

SEQ ID NO: 1170826 - DNA, 15 bp, Homo sapiens
gacatctatccttct

SEQ ID NO: 1170827 - DNA, 15 bp, Homo sapiens
tgacatctatccttc

SEQ ID NO: 1170828 - DNA, 15 bp, Homo sapiens
atgacatctatcctt

SEQ ID NO: 1170829 - DNA, 15 bp, Homo sapiens
catgacatctatcct

SEQ ID NO: 1170830 - DNA, 15 bp, Homo sapiens
ccatgacatctatcc

SEQ ID NO: 1170831 - DNA, 15 bp, Homo sapiens
tccatgacatctatc

SEQ ID NO: 1170832 - DNA, 15 bp, Homo sapiens
ttccatgacatctat

SEQ ID NO: 1170833 - DNA, 15 bp, Homo sapiens
tttccatgacatcta

SEQ ID NO: 1170834 - DNA, 15 bp, Homo sapiens
ttttccatgacatct

SEQ ID NO: 1170835 - DNA, 15 bp, Homo sapiens
attttccatgacatc

SEQ ID NO: 1170836 - DNA, 15 bp, Homo sapiens
cattttccatgacat

SEQ ID NO: 1170837 - DNA, 15 bp, Homo sapiens
acattttccatgaca

SEQ ID NO: 1170838 - DNA, 15 bp, Homo sapiens
gacattttccatgac

SEQ ID NO: 1170839 - DNA, 15 bp, Homo sapiens
tgacattttccatga

SEQ ID NO: 1170840 - DNA, 15 bp, Homo sapiens
gtgacattttccatg

SEQ ID NO: 1170841 - DNA, 15 bp, Homo sapiens
cgtgacattttccat

SEQ ID NO: 1170842 - DNA, 15 bp, Homo sapiens
tcgtgacattttcca

SEQ ID NO: 1170843 - DNA, 15 bp, Homo sapiens
ttcgtgacattttcc

SEQ ID NO: 1170844 - DNA, 15 bp, Homo sapiens
tttcgtgacattttc

SEQ ID NO: 1170845 - DNA, 15 bp, Homo sapiens
ttttcgtgacatttt

SEQ ID NO: 1170846 - DNA, 15 bp, Homo sapiens
attttcgtgacattt

SEQ ID NO: 1170847 - DNA, 15 bp, Homo sapiens
tattttcgtgacatt

SEQ ID NO: 1170848 - DNA, 15 bp, Homo sapiens
ttattttcgtgacat

SEQ ID NO: 1170849 - DNA, 15 bp, Homo sapiens
tttattttcgtgaca

SEQ ID NO: 1170850 - DNA, 15 bp, Homo sapiens
ttttattttcgtgac

SEQ ID NO: 1170851 - DNA, 15 bp, Homo sapiens
cttttattttcgtga

SEQ ID NO: 1170852 - DNA, 15 bp, Homo sapiens
tcttttattttcgtg

SEQ ID NO: 1170853 - DNA, 15 bp, Homo sapiens
ctcttttattttcgt

SEQ ID NO: 1170854 - DNA, 15 bp, Homo sapiens
actcttttattttcg

SEQ ID NO: 1170855 - DNA, 15 bp, Homo sapiens
aactcttttattttc

SEQ ID NO: 1170856 - DNA, 15 bp, Homo sapiens
taactcttttatttt

SEQ ID NO: 1170857 - DNA, 15 bp, Homo sapiens
ttaactcttttattt

SEQ ID NO: 1170858 - DNA, 15 bp, Homo sapiens
tttaactcttttatt

SEQ ID NO: 1170859 - DNA, 15 bp, Homo sapiens
ttttaactcttttat

SEQ ID NO: 1170860 - DNA, 15 bp, Homo sapiens
tttttaactctttta

SEQ ID NO: 1170861 - DNA, 15 bp, Homo sapiens
ttttttaactctttt

SEQ ID NO: 1170862 - DNA, 15 bp, Homo sapiens
tttttttaactcttt

SEQ ID NO: 1170863 - DNA, 15 bp, Homo sapiens
ttttttttaactctt

SEQ ID NO: 1170864 - DNA, 15 bp, Homo sapiens
ttttttttttaactc

SEQ ID NO: 1170865 - DNA, 15 bp, Homo sapiens
tttttttttttaact

SEQ ID NO: 1170866 - DNA, 15 bp, Homo sapiens
cctactttttttttt

SEQ ID NO: 1170867 - DNA, 15 bp, Homo sapiens
gcctacttttttttt

SEQ ID NO: 1170868 - DNA, 15 bp, Homo sapiens
agcctactttttttt

SEQ ID NO: 1170869 - DNA, 15 bp, Homo sapiens
cagcctacttttttt

SEQ ID NO: 1170870 - DNA, 15 bp, Homo sapiens
gcagcctactttttt

SEQ ID NO: 1170871 - DNA, 15 bp, Homo sapiens
tgcagcctacttttt

SEQ ID NO: 1170872 - DNA, 15 bp, Homo sapiens
ttgcagcctactttt

SEQ ID NO: 1170873 - DNA, 15 bp, Homo sapiens
attgcagcctacttt

SEQ ID NO: 1170874 - DNA, 15 bp, Homo sapiens
cattgcagcctactt

SEQ ID NO: 1170875 - DNA, 15 bp, Homo sapiens
gcattgcagcctact

SEQ ID NO: 1170876 - DNA, 15 bp, Homo sapiens
ggcattgcagcctac

SEQ ID NO: 1170877 - DNA, 15 bp, Homo sapiens
tggcattgcagccta

SEQ ID NO: 1170878 - DNA, 15 bp, Homo sapiens
ctggcattgcagcct

SEQ ID NO: 1170879 - DNA, 15 bp, Homo sapiens
tctggcattgcagcc

SEQ ID NO: 1170880 - DNA, 15 bp, Homo sapiens
atctggcattgcagc

SEQ ID NO: 1170881 - DNA, 15 bp, Homo sapiens
catctggcattgcag

SEQ ID NO: 1170882 - DNA, 15 bp, Homo sapiens
gcatctggcattgca

SEQ ID NO: 1170883 - DNA, 15 bp, Homo sapiens
ggcatctggcattgc

SEQ ID NO: 1170884 - DNA, 15 bp, Homo sapiens
aggcatctggcattg

SEQ ID NO: 1170885 - DNA, 15 bp, Homo sapiens
caggcatctggcatt

SEQ ID NO: 1170886 - DNA, 15 bp, Homo sapiens
tcaggcatctggcat

SEQ ID NO: 1170887 - DNA, 15 bp, Homo sapiens
ttcaggcatctggca

SEQ ID NO: 1170888 - DNA, 15 bp, Homo sapiens
tttcaggcatctggc

SEQ ID NO: 1170889 - DNA, 15 bp, Homo sapiens
ttttcaggcatctgg

SEQ ID NO: 1170890 - DNA, 15 bp, Homo sapiens
cttttcaggcatctg

SEQ ID NO: 1170891 - DNA, 15 bp, Homo sapiens
acttttcaggcatct

SEQ ID NO: 1170892 - DNA, 15 bp, Homo sapiens
aacttttcaggcatc

SEQ ID NO: 1170893 - DNA, 15 bp, Homo sapiens
taacttttcaggcat

SEQ ID NO: 1170894 - DNA, 15 bp, Homo sapiens
ttaacttttcaggca

SEQ ID NO: 1170895 - DNA, 15 bp, Homo sapiens
attaacttttcaggc

SEQ ID NO: 1170896 - DNA, 15 bp, Homo sapiens
gattaacttttcagg

SEQ ID NO: 1170897 - DNA, 15 bp, Homo sapiens
tgattaacttttcag

SEQ ID NO: 1170898 - DNA, 15 bp, Homo sapiens
ttgattaacttttca

SEQ ID NO: 1170899 - DNA, 15 bp, Homo sapiens
gttgattaacttttc

SEQ ID NO: 1170900 - DNA, 15 bp, Homo sapiens
cgttgattaactttt

SEQ ID NO: 1170901 - DNA, 15 bp, Homo sapiens
tcgttgattaacttt

SEQ ID NO: 1170902 - DNA, 15 bp, Homo sapiens
ttcgttgattaactt

SEQ ID NO: 1170903 - DNA, 15 bp, Homo sapiens
tttcgttgattaact

SEQ ID NO: 1170904 - DNA, 15 bp, Homo sapiens
ctttcgttgattaac

SEQ ID NO: 1170905 - DNA, 15 bp, Homo sapiens
cctttcgttgattaa

SEQ ID NO: 1170906 - DNA, 15 bp, Homo sapiens
tcctttcgttgatta

SEQ ID NO: 1170907 - DNA, 15 bp, Homo sapiens
gtcctttcgttgatt

SEQ ID NO: 1170908 - DNA, 15 bp, Homo sapiens
agtcctttcgttgat

SEQ ID NO: 1170909 - DNA, 15 bp, Homo sapiens
aagtcctttcgttga

SEQ ID NO: 1170910 - DNA, 15 bp, Homo sapiens
taagtcctttcgttg

SEQ ID NO: 1170911 - DNA, 15 bp, Homo sapiens
ttaagtcctttcgtt

SEQ ID NO: 1170912 - DNA, 15 bp, Homo sapiens
tttaagtcctttcgt

SEQ ID NO: 1170913 - DNA, 15 bp, Homo sapiens
atttaagtcctttcg

SEQ ID NO: 1170914 - DNA, 15 bp, Homo sapiens
catttaagtcctttc

SEQ ID NO: 1170915 - DNA, 15 bp, Homo sapiens
acatttaagtccttt

SEQ ID NO: 1170916 - DNA, 15 bp, Homo sapiens
gacatttaagtcctt

SEQ ID NO: 1170917 - DNA, 15 bp, Homo sapiens
ggacatttaagtcct

SEQ ID NO: 1170918 - DNA, 15 bp, Homo sapiens
gggacatttaagtcc

SEQ ID NO: 1170919 - DNA, 15 bp, Homo sapiens
ggggacatttaagtc

SEQ ID NO: 1170920 - DNA, 15 bp, Homo sapiens
tggggacatttaagt

SEQ ID NO: 1170921 - DNA, 15 bp, Homo sapiens
atggggacatttaag

SEQ ID NO: 1170922 - DNA, 15 bp, Homo sapiens
aatggggacatttaa

SEQ ID NO: 1170923 - DNA, 15 bp, Homo sapiens
caatggggacattta

SEQ ID NO: 1170924 - DNA, 15 bp, Homo sapiens
tcaatggggacattt

SEQ ID NO: 1170925 - DNA, 15 bp, Homo sapiens
ttcaatggggacatt

SEQ ID NO: 1170926 - DNA, 15 bp, Homo sapiens
attcaatggggacat

SEQ ID NO: 1170927 - DNA, 15 bp, Homo sapiens
aattcaatggggaca

SEQ ID NO: 1170928 - DNA, 15 bp, Homo sapiens
aaattcaatggggac

SEQ ID NO: 1170929 - DNA, 15 bp, Homo sapiens
taaattcaatgggga

SEQ ID NO: 1170930 - DNA, 15 bp, Homo sapiens
ctaaattcaatgggg

SEQ ID NO: 1170931 - DNA, 15 bp, Homo sapiens
cctaaattcaatggg

SEQ ID NO: 1170932 - DNA, 15 bp, Homo sapiens
tcctaaattcaatgg

SEQ ID NO: 1170933 - DNA, 15 bp, Homo sapiens
ttcctaaattcaatg

SEQ ID NO: 1170934 - DNA, 15 bp, Homo sapiens
gttcctaaattcaat

SEQ ID NO: 1170935 - DNA, 15 bp, Homo sapiens
tgttcctaaattcaa

SEQ ID NO: 1170936 - DNA, 15 bp, Homo sapiens
ttgttcctaaattca

SEQ ID NO: 1170937 - DNA, 15 bp, Homo sapiens
tttgttcctaaattc

SEQ ID NO: 1170938 - DNA, 15 bp, Homo sapiens
ctttgttcctaaatt

SEQ ID NO: 1170939 - DNA, 15 bp, Homo sapiens
tctttgttcctaaat

SEQ ID NO: 1170940 - DNA, 15 bp, Homo sapiens
ttctttgttcctaaa

SEQ ID NO: 1170941 - DNA, 15 bp, Homo sapiens
cttctttgttcctaa

SEQ ID NO: 1170942 - DNA, 15 bp, Homo sapiens
acttctttgttccta

SEQ ID NO: 1170943 - DNA, 15 bp, Homo sapiens
tacttctttgttcct

SEQ ID NO: 1170944 - DNA, 15 bp, Homo sapiens
ttacttctttgttcc

SEQ ID NO: 1170945 - DNA, 15 bp, Homo sapiens
attacttctttgttc

SEQ ID NO: 1170946 - DNA, 15 bp, Homo sapiens
aattacttctttgtt

SEQ ID NO: 1170947 - DNA, 15 bp, Homo sapiens
taattacttctttgt

SEQ ID NO: 1170948 - DNA, 15 bp, Homo sapiens
ttaattacttctttg

SEQ ID NO: 1170949 - DNA, 15 bp, Homo sapiens
attaattacttcttt

SEQ ID NO: 1170950 - DNA, 15 bp, Homo sapiens
cattaattacttctt

SEQ ID NO: 1170951 - DNA, 15 bp, Homo sapiens
tcattaattacttct

SEQ ID NO: 1170952 - DNA, 15 bp, Homo sapiens
ttcattaattacttc

SEQ ID NO: 1170953 - DNA, 15 bp, Homo sapiens
gttcattaattactt

SEQ ID NO: 1170954 - DNA, 15 bp, Homo sapiens
agttcattaattact

SEQ ID NO: 1170955 - DNA, 15 bp, Homo sapiens
cagttcattaattac

SEQ ID NO: 1170956 - DNA, 15 bp, Homo sapiens
ccagttcattaatta

SEQ ID NO: 1170957 - DNA, 15 bp, Homo sapiens
cccagttcattaatt

SEQ ID NO: 1170958 - DNA, 15 bp, Homo sapiens
gcccagttcattaat

SEQ ID NO: 1170959 - DNA, 15 bp, Homo sapiens
tgcccagttcattaa

SEQ ID NO: 1170960 - DNA, 15 bp, Homo sapiens
ttgcccagttcatta

SEQ ID NO: 1170961 - DNA, 15 bp, Homo sapiens
tttgcccagttcatt

SEQ ID NO: 1170962 - DNA, 15 bp, Homo sapiens
ttttgcccagttcat

SEQ ID NO: 1170963 - DNA, 15 bp, Homo sapiens
tttttgcccagttca

SEQ ID NO: 1170964 - DNA, 15 bp, Homo sapiens
gtttttgcccagttc

SEQ ID NO: 1170965 - DNA, 15 bp, Homo sapiens
tgtttttgcccagtt

SEQ ID NO: 1170966 - DNA, 15 bp, Homo sapiens
gtgtttttgcccagt

SEQ ID NO: 1170967 - DNA, 15 bp, Homo sapiens
agtgtttttgcccag

SEQ ID NO: 1170968 - DNA, 15 bp, Homo sapiens
gagtgtttttgccca

SEQ ID NO: 1170969 - DNA, 15 bp, Homo sapiens
tgagtgtttttgccc

SEQ ID NO: 1170970 - DNA, 15 bp, Homo sapiens
ttgagtgtttttgcc

SEQ ID NO: 1170971 - DNA, 15 bp, Homo sapiens
attgagtgtttttgc

SEQ ID NO: 1170972 - DNA, 15 bp, Homo sapiens
cattgagtgtttttg

SEQ ID NO: 1170973 - DNA, 15 bp, Homo sapiens
acattgagtgttttt

SEQ ID NO: 1170974 - DNA, 15 bp, Homo sapiens
tacattgagtgtttt

SEQ ID NO: 1170975 - DNA, 15 bp, Homo sapiens
gtacattgagtgttt

SEQ ID NO: 1170976 - DNA, 15 bp, Homo sapiens
ggtacattgagtgtt

SEQ ID NO: 1170977 - DNA, 15 bp, Homo sapiens
tggtacattgagtgt

SEQ ID NO: 1170978 - DNA, 15 bp, Homo sapiens
ctggtacattgagtg

SEQ ID NO: 1170979 - DNA, 15 bp, Homo sapiens
gctggtacattgagt

SEQ ID NO: 1170980 - DNA, 15 bp, Homo sapiens
cgctggtacattgag

SEQ ID NO: 1170981 - DNA, 15 bp, Homo sapiens
acgctggtacattga

SEQ ID NO: 1170982 - DNA, 15 bp, Homo sapiens
aacgctggtacattg

SEQ ID NO: 1170983 - DNA, 15 bp, Homo sapiens
taacgctggtacatt

SEQ ID NO: 1170984 - DNA, 15 bp, Homo sapiens
ataacgctggtacat

SEQ ID NO: 1170985 - DNA, 15 bp, Homo sapiens
gataacgctggtaca

SEQ ID NO: 1170986 - DNA, 15 bp, Homo sapiens
cgataacgctggtac

SEQ ID NO: 1170987 - DNA, 15 bp, Homo sapiens
tcgataacgctggta

SEQ ID NO: 1170988 - DNA, 15 bp, Homo sapiens
atcgataacgctggt

SEQ ID NO: 1170989 - DNA, 15 bp, Homo sapiens
aatcgataacgctgg

SEQ ID NO: 1170990 - DNA, 15 bp, Homo sapiens
aaatcgataacgctg

SEQ ID NO: 1170991 - DNA, 15 bp, Homo sapiens
taaatcgataacgct

SEQ ID NO: 1170992 - DNA, 15 bp, Homo sapiens
ctaaatcgataacgc

SEQ ID NO: 1170993 - DNA, 15 bp, Homo sapiens
tctaaatcgataacg

SEQ ID NO: 1170994 - DNA, 15 bp, Homo sapiens
ttctaaatcgataac

SEQ ID NO: 1170995 - DNA, 15 bp, Homo sapiens
tttctaaatcgataa

SEQ ID NO: 1170996 - DNA, 15 bp, Homo sapiens
gtttctaaatcgata

SEQ ID NO: 1170997 - DNA, 15 bp, Homo sapiens
agtttctaaatcgat

SEQ ID NO: 1170998 - DNA, 15 bp, Homo sapiens
cagtttctaaatcga

SEQ ID NO: 1170999 - DNA, 15 bp, Homo sapiens
tcagtttctaaatcg

SEQ ID NO: 1171000 - DNA, 15 bp, Homo sapiens
ttcagtttctaaatc

SEQ ID NO: 1171001 - DNA, 15 bp, Homo sapiens
tttcagtttctaaat

SEQ ID NO: 1171002 - DNA, 15 bp, Homo sapiens
gtttcagtttctaaa

SEQ ID NO: 1171003 - DNA, 15 bp, Homo sapiens
agtttcagtttctaa

SEQ ID NO: 1171004 - DNA, 15 bp, Homo sapiens
tagtttcagtttcta

SEQ ID NO: 1171005 - DNA, 15 bp, Homo sapiens
ttagtttcagtttct

SEQ ID NO: 1171006 - DNA, 15 bp, Homo sapiens
cttagtttcagtttc

SEQ ID NO: 1171007 - DNA, 15 bp, Homo sapiens
acttagtttcagttt

SEQ ID NO: 1171008 - DNA, 15 bp, Homo sapiens
tacttagtttcagtt

SEQ ID NO: 1171009 - DNA, 15 bp, Homo sapiens
atacttagtttcagt

SEQ ID NO: 1171010 - DNA, 15 bp, Homo sapiens
tatacttagtttcag

SEQ ID NO: 1171011 - DNA, 15 bp, Homo sapiens
atatacttagtttca

SEQ ID NO: 1171012 - DNA, 15 bp, Homo sapiens
gatatacttagtttc

SEQ ID NO: 1171013 - DNA, 15 bp, Homo sapiens
agatatacttagttt

SEQ ID NO: 1171014 - DNA, 15 bp, Homo sapiens
cagatatacttagtt

SEQ ID NO: 1171015 - DNA, 15 bp, Homo sapiens
tcagatatacttagt

SEQ ID NO: 1171016 - DNA, 15 bp, Homo sapiens
atcagatatacttag

SEQ ID NO: 1171017 - DNA, 15 bp, Homo sapiens
catcagatatactta

SEQ ID NO: 1171018 - DNA, 15 bp, Homo sapiens
acatcagatatactt

SEQ ID NO: 1171019 - DNA, 15 bp, Homo sapiens
aacatcagatatact

SEQ ID NO: 1171020 - DNA, 15 bp, Homo sapiens
caacatcagatatac

SEQ ID NO: 1171021 - DNA, 15 bp, Homo sapiens
gcaacatcagatata

SEQ ID NO: 1171022 - DNA, 15 bp, Homo sapiens
agcaacatcagatat

SEQ ID NO: 1171023 - DNA, 15 bp, Homo sapiens
aagcaacatcagata

SEQ ID NO: 1171024 - DNA, 15 bp, Homo sapiens
aaagcaacatcagat

SEQ ID NO: 1171025 - DNA, 15 bp, Homo sapiens
aaaagcaacatcaga

SEQ ID NO: 1171026 - DNA, 15 bp, Homo sapiens
taaaagcaacatcag

SEQ ID NO: 1171027 - DNA, 15 bp, Homo sapiens
ctaaaagcaacatca

SEQ ID NO: 1171028 - DNA, 15 bp, Homo sapiens
cctaaaagcaacatc

SEQ ID NO: 1171029 - DNA, 15 bp, Homo sapiens
tcctaaaagcaacat

SEQ ID NO: 1171030 - DNA, 15 bp, Homo sapiens
ttcctaaaagcaaca

SEQ ID NO: 1171031 - DNA, 15 bp, Homo sapiens
tttcctaaaagcaac

SEQ ID NO: 1171032 - DNA, 15 bp, Homo sapiens
gtttcctaaaagcaa

SEQ ID NO: 1171033 - DNA, 15 bp, Homo sapiens
tgtttcctaaaagca

SEQ ID NO: 1171034 - DNA, 15 bp, Homo sapiens
ttgtttcctaaaagc

SEQ ID NO: 1171035 - DNA, 15 bp, Homo sapiens
cttgtttcctaaaag

SEQ ID NO: 1171036 - DNA, 15 bp, Homo sapiens
acttgtttcctaaaa

SEQ ID NO: 1171037 - DNA, 15 bp, Homo sapiens
tacttgtttcctaaa

SEQ ID NO: 1171038 - DNA, 15 bp, Homo sapiens
ttacttgtttcctaa

SEQ ID NO: 1171039 - DNA, 15 bp, Homo sapiens
tttacttgtttccta

SEQ ID NO: 1171040 - DNA, 15 bp, Homo sapiens
atttacttgtttcct

SEQ ID NO: 1171041 - DNA, 15 bp, Homo sapiens
catttacttgtttcc

SEQ ID NO: 1171042 - DNA, 15 bp, Homo sapiens
tcatttacttgtttc

SEQ ID NO: 1171043 - DNA, 15 bp, Homo sapiens
ctcatttacttgttt

SEQ ID NO: 1171044 - DNA, 15 bp, Homo sapiens
cctcatttacttgtt

SEQ ID NO: 1171045 - DNA, 15 bp, Homo sapiens
acctcatttacttgt

SEQ ID NO: 1171046 - DNA, 15 bp, Homo sapiens
gacctcatttacttg

SEQ ID NO: 1171047 - DNA, 15 bp, Homo sapiens
ggacctcatttactt

SEQ ID NO: 1171048 - DNA, 15 bp, Homo sapiens
aggacctcatttact

SEQ ID NO: 1171049 - DNA, 15 bp, Homo sapiens
taggacctcatttac

SEQ ID NO: 1171050 - DNA, 15 bp, Homo sapiens
ttaggacctcattta

SEQ ID NO: 1171051 - DNA, 15 bp, Homo sapiens
tttaggacctcattt

SEQ ID NO: 1171052 - DNA, 15 bp, Homo sapiens
ttttaggacctcatt

SEQ ID NO: 1171053 - DNA, 15 bp, Homo sapiens
tttttaggacctcat

SEQ ID NO: 1171054 - DNA, 15 bp, Homo sapiens
ctttttaggacctca

SEQ ID NO: 1171055 - DNA, 15 bp, Homo sapiens
actttttaggacctc

SEQ ID NO: 1171056 - DNA, 15 bp, Homo sapiens
aactttttaggacct

SEQ ID NO: 1171057 - DNA, 15 bp, Homo sapiens
taactttttaggacc

SEQ ID NO: 1171058 - DNA, 15 bp, Homo sapiens
ttaactttttaggac

SEQ ID NO: 1171059 - DNA, 15 bp, Homo sapiens
tttaactttttagga

SEQ ID NO: 1171060 - DNA, 15 bp, Homo sapiens
gtttaactttttagg

SEQ ID NO: 1171061 - DNA, 15 bp, Homo sapiens
agtttaactttttag

SEQ ID NO: 1171062 - DNA, 15 bp, Homo sapiens
cagtttaacttttta

SEQ ID NO: 1171063 - DNA, 15 bp, Homo sapiens
acagtttaacttttt

SEQ ID NO: 1171064 - DNA, 15 bp, Homo sapiens
cacagtttaactttt

SEQ ID NO: 1171065 - DNA, 15 bp, Homo sapiens
tcacagtttaacttt

SEQ ID NO: 1171066 - DNA, 15 bp, Homo sapiens
gtcacagtttaactt

SEQ ID NO: 1171067 - DNA, 15 bp, Homo sapiens
ggtcacagtttaact

SEQ ID NO: 1171068 - DNA, 15 bp, Homo sapiens
tggtcacagtttaac

SEQ ID NO: 1171069 - DNA, 15 bp, Homo sapiens
atggtcacagtttaa

SEQ ID NO: 1171070 - DNA, 15 bp, Homo sapiens
tatggtcacagttta

SEQ ID NO: 1171071 - DNA, 15 bp, Homo sapiens
atatggtcacagttt

SEQ ID NO: 1171072 - DNA, 15 bp, Homo sapiens
aatatggtcacagtt

SEQ ID NO: 1171073 - DNA, 15 bp, Homo sapiens
aaatatggtcacagt

SEQ ID NO: 1171074 - DNA, 15 bp, Homo sapiens
aaaatatggtcacag

SEQ ID NO: 1171075 - DNA, 15 bp, Homo sapiens
gaaaatatggtcaca

SEQ ID NO: 1171076 - DNA, 15 bp, Homo sapiens
agaaaatatggtcac

SEQ ID NO: 1171077 - DNA, 15 bp, Homo sapiens
aagaaaatatggtca

SEQ ID NO: 1171078 - DNA, 15 bp, Homo sapiens
aaagaaaatatggtc

SEQ ID NO: 1171079 - DNA, 15 bp, Homo sapiens
gaaagaaaatatggt

SEQ ID NO: 1171080 - DNA, 15 bp, Homo sapiens
ggaaagaaaatatgg

SEQ ID NO: 1171081 - DNA, 15 bp, Homo sapiens
aggaaagaaaatatg

SEQ ID NO: 1171082 - DNA, 15 bp, Homo sapiens
aaggaaagaaaatat

SEQ ID NO: 1171083 - DNA, 15 bp, Homo sapiens
aaaggaaagaaaata

SEQ ID NO: 1171084 - DNA, 15 bp, Homo sapiens
aaaaggaaagaaaat

SEQ ID NO: 1171085 - DNA, 15 bp, Homo sapiens
aaaaaggaaagaaaa

SEQ ID NO: 1171086 - DNA, 15 bp, Homo sapiens
gaaaaaggaaagaaa

SEQ ID NO: 1171087 - DNA, 15 bp, Homo sapiens
agaaaaaggaaagaa

SEQ ID NO: 1171088 - DNA, 15 bp, Homo sapiens
tagaaaaaggaaaga

SEQ ID NO: 1171089 - DNA, 15 bp, Homo sapiens
ttagaaaaaggaaag

SEQ ID NO: 1171090 - DNA, 15 bp, Homo sapiens
attagaaaaaggaaa

SEQ ID NO: 1171091 - DNA, 15 bp, Homo sapiens
aattagaaaaaggaa

SEQ ID NO: 1171092 - DNA, 15 bp, Homo sapiens
aaattagaaaaagga

SEQ ID NO: 1171093 - DNA, 15 bp, Homo sapiens
gaaattagaaaaagg

SEQ ID NO: 1171094 - DNA, 15 bp, Homo sapiens
agaaattagaaaaag

SEQ ID NO: 1171095 - DNA, 15 bp, Homo sapiens
gagaaattagaaaaa

SEQ ID NO: 1171096 - DNA, 15 bp, Homo sapiens
ggagaaattagaaaa

SEQ ID NO: 1171097 - DNA, 15 bp, Homo sapiens
aggagaaattagaaa

SEQ ID NO: 1171098 - DNA, 15 bp, Homo sapiens
aaggagaaattagaa

SEQ ID NO: 1171099 - DNA, 15 bp, Homo sapiens
caaggagaaattaga

SEQ ID NO: 1171100 - DNA, 15 bp, Homo sapiens
ccaaggagaaattag

SEQ ID NO: 1171101 - DNA, 15 bp, Homo sapiens
cccaaggagaaatta

SEQ ID NO: 1171102 - DNA, 15 bp, Homo sapiens
gcccaaggagaaatt

SEQ ID NO: 1171103 - DNA, 15 bp, Homo sapiens
ggcccaaggagaaat

SEQ ID NO: 1171104 - DNA, 15 bp, Homo sapiens
tggcccaaggagaaa

SEQ ID NO: 1171105 - DNA, 15 bp, Homo sapiens
atggcccaaggagaa

SEQ ID NO: 1171106 - DNA, 15 bp, Homo sapiens
aatggcccaaggaga

SEQ ID NO: 1171107 - DNA, 15 bp, Homo sapiens
aaatggcccaaggag

SEQ ID NO: 1171108 - DNA, 15 bp, Homo sapiens
gaaatggcccaagga

SEQ ID NO: 1171109 - DNA, 15 bp, Homo sapiens
ggaaatggcccaagg

SEQ ID NO: 1171110 - DNA, 15 bp, Homo sapiens
tggaaatggcccaag

SEQ ID NO: 1171111 - DNA, 15 bp, Homo sapiens
ttggaaatggcccaa

SEQ ID NO: 1171112 - DNA, 15 bp, Homo sapiens
tttggaaatggccca

SEQ ID NO: 1171113 - DNA, 15 bp, Homo sapiens
ttttggaaatggccc

SEQ ID NO: 1171114 - DNA, 15 bp, Homo sapiens
tttttggaaatggcc

SEQ ID NO: 1171115 - DNA, 15 bp, Homo sapiens
ctttttggaaatggc

SEQ ID NO: 1171116 - DNA, 15 bp, Homo sapiens
gctttttggaaatgg

SEQ ID NO: 1171117 - DNA, 15 bp, Homo sapiens
ggctttttggaaatg

SEQ ID NO: 1171118 - DNA, 15 bp, Homo sapiens
gggctttttggaaat

SEQ ID NO: 1171119 - DNA, 15 bp, Homo sapiens
agggctttttggaaa

SEQ ID NO: 1171120 - DNA, 15 bp, Homo sapiens
tagggctttttggaa

SEQ ID NO: 1171121 - DNA, 15 bp, Homo sapiens
ttagggctttttgga

SEQ ID NO: 1171122 - DNA, 15 bp, Homo sapiens
attagggctttttgg

SEQ ID NO: 1171123 - DNA, 15 bp, Homo sapiens
tattagggctttttg

SEQ ID NO: 1171124 - DNA, 15 bp, Homo sapiens
gtattagggcttttt

SEQ ID NO: 1171125 - DNA, 15 bp, Homo sapiens
ggtattagggctttt

SEQ ID NO: 1171126 - DNA, 15 bp, Homo sapiens
gggtattagggcttt

SEQ ID NO: 1171127 - DNA, 15 bp, Homo sapiens
ggggtattagggctt

SEQ ID NO: 1171128 - DNA, 15 bp, Homo sapiens
cggggtattagggct

SEQ ID NO: 1171129 - DNA, 15 bp, Homo sapiens
tcggggtattagggc

SEQ ID NO: 1171130 - DNA, 15 bp, Homo sapiens
gtcggggtattaggg

SEQ ID NO: 1171131 - DNA, 15 bp, Homo sapiens
agtcggggtattagg

SEQ ID NO: 1171132 - DNA, 15 bp, Homo sapiens
cagtcggggtattag

SEQ ID NO: 1171133 - DNA, 15 bp, Homo sapiens
tcagtcggggtatta

SEQ ID NO: 1171134 - DNA, 15 bp, Homo sapiens
atcagtcggggtatt

SEQ ID NO: 1171135 - DNA, 15 bp, Homo sapiens
tatcagtcggggtat

SEQ ID NO: 1171136 - DNA, 15 bp, Homo sapiens
ctatcagtcggggta

SEQ ID NO: 1171137 - DNA, 15 bp, Homo sapiens
tctatcagtcggggt

SEQ ID NO: 1171138 - DNA, 15 bp, Homo sapiens
ttctatcagtcgggg

SEQ ID NO: 1171139 - DNA, 15 bp, Homo sapiens
tttctatcagtcggg

SEQ ID NO: 1171140 - DNA, 15 bp, Homo sapiens
atttctatcagtcgg

SEQ ID NO: 1171141 - DNA, 15 bp, Homo sapiens
catttctatcagtcg

SEQ ID NO: 1171142 - DNA, 15 bp, Homo sapiens
ccatttctatcagtc

SEQ ID NO: 1171143 - DNA, 15 bp, Homo sapiens
tccatttctatcagt

SEQ ID NO: 1171144 - DNA, 15 bp, Homo sapiens
atccatttctatcag

SEQ ID NO: 1171145 - DNA, 15 bp, Homo sapiens
tatccatttctatca

SEQ ID NO: 1171146 - DNA, 15 bp, Homo sapiens
gtatccatttctatc

SEQ ID NO: 1171147 - DNA, 15 bp, Homo sapiens
ggtatccatttctat

SEQ ID NO: 1171148 - DNA, 15 bp, Homo sapiens
aggtatccatttcta

SEQ ID NO: 1171149 - DNA, 15 bp, Homo sapiens
aaggtatccatttct

SEQ ID NO: 1171150 - DNA, 15 bp, Homo sapiens
caaggtatccatttc

SEQ ID NO: 1171151 - DNA, 15 bp, Homo sapiens
gcaaggtatccattt

SEQ ID NO: 1171152 - DNA, 15 bp, Homo sapiens
agcaaggtatccatt

SEQ ID NO: 1171153 - DNA, 15 bp, Homo sapiens
cagcaaggtatccat

SEQ ID NO: 1171154 - DNA, 15 bp, Homo sapiens
acagcaaggtatcca

SEQ ID NO: 1171155 - DNA, 15 bp, Homo sapiens
cacagcaaggtatcc

SEQ ID NO: 1171156 - DNA, 15 bp, Homo sapiens
gcacagcaaggtatc

SEQ ID NO: 1171157 - DNA, 15 bp, Homo sapiens
tgcacagcaaggtat

SEQ ID NO: 1171158 - DNA, 15 bp, Homo sapiens
gtgcacagcaaggta

SEQ ID NO: 1171159 - DNA, 15 bp, Homo sapiens
agtgcacagcaaggt

SEQ ID NO: 1171160 - DNA, 15 bp, Homo sapiens
cagtgcacagcaagg

SEQ ID NO: 1171161 - DNA, 15 bp, Homo sapiens
ccagtgcacagcaag

SEQ ID NO: 1171162 - DNA, 15 bp, Homo sapiens
accagtgcacagcaa

SEQ ID NO: 1171163 - DNA, 15 bp, Homo sapiens
taccagtgcacagca

SEQ ID NO: 1171164 - DNA, 15 bp, Homo sapiens
gtaccagtgcacagc

SEQ ID NO: 1171165 - DNA, 15 bp, Homo sapiens
agtaccagtgcacag

SEQ ID NO: 1171166 - DNA, 15 bp, Homo sapiens
tagtaccagtgcaca

SEQ ID NO: 1171167 - DNA, 15 bp, Homo sapiens
gtagtaccagtgcac

SEQ ID NO: 1171168 - DNA, 15 bp, Homo sapiens
agtagtaccagtgca

SEQ ID NO: 1171169 - DNA, 15 bp, Homo sapiens
cagtagtaccagtgc

SEQ ID NO: 1171170 - DNA, 15 bp, Homo sapiens
acagtagtaccagtg

SEQ ID NO: 1171171 - DNA, 15 bp, Homo sapiens
cacagtagtaccagt

SEQ ID NO: 1171172 - DNA, 15 bp, Homo sapiens
tcacagtagtaccag

SEQ ID NO: 1171173 - DNA, 15 bp, Homo sapiens
atcacagtagtacca

SEQ ID NO: 1171174 - DNA, 15 bp, Homo sapiens
aatcacagtagtacc

SEQ ID NO: 1171175 - DNA, 15 bp, Homo sapiens
gaatcacagtagtac

SEQ ID NO: 1171176 - DNA, 15 bp, Homo sapiens
tgaatcacagtagta

SEQ ID NO: 1171177 - DNA, 15 bp, Homo sapiens
atgaatcacagtagt

SEQ ID NO: 1171178 - DNA, 15 bp, Homo sapiens
catgaatcacagtag

SEQ ID NO: 1171179 - DNA, 15 bp, Homo sapiens
ccatgaatcacagta

SEQ ID NO: 1171180 - DNA, 15 bp, Homo sapiens
tccatgaatcacagt

SEQ ID NO: 1171181 - DNA, 15 bp, Homo sapiens
ttccatgaatcacag

SEQ ID NO: 1171182 - DNA, 15 bp, Homo sapiens
tttccatgaatcaca

SEQ ID NO: 1171183 - DNA, 15 bp, Homo sapiens
ctttccatgaatcac

SEQ ID NO: 1171184 - DNA, 15 bp, Homo sapiens
gctttccatgaatca

SEQ ID NO: 1171185 - DNA, 15 bp, Homo sapiens
agctttccatgaatc

SEQ ID NO: 1171186 - DNA, 15 bp, Homo sapiens
cagctttccatgaat

SEQ ID NO: 1171187 - DNA, 15 bp, Homo sapiens
tcagctttccatgaa

SEQ ID NO: 1171188 - DNA, 15 bp, Homo sapiens
atcagctttccatga

SEQ ID NO: 1171189 - DNA, 15 bp, Homo sapiens
gatcagctttccatg

SEQ ID NO: 1171190 - DNA, 15 bp, Homo sapiens
tgatcagctttccat

SEQ ID NO: 1171191 - DNA, 15 bp, Homo sapiens
atgatcagctttcca

SEQ ID NO: 1171192 - DNA, 15 bp, Homo sapiens
catgatcagctttcc

SEQ ID NO: 1171193 - DNA, 15 bp, Homo sapiens
gcatgatcagctttc

SEQ ID NO: 1171194 - DNA, 15 bp, Homo sapiens
tgcatgatcagcttt

SEQ ID NO: 1171195 - DNA, 15 bp, Homo sapiens
ttgcatgatcagctt

SEQ ID NO: 1171196 - DNA, 15 bp, Homo sapiens
gttgcatgatcagct

SEQ ID NO: 1171197 - DNA, 15 bp, Homo sapiens
ggttgcatgatcagc

SEQ ID NO: 1171198 - DNA, 15 bp, Homo sapiens
gggttgcatgatcag

SEQ ID NO: 1171199 - DNA, 15 bp, Homo sapiens
tgggttgcatgatca

SEQ ID NO: 1171200 - DNA, 15 bp, Homo sapiens
ttgggttgcatgatc

SEQ ID NO: 1171201 - DNA, 15 bp, Homo sapiens
cttgggttgcatgat

SEQ ID NO: 1171202 - DNA, 15 bp, Homo sapiens
tcttgggttgcatga

SEQ ID NO: 1171203 - DNA, 15 bp, Homo sapiens
gtcttgggttgcatg

SEQ ID NO: 1171204 - DNA, 15 bp, Homo sapiens
cgtcttgggttgcat

SEQ ID NO: 1171205 - DNA, 15 bp, Homo sapiens
gcgtcttgggttgca

SEQ ID NO: 1171206 - DNA, 15 bp, Homo sapiens
ggcgtcttgggttgc

SEQ ID NO: 1171207 - DNA, 15 bp, Homo sapiens
tggcgtcttgggttg

SEQ ID NO: 1171208 - DNA, 15 bp, Homo sapiens
ttggcgtcttgggtt

SEQ ID NO: 1171209 - DNA, 15 bp, Homo sapiens
tttggcgtcttgggt

SEQ ID NO: 1171210 - DNA, 15 bp, Homo sapiens
ttttggcgtcttggg

SEQ ID NO: 1171211 - DNA, 15 bp, Homo sapiens
attttggcgtcttgg

SEQ ID NO: 1171212 - DNA, 15 bp, Homo sapiens
aattttggcgtcttg

SEQ ID NO: 1171213 - DNA, 15 bp, Homo sapiens
gaattttggcgtctt

SEQ ID NO: 1171214 - DNA, 15 bp, Homo sapiens
ggaattttggcgtct

SEQ ID NO: 1171215 - DNA, 15 bp, Homo sapiens
gggaattttggcgtc

SEQ ID NO: 1171216 - DNA, 15 bp, Homo sapiens
tgggaattttggcgt

SEQ ID NO: 1171217 - DNA, 15 bp, Homo sapiens
ctgggaattttggcg

SEQ ID NO: 1171218 - DNA, 15 bp, Homo sapiens
gctgggaattttggc

SEQ ID NO: 1171219 - DNA, 15 bp, Homo sapiens
ggctgggaattttgg

SEQ ID NO: 1171220 - DNA, 15 bp, Homo sapiens
aggctgggaattttg

SEQ ID NO: 1171221 - DNA, 15 bp, Homo sapiens
aaggctgggaatttt

SEQ ID NO: 1171222 - DNA, 15 bp, Homo sapiens
taaggctgggaattt

SEQ ID NO: 1171223 - DNA, 15 bp, Homo sapiens
gtaaggctgggaatt

SEQ ID NO: 1171224 - DNA, 15 bp, Homo sapiens
agtaaggctgggaat

SEQ ID NO: 1171225 - DNA, 15 bp, Homo sapiens
cagtaaggctgggaa

SEQ ID NO: 1171226 - DNA, 15 bp, Homo sapiens
acagtaaggctggga

SEQ ID NO: 1171227 - DNA, 15 bp, Homo sapiens
aacagtaaggctggg

SEQ ID NO: 1171228 - DNA, 15 bp, Homo sapiens
taacagtaaggctgg

SEQ ID NO: 1171229 - DNA, 15 bp, Homo sapiens
gtaacagtaaggctg

SEQ ID NO: 1171230 - DNA, 15 bp, Homo sapiens
cgtaacagtaaggct

SEQ ID NO: 1171231 - DNA, 15 bp, Homo sapiens
tcgtaacagtaaggc

SEQ ID NO: 1171232 - DNA, 15 bp, Homo sapiens
ttcgtaacagtaagg

SEQ ID NO: 1171233 - DNA, 15 bp, Homo sapiens
tttcgtaacagtaag

SEQ ID NO: 1171234 - DNA, 15 bp, Homo sapiens
ctttcgtaacagtaa

SEQ ID NO: 1171235 - DNA, 15 bp, Homo sapiens
tctttcgtaacagta

SEQ ID NO: 1171236 - DNA, 15 bp, Homo sapiens
ttctttcgtaacagt

SEQ ID NO: 1171237 - DNA, 15 bp, Homo sapiens
tttctttcgtaacag

SEQ ID NO: 1171238 - DNA, 15 bp, Homo sapiens
ctttctttcgtaaca

SEQ ID NO: 1171239 - DNA, 15 bp, Homo sapiens
actttctttcgtaac

SEQ ID NO: 1171240 - DNA, 15 bp, Homo sapiens
aactttctttcgtaa

SEQ ID NO: 1171241 - DNA, 15 bp, Homo sapiens
aaactttctttcgta

SEQ ID NO: 1171242 - DNA, 15 bp, Homo sapiens
gaaactttctttcgt

SEQ ID NO: 1171243 - DNA, 15 bp, Homo sapiens
agaaactttctttcg

SEQ ID NO: 1171244 - DNA, 15 bp, Homo sapiens
tagaaactttctttc

SEQ ID NO: 1171245 - DNA, 15 bp, Homo sapiens
ttagaaactttcttt

SEQ ID NO: 1171246 - DNA, 15 bp, Homo sapiens
cttagaaactttctt

SEQ ID NO: 1171247 - DNA, 15 bp, Homo sapiens
gcttagaaactttct

SEQ ID NO: 1171248 - DNA, 15 bp, Homo sapiens
tgcttagaaactttc

SEQ ID NO: 1171249 - DNA, 15 bp, Homo sapiens
gtgcttagaaacttt

SEQ ID NO: 1171250 - DNA, 15 bp, Homo sapiens
tgtgcttagaaactt

SEQ ID NO: 1171251 - DNA, 15 bp, Homo sapiens
ttgtgcttagaaact

SEQ ID NO: 1171252 - DNA, 15 bp, Homo sapiens
attgtgcttagaaac

SEQ ID NO: 1171253 - DNA, 15 bp, Homo sapiens
aattgtgcttagaaa

SEQ ID NO: 1171254 - DNA, 15 bp, Homo sapiens
caattgtgcttagaa

SEQ ID NO: 1171255 - DNA, 15 bp, Homo sapiens
acaattgtgcttaga

SEQ ID NO: 1171256 - DNA, 15 bp, Homo sapiens
gacaattgtgcttag

SEQ ID NO: 1171257 - DNA, 15 bp, Homo sapiens
agacaattgtgctta

SEQ ID NO: 1171258 - DNA, 15 bp, Homo sapiens
gagacaattgtgctt

SEQ ID NO: 1171259 - DNA, 15 bp, Homo sapiens
agagacaattgtgct

SEQ ID NO: 1171260 - DNA, 15 bp, Homo sapiens
tagagacaattgtgc

SEQ ID NO: 1171261 - DNA, 15 bp, Homo sapiens
ctagagacaattgtg

SEQ ID NO: 1171262 - DNA, 15 bp, Homo sapiens
gctagagacaattgt

SEQ ID NO: 1171263 - DNA, 15 bp, Homo sapiens
ggctagagacaattg

SEQ ID NO: 1171264 - DNA, 15 bp, Homo sapiens
tggctagagacaatt

SEQ ID NO: 1171265 - DNA, 15 bp, Homo sapiens
ttggctagagacaat

SEQ ID NO: 1171266 - DNA, 15 bp, Homo sapiens
gttggctagagacaa

SEQ ID NO: 1171267 - DNA, 15 bp, Homo sapiens
agttggctagagaca

SEQ ID NO: 1171268 - DNA, 15 bp, Homo sapiens
aagttggctagagac

SEQ ID NO: 1171269 - DNA, 15 bp, Homo sapiens
gaagttggctagaga

SEQ ID NO: 1171270 - DNA, 15 bp, Homo sapiens
ggaagttggctagag

SEQ ID NO: 1171271 - DNA, 15 bp, Homo sapiens
aggaagttggctaga

SEQ ID NO: 1171272 - DNA, 15 bp, Homo sapiens
gaggaagttggctag

SEQ ID NO: 1171273 - DNA, 15 bp, Homo sapiens
agaggaagttggcta

SEQ ID NO: 1171274 - DNA, 15 bp, Homo sapiens
aagaggaagttggct

SEQ ID NO: 1171275 - DNA, 15 bp, Homo sapiens
taagaggaagttggc

SEQ ID NO: 1171276 - DNA, 15 bp, Homo sapiens
ctaagaggaagttgg

SEQ ID NO: 1171277 - DNA, 15 bp, Homo sapiens
actaagaggaagttg

SEQ ID NO: 1171278 - DNA, 15 bp, Homo sapiens
tactaagaggaagtt

SEQ ID NO: 1171279 - DNA, 15 bp, Homo sapiens
ttactaagaggaagt

SEQ ID NO: 1171280 - DNA, 15 bp, Homo sapiens
cttactaagaggaag

SEQ ID NO: 1171281 - DNA, 15 bp, Homo sapiens
tcttactaagaggaa

SEQ ID NO: 1171282 - DNA, 15 bp, Homo sapiens
ttcttactaagagga

SEQ ID NO: 1171283 - DNA, 15 bp, Homo sapiens
tttcttactaagagg

SEQ ID NO: 1171284 - DNA, 15 bp, Homo sapiens
ctttcttactaagag

SEQ ID NO: 1171285 - DNA, 15 bp, Homo sapiens
tctttcttactaaga

SEQ ID NO: 1171286 - DNA, 15 bp, Homo sapiens
ctctttcttactaag

SEQ ID NO: 1171287 - DNA, 15 bp, Homo sapiens
cctctttcttactaa

SEQ ID NO: 1171288 - DNA, 15 bp, Homo sapiens
gcctctttcttacta

SEQ ID NO: 1171289 - DNA, 15 bp, Homo sapiens
ggcctctttcttact

SEQ ID NO: 1171290 - DNA, 15 bp, Homo sapiens
tgcctggcctctttc

SEQ ID NO: 1171291 - DNA, 15 bp, Homo sapiens
ctgcctggcctcttt

SEQ ID NO: 1171292 - DNA, 15 bp, Homo sapiens
cctgcctggcctctt

SEQ ID NO: 1171293 - DNA, 15 bp, Homo sapiens
ccctgcctggcctct

SEQ ID NO: 1171294 - DNA, 15 bp, Homo sapiens
gccctgcctggcctc

SEQ ID NO: 1171295 - DNA, 15 bp, Homo sapiens
agccctgcctggcct

SEQ ID NO: 1171296 - DNA, 15 bp, Homo sapiens
aagccctgcctggcc

SEQ ID NO: 1171297 - DNA, 15 bp, Homo sapiens
gaagccctgcctggc

SEQ ID NO: 1171298 - DNA, 15 bp, Homo sapiens
tgaagccctgcctgg

SEQ ID NO: 1171299 - DNA, 15 bp, Homo sapiens
atgaagccctgcctg

SEQ ID NO: 1171300 - DNA, 15 bp, Homo sapiens
catgaagccctgcct

SEQ ID NO: 1171301 - DNA, 15 bp, Homo sapiens
gcatgaagccctgcc

SEQ ID NO: 1171302 - DNA, 15 bp, Homo sapiens
tgcatgaagccctgc

SEQ ID NO: 1171303 - DNA, 15 bp, Homo sapiens
ctgcatgaagccctg

SEQ ID NO: 1171304 - DNA, 15 bp, Homo sapiens
cctgcatgaagccct

SEQ ID NO: 1171305 - DNA, 15 bp, Homo sapiens
ccctgcatgaagccc

SEQ ID NO: 1171306 - DNA, 15 bp, Homo sapiens
accctgcatgaagcc

SEQ ID NO: 1171307 - DNA, 15 bp, Homo sapiens
taccctgcatgaagc

SEQ ID NO: 1171308 - DNA, 15 bp, Homo sapiens
gtaccctgcatgaag

SEQ ID NO: 1171309 - DNA, 15 bp, Homo sapiens
tgtaccctgcatgaa

SEQ ID NO: 1171310 - DNA, 15 bp, Homo sapiens
ctgtaccctgcatga

SEQ ID NO: 1171311 - DNA, 15 bp, Homo sapiens
gctgtaccctgcatg

SEQ ID NO: 1171312 - DNA, 15 bp, Homo sapiens
ggctgtaccctgcat

SEQ ID NO: 1171313 - DNA, 15 bp, Homo sapiens
gggctgtaccctgca

SEQ ID NO: 1171314 - DNA, 15 bp, Homo sapiens
agggctgtaccctgc

SEQ ID NO: 1171315 - DNA, 15 bp, Homo sapiens
cagggctgtaccctg

SEQ ID NO: 1171316 - DNA, 15 bp, Homo sapiens
tcagggctgtaccct

SEQ ID NO: 1171317 - DNA, 15 bp, Homo sapiens
ctcagggctgtaccc

SEQ ID NO: 1171318 - DNA, 15 bp, Homo sapiens
actcagggctgtacc

SEQ ID NO: 1171319 - DNA, 15 bp, Homo sapiens
aactcagggctgtac

SEQ ID NO: 1171320 - DNA, 15 bp, Homo sapiens
aaactcagggctgta

SEQ ID NO: 1171321 - DNA, 15 bp, Homo sapiens
gaaactcagggctgt

SEQ ID NO: 1171322 - DNA, 15 bp, Homo sapiens
agaaactcagggctg

SEQ ID NO: 1171323 - DNA, 15 bp, Homo sapiens
aagaaactcagggct

SEQ ID NO: 1171324 - DNA, 15 bp, Homo sapiens
taagaaactcagggc

SEQ ID NO: 1171325 - DNA, 15 bp, Homo sapiens
gtaagaaactcaggg

SEQ ID NO: 1171326 - DNA, 15 bp, Homo sapiens
agtaagaaactcagg

SEQ ID NO: 1171327 - DNA, 15 bp, Homo sapiens
cagtaagaaactcag

SEQ ID NO: 1171328 - DNA, 15 bp, Homo sapiens
gcagtaagaaactca

SEQ ID NO: 1171329 - DNA, 15 bp, Homo sapiens
cgcagtaagaaactc

SEQ ID NO: 1171330 - DNA, 15 bp, Homo sapiens
acgcagtaagaaact

SEQ ID NO: 1171331 - DNA, 15 bp, Homo sapiens
cacgcagtaagaaac

SEQ ID NO: 1171332 - DNA, 15 bp, Homo sapiens
ccacgcagtaagaaa

SEQ ID NO: 1171333 - DNA, 15 bp, Homo sapiens
accacgcagtaagaa

SEQ ID NO: 1171334 - DNA, 15 bp, Homo sapiens
taccacgcagtaaga

SEQ ID NO: 1171335 - DNA, 15 bp, Homo sapiens
ttaccacgcagtaag

SEQ ID NO: 1171336 - DNA, 15 bp, Homo sapiens
cttaccacgcagtaa

SEQ ID NO: 1171337 - DNA, 15 bp, Homo sapiens
acttaccacgcagta

SEQ ID NO: 1171338 - DNA, 15 bp, Homo sapiens
aacttaccacgcagt

SEQ ID NO: 1171339 - DNA, 15 bp, Homo sapiens
aaacttaccacgcag

SEQ ID NO: 1171340 - DNA, 15 bp, Homo sapiens
gaaacttaccacgca

SEQ ID NO: 1171341 - DNA, 15 bp, Homo sapiens
agaaacttaccacgc

SEQ ID NO: 1171342 - DNA, 15 bp, Homo sapiens
cagaaacttaccacg

SEQ ID NO: 1171343 - DNA, 15 bp, Homo sapiens
ccagaaacttaccac

SEQ ID NO: 1171344 - DNA, 15 bp, Homo sapiens
cccagaaacttacca

SEQ ID NO: 1171345 - DNA, 15 bp, Homo sapiens
ccccagaaacttacc

SEQ ID NO: 1171346 - DNA, 15 bp, Homo sapiens
gccccagaaacttac

SEQ ID NO: 1171347 - DNA, 15 bp, Homo sapiens
agccccagaaactta

SEQ ID NO: 1171348 - DNA, 15 bp, Homo sapiens
cagccccagaaactt

SEQ ID NO: 1171349 - DNA, 15 bp, Homo sapiens
ccagccccagaaact

SEQ ID NO: 1171350 - DNA, 15 bp, Homo sapiens
cccagccccagaaac

SEQ ID NO: 1171351 - DNA, 15 bp, Homo sapiens
tcccagccccagaaa

SEQ ID NO: 1171352 - DNA, 15 bp, Homo sapiens
ctcccagccccagaa

SEQ ID NO: 1171353 - DNA, 15 bp, Homo sapiens
actcccagccccaga

SEQ ID NO: 1171354 - DNA, 15 bp, Homo sapiens
tactcccagccccag

SEQ ID NO: 1171355 - DNA, 15 bp, Homo sapiens
ttactcccagcccca

SEQ ID NO: 1171356 - DNA, 15 bp, Homo sapiens
tttactcccagcccc

SEQ ID NO: 1171357 - DNA, 15 bp, Homo sapiens
ctttactcccagccc

SEQ ID NO: 1171358 - DNA, 15 bp, Homo sapiens
gctttactcccagcc

SEQ ID NO: 1171359 - DNA, 15 bp, Homo sapiens
tgctttactcccagc

SEQ ID NO: 1171360 - DNA, 15 bp, Homo sapiens
ctgctttactcccag

SEQ ID NO: 1171361 - DNA, 15 bp, Homo sapiens
gctgctttactccca

SEQ ID NO: 1171362 - DNA, 15 bp, Homo sapiens
cgctgctttactccc

SEQ ID NO: 1171363 - DNA, 15 bp, Homo sapiens
acgctgctttactcc

SEQ ID NO: 1171364 - DNA, 15 bp, Homo sapiens
cacgctgctttactc

SEQ ID NO: 1171365 - DNA, 15 bp, Homo sapiens
tcacgctgctttact

SEQ ID NO: 1171366 - DNA, 15 bp, Homo sapiens
gtcacgctgctttac

SEQ ID NO: 1171367 - DNA, 15 bp, Homo sapiens
ggtcacgctgcttta

SEQ ID NO: 1171368 - DNA, 15 bp, Homo sapiens
cggtcacgctgcttt

SEQ ID NO: 1171369 - DNA, 15 bp, Homo sapiens
tcggtcacgctgctt

SEQ ID NO: 1171370 - DNA, 15 bp, Homo sapiens
ttcggtcacgctgct

SEQ ID NO: 1171371 - DNA, 15 bp, Homo sapiens
tttcggtcacgctgc

SEQ ID NO: 1171372 - DNA, 15 bp, Homo sapiens
ctttcggtcacgctg

SEQ ID NO: 1171373 - DNA, 15 bp, Homo sapiens
gctttcggtcacgct

SEQ ID NO: 1171374 - DNA, 15 bp, Homo sapiens
tgctttcggtcacgc

SEQ ID NO: 1171375 - DNA, 15 bp, Homo sapiens
ctgctttcggtcacg

SEQ ID NO: 1171376 - DNA, 15 bp, Homo sapiens
actgctttcggtcac

SEQ ID NO: 1171377 - DNA, 15 bp, Homo sapiens
tactgctttcggtca

SEQ ID NO: 1171378 - DNA, 15 bp, Homo sapiens
gtactgctttcggtc

SEQ ID NO: 1171379 - DNA, 15 bp, Homo sapiens
tgtactgctttcggt

SEQ ID NO: 1171380 - DNA, 15 bp, Homo sapiens
ttgtactgctttcgg

SEQ ID NO: 1171381 - DNA, 15 bp, Homo sapiens
tttgtactgctttcg

SEQ ID NO: 1171382 - DNA, 15 bp, Homo sapiens
ctttgtactgctttc

SEQ ID NO: 1171383 - DNA, 15 bp, Homo sapiens
actttgtactgcttt

SEQ ID NO: 1171384 - DNA, 15 bp, Homo sapiens
aactttgtactgctt

SEQ ID NO: 1171385 - DNA, 15 bp, Homo sapiens
gaactttgtactgct

SEQ ID NO: 1171386 - DNA, 15 bp, Homo sapiens
agaactttgtactgc

SEQ ID NO: 1171387 - DNA, 15 bp, Homo sapiens
tagaactttgtactg

SEQ ID NO: 1171388 - DNA, 15 bp, Homo sapiens
gtagaactttgtact

SEQ ID NO: 1171389 - DNA, 15 bp, Homo sapiens
ggtagaactttgtac

SEQ ID NO: 1171390 - DNA, 15 bp, Homo sapiens
cggtagaactttgta

SEQ ID NO: 1171391 - DNA, 15 bp, Homo sapiens
ccggtagaactttgt

SEQ ID NO: 1171392 - DNA, 15 bp, Homo sapiens
tccggtagaactttg

SEQ ID NO: 1171393 - DNA, 15 bp, Homo sapiens
gtccggtagaacttt

SEQ ID NO: 1171394 - DNA, 15 bp, Homo sapiens
tgtccggtagaactt

SEQ ID NO: 1171395 - DNA, 15 bp, Homo sapiens
gtgtccggtagaact

SEQ ID NO: 1171396 - DNA, 15 bp, Homo sapiens
cgtgtccggtagaac

SEQ ID NO: 1171397 - DNA, 15 bp, Homo sapiens
gcgtgtccggtagaa

SEQ ID NO: 1171398 - DNA, 15 bp, Homo sapiens
tgcgtgtccggtaga

SEQ ID NO: 1171399 - DNA, 15 bp, Homo sapiens
ctgcgtgtccggtag

SEQ ID NO: 1171400 - DNA, 15 bp, Homo sapiens
tctgcgtgtccggta

SEQ ID NO: 1171401 - DNA, 15 bp, Homo sapiens
atctgcgtgtccggt

SEQ ID NO: 1171402 - DNA, 15 bp, Homo sapiens
gatctgcgtgtccgg

SEQ ID NO: 1171403 - DNA, 15 bp, Homo sapiens
ggatctgcgtgtccg

SEQ ID NO: 1171404 - DNA, 15 bp, Homo sapiens
gggatctgcgtgtcc

SEQ ID NO: 1171405 - DNA, 15 bp, Homo sapiens
cgggatctgcgtgtc

SEQ ID NO: 1171406 - DNA, 15 bp, Homo sapiens
ccgggatctgcgtgt

SEQ ID NO: 1171407 - DNA, 15 bp, Homo sapiens
accgggatctgcgtg

SEQ ID NO: 1171408 - DNA, 15 bp, Homo sapiens
gaccgggatctgcgt

SEQ ID NO: 1171409 - DNA, 15 bp, Homo sapiens
ggaccgggatctgcg

SEQ ID NO: 1171410 - DNA, 15 bp, Homo sapiens
aggaccgggatctgc

SEQ ID NO: 1171411 - DNA, 15 bp, Homo sapiens
taggaccgggatctg

SEQ ID NO: 1171412 - DNA, 15 bp, Homo sapiens
gtaggaccgggatct

SEQ ID NO: 1171413 - DNA, 15 bp, Homo sapiens
tgtaggaccgggatc

SEQ ID NO: 1171414 - DNA, 15 bp, Homo sapiens
ttgtaggaccgggat

SEQ ID NO: 1171415 - DNA, 15 bp, Homo sapiens
tttgtaggaccggga

SEQ ID NO: 1171416 - DNA, 15 bp, Homo sapiens
atttgtaggaccggg

SEQ ID NO: 1171417 - DNA, 15 bp, Homo sapiens
tatttgtaggaccgg

SEQ ID NO: 1171418 - DNA, 15 bp, Homo sapiens
atatttgtaggaccg

SEQ ID NO: 1171419 - DNA, 15 bp, Homo sapiens
catatttgtaggacc

SEQ ID NO: 1171420 - DNA, 15 bp, Homo sapiens
tcatatttgtaggac

SEQ ID NO: 1171421 - DNA, 15 bp, Homo sapiens
ctcatatttgtagga

SEQ ID NO: 1171422 - DNA, 15 bp, Homo sapiens
cctcatatttgtagg

SEQ ID NO: 1171423 - DNA, 15 bp, Homo sapiens
acctcatatttgtag

SEQ ID NO: 1171424 - DNA, 15 bp, Homo sapiens
gacctcatatttgta

SEQ ID NO: 1171425 - DNA, 15 bp, Homo sapiens
ggacctcatatttgt

SEQ ID NO: 1171426 - DNA, 15 bp, Homo sapiens
tggacctcatatttg

SEQ ID NO: 1171427 - DNA, 15 bp, Homo sapiens
atggacctcatattt

SEQ ID NO: 1171428 - DNA, 15 bp, Homo sapiens
tatggacctcatatt

SEQ ID NO: 1171429 - DNA, 15 bp, Homo sapiens
ttatggacctcatat

SEQ ID NO: 1171430 - DNA, 15 bp, Homo sapiens
attatggacctcata

SEQ ID NO: 1171431 - DNA, 15 bp, Homo sapiens
cattatggacctcat

SEQ ID NO: 1171432 - DNA, 15 bp, Homo sapiens
tcattatggacctca

SEQ ID NO: 1171433 - DNA, 15 bp, Homo sapiens
ctcattatggacctc

SEQ ID NO: 1171434 - DNA, 15 bp, Homo sapiens
tctcattatggacct

SEQ ID NO: 1171435 - DNA, 15 bp, Homo sapiens
gtctcattatggacc

SEQ ID NO: 1171436 - DNA, 15 bp, Homo sapiens
agtctcattatggac

SEQ ID NO: 1171437 - DNA, 15 bp, Homo sapiens
cagtctcattatgga

SEQ ID NO: 1171438 - DNA, 15 bp, Homo sapiens
tcagtctcattatgg

SEQ ID NO: 1171439 - DNA, 15 bp, Homo sapiens
ctcagtctcattatg

SEQ ID NO: 1171440 - DNA, 15 bp, Homo sapiens
tctcagtctcattat

SEQ ID NO: 1171441 - DNA, 15 bp, Homo sapiens
atctcagtctcatta

SEQ ID NO: 1171442 - DNA, 15 bp, Homo sapiens
tatctcagtctcatt

SEQ ID NO: 1171443 - DNA, 15 bp, Homo sapiens
atatctcagtctcat

SEQ ID NO: 1171444 - DNA, 15 bp, Homo sapiens
gatatctcagtctca

SEQ ID NO: 1171445 - DNA, 15 bp, Homo sapiens
tgatatctcagtctc

SEQ ID NO: 1171446 - DNA, 15 bp, Homo sapiens
atgatatctcagtct

SEQ ID NO: 1171447 - DNA, 15 bp, Homo sapiens
aatgatatctcagtc

SEQ ID NO: 1171448 - DNA, 15 bp, Homo sapiens
gaatgatatctcagt

SEQ ID NO: 1171449 - DNA, 15 bp, Homo sapiens
tgaatgatatctcag

SEQ ID NO: 1171450 - DNA, 15 bp, Homo sapiens
atgaatgatatctca

SEQ ID NO: 1171451 - DNA, 15 bp, Homo sapiens
gatgaatgatatctc

SEQ ID NO: 1171452 - DNA, 15 bp, Homo sapiens
ggatgaatgatatct

SEQ ID NO: 1171453 - DNA, 15 bp, Homo sapiens
tggatgaatgatatc

SEQ ID NO: 1171454 - DNA, 15 bp, Homo sapiens
ttggatgaatgatat

SEQ ID NO: 1171455 - DNA, 15 bp, Homo sapiens
gttggatgaatgata

SEQ ID NO: 1171456 - DNA, 15 bp, Homo sapiens
tgttggatgaatgat

SEQ ID NO: 1171457 - DNA, 15 bp, Homo sapiens
ttgttggatgaatga

SEQ ID NO: 1171458 - DNA, 15 bp, Homo sapiens
tttgttggatgaatg

SEQ ID NO: 1171459 - DNA, 15 bp, Homo sapiens
atttgttggatgaat

SEQ ID NO: 1171460 - DNA, 15 bp, Homo sapiens
tatttgttggatgaa

SEQ ID NO: 1171461 - DNA, 15 bp, Homo sapiens
atatttgttggatga

SEQ ID NO: 1171462 - DNA, 15 bp, Homo sapiens
aatatttgttggatg

SEQ ID NO: 1171463 - DNA, 15 bp, Homo sapiens
aaatatttgttggat

SEQ ID NO: 1171464 - DNA, 15 bp, Homo sapiens
taaatatttgttgga

SEQ ID NO: 1171465 - DNA, 15 bp, Homo sapiens
ataaatatttgttgg

SEQ ID NO: 1171466 - DNA, 15 bp, Homo sapiens
aataaatatttgttg

SEQ ID NO: 1171467 - DNA, 15 bp, Homo sapiens
caataaatatttgtt

SEQ ID NO: 1171468 - DNA, 15 bp, Homo sapiens
tcaataaatatttgt

SEQ ID NO: 1171469 - DNA, 15 bp, Homo sapiens
ttcaataaatatttg

SEQ ID NO: 1171470 - DNA, 15 bp, Homo sapiens
attcaataaatattt

SEQ ID NO: 1171471 - DNA, 15 bp, Homo sapiens
tattcaataaatatt

SEQ ID NO: 1171472 - DNA, 15 bp, Homo sapiens
gtattcaataaatat

SEQ ID NO: 1171473 - DNA, 15 bp, Homo sapiens
ggtattcaataaata

SEQ ID NO: 1171474 - DNA, 15 bp, Homo sapiens
tggtattcaataaat

SEQ ID NO: 1171475 - DNA, 15 bp, Homo sapiens
ttggtattcaataaa

SEQ ID NO: 1171476 - DNA, 15 bp, Homo sapiens
tttggtattcaataa

SEQ ID NO: 1171477 - DNA, 15 bp, Homo sapiens
gtttggtattcaata

SEQ ID NO: 1171478 - DNA, 15 bp, Homo sapiens
tgtttggtattcaat

SEQ ID NO: 1171479 - DNA, 15 bp, Homo sapiens
atgtttggtattcaa

SEQ ID NO: 1171480 - DNA, 15 bp, Homo sapiens
aatgtttggtattca

SEQ ID NO: 1171481 - DNA, 15 bp, Homo sapiens
caatgtttggtattc

SEQ ID NO: 1171482 - DNA, 15 bp, Homo sapiens
ccaatgtttggtatt

SEQ ID NO: 1171483 - DNA, 15 bp, Homo sapiens
cccaatgtttggtat

SEQ ID NO: 1171484 - DNA, 15 bp, Homo sapiens
gcccaatgtttggta

SEQ ID NO: 1171485 - DNA, 15 bp, Homo sapiens
agcccaatgtttggt

SEQ ID NO: 1171486 - DNA, 15 bp, Homo sapiens
aagcccaatgtttgg

SEQ ID NO: 1171487 - DNA, 15 bp, Homo sapiens
taagcccaatgtttg

SEQ ID NO: 1171488 - DNA, 15 bp, Homo sapiens
gtaagcccaatgttt

SEQ ID NO: 1171489 - DNA, 15 bp, Homo sapiens
cgtaagcccaatgtt

SEQ ID NO: 1171490 - DNA, 15 bp, Homo sapiens
ccgtaagcccaatgt

SEQ ID NO: 1171491 - DNA, 15 bp, Homo sapiens
gccgtaagcccaatg

SEQ ID NO: 1171492 - DNA, 15 bp, Homo sapiens
agccgtaagcccaat

SEQ ID NO: 1171493 - DNA, 15 bp, Homo sapiens
tagccgtaagcccaa

SEQ ID NO: 1171494 - DNA, 15 bp, Homo sapiens
ttagccgtaagccca

SEQ ID NO: 1171495 - DNA, 15 bp, Homo sapiens
tttagccgtaagccc

SEQ ID NO: 1171496 - DNA, 15 bp, Homo sapiens
ctttagccgtaagcc

SEQ ID NO: 1171497 - DNA, 15 bp, Homo sapiens
cctttagccgtaagc

SEQ ID NO: 1171498 - DNA, 15 bp, Homo sapiens
tcctttagccgtaag

SEQ ID NO: 1171499 - DNA, 15 bp, Homo sapiens
ttcctttagccgtaa

SEQ ID NO: 1171500 - DNA, 15 bp, Homo sapiens
tttcctttagccgta

SEQ ID NO: 1171501 - DNA, 15 bp, Homo sapiens
ttttcctttagccgt

SEQ ID NO: 1171502 - DNA, 15 bp, Homo sapiens
attttcctttagccg

SEQ ID NO: 1171503 - DNA, 15 bp, Homo sapiens
tattttcctttagcc

SEQ ID NO: 1171504 - DNA, 15 bp, Homo sapiens
gtattttcctttagc

SEQ ID NO: 1171505 - DNA, 15 bp, Homo sapiens
tgtattttcctttag

SEQ ID NO: 1171506 - DNA, 15 bp, Homo sapiens
ttgtattttccttta

SEQ ID NO: 1171507 - DNA, 15 bp, Homo sapiens
tttgtattttccttt

SEQ ID NO: 1171508 - DNA, 15 bp, Homo sapiens
ctttgtattttcctt

SEQ ID NO: 1171509 - DNA, 15 bp, Homo sapiens
actttgtattttcct

SEQ ID NO: 1171510 - DNA, 15 bp, Homo sapiens
aactttgtattttcc

SEQ ID NO: 1171511 - DNA, 15 bp, Homo sapiens
caactttgtattttc

SEQ ID NO: 1171512 - DNA, 15 bp, Homo sapiens
acaactttgtatttt

SEQ ID NO: 1171513 - DNA, 15 bp, Homo sapiens
cacaactttgtattt

SEQ ID NO: 1171514 - DNA, 15 bp, Homo sapiens
acacaactttgtatt

SEQ ID NO: 1171515 - DNA, 15 bp, Homo sapiens
aacacaactttgtat

SEQ ID NO: 1171516 - DNA, 15 bp, Homo sapiens
caacacaactttgta

SEQ ID NO: 1171517 - DNA, 15 bp, Homo sapiens
ccaacacaactttgt

SEQ ID NO: 1171518 - DNA, 15 bp, Homo sapiens
tccaacacaactttg

SEQ ID NO: 1171519 - DNA, 15 bp, Homo sapiens
atccaacacaacttt

SEQ ID NO: 1171520 - DNA, 15 bp, Homo sapiens
tatccaacacaactt

SEQ ID NO: 1171521 - DNA, 15 bp, Homo sapiens
atatccaacacaact

SEQ ID NO: 1171522 - DNA, 15 bp, Homo sapiens
catatccaacacaac

SEQ ID NO: 1171523 - DNA, 15 bp, Homo sapiens
ccatatccaacacaa

SEQ ID NO: 1171524 - DNA, 15 bp, Homo sapiens
cccatatccaacaca

SEQ ID NO: 1171525 - DNA, 15 bp, Homo sapiens
acccatatccaacac

SEQ ID NO: 1171526 - DNA, 15 bp, Homo sapiens
aacccatatccaaca

SEQ ID NO: 1171527 - DNA, 15 bp, Homo sapiens
gaacccatatccaac

SEQ ID NO: 1171528 - DNA, 15 bp, Homo sapiens
agaacccatatccaa

SEQ ID NO: 1171529 - DNA, 15 bp, Homo sapiens
cagaacccatatcca

SEQ ID NO: 1171530 - DNA, 15 bp, Homo sapiens
acagaacccatatcc

SEQ ID NO: 1171531 - DNA, 15 bp, Homo sapiens
aacagaacccatatc

SEQ ID NO: 1171532 - DNA, 15 bp, Homo sapiens
aaacagaacccatat

SEQ ID NO: 1171533 - DNA, 15 bp, Homo sapiens
aaaacagaacccata

SEQ ID NO: 1171534 - DNA, 15 bp, Homo sapiens
gaaaacagaacccat

SEQ ID NO: 1171535 - DNA, 15 bp, Homo sapiens
tgaaaacagaaccca

SEQ ID NO: 1171536 - DNA, 15 bp, Homo sapiens
ttgaaaacagaaccc

SEQ ID NO: 1171537 - DNA, 15 bp, Homo sapiens
cttgaaaacagaacc

SEQ ID NO: 1171538 - DNA, 15 bp, Homo sapiens
ccttgaaaacagaac

SEQ ID NO: 1171539 - DNA, 15 bp, Homo sapiens
tccttgaaaacagaa

SEQ ID NO: 1171540 - DNA, 15 bp, Homo sapiens
ctccttgaaaacaga

SEQ ID NO: 1171541 - DNA, 15 bp, Homo sapiens
gctccttgaaaacag

SEQ ID NO: 1171542 - DNA, 15 bp, Homo sapiens
agctccttgaaaaca

SEQ ID NO: 1171543 - DNA, 15 bp, Homo sapiens
aagctccttgaaaac

SEQ ID NO: 1171544 - DNA, 15 bp, Homo sapiens
taagctccttgaaaa

SEQ ID NO: 1171545 - DNA, 15 bp, Homo sapiens
ataagctccttgaaa

SEQ ID NO: 1171546 - DNA, 15 bp, Homo sapiens
tataagctccttgaa

SEQ ID NO: 1171547 - DNA, 15 bp, Homo sapiens
ttataagctccttga

SEQ ID NO: 1171548 - DNA, 15 bp, Homo sapiens
attataagctccttg

SEQ ID NO: 1171549 - DNA, 15 bp, Homo sapiens
gattataagctcctt

SEQ ID NO: 1171550 - DNA, 15 bp, Homo sapiens
agattataagctcct

SEQ ID NO: 1171551 - DNA, 15 bp, Homo sapiens
tagattataagctcc

SEQ ID NO: 1171552 - DNA, 15 bp, Homo sapiens
ttagattataagctc

SEQ ID NO: 1171553 - DNA, 15 bp, Homo sapiens
tattagattataagc

SEQ ID NO: 1171554 - DNA, 15 bp, Homo sapiens
ctattagattataag

SEQ ID NO: 1171555 - DNA, 15 bp, Homo sapiens
cctattagattataa

SEQ ID NO: 1171556 - DNA, 15 bp, Homo sapiens
tcctattagattata

SEQ ID NO: 1171557 - DNA, 15 bp, Homo sapiens
ttcctattagattat

SEQ ID NO: 1171558 - DNA, 15 bp, Homo sapiens
tttcctattagatta

SEQ ID NO: 1171559 - DNA, 15 bp, Homo sapiens
ctttcctattagatt

SEQ ID NO: 1171560 - DNA, 15 bp, Homo sapiens
tctttcctattagat

SEQ ID NO: 1171561 - DNA, 15 bp, Homo sapiens
atctttcctattaga

SEQ ID NO: 1171562 - DNA, 15 bp, Homo sapiens
catctttcctattag

SEQ ID NO: 1171563 - DNA, 15 bp, Homo sapiens
tcatctttcctatta

SEQ ID NO: 1171564 - DNA, 15 bp, Homo sapiens
ctcatctttcctatt

SEQ ID NO: 1171565 - DNA, 15 bp, Homo sapiens
cctcatctttcctat

SEQ ID NO: 1171566 - DNA, 15 bp, Homo sapiens
acctcatctttccta

SEQ ID NO: 1171567 - DNA, 15 bp, Homo sapiens
aacctcatctttcct

SEQ ID NO: 1171568 - DNA, 15 bp, Homo sapiens
taacctcatctttcc

SEQ ID NO: 1171569 - DNA, 15 bp, Homo sapiens
gtaacctcatctttc

SEQ ID NO: 1171570 - DNA, 15 bp, Homo sapiens
agtaacctcatcttt

SEQ ID NO: 1171571 - DNA, 15 bp, Homo sapiens
tagtaacctcatctt

SEQ ID NO: 1171572 - DNA, 15 bp, Homo sapiens
gtagtaacctcatct

SEQ ID NO: 1171573 - DNA, 15 bp, Homo sapiens
tgtagtaacctcatc

SEQ ID NO: 1171574 - DNA, 15 bp, Homo sapiens
atgtagtaacctcat

SEQ ID NO: 1171575 - DNA, 15 bp, Homo sapiens
aatgtagtaacctca

SEQ ID NO: 1171576 - DNA, 15 bp, Homo sapiens
taatgtagtaacctc

SEQ ID NO: 1171577 - DNA, 15 bp, Homo sapiens
ctaatgtagtaacct

SEQ ID NO: 1171578 - DNA, 15 bp, Homo sapiens
actaatgtagtaacc

SEQ ID NO: 1171579 - DNA, 15 bp, Homo sapiens
tactaatgtagtaac

SEQ ID NO: 1171580 - DNA, 15 bp, Homo sapiens
ctactaatgtagtaa

SEQ ID NO: 1171581 - DNA, 15 bp, Homo sapiens
gctactaatgtagta

SEQ ID NO: 1171582 - DNA, 15 bp, Homo sapiens
tgctactaatgtagt

SEQ ID NO: 1171583 - DNA, 15 bp, Homo sapiens
ttgctactaatgtag

SEQ ID NO: 1171584 - DNA, 15 bp, Homo sapiens
attgctactaatgta

SEQ ID NO: 1171585 - DNA, 15 bp, Homo sapiens
gattgctactaatgt

SEQ ID NO: 1171586 - DNA, 15 bp, Homo sapiens
tgattgctactaatg

SEQ ID NO: 1171587 - DNA, 15 bp, Homo sapiens
ctgattgctactaat

SEQ ID NO: 1171588 - DNA, 15 bp, Homo sapiens
tctgattgctactaa

SEQ ID NO: 1171589 - DNA, 15 bp, Homo sapiens
gtctgattgctacta

SEQ ID NO: 1171590 - DNA, 15 bp, Homo sapiens
ggtctgattgctact

SEQ ID NO: 1171591 - DNA, 15 bp, Homo sapiens
tggtctgattgctac

SEQ ID NO: 1171592 - DNA, 15 bp, Homo sapiens
ctggtctgattgcta

SEQ ID NO: 1171593 - DNA, 15 bp, Homo sapiens
tctggtctgattgct

SEQ ID NO: 1171594 - DNA, 15 bp, Homo sapiens
atctggtctgattgc

SEQ ID NO: 1171595 - DNA, 15 bp, Homo sapiens
tatctggtctgattg

SEQ ID NO: 1171596 - DNA, 15 bp, Homo sapiens
ctatctggtctgatt

SEQ ID NO: 1171597 - DNA, 15 bp, Homo sapiens
tctatctggtctgat

SEQ ID NO: 1171598 - DNA, 15 bp, Homo sapiens
ttctatctggtctga

SEQ ID NO: 1171599 - DNA, 15 bp, Homo sapiens
gttctatctggtctg

SEQ ID NO: 1171600 - DNA, 15 bp, Homo sapiens
agttctatctggtct

SEQ ID NO: 1171601 - DNA, 15 bp, Homo sapiens
cagttctatctggtc

SEQ ID NO: 1171602 - DNA, 15 bp, Homo sapiens
ccagttctatctggt

SEQ ID NO: 1171603 - DNA, 15 bp, Homo sapiens
tccagttctatctgg

SEQ ID NO: 1171604 - DNA, 15 bp, Homo sapiens
ttccagttctatctg

SEQ ID NO: 1171605 - DNA, 15 bp, Homo sapiens
cttccagttctatct

SEQ ID NO: 1171606 - DNA, 15 bp, Homo sapiens
acttccagttctatc

SEQ ID NO: 1171607 - DNA, 15 bp, Homo sapiens
cacttccagttctat

SEQ ID NO: 1171608 - DNA, 15 bp, Homo sapiens
acacttccagttcta

SEQ ID NO: 1171609 - DNA, 15 bp, Homo sapiens
cacacttccagttct

SEQ ID NO: 1171610 - DNA, 15 bp, Homo sapiens
tcacacttccagttc

SEQ ID NO: 1171611 - DNA, 15 bp, Homo sapiens
atcacacttccagtt

SEQ ID NO: 1171612 - DNA, 15 bp, Homo sapiens
catcacacttccagt

SEQ ID NO: 1171613 - DNA, 15 bp, Homo sapiens
acatcacacttccag

SEQ ID NO: 1171614 - DNA, 15 bp, Homo sapiens
tacatcacacttcca

SEQ ID NO: 1171615 - DNA, 15 bp, Homo sapiens
ttacatcacacttcc

SEQ ID NO: 1171616 - DNA, 15 bp, Homo sapiens
tttacatcacacttc

SEQ ID NO: 1171617 - DNA, 15 bp, Homo sapiens
atttacatcacactt

SEQ ID NO: 1171618 - DNA, 15 bp, Homo sapiens
catttacatcacact

SEQ ID NO: 1171619 - DNA, 15 bp, Homo sapiens
tcatttacatcacac

SEQ ID NO: 1171620 - DNA, 15 bp, Homo sapiens
ctcatttacatcaca

SEQ ID NO: 1171621 - DNA, 15 bp, Homo sapiens
cctcatttacatcac

SEQ ID NO: 1171622 - DNA, 15 bp, Homo sapiens
acctcatttacatca

SEQ ID NO: 1171623 - DNA, 15 bp, Homo sapiens
tacctcatttacatc

SEQ ID NO: 1171624 - DNA, 15 bp, Homo sapiens
gtacctcatttacat

SEQ ID NO: 1171625 - DNA, 15 bp, Homo sapiens
tgtacctcatttaca

SEQ ID NO: 1171626 - DNA, 15 bp, Homo sapiens
ctgtacctcatttac

SEQ ID NO: 1171627 - DNA, 15 bp, Homo sapiens
tctgtacctcattta

SEQ ID NO: 1171628 - DNA, 15 bp, Homo sapiens
atctgtacctcattt

SEQ ID NO: 1171629 - DNA, 15 bp, Homo sapiens
aatctgtacctcatt

SEQ ID NO: 1171630 - DNA, 15 bp, Homo sapiens
caatctgtacctcat

SEQ ID NO: 1171631 - DNA, 15 bp, Homo sapiens
tcaatctgtacctca

SEQ ID NO: 1171632 - DNA, 15 bp, Homo sapiens
atcaatctgtacctc

SEQ ID NO: 1171633 - DNA, 15 bp, Homo sapiens
aatcaatctgtacct

SEQ ID NO: 1171634 - DNA, 15 bp, Homo sapiens
caatcaatctgtacc

SEQ ID NO: 1171635 - DNA, 15 bp, Homo sapiens
acaatcaatctgtac

SEQ ID NO: 1171636 - DNA, 15 bp, Homo sapiens
tacaatcaatctgta

SEQ ID NO: 1171637 - DNA, 15 bp, Homo sapiens
ctacaatcaatctgt

SEQ ID NO: 1171638 - DNA, 15 bp, Homo sapiens
tctacaatcaatctg

SEQ ID NO: 1171639 - DNA, 15 bp, Homo sapiens
ttctacaatcaatct

SEQ ID NO: 1171640 - DNA, 15 bp, Homo sapiens
attctacaatcaatc

SEQ ID NO: 1171641 - DNA, 15 bp, Homo sapiens
aattctacaatcaat

SEQ ID NO: 1171642 - DNA, 15 bp, Homo sapiens
aaattctacaatcaa

SEQ ID NO: 1171643 - DNA, 15 bp, Homo sapiens
aaaattctacaatca

SEQ ID NO: 1171644 - DNA, 15 bp, Homo sapiens
caaaattctacaatc

SEQ ID NO: 1171645 - DNA, 15 bp, Homo sapiens
gcaaaattctacaat

SEQ ID NO: 1171646 - DNA, 15 bp, Homo sapiens
tgcaaaattctacaa

SEQ ID NO: 1171647 - DNA, 15 bp, Homo sapiens
ctgcaaaattctaca

SEQ ID NO: 1171648 - DNA, 15 bp, Homo sapiens
tctgcaaaattctac

SEQ ID NO: 1171649 - DNA, 15 bp, Homo sapiens
ttctgcaaaattcta

SEQ ID NO: 1171650 - DNA, 15 bp, Homo sapiens
tttctgcaaaattct

SEQ ID NO: 1171651 - DNA, 15 bp, Homo sapiens
ctttctgcaaaattc

SEQ ID NO: 1171652 - DNA, 15 bp, Homo sapiens
tctttctgcaaaatt

SEQ ID NO: 1171653 - DNA, 15 bp, Homo sapiens
ttctttctgcaaaat

SEQ ID NO: 1171654 - DNA, 15 bp, Homo sapiens
tttctttctgcaaaa

SEQ ID NO: 1171655 - DNA, 15 bp, Homo sapiens
ttttctttctgcaaa

SEQ ID NO: 1171656 - DNA, 15 bp, Homo sapiens
gttttctttctgcaa

SEQ ID NO: 1171657 - DNA, 15 bp, Homo sapiens
tgttttctttctgca

SEQ ID NO: 1171658 - DNA, 15 bp, Homo sapiens
ttgttttctttctgc

SEQ ID NO: 1171659 - DNA, 15 bp, Homo sapiens
attgttttctttctg

SEQ ID NO: 1171660 - DNA, 15 bp, Homo sapiens
aattgttttctttct

SEQ ID NO: 1171661 - DNA, 15 bp, Homo sapiens
gaattgttttctttc

SEQ ID NO: 1171662 - DNA, 15 bp, Homo sapiens
agaattgttttcttt

SEQ ID NO: 1171663 - DNA, 15 bp, Homo sapiens
cagaattgttttctt

SEQ ID NO: 1171664 - DNA, 15 bp, Homo sapiens
tcagaattgttttct

SEQ ID NO: 1171665 - DNA, 15 bp, Homo sapiens
ttcagaattgttttc

SEQ ID NO: 1171666 - DNA, 15 bp, Homo sapiens
cttcagaattgtttt

SEQ ID NO: 1171667 - DNA, 15 bp, Homo sapiens
tcttcagaattgttt

SEQ ID NO: 1171668 - DNA, 15 bp, Homo sapiens
ttcttcagaattgtt

SEQ ID NO: 1171669 - DNA, 15 bp, Homo sapiens
tttcttcagaattgt

SEQ ID NO: 1171670 - DNA, 15 bp, Homo sapiens
atttcttcagaattg

SEQ ID NO: 1171671 - DNA, 15 bp, Homo sapiens
catttcttcagaatt

SEQ ID NO: 1171672 - DNA, 15 bp, Homo sapiens
acatttcttcagaat

SEQ ID NO: 1171673 - DNA, 15 bp, Homo sapiens
aacatttcttcagaa

SEQ ID NO: 1171674 - DNA, 15 bp, Homo sapiens
gaacatttcttcaga

SEQ ID NO: 1171675 - DNA, 15 bp, Homo sapiens
tgaacatttcttcag

SEQ ID NO: 1171676 - DNA, 15 bp, Homo sapiens
atgaacatttcttca

SEQ ID NO: 1171677 - DNA, 15 bp, Homo sapiens
catgaacatttcttc

SEQ ID NO: 1171678 - DNA, 15 bp, Homo sapiens
ccatgaacatttctt

SEQ ID NO: 1171679 - DNA, 15 bp, Homo sapiens
tccatgaacatttct

SEQ ID NO: 1171680 - DNA, 15 bp, Homo sapiens
ttccatgaacatttc

SEQ ID NO: 1171681 - DNA, 15 bp, Homo sapiens
cttccatgaacattt

SEQ ID NO: 1171682 - DNA, 15 bp, Homo sapiens
acttccatgaacatt

SEQ ID NO: 1171683 - DNA, 15 bp, Homo sapiens
tacttccatgaacat

SEQ ID NO: 1171684 - DNA, 15 bp, Homo sapiens
atacttccatgaaca

SEQ ID NO: 1171685 - DNA, 15 bp, Homo sapiens
aatacttccatgaac

SEQ ID NO: 1171686 - DNA, 15 bp, Homo sapiens
taatacttccatgaa

SEQ ID NO: 1171687 - DNA, 15 bp, Homo sapiens
ctaatacttccatga

SEQ ID NO: 1171688 - DNA, 15 bp, Homo sapiens
gctaatacttccatg

SEQ ID NO: 1171689 - DNA, 15 bp, Homo sapiens
tgctaatacttccat

SEQ ID NO: 1171690 - DNA, 15 bp, Homo sapiens
ctgctaatacttcca

SEQ ID NO: 1171691 - DNA, 15 bp, Homo sapiens
actgctaatacttcc

SEQ ID NO: 1171692 - DNA, 15 bp, Homo sapiens
aactgctaatacttc

SEQ ID NO: 1171693 - DNA, 15 bp, Homo sapiens
caactgctaatactt

SEQ ID NO: 1171694 - DNA, 15 bp, Homo sapiens
tcaactgctaatact

SEQ ID NO: 1171695 - DNA, 15 bp, Homo sapiens
ctcaactgctaatac

SEQ ID NO: 1171696 - DNA, 15 bp, Homo sapiens
tctcaactgctaata

SEQ ID NO: 1171697 - DNA, 15 bp, Homo sapiens
atctcaactgctaat

SEQ ID NO: 1171698 - DNA, 15 bp, Homo sapiens
catctcaactgctaa

SEQ ID NO: 1171699 - DNA, 15 bp, Homo sapiens
acatctcaactgcta

SEQ ID NO: 1171700 - DNA, 15 bp, Homo sapiens
tacatctcaactgct

SEQ ID NO: 1171701 - DNA, 15 bp, Homo sapiens
atacatctcaactgc

SEQ ID NO: 1171702 - DNA, 15 bp, Homo sapiens
gatacatctcaactg

SEQ ID NO: 1171703 - DNA, 15 bp, Homo sapiens
agatacatctcaact

SEQ ID NO: 1171704 - DNA, 15 bp, Homo sapiens
aagatacatctcaac

SEQ ID NO: 1171705 - DNA, 15 bp, Homo sapiens
taagatacatctcaa

SEQ ID NO: 1171706 - DNA, 15 bp, Homo sapiens
ttaagatacatctca

SEQ ID NO: 1171707 - DNA, 15 bp, Homo sapiens
tttaagatacatctc

SEQ ID NO: 1171708 - DNA, 15 bp, Homo sapiens
ttttaagatacatct

SEQ ID NO: 1171709 - DNA, 15 bp, Homo sapiens
cttttaagatacatc

SEQ ID NO: 1171710 - DNA, 15 bp, Homo sapiens
tcttttaagatacat

SEQ ID NO: 1171711 - DNA, 15 bp, Homo sapiens
atcttttaagataca

SEQ ID NO: 1171712 - DNA, 15 bp, Homo sapiens
tatcttttaagatac

SEQ ID NO: 1171713 - DNA, 15 bp, Homo sapiens
ttatcttttaagata

SEQ ID NO: 1171714 - DNA, 15 bp, Homo sapiens
cttatcttttaagat

SEQ ID NO: 1171715 - DNA, 15 bp, Homo sapiens
acttatcttttaaga

SEQ ID NO: 1171716 - DNA, 15 bp, Homo sapiens
cacttatcttttaag

SEQ ID NO: 1171717 - DNA, 15 bp, Homo sapiens
ccacttatcttttaa

SEQ ID NO: 1171718 - DNA, 15 bp, Homo sapiens
cccacttatctttta

SEQ ID NO: 1171719 - DNA, 15 bp, Homo sapiens
ccccacttatctttt

SEQ ID NO: 1171720 - DNA, 15 bp, Homo sapiens
accccacttatcttt

SEQ ID NO: 1171721 - DNA, 15 bp, Homo sapiens
aaccccacttatctt

SEQ ID NO: 1171722 - DNA, 15 bp, Homo sapiens
gaaccccacttatct

SEQ ID NO: 1171723 - DNA, 15 bp, Homo sapiens
ggaaccccacttatc

SEQ ID NO: 1171724 - DNA, 15 bp, Homo sapiens
aggaaccccacttat

SEQ ID NO: 1171725 - DNA, 15 bp, Homo sapiens
caggaaccccactta

SEQ ID NO: 1171726 - DNA, 15 bp, Homo sapiens
acaggaaccccactt

SEQ ID NO: 1171727 - DNA, 15 bp, Homo sapiens
aacaggaaccccact

SEQ ID NO: 1171728 - DNA, 15 bp, Homo sapiens
caacaggaaccccac

SEQ ID NO: 1171729 - DNA, 15 bp, Homo sapiens
ccaacaggaacccca

SEQ ID NO: 1171730 - DNA, 15 bp, Homo sapiens
tccaacaggaacccc

SEQ ID NO: 1171731 - DNA, 15 bp, Homo sapiens
ttccaacaggaaccc

SEQ ID NO: 1171732 - DNA, 15 bp, Homo sapiens
tttccaacaggaacc

SEQ ID NO: 1171733 - DNA, 15 bp, Homo sapiens
gtttccaacaggaac

SEQ ID NO: 1171734 - DNA, 15 bp, Homo sapiens
tgtttccaacaggaa

SEQ ID NO: 1171735 - DNA, 15 bp, Homo sapiens
atgtttccaacagga

SEQ ID NO: 1171736 - DNA, 15 bp, Homo sapiens
aatgtttccaacagg

SEQ ID NO: 1171737 - DNA, 15 bp, Homo sapiens
gaatgtttccaacag

SEQ ID NO: 1171738 - DNA, 15 bp, Homo sapiens
tgaatgtttccaaca

SEQ ID NO: 1171739 - DNA, 15 bp, Homo sapiens
ttgaatgtttccaac

SEQ ID NO: 1171740 - DNA, 15 bp, Homo sapiens
tttgaatgtttccaa

SEQ ID NO: 1171741 - DNA, 15 bp, Homo sapiens
ttttgaatgtttcca

SEQ ID NO: 1171742 - DNA, 15 bp, Homo sapiens
gttttgaatgtttcc

SEQ ID NO: 1171743 - DNA, 15 bp, Homo sapiens
agttttgaatgtttc

SEQ ID NO: 1171744 - DNA, 15 bp, Homo sapiens
gagttttgaatgttt

SEQ ID NO: 1171745 - DNA, 15 bp, Homo sapiens
agagttttgaatgtt

SEQ ID NO: 1171746 - DNA, 15 bp, Homo sapiens
gagagttttgaatgt

SEQ ID NO: 1171747 - DNA, 15 bp, Homo sapiens
agagagttttgaatg

SEQ ID NO: 1171748 - DNA, 15 bp, Homo sapiens
gagagagttttgaat

SEQ ID NO: 1171749 - DNA, 15 bp, Homo sapiens
agagagagttttgaa

SEQ ID NO: 1171750 - DNA, 15 bp, Homo sapiens
aagagagagttttga

SEQ ID NO: 1171751 - DNA, 15 bp, Homo sapiens
gaagagagagttttg

SEQ ID NO: 1171752 - DNA, 15 bp, Homo sapiens
agaagagagagtttt

SEQ ID NO: 1171753 - DNA, 15 bp, Homo sapiens
tagaagagagagttt

SEQ ID NO: 1171754 - DNA, 15 bp, Homo sapiens
ctagaagagagagtt

SEQ ID NO: 1171755 - DNA, 15 bp, Homo sapiens
gctagaagagagagt

SEQ ID NO: 1171756 - DNA, 15 bp, Homo sapiens
agctagaagagagag

SEQ ID NO: 1171757 - DNA, 15 bp, Homo sapiens
tagctagaagagaga

SEQ ID NO: 1171758 - DNA, 15 bp, Homo sapiens
atagctagaagagag

SEQ ID NO: 1171759 - DNA, 15 bp, Homo sapiens
aatagctagaagaga

SEQ ID NO: 1171760 - DNA, 15 bp, Homo sapiens
aaatagctagaagag

SEQ ID NO: 1171761 - DNA, 15 bp, Homo sapiens
aaaatagctagaaga

SEQ ID NO: 1171762 - DNA, 15 bp, Homo sapiens
taaaatagctagaag

SEQ ID NO: 1171763 - DNA, 15 bp, Homo sapiens
ttaaaatagctagaa

SEQ ID NO: 1171764 - DNA, 15 bp, Homo sapiens
tttaaaatagctaga

SEQ ID NO: 1171765 - DNA, 15 bp, Homo sapiens
ttttaaaatagctag

SEQ ID NO: 1171766 - DNA, 15 bp, Homo sapiens
attttaaaatagcta

SEQ ID NO: 1171767 - DNA, 15 bp, Homo sapiens
tattttaaaatagct

SEQ ID NO: 1171768 - DNA, 15 bp, Homo sapiens
gtattttaaaatagc

SEQ ID NO: 1171769 - DNA, 15 bp, Homo sapiens
cgtattttaaaatag

SEQ ID NO: 1171770 - DNA, 15 bp, Homo sapiens
gcgtattttaaaata

SEQ ID NO: 1171771 - DNA, 15 bp, Homo sapiens
tgcgtattttaaaat

SEQ ID NO: 1171772 - DNA, 15 bp, Homo sapiens
ttgcgtattttaaaa

SEQ ID NO: 1171773 - DNA, 15 bp, Homo sapiens
attgcgtattttaaa

SEQ ID NO: 1171774 - DNA, 15 bp, Homo sapiens
tattgcgtattttaa

SEQ ID NO: 1171775 - DNA, 15 bp, Homo sapiens
atattgcgtatttta

SEQ ID NO: 1171776 - DNA, 15 bp, Homo sapiens
tatattgcgtatttt

SEQ ID NO: 1171777 - DNA, 15 bp, Homo sapiens
atatattgcgtattt

SEQ ID NO: 1171778 - DNA, 15 bp, Homo sapiens
aatatattgcgtatt

SEQ ID NO: 1171779 - DNA, 15 bp, Homo sapiens
taatatattgcgtat

SEQ ID NO: 1171780 - DNA, 15 bp, Homo sapiens
ataatatattgcgta

SEQ ID NO: 1171781 - DNA, 15 bp, Homo sapiens
aataatatattgcgt

SEQ ID NO: 1171782 - DNA, 15 bp, Homo sapiens
taataatatattgcg

SEQ ID NO: 1171783 - DNA, 15 bp, Homo sapiens
ttaataatatattgc

SEQ ID NO: 1171784 - DNA, 15 bp, Homo sapiens
gttaataatatattg

SEQ ID NO: 1171785 - DNA, 15 bp, Homo sapiens
agttaataatatatt

SEQ ID NO: 1171786 - DNA, 15 bp, Homo sapiens
tagttaataatatat

SEQ ID NO: 1171787 - DNA, 15 bp, Homo sapiens
atagttaataatata

SEQ ID NO: 1171788 - DNA, 15 bp, Homo sapiens
catagttaataatat

SEQ ID NO: 1171789 - DNA, 15 bp, Homo sapiens
ccatagttaataata

SEQ ID NO: 1171790 - DNA, 15 bp, Homo sapiens
accatagttaataat

SEQ ID NO: 1171791 - DNA, 15 bp, Homo sapiens
gaccatagttaataa

SEQ ID NO: 1171792 - DNA, 15 bp, Homo sapiens
tgaccatagttaata

SEQ ID NO: 1171793 - DNA, 15 bp, Homo sapiens
gtgaccatagttaat

SEQ ID NO: 1171794 - DNA, 15 bp, Homo sapiens
ggtgaccatagttaa

SEQ ID NO: 1171795 - DNA, 15 bp, Homo sapiens
aggtgaccatagtta

SEQ ID NO: 1171796 - DNA, 15 bp, Homo sapiens
aaggtgaccatagtt

SEQ ID NO: 1171797 - DNA, 15 bp, Homo sapiens
taaggtgaccatagt

SEQ ID NO: 1171798 - DNA, 15 bp, Homo sapiens
gtaaggtgaccatag

SEQ ID NO: 1171799 - DNA, 15 bp, Homo sapiens
agtaaggtgaccata

SEQ ID NO: 1171800 - DNA, 15 bp, Homo sapiens
cagtaaggtgaccat

SEQ ID NO: 1171801 - DNA, 15 bp, Homo sapiens
acagtaaggtgacca

SEQ ID NO: 1171802 - DNA, 15 bp, Homo sapiens
cacagtaaggtgacc

SEQ ID NO: 1171803 - DNA, 15 bp, Homo sapiens
gcacagtaaggtgac

SEQ ID NO: 1171804 - DNA, 15 bp, Homo sapiens
agcacagtaaggtga

SEQ ID NO: 1171805 - DNA, 15 bp, Homo sapiens
tagcacagtaaggtg

SEQ ID NO: 1171806 - DNA, 15 bp, Homo sapiens
atagcacagtaaggt

SEQ ID NO: 1171807 - DNA, 15 bp, Homo sapiens
tatagcacagtaagg

SEQ ID NO: 1171808 - DNA, 15 bp, Homo sapiens
ctatagcacagtaag

SEQ ID NO: 1171809 - DNA, 15 bp, Homo sapiens
tctatagcacagtaa

SEQ ID NO: 1171810 - DNA, 15 bp, Homo sapiens
ttctatagcacagta

SEQ ID NO: 1171811 - DNA, 15 bp, Homo sapiens
gttctatagcacagt

SEQ ID NO: 1171812 - DNA, 15 bp, Homo sapiens
tgttctatagcacag

SEQ ID NO: 1171813 - DNA, 15 bp, Homo sapiens
gtgttctatagcaca

SEQ ID NO: 1171814 - DNA, 15 bp, Homo sapiens
agtgttctatagcac

SEQ ID NO: 1171815 - DNA, 15 bp, Homo sapiens
tagtgttctatagca

SEQ ID NO: 1171816 - DNA, 15 bp, Homo sapiens
ctagtgttctatagc

SEQ ID NO: 1171817 - DNA, 15 bp, Homo sapiens
tctagtgttctatag

SEQ ID NO: 1171818 - DNA, 15 bp, Homo sapiens
ttctagtgttctata

SEQ ID NO: 1171819 - DNA, 15 bp, Homo sapiens
gttctagtgttctat

SEQ ID NO: 1171820 - DNA, 15 bp, Homo sapiens
agttctagtgttcta

SEQ ID NO: 1171821 - DNA, 15 bp, Homo sapiens
aagttctagtgttct

SEQ ID NO: 1171822 - DNA, 15 bp, Homo sapiens
taagttctagtgttc

SEQ ID NO: 1171823 - DNA, 15 bp, Homo sapiens
ataagttctagtgtt

SEQ ID NO: 1171824 - DNA, 15 bp, Homo sapiens
aataagttctagtgt

SEQ ID NO: 1171825 - DNA, 15 bp, Homo sapiens
gaataagttctagtg

SEQ ID NO: 1171826 - DNA, 15 bp, Homo sapiens
ggaataagttctagt

SEQ ID NO: 1171827 - DNA, 15 bp, Homo sapiens
aggaataagttctag

SEQ ID NO: 1171828 - DNA, 15 bp, Homo sapiens
taggaataagttcta

SEQ ID NO: 1171829 - DNA, 15 bp, Homo sapiens
gtaggaataagttct

SEQ ID NO: 1171830 - DNA, 15 bp, Homo sapiens
agtaggaataagttc

SEQ ID NO: 1171831 - DNA, 15 bp, Homo sapiens
tagtaggaataagtt

SEQ ID NO: 1171832 - DNA, 15 bp, Homo sapiens
atagtaggaataagt

SEQ ID NO: 1171833 - DNA, 15 bp, Homo sapiens
gatagtaggaataag

SEQ ID NO: 1171834 - DNA, 15 bp, Homo sapiens
agatagtaggaataa

SEQ ID NO: 1171835 - DNA, 15 bp, Homo sapiens
tagatagtaggaata

SEQ ID NO: 1171836 - DNA, 15 bp, Homo sapiens
ttagatagtaggaat

SEQ ID NO: 1171837 - DNA, 15 bp, Homo sapiens
gttagatagtaggaa

SEQ ID NO: 1171838 - DNA, 15 bp, Homo sapiens
agttagatagtagga

SEQ ID NO: 1171839 - DNA, 15 bp, Homo sapiens
tagttagatagtagg

SEQ ID NO: 1171840 - DNA, 15 bp, Homo sapiens
atagttagatagtag

SEQ ID NO: 1171841 - DNA, 15 bp, Homo sapiens
tatagttagatagta

SEQ ID NO: 1171842 - DNA, 15 bp, Homo sapiens
ttatagttagatagt

SEQ ID NO: 1171843 - DNA, 15 bp, Homo sapiens
attatagttagatag

SEQ ID NO: 1171844 - DNA, 15 bp, Homo sapiens
aattatagttagata

SEQ ID NO: 1171845 - DNA, 15 bp, Homo sapiens
aaattatagttagat

SEQ ID NO: 1171846 - DNA, 15 bp, Homo sapiens
aaaattatagttaga

SEQ ID NO: 1171847 - DNA, 15 bp, Homo sapiens
caaaattatagttag

SEQ ID NO: 1171848 - DNA, 15 bp, Homo sapiens
acaaaattatagtta

SEQ ID NO: 1171849 - DNA, 15 bp, Homo sapiens
tacaaaattatagtt

SEQ ID NO: 1171850 - DNA, 15 bp, Homo sapiens
gtacaaaattatagt

SEQ ID NO: 1171851 - DNA, 15 bp, Homo sapiens
ggtacaaaattatag

SEQ ID NO: 1171852 - DNA, 15 bp, Homo sapiens
gggtacaaaattata

SEQ ID NO: 1171853 - DNA, 15 bp, Homo sapiens
tgggtacaaaattat

SEQ ID NO: 1171854 - DNA, 15 bp, Homo sapiens
gtgggtacaaaatta

SEQ ID NO: 1171855 - DNA, 15 bp, Homo sapiens
agtgggtacaaaatt

SEQ ID NO: 1171856 - DNA, 15 bp, Homo sapiens
tagtgggtacaaaat

SEQ ID NO: 1171857 - DNA, 15 bp, Homo sapiens
ttagtgggtacaaaa

SEQ ID NO: 1171858 - DNA, 15 bp, Homo sapiens
gttagtgggtacaaa

SEQ ID NO: 1171859 - DNA, 15 bp, Homo sapiens
ggttagtgggtacaa

SEQ ID NO: 1171860 - DNA, 15 bp, Homo sapiens
tggttagtgggtaca

SEQ ID NO: 1171861 - DNA, 15 bp, Homo sapiens
ttggttagtgggtac

SEQ ID NO: 1171862 - DNA, 15 bp, Homo sapiens
gttggttagtgggta

SEQ ID NO: 1171863 - DNA, 15 bp, Homo sapiens
ggttggttagtgggt

SEQ ID NO: 1171864 - DNA, 15 bp, Homo sapiens
aggttggttagtggg

SEQ ID NO: 1171865 - DNA, 15 bp, Homo sapiens
gaggttggttagtgg

SEQ ID NO: 1171866 - DNA, 15 bp, Homo sapiens
agaggttggttagtg

SEQ ID NO: 1171867 - DNA, 15 bp, Homo sapiens
gagaggttggttagt

SEQ ID NO: 1171868 - DNA, 15 bp, Homo sapiens
ggagaggttggttag

SEQ ID NO: 1171869 - DNA, 15 bp, Homo sapiens
gggagaggttggtta

SEQ ID NO: 1171870 - DNA, 15 bp, Homo sapiens
agggagaggttggtt

SEQ ID NO: 1171871 - DNA, 15 bp, Homo sapiens
cagggagaggttggt

SEQ ID NO: 1171872 - DNA, 15 bp, Homo sapiens
acagggagaggttgg

SEQ ID NO: 1171873 - DNA, 15 bp, Homo sapiens
gacagggagaggttg

SEQ ID NO: 1171874 - DNA, 15 bp, Homo sapiens
ggacagggagaggtt

SEQ ID NO: 1171875 - DNA, 15 bp, Homo sapiens
gggacagggagaggt

SEQ ID NO: 1171876 - DNA, 15 bp, Homo sapiens
agggacagggagagg

SEQ ID NO: 1171877 - DNA, 15 bp, Homo sapiens
gagggacagggagag

SEQ ID NO: 1171878 - DNA, 15 bp, Homo sapiens
ggagggacagggaga

SEQ ID NO: 1171879 - DNA, 15 bp, Homo sapiens
aggagggacagggag

SEQ ID NO: 1171880 - DNA, 15 bp, Homo sapiens
gaggagggacaggga

SEQ ID NO: 1171881 - DNA, 15 bp, Homo sapiens
ggaggagggacaggg

SEQ ID NO: 1171882 - DNA, 15 bp, Homo sapiens
gggaggagggacagg

SEQ ID NO: 1171883 - DNA, 15 bp, Homo sapiens
ggggaggagggacag

SEQ ID NO: 1171884 - DNA, 15 bp, Homo sapiens
gggggaggagggaca

SEQ ID NO: 1171885 - DNA, 15 bp, Homo sapiens
agggggaggagggac

SEQ ID NO: 1171886 - DNA, 15 bp, Homo sapiens
tagggggaggaggga

SEQ ID NO: 1171887 - DNA, 15 bp, Homo sapiens
atagggggaggaggg

SEQ ID NO: 1171888 - DNA, 15 bp, Homo sapiens
aatagggggaggagg

SEQ ID NO: 1171889 - DNA, 15 bp, Homo sapiens
gaatagggggaggag

SEQ ID NO: 1171890 - DNA, 15 bp, Homo sapiens
tgaatagggggagga

SEQ ID NO: 1171891 - DNA, 15 bp, Homo sapiens
atgaatagggggagg

SEQ ID NO: 1171892 - DNA, 15 bp, Homo sapiens
gatgaatagggggag

SEQ ID NO: 1171893 - DNA, 15 bp, Homo sapiens
ggatgaataggggga

SEQ ID NO: 1171894 - DNA, 15 bp, Homo sapiens
gggatgaataggggg

SEQ ID NO: 1171895 - DNA, 15 bp, Homo sapiens
tgggatgaatagggg

SEQ ID NO: 1171896 - DNA, 15 bp, Homo sapiens
gtgggatgaataggg

SEQ ID NO: 1171897 - DNA, 15 bp, Homo sapiens
ggtgggatgaatagg

SEQ ID NO: 1171898 - DNA, 15 bp, Homo sapiens
gggtgggatgaatag

SEQ ID NO: 1171899 - DNA, 15 bp, Homo sapiens
agggtgggatgaata

SEQ ID NO: 1171900 - DNA, 15 bp, Homo sapiens
gagggtgggatgaat

SEQ ID NO: 1171901 - DNA, 15 bp, Homo sapiens
agagggtgggatgaa

SEQ ID NO: 1171902 - DNA, 15 bp, Homo sapiens
cagagggtgggatga

SEQ ID NO: 1171903 - DNA, 15 bp, Homo sapiens
ccagagggtgggatg

SEQ ID NO: 1171904 - DNA, 15 bp, Homo sapiens
accagagggtgggat

SEQ ID NO: 1171905 - DNA, 15 bp, Homo sapiens
taccagagggtggga

SEQ ID NO: 1171906 - DNA, 15 bp, Homo sapiens
ttaccagagggtggg

SEQ ID NO: 1171907 - DNA, 15 bp, Homo sapiens
gttaccagagggtgg

SEQ ID NO: 1171908 - DNA, 15 bp, Homo sapiens
ggttaccagagggtg

SEQ ID NO: 1171909 - DNA, 15 bp, Homo sapiens
tggttaccagagggt

SEQ ID NO: 1171910 - DNA, 15 bp, Homo sapiens
gtggttaccagaggg

SEQ ID NO: 1171911 - DNA, 15 bp, Homo sapiens
agtggttaccagagg

SEQ ID NO: 1171912 - DNA, 15 bp, Homo sapiens
cagtggttaccagag

SEQ ID NO: 1171913 - DNA, 15 bp, Homo sapiens
acagtggttaccaga

SEQ ID NO: 1171914 - DNA, 15 bp, Homo sapiens
aacagtggttaccag

SEQ ID NO: 1171915 - DNA, 15 bp, Homo sapiens
gaacagtggttacca

SEQ ID NO: 1171916 - DNA, 15 bp, Homo sapiens
agaacagtggttacc

SEQ ID NO: 1171917 - DNA, 15 bp, Homo sapiens
tagaacagtggttac

SEQ ID NO: 1171918 - DNA, 15 bp, Homo sapiens
gtagaacagtggtta

SEQ ID NO: 1171919 - DNA, 15 bp, Homo sapiens
agtagaacagtggtt

SEQ ID NO: 1171920 - DNA, 15 bp, Homo sapiens
gagtagaacagtggt

SEQ ID NO: 1171921 - DNA, 15 bp, Homo sapiens
agagtagaacagtgg

SEQ ID NO: 1171922 - DNA, 15 bp, Homo sapiens
gagagtagaacagtg

SEQ ID NO: 1171923 - DNA, 15 bp, Homo sapiens
agagagtagaacagt

SEQ ID NO: 1171924 - DNA, 15 bp, Homo sapiens
cagagagtagaacag

SEQ ID NO: 1171925 - DNA, 15 bp, Homo sapiens
gcagagagtagaaca

SEQ ID NO: 1171926 - DNA, 15 bp, Homo sapiens
agcagagagtagaac

SEQ ID NO: 1171927 - DNA, 15 bp, Homo sapiens
aagcagagagtagaa

SEQ ID NO: 1171928 - DNA, 15 bp, Homo sapiens
gaagcagagagtaga

SEQ ID NO: 1171929 - DNA, 15 bp, Homo sapiens
ggaagcagagagtag

SEQ ID NO: 1171930 - DNA, 15 bp, Homo sapiens
gggaagcagagagta

SEQ ID NO: 1171931 - DNA, 15 bp, Homo sapiens
tgggaagcagagagt

SEQ ID NO: 1171932 - DNA, 15 bp, Homo sapiens
ttgggaagcagagag

SEQ ID NO: 1171933 - DNA, 15 bp, Homo sapiens
tttgggaagcagaga

SEQ ID NO: 1171934 - DNA, 15 bp, Homo sapiens
ttttgggaagcagag

SEQ ID NO: 1171935 - DNA, 15 bp, Homo sapiens
tgctggcgacaaaat

SEQ ID NO: 1171936 - DNA, 15 bp, Homo sapiens
ctgctggcgacaaaa

SEQ ID NO: 1171937 - DNA, 15 bp, Homo sapiens
cctgctggcgacaaa

SEQ ID NO: 1171938 - DNA, 15 bp, Homo sapiens
gcctgctggcgacaa

SEQ ID NO: 1171939 - DNA, 15 bp, Homo sapiens
ggcctgctggcgaca

SEQ ID NO: 1171940 - DNA, 15 bp, Homo sapiens
aggcctgctggcgac

SEQ ID NO: 1171941 - DNA, 15 bp, Homo sapiens
caggcctgctggcga

SEQ ID NO: 1171942 - DNA, 15 bp, Homo sapiens
gcaggcctgctggcg

SEQ ID NO: 1171943 - DNA, 15 bp, Homo sapiens
ggcaggcctgctggc

SEQ ID NO: 1171944 - DNA, 15 bp, Homo sapiens
aggcaggcctgctgg

SEQ ID NO: 1171945 - DNA, 15 bp, Homo sapiens
aaggcaggcctgctg

SEQ ID NO: 1171946 - DNA, 15 bp, Homo sapiens
taaggcaggcctgct

SEQ ID NO: 1171947 - DNA, 15 bp, Homo sapiens
ataaggcaggcctgc

SEQ ID NO: 1171948 - DNA, 15 bp, Homo sapiens
tataaggcaggcctg

SEQ ID NO: 1171949 - DNA, 15 bp, Homo sapiens
ttataaggcaggcct

SEQ ID NO: 1171950 - DNA, 15 bp, Homo sapiens
cttataaggcaggcc

SEQ ID NO: 1171951 - DNA, 15 bp, Homo sapiens
tcttataaggcaggc

SEQ ID NO: 1171952 - DNA, 15 bp, Homo sapiens
ttcttataaggcagg

SEQ ID NO: 1171953 - DNA, 15 bp, Homo sapiens
gttcttataaggcag

SEQ ID NO: 1171954 - DNA, 15 bp, Homo sapiens
agttcttataaggca

SEQ ID NO: 1171955 - DNA, 15 bp, Homo sapiens
gagttcttataaggc

SEQ ID NO: 1171956 - DNA, 15 bp, Homo sapiens
ggagttcttataagg

SEQ ID NO: 1171957 - DNA, 15 bp, Homo sapiens
aggagttcttataag

SEQ ID NO: 1171958 - DNA, 15 bp, Homo sapiens
caggagttcttataa

SEQ ID NO: 1171959 - DNA, 15 bp, Homo sapiens
tcaggagttcttata

SEQ ID NO: 1171960 - DNA, 15 bp, Homo sapiens
ttcaggagttcttat

SEQ ID NO: 1171961 - DNA, 15 bp, Homo sapiens
cttcaggagttctta

SEQ ID NO: 1171962 - DNA, 15 bp, Homo sapiens
ccttcaggagttctt

SEQ ID NO: 1171963 - DNA, 15 bp, Homo sapiens
tccttcaggagttct

SEQ ID NO: 1171964 - DNA, 15 bp, Homo sapiens
ttccttcaggagttc

SEQ ID NO: 1171965 - DNA, 15 bp, Homo sapiens
cttccttcaggagtt

SEQ ID NO: 1171966 - DNA, 15 bp, Homo sapiens
gcttccttcaggagt

SEQ ID NO: 1171967 - DNA, 15 bp, Homo sapiens
tgcttccttcaggag

SEQ ID NO: 1171968 - DNA, 15 bp, Homo sapiens
gtgcttccttcagga

SEQ ID NO: 1171969 - DNA, 15 bp, Homo sapiens
agtgcttccttcagg

SEQ ID NO: 1171970 - DNA, 15 bp, Homo sapiens
tagtgcttccttcag

SEQ ID NO: 1171971 - DNA, 15 bp, Homo sapiens
ttagtgcttccttca

SEQ ID NO: 1171972 - DNA, 15 bp, Homo sapiens
tttagtgcttccttc

SEQ ID NO: 1171973 - DNA, 15 bp, Homo sapiens
atttagtgcttcctt

SEQ ID NO: 1171974 - DNA, 15 bp, Homo sapiens
catttagtgcttcct

SEQ ID NO: 1171975 - DNA, 15 bp, Homo sapiens
acatttagtgcttcc

SEQ ID NO: 1171976 - DNA, 15 bp, Homo sapiens
cacatttagtgcttc

SEQ ID NO: 1171977 - DNA, 15 bp, Homo sapiens
acacatttagtgctt

SEQ ID NO: 1171978 - DNA, 15 bp, Homo sapiens
tacacatttagtgct

SEQ ID NO: 1171979 - DNA, 15 bp, Homo sapiens
ttacacatttagtgc

SEQ ID NO: 1171980 - DNA, 15 bp, Homo sapiens
tttacacatttagtg

SEQ ID NO: 1171981 - DNA, 15 bp, Homo sapiens
ctttacacatttagt

SEQ ID NO: 1171982 - DNA, 15 bp, Homo sapiens
cctttacacatttag

SEQ ID NO: 1171983 - DNA, 15 bp, Homo sapiens
tcctttacacattta

SEQ ID NO: 1171984 - DNA, 15 bp, Homo sapiens
ttcctttacacattt

SEQ ID NO: 1171985 - DNA, 15 bp, Homo sapiens
tttcctttacacatt

SEQ ID NO: 1171986 - DNA, 15 bp, Homo sapiens
ttttcctttacacat

SEQ ID NO: 1171987 - DNA, 15 bp, Homo sapiens
tttttcctttacaca

SEQ ID NO: 1171988 - DNA, 15 bp, Homo sapiens
gtttttcctttacac

SEQ ID NO: 1171989 - DNA, 15 bp, Homo sapiens
agtttttcctttaca

SEQ ID NO: 1171990 - DNA, 15 bp, Homo sapiens
cagtttttcctttac

SEQ ID NO: 1171991 - DNA, 15 bp, Homo sapiens
ccagtttttccttta

SEQ ID NO: 1171992 - DNA, 15 bp, Homo sapiens
accagtttttccttt

SEQ ID NO: 1171993 - DNA, 15 bp, Homo sapiens
taccagtttttcctt

SEQ ID NO: 1171994 - DNA, 15 bp, Homo sapiens
gtaccagtttttcct

SEQ ID NO: 1171995 - DNA, 15 bp, Homo sapiens
ggtaccagtttttcc

SEQ ID NO: 1171996 - DNA, 15 bp, Homo sapiens
aggtaccagtttttc

SEQ ID NO: 1171997 - DNA, 15 bp, Homo sapiens
aaggtaccagttttt

SEQ ID NO: 1171998 - DNA, 15 bp, Homo sapiens
taaggtaccagtttt

SEQ ID NO: 1171999 - DNA, 15 bp, Homo sapiens
ttaaggtaccagttt

SEQ ID NO: 1172000 - DNA, 15 bp, Homo sapiens
tttaaggtaccagtt

SEQ ID NO: 1172001 - DNA, 15 bp, Homo sapiens
ctttaaggtaccagt

SEQ ID NO: 1172002 - DNA, 15 bp, Homo sapiens
tctttaaggtaccag

SEQ ID NO: 1172003 - DNA, 15 bp, Homo sapiens
atctttaaggtacca

SEQ ID NO: 1172004 - DNA, 15 bp, Homo sapiens
gatctttaaggtacc

SEQ ID NO: 1172005 - DNA, 15 bp, Homo sapiens
tgatctttaaggtac

SEQ ID NO: 1172006 - DNA, 15 bp, Homo sapiens
atgatctttaaggta

SEQ ID NO: 1172007 - DNA, 15 bp, Homo sapiens
gatgatctttaaggt

SEQ ID NO: 1172008 - DNA, 15 bp, Homo sapiens
tgatgatctttaagg

SEQ ID NO: 1172009 - DNA, 15 bp, Homo sapiens
ttgatgatctttaag

SEQ ID NO: 1172010 - DNA, 15 bp, Homo sapiens
gttgatgatctttaa

SEQ ID NO: 1172011 - DNA, 15 bp, Homo sapiens
tgttgatgatcttta

SEQ ID NO: 1172012 - DNA, 15 bp, Homo sapiens
gtgttgatgatcttt

SEQ ID NO: 1172013 - DNA, 15 bp, Homo sapiens
agtgttgatgatctt

SEQ ID NO: 1172014 - DNA, 15 bp, Homo sapiens
tagtgttgatgatct

SEQ ID NO: 1172015 - DNA, 15 bp, Homo sapiens
atagtgttgatgatc

SEQ ID NO: 1172016 - DNA, 15 bp, Homo sapiens
catagtgttgatgat

SEQ ID NO: 1172017 - DNA, 15 bp, Homo sapiens
tcatagtgttgatga

SEQ ID NO: 1172018 - DNA, 15 bp, Homo sapiens
ttcatagtgttgatg

SEQ ID NO: 1172019 - DNA, 15 bp, Homo sapiens
cttcatagtgttgat

SEQ ID NO: 1172020 - DNA, 15 bp, Homo sapiens
tcttcatagtgttga

SEQ ID NO: 1172021 - DNA, 15 bp, Homo sapiens
ttcttcatagtgttg

SEQ ID NO: 1172022 - DNA, 15 bp, Homo sapiens
tttcttcatagtgtt

SEQ ID NO: 1172023 - DNA, 15 bp, Homo sapiens
gtttcttcatagtgt

SEQ ID NO: 1172024 - DNA, 15 bp, Homo sapiens
agtttcttcatagtg

SEQ ID NO: 1172025 - DNA, 15 bp, Homo sapiens
cagtttcttcatagt

SEQ ID NO: 1172026 - DNA, 15 bp, Homo sapiens
gcagtttcttcatag

SEQ ID NO: 1172027 - DNA, 15 bp, Homo sapiens
tgcagtttcttcata

SEQ ID NO: 1172028 - DNA, 15 bp, Homo sapiens
gtgcagtttcttcat

SEQ ID NO: 1172029 - DNA, 15 bp, Homo sapiens
ggtgcagtttcttca

SEQ ID NO: 1172030 - DNA, 15 bp, Homo sapiens
tggtgcagtttcttc

SEQ ID NO: 1172031 - DNA, 15 bp, Homo sapiens
ctggtgcagtttctt

SEQ ID NO: 1172032 - DNA, 15 bp, Homo sapiens
gctggtgcagtttct

SEQ ID NO: 1172033 - DNA, 15 bp, Homo sapiens
agctggtgcagtttc

SEQ ID NO: 1172034 - DNA, 15 bp, Homo sapiens
tagctggtgcagttt

SEQ ID NO: 1172035 - DNA, 15 bp, Homo sapiens
ttagctggtgcagtt

SEQ ID NO: 1172036 - DNA, 15 bp, Homo sapiens
attagctggtgcagt

SEQ ID NO: 1172037 - DNA, 15 bp, Homo sapiens
cattagctggtgcag

SEQ ID NO: 1172038 - DNA, 15 bp, Homo sapiens
ccattagctggtgca

SEQ ID NO: 1172039 - DNA, 15 bp, Homo sapiens
cccattagctggtgc

SEQ ID NO: 1172040 - DNA, 15 bp, Homo sapiens
gcccattagctggtg

SEQ ID NO: 1172041 - DNA, 15 bp, Homo sapiens
tgcccattagctggt

SEQ ID NO: 1172042 - DNA, 15 bp, Homo sapiens
ttgcccattagctgg

SEQ ID NO: 1172043 - DNA, 15 bp, Homo sapiens
tttgcccattagctg

SEQ ID NO: 1172044 - DNA, 15 bp, Homo sapiens
ttttgcccattagct

SEQ ID NO: 1172045 - DNA, 15 bp, Homo sapiens
attttgcccattagc

SEQ ID NO: 1172046 - DNA, 15 bp, Homo sapiens
tattttgcccattag

SEQ ID NO: 1172047 - DNA, 15 bp, Homo sapiens
ttattttgcccatta

SEQ ID NO: 1172048 - DNA, 15 bp, Homo sapiens
cttattttgcccatt

SEQ ID NO: 1172049 - DNA, 15 bp, Homo sapiens
gcttattttgcccat

SEQ ID NO: 1172050 - DNA, 15 bp, Homo sapiens
tgcttattttgccca

SEQ ID NO: 1172051 - DNA, 15 bp, Homo sapiens
ctgcttattttgccc

SEQ ID NO: 1172052 - DNA, 15 bp, Homo sapiens
gctgcttattttgcc

SEQ ID NO: 1172053 - DNA, 15 bp, Homo sapiens
agctgcttattttgc

SEQ ID NO: 1172054 - DNA, 15 bp, Homo sapiens
tagctgcttattttg

SEQ ID NO: 1172055 - DNA, 15 bp, Homo sapiens
ttagctgcttatttt

SEQ ID NO: 1172056 - DNA, 15 bp, Homo sapiens
gttagctgcttattt

SEQ ID NO: 1172057 - DNA, 15 bp, Homo sapiens
tgttagctgcttatt

SEQ ID NO: 1172058 - DNA, 15 bp, Homo sapiens
ttagttcttcttgtt

SEQ ID NO: 1172059 - DNA, 15 bp, Homo sapiens
gttagttcttcttgt

SEQ ID NO: 1172060 - DNA, 15 bp, Homo sapiens
agttagttcttcttg

SEQ ID NO: 1172061 - DNA, 15 bp, Homo sapiens
tagttagttcttctt

SEQ ID NO: 1172062 - DNA, 15 bp, Homo sapiens
atagttagttcttct

SEQ ID NO: 1172063 - DNA, 15 bp, Homo sapiens
gatagttagttcttc

SEQ ID NO: 1172064 - DNA, 15 bp, Homo sapiens
ggatagttagttctt

SEQ ID NO: 1172065 - DNA, 15 bp, Homo sapiens
aggatagttagttct

SEQ ID NO: 1172066 - DNA, 15 bp, Homo sapiens
taggatagttagttc

SEQ ID NO: 1172067 - DNA, 15 bp, Homo sapiens
ttaggatagttagtt

SEQ ID NO: 1172068 - DNA, 15 bp, Homo sapiens
tttaggatagttagt

SEQ ID NO: 1172069 - DNA, 15 bp, Homo sapiens
atttaggatagttag

SEQ ID NO: 1172070 - DNA, 15 bp, Homo sapiens
tatttaggatagtta

SEQ ID NO: 1172071 - DNA, 15 bp, Homo sapiens
gtatttaggatagtt

SEQ ID NO: 1172072 - DNA, 15 bp, Homo sapiens
tgtatttaggatagt

SEQ ID NO: 1172073 - DNA, 15 bp, Homo sapiens
gtgtatttaggatag

SEQ ID NO: 1172074 - DNA, 15 bp, Homo sapiens
ggtgtatttaggata

SEQ ID NO: 1172075 - DNA, 15 bp, Homo sapiens
tggtgtatttaggat

SEQ ID NO: 1172076 - DNA, 15 bp, Homo sapiens
gtggtgtatttagga

SEQ ID NO: 1172077 - DNA, 15 bp, Homo sapiens
tgtggtgtatttagg

SEQ ID NO: 1172078 - DNA, 15 bp, Homo sapiens
gtgtggtgtatttag

SEQ ID NO: 1172079 - DNA, 15 bp, Homo sapiens
tgtgtggtgtattta

SEQ ID NO: 1172080 - DNA, 15 bp, Homo sapiens
ttgtgtggtgtattt

SEQ ID NO: 1172081 - DNA, 15 bp, Homo sapiens
attgtgtggtgtatt

SEQ ID NO: 1172082 - DNA, 15 bp, Homo sapiens
tattgtgtggtgtat

SEQ ID NO: 1172083 - DNA, 15 bp, Homo sapiens
ttattgtgtggtgta

SEQ ID NO: 1172084 - DNA, 15 bp, Homo sapiens
attattgtgtggtgt

SEQ ID NO: 1172085 - DNA, 15 bp, Homo sapiens
tattattgtgtggtg

SEQ ID NO: 1172086 - DNA, 15 bp, Homo sapiens
ctattattgtgtggt

SEQ ID NO: 1172087 - DNA, 15 bp, Homo sapiens
actattattgtgtgg

SEQ ID NO: 1172088 - DNA, 15 bp, Homo sapiens
tactattattgtgtg

SEQ ID NO: 1172089 - DNA, 15 bp, Homo sapiens
ctactattattgtgt

SEQ ID NO: 1172090 - DNA, 15 bp, Homo sapiens
cctactattattgtg

SEQ ID NO: 1172091 - DNA, 15 bp, Homo sapiens
tcctactattattgt

SEQ ID NO: 1172092 - DNA, 15 bp, Homo sapiens
ctcctactattattg

SEQ ID NO: 1172093 - DNA, 15 bp, Homo sapiens
tctcctactattatt

SEQ ID NO: 1172094 - DNA, 15 bp, Homo sapiens
ctctcctactattat

SEQ ID NO: 1172095 - DNA, 15 bp, Homo sapiens
actctcctactatta

SEQ ID NO: 1172096 - DNA, 15 bp, Homo sapiens
aactctcctactatt

SEQ ID NO: 1172097 - DNA, 15 bp, Homo sapiens
aaactctcctactat

SEQ ID NO: 1172098 - DNA, 15 bp, Homo sapiens
taaactctcctacta

SEQ ID NO: 1172099 - DNA, 15 bp, Homo sapiens
ttaaactctcctact

SEQ ID NO: 1172100 - DNA, 15 bp, Homo sapiens
gttaaactctcctac

SEQ ID NO: 1172101 - DNA, 15 bp, Homo sapiens
agttaaactctccta

SEQ ID NO: 1172102 - DNA, 15 bp, Homo sapiens
gagttaaactctcct

SEQ ID NO: 1172103 - DNA, 15 bp, Homo sapiens
ggagttaaactctcc

SEQ ID NO: 1172104 - DNA, 15 bp, Homo sapiens
gggagttaaactctc

SEQ ID NO: 1172105 - DNA, 15 bp, Homo sapiens
ggggagttaaactct

SEQ ID NO: 1172106 - DNA, 15 bp, Homo sapiens
tggggagttaaactc

SEQ ID NO: 1172107 - DNA, 15 bp, Homo sapiens
gtggggagttaaact

SEQ ID NO: 1172108 - DNA, 15 bp, Homo sapiens
agtggggagttaaac

SEQ ID NO: 1172109 - DNA, 15 bp, Homo sapiens
cagtggggagttaaa

SEQ ID NO: 1172110 - DNA, 15 bp, Homo sapiens
acagtggggagttaa

SEQ ID NO: 1172111 - DNA, 15 bp, Homo sapiens
cacagtggggagtta

SEQ ID NO: 1172112 - DNA, 15 bp, Homo sapiens
tcacagtggggagtt

SEQ ID NO: 1172113 - DNA, 15 bp, Homo sapiens
ttcacagtggggagt

SEQ ID NO: 1172114 - DNA, 15 bp, Homo sapiens
attcacagtggggag

SEQ ID NO: 1172115 - DNA, 15 bp, Homo sapiens
tattcacagtgggga

SEQ ID NO: 1172116 - DNA, 15 bp, Homo sapiens
atattcacagtgggg

SEQ ID NO: 1172117 - DNA, 15 bp, Homo sapiens
aatattcacagtggg

SEQ ID NO: 1172118 - DNA, 15 bp, Homo sapiens
taatattcacagtgg

SEQ ID NO: 1172119 - DNA, 15 bp, Homo sapiens
ctaatattcacagtg

SEQ ID NO: 1172120 - DNA, 15 bp, Homo sapiens
tctaatattcacagt

SEQ ID NO: 1172121 - DNA, 15 bp, Homo sapiens
gtctaatattcacag

SEQ ID NO: 1172122 - DNA, 15 bp, Homo sapiens
tgtctaatattcaca

SEQ ID NO: 1172123 - DNA, 15 bp, Homo sapiens
ttgtctaatattcac

SEQ ID NO: 1172124 - DNA, 15 bp, Homo sapiens
tttgtctaatattca

SEQ ID NO: 1172125 - DNA, 15 bp, Homo sapiens
atttgtctaatattc

SEQ ID NO: 1172126 - DNA, 15 bp, Homo sapiens
gatttgtctaatatt

SEQ ID NO: 1172127 - DNA, 15 bp, Homo sapiens
tgatttgtctaatat

SEQ ID NO: 1172128 - DNA, 15 bp, Homo sapiens
ctgatttgtctaata

SEQ ID NO: 1172129 - DNA, 15 bp, Homo sapiens
actgatttgtctaat

SEQ ID NO: 1172130 - DNA, 15 bp, Homo sapiens
cactgatttgtctaa

SEQ ID NO: 1172131 - DNA, 15 bp, Homo sapiens
tcactgatttgtcta

SEQ ID NO: 1172132 - DNA, 15 bp, Homo sapiens
ctcactgatttgtct

SEQ ID NO: 1172133 - DNA, 15 bp, Homo sapiens
tctcactgatttgtc

SEQ ID NO: 1172134 - DNA, 15 bp, Homo sapiens
gtctcactgatttgt

SEQ ID NO: 1172135 - DNA, 15 bp, Homo sapiens
tgtctcactgatttg

SEQ ID NO: 1172136 - DNA, 15 bp, Homo sapiens
ctgtctcactgattt

SEQ ID NO: 1172137 - DNA, 15 bp, Homo sapiens
tctgtctcactgatt

SEQ ID NO: 1172138 - DNA, 15 bp, Homo sapiens
ttctgtctcactgat

SEQ ID NO: 1172139 - DNA, 15 bp, Homo sapiens
tttctgtctcactga

SEQ ID NO: 1172140 - DNA, 15 bp, Homo sapiens
ttttctgtctcactg

SEQ ID NO: 1172141 - DNA, 15 bp, Homo sapiens
attttctgtctcact

SEQ ID NO: 1172142 - DNA, 15 bp, Homo sapiens
aattttctgtctcac

SEQ ID NO: 1172143 - DNA, 15 bp, Homo sapiens
taattttctgtctca

SEQ ID NO: 1172144 - DNA, 15 bp, Homo sapiens
ctaattttctgtctc

SEQ ID NO: 1172145 - DNA, 15 bp, Homo sapiens
gctaattttctgtct

SEQ ID NO: 1172146 - DNA, 15 bp, Homo sapiens
tgctaattttctgtc

SEQ ID NO: 1172147 - DNA, 15 bp, Homo sapiens
ttgctaattttctgt

SEQ ID NO: 1172148 - DNA, 15 bp, Homo sapiens
cttgctaattttctg

SEQ ID NO: 1172149 - DNA, 15 bp, Homo sapiens
ccttgctaattttct

SEQ ID NO: 1172150 - DNA, 15 bp, Homo sapiens
tccttgctaattttc

SEQ ID NO: 1172151 - DNA, 15 bp, Homo sapiens
atccttgctaatttt

SEQ ID NO: 1172152 - DNA, 15 bp, Homo sapiens
tatccttgctaattt

SEQ ID NO: 1172153 - DNA, 15 bp, Homo sapiens
atatccttgctaatt

SEQ ID NO: 1172154 - DNA, 15 bp, Homo sapiens
aatatccttgctaat

SEQ ID NO: 1172155 - DNA, 15 bp, Homo sapiens
gaatatccttgctaa

SEQ ID NO: 1172156 - DNA, 15 bp, Homo sapiens
tgaatatccttgcta

SEQ ID NO: 1172157 - DNA, 15 bp, Homo sapiens
ctgaatatccttgct

SEQ ID NO: 1172158 - DNA, 15 bp, Homo sapiens
cctgaatatccttgc

SEQ ID NO: 1172159 - DNA, 15 bp, Homo sapiens
tcctgaatatccttg

SEQ ID NO: 1172160 - DNA, 15 bp, Homo sapiens
gtcctgaatatcctt

SEQ ID NO: 1172161 - DNA, 15 bp, Homo sapiens
agtcctgaatatcct

SEQ ID NO: 1172162 - DNA, 15 bp, Homo sapiens
aagtcctgaatatcc

SEQ ID NO: 1172163 - DNA, 15 bp, Homo sapiens
caagtcctgaatatc

SEQ ID NO: 1172164 - DNA, 15 bp, Homo sapiens
tcaagtcctgaatat

SEQ ID NO: 1172165 - DNA, 15 bp, Homo sapiens
ttcaagtcctgaata

SEQ ID NO: 1172166 - DNA, 15 bp, Homo sapiens
gttcaagtcctgaat

SEQ ID NO: 1172167 - DNA, 15 bp, Homo sapiens
agttcaagtcctgaa

SEQ ID NO: 1172168 - DNA, 15 bp, Homo sapiens
gagttcaagtcctga

SEQ ID NO: 1172169 - DNA, 15 bp, Homo sapiens
tgagttcaagtcctg

SEQ ID NO: 1172170 - DNA, 15 bp, Homo sapiens
ctgagttcaagtcct

SEQ ID NO: 1172171 - DNA, 15 bp, Homo sapiens
gctgagttcaagtcc

SEQ ID NO: 1172172 - DNA, 15 bp, Homo sapiens
agctgagttcaagtc

SEQ ID NO: 1172173 - DNA, 15 bp, Homo sapiens
gagctgagttcaagt

SEQ ID NO: 1172174 - DNA, 15 bp, Homo sapiens
agagctgagttcaag

SEQ ID NO: 1172175 - DNA, 15 bp, Homo sapiens
cagagctgagttcaa

SEQ ID NO: 1172176 - DNA, 15 bp, Homo sapiens
ccagagctgagttca

SEQ ID NO: 1172177 - DNA, 15 bp, Homo sapiens
tccagagctgagttc

SEQ ID NO: 1172178 - DNA, 15 bp, Homo sapiens
gtccagagctgagtt

SEQ ID NO: 1172179 - DNA, 15 bp, Homo sapiens
ggtccagagctgagt

SEQ ID NO: 1172180 - DNA, 15 bp, Homo sapiens
tggtccagagctgag

SEQ ID NO: 1172181 - DNA, 15 bp, Homo sapiens
ttggtccagagctga

SEQ ID NO: 1172182 - DNA, 15 bp, Homo sapiens
cttggtccagagctg

SEQ ID NO: 1172183 - DNA, 15 bp, Homo sapiens
acttggtccagagct

SEQ ID NO: 1172184 - DNA, 15 bp, Homo sapiens
cacttggtccagagc

SEQ ID NO: 1172185 - DNA, 15 bp, Homo sapiens
ccacttggtccagag

SEQ ID NO: 1172186 - DNA, 15 bp, Homo sapiens
tccacttggtccaga

SEQ ID NO: 1172187 - DNA, 15 bp, Homo sapiens
gtccacttggtccag

SEQ ID NO: 1172188 - DNA, 15 bp, Homo sapiens
ggtccacttggtcca

SEQ ID NO: 1172189 - DNA, 15 bp, Homo sapiens
aggtccacttggtcc

SEQ ID NO: 1172190 - DNA, 15 bp, Homo sapiens
taggtccacttggtc

SEQ ID NO: 1172191 - DNA, 15 bp, Homo sapiens
ttaggtccacttggt

SEQ ID NO: 1172192 - DNA, 15 bp, Homo sapiens
attaggtccacttgg

SEQ ID NO: 1172193 - DNA, 15 bp, Homo sapiens
tattaggtccacttg

SEQ ID NO: 1172194 - DNA, 15 bp, Homo sapiens
ctattaggtccactt

SEQ ID NO: 1172195 - DNA, 15 bp, Homo sapiens
tctattaggtccact

SEQ ID NO: 1172196 - DNA, 15 bp, Homo sapiens
gtctattaggtccac

SEQ ID NO: 1172197 - DNA, 15 bp, Homo sapiens
tgtctattaggtcca

SEQ ID NO: 1172198 - DNA, 15 bp, Homo sapiens
atgtctattaggtcc

SEQ ID NO: 1172199 - DNA, 15 bp, Homo sapiens
gatgtctattaggtc

SEQ ID NO: 1172200 - DNA, 15 bp, Homo sapiens
agatgtctattaggt

SEQ ID NO: 1172201 - DNA, 15 bp, Homo sapiens
tagatgtctattagg

SEQ ID NO: 1172202 - DNA, 15 bp, Homo sapiens
gtagatgtctattag

SEQ ID NO: 1172203 - DNA, 15 bp, Homo sapiens
tgtagatgtctatta

SEQ ID NO: 1172204 - DNA, 15 bp, Homo sapiens
ctgtagatgtctatt

SEQ ID NO: 1172205 - DNA, 15 bp, Homo sapiens
tctgtagatgtctat

SEQ ID NO: 1172206 - DNA, 15 bp, Homo sapiens
ttctgtagatgtcta

SEQ ID NO: 1172207 - DNA, 15 bp, Homo sapiens
gttctgtagatgtct

SEQ ID NO: 1172208 - DNA, 15 bp, Homo sapiens
agttctgtagatgtc

SEQ ID NO: 1172209 - DNA, 15 bp, Homo sapiens
gagttctgtagatgt

SEQ ID NO: 1172210 - DNA, 15 bp, Homo sapiens
agagttctgtagatg

SEQ ID NO: 1172211 - DNA, 15 bp, Homo sapiens
gagagttctgtagat

SEQ ID NO: 1172212 - DNA, 15 bp, Homo sapiens
ggagagttctgtaga

SEQ ID NO: 1172213 - DNA, 15 bp, Homo sapiens
tggagagttctgtag

SEQ ID NO: 1172214 - DNA, 15 bp, Homo sapiens
gtggagagttctgta

SEQ ID NO: 1172215 - DNA, 15 bp, Homo sapiens
ggtggagagttctgt

SEQ ID NO: 1172216 - DNA, 15 bp, Homo sapiens
gggtggagagttctg

SEQ ID NO: 1172217 - DNA, 15 bp, Homo sapiens
ggggtggagagttct

SEQ ID NO: 1172218 - DNA, 15 bp, Homo sapiens
tggggtggagagttc

SEQ ID NO: 1172219 - DNA, 15 bp, Homo sapiens
ttggggtggagagtt

SEQ ID NO: 1172220 - DNA, 15 bp, Homo sapiens
tttggggtggagagt

SEQ ID NO: 1172221 - DNA, 15 bp, Homo sapiens
atttggggtggagag

SEQ ID NO: 1172222 - DNA, 15 bp, Homo sapiens
gatttggggtggaga

SEQ ID NO: 1172223 - DNA, 15 bp, Homo sapiens
tgatttggggtggag

SEQ ID NO: 1172224 - DNA, 15 bp, Homo sapiens
ttgatttggggtgga

SEQ ID NO: 1172225 - DNA, 15 bp, Homo sapiens
gttgatttggggtgg

SEQ ID NO: 1172226 - DNA, 15 bp, Homo sapiens
tgttgatttggggtg

SEQ ID NO: 1172227 - DNA, 15 bp, Homo sapiens
ctgttgatttggggt

SEQ ID NO: 1172228 - DNA, 15 bp, Homo sapiens
tctgttgatttgggg

SEQ ID NO: 1172229 - DNA, 15 bp, Homo sapiens
ttctgttgatttggg

SEQ ID NO: 1172230 - DNA, 15 bp, Homo sapiens
attctgttgatttgg

SEQ ID NO: 1172231 - DNA, 15 bp, Homo sapiens
tattctgttgatttg

SEQ ID NO: 1172232 - DNA, 15 bp, Homo sapiens
atattctgttgattt

SEQ ID NO: 1172233 - DNA, 15 bp, Homo sapiens
tatattctgttgatt

SEQ ID NO: 1172234 - DNA, 15 bp, Homo sapiens
gtatattctgttgat

SEQ ID NO: 1172235 - DNA, 15 bp, Homo sapiens
tgtatattctgttga

SEQ ID NO: 1172236 - DNA, 15 bp, Homo sapiens
atgtatattctgttg

SEQ ID NO: 1172237 - DNA, 15 bp, Homo sapiens
aatgtatattctgtt

SEQ ID NO: 1172238 - DNA, 15 bp, Homo sapiens
gaatgtatattctgt

SEQ ID NO: 1172239 - DNA, 15 bp, Homo sapiens
agaatgtatattctg

SEQ ID NO: 1172240 - DNA, 15 bp, Homo sapiens
aagaatgtatattct

SEQ ID NO: 1172241 - DNA, 15 bp, Homo sapiens
gaagaatgtatattc

SEQ ID NO: 1172242 - DNA, 15 bp, Homo sapiens
agaagaatgtatatt

SEQ ID NO: 1172243 - DNA, 15 bp, Homo sapiens
gagaagaatgtatat

SEQ ID NO: 1172244 - DNA, 15 bp, Homo sapiens
tgagaagaatgtata

SEQ ID NO: 1172245 - DNA, 15 bp, Homo sapiens
ctgagaagaatgtat

SEQ ID NO: 1172246 - DNA, 15 bp, Homo sapiens
gctgagaagaatgta

SEQ ID NO: 1172247 - DNA, 15 bp, Homo sapiens
tgctgagaagaatgt

SEQ ID NO: 1172248 - DNA, 15 bp, Homo sapiens
gtgctgagaagaatg

SEQ ID NO: 1172249 - DNA, 15 bp, Homo sapiens
ggtgctgagaagaat

SEQ ID NO: 1172250 - DNA, 15 bp, Homo sapiens
tggtgctgagaagaa

SEQ ID NO: 1172251 - DNA, 15 bp, Homo sapiens
gtggtgctgagaaga

SEQ ID NO: 1172252 - DNA, 15 bp, Homo sapiens
tgtggtgctgagaag

SEQ ID NO: 1172253 - DNA, 15 bp, Homo sapiens
atgtggtgctgagaa

SEQ ID NO: 1172254 - DNA, 15 bp, Homo sapiens
gatgtggtgctgaga

SEQ ID NO: 1172255 - DNA, 15 bp, Homo sapiens
tgatgtggtgctgag

SEQ ID NO: 1172256 - DNA, 15 bp, Homo sapiens
gtgatgtggtgctga

SEQ ID NO: 1172257 - DNA, 15 bp, Homo sapiens
tgtgatgtggtgctg

SEQ ID NO: 1172258 - DNA, 15 bp, Homo sapiens
gtgtgatgtggtgct

SEQ ID NO: 1172259 - DNA, 15 bp, Homo sapiens
agtgtgatgtggtgc

SEQ ID NO: 1172260 - DNA, 15 bp, Homo sapiens
aagtgtgatgtggtg

SEQ ID NO: 1172261 - DNA, 15 bp, Homo sapiens
taagtgtgatgtggt

SEQ ID NO: 1172262 - DNA, 15 bp, Homo sapiens
ataagtgtgatgtgg

SEQ ID NO: 1172263 - DNA, 15 bp, Homo sapiens
aataagtgtgatgtg

SEQ ID NO: 1172264 - DNA, 15 bp, Homo sapiens
gaataagtgtgatgt

SEQ ID NO: 1172265 - DNA, 15 bp, Homo sapiens
agaataagtgtgatg

SEQ ID NO: 1172266 - DNA, 15 bp, Homo sapiens
tagaataagtgtgat

SEQ ID NO: 1172267 - DNA, 15 bp, Homo sapiens
ttagaataagtgtga

SEQ ID NO: 1172268 - DNA, 15 bp, Homo sapiens
tttagaataagtgtg

SEQ ID NO: 1172269 - DNA, 15 bp, Homo sapiens
ttttagaataagtgt

SEQ ID NO: 1172270 - DNA, 15 bp, Homo sapiens
gttttagaataagtg

SEQ ID NO: 1172271 - DNA, 15 bp, Homo sapiens
agttttagaataagt

SEQ ID NO: 1172272 - DNA, 15 bp, Homo sapiens
cagttttagaataag

SEQ ID NO: 1172273 - DNA, 15 bp, Homo sapiens
tcagttttagaataa

SEQ ID NO: 1172274 - DNA, 15 bp, Homo sapiens
gtcagttttagaata

SEQ ID NO: 1172275 - DNA, 15 bp, Homo sapiens
ggtcagttttagaat

SEQ ID NO: 1172276 - DNA, 15 bp, Homo sapiens
tggtcagttttagaa

SEQ ID NO: 1172277 - DNA, 15 bp, Homo sapiens
gtggtcagttttaga

SEQ ID NO: 1172278 - DNA, 15 bp, Homo sapiens
tgtggtcagttttag

SEQ ID NO: 1172279 - DNA, 15 bp, Homo sapiens
atgtggtcagtttta

SEQ ID NO: 1172280 - DNA, 15 bp, Homo sapiens
tatgtggtcagtttt

SEQ ID NO: 1172281 - DNA, 15 bp, Homo sapiens
ttatgtggtcagttt

SEQ ID NO: 1172282 - DNA, 15 bp, Homo sapiens
attatgtggtcagtt

SEQ ID NO: 1172283 - DNA, 15 bp, Homo sapiens
aattatgtggtcagt

SEQ ID NO: 1172284 - DNA, 15 bp, Homo sapiens
caattatgtggtcag

SEQ ID NO: 1172285 - DNA, 15 bp, Homo sapiens
ccaattatgtggtca

SEQ ID NO: 1172286 - DNA, 15 bp, Homo sapiens
tccaattatgtggtc

SEQ ID NO: 1172287 - DNA, 15 bp, Homo sapiens
ttccaattatgtggt

SEQ ID NO: 1172288 - DNA, 15 bp, Homo sapiens
cttccaattatgtgg

SEQ ID NO: 1172289 - DNA, 15 bp, Homo sapiens
acttccaattatgtg

SEQ ID NO: 1172290 - DNA, 15 bp, Homo sapiens
tacttccaattatgt

SEQ ID NO: 1172291 - DNA, 15 bp, Homo sapiens
ttacttccaattatg

SEQ ID NO: 1172292 - DNA, 15 bp, Homo sapiens
tttacttccaattat

SEQ ID NO: 1172293 - DNA, 15 bp, Homo sapiens
ttttacttccaatta

SEQ ID NO: 1172294 - DNA, 15 bp, Homo sapiens
gttttacttccaatt

SEQ ID NO: 1172295 - DNA, 15 bp, Homo sapiens
tgttttacttccaat

SEQ ID NO: 1172296 - DNA, 15 bp, Homo sapiens
gtgttttacttccaa

SEQ ID NO: 1172297 - DNA, 15 bp, Homo sapiens
agtgttttacttcca

SEQ ID NO: 1172298 - DNA, 15 bp, Homo sapiens
gagtgttttacttcc

SEQ ID NO: 1172299 - DNA, 15 bp, Homo sapiens
ggagtgttttacttc

SEQ ID NO: 1172300 - DNA, 15 bp, Homo sapiens
aggagtgttttactt

SEQ ID NO: 1172301 - DNA, 15 bp, Homo sapiens
gaggagtgttttact

SEQ ID NO: 1172302 - DNA, 15 bp, Homo sapiens
tgaggagtgttttac

SEQ ID NO: 1172303 - DNA, 15 bp, Homo sapiens
ctgaggagtgtttta

SEQ ID NO: 1172304 - DNA, 15 bp, Homo sapiens
gctgaggagtgtttt

SEQ ID NO: 1172305 - DNA, 15 bp, Homo sapiens
tgctgaggagtgttt

SEQ ID NO: 1172306 - DNA, 15 bp, Homo sapiens
ttgctgaggagtgtt

SEQ ID NO: 1172307 - DNA, 15 bp, Homo sapiens
tttgctgaggagtgt

SEQ ID NO: 1172308 - DNA, 15 bp, Homo sapiens
atttgctgaggagtg

SEQ ID NO: 1172309 - DNA, 15 bp, Homo sapiens
catttgctgaggagt

SEQ ID NO: 1172310 - DNA, 15 bp, Homo sapiens
gcatttgctgaggag

SEQ ID NO: 1172311 - DNA, 15 bp, Homo sapiens
tgcatttgctgagga

SEQ ID NO: 1172312 - DNA, 15 bp, Homo sapiens
ttgcatttgctgagg

SEQ ID NO: 1172313 - DNA, 15 bp, Homo sapiens
tttgcatttgctgag

SEQ ID NO: 1172314 - DNA, 15 bp, Homo sapiens
ttttgcatttgctga

SEQ ID NO: 1172315 - DNA, 15 bp, Homo sapiens
cttttgcatttgctg

SEQ ID NO: 1172316 - DNA, 15 bp, Homo sapiens
tcttttgcatttgct

SEQ ID NO: 1172317 - DNA, 15 bp, Homo sapiens
ttcttttgcatttgc

SEQ ID NO: 1172318 - DNA, 15 bp, Homo sapiens
attcttttgcatttg

SEQ ID NO: 1172319 - DNA, 15 bp, Homo sapiens
tattcttttgcattt

SEQ ID NO: 1172320 - DNA, 15 bp, Homo sapiens
ctattcttttgcatt

SEQ ID NO: 1172321 - DNA, 15 bp, Homo sapiens
tctattcttttgcat

SEQ ID NO: 1172322 - DNA, 15 bp, Homo sapiens
ttctattcttttgca

SEQ ID NO: 1172323 - DNA, 15 bp, Homo sapiens
tttctattcttttgc

SEQ ID NO: 1172324 - DNA, 15 bp, Homo sapiens
atttctattcttttg

SEQ ID NO: 1172325 - DNA, 15 bp, Homo sapiens
gatttctattctttt

SEQ ID NO: 1172326 - DNA, 15 bp, Homo sapiens
tgatttctattcttt

SEQ ID NO: 1172327 - DNA, 15 bp, Homo sapiens
atgatttctattctt

SEQ ID NO: 1172328 - DNA, 15 bp, Homo sapiens
tatgatttctattct

SEQ ID NO: 1172329 - DNA, 15 bp, Homo sapiens
ttatgatttctattc

SEQ ID NO: 1172330 - DNA, 15 bp, Homo sapiens
gttatgatttctatt

SEQ ID NO: 1172331 - DNA, 15 bp, Homo sapiens
tgttatgatttctat

SEQ ID NO: 1172332 - DNA, 15 bp, Homo sapiens
ttgttatgatttcta

SEQ ID NO: 1172333 - DNA, 15 bp, Homo sapiens
tttgttatgatttct

SEQ ID NO: 1172334 - DNA, 15 bp, Homo sapiens
gtttgttatgatttc

SEQ ID NO: 1172335 - DNA, 15 bp, Homo sapiens
tgtttgttatgattt

SEQ ID NO: 1172336 - DNA, 15 bp, Homo sapiens
ctgtttgttatgatt

SEQ ID NO: 1172337 - DNA, 15 bp, Homo sapiens
actgtttgttatgat

SEQ ID NO: 1172338 - DNA, 15 bp, Homo sapiens
gactgtttgttatga

SEQ ID NO: 1172339 - DNA, 15 bp, Homo sapiens
agactgtttgttatg

SEQ ID NO: 1172340 - DNA, 15 bp, Homo sapiens
gagactgtttgttat

SEQ ID NO: 1172341 - DNA, 15 bp, Homo sapiens
agagactgtttgtta

SEQ ID NO: 1172342 - DNA, 15 bp, Homo sapiens
gagagactgtttgtt

SEQ ID NO: 1172343 - DNA, 15 bp, Homo sapiens
cgagagactgtttgt

SEQ ID NO: 1172344 - DNA, 15 bp, Homo sapiens
ccgagagactgtttg

SEQ ID NO: 1172345 - DNA, 15 bp, Homo sapiens
tccgagagactgttt

SEQ ID NO: 1172346 - DNA, 15 bp, Homo sapiens
gtccgagagactgtt

SEQ ID NO: 1172347 - DNA, 15 bp, Homo sapiens
ggtccgagagactgt

SEQ ID NO: 1172348 - DNA, 15 bp, Homo sapiens
tggtccgagagactg

SEQ ID NO: 1172349 - DNA, 15 bp, Homo sapiens
gtggtccgagagact

SEQ ID NO: 1172350 - DNA, 15 bp, Homo sapiens
tgtggtccgagagac

SEQ ID NO: 1172351 - DNA, 15 bp, Homo sapiens
ctgtggtccgagaga

SEQ ID NO: 1172352 - DNA, 15 bp, Homo sapiens
actgtggtccgagag

SEQ ID NO: 1172353 - DNA, 15 bp, Homo sapiens
cactgtggtccgaga

SEQ ID NO: 1172354 - DNA, 15 bp, Homo sapiens
gcactgtggtccgag

SEQ ID NO: 1172355 - DNA, 15 bp, Homo sapiens
tgcactgtggtccga

SEQ ID NO: 1172356 - DNA, 15 bp, Homo sapiens
ttgcactgtggtccg

SEQ ID NO: 1172357 - DNA, 15 bp, Homo sapiens
attgcactgtggtcc

SEQ ID NO: 1172358 - DNA, 15 bp, Homo sapiens
gattgcactgtggtc

SEQ ID NO: 1172359 - DNA, 15 bp, Homo sapiens
tgattgcactgtggt

SEQ ID NO: 1172360 - DNA, 15 bp, Homo sapiens
ttgattgcactgtgg

SEQ ID NO: 1172361 - DNA, 15 bp, Homo sapiens
tttgattgcactgtg

SEQ ID NO: 1172362 - DNA, 15 bp, Homo sapiens
atttgattgcactgt

SEQ ID NO: 1172363 - DNA, 15 bp, Homo sapiens
aatttgattgcactg

SEQ ID NO: 1172364 - DNA, 15 bp, Homo sapiens
taatttgattgcact

SEQ ID NO: 1172365 - DNA, 15 bp, Homo sapiens
ctaatttgattgcac

SEQ ID NO: 1172366 - DNA, 15 bp, Homo sapiens
tctaatttgattgca

SEQ ID NO: 1172367 - DNA, 15 bp, Homo sapiens
ttctaatttgattgc

SEQ ID NO: 1172368 - DNA, 15 bp, Homo sapiens
gttctaatttgattg

SEQ ID NO: 1172369 - DNA, 15 bp, Homo sapiens
agttctaatttgatt

SEQ ID NO: 1172370 - DNA, 15 bp, Homo sapiens
gagttctaatttgat

SEQ ID NO: 1172371 - DNA, 15 bp, Homo sapiens
tgagttctaatttga

SEQ ID NO: 1172372 - DNA, 15 bp, Homo sapiens
ctgagttctaatttg

SEQ ID NO: 1172373 - DNA, 15 bp, Homo sapiens
cctgagttctaattt

SEQ ID NO: 1172374 - DNA, 15 bp, Homo sapiens
tcctgagttctaatt

SEQ ID NO: 1172375 - DNA, 15 bp, Homo sapiens
atcctgagttctaat

SEQ ID NO: 1172376 - DNA, 15 bp, Homo sapiens
gatcctgagttctaa

SEQ ID NO: 1172377 - DNA, 15 bp, Homo sapiens
tgatcctgagttcta

SEQ ID NO: 1172378 - DNA, 15 bp, Homo sapiens
ttgatcctgagttct

SEQ ID NO: 1172379 - DNA, 15 bp, Homo sapiens
cttgatcctgagttc

SEQ ID NO: 1172380 - DNA, 15 bp, Homo sapiens
tcttgatcctgagtt

SEQ ID NO: 1172381 - DNA, 15 bp, Homo sapiens
ttcttgatcctgagt

SEQ ID NO: 1172382 - DNA, 15 bp, Homo sapiens
tttcttgatcctgag

SEQ ID NO: 1172383 - DNA, 15 bp, Homo sapiens
gtttcttgatcctga

SEQ ID NO: 1172384 - DNA, 15 bp, Homo sapiens
agtttcttgatcctg

SEQ ID NO: 1172385 - DNA, 15 bp, Homo sapiens
gagtttcttgatcct

SEQ ID NO: 1172386 - DNA, 15 bp, Homo sapiens
tgagtttcttgatcc

SEQ ID NO: 1172387 - DNA, 15 bp, Homo sapiens
gtgagtttcttgatc

SEQ ID NO: 1172388 - DNA, 15 bp, Homo sapiens
agtgagtttcttgat

SEQ ID NO: 1172389 - DNA, 15 bp, Homo sapiens
gagtgagtttcttga

SEQ ID NO: 1172390 - DNA, 15 bp, Homo sapiens
tgagtgagtttcttg

SEQ ID NO: 1172391 - DNA, 15 bp, Homo sapiens
ttgagtgagtttctt

SEQ ID NO: 1172392 - DNA, 15 bp, Homo sapiens
tttgagtgagtttct

SEQ ID NO: 1172393 - DNA, 15 bp, Homo sapiens
ttttgagtgagtttc

SEQ ID NO: 1172394 - DNA, 15 bp, Homo sapiens
gttttgagtgagttt

SEQ ID NO: 1172395 - DNA, 15 bp, Homo sapiens
agttttgagtgagtt

SEQ ID NO: 1172396 - DNA, 15 bp, Homo sapiens
aagttttgagtgagt

SEQ ID NO: 1172397 - DNA, 15 bp, Homo sapiens
gaagttttgagtgag

SEQ ID NO: 1172398 - DNA, 15 bp, Homo sapiens
tgaagttttgagtga

SEQ ID NO: 1172399 - DNA, 15 bp, Homo sapiens
gtgaagttttgagtg

SEQ ID NO: 1172400 - DNA, 15 bp, Homo sapiens
tgtgaagttttgagt

SEQ ID NO: 1172401 - DNA, 15 bp, Homo sapiens
ttgtgaagttttgag

SEQ ID NO: 1172402 - DNA, 15 bp, Homo sapiens
gttgtgaagttttga

SEQ ID NO: 1172403 - DNA, 15 bp, Homo sapiens
agttgtgaagttttg

SEQ ID NO: 1172404 - DNA, 15 bp, Homo sapiens
tagttgtgaagtttt

SEQ ID NO: 1172405 - DNA, 15 bp, Homo sapiens
gtagttgtgaagttt

SEQ ID NO: 1172406 - DNA, 15 bp, Homo sapiens
tgtagttgtgaagtt

SEQ ID NO: 1172407 - DNA, 15 bp, Homo sapiens
atgtagttgtgaagt

SEQ ID NO: 1172408 - DNA, 15 bp, Homo sapiens
tatgtagttgtgaag

SEQ ID NO: 1172409 - DNA, 15 bp, Homo sapiens
ttatgtagttgtgaa

SEQ ID NO: 1172410 - DNA, 15 bp, Homo sapiens
tttatgtagttgtga

SEQ ID NO: 1172411 - DNA, 15 bp, Homo sapiens
ttttatgtagttgtg

SEQ ID NO: 1172412 - DNA, 15 bp, Homo sapiens
tttttatgtagttgt

SEQ ID NO: 1172413 - DNA, 15 bp, Homo sapiens
gtttttatgtagttg

SEQ ID NO: 1172414 - DNA, 15 bp, Homo sapiens
agtttttatgtagtt

SEQ ID NO: 1172415 - DNA, 15 bp, Homo sapiens
cagtttttatgtagt

SEQ ID NO: 1172416 - DNA, 15 bp, Homo sapiens
tcagtttttatgtag

SEQ ID NO: 1172417 - DNA, 15 bp, Homo sapiens
ttcagtttttatgta

SEQ ID NO: 1172418 - DNA, 15 bp, Homo sapiens
gttcagtttttatgt

SEQ ID NO: 1172419 - DNA, 15 bp, Homo sapiens
tgttcagtttttatg

SEQ ID NO: 1172420 - DNA, 15 bp, Homo sapiens
ttgttcagtttttat

SEQ ID NO: 1172421 - DNA, 15 bp, Homo sapiens
gttgttcagttttta

SEQ ID NO: 1172422 - DNA, 15 bp, Homo sapiens
ggttgttcagttttt

SEQ ID NO: 1172423 - DNA, 15 bp, Homo sapiens
aggttgttcagtttt

SEQ ID NO: 1172424 - DNA, 15 bp, Homo sapiens
taggttgttcagttt

SEQ ID NO: 1172425 - DNA, 15 bp, Homo sapiens
gtaggttgttcagtt

SEQ ID NO: 1172426 - DNA, 15 bp, Homo sapiens
agtaggttgttcagt

SEQ ID NO: 1172427 - DNA, 15 bp, Homo sapiens
gagtaggttgttcag

SEQ ID NO: 1172428 - DNA, 15 bp, Homo sapiens
ggagtaggttgttca

SEQ ID NO: 1172429 - DNA, 15 bp, Homo sapiens
aggagtaggttgttc

SEQ ID NO: 1172430 - DNA, 15 bp, Homo sapiens
aaggagtaggttgtt

SEQ ID NO: 1172431 - DNA, 15 bp, Homo sapiens
taaggagtaggttgt

SEQ ID NO: 1172432 - DNA, 15 bp, Homo sapiens
ttaaggagtaggttg

SEQ ID NO: 1172433 - DNA, 15 bp, Homo sapiens
attaaggagtaggtt

SEQ ID NO: 1172434 - DNA, 15 bp, Homo sapiens
cattaaggagtaggt

SEQ ID NO: 1172435 - DNA, 15 bp, Homo sapiens
tcattaaggagtagg

SEQ ID NO: 1172436 - DNA, 15 bp, Homo sapiens
ttcattaaggagtag

SEQ ID NO: 1172437 - DNA, 15 bp, Homo sapiens
attcattaaggagta

SEQ ID NO: 1172438 - DNA, 15 bp, Homo sapiens
tattcattaaggagt

SEQ ID NO: 1172439 - DNA, 15 bp, Homo sapiens
gtattcattaaggag

SEQ ID NO: 1172440 - DNA, 15 bp, Homo sapiens
agtattcattaagga

SEQ ID NO: 1172441 - DNA, 15 bp, Homo sapiens
cagtattcattaagg

SEQ ID NO: 1172442 - DNA, 15 bp, Homo sapiens
ccagtattcattaag

SEQ ID NO: 1172443 - DNA, 15 bp, Homo sapiens
cccagtattcattaa

SEQ ID NO: 1172444 - DNA, 15 bp, Homo sapiens
acccagtattcatta

SEQ ID NO: 1172445 - DNA, 15 bp, Homo sapiens
tacccagtattcatt

SEQ ID NO: 1172446 - DNA, 15 bp, Homo sapiens
ttacccagtattcat

SEQ ID NO: 1172447 - DNA, 15 bp, Homo sapiens
tttacccagtattca

SEQ ID NO: 1172448 - DNA, 15 bp, Homo sapiens
atttacccagtattc

SEQ ID NO: 1172449 - DNA, 15 bp, Homo sapiens
tatttacccagtatt

SEQ ID NO: 1172450 - DNA, 15 bp, Homo sapiens
ttatttacccagtat

SEQ ID NO: 1172451 - DNA, 15 bp, Homo sapiens
gttatttacccagta

SEQ ID NO: 1172452 - DNA, 15 bp, Homo sapiens
tgttatttacccagt

SEQ ID NO: 1172453 - DNA, 15 bp, Homo sapiens
ttgttatttacccag

SEQ ID NO: 1172454 - DNA, 15 bp, Homo sapiens
tttgttatttaccca

SEQ ID NO: 1172455 - DNA, 15 bp, Homo sapiens
ttttgttatttaccc

SEQ ID NO: 1172456 - DNA, 15 bp, Homo sapiens
attttgttatttacc

SEQ ID NO: 1172457 - DNA, 15 bp, Homo sapiens
cattttgttatttac

SEQ ID NO: 1172458 - DNA, 15 bp, Homo sapiens
tcattttgttattta

SEQ ID NO: 1172459 - DNA, 15 bp, Homo sapiens
ttcattttgttattt

SEQ ID NO: 1172460 - DNA, 15 bp, Homo sapiens
cttcattttgttatt

SEQ ID NO: 1172461 - DNA, 15 bp, Homo sapiens
ccttcattttgttat

SEQ ID NO: 1172462 - DNA, 15 bp, Homo sapiens
gccttcattttgtta

SEQ ID NO: 1172463 - DNA, 15 bp, Homo sapiens
tgccttcattttgtt

SEQ ID NO: 1172464 - DNA, 15 bp, Homo sapiens
ctgccttcattttgt

SEQ ID NO: 1172465 - DNA, 15 bp, Homo sapiens
tctgccttcattttg

SEQ ID NO: 1172466 - DNA, 15 bp, Homo sapiens
ttctgccttcatttt

SEQ ID NO: 1172467 - DNA, 15 bp, Homo sapiens
tttctgccttcattt

SEQ ID NO: 1172468 - DNA, 15 bp, Homo sapiens
atttctgccttcatt

SEQ ID NO: 1172469 - DNA, 15 bp, Homo sapiens
tatttctgccttcat

SEQ ID NO: 1172470 - DNA, 15 bp, Homo sapiens
ttatttctgccttca

SEQ ID NO: 1172471 - DNA, 15 bp, Homo sapiens
tttatttctgccttc

SEQ ID NO: 1172472 - DNA, 15 bp, Homo sapiens
atttatttctgcctt

SEQ ID NO: 1172473 - DNA, 15 bp, Homo sapiens
tatttatttctgcct

SEQ ID NO: 1172474 - DNA, 15 bp, Homo sapiens
ttatttatttctgcc

SEQ ID NO: 1172475 - DNA, 15 bp, Homo sapiens
cttatttatttctgc

SEQ ID NO: 1172476 - DNA, 15 bp, Homo sapiens
acttatttatttctg

SEQ ID NO: 1172477 - DNA, 15 bp, Homo sapiens
aacttatttatttct

SEQ ID NO: 1172478 - DNA, 15 bp, Homo sapiens
gaacttatttatttc

SEQ ID NO: 1172479 - DNA, 15 bp, Homo sapiens
aagaacttatttatt

SEQ ID NO: 1172480 - DNA, 15 bp, Homo sapiens
aaagaacttatttat

SEQ ID NO: 1172481 - DNA, 15 bp, Homo sapiens
caaagaacttattta

SEQ ID NO: 1172482 - DNA, 15 bp, Homo sapiens
tcaaagaacttattt

SEQ ID NO: 1172483 - DNA, 15 bp, Homo sapiens
ttcaaagaacttatt

SEQ ID NO: 1172484 - DNA, 15 bp, Homo sapiens
tttcaaagaacttat

SEQ ID NO: 1172485 - DNA, 15 bp, Homo sapiens
gtttcaaagaactta

SEQ ID NO: 1172486 - DNA, 15 bp, Homo sapiens
ggtttcaaagaactt

SEQ ID NO: 1172487 - DNA, 15 bp, Homo sapiens
tggtttcaaagaact

SEQ ID NO: 1172488 - DNA, 15 bp, Homo sapiens
ttggtttcaaagaac

SEQ ID NO: 1172489 - DNA, 15 bp, Homo sapiens
attggtttcaaagaa

SEQ ID NO: 1172490 - DNA, 15 bp, Homo sapiens
cattggtttcaaaga

SEQ ID NO: 1172491 - DNA, 15 bp, Homo sapiens
tcattggtttcaaag

SEQ ID NO: 1172492 - DNA, 15 bp, Homo sapiens
ctcattggtttcaaa

SEQ ID NO: 1172493 - DNA, 15 bp, Homo sapiens
tctcattggtttcaa

SEQ ID NO: 1172494 - DNA, 15 bp, Homo sapiens
ctctcattggtttca

SEQ ID NO: 1172495 - DNA, 15 bp, Homo sapiens
gctctcattggtttc

SEQ ID NO: 1172496 - DNA, 15 bp, Homo sapiens
tgctctcattggttt

SEQ ID NO: 1172497 - DNA, 15 bp, Homo sapiens
ttgctctcattggtt

SEQ ID NO: 1172498 - DNA, 15 bp, Homo sapiens
tttgctctcattggt

SEQ ID NO: 1172499 - DNA, 15 bp, Homo sapiens
ctttgctctcattgg

SEQ ID NO: 1172500 - DNA, 15 bp, Homo sapiens
tctttgctctcattg

SEQ ID NO: 1172501 - DNA, 15 bp, Homo sapiens
gtctttgctctcatt

SEQ ID NO: 1172502 - DNA, 15 bp, Homo sapiens
tgtctttgctctcat

SEQ ID NO: 1172503 - DNA, 15 bp, Homo sapiens
gtgtctttgctctca

SEQ ID NO: 1172504 - DNA, 15 bp, Homo sapiens
tgtgtctttgctctc

SEQ ID NO: 1172505 - DNA, 15 bp, Homo sapiens
ttgtgtctttgctct

SEQ ID NO: 1172506 - DNA, 15 bp, Homo sapiens
attgtgtctttgctc

SEQ ID NO: 1172507 - DNA, 15 bp, Homo sapiens
cattgtgtctttgct

SEQ ID NO: 1172508 - DNA, 15 bp, Homo sapiens
acattgtgtctttgc

SEQ ID NO: 1172509 - DNA, 15 bp, Homo sapiens
tacattgtgtctttg

SEQ ID NO: 1172510 - DNA, 15 bp, Homo sapiens
gtacattgtgtcttt

SEQ ID NO: 1172511 - DNA, 15 bp, Homo sapiens
ggtacattgtgtctt

SEQ ID NO: 1172512 - DNA, 15 bp, Homo sapiens
tggtacattgtgtct

SEQ ID NO: 1172513 - DNA, 15 bp, Homo sapiens
ctggtacattgtgtc

SEQ ID NO: 1172514 - DNA, 15 bp, Homo sapiens
tctggtacattgtgt

SEQ ID NO: 1172515 - DNA, 15 bp, Homo sapiens
ttctggtacattgtg

SEQ ID NO: 1172516 - DNA, 15 bp, Homo sapiens
attctggtacattgt

SEQ ID NO: 1172517 - DNA, 15 bp, Homo sapiens
gattctggtacattg

SEQ ID NO: 1172518 - DNA, 15 bp, Homo sapiens
agattctggtacatt

SEQ ID NO: 1172519 - DNA, 15 bp, Homo sapiens
gagattctggtacat

SEQ ID NO: 1172520 - DNA, 15 bp, Homo sapiens
agagattctggtaca

SEQ ID NO: 1172521 - DNA, 15 bp, Homo sapiens
cagagattctggtac

SEQ ID NO: 1172522 - DNA, 15 bp, Homo sapiens
ccagagattctggta

SEQ ID NO: 1172523 - DNA, 15 bp, Homo sapiens
cccagagattctggt

SEQ ID NO: 1172524 - DNA, 15 bp, Homo sapiens
tcccagagattctgg

SEQ ID NO: 1172525 - DNA, 15 bp, Homo sapiens
gtcccagagattctg

SEQ ID NO: 1172526 - DNA, 15 bp, Homo sapiens
tgtcccagagattct

SEQ ID NO: 1172527 - DNA, 15 bp, Homo sapiens
gtgtcccagagattc

SEQ ID NO: 1172528 - DNA, 15 bp, Homo sapiens
tgtgtcccagagatt

SEQ ID NO: 1172529 - DNA, 15 bp, Homo sapiens
ctgtgtcccagagat

SEQ ID NO: 1172530 - DNA, 15 bp, Homo sapiens
gctgtgtcccagaga

SEQ ID NO: 1172531 - DNA, 15 bp, Homo sapiens
agctgtgtcccagag

SEQ ID NO: 1172532 - DNA, 15 bp, Homo sapiens
tagctgtgtcccaga

SEQ ID NO: 1172533 - DNA, 15 bp, Homo sapiens
ttagctgtgtcccag

SEQ ID NO: 1172534 - DNA, 15 bp, Homo sapiens
tttagctgtgtccca

SEQ ID NO: 1172535 - DNA, 15 bp, Homo sapiens
ctttagctgtgtccc

SEQ ID NO: 1172536 - DNA, 15 bp, Homo sapiens
gctttagctgtgtcc

SEQ ID NO: 1172537 - DNA, 15 bp, Homo sapiens
tgctttagctgtgtc

SEQ ID NO: 1172538 - DNA, 15 bp, Homo sapiens
ttgctttagctgtgt

SEQ ID NO: 1172539 - DNA, 15 bp, Homo sapiens
cttgctttagctgtg

SEQ ID NO: 1172540 - DNA, 15 bp, Homo sapiens
ccttgctttagctgt

SEQ ID NO: 1172541 - DNA, 15 bp, Homo sapiens
accttgctttagctg

SEQ ID NO: 1172542 - DNA, 15 bp, Homo sapiens
aaccttgctttagct

SEQ ID NO: 1172543 - DNA, 15 bp, Homo sapiens
aaaccttgctttagc

SEQ ID NO: 1172544 - DNA, 15 bp, Homo sapiens
gaaaccttgctttag

SEQ ID NO: 1172545 - DNA, 15 bp, Homo sapiens
cgaaaccttgcttta

SEQ ID NO: 1172546 - DNA, 15 bp, Homo sapiens
tcgaaaccttgcttt

SEQ ID NO: 1172547 - DNA, 15 bp, Homo sapiens
ctcgaaaccttgctt

SEQ ID NO: 1172548 - DNA, 15 bp, Homo sapiens
cctcgaaaccttgct

SEQ ID NO: 1172549 - DNA, 15 bp, Homo sapiens
ccctcgaaaccttgc

SEQ ID NO: 1172550 - DNA, 15 bp, Homo sapiens
tccctcgaaaccttg

SEQ ID NO: 1172551 - DNA, 15 bp, Homo sapiens
ttccctcgaaacctt

SEQ ID NO: 1172552 - DNA, 15 bp, Homo sapiens
tttccctcgaaacct

SEQ ID NO: 1172553 - DNA, 15 bp, Homo sapiens
atttccctcgaaacc

SEQ ID NO: 1172554 - DNA, 15 bp, Homo sapiens
aatttccctcgaaac

SEQ ID NO: 1172555 - DNA, 15 bp, Homo sapiens
aaatttccctcgaaa

SEQ ID NO: 1172556 - DNA, 15 bp, Homo sapiens
taaatttccctcgaa

SEQ ID NO: 1172557 - DNA, 15 bp, Homo sapiens
ataaatttccctcga

SEQ ID NO: 1172558 - DNA, 15 bp, Homo sapiens
tataaatttccctcg

SEQ ID NO: 1172559 - DNA, 15 bp, Homo sapiens
ctataaatttccctc

SEQ ID NO: 1172560 - DNA, 15 bp, Homo sapiens
gctataaatttccct

SEQ ID NO: 1172561 - DNA, 15 bp, Homo sapiens
tgctataaatttccc

SEQ ID NO: 1172562 - DNA, 15 bp, Homo sapiens
gtgctataaatttcc

SEQ ID NO: 1172563 - DNA, 15 bp, Homo sapiens
agtgctataaatttc

SEQ ID NO: 1172564 - DNA, 15 bp, Homo sapiens
tagtgctataaattt

SEQ ID NO: 1172565 - DNA, 15 bp, Homo sapiens
ttagtgctataaatt

SEQ ID NO: 1172566 - DNA, 15 bp, Homo sapiens
tttagtgctataaat

SEQ ID NO: 1172567 - DNA, 15 bp, Homo sapiens
atttagtgctataaa

SEQ ID NO: 1172568 - DNA, 15 bp, Homo sapiens
catttagtgctataa

SEQ ID NO: 1172569 - DNA, 15 bp, Homo sapiens
gcatttagtgctata

SEQ ID NO: 1172570 - DNA, 15 bp, Homo sapiens
ggcatttagtgctat

SEQ ID NO: 1172571 - DNA, 15 bp, Homo sapiens
gggcatttagtgcta

SEQ ID NO: 1172572 - DNA, 15 bp, Homo sapiens
tgggcatttagtgct

SEQ ID NO: 1172573 - DNA, 15 bp, Homo sapiens
gtgggcatttagtgc

SEQ ID NO: 1172574 - DNA, 15 bp, Homo sapiens
tgtgggcatttagtg

SEQ ID NO: 1172575 - DNA, 15 bp, Homo sapiens
ctgtgggcatttagt

SEQ ID NO: 1172576 - DNA, 15 bp, Homo sapiens
cctgtgggcatttag

SEQ ID NO: 1172577 - DNA, 15 bp, Homo sapiens
tcctgtgggcattta

SEQ ID NO: 1172578 - DNA, 15 bp, Homo sapiens
ttcctgtgggcattt

SEQ ID NO: 1172579 - DNA, 15 bp, Homo sapiens
tttcctgtgggcatt

SEQ ID NO: 1172580 - DNA, 15 bp, Homo sapiens
ctttcctgtgggcat

SEQ ID NO: 1172581 - DNA, 15 bp, Homo sapiens
tctttcctgtgggca

SEQ ID NO: 1172582 - DNA, 15 bp, Homo sapiens
ctctttcctgtgggc

SEQ ID NO: 1172583 - DNA, 15 bp, Homo sapiens
cctctttcctgtggg

SEQ ID NO: 1172584 - DNA, 15 bp, Homo sapiens
tcctctttcctgtgg

SEQ ID NO: 1172585 - DNA, 15 bp, Homo sapiens
ctcctctttcctgtg

SEQ ID NO: 1172586 - DNA, 15 bp, Homo sapiens
tctcctctttcctgt

SEQ ID NO: 1172587 - DNA, 15 bp, Homo sapiens
ttctcctctttcctg

SEQ ID NO: 1172588 - DNA, 15 bp, Homo sapiens
tttctcctctttcct

SEQ ID NO: 1172589 - DNA, 15 bp, Homo sapiens
ttttctcctctttcc

SEQ ID NO: 1172590 - DNA, 15 bp, Homo sapiens
cttttctcctctttc

SEQ ID NO: 1172591 - DNA, 15 bp, Homo sapiens
tcttttctcctcttt

SEQ ID NO: 1172592 - DNA, 15 bp, Homo sapiens
atcttttctcctctt

SEQ ID NO: 1172593 - DNA, 15 bp, Homo sapiens
gatcttttctcctct

SEQ ID NO: 1172594 - DNA, 15 bp, Homo sapiens
tgatcttttctcctc

SEQ ID NO: 1172595 - DNA, 15 bp, Homo sapiens
ttgatcttttctcct

SEQ ID NO: 1172596 - DNA, 15 bp, Homo sapiens
tttgatcttttctcc

SEQ ID NO: 1172597 - DNA, 15 bp, Homo sapiens
ttttgatcttttctc

SEQ ID NO: 1172598 - DNA, 15 bp, Homo sapiens
tttttgatcttttct

SEQ ID NO: 1172599 - DNA, 15 bp, Homo sapiens
atttttgatcttttc

SEQ ID NO: 1172600 - DNA, 15 bp, Homo sapiens
aatttttgatctttt

SEQ ID NO: 1172601 - DNA, 15 bp, Homo sapiens
caatttttgatcttt

SEQ ID NO: 1172602 - DNA, 15 bp, Homo sapiens
tcaatttttgatctt

SEQ ID NO: 1172603 - DNA, 15 bp, Homo sapiens
gtcaatttttgatct

SEQ ID NO: 1172604 - DNA, 15 bp, Homo sapiens
tgtcaatttttgatc

SEQ ID NO: 1172605 - DNA, 15 bp, Homo sapiens
gtgtcaatttttgat

SEQ ID NO: 1172606 - DNA, 15 bp, Homo sapiens
ggtgtcaatttttga

SEQ ID NO: 1172607 - DNA, 15 bp, Homo sapiens
gggtgtcaatttttg

SEQ ID NO: 1172608 - DNA, 15 bp, Homo sapiens
agggtgtcaattttt

SEQ ID NO: 1172609 - DNA, 15 bp, Homo sapiens
tagggtgtcaatttt

SEQ ID NO: 1172610 - DNA, 15 bp, Homo sapiens
ttagggtgtcaattt

SEQ ID NO: 1172611 - DNA, 15 bp, Homo sapiens
attagggtgtcaatt

SEQ ID NO: 1172612 - DNA, 15 bp, Homo sapiens
tattagggtgtcaat

SEQ ID NO: 1172613 - DNA, 15 bp, Homo sapiens
atattagggtgtcaa

SEQ ID NO: 1172614 - DNA, 15 bp, Homo sapiens
gatattagggtgtca

SEQ ID NO: 1172615 - DNA, 15 bp, Homo sapiens
tgatattagggtgtc

SEQ ID NO: 1172616 - DNA, 15 bp, Homo sapiens
ttgatattagggtgt

SEQ ID NO: 1172617 - DNA, 15 bp, Homo sapiens
tttgatattagggtg

SEQ ID NO: 1172618 - DNA, 15 bp, Homo sapiens
ttttgatattagggt

SEQ ID NO: 1172619 - DNA, 15 bp, Homo sapiens
attttgatattaggg

SEQ ID NO: 1172620 - DNA, 15 bp, Homo sapiens
aattttgatattagg

SEQ ID NO: 1172621 - DNA, 15 bp, Homo sapiens
taattttgatattag

SEQ ID NO: 1172622 - DNA, 15 bp, Homo sapiens
ttaattttgatatta

SEQ ID NO: 1172623 - DNA, 15 bp, Homo sapiens
tttaattttgatatt

SEQ ID NO: 1172624 - DNA, 15 bp, Homo sapiens
ttttaattttgatat

SEQ ID NO: 1172625 - DNA, 15 bp, Homo sapiens
cttttaattttgata

SEQ ID NO: 1172626 - DNA, 15 bp, Homo sapiens
tcttttaattttgat

SEQ ID NO: 1172627 - DNA, 15 bp, Homo sapiens
ttcttttaattttga

SEQ ID NO: 1172628 - DNA, 15 bp, Homo sapiens
gttcttttaattttg

SEQ ID NO: 1172629 - DNA, 15 bp, Homo sapiens
agttcttttaatttt

SEQ ID NO: 1172630 - DNA, 15 bp, Homo sapiens
tagttcttttaattt

SEQ ID NO: 1172631 - DNA, 15 bp, Homo sapiens
ctagttcttttaatt

SEQ ID NO: 1172632 - DNA, 15 bp, Homo sapiens
tctagttcttttaat

SEQ ID NO: 1172633 - DNA, 15 bp, Homo sapiens
ctctagttcttttaa

SEQ ID NO: 1172634 - DNA, 15 bp, Homo sapiens
tctctagttctttta

SEQ ID NO: 1172635 - DNA, 15 bp, Homo sapiens
ttctctagttctttt

SEQ ID NO: 1172636 - DNA, 15 bp, Homo sapiens
cttctctagttcttt

SEQ ID NO: 1172637 - DNA, 15 bp, Homo sapiens
gcttctctagttctt

SEQ ID NO: 1172638 - DNA, 15 bp, Homo sapiens
tgcttctctagttct

SEQ ID NO: 1172639 - DNA, 15 bp, Homo sapiens
ttgcttctctagttc

SEQ ID NO: 1172640 - DNA, 15 bp, Homo sapiens
cttgcttctctagtt

SEQ ID NO: 1172641 - DNA, 15 bp, Homo sapiens
tcttgcttctctagt

SEQ ID NO: 1172642 - DNA, 15 bp, Homo sapiens
ctcttgcttctctag

SEQ ID NO: 1172643 - DNA, 15 bp, Homo sapiens
gctcttgcttctcta

SEQ ID NO: 1172644 - DNA, 15 bp, Homo sapiens
tgctcttgcttctct

SEQ ID NO: 1172645 - DNA, 15 bp, Homo sapiens
ttgctcttgcttctc

SEQ ID NO: 1172646 - DNA, 15 bp, Homo sapiens
tttgctcttgcttct

SEQ ID NO: 1172647 - DNA, 15 bp, Homo sapiens
gtttgctcttgcttc

SEQ ID NO: 1172648 - DNA, 15 bp, Homo sapiens
tgtttgctcttgctt

SEQ ID NO: 1172649 - DNA, 15 bp, Homo sapiens
ttgtttgctcttgct

SEQ ID NO: 1172650 - DNA, 15 bp, Homo sapiens
tttgtttgctcttgc

SEQ ID NO: 1172651 - DNA, 15 bp, Homo sapiens
atttgtttgctcttg

SEQ ID NO: 1172652 - DNA, 15 bp, Homo sapiens
aatttgtttgctctt

SEQ ID NO: 1172653 - DNA, 15 bp, Homo sapiens
ttttgaatttgtttg

SEQ ID NO: 1172654 - DNA, 15 bp, Homo sapiens
cttttgaatttgttt

SEQ ID NO: 1172655 - DNA, 15 bp, Homo sapiens
gcttttgaatttgtt

SEQ ID NO: 1172656 - DNA, 15 bp, Homo sapiens
agcttttgaatttgt

SEQ ID NO: 1172657 - DNA, 15 bp, Homo sapiens
tagcttttgaatttg

SEQ ID NO: 1172658 - DNA, 15 bp, Homo sapiens
ctagcttttgaattt

SEQ ID NO: 1172659 - DNA, 15 bp, Homo sapiens
gctagcttttgaatt

SEQ ID NO: 1172660 - DNA, 15 bp, Homo sapiens
tgctagcttttgaat

SEQ ID NO: 1172661 - DNA, 15 bp, Homo sapiens
ctgctagcttttgaa

SEQ ID NO: 1172662 - DNA, 15 bp, Homo sapiens
tctgctagcttttga

SEQ ID NO: 1172663 - DNA, 15 bp, Homo sapiens
ttctgctagcttttg

SEQ ID NO: 1172664 - DNA, 15 bp, Homo sapiens
cttctgctagctttt

SEQ ID NO: 1172665 - DNA, 15 bp, Homo sapiens
tcttctgctagcttt

SEQ ID NO: 1172666 - DNA, 15 bp, Homo sapiens
gtcttctgctagctt

SEQ ID NO: 1172667 - DNA, 15 bp, Homo sapiens
tgtcttctgctagct

SEQ ID NO: 1172668 - DNA, 15 bp, Homo sapiens
gtgtcttctgctagc

SEQ ID NO: 1172669 - DNA, 15 bp, Homo sapiens
cgtgtcttctgctag

SEQ ID NO: 1172670 - DNA, 15 bp, Homo sapiens
tcgtgtcttctgcta

SEQ ID NO: 1172671 - DNA, 15 bp, Homo sapiens
ttcgtgtcttctgct

SEQ ID NO: 1172672 - DNA, 15 bp, Homo sapiens
tttcgtgtcttctgc

SEQ ID NO: 1172673 - DNA, 15 bp, Homo sapiens
atttcgtgtcttctg

SEQ ID NO: 1172674 - DNA, 15 bp, Homo sapiens
tatttcgtgtcttct

SEQ ID NO: 1172675 - DNA, 15 bp, Homo sapiens
ttatttcgtgtcttc

SEQ ID NO: 1172676 - DNA, 15 bp, Homo sapiens
gttatttcgtgtctt

SEQ ID NO: 1172677 - DNA, 15 bp, Homo sapiens
agttatttcgtgtct

SEQ ID NO: 1172678 - DNA, 15 bp, Homo sapiens
tagttatttcgtgtc

SEQ ID NO: 1172679 - DNA, 15 bp, Homo sapiens
ttagttatttcgtgt

SEQ ID NO: 1172680 - DNA, 15 bp, Homo sapiens
cttagttatttcgtg

SEQ ID NO: 1172681 - DNA, 15 bp, Homo sapiens
tcttagttatttcgt

SEQ ID NO: 1172682 - DNA, 15 bp, Homo sapiens
atcttagttatttcg

SEQ ID NO: 1172683 - DNA, 15 bp, Homo sapiens
gatcttagttatttc

SEQ ID NO: 1172684 - DNA, 15 bp, Homo sapiens
tgatcttagttattt

SEQ ID NO: 1172685 - DNA, 15 bp, Homo sapiens
ctgatcttagttatt

SEQ ID NO: 1172686 - DNA, 15 bp, Homo sapiens
tctgatcttagttat

SEQ ID NO: 1172687 - DNA, 15 bp, Homo sapiens
ctctgatcttagtta

SEQ ID NO: 1172688 - DNA, 15 bp, Homo sapiens
gctctgatcttagtt

SEQ ID NO: 1172689 - DNA, 15 bp, Homo sapiens
tgctctgatcttagt

SEQ ID NO: 1172690 - DNA, 15 bp, Homo sapiens
ctgctctgatcttag

SEQ ID NO: 1172691 - DNA, 15 bp, Homo sapiens
tctgctctgatctta

SEQ ID NO: 1172692 - DNA, 15 bp, Homo sapiens
ttctgctctgatctt

SEQ ID NO: 1172693 - DNA, 15 bp, Homo sapiens
gttctgctctgatct

SEQ ID NO: 1172694 - DNA, 15 bp, Homo sapiens
agttctgctctgatc

SEQ ID NO: 1172695 - DNA, 15 bp, Homo sapiens
cagttctgctctgat

SEQ ID NO: 1172696 - DNA, 15 bp, Homo sapiens
tcagttctgctctga

SEQ ID NO: 1172697 - DNA, 15 bp, Homo sapiens
ttcagttctgctctg

SEQ ID NO: 1172698 - DNA, 15 bp, Homo sapiens
tttcagttctgctct

SEQ ID NO: 1172699 - DNA, 15 bp, Homo sapiens
ctttcagttctgctc

SEQ ID NO: 1172700 - DNA, 15 bp, Homo sapiens
tctttcagttctgct

SEQ ID NO: 1172701 - DNA, 15 bp, Homo sapiens
gtctttcagttctgc

SEQ ID NO: 1172702 - DNA, 15 bp, Homo sapiens
tgtctttcagttctg

SEQ ID NO: 1172703 - DNA, 15 bp, Homo sapiens
atgtctttcagttct

SEQ ID NO: 1172704 - DNA, 15 bp, Homo sapiens
tatgtctttcagttc

SEQ ID NO: 1172705 - DNA, 15 bp, Homo sapiens
ctatgtctttcagtt

SEQ ID NO: 1172706 - DNA, 15 bp, Homo sapiens
tctatgtctttcagt

SEQ ID NO: 1172707 - DNA, 15 bp, Homo sapiens
ctctatgtctttcag

SEQ ID NO: 1172708 - DNA, 15 bp, Homo sapiens
tctctatgtctttca

SEQ ID NO: 1172709 - DNA, 15 bp, Homo sapiens
gtctctatgtctttc

SEQ ID NO: 1172710 - DNA, 15 bp, Homo sapiens
tgtctctatgtcttt

SEQ ID NO: 1172711 - DNA, 15 bp, Homo sapiens
gtgtctctatgtctt

SEQ ID NO: 1172712 - DNA, 15 bp, Homo sapiens
cgtgtctctatgtct

SEQ ID NO: 1172713 - DNA, 15 bp, Homo sapiens
tcgtgtctctatgtc

SEQ ID NO: 1172714 - DNA, 15 bp, Homo sapiens
ttcgtgtctctatgt

SEQ ID NO: 1172715 - DNA, 15 bp, Homo sapiens
tttcgtgtctctatg

SEQ ID NO: 1172716 - DNA, 15 bp, Homo sapiens
ttttcgtgtctctat

SEQ ID NO: 1172717 - DNA, 15 bp, Homo sapiens
tttttcgtgtctcta

SEQ ID NO: 1172718 - DNA, 15 bp, Homo sapiens
gtttttcgtgtctct

SEQ ID NO: 1172719 - DNA, 15 bp, Homo sapiens
ggtttttcgtgtctc

SEQ ID NO: 1172720 - DNA, 15 bp, Homo sapiens
gggtttttcgtgtct

SEQ ID NO: 1172721 - DNA, 15 bp, Homo sapiens
tgggtttttcgtgtc

SEQ ID NO: 1172722 - DNA, 15 bp, Homo sapiens
atgggtttttcgtgt

SEQ ID NO: 1172723 - DNA, 15 bp, Homo sapiens
gatgggtttttcgtg

SEQ ID NO: 1172724 - DNA, 15 bp, Homo sapiens
tgatgggtttttcgt

SEQ ID NO: 1172725 - DNA, 15 bp, Homo sapiens
ttgatgggtttttcg

SEQ ID NO: 1172726 - DNA, 15 bp, Homo sapiens
tttgatgggtttttc

SEQ ID NO: 1172727 - DNA, 15 bp, Homo sapiens
ttttgatgggttttt

SEQ ID NO: 1172728 - DNA, 15 bp, Homo sapiens
tttttgatgggtttt

SEQ ID NO: 1172729 - DNA, 15 bp, Homo sapiens
ttttttgatgggttt

SEQ ID NO: 1172730 - DNA, 15 bp, Homo sapiens
tttttttgatgggtt

SEQ ID NO: 1172731 - DNA, 15 bp, Homo sapiens
atttttttgatgggt

SEQ ID NO: 1172732 - DNA, 15 bp, Homo sapiens
gatttttttgatggg

SEQ ID NO: 1172733 - DNA, 15 bp, Homo sapiens
tgatttttttgatgg

SEQ ID NO: 1172734 - DNA, 15 bp, Homo sapiens
ttgatttttttgatg

SEQ ID NO: 1172735 - DNA, 15 bp, Homo sapiens
attgatttttttgat

SEQ ID NO: 1172736 - DNA, 15 bp, Homo sapiens
cattgatttttttga

SEQ ID NO: 1172737 - DNA, 15 bp, Homo sapiens
tcattgatttttttg

SEQ ID NO: 1172738 - DNA, 15 bp, Homo sapiens
ttcattgattttttt

SEQ ID NO: 1172739 - DNA, 15 bp, Homo sapiens
attcattgatttttt

SEQ ID NO: 1172740 - DNA, 15 bp, Homo sapiens
gattcattgattttt

SEQ ID NO: 1172741 - DNA, 15 bp, Homo sapiens
ggattcattgatttt

SEQ ID NO: 1172742 - DNA, 15 bp, Homo sapiens
tggattcattgattt

SEQ ID NO: 1172743 - DNA, 15 bp, Homo sapiens
ctggattcattgatt

SEQ ID NO: 1172744 - DNA, 15 bp, Homo sapiens
cctggattcattgat

SEQ ID NO: 1172745 - DNA, 15 bp, Homo sapiens
tcctggattcattga

SEQ ID NO: 1172746 - DNA, 15 bp, Homo sapiens
ctcctggattcattg

SEQ ID NO: 1172747 - DNA, 15 bp, Homo sapiens
gctcctggattcatt

SEQ ID NO: 1172748 - DNA, 15 bp, Homo sapiens
agctcctggattcat

SEQ ID NO: 1172749 - DNA, 15 bp, Homo sapiens
cagctcctggattca

SEQ ID NO: 1172750 - DNA, 15 bp, Homo sapiens
ccagctcctggattc

SEQ ID NO: 1172751 - DNA, 15 bp, Homo sapiens
accagctcctggatt

SEQ ID NO: 1172752 - DNA, 15 bp, Homo sapiens
aaccagctcctggat

SEQ ID NO: 1172753 - DNA, 15 bp, Homo sapiens
aaaccagctcctgga

SEQ ID NO: 1172754 - DNA, 15 bp, Homo sapiens
aaaaccagctcctgg

SEQ ID NO: 1172755 - DNA, 15 bp, Homo sapiens
aaaaaccagctcctg

SEQ ID NO: 1172756 - DNA, 15 bp, Homo sapiens
aaaaaaccagctcct

SEQ ID NO: 1172757 - DNA, 15 bp, Homo sapiens
caaaaaaccagctcc

SEQ ID NO: 1172758 - DNA, 15 bp, Homo sapiens
tcaaaaaaccagctc

SEQ ID NO: 1172759 - DNA, 15 bp, Homo sapiens
ttcaaaaaaccagct

SEQ ID NO: 1172760 - DNA, 15 bp, Homo sapiens
tttcaaaaaaccagc

SEQ ID NO: 1172761 - DNA, 15 bp, Homo sapiens
ctttcaaaaaaccag

SEQ ID NO: 1172762 - DNA, 15 bp, Homo sapiens
tctttcaaaaaacca

SEQ ID NO: 1172763 - DNA, 15 bp, Homo sapiens
atctttcaaaaaacc

SEQ ID NO: 1172764 - DNA, 15 bp, Homo sapiens
aatctttcaaaaaac

SEQ ID NO: 1172765 - DNA, 15 bp, Homo sapiens
taatctttcaaaaaa

SEQ ID NO: 1172766 - DNA, 15 bp, Homo sapiens
ttaatctttcaaaaa

SEQ ID NO: 1172767 - DNA, 15 bp, Homo sapiens
gttaatctttcaaaa

SEQ ID NO: 1172768 - DNA, 15 bp, Homo sapiens
tgttaatctttcaaa

SEQ ID NO: 1172769 - DNA, 15 bp, Homo sapiens
ttgttaatctttcaa

SEQ ID NO: 1172770 - DNA, 15 bp, Homo sapiens
tttgttaatctttca

SEQ ID NO: 1172771 - DNA, 15 bp, Homo sapiens
ttttgttaatctttc

SEQ ID NO: 1172772 - DNA, 15 bp, Homo sapiens
attttgttaatcttt

SEQ ID NO: 1172773 - DNA, 15 bp, Homo sapiens
tattttgttaatctt

SEQ ID NO: 1172774 - DNA, 15 bp, Homo sapiens
ctattttgttaatct

SEQ ID NO: 1172775 - DNA, 15 bp, Homo sapiens
tctattttgttaatc

SEQ ID NO: 1172776 - DNA, 15 bp, Homo sapiens
atctattttgttaat

SEQ ID NO: 1172777 - DNA, 15 bp, Homo sapiens
tatctattttgttaa

SEQ ID NO: 1172778 - DNA, 15 bp, Homo sapiens
ctatctattttgtta

SEQ ID NO: 1172779 - DNA, 15 bp, Homo sapiens
tctatctattttgtt

SEQ ID NO: 1172780 - DNA, 15 bp, Homo sapiens
gtctatctattttgt

SEQ ID NO: 1172781 - DNA, 15 bp, Homo sapiens
agtctatctattttg

SEQ ID NO: 1172782 - DNA, 15 bp, Homo sapiens
cagtctatctatttt

SEQ ID NO: 1172783 - DNA, 15 bp, Homo sapiens
acagtctatctattt

SEQ ID NO: 1172784 - DNA, 15 bp, Homo sapiens
aacagtctatctatt

SEQ ID NO: 1172785 - DNA, 15 bp, Homo sapiens
taacagtctatctat

SEQ ID NO: 1172786 - DNA, 15 bp, Homo sapiens
ctaacagtctatcta

SEQ ID NO: 1172787 - DNA, 15 bp, Homo sapiens
gctaacagtctatct

SEQ ID NO: 1172788 - DNA, 15 bp, Homo sapiens
ggctaacagtctatc

SEQ ID NO: 1172789 - DNA, 15 bp, Homo sapiens
tggctaacagtctat

SEQ ID NO: 1172790 - DNA, 15 bp, Homo sapiens
ctggctaacagtcta

SEQ ID NO: 1172791 - DNA, 15 bp, Homo sapiens
tctggctaacagtct

SEQ ID NO: 1172792 - DNA, 15 bp, Homo sapiens
gtctggctaacagtc

SEQ ID NO: 1172793 - DNA, 15 bp, Homo sapiens
agtctggctaacagt

SEQ ID NO: 1172794 - DNA, 15 bp, Homo sapiens
tagtctggctaacag

SEQ ID NO: 1172795 - DNA, 15 bp, Homo sapiens
ttagtctggctaaca

SEQ ID NO: 1172796 - DNA, 15 bp, Homo sapiens
attagtctggctaac

SEQ ID NO: 1172797 - DNA, 15 bp, Homo sapiens
tattagtctggctaa

SEQ ID NO: 1172798 - DNA, 15 bp, Homo sapiens
ttattagtctggcta

SEQ ID NO: 1172799 - DNA, 15 bp, Homo sapiens
cttattagtctggct

SEQ ID NO: 1172800 - DNA, 15 bp, Homo sapiens
ccttattagtctggc

SEQ ID NO: 1172801 - DNA, 15 bp, Homo sapiens
tccttattagtctgg

SEQ ID NO: 1172802 - DNA, 15 bp, Homo sapiens
ttccttattagtctg

SEQ ID NO: 1172803 - DNA, 15 bp, Homo sapiens
cttccttattagtct

SEQ ID NO: 1172804 - DNA, 15 bp, Homo sapiens
tcttccttattagtc

SEQ ID NO: 1172805 - DNA, 15 bp, Homo sapiens
ttcttccttattagt

SEQ ID NO: 1172806 - DNA, 15 bp, Homo sapiens
tttcttccttattag

SEQ ID NO: 1172807 - DNA, 15 bp, Homo sapiens
ttttcttccttatta

SEQ ID NO: 1172808 - DNA, 15 bp, Homo sapiens
cttttcttccttatt

SEQ ID NO: 1172809 - DNA, 15 bp, Homo sapiens
tcttttcttccttat

SEQ ID NO: 1172810 - DNA, 15 bp, Homo sapiens
ctcttttcttcctta

SEQ ID NO: 1172811 - DNA, 15 bp, Homo sapiens
tctcttttcttcctt

SEQ ID NO: 1172812 - DNA, 15 bp, Homo sapiens
ctctcttttcttcct

SEQ ID NO: 1172813 - DNA, 15 bp, Homo sapiens
tctctcttttcttcc

SEQ ID NO: 1172814 - DNA, 15 bp, Homo sapiens
ttctctcttttcttc

SEQ ID NO: 1172815 - DNA, 15 bp, Homo sapiens
cttctctcttttctt

SEQ ID NO: 1172816 - DNA, 15 bp, Homo sapiens
tcttctctcttttct

SEQ ID NO: 1172817 - DNA, 15 bp, Homo sapiens
ttcttctctcttttc

SEQ ID NO: 1172818 - DNA, 15 bp, Homo sapiens
attcttctctctttt

SEQ ID NO: 1172819 - DNA, 15 bp, Homo sapiens
gattcttctctcttt

SEQ ID NO: 1172820 - DNA, 15 bp, Homo sapiens
tgattcttctctctt

SEQ ID NO: 1172821 - DNA, 15 bp, Homo sapiens
ttgattcttctctct

SEQ ID NO: 1172822 - DNA, 15 bp, Homo sapiens
tttgattcttctctc

SEQ ID NO: 1172823 - DNA, 15 bp, Homo sapiens
atttgattcttctct

SEQ ID NO: 1172824 - DNA, 15 bp, Homo sapiens
tatttgattcttctc

SEQ ID NO: 1172825 - DNA, 15 bp, Homo sapiens
ctatttgattcttct

SEQ ID NO: 1172826 - DNA, 15 bp, Homo sapiens
tctatttgattcttc

SEQ ID NO: 1172827 - DNA, 15 bp, Homo sapiens
gtctatttgattctt

SEQ ID NO: 1172828 - DNA, 15 bp, Homo sapiens
tgtctatttgattct

SEQ ID NO: 1172829 - DNA, 15 bp, Homo sapiens
gtgtctatttgattc

SEQ ID NO: 1172830 - DNA, 15 bp, Homo sapiens
tgtgtctatttgatt

SEQ ID NO: 1172831 - DNA, 15 bp, Homo sapiens
ttgtgtctatttgat

SEQ ID NO: 1172832 - DNA, 15 bp, Homo sapiens
attgtgtctatttga

SEQ ID NO: 1172833 - DNA, 15 bp, Homo sapiens
tattgtgtctatttg

SEQ ID NO: 1172834 - DNA, 15 bp, Homo sapiens
ttattgtgtctattt

SEQ ID NO: 1172835 - DNA, 15 bp, Homo sapiens
tttattgtgtctatt

SEQ ID NO: 1172836 - DNA, 15 bp, Homo sapiens
gtttattgtgtctat

SEQ ID NO: 1172837 - DNA, 15 bp, Homo sapiens
tgtttattgtgtcta

SEQ ID NO: 1172838 - DNA, 15 bp, Homo sapiens
ttgtttattgtgtct

SEQ ID NO: 1172839 - DNA, 15 bp, Homo sapiens
attgtttattgtgtc

SEQ ID NO: 1172840 - DNA, 15 bp, Homo sapiens
tattgtttattgtgt

SEQ ID NO: 1172841 - DNA, 15 bp, Homo sapiens
ttattgtttattgtg

SEQ ID NO: 1172842 - DNA, 15 bp, Homo sapiens
attattgtttattgt

SEQ ID NO: 1172843 - DNA, 15 bp, Homo sapiens
tattattgtttattg

SEQ ID NO: 1172844 - DNA, 15 bp, Homo sapiens
ttattattgtttatt

SEQ ID NO: 1172845 - DNA, 15 bp, Homo sapiens
tttattattgtttat

SEQ ID NO: 1172846 - DNA, 15 bp, Homo sapiens
ctttattattgttta

SEQ ID NO: 1172847 - DNA, 15 bp, Homo sapiens
cctttattattgttt

SEQ ID NO: 1172848 - DNA, 15 bp, Homo sapiens
ccctttattattgtt

SEQ ID NO: 1172849 - DNA, 15 bp, Homo sapiens
cccctttattattgt

SEQ ID NO: 1172850 - DNA, 15 bp, Homo sapiens
tcccctttattattg

SEQ ID NO: 1172851 - DNA, 15 bp, Homo sapiens
atcccctttattatt

SEQ ID NO: 1172852 - DNA, 15 bp, Homo sapiens
tatcccctttattat

SEQ ID NO: 1172853 - DNA, 15 bp, Homo sapiens
atatcccctttatta

SEQ ID NO: 1172854 - DNA, 15 bp, Homo sapiens
gatatcccctttatt

SEQ ID NO: 1172855 - DNA, 15 bp, Homo sapiens
tgatatcccctttat

SEQ ID NO: 1172856 - DNA, 15 bp, Homo sapiens
gtgatatccccttta

SEQ ID NO: 1172857 - DNA, 15 bp, Homo sapiens
ggtgatatccccttt

SEQ ID NO: 1172858 - DNA, 15 bp, Homo sapiens
tggtgatatcccctt

SEQ ID NO: 1172859 - DNA, 15 bp, Homo sapiens
gtggtgatatcccct

SEQ ID NO: 1172860 - DNA, 15 bp, Homo sapiens
agtggtgatatcccc

SEQ ID NO: 1172861 - DNA, 15 bp, Homo sapiens
cagtggtgatatccc

SEQ ID NO: 1172862 - DNA, 15 bp, Homo sapiens
tcagtggtgatatcc

SEQ ID NO: 1172863 - DNA, 15 bp, Homo sapiens
atcagtggtgatatc

SEQ ID NO: 1172864 - DNA, 15 bp, Homo sapiens
gatcagtggtgatat

SEQ ID NO: 1172865 - DNA, 15 bp, Homo sapiens
ggatcagtggtgata

SEQ ID NO: 1172866 - DNA, 15 bp, Homo sapiens
aggatcagtggtgat

SEQ ID NO: 1172867 - DNA, 15 bp, Homo sapiens
taggatcagtggtga

SEQ ID NO: 1172868 - DNA, 15 bp, Homo sapiens
gtaggatcagtggtg

SEQ ID NO: 1172869 - DNA, 15 bp, Homo sapiens
tgtaggatcagtggt

SEQ ID NO: 1172870 - DNA, 15 bp, Homo sapiens
ctgtaggatcagtgg

SEQ ID NO: 1172871 - DNA, 15 bp, Homo sapiens
tctgtaggatcagtg

SEQ ID NO: 1172872 - DNA, 15 bp, Homo sapiens
ttctgtaggatcagt

SEQ ID NO: 1172873 - DNA, 15 bp, Homo sapiens
tttctgtaggatcag

SEQ ID NO: 1172874 - DNA, 15 bp, Homo sapiens
atttctgtaggatca

SEQ ID NO: 1172875 - DNA, 15 bp, Homo sapiens
tatttctgtaggatc

SEQ ID NO: 1172876 - DNA, 15 bp, Homo sapiens
gtatttctgtaggat

SEQ ID NO: 1172877 - DNA, 15 bp, Homo sapiens
tgtatttctgtagga

SEQ ID NO: 1172878 - DNA, 15 bp, Homo sapiens
ttgtatttctgtagg

SEQ ID NO: 1172879 - DNA, 15 bp, Homo sapiens
tttgtatttctgtag

SEQ ID NO: 1172880 - DNA, 15 bp, Homo sapiens
gtttgtatttctgta

SEQ ID NO: 1172881 - DNA, 15 bp, Homo sapiens
agtttgtatttctgt

SEQ ID NO: 1172882 - DNA, 15 bp, Homo sapiens
tagtttgtatttctg

SEQ ID NO: 1172883 - DNA, 15 bp, Homo sapiens
gtagtttgtatttct

SEQ ID NO: 1172884 - DNA, 15 bp, Homo sapiens
ggtagtttgtatttc

SEQ ID NO: 1172885 - DNA, 15 bp, Homo sapiens
tggtagtttgtattt

SEQ ID NO: 1172886 - DNA, 15 bp, Homo sapiens
atggtagtttgtatt

SEQ ID NO: 1172887 - DNA, 15 bp, Homo sapiens
gatggtagtttgtat

SEQ ID NO: 1172888 - DNA, 15 bp, Homo sapiens
tgatggtagtttgta

SEQ ID NO: 1172889 - DNA, 15 bp, Homo sapiens
ctgatggtagtttgt

SEQ ID NO: 1172890 - DNA, 15 bp, Homo sapiens
tctgatggtagtttg

SEQ ID NO: 1172891 - DNA, 15 bp, Homo sapiens
atctgatggtagttt

SEQ ID NO: 1172892 - DNA, 15 bp, Homo sapiens
tatctgatggtagtt

SEQ ID NO: 1172893 - DNA, 15 bp, Homo sapiens
ttatctgatggtagt

SEQ ID NO: 1172894 - DNA, 15 bp, Homo sapiens
attatctgatggtag

SEQ ID NO: 1172895 - DNA, 15 bp, Homo sapiens
cattatctgatggta

SEQ ID NO: 1172896 - DNA, 15 bp, Homo sapiens
gcattatctgatggt

SEQ ID NO: 1172897 - DNA, 15 bp, Homo sapiens
agcattatctgatgg

SEQ ID NO: 1172898 - DNA, 15 bp, Homo sapiens
tagcattatctgatg

SEQ ID NO: 1172899 - DNA, 15 bp, Homo sapiens
atagcattatctgat

SEQ ID NO: 1172900 - DNA, 15 bp, Homo sapiens
tatagcattatctga

SEQ ID NO: 1172901 - DNA, 15 bp, Homo sapiens
ttatagcattatctg

SEQ ID NO: 1172902 - DNA, 15 bp, Homo sapiens
tttatagcattatct

SEQ ID NO: 1172903 - DNA, 15 bp, Homo sapiens
gtttatagcattatc

SEQ ID NO: 1172904 - DNA, 15 bp, Homo sapiens
tgtttatagcattat

SEQ ID NO: 1172905 - DNA, 15 bp, Homo sapiens
atgtttatagcatta

SEQ ID NO: 1172906 - DNA, 15 bp, Homo sapiens
gatgtttatagcatt

SEQ ID NO: 1172907 - DNA, 15 bp, Homo sapiens
agatgtttatagcat

SEQ ID NO: 1172908 - DNA, 15 bp, Homo sapiens
gagatgtttatagca

SEQ ID NO: 1172909 - DNA, 15 bp, Homo sapiens
agagatgtttatagc

SEQ ID NO: 1172910 - DNA, 15 bp, Homo sapiens
tagagatgtttatag

SEQ ID NO: 1172911 - DNA, 15 bp, Homo sapiens
atagagatgtttata

SEQ ID NO: 1172912 - DNA, 15 bp, Homo sapiens
catagagatgtttat

SEQ ID NO: 1172913 - DNA, 15 bp, Homo sapiens
gcatagagatgttta

SEQ ID NO: 1172914 - DNA, 15 bp, Homo sapiens
tgcatagagatgttt

SEQ ID NO: 1172915 - DNA, 15 bp, Homo sapiens
ttgcatagagatgtt

SEQ ID NO: 1172916 - DNA, 15 bp, Homo sapiens
tttgcatagagatgt

SEQ ID NO: 1172917 - DNA, 15 bp, Homo sapiens
gtttgcatagagatg

SEQ ID NO: 1172918 - DNA, 15 bp, Homo sapiens
tgtttgcatagagat

SEQ ID NO: 1172919 - DNA, 15 bp, Homo sapiens
ttgtttgcatagaga

SEQ ID NO: 1172920 - DNA, 15 bp, Homo sapiens
tttgtttgcatagag

SEQ ID NO: 1172921 - DNA, 15 bp, Homo sapiens
gtttgtttgcataga

SEQ ID NO: 1172922 - DNA, 15 bp, Homo sapiens
agtttgtttgcatag

SEQ ID NO: 1172923 - DNA, 15 bp, Homo sapiens
tagtttgtttgcata

SEQ ID NO: 1172924 - DNA, 15 bp, Homo sapiens
ctagtttgtttgcat

SEQ ID NO: 1172925 - DNA, 15 bp, Homo sapiens
tctagtttgtttgca

SEQ ID NO: 1172926 - DNA, 15 bp, Homo sapiens
ttctagtttgtttgc

SEQ ID NO: 1172927 - DNA, 15 bp, Homo sapiens
tttctagtttgtttg

SEQ ID NO: 1172928 - DNA, 15 bp, Homo sapiens
ttttctagtttgttt

SEQ ID NO: 1172929 - DNA, 15 bp, Homo sapiens
attttctagtttgtt

SEQ ID NO: 1172930 - DNA, 15 bp, Homo sapiens
gattttctagtttgt

SEQ ID NO: 1172931 - DNA, 15 bp, Homo sapiens
agattttctagtttg

SEQ ID NO: 1172932 - DNA, 15 bp, Homo sapiens
tagattttctagttt

SEQ ID NO: 1172933 - DNA, 15 bp, Homo sapiens
ctagattttctagtt

SEQ ID NO: 1172934 - DNA, 15 bp, Homo sapiens
tctagattttctagt

SEQ ID NO: 1172935 - DNA, 15 bp, Homo sapiens
ttctagattttctag

SEQ ID NO: 1172936 - DNA, 15 bp, Homo sapiens
cttctagattttcta

SEQ ID NO: 1172937 - DNA, 15 bp, Homo sapiens
tcttctagattttct

SEQ ID NO: 1172938 - DNA, 15 bp, Homo sapiens
ttcttctagattttc

SEQ ID NO: 1172939 - DNA, 15 bp, Homo sapiens
tttcttctagatttt

SEQ ID NO: 1172940 - DNA, 15 bp, Homo sapiens
atttcttctagattt

SEQ ID NO: 1172941 - DNA, 15 bp, Homo sapiens
catttcttctagatt

SEQ ID NO: 1172942 - DNA, 15 bp, Homo sapiens
ccatttcttctagat

SEQ ID NO: 1172943 - DNA, 15 bp, Homo sapiens
tccatttcttctaga

SEQ ID NO: 1172944 - DNA, 15 bp, Homo sapiens
atccatttcttctag

SEQ ID NO: 1172945 - DNA, 15 bp, Homo sapiens
tatccatttcttcta

SEQ ID NO: 1172946 - DNA, 15 bp, Homo sapiens
ttatccatttcttct

SEQ ID NO: 1172947 - DNA, 15 bp, Homo sapiens
tttatccatttcttc

SEQ ID NO: 1172948 - DNA, 15 bp, Homo sapiens
atttatccatttctt

SEQ ID NO: 1172949 - DNA, 15 bp, Homo sapiens
aatttatccatttct

SEQ ID NO: 1172950 - DNA, 15 bp, Homo sapiens
caatttatccatttc

SEQ ID NO: 1172951 - DNA, 15 bp, Homo sapiens
gcaatttatccattt

SEQ ID NO: 1172952 - DNA, 15 bp, Homo sapiens
agcaatttatccatt

SEQ ID NO: 1172953 - DNA, 15 bp, Homo sapiens
cagcaatttatccat

SEQ ID NO: 1172954 - DNA, 15 bp, Homo sapiens
ccagcaatttatcca

SEQ ID NO: 1172955 - DNA, 15 bp, Homo sapiens
tccagcaatttatcc

SEQ ID NO: 1172956 - DNA, 15 bp, Homo sapiens
gtccagcaatttatc

SEQ ID NO: 1172957 - DNA, 15 bp, Homo sapiens
tgtccagcaatttat

SEQ ID NO: 1172958 - DNA, 15 bp, Homo sapiens
gtgtccagcaattta

SEQ ID NO: 1172959 - DNA, 15 bp, Homo sapiens
tgtgtccagcaattt

SEQ ID NO: 1172960 - DNA, 15 bp, Homo sapiens
atgtgtccagcaatt

SEQ ID NO: 1172961 - DNA, 15 bp, Homo sapiens
tatgtgtccagcaat

SEQ ID NO: 1172962 - DNA, 15 bp, Homo sapiens
gtatgtgtccagcaa

SEQ ID NO: 1172963 - DNA, 15 bp, Homo sapiens
tgtatgtgtccagca

SEQ ID NO: 1172964 - DNA, 15 bp, Homo sapiens
gtgtatgtgtccagc

SEQ ID NO: 1172965 - DNA, 15 bp, Homo sapiens
ggtgtatgtgtccag

SEQ ID NO: 1172966 - DNA, 15 bp, Homo sapiens
gggtgtatgtgtcca

SEQ ID NO: 1172967 - DNA, 15 bp, Homo sapiens
agggtgtatgtgtcc

SEQ ID NO: 1172968 - DNA, 15 bp, Homo sapiens
cagggtgtatgtgtc

SEQ ID NO: 1172969 - DNA, 15 bp, Homo sapiens
gcagggtgtatgtgt

SEQ ID NO: 1172970 - DNA, 15 bp, Homo sapiens
ggcagggtgtatgtg

SEQ ID NO: 1172971 - DNA, 15 bp, Homo sapiens
tggcagggtgtatgt

SEQ ID NO: 1172972 - DNA, 15 bp, Homo sapiens
ttggcagggtgtatg

SEQ ID NO: 1172973 - DNA, 15 bp, Homo sapiens
cttggcagggtgtat

SEQ ID NO: 1172974 - DNA, 15 bp, Homo sapiens
tcttggcagggtgta

SEQ ID NO: 1172975 - DNA, 15 bp, Homo sapiens
gtcttggcagggtgt

SEQ ID NO: 1172976 - DNA, 15 bp, Homo sapiens
agtcttggcagggtg

SEQ ID NO: 1172977 - DNA, 15 bp, Homo sapiens
tagtcttggcagggt

SEQ ID NO: 1172978 - DNA, 15 bp, Homo sapiens
ttagtcttggcaggg

SEQ ID NO: 1172979 - DNA, 15 bp, Homo sapiens
tttagtcttggcagg

SEQ ID NO: 1172980 - DNA, 15 bp, Homo sapiens
gtttagtcttggcag

SEQ ID NO: 1172981 - DNA, 15 bp, Homo sapiens
ggtttagtcttggca

SEQ ID NO: 1172982 - DNA, 15 bp, Homo sapiens
tggtttagtcttggc

SEQ ID NO: 1172983 - DNA, 15 bp, Homo sapiens
ctggtttagtcttgg

SEQ ID NO: 1172984 - DNA, 15 bp, Homo sapiens
cctggtttagtcttg

SEQ ID NO: 1172985 - DNA, 15 bp, Homo sapiens
tcctggtttagtctt

SEQ ID NO: 1172986 - DNA, 15 bp, Homo sapiens
ttcctggtttagtct

SEQ ID NO: 1172987 - DNA, 15 bp, Homo sapiens
cttcctggtttagtc

SEQ ID NO: 1172988 - DNA, 15 bp, Homo sapiens
tcttcctggtttagt

SEQ ID NO: 1172989 - DNA, 15 bp, Homo sapiens
ttcttcctggtttag

SEQ ID NO: 1172990 - DNA, 15 bp, Homo sapiens
cttcttcctggttta

SEQ ID NO: 1172991 - DNA, 15 bp, Homo sapiens
acttcttcctggttt

SEQ ID NO: 1172992 - DNA, 15 bp, Homo sapiens
gacttcttcctggtt

SEQ ID NO: 1172993 - DNA, 15 bp, Homo sapiens
cgacttcttcctggt

SEQ ID NO: 1172994 - DNA, 15 bp, Homo sapiens
tcgacttcttcctgg

SEQ ID NO: 1172995 - DNA, 15 bp, Homo sapiens
ttcgacttcttcctg

SEQ ID NO: 1172996 - DNA, 15 bp, Homo sapiens
attcgacttcttcct

SEQ ID NO: 1172997 - DNA, 15 bp, Homo sapiens
gattcgacttcttcc

SEQ ID NO: 1172998 - DNA, 15 bp, Homo sapiens
ggattcgacttcttc

SEQ ID NO: 1172999 - DNA, 15 bp, Homo sapiens
gggattcgacttctt

SEQ ID NO: 1173000 - DNA, 15 bp, Homo sapiens
agggattcgacttct

SEQ ID NO: 1173001 - DNA, 15 bp, Homo sapiens
cagggattcgacttc

SEQ ID NO: 1173002 - DNA, 15 bp, Homo sapiens
tcagggattcgactt

SEQ ID NO: 1173003 - DNA, 15 bp, Homo sapiens
ttcagggattcgact

SEQ ID NO: 1173004 - DNA, 15 bp, Homo sapiens
attcagggattcgac

SEQ ID NO: 1173005 - DNA, 15 bp, Homo sapiens
tattcagggattcga

SEQ ID NO: 1173006 - DNA, 15 bp, Homo sapiens
ttattcagggattcg

SEQ ID NO: 1173007 - DNA, 15 bp, Homo sapiens
tttattcagggattc

SEQ ID NO: 1173008 - DNA, 15 bp, Homo sapiens
gtttattcagggatt

SEQ ID NO: 1173009 - DNA, 15 bp, Homo sapiens
ggtttattcagggat

SEQ ID NO: 1173010 - DNA, 15 bp, Homo sapiens
tggtttattcaggga

SEQ ID NO: 1173011 - DNA, 15 bp, Homo sapiens
ttggtttattcaggg

SEQ ID NO: 1173012 - DNA, 15 bp, Homo sapiens
attggtttattcagg

SEQ ID NO: 1173013 - DNA, 15 bp, Homo sapiens
tattggtttattcag

SEQ ID NO: 1173014 - DNA, 15 bp, Homo sapiens
ttattggtttattca

SEQ ID NO: 1173015 - DNA, 15 bp, Homo sapiens
gttattggtttattc

SEQ ID NO: 1173016 - DNA, 15 bp, Homo sapiens
tgttattggtttatt

SEQ ID NO: 1173017 - DNA, 15 bp, Homo sapiens
ttgttattggtttat

SEQ ID NO: 1173018 - DNA, 15 bp, Homo sapiens
cttgttattggttta

SEQ ID NO: 1173019 - DNA, 15 bp, Homo sapiens
acttgttattggttt

SEQ ID NO: 1173020 - DNA, 15 bp, Homo sapiens
tacttgttattggtt

SEQ ID NO: 1173021 - DNA, 15 bp, Homo sapiens
gtacttgttattggt

SEQ ID NO: 1173022 - DNA, 15 bp, Homo sapiens
agtacttgttattgg

SEQ ID NO: 1173023 - DNA, 15 bp, Homo sapiens
cagtacttgttattg

SEQ ID NO: 1173024 - DNA, 15 bp, Homo sapiens
tcagtacttgttatt

SEQ ID NO: 1173025 - DNA, 15 bp, Homo sapiens
ttcagtacttgttat

SEQ ID NO: 1173026 - DNA, 15 bp, Homo sapiens
tttcagtacttgtta

SEQ ID NO: 1173027 - DNA, 15 bp, Homo sapiens
atttcagtacttgtt

SEQ ID NO: 1173028 - DNA, 15 bp, Homo sapiens
aatttcagtacttgt

SEQ ID NO: 1173029 - DNA, 15 bp, Homo sapiens
caatttcagtacttg

SEQ ID NO: 1173030 - DNA, 15 bp, Homo sapiens
tcaatttcagtactt

SEQ ID NO: 1173031 - DNA, 15 bp, Homo sapiens
ctcaatttcagtact

SEQ ID NO: 1173032 - DNA, 15 bp, Homo sapiens
cctcaatttcagtac

SEQ ID NO: 1173033 - DNA, 15 bp, Homo sapiens
gcctcaatttcagta

SEQ ID NO: 1173034 - DNA, 15 bp, Homo sapiens
tgcctcaatttcagt

SEQ ID NO: 1173035 - DNA, 15 bp, Homo sapiens
ctgcctcaatttcag

SEQ ID NO: 1173036 - DNA, 15 bp, Homo sapiens
actgcctcaatttca

SEQ ID NO: 1173037 - DNA, 15 bp, Homo sapiens
tactgcctcaatttc

SEQ ID NO: 1173038 - DNA, 15 bp, Homo sapiens
ttactgcctcaattt

SEQ ID NO: 1173039 - DNA, 15 bp, Homo sapiens
attactgcctcaatt

SEQ ID NO: 1173040 - DNA, 15 bp, Homo sapiens
aattactgcctcaat

SEQ ID NO: 1173041 - DNA, 15 bp, Homo sapiens
taattactgcctcaa

SEQ ID NO: 1173042 - DNA, 15 bp, Homo sapiens
ttaattactgcctca

SEQ ID NO: 1173043 - DNA, 15 bp, Homo sapiens
attaattactgcctc

SEQ ID NO: 1173044 - DNA, 15 bp, Homo sapiens
tattaattactgcct

SEQ ID NO: 1173045 - DNA, 15 bp, Homo sapiens
ctattaattactgcc

SEQ ID NO: 1173046 - DNA, 15 bp, Homo sapiens
gctattaattactgc

SEQ ID NO: 1173047 - DNA, 15 bp, Homo sapiens
ggctattaattactg

SEQ ID NO: 1173048 - DNA, 15 bp, Homo sapiens
aggctattaattact

SEQ ID NO: 1173049 - DNA, 15 bp, Homo sapiens
taggctattaattac

SEQ ID NO: 1173050 - DNA, 15 bp, Homo sapiens
gtaggctattaatta

SEQ ID NO: 1173051 - DNA, 15 bp, Homo sapiens
ggtaggctattaatt

SEQ ID NO: 1173052 - DNA, 15 bp, Homo sapiens
tggtaggctattaat

SEQ ID NO: 1173053 - DNA, 15 bp, Homo sapiens
ttggtaggctattaa

SEQ ID NO: 1173054 - DNA, 15 bp, Homo sapiens
gttggtaggctatta

SEQ ID NO: 1173055 - DNA, 15 bp, Homo sapiens
agttggtaggctatt

SEQ ID NO: 1173056 - DNA, 15 bp, Homo sapiens
tagttggtaggctat

SEQ ID NO: 1173057 - DNA, 15 bp, Homo sapiens
ttagttggtaggcta

SEQ ID NO: 1173058 - DNA, 15 bp, Homo sapiens
tttagttggtaggct

SEQ ID NO: 1173059 - DNA, 15 bp, Homo sapiens
ttttagttggtaggc

SEQ ID NO: 1173060 - DNA, 15 bp, Homo sapiens
tttttagttggtagg

SEQ ID NO: 1173061 - DNA, 15 bp, Homo sapiens
ttttttagttggtag

SEQ ID NO: 1173062 - DNA, 15 bp, Homo sapiens
tttttttagttggta

SEQ ID NO: 1173063 - DNA, 15 bp, Homo sapiens
atttttttagttggt

SEQ ID NO: 1173064 - DNA, 15 bp, Homo sapiens
gatttttttagttgg

SEQ ID NO: 1173065 - DNA, 15 bp, Homo sapiens
agatttttttagttg

SEQ ID NO: 1173066 - DNA, 15 bp, Homo sapiens
gagatttttttagtt

SEQ ID NO: 1173067 - DNA, 15 bp, Homo sapiens
tgagatttttttagt

SEQ ID NO: 1173068 - DNA, 15 bp, Homo sapiens
ctgagatttttttag

SEQ ID NO: 1173069 - DNA, 15 bp, Homo sapiens
cctgagattttttta

SEQ ID NO: 1173070 - DNA, 15 bp, Homo sapiens
tcctgagattttttt

SEQ ID NO: 1173071 - DNA, 15 bp, Homo sapiens
gtcctgagatttttt

SEQ ID NO: 1173072 - DNA, 15 bp, Homo sapiens
ggtcctgagattttt

SEQ ID NO: 1173073 - DNA, 15 bp, Homo sapiens
tggtcctgagatttt

SEQ ID NO: 1173074 - DNA, 15 bp, Homo sapiens
ctggtcctgagattt

SEQ ID NO: 1173075 - DNA, 15 bp, Homo sapiens
tctggtcctgagatt

SEQ ID NO: 1173076 - DNA, 15 bp, Homo sapiens
atctggtcctgagat

SEQ ID NO: 1173077 - DNA, 15 bp, Homo sapiens
catctggtcctgaga

SEQ ID NO: 1173078 - DNA, 15 bp, Homo sapiens
ccatctggtcctgag

SEQ ID NO: 1173079 - DNA, 15 bp, Homo sapiens
tccatctggtcctga

SEQ ID NO: 1173080 - DNA, 15 bp, Homo sapiens
atccatctggtcctg

SEQ ID NO: 1173081 - DNA, 15 bp, Homo sapiens
aatccatctggtcct

SEQ ID NO: 1173082 - DNA, 15 bp, Homo sapiens
gaatccatctggtcc

SEQ ID NO: 1173083 - DNA, 15 bp, Homo sapiens
tgaatccatctggtc

SEQ ID NO: 1173084 - DNA, 15 bp, Homo sapiens
gtgaatccatctggt

SEQ ID NO: 1173085 - DNA, 15 bp, Homo sapiens
tgtgaatccatctgg

SEQ ID NO: 1173086 - DNA, 15 bp, Homo sapiens
ctgtgaatccatctg

SEQ ID NO: 1173087 - DNA, 15 bp, Homo sapiens
gctgtgaatccatct

SEQ ID NO: 1173088 - DNA, 15 bp, Homo sapiens
ggctgtgaatccatc

SEQ ID NO: 1173089 - DNA, 15 bp, Homo sapiens
tggctgtgaatccat

SEQ ID NO: 1173090 - DNA, 15 bp, Homo sapiens
ttggctgtgaatcca

SEQ ID NO: 1173091 - DNA, 15 bp, Homo sapiens
tttggctgtgaatcc

SEQ ID NO: 1173092 - DNA, 15 bp, Homo sapiens
atttggctgtgaatc

SEQ ID NO: 1173093 - DNA, 15 bp, Homo sapiens
aatttggctgtgaat

SEQ ID NO: 1173094 - DNA, 15 bp, Homo sapiens
gaatttggctgtgaa

SEQ ID NO: 1173095 - DNA, 15 bp, Homo sapiens
agaatttggctgtga

SEQ ID NO: 1173096 - DNA, 15 bp, Homo sapiens
aagaatttggctgtg

SEQ ID NO: 1173097 - DNA, 15 bp, Homo sapiens
gaagaatttggctgt

SEQ ID NO: 1173098 - DNA, 15 bp, Homo sapiens
ggaagaatttggctg

SEQ ID NO: 1173099 - DNA, 15 bp, Homo sapiens
tggaagaatttggct

SEQ ID NO: 1173100 - DNA, 15 bp, Homo sapiens
ctggaagaatttggc

SEQ ID NO: 1173101 - DNA, 15 bp, Homo sapiens
tctggaagaatttgg

SEQ ID NO: 1173102 - DNA, 15 bp, Homo sapiens
ctctggaagaatttg

SEQ ID NO: 1173103 - DNA, 15 bp, Homo sapiens
cctctggaagaattt

SEQ ID NO: 1173104 - DNA, 15 bp, Homo sapiens
acctctggaagaatt

SEQ ID NO: 1173105 - DNA, 15 bp, Homo sapiens
tacctctggaagaat

SEQ ID NO: 1173106 - DNA, 15 bp, Homo sapiens
gtacctctggaagaa

SEQ ID NO: 1173107 - DNA, 15 bp, Homo sapiens
tgtacctctggaaga

SEQ ID NO: 1173108 - DNA, 15 bp, Homo sapiens
ttgtacctctggaag

SEQ ID NO: 1173109 - DNA, 15 bp, Homo sapiens
tttgtacctctggaa

SEQ ID NO: 1173110 - DNA, 15 bp, Homo sapiens
ctttgtacctctgga

SEQ ID NO: 1173111 - DNA, 15 bp, Homo sapiens
tctttgtacctctgg

SEQ ID NO: 1173112 - DNA, 15 bp, Homo sapiens
ctctttgtacctctg

SEQ ID NO: 1173113 - DNA, 15 bp, Homo sapiens
cctctttgtacctct

SEQ ID NO: 1173114 - DNA, 15 bp, Homo sapiens
tcctctttgtacctc

SEQ ID NO: 1173115 - DNA, 15 bp, Homo sapiens
ctcctctttgtacct

SEQ ID NO: 1173116 - DNA, 15 bp, Homo sapiens
gctcctctttgtacc

SEQ ID NO: 1173117 - DNA, 15 bp, Homo sapiens
agctcctctttgtac

SEQ ID NO: 1173118 - DNA, 15 bp, Homo sapiens
cagctcctctttgta

SEQ ID NO: 1173119 - DNA, 15 bp, Homo sapiens
ccagctcctctttgt

SEQ ID NO: 1173120 - DNA, 15 bp, Homo sapiens
accagctcctctttg

SEQ ID NO: 1173121 - DNA, 15 bp, Homo sapiens
taccagctcctcttt

SEQ ID NO: 1173122 - DNA, 15 bp, Homo sapiens
gtaccagctcctctt

SEQ ID NO: 1173123 - DNA, 15 bp, Homo sapiens
ggtaccagctcctct

SEQ ID NO: 1173124 - DNA, 15 bp, Homo sapiens
tggtaccagctcctc

SEQ ID NO: 1173125 - DNA, 15 bp, Homo sapiens
atggtaccagctcct

SEQ ID NO: 1173126 - DNA, 15 bp, Homo sapiens
aatggtaccagctcc

SEQ ID NO: 1173127 - DNA, 15 bp, Homo sapiens
gaatggtaccagctc

SEQ ID NO: 1173128 - DNA, 15 bp, Homo sapiens
ggaatggtaccagct

SEQ ID NO: 1173129 - DNA, 15 bp, Homo sapiens
aggaatggtaccagc

SEQ ID NO: 1173130 - DNA, 15 bp, Homo sapiens
aaggaatggtaccag

SEQ ID NO: 1173131 - DNA, 15 bp, Homo sapiens
gaaggaatggtacca

SEQ ID NO: 1173132 - DNA, 15 bp, Homo sapiens
agaaggaatggtacc

SEQ ID NO: 1173133 - DNA, 15 bp, Homo sapiens
cagaaggaatggtac

SEQ ID NO: 1173134 - DNA, 15 bp, Homo sapiens
tcagaaggaatggta

SEQ ID NO: 1173135 - DNA, 15 bp, Homo sapiens
ttcagaaggaatggt

SEQ ID NO: 1173136 - DNA, 15 bp, Homo sapiens
tttcagaaggaatgg

SEQ ID NO: 1173137 - DNA, 15 bp, Homo sapiens
gtttcagaaggaatg

SEQ ID NO: 1173138 - DNA, 15 bp, Homo sapiens
agtttcagaaggaat

SEQ ID NO: 1173139 - DNA, 15 bp, Homo sapiens
tagtttcagaaggaa

SEQ ID NO: 1173140 - DNA, 15 bp, Homo sapiens
atagtttcagaagga

SEQ ID NO: 1173141 - DNA, 15 bp, Homo sapiens
tatagtttcagaagg

SEQ ID NO: 1173142 - DNA, 15 bp, Homo sapiens
gtatagtttcagaag

SEQ ID NO: 1173143 - DNA, 15 bp, Homo sapiens
ggtatagtttcagaa

SEQ ID NO: 1173144 - DNA, 15 bp, Homo sapiens
tggtatagtttcaga

SEQ ID NO: 1173145 - DNA, 15 bp, Homo sapiens
ttggtatagtttcag

SEQ ID NO: 1173146 - DNA, 15 bp, Homo sapiens
tttggtatagtttca

SEQ ID NO: 1173147 - DNA, 15 bp, Homo sapiens
gtttggtatagtttc

SEQ ID NO: 1173148 - DNA, 15 bp, Homo sapiens
tgtttggtatagttt

SEQ ID NO: 1173149 - DNA, 15 bp, Homo sapiens
ttgtttggtatagtt

SEQ ID NO: 1173150 - DNA, 15 bp, Homo sapiens
cttgtttggtatagt

SEQ ID NO: 1173151 - DNA, 15 bp, Homo sapiens
tcttgtttggtatag

SEQ ID NO: 1173152 - DNA, 15 bp, Homo sapiens
ctcttgtttggtata

SEQ ID NO: 1173153 - DNA, 15 bp, Homo sapiens
tctcttgtttggtat

SEQ ID NO: 1173154 - DNA, 15 bp, Homo sapiens
ttctcttgtttggta

SEQ ID NO: 1173155 - DNA, 15 bp, Homo sapiens
tttctcttgtttggt

SEQ ID NO: 1173156 - DNA, 15 bp, Homo sapiens
ttttctcttgtttgg

SEQ ID NO: 1173157 - DNA, 15 bp, Homo sapiens
tttttctcttgtttg

SEQ ID NO: 1173158 - DNA, 15 bp, Homo sapiens
ctttttctcttgttt

SEQ ID NO: 1173159 - DNA, 15 bp, Homo sapiens
tctttttctcttgtt

SEQ ID NO: 1173160 - DNA, 15 bp, Homo sapiens
ctctttttctcttgt

SEQ ID NO: 1173161 - DNA, 15 bp, Homo sapiens
cctctttttctcttg

SEQ ID NO: 1173162 - DNA, 15 bp, Homo sapiens
ccctctttttctctt

SEQ ID NO: 1173163 - DNA, 15 bp, Homo sapiens
tccctctttttctct

SEQ ID NO: 1173164 - DNA, 15 bp, Homo sapiens
gtccctctttttctc

SEQ ID NO: 1173165 - DNA, 15 bp, Homo sapiens
agtccctctttttct

SEQ ID NO: 1173166 - DNA, 15 bp, Homo sapiens
gagtccctctttttc

SEQ ID NO: 1173167 - DNA, 15 bp, Homo sapiens
ggagtccctcttttt

SEQ ID NO: 1173168 - DNA, 15 bp, Homo sapiens
aggagtccctctttt

SEQ ID NO: 1173169 - DNA, 15 bp, Homo sapiens
gaggagtccctcttt

SEQ ID NO: 1173170 - DNA, 15 bp, Homo sapiens
ggaggagtccctctt

SEQ ID NO: 1173171 - DNA, 15 bp, Homo sapiens
gggaggagtccctct

SEQ ID NO: 1173172 - DNA, 15 bp, Homo sapiens
agggaggagtccctc

SEQ ID NO: 1173173 - DNA, 15 bp, Homo sapiens
tagggaggagtccct

SEQ ID NO: 1173174 - DNA, 15 bp, Homo sapiens
ttagggaggagtccc

SEQ ID NO: 1173175 - DNA, 15 bp, Homo sapiens
gttagggaggagtcc

SEQ ID NO: 1173176 - DNA, 15 bp, Homo sapiens
agttagggaggagtc

SEQ ID NO: 1173177 - DNA, 15 bp, Homo sapiens
gagttagggaggagt

SEQ ID NO: 1173178 - DNA, 15 bp, Homo sapiens
tgagttagggaggag

SEQ ID NO: 1173179 - DNA, 15 bp, Homo sapiens
atgagttagggagga

SEQ ID NO: 1173180 - DNA, 15 bp, Homo sapiens
aatgagttagggagg

SEQ ID NO: 1173181 - DNA, 15 bp, Homo sapiens
aaatgagttagggag

SEQ ID NO: 1173182 - DNA, 15 bp, Homo sapiens
aaaatgagttaggga

SEQ ID NO: 1173183 - DNA, 15 bp, Homo sapiens
taaaatgagttaggg

SEQ ID NO: 1173184 - DNA, 15 bp, Homo sapiens
ataaaatgagttagg

SEQ ID NO: 1173185 - DNA, 15 bp, Homo sapiens
cataaaatgagttag

SEQ ID NO: 1173186 - DNA, 15 bp, Homo sapiens
tcataaaatgagtta

SEQ ID NO: 1173187 - DNA, 15 bp, Homo sapiens
ttcataaaatgagtt

SEQ ID NO: 1173188 - DNA, 15 bp, Homo sapiens
cttcataaaatgagt

SEQ ID NO: 1173189 - DNA, 15 bp, Homo sapiens
gcttcataaaatgag

SEQ ID NO: 1173190 - DNA, 15 bp, Homo sapiens
ggcttcataaaatga

SEQ ID NO: 1173191 - DNA, 15 bp, Homo sapiens
tggcttcataaaatg

SEQ ID NO: 1173192 - DNA, 15 bp, Homo sapiens
ctggcttcataaaat

SEQ ID NO: 1173193 - DNA, 15 bp, Homo sapiens
gctggcttcataaaa

SEQ ID NO: 1173194 - DNA, 15 bp, Homo sapiens
tgctggcttcataaa

SEQ ID NO: 1173195 - DNA, 15 bp, Homo sapiens
atgctggcttcataa

SEQ ID NO: 1173196 - DNA, 15 bp, Homo sapiens
gatgctggcttcata

SEQ ID NO: 1173197 - DNA, 15 bp, Homo sapiens
tgatgctggcttcat

SEQ ID NO: 1173198 - DNA, 15 bp, Homo sapiens
atgatgctggcttca

SEQ ID NO: 1173199 - DNA, 15 bp, Homo sapiens
aatgatgctggcttc

SEQ ID NO: 1173200 - DNA, 15 bp, Homo sapiens
gaatgatgctggctt

SEQ ID NO: 1173201 - DNA, 15 bp, Homo sapiens
agaatgatgctggct

SEQ ID NO: 1173202 - DNA, 15 bp, Homo sapiens
cagaatgatgctggc

SEQ ID NO: 1173203 - DNA, 15 bp, Homo sapiens
tcagaatgatgctgg

SEQ ID NO: 1173204 - DNA, 15 bp, Homo sapiens
atcagaatgatgctg

SEQ ID NO: 1173205 - DNA, 15 bp, Homo sapiens
tatcagaatgatgct

SEQ ID NO: 1173206 - DNA, 15 bp, Homo sapiens
gtatcagaatgatgc

SEQ ID NO: 1173207 - DNA, 15 bp, Homo sapiens
ggtatcagaatgatg

SEQ ID NO: 1173208 - DNA, 15 bp, Homo sapiens
tggtatcagaatgat

SEQ ID NO: 1173209 - DNA, 15 bp, Homo sapiens
ttggtatcagaatga

SEQ ID NO: 1173210 - DNA, 15 bp, Homo sapiens
tttggtatcagaatg

SEQ ID NO: 1173211 - DNA, 15 bp, Homo sapiens
ttttggtatcagaat

SEQ ID NO: 1173212 - DNA, 15 bp, Homo sapiens
gttttggtatcagaa

SEQ ID NO: 1173213 - DNA, 15 bp, Homo sapiens
ggttttggtatcaga

SEQ ID NO: 1173214 - DNA, 15 bp, Homo sapiens
aggttttggtatcag

SEQ ID NO: 1173215 - DNA, 15 bp, Homo sapiens
caggttttggtatca

SEQ ID NO: 1173216 - DNA, 15 bp, Homo sapiens
ccaggttttggtatc

SEQ ID NO: 1173217 - DNA, 15 bp, Homo sapiens
gccaggttttggtat

SEQ ID NO: 1173218 - DNA, 15 bp, Homo sapiens
tgccaggttttggta

SEQ ID NO: 1173219 - DNA, 15 bp, Homo sapiens
gtgccaggttttggt

SEQ ID NO: 1173220 - DNA, 15 bp, Homo sapiens
tgtgccaggttttgg

SEQ ID NO: 1173221 - DNA, 15 bp, Homo sapiens
ctgtgccaggttttg

SEQ ID NO: 1173222 - DNA, 15 bp, Homo sapiens
tctgtgccaggtttt

SEQ ID NO: 1173223 - DNA, 15 bp, Homo sapiens
gtctgtgccaggttt

SEQ ID NO: 1173224 - DNA, 15 bp, Homo sapiens
tgtctgtgccaggtt

SEQ ID NO: 1173225 - DNA, 15 bp, Homo sapiens
gtgtctgtgccaggt

SEQ ID NO: 1173226 - DNA, 15 bp, Homo sapiens
tgtgtctgtgccagg

SEQ ID NO: 1173227 - DNA, 15 bp, Homo sapiens
ttgtgtctgtgccag

SEQ ID NO: 1173228 - DNA, 15 bp, Homo sapiens
gttgtgtctgtgcca

SEQ ID NO: 1173229 - DNA, 15 bp, Homo sapiens
tgttgtgtctgtgcc

SEQ ID NO: 1173230 - DNA, 15 bp, Homo sapiens
ttgttgtgtctgtgc

SEQ ID NO: 1173231 - DNA, 15 bp, Homo sapiens
tttgttgtgtctgtg

SEQ ID NO: 1173232 - DNA, 15 bp, Homo sapiens
ttttgttgtgtctgt

SEQ ID NO: 1173233 - DNA, 15 bp, Homo sapiens
tttttgttgtgtctg

SEQ ID NO: 1173234 - DNA, 15 bp, Homo sapiens
ttttttgttgtgtct

SEQ ID NO: 1173235 - DNA, 15 bp, Homo sapiens
tttttttgttgtgtc

SEQ ID NO: 1173236 - DNA, 15 bp, Homo sapiens
ctttttttgttgtgt

SEQ ID NO: 1173237 - DNA, 15 bp, Homo sapiens
tctttttttgttgtg

SEQ ID NO: 1173238 - DNA, 15 bp, Homo sapiens
ttctttttttgttgt

SEQ ID NO: 1173239 - DNA, 15 bp, Homo sapiens
tttctttttttgttg

SEQ ID NO: 1173240 - DNA, 15 bp, Homo sapiens
ttttctttttttgtt

SEQ ID NO: 1173241 - DNA, 15 bp, Homo sapiens
attttctttttttgt

SEQ ID NO: 1173242 - DNA, 15 bp, Homo sapiens
aattttctttttttg

SEQ ID NO: 1173243 - DNA, 15 bp, Homo sapiens
aaattttcttttttt

SEQ ID NO: 1173244 - DNA, 15 bp, Homo sapiens
gaaattttctttttt

SEQ ID NO: 1173245 - DNA, 15 bp, Homo sapiens
tgaaattttcttttt

SEQ ID NO: 1173246 - DNA, 15 bp, Homo sapiens
ctgaaattttctttt

SEQ ID NO: 1173247 - DNA, 15 bp, Homo sapiens
cctgaaattttcttt

SEQ ID NO: 1173248 - DNA, 15 bp, Homo sapiens
gcctgaaattttctt

SEQ ID NO: 1173249 - DNA, 15 bp, Homo sapiens
ggcctgaaattttct

SEQ ID NO: 1173250 - DNA, 15 bp, Homo sapiens
tggcctgaaattttc

SEQ ID NO: 1173251 - DNA, 15 bp, Homo sapiens
ttggcctgaaatttt

SEQ ID NO: 1173252 - DNA, 15 bp, Homo sapiens
attggcctgaaattt

SEQ ID NO: 1173253 - DNA, 15 bp, Homo sapiens
tattggcctgaaatt

SEQ ID NO: 1173254 - DNA, 15 bp, Homo sapiens
atattggcctgaaat

SEQ ID NO: 1173255 - DNA, 15 bp, Homo sapiens
gatattggcctgaaa

SEQ ID NO: 1173256 - DNA, 15 bp, Homo sapiens
ggatattggcctgaa

SEQ ID NO: 1173257 - DNA, 15 bp, Homo sapiens
gggatattggcctga

SEQ ID NO: 1173258 - DNA, 15 bp, Homo sapiens
agggatattggcctg

SEQ ID NO: 1173259 - DNA, 15 bp, Homo sapiens
cagggatattggcct

SEQ ID NO: 1173260 - DNA, 15 bp, Homo sapiens
tcagggatattggcc

SEQ ID NO: 1173261 - DNA, 15 bp, Homo sapiens
atcagggatattggc

SEQ ID NO: 1173262 - DNA, 15 bp, Homo sapiens
catcagggatattgg

SEQ ID NO: 1173263 - DNA, 15 bp, Homo sapiens
tcatcagggatattg

SEQ ID NO: 1173264 - DNA, 15 bp, Homo sapiens
ttcatcagggatatt

SEQ ID NO: 1173265 - DNA, 15 bp, Homo sapiens
gttcatcagggatat

SEQ ID NO: 1173266 - DNA, 15 bp, Homo sapiens
cgttcatcagggata

SEQ ID NO: 1173267 - DNA, 15 bp, Homo sapiens
acgttcatcagggat

SEQ ID NO: 1173268 - DNA, 15 bp, Homo sapiens
gacgttcatcaggga

SEQ ID NO: 1173269 - DNA, 15 bp, Homo sapiens
tgacgttcatcaggg

SEQ ID NO: 1173270 - DNA, 15 bp, Homo sapiens
ttgacgttcatcagg

SEQ ID NO: 1173271 - DNA, 15 bp, Homo sapiens
attgacgttcatcag

SEQ ID NO: 1173272 - DNA, 15 bp, Homo sapiens
cattgacgttcatca

SEQ ID NO: 1173273 - DNA, 15 bp, Homo sapiens
gcattgacgttcatc

SEQ ID NO: 1173274 - DNA, 15 bp, Homo sapiens
tgcattgacgttcat

SEQ ID NO: 1173275 - DNA, 15 bp, Homo sapiens
ttgcattgacgttca

SEQ ID NO: 1173276 - DNA, 15 bp, Homo sapiens
tttgcattgacgttc

SEQ ID NO: 1173277 - DNA, 15 bp, Homo sapiens
ttttgcattgacgtt

SEQ ID NO: 1173278 - DNA, 15 bp, Homo sapiens
tttttgcattgacgt

SEQ ID NO: 1173279 - DNA, 15 bp, Homo sapiens
atttttgcattgacg

SEQ ID NO: 1173280 - DNA, 15 bp, Homo sapiens
gatttttgcattgac

SEQ ID NO: 1173281 - DNA, 15 bp, Homo sapiens
ggatttttgcattga

SEQ ID NO: 1173282 - DNA, 15 bp, Homo sapiens
aggatttttgcattg

SEQ ID NO: 1173283 - DNA, 15 bp, Homo sapiens
gaggatttttgcatt

SEQ ID NO: 1173284 - DNA, 15 bp, Homo sapiens
tgaggatttttgcat

SEQ ID NO: 1173285 - DNA, 15 bp, Homo sapiens
ttgaggatttttgca

SEQ ID NO: 1173286 - DNA, 15 bp, Homo sapiens
attgaggatttttgc

SEQ ID NO: 1173287 - DNA, 15 bp, Homo sapiens
tattgaggatttttg

SEQ ID NO: 1173288 - DNA, 15 bp, Homo sapiens
ttattgaggattttt

SEQ ID NO: 1173289 - DNA, 15 bp, Homo sapiens
tttattgaggatttt

SEQ ID NO: 1173290 - DNA, 15 bp, Homo sapiens
ttttattgaggattt

SEQ ID NO: 1173291 - DNA, 15 bp, Homo sapiens
attttattgaggatt

SEQ ID NO: 1173292 - DNA, 15 bp, Homo sapiens
tattttattgaggat

SEQ ID NO: 1173293 - DNA, 15 bp, Homo sapiens
gtattttattgagga

SEQ ID NO: 1173294 - DNA, 15 bp, Homo sapiens
agtattttattgagg

SEQ ID NO: 1173295 - DNA, 15 bp, Homo sapiens
tagtattttattgag

SEQ ID NO: 1173296 - DNA, 15 bp, Homo sapiens
ctagtattttattga

SEQ ID NO: 1173297 - DNA, 15 bp, Homo sapiens
gctagtattttattg

SEQ ID NO: 1173298 - DNA, 15 bp, Homo sapiens
tgctagtattttatt

SEQ ID NO: 1173299 - DNA, 15 bp, Homo sapiens
ttgctagtattttat

SEQ ID NO: 1173300 - DNA, 15 bp, Homo sapiens
tttgctagtatttta

SEQ ID NO: 1173301 - DNA, 15 bp, Homo sapiens
gtttgctagtatttt

SEQ ID NO: 1173302 - DNA, 15 bp, Homo sapiens
ggtttgctagtattt

SEQ ID NO: 1173303 - DNA, 15 bp, Homo sapiens
cggtttgctagtatt

SEQ ID NO: 1173304 - DNA, 15 bp, Homo sapiens
tcggtttgctagtat

SEQ ID NO: 1173305 - DNA, 15 bp, Homo sapiens
ttcggtttgctagta

SEQ ID NO: 1173306 - DNA, 15 bp, Homo sapiens
attcggtttgctagt

SEQ ID NO: 1173307 - DNA, 15 bp, Homo sapiens
gattcggtttgctag

SEQ ID NO: 1173308 - DNA, 15 bp, Homo sapiens
ggattcggtttgcta

SEQ ID NO: 1173309 - DNA, 15 bp, Homo sapiens
tggattcggtttgct

SEQ ID NO: 1173310 - DNA, 15 bp, Homo sapiens
ctggattcggtttgc

SEQ ID NO: 1173311 - DNA, 15 bp, Homo sapiens
gctggattcggtttg

SEQ ID NO: 1173312 - DNA, 15 bp, Homo sapiens
tgctggattcggttt

SEQ ID NO: 1173313 - DNA, 15 bp, Homo sapiens
ctgctggattcggtt

SEQ ID NO: 1173314 - DNA, 15 bp, Homo sapiens
gctgctggattcggt

SEQ ID NO: 1173315 - DNA, 15 bp, Homo sapiens
tgctgctggattcgg

SEQ ID NO: 1173316 - DNA, 15 bp, Homo sapiens
gtgctgctggattcg

SEQ ID NO: 1173317 - DNA, 15 bp, Homo sapiens
tgtgctgctggattc

SEQ ID NO: 1173318 - DNA, 15 bp, Homo sapiens
atgtgctgctggatt

SEQ ID NO: 1173319 - DNA, 15 bp, Homo sapiens
gatgtgctgctggat

SEQ ID NO: 1173320 - DNA, 15 bp, Homo sapiens
tgatgtgctgctgga

SEQ ID NO: 1173321 - DNA, 15 bp, Homo sapiens
ttgatgtgctgctgg

SEQ ID NO: 1173322 - DNA, 15 bp, Homo sapiens
tttgatgtgctgctg

SEQ ID NO: 1173323 - DNA, 15 bp, Homo sapiens
ttttgatgtgctgct

SEQ ID NO: 1173324 - DNA, 15 bp, Homo sapiens
tttttgatgtgctgc

SEQ ID NO: 1173325 - DNA, 15 bp, Homo sapiens
ctttttgatgtgctg

SEQ ID NO: 1173326 - DNA, 15 bp, Homo sapiens
gctttttgatgtgct

SEQ ID NO: 1173327 - DNA, 15 bp, Homo sapiens
agctttttgatgtgc

SEQ ID NO: 1173328 - DNA, 15 bp, Homo sapiens
aagctttttgatgtg

SEQ ID NO: 1173329 - DNA, 15 bp, Homo sapiens
taagctttttgatgt

SEQ ID NO: 1173330 - DNA, 15 bp, Homo sapiens
ataagctttttgatg

SEQ ID NO: 1173331 - DNA, 15 bp, Homo sapiens
gataagctttttgat

SEQ ID NO: 1173332 - DNA, 15 bp, Homo sapiens
ggataagctttttga

SEQ ID NO: 1173333 - DNA, 15 bp, Homo sapiens
tggataagctttttg

SEQ ID NO: 1173334 - DNA, 15 bp, Homo sapiens
atggataagcttttt

SEQ ID NO: 1173335 - DNA, 15 bp, Homo sapiens
catggataagctttt

SEQ ID NO: 1173336 - DNA, 15 bp, Homo sapiens
tcatggataagcttt

SEQ ID NO: 1173337 - DNA, 15 bp, Homo sapiens
atcatggataagctt

SEQ ID NO: 1173338 - DNA, 15 bp, Homo sapiens
catcatggataagct

SEQ ID NO: 1173339 - DNA, 15 bp, Homo sapiens
tcatcatggataagc

SEQ ID NO: 1173340 - DNA, 15 bp, Homo sapiens
gtcatcatggataag

SEQ ID NO: 1173341 - DNA, 15 bp, Homo sapiens
ggtcatcatggataa

SEQ ID NO: 1173342 - DNA, 15 bp, Homo sapiens
tggtcatcatggata

SEQ ID NO: 1173343 - DNA, 15 bp, Homo sapiens
ttggtcatcatggat

SEQ ID NO: 1173344 - DNA, 15 bp, Homo sapiens
cttggtcatcatgga

SEQ ID NO: 1173345 - DNA, 15 bp, Homo sapiens
acttggtcatcatgg

SEQ ID NO: 1173346 - DNA, 15 bp, Homo sapiens
gacttggtcatcatg

SEQ ID NO: 1173347 - DNA, 15 bp, Homo sapiens
tgacttggtcatcat

SEQ ID NO: 1173348 - DNA, 15 bp, Homo sapiens
ctgacttggtcatca

SEQ ID NO: 1173349 - DNA, 15 bp, Homo sapiens
gctgacttggtcatc

SEQ ID NO: 1173350 - DNA, 15 bp, Homo sapiens
agctgacttggtcat

SEQ ID NO: 1173351 - DNA, 15 bp, Homo sapiens
aagctgacttggtca

SEQ ID NO: 1173352 - DNA, 15 bp, Homo sapiens
gaagctgacttggtc

SEQ ID NO: 1173353 - DNA, 15 bp, Homo sapiens
tgaagctgacttggt

SEQ ID NO: 1173354 - DNA, 15 bp, Homo sapiens
atgaagctgacttgg

SEQ ID NO: 1173355 - DNA, 15 bp, Homo sapiens
gatgaagctgacttg

SEQ ID NO: 1173356 - DNA, 15 bp, Homo sapiens
ggatgaagctgactt

SEQ ID NO: 1173357 - DNA, 15 bp, Homo sapiens
gggatgaagctgact

SEQ ID NO: 1173358 - DNA, 15 bp, Homo sapiens
agggatgaagctgac

SEQ ID NO: 1173359 - DNA, 15 bp, Homo sapiens
cagggatgaagctga

SEQ ID NO: 1173360 - DNA, 15 bp, Homo sapiens
ccagggatgaagctg

SEQ ID NO: 1173361 - DNA, 15 bp, Homo sapiens
cccagggatgaagct

SEQ ID NO: 1173362 - DNA, 15 bp, Homo sapiens
tcccagggatgaagc

SEQ ID NO: 1173363 - DNA, 15 bp, Homo sapiens
atcccagggatgaag

SEQ ID NO: 1173364 - DNA, 15 bp, Homo sapiens
catcccagggatgaa

SEQ ID NO: 1173365 - DNA, 15 bp, Homo sapiens
gcatcccagggatga

SEQ ID NO: 1173366 - DNA, 15 bp, Homo sapiens
tgcatcccagggatg

SEQ ID NO: 1173367 - DNA, 15 bp, Homo sapiens
ttgcatcccagggat

SEQ ID NO: 1173368 - DNA, 15 bp, Homo sapiens
cttgcatcccaggga

SEQ ID NO: 1173369 - DNA, 15 bp, Homo sapiens
ccttgcatcccaggg

SEQ ID NO: 1173370 - DNA, 15 bp, Homo sapiens
gccttgcatcccagg

SEQ ID NO: 1173371 - DNA, 15 bp, Homo sapiens
agccttgcatcccag

SEQ ID NO: 1173372 - DNA, 15 bp, Homo sapiens
cagccttgcatccca

SEQ ID NO: 1173373 - DNA, 15 bp, Homo sapiens
ccagccttgcatccc

SEQ ID NO: 1173374 - DNA, 15 bp, Homo sapiens
accagccttgcatcc

SEQ ID NO: 1173375 - DNA, 15 bp, Homo sapiens
aaccagccttgcatc

SEQ ID NO: 1173376 - DNA, 15 bp, Homo sapiens
gaaccagccttgcat

SEQ ID NO: 1173377 - DNA, 15 bp, Homo sapiens
tgaaccagccttgca

SEQ ID NO: 1173378 - DNA, 15 bp, Homo sapiens
ctgaaccagccttgc

SEQ ID NO: 1173379 - DNA, 15 bp, Homo sapiens
gctgaaccagccttg

SEQ ID NO: 1173380 - DNA, 15 bp, Homo sapiens
tgctgaaccagcctt

SEQ ID NO: 1173381 - DNA, 15 bp, Homo sapiens
atgctgaaccagcct

SEQ ID NO: 1173382 - DNA, 15 bp, Homo sapiens
tatgctgaaccagcc

SEQ ID NO: 1173383 - DNA, 15 bp, Homo sapiens
atatgctgaaccagc

SEQ ID NO: 1173384 - DNA, 15 bp, Homo sapiens
catatgctgaaccag

SEQ ID NO: 1173385 - DNA, 15 bp, Homo sapiens
gcatatgctgaacca

SEQ ID NO: 1173386 - DNA, 15 bp, Homo sapiens
tgcatatgctgaacc

SEQ ID NO: 1173387 - DNA, 15 bp, Homo sapiens
ttgcatatgctgaac

SEQ ID NO: 1173388 - DNA, 15 bp, Homo sapiens
tttgcatatgctgaa

SEQ ID NO: 1173389 - DNA, 15 bp, Homo sapiens
gtttgcatatgctga

SEQ ID NO: 1173390 - DNA, 15 bp, Homo sapiens
ggtttgcatatgctg

SEQ ID NO: 1173391 - DNA, 15 bp, Homo sapiens
tggtttgcatatgct

SEQ ID NO: 1173392 - DNA, 15 bp, Homo sapiens
ttggtttgcatatgc

SEQ ID NO: 1173393 - DNA, 15 bp, Homo sapiens
attggtttgcatatg

SEQ ID NO: 1173394 - DNA, 15 bp, Homo sapiens
tattggtttgcatat

SEQ ID NO: 1173395 - DNA, 15 bp, Homo sapiens
ttattggtttgcata

SEQ ID NO: 1173396 - DNA, 15 bp, Homo sapiens
tttattggtttgcat

SEQ ID NO: 1173397 - DNA, 15 bp, Homo sapiens
gtttattggtttgca

SEQ ID NO: 1173398 - DNA, 15 bp, Homo sapiens
tgtttattggtttgc

SEQ ID NO: 1173399 - DNA, 15 bp, Homo sapiens
atgtttattggtttg

SEQ ID NO: 1173400 - DNA, 15 bp, Homo sapiens
tatgtttattggttt

SEQ ID NO: 1173401 - DNA, 15 bp, Homo sapiens
ttatgtttattggtt

SEQ ID NO: 1173402 - DNA, 15 bp, Homo sapiens
attatgtttattggt

SEQ ID NO: 1173403 - DNA, 15 bp, Homo sapiens
gattatgtttattgg

SEQ ID NO: 1173404 - DNA, 15 bp, Homo sapiens
ggattatgtttattg

SEQ ID NO: 1173405 - DNA, 15 bp, Homo sapiens
tggattatgtttatt

SEQ ID NO: 1173406 - DNA, 15 bp, Homo sapiens
atggattatgtttat

SEQ ID NO: 1173407 - DNA, 15 bp, Homo sapiens
gatggattatgttta

SEQ ID NO: 1173408 - DNA, 15 bp, Homo sapiens
tgatggattatgttt

SEQ ID NO: 1173409 - DNA, 15 bp, Homo sapiens
gtgatggattatgtt

SEQ ID NO: 1173410 - DNA, 15 bp, Homo sapiens
tgtgatggattatgt

SEQ ID NO: 1173411 - DNA, 15 bp, Homo sapiens
atgtgatggattatg

SEQ ID NO: 1173412 - DNA, 15 bp, Homo sapiens
tatgtgatggattat

SEQ ID NO: 1173413 - DNA, 15 bp, Homo sapiens
ttatgtgatggatta

SEQ ID NO: 1173414 - DNA, 15 bp, Homo sapiens
tttatgtgatggatt

SEQ ID NO: 1173415 - DNA, 15 bp, Homo sapiens
gtttatgtgatggat

SEQ ID NO: 1173416 - DNA, 15 bp, Homo sapiens
tgtttatgtgatgga

SEQ ID NO: 1173417 - DNA, 15 bp, Homo sapiens
ctgtttatgtgatgg

SEQ ID NO: 1173418 - DNA, 15 bp, Homo sapiens
tctgtttatgtgatg

SEQ ID NO: 1173419 - DNA, 15 bp, Homo sapiens
ttctgtttatgtgat

SEQ ID NO: 1173420 - DNA, 15 bp, Homo sapiens
gttctgtttatgtga

SEQ ID NO: 1173421 - DNA, 15 bp, Homo sapiens
ggttctgtttatgtg

SEQ ID NO: 1173422 - DNA, 15 bp, Homo sapiens
cggttctgtttatgt

SEQ ID NO: 1173423 - DNA, 15 bp, Homo sapiens
tcggttctgtttatg

SEQ ID NO: 1173424 - DNA, 15 bp, Homo sapiens
atcggttctgtttat

SEQ ID NO: 1173425 - DNA, 15 bp, Homo sapiens
catcggttctgttta

SEQ ID NO: 1173426 - DNA, 15 bp, Homo sapiens
tcatcggttctgttt

SEQ ID NO: 1173427 - DNA, 15 bp, Homo sapiens
gtcatcggttctgtt

SEQ ID NO: 1173428 - DNA, 15 bp, Homo sapiens
tgtcatcggttctgt

SEQ ID NO: 1173429 - DNA, 15 bp, Homo sapiens
ttgtcatcggttctg

SEQ ID NO: 1173430 - DNA, 15 bp, Homo sapiens
tttgtcatcggttct

SEQ ID NO: 1173431 - DNA, 15 bp, Homo sapiens
ttttgtcatcggttc

SEQ ID NO: 1173432 - DNA, 15 bp, Homo sapiens
tttttgtcatcggtt

SEQ ID NO: 1173433 - DNA, 15 bp, Homo sapiens
gtttttgtcatcggt

SEQ ID NO: 1173434 - DNA, 15 bp, Homo sapiens
ggtttttgtcatcgg

SEQ ID NO: 1173435 - DNA, 15 bp, Homo sapiens
tggtttttgtcatcg

SEQ ID NO: 1173436 - DNA, 15 bp, Homo sapiens
gtggtttttgtcatc

SEQ ID NO: 1173437 - DNA, 15 bp, Homo sapiens
tgtggtttttgtcat

SEQ ID NO: 1173438 - DNA, 15 bp, Homo sapiens
atgtggtttttgtca

SEQ ID NO: 1173439 - DNA, 15 bp, Homo sapiens
catgtggtttttgtc

SEQ ID NO: 1173440 - DNA, 15 bp, Homo sapiens
tcatgtggtttttgt

SEQ ID NO: 1173441 - DNA, 15 bp, Homo sapiens
atcatgtggtttttg

SEQ ID NO: 1173442 - DNA, 15 bp, Homo sapiens
aatcatgtggttttt

SEQ ID NO: 1173443 - DNA, 15 bp, Homo sapiens
taatcatgtggtttt

SEQ ID NO: 1173444 - DNA, 15 bp, Homo sapiens
ataatcatgtggttt

SEQ ID NO: 1173445 - DNA, 15 bp, Homo sapiens
gataatcatgtggtt

SEQ ID NO: 1173446 - DNA, 15 bp, Homo sapiens
agataatcatgtggt

SEQ ID NO: 1173447 - DNA, 15 bp, Homo sapiens
gagataatcatgtgg

SEQ ID NO: 1173448 - DNA, 15 bp, Homo sapiens
tgagataatcatgtg

SEQ ID NO: 1173449 - DNA, 15 bp, Homo sapiens
ttgagataatcatgt

SEQ ID NO: 1173450 - DNA, 15 bp, Homo sapiens
cttgagataatcatg

SEQ ID NO: 1173451 - DNA, 15 bp, Homo sapiens
tcttgagataatcat

SEQ ID NO: 1173452 - DNA, 15 bp, Homo sapiens
ctcttgagataatca

SEQ ID NO: 1173453 - DNA, 15 bp, Homo sapiens
tctcttgagataatc

SEQ ID NO: 1173454 - DNA, 15 bp, Homo sapiens
atctcttgagataat

SEQ ID NO: 1173455 - DNA, 15 bp, Homo sapiens
catctcttgagataa

SEQ ID NO: 1173456 - DNA, 15 bp, Homo sapiens
gcatctcttgagata

SEQ ID NO: 1173457 - DNA, 15 bp, Homo sapiens
tgcatctcttgagat

SEQ ID NO: 1173458 - DNA, 15 bp, Homo sapiens
ctgcatctcttgaga

SEQ ID NO: 1173459 - DNA, 15 bp, Homo sapiens
tctgcatctcttgag

SEQ ID NO: 1173460 - DNA, 15 bp, Homo sapiens
ttctgcatctcttga

SEQ ID NO: 1173461 - DNA, 15 bp, Homo sapiens
tttctgcatctcttg

SEQ ID NO: 1173462 - DNA, 15 bp, Homo sapiens
ttttctgcatctctt

SEQ ID NO: 1173463 - DNA, 15 bp, Homo sapiens
cttttctgcatctct

SEQ ID NO: 1173464 - DNA, 15 bp, Homo sapiens
acttttctgcatctc

SEQ ID NO: 1173465 - DNA, 15 bp, Homo sapiens
gacttttctgcatct

SEQ ID NO: 1173466 - DNA, 15 bp, Homo sapiens
ggacttttctgcatc

SEQ ID NO: 1173467 - DNA, 15 bp, Homo sapiens
aggacttttctgcat

SEQ ID NO: 1173468 - DNA, 15 bp, Homo sapiens
aaggacttttctgca

SEQ ID NO: 1173469 - DNA, 15 bp, Homo sapiens
gaaggacttttctgc

SEQ ID NO: 1173470 - DNA, 15 bp, Homo sapiens
tgaaggacttttctg

SEQ ID NO: 1173471 - DNA, 15 bp, Homo sapiens
ttgaaggacttttct

SEQ ID NO: 1173472 - DNA, 15 bp, Homo sapiens
attgaaggacttttc

SEQ ID NO: 1173473 - DNA, 15 bp, Homo sapiens
tattgaaggactttt

SEQ ID NO: 1173474 - DNA, 15 bp, Homo sapiens
ttattgaaggacttt

SEQ ID NO: 1173475 - DNA, 15 bp, Homo sapiens
tttattgaaggactt

SEQ ID NO: 1173476 - DNA, 15 bp, Homo sapiens
ttttattgaaggact

SEQ ID NO: 1173477 - DNA, 15 bp, Homo sapiens
attttattgaaggac

SEQ ID NO: 1173478 - DNA, 15 bp, Homo sapiens
aattttattgaagga

SEQ ID NO: 1173479 - DNA, 15 bp, Homo sapiens
gaattttattgaagg

SEQ ID NO: 1173480 - DNA, 15 bp, Homo sapiens
tgaattttattgaag

SEQ ID NO: 1173481 - DNA, 15 bp, Homo sapiens
ttgaattttattgaa

SEQ ID NO: 1173482 - DNA, 15 bp, Homo sapiens
gttgaattttattga

SEQ ID NO: 1173483 - DNA, 15 bp, Homo sapiens
tgttgaattttattg

SEQ ID NO: 1173484 - DNA, 15 bp, Homo sapiens
ctgttgaattttatt

SEQ ID NO: 1173485 - DNA, 15 bp, Homo sapiens
gctgttgaattttat

SEQ ID NO: 1173486 - DNA, 15 bp, Homo sapiens
ggctgttgaatttta

SEQ ID NO: 1173487 - DNA, 15 bp, Homo sapiens
gggctgttgaatttt

SEQ ID NO: 1173488 - DNA, 15 bp, Homo sapiens
agggctgttgaattt

SEQ ID NO: 1173489 - DNA, 15 bp, Homo sapiens
aagggctgttgaatt

SEQ ID NO: 1173490 - DNA, 15 bp, Homo sapiens
gaagggctgttgaat

SEQ ID NO: 1173491 - DNA, 15 bp, Homo sapiens
tgaagggctgttgaa

SEQ ID NO: 1173492 - DNA, 15 bp, Homo sapiens
atgaagggctgttga

SEQ ID NO: 1173493 - DNA, 15 bp, Homo sapiens
catgaagggctgttg

SEQ ID NO: 1173494 - DNA, 15 bp, Homo sapiens
gcatgaagggctgtt

SEQ ID NO: 1173495 - DNA, 15 bp, Homo sapiens
agcatgaagggctgt

SEQ ID NO: 1173496 - DNA, 15 bp, Homo sapiens
tagcatgaagggctg

SEQ ID NO: 1173497 - DNA, 15 bp, Homo sapiens
ttagcatgaagggct

SEQ ID NO: 1173498 - DNA, 15 bp, Homo sapiens
tttagcatgaagggc

SEQ ID NO: 1173499 - DNA, 15 bp, Homo sapiens
ttttagcatgaaggg

SEQ ID NO: 1173500 - DNA, 15 bp, Homo sapiens
tttttagcatgaagg

SEQ ID NO: 1173501 - DNA, 15 bp, Homo sapiens
gtttttagcatgaag

SEQ ID NO: 1173502 - DNA, 15 bp, Homo sapiens
agtttttagcatgaa

SEQ ID NO: 1173503 - DNA, 15 bp, Homo sapiens
gagtttttagcatga

SEQ ID NO: 1173504 - DNA, 15 bp, Homo sapiens
agagtttttagcatg

SEQ ID NO: 1173505 - DNA, 15 bp, Homo sapiens
gagagtttttagcat

SEQ ID NO: 1173506 - DNA, 15 bp, Homo sapiens
tgagagtttttagca

SEQ ID NO: 1173507 - DNA, 15 bp, Homo sapiens
ttgagagtttttagc

SEQ ID NO: 1173508 - DNA, 15 bp, Homo sapiens
attgagagtttttag

SEQ ID NO: 1173509 - DNA, 15 bp, Homo sapiens
tattgagagttttta

SEQ ID NO: 1173510 - DNA, 15 bp, Homo sapiens
ttattgagagttttt

SEQ ID NO: 1173511 - DNA, 15 bp, Homo sapiens
tttattgagagtttt

SEQ ID NO: 1173512 - DNA, 15 bp, Homo sapiens
gtttattgagagttt

SEQ ID NO: 1173513 - DNA, 15 bp, Homo sapiens
agtttattgagagtt

SEQ ID NO: 1173514 - DNA, 15 bp, Homo sapiens
tagtttattgagagt

SEQ ID NO: 1173515 - DNA, 15 bp, Homo sapiens
ctagtttattgagag

SEQ ID NO: 1173516 - DNA, 15 bp, Homo sapiens
cctagtttattgaga

SEQ ID NO: 1173517 - DNA, 15 bp, Homo sapiens
acctagtttattgag

SEQ ID NO: 1173518 - DNA, 15 bp, Homo sapiens
tacctagtttattga

SEQ ID NO: 1173519 - DNA, 15 bp, Homo sapiens
atacctagtttattg

SEQ ID NO: 1173520 - DNA, 15 bp, Homo sapiens
gatacctagtttatt

SEQ ID NO: 1173521 - DNA, 15 bp, Homo sapiens
tgatacctagtttat

SEQ ID NO: 1173522 - DNA, 15 bp, Homo sapiens
ctgatacctagttta

SEQ ID NO: 1173523 - DNA, 15 bp, Homo sapiens
actgatacctagttt

SEQ ID NO: 1173524 - DNA, 15 bp, Homo sapiens
cactgatacctagtt

SEQ ID NO: 1173525 - DNA, 15 bp, Homo sapiens
ccactgatacctagt

SEQ ID NO: 1173526 - DNA, 15 bp, Homo sapiens
tccactgatacctag

SEQ ID NO: 1173527 - DNA, 15 bp, Homo sapiens
ttccactgataccta

SEQ ID NO: 1173528 - DNA, 15 bp, Homo sapiens
gttccactgatacct

SEQ ID NO: 1173529 - DNA, 15 bp, Homo sapiens
tgttccactgatacc

SEQ ID NO: 1173530 - DNA, 15 bp, Homo sapiens
atgttccactgatac

SEQ ID NO: 1173531 - DNA, 15 bp, Homo sapiens
tatgttccactgata

SEQ ID NO: 1173532 - DNA, 15 bp, Homo sapiens
atatgttccactgat

SEQ ID NO: 1173533 - DNA, 15 bp, Homo sapiens
gatatgttccactga

SEQ ID NO: 1173534 - DNA, 15 bp, Homo sapiens
agatatgttccactg

SEQ ID NO: 1173535 - DNA, 15 bp, Homo sapiens
gagatatgttccact

SEQ ID NO: 1173536 - DNA, 15 bp, Homo sapiens
tgagatatgttccac

SEQ ID NO: 1173537 - DNA, 15 bp, Homo sapiens
ttgagatatgttcca

SEQ ID NO: 1173538 - DNA, 15 bp, Homo sapiens
tttgagatatgttcc

SEQ ID NO: 1173539 - DNA, 15 bp, Homo sapiens
ttttgagatatgttc

SEQ ID NO: 1173540 - DNA, 15 bp, Homo sapiens
attttgagatatgtt

SEQ ID NO: 1173541 - DNA, 15 bp, Homo sapiens
tattttgagatatgt

SEQ ID NO: 1173542 - DNA, 15 bp, Homo sapiens
ctattttgagatatg

SEQ ID NO: 1173543 - DNA, 15 bp, Homo sapiens
actattttgagatat

SEQ ID NO: 1173544 - DNA, 15 bp, Homo sapiens
tactattttgagata

SEQ ID NO: 1173545 - DNA, 15 bp, Homo sapiens
ttactattttgagat

SEQ ID NO: 1173546 - DNA, 15 bp, Homo sapiens
cttactattttgaga

SEQ ID NO: 1173547 - DNA, 15 bp, Homo sapiens
acttactattttgag

SEQ ID NO: 1173548 - DNA, 15 bp, Homo sapiens
cacttactattttga

SEQ ID NO: 1173549 - DNA, 15 bp, Homo sapiens
gcacttactattttg

SEQ ID NO: 1173550 - DNA, 15 bp, Homo sapiens
agcacttactatttt

SEQ ID NO: 1173551 - DNA, 15 bp, Homo sapiens
tagcacttactattt

SEQ ID NO: 1173552 - DNA, 15 bp, Homo sapiens
ttagcacttactatt

SEQ ID NO: 1173553 - DNA, 15 bp, Homo sapiens
attagcacttactat

SEQ ID NO: 1173554 - DNA, 15 bp, Homo sapiens
aattagcacttacta

SEQ ID NO: 1173555 - DNA, 15 bp, Homo sapiens
taattagcacttact

SEQ ID NO: 1173556 - DNA, 15 bp, Homo sapiens
ataattagcacttac

SEQ ID NO: 1173557 - DNA, 15 bp, Homo sapiens
cataattagcactta

SEQ ID NO: 1173558 - DNA, 15 bp, Homo sapiens
tcataattagcactt

SEQ ID NO: 1173559 - DNA, 15 bp, Homo sapiens
gtcataattagcact

SEQ ID NO: 1173560 - DNA, 15 bp, Homo sapiens
tgtcataattagcac

SEQ ID NO: 1173561 - DNA, 15 bp, Homo sapiens
ttgtcataattagca

SEQ ID NO: 1173562 - DNA, 15 bp, Homo sapiens
tttgtcataattagc

SEQ ID NO: 1173563 - DNA, 15 bp, Homo sapiens
gtttgtcataattag

SEQ ID NO: 1173564 - DNA, 15 bp, Homo sapiens
ggtttgtcataatta

SEQ ID NO: 1173565 - DNA, 15 bp, Homo sapiens
gggtttgtcataatt

SEQ ID NO: 1173566 - DNA, 15 bp, Homo sapiens
tgggtttgtcataat

SEQ ID NO: 1173567 - DNA, 15 bp, Homo sapiens
gtgggtttgtcataa

SEQ ID NO: 1173568 - DNA, 15 bp, Homo sapiens
tgtgggtttgtcata

SEQ ID NO: 1173569 - DNA, 15 bp, Homo sapiens
ctgtgggtttgtcat

SEQ ID NO: 1173570 - DNA, 15 bp, Homo sapiens
gctgtgggtttgtca

SEQ ID NO: 1173571 - DNA, 15 bp, Homo sapiens
ggctgtgggtttgtc

SEQ ID NO: 1173572 - DNA, 15 bp, Homo sapiens
tggctgtgggtttgt

SEQ ID NO: 1173573 - DNA, 15 bp, Homo sapiens
ttggctgtgggtttg

SEQ ID NO: 1173574 - DNA, 15 bp, Homo sapiens
attggctgtgggttt

SEQ ID NO: 1173575 - DNA, 15 bp, Homo sapiens
tattggctgtgggtt

SEQ ID NO: 1173576 - DNA, 15 bp, Homo sapiens
atattggctgtgggt

SEQ ID NO: 1173577 - DNA, 15 bp, Homo sapiens
gatattggctgtggg

SEQ ID NO: 1173578 - DNA, 15 bp, Homo sapiens
tgatattggctgtgg

SEQ ID NO: 1173579 - DNA, 15 bp, Homo sapiens
atgatattggctgtg

SEQ ID NO: 1173580 - DNA, 15 bp, Homo sapiens
tatgatattggctgt

SEQ ID NO: 1173581 - DNA, 15 bp, Homo sapiens
gtatgatattggctg

SEQ ID NO: 1173582 - DNA, 15 bp, Homo sapiens
agtatgatattggct

SEQ ID NO: 1173583 - DNA, 15 bp, Homo sapiens
cagtatgatattggc

SEQ ID NO: 1173584 - DNA, 15 bp, Homo sapiens
tcagtatgatattgg

SEQ ID NO: 1173585 - DNA, 15 bp, Homo sapiens
ttcagtatgatattg

SEQ ID NO: 1173586 - DNA, 15 bp, Homo sapiens
attcagtatgatatt

SEQ ID NO: 1173587 - DNA, 15 bp, Homo sapiens
cattcagtatgatat

SEQ ID NO: 1173588 - DNA, 15 bp, Homo sapiens
ccattcagtatgata

SEQ ID NO: 1173589 - DNA, 15 bp, Homo sapiens
cccattcagtatgat

SEQ ID NO: 1173590 - DNA, 15 bp, Homo sapiens
gcccattcagtatga

SEQ ID NO: 1173591 - DNA, 15 bp, Homo sapiens
tgcccattcagtatg

SEQ ID NO: 1173592 - DNA, 15 bp, Homo sapiens
ttgcccattcagtat

SEQ ID NO: 1173593 - DNA, 15 bp, Homo sapiens
tttgcccattcagta

SEQ ID NO: 1173594 - DNA, 15 bp, Homo sapiens
ttttgcccattcagt

SEQ ID NO: 1173595 - DNA, 15 bp, Homo sapiens
cttttgcccattcag

SEQ ID NO: 1173596 - DNA, 15 bp, Homo sapiens
gcttttgcccattca

SEQ ID NO: 1173597 - DNA, 15 bp, Homo sapiens
agcttttgcccattc

SEQ ID NO: 1173598 - DNA, 15 bp, Homo sapiens
cagcttttgcccatt

SEQ ID NO: 1173599 - DNA, 15 bp, Homo sapiens
ccagcttttgcccat

SEQ ID NO: 1173600 - DNA, 15 bp, Homo sapiens
tccagcttttgccca

SEQ ID NO: 1173601 - DNA, 15 bp, Homo sapiens
ttccagcttttgccc

SEQ ID NO: 1173602 - DNA, 15 bp, Homo sapiens
cttccagcttttgcc

SEQ ID NO: 1173603 - DNA, 15 bp, Homo sapiens
gcttccagcttttgc

SEQ ID NO: 1173604 - DNA, 15 bp, Homo sapiens
tgcttccagcttttg

SEQ ID NO: 1173605 - DNA, 15 bp, Homo sapiens
atgcttccagctttt

SEQ ID NO: 1173606 - DNA, 15 bp, Homo sapiens
aatgcttccagcttt

SEQ ID NO: 1173607 - DNA, 15 bp, Homo sapiens
gaatgcttccagctt

SEQ ID NO: 1173608 - DNA, 15 bp, Homo sapiens
ggaatgcttccagct

SEQ ID NO: 1173609 - DNA, 15 bp, Homo sapiens
gggaatgcttccagc

SEQ ID NO: 1173610 - DNA, 15 bp, Homo sapiens
agggaatgcttccag

SEQ ID NO: 1173611 - DNA, 15 bp, Homo sapiens
gagggaatgcttcca

SEQ ID NO: 1173612 - DNA, 15 bp, Homo sapiens
agagggaatgcttcc

SEQ ID NO: 1173613 - DNA, 15 bp, Homo sapiens
cagagggaatgcttc

SEQ ID NO: 1173614 - DNA, 15 bp, Homo sapiens
tcagagggaatgctt

SEQ ID NO: 1173615 - DNA, 15 bp, Homo sapiens
ttcagagggaatgct

SEQ ID NO: 1173616 - DNA, 15 bp, Homo sapiens
tttcagagggaatgc

SEQ ID NO: 1173617 - DNA, 15 bp, Homo sapiens
ttttcagagggaatg

SEQ ID NO: 1173618 - DNA, 15 bp, Homo sapiens
gttttcagagggaat

SEQ ID NO: 1173619 - DNA, 15 bp, Homo sapiens
ggttttcagagggaa

SEQ ID NO: 1173620 - DNA, 15 bp, Homo sapiens
tggttttcagaggga

SEQ ID NO: 1173621 - DNA, 15 bp, Homo sapiens
ctggttttcagaggg

SEQ ID NO: 1173622 - DNA, 15 bp, Homo sapiens
gctggttttcagagg

SEQ ID NO: 1173623 - DNA, 15 bp, Homo sapiens
tgctggttttcagag

SEQ ID NO: 1173624 - DNA, 15 bp, Homo sapiens
gtgctggttttcaga

SEQ ID NO: 1173625 - DNA, 15 bp, Homo sapiens
tgtgctggttttcag

SEQ ID NO: 1173626 - DNA, 15 bp, Homo sapiens
ttgtgctggttttca

SEQ ID NO: 1173627 - DNA, 15 bp, Homo sapiens
cttgtgctggttttc

SEQ ID NO: 1173628 - DNA, 15 bp, Homo sapiens
tcttgtgctggtttt

SEQ ID NO: 1173629 - DNA, 15 bp, Homo sapiens
gtcttgtgctggttt

SEQ ID NO: 1173630 - DNA, 15 bp, Homo sapiens
tgtcttgtgctggtt

SEQ ID NO: 1173631 - DNA, 15 bp, Homo sapiens
ttgtcttgtgctggt

SEQ ID NO: 1173632 - DNA, 15 bp, Homo sapiens
tttgtcttgtgctgg

SEQ ID NO: 1173633 - DNA, 15 bp, Homo sapiens
atttgtcttgtgctg

SEQ ID NO: 1173634 - DNA, 15 bp, Homo sapiens
tatttgtcttgtgct

SEQ ID NO: 1173635 - DNA, 15 bp, Homo sapiens
atatttgtcttgtgc

SEQ ID NO: 1173636 - DNA, 15 bp, Homo sapiens
catatttgtcttgtg

SEQ ID NO: 1173637 - DNA, 15 bp, Homo sapiens
gcatatttgtcttgt

SEQ ID NO: 1173638 - DNA, 15 bp, Homo sapiens
ggcatatttgtcttg

SEQ ID NO: 1173639 - DNA, 15 bp, Homo sapiens
gggcatatttgtctt

SEQ ID NO: 1173640 - DNA, 15 bp, Homo sapiens
agggcatatttgtct

SEQ ID NO: 1173641 - DNA, 15 bp, Homo sapiens
gagggcatatttgtc

SEQ ID NO: 1173642 - DNA, 15 bp, Homo sapiens
agagggcatatttgt

SEQ ID NO: 1173643 - DNA, 15 bp, Homo sapiens
gagagggcatatttg

SEQ ID NO: 1173644 - DNA, 15 bp, Homo sapiens
agagagggcatattt

SEQ ID NO: 1173645 - DNA, 15 bp, Homo sapiens
gagagagggcatatt

SEQ ID NO: 1173646 - DNA, 15 bp, Homo sapiens
tgagagagggcatat

SEQ ID NO: 1173647 - DNA, 15 bp, Homo sapiens
ctgagagagggcata

SEQ ID NO: 1173648 - DNA, 15 bp, Homo sapiens
gctgagagagggcat

SEQ ID NO: 1173649 - DNA, 15 bp, Homo sapiens
tgctgagagagggca

SEQ ID NO: 1173650 - DNA, 15 bp, Homo sapiens
gtgctgagagagggc

SEQ ID NO: 1173651 - DNA, 15 bp, Homo sapiens
agtgctgagagaggg

SEQ ID NO: 1173652 - DNA, 15 bp, Homo sapiens
gagtgctgagagagg

SEQ ID NO: 1173653 - DNA, 15 bp, Homo sapiens
ggagtgctgagagag

SEQ ID NO: 1173654 - DNA, 15 bp, Homo sapiens
aggagtgctgagaga

SEQ ID NO: 1173655 - DNA, 15 bp, Homo sapiens
taggagtgctgagag

SEQ ID NO: 1173656 - DNA, 15 bp, Homo sapiens
ataggagtgctgaga

SEQ ID NO: 1173657 - DNA, 15 bp, Homo sapiens
gataggagtgctgag

SEQ ID NO: 1173658 - DNA, 15 bp, Homo sapiens
ggataggagtgctga

SEQ ID NO: 1173659 - DNA, 15 bp, Homo sapiens
tggataggagtgctg

SEQ ID NO: 1173660 - DNA, 15 bp, Homo sapiens
ttggataggagtgct

SEQ ID NO: 1173661 - DNA, 15 bp, Homo sapiens
gttggataggagtgc

SEQ ID NO: 1173662 - DNA, 15 bp, Homo sapiens
tgttggataggagtg

SEQ ID NO: 1173663 - DNA, 15 bp, Homo sapiens
gtgttggataggagt

SEQ ID NO: 1173664 - DNA, 15 bp, Homo sapiens
tgtgttggataggag

SEQ ID NO: 1173665 - DNA, 15 bp, Homo sapiens
atgtgttggatagga

SEQ ID NO: 1173666 - DNA, 15 bp, Homo sapiens
aatgtgttggatagg

SEQ ID NO: 1173667 - DNA, 15 bp, Homo sapiens
taatgtgttggatag

SEQ ID NO: 1173668 - DNA, 15 bp, Homo sapiens
ataatgtgttggata

SEQ ID NO: 1173669 - DNA, 15 bp, Homo sapiens
aataatgtgttggat

SEQ ID NO: 1173670 - DNA, 15 bp, Homo sapiens
caataatgtgttgga

SEQ ID NO: 1173671 - DNA, 15 bp, Homo sapiens
ccaataatgtgttgg

SEQ ID NO: 1173672 - DNA, 15 bp, Homo sapiens
tccaataatgtgttg

SEQ ID NO: 1173673 - DNA, 15 bp, Homo sapiens
gtccaataatgtgtt

SEQ ID NO: 1173674 - DNA, 15 bp, Homo sapiens
tgtccaataatgtgt

SEQ ID NO: 1173675 - DNA, 15 bp, Homo sapiens
atgtccaataatgtg

SEQ ID NO: 1173676 - DNA, 15 bp, Homo sapiens
aatgtccaataatgt

SEQ ID NO: 1173677 - DNA, 15 bp, Homo sapiens
gaatgtccaataatg

SEQ ID NO: 1173678 - DNA, 15 bp, Homo sapiens
agaatgtccaataat

SEQ ID NO: 1173679 - DNA, 15 bp, Homo sapiens
cagaatgtccaataa

SEQ ID NO: 1173680 - DNA, 15 bp, Homo sapiens
ccagaatgtccaata

SEQ ID NO: 1173681 - DNA, 15 bp, Homo sapiens
gccagaatgtccaat

SEQ ID NO: 1173682 - DNA, 15 bp, Homo sapiens
ggccagaatgtccaa

SEQ ID NO: 1173683 - DNA, 15 bp, Homo sapiens
tggccagaatgtcca

SEQ ID NO: 1173684 - DNA, 15 bp, Homo sapiens
ctggccagaatgtcc

SEQ ID NO: 1173685 - DNA, 15 bp, Homo sapiens
cctggccagaatgtc

SEQ ID NO: 1173686 - DNA, 15 bp, Homo sapiens
ccctggccagaatgt

SEQ ID NO: 1173687 - DNA, 15 bp, Homo sapiens
gccctggccagaatg

SEQ ID NO: 1173688 - DNA, 15 bp, Homo sapiens
tgccctggccagaat

SEQ ID NO: 1173689 - DNA, 15 bp, Homo sapiens
ttgccctggccagaa

SEQ ID NO: 1173690 - DNA, 15 bp, Homo sapiens
attgccctggccaga

SEQ ID NO: 1173691 - DNA, 15 bp, Homo sapiens
gattgccctggccag

SEQ ID NO: 1173692 - DNA, 15 bp, Homo sapiens
tgattgccctggcca

SEQ ID NO: 1173693 - DNA, 15 bp, Homo sapiens
ttgattgccctggcc

SEQ ID NO: 1173694 - DNA, 15 bp, Homo sapiens
cttgattgccctggc

SEQ ID NO: 1173695 - DNA, 15 bp, Homo sapiens
gcttgattgccctgg

SEQ ID NO: 1173696 - DNA, 15 bp, Homo sapiens
tgcttgattgccctg

SEQ ID NO: 1173697 - DNA, 15 bp, Homo sapiens
ttgcttgattgccct

SEQ ID NO: 1173698 - DNA, 15 bp, Homo sapiens
cttgcttgattgccc

SEQ ID NO: 1173699 - DNA, 15 bp, Homo sapiens
tcttgcttgattgcc

SEQ ID NO: 1173700 - DNA, 15 bp, Homo sapiens
ctcttgcttgattgc

SEQ ID NO: 1173701 - DNA, 15 bp, Homo sapiens
tctcttgcttgattg

SEQ ID NO: 1173702 - DNA, 15 bp, Homo sapiens
ttctcttgcttgatt

SEQ ID NO: 1173703 - DNA, 15 bp, Homo sapiens
tttctcttgcttgat

SEQ ID NO: 1173704 - DNA, 15 bp, Homo sapiens
ctttctcttgcttga

SEQ ID NO: 1173705 - DNA, 15 bp, Homo sapiens
tctttctcttgcttg

SEQ ID NO: 1173706 - DNA, 15 bp, Homo sapiens
ttctttctcttgctt

SEQ ID NO: 1173707 - DNA, 15 bp, Homo sapiens
tttctttctcttgct

SEQ ID NO: 1173708 - DNA, 15 bp, Homo sapiens
gtttctttctcttgc

SEQ ID NO: 1173709 - DNA, 15 bp, Homo sapiens
tgtttctttctcttg

SEQ ID NO: 1173710 - DNA, 15 bp, Homo sapiens
ttgtttctttctctt

SEQ ID NO: 1173711 - DNA, 15 bp, Homo sapiens
tttgtttctttctct

SEQ ID NO: 1173712 - DNA, 15 bp, Homo sapiens
ctttgtttctttctc

SEQ ID NO: 1173713 - DNA, 15 bp, Homo sapiens
gctttgtttctttct

SEQ ID NO: 1173714 - DNA, 15 bp, Homo sapiens
tgctttgtttctttc

SEQ ID NO: 1173715 - DNA, 15 bp, Homo sapiens
atgctttgtttcttt

SEQ ID NO: 1173716 - DNA, 15 bp, Homo sapiens
tatgctttgtttctt

SEQ ID NO: 1173717 - DNA, 15 bp, Homo sapiens
atatgctttgtttct

SEQ ID NO: 1173718 - DNA, 15 bp, Homo sapiens
aatatgctttgtttc

SEQ ID NO: 1173719 - DNA, 15 bp, Homo sapiens
gaatatgctttgttt

SEQ ID NO: 1173720 - DNA, 15 bp, Homo sapiens
tgaatatgctttgtt

SEQ ID NO: 1173721 - DNA, 15 bp, Homo sapiens
ttgaatatgctttgt

SEQ ID NO: 1173722 - DNA, 15 bp, Homo sapiens
tttgaatatgctttg

SEQ ID NO: 1173723 - DNA, 15 bp, Homo sapiens
atttgaatatgcttt

SEQ ID NO: 1173724 - DNA, 15 bp, Homo sapiens
catttgaatatgctt

SEQ ID NO: 1173725 - DNA, 15 bp, Homo sapiens
ccatttgaatatgct

SEQ ID NO: 1173726 - DNA, 15 bp, Homo sapiens
cccatttgaatatgc

SEQ ID NO: 1173727 - DNA, 15 bp, Homo sapiens
tcccatttgaatatg

SEQ ID NO: 1173728 - DNA, 15 bp, Homo sapiens
ttcccatttgaatat

SEQ ID NO: 1173729 - DNA, 15 bp, Homo sapiens
cttcccatttgaata

SEQ ID NO: 1173730 - DNA, 15 bp, Homo sapiens
tcttcccatttgaat

SEQ ID NO: 1173731 - DNA, 15 bp, Homo sapiens
ctcttcccatttgaa

SEQ ID NO: 1173732 - DNA, 15 bp, Homo sapiens
tctcttcccatttga

SEQ ID NO: 1173733 - DNA, 15 bp, Homo sapiens
ctctcttcccatttg

SEQ ID NO: 1173734 - DNA, 15 bp, Homo sapiens
cctctcttcccattt

SEQ ID NO: 1173735 - DNA, 15 bp, Homo sapiens
tcctctcttcccatt

SEQ ID NO: 1173736 - DNA, 15 bp, Homo sapiens
ttcctctcttcccat

SEQ ID NO: 1173737 - DNA, 15 bp, Homo sapiens
cttcctctcttccca

SEQ ID NO: 1173738 - DNA, 15 bp, Homo sapiens
acttcctctcttccc

SEQ ID NO: 1173739 - DNA, 15 bp, Homo sapiens
gacttcctctcttcc

SEQ ID NO: 1173740 - DNA, 15 bp, Homo sapiens
tgacttcctctcttc

SEQ ID NO: 1173741 - DNA, 15 bp, Homo sapiens
ttgacttcctctctt

SEQ ID NO: 1173742 - DNA, 15 bp, Homo sapiens
tttgacttcctctct

SEQ ID NO: 1173743 - DNA, 15 bp, Homo sapiens
atttgacttcctctc

SEQ ID NO: 1173744 - DNA, 15 bp, Homo sapiens
aatttgacttcctct

SEQ ID NO: 1173745 - DNA, 15 bp, Homo sapiens
caatttgacttcctc

SEQ ID NO: 1173746 - DNA, 15 bp, Homo sapiens
acaatttgacttcct

SEQ ID NO: 1173747 - DNA, 15 bp, Homo sapiens
aacaatttgacttcc

SEQ ID NO: 1173748 - DNA, 15 bp, Homo sapiens
aaacaatttgacttc

SEQ ID NO: 1173749 - DNA, 15 bp, Homo sapiens
caaacaatttgactt

SEQ ID NO: 1173750 - DNA, 15 bp, Homo sapiens
acaaacaatttgact

SEQ ID NO: 1173751 - DNA, 15 bp, Homo sapiens
tacaaacaatttgac

SEQ ID NO: 1173752 - DNA, 15 bp, Homo sapiens
ctacaaacaatttga

SEQ ID NO: 1173753 - DNA, 15 bp, Homo sapiens
tctacaaacaatttg

SEQ ID NO: 1173754 - DNA, 15 bp, Homo sapiens
atctacaaacaattt

SEQ ID NO: 1173755 - DNA, 15 bp, Homo sapiens
catctacaaacaatt

SEQ ID NO: 1173756 - DNA, 15 bp, Homo sapiens
tcatctacaaacaat

SEQ ID NO: 1173757 - DNA, 15 bp, Homo sapiens
gtcatctacaaacaa

SEQ ID NO: 1173758 - DNA, 15 bp, Homo sapiens
tgtcatctacaaaca

SEQ ID NO: 1173759 - DNA, 15 bp, Homo sapiens
atgtcatctacaaac

SEQ ID NO: 1173760 - DNA, 15 bp, Homo sapiens
catgtcatctacaaa

SEQ ID NO: 1173761 - DNA, 15 bp, Homo sapiens
tcatgtcatctacaa

SEQ ID NO: 1173762 - DNA, 15 bp, Homo sapiens
atcatgtcatctaca

SEQ ID NO: 1173763 - DNA, 15 bp, Homo sapiens
aatcatgtcatctac

SEQ ID NO: 1173764 - DNA, 15 bp, Homo sapiens
caatcatgtcatcta

SEQ ID NO: 1173765 - DNA, 15 bp, Homo sapiens
acaatcatgtcatct

SEQ ID NO: 1173766 - DNA, 15 bp, Homo sapiens
cacaatcatgtcatc

SEQ ID NO: 1173767 - DNA, 15 bp, Homo sapiens
acacaatcatgtcat

SEQ ID NO: 1173768 - DNA, 15 bp, Homo sapiens
tacacaatcatgtca

SEQ ID NO: 1173769 - DNA, 15 bp, Homo sapiens
atacacaatcatgtc

SEQ ID NO: 1173770 - DNA, 15 bp, Homo sapiens
aatacacaatcatgt

SEQ ID NO: 1173771 - DNA, 15 bp, Homo sapiens
taatacacaatcatg

SEQ ID NO: 1173772 - DNA, 15 bp, Homo sapiens
ttaatacacaatcat

SEQ ID NO: 1173773 - DNA, 15 bp, Homo sapiens
cttaatacacaatca

SEQ ID NO: 1173774 - DNA, 15 bp, Homo sapiens
tcttaatacacaatc

SEQ ID NO: 1173775 - DNA, 15 bp, Homo sapiens
ttcttaatacacaat

SEQ ID NO: 1173776 - DNA, 15 bp, Homo sapiens
tttcttaatacacaa

SEQ ID NO: 1173777 - DNA, 15 bp, Homo sapiens
ttttcttaatacaca

SEQ ID NO: 1173778 - DNA, 15 bp, Homo sapiens
gttttcttaatacac

SEQ ID NO: 1173779 - DNA, 15 bp, Homo sapiens
ggttttcttaataca

SEQ ID NO: 1173780 - DNA, 15 bp, Homo sapiens
gggttttcttaatac

SEQ ID NO: 1173781 - DNA, 15 bp, Homo sapiens
ggggttttcttaata

SEQ ID NO: 1173782 - DNA, 15 bp, Homo sapiens
tggggttttcttaat

SEQ ID NO: 1173783 - DNA, 15 bp, Homo sapiens
atggggttttcttaa

SEQ ID NO: 1173784 - DNA, 15 bp, Homo sapiens
gatggggttttctta

SEQ ID NO: 1173785 - DNA, 15 bp, Homo sapiens
tgatggggttttctt

SEQ ID NO: 1173786 - DNA, 15 bp, Homo sapiens
atgatggggttttct

SEQ ID NO: 1173787 - DNA, 15 bp, Homo sapiens
gatgatggggttttc

SEQ ID NO: 1173788 - DNA, 15 bp, Homo sapiens
agatgatggggtttt

SEQ ID NO: 1173789 - DNA, 15 bp, Homo sapiens
gagatgatggggttt

SEQ ID NO: 1173790 - DNA, 15 bp, Homo sapiens
tgagatgatggggtt

SEQ ID NO: 1173791 - DNA, 15 bp, Homo sapiens
ctgagatgatggggt

SEQ ID NO: 1173792 - DNA, 15 bp, Homo sapiens
gctgagatgatgggg

SEQ ID NO: 1173793 - DNA, 15 bp, Homo sapiens
ggctgagatgatggg

SEQ ID NO: 1173794 - DNA, 15 bp, Homo sapiens
gggctgagatgatgg

SEQ ID NO: 1173795 - DNA, 15 bp, Homo sapiens
ggggctgagatgatg

SEQ ID NO: 1173796 - DNA, 15 bp, Homo sapiens
tggggctgagatgat

SEQ ID NO: 1173797 - DNA, 15 bp, Homo sapiens
ttggggctgagatga

SEQ ID NO: 1173798 - DNA, 15 bp, Homo sapiens
tttggggctgagatg

SEQ ID NO: 1173799 - DNA, 15 bp, Homo sapiens
atttggggctgagat

SEQ ID NO: 1173800 - DNA, 15 bp, Homo sapiens
gatttggggctgaga

SEQ ID NO: 1173801 - DNA, 15 bp, Homo sapiens
agatttggggctgag

SEQ ID NO: 1173802 - DNA, 15 bp, Homo sapiens
gagatttggggctga

SEQ ID NO: 1173803 - DNA, 15 bp, Homo sapiens
ggagatttggggctg

SEQ ID NO: 1173804 - DNA, 15 bp, Homo sapiens
aggagatttggggct

SEQ ID NO: 1173805 - DNA, 15 bp, Homo sapiens
aaggagatttggggc

SEQ ID NO: 1173806 - DNA, 15 bp, Homo sapiens
taaggagatttgggg

SEQ ID NO: 1173807 - DNA, 15 bp, Homo sapiens
ttaaggagatttggg

SEQ ID NO: 1173808 - DNA, 15 bp, Homo sapiens
cttaaggagatttgg

SEQ ID NO: 1173809 - DNA, 15 bp, Homo sapiens
gcttaaggagatttg

SEQ ID NO: 1173810 - DNA, 15 bp, Homo sapiens
agcttaaggagattt

SEQ ID NO: 1173811 - DNA, 15 bp, Homo sapiens
cagcttaaggagatt

SEQ ID NO: 1173812 - DNA, 15 bp, Homo sapiens
tcagcttaaggagat

SEQ ID NO: 1173813 - DNA, 15 bp, Homo sapiens
atcagcttaaggaga

SEQ ID NO: 1173814 - DNA, 15 bp, Homo sapiens
tatcagcttaaggag

SEQ ID NO: 1173815 - DNA, 15 bp, Homo sapiens
ttatcagcttaagga

SEQ ID NO: 1173816 - DNA, 15 bp, Homo sapiens
cttatcagcttaagg

SEQ ID NO: 1173817 - DNA, 15 bp, Homo sapiens
gcttatcagcttaag

SEQ ID NO: 1173818 - DNA, 15 bp, Homo sapiens
tgcttatcagcttaa

SEQ ID NO: 1173819 - DNA, 15 bp, Homo sapiens
gttgcttatcagctt

SEQ ID NO: 1173820 - DNA, 15 bp, Homo sapiens
agttgcttatcagct

SEQ ID NO: 1173821 - DNA, 15 bp, Homo sapiens
aagttgcttatcagc

SEQ ID NO: 1173822 - DNA, 15 bp, Homo sapiens
gaagttgcttatcag

SEQ ID NO: 1173823 - DNA, 15 bp, Homo sapiens
tgaagttgcttatca

SEQ ID NO: 1173824 - DNA, 15 bp, Homo sapiens
ctgaagttgcttatc

SEQ ID NO: 1173825 - DNA, 15 bp, Homo sapiens
gctgaagttgcttat

SEQ ID NO: 1173826 - DNA, 15 bp, Homo sapiens
tgctgaagttgctta

SEQ ID NO: 1173827 - DNA, 15 bp, Homo sapiens
ttgctgaagttgctt

SEQ ID NO: 1173828 - DNA, 15 bp, Homo sapiens
tttgctgaagttgct

SEQ ID NO: 1173829 - DNA, 15 bp, Homo sapiens
ctttgctgaagttgc

SEQ ID NO: 1173830 - DNA, 15 bp, Homo sapiens
actttgctgaagttg

SEQ ID NO: 1173831 - DNA, 15 bp, Homo sapiens
gactttgctgaagtt

SEQ ID NO: 1173832 - DNA, 15 bp, Homo sapiens
agactttgctgaagt

SEQ ID NO: 1173833 - DNA, 15 bp, Homo sapiens
gagactttgctgaag

SEQ ID NO: 1173834 - DNA, 15 bp, Homo sapiens
tgagactttgctgaa

SEQ ID NO: 1173835 - DNA, 15 bp, Homo sapiens
ctgagactttgctga

SEQ ID NO: 1173836 - DNA, 15 bp, Homo sapiens
cctgagactttgctg

SEQ ID NO: 1173837 - DNA, 15 bp, Homo sapiens
tcctgagactttgct

SEQ ID NO: 1173838 - DNA, 15 bp, Homo sapiens
atcctgagactttgc

SEQ ID NO: 1173839 - DNA, 15 bp, Homo sapiens
tatcctgagactttg

SEQ ID NO: 1173840 - DNA, 15 bp, Homo sapiens
gtatcctgagacttt

SEQ ID NO: 1173841 - DNA, 15 bp, Homo sapiens
tgtatcctgagactt

SEQ ID NO: 1173842 - DNA, 15 bp, Homo sapiens
ttgtatcctgagact

SEQ ID NO: 1173843 - DNA, 15 bp, Homo sapiens
tttgtatcctgagac

SEQ ID NO: 1173844 - DNA, 15 bp, Homo sapiens
ctttgtatcctgaga

SEQ ID NO: 1173845 - DNA, 15 bp, Homo sapiens
actttgtatcctgag

SEQ ID NO: 1173846 - DNA, 15 bp, Homo sapiens
gactttgtatcctga

SEQ ID NO: 1173847 - DNA, 15 bp, Homo sapiens
tgactttgtatcctg

SEQ ID NO: 1173848 - DNA, 15 bp, Homo sapiens
ttgactttgtatcct

SEQ ID NO: 1173849 - DNA, 15 bp, Homo sapiens
attgactttgtatcc

SEQ ID NO: 1173850 - DNA, 15 bp, Homo sapiens
cattgactttgtatc

SEQ ID NO: 1173851 - DNA, 15 bp, Homo sapiens
acattgactttgtat

SEQ ID NO: 1173852 - DNA, 15 bp, Homo sapiens
cacattgactttgta

SEQ ID NO: 1173853 - DNA, 15 bp, Homo sapiens
gcacattgactttgt

SEQ ID NO: 1173854 - DNA, 15 bp, Homo sapiens
tgcacattgactttg

SEQ ID NO: 1173855 - DNA, 15 bp, Homo sapiens
ttgcacattgacttt

SEQ ID NO: 1173856 - DNA, 15 bp, Homo sapiens
tttgcacattgactt

SEQ ID NO: 1173857 - DNA, 15 bp, Homo sapiens
ttttgcacattgact

SEQ ID NO: 1173858 - DNA, 15 bp, Homo sapiens
attttgcacattgac

SEQ ID NO: 1173859 - DNA, 15 bp, Homo sapiens
aattttgcacattga

SEQ ID NO: 1173860 - DNA, 15 bp, Homo sapiens
gaattttgcacattg

SEQ ID NO: 1173861 - DNA, 15 bp, Homo sapiens
tgaattttgcacatt

SEQ ID NO: 1173862 - DNA, 15 bp, Homo sapiens
gtgaattttgcacat

SEQ ID NO: 1173863 - DNA, 15 bp, Homo sapiens
tgtgaattttgcaca

SEQ ID NO: 1173864 - DNA, 15 bp, Homo sapiens
ttgtgaattttgcac

SEQ ID NO: 1173865 - DNA, 15 bp, Homo sapiens
cttgtgaattttgca

SEQ ID NO: 1173866 - DNA, 15 bp, Homo sapiens
gcttgtgaattttgc

SEQ ID NO: 1173867 - DNA, 15 bp, Homo sapiens
tgcttgtgaattttg

SEQ ID NO: 1173868 - DNA, 15 bp, Homo sapiens
atgcttgtgaatttt

SEQ ID NO: 1173869 - DNA, 15 bp, Homo sapiens
aatgcttgtgaattt

SEQ ID NO: 1173870 - DNA, 15 bp, Homo sapiens
gaatgcttgtgaatt

SEQ ID NO: 1173871 - DNA, 15 bp, Homo sapiens
ggaatgcttgtgaat

SEQ ID NO: 1173872 - DNA, 15 bp, Homo sapiens
aggaatgcttgtgaa

SEQ ID NO: 1173873 - DNA, 15 bp, Homo sapiens
taggaatgcttgtga

SEQ ID NO: 1173874 - DNA, 15 bp, Homo sapiens
ataggaatgcttgtg

SEQ ID NO: 1173875 - DNA, 15 bp, Homo sapiens
tataggaatgcttgt

SEQ ID NO: 1173876 - DNA, 15 bp, Homo sapiens
gtataggaatgcttg

SEQ ID NO: 1173877 - DNA, 15 bp, Homo sapiens
tgtataggaatgctt

SEQ ID NO: 1173878 - DNA, 15 bp, Homo sapiens
gtgtataggaatgct

SEQ ID NO: 1173879 - DNA, 15 bp, Homo sapiens
ggtgtataggaatgc

SEQ ID NO: 1173880 - DNA, 15 bp, Homo sapiens
tggtgtataggaatg

SEQ ID NO: 1173881 - DNA, 15 bp, Homo sapiens
ttggtgtataggaat

SEQ ID NO: 1173882 - DNA, 15 bp, Homo sapiens
attggtgtataggaa

SEQ ID NO: 1173883 - DNA, 15 bp, Homo sapiens
tattggtgtatagga

SEQ ID NO: 1173884 - DNA, 15 bp, Homo sapiens
ttattggtgtatagg

SEQ ID NO: 1173885 - DNA, 15 bp, Homo sapiens
gttattggtgtatag

SEQ ID NO: 1173886 - DNA, 15 bp, Homo sapiens
tgttattggtgtata

SEQ ID NO: 1173887 - DNA, 15 bp, Homo sapiens
ctgttattggtgtat

SEQ ID NO: 1173888 - DNA, 15 bp, Homo sapiens
tctgttattggtgta

SEQ ID NO: 1173889 - DNA, 15 bp, Homo sapiens
gtctgttattggtgt

SEQ ID NO: 1173890 - DNA, 15 bp, Homo sapiens
tgtctgttattggtg

SEQ ID NO: 1173891 - DNA, 15 bp, Homo sapiens
ttgtctgttattggt

SEQ ID NO: 1173892 - DNA, 15 bp, Homo sapiens
tttgtctgttattgg

SEQ ID NO: 1173893 - DNA, 15 bp, Homo sapiens
gtttgtctgttattg

SEQ ID NO: 1173894 - DNA, 15 bp, Homo sapiens
tgtttgtctgttatt

SEQ ID NO: 1173895 - DNA, 15 bp, Homo sapiens
ctgtttgtctgttat

SEQ ID NO: 1173896 - DNA, 15 bp, Homo sapiens
tctgtttgtctgtta

SEQ ID NO: 1173897 - DNA, 15 bp, Homo sapiens
ctctgtttgtctgtt

SEQ ID NO: 1173898 - DNA, 15 bp, Homo sapiens
tctctgtttgtctgt

SEQ ID NO: 1173899 - DNA, 15 bp, Homo sapiens
ctctctgtttgtctg

SEQ ID NO: 1173900 - DNA, 15 bp, Homo sapiens
gctctctgtttgtct

SEQ ID NO: 1173901 - DNA, 15 bp, Homo sapiens
ggctctctgtttgtc

SEQ ID NO: 1173902 - DNA, 15 bp, Homo sapiens
tggctctctgtttgt

SEQ ID NO: 1173903 - DNA, 15 bp, Homo sapiens
ttggctctctgtttg

SEQ ID NO: 1173904 - DNA, 15 bp, Homo sapiens
atttggctctctgtt

SEQ ID NO: 1173905 - DNA, 15 bp, Homo sapiens
gatttggctctctgt

SEQ ID NO: 1173906 - DNA, 15 bp, Homo sapiens
tgatttggctctctg

SEQ ID NO: 1173907 - DNA, 15 bp, Homo sapiens
atgatttggctctct

SEQ ID NO: 1173908 - DNA, 15 bp, Homo sapiens
catgatttggctctc

SEQ ID NO: 1173909 - DNA, 15 bp, Homo sapiens
tcatgatttggctct

SEQ ID NO: 1173910 - DNA, 15 bp, Homo sapiens
ctcatgatttggctc

SEQ ID NO: 1173911 - DNA, 15 bp, Homo sapiens
actcatgatttggct

SEQ ID NO: 1173912 - DNA, 15 bp, Homo sapiens
cactcatgatttggc

SEQ ID NO: 1173913 - DNA, 15 bp, Homo sapiens
tcactcatgatttgg

SEQ ID NO: 1173914 - DNA, 15 bp, Homo sapiens
ttcactcatgatttg

SEQ ID NO: 1173915 - DNA, 15 bp, Homo sapiens
gttcactcatgattt

SEQ ID NO: 1173916 - DNA, 15 bp, Homo sapiens
agttcactcatgatt

SEQ ID NO: 1173917 - DNA, 15 bp, Homo sapiens
gagttcactcatgat

SEQ ID NO: 1173918 - DNA, 15 bp, Homo sapiens
ggagttcactcatga

SEQ ID NO: 1173919 - DNA, 15 bp, Homo sapiens
gggagttcactcatg

SEQ ID NO: 1173920 - DNA, 15 bp, Homo sapiens
tgggagttcactcat

SEQ ID NO: 1173921 - DNA, 15 bp, Homo sapiens
atgggagttcactca

SEQ ID NO: 1173922 - DNA, 15 bp, Homo sapiens
aatgggagttcactc

SEQ ID NO: 1173923 - DNA, 15 bp, Homo sapiens
taatgggagttcact

SEQ ID NO: 1173924 - DNA, 15 bp, Homo sapiens
ctaatgggagttcac

SEQ ID NO: 1173925 - DNA, 15 bp, Homo sapiens
gctaatgggagttca

SEQ ID NO: 1173926 - DNA, 15 bp, Homo sapiens
tgctaatgggagttc

SEQ ID NO: 1173927 - DNA, 15 bp, Homo sapiens
ttgctaatgggagtt

SEQ ID NO: 1173928 - DNA, 15 bp, Homo sapiens
attgctaatgggagt

SEQ ID NO: 1173929 - DNA, 15 bp, Homo sapiens
aattgctaatgggag

SEQ ID NO: 1173930 - DNA, 15 bp, Homo sapiens
caattgctaatggga

SEQ ID NO: 1173931 - DNA, 15 bp, Homo sapiens
gcaattgctaatggg

SEQ ID NO: 1173932 - DNA, 15 bp, Homo sapiens
agcaattgctaatgg

SEQ ID NO: 1173933 - DNA, 15 bp, Homo sapiens
tagcaattgctaatg

SEQ ID NO: 1173934 - DNA, 15 bp, Homo sapiens
gtagcaattgctaat

SEQ ID NO: 1173935 - DNA, 15 bp, Homo sapiens
tgtagcaattgctaa

SEQ ID NO: 1173936 - DNA, 15 bp, Homo sapiens
ttgtagcaattgcta

SEQ ID NO: 1173937 - DNA, 15 bp, Homo sapiens
tttgtagcaattgct

SEQ ID NO: 1173938 - DNA, 15 bp, Homo sapiens
ctttgtagcaattgc

SEQ ID NO: 1173939 - DNA, 15 bp, Homo sapiens
tctttgtagcaattg

SEQ ID NO: 1173940 - DNA, 15 bp, Homo sapiens
ctctttgtagcaatt

SEQ ID NO: 1173941 - DNA, 15 bp, Homo sapiens
tctctttgtagcaat

SEQ ID NO: 1173942 - DNA, 15 bp, Homo sapiens
ttctctttgtagcaa

SEQ ID NO: 1173943 - DNA, 15 bp, Homo sapiens
attctctttgtagca

SEQ ID NO: 1173944 - DNA, 15 bp, Homo sapiens
tattctctttgtagc

SEQ ID NO: 1173945 - DNA, 15 bp, Homo sapiens
ttattctctttgtag

SEQ ID NO: 1173946 - DNA, 15 bp, Homo sapiens
tttattctctttgta

SEQ ID NO: 1173947 - DNA, 15 bp, Homo sapiens
ttttattctctttgt

SEQ ID NO: 1173948 - DNA, 15 bp, Homo sapiens
attttattctctttg

SEQ ID NO: 1173949 - DNA, 15 bp, Homo sapiens
tattttattctcttt

SEQ ID NO: 1173950 - DNA, 15 bp, Homo sapiens
gtattttattctctt

SEQ ID NO: 1173951 - DNA, 15 bp, Homo sapiens
ggtattttattctct

SEQ ID NO: 1173952 - DNA, 15 bp, Homo sapiens
aggtattttattctc

SEQ ID NO: 1173953 - DNA, 15 bp, Homo sapiens
taggtattttattct

SEQ ID NO: 1173954 - DNA, 15 bp, Homo sapiens
ctaggtattttattc

SEQ ID NO: 1173955 - DNA, 15 bp, Homo sapiens
tctaggtattttatt

SEQ ID NO: 1173956 - DNA, 15 bp, Homo sapiens
ttctaggtattttat

SEQ ID NO: 1173957 - DNA, 15 bp, Homo sapiens
tttctaggtatttta

SEQ ID NO: 1173958 - DNA, 15 bp, Homo sapiens
atttctaggtatttt

SEQ ID NO: 1173959 - DNA, 15 bp, Homo sapiens
tatttctaggtattt

SEQ ID NO: 1173960 - DNA, 15 bp, Homo sapiens
gtatttctaggtatt

SEQ ID NO: 1173961 - DNA, 15 bp, Homo sapiens
tgtatttctaggtat

SEQ ID NO: 1173962 - DNA, 15 bp, Homo sapiens
ttgtatttctaggta

SEQ ID NO: 1173963 - DNA, 15 bp, Homo sapiens
gttgtatttctaggt

SEQ ID NO: 1173964 - DNA, 15 bp, Homo sapiens
agttgtatttctagg

SEQ ID NO: 1173965 - DNA, 15 bp, Homo sapiens
tagttgtatttctag

SEQ ID NO: 1173966 - DNA, 15 bp, Homo sapiens
ttagttgtatttcta

SEQ ID NO: 1173967 - DNA, 15 bp, Homo sapiens
gttagttgtatttct

SEQ ID NO: 1173968 - DNA, 15 bp, Homo sapiens
tgttagttgtatttc

SEQ ID NO: 1173969 - DNA, 15 bp, Homo sapiens
ttgttagttgtattt

SEQ ID NO: 1173970 - DNA, 15 bp, Homo sapiens
cttgttagttgtatt

SEQ ID NO: 1173971 - DNA, 15 bp, Homo sapiens
ccttgttagttgtat

SEQ ID NO: 1173972 - DNA, 15 bp, Homo sapiens
cccttgttagttgta

SEQ ID NO: 1173973 - DNA, 15 bp, Homo sapiens
tcccttgttagttgt

SEQ ID NO: 1173974 - DNA, 15 bp, Homo sapiens
atcccttgttagttg

SEQ ID NO: 1173975 - DNA, 15 bp, Homo sapiens
catcccttgttagtt

SEQ ID NO: 1173976 - DNA, 15 bp, Homo sapiens
acatcccttgttagt

SEQ ID NO: 1173977 - DNA, 15 bp, Homo sapiens
cacatcccttgttag

SEQ ID NO: 1173978 - DNA, 15 bp, Homo sapiens
tcacatcccttgtta

SEQ ID NO: 1173979 - DNA, 15 bp, Homo sapiens
ttcacatcccttgtt

SEQ ID NO: 1173980 - DNA, 15 bp, Homo sapiens
cttcacatcccttgt

SEQ ID NO: 1173981 - DNA, 15 bp, Homo sapiens
ccttcacatcccttg

SEQ ID NO: 1173982 - DNA, 15 bp, Homo sapiens
tccttcacatccctt

SEQ ID NO: 1173983 - DNA, 15 bp, Homo sapiens
gtccttcacatccct

SEQ ID NO: 1173984 - DNA, 15 bp, Homo sapiens
ggtccttcacatccc

SEQ ID NO: 1173985 - DNA, 15 bp, Homo sapiens
aggtccttcacatcc

SEQ ID NO: 1173986 - DNA, 15 bp, Homo sapiens
gaggtccttcacatc

SEQ ID NO: 1173987 - DNA, 15 bp, Homo sapiens
agaggtccttcacat

SEQ ID NO: 1173988 - DNA, 15 bp, Homo sapiens
aagaggtccttcaca

SEQ ID NO: 1173989 - DNA, 15 bp, Homo sapiens
gaagaggtccttcac

SEQ ID NO: 1173990 - DNA, 15 bp, Homo sapiens
tgaagaggtccttca

SEQ ID NO: 1173991 - DNA, 15 bp, Homo sapiens
ttgaagaggtccttc

SEQ ID NO: 1173992 - DNA, 15 bp, Homo sapiens
cttgaagaggtcctt

SEQ ID NO: 1173993 - DNA, 15 bp, Homo sapiens
ccttgaagaggtcct

SEQ ID NO: 1173994 - DNA, 15 bp, Homo sapiens
tccttgaagaggtcc

SEQ ID NO: 1173995 - DNA, 15 bp, Homo sapiens
ctccttgaagaggtc

SEQ ID NO: 1173996 - DNA, 15 bp, Homo sapiens
tctccttgaagaggt

SEQ ID NO: 1173997 - DNA, 15 bp, Homo sapiens
ttctccttgaagagg

SEQ ID NO: 1173998 - DNA, 15 bp, Homo sapiens
gttctccttgaagag

SEQ ID NO: 1173999 - DNA, 15 bp, Homo sapiens
agttctccttgaaga

SEQ ID NO: 1174000 - DNA, 15 bp, Homo sapiens
tagttctccttgaag

SEQ ID NO: 1174001 - DNA, 15 bp, Homo sapiens
gtagttctccttgaa

SEQ ID NO: 1174002 - DNA, 15 bp, Homo sapiens
tgtagttctccttga

SEQ ID NO: 1174003 - DNA, 15 bp, Homo sapiens
ttgtagttctccttg

SEQ ID NO: 1174004 - DNA, 15 bp, Homo sapiens
tttgtagttctcctt

SEQ ID NO: 1174005 - DNA, 15 bp, Homo sapiens
gtttgtagttctcct

SEQ ID NO: 1174006 - DNA, 15 bp, Homo sapiens
ggtttgtagttctcc

SEQ ID NO: 1174007 - DNA, 15 bp, Homo sapiens
tggtttgtagttctc

SEQ ID NO: 1174008 - DNA, 15 bp, Homo sapiens
gtggtttgtagttct

SEQ ID NO: 1174009 - DNA, 15 bp, Homo sapiens
agtggtttgtagttc

SEQ ID NO: 1174010 - DNA, 15 bp, Homo sapiens
cagtggtttgtagtt

SEQ ID NO: 1174011 - DNA, 15 bp, Homo sapiens
gcagtggtttgtagt

SEQ ID NO: 1174012 - DNA, 15 bp, Homo sapiens
agcagtggtttgtag

SEQ ID NO: 1174013 - DNA, 15 bp, Homo sapiens
gagcagtggtttgta

SEQ ID NO: 1174014 - DNA, 15 bp, Homo sapiens
tgagcagtggtttgt

SEQ ID NO: 1174015 - DNA, 15 bp, Homo sapiens
ttgagcagtggtttg

SEQ ID NO: 1174016 - DNA, 15 bp, Homo sapiens
cttgagcagtggttt

SEQ ID NO: 1174017 - DNA, 15 bp, Homo sapiens
ccttgagcagtggtt

SEQ ID NO: 1174018 - DNA, 15 bp, Homo sapiens
tccttgagcagtggt

SEQ ID NO: 1174019 - DNA, 15 bp, Homo sapiens
ttccttgagcagtgg

SEQ ID NO: 1174020 - DNA, 15 bp, Homo sapiens
tttccttgagcagtg

SEQ ID NO: 1174021 - DNA, 15 bp, Homo sapiens
atttccttgagcagt

SEQ ID NO: 1174022 - DNA, 15 bp, Homo sapiens
gatttccttgagcag

SEQ ID NO: 1174023 - DNA, 15 bp, Homo sapiens
tgatttccttgagca

SEQ ID NO: 1174024 - DNA, 15 bp, Homo sapiens
ctgatttccttgagc

SEQ ID NO: 1174025 - DNA, 15 bp, Homo sapiens
tctgatttccttgag

SEQ ID NO: 1174026 - DNA, 15 bp, Homo sapiens
ctctgatttccttga

SEQ ID NO: 1174027 - DNA, 15 bp, Homo sapiens
tctctgatttccttg

SEQ ID NO: 1174028 - DNA, 15 bp, Homo sapiens
ctctctgatttcctt

SEQ ID NO: 1174029 - DNA, 15 bp, Homo sapiens
cctctctgatttcct

SEQ ID NO: 1174030 - DNA, 15 bp, Homo sapiens
tcctctctgatttcc

SEQ ID NO: 1174031 - DNA, 15 bp, Homo sapiens
gtcctctctgatttc

SEQ ID NO: 1174032 - DNA, 15 bp, Homo sapiens
tgtcctctctgattt

SEQ ID NO: 1174033 - DNA, 15 bp, Homo sapiens
gtgtcctctctgatt

SEQ ID NO: 1174034 - DNA, 15 bp, Homo sapiens
tgtgtcctctctgat

SEQ ID NO: 1174035 - DNA, 15 bp, Homo sapiens
ttgtgtcctctctga

SEQ ID NO: 1174036 - DNA, 15 bp, Homo sapiens
tttgtgtcctctctg

SEQ ID NO: 1174037 - DNA, 15 bp, Homo sapiens
gtttgtgtcctctct

SEQ ID NO: 1174038 - DNA, 15 bp, Homo sapiens
tgtttgtgtcctctc

SEQ ID NO: 1174039 - DNA, 15 bp, Homo sapiens
ttgtttgtgtcctct

SEQ ID NO: 1174040 - DNA, 15 bp, Homo sapiens
tttgtttgtgtcctc

SEQ ID NO: 1174041 - DNA, 15 bp, Homo sapiens
atttgtttgtgtcct

SEQ ID NO: 1174042 - DNA, 15 bp, Homo sapiens
catttgtttgtgtcc

SEQ ID NO: 1174043 - DNA, 15 bp, Homo sapiens
tcatttgtttgtgtc

SEQ ID NO: 1174044 - DNA, 15 bp, Homo sapiens
ttcatttgtttgtgt

SEQ ID NO: 1174045 - DNA, 15 bp, Homo sapiens
tttcatttgtttgtg

SEQ ID NO: 1174046 - DNA, 15 bp, Homo sapiens
ttttcatttgtttgt

SEQ ID NO: 1174047 - DNA, 15 bp, Homo sapiens
tttttcatttgtttg

SEQ ID NO: 1174048 - DNA, 15 bp, Homo sapiens
ttttttcatttgttt

SEQ ID NO: 1174049 - DNA, 15 bp, Homo sapiens
attttttcatttgtt

SEQ ID NO: 1174050 - DNA, 15 bp, Homo sapiens
tattttttcatttgt

SEQ ID NO: 1174051 - DNA, 15 bp, Homo sapiens
atattttttcatttg

SEQ ID NO: 1174052 - DNA, 15 bp, Homo sapiens
aatattttttcattt

SEQ ID NO: 1174053 - DNA, 15 bp, Homo sapiens
gaatattttttcatt

SEQ ID NO: 1174054 - DNA, 15 bp, Homo sapiens
agaatattttttcat

SEQ ID NO: 1174055 - DNA, 15 bp, Homo sapiens
tagaatattttttca

SEQ ID NO: 1174056 - DNA, 15 bp, Homo sapiens
atagaatattttttc

SEQ ID NO: 1174057 - DNA, 15 bp, Homo sapiens
catagaatatttttt

SEQ ID NO: 1174058 - DNA, 15 bp, Homo sapiens
gcatagaatattttt

SEQ ID NO: 1174059 - DNA, 15 bp, Homo sapiens
agcatagaatatttt

SEQ ID NO: 1174060 - DNA, 15 bp, Homo sapiens
gagcatagaatattt

SEQ ID NO: 1174061 - DNA, 15 bp, Homo sapiens
tgagcatagaatatt

SEQ ID NO: 1174062 - DNA, 15 bp, Homo sapiens
atgagcatagaatat

SEQ ID NO: 1174063 - DNA, 15 bp, Homo sapiens
catgagcatagaata

SEQ ID NO: 1174064 - DNA, 15 bp, Homo sapiens
ccatgagcatagaat

SEQ ID NO: 1174065 - DNA, 15 bp, Homo sapiens
tccatgagcatagaa

SEQ ID NO: 1174066 - DNA, 15 bp, Homo sapiens
atccatgagcataga

SEQ ID NO: 1174067 - DNA, 15 bp, Homo sapiens
tatccatgagcatag

SEQ ID NO: 1174068 - DNA, 15 bp, Homo sapiens
ctatccatgagcata

SEQ ID NO: 1174069 - DNA, 15 bp, Homo sapiens
cctatccatgagcat

SEQ ID NO: 1174070 - DNA, 15 bp, Homo sapiens
tcctatccatgagca

SEQ ID NO: 1174071 - DNA, 15 bp, Homo sapiens
ttcctatccatgagc

SEQ ID NO: 1174072 - DNA, 15 bp, Homo sapiens
cttcctatccatgag

SEQ ID NO: 1174073 - DNA, 15 bp, Homo sapiens
tcttcctatccatga

SEQ ID NO: 1174074 - DNA, 15 bp, Homo sapiens
ttcttcctatccatg

SEQ ID NO: 1174075 - DNA, 15 bp, Homo sapiens
attcttcctatccat

SEQ ID NO: 1174076 - DNA, 15 bp, Homo sapiens
gattcttcctatcca

SEQ ID NO: 1174077 - DNA, 15 bp, Homo sapiens
tgattcttcctatcc

SEQ ID NO: 1174078 - DNA, 15 bp, Homo sapiens
ttgattcttcctatc

SEQ ID NO: 1174079 - DNA, 15 bp, Homo sapiens
attgattcttcctat

SEQ ID NO: 1174080 - DNA, 15 bp, Homo sapiens
tattgattcttccta

SEQ ID NO: 1174081 - DNA, 15 bp, Homo sapiens
atattgattcttcct

SEQ ID NO: 1174082 - DNA, 15 bp, Homo sapiens
aatattgattcttcc

SEQ ID NO: 1174083 - DNA, 15 bp, Homo sapiens
caatattgattcttc

SEQ ID NO: 1174084 - DNA, 15 bp, Homo sapiens
acaatattgattctt

SEQ ID NO: 1174085 - DNA, 15 bp, Homo sapiens
cacaatattgattct

SEQ ID NO: 1174086 - DNA, 15 bp, Homo sapiens
tcacaatattgattc

SEQ ID NO: 1174087 - DNA, 15 bp, Homo sapiens
ttcacaatattgatt

SEQ ID NO: 1174088 - DNA, 15 bp, Homo sapiens
tttcacaatattgat

SEQ ID NO: 1174089 - DNA, 15 bp, Homo sapiens
ttttcacaatattga

SEQ ID NO: 1174090 - DNA, 15 bp, Homo sapiens
cattttcacaatatt

SEQ ID NO: 1174091 - DNA, 15 bp, Homo sapiens
ccattttcacaatat

SEQ ID NO: 1174092 - DNA, 15 bp, Homo sapiens
accattttcacaata

SEQ ID NO: 1174093 - DNA, 15 bp, Homo sapiens
gaccattttcacaat

SEQ ID NO: 1174094 - DNA, 15 bp, Homo sapiens
tgaccattttcacaa

SEQ ID NO: 1174095 - DNA, 15 bp, Homo sapiens
atgaccattttcaca

SEQ ID NO: 1174096 - DNA, 15 bp, Homo sapiens
tatgaccattttcac

SEQ ID NO: 1174097 - DNA, 15 bp, Homo sapiens
gtatgaccattttca

SEQ ID NO: 1174098 - DNA, 15 bp, Homo sapiens
agtatgaccattttc

SEQ ID NO: 1174099 - DNA, 15 bp, Homo sapiens
cagtatgaccatttt

SEQ ID NO: 1174100 - DNA, 15 bp, Homo sapiens
gcagtatgaccattt

SEQ ID NO: 1174101 - DNA, 15 bp, Homo sapiens
ggcagtatgaccatt

SEQ ID NO: 1174102 - DNA, 15 bp, Homo sapiens
gggcagtatgaccat

SEQ ID NO: 1174103 - DNA, 15 bp, Homo sapiens
tgggcagtatgacca

SEQ ID NO: 1174104 - DNA, 15 bp, Homo sapiens
atgggcagtatgacc

SEQ ID NO: 1174105 - DNA, 15 bp, Homo sapiens
tatgggcagtatgac

SEQ ID NO: 1174106 - DNA, 15 bp, Homo sapiens
ctatgggcagtatga

SEQ ID NO: 1174107 - DNA, 15 bp, Homo sapiens
actatgggcagtatg

SEQ ID NO: 1174108 - DNA, 15 bp, Homo sapiens
tactatgggcagtat

SEQ ID NO: 1174109 - DNA, 15 bp, Homo sapiens
ttactatgggcagta

SEQ ID NO: 1174110 - DNA, 15 bp, Homo sapiens
attactatgggcagt

SEQ ID NO: 1174111 - DNA, 15 bp, Homo sapiens
aattactatgggcag

SEQ ID NO: 1174112 - DNA, 15 bp, Homo sapiens
aaattactatgggca

SEQ ID NO: 1174113 - DNA, 15 bp, Homo sapiens
taaattactatgggc

SEQ ID NO: 1174114 - DNA, 15 bp, Homo sapiens
ataaattactatggg

SEQ ID NO: 1174115 - DNA, 15 bp, Homo sapiens
tataaattactatgg

SEQ ID NO: 1174116 - DNA, 15 bp, Homo sapiens
ctataaattactatg

SEQ ID NO: 1174117 - DNA, 15 bp, Homo sapiens
tctataaattactat

SEQ ID NO: 1174118 - DNA, 15 bp, Homo sapiens
atctataaattacta

SEQ ID NO: 1174119 - DNA, 15 bp, Homo sapiens
aatctataaattact

SEQ ID NO: 1174120 - DNA, 15 bp, Homo sapiens
gaatctataaattac

SEQ ID NO: 1174121 - DNA, 15 bp, Homo sapiens
tgaatctataaatta

SEQ ID NO: 1174122 - DNA, 15 bp, Homo sapiens
ttgaatctataaatt

SEQ ID NO: 1174123 - DNA, 15 bp, Homo sapiens
attgaatctataaat

SEQ ID NO: 1174124 - DNA, 15 bp, Homo sapiens
cattgaatctataaa

SEQ ID NO: 1174125 - DNA, 15 bp, Homo sapiens
gcattgaatctataa

SEQ ID NO: 1174126 - DNA, 15 bp, Homo sapiens
agcattgaatctata

SEQ ID NO: 1174127 - DNA, 15 bp, Homo sapiens
tagcattgaatctat

SEQ ID NO: 1174128 - DNA, 15 bp, Homo sapiens
atagcattgaatcta

SEQ ID NO: 1174129 - DNA, 15 bp, Homo sapiens
aatagcattgaatct

SEQ ID NO: 1174130 - DNA, 15 bp, Homo sapiens
gaatagcattgaatc

SEQ ID NO: 1174131 - DNA, 15 bp, Homo sapiens
ggaatagcattgaat

SEQ ID NO: 1174132 - DNA, 15 bp, Homo sapiens
gggaatagcattgaa

SEQ ID NO: 1174133 - DNA, 15 bp, Homo sapiens
tgggaatagcattga

SEQ ID NO: 1174134 - DNA, 15 bp, Homo sapiens
atgggaatagcattg

SEQ ID NO: 1174135 - DNA, 15 bp, Homo sapiens
gatgggaatagcatt

SEQ ID NO: 1174136 - DNA, 15 bp, Homo sapiens
tgatgggaatagcat

SEQ ID NO: 1174137 - DNA, 15 bp, Homo sapiens
ttgatgggaatagca

SEQ ID NO: 1174138 - DNA, 15 bp, Homo sapiens
cttgatgggaatagc

SEQ ID NO: 1174139 - DNA, 15 bp, Homo sapiens
ccttgatgggaatag

SEQ ID NO: 1174140 - DNA, 15 bp, Homo sapiens
accttgatgggaata

SEQ ID NO: 1174141 - DNA, 15 bp, Homo sapiens
taccttgatgggaat

SEQ ID NO: 1174142 - DNA, 15 bp, Homo sapiens
gtaccttgatgggaa

SEQ ID NO: 1174143 - DNA, 15 bp, Homo sapiens
ggtaccttgatggga

SEQ ID NO: 1174144 - DNA, 15 bp, Homo sapiens
tggtaccttgatggg

SEQ ID NO: 1174145 - DNA, 15 bp, Homo sapiens
atggtaccttgatgg

SEQ ID NO: 1174146 - DNA, 15 bp, Homo sapiens
aatggtaccttgatg

SEQ ID NO: 1174147 - DNA, 15 bp, Homo sapiens
caatggtaccttgat

SEQ ID NO: 1174148 - DNA, 15 bp, Homo sapiens
tcaatggtaccttga

SEQ ID NO: 1174149 - DNA, 15 bp, Homo sapiens
gtcaatggtaccttg

SEQ ID NO: 1174150 - DNA, 15 bp, Homo sapiens
agtcaatggtacctt

SEQ ID NO: 1174151 - DNA, 15 bp, Homo sapiens
aagtcaatggtacct

SEQ ID NO: 1174152 - DNA, 15 bp, Homo sapiens
aaagtcaatggtacc

SEQ ID NO: 1174153 - DNA, 15 bp, Homo sapiens
gaaagtcaatggtac

SEQ ID NO: 1174154 - DNA, 15 bp, Homo sapiens
agaaagtcaatggta

SEQ ID NO: 1174155 - DNA, 15 bp, Homo sapiens
aagaaagtcaatggt

SEQ ID NO: 1174156 - DNA, 15 bp, Homo sapiens
gaagaaagtcaatgg

SEQ ID NO: 1174157 - DNA, 15 bp, Homo sapiens
tgaagaaagtcaatg

SEQ ID NO: 1174158 - DNA, 15 bp, Homo sapiens
gtgaagaaagtcaat

SEQ ID NO: 1174159 - DNA, 15 bp, Homo sapiens
tgtgaagaaagtcaa

SEQ ID NO: 1174160 - DNA, 15 bp, Homo sapiens
ctgtgaagaaagtca

SEQ ID NO: 1174161 - DNA, 15 bp, Homo sapiens
tctgtgaagaaagtc

SEQ ID NO: 1174162 - DNA, 15 bp, Homo sapiens
ttctgtgaagaaagt

SEQ ID NO: 1174163 - DNA, 15 bp, Homo sapiens
attctgtgaagaaag

SEQ ID NO: 1174164 - DNA, 15 bp, Homo sapiens
aattctgtgaagaaa

SEQ ID NO: 1174165 - DNA, 15 bp, Homo sapiens
taattctgtgaagaa

SEQ ID NO: 1174166 - DNA, 15 bp, Homo sapiens
ctaattctgtgaaga

SEQ ID NO: 1174167 - DNA, 15 bp, Homo sapiens
tctaattctgtgaag

SEQ ID NO: 1174168 - DNA, 15 bp, Homo sapiens
ttctaattctgtgaa

SEQ ID NO: 1174169 - DNA, 15 bp, Homo sapiens
tttctaattctgtga

SEQ ID NO: 1174170 - DNA, 15 bp, Homo sapiens
ttttctaattctgtg

SEQ ID NO: 1174171 - DNA, 15 bp, Homo sapiens
tttttctaattctgt

SEQ ID NO: 1174172 - DNA, 15 bp, Homo sapiens
ttttttctaattctg

SEQ ID NO: 1174173 - DNA, 15 bp, Homo sapiens
tttttttctaattct

SEQ ID NO: 1174174 - DNA, 15 bp, Homo sapiens
ttttttttctaattc

SEQ ID NO: 1174175 - DNA, 15 bp, Homo sapiens
tttttttttctaatt

SEQ ID NO: 1174176 - DNA, 15 bp, Homo sapiens
ttttttttttctaat

SEQ ID NO: 1174177 - DNA, 15 bp, Homo sapiens
tttttttttttctaa

SEQ ID NO: 1174178 - DNA, 15 bp, Homo sapiens
gtttttttttttcta

SEQ ID NO: 1174179 - DNA, 15 bp, Homo sapiens
agtttttttttttct

SEQ ID NO: 1174180 - DNA, 15 bp, Homo sapiens
tagtttttttttttc

SEQ ID NO: 1174181 - DNA, 15 bp, Homo sapiens
gtagttttttttttt

SEQ ID NO: 1174182 - DNA, 15 bp, Homo sapiens
agtagtttttttttt

SEQ ID NO: 1174183 - DNA, 15 bp, Homo sapiens
aagtagttttttttt

SEQ ID NO: 1174184 - DNA, 15 bp, Homo sapiens
aaagtagtttttttt

SEQ ID NO: 1174185 - DNA, 15 bp, Homo sapiens
taaagtagttttttt

SEQ ID NO: 1174186 - DNA, 15 bp, Homo sapiens
ttaaagtagtttttt

SEQ ID NO: 1174187 - DNA, 15 bp, Homo sapiens
tttaaagtagttttt

SEQ ID NO: 1174188 - DNA, 15 bp, Homo sapiens
atttaaagtagtttt

SEQ ID NO: 1174189 - DNA, 15 bp, Homo sapiens
aatttaaagtagttt

SEQ ID NO: 1174190 - DNA, 15 bp, Homo sapiens
aaatttaaagtagtt

SEQ ID NO: 1174191 - DNA, 15 bp, Homo sapiens
gaaatttaaagtagt

SEQ ID NO: 1174192 - DNA, 15 bp, Homo sapiens
tgaaatttaaagtag

SEQ ID NO: 1174193 - DNA, 15 bp, Homo sapiens
atgaaatttaaagta

SEQ ID NO: 1174194 - DNA, 15 bp, Homo sapiens
tatgaaatttaaagt

SEQ ID NO: 1174195 - DNA, 15 bp, Homo sapiens
atatgaaatttaaag

SEQ ID NO: 1174196 - DNA, 15 bp, Homo sapiens
catatgaaatttaaa

SEQ ID NO: 1174197 - DNA, 15 bp, Homo sapiens
ccatatgaaatttaa

SEQ ID NO: 1174198 - DNA, 15 bp, Homo sapiens
tccatatgaaattta

SEQ ID NO: 1174199 - DNA, 15 bp, Homo sapiens
ttccatatgaaattt

SEQ ID NO: 1174200 - DNA, 15 bp, Homo sapiens
gttccatatgaaatt

SEQ ID NO: 1174201 - DNA, 15 bp, Homo sapiens
ggttccatatgaaat

SEQ ID NO: 1174202 - DNA, 15 bp, Homo sapiens
tggttccatatgaaa

SEQ ID NO: 1174203 - DNA, 15 bp, Homo sapiens
ttggttccatatgaa

SEQ ID NO: 1174204 - DNA, 15 bp, Homo sapiens
tttggttccatatga

SEQ ID NO: 1174205 - DNA, 15 bp, Homo sapiens
ttttggttccatatg

SEQ ID NO: 1174206 - DNA, 15 bp, Homo sapiens
tttttggttccatat

SEQ ID NO: 1174207 - DNA, 15 bp, Homo sapiens
ttttttggttccata

SEQ ID NO: 1174208 - DNA, 15 bp, Homo sapiens
tttttttggttccat

SEQ ID NO: 1174209 - DNA, 15 bp, Homo sapiens
atttttttggttcca

SEQ ID NO: 1174210 - DNA, 15 bp, Homo sapiens
catttttttggttcc

SEQ ID NO: 1174211 - DNA, 15 bp, Homo sapiens
gcatttttttggttc

SEQ ID NO: 1174212 - DNA, 15 bp, Homo sapiens
ggcatttttttggtt

SEQ ID NO: 1174213 - DNA, 15 bp, Homo sapiens
gggcatttttttggt

SEQ ID NO: 1174214 - DNA, 15 bp, Homo sapiens
cgggcatttttttgg

SEQ ID NO: 1174215 - DNA, 15 bp, Homo sapiens
acgggcatttttttg

SEQ ID NO: 1174216 - DNA, 15 bp, Homo sapiens
cacgggcattttttt

SEQ ID NO: 1174217 - DNA, 15 bp, Homo sapiens
acacgggcatttttt

SEQ ID NO: 1174218 - DNA, 15 bp, Homo sapiens
tacacgggcattttt

SEQ ID NO: 1174219 - DNA, 15 bp, Homo sapiens
ctacacgggcatttt

SEQ ID NO: 1174220 - DNA, 15 bp, Homo sapiens
gctacacgggcattt

SEQ ID NO: 1174221 - DNA, 15 bp, Homo sapiens
ggctacacgggcatt

SEQ ID NO: 1174222 - DNA, 15 bp, Homo sapiens
tggctacacgggcat

SEQ ID NO: 1174223 - DNA, 15 bp, Homo sapiens
ttggctacacgggca

SEQ ID NO: 1174224 - DNA, 15 bp, Homo sapiens
cttggctacacgggc

SEQ ID NO: 1174225 - DNA, 15 bp, Homo sapiens
tcttggctacacggg

SEQ ID NO: 1174226 - DNA, 15 bp, Homo sapiens
gtcttggctacacgg

SEQ ID NO: 1174227 - DNA, 15 bp, Homo sapiens
tgtcttggctacacg

SEQ ID NO: 1174228 - DNA, 15 bp, Homo sapiens
ttgtcttggctacac

SEQ ID NO: 1174229 - DNA, 15 bp, Homo sapiens
attgtcttggctaca

SEQ ID NO: 1174230 - DNA, 15 bp, Homo sapiens
gattgtcttggctac

SEQ ID NO: 1174231 - DNA, 15 bp, Homo sapiens
ggattgtcttggcta

SEQ ID NO: 1174232 - DNA, 15 bp, Homo sapiens
aggattgtcttggct

SEQ ID NO: 1174233 - DNA, 15 bp, Homo sapiens
taggattgtcttggc

SEQ ID NO: 1174234 - DNA, 15 bp, Homo sapiens
ttaggattgtcttgg

SEQ ID NO: 1174235 - DNA, 15 bp, Homo sapiens
cttaggattgtcttg

SEQ ID NO: 1174236 - DNA, 15 bp, Homo sapiens
gcttaggattgtctt

SEQ ID NO: 1174237 - DNA, 15 bp, Homo sapiens
tgcttaggattgtct

SEQ ID NO: 1174238 - DNA, 15 bp, Homo sapiens
ttgcttaggattgtc

SEQ ID NO: 1174239 - DNA, 15 bp, Homo sapiens
tttgcttaggattgt

SEQ ID NO: 1174240 - DNA, 15 bp, Homo sapiens
ttttgcttaggattg

SEQ ID NO: 1174241 - DNA, 15 bp, Homo sapiens
cttttgcttaggatt

SEQ ID NO: 1174242 - DNA, 15 bp, Homo sapiens
ccttttgcttaggat

SEQ ID NO: 1174243 - DNA, 15 bp, Homo sapiens
tccttttgcttagga

SEQ ID NO: 1174244 - DNA, 15 bp, Homo sapiens
ttccttttgcttagg

SEQ ID NO: 1174245 - DNA, 15 bp, Homo sapiens
gttccttttgcttag

SEQ ID NO: 1174246 - DNA, 15 bp, Homo sapiens
tgttccttttgctta

SEQ ID NO: 1174247 - DNA, 15 bp, Homo sapiens
ttgttccttttgctt

SEQ ID NO: 1174248 - DNA, 15 bp, Homo sapiens
tttgttccttttgct

SEQ ID NO: 1174249 - DNA, 15 bp, Homo sapiens
ctttgttccttttgc

SEQ ID NO: 1174250 - DNA, 15 bp, Homo sapiens
actttgttccttttg

SEQ ID NO: 1174251 - DNA, 15 bp, Homo sapiens
cactttgttcctttt

SEQ ID NO: 1174252 - DNA, 15 bp, Homo sapiens
ccactttgttccttt

SEQ ID NO: 1174253 - DNA, 15 bp, Homo sapiens
tccactttgttcctt

SEQ ID NO: 1174254 - DNA, 15 bp, Homo sapiens
ctccactttgttcct

SEQ ID NO: 1174255 - DNA, 15 bp, Homo sapiens
cctccactttgttcc

SEQ ID NO: 1174256 - DNA, 15 bp, Homo sapiens
gcctccactttgttc

SEQ ID NO: 1174257 - DNA, 15 bp, Homo sapiens
tgcctccactttgtt

SEQ ID NO: 1174258 - DNA, 15 bp, Homo sapiens
atgcctccactttgt

SEQ ID NO: 1174259 - DNA, 15 bp, Homo sapiens
gatgcctccactttg

SEQ ID NO: 1174260 - DNA, 15 bp, Homo sapiens
tgatgcctccacttt

SEQ ID NO: 1174261 - DNA, 15 bp, Homo sapiens
atgatgcctccactt

SEQ ID NO: 1174262 - DNA, 15 bp, Homo sapiens
catgatgcctccact

SEQ ID NO: 1174263 - DNA, 15 bp, Homo sapiens
gcatgatgcctccac

SEQ ID NO: 1174264 - DNA, 15 bp, Homo sapiens
agcatgatgcctcca

SEQ ID NO: 1174265 - DNA, 15 bp, Homo sapiens
tagcatgatgcctcc

SEQ ID NO: 1174266 - DNA, 15 bp, Homo sapiens
gtagcatgatgcctc

SEQ ID NO: 1174267 - DNA, 15 bp, Homo sapiens
ggtagcatgatgcct

SEQ ID NO: 1174268 - DNA, 15 bp, Homo sapiens
aggtagcatgatgcc

SEQ ID NO: 1174269 - DNA, 15 bp, Homo sapiens
caggtagcatgatgc

SEQ ID NO: 1174270 - DNA, 15 bp, Homo sapiens
tcaggtagcatgatg

SEQ ID NO: 1174271 - DNA, 15 bp, Homo sapiens
gtcaggtagcatgat

SEQ ID NO: 1174272 - DNA, 15 bp, Homo sapiens
agtcaggtagcatga

SEQ ID NO: 1174273 - DNA, 15 bp, Homo sapiens
aagtcaggtagcatg

SEQ ID NO: 1174274 - DNA, 15 bp, Homo sapiens
aaagtcaggtagcat

SEQ ID NO: 1174275 - DNA, 15 bp, Homo sapiens
taaagtcaggtagca

SEQ ID NO: 1174276 - DNA, 15 bp, Homo sapiens
ttaaagtcaggtagc

SEQ ID NO: 1174277 - DNA, 15 bp, Homo sapiens
tttaaagtcaggtag

SEQ ID NO: 1174278 - DNA, 15 bp, Homo sapiens
gtttaaagtcaggta

SEQ ID NO: 1174279 - DNA, 15 bp, Homo sapiens
agtttaaagtcaggt

SEQ ID NO: 1174280 - DNA, 15 bp, Homo sapiens
tagtttaaagtcagg

SEQ ID NO: 1174281 - DNA, 15 bp, Homo sapiens
gtagtttaaagtcag

SEQ ID NO: 1174282 - DNA, 15 bp, Homo sapiens
tgtagtttaaagtca

SEQ ID NO: 1174283 - DNA, 15 bp, Homo sapiens
gtgtagtttaaagtc

SEQ ID NO: 1174284 - DNA, 15 bp, Homo sapiens
agtgtagtttaaagt

SEQ ID NO: 1174285 - DNA, 15 bp, Homo sapiens
tagtgtagtttaaag

SEQ ID NO: 1174286 - DNA, 15 bp, Homo sapiens
gtagtgtagtttaaa

SEQ ID NO: 1174287 - DNA, 15 bp, Homo sapiens
tgtagtgtagtttaa

SEQ ID NO: 1174288 - DNA, 15 bp, Homo sapiens
ttgtagtgtagttta

SEQ ID NO: 1174289 - DNA, 15 bp, Homo sapiens
cttgtagtgtagttt

SEQ ID NO: 1174290 - DNA, 15 bp, Homo sapiens
ccttgtagtgtagtt

SEQ ID NO: 1174291 - DNA, 15 bp, Homo sapiens
gccttgtagtgtagt

SEQ ID NO: 1174292 - DNA, 15 bp, Homo sapiens
agccttgtagtgtag

SEQ ID NO: 1174293 - DNA, 15 bp, Homo sapiens
tagccttgtagtgta

SEQ ID NO: 1174294 - DNA, 15 bp, Homo sapiens
gtagccttgtagtgt

SEQ ID NO: 1174295 - DNA, 15 bp, Homo sapiens
tgtagccttgtagtg

SEQ ID NO: 1174296 - DNA, 15 bp, Homo sapiens
ctgtagccttgtagt

SEQ ID NO: 1174297 - DNA, 15 bp, Homo sapiens
actgtagccttgtag

SEQ ID NO: 1174298 - DNA, 15 bp, Homo sapiens
tactgtagccttgta

SEQ ID NO: 1174299 - DNA, 15 bp, Homo sapiens
ttactgtagccttgt

SEQ ID NO: 1174300 - DNA, 15 bp, Homo sapiens
gttactgtagccttg

SEQ ID NO: 1174301 - DNA, 15 bp, Homo sapiens
ggttactgtagcctt

SEQ ID NO: 1174302 - DNA, 15 bp, Homo sapiens
tggttactgtagcct

SEQ ID NO: 1174303 - DNA, 15 bp, Homo sapiens
ttggttactgtagcc

SEQ ID NO: 1174304 - DNA, 15 bp, Homo sapiens
tttggttactgtagc

SEQ ID NO: 1174305 - DNA, 15 bp, Homo sapiens
ttttggttactgtag

SEQ ID NO: 1174306 - DNA, 15 bp, Homo sapiens
gttttggttactgta

SEQ ID NO: 1174307 - DNA, 15 bp, Homo sapiens
tgttttggttactgt

SEQ ID NO: 1174308 - DNA, 15 bp, Homo sapiens
ctgttttggttactg

SEQ ID NO: 1174309 - DNA, 15 bp, Homo sapiens
gctgttttggttact

SEQ ID NO: 1174310 - DNA, 15 bp, Homo sapiens
tgctgttttggttac

SEQ ID NO: 1174311 - DNA, 15 bp, Homo sapiens
atgctgttttggtta

SEQ ID NO: 1174312 - DNA, 15 bp, Homo sapiens
catgctgttttggtt

SEQ ID NO: 1174313 - DNA, 15 bp, Homo sapiens
ccatgctgttttggt

SEQ ID NO: 1174314 - DNA, 15 bp, Homo sapiens
accatgctgttttgg

SEQ ID NO: 1174315 - DNA, 15 bp, Homo sapiens
taccatgctgttttg

SEQ ID NO: 1174316 - DNA, 15 bp, Homo sapiens
gtaccatgctgtttt

SEQ ID NO: 1174317 - DNA, 15 bp, Homo sapiens
agtaccatgctgttt

SEQ ID NO: 1174318 - DNA, 15 bp, Homo sapiens
cagtaccatgctgtt

SEQ ID NO: 1174319 - DNA, 15 bp, Homo sapiens
ccagtaccatgctgt

SEQ ID NO: 1174320 - DNA, 15 bp, Homo sapiens
accagtaccatgctg

SEQ ID NO: 1174321 - DNA, 15 bp, Homo sapiens
taccagtaccatgct

SEQ ID NO: 1174322 - DNA, 15 bp, Homo sapiens
gtaccagtaccatgc

SEQ ID NO: 1174323 - DNA, 15 bp, Homo sapiens
ggtaccagtaccatg

SEQ ID NO: 1174324 - DNA, 15 bp, Homo sapiens
tggtaccagtaccat

SEQ ID NO: 1174325 - DNA, 15 bp, Homo sapiens
ttggtaccagtacca

SEQ ID NO: 1174326 - DNA, 15 bp, Homo sapiens
tttggtaccagtacc

SEQ ID NO: 1174327 - DNA, 15 bp, Homo sapiens
ttttggtaccagtac

SEQ ID NO: 1174328 - DNA, 15 bp, Homo sapiens
gttttggtaccagta

SEQ ID NO: 1174329 - DNA, 15 bp, Homo sapiens
ggttttggtaccagt

SEQ ID NO: 1174330 - DNA, 15 bp, Homo sapiens
cggttttggtaccag

SEQ ID NO: 1174331 - DNA, 15 bp, Homo sapiens
tcggttttggtacca

SEQ ID NO: 1174332 - DNA, 15 bp, Homo sapiens
atcggttttggtacc

SEQ ID NO: 1174333 - DNA, 15 bp, Homo sapiens
tatcggttttggtac

SEQ ID NO: 1174334 - DNA, 15 bp, Homo sapiens
ttatcggttttggta

SEQ ID NO: 1174335 - DNA, 15 bp, Homo sapiens
tttatcggttttggt

SEQ ID NO: 1174336 - DNA, 15 bp, Homo sapiens
atttatcggttttgg

SEQ ID NO: 1174337 - DNA, 15 bp, Homo sapiens
tatttatcggttttg

SEQ ID NO: 1174338 - DNA, 15 bp, Homo sapiens
ctatttatcggtttt

SEQ ID NO: 1174339 - DNA, 15 bp, Homo sapiens
actatttatcggttt

SEQ ID NO: 1174340 - DNA, 15 bp, Homo sapiens
gactatttatcggtt

SEQ ID NO: 1174341 - DNA, 15 bp, Homo sapiens
ggactatttatcggt

SEQ ID NO: 1174342 - DNA, 15 bp, Homo sapiens
tggactatttatcgg

SEQ ID NO: 1174343 - DNA, 15 bp, Homo sapiens
ttggactatttatcg

SEQ ID NO: 1174344 - DNA, 15 bp, Homo sapiens
attggactatttatc

SEQ ID NO: 1174345 - DNA, 15 bp, Homo sapiens
cattggactatttat

SEQ ID NO: 1174346 - DNA, 15 bp, Homo sapiens
ccattggactattta

SEQ ID NO: 1174347 - DNA, 15 bp, Homo sapiens
tccattggactattt

SEQ ID NO: 1174348 - DNA, 15 bp, Homo sapiens
ttccattggactatt

SEQ ID NO: 1174349 - DNA, 15 bp, Homo sapiens
gttccattggactat

SEQ ID NO: 1174350 - DNA, 15 bp, Homo sapiens
tgttccattggacta

SEQ ID NO: 1174351 - DNA, 15 bp, Homo sapiens
ctgttccattggact

SEQ ID NO: 1174352 - DNA, 15 bp, Homo sapiens
tctgttccattggac

SEQ ID NO: 1174353 - DNA, 15 bp, Homo sapiens
ttctgttccattgga

SEQ ID NO: 1174354 - DNA, 15 bp, Homo sapiens
gttctgttccattgg

SEQ ID NO: 1174355 - DNA, 15 bp, Homo sapiens
ctctgttctgttcca

SEQ ID NO: 1174356 - DNA, 15 bp, Homo sapiens
cctctgttctgttcc

SEQ ID NO: 1174357 - DNA, 15 bp, Homo sapiens
gcctctgttctgttc

SEQ ID NO: 1174358 - DNA, 15 bp, Homo sapiens
ggcctctgttctgtt

SEQ ID NO: 1174359 - DNA, 15 bp, Homo sapiens
aggcctctgttctgt

SEQ ID NO: 1174360 - DNA, 15 bp, Homo sapiens
gaggcctctgttctg

SEQ ID NO: 1174361 - DNA, 15 bp, Homo sapiens
tgaggcctctgttct

SEQ ID NO: 1174362 - DNA, 15 bp, Homo sapiens
ctgaggcctctgttc

SEQ ID NO: 1174363 - DNA, 15 bp, Homo sapiens
tctgaggcctctgtt

SEQ ID NO: 1174364 - DNA, 15 bp, Homo sapiens
ttctgaggcctctgt

SEQ ID NO: 1174365 - DNA, 15 bp, Homo sapiens
tttctgaggcctctg

SEQ ID NO: 1174366 - DNA, 15 bp, Homo sapiens
atttctgaggcctct

SEQ ID NO: 1174367 - DNA, 15 bp, Homo sapiens
tatttctgaggcctc

SEQ ID NO: 1174368 - DNA, 15 bp, Homo sapiens
ctatttctgaggcct

SEQ ID NO: 1174369 - DNA, 15 bp, Homo sapiens
actatttctgaggcc

SEQ ID NO: 1174370 - DNA, 15 bp, Homo sapiens
cactatttctgaggc

SEQ ID NO: 1174371 - DNA, 15 bp, Homo sapiens
gcactatttctgagg

SEQ ID NO: 1174372 - DNA, 15 bp, Homo sapiens
ggcactatttctgag

SEQ ID NO: 1174373 - DNA, 15 bp, Homo sapiens
tggcactatttctga

SEQ ID NO: 1174374 - DNA, 15 bp, Homo sapiens
gtggcactatttctg

SEQ ID NO: 1174375 - DNA, 15 bp, Homo sapiens
tgtggcactatttct

SEQ ID NO: 1174376 - DNA, 15 bp, Homo sapiens
gtgtggcactatttc

SEQ ID NO: 1174377 - DNA, 15 bp, Homo sapiens
tgtgtggcactattt

SEQ ID NO: 1174378 - DNA, 15 bp, Homo sapiens
atgtgtggcactatt

SEQ ID NO: 1174379 - DNA, 15 bp, Homo sapiens
gatgtgtggcactat

SEQ ID NO: 1174380 - DNA, 15 bp, Homo sapiens
agatgtgtggcacta

SEQ ID NO: 1174381 - DNA, 15 bp, Homo sapiens
tagatgtgtggcact

SEQ ID NO: 1174382 - DNA, 15 bp, Homo sapiens
gtagatgtgtggcac

SEQ ID NO: 1174383 - DNA, 15 bp, Homo sapiens
tgtagatgtgtggca

SEQ ID NO: 1174384 - DNA, 15 bp, Homo sapiens
ttgtagatgtgtggc

SEQ ID NO: 1174385 - DNA, 15 bp, Homo sapiens
gttgtagatgtgtgg

SEQ ID NO: 1174386 - DNA, 15 bp, Homo sapiens
ggttgtagatgtgtg

SEQ ID NO: 1174387 - DNA, 15 bp, Homo sapiens
tggttgtagatgtgt

SEQ ID NO: 1174388 - DNA, 15 bp, Homo sapiens
atggttgtagatgtg

SEQ ID NO: 1174389 - DNA, 15 bp, Homo sapiens
gatggttgtagatgt

SEQ ID NO: 1174390 - DNA, 15 bp, Homo sapiens
agatggttgtagatg

SEQ ID NO: 1174391 - DNA, 15 bp, Homo sapiens
cagatggttgtagat

SEQ ID NO: 1174392 - DNA, 15 bp, Homo sapiens
tcagatggttgtaga

SEQ ID NO: 1174393 - DNA, 15 bp, Homo sapiens
atcagatggttgtag

SEQ ID NO: 1174394 - DNA, 15 bp, Homo sapiens
gatcagatggttgta

SEQ ID NO: 1174395 - DNA, 15 bp, Homo sapiens
agatcagatggttgt

SEQ ID NO: 1174396 - DNA, 15 bp, Homo sapiens
aagatcagatggttg

SEQ ID NO: 1174397 - DNA, 15 bp, Homo sapiens
aaagatcagatggtt

SEQ ID NO: 1174398 - DNA, 15 bp, Homo sapiens
caaagatcagatggt

SEQ ID NO: 1174399 - DNA, 15 bp, Homo sapiens
tcaaagatcagatgg

SEQ ID NO: 1174400 - DNA, 15 bp, Homo sapiens
gtcaaagatcagatg

SEQ ID NO: 1174401 - DNA, 15 bp, Homo sapiens
tttgtcaaagatcag

SEQ ID NO: 1174402 - DNA, 15 bp, Homo sapiens
gtttgtcaaagatca

SEQ ID NO: 1174403 - DNA, 15 bp, Homo sapiens
ggtttgtcaaagatc

SEQ ID NO: 1174404 - DNA, 15 bp, Homo sapiens
aggtttgtcaaagat

SEQ ID NO: 1174405 - DNA, 15 bp, Homo sapiens
caggtttgtcaaaga

SEQ ID NO: 1174406 - DNA, 15 bp, Homo sapiens
gcaggtttgtcaaag

SEQ ID NO: 1174407 - DNA, 15 bp, Homo sapiens
tgcaggtttgtcaaa

SEQ ID NO: 1174408 - DNA, 15 bp, Homo sapiens
ttgcaggtttgtcaa

SEQ ID NO: 1174409 - DNA, 15 bp, Homo sapiens
attgcaggtttgtca

SEQ ID NO: 1174410 - DNA, 15 bp, Homo sapiens
cattgcaggtttgtc

SEQ ID NO: 1174411 - DNA, 15 bp, Homo sapiens
ccattgcaggtttgt

SEQ ID NO: 1174412 - DNA, 15 bp, Homo sapiens
tccattgcaggtttg

SEQ ID NO: 1174413 - DNA, 15 bp, Homo sapiens
ctccattgcaggttt

SEQ ID NO: 1174414 - DNA, 15 bp, Homo sapiens
cctccattgcaggtt

SEQ ID NO: 1174415 - DNA, 15 bp, Homo sapiens
acctccattgcaggt

SEQ ID NO: 1174416 - DNA, 15 bp, Homo sapiens
aacctccattgcagg

SEQ ID NO: 1174417 - DNA, 15 bp, Homo sapiens
aaacctccattgcag

SEQ ID NO: 1174418 - DNA, 15 bp, Homo sapiens
aaaacctccattgca

SEQ ID NO: 1174419 - DNA, 15 bp, Homo sapiens
aaaaacctccattgc

SEQ ID NO: 1174420 - DNA, 15 bp, Homo sapiens
caaaaacctccattg

SEQ ID NO: 1174421 - DNA, 15 bp, Homo sapiens
acaaaaacctccatt

SEQ ID NO: 1174422 - DNA, 15 bp, Homo sapiens
gacaaaaacctccat

SEQ ID NO: 1174423 - DNA, 15 bp, Homo sapiens
ggacaaaaacctcca

SEQ ID NO: 1174424 - DNA, 15 bp, Homo sapiens
aggacaaaaacctcc

SEQ ID NO: 1174425 - DNA, 15 bp, Homo sapiens
caggacaaaaacctc

SEQ ID NO: 1174426 - DNA, 15 bp, Homo sapiens
tcaggacaaaaacct

SEQ ID NO: 1174427 - DNA, 15 bp, Homo sapiens
gtcaggacaaaaacc

SEQ ID NO: 1174428 - DNA, 15 bp, Homo sapiens
tgtcaggacaaaaac

SEQ ID NO: 1174429 - DNA, 15 bp, Homo sapiens
ttgtcaggacaaaaa

SEQ ID NO: 1174430 - DNA, 15 bp, Homo sapiens
tttgtcaggacaaaa

SEQ ID NO: 1174431 - DNA, 15 bp, Homo sapiens
ttttgtcaggacaaa

SEQ ID NO: 1174432 - DNA, 15 bp, Homo sapiens
tttttgtcaggacaa

SEQ ID NO: 1174433 - DNA, 15 bp, Homo sapiens
gtttttgtcaggaca

SEQ ID NO: 1174434 - DNA, 15 bp, Homo sapiens
tgtttttgtcaggac

SEQ ID NO: 1174435 - DNA, 15 bp, Homo sapiens
ttgtttttgtcagga

SEQ ID NO: 1174436 - DNA, 15 bp, Homo sapiens
cttgtttttgtcagg

SEQ ID NO: 1174437 - DNA, 15 bp, Homo sapiens
gcttgtttttgtcag

SEQ ID NO: 1174438 - DNA, 15 bp, Homo sapiens
tgcttgtttttgtca

SEQ ID NO: 1174439 - DNA, 15 bp, Homo sapiens
ttgcttgtttttgtc

SEQ ID NO: 1174440 - DNA, 15 bp, Homo sapiens
attgcttgtttttgt

SEQ ID NO: 1174441 - DNA, 15 bp, Homo sapiens
cattgcttgtttttg

SEQ ID NO: 1174442 - DNA, 15 bp, Homo sapiens
ccattgcttgttttt

SEQ ID NO: 1174443 - DNA, 15 bp, Homo sapiens
tccattgcttgtttt

SEQ ID NO: 1174444 - DNA, 15 bp, Homo sapiens
ctccattgcttgttt

SEQ ID NO: 1174445 - DNA, 15 bp, Homo sapiens
tctccattgcttgtt

SEQ ID NO: 1174446 - DNA, 15 bp, Homo sapiens
ttctccattgcttgt

SEQ ID NO: 1174447 - DNA, 15 bp, Homo sapiens
tttctccattgcttg

SEQ ID NO: 1174448 - DNA, 15 bp, Homo sapiens
ctttctccattgctt

SEQ ID NO: 1174449 - DNA, 15 bp, Homo sapiens
cctttctccattgct

SEQ ID NO: 1174450 - DNA, 15 bp, Homo sapiens
ccctttctccattgc

SEQ ID NO: 1174451 - DNA, 15 bp, Homo sapiens
accctttctccattg

SEQ ID NO: 1174452 - DNA, 15 bp, Homo sapiens
aaccctttctccatt

SEQ ID NO: 1174453 - DNA, 15 bp, Homo sapiens
gaaccctttctccat

SEQ ID NO: 1174454 - DNA, 15 bp, Homo sapiens
ggaaccctttctcca

SEQ ID NO: 1174455 - DNA, 15 bp, Homo sapiens
gggaaccctttctcc

SEQ ID NO: 1174456 - DNA, 15 bp, Homo sapiens
agggaaccctttctc

SEQ ID NO: 1174457 - DNA, 15 bp, Homo sapiens
tagggaaccctttct

SEQ ID NO: 1174458 - DNA, 15 bp, Homo sapiens
atagggaaccctttc

SEQ ID NO: 1174459 - DNA, 15 bp, Homo sapiens
aatagggaacccttt

SEQ ID NO: 1174460 - DNA, 15 bp, Homo sapiens
aaatagggaaccctt

SEQ ID NO: 1174461 - DNA, 15 bp, Homo sapiens
taaatagggaaccct

SEQ ID NO: 1174462 - DNA, 15 bp, Homo sapiens
ttaaatagggaaccc

SEQ ID NO: 1174463 - DNA, 15 bp, Homo sapiens
attaaatagggaacc

SEQ ID NO: 1174464 - DNA, 15 bp, Homo sapiens
tattaaatagggaac

SEQ ID NO: 1174465 - DNA, 15 bp, Homo sapiens
ttattaaatagggaa

SEQ ID NO: 1174466 - DNA, 15 bp, Homo sapiens
tttattaaataggga

SEQ ID NO: 1174467 - DNA, 15 bp, Homo sapiens
atttattaaataggg

SEQ ID NO: 1174468 - DNA, 15 bp, Homo sapiens
catttattaaatagg

SEQ ID NO: 1174469 - DNA, 15 bp, Homo sapiens
ccatttattaaatag

SEQ ID NO: 1174470 - DNA, 15 bp, Homo sapiens
accatttattaaata

SEQ ID NO: 1174471 - DNA, 15 bp, Homo sapiens
caccatttattaaat

SEQ ID NO: 1174472 - DNA, 15 bp, Homo sapiens
gcaccatttattaaa

SEQ ID NO: 1174473 - DNA, 15 bp, Homo sapiens
agcaccatttattaa

SEQ ID NO: 1174474 - DNA, 15 bp, Homo sapiens
cagcaccatttatta

SEQ ID NO: 1174475 - DNA, 15 bp, Homo sapiens
ccagcaccatttatt

SEQ ID NO: 1174476 - DNA, 15 bp, Homo sapiens
cccagcaccatttat

SEQ ID NO: 1174477 - DNA, 15 bp, Homo sapiens
tcccagcaccattta

SEQ ID NO: 1174478 - DNA, 15 bp, Homo sapiens
ttcccagcaccattt

SEQ ID NO: 1174479 - DNA, 15 bp, Homo sapiens
tttcccagcaccatt

SEQ ID NO: 1174480 - DNA, 15 bp, Homo sapiens
ttttcccagcaccat

SEQ ID NO: 1174481 - DNA, 15 bp, Homo sapiens
gttttcccagcacca

SEQ ID NO: 1174482 - DNA, 15 bp, Homo sapiens
agttttcccagcacc

SEQ ID NO: 1174483 - DNA, 15 bp, Homo sapiens
cagttttcccagcac

SEQ ID NO: 1174484 - DNA, 15 bp, Homo sapiens
ccagttttcccagca

SEQ ID NO: 1174485 - DNA, 15 bp, Homo sapiens
gccagttttcccagc

SEQ ID NO: 1174486 - DNA, 15 bp, Homo sapiens
agccagttttcccag

SEQ ID NO: 1174487 - DNA, 15 bp, Homo sapiens
tagccagttttccca

SEQ ID NO: 1174488 - DNA, 15 bp, Homo sapiens
ctagccagttttccc

SEQ ID NO: 1174489 - DNA, 15 bp, Homo sapiens
gctagccagttttcc

SEQ ID NO: 1174490 - DNA, 15 bp, Homo sapiens
ggctagccagttttc

SEQ ID NO: 1174491 - DNA, 15 bp, Homo sapiens
tggctagccagtttt

SEQ ID NO: 1174492 - DNA, 15 bp, Homo sapiens
atggctagccagttt

SEQ ID NO: 1174493 - DNA, 15 bp, Homo sapiens
tatggctagccagtt

SEQ ID NO: 1174494 - DNA, 15 bp, Homo sapiens
atatggctagccagt

SEQ ID NO: 1174495 - DNA, 15 bp, Homo sapiens
catatggctagccag

SEQ ID NO: 1174496 - DNA, 15 bp, Homo sapiens
gcatatggctagcca

SEQ ID NO: 1174497 - DNA, 15 bp, Homo sapiens
tgcatatggctagcc

SEQ ID NO: 1174498 - DNA, 15 bp, Homo sapiens
ctgcatatggctagc

SEQ ID NO: 1174499 - DNA, 15 bp, Homo sapiens
cctgcatatggctag

SEQ ID NO: 1174500 - DNA, 15 bp, Homo sapiens
tcctgcatatggcta

SEQ ID NO: 1174501 - DNA, 15 bp, Homo sapiens
ttcctgcatatggct

SEQ ID NO: 1174502 - DNA, 15 bp, Homo sapiens
tttcctgcatatggc

SEQ ID NO: 1174503 - DNA, 15 bp, Homo sapiens
gtttcctgcatatgg

SEQ ID NO: 1174504 - DNA, 15 bp, Homo sapiens
agtttcctgcatatg

SEQ ID NO: 1174505 - DNA, 15 bp, Homo sapiens
cagtttcctgcatat

SEQ ID NO: 1174506 - DNA, 15 bp, Homo sapiens
tcagtttcctgcata

SEQ ID NO: 1174507 - DNA, 15 bp, Homo sapiens
ttcagtttcctgcat

SEQ ID NO: 1174508 - DNA, 15 bp, Homo sapiens
tttcagtttcctgca

SEQ ID NO: 1174509 - DNA, 15 bp, Homo sapiens
gtttcagtttcctgc

SEQ ID NO: 1174510 - DNA, 15 bp, Homo sapiens
agtttcagtttcctg

SEQ ID NO: 1174511 - DNA, 15 bp, Homo sapiens
cagtttcagtttcct

SEQ ID NO: 1174512 - DNA, 15 bp, Homo sapiens
ccagtttcagtttcc

SEQ ID NO: 1174513 - DNA, 15 bp, Homo sapiens
tccagtttcagtttc

SEQ ID NO: 1174514 - DNA, 15 bp, Homo sapiens
gtccagtttcagttt

SEQ ID NO: 1174515 - DNA, 15 bp, Homo sapiens
ggtccagtttcagtt

SEQ ID NO: 1174516 - DNA, 15 bp, Homo sapiens
gggtccagtttcagt

SEQ ID NO: 1174517 - DNA, 15 bp, Homo sapiens
ggggtccagtttcag

SEQ ID NO: 1174518 - DNA, 15 bp, Homo sapiens
aggggtccagtttca

SEQ ID NO: 1174519 - DNA, 15 bp, Homo sapiens
aaggggtccagtttc

SEQ ID NO: 1174520 - DNA, 15 bp, Homo sapiens
gaaggggtccagttt

SEQ ID NO: 1174521 - DNA, 15 bp, Homo sapiens
ggaaggggtccagtt

SEQ ID NO: 1174522 - DNA, 15 bp, Homo sapiens
aggaaggggtccagt

SEQ ID NO: 1174523 - DNA, 15 bp, Homo sapiens
aaggaaggggtccag

SEQ ID NO: 1174524 - DNA, 15 bp, Homo sapiens
taaggaaggggtcca

SEQ ID NO: 1174525 - DNA, 15 bp, Homo sapiens
ataaggaaggggtcc

SEQ ID NO: 1174526 - DNA, 15 bp, Homo sapiens
tataaggaaggggtc

SEQ ID NO: 1174527 - DNA, 15 bp, Homo sapiens
gtataaggaaggggt

SEQ ID NO: 1174528 - DNA, 15 bp, Homo sapiens
ggtataaggaagggg

SEQ ID NO: 1174529 - DNA, 15 bp, Homo sapiens
aggtataaggaaggg

SEQ ID NO: 1174530 - DNA, 15 bp, Homo sapiens
aaggtataaggaagg

SEQ ID NO: 1174531 - DNA, 15 bp, Homo sapiens
taaggtataaggaag

SEQ ID NO: 1174532 - DNA, 15 bp, Homo sapiens
ataaggtataaggaa

SEQ ID NO: 1174533 - DNA, 15 bp, Homo sapiens
tataaggtataagga

SEQ ID NO: 1174534 - DNA, 15 bp, Homo sapiens
gtataaggtataagg

SEQ ID NO: 1174535 - DNA, 15 bp, Homo sapiens
tgtataaggtataag

SEQ ID NO: 1174536 - DNA, 15 bp, Homo sapiens
ttgtataaggtataa

SEQ ID NO: 1174537 - DNA, 15 bp, Homo sapiens
tttgtataaggtata

SEQ ID NO: 1174538 - DNA, 15 bp, Homo sapiens
ttttgtataaggtat

SEQ ID NO: 1174539 - DNA, 15 bp, Homo sapiens
tttttgtataaggta

SEQ ID NO: 1174540 - DNA, 15 bp, Homo sapiens
atttttgtataaggt

SEQ ID NO: 1174541 - DNA, 15 bp, Homo sapiens
aatttttgtataagg

SEQ ID NO: 1174542 - DNA, 15 bp, Homo sapiens
taatttttgtataag

SEQ ID NO: 1174543 - DNA, 15 bp, Homo sapiens
ttaatttttgtataa

SEQ ID NO: 1174544 - DNA, 15 bp, Homo sapiens
gttaatttttgtata

SEQ ID NO: 1174545 - DNA, 15 bp, Homo sapiens
gagttaatttttgta

SEQ ID NO: 1174546 - DNA, 15 bp, Homo sapiens
tgagttaatttttgt

SEQ ID NO: 1174547 - DNA, 15 bp, Homo sapiens
ttgagttaatttttg

SEQ ID NO: 1174548 - DNA, 15 bp, Homo sapiens
cttgagttaattttt

SEQ ID NO: 1174549 - DNA, 15 bp, Homo sapiens
tcttgagttaatttt

SEQ ID NO: 1174550 - DNA, 15 bp, Homo sapiens
atcttgagttaattt

SEQ ID NO: 1174551 - DNA, 15 bp, Homo sapiens
catcttgagttaatt

SEQ ID NO: 1174552 - DNA, 15 bp, Homo sapiens
tcatcttgagttaat

SEQ ID NO: 1174553 - DNA, 15 bp, Homo sapiens
ttcatcttgagttaa

SEQ ID NO: 1174554 - DNA, 15 bp, Homo sapiens
attcatcttgagtta

SEQ ID NO: 1174555 - DNA, 15 bp, Homo sapiens
aattcatcttgagtt

SEQ ID NO: 1174556 - DNA, 15 bp, Homo sapiens
taattcatcttgagt

SEQ ID NO: 1174557 - DNA, 15 bp, Homo sapiens
ttaattcatcttgag

SEQ ID NO: 1174558 - DNA, 15 bp, Homo sapiens
gttaattcatcttga

SEQ ID NO: 1174559 - DNA, 15 bp, Homo sapiens
tgttaattcatcttg

SEQ ID NO: 1174560 - DNA, 15 bp, Homo sapiens
ttgttaattcatctt

SEQ ID NO: 1174561 - DNA, 15 bp, Homo sapiens
gttgttaattcatct

SEQ ID NO: 1174562 - DNA, 15 bp, Homo sapiens
agttgttaattcatc

SEQ ID NO: 1174563 - DNA, 15 bp, Homo sapiens
aagttgttaattcat

SEQ ID NO: 1174564 - DNA, 15 bp, Homo sapiens
taagttgttaattca

SEQ ID NO: 1174565 - DNA, 15 bp, Homo sapiens
ttaagttgttaattc

SEQ ID NO: 1174566 - DNA, 15 bp, Homo sapiens
tttaagttgttaatt

SEQ ID NO: 1174567 - DNA, 15 bp, Homo sapiens
atttaagttgttaat

SEQ ID NO: 1174568 - DNA, 15 bp, Homo sapiens
catttaagttgttaa

SEQ ID NO: 1174569 - DNA, 15 bp, Homo sapiens
ccatttaagttgtta

SEQ ID NO: 1174570 - DNA, 15 bp, Homo sapiens
tccatttaagttgtt

SEQ ID NO: 1174571 - DNA, 15 bp, Homo sapiens
ttccatttaagttgt

SEQ ID NO: 1174572 - DNA, 15 bp, Homo sapiens
cttccatttaagttg

SEQ ID NO: 1174573 - DNA, 15 bp, Homo sapiens
tcttccatttaagtt

SEQ ID NO: 1174574 - DNA, 15 bp, Homo sapiens
gtcttccatttaagt

SEQ ID NO: 1174575 - DNA, 15 bp, Homo sapiens
agtcttccatttaag

SEQ ID NO: 1174576 - DNA, 15 bp, Homo sapiens
aagtcttccatttaa

SEQ ID NO: 1174577 - DNA, 15 bp, Homo sapiens
taagtcttccattta

SEQ ID NO: 1174578 - DNA, 15 bp, Homo sapiens
ttaagtcttccattt

SEQ ID NO: 1174579 - DNA, 15 bp, Homo sapiens
tttaagtcttccatt

SEQ ID NO: 1174580 - DNA, 15 bp, Homo sapiens
ttttaagtcttccat

SEQ ID NO: 1174581 - DNA, 15 bp, Homo sapiens
gttttaagtcttcca

SEQ ID NO: 1174582 - DNA, 15 bp, Homo sapiens
ggttttaagtcttcc

SEQ ID NO: 1174583 - DNA, 15 bp, Homo sapiens
tggttttaagtcttc

SEQ ID NO: 1174584 - DNA, 15 bp, Homo sapiens
atggttttaagtctt

SEQ ID NO: 1174585 - DNA, 15 bp, Homo sapiens
tatggttttaagtct

SEQ ID NO: 1174586 - DNA, 15 bp, Homo sapiens
ttatggttttaagtc

SEQ ID NO: 1174587 - DNA, 15 bp, Homo sapiens
tttatggttttaagt

SEQ ID NO: 1174588 - DNA, 15 bp, Homo sapiens
ttttatggttttaag

SEQ ID NO: 1174589 - DNA, 15 bp, Homo sapiens
tttttatggttttaa

SEQ ID NO: 1174590 - DNA, 15 bp, Homo sapiens
atttttatggtttta

SEQ ID NO: 1174591 - DNA, 15 bp, Homo sapiens
gatttttatggtttt

SEQ ID NO: 1174592 - DNA, 15 bp, Homo sapiens
agatttttatggttt

SEQ ID NO: 1174593 - DNA, 15 bp, Homo sapiens
aagatttttatggtt

SEQ ID NO: 1174594 - DNA, 15 bp, Homo sapiens
taagatttttatggt

SEQ ID NO: 1174595 - DNA, 15 bp, Homo sapiens
ctaagatttttatgg

SEQ ID NO: 1174596 - DNA, 15 bp, Homo sapiens
tctaagatttttatg

SEQ ID NO: 1174597 - DNA, 15 bp, Homo sapiens
ttctaagatttttat

SEQ ID NO: 1174598 - DNA, 15 bp, Homo sapiens
cttctaagattttta

SEQ ID NO: 1174599 - DNA, 15 bp, Homo sapiens
tcttctaagattttt

SEQ ID NO: 1174600 - DNA, 15 bp, Homo sapiens
ttcttctaagatttt

SEQ ID NO: 1174601 - DNA, 15 bp, Homo sapiens
tttcttctaagattt

SEQ ID NO: 1174602 - DNA, 15 bp, Homo sapiens
ttttcttctaagatt

SEQ ID NO: 1174603 - DNA, 15 bp, Homo sapiens
gttttcttctaagat

SEQ ID NO: 1174604 - DNA, 15 bp, Homo sapiens
ggttttcttctaaga

SEQ ID NO: 1174605 - DNA, 15 bp, Homo sapiens
aggttttcttctaag

SEQ ID NO: 1174606 - DNA, 15 bp, Homo sapiens
taggttttcttctaa

SEQ ID NO: 1174607 - DNA, 15 bp, Homo sapiens
agtattgcctaggtt

SEQ ID NO: 1174608 - DNA, 15 bp, Homo sapiens
tagtattgcctaggt

SEQ ID NO: 1174609 - DNA, 15 bp, Homo sapiens
atagtattgcctagg

SEQ ID NO: 1174610 - DNA, 15 bp, Homo sapiens
aatagtattgcctag

SEQ ID NO: 1174611 - DNA, 15 bp, Homo sapiens
gaatagtattgccta

SEQ ID NO: 1174612 - DNA, 15 bp, Homo sapiens
tgaatagtattgcct

SEQ ID NO: 1174613 - DNA, 15 bp, Homo sapiens
ctgaatagtattgcc

SEQ ID NO: 1174614 - DNA, 15 bp, Homo sapiens
cctgaatagtattgc

SEQ ID NO: 1174615 - DNA, 15 bp, Homo sapiens
tcctgaatagtattg

SEQ ID NO: 1174616 - DNA, 15 bp, Homo sapiens
gtcctgaatagtatt

SEQ ID NO: 1174617 - DNA, 15 bp, Homo sapiens
tgtcctgaatagtat

SEQ ID NO: 1174618 - DNA, 15 bp, Homo sapiens
atgtcctgaatagta

SEQ ID NO: 1174619 - DNA, 15 bp, Homo sapiens
tatgtcctgaatagt

SEQ ID NO: 1174620 - DNA, 15 bp, Homo sapiens
ctatgtcctgaatag

SEQ ID NO: 1174621 - DNA, 15 bp, Homo sapiens
cctatgtcctgaata

SEQ ID NO: 1174622 - DNA, 15 bp, Homo sapiens
gcctatgtcctgaat

SEQ ID NO: 1174623 - DNA, 15 bp, Homo sapiens
tgcctatgtcctgaa

SEQ ID NO: 1174624 - DNA, 15 bp, Homo sapiens
atgcctatgtcctga

SEQ ID NO: 1174625 - DNA, 15 bp, Homo sapiens
tatgcctatgtcctg

SEQ ID NO: 1174626 - DNA, 15 bp, Homo sapiens
ctatgcctatgtcct

SEQ ID NO: 1174627 - DNA, 15 bp, Homo sapiens
cctatgcctatgtcc

SEQ ID NO: 1174628 - DNA, 15 bp, Homo sapiens
gcctatgcctatgtc

SEQ ID NO: 1174629 - DNA, 15 bp, Homo sapiens
tgcctatgcctatgt

SEQ ID NO: 1174630 - DNA, 15 bp, Homo sapiens
ttgcctatgcctatg

SEQ ID NO: 1174631 - DNA, 15 bp, Homo sapiens
tttgcctatgcctat

SEQ ID NO: 1174632 - DNA, 15 bp, Homo sapiens
gtttgcctatgccta

SEQ ID NO: 1174633 - DNA, 15 bp, Homo sapiens
tgtttgcctatgcct

SEQ ID NO: 1174634 - DNA, 15 bp, Homo sapiens
gtgtttgcctatgcc

SEQ ID NO: 1174635 - DNA, 15 bp, Homo sapiens
agtgtttgcctatgc

SEQ ID NO: 1174636 - DNA, 15 bp, Homo sapiens
gagtgtttgcctatg

SEQ ID NO: 1174637 - DNA, 15 bp, Homo sapiens
ggagtgtttgcctat

SEQ ID NO: 1174638 - DNA, 15 bp, Homo sapiens
tggagtgtttgccta

SEQ ID NO: 1174639 - DNA, 15 bp, Homo sapiens
atggagtgtttgcct

SEQ ID NO: 1174640 - DNA, 15 bp, Homo sapiens
tatggagtgtttgcc

SEQ ID NO: 1174641 - DNA, 15 bp, Homo sapiens
ttatggagtgtttgc

SEQ ID NO: 1174642 - DNA, 15 bp, Homo sapiens
gttatggagtgtttg

SEQ ID NO: 1174643 - DNA, 15 bp, Homo sapiens
agttatggagtgttt

SEQ ID NO: 1174644 - DNA, 15 bp, Homo sapiens
tagttatggagtgtt

SEQ ID NO: 1174645 - DNA, 15 bp, Homo sapiens
ttagttatggagtgt

SEQ ID NO: 1174646 - DNA, 15 bp, Homo sapiens
tttagttatggagtg

SEQ ID NO: 1174647 - DNA, 15 bp, Homo sapiens
ttttagttatggagt

SEQ ID NO: 1174648 - DNA, 15 bp, Homo sapiens
gttttagttatggag

SEQ ID NO: 1174649 - DNA, 15 bp, Homo sapiens
tgttttagttatgga

SEQ ID NO: 1174650 - DNA, 15 bp, Homo sapiens
gtgttttagttatgg

SEQ ID NO: 1174651 - DNA, 15 bp, Homo sapiens
ggtgttttagttatg

SEQ ID NO: 1174652 - DNA, 15 bp, Homo sapiens
tggtgttttagttat

SEQ ID NO: 1174653 - DNA, 15 bp, Homo sapiens
ttggtgttttagtta

SEQ ID NO: 1174654 - DNA, 15 bp, Homo sapiens
tttggtgttttagtt

SEQ ID NO: 1174655 - DNA, 15 bp, Homo sapiens
aattgcttttggtgt

SEQ ID NO: 1174656 - DNA, 15 bp, Homo sapiens
caattgcttttggtg

SEQ ID NO: 1174657 - DNA, 15 bp, Homo sapiens
gcaattgcttttggt

SEQ ID NO: 1174658 - DNA, 15 bp, Homo sapiens
tgcaattgcttttgg

SEQ ID NO: 1174659 - DNA, 15 bp, Homo sapiens
ttgcaattgcttttg

SEQ ID NO: 1174660 - DNA, 15 bp, Homo sapiens
gttgcaattgctttt

SEQ ID NO: 1174661 - DNA, 15 bp, Homo sapiens
tgttgcaattgcttt

SEQ ID NO: 1174662 - DNA, 15 bp, Homo sapiens
ttgttgcaattgctt

SEQ ID NO: 1174663 - DNA, 15 bp, Homo sapiens
tttgttgcaattgct

SEQ ID NO: 1174664 - DNA, 15 bp, Homo sapiens
ttttgttgcaattgc

SEQ ID NO: 1174665 - DNA, 15 bp, Homo sapiens
cttttgttgcaattg

SEQ ID NO: 1174666 - DNA, 15 bp, Homo sapiens
gcttttgttgcaatt

SEQ ID NO: 1174667 - DNA, 15 bp, Homo sapiens
ggcttttgttgcaat

SEQ ID NO: 1174668 - DNA, 15 bp, Homo sapiens
tggcttttgttgcaa

SEQ ID NO: 1174669 - DNA, 15 bp, Homo sapiens
ttggcttttgttgca

SEQ ID NO: 1174670 - DNA, 15 bp, Homo sapiens
cttggcttttgttgc

SEQ ID NO: 1174671 - DNA, 15 bp, Homo sapiens
tcttggcttttgttg

SEQ ID NO: 1174672 - DNA, 15 bp, Homo sapiens
atcttggcttttgtt

SEQ ID NO: 1174673 - DNA, 15 bp, Homo sapiens
aatcttggcttttgt

SEQ ID NO: 1174674 - DNA, 15 bp, Homo sapiens
caatcttggcttttg

SEQ ID NO: 1174675 - DNA, 15 bp, Homo sapiens
tcaatcttggctttt

SEQ ID NO: 1174676 - DNA, 15 bp, Homo sapiens
gtcaatcttggcttt

SEQ ID NO: 1174677 - DNA, 15 bp, Homo sapiens
tgtcaatcttggctt

SEQ ID NO: 1174678 - DNA, 15 bp, Homo sapiens
ttgtcaatcttggct

SEQ ID NO: 1174679 - DNA, 15 bp, Homo sapiens
tttgtcaatcttggc

SEQ ID NO: 1174680 - DNA, 15 bp, Homo sapiens
atttgtcaatcttgg

SEQ ID NO: 1174681 - DNA, 15 bp, Homo sapiens
catttgtcaatcttg

SEQ ID NO: 1174682 - DNA, 15 bp, Homo sapiens
ccatttgtcaatctt

SEQ ID NO: 1174683 - DNA, 15 bp, Homo sapiens
cccatttgtcaatct

SEQ ID NO: 1174684 - DNA, 15 bp, Homo sapiens
tcccatttgtcaatc

SEQ ID NO: 1174685 - DNA, 15 bp, Homo sapiens
actctttagtttaat

SEQ ID NO: 1174686 - DNA, 15 bp, Homo sapiens
aactctttagtttaa

SEQ ID NO: 1174687 - DNA, 15 bp, Homo sapiens
aaactctttagttta

SEQ ID NO: 1174688 - DNA, 15 bp, Homo sapiens
gaaactctttagttt

SEQ ID NO: 1174689 - DNA, 15 bp, Homo sapiens
agaaactctttagtt

SEQ ID NO: 1174690 - DNA, 15 bp, Homo sapiens
cagaaactctttagt

SEQ ID NO: 1174691 - DNA, 15 bp, Homo sapiens
gcagaaactctttag

SEQ ID NO: 1174692 - DNA, 15 bp, Homo sapiens
tgcagaaactcttta

SEQ ID NO: 1174693 - DNA, 15 bp, Homo sapiens
gtgcagaaactcttt

SEQ ID NO: 1174694 - DNA, 15 bp, Homo sapiens
tgtgcagaaactctt

SEQ ID NO: 1174695 - DNA, 15 bp, Homo sapiens
ctgtgcagaaactct

SEQ ID NO: 1174696 - DNA, 15 bp, Homo sapiens
gctgtgcagaaactc

SEQ ID NO: 1174697 - DNA, 15 bp, Homo sapiens
tgctgtgcagaaact

SEQ ID NO: 1174698 - DNA, 15 bp, Homo sapiens
ttgctgtgcagaaac

SEQ ID NO: 1174699 - DNA, 15 bp, Homo sapiens
tttgctgtgcagaaa

SEQ ID NO: 1174700 - DNA, 15 bp, Homo sapiens
ttttgctgtgcagaa

SEQ ID NO: 1174701 - DNA, 15 bp, Homo sapiens
cttttgctgtgcaga

SEQ ID NO: 1174702 - DNA, 15 bp, Homo sapiens
tcttttgctgtgcag

SEQ ID NO: 1174703 - DNA, 15 bp, Homo sapiens
ttcttttgctgtgca

SEQ ID NO: 1174704 - DNA, 15 bp, Homo sapiens
tttcttttgctgtgc

SEQ ID NO: 1174705 - DNA, 15 bp, Homo sapiens
gtttcttttgctgtg

SEQ ID NO: 1174706 - DNA, 15 bp, Homo sapiens
atagtttcttttgct

SEQ ID NO: 1174707 - DNA, 15 bp, Homo sapiens
gatagtttcttttgc

SEQ ID NO: 1174708 - DNA, 15 bp, Homo sapiens
tgatagtttcttttg

SEQ ID NO: 1174709 - DNA, 15 bp, Homo sapiens
atgatagtttctttt

SEQ ID NO: 1174710 - DNA, 15 bp, Homo sapiens
gatgatagtttcttt

SEQ ID NO: 1174711 - DNA, 15 bp, Homo sapiens
tgatgatagtttctt

SEQ ID NO: 1174712 - DNA, 15 bp, Homo sapiens
ctgatgatagtttct

SEQ ID NO: 1174713 - DNA, 15 bp, Homo sapiens
tctgatgatagtttc

SEQ ID NO: 1174714 - DNA, 15 bp, Homo sapiens
ctctgatgatagttt

SEQ ID NO: 1174715 - DNA, 15 bp, Homo sapiens
actctgatgatagtt

SEQ ID NO: 1174716 - DNA, 15 bp, Homo sapiens
cactctgatgatagt

SEQ ID NO: 1174717 - DNA, 15 bp, Homo sapiens
tcactctgatgatag

SEQ ID NO: 1174718 - DNA, 15 bp, Homo sapiens
ttcactctgatgata

SEQ ID NO: 1174719 - DNA, 15 bp, Homo sapiens
gttcactctgatgat

SEQ ID NO: 1174720 - DNA, 15 bp, Homo sapiens
tgttcactctgatga

SEQ ID NO: 1174721 - DNA, 15 bp, Homo sapiens
ctgttcactctgatg

SEQ ID NO: 1174722 - DNA, 15 bp, Homo sapiens
ccattctgtaggttg

SEQ ID NO: 1174723 - DNA, 15 bp, Homo sapiens
cccattctgtaggtt

SEQ ID NO: 1174724 - DNA, 15 bp, Homo sapiens
cttctcccattctgt

SEQ ID NO: 1174725 - DNA, 15 bp, Homo sapiens
tcttctcccattctg

SEQ ID NO: 1174726 - DNA, 15 bp, Homo sapiens
atcttctcccattct

SEQ ID NO: 1174727 - DNA, 15 bp, Homo sapiens
aatcttctcccattc

SEQ ID NO: 1174728 - DNA, 15 bp, Homo sapiens
aaatcttctcccatt

SEQ ID NO: 1174729 - DNA, 15 bp, Homo sapiens
aaaatcttctcccat

SEQ ID NO: 1174730 - DNA, 15 bp, Homo sapiens
aaaaatcttctccca

SEQ ID NO: 1174731 - DNA, 15 bp, Homo sapiens
caaaaatcttctccc

SEQ ID NO: 1174732 - DNA, 15 bp, Homo sapiens
gcaaaaatcttctcc

SEQ ID NO: 1174733 - DNA, 15 bp, Homo sapiens
tgcaaaaatcttctc

SEQ ID NO: 1174734 - DNA, 15 bp, Homo sapiens
ttgcaaaaatcttct

SEQ ID NO: 1174735 - DNA, 15 bp, Homo sapiens
gttgcaaaaatcttc

SEQ ID NO: 1174736 - DNA, 15 bp, Homo sapiens
cgttgcaaaaatctt

SEQ ID NO: 1174737 - DNA, 15 bp, Homo sapiens
acgttgcaaaaatct

SEQ ID NO: 1174738 - DNA, 15 bp, Homo sapiens
tacgttgcaaaaatc

SEQ ID NO: 1174739 - DNA, 15 bp, Homo sapiens
atacgttgcaaaaat

SEQ ID NO: 1174740 - DNA, 15 bp, Homo sapiens
gatacgttgcaaaaa

SEQ ID NO: 1174741 - DNA, 15 bp, Homo sapiens
ggatacgttgcaaaa

SEQ ID NO: 1174742 - DNA, 15 bp, Homo sapiens
tggatacgttgcaaa

SEQ ID NO: 1174743 - DNA, 15 bp, Homo sapiens
atggatacgttgcaa

SEQ ID NO: 1174744 - DNA, 15 bp, Homo sapiens
gatggatacgttgca

SEQ ID NO: 1174745 - DNA, 15 bp, Homo sapiens
agatggatacgttgc

SEQ ID NO: 1174746 - DNA, 15 bp, Homo sapiens
cagatggatacgttg

SEQ ID NO: 1174747 - DNA, 15 bp, Homo sapiens
tcagatggatacgtt

SEQ ID NO: 1174748 - DNA, 15 bp, Homo sapiens
gtcagatggatacgt

SEQ ID NO: 1174749 - DNA, 15 bp, Homo sapiens
tgtcagatggatacg

SEQ ID NO: 1174750 - DNA, 15 bp, Homo sapiens
ttgtcagatggatac

SEQ ID NO: 1174751 - DNA, 15 bp, Homo sapiens
tttgtcagatggata

SEQ ID NO: 1174752 - DNA, 15 bp, Homo sapiens
ctttgtcagatggat

SEQ ID NO: 1174753 - DNA, 15 bp, Homo sapiens
cctttgtcagatgga

SEQ ID NO: 1174754 - DNA, 15 bp, Homo sapiens
ttgtagattctggat

SEQ ID NO: 1174755 - DNA, 15 bp, Homo sapiens
aagttctttgtagat

SEQ ID NO: 1174756 - DNA, 15 bp, Homo sapiens
taagttctttgtaga

SEQ ID NO: 1174757 - DNA, 15 bp, Homo sapiens
ttaagttctttgtag

SEQ ID NO: 1174758 - DNA, 15 bp, Homo sapiens
tttaagttctttgta

SEQ ID NO: 1174759 - DNA, 15 bp, Homo sapiens
gtttaagttctttgt

SEQ ID NO: 1174760 - DNA, 15 bp, Homo sapiens
tgtttaagttctttg

SEQ ID NO: 1174761 - DNA, 15 bp, Homo sapiens
ttgtttaagttcttt

SEQ ID NO: 1174762 - DNA, 15 bp, Homo sapiens
tttgtttaagttctt

SEQ ID NO: 1174763 - DNA, 15 bp, Homo sapiens
atttgtttaagttct

SEQ ID NO: 1174764 - DNA, 15 bp, Homo sapiens
aatttgtttaagttc

SEQ ID NO: 1174765 - DNA, 15 bp, Homo sapiens
aaatttgtttaagtt

SEQ ID NO: 1174766 - DNA, 15 bp, Homo sapiens
taaatttgtttaagt

SEQ ID NO: 1174767 - DNA, 15 bp, Homo sapiens
gtaaatttgtttaag

SEQ ID NO: 1174768 - DNA, 15 bp, Homo sapiens
tgtaaatttgtttaa

SEQ ID NO: 1174769 - DNA, 15 bp, Homo sapiens
ttgtaaatttgttta

SEQ ID NO: 1174770 - DNA, 15 bp, Homo sapiens
tttttttcttgtaaa

SEQ ID NO: 1174771 - DNA, 15 bp, Homo sapiens
gtttttttcttgtaa

SEQ ID NO: 1174772 - DNA, 15 bp, Homo sapiens
tgtttttttcttgta

SEQ ID NO: 1174773 - DNA, 15 bp, Homo sapiens
ttgtttttttcttgt

SEQ ID NO: 1174774 - DNA, 15 bp, Homo sapiens
tttgtttttttcttg

SEQ ID NO: 1174775 - DNA, 15 bp, Homo sapiens
gtttgtttttttctt

SEQ ID NO: 1174776 - DNA, 15 bp, Homo sapiens
tgtttgtttttttct

SEQ ID NO: 1174777 - DNA, 15 bp, Homo sapiens
ttgtttgtttttttc

SEQ ID NO: 1174778 - DNA, 15 bp, Homo sapiens
gttgtttgttttttt

SEQ ID NO: 1174779 - DNA, 15 bp, Homo sapiens
ggttgtttgtttttt

SEQ ID NO: 1174780 - DNA, 15 bp, Homo sapiens
gggttgtttgttttt

SEQ ID NO: 1174781 - DNA, 15 bp, Homo sapiens
ggggttgtttgtttt

SEQ ID NO: 1174782 - DNA, 15 bp, Homo sapiens
tggggttgtttgttt

SEQ ID NO: 1174783 - DNA, 15 bp, Homo sapiens
atggggttgtttgtt

SEQ ID NO: 1174784 - DNA, 15 bp, Homo sapiens
gatggggttgtttgt

SEQ ID NO: 1174785 - DNA, 15 bp, Homo sapiens
tgatggggttgtttg

SEQ ID NO: 1174786 - DNA, 15 bp, Homo sapiens
ttgatggggttgttt

SEQ ID NO: 1174787 - DNA, 15 bp, Homo sapiens
tttgatggggttgtt

SEQ ID NO: 1174788 - DNA, 15 bp, Homo sapiens
ttttgatggggttgt

SEQ ID NO: 1174789 - DNA, 15 bp, Homo sapiens
gcccactttttgatg

SEQ ID NO: 1174790 - DNA, 15 bp, Homo sapiens
tgcccactttttgat

SEQ ID NO: 1174791 - DNA, 15 bp, Homo sapiens
ttgcccactttttga

SEQ ID NO: 1174792 - DNA, 15 bp, Homo sapiens
tttgcccactttttg

SEQ ID NO: 1174793 - DNA, 15 bp, Homo sapiens
ctttgcccacttttt

SEQ ID NO: 1174794 - DNA, 15 bp, Homo sapiens
cctttgcccactttt

SEQ ID NO: 1174795 - DNA, 15 bp, Homo sapiens
tcctttgcccacttt

SEQ ID NO: 1174796 - DNA, 15 bp, Homo sapiens
atcctttgcccactt

SEQ ID NO: 1174797 - DNA, 15 bp, Homo sapiens
tatcctttgcccact

SEQ ID NO: 1174798 - DNA, 15 bp, Homo sapiens
atatcctttgcccac

SEQ ID NO: 1174799 - DNA, 15 bp, Homo sapiens
catatcctttgccca

SEQ ID NO: 1174800 - DNA, 15 bp, Homo sapiens
tcatatcctttgccc

SEQ ID NO: 1174801 - DNA, 15 bp, Homo sapiens
ttcatatcctttgcc

SEQ ID NO: 1174802 - DNA, 15 bp, Homo sapiens
gttcatatcctttgc

SEQ ID NO: 1174803 - DNA, 15 bp, Homo sapiens
tgttcatatcctttg

SEQ ID NO: 1174804 - DNA, 15 bp, Homo sapiens
ctgttcatatccttt

SEQ ID NO: 1174805 - DNA, 15 bp, Homo sapiens
tctgttcatatcctt

SEQ ID NO: 1174806 - DNA, 15 bp, Homo sapiens
gtctgttcatatcct

SEQ ID NO: 1174807 - DNA, 15 bp, Homo sapiens
tgtctgttcatatcc

SEQ ID NO: 1174808 - DNA, 15 bp, Homo sapiens
aaagtgtctgttcat

SEQ ID NO: 1174809 - DNA, 15 bp, Homo sapiens
aaaagtgtctgttca

SEQ ID NO: 1174810 - DNA, 15 bp, Homo sapiens
gaaaagtgtctgttc

SEQ ID NO: 1174811 - DNA, 15 bp, Homo sapiens
tgaaaagtgtctgtt

SEQ ID NO: 1174812 - DNA, 15 bp, Homo sapiens
ttgaaaagtgtctgt

SEQ ID NO: 1174813 - DNA, 15 bp, Homo sapiens
tttgaaaagtgtctg

SEQ ID NO: 1174814 - DNA, 15 bp, Homo sapiens
ttttgaaaagtgtct

SEQ ID NO: 1174815 - DNA, 15 bp, Homo sapiens
cttttgaaaagtgtc

SEQ ID NO: 1174816 - DNA, 15 bp, Homo sapiens
tcttttgaaaagtgt

SEQ ID NO: 1174817 - DNA, 15 bp, Homo sapiens
ttcttttgaaaagtg

SEQ ID NO: 1174818 - DNA, 15 bp, Homo sapiens
cttcttttgaaaagt

SEQ ID NO: 1174819 - DNA, 15 bp, Homo sapiens
tcttcttttgaaaag

SEQ ID NO: 1174820 - DNA, 15 bp, Homo sapiens
gtcttcttttgaaaa

SEQ ID NO: 1174821 - DNA, 15 bp, Homo sapiens
tgtcttcttttgaaa

SEQ ID NO: 1174822 - DNA, 15 bp, Homo sapiens
atgtcttcttttgaa

SEQ ID NO: 1174823 - DNA, 15 bp, Homo sapiens
acataaatgtcttct

SEQ ID NO: 1174824 - DNA, 15 bp, Homo sapiens
cacataaatgtcttc

SEQ ID NO: 1174825 - DNA, 15 bp, Homo sapiens
ccacataaatgtctt

SEQ ID NO: 1174826 - DNA, 15 bp, Homo sapiens
gccacataaatgtct

SEQ ID NO: 1174827 - DNA, 15 bp, Homo sapiens
ggccacataaatgtc

SEQ ID NO: 1174828 - DNA, 15 bp, Homo sapiens
tggccacataaatgt

SEQ ID NO: 1174829 - DNA, 15 bp, Homo sapiens
ttggccacataaatg

SEQ ID NO: 1174830 - DNA, 15 bp, Homo sapiens
tttggccacataaat

SEQ ID NO: 1174831 - DNA, 15 bp, Homo sapiens
ttttggccacataaa

SEQ ID NO: 1174832 - DNA, 15 bp, Homo sapiens
tttttggccacataa

SEQ ID NO: 1174833 - DNA, 15 bp, Homo sapiens
ttttttggccacata

SEQ ID NO: 1174834 - DNA, 15 bp, Homo sapiens
attttttggccacat

SEQ ID NO: 1174835 - DNA, 15 bp, Homo sapiens
tattttttggccaca

SEQ ID NO: 1174836 - DNA, 15 bp, Homo sapiens
atattttttggccac

SEQ ID NO: 1174837 - DNA, 15 bp, Homo sapiens
tatattttttggcca

SEQ ID NO: 1174838 - DNA, 15 bp, Homo sapiens
atatattttttggcc

SEQ ID NO: 1174839 - DNA, 15 bp, Homo sapiens
catatattttttggc

SEQ ID NO: 1174840 - DNA, 15 bp, Homo sapiens
tcatatattttttgg

SEQ ID NO: 1174841 - DNA, 15 bp, Homo sapiens
ttcatatattttttg

SEQ ID NO: 1174842 - DNA, 15 bp, Homo sapiens
tttcatatatttttt

SEQ ID NO: 1174843 - DNA, 15 bp, Homo sapiens
ttttcatatattttt

SEQ ID NO: 1174844 - DNA, 15 bp, Homo sapiens
tttttcatatatttt

SEQ ID NO: 1174845 - DNA, 15 bp, Homo sapiens
ttttttcatatattt

SEQ ID NO: 1174846 - DNA, 15 bp, Homo sapiens
cttttttcatatatt

SEQ ID NO: 1174847 - DNA, 15 bp, Homo sapiens
gcttttttcatatat

SEQ ID NO: 1174848 - DNA, 15 bp, Homo sapiens
agcttttttcatata

SEQ ID NO: 1174849 - DNA, 15 bp, Homo sapiens
gagcttttttcatat

SEQ ID NO: 1174850 - DNA, 15 bp, Homo sapiens
agagcttttttcata

SEQ ID NO: 1174851 - DNA, 15 bp, Homo sapiens
aagagcttttttcat

SEQ ID NO: 1174852 - DNA, 15 bp, Homo sapiens
gaagagcttttttca

SEQ ID NO: 1174853 - DNA, 15 bp, Homo sapiens
tgaagagcttttttc

SEQ ID NO: 1174854 - DNA, 15 bp, Homo sapiens
atgaagagctttttt

SEQ ID NO: 1174855 - DNA, 15 bp, Homo sapiens
gatgaagagcttttt

SEQ ID NO: 1174856 - DNA, 15 bp, Homo sapiens
tgatgaagagctttt

SEQ ID NO: 1174857 - DNA, 15 bp, Homo sapiens
gtgatgaagagcttt

SEQ ID NO: 1174858 - DNA, 15 bp, Homo sapiens
agtgatgaagagctt

SEQ ID NO: 1174859 - DNA, 15 bp, Homo sapiens
cagtgatgaagagct

SEQ ID NO: 1174860 - DNA, 15 bp, Homo sapiens
ccagtgatgaagagc

SEQ ID NO: 1174861 - DNA, 15 bp, Homo sapiens
accagtgatgaagag

SEQ ID NO: 1174862 - DNA, 15 bp, Homo sapiens
gaccagtgatgaaga

SEQ ID NO: 1174863 - DNA, 15 bp, Homo sapiens
tgaccagtgatgaag

SEQ ID NO: 1174864 - DNA, 15 bp, Homo sapiens
atgaccagtgatgaa

SEQ ID NO: 1174865 - DNA, 15 bp, Homo sapiens
aatgaccagtgatga

SEQ ID NO: 1174866 - DNA, 15 bp, Homo sapiens
taatgaccagtgatg

SEQ ID NO: 1174867 - DNA, 15 bp, Homo sapiens
ctaatgaccagtgat

SEQ ID NO: 1174868 - DNA, 15 bp, Homo sapiens
tctaatgaccagtga

SEQ ID NO: 1174869 - DNA, 15 bp, Homo sapiens
ctctaatgaccagtg

SEQ ID NO: 1174870 - DNA, 15 bp, Homo sapiens
tctctaatgaccagt

SEQ ID NO: 1174871 - DNA, 15 bp, Homo sapiens
ttctctaatgaccag

SEQ ID NO: 1174872 - DNA, 15 bp, Homo sapiens
tttctctaatgacca

SEQ ID NO: 1174873 - DNA, 15 bp, Homo sapiens
atttctctaatgacc

SEQ ID NO: 1174874 - DNA, 15 bp, Homo sapiens
catttctctaatgac

SEQ ID NO: 1174875 - DNA, 15 bp, Homo sapiens
gcatttctctaatga

SEQ ID NO: 1174876 - DNA, 15 bp, Homo sapiens
tgcatttctctaatg

SEQ ID NO: 1174877 - DNA, 15 bp, Homo sapiens
ttgcatttctctaat

SEQ ID NO: 1174878 - DNA, 15 bp, Homo sapiens
tttgcatttctctaa

SEQ ID NO: 1174879 - DNA, 15 bp, Homo sapiens
atttgcatttctcta

SEQ ID NO: 1174880 - DNA, 15 bp, Homo sapiens
gatttgcatttctct

SEQ ID NO: 1174881 - DNA, 15 bp, Homo sapiens
tgatttgcatttctc

SEQ ID NO: 1174882 - DNA, 15 bp, Homo sapiens
ttgatttgcatttct

SEQ ID NO: 1174883 - DNA, 15 bp, Homo sapiens
tttgatttgcatttc

SEQ ID NO: 1174884 - DNA, 15 bp, Homo sapiens
ttttgatttgcattt

SEQ ID NO: 1174885 - DNA, 15 bp, Homo sapiens
gttttgatttgcatt

SEQ ID NO: 1174886 - DNA, 15 bp, Homo sapiens
ggttttgatttgcat

SEQ ID NO: 1174887 - DNA, 15 bp, Homo sapiens
tggttttgatttgca

SEQ ID NO: 1174888 - DNA, 15 bp, Homo sapiens
gtggttttgatttgc

SEQ ID NO: 1174889 - DNA, 15 bp, Homo sapiens
tgtggttttgatttg

SEQ ID NO: 1174890 - DNA, 15 bp, Homo sapiens
ttgtggttttgattt

SEQ ID NO: 1174891 - DNA, 15 bp, Homo sapiens
attgtggttttgatt

SEQ ID NO: 1174892 - DNA, 15 bp, Homo sapiens
cattgtggttttgat

SEQ ID NO: 1174893 - DNA, 15 bp, Homo sapiens
tcattgtggttttga

SEQ ID NO: 1174894 - DNA, 15 bp, Homo sapiens
ctcattgtggttttg

SEQ ID NO: 1174895 - DNA, 15 bp, Homo sapiens
tctcattgtggtttt

SEQ ID NO: 1174896 - DNA, 15 bp, Homo sapiens
atctcattgtggttt

SEQ ID NO: 1174897 - DNA, 15 bp, Homo sapiens
tatctcattgtggtt

SEQ ID NO: 1174898 - DNA, 15 bp, Homo sapiens
gtatctcattgtggt

SEQ ID NO: 1174899 - DNA, 15 bp, Homo sapiens
ggtatctcattgtgg

SEQ ID NO: 1174900 - DNA, 15 bp, Homo sapiens
tggtatctcattgtg

SEQ ID NO: 1174901 - DNA, 15 bp, Homo sapiens
atggtatctcattgt

SEQ ID NO: 1174902 - DNA, 15 bp, Homo sapiens
gatggtatctcattg

SEQ ID NO: 1174903 - DNA, 15 bp, Homo sapiens
agatggtatctcatt

SEQ ID NO: 1174904 - DNA, 15 bp, Homo sapiens
gagatggtatctcat

SEQ ID NO: 1174905 - DNA, 15 bp, Homo sapiens
tgagatggtatctca

SEQ ID NO: 1174906 - DNA, 15 bp, Homo sapiens
atgagatggtatctc

SEQ ID NO: 1174907 - DNA, 15 bp, Homo sapiens
catgagatggtatct

SEQ ID NO: 1174908 - DNA, 15 bp, Homo sapiens
gcatgagatggtatc

SEQ ID NO: 1174909 - DNA, 15 bp, Homo sapiens
ggcatgagatggtat

SEQ ID NO: 1174910 - DNA, 15 bp, Homo sapiens
tggcatgagatggta

SEQ ID NO: 1174911 - DNA, 15 bp, Homo sapiens
ctggcatgagatggt

SEQ ID NO: 1174912 - DNA, 15 bp, Homo sapiens
actggcatgagatgg

SEQ ID NO: 1174913 - DNA, 15 bp, Homo sapiens
aactggcatgagatg

SEQ ID NO: 1174914 - DNA, 15 bp, Homo sapiens
taactggcatgagat

SEQ ID NO: 1174915 - DNA, 15 bp, Homo sapiens
ctaactggcatgaga

SEQ ID NO: 1174916 - DNA, 15 bp, Homo sapiens
tctaactggcatgag

SEQ ID NO: 1174917 - DNA, 15 bp, Homo sapiens
ttctaactggcatga

SEQ ID NO: 1174918 - DNA, 15 bp, Homo sapiens
attctaactggcatg

SEQ ID NO: 1174919 - DNA, 15 bp, Homo sapiens
cattctaactggcat

SEQ ID NO: 1174920 - DNA, 15 bp, Homo sapiens
ccattctaactggca

SEQ ID NO: 1174921 - DNA, 15 bp, Homo sapiens
gccattctaactggc

SEQ ID NO: 1174922 - DNA, 15 bp, Homo sapiens
gctttttaatgatcg

SEQ ID NO: 1174923 - DNA, 15 bp, Homo sapiens
ggctttttaatgatc

SEQ ID NO: 1174924 - DNA, 15 bp, Homo sapiens
tggctttttaatgat

SEQ ID NO: 1174925 - DNA, 15 bp, Homo sapiens
ctggctttttaatga

SEQ ID NO: 1174926 - DNA, 15 bp, Homo sapiens
cctggctttttaatg

SEQ ID NO: 1174927 - DNA, 15 bp, Homo sapiens
tcctggctttttaat

SEQ ID NO: 1174928 - DNA, 15 bp, Homo sapiens
ttcctggctttttaa

SEQ ID NO: 1174929 - DNA, 15 bp, Homo sapiens
tttcctggcttttta

SEQ ID NO: 1174930 - DNA, 15 bp, Homo sapiens
gtttcctggcttttt

SEQ ID NO: 1174931 - DNA, 15 bp, Homo sapiens
tgtttcctggctttt

SEQ ID NO: 1174932 - DNA, 15 bp, Homo sapiens
ttgtttcctggcttt

SEQ ID NO: 1174933 - DNA, 15 bp, Homo sapiens
gttgtttcctggctt

SEQ ID NO: 1174934 - DNA, 15 bp, Homo sapiens
tgttgtttcctggct

SEQ ID NO: 1174935 - DNA, 15 bp, Homo sapiens
ctgttgtttcctggc

SEQ ID NO: 1174936 - DNA, 15 bp, Homo sapiens
tctgttgtttcctgg

SEQ ID NO: 1174937 - DNA, 15 bp, Homo sapiens
tcagcatctgttgtt

SEQ ID NO: 1174938 - DNA, 15 bp, Homo sapiens
ttcagcatctgttgt

SEQ ID NO: 1174939 - DNA, 15 bp, Homo sapiens
cttcagcatctgttg

SEQ ID NO: 1174940 - DNA, 15 bp, Homo sapiens
tcttcagcatctgtt

SEQ ID NO: 1174941 - DNA, 15 bp, Homo sapiens
ctcttcagcatctgt

SEQ ID NO: 1174942 - DNA, 15 bp, Homo sapiens
cctcttcagcatctg

SEQ ID NO: 1174943 - DNA, 15 bp, Homo sapiens
tcctcttcagcatct

SEQ ID NO: 1174944 - DNA, 15 bp, Homo sapiens
atcctcttcagcatc

SEQ ID NO: 1174945 - DNA, 15 bp, Homo sapiens
aatcctcttcagcat

SEQ ID NO: 1174946 - DNA, 15 bp, Homo sapiens
aaatcctcttcagca

SEQ ID NO: 1174947 - DNA, 15 bp, Homo sapiens
caaatcctcttcagc

SEQ ID NO: 1174948 - DNA, 15 bp, Homo sapiens
ccaaatcctcttcag

SEQ ID NO: 1174949 - DNA, 15 bp, Homo sapiens
tccaaatcctcttca

SEQ ID NO: 1174950 - DNA, 15 bp, Homo sapiens
ctccaaatcctcttc

SEQ ID NO: 1174951 - DNA, 15 bp, Homo sapiens
tctccaaatcctctt

SEQ ID NO: 1174952 - DNA, 15 bp, Homo sapiens
ttctccaaatcctct

SEQ ID NO: 1174953 - DNA, 15 bp, Homo sapiens
tttctccaaatcctc

SEQ ID NO: 1174954 - DNA, 15 bp, Homo sapiens
atttctccaaatcct

SEQ ID NO: 1174955 - DNA, 15 bp, Homo sapiens
tatttctccaaatcc

SEQ ID NO: 1174956 - DNA, 15 bp, Homo sapiens
ctatttctccaaatc

SEQ ID NO: 1174957 - DNA, 15 bp, Homo sapiens
tctatttctccaaat

SEQ ID NO: 1174958 - DNA, 15 bp, Homo sapiens
ctctatttctccaaa

SEQ ID NO: 1174959 - DNA, 15 bp, Homo sapiens
cctctatttctccaa

SEQ ID NO: 1174960 - DNA, 15 bp, Homo sapiens
tcctctatttctcca

SEQ ID NO: 1174961 - DNA, 15 bp, Homo sapiens
ttcctctatttctcc

SEQ ID NO: 1174962 - DNA, 15 bp, Homo sapiens
tttcctctatttctc

SEQ ID NO: 1174963 - DNA, 15 bp, Homo sapiens
atttcctctatttct

SEQ ID NO: 1174964 - DNA, 15 bp, Homo sapiens
catttcctctatttc

SEQ ID NO: 1174965 - DNA, 15 bp, Homo sapiens
gcatttcctctattt

SEQ ID NO: 1174966 - DNA, 15 bp, Homo sapiens
agcatttcctctatt

SEQ ID NO: 1174967 - DNA, 15 bp, Homo sapiens
aagcatttcctctat

SEQ ID NO: 1174968 - DNA, 15 bp, Homo sapiens
aaagcatttcctcta

SEQ ID NO: 1174969 - DNA, 15 bp, Homo sapiens
aaaagcatttcctct

SEQ ID NO: 1174970 - DNA, 15 bp, Homo sapiens
taaaagcatttcctc

SEQ ID NO: 1174971 - DNA, 15 bp, Homo sapiens
gtaaaagcatttcct

SEQ ID NO: 1174972 - DNA, 15 bp, Homo sapiens
tgtaaaagcatttcc

SEQ ID NO: 1174973 - DNA, 15 bp, Homo sapiens
gtgtaaaagcatttc

SEQ ID NO: 1174974 - DNA, 15 bp, Homo sapiens
agtgtaaaagcattt

SEQ ID NO: 1174975 - DNA, 15 bp, Homo sapiens
cagtgtaaaagcatt

SEQ ID NO: 1174976 - DNA, 15 bp, Homo sapiens
acagtgtaaaagcat

SEQ ID NO: 1174977 - DNA, 15 bp, Homo sapiens
aacagtgtaaaagca

SEQ ID NO: 1174978 - DNA, 15 bp, Homo sapiens
caacagtgtaaaagc

SEQ ID NO: 1174979 - DNA, 15 bp, Homo sapiens
tcaacagtgtaaaag

SEQ ID NO: 1174980 - DNA, 15 bp, Homo sapiens
atcaacagtgtaaaa

SEQ ID NO: 1174981 - DNA, 15 bp, Homo sapiens
catcaacagtgtaaa

SEQ ID NO: 1174982 - DNA, 15 bp, Homo sapiens
ccatcaacagtgtaa

SEQ ID NO: 1174983 - DNA, 15 bp, Homo sapiens
cccatcaacagtgta

SEQ ID NO: 1174984 - DNA, 15 bp, Homo sapiens
tcccatcaacagtgt

SEQ ID NO: 1174985 - DNA, 15 bp, Homo sapiens
ctcccatcaacagtg

SEQ ID NO: 1174986 - DNA, 15 bp, Homo sapiens
actcccatcaacagt

SEQ ID NO: 1174987 - DNA, 15 bp, Homo sapiens
cactcccatcaacag

SEQ ID NO: 1174988 - DNA, 15 bp, Homo sapiens
acactcccatcaaca

SEQ ID NO: 1174989 - DNA, 15 bp, Homo sapiens
tacactcccatcaac

SEQ ID NO: 1174990 - DNA, 15 bp, Homo sapiens
ttacactcccatcaa

SEQ ID NO: 1174991 - DNA, 15 bp, Homo sapiens
tttacactcccatca

SEQ ID NO: 1174992 - DNA, 15 bp, Homo sapiens
atttacactcccatc

SEQ ID NO: 1174993 - DNA, 15 bp, Homo sapiens
aatttacactcccat

SEQ ID NO: 1174994 - DNA, 15 bp, Homo sapiens
taatttacactccca

SEQ ID NO: 1174995 - DNA, 15 bp, Homo sapiens
ctaatttacactccc

SEQ ID NO: 1174996 - DNA, 15 bp, Homo sapiens
actaatttacactcc

SEQ ID NO: 1174997 - DNA, 15 bp, Homo sapiens
aactaatttacactc

SEQ ID NO: 1174998 - DNA, 15 bp, Homo sapiens
gaactaatttacact

SEQ ID NO: 1174999 - DNA, 15 bp, Homo sapiens
tgaactaatttacac

SEQ ID NO: 1175000 - DNA, 15 bp, Homo sapiens
ttgaactaatttaca

SEQ ID NO: 1175001 - DNA, 15 bp, Homo sapiens
gttgaactaatttac

SEQ ID NO: 1175002 - DNA, 15 bp, Homo sapiens
ggttgaactaattta

SEQ ID NO: 1175003 - DNA, 15 bp, Homo sapiens
tggttgaactaattt

SEQ ID NO: 1175004 - DNA, 15 bp, Homo sapiens
atggttgaactaatt

SEQ ID NO: 1175005 - DNA, 15 bp, Homo sapiens
aatggttgaactaat

SEQ ID NO: 1175006 - DNA, 15 bp, Homo sapiens
caatggttgaactaa

SEQ ID NO: 1175007 - DNA, 15 bp, Homo sapiens
acaatggttgaacta

SEQ ID NO: 1175008 - DNA, 15 bp, Homo sapiens
cacaatggttgaact

SEQ ID NO: 1175009 - DNA, 15 bp, Homo sapiens
ccacaatggttgaac

SEQ ID NO: 1175010 - DNA, 15 bp, Homo sapiens
tccacaatggttgaa

SEQ ID NO: 1175011 - DNA, 15 bp, Homo sapiens
ttccacaatggttga

SEQ ID NO: 1175012 - DNA, 15 bp, Homo sapiens
cttccacaatggttg

SEQ ID NO: 1175013 - DNA, 15 bp, Homo sapiens
tcttccacaatggtt

SEQ ID NO: 1175014 - DNA, 15 bp, Homo sapiens
gtcttccacaatggt

SEQ ID NO: 1175015 - DNA, 15 bp, Homo sapiens
tgtcttccacaatgg

SEQ ID NO: 1175016 - DNA, 15 bp, Homo sapiens
ctgtcttccacaatg

SEQ ID NO: 1175017 - DNA, 15 bp, Homo sapiens
actgtcttccacaat

SEQ ID NO: 1175018 - DNA, 15 bp, Homo sapiens
cactgtcttccacaa

SEQ ID NO: 1175019 - DNA, 15 bp, Homo sapiens
acactgtcttccaca

SEQ ID NO: 1175020 - DNA, 15 bp, Homo sapiens
cacactgtcttccac

SEQ ID NO: 1175021 - DNA, 15 bp, Homo sapiens
ccacactgtcttcca

SEQ ID NO: 1175022 - DNA, 15 bp, Homo sapiens
gccacactgtcttcc

SEQ ID NO: 1175023 - DNA, 15 bp, Homo sapiens
tgccacactgtcttc

SEQ ID NO: 1175024 - DNA, 15 bp, Homo sapiens
ttgccacactgtctt

SEQ ID NO: 1175025 - DNA, 15 bp, Homo sapiens
attgccacactgtct

SEQ ID NO: 1175026 - DNA, 15 bp, Homo sapiens
aattgccacactgtc

SEQ ID NO: 1175027 - DNA, 15 bp, Homo sapiens
gaattgccacactgt

SEQ ID NO: 1175028 - DNA, 15 bp, Homo sapiens
agaattgccacactg

SEQ ID NO: 1175029 - DNA, 15 bp, Homo sapiens
aagaattgccacact

SEQ ID NO: 1175030 - DNA, 15 bp, Homo sapiens
gaagaattgccacac

SEQ ID NO: 1175031 - DNA, 15 bp, Homo sapiens
tgaagaattgccaca

SEQ ID NO: 1175032 - DNA, 15 bp, Homo sapiens
ttgaagaattgccac

SEQ ID NO: 1175033 - DNA, 15 bp, Homo sapiens
cttgaagaattgcca

SEQ ID NO: 1175034 - DNA, 15 bp, Homo sapiens
ccttgaagaattgcc

SEQ ID NO: 1175035 - DNA, 15 bp, Homo sapiens
tccttgaagaattgc

SEQ ID NO: 1175036 - DNA, 15 bp, Homo sapiens
atccttgaagaattg

SEQ ID NO: 1175037 - DNA, 15 bp, Homo sapiens
gatccttgaagaatt

SEQ ID NO: 1175038 - DNA, 15 bp, Homo sapiens
agatccttgaagaat

SEQ ID NO: 1175039 - DNA, 15 bp, Homo sapiens
tagatccttgaagaa

SEQ ID NO: 1175040 - DNA, 15 bp, Homo sapiens
ctagatccttgaaga

SEQ ID NO: 1175041 - DNA, 15 bp, Homo sapiens
tctagatccttgaag

SEQ ID NO: 1175042 - DNA, 15 bp, Homo sapiens
ttctagatccttgaa

SEQ ID NO: 1175043 - DNA, 15 bp, Homo sapiens
gttctagatccttga

SEQ ID NO: 1175044 - DNA, 15 bp, Homo sapiens
ggttctagatccttg

SEQ ID NO: 1175045 - DNA, 15 bp, Homo sapiens
tggttctagatcctt

SEQ ID NO: 1175046 - DNA, 15 bp, Homo sapiens
ctggttctagatcct

SEQ ID NO: 1175047 - DNA, 15 bp, Homo sapiens
tctggttctagatcc

SEQ ID NO: 1175048 - DNA, 15 bp, Homo sapiens
ttctggttctagatc

SEQ ID NO: 1175049 - DNA, 15 bp, Homo sapiens
tttctggttctagat

SEQ ID NO: 1175050 - DNA, 15 bp, Homo sapiens
atttctggttctaga

SEQ ID NO: 1175051 - DNA, 15 bp, Homo sapiens
tatttctggttctag

SEQ ID NO: 1175052 - DNA, 15 bp, Homo sapiens
gtatttctggttcta

SEQ ID NO: 1175053 - DNA, 15 bp, Homo sapiens
tgtatttctggttct

SEQ ID NO: 1175054 - DNA, 15 bp, Homo sapiens
ttgtatttctggttc

SEQ ID NO: 1175055 - DNA, 15 bp, Homo sapiens
attgtatttctggtt

SEQ ID NO: 1175056 - DNA, 15 bp, Homo sapiens
aattgtatttctggt

SEQ ID NO: 1175057 - DNA, 15 bp, Homo sapiens
aaattgtatttctgg

SEQ ID NO: 1175058 - DNA, 15 bp, Homo sapiens
caaattgtatttctg

SEQ ID NO: 1175059 - DNA, 15 bp, Homo sapiens
tcaaattgtatttct

SEQ ID NO: 1175060 - DNA, 15 bp, Homo sapiens
gtcaaattgtatttc

SEQ ID NO: 1175061 - DNA, 15 bp, Homo sapiens
ggtcaaattgtattt

SEQ ID NO: 1175062 - DNA, 15 bp, Homo sapiens
gggtcaaattgtatt

SEQ ID NO: 1175063 - DNA, 15 bp, Homo sapiens
tgggtcaaattgtat

SEQ ID NO: 1175064 - DNA, 15 bp, Homo sapiens
ctgggtcaaattgta

SEQ ID NO: 1175065 - DNA, 15 bp, Homo sapiens
gctgggtcaaattgt

SEQ ID NO: 1175066 - DNA, 15 bp, Homo sapiens
tgctgggtcaaattg

SEQ ID NO: 1175067 - DNA, 15 bp, Homo sapiens
ttgctgggtcaaatt

SEQ ID NO: 1175068 - DNA, 15 bp, Homo sapiens
attgctgggtcaaat

SEQ ID NO: 1175069 - DNA, 15 bp, Homo sapiens
gattgctgggtcaaa

SEQ ID NO: 1175070 - DNA, 15 bp, Homo sapiens
ggattgctgggtcaa

SEQ ID NO: 1175071 - DNA, 15 bp, Homo sapiens
gggattgctgggtca

SEQ ID NO: 1175072 - DNA, 15 bp, Homo sapiens
tgggattgctgggtc

SEQ ID NO: 1175073 - DNA, 15 bp, Homo sapiens
atgggattgctgggt

SEQ ID NO: 1175074 - DNA, 15 bp, Homo sapiens
aatgggattgctggg

SEQ ID NO: 1175075 - DNA, 15 bp, Homo sapiens
taatgggattgctgg

SEQ ID NO: 1175076 - DNA, 15 bp, Homo sapiens
gtaatgggattgctg

SEQ ID NO: 1175077 - DNA, 15 bp, Homo sapiens
agtaatgggattgct

SEQ ID NO: 1175078 - DNA, 15 bp, Homo sapiens
cagtaatgggattgc

SEQ ID NO: 1175079 - DNA, 15 bp, Homo sapiens
ccagtaatgggattg

SEQ ID NO: 1175080 - DNA, 15 bp, Homo sapiens
cccagtaatgggatt

SEQ ID NO: 1175081 - DNA, 15 bp, Homo sapiens
acccagtaatgggat

SEQ ID NO: 1175082 - DNA, 15 bp, Homo sapiens
tacccagtaatggga

SEQ ID NO: 1175083 - DNA, 15 bp, Homo sapiens
atacccagtaatggg

SEQ ID NO: 1175084 - DNA, 15 bp, Homo sapiens
tatacccagtaatgg

SEQ ID NO: 1175085 - DNA, 15 bp, Homo sapiens
tagcatgatttataa

SEQ ID NO: 1175086 - DNA, 15 bp, Homo sapiens
gtagcatgatttata

SEQ ID NO: 1175087 - DNA, 15 bp, Homo sapiens
agtagcatgatttat

SEQ ID NO: 1175088 - DNA, 15 bp, Homo sapiens
tagtagcatgattta

SEQ ID NO: 1175089 - DNA, 15 bp, Homo sapiens
atagtagcatgattt

SEQ ID NO: 1175090 - DNA, 15 bp, Homo sapiens
tatagtagcatgatt

SEQ ID NO: 1175091 - DNA, 15 bp, Homo sapiens
ttatagtagcatgat

SEQ ID NO: 1175092 - DNA, 15 bp, Homo sapiens
tttatagtagcatga

SEQ ID NO: 1175093 - DNA, 15 bp, Homo sapiens
ctttatagtagcatg

SEQ ID NO: 1175094 - DNA, 15 bp, Homo sapiens
tctttatagtagcat

SEQ ID NO: 1175095 - DNA, 15 bp, Homo sapiens
gtctttatagtagca

SEQ ID NO: 1175096 - DNA, 15 bp, Homo sapiens
tgtctttatagtagc

SEQ ID NO: 1175097 - DNA, 15 bp, Homo sapiens
gtgtctttatagtag

SEQ ID NO: 1175098 - DNA, 15 bp, Homo sapiens
tgtgtctttatagta

SEQ ID NO: 1175099 - DNA, 15 bp, Homo sapiens
atgtgtctttatagt

SEQ ID NO: 1175100 - DNA, 15 bp, Homo sapiens
ctgccacaataaaca

SEQ ID NO: 1175101 - DNA, 15 bp, Homo sapiens
actgccacaataaac

SEQ ID NO: 1175102 - DNA, 15 bp, Homo sapiens
tactgccacaataaa

SEQ ID NO: 1175103 - DNA, 15 bp, Homo sapiens
atactgccacaataa

SEQ ID NO: 1175104 - DNA, 15 bp, Homo sapiens
aatactgccacaata

SEQ ID NO: 1175105 - DNA, 15 bp, Homo sapiens
gaatactgccacaat

SEQ ID NO: 1175106 - DNA, 15 bp, Homo sapiens
tgaatactgccacaa

SEQ ID NO: 1175107 - DNA, 15 bp, Homo sapiens
gtgaatactgccaca

SEQ ID NO: 1175108 - DNA, 15 bp, Homo sapiens
tgtgaatactgccac

SEQ ID NO: 1175109 - DNA, 15 bp, Homo sapiens
ttgtgaatactgcca

SEQ ID NO: 1175110 - DNA, 15 bp, Homo sapiens
attgtgaatactgcc

SEQ ID NO: 1175111 - DNA, 15 bp, Homo sapiens
tattgtgaatactgc

SEQ ID NO: 1175112 - DNA, 15 bp, Homo sapiens
ctattgtgaatactg

SEQ ID NO: 1175113 - DNA, 15 bp, Homo sapiens
gctattgtgaatact

SEQ ID NO: 1175114 - DNA, 15 bp, Homo sapiens
tgctattgtgaatac

SEQ ID NO: 1175115 - DNA, 15 bp, Homo sapiens
gttccaagtctttgc

SEQ ID NO: 1175116 - DNA, 15 bp, Homo sapiens
ggttccaagtctttg

SEQ ID NO: 1175117 - DNA, 15 bp, Homo sapiens
tggttccaagtcttt

SEQ ID NO: 1175118 - DNA, 15 bp, Homo sapiens
ttggttccaagtctt

SEQ ID NO: 1175119 - DNA, 15 bp, Homo sapiens
gttggttccaagtct

SEQ ID NO: 1175120 - DNA, 15 bp, Homo sapiens
ggttggttccaagtc

SEQ ID NO: 1175121 - DNA, 15 bp, Homo sapiens
gggttggttccaagt

SEQ ID NO: 1175122 - DNA, 15 bp, Homo sapiens
tgggttggttccaag

SEQ ID NO: 1175123 - DNA, 15 bp, Homo sapiens
ttgggttggttccaa

SEQ ID NO: 1175124 - DNA, 15 bp, Homo sapiens
tttgggttggttcca

SEQ ID NO: 1175125 - DNA, 15 bp, Homo sapiens
atttgggttggttcc

SEQ ID NO: 1175126 - DNA, 15 bp, Homo sapiens
tatttgggttggttc

SEQ ID NO: 1175127 - DNA, 15 bp, Homo sapiens
gtatttgggttggtt

SEQ ID NO: 1175128 - DNA, 15 bp, Homo sapiens
ggtatttgggttggt

SEQ ID NO: 1175129 - DNA, 15 bp, Homo sapiens
gggtatttgggttgg

SEQ ID NO: 1175130 - DNA, 15 bp, Homo sapiens
tgggtatttgggttg

SEQ ID NO: 1175131 - DNA, 15 bp, Homo sapiens
atgggtatttgggtt

SEQ ID NO: 1175132 - DNA, 15 bp, Homo sapiens
gatgggtatttgggt

SEQ ID NO: 1175133 - DNA, 15 bp, Homo sapiens
tgatgggtatttggg

SEQ ID NO: 1175134 - DNA, 15 bp, Homo sapiens
ttgatgggtatttgg

SEQ ID NO: 1175135 - DNA, 15 bp, Homo sapiens
attgatgggtatttg

SEQ ID NO: 1175136 - DNA, 15 bp, Homo sapiens
cattgatgggtattt

SEQ ID NO: 1175137 - DNA, 15 bp, Homo sapiens
tcattgatgggtatt

SEQ ID NO: 1175138 - DNA, 15 bp, Homo sapiens
atcattgatgggtat

SEQ ID NO: 1175139 - DNA, 15 bp, Homo sapiens
tatcattgatgggta

SEQ ID NO: 1175140 - DNA, 15 bp, Homo sapiens
ctatcattgatgggt

SEQ ID NO: 1175141 - DNA, 15 bp, Homo sapiens
tctatcattgatggg

SEQ ID NO: 1175142 - DNA, 15 bp, Homo sapiens
gtctatcattgatgg

SEQ ID NO: 1175143 - DNA, 15 bp, Homo sapiens
agtctatcattgatg

SEQ ID NO: 1175144 - DNA, 15 bp, Homo sapiens
cagtctatcattgat

SEQ ID NO: 1175145 - DNA, 15 bp, Homo sapiens
ccagtctatcattga

SEQ ID NO: 1175146 - DNA, 15 bp, Homo sapiens
tccagtctatcattg

SEQ ID NO: 1175147 - DNA, 15 bp, Homo sapiens
atccagtctatcatt

SEQ ID NO: 1175148 - DNA, 15 bp, Homo sapiens
tatccagtctatcat

SEQ ID NO: 1175149 - DNA, 15 bp, Homo sapiens
ttatccagtctatca

SEQ ID NO: 1175150 - DNA, 15 bp, Homo sapiens
tttatccagtctatc

SEQ ID NO: 1175151 - DNA, 15 bp, Homo sapiens
ctttatccagtctat

SEQ ID NO: 1175152 - DNA, 15 bp, Homo sapiens
tctttatccagtcta

SEQ ID NO: 1175153 - DNA, 15 bp, Homo sapiens
ttctttatccagtct

SEQ ID NO: 1175154 - DNA, 15 bp, Homo sapiens
tttctttatccagtc

SEQ ID NO: 1175155 - DNA, 15 bp, Homo sapiens
ttttctttatccagt

SEQ ID NO: 1175156 - DNA, 15 bp, Homo sapiens
attttctttatccag

SEQ ID NO: 1175157 - DNA, 15 bp, Homo sapiens
catattttctttatc

SEQ ID NO: 1175158 - DNA, 15 bp, Homo sapiens
ccatattttctttat

SEQ ID NO: 1175159 - DNA, 15 bp, Homo sapiens
gccatattttcttta

SEQ ID NO: 1175160 - DNA, 15 bp, Homo sapiens
tgccatattttcttt

SEQ ID NO: 1175161 - DNA, 15 bp, Homo sapiens
gtgccatattttctt

SEQ ID NO: 1175162 - DNA, 15 bp, Homo sapiens
tgtgccatattttct

SEQ ID NO: 1175163 - DNA, 15 bp, Homo sapiens
atgtgccatattttc

SEQ ID NO: 1175164 - DNA, 15 bp, Homo sapiens
tatgtgccatatttt

SEQ ID NO: 1175165 - DNA, 15 bp, Homo sapiens
gtatgtgccatattt

SEQ ID NO: 1175166 - DNA, 15 bp, Homo sapiens
tgtatgtgccatatt

SEQ ID NO: 1175167 - DNA, 15 bp, Homo sapiens
atgtatgtgccatat

SEQ ID NO: 1175168 - DNA, 15 bp, Homo sapiens
tatgtatgtgccata

SEQ ID NO: 1175169 - DNA, 15 bp, Homo sapiens
gtatgtatgtgccat

SEQ ID NO: 1175170 - DNA, 15 bp, Homo sapiens
ggtatgtatgtgcca

SEQ ID NO: 1175171 - DNA, 15 bp, Homo sapiens
tggtatgtatgtgcc

SEQ ID NO: 1175172 - DNA, 15 bp, Homo sapiens
atggtatgtatgtgc

SEQ ID NO: 1175173 - DNA, 15 bp, Homo sapiens
tatggtatgtatgtg

SEQ ID NO: 1175174 - DNA, 15 bp, Homo sapiens
ctatggtatgtatgt

SEQ ID NO: 1175175 - DNA, 15 bp, Homo sapiens
tctatggtatgtatg

SEQ ID NO: 1175176 - DNA, 15 bp, Homo sapiens
ttctatggtatgtat

SEQ ID NO: 1175177 - DNA, 15 bp, Homo sapiens
attctatggtatgta

SEQ ID NO: 1175178 - DNA, 15 bp, Homo sapiens
tattctatggtatgt

SEQ ID NO: 1175179 - DNA, 15 bp, Homo sapiens
gtattctatggtatg

SEQ ID NO: 1175180 - DNA, 15 bp, Homo sapiens
agtattctatggtat

SEQ ID NO: 1175181 - DNA, 15 bp, Homo sapiens
tagtattctatggta

SEQ ID NO: 1175182 - DNA, 15 bp, Homo sapiens
atagtattctatggt

SEQ ID NO: 1175183 - DNA, 15 bp, Homo sapiens
catagtattctatgg

SEQ ID NO: 1175184 - DNA, 15 bp, Homo sapiens
gcatagtattctatg

SEQ ID NO: 1175185 - DNA, 15 bp, Homo sapiens
tgcatagtattctat

SEQ ID NO: 1175186 - DNA, 15 bp, Homo sapiens
ctgcatagtattcta

SEQ ID NO: 1175187 - DNA, 15 bp, Homo sapiens
gctgcatagtattct

SEQ ID NO: 1175188 - DNA, 15 bp, Homo sapiens
tcttttttatggctg

SEQ ID NO: 1175189 - DNA, 15 bp, Homo sapiens
ttcttttttatggct

SEQ ID NO: 1175190 - DNA, 15 bp, Homo sapiens
attcttttttatggc

SEQ ID NO: 1175191 - DNA, 15 bp, Homo sapiens
cattcttttttatgg

SEQ ID NO: 1175192 - DNA, 15 bp, Homo sapiens
tcattcttttttatg

SEQ ID NO: 1175193 - DNA, 15 bp, Homo sapiens
ctcattcttttttat

SEQ ID NO: 1175194 - DNA, 15 bp, Homo sapiens
actcattctttttta

SEQ ID NO: 1175195 - DNA, 15 bp, Homo sapiens
aactcattctttttt

SEQ ID NO: 1175196 - DNA, 15 bp, Homo sapiens
gaactcattcttttt

SEQ ID NO: 1175197 - DNA, 15 bp, Homo sapiens
tgaactcattctttt

SEQ ID NO: 1175198 - DNA, 15 bp, Homo sapiens
atgaactcattcttt

SEQ ID NO: 1175199 - DNA, 15 bp, Homo sapiens
catgaactcattctt

SEQ ID NO: 1175200 - DNA, 15 bp, Homo sapiens
acatgaactcattct

SEQ ID NO: 1175201 - DNA, 15 bp, Homo sapiens
aacatgaactcattc

SEQ ID NO: 1175202 - DNA, 15 bp, Homo sapiens
gaacatgaactcatt

SEQ ID NO: 1175203 - DNA, 15 bp, Homo sapiens
agaacatgaactcat

SEQ ID NO: 1175204 - DNA, 15 bp, Homo sapiens
aagaacatgaactca

SEQ ID NO: 1175205 - DNA, 15 bp, Homo sapiens
aaagaacatgaactc

SEQ ID NO: 1175206 - DNA, 15 bp, Homo sapiens
caaagaacatgaact

SEQ ID NO: 1175207 - DNA, 15 bp, Homo sapiens
gcaaagaacatgaac

SEQ ID NO: 1175208 - DNA, 15 bp, Homo sapiens
tgcaaagaacatgaa

SEQ ID NO: 1175209 - DNA, 15 bp, Homo sapiens
ctgcaaagaacatga

SEQ ID NO: 1175210 - DNA, 15 bp, Homo sapiens
cctgcaaagaacatg

SEQ ID NO: 1175211 - DNA, 15 bp, Homo sapiens
ccctgcaaagaacat

SEQ ID NO: 1175212 - DNA, 15 bp, Homo sapiens
tccctgcaaagaaca

SEQ ID NO: 1175213 - DNA, 15 bp, Homo sapiens
gtccctgcaaagaac

SEQ ID NO: 1175214 - DNA, 15 bp, Homo sapiens
tgtccctgcaaagaa

SEQ ID NO: 1175215 - DNA, 15 bp, Homo sapiens
atgtccctgcaaaga

SEQ ID NO: 1175216 - DNA, 15 bp, Homo sapiens
gatgtccctgcaaag

SEQ ID NO: 1175217 - DNA, 15 bp, Homo sapiens
tgatgtccctgcaaa

SEQ ID NO: 1175218 - DNA, 15 bp, Homo sapiens
atgatgtccctgcaa

SEQ ID NO: 1175219 - DNA, 15 bp, Homo sapiens
aatgatgtccctgca

SEQ ID NO: 1175220 - DNA, 15 bp, Homo sapiens
gaatgatgtccctgc

SEQ ID NO: 1175221 - DNA, 15 bp, Homo sapiens
agaatgatgtccctg

SEQ ID NO: 1175222 - DNA, 15 bp, Homo sapiens
gagaatgatgtccct

SEQ ID NO: 1175223 - DNA, 15 bp, Homo sapiens
ggagaatgatgtccc

SEQ ID NO: 1175224 - DNA, 15 bp, Homo sapiens
cggagaatgatgtcc

SEQ ID NO: 1175225 - DNA, 15 bp, Homo sapiens
gcggagaatgatgtc

SEQ ID NO: 1175226 - DNA, 15 bp, Homo sapiens
tgcggagaatgatgt

SEQ ID NO: 1175227 - DNA, 15 bp, Homo sapiens
ttgcggagaatgatg

SEQ ID NO: 1175228 - DNA, 15 bp, Homo sapiens
tttgcggagaatgat

SEQ ID NO: 1175229 - DNA, 15 bp, Homo sapiens
gtttgcggagaatga

SEQ ID NO: 1175230 - DNA, 15 bp, Homo sapiens
agtttgcggagaatg

SEQ ID NO: 1175231 - DNA, 15 bp, Homo sapiens
tagtttgcggagaat

SEQ ID NO: 1175232 - DNA, 15 bp, Homo sapiens
ttagtttgcggagaa

SEQ ID NO: 1175233 - DNA, 15 bp, Homo sapiens
gttagtttgcggaga

SEQ ID NO: 1175234 - DNA, 15 bp, Homo sapiens
tgttagtttgcggag

SEQ ID NO: 1175235 - DNA, 15 bp, Homo sapiens
gtgttagtttgcgga

SEQ ID NO: 1175236 - DNA, 15 bp, Homo sapiens
tgtgttagtttgcgg

SEQ ID NO: 1175237 - DNA, 15 bp, Homo sapiens
ctgtgttagtttgcg

SEQ ID NO: 1175238 - DNA, 15 bp, Homo sapiens
cctgtgttagtttgc

SEQ ID NO: 1175239 - DNA, 15 bp, Homo sapiens
tcctgtgttagtttg

SEQ ID NO: 1175240 - DNA, 15 bp, Homo sapiens
ttcctgtgttagttt

SEQ ID NO: 1175241 - DNA, 15 bp, Homo sapiens
gttcctgtgttagtt

SEQ ID NO: 1175242 - DNA, 15 bp, Homo sapiens
tgttcctgtgttagt

SEQ ID NO: 1175243 - DNA, 15 bp, Homo sapiens
ctgttcctgtgttag

SEQ ID NO: 1175244 - DNA, 15 bp, Homo sapiens
tctgttcctgtgtta

SEQ ID NO: 1175245 - DNA, 15 bp, Homo sapiens
ttctgttcctgtgtt

SEQ ID NO: 1175246 - DNA, 15 bp, Homo sapiens
tttctgttcctgtgt

SEQ ID NO: 1175247 - DNA, 15 bp, Homo sapiens
ttttctgttcctgtg

SEQ ID NO: 1175248 - DNA, 15 bp, Homo sapiens
gttttctgttcctgt

SEQ ID NO: 1175249 - DNA, 15 bp, Homo sapiens
ggttttctgttcctg

SEQ ID NO: 1175250 - DNA, 15 bp, Homo sapiens
tggttttctgttcct

SEQ ID NO: 1175251 - DNA, 15 bp, Homo sapiens
ttggttttctgttcc

SEQ ID NO: 1175252 - DNA, 15 bp, Homo sapiens
acatttggttttctg

SEQ ID NO: 1175253 - DNA, 15 bp, Homo sapiens
gacatttggttttct

SEQ ID NO: 1175254 - DNA, 15 bp, Homo sapiens
cgacatttggttttc

SEQ ID NO: 1175255 - DNA, 15 bp, Homo sapiens
gcgacatttggtttt

SEQ ID NO: 1175256 - DNA, 15 bp, Homo sapiens
tgcgacatttggttt

SEQ ID NO: 1175257 - DNA, 15 bp, Homo sapiens
atgcgacatttggtt

SEQ ID NO: 1175258 - DNA, 15 bp, Homo sapiens
catgcgacatttggt

SEQ ID NO: 1175259 - DNA, 15 bp, Homo sapiens
acatgcgacatttgg

SEQ ID NO: 1175260 - DNA, 15 bp, Homo sapiens
aacatgcgacatttg

SEQ ID NO: 1175261 - DNA, 15 bp, Homo sapiens
gaacatgcgacattt

SEQ ID NO: 1175262 - DNA, 15 bp, Homo sapiens
agaacatgcgacatt

SEQ ID NO: 1175263 - DNA, 15 bp, Homo sapiens
gagaacatgcgacat

SEQ ID NO: 1175264 - DNA, 15 bp, Homo sapiens
tgagaacatgcgaca

SEQ ID NO: 1175265 - DNA, 15 bp, Homo sapiens
gtgagaacatgcgac

SEQ ID NO: 1175266 - DNA, 15 bp, Homo sapiens
agtgagaacatgcga

SEQ ID NO: 1175267 - DNA, 15 bp, Homo sapiens
aagtgagaacatgcg

SEQ ID NO: 1175268 - DNA, 15 bp, Homo sapiens
taagtgagaacatgc

SEQ ID NO: 1175269 - DNA, 15 bp, Homo sapiens
ataagtgagaacatg

SEQ ID NO: 1175270 - DNA, 15 bp, Homo sapiens
tataagtgagaacat

SEQ ID NO: 1175271 - DNA, 15 bp, Homo sapiens
atataagtgagaaca

SEQ ID NO: 1175272 - DNA, 15 bp, Homo sapiens
catataagtgagaac

SEQ ID NO: 1175273 - DNA, 15 bp, Homo sapiens
acatataagtgagaa

SEQ ID NO: 1175274 - DNA, 15 bp, Homo sapiens
cacatataagtgaga

SEQ ID NO: 1175275 - DNA, 15 bp, Homo sapiens
ccacatataagtgag

SEQ ID NO: 1175276 - DNA, 15 bp, Homo sapiens
cccacatataagtga

SEQ ID NO: 1175277 - DNA, 15 bp, Homo sapiens
tcccacatataagtg

SEQ ID NO: 1175278 - DNA, 15 bp, Homo sapiens
ctcccacatataagt

SEQ ID NO: 1175279 - DNA, 15 bp, Homo sapiens
actcccacatataag

SEQ ID NO: 1175280 - DNA, 15 bp, Homo sapiens
aactcccacatataa

SEQ ID NO: 1175281 - DNA, 15 bp, Homo sapiens
caactcccacatata

SEQ ID NO: 1175282 - DNA, 15 bp, Homo sapiens
tcaactcccacatat

SEQ ID NO: 1175283 - DNA, 15 bp, Homo sapiens
ttcaactcccacata

SEQ ID NO: 1175284 - DNA, 15 bp, Homo sapiens
gttcaactcccacat

SEQ ID NO: 1175285 - DNA, 15 bp, Homo sapiens
tgttcaactcccaca

SEQ ID NO: 1175286 - DNA, 15 bp, Homo sapiens
ttgttcaactcccac

SEQ ID NO: 1175287 - DNA, 15 bp, Homo sapiens
attgttcaactccca

SEQ ID NO: 1175288 - DNA, 15 bp, Homo sapiens
cattgttcaactccc

SEQ ID NO: 1175289 - DNA, 15 bp, Homo sapiens
tcattgttcaactcc

SEQ ID NO: 1175290 - DNA, 15 bp, Homo sapiens
ctcattgttcaactc

SEQ ID NO: 1175291 - DNA, 15 bp, Homo sapiens
tctcattgttcaact

SEQ ID NO: 1175292 - DNA, 15 bp, Homo sapiens
gttctcattgttcaa

SEQ ID NO: 1175293 - DNA, 15 bp, Homo sapiens
tgtgttctcattgtt

SEQ ID NO: 1175294 - DNA, 15 bp, Homo sapiens
atgtgttctcattgt

SEQ ID NO: 1175295 - DNA, 15 bp, Homo sapiens
catgtgttctcattg

SEQ ID NO: 1175296 - DNA, 15 bp, Homo sapiens
ccatgtgttctcatt

SEQ ID NO: 1175297 - DNA, 15 bp, Homo sapiens
cccatgtgttctcat

SEQ ID NO: 1175298 - DNA, 15 bp, Homo sapiens
gcccatgtgttctca

SEQ ID NO: 1175299 - DNA, 15 bp, Homo sapiens
tgcccatgtgttctc

SEQ ID NO: 1175300 - DNA, 15 bp, Homo sapiens
gtgcccatgtgttct

SEQ ID NO: 1175301 - DNA, 15 bp, Homo sapiens
tgtgcccatgtgttc

SEQ ID NO: 1175302 - DNA, 15 bp, Homo sapiens
ctgtgcccatgtgtt

SEQ ID NO: 1175303 - DNA, 15 bp, Homo sapiens
cctgtgcccatgtgt

SEQ ID NO: 1175304 - DNA, 15 bp, Homo sapiens
ccctgtgcccatgtg

SEQ ID NO: 1175305 - DNA, 15 bp, Homo sapiens
tccctgtgcccatgt

SEQ ID NO: 1175306 - DNA, 15 bp, Homo sapiens
atccctgtgcccatg

SEQ ID NO: 1175307 - DNA, 15 bp, Homo sapiens
catccctgtgcccat

SEQ ID NO: 1175308 - DNA, 15 bp, Homo sapiens
ccatccctgtgccca

SEQ ID NO: 1175309 - DNA, 15 bp, Homo sapiens
cccatccctgtgccc

SEQ ID NO: 1175310 - DNA, 15 bp, Homo sapiens
tcccatccctgtgcc

SEQ ID NO: 1175311 - DNA, 15 bp, Homo sapiens
ttcccatccctgtgc

SEQ ID NO: 1175312 - DNA, 15 bp, Homo sapiens
gttcccatccctgtg

SEQ ID NO: 1175313 - DNA, 15 bp, Homo sapiens
tgttcccatccctgt

SEQ ID NO: 1175314 - DNA, 15 bp, Homo sapiens
atgttcccatccctg

SEQ ID NO: 1175315 - DNA, 15 bp, Homo sapiens
gatgttcccatccct

SEQ ID NO: 1175316 - DNA, 15 bp, Homo sapiens
tgatgttcccatccc

SEQ ID NO: 1175317 - DNA, 15 bp, Homo sapiens
gtgatgttcccatcc

SEQ ID NO: 1175318 - DNA, 15 bp, Homo sapiens
tgtgatgttcccatc

SEQ ID NO: 1175319 - DNA, 15 bp, Homo sapiens
gtgtgatgttcccat

SEQ ID NO: 1175320 - DNA, 15 bp, Homo sapiens
tgtgtgatgttccca

SEQ ID NO: 1175321 - DNA, 15 bp, Homo sapiens
ggtgtgtgatgttcc

SEQ ID NO: 1175322 - DNA, 15 bp, Homo sapiens
tggtgtgtgatgttc

SEQ ID NO: 1175323 - DNA, 15 bp, Homo sapiens
ctggtgtgtgatgtt

SEQ ID NO: 1175324 - DNA, 15 bp, Homo sapiens
cctggtgtgtgatgt

SEQ ID NO: 1175325 - DNA, 15 bp, Homo sapiens
ccctggtgtgtgatg

SEQ ID NO: 1175326 - DNA, 15 bp, Homo sapiens
gccctggtgtgtgat

SEQ ID NO: 1175327 - DNA, 15 bp, Homo sapiens
ggccctggtgtgtga

SEQ ID NO: 1175328 - DNA, 15 bp, Homo sapiens
aggccctggtgtgtg

SEQ ID NO: 1175329 - DNA, 15 bp, Homo sapiens
aaggccctggtgtgt

SEQ ID NO: 1175330 - DNA, 15 bp, Homo sapiens
aaaggccctggtgtg

SEQ ID NO: 1175331 - DNA, 15 bp, Homo sapiens
gaaaggccctggtgt

SEQ ID NO: 1175332 - DNA, 15 bp, Homo sapiens
agaaaggccctggtg

SEQ ID NO: 1175333 - DNA, 15 bp, Homo sapiens
cagaaaggccctggt

SEQ ID NO: 1175334 - DNA, 15 bp, Homo sapiens
ccagaaaggccctgg

SEQ ID NO: 1175335 - DNA, 15 bp, Homo sapiens
gccagaaaggccctg

SEQ ID NO: 1175336 - DNA, 15 bp, Homo sapiens
cgccagaaaggccct

SEQ ID NO: 1175337 - DNA, 15 bp, Homo sapiens
acgccagaaaggccc

SEQ ID NO: 1175338 - DNA, 15 bp, Homo sapiens
cacgccagaaaggcc

SEQ ID NO: 1175339 - DNA, 15 bp, Homo sapiens
ccacgccagaaaggc

SEQ ID NO: 1175340 - DNA, 15 bp, Homo sapiens
cccacgccagaaagg

SEQ ID NO: 1175341 - DNA, 15 bp, Homo sapiens
tcccacgccagaaag

SEQ ID NO: 1175342 - DNA, 15 bp, Homo sapiens
ctcccacgccagaaa

SEQ ID NO: 1175343 - DNA, 15 bp, Homo sapiens
cctcccacgccagaa

SEQ ID NO: 1175344 - DNA, 15 bp, Homo sapiens
gcctcccacgccaga

SEQ ID NO: 1175345 - DNA, 15 bp, Homo sapiens
agcctcccacgccag

SEQ ID NO: 1175346 - DNA, 15 bp, Homo sapiens
tagcctcccacgcca

SEQ ID NO: 1175347 - DNA, 15 bp, Homo sapiens
ctagcctcccacgcc

SEQ ID NO: 1175348 - DNA, 15 bp, Homo sapiens
cctagcctcccacgc

SEQ ID NO: 1175349 - DNA, 15 bp, Homo sapiens
ccctagcctcccacg

SEQ ID NO: 1175350 - DNA, 15 bp, Homo sapiens
cccctagcctcccac

SEQ ID NO: 1175351 - DNA, 15 bp, Homo sapiens
tcccctagcctccca

SEQ ID NO: 1175352 - DNA, 15 bp, Homo sapiens
ctcccctagcctccc

SEQ ID NO: 1175353 - DNA, 15 bp, Homo sapiens
cctcccctagcctcc

SEQ ID NO: 1175354 - DNA, 15 bp, Homo sapiens
ccctcccctagcctc

SEQ ID NO: 1175355 - DNA, 15 bp, Homo sapiens
tccctcccctagcct

SEQ ID NO: 1175356 - DNA, 15 bp, Homo sapiens
atccctcccctagcc

SEQ ID NO: 1175357 - DNA, 15 bp, Homo sapiens
tatccctcccctagc

SEQ ID NO: 1175358 - DNA, 15 bp, Homo sapiens
ctatccctcccctag

SEQ ID NO: 1175359 - DNA, 15 bp, Homo sapiens
gctatccctccccta

SEQ ID NO: 1175360 - DNA, 15 bp, Homo sapiens
tgctatccctcccct

SEQ ID NO: 1175361 - DNA, 15 bp, Homo sapiens
atgctatccctcccc

SEQ ID NO: 1175362 - DNA, 15 bp, Homo sapiens
ttctcctaatgctat

SEQ ID NO: 1175363 - DNA, 15 bp, Homo sapiens
tttctcctaatgcta

SEQ ID NO: 1175364 - DNA, 15 bp, Homo sapiens
atttctcctaatgct

SEQ ID NO: 1175365 - DNA, 15 bp, Homo sapiens
tatttctcctaatgc

SEQ ID NO: 1175366 - DNA, 15 bp, Homo sapiens
gtatttctcctaatg

SEQ ID NO: 1175367 - DNA, 15 bp, Homo sapiens
agtatttctcctaat

SEQ ID NO: 1175368 - DNA, 15 bp, Homo sapiens
aagtatttctcctaa

SEQ ID NO: 1175369 - DNA, 15 bp, Homo sapiens
taagtatttctccta

SEQ ID NO: 1175370 - DNA, 15 bp, Homo sapiens
ttaagtatttctcct

SEQ ID NO: 1175371 - DNA, 15 bp, Homo sapiens
attaagtatttctcc

SEQ ID NO: 1175372 - DNA, 15 bp, Homo sapiens
tattaagtatttctc

SEQ ID NO: 1175373 - DNA, 15 bp, Homo sapiens
atattaagtatttct

SEQ ID NO: 1175374 - DNA, 15 bp, Homo sapiens
tatattaagtatttc

SEQ ID NO: 1175375 - DNA, 15 bp, Homo sapiens
ctatattaagtattt

SEQ ID NO: 1175376 - DNA, 15 bp, Homo sapiens
tctatattaagtatt

SEQ ID NO: 1175377 - DNA, 15 bp, Homo sapiens
atctatattaagtat

SEQ ID NO: 1175378 - DNA, 15 bp, Homo sapiens
catctatattaagta

SEQ ID NO: 1175379 - DNA, 15 bp, Homo sapiens
tcatctatattaagt

SEQ ID NO: 1175380 - DNA, 15 bp, Homo sapiens
gtcatctatattaag

SEQ ID NO: 1175381 - DNA, 15 bp, Homo sapiens
tgtcatctatattaa

SEQ ID NO: 1175382 - DNA, 15 bp, Homo sapiens
ctgtcatctatatta

SEQ ID NO: 1175383 - DNA, 15 bp, Homo sapiens
cctgtcatctatatt

SEQ ID NO: 1175384 - DNA, 15 bp, Homo sapiens
acctgtcatctatat

SEQ ID NO: 1175385 - DNA, 15 bp, Homo sapiens
aacctgtcatctata

SEQ ID NO: 1175386 - DNA, 15 bp, Homo sapiens
caacctgtcatctat

SEQ ID NO: 1175387 - DNA, 15 bp, Homo sapiens
catcaacctgtcatc

SEQ ID NO: 1175388 - DNA, 15 bp, Homo sapiens
ccatcaacctgtcat

SEQ ID NO: 1175389 - DNA, 15 bp, Homo sapiens
cccatcaacctgtca

SEQ ID NO: 1175390 - DNA, 15 bp, Homo sapiens
acccatcaacctgtc

SEQ ID NO: 1175391 - DNA, 15 bp, Homo sapiens
cacccatcaacctgt

SEQ ID NO: 1175392 - DNA, 15 bp, Homo sapiens
gcacccatcaacctg

SEQ ID NO: 1175393 - DNA, 15 bp, Homo sapiens
tgcacccatcaacct

SEQ ID NO: 1175394 - DNA, 15 bp, Homo sapiens
ctgcacccatcaacc

SEQ ID NO: 1175395 - DNA, 15 bp, Homo sapiens
gctgcacccatcaac

SEQ ID NO: 1175396 - DNA, 15 bp, Homo sapiens
tgctgcacccatcaa

SEQ ID NO: 1175397 - DNA, 15 bp, Homo sapiens
ttgctgcacccatca

SEQ ID NO: 1175398 - DNA, 15 bp, Homo sapiens
tttgctgcacccatc

SEQ ID NO: 1175399 - DNA, 15 bp, Homo sapiens
gtttgctgcacccat

SEQ ID NO: 1175400 - DNA, 15 bp, Homo sapiens
ggtttgctgcaccca

SEQ ID NO: 1175401 - DNA, 15 bp, Homo sapiens
tggtttgctgcaccc

SEQ ID NO: 1175402 - DNA, 15 bp, Homo sapiens
gtggtttgctgcacc

SEQ ID NO: 1175403 - DNA, 15 bp, Homo sapiens
ggtggtttgctgcac

SEQ ID NO: 1175404 - DNA, 15 bp, Homo sapiens
tggtggtttgctgca

SEQ ID NO: 1175405 - DNA, 15 bp, Homo sapiens
atggtggtttgctgc

SEQ ID NO: 1175406 - DNA, 15 bp, Homo sapiens
catggtggtttgctg

SEQ ID NO: 1175407 - DNA, 15 bp, Homo sapiens
ccatggtggtttgct

SEQ ID NO: 1175408 - DNA, 15 bp, Homo sapiens
gccatggtggtttgc

SEQ ID NO: 1175409 - DNA, 15 bp, Homo sapiens
tgttacataggtata

SEQ ID NO: 1175410 - DNA, 15 bp, Homo sapiens
ttgttacataggtat

SEQ ID NO: 1175411 - DNA, 15 bp, Homo sapiens
gtttgttacataggt

SEQ ID NO: 1175412 - DNA, 15 bp, Homo sapiens
ggtttgttacatagg

SEQ ID NO: 1175413 - DNA, 15 bp, Homo sapiens
aggtttgttacatag

SEQ ID NO: 1175414 - DNA, 15 bp, Homo sapiens
tgcaggtttgttaca

SEQ ID NO: 1175415 - DNA, 15 bp, Homo sapiens
gtgcaggtttgttac

SEQ ID NO: 1175416 - DNA, 15 bp, Homo sapiens
ggtgcaggtttgtta

SEQ ID NO: 1175417 - DNA, 15 bp, Homo sapiens
cggtgcaggtttgtt

SEQ ID NO: 1175418 - DNA, 15 bp, Homo sapiens
acggtgcaggtttgt

SEQ ID NO: 1175419 - DNA, 15 bp, Homo sapiens
gacggtgcaggtttg

SEQ ID NO: 1175420 - DNA, 15 bp, Homo sapiens
ggacggtgcaggttt

SEQ ID NO: 1175421 - DNA, 15 bp, Homo sapiens
tggacggtgcaggtt

SEQ ID NO: 1175422 - DNA, 15 bp, Homo sapiens
gtggacggtgcaggt

SEQ ID NO: 1175423 - DNA, 15 bp, Homo sapiens
tgtggacggtgcagg

SEQ ID NO: 1175424 - DNA, 15 bp, Homo sapiens
gtgtggacggtgcag

SEQ ID NO: 1175425 - DNA, 15 bp, Homo sapiens
tgtgtggacggtgca

SEQ ID NO: 1175426 - DNA, 15 bp, Homo sapiens
atgtgtggacggtgc

SEQ ID NO: 1175427 - DNA, 15 bp, Homo sapiens
catgtgtggacggtg

SEQ ID NO: 1175428 - DNA, 15 bp, Homo sapiens
acatgtgtggacggt

SEQ ID NO: 1175429 - DNA, 15 bp, Homo sapiens
tacatgtgtggacgg

SEQ ID NO: 1175430 - DNA, 15 bp, Homo sapiens
atacatgtgtggacg

SEQ ID NO: 1175431 - DNA, 15 bp, Homo sapiens
aatacatgtgtggac

SEQ ID NO: 1175432 - DNA, 15 bp, Homo sapiens
gaatacatgtgtgga

SEQ ID NO: 1175433 - DNA, 15 bp, Homo sapiens
ggaatacatgtgtgg

SEQ ID NO: 1175434 - DNA, 15 bp, Homo sapiens
tggaatacatgtgtg

SEQ ID NO: 1175435 - DNA, 15 bp, Homo sapiens
ctggaatacatgtgt

SEQ ID NO: 1175436 - DNA, 15 bp, Homo sapiens
tctggaatacatgtg

SEQ ID NO: 1175437 - DNA, 15 bp, Homo sapiens
ttctggaatacatgt

SEQ ID NO: 1175438 - DNA, 15 bp, Homo sapiens
gttctggaatacatg

SEQ ID NO: 1175439 - DNA, 15 bp, Homo sapiens
agttctggaatacat

SEQ ID NO: 1175440 - DNA, 15 bp, Homo sapiens
aagttctggaataca

SEQ ID NO: 1175441 - DNA, 15 bp, Homo sapiens
taagttctggaatac

SEQ ID NO: 1175442 - DNA, 15 bp, Homo sapiens
ttaagttctggaata

SEQ ID NO: 1175443 - DNA, 15 bp, Homo sapiens
tttaagttctggaat

SEQ ID NO: 1175444 - DNA, 15 bp, Homo sapiens
ctttaagttctggaa

SEQ ID NO: 1175445 - DNA, 15 bp, Homo sapiens
actttaagttctgga

SEQ ID NO: 1175446 - DNA, 15 bp, Homo sapiens
tactttaagttctgg

SEQ ID NO: 1175447 - DNA, 15 bp, Homo sapiens
atactttaagttctg

SEQ ID NO: 1175448 - DNA, 15 bp, Homo sapiens
aattatactttaagt

SEQ ID NO: 1175449 - DNA, 15 bp, Homo sapiens
aaattatactttaag

SEQ ID NO: 1175450 - DNA, 15 bp, Homo sapiens
taaattatactttaa

SEQ ID NO: 1175451 - DNA, 15 bp, Homo sapiens
ttaaattatacttta

SEQ ID NO: 1175452 - DNA, 15 bp, Homo sapiens
tttaaattatacttt

SEQ ID NO: 1175453 - DNA, 15 bp, Homo sapiens
ttttaaattatactt

SEQ ID NO: 1175454 - DNA, 15 bp, Homo sapiens
tttttaaattatact

SEQ ID NO: 1175455 - DNA, 15 bp, Homo sapiens
ttttttaaattatac

SEQ ID NO: 1175456 - DNA, 15 bp, Homo sapiens
attttttaaattata

SEQ ID NO: 1175457 - DNA, 15 bp, Homo sapiens
gtattttttaaatta

SEQ ID NO: 1175458 - DNA, 15 bp, Homo sapiens
tgtattttttaaatt

SEQ ID NO: 1175459 - DNA, 15 bp, Homo sapiens
gtgtattttttaaat

SEQ ID NO: 1175460 - DNA, 15 bp, Homo sapiens
tgtgtattttttaaa

SEQ ID NO: 1175461 - DNA, 15 bp, Homo sapiens
atgtgtattttttaa

SEQ ID NO: 1175462 - DNA, 15 bp, Homo sapiens
gatgtgtatttttta

SEQ ID NO: 1175463 - DNA, 15 bp, Homo sapiens
ggatgtgtatttttt

SEQ ID NO: 1175464 - DNA, 15 bp, Homo sapiens
tggatgtgtattttt

SEQ ID NO: 1175465 - DNA, 15 bp, Homo sapiens
gtggatgtgtatttt

SEQ ID NO: 1175466 - DNA, 15 bp, Homo sapiens
tgtggatgtgtattt

SEQ ID NO: 1175467 - DNA, 15 bp, Homo sapiens
atgtggatgtgtatt

SEQ ID NO: 1175468 - DNA, 15 bp, Homo sapiens
tatgtggatgtgtat

SEQ ID NO: 1175469 - DNA, 15 bp, Homo sapiens
ttatgtggatgtgta

SEQ ID NO: 1175470 - DNA, 15 bp, Homo sapiens
tttatgtggatgtgt

SEQ ID NO: 1175471 - DNA, 15 bp, Homo sapiens
gtttatgtggatgtg

SEQ ID NO: 1175472 - DNA, 15 bp, Homo sapiens
tgtttatgtggatgt

SEQ ID NO: 1175473 - DNA, 15 bp, Homo sapiens
gtgtttatgtggatg

SEQ ID NO: 1175474 - DNA, 15 bp, Homo sapiens
tgtgtttatgtggat

SEQ ID NO: 1175475 - DNA, 15 bp, Homo sapiens
gtgtgtttatgtgga

SEQ ID NO: 1175476 - DNA, 15 bp, Homo sapiens
tgtgtgtttatgtgg

SEQ ID NO: 1175477 - DNA, 15 bp, Homo sapiens
atgtgtgtttatgtg

SEQ ID NO: 1175478 - DNA, 15 bp, Homo sapiens
catgtgtgtttatgt

SEQ ID NO: 1175479 - DNA, 15 bp, Homo sapiens
acatgtgtgtttatg

SEQ ID NO: 1175480 - DNA, 15 bp, Homo sapiens
tacatgtgtgtttat

SEQ ID NO: 1175481 - DNA, 15 bp, Homo sapiens
atacatgtgtgttta

SEQ ID NO: 1175482 - DNA, 15 bp, Homo sapiens
tatacatgtgtgttt

SEQ ID NO: 1175483 - DNA, 15 bp, Homo sapiens
atatacatgtgtgtt

SEQ ID NO: 1175484 - DNA, 15 bp, Homo sapiens
catatacatgtgtgt

SEQ ID NO: 1175485 - DNA, 15 bp, Homo sapiens
gcatatacatgtgtg

SEQ ID NO: 1175486 - DNA, 15 bp, Homo sapiens
agcatatacatgtgt

SEQ ID NO: 1175487 - DNA, 15 bp, Homo sapiens
tagcatatacatgtg

SEQ ID NO: 1175488 - DNA, 15 bp, Homo sapiens
gtagcatatacatgt

SEQ ID NO: 1175489 - DNA, 15 bp, Homo sapiens
tgtagcatatacatg

SEQ ID NO: 1175490 - DNA, 15 bp, Homo sapiens
atgtagcatatacat

SEQ ID NO: 1175491 - DNA, 15 bp, Homo sapiens
aatgtagcatataca

SEQ ID NO: 1175492 - DNA, 15 bp, Homo sapiens
aaatgtagcatatac

SEQ ID NO: 1175493 - DNA, 15 bp, Homo sapiens
aaaatgtagcatata

SEQ ID NO: 1175494 - DNA, 15 bp, Homo sapiens
gaaaatgtagcatat

SEQ ID NO: 1175495 - DNA, 15 bp, Homo sapiens
tgaaaatgtagcata

SEQ ID NO: 1175496 - DNA, 15 bp, Homo sapiens
ctgaaaatgtagcat

SEQ ID NO: 1175497 - DNA, 15 bp, Homo sapiens
actgaaaatgtagca

SEQ ID NO: 1175498 - DNA, 15 bp, Homo sapiens
gactgaaaatgtagc

SEQ ID NO: 1175499 - DNA, 15 bp, Homo sapiens
tgactgaaaatgtag

SEQ ID NO: 1175500 - DNA, 15 bp, Homo sapiens
ttgactgaaaatgta

SEQ ID NO: 1175501 - DNA, 15 bp, Homo sapiens
gttgactgaaaatgt

SEQ ID NO: 1175502 - DNA, 15 bp, Homo sapiens
tgttgactgaaaatg

SEQ ID NO: 1175503 - DNA, 15 bp, Homo sapiens
gtgttgactgaaaat

SEQ ID NO: 1175504 - DNA, 15 bp, Homo sapiens
agtgttgactgaaaa

SEQ ID NO: 1175505 - DNA, 15 bp, Homo sapiens
tagtgttgactgaaa

SEQ ID NO: 1175506 - DNA, 15 bp, Homo sapiens
ttagtgttgactgaa

SEQ ID NO: 1175507 - DNA, 15 bp, Homo sapiens
cttagtgttgactga

SEQ ID NO: 1175508 - DNA, 15 bp, Homo sapiens
tcttagtgttgactg

SEQ ID NO: 1175509 - DNA, 15 bp, Homo sapiens
ttcttagtgttgact

SEQ ID NO: 1175510 - DNA, 15 bp, Homo sapiens
gttcttagtgttgac

SEQ ID NO: 1175511 - DNA, 15 bp, Homo sapiens
tgttcttagtgttga

SEQ ID NO: 1175512 - DNA, 15 bp, Homo sapiens
ctgttcttagtgttg

SEQ ID NO: 1175513 - DNA, 15 bp, Homo sapiens
tctgttcttagtgtt

SEQ ID NO: 1175514 - DNA, 15 bp, Homo sapiens
atctgttcttagtgt

SEQ ID NO: 1175515 - DNA, 15 bp, Homo sapiens
catctgttcttagtg

SEQ ID NO: 1175516 - DNA, 15 bp, Homo sapiens
ccatctgttcttagt

SEQ ID NO: 1175517 - DNA, 15 bp, Homo sapiens
accatctgttcttag

SEQ ID NO: 1175518 - DNA, 15 bp, Homo sapiens
taccatctgttctta

SEQ ID NO: 1175519 - DNA, 15 bp, Homo sapiens
gtaccatctgttctt

SEQ ID NO: 1175520 - DNA, 15 bp, Homo sapiens
tgtaccatctgttct

SEQ ID NO: 1175521 - DNA, 15 bp, Homo sapiens
ttgtaccatctgttc

SEQ ID NO: 1175522 - DNA, 15 bp, Homo sapiens
tttgtaccatctgtt

SEQ ID NO: 1175523 - DNA, 15 bp, Homo sapiens
ctttgtaccatctgt

SEQ ID NO: 1175524 - DNA, 15 bp, Homo sapiens
tctttgtaccatctg

SEQ ID NO: 1175525 - DNA, 15 bp, Homo sapiens
ctctttgtaccatct

SEQ ID NO: 1175526 - DNA, 15 bp, Homo sapiens
gctctttgtaccatc

SEQ ID NO: 1175527 - DNA, 15 bp, Homo sapiens
tgctctttgtaccat

SEQ ID NO: 1175528 - DNA, 15 bp, Homo sapiens
gtgctctttgtacca

SEQ ID NO: 1175529 - DNA, 15 bp, Homo sapiens
ggtgctctttgtacc

SEQ ID NO: 1175530 - DNA, 15 bp, Homo sapiens
aggtgctctttgtac

SEQ ID NO: 1175531 - DNA, 15 bp, Homo sapiens
taggtgctctttgta

SEQ ID NO: 1175532 - DNA, 15 bp, Homo sapiens
ataggtgctctttgt

SEQ ID NO: 1175533 - DNA, 15 bp, Homo sapiens
gataggtgctctttg

SEQ ID NO: 1175534 - DNA, 15 bp, Homo sapiens
tgataggtgctcttt

SEQ ID NO: 1175535 - DNA, 15 bp, Homo sapiens
ttgataggtgctctt

SEQ ID NO: 1175536 - DNA, 15 bp, Homo sapiens
attgataggtgctct

SEQ ID NO: 1175537 - DNA, 15 bp, Homo sapiens
gattgataggtgctc

SEQ ID NO: 1175538 - DNA, 15 bp, Homo sapiens
tgattgataggtgct

SEQ ID NO: 1175539 - DNA, 15 bp, Homo sapiens
atgattgataggtgc

SEQ ID NO: 1175540 - DNA, 15 bp, Homo sapiens
catgattgataggtg

SEQ ID NO: 1175541 - DNA, 15 bp, Homo sapiens
acatgattgataggt

SEQ ID NO: 1175542 - DNA, 15 bp, Homo sapiens
aacatgattgatagg

SEQ ID NO: 1175543 - DNA, 15 bp, Homo sapiens
aaacatgattgatag

SEQ ID NO: 1175544 - DNA, 15 bp, Homo sapiens
gaaacatgattgata

SEQ ID NO: 1175545 - DNA, 15 bp, Homo sapiens
ggaaacatgattgat

SEQ ID NO: 1175546 - DNA, 15 bp, Homo sapiens
tggaaacatgattga

SEQ ID NO: 1175547 - DNA, 15 bp, Homo sapiens
ttggaaacatgattg

SEQ ID NO: 1175548 - DNA, 15 bp, Homo sapiens
attggaaacatgatt

SEQ ID NO: 1175549 - DNA, 15 bp, Homo sapiens
gattggaaacatgat

SEQ ID NO: 1175550 - DNA, 15 bp, Homo sapiens
tgattggaaacatga

SEQ ID NO: 1175551 - DNA, 15 bp, Homo sapiens
atgattggaaacatg

SEQ ID NO: 1175552 - DNA, 15 bp, Homo sapiens
aatgattggaaacat

SEQ ID NO: 1175553 - DNA, 15 bp, Homo sapiens
caatgattggaaaca

SEQ ID NO: 1175554 - DNA, 15 bp, Homo sapiens
acaatgattggaaac

SEQ ID NO: 1175555 - DNA, 15 bp, Homo sapiens
aacaatgattggaaa

SEQ ID NO: 1175556 - DNA, 15 bp, Homo sapiens
aaacaatgattggaa

SEQ ID NO: 1175557 - DNA, 15 bp, Homo sapiens
aaaacaatgattgga

SEQ ID NO: 1175558 - DNA, 15 bp, Homo sapiens
caaaacaatgattgg

SEQ ID NO: 1175559 - DNA, 15 bp, Homo sapiens
ccaaaacaatgattg

SEQ ID NO: 1175560 - DNA, 15 bp, Homo sapiens
cccaaaacaatgatt

SEQ ID NO: 1175561 - DNA, 15 bp, Homo sapiens
tcccaaaacaatgat

SEQ ID NO: 1175562 - DNA, 15 bp, Homo sapiens
ctcccaaaacaatga

SEQ ID NO: 1175563 - DNA, 15 bp, Homo sapiens
tctcccaaaacaatg

SEQ ID NO: 1175564 - DNA, 15 bp, Homo sapiens
gtctcccaaaacaat

SEQ ID NO: 1175565 - DNA, 15 bp, Homo sapiens
agtctcccaaaacaa

SEQ ID NO: 1175566 - DNA, 15 bp, Homo sapiens
aagtctcccaaaaca

SEQ ID NO: 1175567 - DNA, 15 bp, Homo sapiens
aaagtctcccaaaac

SEQ ID NO: 1175568 - DNA, 15 bp, Homo sapiens
aaaagtctcccaaaa

SEQ ID NO: 1175569 - DNA, 15 bp, Homo sapiens
gaaaagtctcccaaa

SEQ ID NO: 1175570 - DNA, 15 bp, Homo sapiens
ggaaaagtctcccaa

SEQ ID NO: 1175571 - DNA, 15 bp, Homo sapiens
aggaaaagtctccca

SEQ ID NO: 1175572 - DNA, 15 bp, Homo sapiens
caggaaaagtctccc

SEQ ID NO: 1175573 - DNA, 15 bp, Homo sapiens
tcaggaaaagtctcc

SEQ ID NO: 1175574 - DNA, 15 bp, Homo sapiens
gtcaggaaaagtctc

SEQ ID NO: 1175575 - DNA, 15 bp, Homo sapiens
agtcaggaaaagtct

SEQ ID NO: 1175576 - DNA, 15 bp, Homo sapiens
cagtcaggaaaagtc

SEQ ID NO: 1175577 - DNA, 15 bp, Homo sapiens
acagtcaggaaaagt

SEQ ID NO: 1175578 - DNA, 15 bp, Homo sapiens
tacagtcaggaaaag

SEQ ID NO: 1175579 - DNA, 15 bp, Homo sapiens
ttacagtcaggaaaa

SEQ ID NO: 1175580 - DNA, 15 bp, Homo sapiens
tttacagtcaggaaa

SEQ ID NO: 1175581 - DNA, 15 bp, Homo sapiens
ttttacagtcaggaa

SEQ ID NO: 1175582 - DNA, 15 bp, Homo sapiens
attttacagtcagga

SEQ ID NO: 1175583 - DNA, 15 bp, Homo sapiens
tattttacagtcagg

SEQ ID NO: 1175584 - DNA, 15 bp, Homo sapiens
gtattttacagtcag

SEQ ID NO: 1175585 - DNA, 15 bp, Homo sapiens
ggtattttacagtca

SEQ ID NO: 1175586 - DNA, 15 bp, Homo sapiens
aggtattttacagtc

SEQ ID NO: 1175587 - DNA, 15 bp, Homo sapiens
caggtattttacagt

SEQ ID NO: 1175588 - DNA, 15 bp, Homo sapiens
gcaggtattttacag

SEQ ID NO: 1175589 - DNA, 15 bp, Homo sapiens
agcaggtattttaca

SEQ ID NO: 1175590 - DNA, 15 bp, Homo sapiens
aagcaggtattttac

SEQ ID NO: 1175591 - DNA, 15 bp, Homo sapiens
taagcaggtatttta

SEQ ID NO: 1175592 - DNA, 15 bp, Homo sapiens
ttaagcaggtatttt

SEQ ID NO: 1175593 - DNA, 15 bp, Homo sapiens
cttaagcaggtattt

SEQ ID NO: 1175594 - DNA, 15 bp, Homo sapiens
ccttaagcaggtatt

SEQ ID NO: 1175595 - DNA, 15 bp, Homo sapiens
accttaagcaggtat

SEQ ID NO: 1175596 - DNA, 15 bp, Homo sapiens
taccttaagcaggta

SEQ ID NO: 1175597 - DNA, 15 bp, Homo sapiens
ttaccttaagcaggt

SEQ ID NO: 1175598 - DNA, 15 bp, Homo sapiens
tttaccttaagcagg

SEQ ID NO: 1175599 - DNA, 15 bp, Homo sapiens
ttttaccttaagcag

SEQ ID NO: 1175600 - DNA, 15 bp, Homo sapiens
tttttaccttaagca

SEQ ID NO: 1175601 - DNA, 15 bp, Homo sapiens
ttttttaccttaagc

SEQ ID NO: 1175602 - DNA, 15 bp, Homo sapiens
tttttttaccttaag

SEQ ID NO: 1175603 - DNA, 15 bp, Homo sapiens
ttttttttaccttaa

SEQ ID NO: 1175604 - DNA, 15 bp, Homo sapiens
tttttttttacctta

SEQ ID NO: 1175605 - DNA, 15 bp, Homo sapiens
ttttttttttacctt

SEQ ID NO: 1175606 - DNA, 15 bp, Homo sapiens
tttttttttttacct

SEQ ID NO: 1175607 - DNA, 15 bp, Homo sapiens
ttttttttttttacc

SEQ ID NO: 1175608 - DNA, 15 bp, Homo sapiens
ttttgcatttttttt

SEQ ID NO: 1175609 - DNA, 15 bp, Homo sapiens
tttttgcattttttt

SEQ ID NO: 1175610 - DNA, 15 bp, Homo sapiens
ttttttgcatttttt

SEQ ID NO: 1175611 - DNA, 15 bp, Homo sapiens
cttttttgcattttt

SEQ ID NO: 1175612 - DNA, 15 bp, Homo sapiens
acttttttgcatttt

SEQ ID NO: 1175613 - DNA, 15 bp, Homo sapiens
tacttttttgcattt

SEQ ID NO: 1175614 - DNA, 15 bp, Homo sapiens
atacttttttgcatt

SEQ ID NO: 1175615 - DNA, 15 bp, Homo sapiens
aatacttttttgcat

SEQ ID NO: 1175616 - DNA, 15 bp, Homo sapiens
taatacttttttgca

SEQ ID NO: 1175617 - DNA, 15 bp, Homo sapiens
ctaatacttttttgc

SEQ ID NO: 1175618 - DNA, 15 bp, Homo sapiens
tctaatacttttttg

SEQ ID NO: 1175619 - DNA, 15 bp, Homo sapiens
ctctaatactttttt

SEQ ID NO: 1175620 - DNA, 15 bp, Homo sapiens
cctctaatacttttt

SEQ ID NO: 1175621 - DNA, 15 bp, Homo sapiens
acctctaatactttt

SEQ ID NO: 1175622 - DNA, 15 bp, Homo sapiens
cacctctaatacttt

SEQ ID NO: 1175623 - DNA, 15 bp, Homo sapiens
gcacctctaatactt

SEQ ID NO: 1175624 - DNA, 15 bp, Homo sapiens
agcacctctaatact

SEQ ID NO: 1175625 - DNA, 15 bp, Homo sapiens
tagcacctctaatac

SEQ ID NO: 1175626 - DNA, 15 bp, Homo sapiens
ttagcacctctaata

SEQ ID NO: 1175627 - DNA, 15 bp, Homo sapiens
tttagcacctctaat

SEQ ID NO: 1175628 - DNA, 15 bp, Homo sapiens
ttttagcacctctaa

SEQ ID NO: 1175629 - DNA, 15 bp, Homo sapiens
tttttagcacctcta

SEQ ID NO: 1175630 - DNA, 15 bp, Homo sapiens
atttttagcacctct

SEQ ID NO: 1175631 - DNA, 15 bp, Homo sapiens
gatttttagcacctc

SEQ ID NO: 1175632 - DNA, 15 bp, Homo sapiens
tgatttttagcacct

SEQ ID NO: 1175633 - DNA, 15 bp, Homo sapiens
gtgatttttagcacc

SEQ ID NO: 1175634 - DNA, 15 bp, Homo sapiens
agtgatttttagcac

SEQ ID NO: 1175635 - DNA, 15 bp, Homo sapiens
aagtgatttttagca

SEQ ID NO: 1175636 - DNA, 15 bp, Homo sapiens
caagtgatttttagc

SEQ ID NO: 1175637 - DNA, 15 bp, Homo sapiens
gcaagtgatttttag

SEQ ID NO: 1175638 - DNA, 15 bp, Homo sapiens
ggcaagtgattttta

SEQ ID NO: 1175639 - DNA, 15 bp, Homo sapiens
aggcaagtgattttt

SEQ ID NO: 1175640 - DNA, 15 bp, Homo sapiens
gaggcaagtgatttt

SEQ ID NO: 1175641 - DNA, 15 bp, Homo sapiens
tgaggcaagtgattt

SEQ ID NO: 1175642 - DNA, 15 bp, Homo sapiens
atgaggcaagtgatt

SEQ ID NO: 1175643 - DNA, 15 bp, Homo sapiens
catgaggcaagtgat

SEQ ID NO: 1175644 - DNA, 15 bp, Homo sapiens
gcatgaggcaagtga

SEQ ID NO: 1175645 - DNA, 15 bp, Homo sapiens
agcatgaggcaagtg

SEQ ID NO: 1175646 - DNA, 15 bp, Homo sapiens
tagcatgaggcaagt

SEQ ID NO: 1175647 - DNA, 15 bp, Homo sapiens
gtagcatgaggcaag

SEQ ID NO: 1175648 - DNA, 15 bp, Homo sapiens
tgtagcatgaggcaa

SEQ ID NO: 1175649 - DNA, 15 bp, Homo sapiens
gtgtagcatgaggca

SEQ ID NO: 1175650 - DNA, 15 bp, Homo sapiens
tgtgtagcatgaggc

SEQ ID NO: 1175651 - DNA, 15 bp, Homo sapiens
ttgtgtagcatgagg

SEQ ID NO: 1175652 - DNA, 15 bp, Homo sapiens
tttgtgtagcatgag

SEQ ID NO: 1175653 - DNA, 15 bp, Homo sapiens
ctttgtgtagcatga

SEQ ID NO: 1175654 - DNA, 15 bp, Homo sapiens
cctttgtgtagcatg

SEQ ID NO: 1175655 - DNA, 15 bp, Homo sapiens
acctttgtgtagcat

SEQ ID NO: 1175656 - DNA, 15 bp, Homo sapiens
aacctttgtgtagca

SEQ ID NO: 1175657 - DNA, 15 bp, Homo sapiens
gaacctttgtgtagc

SEQ ID NO: 1175658 - DNA, 15 bp, Homo sapiens
tgaacctttgtgtag

SEQ ID NO: 1175659 - DNA, 15 bp, Homo sapiens
atgaacctttgtgta

SEQ ID NO: 1175660 - DNA, 15 bp, Homo sapiens
tatgaacctttgtgt

SEQ ID NO: 1175661 - DNA, 15 bp, Homo sapiens
ctatgaacctttgtg

SEQ ID NO: 1175662 - DNA, 15 bp, Homo sapiens
actatgaacctttgt

SEQ ID NO: 1175663 - DNA, 15 bp, Homo sapiens
gactatgaacctttg

SEQ ID NO: 1175664 - DNA, 15 bp, Homo sapiens
ggactatgaaccttt

SEQ ID NO: 1175665 - DNA, 15 bp, Homo sapiens
gggactatgaacctt

SEQ ID NO: 1175666 - DNA, 15 bp, Homo sapiens
tgggactatgaacct

SEQ ID NO: 1175667 - DNA, 15 bp, Homo sapiens
gtgggactatgaacc

SEQ ID NO: 1175668 - DNA, 15 bp, Homo sapiens
tgtgggactatgaac

SEQ ID NO: 1175669 - DNA, 15 bp, Homo sapiens
atgtgggactatgaa

SEQ ID NO: 1175670 - DNA, 15 bp, Homo sapiens
tatgtgggactatga

SEQ ID NO: 1175671 - DNA, 15 bp, Homo sapiens
ctatgtgggactatg

SEQ ID NO: 1175672 - DNA, 15 bp, Homo sapiens
cctatgtgggactat

SEQ ID NO: 1175673 - DNA, 15 bp, Homo sapiens
ccctatgtgggacta

SEQ ID NO: 1175674 - DNA, 15 bp, Homo sapiens
accctatgtgggact

SEQ ID NO: 1175675 - DNA, 15 bp, Homo sapiens
gaccctatgtgggac

SEQ ID NO: 1175676 - DNA, 15 bp, Homo sapiens
tgaccctatgtggga

SEQ ID NO: 1175677 - DNA, 15 bp, Homo sapiens
ctgaccctatgtggg

SEQ ID NO: 1175678 - DNA, 15 bp, Homo sapiens
cctgaccctatgtgg

SEQ ID NO: 1175679 - DNA, 15 bp, Homo sapiens
gcctgaccctatgtg

SEQ ID NO: 1175680 - DNA, 15 bp, Homo sapiens
tgcctgaccctatgt

SEQ ID NO: 1175681 - DNA, 15 bp, Homo sapiens
gtgcctgaccctatg

SEQ ID NO: 1175682 - DNA, 15 bp, Homo sapiens
tgtgcctgaccctat

SEQ ID NO: 1175683 - DNA, 15 bp, Homo sapiens
ctgtgcctgacccta

SEQ ID NO: 1175684 - DNA, 15 bp, Homo sapiens
tctgtgcctgaccct

SEQ ID NO: 1175685 - DNA, 15 bp, Homo sapiens
ctctgtgcctgaccc

SEQ ID NO: 1175686 - DNA, 15 bp, Homo sapiens
actctgtgcctgacc

SEQ ID NO: 1175687 - DNA, 15 bp, Homo sapiens
gactctgtgcctgac

SEQ ID NO: 1175688 - DNA, 15 bp, Homo sapiens
tgactctgtgcctga

SEQ ID NO: 1175689 - DNA, 15 bp, Homo sapiens
ctgactctgtgcctg

SEQ ID NO: 1175690 - DNA, 15 bp, Homo sapiens
actgactctgtgcct

SEQ ID NO: 1175691 - DNA, 15 bp, Homo sapiens
gactgactctgtgcc

SEQ ID NO: 1175692 - DNA, 15 bp, Homo sapiens
agactgactctgtgc

SEQ ID NO: 1175693 - DNA, 15 bp, Homo sapiens
gagactgactctgtg

SEQ ID NO: 1175694 - DNA, 15 bp, Homo sapiens
agagactgactctgt

SEQ ID NO: 1175695 - DNA, 15 bp, Homo sapiens
tagagactgactctg

SEQ ID NO: 1175696 - DNA, 15 bp, Homo sapiens
ctagagactgactct

SEQ ID NO: 1175697 - DNA, 15 bp, Homo sapiens
tctagagactgactc

SEQ ID NO: 1175698 - DNA, 15 bp, Homo sapiens
ctctagagactgact

SEQ ID NO: 1175699 - DNA, 15 bp, Homo sapiens
cctctagagactgac

SEQ ID NO: 1175700 - DNA, 15 bp, Homo sapiens
gcctctagagactga

SEQ ID NO: 1175701 - DNA, 15 bp, Homo sapiens
tgcctctagagactg

SEQ ID NO: 1175702 - DNA, 15 bp, Homo sapiens
atgcctctagagact

SEQ ID NO: 1175703 - DNA, 15 bp, Homo sapiens
tatgcctctagagac

SEQ ID NO: 1175704 - DNA, 15 bp, Homo sapiens
ttatgcctctagaga

SEQ ID NO: 1175705 - DNA, 15 bp, Homo sapiens
tttatgcctctagag

SEQ ID NO: 1175706 - DNA, 15 bp, Homo sapiens
gtttatgcctctaga

SEQ ID NO: 1175707 - DNA, 15 bp, Homo sapiens
tgtttatgcctctag

SEQ ID NO: 1175708 - DNA, 15 bp, Homo sapiens
atgtttatgcctcta

SEQ ID NO: 1175709 - DNA, 15 bp, Homo sapiens
catgtttatgcctct

SEQ ID NO: 1175710 - DNA, 15 bp, Homo sapiens
acatgtttatgcctc

SEQ ID NO: 1175711 - DNA, 15 bp, Homo sapiens
aacatgtttatgcct

SEQ ID NO: 1175712 - DNA, 15 bp, Homo sapiens
caacatgtttatgcc

SEQ ID NO: 1175713 - DNA, 15 bp, Homo sapiens
acaacatgtttatgc

SEQ ID NO: 1175714 - DNA, 15 bp, Homo sapiens
tacaacatgtttatg

SEQ ID NO: 1175715 - DNA, 15 bp, Homo sapiens
ttacaacatgtttat

SEQ ID NO: 1175716 - DNA, 15 bp, Homo sapiens
tttacaacatgttta

SEQ ID NO: 1175717 - DNA, 15 bp, Homo sapiens
ttttacaacatgttt

SEQ ID NO: 1175718 - DNA, 15 bp, Homo sapiens
cttttacaacatgtt

SEQ ID NO: 1175719 - DNA, 15 bp, Homo sapiens
gcttttacaacatgt

SEQ ID NO: 1175720 - DNA, 15 bp, Homo sapiens
agcttttacaacatg

SEQ ID NO: 1175721 - DNA, 15 bp, Homo sapiens
gagcttttacaacat

SEQ ID NO: 1175722 - DNA, 15 bp, Homo sapiens
agagcttttacaaca

SEQ ID NO: 1175723 - DNA, 15 bp, Homo sapiens
gagagcttttacaac

SEQ ID NO: 1175724 - DNA, 15 bp, Homo sapiens
agagagcttttacaa

SEQ ID NO: 1175725 - DNA, 15 bp, Homo sapiens
gagagagcttttaca

SEQ ID NO: 1175726 - DNA, 15 bp, Homo sapiens
agagagagcttttac

SEQ ID NO: 1175727 - DNA, 15 bp, Homo sapiens
gagagagagctttta

SEQ ID NO: 1175728 - DNA, 15 bp, Homo sapiens
tgagagagagctttt

SEQ ID NO: 1175729 - DNA, 15 bp, Homo sapiens
atgagagagagcttt

SEQ ID NO: 1175730 - DNA, 15 bp, Homo sapiens
aatgagagagagctt

SEQ ID NO: 1175731 - DNA, 15 bp, Homo sapiens
caatgagagagagct

SEQ ID NO: 1175732 - DNA, 15 bp, Homo sapiens
acaatgagagagagc

SEQ ID NO: 1175733 - DNA, 15 bp, Homo sapiens
aacaatgagagagag

SEQ ID NO: 1175734 - DNA, 15 bp, Homo sapiens
caacaatgagagaga

SEQ ID NO: 1175735 - DNA, 15 bp, Homo sapiens
gcaacaatgagagag

SEQ ID NO: 1175736 - DNA, 15 bp, Homo sapiens
agcaacaatgagaga

SEQ ID NO: 1175737 - DNA, 15 bp, Homo sapiens
tagcaacaatgagag

SEQ ID NO: 1175738 - DNA, 15 bp, Homo sapiens
ttagcaacaatgaga

SEQ ID NO: 1175739 - DNA, 15 bp, Homo sapiens
tttagcaacaatgag

SEQ ID NO: 1175740 - DNA, 15 bp, Homo sapiens
ctttagcaacaatga

SEQ ID NO: 1175741 - DNA, 15 bp, Homo sapiens
cctttagcaacaatg

SEQ ID NO: 1175742 - DNA, 15 bp, Homo sapiens
ccctttagcaacaat

SEQ ID NO: 1175743 - DNA, 15 bp, Homo sapiens
gccctttagcaacaa

SEQ ID NO: 1175744 - DNA, 15 bp, Homo sapiens
tgccctttagcaaca

SEQ ID NO: 1175745 - DNA, 15 bp, Homo sapiens
ctgccctttagcaac

SEQ ID NO: 1175746 - DNA, 15 bp, Homo sapiens
cctgccctttagcaa

SEQ ID NO: 1175747 - DNA, 15 bp, Homo sapiens
tcctgccctttagca

SEQ ID NO: 1175748 - DNA, 15 bp, Homo sapiens
ttcctgccctttagc

SEQ ID NO: 1175749 - DNA, 15 bp, Homo sapiens
tttcctgccctttag

SEQ ID NO: 1175750 - DNA, 15 bp, Homo sapiens
atttcctgcccttta

SEQ ID NO: 1175751 - DNA, 15 bp, Homo sapiens
gatttcctgcccttt

SEQ ID NO: 1175752 - DNA, 15 bp, Homo sapiens
tgatttcctgccctt

SEQ ID NO: 1175753 - DNA, 15 bp, Homo sapiens
atgatttcctgccct

SEQ ID NO: 1175754 - DNA, 15 bp, Homo sapiens
gatgatttcctgccc

SEQ ID NO: 1175755 - DNA, 15 bp, Homo sapiens
ggatgatttcctgcc

SEQ ID NO: 1175756 - DNA, 15 bp, Homo sapiens
gggatgatttcctgc

SEQ ID NO: 1175757 - DNA, 15 bp, Homo sapiens
tgggatgatttcctg

SEQ ID NO: 1175758 - DNA, 15 bp, Homo sapiens
ttgggatgatttcct

SEQ ID NO: 1175759 - DNA, 15 bp, Homo sapiens
gttgggatgatttcc

SEQ ID NO: 1175760 - DNA, 15 bp, Homo sapiens
agttgggatgatttc

SEQ ID NO: 1175761 - DNA, 15 bp, Homo sapiens
gagttgggatgattt

SEQ ID NO: 1175762 - DNA, 15 bp, Homo sapiens
tgagttgggatgatt

SEQ ID NO: 1175763 - DNA, 15 bp, Homo sapiens
ttgagttgggatgat

SEQ ID NO: 1175764 - DNA, 15 bp, Homo sapiens
tttgagttgggatga

SEQ ID NO: 1175765 - DNA, 15 bp, Homo sapiens
atttgagttgggatg

SEQ ID NO: 1175766 - DNA, 15 bp, Homo sapiens
tatttgagttgggat

SEQ ID NO: 1175767 - DNA, 15 bp, Homo sapiens
atatttgagttggga

SEQ ID NO: 1175768 - DNA, 15 bp, Homo sapiens
gatatttgagttggg

SEQ ID NO: 1175769 - DNA, 15 bp, Homo sapiens
tgatatttgagttgg

SEQ ID NO: 1175770 - DNA, 15 bp, Homo sapiens
gtgatatttgagttg

SEQ ID NO: 1175771 - DNA, 15 bp, Homo sapiens
ggtgatatttgagtt

SEQ ID NO: 1175772 - DNA, 15 bp, Homo sapiens
aggtgatatttgagt

SEQ ID NO: 1175773 - DNA, 15 bp, Homo sapiens
aaggtgatatttgag

SEQ ID NO: 1175774 - DNA, 15 bp, Homo sapiens
taaggtgatatttga

SEQ ID NO: 1175775 - DNA, 15 bp, Homo sapiens
ctaaggtgatatttg

SEQ ID NO: 1175776 - DNA, 15 bp, Homo sapiens
cctaaggtgatattt

SEQ ID NO: 1175777 - DNA, 15 bp, Homo sapiens
gcctaaggtgatatt

SEQ ID NO: 1175778 - DNA, 15 bp, Homo sapiens
agcctaaggtgatat

SEQ ID NO: 1175779 - DNA, 15 bp, Homo sapiens
aagcctaaggtgata

SEQ ID NO: 1175780 - DNA, 15 bp, Homo sapiens
caagcctaaggtgat

SEQ ID NO: 1175781 - DNA, 15 bp, Homo sapiens
tcaagcctaaggtga

SEQ ID NO: 1175782 - DNA, 15 bp, Homo sapiens
ttcaagcctaaggtg

SEQ ID NO: 1175783 - DNA, 15 bp, Homo sapiens
tttcaagcctaaggt

SEQ ID NO: 1175784 - DNA, 15 bp, Homo sapiens
gtttcaagcctaagg

SEQ ID NO: 1175785 - DNA, 15 bp, Homo sapiens
agtttcaagcctaag

SEQ ID NO: 1175786 - DNA, 15 bp, Homo sapiens
aagtttcaagcctaa

SEQ ID NO: 1175787 - DNA, 15 bp, Homo sapiens
gaagtttcaagccta

SEQ ID NO: 1175788 - DNA, 15 bp, Homo sapiens
agaagtttcaagcct

SEQ ID NO: 1175789 - DNA, 15 bp, Homo sapiens
gagaagtttcaagcc

SEQ ID NO: 1175790 - DNA, 15 bp, Homo sapiens
agagaagtttcaagc

SEQ ID NO: 1175791 - DNA, 15 bp, Homo sapiens
gagagaagtttcaag

SEQ ID NO: 1175792 - DNA, 15 bp, Homo sapiens
ggagagaagtttcaa

SEQ ID NO: 1175793 - DNA, 15 bp, Homo sapiens
tggagagaagtttca

SEQ ID NO: 1175794 - DNA, 15 bp, Homo sapiens
atggagagaagtttc

SEQ ID NO: 1175795 - DNA, 15 bp, Homo sapiens
aatggagagaagttt

SEQ ID NO: 1175796 - DNA, 15 bp, Homo sapiens
caatggagagaagtt

SEQ ID NO: 1175797 - DNA, 15 bp, Homo sapiens
ccaatggagagaagt

SEQ ID NO: 1175798 - DNA, 15 bp, Homo sapiens
accaatggagagaag

SEQ ID NO: 1175799 - DNA, 15 bp, Homo sapiens
gaccaatggagagaa

SEQ ID NO: 1175800 - DNA, 15 bp, Homo sapiens
agaccaatggagaga

SEQ ID NO: 1175801 - DNA, 15 bp, Homo sapiens
tagaccaatggagag

SEQ ID NO: 1175802 - DNA, 15 bp, Homo sapiens
ttagaccaatggaga

SEQ ID NO: 1175803 - DNA, 15 bp, Homo sapiens
tttagaccaatggag

SEQ ID NO: 1175804 - DNA, 15 bp, Homo sapiens
gtttagaccaatgga

SEQ ID NO: 1175805 - DNA, 15 bp, Homo sapiens
tgtttagaccaatgg

SEQ ID NO: 1175806 - DNA, 15 bp, Homo sapiens
ctgtttagaccaatg

SEQ ID NO: 1175807 - DNA, 15 bp, Homo sapiens
gctgtttagaccaat

SEQ ID NO: 1175808 - DNA, 15 bp, Homo sapiens
agctgtttagaccaa

SEQ ID NO: 1175809 - DNA, 15 bp, Homo sapiens
tagctgtttagacca

SEQ ID NO: 1175810 - DNA, 15 bp, Homo sapiens
ttagctgtttagacc

SEQ ID NO: 1175811 - DNA, 15 bp, Homo sapiens
gttagctgtttagac

SEQ ID NO: 1175812 - DNA, 15 bp, Homo sapiens
agttagctgtttaga

SEQ ID NO: 1175813 - DNA, 15 bp, Homo sapiens
aagttagctgtttag

SEQ ID NO: 1175814 - DNA, 15 bp, Homo sapiens
aaagttagctgttta

SEQ ID NO: 1175815 - DNA, 15 bp, Homo sapiens
gaaagttagctgttt

SEQ ID NO: 1175816 - DNA, 15 bp, Homo sapiens
agaaagttagctgtt

SEQ ID NO: 1175817 - DNA, 15 bp, Homo sapiens
aagaaagttagctgt

SEQ ID NO: 1175818 - DNA, 15 bp, Homo sapiens
taagaaagttagctg

SEQ ID NO: 1175819 - DNA, 15 bp, Homo sapiens
ataagaaagttagct

SEQ ID NO: 1175820 - DNA, 15 bp, Homo sapiens
cataagaaagttagc

SEQ ID NO: 1175821 - DNA, 15 bp, Homo sapiens
tcataagaaagttag

SEQ ID NO: 1175822 - DNA, 15 bp, Homo sapiens
ctcataagaaagtta

SEQ ID NO: 1175823 - DNA, 15 bp, Homo sapiens
cctcataagaaagtt

SEQ ID NO: 1175824 - DNA, 15 bp, Homo sapiens
ccctcataagaaagt

SEQ ID NO: 1175825 - DNA, 15 bp, Homo sapiens
tccctcataagaaag

SEQ ID NO: 1175826 - DNA, 15 bp, Homo sapiens
ttccctcataagaaa

SEQ ID NO: 1175827 - DNA, 15 bp, Homo sapiens
attccctcataagaa

SEQ ID NO: 1175828 - DNA, 15 bp, Homo sapiens
cattccctcataaga

SEQ ID NO: 1175829 - DNA, 15 bp, Homo sapiens
tcattccctcataag

SEQ ID NO: 1175830 - DNA, 15 bp, Homo sapiens
ctcattccctcataa

SEQ ID NO: 1175831 - DNA, 15 bp, Homo sapiens
actcattccctcata

SEQ ID NO: 1175832 - DNA, 15 bp, Homo sapiens
cactcattccctcat

SEQ ID NO: 1175833 - DNA, 15 bp, Homo sapiens
acactcattccctca

SEQ ID NO: 1175834 - DNA, 15 bp, Homo sapiens
tacactcattccctc

SEQ ID NO: 1175835 - DNA, 15 bp, Homo sapiens
gtacactcattccct

SEQ ID NO: 1175836 - DNA, 15 bp, Homo sapiens
agtacactcattccc

SEQ ID NO: 1175837 - DNA, 15 bp, Homo sapiens
aagtacactcattcc

SEQ ID NO: 1175838 - DNA, 15 bp, Homo sapiens
gaagtacactcattc

SEQ ID NO: 1175839 - DNA, 15 bp, Homo sapiens
agaagtacactcatt

SEQ ID NO: 1175840 - DNA, 15 bp, Homo sapiens
aagaagtacactcat

SEQ ID NO: 1175841 - DNA, 15 bp, Homo sapiens
taagaagtacactca

SEQ ID NO: 1175842 - DNA, 15 bp, Homo sapiens
ataagaagtacactc

SEQ ID NO: 1175843 - DNA, 15 bp, Homo sapiens
aataagaagtacact

SEQ ID NO: 1175844 - DNA, 15 bp, Homo sapiens
taataagaagtacac

SEQ ID NO: 1175845 - DNA, 15 bp, Homo sapiens
ataataagaagtaca

SEQ ID NO: 1175846 - DNA, 15 bp, Homo sapiens
gataataagaagtac

SEQ ID NO: 1175847 - DNA, 15 bp, Homo sapiens
agataataagaagta

SEQ ID NO: 1175848 - DNA, 15 bp, Homo sapiens
tagataataagaagt

SEQ ID NO: 1175849 - DNA, 15 bp, Homo sapiens
ctagataataagaag

SEQ ID NO: 1175850 - DNA, 15 bp, Homo sapiens
tctagataataagaa

SEQ ID NO: 1175851 - DNA, 15 bp, Homo sapiens
ctctagataataaga

SEQ ID NO: 1175852 - DNA, 15 bp, Homo sapiens
tctctagataataag

SEQ ID NO: 1175853 - DNA, 15 bp, Homo sapiens
ttctctagataataa

SEQ ID NO: 1175854 - DNA, 15 bp, Homo sapiens
tttctctagataata

SEQ ID NO: 1175855 - DNA, 15 bp, Homo sapiens
gtttctctagataat

SEQ ID NO: 1175856 - DNA, 15 bp, Homo sapiens
agtttctctagataa

SEQ ID NO: 1175857 - DNA, 15 bp, Homo sapiens
tagtttctctagata

SEQ ID NO: 1175858 - DNA, 15 bp, Homo sapiens
ttagtttctctagat

SEQ ID NO: 1175859 - DNA, 15 bp, Homo sapiens
cttagtttctctaga

SEQ ID NO: 1175860 - DNA, 15 bp, Homo sapiens
gcttagtttctctag

SEQ ID NO: 1175861 - DNA, 15 bp, Homo sapiens
tgcttagtttctcta

SEQ ID NO: 1175862 - DNA, 15 bp, Homo sapiens
gtgcttagtttctct

SEQ ID NO: 1175863 - DNA, 15 bp, Homo sapiens
tgtgcttagtttctc

SEQ ID NO: 1175864 - DNA, 15 bp, Homo sapiens
ctgtgcttagtttct

SEQ ID NO: 1175865 - DNA, 15 bp, Homo sapiens
cctgtgcttagtttc

SEQ ID NO: 1175866 - DNA, 15 bp, Homo sapiens
acctgtgcttagttt

SEQ ID NO: 1175867 - DNA, 15 bp, Homo sapiens
cacctgtgcttagtt

SEQ ID NO: 1175868 - DNA, 15 bp, Homo sapiens
gcacctgtgcttagt

SEQ ID NO: 1175869 - DNA, 15 bp, Homo sapiens
ggcacctgtgcttag

SEQ ID NO: 1175870 - DNA, 15 bp, Homo sapiens
aggcacctgtgctta

SEQ ID NO: 1175871 - DNA, 15 bp, Homo sapiens
taggcacctgtgctt

SEQ ID NO: 1175872 - DNA, 15 bp, Homo sapiens
ataggcacctgtgct

SEQ ID NO: 1175873 - DNA, 15 bp, Homo sapiens
aataggcacctgtgc

SEQ ID NO: 1175874 - DNA, 15 bp, Homo sapiens
aaataggcacctgtg

SEQ ID NO: 1175875 - DNA, 15 bp, Homo sapiens
aaaataggcacctgt

SEQ ID NO: 1175876 - DNA, 15 bp, Homo sapiens
aaaaataggcacctg

SEQ ID NO: 1175877 - DNA, 15 bp, Homo sapiens
caaaaataggcacct

SEQ ID NO: 1175878 - DNA, 15 bp, Homo sapiens
acaaaaataggcacc

SEQ ID NO: 1175879 - DNA, 15 bp, Homo sapiens
tacaaaaataggcac

SEQ ID NO: 1175880 - DNA, 15 bp, Homo sapiens
atacaaaaataggca

SEQ ID NO: 1175881 - DNA, 15 bp, Homo sapiens
aatacaaaaataggc

SEQ ID NO: 1175882 - DNA, 15 bp, Homo sapiens
aaatacaaaaatagg

SEQ ID NO: 1175883 - DNA, 15 bp, Homo sapiens
caaatacaaaaatag

SEQ ID NO: 1175884 - DNA, 15 bp, Homo sapiens
acaaatacaaaaata

SEQ ID NO: 1175885 - DNA, 15 bp, Homo sapiens
aacaaatacaaaaat

SEQ ID NO: 1175886 - DNA, 15 bp, Homo sapiens
aaacaaatacaaaaa

SEQ ID NO: 1175887 - DNA, 15 bp, Homo sapiens
caaacaaatacaaaa

SEQ ID NO: 1175888 - DNA, 15 bp, Homo sapiens
gcaaacaaatacaaa

SEQ ID NO: 1175889 - DNA, 15 bp, Homo sapiens
tgcaaacaaatacaa

SEQ ID NO: 1175890 - DNA, 15 bp, Homo sapiens
atgcaaacaaataca

SEQ ID NO: 1175891 - DNA, 15 bp, Homo sapiens
catgcaaacaaatac

SEQ ID NO: 1175892 - DNA, 15 bp, Homo sapiens
acatgcaaacaaata

SEQ ID NO: 1175893 - DNA, 15 bp, Homo sapiens
cacatgcaaacaaat

SEQ ID NO: 1175894 - DNA, 15 bp, Homo sapiens
acacatgcaaacaaa

SEQ ID NO: 1175895 - DNA, 15 bp, Homo sapiens
aacacatgcaaacaa

SEQ ID NO: 1175896 - DNA, 15 bp, Homo sapiens
aaacacatgcaaaca

SEQ ID NO: 1175897 - DNA, 15 bp, Homo sapiens
caaacacatgcaaac

SEQ ID NO: 1175898 - DNA, 15 bp, Homo sapiens
tcaaacacatgcaaa

SEQ ID NO: 1175899 - DNA, 15 bp, Homo sapiens
ctcaaacacatgcaa

SEQ ID NO: 1175900 - DNA, 15 bp, Homo sapiens
actcaaacacatgca

SEQ ID NO: 1175901 - DNA, 15 bp, Homo sapiens
cactcaaacacatgc

SEQ ID NO: 1175902 - DNA, 15 bp, Homo sapiens
gcactcaaacacatg

SEQ ID NO: 1175903 - DNA, 15 bp, Homo sapiens
agcactcaaacacat

SEQ ID NO: 1175904 - DNA, 15 bp, Homo sapiens
cagcactcaaacaca

SEQ ID NO: 1175905 - DNA, 15 bp, Homo sapiens
acagcactcaaacac

SEQ ID NO: 1175906 - DNA, 15 bp, Homo sapiens
cacagcactcaaaca

SEQ ID NO: 1175907 - DNA, 15 bp, Homo sapiens
acacagcactcaaac

SEQ ID NO: 1175908 - DNA, 15 bp, Homo sapiens
cacacagcactcaaa

SEQ ID NO: 1175909 - DNA, 15 bp, Homo sapiens
gcacacagcactcaa

SEQ ID NO: 1175910 - DNA, 15 bp, Homo sapiens
cgcacacagcactca

SEQ ID NO: 1175911 - DNA, 15 bp, Homo sapiens
acgcacacagcactc

SEQ ID NO: 1175912 - DNA, 15 bp, Homo sapiens
aacgcacacagcact

SEQ ID NO: 1175913 - DNA, 15 bp, Homo sapiens
gaacgcacacagcac

SEQ ID NO: 1175914 - DNA, 15 bp, Homo sapiens
agaacgcacacagca

SEQ ID NO: 1175915 - DNA, 15 bp, Homo sapiens
tagaacgcacacagc

SEQ ID NO: 1175916 - DNA, 15 bp, Homo sapiens
ctagaacgcacacag

SEQ ID NO: 1175917 - DNA, 15 bp, Homo sapiens
tctagaacgcacaca

SEQ ID NO: 1175918 - DNA, 15 bp, Homo sapiens
ttctagaacgcacac

SEQ ID NO: 1175919 - DNA, 15 bp, Homo sapiens
attctagaacgcaca

SEQ ID NO: 1175920 - DNA, 15 bp, Homo sapiens
tattctagaacgcac

SEQ ID NO: 1175921 - DNA, 15 bp, Homo sapiens
ttattctagaacgca

SEQ ID NO: 1175922 - DNA, 15 bp, Homo sapiens
cttattctagaacgc

SEQ ID NO: 1175923 - DNA, 15 bp, Homo sapiens
tcttattctagaacg

SEQ ID NO: 1175924 - DNA, 15 bp, Homo sapiens
gtcttattctagaac

SEQ ID NO: 1175925 - DNA, 15 bp, Homo sapiens
tgtcttattctagaa

SEQ ID NO: 1175926 - DNA, 15 bp, Homo sapiens
ttgtcttattctaga

SEQ ID NO: 1175927 - DNA, 15 bp, Homo sapiens
tttgtcttattctag

SEQ ID NO: 1175928 - DNA, 15 bp, Homo sapiens
ttttgtcttattcta

SEQ ID NO: 1175929 - DNA, 15 bp, Homo sapiens
tttttgtcttattct

SEQ ID NO: 1175930 - DNA, 15 bp, Homo sapiens
ttttttgtcttattc

SEQ ID NO: 1175931 - DNA, 15 bp, Homo sapiens
tttttttgtcttatt

SEQ ID NO: 1175932 - DNA, 15 bp, Homo sapiens
ttttttttgtcttat

SEQ ID NO: 1175933 - DNA, 15 bp, Homo sapiens
tttttttttgtctta

SEQ ID NO: 1175934 - DNA, 15 bp, Homo sapiens
ggtttttttttgtct

SEQ ID NO: 1175935 - DNA, 15 bp, Homo sapiens
gggtttttttttgtc

SEQ ID NO: 1175936 - DNA, 15 bp, Homo sapiens
tgggtttttttttgt

SEQ ID NO: 1175937 - DNA, 15 bp, Homo sapiens
gtgggtttttttttg

SEQ ID NO: 1175938 - DNA, 15 bp, Homo sapiens
agtgggttttttttt

SEQ ID NO: 1175939 - DNA, 15 bp, Homo sapiens
cagtgggtttttttt

SEQ ID NO: 1175940 - DNA, 15 bp, Homo sapiens
acagtgggttttttt

SEQ ID NO: 1175941 - DNA, 15 bp, Homo sapiens
aacagtgggtttttt

SEQ ID NO: 1175942 - DNA, 15 bp, Homo sapiens
aaacagtgggttttt

SEQ ID NO: 1175943 - DNA, 15 bp, Homo sapiens
taaacagtgggtttt

SEQ ID NO: 1175944 - DNA, 15 bp, Homo sapiens
ataaacagtgggttt

SEQ ID NO: 1175945 - DNA, 15 bp, Homo sapiens
aataaacagtgggtt

SEQ ID NO: 1175946 - DNA, 15 bp, Homo sapiens
aaataaacagtgggt

SEQ ID NO: 1175947 - DNA, 15 bp, Homo sapiens
aaaataaacagtggg

SEQ ID NO: 1175948 - DNA, 15 bp, Homo sapiens
gaaaataaacagtgg

SEQ ID NO: 1175949 - DNA, 15 bp, Homo sapiens
agaaaataaacagtg

SEQ ID NO: 1175950 - DNA, 15 bp, Homo sapiens
aagaaaataaacagt

SEQ ID NO: 1175951 - DNA, 15 bp, Homo sapiens
caagaaaataaacag

SEQ ID NO: 1175952 - DNA, 15 bp, Homo sapiens
acaagaaaataaaca

SEQ ID NO: 1175953 - DNA, 15 bp, Homo sapiens
aacaagaaaataaac

SEQ ID NO: 1175954 - DNA, 15 bp, Homo sapiens
caacaagaaaataaa

SEQ ID NO: 1175955 - DNA, 15 bp, Homo sapiens
gcaacaagaaaataa

SEQ ID NO: 1175956 - DNA, 15 bp, Homo sapiens
ggcaacaagaaaata

SEQ ID NO: 1175957 - DNA, 15 bp, Homo sapiens
tggcaacaagaaaat

SEQ ID NO: 1175958 - DNA, 15 bp, Homo sapiens
ttggcaacaagaaaa

SEQ ID NO: 1175959 - DNA, 15 bp, Homo sapiens
attggcaacaagaaa

SEQ ID NO: 1175960 - DNA, 15 bp, Homo sapiens
cattggcaacaagaa

SEQ ID NO: 1175961 - DNA, 15 bp, Homo sapiens
tcattggcaacaaga

SEQ ID NO: 1175962 - DNA, 15 bp, Homo sapiens
ctcattggcaacaag

SEQ ID NO: 1175963 - DNA, 15 bp, Homo sapiens
actcattggcaacaa

SEQ ID NO: 1175964 - DNA, 15 bp, Homo sapiens
cactcattggcaaca

SEQ ID NO: 1175965 - DNA, 15 bp, Homo sapiens
acactcattggcaac

SEQ ID NO: 1175966 - DNA, 15 bp, Homo sapiens
gacactcattggcaa

SEQ ID NO: 1175967 - DNA, 15 bp, Homo sapiens
tgacactcattggca

SEQ ID NO: 1175968 - DNA, 15 bp, Homo sapiens
atgacactcattggc

SEQ ID NO: 1175969 - DNA, 15 bp, Homo sapiens
gatgacactcattgg

SEQ ID NO: 1175970 - DNA, 15 bp, Homo sapiens
agatgacactcattg

SEQ ID NO: 1175971 - DNA, 15 bp, Homo sapiens
aagatgacactcatt

SEQ ID NO: 1175972 - DNA, 15 bp, Homo sapiens
gaagatgacactcat

SEQ ID NO: 1175973 - DNA, 15 bp, Homo sapiens
tgaagatgacactca

SEQ ID NO: 1175974 - DNA, 15 bp, Homo sapiens
atgaagatgacactc

SEQ ID NO: 1175975 - DNA, 15 bp, Homo sapiens
tatgaagatgacact

SEQ ID NO: 1175976 - DNA, 15 bp, Homo sapiens
gtatgaagatgacac

SEQ ID NO: 1175977 - DNA, 15 bp, Homo sapiens
tgtatgaagatgaca

SEQ ID NO: 1175978 - DNA, 15 bp, Homo sapiens
ttgtatgaagatgac

SEQ ID NO: 1175979 - DNA, 15 bp, Homo sapiens
attgtatgaagatga

SEQ ID NO: 1175980 - DNA, 15 bp, Homo sapiens
tattgtatgaagatg

SEQ ID NO: 1175981 - DNA, 15 bp, Homo sapiens
atattgtatgaagat

SEQ ID NO: 1175982 - DNA, 15 bp, Homo sapiens
aatattgtatgaaga

SEQ ID NO: 1175983 - DNA, 15 bp, Homo sapiens
taatattgtatgaag

SEQ ID NO: 1175984 - DNA, 15 bp, Homo sapiens
ttaatattgtatgaa

SEQ ID NO: 1175985 - DNA, 15 bp, Homo sapiens
attaatattgtatga

SEQ ID NO: 1175986 - DNA, 15 bp, Homo sapiens
cattaatattgtatg

SEQ ID NO: 1175987 - DNA, 15 bp, Homo sapiens
tcattaatattgtat

SEQ ID NO: 1175988 - DNA, 15 bp, Homo sapiens
gtcattaatattgta

SEQ ID NO: 1175989 - DNA, 15 bp, Homo sapiens
tgtcattaatattgt

SEQ ID NO: 1175990 - DNA, 15 bp, Homo sapiens
gtgtcattaatattg

SEQ ID NO: 1175991 - DNA, 15 bp, Homo sapiens
tgtgtcattaatatt

SEQ ID NO: 1175992 - DNA, 15 bp, Homo sapiens
ctgtgtcattaatat

SEQ ID NO: 1175993 - DNA, 15 bp, Homo sapiens
gctgtgtcattaata

SEQ ID NO: 1175994 - DNA, 15 bp, Homo sapiens
ggctgtgtcattaat

SEQ ID NO: 1175995 - DNA, 15 bp, Homo sapiens
tggctgtgtcattaa

SEQ ID NO: 1175996 - DNA, 15 bp, Homo sapiens
ttggctgtgtcatta

SEQ ID NO: 1175997 - DNA, 15 bp, Homo sapiens
cttggctgtgtcatt

SEQ ID NO: 1175998 - DNA, 15 bp, Homo sapiens
acttggctgtgtcat

SEQ ID NO: 1175999 - DNA, 15 bp, Homo sapiens
gacttggctgtgtca

SEQ ID NO: 1176000 - DNA, 15 bp, Homo sapiens
tgacttggctgtgtc

SEQ ID NO: 1176001 - DNA, 15 bp, Homo sapiens
ttgacttggctgtgt

SEQ ID NO: 1176002 - DNA, 15 bp, Homo sapiens
cttgacttggctgtg

SEQ ID NO: 1176003 - DNA, 15 bp, Homo sapiens
acttgacttggctgt

SEQ ID NO: 1176004 - DNA, 15 bp, Homo sapiens
cacttgacttggctg

SEQ ID NO: 1176005 - DNA, 15 bp, Homo sapiens
ccacttgacttggct

SEQ ID NO: 1176006 - DNA, 15 bp, Homo sapiens
accacttgacttggc

SEQ ID NO: 1176007 - DNA, 15 bp, Homo sapiens
gaccacttgacttgg

SEQ ID NO: 1176008 - DNA, 15 bp, Homo sapiens
tgaccacttgacttg

SEQ ID NO: 1176009 - DNA, 15 bp, Homo sapiens
gtgaccacttgactt

SEQ ID NO: 1176010 - DNA, 15 bp, Homo sapiens
tgtgaccacttgact

SEQ ID NO: 1176011 - DNA, 15 bp, Homo sapiens
ttgtgaccacttgac

SEQ ID NO: 1176012 - DNA, 15 bp, Homo sapiens
gttgtgaccacttga

SEQ ID NO: 1176013 - DNA, 15 bp, Homo sapiens
agttgtgaccacttg

SEQ ID NO: 1176014 - DNA, 15 bp, Homo sapiens
aagttgtgaccactt

SEQ ID NO: 1176015 - DNA, 15 bp, Homo sapiens
gaagttgtgaccact

SEQ ID NO: 1176016 - DNA, 15 bp, Homo sapiens
agaagttgtgaccac

SEQ ID NO: 1176017 - DNA, 15 bp, Homo sapiens
gagaagttgtgacca

SEQ ID NO: 1176018 - DNA, 15 bp, Homo sapiens
agagaagttgtgacc

SEQ ID NO: 1176019 - DNA, 15 bp, Homo sapiens
aagagaagttgtgac

SEQ ID NO: 1176020 - DNA, 15 bp, Homo sapiens
aaagagaagttgtga

SEQ ID NO: 1176021 - DNA, 15 bp, Homo sapiens
caaagagaagttgtg

SEQ ID NO: 1176022 - DNA, 15 bp, Homo sapiens
ccaaagagaagttgt

SEQ ID NO: 1176023 - DNA, 15 bp, Homo sapiens
tccaaagagaagttg

SEQ ID NO: 1176024 - DNA, 15 bp, Homo sapiens
ttccaaagagaagtt

SEQ ID NO: 1176025 - DNA, 15 bp, Homo sapiens
tttccaaagagaagt

SEQ ID NO: 1176026 - DNA, 15 bp, Homo sapiens
atttccaaagagaag

SEQ ID NO: 1176027 - DNA, 15 bp, Homo sapiens
catttccaaagagaa

SEQ ID NO: 1176028 - DNA, 15 bp, Homo sapiens
tcatttccaaagaga

SEQ ID NO: 1176029 - DNA, 15 bp, Homo sapiens
atcatttccaaagag

SEQ ID NO: 1176030 - DNA, 15 bp, Homo sapiens
gatcatttccaaaga

SEQ ID NO: 1176031 - DNA, 15 bp, Homo sapiens
tgatcatttccaaag

SEQ ID NO: 1176032 - DNA, 15 bp, Homo sapiens
ttgatcatttccaaa

SEQ ID NO: 1176033 - DNA, 15 bp, Homo sapiens
cttgatcatttccaa

SEQ ID NO: 1176034 - DNA, 15 bp, Homo sapiens
tcttgatcatttcca

SEQ ID NO: 1176035 - DNA, 15 bp, Homo sapiens
ttcttgatcatttcc

SEQ ID NO: 1176036 - DNA, 15 bp, Homo sapiens
tttcttgatcatttc

SEQ ID NO: 1176037 - DNA, 15 bp, Homo sapiens
gtttcttgatcattt

SEQ ID NO: 1176038 - DNA, 15 bp, Homo sapiens
tgtttcttgatcatt

SEQ ID NO: 1176039 - DNA, 15 bp, Homo sapiens
ctgtttcttgatcat

SEQ ID NO: 1176040 - DNA, 15 bp, Homo sapiens
actgtttcttgatca

SEQ ID NO: 1176041 - DNA, 15 bp, Homo sapiens
tactgtttcttgatc

SEQ ID NO: 1176042 - DNA, 15 bp, Homo sapiens
ttactgtttcttgat

SEQ ID NO: 1176043 - DNA, 15 bp, Homo sapiens
cttactgtttcttga

SEQ ID NO: 1176044 - DNA, 15 bp, Homo sapiens
acttactgtttcttg

SEQ ID NO: 1176045 - DNA, 15 bp, Homo sapiens
cacttactgtttctt

SEQ ID NO: 1176046 - DNA, 15 bp, Homo sapiens
gcacttactgtttct

SEQ ID NO: 1176047 - DNA, 15 bp, Homo sapiens
tgcacttactgtttc

SEQ ID NO: 1176048 - DNA, 15 bp, Homo sapiens
ctgcacttactgttt

SEQ ID NO: 1176049 - DNA, 15 bp, Homo sapiens
cctgcacttactgtt

SEQ ID NO: 1176050 - DNA, 15 bp, Homo sapiens
tcctgcacttactgt

SEQ ID NO: 1176051 - DNA, 15 bp, Homo sapiens
ctcctgcacttactg

SEQ ID NO: 1176052 - DNA, 15 bp, Homo sapiens
gctcctgcacttact

SEQ ID NO: 1176053 - DNA, 15 bp, Homo sapiens
ggctcctgcacttac

SEQ ID NO: 1176054 - DNA, 15 bp, Homo sapiens
tggctcctgcactta

SEQ ID NO: 1176055 - DNA, 15 bp, Homo sapiens
gtggctcctgcactt

SEQ ID NO: 1176056 - DNA, 15 bp, Homo sapiens
tgtggctcctgcact

SEQ ID NO: 1176057 - DNA, 15 bp, Homo sapiens
ctgtggctcctgcac

SEQ ID NO: 1176058 - DNA, 15 bp, Homo sapiens
cctgtggctcctgca

SEQ ID NO: 1176059 - DNA, 15 bp, Homo sapiens
acctgtggctcctgc

SEQ ID NO: 1176060 - DNA, 15 bp, Homo sapiens
cacctgtggctcctg

SEQ ID NO: 1176061 - DNA, 15 bp, Homo sapiens
tcacctgtggctcct

SEQ ID NO: 1176062 - DNA, 15 bp, Homo sapiens
ttcacctgtggctcc

SEQ ID NO: 1176063 - DNA, 15 bp, Homo sapiens
tttcacctgtggctc

SEQ ID NO: 1176064 - DNA, 15 bp, Homo sapiens
ctttcacctgtggct

SEQ ID NO: 1176065 - DNA, 15 bp, Homo sapiens
tctttcacctgtggc

SEQ ID NO: 1176066 - DNA, 15 bp, Homo sapiens
ttctttcacctgtgg

SEQ ID NO: 1176067 - DNA, 15 bp, Homo sapiens
tttctttcacctgtg

SEQ ID NO: 1176068 - DNA, 15 bp, Homo sapiens
ttttctttcacctgt

SEQ ID NO: 1176069 - DNA, 15 bp, Homo sapiens
tttttctttcacctg

SEQ ID NO: 1176070 - DNA, 15 bp, Homo sapiens
atttttctttcacct

SEQ ID NO: 1176071 - DNA, 15 bp, Homo sapiens
catttttctttcacc

SEQ ID NO: 1176072 - DNA, 15 bp, Homo sapiens
tcatttttctttcac

SEQ ID NO: 1176073 - DNA, 15 bp, Homo sapiens
ctcatttttctttca

SEQ ID NO: 1176074 - DNA, 15 bp, Homo sapiens
actcatttttctttc

SEQ ID NO: 1176075 - DNA, 15 bp, Homo sapiens
tactcatttttcttt

SEQ ID NO: 1176076 - DNA, 15 bp, Homo sapiens
ttactcatttttctt

SEQ ID NO: 1176077 - DNA, 15 bp, Homo sapiens
cttactcatttttct

SEQ ID NO: 1176078 - DNA, 15 bp, Homo sapiens
tcttactcatttttc

SEQ ID NO: 1176079 - DNA, 15 bp, Homo sapiens
ttcttactcattttt

SEQ ID NO: 1176080 - DNA, 15 bp, Homo sapiens
tttcttactcatttt

SEQ ID NO: 1176081 - DNA, 15 bp, Homo sapiens
ttttcttactcattt

SEQ ID NO: 1176082 - DNA, 15 bp, Homo sapiens
gttttcttactcatt

SEQ ID NO: 1176083 - DNA, 15 bp, Homo sapiens
agttttcttactcat

SEQ ID NO: 1176084 - DNA, 15 bp, Homo sapiens
aagttttcttactca

SEQ ID NO: 1176085 - DNA, 15 bp, Homo sapiens
taagttttcttactc

SEQ ID NO: 1176086 - DNA, 15 bp, Homo sapiens
ctaagttttcttact

SEQ ID NO: 1176087 - DNA, 15 bp, Homo sapiens
tctaagttttcttac

SEQ ID NO: 1176088 - DNA, 15 bp, Homo sapiens
ttctaagttttctta

SEQ ID NO: 1176089 - DNA, 15 bp, Homo sapiens
attctaagttttctt

SEQ ID NO: 1176090 - DNA, 15 bp, Homo sapiens
aattctaagttttct

SEQ ID NO: 1176091 - DNA, 15 bp, Homo sapiens
caattctaagttttc

SEQ ID NO: 1176092 - DNA, 15 bp, Homo sapiens
ccaattctaagtttt

SEQ ID NO: 1176093 - DNA, 15 bp, Homo sapiens
tccaattctaagttt

SEQ ID NO: 1176094 - DNA, 15 bp, Homo sapiens
ttccaattctaagtt

SEQ ID NO: 1176095 - DNA, 15 bp, Homo sapiens
tttccaattctaagt

SEQ ID NO: 1176096 - DNA, 15 bp, Homo sapiens
ttttccaattctaag

SEQ ID NO: 1176097 - DNA, 15 bp, Homo sapiens
attttccaattctaa

SEQ ID NO: 1176098 - DNA, 15 bp, Homo sapiens
tattttccaattcta

SEQ ID NO: 1176099 - DNA, 15 bp, Homo sapiens
atattttccaattct

SEQ ID NO: 1176100 - DNA, 15 bp, Homo sapiens
tatattttccaattc

SEQ ID NO: 1176101 - DNA, 15 bp, Homo sapiens
ttatattttccaatt

SEQ ID NO: 1176102 - DNA, 15 bp, Homo sapiens
aattatattttccaa

SEQ ID NO: 1176103 - DNA, 15 bp, Homo sapiens
aaattatattttcca

SEQ ID NO: 1176104 - DNA, 15 bp, Homo sapiens
taaattatattttcc

SEQ ID NO: 1176105 - DNA, 15 bp, Homo sapiens
ataaattatattttc

SEQ ID NO: 1176106 - DNA, 15 bp, Homo sapiens
aataaattatatttt

SEQ ID NO: 1176107 - DNA, 15 bp, Homo sapiens
taataaattatattt

SEQ ID NO: 1176108 - DNA, 15 bp, Homo sapiens
ttaataaattatatt

SEQ ID NO: 1176109 - DNA, 15 bp, Homo sapiens
gttaataaattatat

SEQ ID NO: 1176110 - DNA, 15 bp, Homo sapiens
agttaataaattata

SEQ ID NO: 1176111 - DNA, 15 bp, Homo sapiens
aagttaataaattat

SEQ ID NO: 1176112 - DNA, 15 bp, Homo sapiens
caagttaataaatta

SEQ ID NO: 1176113 - DNA, 15 bp, Homo sapiens
ccaagttaataaatt

SEQ ID NO: 1176114 - DNA, 15 bp, Homo sapiens
cccaagttaataaat

SEQ ID NO: 1176115 - DNA, 15 bp, Homo sapiens
acccaagttaataaa

SEQ ID NO: 1176116 - DNA, 15 bp, Homo sapiens
aacccaagttaataa

SEQ ID NO: 1176117 - DNA, 15 bp, Homo sapiens
aaacccaagttaata

SEQ ID NO: 1176118 - DNA, 15 bp, Homo sapiens
aaaacccaagttaat

SEQ ID NO: 1176119 - DNA, 15 bp, Homo sapiens
gaaaacccaagttaa

SEQ ID NO: 1176120 - DNA, 15 bp, Homo sapiens
agaaaacccaagtta

SEQ ID NO: 1176121 - DNA, 15 bp, Homo sapiens
aagaaaacccaagtt

SEQ ID NO: 1176122 - DNA, 15 bp, Homo sapiens
aaagaaaacccaagt

SEQ ID NO: 1176123 - DNA, 15 bp, Homo sapiens
aaaagaaaacccaag

SEQ ID NO: 1176124 - DNA, 15 bp, Homo sapiens
aaaaagaaaacccaa

SEQ ID NO: 1176125 - DNA, 15 bp, Homo sapiens
aaaaaagaaaaccca

SEQ ID NO: 1176126 - DNA, 15 bp, Homo sapiens
caaaaaagaaaaccc

SEQ ID NO: 1176127 - DNA, 15 bp, Homo sapiens
gcaaaaaagaaaacc

SEQ ID NO: 1176128 - DNA, 15 bp, Homo sapiens
ggcaaaaaagaaaac

SEQ ID NO: 1176129 - DNA, 15 bp, Homo sapiens
tggcaaaaaagaaaa

SEQ ID NO: 1176130 - DNA, 15 bp, Homo sapiens
gtggcaaaaaagaaa

SEQ ID NO: 1176131 - DNA, 15 bp, Homo sapiens
agtggcaaaaaagaa

SEQ ID NO: 1176132 - DNA, 15 bp, Homo sapiens
aagtggcaaaaaaga

SEQ ID NO: 1176133 - DNA, 15 bp, Homo sapiens
caagtggcaaaaaag

SEQ ID NO: 1176134 - DNA, 15 bp, Homo sapiens
ccaagtggcaaaaaa

SEQ ID NO: 1176135 - DNA, 15 bp, Homo sapiens
tccaagtggcaaaaa

SEQ ID NO: 1176136 - DNA, 15 bp, Homo sapiens
ttccaagtggcaaaa

SEQ ID NO: 1176137 - DNA, 15 bp, Homo sapiens
tttccaagtggcaaa

SEQ ID NO: 1176138 - DNA, 15 bp, Homo sapiens
ttttccaagtggcaa

SEQ ID NO: 1176139 - DNA, 15 bp, Homo sapiens
attttccaagtggca

SEQ ID NO: 1176140 - DNA, 15 bp, Homo sapiens
tattttccaagtggc

SEQ ID NO: 1176141 - DNA, 15 bp, Homo sapiens
ctattttccaagtgg

SEQ ID NO: 1176142 - DNA, 15 bp, Homo sapiens
actattttccaagtg

SEQ ID NO: 1176143 - DNA, 15 bp, Homo sapiens
tactattttccaagt

SEQ ID NO: 1176144 - DNA, 15 bp, Homo sapiens
atactattttccaag

SEQ ID NO: 1176145 - DNA, 15 bp, Homo sapiens
aatactattttccaa

SEQ ID NO: 1176146 - DNA, 15 bp, Homo sapiens
taatactattttcca

SEQ ID NO: 1176147 - DNA, 15 bp, Homo sapiens
ataatactattttcc

SEQ ID NO: 1176148 - DNA, 15 bp, Homo sapiens
aataatactattttc

SEQ ID NO: 1176149 - DNA, 15 bp, Homo sapiens
taataatactatttt

SEQ ID NO: 1176150 - DNA, 15 bp, Homo sapiens
gtaataatactattt

SEQ ID NO: 1176151 - DNA, 15 bp, Homo sapiens
agtaataatactatt

SEQ ID NO: 1176152 - DNA, 15 bp, Homo sapiens
tagtaataatactat

SEQ ID NO: 1176153 - DNA, 15 bp, Homo sapiens
gtagtaataatacta

SEQ ID NO: 1176154 - DNA, 15 bp, Homo sapiens
agtagtaataatact

SEQ ID NO: 1176155 - DNA, 15 bp, Homo sapiens
gagtagtaataatac

SEQ ID NO: 1176156 - DNA, 15 bp, Homo sapiens
tgagtagtaataata

SEQ ID NO: 1176157 - DNA, 15 bp, Homo sapiens
ctgagtagtaataat

SEQ ID NO: 1176158 - DNA, 15 bp, Homo sapiens
actgagtagtaataa

SEQ ID NO: 1176159 - DNA, 15 bp, Homo sapiens
aactgagtagtaata

SEQ ID NO: 1176160 - DNA, 15 bp, Homo sapiens
aaactgagtagtaat

SEQ ID NO: 1176161 - DNA, 15 bp, Homo sapiens
aaaactgagtagtaa

SEQ ID NO: 1176162 - DNA, 15 bp, Homo sapiens
taaaactgagtagta

SEQ ID NO: 1176163 - DNA, 15 bp, Homo sapiens
ctaaaactgagtagt

SEQ ID NO: 1176164 - DNA, 15 bp, Homo sapiens
actaaaactgagtag

SEQ ID NO: 1176165 - DNA, 15 bp, Homo sapiens
cactaaaactgagta

SEQ ID NO: 1176166 - DNA, 15 bp, Homo sapiens
tcactaaaactgagt

SEQ ID NO: 1176167 - DNA, 15 bp, Homo sapiens
ctcactaaaactgag

SEQ ID NO: 1176168 - DNA, 15 bp, Homo sapiens
cctcactaaaactga

SEQ ID NO: 1176169 - DNA, 15 bp, Homo sapiens
ccctcactaaaactg

SEQ ID NO: 1176170 - DNA, 15 bp, Homo sapiens
tccctcactaaaact

SEQ ID NO: 1176171 - DNA, 15 bp, Homo sapiens
ctccctcactaaaac

SEQ ID NO: 1176172 - DNA, 15 bp, Homo sapiens
cctccctcactaaaa

SEQ ID NO: 1176173 - DNA, 15 bp, Homo sapiens
tcctccctcactaaa

SEQ ID NO: 1176174 - DNA, 15 bp, Homo sapiens
gtcctccctcactaa

SEQ ID NO: 1176175 - DNA, 15 bp, Homo sapiens
ggtcctccctcacta

SEQ ID NO: 1176176 - DNA, 15 bp, Homo sapiens
tggtcctccctcact

SEQ ID NO: 1176177 - DNA, 15 bp, Homo sapiens
ctggtcctccctcac

SEQ ID NO: 1176178 - DNA, 15 bp, Homo sapiens
actggtcctccctca

SEQ ID NO: 1176179 - DNA, 15 bp, Homo sapiens
cactggtcctccctc

SEQ ID NO: 1176180 - DNA, 15 bp, Homo sapiens
tcactggtcctccct

SEQ ID NO: 1176181 - DNA, 15 bp, Homo sapiens
ctcactggtcctccc

SEQ ID NO: 1176182 - DNA, 15 bp, Homo sapiens
gctcactggtcctcc

SEQ ID NO: 1176183 - DNA, 15 bp, Homo sapiens
cgctcactggtcctc

SEQ ID NO: 1176184 - DNA, 15 bp, Homo sapiens
gcgctcactggtcct

SEQ ID NO: 1176185 - DNA, 15 bp, Homo sapiens
tgcgctcactggtcc

SEQ ID NO: 1176186 - DNA, 15 bp, Homo sapiens
gtgcgctcactggtc

SEQ ID NO: 1176187 - DNA, 15 bp, Homo sapiens
ggtgcgctcactggt

SEQ ID NO: 1176188 - DNA, 15 bp, Homo sapiens
aggtgcgctcactgg

SEQ ID NO: 1176189 - DNA, 15 bp, Homo sapiens
aaggtgcgctcactg

SEQ ID NO: 1176190 - DNA, 15 bp, Homo sapiens
aaaggtgcgctcact

SEQ ID NO: 1176191 - DNA, 15 bp, Homo sapiens
aaaaggtgcgctcac

SEQ ID NO: 1176192 - DNA, 15 bp, Homo sapiens
caaaaggtgcgctca

SEQ ID NO: 1176193 - DNA, 15 bp, Homo sapiens
tcaaaaggtgcgctc

SEQ ID NO: 1176194 - DNA, 15 bp, Homo sapiens
ctcaaaaggtgcgct

SEQ ID NO: 1176195 - DNA, 15 bp, Homo sapiens
tctcaaaaggtgcgc

SEQ ID NO: 1176196 - DNA, 15 bp, Homo sapiens
ctctcaaaaggtgcg

SEQ ID NO: 1176197 - DNA, 15 bp, Homo sapiens
cctctcaaaaggtgc

SEQ ID NO: 1176198 - DNA, 15 bp, Homo sapiens
gcctctcaaaaggtg

SEQ ID NO: 1176199 - DNA, 15 bp, Homo sapiens
tgcctctcaaaaggt

SEQ ID NO: 1176200 - DNA, 15 bp, Homo sapiens
gtgcctctcaaaagg

SEQ ID NO: 1176201 - DNA, 15 bp, Homo sapiens
agtgcctctcaaaag

SEQ ID NO: 1176202 - DNA, 15 bp, Homo sapiens
cagtgcctctcaaaa

SEQ ID NO: 1176203 - DNA, 15 bp, Homo sapiens
tcagtgcctctcaaa

SEQ ID NO: 1176204 - DNA, 15 bp, Homo sapiens
atcagtgcctctcaa

SEQ ID NO: 1176205 - DNA, 15 bp, Homo sapiens
tatcagtgcctctca

SEQ ID NO: 1176206 - DNA, 15 bp, Homo sapiens
gtatcagtgcctctc

SEQ ID NO: 1176207 - DNA, 15 bp, Homo sapiens
cgtatcagtgcctct

SEQ ID NO: 1176208 - DNA, 15 bp, Homo sapiens
tcgtatcagtgcctc

SEQ ID NO: 1176209 - DNA, 15 bp, Homo sapiens
atcgtatcagtgcct

SEQ ID NO: 1176210 - DNA, 15 bp, Homo sapiens
catcgtatcagtgcc

SEQ ID NO: 1176211 - DNA, 15 bp, Homo sapiens
ccatcgtatcagtgc

SEQ ID NO: 1176212 - DNA, 15 bp, Homo sapiens
accatcgtatcagtg

SEQ ID NO: 1176213 - DNA, 15 bp, Homo sapiens
aaccatcgtatcagt

SEQ ID NO: 1176214 - DNA, 15 bp, Homo sapiens
taaccatcgtatcag

SEQ ID NO: 1176215 - DNA, 15 bp, Homo sapiens
ttaaccatcgtatca

SEQ ID NO: 1176216 - DNA, 15 bp, Homo sapiens
attaaccatcgtatc

SEQ ID NO: 1176217 - DNA, 15 bp, Homo sapiens
aattaaccatcgtat

SEQ ID NO: 1176218 - DNA, 15 bp, Homo sapiens
aaattaaccatcgta

SEQ ID NO: 1176219 - DNA, 15 bp, Homo sapiens
aaaattaaccatcgt

SEQ ID NO: 1176220 - DNA, 15 bp, Homo sapiens
taaaattaaccatcg

SEQ ID NO: 1176221 - DNA, 15 bp, Homo sapiens
ataaaattaaccatc

SEQ ID NO: 1176222 - DNA, 15 bp, Homo sapiens
cataaaattaaccat

SEQ ID NO: 1176223 - DNA, 15 bp, Homo sapiens
acataaaattaacca

SEQ ID NO: 1176224 - DNA, 15 bp, Homo sapiens
cacataaaattaacc

SEQ ID NO: 1176225 - DNA, 15 bp, Homo sapiens
acacataaaattaac

SEQ ID NO: 1176226 - DNA, 15 bp, Homo sapiens
gacacataaaattaa

SEQ ID NO: 1176227 - DNA, 15 bp, Homo sapiens
ggacacataaaatta

SEQ ID NO: 1176228 - DNA, 15 bp, Homo sapiens
tggacacataaaatt

SEQ ID NO: 1176229 - DNA, 15 bp, Homo sapiens
gtggacacataaaat

SEQ ID NO: 1176230 - DNA, 15 bp, Homo sapiens
agtggacacataaaa

SEQ ID NO: 1176231 - DNA, 15 bp, Homo sapiens
aagtggacacataaa

SEQ ID NO: 1176232 - DNA, 15 bp, Homo sapiens
taagtggacacataa

SEQ ID NO: 1176233 - DNA, 15 bp, Homo sapiens
ctaagtggacacata

SEQ ID NO: 1176234 - DNA, 15 bp, Homo sapiens
gctaagtggacacat

SEQ ID NO: 1176235 - DNA, 15 bp, Homo sapiens
agctaagtggacaca

SEQ ID NO: 1176236 - DNA, 15 bp, Homo sapiens
tagctaagtggacac

SEQ ID NO: 1176237 - DNA, 15 bp, Homo sapiens
ctagctaagtggaca

SEQ ID NO: 1176238 - DNA, 15 bp, Homo sapiens
cctagctaagtggac

SEQ ID NO: 1176239 - DNA, 15 bp, Homo sapiens
gcctagctaagtgga

SEQ ID NO: 1176240 - DNA, 15 bp, Homo sapiens
ggcctagctaagtgg

SEQ ID NO: 1176241 - DNA, 15 bp, Homo sapiens
tggcctagctaagtg

SEQ ID NO: 1176242 - DNA, 15 bp, Homo sapiens
gtggcctagctaagt

SEQ ID NO: 1176243 - DNA, 15 bp, Homo sapiens
tgtggcctagctaag

SEQ ID NO: 1176244 - DNA, 15 bp, Homo sapiens
ctgtggcctagctaa

SEQ ID NO: 1176245 - DNA, 15 bp, Homo sapiens
actgtggcctagcta

SEQ ID NO: 1176246 - DNA, 15 bp, Homo sapiens
tactgtggcctagct

SEQ ID NO: 1176247 - DNA, 15 bp, Homo sapiens
gtactgtggcctagc

SEQ ID NO: 1176248 - DNA, 15 bp, Homo sapiens
ggtactgtggcctag

SEQ ID NO: 1176249 - DNA, 15 bp, Homo sapiens
gggtactgtggccta

SEQ ID NO: 1176250 - DNA, 15 bp, Homo sapiens
tgggtactgtggcct

SEQ ID NO: 1176251 - DNA, 15 bp, Homo sapiens
ttgggtactgtggcc

SEQ ID NO: 1176252 - DNA, 15 bp, Homo sapiens
tttgggtactgtggc

SEQ ID NO: 1176253 - DNA, 15 bp, Homo sapiens
atttgggtactgtgg

SEQ ID NO: 1176254 - DNA, 15 bp, Homo sapiens
tatttgggtactgtg

SEQ ID NO: 1176255 - DNA, 15 bp, Homo sapiens
gtatttgggtactgt

SEQ ID NO: 1176256 - DNA, 15 bp, Homo sapiens
agtatttgggtactg

SEQ ID NO: 1176257 - DNA, 15 bp, Homo sapiens
aagtatttgggtact

SEQ ID NO: 1176258 - DNA, 15 bp, Homo sapiens
aaagtatttgggtac

SEQ ID NO: 1176259 - DNA, 15 bp, Homo sapiens
caaagtatttgggta

SEQ ID NO: 1176260 - DNA, 15 bp, Homo sapiens
acaaagtatttgggt

SEQ ID NO: 1176261 - DNA, 15 bp, Homo sapiens
gacaaagtatttggg

SEQ ID NO: 1176262 - DNA, 15 bp, Homo sapiens
tgacaaagtatttgg

SEQ ID NO: 1176263 - DNA, 15 bp, Homo sapiens
ttgacaaagtatttg

SEQ ID NO: 1176264 - DNA, 15 bp, Homo sapiens
cttgacaaagtattt

SEQ ID NO: 1176265 - DNA, 15 bp, Homo sapiens
gcttgacaaagtatt

SEQ ID NO: 1176266 - DNA, 15 bp, Homo sapiens
tgcttgacaaagtat

SEQ ID NO: 1176267 - DNA, 15 bp, Homo sapiens
atgcttgacaaagta

SEQ ID NO: 1176268 - DNA, 15 bp, Homo sapiens
gatgcttgacaaagt

SEQ ID NO: 1176269 - DNA, 15 bp, Homo sapiens
tgatgcttgacaaag

SEQ ID NO: 1176270 - DNA, 15 bp, Homo sapiens
atgatgcttgacaaa

SEQ ID NO: 1176271 - DNA, 15 bp, Homo sapiens
aatgatgcttgacaa

SEQ ID NO: 1176272 - DNA, 15 bp, Homo sapiens
caatgatgcttgaca

SEQ ID NO: 1176273 - DNA, 15 bp, Homo sapiens
acaatgatgcttgac

SEQ ID NO: 1176274 - DNA, 15 bp, Homo sapiens
tacaatgatgcttga

SEQ ID NO: 1176275 - DNA, 15 bp, Homo sapiens
gtacaatgatgcttg

SEQ ID NO: 1176276 - DNA, 15 bp, Homo sapiens
tgtacaatgatgctt

SEQ ID NO: 1176277 - DNA, 15 bp, Homo sapiens
atgtacaatgatgct

SEQ ID NO: 1176278 - DNA, 15 bp, Homo sapiens
catgtacaatgatgc

SEQ ID NO: 1176279 - DNA, 15 bp, Homo sapiens
acatgtacaatgatg

SEQ ID NO: 1176280 - DNA, 15 bp, Homo sapiens
gacatgtacaatgat

SEQ ID NO: 1176281 - DNA, 15 bp, Homo sapiens
agacatgtacaatga

SEQ ID NO: 1176282 - DNA, 15 bp, Homo sapiens
gagacatgtacaatg

SEQ ID NO: 1176283 - DNA, 15 bp, Homo sapiens
agagacatgtacaat

SEQ ID NO: 1176284 - DNA, 15 bp, Homo sapiens
cagagacatgtacaa

SEQ ID NO: 1176285 - DNA, 15 bp, Homo sapiens
tcacagagacatgta

SEQ ID NO: 1176286 - DNA, 15 bp, Homo sapiens
gtcacagagacatgt

SEQ ID NO: 1176287 - DNA, 15 bp, Homo sapiens
agtcacagagacatg

SEQ ID NO: 1176288 - DNA, 15 bp, Homo sapiens
aagtcacagagacat

SEQ ID NO: 1176289 - DNA, 15 bp, Homo sapiens
aaagtcacagagaca

SEQ ID NO: 1176290 - DNA, 15 bp, Homo sapiens
aaaagtcacagagac

SEQ ID NO: 1176291 - DNA, 15 bp, Homo sapiens
aaaaagtcacagaga

SEQ ID NO: 1176292 - DNA, 15 bp, Homo sapiens
taaaaagtcacagag

SEQ ID NO: 1176293 - DNA, 15 bp, Homo sapiens
ttaaaaagtcacaga

SEQ ID NO: 1176294 - DNA, 15 bp, Homo sapiens
ccttaaaaagtcaca

SEQ ID NO: 1176295 - DNA, 15 bp, Homo sapiens
accttaaaaagtcac

SEQ ID NO: 1176296 - DNA, 15 bp, Homo sapiens
caccttaaaaagtca

SEQ ID NO: 1176297 - DNA, 15 bp, Homo sapiens
tcaccttaaaaagtc

SEQ ID NO: 1176298 - DNA, 15 bp, Homo sapiens
ctcaccttaaaaagt

SEQ ID NO: 1176299 - DNA, 15 bp, Homo sapiens
tctcaccttaaaaag

SEQ ID NO: 1176300 - DNA, 15 bp, Homo sapiens
atctcaccttaaaaa

SEQ ID NO: 1176301 - DNA, 15 bp, Homo sapiens
aatctcaccttaaaa

SEQ ID NO: 1176302 - DNA, 15 bp, Homo sapiens
taatctcaccttaaa

SEQ ID NO: 1176303 - DNA, 15 bp, Homo sapiens
ttaatctcaccttaa

SEQ ID NO: 1176304 - DNA, 15 bp, Homo sapiens
gttaatctcacctta

SEQ ID NO: 1176305 - DNA, 15 bp, Homo sapiens
tgttaatctcacctt

SEQ ID NO: 1176306 - DNA, 15 bp, Homo sapiens
atgttaatctcacct

SEQ ID NO: 1176307 - DNA, 15 bp, Homo sapiens
catgttaatctcacc

SEQ ID NO: 1176308 - DNA, 15 bp, Homo sapiens
acatgttaatctcac

SEQ ID NO: 1176309 - DNA, 15 bp, Homo sapiens
tacatgttaatctca

SEQ ID NO: 1176310 - DNA, 15 bp, Homo sapiens
ttacatgttaatctc

SEQ ID NO: 1176311 - DNA, 15 bp, Homo sapiens
cttacatgttaatct

SEQ ID NO: 1176312 - DNA, 15 bp, Homo sapiens
acttacatgttaatc

SEQ ID NO: 1176313 - DNA, 15 bp, Homo sapiens
gacttacatgttaat

SEQ ID NO: 1176314 - DNA, 15 bp, Homo sapiens
tgacttacatgttaa

SEQ ID NO: 1176315 - DNA, 15 bp, Homo sapiens
ctgacttacatgtta

SEQ ID NO: 1176316 - DNA, 15 bp, Homo sapiens
actgacttacatgtt

SEQ ID NO: 1176317 - DNA, 15 bp, Homo sapiens
tactgacttacatgt

SEQ ID NO: 1176318 - DNA, 15 bp, Homo sapiens
ctactgacttacatg

SEQ ID NO: 1176319 - DNA, 15 bp, Homo sapiens
tctactgacttacat

SEQ ID NO: 1176320 - DNA, 15 bp, Homo sapiens
gtctactgacttaca

SEQ ID NO: 1176321 - DNA, 15 bp, Homo sapiens
agtctactgacttac

SEQ ID NO: 1176322 - DNA, 15 bp, Homo sapiens
aagtctactgactta

SEQ ID NO: 1176323 - DNA, 15 bp, Homo sapiens
aaagtctactgactt

SEQ ID NO: 1176324 - DNA, 15 bp, Homo sapiens
caaagtctactgact

SEQ ID NO: 1176325 - DNA, 15 bp, Homo sapiens
tcaaagtctactgac

SEQ ID NO: 1176326 - DNA, 15 bp, Homo sapiens
ctcaaagtctactga

SEQ ID NO: 1176327 - DNA, 15 bp, Homo sapiens
gctcaaagtctactg

SEQ ID NO: 1176328 - DNA, 15 bp, Homo sapiens
tgctcaaagtctact

SEQ ID NO: 1176329 - DNA, 15 bp, Homo sapiens
ttgctcaaagtctac

SEQ ID NO: 1176330 - DNA, 15 bp, Homo sapiens
tttgctcaaagtcta

SEQ ID NO: 1176331 - DNA, 15 bp, Homo sapiens
ctttgctcaaagtct

SEQ ID NO: 1176332 - DNA, 15 bp, Homo sapiens
cctttgctcaaagtc

SEQ ID NO: 1176333 - DNA, 15 bp, Homo sapiens
tcctttgctcaaagt

SEQ ID NO: 1176334 - DNA, 15 bp, Homo sapiens
ctcctttgctcaaag

SEQ ID NO: 1176335 - DNA, 15 bp, Homo sapiens
tctcctttgctcaaa

SEQ ID NO: 1176336 - DNA, 15 bp, Homo sapiens
atctcctttgctcaa

SEQ ID NO: 1176337 - DNA, 15 bp, Homo sapiens
aatctcctttgctca

SEQ ID NO: 1176338 - DNA, 15 bp, Homo sapiens
taatctcctttgctc

SEQ ID NO: 1176339 - DNA, 15 bp, Homo sapiens
gtaatctcctttgct

SEQ ID NO: 1176340 - DNA, 15 bp, Homo sapiens
ggtaatctcctttgc

SEQ ID NO: 1176341 - DNA, 15 bp, Homo sapiens
aggtaatctcctttg

SEQ ID NO: 1176342 - DNA, 15 bp, Homo sapiens
gaggtaatctccttt

SEQ ID NO: 1176343 - DNA, 15 bp, Homo sapiens
ggaggtaatctcctt

SEQ ID NO: 1176344 - DNA, 15 bp, Homo sapiens
tggaggtaatctcct

SEQ ID NO: 1176345 - DNA, 15 bp, Homo sapiens
atggaggtaatctcc

SEQ ID NO: 1176346 - DNA, 15 bp, Homo sapiens
tatggaggtaatctc

SEQ ID NO: 1176347 - DNA, 15 bp, Homo sapiens
ttatggaggtaatct

SEQ ID NO: 1176348 - DNA, 15 bp, Homo sapiens
attatggaggtaatc

SEQ ID NO: 1176349 - DNA, 15 bp, Homo sapiens
cattatggaggtaat

SEQ ID NO: 1176350 - DNA, 15 bp, Homo sapiens
gcattatggaggtaa

SEQ ID NO: 1176351 - DNA, 15 bp, Homo sapiens
cgcattatggaggta

SEQ ID NO: 1176352 - DNA, 15 bp, Homo sapiens
tcgcattatggaggt

SEQ ID NO: 1176353 - DNA, 15 bp, Homo sapiens
ctcgcattatggagg

SEQ ID NO: 1176354 - DNA, 15 bp, Homo sapiens
actcgcattatggag

SEQ ID NO: 1176355 - DNA, 15 bp, Homo sapiens
cactcgcattatgga

SEQ ID NO: 1176356 - DNA, 15 bp, Homo sapiens
ccactcgcattatgg

SEQ ID NO: 1176357 - DNA, 15 bp, Homo sapiens
accactcgcattatg

SEQ ID NO: 1176358 - DNA, 15 bp, Homo sapiens
gaccactcgcattat

SEQ ID NO: 1176359 - DNA, 15 bp, Homo sapiens
agaccactcgcatta

SEQ ID NO: 1176360 - DNA, 15 bp, Homo sapiens
gagaccactcgcatt

SEQ ID NO: 1176361 - DNA, 15 bp, Homo sapiens
tgagaccactcgcat

SEQ ID NO: 1176362 - DNA, 15 bp, Homo sapiens
atgagaccactcgca

SEQ ID NO: 1176363 - DNA, 15 bp, Homo sapiens
gatgagaccactcgc

SEQ ID NO: 1176364 - DNA, 15 bp, Homo sapiens
agatgagaccactcg

SEQ ID NO: 1176365 - DNA, 15 bp, Homo sapiens
tagatgagaccactc

SEQ ID NO: 1176366 - DNA, 15 bp, Homo sapiens
ttagatgagaccact

SEQ ID NO: 1176367 - DNA, 15 bp, Homo sapiens
attagatgagaccac

SEQ ID NO: 1176368 - DNA, 15 bp, Homo sapiens
gattagatgagacca

SEQ ID NO: 1176369 - DNA, 15 bp, Homo sapiens
tgattagatgagacc

SEQ ID NO: 1176370 - DNA, 15 bp, Homo sapiens
ctgattagatgagac

SEQ ID NO: 1176371 - DNA, 15 bp, Homo sapiens
actgattagatgaga

SEQ ID NO: 1176372 - DNA, 15 bp, Homo sapiens
aactgattagatgag

SEQ ID NO: 1176373 - DNA, 15 bp, Homo sapiens
caactgattagatga

SEQ ID NO: 1176374 - DNA, 15 bp, Homo sapiens
tcaactgattagatg

SEQ ID NO: 1176375 - DNA, 15 bp, Homo sapiens
ttcaactgattagat

SEQ ID NO: 1176376 - DNA, 15 bp, Homo sapiens
cttcaactgattaga

SEQ ID NO: 1176377 - DNA, 15 bp, Homo sapiens
ccttcaactgattag

SEQ ID NO: 1176378 - DNA, 15 bp, Homo sapiens
gccttcaactgatta

SEQ ID NO: 1176379 - DNA, 15 bp, Homo sapiens
ggccttcaactgatt

SEQ ID NO: 1176380 - DNA, 15 bp, Homo sapiens
aggccttcaactgat

SEQ ID NO: 1176381 - DNA, 15 bp, Homo sapiens
aaggccttcaactga

SEQ ID NO: 1176382 - DNA, 15 bp, Homo sapiens
taaggccttcaactg

SEQ ID NO: 1176383 - DNA, 15 bp, Homo sapiens
ttaaggccttcaact

SEQ ID NO: 1176384 - DNA, 15 bp, Homo sapiens
attaaggccttcaac

SEQ ID NO: 1176385 - DNA, 15 bp, Homo sapiens
tattaaggccttcaa

SEQ ID NO: 1176386 - DNA, 15 bp, Homo sapiens
ttattaaggccttca

SEQ ID NO: 1176387 - DNA, 15 bp, Homo sapiens
tttattaaggccttc

SEQ ID NO: 1176388 - DNA, 15 bp, Homo sapiens
ttttattaaggcctt

SEQ ID NO: 1176389 - DNA, 15 bp, Homo sapiens
tttttattaaggcct

SEQ ID NO: 1176390 - DNA, 15 bp, Homo sapiens
ctttttattaaggcc

SEQ ID NO: 1176391 - DNA, 15 bp, Homo sapiens
tctttttattaaggc

SEQ ID NO: 1176392 - DNA, 15 bp, Homo sapiens
ctctttttattaagg

SEQ ID NO: 1176393 - DNA, 15 bp, Homo sapiens
tctctttttattaag

SEQ ID NO: 1176394 - DNA, 15 bp, Homo sapiens
gtctctttttattaa

SEQ ID NO: 1176395 - DNA, 15 bp, Homo sapiens
agtctctttttatta

SEQ ID NO: 1176396 - DNA, 15 bp, Homo sapiens
cagtctctttttatt

SEQ ID NO: 1176397 - DNA, 15 bp, Homo sapiens
tcagtctctttttat

SEQ ID NO: 1176398 - DNA, 15 bp, Homo sapiens
gtcagtctcttttta

SEQ ID NO: 1176399 - DNA, 15 bp, Homo sapiens
ggtcagtctcttttt

SEQ ID NO: 1176400 - DNA, 15 bp, Homo sapiens
aggtcagtctctttt

SEQ ID NO: 1176401 - DNA, 15 bp, Homo sapiens
gaggtcagtctcttt

SEQ ID NO: 1176402 - DNA, 15 bp, Homo sapiens
agaggtcagtctctt

SEQ ID NO: 1176403 - DNA, 15 bp, Homo sapiens
aagaggtcagtctct

SEQ ID NO: 1176404 - DNA, 15 bp, Homo sapiens
gaagaggtcagtctc

SEQ ID NO: 1176405 - DNA, 15 bp, Homo sapiens
ggaagaggtcagtct

SEQ ID NO: 1176406 - DNA, 15 bp, Homo sapiens
aggaagaggtcagtc

SEQ ID NO: 1176407 - DNA, 15 bp, Homo sapiens
gaggaagaggtcagt

SEQ ID NO: 1176408 - DNA, 15 bp, Homo sapiens
tgaggaagaggtcag

SEQ ID NO: 1176409 - DNA, 15 bp, Homo sapiens
ctgaggaagaggtca

SEQ ID NO: 1176410 - DNA, 15 bp, Homo sapiens
tctgaggaagaggtc

SEQ ID NO: 1176411 - DNA, 15 bp, Homo sapiens
ttctgaggaagaggt

SEQ ID NO: 1176412 - DNA, 15 bp, Homo sapiens
cttctgaggaagagg

SEQ ID NO: 1176413 - DNA, 15 bp, Homo sapiens
tcttctgaggaagag

SEQ ID NO: 1176414 - DNA, 15 bp, Homo sapiens
ttcttctgaggaaga

SEQ ID NO: 1176415 - DNA, 15 bp, Homo sapiens
cttcttctgaggaag

SEQ ID NO: 1176416 - DNA, 15 bp, Homo sapiens
tcttcttctgaggaa

SEQ ID NO: 1176417 - DNA, 15 bp, Homo sapiens
ttcttcttctgagga

SEQ ID NO: 1176418 - DNA, 15 bp, Homo sapiens
tttcttcttctgagg

SEQ ID NO: 1176419 - DNA, 15 bp, Homo sapiens
atttcttcttctgag

SEQ ID NO: 1176420 - DNA, 15 bp, Homo sapiens
aatttcttcttctga

SEQ ID NO: 1176421 - DNA, 15 bp, Homo sapiens
gaatttcttcttctg

SEQ ID NO: 1176422 - DNA, 15 bp, Homo sapiens
agaatttcttcttct

SEQ ID NO: 1176423 - DNA, 15 bp, Homo sapiens
cagaatttcttcttc

SEQ ID NO: 1176424 - DNA, 15 bp, Homo sapiens
gcagaatttcttctt

SEQ ID NO: 1176425 - DNA, 15 bp, Homo sapiens
agcagaatttcttct

SEQ ID NO: 1176426 - DNA, 15 bp, Homo sapiens
tagcagaatttcttc

SEQ ID NO: 1176427 - DNA, 15 bp, Homo sapiens
ctagcagaatttctt

SEQ ID NO: 1176428 - DNA, 15 bp, Homo sapiens
gctagcagaatttct

SEQ ID NO: 1176429 - DNA, 15 bp, Homo sapiens
tgctagcagaatttc

SEQ ID NO: 1176430 - DNA, 15 bp, Homo sapiens
ctgctagcagaattt

SEQ ID NO: 1176431 - DNA, 15 bp, Homo sapiens
tctgctagcagaatt

SEQ ID NO: 1176432 - DNA, 15 bp, Homo sapiens
gtctgctagcagaat

SEQ ID NO: 1176433 - DNA, 15 bp, Homo sapiens
agtctgctagcagaa

SEQ ID NO: 1176434 - DNA, 15 bp, Homo sapiens
cagtctgctagcaga

SEQ ID NO: 1176435 - DNA, 15 bp, Homo sapiens
gcagtctgctagcag

SEQ ID NO: 1176436 - DNA, 15 bp, Homo sapiens
ggcagtctgctagca

SEQ ID NO: 1176437 - DNA, 15 bp, Homo sapiens
aggcagtctgctagc

SEQ ID NO: 1176438 - DNA, 15 bp, Homo sapiens
aaggcagtctgctag

SEQ ID NO: 1176439 - DNA, 15 bp, Homo sapiens
aaaggcagtctgcta

SEQ ID NO: 1176440 - DNA, 15 bp, Homo sapiens
caaaggcagtctgct

SEQ ID NO: 1176441 - DNA, 15 bp, Homo sapiens
gcaaaggcagtctgc

SEQ ID NO: 1176442 - DNA, 15 bp, Homo sapiens
agcaaaggcagtctg

SEQ ID NO: 1176443 - DNA, 15 bp, Homo sapiens
gagcaaaggcagtct

SEQ ID NO: 1176444 - DNA, 15 bp, Homo sapiens
ggagcaaaggcagtc

SEQ ID NO: 1176445 - DNA, 15 bp, Homo sapiens
gggagcaaaggcagt

SEQ ID NO: 1176446 - DNA, 15 bp, Homo sapiens
ggggagcaaaggcag

SEQ ID NO: 1176447 - DNA, 15 bp, Homo sapiens
aggggagcaaaggca

SEQ ID NO: 1176448 - DNA, 15 bp, Homo sapiens
gaggggagcaaaggc

SEQ ID NO: 1176449 - DNA, 15 bp, Homo sapiens
ggaggggagcaaagg

SEQ ID NO: 1176450 - DNA, 15 bp, Homo sapiens
gggaggggagcaaag

SEQ ID NO: 1176451 - DNA, 15 bp, Homo sapiens
agggaggggagcaaa

SEQ ID NO: 1176452 - DNA, 15 bp, Homo sapiens
cagggaggggagcaa

SEQ ID NO: 1176453 - DNA, 15 bp, Homo sapiens
ccagggaggggagca

SEQ ID NO: 1176454 - DNA, 15 bp, Homo sapiens
accagggaggggagc

SEQ ID NO: 1176455 - DNA, 15 bp, Homo sapiens
aaccagggaggggag

SEQ ID NO: 1176456 - DNA, 15 bp, Homo sapiens
gaaccagggagggga

SEQ ID NO: 1176457 - DNA, 15 bp, Homo sapiens
agaaccagggagggg

SEQ ID NO: 1176458 - DNA, 15 bp, Homo sapiens
gagaaccagggaggg

SEQ ID NO: 1176459 - DNA, 15 bp, Homo sapiens
ggagaaccagggagg

SEQ ID NO: 1176460 - DNA, 15 bp, Homo sapiens
tggagaaccagggag

SEQ ID NO: 1176461 - DNA, 15 bp, Homo sapiens
ctggagaaccaggga

SEQ ID NO: 1176462 - DNA, 15 bp, Homo sapiens
gctggagaaccaggg

SEQ ID NO: 1176463 - DNA, 15 bp, Homo sapiens
ggctggagaaccagg

SEQ ID NO: 1176464 - DNA, 15 bp, Homo sapiens
aggctggagaaccag

SEQ ID NO: 1176465 - DNA, 15 bp, Homo sapiens
caggctggagaacca

SEQ ID NO: 1176466 - DNA, 15 bp, Homo sapiens
gcaggctggagaacc

SEQ ID NO: 1176467 - DNA, 15 bp, Homo sapiens
agcaggctggagaac

SEQ ID NO: 1176468 - DNA, 15 bp, Homo sapiens
cagcaggctggagaa

SEQ ID NO: 1176469 - DNA, 15 bp, Homo sapiens
ccagcaggctggaga

SEQ ID NO: 1176470 - DNA, 15 bp, Homo sapiens
accagcaggctggag

SEQ ID NO: 1176471 - DNA, 15 bp, Homo sapiens
gaccagcaggctgga

SEQ ID NO: 1176472 - DNA, 15 bp, Homo sapiens
agaccagcaggctgg

SEQ ID NO: 1176473 - DNA, 15 bp, Homo sapiens
tagaccagcaggctg

SEQ ID NO: 1176474 - DNA, 15 bp, Homo sapiens
gtagaccagcaggct

SEQ ID NO: 1176475 - DNA, 15 bp, Homo sapiens
ggtagaccagcaggc

SEQ ID NO: 1176476 - DNA, 15 bp, Homo sapiens
gggtagaccagcagg

SEQ ID NO: 1176477 - DNA, 15 bp, Homo sapiens
agggtagaccagcag

SEQ ID NO: 1176478 - DNA, 15 bp, Homo sapiens
cagggtagaccagca

SEQ ID NO: 1176479 - DNA, 15 bp, Homo sapiens
gcagggtagaccagc

SEQ ID NO: 1176480 - DNA, 15 bp, Homo sapiens
tgcagggtagaccag

SEQ ID NO: 1176481 - DNA, 15 bp, Homo sapiens
ctgcagggtagacca

SEQ ID NO: 1176482 - DNA, 15 bp, Homo sapiens
tctgcagggtagacc

SEQ ID NO: 1176483 - DNA, 15 bp, Homo sapiens
gtctgcagggtagac

SEQ ID NO: 1176484 - DNA, 15 bp, Homo sapiens
agtctgcagggtaga

SEQ ID NO: 1176485 - DNA, 15 bp, Homo sapiens
aagtctgcagggtag

SEQ ID NO: 1176486 - DNA, 15 bp, Homo sapiens
aaagtctgcagggta

SEQ ID NO: 1176487 - DNA, 15 bp, Homo sapiens
caaagtctgcagggt

SEQ ID NO: 1176488 - DNA, 15 bp, Homo sapiens
tcaaagtctgcaggg

SEQ ID NO: 1176489 - DNA, 15 bp, Homo sapiens
gtcaaagtctgcagg

SEQ ID NO: 1176490 - DNA, 15 bp, Homo sapiens
agtcaaagtctgcag

SEQ ID NO: 1176491 - DNA, 15 bp, Homo sapiens
aagtcaaagtctgca

SEQ ID NO: 1176492 - DNA, 15 bp, Homo sapiens
aaagtcaaagtctgc

SEQ ID NO: 1176493 - DNA, 15 bp, Homo sapiens
gaaagtcaaagtctg

SEQ ID NO: 1176494 - DNA, 15 bp, Homo sapiens
ggaaagtcaaagtct

SEQ ID NO: 1176495 - DNA, 15 bp, Homo sapiens
tggaaagtcaaagtc

SEQ ID NO: 1176496 - DNA, 15 bp, Homo sapiens
ttggaaagtcaaagt

SEQ ID NO: 1176497 - DNA, 15 bp, Homo sapiens
cttggaaagtcaaag

SEQ ID NO: 1176498 - DNA, 15 bp, Homo sapiens
gcttggaaagtcaaa

SEQ ID NO: 1176499 - DNA, 15 bp, Homo sapiens
agcttggaaagtcaa

SEQ ID NO: 1176500 - DNA, 15 bp, Homo sapiens
cagcttggaaagtca

SEQ ID NO: 1176501 - DNA, 15 bp, Homo sapiens
gcagcttggaaagtc

SEQ ID NO: 1176502 - DNA, 15 bp, Homo sapiens
ggcagcttggaaagt

SEQ ID NO: 1176503 - DNA, 15 bp, Homo sapiens
tggcagcttggaaag

SEQ ID NO: 1176504 - DNA, 15 bp, Homo sapiens
gtggcagcttggaaa

SEQ ID NO: 1176505 - DNA, 15 bp, Homo sapiens
tgtggcagcttggaa

SEQ ID NO: 1176506 - DNA, 15 bp, Homo sapiens
ttgtggcagcttgga

SEQ ID NO: 1176507 - DNA, 15 bp, Homo sapiens
attgtggcagcttgg

SEQ ID NO: 1176508 - DNA, 15 bp, Homo sapiens
gattgtggcagcttg

SEQ ID NO: 1176509 - DNA, 15 bp, Homo sapiens
tgattgtggcagctt

SEQ ID NO: 1176510 - DNA, 15 bp, Homo sapiens
atgattgtggcagct

SEQ ID NO: 1176511 - DNA, 15 bp, Homo sapiens
catgattgtggcagc

SEQ ID NO: 1176512 - DNA, 15 bp, Homo sapiens
acatgattgtggcag

SEQ ID NO: 1176513 - DNA, 15 bp, Homo sapiens
cacatgattgtggca

SEQ ID NO: 1176514 - DNA, 15 bp, Homo sapiens
tcacatgattgtggc

SEQ ID NO: 1176515 - DNA, 15 bp, Homo sapiens
ctcacatgattgtgg

SEQ ID NO: 1176516 - DNA, 15 bp, Homo sapiens
gctcacatgattgtg

SEQ ID NO: 1176517 - DNA, 15 bp, Homo sapiens
ggctcacatgattgt

SEQ ID NO: 1176518 - DNA, 15 bp, Homo sapiens
tggctcacatgattg

SEQ ID NO: 1176519 - DNA, 15 bp, Homo sapiens
ttggctcacatgatt

SEQ ID NO: 1176520 - DNA, 15 bp, Homo sapiens
attggctcacatgat

SEQ ID NO: 1176521 - DNA, 15 bp, Homo sapiens
aattggctcacatga

SEQ ID NO: 1176522 - DNA, 15 bp, Homo sapiens
gaattggctcacatg

SEQ ID NO: 1176523 - DNA, 15 bp, Homo sapiens
ggaattggctcacat

SEQ ID NO: 1176524 - DNA, 15 bp, Homo sapiens
gggaattggctcaca

SEQ ID NO: 1176525 - DNA, 15 bp, Homo sapiens
agggaattggctcac

SEQ ID NO: 1176526 - DNA, 15 bp, Homo sapiens
tagggaattggctca

SEQ ID NO: 1176527 - DNA, 15 bp, Homo sapiens
ttagggaattggctc

SEQ ID NO: 1176528 - DNA, 15 bp, Homo sapiens
tttagggaattggct

SEQ ID NO: 1176529 - DNA, 15 bp, Homo sapiens
ttttagggaattggc

SEQ ID NO: 1176530 - DNA, 15 bp, Homo sapiens
attttagggaattgg

SEQ ID NO: 1176531 - DNA, 15 bp, Homo sapiens
tattttagggaattg

SEQ ID NO: 1176532 - DNA, 15 bp, Homo sapiens
ttattttagggaatt

SEQ ID NO: 1176533 - DNA, 15 bp, Homo sapiens
tttattttagggaat

SEQ ID NO: 1176534 - DNA, 15 bp, Homo sapiens
gtttattttagggaa

SEQ ID NO: 1176535 - DNA, 15 bp, Homo sapiens
ggtttattttaggga

SEQ ID NO: 1176536 - DNA, 15 bp, Homo sapiens
aggtttattttaggg

SEQ ID NO: 1176537 - DNA, 15 bp, Homo sapiens
gaggtttattttagg

SEQ ID NO: 1176538 - DNA, 15 bp, Homo sapiens
agaggtttattttag

SEQ ID NO: 1176539 - DNA, 15 bp, Homo sapiens
gagaggtttatttta

SEQ ID NO: 1176540 - DNA, 15 bp, Homo sapiens
agagaggtttatttt

SEQ ID NO: 1176541 - DNA, 15 bp, Homo sapiens
tagagaggtttattt

SEQ ID NO: 1176542 - DNA, 15 bp, Homo sapiens
atagagaggtttatt

SEQ ID NO: 1176543 - DNA, 15 bp, Homo sapiens
tatagagaggtttat

SEQ ID NO: 1176544 - DNA, 15 bp, Homo sapiens
atatagagaggttta

SEQ ID NO: 1176545 - DNA, 15 bp, Homo sapiens
tatatagagaggttt

SEQ ID NO: 1176546 - DNA, 15 bp, Homo sapiens
atatatagagaggtt

SEQ ID NO: 1176547 - DNA, 15 bp, Homo sapiens
tatatatagagaggt

SEQ ID NO: 1176548 - DNA, 15 bp, Homo sapiens
gtatatatagagagg

SEQ ID NO: 1176549 - DNA, 15 bp, Homo sapiens
agtatatatagagag

SEQ ID NO: 1176550 - DNA, 15 bp, Homo sapiens
aagtatatatagaga

SEQ ID NO: 1176551 - DNA, 15 bp, Homo sapiens
caagtatatatagag

SEQ ID NO: 1176552 - DNA, 15 bp, Homo sapiens
acaagtatatataga

SEQ ID NO: 1176553 - DNA, 15 bp, Homo sapiens
tacaagtatatatag

SEQ ID NO: 1176554 - DNA, 15 bp, Homo sapiens
atacaagtatatata

SEQ ID NO: 1176555 - DNA, 15 bp, Homo sapiens
tatacaagtatatat

SEQ ID NO: 1176556 - DNA, 15 bp, Homo sapiens
gtatacaagtatata

SEQ ID NO: 1176557 - DNA, 15 bp, Homo sapiens
tgtatacaagtatat

SEQ ID NO: 1176558 - DNA, 15 bp, Homo sapiens
atgtatacaagtata

SEQ ID NO: 1176559 - DNA, 15 bp, Homo sapiens
gatgtatacaagtat

SEQ ID NO: 1176560 - DNA, 15 bp, Homo sapiens
ggatgtatacaagta

SEQ ID NO: 1176561 - DNA, 15 bp, Homo sapiens
aggatgtatacaagt

SEQ ID NO: 1176562 - DNA, 15 bp, Homo sapiens
caggatgtatacaag

SEQ ID NO: 1176563 - DNA, 15 bp, Homo sapiens
acaggatgtatacaa

SEQ ID NO: 1176564 - DNA, 15 bp, Homo sapiens
aacaggatgtataca

SEQ ID NO: 1176565 - DNA, 15 bp, Homo sapiens
caacaggatgtatac

SEQ ID NO: 1176566 - DNA, 15 bp, Homo sapiens
tcaacaggatgtata

SEQ ID NO: 1176567 - DNA, 15 bp, Homo sapiens
atcaacaggatgtat

SEQ ID NO: 1176568 - DNA, 15 bp, Homo sapiens
aatcaacaggatgta

SEQ ID NO: 1176569 - DNA, 15 bp, Homo sapiens
aaatcaacaggatgt

SEQ ID NO: 1176570 - DNA, 15 bp, Homo sapiens
aaaatcaacaggatg

SEQ ID NO: 1176571 - DNA, 15 bp, Homo sapiens
caaaatcaacaggat

SEQ ID NO: 1176572 - DNA, 15 bp, Homo sapiens
ccaaaatcaacagga

SEQ ID NO: 1176573 - DNA, 15 bp, Homo sapiens
accaaaatcaacagg

SEQ ID NO: 1176574 - DNA, 15 bp, Homo sapiens
aaccaaaatcaacag

SEQ ID NO: 1176575 - DNA, 15 bp, Homo sapiens
gaaccaaaatcaaca

SEQ ID NO: 1176576 - DNA, 15 bp, Homo sapiens
agaaccaaaatcaac

SEQ ID NO: 1176577 - DNA, 15 bp, Homo sapiens
gagaaccaaaatcaa

SEQ ID NO: 1176578 - DNA, 15 bp, Homo sapiens
agagaaccaaaatca

SEQ ID NO: 1176579 - DNA, 15 bp, Homo sapiens
cagagaaccaaaatc

SEQ ID NO: 1176580 - DNA, 15 bp, Homo sapiens
ccagagaaccaaaat

SEQ ID NO: 1176581 - DNA, 15 bp, Homo sapiens
tccagagaaccaaaa

SEQ ID NO: 1176582 - DNA, 15 bp, Homo sapiens
ctccagagaaccaaa

SEQ ID NO: 1176583 - DNA, 15 bp, Homo sapiens
tctccagagaaccaa

SEQ ID NO: 1176584 - DNA, 15 bp, Homo sapiens
ttctccagagaacca

SEQ ID NO: 1176585 - DNA, 15 bp, Homo sapiens
gttctccagagaacc

SEQ ID NO: 1176586 - DNA, 15 bp, Homo sapiens
ggttctccagagaac

SEQ ID NO: 1176587 - DNA, 15 bp, Homo sapiens
tggttctccagagaa

SEQ ID NO: 1176588 - DNA, 15 bp, Homo sapiens
atggttctccagaga

SEQ ID NO: 1176589 - DNA, 15 bp, Homo sapiens
catggttctccagag

SEQ ID NO: 1176590 - DNA, 15 bp, Homo sapiens
tcatggttctccaga

SEQ ID NO: 1176591 - DNA, 15 bp, Homo sapiens
gtcatggttctccag

SEQ ID NO: 1176592 - DNA, 15 bp, Homo sapiens
agtcatggttctcca

SEQ ID NO: 1176593 - DNA, 15 bp, Homo sapiens
tagtcatggttctcc

SEQ ID NO: 1176594 - DNA, 15 bp, Homo sapiens
ttagtcatggttctc

SEQ ID NO: 1176595 - DNA, 15 bp, Homo sapiens
attagtcatggttct

SEQ ID NO: 1176596 - DNA, 15 bp, Homo sapiens
tattagtcatggttc

SEQ ID NO: 1176597 - DNA, 15 bp, Homo sapiens
gtattagtcatggtt

SEQ ID NO: 1176598 - DNA, 15 bp, Homo sapiens
tgtattagtcatggt

SEQ ID NO: 1176599 - DNA, 15 bp, Homo sapiens
ttgtattagtcatgg

SEQ ID NO: 1176600 - DNA, 15 bp, Homo sapiens
gttgtattagtcatg

SEQ ID NO: 1176601 - DNA, 15 bp, Homo sapiens
agttgtattagtcat

SEQ ID NO: 1176602 - DNA, 15 bp, Homo sapiens
cagttgtattagtca

SEQ ID NO: 1176603 - DNA, 15 bp, Homo sapiens
ccagttgtattagtc

SEQ ID NO: 1176604 - DNA, 15 bp, Homo sapiens
cccagttgtattagt

SEQ ID NO: 1176605 - DNA, 15 bp, Homo sapiens
gcccagttgtattag

SEQ ID NO: 1176606 - DNA, 15 bp, Homo sapiens
agcccagttgtatta

SEQ ID NO: 1176607 - DNA, 15 bp, Homo sapiens
aagcccagttgtatt

SEQ ID NO: 1176608 - DNA, 15 bp, Homo sapiens
taagcccagttgtat

SEQ ID NO: 1176609 - DNA, 15 bp, Homo sapiens
ttaagcccagttgta

SEQ ID NO: 1176610 - DNA, 15 bp, Homo sapiens
gttaagcccagttgt

SEQ ID NO: 1176611 - DNA, 15 bp, Homo sapiens
tgttaagcccagttg

SEQ ID NO: 1176612 - DNA, 15 bp, Homo sapiens
atgttaagcccagtt

SEQ ID NO: 1176613 - DNA, 15 bp, Homo sapiens
aatgttaagcccagt

SEQ ID NO: 1176614 - DNA, 15 bp, Homo sapiens
aaatgttaagcccag

SEQ ID NO: 1176615 - DNA, 15 bp, Homo sapiens
aaaatgttaagccca

SEQ ID NO: 1176616 - DNA, 15 bp, Homo sapiens
taaaatgttaagccc

SEQ ID NO: 1176617 - DNA, 15 bp, Homo sapiens
ataaaatgttaagcc

SEQ ID NO: 1176618 - DNA, 15 bp, Homo sapiens
gataaaatgttaagc

SEQ ID NO: 1176619 - DNA, 15 bp, Homo sapiens
agataaaatgttaag

SEQ ID NO: 1176620 - DNA, 15 bp, Homo sapiens
cagataaaatgttaa

SEQ ID NO: 1176621 - DNA, 15 bp, Homo sapiens
ccagataaaatgtta

SEQ ID NO: 1176622 - DNA, 15 bp, Homo sapiens
tccagataaaatgtt

SEQ ID NO: 1176623 - DNA, 15 bp, Homo sapiens
ctccagataaaatgt

SEQ ID NO: 1176624 - DNA, 15 bp, Homo sapiens
gctccagataaaatg

SEQ ID NO: 1176625 - DNA, 15 bp, Homo sapiens
agctccagataaaat

SEQ ID NO: 1176626 - DNA, 15 bp, Homo sapiens
gagctccagataaaa

SEQ ID NO: 1176627 - DNA, 15 bp, Homo sapiens
ggagctccagataaa

SEQ ID NO: 1176628 - DNA, 15 bp, Homo sapiens
cggagctccagataa

SEQ ID NO: 1176629 - DNA, 15 bp, Homo sapiens
tcggagctccagata

SEQ ID NO: 1176630 - DNA, 15 bp, Homo sapiens
ttcggagctccagat

SEQ ID NO: 1176631 - DNA, 15 bp, Homo sapiens
tttcggagctccaga

SEQ ID NO: 1176632 - DNA, 15 bp, Homo sapiens
ctttcggagctccag

SEQ ID NO: 1176633 - DNA, 15 bp, Homo sapiens
tctttcggagctcca

SEQ ID NO: 1176634 - DNA, 15 bp, Homo sapiens
ttctttcggagctcc

SEQ ID NO: 1176635 - DNA, 15 bp, Homo sapiens
cttctttcggagctc

SEQ ID NO: 1176636 - DNA, 15 bp, Homo sapiens
gcttctttcggagct

SEQ ID NO: 1176637 - DNA, 15 bp, Homo sapiens
agcttctttcggagc

SEQ ID NO: 1176638 - DNA, 15 bp, Homo sapiens
cagcttctttcggag

SEQ ID NO: 1176639 - DNA, 15 bp, Homo sapiens
tcagcttctttcgga

SEQ ID NO: 1176640 - DNA, 15 bp, Homo sapiens
ctcagcttctttcgg

SEQ ID NO: 1176641 - DNA, 15 bp, Homo sapiens
cctcagcttctttcg

SEQ ID NO: 1176642 - DNA, 15 bp, Homo sapiens
acctcagcttctttc

SEQ ID NO: 1176643 - DNA, 15 bp, Homo sapiens
gacctcagcttcttt

SEQ ID NO: 1176644 - DNA, 15 bp, Homo sapiens
agacctcagcttctt

SEQ ID NO: 1176645 - DNA, 15 bp, Homo sapiens
aagacctcagcttct

SEQ ID NO: 1176646 - DNA, 15 bp, Homo sapiens
gaagacctcagcttc

SEQ ID NO: 1176647 - DNA, 15 bp, Homo sapiens
tgaagacctcagctt

SEQ ID NO: 1176648 - DNA, 15 bp, Homo sapiens
gtgaagacctcagct

SEQ ID NO: 1176649 - DNA, 15 bp, Homo sapiens
ggtgaagacctcagc

SEQ ID NO: 1176650 - DNA, 15 bp, Homo sapiens
tggtgaagacctcag

SEQ ID NO: 1176651 - DNA, 15 bp, Homo sapiens
ttggtgaagacctca

SEQ ID NO: 1176652 - DNA, 15 bp, Homo sapiens
cttggtgaagacctc

SEQ ID NO: 1176653 - DNA, 15 bp, Homo sapiens
ccttggtgaagacct

SEQ ID NO: 1176654 - DNA, 15 bp, Homo sapiens
accttggtgaagacc

SEQ ID NO: 1176655 - DNA, 15 bp, Homo sapiens
taccttggtgaagac

SEQ ID NO: 1176656 - DNA, 15 bp, Homo sapiens
ataccttggtgaaga

SEQ ID NO: 1176657 - DNA, 15 bp, Homo sapiens
aataccttggtgaag

SEQ ID NO: 1176658 - DNA, 15 bp, Homo sapiens
taataccttggtgaa

SEQ ID NO: 1176659 - DNA, 15 bp, Homo sapiens
ataataccttggtga

SEQ ID NO: 1176660 - DNA, 15 bp, Homo sapiens
cataataccttggtg

SEQ ID NO: 1176661 - DNA, 15 bp, Homo sapiens
tcataataccttggt

SEQ ID NO: 1176662 - DNA, 15 bp, Homo sapiens
ttcataataccttgg

SEQ ID NO: 1176663 - DNA, 15 bp, Homo sapiens
tttcataataccttg

SEQ ID NO: 1176664 - DNA, 15 bp, Homo sapiens
ctttcataatacctt

SEQ ID NO: 1176665 - DNA, 15 bp, Homo sapiens
cctttcataatacct

SEQ ID NO: 1176666 - DNA, 15 bp, Homo sapiens
tcctttcataatacc

SEQ ID NO: 1176667 - DNA, 15 bp, Homo sapiens
ctcctttcataatac

SEQ ID NO: 1176668 - DNA, 15 bp, Homo sapiens
gctcctttcataata

SEQ ID NO: 1176669 - DNA, 15 bp, Homo sapiens
tgctcctttcataat

SEQ ID NO: 1176670 - DNA, 15 bp, Homo sapiens
ttgctcctttcataa

SEQ ID NO: 1176671 - DNA, 15 bp, Homo sapiens
tttgctcctttcata

SEQ ID NO: 1176672 - DNA, 15 bp, Homo sapiens
ctttgctcctttcat

SEQ ID NO: 1176673 - DNA, 15 bp, Homo sapiens
cctttgctcctttca

SEQ ID NO: 1176674 - DNA, 15 bp, Homo sapiens
ccctttgctcctttc

SEQ ID NO: 1176675 - DNA, 15 bp, Homo sapiens
accctttgctccttt

SEQ ID NO: 1176676 - DNA, 15 bp, Homo sapiens
caccctttgctcctt

SEQ ID NO: 1176677 - DNA, 15 bp, Homo sapiens
acaccctttgctcct

SEQ ID NO: 1176678 - DNA, 15 bp, Homo sapiens
gacaccctttgctcc

SEQ ID NO: 1176679 - DNA, 15 bp, Homo sapiens
ggacaccctttgctc

SEQ ID NO: 1176680 - DNA, 15 bp, Homo sapiens
aggacaccctttgct

SEQ ID NO: 1176681 - DNA, 15 bp, Homo sapiens
taggacaccctttgc

SEQ ID NO: 1176682 - DNA, 15 bp, Homo sapiens
ttaggacaccctttg

SEQ ID NO: 1176683 - DNA, 15 bp, Homo sapiens
cttaggacacccttt

SEQ ID NO: 1176684 - DNA, 15 bp, Homo sapiens
tcttaggacaccctt

SEQ ID NO: 1176685 - DNA, 15 bp, Homo sapiens
ttcttaggacaccct

SEQ ID NO: 1176686 - DNA, 15 bp, Homo sapiens
attcttaggacaccc

SEQ ID NO: 1176687 - DNA, 15 bp, Homo sapiens
tattcttaggacacc

SEQ ID NO: 1176688 - DNA, 15 bp, Homo sapiens
atattcttaggacac

SEQ ID NO: 1176689 - DNA, 15 bp, Homo sapiens
gatattcttaggaca

SEQ ID NO: 1176690 - DNA, 15 bp, Homo sapiens
agatattcttaggac

SEQ ID NO: 1176691 - DNA, 15 bp, Homo sapiens
cagatattcttagga

SEQ ID NO: 1176692 - DNA, 15 bp, Homo sapiens
tcagatattcttagg

SEQ ID NO: 1176693 - DNA, 15 bp, Homo sapiens
ctcagatattcttag

SEQ ID NO: 1176694 - DNA, 15 bp, Homo sapiens
actcagatattctta

SEQ ID NO: 1176695 - DNA, 15 bp, Homo sapiens
cactcagatattctt

SEQ ID NO: 1176696 - DNA, 15 bp, Homo sapiens
acactcagatattct

SEQ ID NO: 1176697 - DNA, 15 bp, Homo sapiens
gacactcagatattc

SEQ ID NO: 1176698 - DNA, 15 bp, Homo sapiens
agacactcagatatt

SEQ ID NO: 1176699 - DNA, 15 bp, Homo sapiens
cagacactcagatat

SEQ ID NO: 1176700 - DNA, 15 bp, Homo sapiens
gcagacactcagata

SEQ ID NO: 1176701 - DNA, 15 bp, Homo sapiens
tgcagacactcagat

SEQ ID NO: 1176702 - DNA, 15 bp, Homo sapiens
ttgcagacactcaga

SEQ ID NO: 1176703 - DNA, 15 bp, Homo sapiens
cttgcagacactcag

SEQ ID NO: 1176704 - DNA, 15 bp, Homo sapiens
ccttgcagacactca

SEQ ID NO: 1176705 - DNA, 15 bp, Homo sapiens
accttgcagacactc

SEQ ID NO: 1176706 - DNA, 15 bp, Homo sapiens
caccttgcagacact

SEQ ID NO: 1176707 - DNA, 15 bp, Homo sapiens
acaccttgcagacac

SEQ ID NO: 1176708 - DNA, 15 bp, Homo sapiens
aacaccttgcagaca

SEQ ID NO: 1176709 - DNA, 15 bp, Homo sapiens
aaacaccttgcagac

SEQ ID NO: 1176710 - DNA, 15 bp, Homo sapiens
taaacaccttgcaga

SEQ ID NO: 1176711 - DNA, 15 bp, Homo sapiens
ttaaacaccttgcag

SEQ ID NO: 1176712 - DNA, 15 bp, Homo sapiens
gttaaacaccttgca

SEQ ID NO: 1176713 - DNA, 15 bp, Homo sapiens
agttaaacaccttgc

SEQ ID NO: 1176714 - DNA, 15 bp, Homo sapiens
gagttaaacaccttg

SEQ ID NO: 1176715 - DNA, 15 bp, Homo sapiens
cgagttaaacacctt

SEQ ID NO: 1176716 - DNA, 15 bp, Homo sapiens
acgagttaaacacct

SEQ ID NO: 1176717 - DNA, 15 bp, Homo sapiens
cacgagttaaacacc

SEQ ID NO: 1176718 - DNA, 15 bp, Homo sapiens
acacgagttaaacac

SEQ ID NO: 1176719 - DNA, 15 bp, Homo sapiens
aacacgagttaaaca

SEQ ID NO: 1176720 - DNA, 15 bp, Homo sapiens
taacacgagttaaac

SEQ ID NO: 1176721 - DNA, 15 bp, Homo sapiens
ttaacacgagttaaa

SEQ ID NO: 1176722 - DNA, 15 bp, Homo sapiens
tttaacacgagttaa

SEQ ID NO: 1176723 - DNA, 15 bp, Homo sapiens
ctttaacacgagtta

SEQ ID NO: 1176724 - DNA, 15 bp, Homo sapiens
cctttaacacgagtt

SEQ ID NO: 1176725 - DNA, 15 bp, Homo sapiens
ccctttaacacgagt

SEQ ID NO: 1176726 - DNA, 15 bp, Homo sapiens
accctttaacacgag

SEQ ID NO: 1176727 - DNA, 15 bp, Homo sapiens
aaccctttaacacga

SEQ ID NO: 1176728 - DNA, 15 bp, Homo sapiens
aaaccctttaacacg

SEQ ID NO: 1176729 - DNA, 15 bp, Homo sapiens
caaaccctttaacac

SEQ ID NO: 1176730 - DNA, 15 bp, Homo sapiens
acaaaccctttaaca

SEQ ID NO: 1176731 - DNA, 15 bp, Homo sapiens
cacaaaccctttaac

SEQ ID NO: 1176732 - DNA, 15 bp, Homo sapiens
gcacaaaccctttaa

SEQ ID NO: 1176733 - DNA, 15 bp, Homo sapiens
agcacaaacccttta

SEQ ID NO: 1176734 - DNA, 15 bp, Homo sapiens
cagcacaaacccttt

SEQ ID NO: 1176735 - DNA, 15 bp, Homo sapiens
ccagcacaaaccctt

SEQ ID NO: 1176736 - DNA, 15 bp, Homo sapiens
cccagcacaaaccct

SEQ ID NO: 1176737 - DNA, 15 bp, Homo sapiens
gcccagcacaaaccc

SEQ ID NO: 1176738 - DNA, 15 bp, Homo sapiens
tgcccagcacaaacc

SEQ ID NO: 1176739 - DNA, 15 bp, Homo sapiens
ctgcccagcacaaac

SEQ ID NO: 1176740 - DNA, 15 bp, Homo sapiens
tctgcccagcacaaa

SEQ ID NO: 1176741 - DNA, 15 bp, Homo sapiens
ctctgcccagcacaa

SEQ ID NO: 1176742 - DNA, 15 bp, Homo sapiens
cctctgcccagcaca

SEQ ID NO: 1176743 - DNA, 15 bp, Homo sapiens
tcctctgcccagcac

SEQ ID NO: 1176744 - DNA, 15 bp, Homo sapiens
gtcctctgcccagca

SEQ ID NO: 1176745 - DNA, 15 bp, Homo sapiens
tgtcctctgcccagc

SEQ ID NO: 1176746 - DNA, 15 bp, Homo sapiens
ttgtcctctgcccag

SEQ ID NO: 1176747 - DNA, 15 bp, Homo sapiens
cttgtcctctgccca

SEQ ID NO: 1176748 - DNA, 15 bp, Homo sapiens
ccttgtcctctgccc

SEQ ID NO: 1176749 - DNA, 15 bp, Homo sapiens
accttgtcctctgcc

SEQ ID NO: 1176750 - DNA, 15 bp, Homo sapiens
taccttgtcctctgc

SEQ ID NO: 1176751 - DNA, 15 bp, Homo sapiens
gtaccttgtcctctg

SEQ ID NO: 1176752 - DNA, 15 bp, Homo sapiens
agtaccttgtcctct

SEQ ID NO: 1176753 - DNA, 15 bp, Homo sapiens
aagtaccttgtcctc

SEQ ID NO: 1176754 - DNA, 15 bp, Homo sapiens
aaagtaccttgtcct

SEQ ID NO: 1176755 - DNA, 15 bp, Homo sapiens
aaaagtaccttgtcc

SEQ ID NO: 1176756 - DNA, 15 bp, Homo sapiens
aaaaagtaccttgtc

SEQ ID NO: 1176757 - DNA, 15 bp, Homo sapiens
aaaaaagtaccttgt

SEQ ID NO: 1176758 - DNA, 15 bp, Homo sapiens
aaaaaaagtaccttg

SEQ ID NO: 1176759 - DNA, 15 bp, Homo sapiens
aaaaaaaagtacctt

SEQ ID NO: 1176760 - DNA, 15 bp, Homo sapiens
aaaaaaaaagtacct

SEQ ID NO: 1176761 - DNA, 15 bp, Homo sapiens
aaaaaaaaaagtacc

SEQ ID NO: 1176762 - DNA, 15 bp, Homo sapiens
aaaaaaaaaaagtac

SEQ ID NO: 1176763 - DNA, 15 bp, Homo sapiens
aaaaactccatctca

SEQ ID NO: 1176764 - DNA, 15 bp, Homo sapiens
gaaaaactccatctc

SEQ ID NO: 1176765 - DNA, 15 bp, Homo sapiens
agaaaaactccatct

SEQ ID NO: 1176766 - DNA, 15 bp, Homo sapiens
gagaaaaactccatc

SEQ ID NO: 1176767 - DNA, 15 bp, Homo sapiens
agagaaaaactccat

SEQ ID NO: 1176768 - DNA, 15 bp, Homo sapiens
gagagaaaaactcca

SEQ ID NO: 1176769 - DNA, 15 bp, Homo sapiens
cgagagaaaaactcc

SEQ ID NO: 1176770 - DNA, 15 bp, Homo sapiens
acgagagaaaaactc

SEQ ID NO: 1176771 - DNA, 15 bp, Homo sapiens
aacgagagaaaaact

SEQ ID NO: 1176772 - DNA, 15 bp, Homo sapiens
caacgagagaaaaac

SEQ ID NO: 1176773 - DNA, 15 bp, Homo sapiens
gcaacgagagaaaaa

SEQ ID NO: 1176774 - DNA, 15 bp, Homo sapiens
ggcaacgagagaaaa

SEQ ID NO: 1176775 - DNA, 15 bp, Homo sapiens
gggcaacgagagaaa

SEQ ID NO: 1176776 - DNA, 15 bp, Homo sapiens
tgggcaacgagagaa

SEQ ID NO: 1176777 - DNA, 15 bp, Homo sapiens
ctgggcaacgagaga

SEQ ID NO: 1176778 - DNA, 15 bp, Homo sapiens
cctgggcaacgagag

SEQ ID NO: 1176779 - DNA, 15 bp, Homo sapiens
gcctgggcaacgaga

SEQ ID NO: 1176780 - DNA, 15 bp, Homo sapiens
agcctgggcaacgag

SEQ ID NO: 1176781 - DNA, 15 bp, Homo sapiens
cagcctgggcaacga

SEQ ID NO: 1176782 - DNA, 15 bp, Homo sapiens
ccagcctgggcaacg

SEQ ID NO: 1176783 - DNA, 15 bp, Homo sapiens
tgctccagcctgggc

SEQ ID NO: 1176784 - DNA, 15 bp, Homo sapiens
gtgctccagcctggg

SEQ ID NO: 1176785 - DNA, 15 bp, Homo sapiens
tgtgctccagcctgg

SEQ ID NO: 1176786 - DNA, 15 bp, Homo sapiens
ttgtgctccagcctg

SEQ ID NO: 1176787 - DNA, 15 bp, Homo sapiens
attgtgctccagcct

SEQ ID NO: 1176788 - DNA, 15 bp, Homo sapiens
cattgtgctccagcc

SEQ ID NO: 1176789 - DNA, 15 bp, Homo sapiens
ccattgtgctccagc

SEQ ID NO: 1176790 - DNA, 15 bp, Homo sapiens
gccattgtgctccag

SEQ ID NO: 1176791 - DNA, 15 bp, Homo sapiens
tgccattgtgctcca

SEQ ID NO: 1176792 - DNA, 15 bp, Homo sapiens
gtgccattgtgctcc

SEQ ID NO: 1176793 - DNA, 15 bp, Homo sapiens
cgtgccattgtgctc

SEQ ID NO: 1176794 - DNA, 15 bp, Homo sapiens
tcgtgccattgtgct

SEQ ID NO: 1176795 - DNA, 15 bp, Homo sapiens
atcgtgccattgtgc

SEQ ID NO: 1176796 - DNA, 15 bp, Homo sapiens
gatcgtgccattgtg

SEQ ID NO: 1176797 - DNA, 15 bp, Homo sapiens
agatcgtgccattgt

SEQ ID NO: 1176798 - DNA, 15 bp, Homo sapiens
ggtgagccaagatcg

SEQ ID NO: 1176799 - DNA, 15 bp, Homo sapiens
tgtggtggcgggtgc

SEQ ID NO: 1176800 - DNA, 15 bp, Homo sapiens
gtgtggtggcgggtg

SEQ ID NO: 1176801 - DNA, 15 bp, Homo sapiens
ggtgtggtggcgggt

SEQ ID NO: 1176802 - DNA, 15 bp, Homo sapiens
ggggtgtggtggcgg

SEQ ID NO: 1176803 - DNA, 15 bp, Homo sapiens
cggggtgtggtggcg

SEQ ID NO: 1176804 - DNA, 15 bp, Homo sapiens
gcggggtgtggtggc

SEQ ID NO: 1176805 - DNA, 15 bp, Homo sapiens
agcggggtgtggtgg

SEQ ID NO: 1176806 - DNA, 15 bp, Homo sapiens
tagcggggtgtggtg

SEQ ID NO: 1176807 - DNA, 15 bp, Homo sapiens
gaattagcggggtgt

SEQ ID NO: 1176808 - DNA, 15 bp, Homo sapiens
agaattagcggggtg

SEQ ID NO: 1176809 - DNA, 15 bp, Homo sapiens
aagaattagcggggt

SEQ ID NO: 1176810 - DNA, 15 bp, Homo sapiens
aaagaattagcgggg

SEQ ID NO: 1176811 - DNA, 15 bp, Homo sapiens
aaaagaattagcggg

SEQ ID NO: 1176812 - DNA, 15 bp, Homo sapiens
aaaaagaattagcgg

SEQ ID NO: 1176813 - DNA, 15 bp, Homo sapiens
caaaaagaattagcg

SEQ ID NO: 1176814 - DNA, 15 bp, Homo sapiens
acaaaaagaattagc

SEQ ID NO: 1176815 - DNA, 15 bp, Homo sapiens
tacaaaaagaattag

SEQ ID NO: 1176816 - DNA, 15 bp, Homo sapiens
atacaaaaagaatta

SEQ ID NO: 1176817 - DNA, 15 bp, Homo sapiens
aatacaaaaagaatt

SEQ ID NO: 1176818 - DNA, 15 bp, Homo sapiens
aaatacaaaaagaat

SEQ ID NO: 1176819 - DNA, 15 bp, Homo sapiens
tcgggagttcaagac

SEQ ID NO: 1176820 - DNA, 15 bp, Homo sapiens
gtcgggagttcaaga

SEQ ID NO: 1176821 - DNA, 15 bp, Homo sapiens
ggtcgggagttcaag

SEQ ID NO: 1176822 - DNA, 15 bp, Homo sapiens
aggtcgggagttcaa

SEQ ID NO: 1176823 - DNA, 15 bp, Homo sapiens
gaggtcgggagttca

SEQ ID NO: 1176824 - DNA, 15 bp, Homo sapiens
agaagcgggcggatc

SEQ ID NO: 1176825 - DNA, 15 bp, Homo sapiens
cagaagcgggcggat

SEQ ID NO: 1176826 - DNA, 15 bp, Homo sapiens
gcagaagcgggcgga

SEQ ID NO: 1176827 - DNA, 15 bp, Homo sapiens
ggcagaagcgggcgg

SEQ ID NO: 1176828 - DNA, 15 bp, Homo sapiens
aggcagaagcgggcg

SEQ ID NO: 1176829 - DNA, 15 bp, Homo sapiens
gaggcagaagcgggc

SEQ ID NO: 1176830 - DNA, 15 bp, Homo sapiens
ggaggcagaagcggg

SEQ ID NO: 1176831 - DNA, 15 bp, Homo sapiens
gggaggcagaagcgg

SEQ ID NO: 1176832 - DNA, 15 bp, Homo sapiens
tgggaggcagaagcg

SEQ ID NO: 1176833 - DNA, 15 bp, Homo sapiens
ttgggaggcagaagc

SEQ ID NO: 1176834 - DNA, 15 bp, Homo sapiens
ctttgggaggcagaa

SEQ ID NO: 1176835 - DNA, 15 bp, Homo sapiens
gctttgggaggcaga

SEQ ID NO: 1176836 - DNA, 15 bp, Homo sapiens
tgctttgggaggcag

SEQ ID NO: 1176837 - DNA, 15 bp, Homo sapiens
gtgctttgggaggca

SEQ ID NO: 1176838 - DNA, 15 bp, Homo sapiens
atcccagtgctttgg

SEQ ID NO: 1176839 - DNA, 15 bp, Homo sapiens
aatcccagtgctttg

SEQ ID NO: 1176840 - DNA, 15 bp, Homo sapiens
taatcccagtgcttt

SEQ ID NO: 1176841 - DNA, 15 bp, Homo sapiens
gtaatcccagtgctt

SEQ ID NO: 1176842 - DNA, 15 bp, Homo sapiens
tgtaatcccagtgct

SEQ ID NO: 1176843 - DNA, 15 bp, Homo sapiens
ctgtaatcccagtgc

SEQ ID NO: 1176844 - DNA, 15 bp, Homo sapiens
cctgtaatcccagtg

SEQ ID NO: 1176845 - DNA, 15 bp, Homo sapiens
tgtggctcaagcctg

SEQ ID NO: 1176846 - DNA, 15 bp, Homo sapiens
ctgtggctcaagcct

SEQ ID NO: 1176847 - DNA, 15 bp, Homo sapiens
gctgtggctcaagcc

SEQ ID NO: 1176848 - DNA, 15 bp, Homo sapiens
tgctgtggctcaagc

SEQ ID NO: 1176849 - DNA, 15 bp, Homo sapiens
gtgctgtggctcaag

SEQ ID NO: 1176850 - DNA, 15 bp, Homo sapiens
ggtgctgtggctcaa

SEQ ID NO: 1176851 - DNA, 15 bp, Homo sapiens
gggtgctgtggctca

SEQ ID NO: 1176852 - DNA, 15 bp, Homo sapiens
tgggtgctgtggctc

SEQ ID NO: 1176853 - DNA, 15 bp, Homo sapiens
ctgggtgctgtggct

SEQ ID NO: 1176854 - DNA, 15 bp, Homo sapiens
tctgggtgctgtggc

SEQ ID NO: 1176855 - DNA, 15 bp, Homo sapiens
gtctgggtgctgtgg

SEQ ID NO: 1176856 - DNA, 15 bp, Homo sapiens
tgtctgggtgctgtg

SEQ ID NO: 1176857 - DNA, 15 bp, Homo sapiens
ctgtctgggtgctgt

SEQ ID NO: 1176858 - DNA, 15 bp, Homo sapiens
cctgtctgggtgctg

SEQ ID NO: 1176859 - DNA, 15 bp, Homo sapiens
tcctgtctgggtgct

SEQ ID NO: 1176860 - DNA, 15 bp, Homo sapiens
gtcctgtctgggtgc

SEQ ID NO: 1176861 - DNA, 15 bp, Homo sapiens
tgtcctgtctgggtg

SEQ ID NO: 1176862 - DNA, 15 bp, Homo sapiens
ttgtcctgtctgggt

SEQ ID NO: 1176863 - DNA, 15 bp, Homo sapiens
cttgtcctgtctggg

SEQ ID NO: 1176864 - DNA, 15 bp, Homo sapiens
tcttgtcctgtctgg

SEQ ID NO: 1176865 - DNA, 15 bp, Homo sapiens
atcttgtcctgtctg

SEQ ID NO: 1176866 - DNA, 15 bp, Homo sapiens
tatcttgtcctgtct

SEQ ID NO: 1176867 - DNA, 15 bp, Homo sapiens
gtatcttgtcctgtc

SEQ ID NO: 1176868 - DNA, 15 bp, Homo sapiens
agtatcttgtcctgt

SEQ ID NO: 1176869 - DNA, 15 bp, Homo sapiens
tagtatcttgtcctg

SEQ ID NO: 1176870 - DNA, 15 bp, Homo sapiens
atagtatcttgtcct

SEQ ID NO: 1176871 - DNA, 15 bp, Homo sapiens
aatagtatcttgtcc

SEQ ID NO: 1176872 - DNA, 15 bp, Homo sapiens
aaatagtatcttgtc

SEQ ID NO: 1176873 - DNA, 15 bp, Homo sapiens
aaaatagtatcttgt

SEQ ID NO: 1176874 - DNA, 15 bp, Homo sapiens
caaaatagtatcttg

SEQ ID NO: 1176875 - DNA, 15 bp, Homo sapiens
tcaaaatagtatctt

SEQ ID NO: 1176876 - DNA, 15 bp, Homo sapiens
ttcaaaatagtatct

SEQ ID NO: 1176877 - DNA, 15 bp, Homo sapiens
cttcaaaatagtatc

SEQ ID NO: 1176878 - DNA, 15 bp, Homo sapiens
ccttcaaaatagtat

SEQ ID NO: 1176879 - DNA, 15 bp, Homo sapiens
cccttcaaaatagta

SEQ ID NO: 1176880 - DNA, 15 bp, Homo sapiens
acccttcaaaatagt

SEQ ID NO: 1176881 - DNA, 15 bp, Homo sapiens
tacccttcaaaatag

SEQ ID NO: 1176882 - DNA, 15 bp, Homo sapiens
atacccttcaaaata

SEQ ID NO: 1176883 - DNA, 15 bp, Homo sapiens
catacccttcaaaat

SEQ ID NO: 1176884 - DNA, 15 bp, Homo sapiens
acatacccttcaaaa

SEQ ID NO: 1176885 - DNA, 15 bp, Homo sapiens
cacatacccttcaaa

SEQ ID NO: 1176886 - DNA, 15 bp, Homo sapiens
gcacatacccttcaa

SEQ ID NO: 1176887 - DNA, 15 bp, Homo sapiens
agcacatacccttca

SEQ ID NO: 1176888 - DNA, 15 bp, Homo sapiens
aagcacatacccttc

SEQ ID NO: 1176889 - DNA, 15 bp, Homo sapiens
gaagcacataccctt

SEQ ID NO: 1176890 - DNA, 15 bp, Homo sapiens
ggaagcacataccct

SEQ ID NO: 1176891 - DNA, 15 bp, Homo sapiens
gggaagcacataccc

SEQ ID NO: 1176892 - DNA, 15 bp, Homo sapiens
tgggaagcacatacc

SEQ ID NO: 1176893 - DNA, 15 bp, Homo sapiens
ctgggaagcacatac

SEQ ID NO: 1176894 - DNA, 15 bp, Homo sapiens
cctgggaagcacata

SEQ ID NO: 1176895 - DNA, 15 bp, Homo sapiens
acctgggaagcacat

SEQ ID NO: 1176896 - DNA, 15 bp, Homo sapiens
tacctgggaagcaca

SEQ ID NO: 1176897 - DNA, 15 bp, Homo sapiens
ctacctgggaagcac

SEQ ID NO: 1176898 - DNA, 15 bp, Homo sapiens
tctacctgggaagca

SEQ ID NO: 1176899 - DNA, 15 bp, Homo sapiens
ctctacctgggaagc

SEQ ID NO: 1176900 - DNA, 15 bp, Homo sapiens
gctctacctgggaag

SEQ ID NO: 1176901 - DNA, 15 bp, Homo sapiens
tgctctacctgggaa

SEQ ID NO: 1176902 - DNA, 15 bp, Homo sapiens
atgctctacctggga

SEQ ID NO: 1176903 - DNA, 15 bp, Homo sapiens
aatgctctacctggg

SEQ ID NO: 1176904 - DNA, 15 bp, Homo sapiens
taatgctctacctgg

SEQ ID NO: 1176905 - DNA, 15 bp, Homo sapiens
gtaatgctctacctg

SEQ ID NO: 1176906 - DNA, 15 bp, Homo sapiens
tgtaatgctctacct

SEQ ID NO: 1176907 - DNA, 15 bp, Homo sapiens
ttgtaatgctctacc

SEQ ID NO: 1176908 - DNA, 15 bp, Homo sapiens
tttgtaatgctctac

SEQ ID NO: 1176909 - DNA, 15 bp, Homo sapiens
ctttgtaatgctcta

SEQ ID NO: 1176910 - DNA, 15 bp, Homo sapiens
cctttgtaatgctct

SEQ ID NO: 1176911 - DNA, 15 bp, Homo sapiens
ccctttgtaatgctc

SEQ ID NO: 1176912 - DNA, 15 bp, Homo sapiens
gccctttgtaatgct

SEQ ID NO: 1176913 - DNA, 15 bp, Homo sapiens
agccctttgtaatgc

SEQ ID NO: 1176914 - DNA, 15 bp, Homo sapiens
gagccctttgtaatg

SEQ ID NO: 1176915 - DNA, 15 bp, Homo sapiens
agagccctttgtaat

SEQ ID NO: 1176916 - DNA, 15 bp, Homo sapiens
aagagccctttgtaa

SEQ ID NO: 1176917 - DNA, 15 bp, Homo sapiens
gaagagccctttgta

SEQ ID NO: 1176918 - DNA, 15 bp, Homo sapiens
agaagagccctttgt

SEQ ID NO: 1176919 - DNA, 15 bp, Homo sapiens
cagaagagccctttg

SEQ ID NO: 1176920 - DNA, 15 bp, Homo sapiens
ccagaagagcccttt

SEQ ID NO: 1176921 - DNA, 15 bp, Homo sapiens
tccagaagagccctt

SEQ ID NO: 1176922 - DNA, 15 bp, Homo sapiens
atccagaagagccct

SEQ ID NO: 1176923 - DNA, 15 bp, Homo sapiens
catccagaagagccc

SEQ ID NO: 1176924 - DNA, 15 bp, Homo sapiens
gcatccagaagagcc

SEQ ID NO: 1176925 - DNA, 15 bp, Homo sapiens
tgcatccagaagagc

SEQ ID NO: 1176926 - DNA, 15 bp, Homo sapiens
ctgcatccagaagag

SEQ ID NO: 1176927 - DNA, 15 bp, Homo sapiens
gctgcatccagaaga

SEQ ID NO: 1176928 - DNA, 15 bp, Homo sapiens
tgctgcatccagaag

SEQ ID NO: 1176929 - DNA, 15 bp, Homo sapiens
atgctgcatccagaa

SEQ ID NO: 1176930 - DNA, 15 bp, Homo sapiens
gatgctgcatccaga

SEQ ID NO: 1176931 - DNA, 15 bp, Homo sapiens
ggatgctgcatccag

SEQ ID NO: 1176932 - DNA, 15 bp, Homo sapiens
gggatgctgcatcca

SEQ ID NO: 1176933 - DNA, 15 bp, Homo sapiens
ggggatgctgcatcc

SEQ ID NO: 1176934 - DNA, 15 bp, Homo sapiens
cggggatgctgcatc

SEQ ID NO: 1176935 - DNA, 15 bp, Homo sapiens
gcggggatgctgcat

SEQ ID NO: 1176936 - DNA, 15 bp, Homo sapiens
agcggggatgctgca

SEQ ID NO: 1176937 - DNA, 15 bp, Homo sapiens
cagcggggatgctgc

SEQ ID NO: 1176938 - DNA, 15 bp, Homo sapiens
gcagcggggatgctg

SEQ ID NO: 1176939 - DNA, 15 bp, Homo sapiens
tgcagcggggatgct

SEQ ID NO: 1176940 - DNA, 15 bp, Homo sapiens
ttgcagcggggatgc

SEQ ID NO: 1176941 - DNA, 15 bp, Homo sapiens
attgcagcggggatg

SEQ ID NO: 1176942 - DNA, 15 bp, Homo sapiens
aattgcagcggggat

SEQ ID NO: 1176943 - DNA, 15 bp, Homo sapiens
caattgcagcgggga

SEQ ID NO: 1176944 - DNA, 15 bp, Homo sapiens
tcaattgcagcgggg

SEQ ID NO: 1176945 - DNA, 15 bp, Homo sapiens
ctcaattgcagcggg

SEQ ID NO: 1176946 - DNA, 15 bp, Homo sapiens
actcaattgcagcgg

SEQ ID NO: 1176947 - DNA, 15 bp, Homo sapiens
cactcaattgcagcg

SEQ ID NO: 1176948 - DNA, 15 bp, Homo sapiens
acactcaattgcagc

SEQ ID NO: 1176949 - DNA, 15 bp, Homo sapiens
gacactcaattgcag

SEQ ID NO: 1176950 - DNA, 15 bp, Homo sapiens
ggacactcaattgca

SEQ ID NO: 1176951 - DNA, 15 bp, Homo sapiens
aggacactcaattgc

SEQ ID NO: 1176952 - DNA, 15 bp, Homo sapiens
taggacactcaattg

SEQ ID NO: 1176953 - DNA, 15 bp, Homo sapiens
ttaggacactcaatt

SEQ ID NO: 1176954 - DNA, 15 bp, Homo sapiens
gttaggacactcaat

SEQ ID NO: 1176955 - DNA, 15 bp, Homo sapiens
agttaggacactcaa

SEQ ID NO: 1176956 - DNA, 15 bp, Homo sapiens
aagttaggacactca

SEQ ID NO: 1176957 - DNA, 15 bp, Homo sapiens
gaagttaggacactc

SEQ ID NO: 1176958 - DNA, 15 bp, Homo sapiens
agaagttaggacact

SEQ ID NO: 1176959 - DNA, 15 bp, Homo sapiens
cagaagttaggacac

SEQ ID NO: 1176960 - DNA, 15 bp, Homo sapiens
acagaagttaggaca

SEQ ID NO: 1176961 - DNA, 15 bp, Homo sapiens
aacagaagttaggac

SEQ ID NO: 1176962 - DNA, 15 bp, Homo sapiens
aaacagaagttagga

SEQ ID NO: 1176963 - DNA, 15 bp, Homo sapiens
taaacagaagttagg

SEQ ID NO: 1176964 - DNA, 15 bp, Homo sapiens
ataaacagaagttag

SEQ ID NO: 1176965 - DNA, 15 bp, Homo sapiens
tataaacagaagtta

SEQ ID NO: 1176966 - DNA, 15 bp, Homo sapiens
ttataaacagaagtt

SEQ ID NO: 1176967 - DNA, 15 bp, Homo sapiens
tttataaacagaagt

SEQ ID NO: 1176968 - DNA, 15 bp, Homo sapiens
ctttataaacagaag

SEQ ID NO: 1176969 - DNA, 15 bp, Homo sapiens
cctttataaacagaa

SEQ ID NO: 1176970 - DNA, 15 bp, Homo sapiens
ccctttataaacaga

SEQ ID NO: 1176971 - DNA, 15 bp, Homo sapiens
cccctttataaacag

SEQ ID NO: 1176972 - DNA, 15 bp, Homo sapiens
tcccctttataaaca

SEQ ID NO: 1176973 - DNA, 15 bp, Homo sapiens
gtcccctttataaac

SEQ ID NO: 1176974 - DNA, 15 bp, Homo sapiens
ggtcccctttataaa

SEQ ID NO: 1176975 - DNA, 15 bp, Homo sapiens
gggtcccctttataa

SEQ ID NO: 1176976 - DNA, 15 bp, Homo sapiens
ggggtcccctttata

SEQ ID NO: 1176977 - DNA, 15 bp, Homo sapiens
tggggtcccctttat

SEQ ID NO: 1176978 - DNA, 15 bp, Homo sapiens
ttggggtccccttta

SEQ ID NO: 1176979 - DNA, 15 bp, Homo sapiens
gttggggtccccttt

SEQ ID NO: 1176980 - DNA, 15 bp, Homo sapiens
tgttggggtcccctt

SEQ ID NO: 1176981 - DNA, 15 bp, Homo sapiens
ctgttggggtcccct

SEQ ID NO: 1176982 - DNA, 15 bp, Homo sapiens
cctgttggggtcccc

SEQ ID NO: 1176983 - DNA, 15 bp, Homo sapiens
tcctgttggggtccc

SEQ ID NO: 1176984 - DNA, 15 bp, Homo sapiens
ttcctgttggggtcc

SEQ ID NO: 1176985 - DNA, 15 bp, Homo sapiens
cttcctgttggggtc

SEQ ID NO: 1176986 - DNA, 15 bp, Homo sapiens
gcttcctgttggggt

SEQ ID NO: 1176987 - DNA, 15 bp, Homo sapiens
tgcttcctgttgggg

SEQ ID NO: 1176988 - DNA, 15 bp, Homo sapiens
gtgcttcctgttggg

SEQ ID NO: 1176989 - DNA, 15 bp, Homo sapiens
ggtgcttcctgttgg

SEQ ID NO: 1176990 - DNA, 15 bp, Homo sapiens
gggtgcttcctgttg

SEQ ID NO: 1176991 - DNA, 15 bp, Homo sapiens
agggtgcttcctgtt

SEQ ID NO: 1176992 - DNA, 15 bp, Homo sapiens
cagggtgcttcctgt

SEQ ID NO: 1176993 - DNA, 15 bp, Homo sapiens
tcagggtgcttcctg

SEQ ID NO: 1176994 - DNA, 15 bp, Homo sapiens
ctcagggtgcttcct

SEQ ID NO: 1176995 - DNA, 15 bp, Homo sapiens
tctcagggtgcttcc

SEQ ID NO: 1176996 - DNA, 15 bp, Homo sapiens
ttctcagggtgcttc

SEQ ID NO: 1176997 - DNA, 15 bp, Homo sapiens
cttctcagggtgctt

SEQ ID NO: 1176998 - DNA, 15 bp, Homo sapiens
aacttctcagggtgc

SEQ ID NO: 1176999 - DNA, 15 bp, Homo sapiens
aaacttctcagggtg

SEQ ID NO: 1177000 - DNA, 15 bp, Homo sapiens
gaaacttctcagggt

SEQ ID NO: 1177001 - DNA, 15 bp, Homo sapiens
ggaaacttctcaggg

SEQ ID NO: 1177002 - DNA, 15 bp, Homo sapiens
gggaaacttctcagg

SEQ ID NO: 1177003 - DNA, 15 bp, Homo sapiens
ggggaaacttctcag

SEQ ID NO: 1177004 - DNA, 15 bp, Homo sapiens
tggggaaacttctca

SEQ ID NO: 1177005 - DNA, 15 bp, Homo sapiens
ctggggaaacttctc

SEQ ID NO: 1177006 - DNA, 15 bp, Homo sapiens
actggggaaacttct

SEQ ID NO: 1177007 - DNA, 15 bp, Homo sapiens
aactggggaaacttc

SEQ ID NO: 1177008 - DNA, 15 bp, Homo sapiens
taactggggaaactt

SEQ ID NO: 1177009 - DNA, 15 bp, Homo sapiens
ctaactggggaaact

SEQ ID NO: 1177010 - DNA, 15 bp, Homo sapiens
gctaactggggaaac

SEQ ID NO: 1177011 - DNA, 15 bp, Homo sapiens
ggctaactggggaaa

SEQ ID NO: 1177012 - DNA, 15 bp, Homo sapiens
tggctaactggggaa

SEQ ID NO: 1177013 - DNA, 15 bp, Homo sapiens
gtggctaactgggga

SEQ ID NO: 1177014 - DNA, 15 bp, Homo sapiens
ggtggctaactgggg

SEQ ID NO: 1177015 - DNA, 15 bp, Homo sapiens
aggtggctaactggg

SEQ ID NO: 1177016 - DNA, 15 bp, Homo sapiens
aaggtggctaactgg

SEQ ID NO: 1177017 - DNA, 15 bp, Homo sapiens
caaggtggctaactg

SEQ ID NO: 1177018 - DNA, 15 bp, Homo sapiens
tcaaggtggctaact

SEQ ID NO: 1177019 - DNA, 15 bp, Homo sapiens
ctcaaggtggctaac

SEQ ID NO: 1177020 - DNA, 15 bp, Homo sapiens
cctcaaggtggctaa

SEQ ID NO: 1177021 - DNA, 15 bp, Homo sapiens
acctcaaggtggcta

SEQ ID NO: 1177022 - DNA, 15 bp, Homo sapiens
tacctcaaggtggct

SEQ ID NO: 1177023 - DNA, 15 bp, Homo sapiens
ttacctcaaggtggc

SEQ ID NO: 1177024 - DNA, 15 bp, Homo sapiens
tttacctcaaggtgg

SEQ ID NO: 1177025 - DNA, 15 bp, Homo sapiens
ttttacctcaaggtg

SEQ ID NO: 1177026 - DNA, 15 bp, Homo sapiens
cttttacctcaaggt

SEQ ID NO: 1177027 - DNA, 15 bp, Homo sapiens
tcttttacctcaagg

SEQ ID NO: 1177028 - DNA, 15 bp, Homo sapiens
atcttttacctcaag

SEQ ID NO: 1177029 - DNA, 15 bp, Homo sapiens
aatcttttacctcaa

SEQ ID NO: 1177030 - DNA, 15 bp, Homo sapiens
caatcttttacctca

SEQ ID NO: 1177031 - DNA, 15 bp, Homo sapiens
tcaatcttttacctc

SEQ ID NO: 1177032 - DNA, 15 bp, Homo sapiens
ctcaatcttttacct

SEQ ID NO: 1177033 - DNA, 15 bp, Homo sapiens
actcaatcttttacc

SEQ ID NO: 1177034 - DNA, 15 bp, Homo sapiens
gactcaatcttttac

SEQ ID NO: 1177035 - DNA, 15 bp, Homo sapiens
agactcaatctttta

SEQ ID NO: 1177036 - DNA, 15 bp, Homo sapiens
cagactcaatctttt

SEQ ID NO: 1177037 - DNA, 15 bp, Homo sapiens
ccagactcaatcttt

SEQ ID NO: 1177038 - DNA, 15 bp, Homo sapiens
cccagactcaatctt

SEQ ID NO: 1177039 - DNA, 15 bp, Homo sapiens
ccccagactcaatct

SEQ ID NO: 1177040 - DNA, 15 bp, Homo sapiens
gccccagactcaatc

SEQ ID NO: 1177041 - DNA, 15 bp, Homo sapiens
agccccagactcaat

SEQ ID NO: 1177042 - DNA, 15 bp, Homo sapiens
gagccccagactcaa

SEQ ID NO: 1177043 - DNA, 15 bp, Homo sapiens
ggagccccagactca

SEQ ID NO: 1177044 - DNA, 15 bp, Homo sapiens
tggagccccagactc

SEQ ID NO: 1177045 - DNA, 15 bp, Homo sapiens
atggagccccagact

SEQ ID NO: 1177046 - DNA, 15 bp, Homo sapiens
catggagccccagac

SEQ ID NO: 1177047 - DNA, 15 bp, Homo sapiens
gcatggagccccaga

SEQ ID NO: 1177048 - DNA, 15 bp, Homo sapiens
ggcatggagccccag

SEQ ID NO: 1177049 - DNA, 15 bp, Homo sapiens
gggcatggagcccca

SEQ ID NO: 1177050 - DNA, 15 bp, Homo sapiens
agggcatggagcccc

SEQ ID NO: 1177051 - DNA, 15 bp, Homo sapiens
cagggcatggagccc

SEQ ID NO: 1177052 - DNA, 15 bp, Homo sapiens
gcagggcatggagcc

SEQ ID NO: 1177053 - DNA, 15 bp, Homo sapiens
agcagggcatggagc

SEQ ID NO: 1177054 - DNA, 15 bp, Homo sapiens
aagcagggcatggag

SEQ ID NO: 1177055 - DNA, 15 bp, Homo sapiens
aaagcagggcatgga

SEQ ID NO: 1177056 - DNA, 15 bp, Homo sapiens
gaaagcagggcatgg

SEQ ID NO: 1177057 - DNA, 15 bp, Homo sapiens
tgaaagcagggcatg

SEQ ID NO: 1177058 - DNA, 15 bp, Homo sapiens
gtgaaagcagggcat

SEQ ID NO: 1177059 - DNA, 15 bp, Homo sapiens
cgtgaaagcagggca

SEQ ID NO: 1177060 - DNA, 15 bp, Homo sapiens
ccgtgaaagcagggc

SEQ ID NO: 1177061 - DNA, 15 bp, Homo sapiens
tccgtgaaagcaggg

SEQ ID NO: 1177062 - DNA, 15 bp, Homo sapiens
ctccgtgaaagcagg

SEQ ID NO: 1177063 - DNA, 15 bp, Homo sapiens
gctccgtgaaagcag

SEQ ID NO: 1177064 - DNA, 15 bp, Homo sapiens
tgctccgtgaaagca

SEQ ID NO: 1177065 - DNA, 15 bp, Homo sapiens
atgctccgtgaaagc

SEQ ID NO: 1177066 - DNA, 15 bp, Homo sapiens
tatgctccgtgaaag

SEQ ID NO: 1177067 - DNA, 15 bp, Homo sapiens
ttatgctccgtgaaa

SEQ ID NO: 1177068 - DNA, 15 bp, Homo sapiens
attatgctccgtgaa

SEQ ID NO: 1177069 - DNA, 15 bp, Homo sapiens
tattatgctccgtga

SEQ ID NO: 1177070 - DNA, 15 bp, Homo sapiens
ttattatgctccgtg

SEQ ID NO: 1177071 - DNA, 15 bp, Homo sapiens
tttattatgctccgt

SEQ ID NO: 1177072 - DNA, 15 bp, Homo sapiens
ttttattatgctccg

SEQ ID NO: 1177073 - DNA, 15 bp, Homo sapiens
gttttattatgctcc

SEQ ID NO: 1177074 - DNA, 15 bp, Homo sapiens
agttttattatgctc

SEQ ID NO: 1177075 - DNA, 15 bp, Homo sapiens
aagttttattatgct

SEQ ID NO: 1177076 - DNA, 15 bp, Homo sapiens
gaagttttattatgc

SEQ ID NO: 1177077 - DNA, 15 bp, Homo sapiens
ggaagttttattatg

SEQ ID NO: 1177078 - DNA, 15 bp, Homo sapiens
aggaagttttattat

SEQ ID NO: 1177079 - DNA, 15 bp, Homo sapiens
aaggaagttttatta

SEQ ID NO: 1177080 - DNA, 15 bp, Homo sapiens
taaggaagttttatt

SEQ ID NO: 1177081 - DNA, 15 bp, Homo sapiens
ttaaggaagttttat

SEQ ID NO: 1177082 - DNA, 15 bp, Homo sapiens
attaaggaagtttta

SEQ ID NO: 1177083 - DNA, 15 bp, Homo sapiens
gattaaggaagtttt

SEQ ID NO: 1177084 - DNA, 15 bp, Homo sapiens
tgattaaggaagttt

SEQ ID NO: 1177085 - DNA, 15 bp, Homo sapiens
ctgattaaggaagtt

SEQ ID NO: 1177086 - DNA, 15 bp, Homo sapiens
gctgattaaggaagt

SEQ ID NO: 1177087 - DNA, 15 bp, Homo sapiens
ggctgattaaggaag

SEQ ID NO: 1177088 - DNA, 15 bp, Homo sapiens
gggctgattaaggaa

SEQ ID NO: 1177089 - DNA, 15 bp, Homo sapiens
tgggctgattaagga

SEQ ID NO: 1177090 - DNA, 15 bp, Homo sapiens
gtgggctgattaagg

SEQ ID NO: 1177091 - DNA, 15 bp, Homo sapiens
tgtgggctgattaag

SEQ ID NO: 1177092 - DNA, 15 bp, Homo sapiens
atgtgggctgattaa

SEQ ID NO: 1177093 - DNA, 15 bp, Homo sapiens
catgtgggctgatta

SEQ ID NO: 1177094 - DNA, 15 bp, Homo sapiens
tcatgtgggctgatt

SEQ ID NO: 1177095 - DNA, 15 bp, Homo sapiens
ttcatgtgggctgat

SEQ ID NO: 1177096 - DNA, 15 bp, Homo sapiens
cttcatgtgggctga

SEQ ID NO: 1177097 - DNA, 15 bp, Homo sapiens
acttcatgtgggctg

SEQ ID NO: 1177098 - DNA, 15 bp, Homo sapiens
tacttcatgtgggct

SEQ ID NO: 1177099 - DNA, 15 bp, Homo sapiens
atacttcatgtgggc

SEQ ID NO: 1177100 - DNA, 15 bp, Homo sapiens
catacttcatgtggg

SEQ ID NO: 1177101 - DNA, 15 bp, Homo sapiens
acatacttcatgtgg

SEQ ID NO: 1177102 - DNA, 15 bp, Homo sapiens
cacatacttcatgtg

SEQ ID NO: 1177103 - DNA, 15 bp, Homo sapiens
tcacatacttcatgt

SEQ ID NO: 1177104 - DNA, 15 bp, Homo sapiens
atcacatacttcatg

SEQ ID NO: 1177105 - DNA, 15 bp, Homo sapiens
catcacatacttcat

SEQ ID NO: 1177106 - DNA, 15 bp, Homo sapiens
gcatcacatacttca

SEQ ID NO: 1177107 - DNA, 15 bp, Homo sapiens
agcatcacatacttc

SEQ ID NO: 1177108 - DNA, 15 bp, Homo sapiens
gagcatcacatactt

SEQ ID NO: 1177109 - DNA, 15 bp, Homo sapiens
agagcatcacatact

SEQ ID NO: 1177110 - DNA, 15 bp, Homo sapiens
cagagcatcacatac

SEQ ID NO: 1177111 - DNA, 15 bp, Homo sapiens
tcagagcatcacata

SEQ ID NO: 1177112 - DNA, 15 bp, Homo sapiens
atcagagcatcacat

SEQ ID NO: 1177113 - DNA, 15 bp, Homo sapiens
catcagagcatcaca

SEQ ID NO: 1177114 - DNA, 15 bp, Homo sapiens
tcatcagagcatcac

SEQ ID NO: 1177115 - DNA, 15 bp, Homo sapiens
ttcatcagagcatca

SEQ ID NO: 1177116 - DNA, 15 bp, Homo sapiens
gttcatcagagcatc

SEQ ID NO: 1177117 - DNA, 15 bp, Homo sapiens
ggttcatcagagcat

SEQ ID NO: 1177118 - DNA, 15 bp, Homo sapiens
aggttcatcagagca

SEQ ID NO: 1177119 - DNA, 15 bp, Homo sapiens
caggttcatcagagc

SEQ ID NO: 1177120 - DNA, 15 bp, Homo sapiens
gcaggttcatcagag

SEQ ID NO: 1177121 - DNA, 15 bp, Homo sapiens
tgcaggttcatcaga

SEQ ID NO: 1177122 - DNA, 15 bp, Homo sapiens
atgcaggttcatcag

SEQ ID NO: 1177123 - DNA, 15 bp, Homo sapiens
aatgcaggttcatca

SEQ ID NO: 1177124 - DNA, 15 bp, Homo sapiens
gaatgcaggttcatc

SEQ ID NO: 1177125 - DNA, 15 bp, Homo sapiens
ggaatgcaggttcat

SEQ ID NO: 1177126 - DNA, 15 bp, Homo sapiens
aggaatgcaggttca

SEQ ID NO: 1177127 - DNA, 15 bp, Homo sapiens
taggaatgcaggttc

SEQ ID NO: 1177128 - DNA, 15 bp, Homo sapiens
ctaggaatgcaggtt

SEQ ID NO: 1177129 - DNA, 15 bp, Homo sapiens
tctaggaatgcaggt

SEQ ID NO: 1177130 - DNA, 15 bp, Homo sapiens
ctctaggaatgcagg

SEQ ID NO: 1177131 - DNA, 15 bp, Homo sapiens
tctctaggaatgcag

SEQ ID NO: 1177132 - DNA, 15 bp, Homo sapiens
ctctctaggaatgca

SEQ ID NO: 1177133 - DNA, 15 bp, Homo sapiens
actctctaggaatgc

SEQ ID NO: 1177134 - DNA, 15 bp, Homo sapiens
aactctctaggaatg

SEQ ID NO: 1177135 - DNA, 15 bp, Homo sapiens
gaactctctaggaat

SEQ ID NO: 1177136 - DNA, 15 bp, Homo sapiens
tgaactctctaggaa

SEQ ID NO: 1177137 - DNA, 15 bp, Homo sapiens
gtgaactctctagga

SEQ ID NO: 1177138 - DNA, 15 bp, Homo sapiens
agtgaactctctagg

SEQ ID NO: 1177139 - DNA, 15 bp, Homo sapiens
cagtgaactctctag

SEQ ID NO: 1177140 - DNA, 15 bp, Homo sapiens
gcagtgaactctcta

SEQ ID NO: 1177141 - DNA, 15 bp, Homo sapiens
agcagtgaactctct

SEQ ID NO: 1177142 - DNA, 15 bp, Homo sapiens
gagcagtgaactctc

SEQ ID NO: 1177143 - DNA, 15 bp, Homo sapiens
ggagcagtgaactct

SEQ ID NO: 1177144 - DNA, 15 bp, Homo sapiens
gggagcagtgaactc

SEQ ID NO: 1177145 - DNA, 15 bp, Homo sapiens
ggggagcagtgaact

SEQ ID NO: 1177146 - DNA, 15 bp, Homo sapiens
tggggagcagtgaac

SEQ ID NO: 1177147 - DNA, 15 bp, Homo sapiens
ctggggagcagtgaa

SEQ ID NO: 1177148 - DNA, 15 bp, Homo sapiens
tctggggagcagtga

SEQ ID NO: 1177149 - DNA, 15 bp, Homo sapiens
ttctggggagcagtg

SEQ ID NO: 1177150 - DNA, 15 bp, Homo sapiens
tttctggggagcagt

SEQ ID NO: 1177151 - DNA, 15 bp, Homo sapiens
gtttctggggagcag

SEQ ID NO: 1177152 - DNA, 15 bp, Homo sapiens
tgtttctggggagca

SEQ ID NO: 1177153 - DNA, 15 bp, Homo sapiens
ttgtttctggggagc

SEQ ID NO: 1177154 - DNA, 15 bp, Homo sapiens
cttgtttctggggag

SEQ ID NO: 1177155 - DNA, 15 bp, Homo sapiens
tcttgtttctgggga

SEQ ID NO: 1177156 - DNA, 15 bp, Homo sapiens
atcttgtttctgggg

SEQ ID NO: 1177157 - DNA, 15 bp, Homo sapiens
gatcttgtttctggg

SEQ ID NO: 1177158 - DNA, 15 bp, Homo sapiens
agatcttgtttctgg

SEQ ID NO: 1177159 - DNA, 15 bp, Homo sapiens
aagatcttgtttctg

SEQ ID NO: 1177160 - DNA, 15 bp, Homo sapiens
caagatcttgtttct

SEQ ID NO: 1177161 - DNA, 15 bp, Homo sapiens
gcaagatcttgtttc

SEQ ID NO: 1177162 - DNA, 15 bp, Homo sapiens
ggcaagatcttgttt

SEQ ID NO: 1177163 - DNA, 15 bp, Homo sapiens
aggcaagatcttgtt

SEQ ID NO: 1177164 - DNA, 15 bp, Homo sapiens
gaggcaagatcttgt

SEQ ID NO: 1177165 - DNA, 15 bp, Homo sapiens
tgaggcaagatcttg

SEQ ID NO: 1177166 - DNA, 15 bp, Homo sapiens
ttgaggcaagatctt

SEQ ID NO: 1177167 - DNA, 15 bp, Homo sapiens
gttgaggcaagatct

SEQ ID NO: 1177168 - DNA, 15 bp, Homo sapiens
agttgaggcaagatc

SEQ ID NO: 1177169 - DNA, 15 bp, Homo sapiens
gagttgaggcaagat

SEQ ID NO: 1177170 - DNA, 15 bp, Homo sapiens
agagttgaggcaaga

SEQ ID NO: 1177171 - DNA, 15 bp, Homo sapiens
aagagttgaggcaag

SEQ ID NO: 1177172 - DNA, 15 bp, Homo sapiens
taagagttgaggcaa

SEQ ID NO: 1177173 - DNA, 15 bp, Homo sapiens
gtaagagttgaggca

SEQ ID NO: 1177174 - DNA, 15 bp, Homo sapiens
tgtaagagttgaggc

SEQ ID NO: 1177175 - DNA, 15 bp, Homo sapiens
ctgtaagagttgagg

SEQ ID NO: 1177176 - DNA, 15 bp, Homo sapiens
actgtaagagttgag

SEQ ID NO: 1177177 - DNA, 15 bp, Homo sapiens
cactgtaagagttga

SEQ ID NO: 1177178 - DNA, 15 bp, Homo sapiens
tcactgtaagagttg

SEQ ID NO: 1177179 - DNA, 15 bp, Homo sapiens
ttcactgtaagagtt

SEQ ID NO: 1177180 - DNA, 15 bp, Homo sapiens
tttcactgtaagagt

SEQ ID NO: 1177181 - DNA, 15 bp, Homo sapiens
ttttcactgtaagag

SEQ ID NO: 1177182 - DNA, 15 bp, Homo sapiens
tttttcactgtaaga

SEQ ID NO: 1177183 - DNA, 15 bp, Homo sapiens
atttttcactgtaag

SEQ ID NO: 1177184 - DNA, 15 bp, Homo sapiens
gatttttcactgtaa

SEQ ID NO: 1177185 - DNA, 15 bp, Homo sapiens
agatttttcactgta

SEQ ID NO: 1177186 - DNA, 15 bp, Homo sapiens
aagatttttcactgt

SEQ ID NO: 1177187 - DNA, 15 bp, Homo sapiens
aaagatttttcactg

SEQ ID NO: 1177188 - DNA, 15 bp, Homo sapiens
taaagatttttcact

SEQ ID NO: 1177189 - DNA, 15 bp, Homo sapiens
ataaagatttttcac

SEQ ID NO: 1177190 - DNA, 15 bp, Homo sapiens
gataaagatttttca

SEQ ID NO: 1177191 - DNA, 15 bp, Homo sapiens
tgataaagatttttc

SEQ ID NO: 1177192 - DNA, 15 bp, Homo sapiens
ttgataaagattttt

SEQ ID NO: 1177193 - DNA, 15 bp, Homo sapiens
cttgataaagatttt

SEQ ID NO: 1177194 - DNA, 15 bp, Homo sapiens
acttgataaagattt

SEQ ID NO: 1177195 - DNA, 15 bp, Homo sapiens
cacttgataaagatt

SEQ ID NO: 1177196 - DNA, 15 bp, Homo sapiens
acacttgataaagat

SEQ ID NO: 1177197 - DNA, 15 bp, Homo sapiens
tacacttgataaaga

SEQ ID NO: 1177198 - DNA, 15 bp, Homo sapiens
ttacacttgataaag

SEQ ID NO: 1177199 - DNA, 15 bp, Homo sapiens
attacacttgataaa

SEQ ID NO: 1177200 - DNA, 15 bp, Homo sapiens
gattacacttgataa

SEQ ID NO: 1177201 - DNA, 15 bp, Homo sapiens
tgattacacttgata

SEQ ID NO: 1177202 - DNA, 15 bp, Homo sapiens
atgattacacttgat

SEQ ID NO: 1177203 - DNA, 15 bp, Homo sapiens
aatgattacacttga

SEQ ID NO: 1177204 - DNA, 15 bp, Homo sapiens
taatgattacacttg

SEQ ID NO: 1177205 - DNA, 15 bp, Homo sapiens
ttaatgattacactt

SEQ ID NO: 1177206 - DNA, 15 bp, Homo sapiens
tttaatgattacact

SEQ ID NO: 1177207 - DNA, 15 bp, Homo sapiens
ttttaatgattacac

SEQ ID NO: 1177208 - DNA, 15 bp, Homo sapiens
attttaatgattaca

SEQ ID NO: 1177209 - DNA, 15 bp, Homo sapiens
gattttaatgattac

SEQ ID NO: 1177210 - DNA, 15 bp, Homo sapiens
agattttaatgatta

SEQ ID NO: 1177211 - DNA, 15 bp, Homo sapiens
tagattttaatgatt

SEQ ID NO: 1177212 - DNA, 15 bp, Homo sapiens
gtagattttaatgat

SEQ ID NO: 1177213 - DNA, 15 bp, Homo sapiens
ggtagattttaatga

SEQ ID NO: 1177214 - DNA, 15 bp, Homo sapiens
aggtagattttaatg

SEQ ID NO: 1177215 - DNA, 15 bp, Homo sapiens
gaggtagattttaat

SEQ ID NO: 1177216 - DNA, 15 bp, Homo sapiens
ggaggtagattttaa

SEQ ID NO: 1177217 - DNA, 15 bp, Homo sapiens
gggaggtagatttta

SEQ ID NO: 1177218 - DNA, 15 bp, Homo sapiens
tgggaggtagatttt

SEQ ID NO: 1177219 - DNA, 15 bp, Homo sapiens
ttgggaggtagattt

SEQ ID NO: 1177220 - DNA, 15 bp, Homo sapiens
tttgggaggtagatt

SEQ ID NO: 1177221 - DNA, 15 bp, Homo sapiens
ctttgggaggtagat

SEQ ID NO: 1177222 - DNA, 15 bp, Homo sapiens
actttgggaggtaga

SEQ ID NO: 1177223 - DNA, 15 bp, Homo sapiens
tactttgggaggtag

SEQ ID NO: 1177224 - DNA, 15 bp, Homo sapiens
atactttgggaggta

SEQ ID NO: 1177225 - DNA, 15 bp, Homo sapiens
tatactttgggaggt

SEQ ID NO: 1177226 - DNA, 15 bp, Homo sapiens
ttatactttgggagg

SEQ ID NO: 1177227 - DNA, 15 bp, Homo sapiens
tttatactttgggag

SEQ ID NO: 1177228 - DNA, 15 bp, Homo sapiens
gtttatactttggga

SEQ ID NO: 1177229 - DNA, 15 bp, Homo sapiens
tgtttatactttggg

SEQ ID NO: 1177230 - DNA, 15 bp, Homo sapiens
gtgtttatactttgg

SEQ ID NO: 1177231 - DNA, 15 bp, Homo sapiens
agtgtttatactttg

SEQ ID NO: 1177232 - DNA, 15 bp, Homo sapiens
cagtgtttatacttt

SEQ ID NO: 1177233 - DNA, 15 bp, Homo sapiens
gcagtgtttatactt

SEQ ID NO: 1177234 - DNA, 15 bp, Homo sapiens
tgcagtgtttatact

SEQ ID NO: 1177235 - DNA, 15 bp, Homo sapiens
ttgcagtgtttatac

SEQ ID NO: 1177236 - DNA, 15 bp, Homo sapiens
attgcagtgtttata

SEQ ID NO: 1177237 - DNA, 15 bp, Homo sapiens
aattgcagtgtttat

SEQ ID NO: 1177238 - DNA, 15 bp, Homo sapiens
taattgcagtgttta

SEQ ID NO: 1177239 - DNA, 15 bp, Homo sapiens
ttaattgcagtgttt

SEQ ID NO: 1177240 - DNA, 15 bp, Homo sapiens
cttaattgcagtgtt

SEQ ID NO: 1177241 - DNA, 15 bp, Homo sapiens
gcttaattgcagtgt

SEQ ID NO: 1177242 - DNA, 15 bp, Homo sapiens
agcttaattgcagtg

SEQ ID NO: 1177243 - DNA, 15 bp, Homo sapiens
aagcttaattgcagt

SEQ ID NO: 1177244 - DNA, 15 bp, Homo sapiens
aaagcttaattgcag

SEQ ID NO: 1177245 - DNA, 15 bp, Homo sapiens
taaagcttaattgca

SEQ ID NO: 1177246 - DNA, 15 bp, Homo sapiens
gtaaagcttaattgc

SEQ ID NO: 1177247 - DNA, 15 bp, Homo sapiens
tgtaaagcttaattg

SEQ ID NO: 1177248 - DNA, 15 bp, Homo sapiens
ttgtaaagcttaatt

SEQ ID NO: 1177249 - DNA, 15 bp, Homo sapiens
tttgtaaagcttaat

SEQ ID NO: 1177250 - DNA, 15 bp, Homo sapiens
atttgtaaagcttaa

SEQ ID NO: 1177251 - DNA, 15 bp, Homo sapiens
catttgtaaagctta

SEQ ID NO: 1177252 - DNA, 15 bp, Homo sapiens
ccatttgtaaagctt

SEQ ID NO: 1177253 - DNA, 15 bp, Homo sapiens
tccatttgtaaagct

SEQ ID NO: 1177254 - DNA, 15 bp, Homo sapiens
ttccatttgtaaagc

SEQ ID NO: 1177255 - DNA, 15 bp, Homo sapiens
attccatttgtaaag

SEQ ID NO: 1177256 - DNA, 15 bp, Homo sapiens
tattccatttgtaaa

SEQ ID NO: 1177257 - DNA, 15 bp, Homo sapiens
atattccatttgtaa

SEQ ID NO: 1177258 - DNA, 15 bp, Homo sapiens
gatattccatttgta

SEQ ID NO: 1177259 - DNA, 15 bp, Homo sapiens
agatattccatttgt

SEQ ID NO: 1177260 - DNA, 15 bp, Homo sapiens
cagatattccatttg

SEQ ID NO: 1177261 - DNA, 15 bp, Homo sapiens
ccagatattccattt

SEQ ID NO: 1177262 - DNA, 15 bp, Homo sapiens
tccagatattccatt

SEQ ID NO: 1177263 - DNA, 15 bp, Homo sapiens
ttccagatattccat

SEQ ID NO: 1177264 - DNA, 15 bp, Homo sapiens
tttccagatattcca

SEQ ID NO: 1177265 - DNA, 15 bp, Homo sapiens
ctttccagatattcc

SEQ ID NO: 1177266 - DNA, 15 bp, Homo sapiens
cctttccagatattc

SEQ ID NO: 1177267 - DNA, 15 bp, Homo sapiens
acctttccagatatt

SEQ ID NO: 1177268 - DNA, 15 bp, Homo sapiens
cacctttccagatat

SEQ ID NO: 1177269 - DNA, 15 bp, Homo sapiens
tcacctttccagata

SEQ ID NO: 1177270 - DNA, 15 bp, Homo sapiens
ttcacctttccagat

SEQ ID NO: 1177271 - DNA, 15 bp, Homo sapiens
attcacctttccaga

SEQ ID NO: 1177272 - DNA, 15 bp, Homo sapiens
tattcacctttccag

SEQ ID NO: 1177273 - DNA, 15 bp, Homo sapiens
ctattcacctttcca

SEQ ID NO: 1177274 - DNA, 15 bp, Homo sapiens
tctattcacctttcc

SEQ ID NO: 1177275 - DNA, 15 bp, Homo sapiens
atctattcacctttc

SEQ ID NO: 1177276 - DNA, 15 bp, Homo sapiens
catctattcaccttt

SEQ ID NO: 1177277 - DNA, 15 bp, Homo sapiens
tcatctattcacctt

SEQ ID NO: 1177278 - DNA, 15 bp, Homo sapiens
atcatctattcacct

SEQ ID NO: 1177279 - DNA, 15 bp, Homo sapiens
gatcatctattcacc

SEQ ID NO: 1177280 - DNA, 15 bp, Homo sapiens
tgatcatctattcac

SEQ ID NO: 1177281 - DNA, 15 bp, Homo sapiens
ttgatcatctattca

SEQ ID NO: 1177282 - DNA, 15 bp, Homo sapiens
attgatcatctattc

SEQ ID NO: 1177283 - DNA, 15 bp, Homo sapiens
tattgatcatctatt

SEQ ID NO: 1177284 - DNA, 15 bp, Homo sapiens
ctattgatcatctat

SEQ ID NO: 1177285 - DNA, 15 bp, Homo sapiens
cctattgatcatcta

SEQ ID NO: 1177286 - DNA, 15 bp, Homo sapiens
acctattgatcatct

SEQ ID NO: 1177287 - DNA, 15 bp, Homo sapiens
tacctattgatcatc

SEQ ID NO: 1177288 - DNA, 15 bp, Homo sapiens
gtacctattgatcat

SEQ ID NO: 1177289 - DNA, 15 bp, Homo sapiens
ggtacctattgatca

SEQ ID NO: 1177290 - DNA, 15 bp, Homo sapiens
aggtacctattgatc

SEQ ID NO: 1177291 - DNA, 15 bp, Homo sapiens
gaggtacctattgat

SEQ ID NO: 1177292 - DNA, 15 bp, Homo sapiens
tgaggtacctattga

SEQ ID NO: 1177293 - DNA, 15 bp, Homo sapiens
ctgaggtacctattg

SEQ ID NO: 1177294 - DNA, 15 bp, Homo sapiens
actgaggtacctatt

SEQ ID NO: 1177295 - DNA, 15 bp, Homo sapiens
aactgaggtacctat

SEQ ID NO: 1177296 - DNA, 15 bp, Homo sapiens
gaactgaggtaccta

SEQ ID NO: 1177297 - DNA, 15 bp, Homo sapiens
agaactgaggtacct

SEQ ID NO: 1177298 - DNA, 15 bp, Homo sapiens
aagaactgaggtacc

SEQ ID NO: 1177299 - DNA, 15 bp, Homo sapiens
taagaactgaggtac

SEQ ID NO: 1177300 - DNA, 15 bp, Homo sapiens
gtaagaactgaggta

SEQ ID NO: 1177301 - DNA, 15 bp, Homo sapiens
ggtaagaactgaggt

SEQ ID NO: 1177302 - DNA, 15 bp, Homo sapiens
gggtaagaactgagg

SEQ ID NO: 1177303 - DNA, 15 bp, Homo sapiens
tgggtaagaactgag

SEQ ID NO: 1177304 - DNA, 15 bp, Homo sapiens
ctgggtaagaactga

SEQ ID NO: 1177305 - DNA, 15 bp, Homo sapiens
cctgggtaagaactg

SEQ ID NO: 1177306 - DNA, 15 bp, Homo sapiens
gcctgggtaagaact

SEQ ID NO: 1177307 - DNA, 15 bp, Homo sapiens
ggcctgggtaagaac

SEQ ID NO: 1177308 - DNA, 15 bp, Homo sapiens
aggcctgggtaagaa

SEQ ID NO: 1177309 - DNA, 15 bp, Homo sapiens
caggcctgggtaaga

SEQ ID NO: 1177310 - DNA, 15 bp, Homo sapiens
gcaggcctgggtaag

SEQ ID NO: 1177311 - DNA, 15 bp, Homo sapiens
ggcaggcctgggtaa

SEQ ID NO: 1177312 - DNA, 15 bp, Homo sapiens
aggcaggcctgggta

SEQ ID NO: 1177313 - DNA, 15 bp, Homo sapiens
gaggcaggcctgggt

SEQ ID NO: 1177314 - DNA, 15 bp, Homo sapiens
agaggcaggcctggg

SEQ ID NO: 1177315 - DNA, 15 bp, Homo sapiens
aagaggcaggcctgg

SEQ ID NO: 1177316 - DNA, 15 bp, Homo sapiens
caagaggcaggcctg

SEQ ID NO: 1177317 - DNA, 15 bp, Homo sapiens
acaagaggcaggcct

SEQ ID NO: 1177318 - DNA, 15 bp, Homo sapiens
cacaagaggcaggcc

SEQ ID NO: 1177319 - DNA, 15 bp, Homo sapiens
ccacaagaggcaggc

SEQ ID NO: 1177320 - DNA, 15 bp, Homo sapiens
cccacaagaggcagg

SEQ ID NO: 1177321 - DNA, 15 bp, Homo sapiens
gcccacaagaggcag

SEQ ID NO: 1177322 - DNA, 15 bp, Homo sapiens
ggcccacaagaggca

SEQ ID NO: 1177323 - DNA, 15 bp, Homo sapiens
aggcccacaagaggc

SEQ ID NO: 1177324 - DNA, 15 bp, Homo sapiens
taggcccacaagagg

SEQ ID NO: 1177325 - DNA, 15 bp, Homo sapiens
ctaggcccacaagag

SEQ ID NO: 1177326 - DNA, 15 bp, Homo sapiens
cctaggcccacaaga

SEQ ID NO: 1177327 - DNA, 15 bp, Homo sapiens
gcctaggcccacaag

SEQ ID NO: 1177328 - DNA, 15 bp, Homo sapiens
agcctaggcccacaa

SEQ ID NO: 1177329 - DNA, 15 bp, Homo sapiens
gagcctaggcccaca

SEQ ID NO: 1177330 - DNA, 15 bp, Homo sapiens
agagcctaggcccac

SEQ ID NO: 1177331 - DNA, 15 bp, Homo sapiens
cagagcctaggccca

SEQ ID NO: 1177332 - DNA, 15 bp, Homo sapiens
tcagagcctaggccc

SEQ ID NO: 1177333 - DNA, 15 bp, Homo sapiens
atcagagcctaggcc

SEQ ID NO: 1177334 - DNA, 15 bp, Homo sapiens
catcagagcctaggc

SEQ ID NO: 1177335 - DNA, 15 bp, Homo sapiens
acatcagagcctagg

SEQ ID NO: 1177336 - DNA, 15 bp, Homo sapiens
tacatcagagcctag

SEQ ID NO: 1177337 - DNA, 15 bp, Homo sapiens
ttacatcagagccta

SEQ ID NO: 1177338 - DNA, 15 bp, Homo sapiens
gttacatcagagcct

SEQ ID NO: 1177339 - DNA, 15 bp, Homo sapiens
ggttacatcagagcc

SEQ ID NO: 1177340 - DNA, 15 bp, Homo sapiens
gggttacatcagagc

SEQ ID NO: 1177341 - DNA, 15 bp, Homo sapiens
tgggttacatcagag

SEQ ID NO: 1177342 - DNA, 15 bp, Homo sapiens
gtgggttacatcaga

SEQ ID NO: 1177343 - DNA, 15 bp, Homo sapiens
cgtgggttacatcag

SEQ ID NO: 1177344 - DNA, 15 bp, Homo sapiens
acgtgggttacatca

SEQ ID NO: 1177345 - DNA, 15 bp, Homo sapiens
gacgtgggttacatc

SEQ ID NO: 1177346 - DNA, 15 bp, Homo sapiens
agacgtgggttacat

SEQ ID NO: 1177347 - DNA, 15 bp, Homo sapiens
cagacgtgggttaca

SEQ ID NO: 1177348 - DNA, 15 bp, Homo sapiens
gcagacgtgggttac

SEQ ID NO: 1177349 - DNA, 15 bp, Homo sapiens
agcagacgtgggtta

SEQ ID NO: 1177350 - DNA, 15 bp, Homo sapiens
tagcagacgtgggtt

SEQ ID NO: 1177351 - DNA, 15 bp, Homo sapiens
atagcagacgtgggt

SEQ ID NO: 1177352 - DNA, 15 bp, Homo sapiens
aatagcagacgtggg

SEQ ID NO: 1177353 - DNA, 15 bp, Homo sapiens
taatagcagacgtgg

SEQ ID NO: 1177354 - DNA, 15 bp, Homo sapiens
gtaatagcagacgtg

SEQ ID NO: 1177355 - DNA, 15 bp, Homo sapiens
tgtaatagcagacgt

SEQ ID NO: 1177356 - DNA, 15 bp, Homo sapiens
atgtaatagcagacg

SEQ ID NO: 1177357 - DNA, 15 bp, Homo sapiens
tatgtaatagcagac

SEQ ID NO: 1177358 - DNA, 15 bp, Homo sapiens
atatgtaatagcaga

SEQ ID NO: 1177359 - DNA, 15 bp, Homo sapiens
aatatgtaatagcag

SEQ ID NO: 1177360 - DNA, 15 bp, Homo sapiens
aaatatgtaatagca

SEQ ID NO: 1177361 - DNA, 15 bp, Homo sapiens
taaatatgtaatagc

SEQ ID NO: 1177362 - DNA, 15 bp, Homo sapiens
gtaaatatgtaatag

SEQ ID NO: 1177363 - DNA, 15 bp, Homo sapiens
ggtaaatatgtaata

SEQ ID NO: 1177364 - DNA, 15 bp, Homo sapiens
caaggtaaatatgta

SEQ ID NO: 1177365 - DNA, 15 bp, Homo sapiens
tcaaggtaaatatgt

SEQ ID NO: 1177366 - DNA, 15 bp, Homo sapiens
ctcaaggtaaatatg

SEQ ID NO: 1177367 - DNA, 15 bp, Homo sapiens
cctcaaggtaaatat

SEQ ID NO: 1177368 - DNA, 15 bp, Homo sapiens
gcctcaaggtaaata

SEQ ID NO: 1177369 - DNA, 15 bp, Homo sapiens
tgcctcaaggtaaat

SEQ ID NO: 1177370 - DNA, 15 bp, Homo sapiens
gtgcctcaaggtaaa

SEQ ID NO: 1177371 - DNA, 15 bp, Homo sapiens
agtgcctcaaggtaa

SEQ ID NO: 1177372 - DNA, 15 bp, Homo sapiens
cagtgcctcaaggta

SEQ ID NO: 1177373 - DNA, 15 bp, Homo sapiens
acagtgcctcaaggt

SEQ ID NO: 1177374 - DNA, 15 bp, Homo sapiens
cacagtgcctcaagg

SEQ ID NO: 1177375 - DNA, 15 bp, Homo sapiens
gcacagtgcctcaag

SEQ ID NO: 1177376 - DNA, 15 bp, Homo sapiens
ggcacagtgcctcaa

SEQ ID NO: 1177377 - DNA, 15 bp, Homo sapiens
tggcacagtgcctca

SEQ ID NO: 1177378 - DNA, 15 bp, Homo sapiens
atggcacagtgcctc

SEQ ID NO: 1177379 - DNA, 15 bp, Homo sapiens
aatggcacagtgcct

SEQ ID NO: 1177380 - DNA, 15 bp, Homo sapiens
gaatggcacagtgcc

SEQ ID NO: 1177381 - DNA, 15 bp, Homo sapiens
ggaatggcacagtgc

SEQ ID NO: 1177382 - DNA, 15 bp, Homo sapiens
gggaatggcacagtg

SEQ ID NO: 1177383 - DNA, 15 bp, Homo sapiens
tgggaatggcacagt

SEQ ID NO: 1177384 - DNA, 15 bp, Homo sapiens
ctgggaatggcacag

SEQ ID NO: 1177385 - DNA, 15 bp, Homo sapiens
tctgggaatggcaca

SEQ ID NO: 1177386 - DNA, 15 bp, Homo sapiens
ctctgggaatggcac

SEQ ID NO: 1177387 - DNA, 15 bp, Homo sapiens
actctgggaatggca

SEQ ID NO: 1177388 - DNA, 15 bp, Homo sapiens
aactctgggaatggc

SEQ ID NO: 1177389 - DNA, 15 bp, Homo sapiens
taactctgggaatgg

SEQ ID NO: 1177390 - DNA, 15 bp, Homo sapiens
ttaactctgggaatg

SEQ ID NO: 1177391 - DNA, 15 bp, Homo sapiens
attaactctgggaat

SEQ ID NO: 1177392 - DNA, 15 bp, Homo sapiens
gattaactctgggaa

SEQ ID NO: 1177393 - DNA, 15 bp, Homo sapiens
tgattaactctggga

SEQ ID NO: 1177394 - DNA, 15 bp, Homo sapiens
gtgattaactctggg

SEQ ID NO: 1177395 - DNA, 15 bp, Homo sapiens
tgtgattaactctgg

SEQ ID NO: 1177396 - DNA, 15 bp, Homo sapiens
ctgtgattaactctg

SEQ ID NO: 1177397 - DNA, 15 bp, Homo sapiens
tctgtgattaactct

SEQ ID NO: 1177398 - DNA, 15 bp, Homo sapiens
gtctgtgattaactc

SEQ ID NO: 1177399 - DNA, 15 bp, Homo sapiens
agtctgtgattaact

SEQ ID NO: 1177400 - DNA, 15 bp, Homo sapiens
aagtctgtgattaac

SEQ ID NO: 1177401 - DNA, 15 bp, Homo sapiens
taagtctgtgattaa

SEQ ID NO: 1177402 - DNA, 15 bp, Homo sapiens
ctaagtctgtgatta

SEQ ID NO: 1177403 - DNA, 15 bp, Homo sapiens
actaagtctgtgatt

SEQ ID NO: 1177404 - DNA, 15 bp, Homo sapiens
aactaagtctgtgat

SEQ ID NO: 1177405 - DNA, 15 bp, Homo sapiens
taactaagtctgtga

SEQ ID NO: 1177406 - DNA, 15 bp, Homo sapiens
gtaactaagtctgtg

SEQ ID NO: 1177407 - DNA, 15 bp, Homo sapiens
tgtaactaagtctgt

SEQ ID NO: 1177408 - DNA, 15 bp, Homo sapiens
gtgtaactaagtctg

SEQ ID NO: 1177409 - DNA, 15 bp, Homo sapiens
tgtgtaactaagtct

SEQ ID NO: 1177410 - DNA, 15 bp, Homo sapiens
gtgtgtaactaagtc

SEQ ID NO: 1177411 - DNA, 15 bp, Homo sapiens
tgtgtgtaactaagt

SEQ ID NO: 1177412 - DNA, 15 bp, Homo sapiens
ttgtgtgtaactaag

SEQ ID NO: 1177413 - DNA, 15 bp, Homo sapiens
tttgtgtgtaactaa

SEQ ID NO: 1177414 - DNA, 15 bp, Homo sapiens
atttgtgtgtaacta

SEQ ID NO: 1177415 - DNA, 15 bp, Homo sapiens
gatttgtgtgtaact

SEQ ID NO: 1177416 - DNA, 15 bp, Homo sapiens
agatttgtgtgtaac

SEQ ID NO: 1177417 - DNA, 15 bp, Homo sapiens
aagatttgtgtgtaa

SEQ ID NO: 1177418 - DNA, 15 bp, Homo sapiens
aaagatttgtgtgta

SEQ ID NO: 1177419 - DNA, 15 bp, Homo sapiens
caaagatttgtgtgt

SEQ ID NO: 1177420 - DNA, 15 bp, Homo sapiens
acaaagatttgtgtg

SEQ ID NO: 1177421 - DNA, 15 bp, Homo sapiens
cacaaagatttgtgt

SEQ ID NO: 1177422 - DNA, 15 bp, Homo sapiens
acacaaagatttgtg

SEQ ID NO: 1177423 - DNA, 15 bp, Homo sapiens
tacacaaagatttgt

SEQ ID NO: 1177424 - DNA, 15 bp, Homo sapiens
gtacacaaagatttg

SEQ ID NO: 1177425 - DNA, 15 bp, Homo sapiens
tgtacacaaagattt

SEQ ID NO: 1177426 - DNA, 15 bp, Homo sapiens
ttgtacacaaagatt

SEQ ID NO: 1177427 - DNA, 15 bp, Homo sapiens
cttgtacacaaagat

SEQ ID NO: 1177428 - DNA, 15 bp, Homo sapiens
ccttgtacacaaaga

SEQ ID NO: 1177429 - DNA, 15 bp, Homo sapiens
cccttgtacacaaag

SEQ ID NO: 1177430 - DNA, 15 bp, Homo sapiens
tcccttgtacacaaa

SEQ ID NO: 1177431 - DNA, 15 bp, Homo sapiens
ttcccttgtacacaa

SEQ ID NO: 1177432 - DNA, 15 bp, Homo sapiens
gttcccttgtacaca

SEQ ID NO: 1177433 - DNA, 15 bp, Homo sapiens
tgttcccttgtacac

SEQ ID NO: 1177434 - DNA, 15 bp, Homo sapiens
atgttcccttgtaca

SEQ ID NO: 1177435 - DNA, 15 bp, Homo sapiens
catgttcccttgtac

SEQ ID NO: 1177436 - DNA, 15 bp, Homo sapiens
tcatgttcccttgta

SEQ ID NO: 1177437 - DNA, 15 bp, Homo sapiens
ctcatgttcccttgt

SEQ ID NO: 1177438 - DNA, 15 bp, Homo sapiens
cctcatgttcccttg

SEQ ID NO: 1177439 - DNA, 15 bp, Homo sapiens
tcctcatgttccctt

SEQ ID NO: 1177440 - DNA, 15 bp, Homo sapiens
ttcctcatgttccct

SEQ ID NO: 1177441 - DNA, 15 bp, Homo sapiens
tttcctcatgttccc

SEQ ID NO: 1177442 - DNA, 15 bp, Homo sapiens
atttcctcatgttcc

SEQ ID NO: 1177443 - DNA, 15 bp, Homo sapiens
aatttcctcatgttc

SEQ ID NO: 1177444 - DNA, 15 bp, Homo sapiens
taatttcctcatgtt

SEQ ID NO: 1177445 - DNA, 15 bp, Homo sapiens
ttaatttcctcatgt

SEQ ID NO: 1177446 - DNA, 15 bp, Homo sapiens
cttaatttcctcatg

SEQ ID NO: 1177447 - DNA, 15 bp, Homo sapiens
tcttaatttcctcat

SEQ ID NO: 1177448 - DNA, 15 bp, Homo sapiens
gtcttaatttcctca

SEQ ID NO: 1177449 - DNA, 15 bp, Homo sapiens
agtcttaatttcctc

SEQ ID NO: 1177450 - DNA, 15 bp, Homo sapiens
cagtcttaatttcct

SEQ ID NO: 1177451 - DNA, 15 bp, Homo sapiens
acagtcttaatttcc

SEQ ID NO: 1177452 - DNA, 15 bp, Homo sapiens
aacagtcttaatttc

SEQ ID NO: 1177453 - DNA, 15 bp, Homo sapiens
aaacagtcttaattt

SEQ ID NO: 1177454 - DNA, 15 bp, Homo sapiens
aaaacagtcttaatt

SEQ ID NO: 1177455 - DNA, 15 bp, Homo sapiens
gaaaacagtcttaat

SEQ ID NO: 1177456 - DNA, 15 bp, Homo sapiens
tgaaaacagtcttaa

SEQ ID NO: 1177457 - DNA, 15 bp, Homo sapiens
ttgaaaacagtctta

SEQ ID NO: 1177458 - DNA, 15 bp, Homo sapiens
cttgaaaacagtctt

SEQ ID NO: 1177459 - DNA, 15 bp, Homo sapiens
acttgaaaacagtct

SEQ ID NO: 1177460 - DNA, 15 bp, Homo sapiens
gacttgaaaacagtc

SEQ ID NO: 1177461 - DNA, 15 bp, Homo sapiens
tgacttgaaaacagt

SEQ ID NO: 1177462 - DNA, 15 bp, Homo sapiens
atgacttgaaaacag

SEQ ID NO: 1177463 - DNA, 15 bp, Homo sapiens
gatgacttgaaaaca

SEQ ID NO: 1177464 - DNA, 15 bp, Homo sapiens
ggatgacttgaaaac

SEQ ID NO: 1177465 - DNA, 15 bp, Homo sapiens
tggatgacttgaaaa

SEQ ID NO: 1177466 - DNA, 15 bp, Homo sapiens
ttggatgacttgaaa

SEQ ID NO: 1177467 - DNA, 15 bp, Homo sapiens
gttggatgacttgaa

SEQ ID NO: 1177468 - DNA, 15 bp, Homo sapiens
agttggatgacttga

SEQ ID NO: 1177469 - DNA, 15 bp, Homo sapiens
cagttggatgacttg

SEQ ID NO: 1177470 - DNA, 15 bp, Homo sapiens
acagttggatgactt

SEQ ID NO: 1177471 - DNA, 15 bp, Homo sapiens
cacagttggatgact

SEQ ID NO: 1177472 - DNA, 15 bp, Homo sapiens
acacagttggatgac

SEQ ID NO: 1177473 - DNA, 15 bp, Homo sapiens
cacacagttggatga

SEQ ID NO: 1177474 - DNA, 15 bp, Homo sapiens
tcacacagttggatg

SEQ ID NO: 1177475 - DNA, 15 bp, Homo sapiens
ttcacacagttggat

SEQ ID NO: 1177476 - DNA, 15 bp, Homo sapiens
cttcacacagttgga

SEQ ID NO: 1177477 - DNA, 15 bp, Homo sapiens
ccttcacacagttgg

SEQ ID NO: 1177478 - DNA, 15 bp, Homo sapiens
tccttcacacagttg

SEQ ID NO: 1177479 - DNA, 15 bp, Homo sapiens
ctccttcacacagtt

SEQ ID NO: 1177480 - DNA, 15 bp, Homo sapiens
cctccttcacacagt

SEQ ID NO: 1177481 - DNA, 15 bp, Homo sapiens
gcctccttcacacag

SEQ ID NO: 1177482 - DNA, 15 bp, Homo sapiens
agcctccttcacaca

SEQ ID NO: 1177483 - DNA, 15 bp, Homo sapiens
tagcctccttcacac

SEQ ID NO: 1177484 - DNA, 15 bp, Homo sapiens
gtagcctccttcaca

SEQ ID NO: 1177485 - DNA, 15 bp, Homo sapiens
agtagcctccttcac

SEQ ID NO: 1177486 - DNA, 15 bp, Homo sapiens
cagtagcctccttca

SEQ ID NO: 1177487 - DNA, 15 bp, Homo sapiens
tcagtagcctccttc

SEQ ID NO: 1177488 - DNA, 15 bp, Homo sapiens
gtcagtagcctcctt

SEQ ID NO: 1177489 - DNA, 15 bp, Homo sapiens
cgtcagtagcctcct

SEQ ID NO: 1177490 - DNA, 15 bp, Homo sapiens
ccgtcagtagcctcc

SEQ ID NO: 1177491 - DNA, 15 bp, Homo sapiens
cccgtcagtagcctc

SEQ ID NO: 1177492 - DNA, 15 bp, Homo sapiens
ccccgtcagtagcct

SEQ ID NO: 1177493 - DNA, 15 bp, Homo sapiens
tccccgtcagtagcc

SEQ ID NO: 1177494 - DNA, 15 bp, Homo sapiens
ctccccgtcagtagc

SEQ ID NO: 1177495 - DNA, 15 bp, Homo sapiens
actccccgtcagtag

SEQ ID NO: 1177496 - DNA, 15 bp, Homo sapiens
cactccccgtcagta

SEQ ID NO: 1177497 - DNA, 15 bp, Homo sapiens
ccactccccgtcagt

SEQ ID NO: 1177498 - DNA, 15 bp, Homo sapiens
cccactccccgtcag

SEQ ID NO: 1177499 - DNA, 15 bp, Homo sapiens
tcccactccccgtca

SEQ ID NO: 1177500 - DNA, 15 bp, Homo sapiens
ctcccactccccgtc

SEQ ID NO: 1177501 - DNA, 15 bp, Homo sapiens
cctcccactccccgt

SEQ ID NO: 1177502 - DNA, 15 bp, Homo sapiens
acctcccactccccg

SEQ ID NO: 1177503 - DNA, 15 bp, Homo sapiens
tacctcccactcccc

SEQ ID NO: 1177504 - DNA, 15 bp, Homo sapiens
ttacctcccactccc

SEQ ID NO: 1177505 - DNA, 15 bp, Homo sapiens
tttacctcccactcc

SEQ ID NO: 1177506 - DNA, 15 bp, Homo sapiens
ttttacctcccactc

SEQ ID NO: 1177507 - DNA, 15 bp, Homo sapiens
cttttacctcccact

SEQ ID NO: 1177508 - DNA, 15 bp, Homo sapiens
ccttttacctcccac

SEQ ID NO: 1177509 - DNA, 15 bp, Homo sapiens
cccttttacctccca

SEQ ID NO: 1177510 - DNA, 15 bp, Homo sapiens
acccttttacctccc

SEQ ID NO: 1177511 - DNA, 15 bp, Homo sapiens
aacccttttacctcc

SEQ ID NO: 1177512 - DNA, 15 bp, Homo sapiens
gaacccttttacctc

SEQ ID NO: 1177513 - DNA, 15 bp, Homo sapiens
ggaacccttttacct

SEQ ID NO: 1177514 - DNA, 15 bp, Homo sapiens
tggaacccttttacc

SEQ ID NO: 1177515 - DNA, 15 bp, Homo sapiens
gtggaacccttttac

SEQ ID NO: 1177516 - DNA, 15 bp, Homo sapiens
tgtggaaccctttta

SEQ ID NO: 1177517 - DNA, 15 bp, Homo sapiens
ctgtggaaccctttt

SEQ ID NO: 1177518 - DNA, 15 bp, Homo sapiens
cctgtggaacccttt

SEQ ID NO: 1177519 - DNA, 15 bp, Homo sapiens
acctgtggaaccctt

SEQ ID NO: 1177520 - DNA, 15 bp, Homo sapiens
tacctgtggaaccct

SEQ ID NO: 1177521 - DNA, 15 bp, Homo sapiens
ctacctgtggaaccc

SEQ ID NO: 1177522 - DNA, 15 bp, Homo sapiens
cctacctgtggaacc

SEQ ID NO: 1177523 - DNA, 15 bp, Homo sapiens
tcctacctgtggaac

SEQ ID NO: 1177524 - DNA, 15 bp, Homo sapiens
gtcctacctgtggaa

SEQ ID NO: 1177525 - DNA, 15 bp, Homo sapiens
agtcctacctgtgga

SEQ ID NO: 1177526 - DNA, 15 bp, Homo sapiens
gagtcctacctgtgg

SEQ ID NO: 1177527 - DNA, 15 bp, Homo sapiens
agagtcctacctgtg

SEQ ID NO: 1177528 - DNA, 15 bp, Homo sapiens
cagagtcctacctgt

SEQ ID NO: 1177529 - DNA, 15 bp, Homo sapiens
tcagagtcctacctg

SEQ ID NO: 1177530 - DNA, 15 bp, Homo sapiens
ccagcagcagttagt

SEQ ID NO: 1177531 - DNA, 15 bp, Homo sapiens
accagcagcagttag

SEQ ID NO: 1177532 - DNA, 15 bp, Homo sapiens
aaccagcagcagtta

SEQ ID NO: 1177533 - DNA, 15 bp, Homo sapiens
aaaccagcagcagtt

SEQ ID NO: 1177534 - DNA, 15 bp, Homo sapiens
taaaccagcagcagt

SEQ ID NO: 1177535 - DNA, 15 bp, Homo sapiens
ataaaccagcagcag

SEQ ID NO: 1177536 - DNA, 15 bp, Homo sapiens
tataaaccagcagca

SEQ ID NO: 1177537 - DNA, 15 bp, Homo sapiens
atataaaccagcagc

SEQ ID NO: 1177538 - DNA, 15 bp, Homo sapiens
tatataaaccagcag

SEQ ID NO: 1177539 - DNA, 15 bp, Homo sapiens
ttatataaaccagca

SEQ ID NO: 1177540 - DNA, 15 bp, Homo sapiens
tttatataaaccagc

SEQ ID NO: 1177541 - DNA, 15 bp, Homo sapiens
atttatataaaccag

SEQ ID NO: 1177542 - DNA, 15 bp, Homo sapiens
tatttatataaacca

SEQ ID NO: 1177543 - DNA, 15 bp, Homo sapiens
ttatttatataaacc

SEQ ID NO: 1177544 - DNA, 15 bp, Homo sapiens
cttatttatataaac

SEQ ID NO: 1177545 - DNA, 15 bp, Homo sapiens
tcttatttatataaa

SEQ ID NO: 1177546 - DNA, 15 bp, Homo sapiens
gtcttatttatataa

SEQ ID NO: 1177547 - DNA, 15 bp, Homo sapiens
tgtcttatttatata

SEQ ID NO: 1177548 - DNA, 15 bp, Homo sapiens
gtgtcttatttatat

SEQ ID NO: 1177549 - DNA, 15 bp, Homo sapiens
tgtgtcttatttata

SEQ ID NO: 1177550 - DNA, 15 bp, Homo sapiens
ttgtgtcttatttat

SEQ ID NO: 1177551 - DNA, 15 bp, Homo sapiens
tttgtgtcttattta

SEQ ID NO: 1177552 - DNA, 15 bp, Homo sapiens
gtttgtgtcttattt

SEQ ID NO: 1177553 - DNA, 15 bp, Homo sapiens
ggtttgtgtcttatt

SEQ ID NO: 1177554 - DNA, 15 bp, Homo sapiens
aggtttgtgtcttat

SEQ ID NO: 1177555 - DNA, 15 bp, Homo sapiens
gaggtttgtgtctta

SEQ ID NO: 1177556 - DNA, 15 bp, Homo sapiens
tgaggtttgtgtctt

SEQ ID NO: 1177557 - DNA, 15 bp, Homo sapiens
atgaggtttgtgtct

SEQ ID NO: 1177558 - DNA, 15 bp, Homo sapiens
gatgaggtttgtgtc

SEQ ID NO: 1177559 - DNA, 15 bp, Homo sapiens
agatgaggtttgtgt

SEQ ID NO: 1177560 - DNA, 15 bp, Homo sapiens
aagatgaggtttgtg

SEQ ID NO: 1177561 - DNA, 15 bp, Homo sapiens
aaagatgaggtttgt

SEQ ID NO: 1177562 - DNA, 15 bp, Homo sapiens
taaagatgaggtttg

SEQ ID NO: 1177563 - DNA, 15 bp, Homo sapiens
ataaagatgaggttt

SEQ ID NO: 1177564 - DNA, 15 bp, Homo sapiens
tataaagatgaggtt

SEQ ID NO: 1177565 - DNA, 15 bp, Homo sapiens
ctataaagatgaggt

SEQ ID NO: 1177566 - DNA, 15 bp, Homo sapiens
tctataaagatgagg

SEQ ID NO: 1177567 - DNA, 15 bp, Homo sapiens
ttctataaagatgag

SEQ ID NO: 1177568 - DNA, 15 bp, Homo sapiens
gttctataaagatga

SEQ ID NO: 1177569 - DNA, 15 bp, Homo sapiens
agttctataaagatg

SEQ ID NO: 1177570 - DNA, 15 bp, Homo sapiens
cagttctataaagat

SEQ ID NO: 1177571 - DNA, 15 bp, Homo sapiens
acagttctataaaga

SEQ ID NO: 1177572 - DNA, 15 bp, Homo sapiens
tacagttctataaag

SEQ ID NO: 1177573 - DNA, 15 bp, Homo sapiens
atacagttctataaa

SEQ ID NO: 1177574 - DNA, 15 bp, Homo sapiens
tatacagttctataa

SEQ ID NO: 1177575 - DNA, 15 bp, Homo sapiens
ctatacagttctata

SEQ ID NO: 1177576 - DNA, 15 bp, Homo sapiens
gctatacagttctat

SEQ ID NO: 1177577 - DNA, 15 bp, Homo sapiens
ggctatacagttcta

SEQ ID NO: 1177578 - DNA, 15 bp, Homo sapiens
gggctatacagttct

SEQ ID NO: 1177579 - DNA, 15 bp, Homo sapiens
agggctatacagttc

SEQ ID NO: 1177580 - DNA, 15 bp, Homo sapiens
gagggctatacagtt

SEQ ID NO: 1177581 - DNA, 15 bp, Homo sapiens
ggagggctatacagt

SEQ ID NO: 1177582 - DNA, 15 bp, Homo sapiens
gggagggctatacag

SEQ ID NO: 1177583 - DNA, 15 bp, Homo sapiens
ggggagggctataca

SEQ ID NO: 1177584 - DNA, 15 bp, Homo sapiens
tggggagggctatac

SEQ ID NO: 1177585 - DNA, 15 bp, Homo sapiens
ttggggagggctata

SEQ ID NO: 1177586 - DNA, 15 bp, Homo sapiens
tttggggagggctat

SEQ ID NO: 1177587 - DNA, 15 bp, Homo sapiens
gtttggggagggcta

SEQ ID NO: 1177588 - DNA, 15 bp, Homo sapiens
tgtttggggagggct

SEQ ID NO: 1177589 - DNA, 15 bp, Homo sapiens
ctgtttggggagggc

SEQ ID NO: 1177590 - DNA, 15 bp, Homo sapiens
tctgtttggggaggg

SEQ ID NO: 1177591 - DNA, 15 bp, Homo sapiens
ctctgtttggggagg

SEQ ID NO: 1177592 - DNA, 15 bp, Homo sapiens
gctctgtttggggag

SEQ ID NO: 1177593 - DNA, 15 bp, Homo sapiens
tgctctgtttgggga

SEQ ID NO: 1177594 - DNA, 15 bp, Homo sapiens
ttgctctgtttgggg

SEQ ID NO: 1177595 - DNA, 15 bp, Homo sapiens
cttgctctgtttggg

SEQ ID NO: 1177596 - DNA, 15 bp, Homo sapiens
ccttgctctgtttgg

SEQ ID NO: 1177597 - DNA, 15 bp, Homo sapiens
cccttgctctgtttg

SEQ ID NO: 1177598 - DNA, 15 bp, Homo sapiens
acccttgctctgttt

SEQ ID NO: 1177599 - DNA, 15 bp, Homo sapiens
tacccttgctctgtt

SEQ ID NO: 1177600 - DNA, 15 bp, Homo sapiens
gtacccttgctctgt

SEQ ID NO: 1177601 - DNA, 15 bp, Homo sapiens
tgtacccttgctctg

SEQ ID NO: 1177602 - DNA, 15 bp, Homo sapiens
ctgtacccttgctct

SEQ ID NO: 1177603 - DNA, 15 bp, Homo sapiens
gctgtacccttgctc

SEQ ID NO: 1177604 - DNA, 15 bp, Homo sapiens
agctgtacccttgct

SEQ ID NO: 1177605 - DNA, 15 bp, Homo sapiens
cagctgtacccttgc

SEQ ID NO: 1177606 - DNA, 15 bp, Homo sapiens
tcagctgtacccttg

SEQ ID NO: 1177607 - DNA, 15 bp, Homo sapiens
ctcagctgtaccctt

SEQ ID NO: 1177608 - DNA, 15 bp, Homo sapiens
gctcagctgtaccct

SEQ ID NO: 1177609 - DNA, 15 bp, Homo sapiens
agctcagctgtaccc

SEQ ID NO: 1177610 - DNA, 15 bp, Homo sapiens
tagctcagctgtacc

SEQ ID NO: 1177611 - DNA, 15 bp, Homo sapiens
ctagctcagctgtac

SEQ ID NO: 1177612 - DNA, 15 bp, Homo sapiens
tctagctcagctgta

SEQ ID NO: 1177613 - DNA, 15 bp, Homo sapiens
ttctagctcagctgt

SEQ ID NO: 1177614 - DNA, 15 bp, Homo sapiens
attctagctcagctg

SEQ ID NO: 1177615 - DNA, 15 bp, Homo sapiens
aattctagctcagct

SEQ ID NO: 1177616 - DNA, 15 bp, Homo sapiens
aaattctagctcagc

SEQ ID NO: 1177617 - DNA, 15 bp, Homo sapiens
taaattctagctcag

SEQ ID NO: 1177618 - DNA, 15 bp, Homo sapiens
ttaaattctagctca

SEQ ID NO: 1177619 - DNA, 15 bp, Homo sapiens
tttaaattctagctc

SEQ ID NO: 1177620 - DNA, 15 bp, Homo sapiens
ttttaaattctagct

SEQ ID NO: 1177621 - DNA, 15 bp, Homo sapiens
cttttaaattctagc

SEQ ID NO: 1177622 - DNA, 15 bp, Homo sapiens
tcttttaaattctag

SEQ ID NO: 1177623 - DNA, 15 bp, Homo sapiens
gtcttttaaattcta

SEQ ID NO: 1177624 - DNA, 15 bp, Homo sapiens
tgtcttttaaattct

SEQ ID NO: 1177625 - DNA, 15 bp, Homo sapiens
ttgtcttttaaattc

SEQ ID NO: 1177626 - DNA, 15 bp, Homo sapiens
attgtcttttaaatt

SEQ ID NO: 1177627 - DNA, 15 bp, Homo sapiens
gattgtcttttaaat

SEQ ID NO: 1177628 - DNA, 15 bp, Homo sapiens
tgattgtcttttaaa

SEQ ID NO: 1177629 - DNA, 15 bp, Homo sapiens
ttgattgtcttttaa

SEQ ID NO: 1177630 - DNA, 15 bp, Homo sapiens
cttgattgtctttta

SEQ ID NO: 1177631 - DNA, 15 bp, Homo sapiens
acttgattgtctttt

SEQ ID NO: 1177632 - DNA, 15 bp, Homo sapiens
gacttgattgtcttt

SEQ ID NO: 1177633 - DNA, 15 bp, Homo sapiens
tgacttgattgtctt

SEQ ID NO: 1177634 - DNA, 15 bp, Homo sapiens
atgacttgattgtct

SEQ ID NO: 1177635 - DNA, 15 bp, Homo sapiens
aatgacttgattgtc

SEQ ID NO: 1177636 - DNA, 15 bp, Homo sapiens
gaatgacttgattgt

SEQ ID NO: 1177637 - DNA, 15 bp, Homo sapiens
agaatgacttgattg

SEQ ID NO: 1177638 - DNA, 15 bp, Homo sapiens
cagaatgacttgatt

SEQ ID NO: 1177639 - DNA, 15 bp, Homo sapiens
ccagaatgacttgat

SEQ ID NO: 1177640 - DNA, 15 bp, Homo sapiens
accagaatgacttga

SEQ ID NO: 1177641 - DNA, 15 bp, Homo sapiens
caccagaatgacttg

SEQ ID NO: 1177642 - DNA, 15 bp, Homo sapiens
tcaccagaatgactt

SEQ ID NO: 1177643 - DNA, 15 bp, Homo sapiens
ttcaccagaatgact

SEQ ID NO: 1177644 - DNA, 15 bp, Homo sapiens
cttcaccagaatgac

SEQ ID NO: 1177645 - DNA, 15 bp, Homo sapiens
ccttcaccagaatga

SEQ ID NO: 1177646 - DNA, 15 bp, Homo sapiens
tccttcaccagaatg

SEQ ID NO: 1177647 - DNA, 15 bp, Homo sapiens
ttccttcaccagaat

SEQ ID NO: 1177648 - DNA, 15 bp, Homo sapiens
cttccttcaccagaa

SEQ ID NO: 1177649 - DNA, 15 bp, Homo sapiens
tcttccttcaccaga

SEQ ID NO: 1177650 - DNA, 15 bp, Homo sapiens
ttcttccttcaccag
